United States Patent Application Publication US 2007/0054278 A1 - sequence listing, part 112

SEQ ID NO: 101422 - DNA, 201 bp, Homo sapiens
tgagtgtgtcaggactgaaggggagagcgtgaatagttgagatgagatagtttgaggaaaaaatcttgtagggagctgtgagcttgagtaggaatttaaaatttttattctaagtgtgatgggaagccacgaagcattggaattacatgattagacctatattgaagagtcactagtgagaatagactactgagggacaag

SEQ ID NO: 101423 - DNA, 201 bp, Homo sapiens
tggttctaacagtatattctgtaactttgaaagttttatcatgtggcaaaagttaagatgctaaccattggtattacaaaagtataggaatatcttcttayagaagaaagattatacctctgatagctatttatacattcattgtatttcttattcagtattgtaattgtactctttggtacctcttagtgaagtacttca

SEQ ID NO: 101424 - DNA, 201 bp, Homo sapiens
atcttttgtaagttcttgaaatcaccctaaacaaattgtatattatttactgaattggttctaacagtatattctgtaactttgaaagttttatcatgtgscaaaagttaagatgctaaccattggtattacaaaagtataggaatatcttcttacagaagaaagattatacctctgatagctatttatacattcattgta

SEQ ID NO: 101425 - DNA, 201 bp, Homo sapiens
ggaacacgtttaaatcactatggcaattatattcataagcagacaaatttaaaatttgcaaatatgactaatctcccctagctgaaaagaagaccaagctrgtattctggaaaagttttctgtttcatcttgtatttctagaatattacctacattttagaactggctagttttaaaaattatttagaacttctgacaata

SEQ ID NO: 101426 - DNA, 201 bp, Homo sapiens
acaaagcaaagaaaatgagggaacaaatttaggaaaggagtaacagggatcttagattaaaacatttaaaaattttatttgtatctaattctaggaacacrtttaaatcactatggcaattatattcataagcagacaaatttaaaatttgcaaatatgactaatctcccctagctgaaaagaagaccaagctggtattct

SEQ ID NO: 101427 - DNA, 201 bp, Homo sapiens
aacaaagcaaagaaaatgagggaacaaatttaggaaaggagtaacagggatcttagattaaaacatttaaaaattttatttgtatctaattctaggaacaygtttaaatcactatggcaattatattcataagcagacaaatttaaaatttgcaaatatgactaatctcccctagctgaaaagaagaccaagctggtattc

SEQ ID NO: 101428 - DNA, 201 bp, Homo sapiens
ataatggtaaacaaagcaaagaaaatgagggaacaaatttaggaaaggagtaacagggatcttagattaaaacatttaaaaattttatttgtatctaattytaggaacacgtttaaatcactatggcaattatattcataagcagacaaatttaaaatttgcaaatatgactaatctcccctagctgaaaagaagaccaag

SEQ ID NO: 101429 - DNA, 201 bp, Homo sapiens
attgagaatacattttgggctagataaattagtgcttcctgaataaatgggacttttgctttagaatctgttttaaataatggtaaacaaagcaaagaaartgagggaacaaatttaggaaaggagtaacagggatcttagattaaaacatttaaaaattttatttgtatctaattctaggaacacgtttaaatcactatg

SEQ ID NO: 101430 - DNA, 201 bp, Homo sapiens
aggctggagtgtagtggtgtgattatagctcacagcagcctggaactcatgggcacaagttatcctctggcctcagccctctaagcagctgaactacaggyatgcaccacagtgcccagctaattttttattttttgtagaaacagggtctaactatgttgcccaggttggtctgaaactcctggcctcaagcgatcctcc

SEQ ID NO: 101431 - DNA, 201 bp, Homo sapiens
catggagaaaccccgtctctactaaaaatacaaaattagccgggcaaggtggtacatgcctgtaatcccagctactcgggaggctgaggcaggagaatccyttgaacctggcagacggaggttgcggtgagccgaaatcacgccattgccctccagcctgggcaacaagagcgagattctgtctcaaaaaaaaaaaaaagt

SEQ ID NO: 101432 - DNA, 201 bp, Homo sapiens
tgtaaaaaagtttccaacagaatcttcaaaactgttaagtcctagccgggcatggtggctcacgcctgtaatcccagcactctgggaggccaaggtaggcrgatcacctgaggttgggagttcaagaccagcctggccaacatggagaaaccccgtctctactaaaaatacaaaattagccgggcaaggtggtacatgcct

SEQ ID NO: 101433 - DNA, 201 bp, Homo sapiens
gtctaacttgttttaagttgtctcctaaactagttctccctcttagccaaaaccccagaatatacaaaaggagaaaagggaaatcatagattgagaagcastaaatacagagtttgcactctactttccccatctcatgggtcctttatttcctgaaatattttcttgctggggacattggcaggggtcagagactatgtg

SEQ ID NO: 101434 - DNA, 201 bp, Homo sapiens
tctattccttatgatgctgttatatgactttatgtaaattttaaaacctctttattcctcattgtgctaatttttaaaatgtggaattggattgtagtttrtaaaacactatccaatttttaaagtttttagattccaataaaatataactgaacatatttcaggtaaaaggaagaaactcaatagggcttcatcaattca

SEQ ID NO: 101435 - DNA, 201 bp, Homo sapiens
tttagttctgcactaagaaattgtattaccctatactgttttcattttctgttctttgcttcagagaattatcttaaaagcacatttgtatgctctgaagwtaatagaattcaaatttccttcacagtattctaaggagaaaaagctgttggttggtgaaaattgcattgaactacaaattggaagacatgtattctattc

SEQ ID NO: 101436 - DNA, 201 bp, Homo sapiens
taaaatagtcaattcaaaggcagacaccgtttaagacatttgatacgtattgtcaaattaccctcccaaaagtttgtgccagtttttgcttcctatgatcrtgcctgtttcttcatattcttatgtattctggatattatcattcttttttactatcatcagcttgaaaggtgaagcaatatttcatttgtaacattagtt

SEQ ID NO: 101437 - DNA, 201 bp, Homo sapiens
tgaggtggaacagtttcatcccaaaaccatcccctcctacctgtctgtggaaaaattttcttccacggaacctgtccctggtgccaaaaagatcggggacygctgctttaattaacatccctgcagctaactcattgcagataactttctccaagtaaaatagtcaattcaaaggcagacaccgtttaagacatttgatac

SEQ ID NO: 101438 - DNA, 201 bp, Homo sapiens
cattggtccatggcctggtcacagcaggaggtgagcaaggagctagcattgccacctgagctccacctcctgtcagatcagcagcagcactagattctcayaggagcatgaaccctgttgtgaactgcgttgcatgttccttatgagaatctaatgcctgatgatctgaggtggaacagtttcatcccaaaaccatcccct

SEQ ID NO: 101439 - DNA, 201 bp, Homo sapiens
gctaattaattctgccagacactgtttcacacctgtaaactattaatagatcaggtaaccctagccatgtgattaaaacagactattcacagtttagagtrtacgtaattaaatactttacactaaaattattctttagttaatggtccactttttttttttttgagacagagtctcgctttgctgcccagactgtaatgc

SEQ ID NO: 101440 - DNA, 201 bp, Homo sapiens
gaaactgaaatcccatattcatttccactgggattaaatatctttttggttgattttaaaataaacatttagctattttcattattttatctaaaaaatarcttagatgaatttagagtgtcctaactatatactttaaaagtatattcataatccttaaagttaactagctatcttcattattgtgggggattatttttt

SEQ ID NO: 101441 - DNA, 201 bp, Homo sapiens
attttggccaggctggtcttgaactcctgacgtcaagttatccacccacctcagcctcccaaagtgctgggattacaggtgggagccactgcacctggcckaaaggtccacttttaattaaagttgtttcttttgttttttgtactttttaaaatagtctataatttttttctttgaggaaaactccagtaagtattcatt

SEQ ID NO: 101442 - DNA, 201 bp, Homo sapiens
ttgtatttgtttgatgtgctgcaattttttcatcttttcccattatttataaaggctttctgtatatatgagatcaagattttagtgtgtgtgtgtgtgtrtgtgtgtgtgtgtgtggtgtgtaaggagtcaggggagcataacttagagaatattgtgaagtttgggattcttcagaaaaattcatcttctctcactgta

SEQ ID NO: 101443 - DNA, 201 bp, Homo sapiens
gtattgagatactaacattcaattgaaaaaatgaatactgctgttcttccaccgcggggatacttaagaatcactgtctgtgagccacaatgtttgaggayttttctagatgaatctgtaatgataaatctgggcttatccaacatttgtatacctagttccctttttaattgttccttattcattgattcctattctttg

SEQ ID NO: 101444 - DNA, 201 bp, Homo sapiens
atccagccaaactaagcttcataagtgaaggagaaataaaatcctttgcagacaagcaaatgctaacagattttgtcaccaccaggcctgcctaacaagarctcctgaaggaagcactaaacatggaaaggaacatccagtaccagccactgcaaaaacataccaagtggtaaagactatcgatgctgtgaagaaactgca

SEQ ID NO: 101445 - DNA, 201 bp, Homo sapiens
gcctcagcctccttagtaagctgggattacaggcgtgtgctaccacacctggctaatttctatatttttagtagagacgaggttttgccatgttggccagkctggtcttgaactcctgacctcaagcgatcggcctgcctcagcctcccaaagtgctgggattacaggcgtgagccaccgtgcctggtccctctcaaggta

SEQ ID NO: 101446 - DNA, 201 bp, Homo sapiens
tggtcatggtggcaggcacctgtgatcccagctactcgggaggctgagacaggagaatcgcttgaaccccagaggcagaggttgcaatgagccgagattgygtcactgcactccagcctgggtgatagagtgagatcctgtcagaaagaaagaaagagagagagagaaagagagagaaggagagaagggaagaaagcaggg

SEQ ID NO: 101447 - DNA, 201 bp, Homo sapiens
gagacagggtttcaccatgttggccaggctggtctggaactcctgacctcagatgatccacctacctcagcttcccaaagtgctgggattacaggcatgarccaccgcacccagccacagtatttgcttttaaacataaagttaaatcatgtagacaaaaatcaatattcattatattaccagatatttgcacagttatat

SEQ ID NO: 101448 - DNA, 201 bp, Homo sapiens
ttttcagactatatggatatgctgttttaccatatgtatacattatttgctttttttttttttttctttttttgagacagaggctgggagtccagtggggygatctcggctcactacaaccaccacctccccagttcactacaaccaccacctccgcagttcaagcaattctcctgcctcagcctcgagtagctgggatta

SEQ ID NO: 101449 - DNA, 201 bp, Homo sapiens
tcaaaaataatgaattggaaaaatgtttttaagtgattttcagactatatggatatgctgttttaccatatgtatacattatttgctttttttttttttttctttttttgagacagaggctgggagtccagtggggcgatctcggctcactacaaccaccacctccccagttcactacaaccaccacctccgcagttcaag

SEQ ID NO: 101450 - DNA, 201 bp, Homo sapiens
taggatatgacagcttgttacaattatgggtttaacccagaaggtgaaataatcagagattctttcctgttttactcaaaaattaaatttaggaggaaaayggagattaatttcatgtgttacattaaagtgtcatcctatcctagtgaaagaatcattacacaaattttctcaaattaaaaaaaatagaaaaaaaaacaa

SEQ ID NO: 101451 - DNA, 201 bp, Homo sapiens
ggtaattaaaaaaaaataggtatcctcttttctttgctttatatgttactgtagctttaaagggaaagattattggtcaaataaacaaaagaacaatatayaaatgtcccagtattcattctcgtctctgagactaattttttttaaatgattgaaaagatagctgctgtgttttacagtgtttcttgtattttgtgaagt

SEQ ID NO: 101452 - DNA, 201 bp, Homo sapiens
gcccaaaggtagttttccaaatcagtcatctaattactctaaatgccctaataattcaggtaattaaaaaaaaataggtatcctcttttctttgctttatrtgttactgtagctttaaagggaaagattattggtcaaataaacaaaagaacaatatataaatgtcccagtattcattctcgtctctgagactaatttttt

SEQ ID NO: 101453 - DNA, 201 bp, Homo sapiens
tttctctttccctcaacttctaagctttaatagtcctattaaacttttttaaaattgtatgaaagacaagtcttataaaattgcttcaaaaaagagatgtstacagtcagatattttaagaagtactacataatagagttatcttttggcaactcaaagtttatattagcaaggactgtgaaaattcctggaataaaaatt

SEQ ID NO: 101454 - DNA, 201 bp, Homo sapiens
aaaccctagaaaccaggacttttgctgttcatggctgccagcattttttggttggagttaaaatcttccaggaagtctcccaaacaatactgtgtccttgratgctaatatctatactattaatttctcattgagaatggagtttcataatccagtgatgctttttgatattatattaccactatttattttttaaaattc

SEQ ID NO: 101455 - DNA, 201 bp, Homo sapiens
gtttacttgcttttgaaagacttagaaaatgctttaccaaatgattaaatgagagagctttaatcatttaagattagcacagagaaatctaggggtgactwaacaaaactaatacatagttaaattccatttcatgctctttttaagtctacttttatgcccatttggctaacatccctttttgtggttttcttcctggta

SEQ ID NO: 101456 - DNA, 201 bp, Homo sapiens
gttcctttgggctatttttggcgagtagtaaccttcaagttcaaatctgtgcaatcagtgaggaaaaaacagaagtagcaaaaaaataaataaataaaaartaggtttacttgcttttgaaagacttagaaaatgctttaccaaatgattaaatgagagagctttaatcatttaagattagcacagagaaatctaggggtg

SEQ ID NO: 101457 - DNA, 201 bp, Homo sapiens
ttacttcctatattgtcctttcaggttcctacagtgtggggtcttgcagccagcctgccctcactcctaatgattcattctccacggtaagaaaaagcccmccctctttcatgtcatacctccttatctgaggaactgcatgtttgtgttttgaaccaaactgatttcatatttaaatatttgtcttctttagatattcat

SEQ ID NO: 101458 - DNA, 201 bp, Homo sapiens
tatagccttggatatctttggccctcagaaaatggatccaatatatcacactcgagaattgcccacctcctcagcaatatcaagtgctttggaccgaatcygagagagacaaaagaaacttcaggttctgagggaagccatgaatgtagaaggttagtaattctgtgcatgtttgagaaagaattgaagtattttaaatat

SEQ ID NO: 101459 - DNA, 201 bp, Homo sapiens
gaacagactcttctcaaaagaagacatttatgcagccaacagacatatgaaaaaatgctcatcatcactggtcatcagagaaatgcaaatcaaaaccacartgagataccatctcatgccggttagaatggcaatcgttaaaaagtcaggaaacaacagatgctggagaggatgtggagaaataggaacgcttttacactg

SEQ ID NO: 101460 - DNA, 201 bp, Homo sapiens
aagaaaaaagcaattccatcaaaaagtgggcaaaggatatgaacagactcttctcaaaagaagacatttatgcagccaacagacatatgaaaaaatgctcrtcatcactggtcatcagagaaatgcaaatcaaaaccacagtgagataccatctcatgccggttagaatggcaatcgttaaaaagtcaggaaacaacagat

SEQ ID NO: 101461 - DNA, 201 bp, Homo sapiens
gatcccttgcttatgccgtatacaaaaattaactcaagatggattaaagacgtaaatgtaagacctaacaccataaaaaccgtagaagaaaacctaggtgrtactattcaggacataggcatgggcaaagacttcatgactaaaacaacaaaagcaatggcaacaaaagccaaaattgacaaatgggatctaattaaagag

SEQ ID NO: 101462 - DNA, 201 bp, Homo sapiens
cagaacagaggccttagaaataatactacccatctacagccatctgatctttgacaaccctgacaaaaacaagcaatggggaaaggattccctatttaatmaatagtgctgggaaaactggctggccatatgtagaaagctgaaactggatcccttgcttatgccgtatacaaaaattaactcaagatggattaaagacgt

SEQ ID NO: 101463 - DNA, 201 bp, Homo sapiens
gctggaggcatcacactacctgacttcaaactatactacaaggctacagtaaccaaaacagcatggtactggtaccaaaacagatataaagaccaatggarcagaacagaggccttagaaataatactacccatctacagccatctgatctttgacaaccctgacaaaaacaagcaatggggaaaggattccctatttaat

SEQ ID NO: 101464 - DNA, 201 bp, Homo sapiens
aggccactatataatggtaaaggtatcaaatcaacaggaagaactaactatcctaaatatatgtgcacccaatacaggagcacccagattcataaagcaartctttagagacctacaaagagacttggactcctacacaataataatgggagactttaacaccccactgtcaatattagacaggtcaacaagacagaaggt

SEQ ID NO: 101465 - DNA, 201 bp, Homo sapiens
aatacagagaacaccacaaagatactccttgaaaagagcaaccccaagacacataattgtcagattcaccaagggtgcaatgaaggaaaaaatgttgagtkcagccagagagaaaggtcaggttgcccacaaagggaagcccatcggaataacagcgatctctcagcagaaagcctacaagccagaagagagtggaggcca

SEQ ID NO: 101466 - DNA, 201 bp, Homo sapiens
cgcagctccttgccagcaagggaacaaaactggacagagaatgagtttgacaagttgacagaaatagacttcagaaggttggtaataacaaactttcccargcaaaaggagcatgttctaacaagtcgcaagaaagctaaaaaccttgaaaaaaaggttagatgaatggctaactagaataaacagtgtagagaagacctt

SEQ ID NO: 101467 - DNA, 201 bp, Homo sapiens
atgatggagaggaaaggagaaaaaatcaaacacacaaatagatatgtaattacaagttgtgttaaggtctgtgaagtttgtttgttgtttttaagtgccayacacacacacacacaaaaagaataaccaaggaaacctgctttagattgggtggatagaaaacatcttcaggaggagaagacacaatgctgaattttttag

SEQ ID NO: 101468 - DNA, 201 bp, Homo sapiens
ctttttccttgggataaacccaaaaatattagaggtttggaatcaaatattattccatttatttggtttttaatcattttgtaatatgaattatttttgtrtactaataaaaataacaacatcccagaaatgtgagttttctttaattattttgatgtccctcttgtggtttggattggctcatccccttacttcctatat

SEQ ID NO: 101469 - DNA, 201 bp, Homo sapiens
atcgcaccactgcactccagcctggcaacagagcatgactctgtcgaaaaaaaaaaaaaagaaaaagaaattagctttttccttgggataaacccaaaaayattagaggtttggaatcaaatattattccatttatttggtttttaatcattttgtaatatgaattatttttgtgtactaataaaaataacaacatcccag

SEQ ID NO: 101470 - DNA, 201 bp, Homo sapiens
tgccacggtctattcttgtaagtaataaaaccaatttgtgtcactcttagaaaataatttcagtagtgttaaaaaccagttaaaattcttataatgcttaytttaataaatgccgtttattttttcaattgtagactaagaaagggaagaatgaggataaccgaaggaaagtaaacataatgcttctgaacgggcaaagac

SEQ ID NO: 101471 - DNA, 201 bp, Homo sapiens
ggagtcagaggttgcagtgagccgagatcgcaccactgcactccagcctggcaacagagcatgactctgtcgaaaaaaaaaaaaaagaaaaagaaattagstttttccttgggataaacccaaaaatattagaggtttggaatcaaatattattccatttatttggtttttaatcattttgtaatatgaattatttttgtg

SEQ ID NO: 101472 - DNA, 201 bp, Homo sapiens
agagctccctgccacatttttaacagtcttgtatttatattctcatatgatactcttttatgcaagtctgaccaaaaagtgaagaaatcggaagaaaacastaaagtatttttttattttatctgaatatttttctcattctgtttagataatgaatatttctttgttgatcctgacttaaaattaaccaaagtggcccca

SEQ ID NO: 101473 - DNA, 201 bp, Homo sapiens
caccaaacttgactctgcccaaaggtagttttccaaatcagtcatctaattactctaaatgccctaataattcaggtaattaaaaaaaaataggtatcctyttttctttgctttatatgttactgtagctttaaagggaaagattattggtcaaataaacaaaagaacaatatataaatgtcccagtattcattctcgtct

SEQ ID NO: 101474 - DNA, 201 bp, Homo sapiens
caatcttcttaacgcaaccctcccccatacacaagtgaactttacaaaaatagtggtaattggttaatacaggtatcactgtagcttttttttttttttttgagtaacagcaagatttattgtgaagggcaaaagaacaaagcttccacacacagtgtggaaggggacccaagcaggttgccccactgtaacttatttcta

SEQ ID NO: 101475 - DNA, 201 bp, Homo sapiens
tccaaatgtatcatttatatcatggcttttacttctagtagggttagtccaaacattttcccccagccattctcattttaattttagtagataattttaamcagaaattttataccaaaatgtacttgatcatttcttcctaacttttctagttaaaacattgaaactatttatggatattggtttatacactgccttctt

SEQ ID NO: 101476 - DNA, 201 bp, Homo sapiens
agtaaatatgtaatgcattagttcttcttctgttcctcattcatgtgtaatatttcagaaacaaaacagaatttgttatctcctattttttttattttccrtatttgtaagtgggttaccttattagtgagatctccaaatgtatcatttatatcatggcttttacttctagtagggttagtccaaacattttcccccagc

SEQ ID NO: 101477 - DNA, 201 bp, Homo sapiens
tagggagcattttttgagtaaatatgtaatgcattagttcttcttctgttcctcattcatgtgtaatatttcagaaacaaaacagaatttgttatctcctmttttttttattttccatatttgtaagtgggttaccttattagtgagatctccaaatgtatcatttatatcatggcttttacttctagtagggttagtcca

SEQ ID NO: 101478 - DNA, 201 bp, Homo sapiens
ggagtacaaaaacgtctctagggagcattttttgagtaaatatgtaatgcattagttcttcttctgttcctcattcatgtgtaatatttcagaaacaaaayagaatttgttatctcctattttttttattttccatatttgtaagtgggttaccttattagtgagatctccaaatgtatcatttatatcatggcttttact

SEQ ID NO: 101479 - DNA, 201 bp, Homo sapiens
tccaggtacgtgaaccagatgaataaattggtatactatggagtacaaaaacgtctctagggagcattttttgagtaaatatgtaatgcattagttcttcytctgttcctcattcatgtgtaatatttcagaaacaaaacagaatttgttatctcctattttttttattttccatatttgtaagtgggttaccttattagt

SEQ ID NO: 101480 - DNA, 201 bp, Homo sapiens
cataaaaccctagaaaccaggacttttgctgttcatggctgccagcattttttggttggagttaaaatcttccaggaagtctcccaaacaatactgtgtccttgaatgctaatatctatactattaatttctcattgagaatggagtttcataatccagtgatgctttttgatattatattaccactatttattttttaaa

SEQ ID NO: 101481 - DNA, 201 bp, Homo sapiens
ccatctcaacttttatctttctaggcagaattatttcagggtcattcccaaatagaggttcttaaatgtatttacctatatttgtttctttctttgttttsttataaagttttccaaactctaccgtatttttctcagtctcttgaaaatataatttaatgaatgaagttatatttaaatatgtgatgttttagctgtaag

SEQ ID NO: 101482 - DNA, 201 bp, Homo sapiens
attgttttcatagatctacttgaatgttaattaggaggggagggaagtcttcaaacaacctggaaagtatttttgtgaaaattaacatttttgctaactttaggtccaactgaatattttgcctcaaaattagtagagcactcttcagctcagccttgaagtcattttcttttgtctttctgcttttatcttagctgtcgt

SEQ ID NO: 101483 - DNA, 201 bp, Homo sapiens
aaaaattattaaggagagaagaagattaaagccactataatctgattaccccaaaactgttaacattttggagctaaatttccagttacccttttttttttgcctataattgtgcatgtgtgtattggagatgaggggtgtgcagcatctacatcttcagtttcattcttagcaatagagtaaaaataatctttaattttt

SEQ ID NO: 101484 - DNA, 201 bp, Homo sapiens
gctacacagcaataaaaaggaatggactattgatacaagcaaaaaaataattaaaataaactcaaaataaatgttctgaattaaataagccagagcataaragaaatagttcatactgtatgattctattacacagttgtagacaatgcaaattatagtgacagcagctcagtggttatgtgggacaaacaggggaaggaa

SEQ ID NO: 101485 - DNA, 201 bp, Homo sapiens
gttgacaatttcttaaaaattataacttacacctaaaatataatccagctttttcactgccagctgttcacttgaagaaagtaagcctatattctacataraaacttggacagaaatgtttctagcacttacttgtagtagccaaaatttgaaacaactcaaatgtccaaaaactgttgaactgaaaaactggttgtaata

SEQ ID NO: 101486 - DNA, 201 bp, Homo sapiens
ggtcttttgaccctttagcttactgatactgaattacttgattccaatcaatgataatgtctgctttatcataaaagtaatatttctttcaacacagtttrtctaatccttatgccttaaaagcttaataataagcttagtaataaactcatggaaattaaccttacatgcctataataaaaaccaccccagtattcaaaa

SEQ ID NO: 101487 - DNA, 201 bp, Homo sapiens; identical to SEQ ID NO: 15989

SEQ ID NO: 101488 - DNA, 201 bp, Homo sapiens
tccgggctgcatccaaaacagtcagattagttattggacgagttctagaattacccagaataccaatgttgcctcatttgctaccggacataacactaacrtgcaacaaagaggagttgggtaatgaaaagtcaaactttgtacaatatgattttcttggttagcttaagagtaagtacttttatgactgagaaaacaaat

SEQ ID NO: 101489 - DNA, 201 bp, Homo sapiens
atctgctccgggctgcatccaaaacagtcagattagttattggacgagttctagaattacccagaataccaatgttgcctcatttgctaccggacataacrctaacgtgcaacaaagaggagttgggtaatgaaaagtcaaactttgtacaatatgattttcttggttagcttaagagtaagtacttttatgactgagaaa

SEQ ID NO: 101490 - DNA, 201 bp, Homo sapiens
gaatcagacagactgtctagagtcagacagacttgacttcttcacttggacaagttaagtaaccttttaaggtttgactttctcctctgttaagggaaatratagtcatctttctgtttgtctatagtgcagaatagacaacctaaaagtattactgcttttttcccttaggaagtagaactcctcattaccctaattaaa

SEQ ID NO: 101491 - DNA, 201 bp, Homo sapiens
ttgaaacacacattaagcttctgataacattagcttcagctttgaattaacaactagaaatcaaaagaattttatttaacctatcttgctgactttatgcrgcttaaagagcttcatcaaaatagaacctaggccggcgcgatggctcacgtctgtaatcccagcattttgggaggccaaggcaggtagattgcctgagct

SEQ ID NO: 101492 - DNA, 201 bp, Homo sapiens
ttactagtaactgagaaagttatttgtatttcactgttaatcatactacttaaacagaaacagaatagacttatttaggcagtaacacagtgggagactarggaccagaaatatagaggggagataagggcagagagtttgcaaaaggtaagacaaagaagatggggaaaagaagaaatgattgaaaacatagaagcatac

SEQ ID NO: 101493 - DNA, 201 bp, Homo sapiens
ttttttttatatctttttctccagaaaatacatttgaggtaaaattatttaaaaatagctcaggtctaggattcagtttttctcgagaagataatcttatrccggagcaaattaatgccagcatagtaagggttaaaaagctctttcctggacagccagcagcagaaagtggaaaaattgatgtaggagatgttatcttga

SEQ ID NO: 101494 - DNA, 201 bp, Homo sapiens
aatgcaagattagttgaactttcacaaatcaatcaatataattgaccatagtaatgactaaaaaagaaaactatattatctttttaatagatgcagaaaarcatttggtaacatctaatatccatttcaatcttaaaaagctctcaactcaacgccgggcttggcagctcacacctgtaatcccagcactttgggaggctg

SEQ ID NO: 101495 - DNA, 201 bp, Homo sapiens
aggcatagtgacatctttaaagtgctgaaactgtcagcctaaaatttctacccaaagaaaatatctttcaaaaacaaaggcgaaataaagtggtttttttyccccagatatacagtagctgaaagaattgataaccagcagatctgcattaccagaaatgttaaagacagttgttcaggcagtagggtaatgataccaaat

SEQ ID NO: 101496 - DNA, 201 bp, Homo sapiens
ataaggtgaacgtagagtaactacctgtggagatatttaaccttttatctgtagctatctgcttaggaacaaaaggaaatgcagtttcttgcatgactcarctttcagcttcatttttttccttttggcggagtgaattggggtcccaagtttttattttcctttcacaaattctagagggcttagagtttattttctttc

SEQ ID NO: 101497 - DNA, 201 bp, Homo sapiens
ggagctggaggtaagtggcttctgccaatgattctctcccaaagtgtatgcatttagtttgtaaggaaaatgtatctttactggcccaagattagaagaawttttgaaaattttccaactctaaaagcaccaccttatcatatctagcagaaaattaatttttctgattaggatcccaataatagtgatttaaaggaatca

SEQ ID NO: 101498 - DNA, 201 bp, Homo sapiens
gaatgtattccatatttatataataatacaaagtaatttattcaatttatttaactaggatttatcaagtactgacttcaggcattttaatgggcactgawactagttattatgttgagcaggtcacaaactgttattcctcatctgcaaaacaatggttaaaaatctctttaataggaaaataacatttctgtaagatgc

SEQ ID NO: 101499 - DNA, 201 bp, Homo sapiens
tgttttgagggtttttccctccaattcctttaccttctgtgagtttaagataacatttagattggtagccatattgagaaattaggtagacagggggcttrtagtctgtcatcactgatgtagagcttttactactgcaagtatagttaagttgctgatgcatagaccatctgttacctttgtttcccaggtaatatgcac

SEQ ID NO: 101500 - DNA, 201 bp, Homo sapiens
ggaagaaagagagtagcttattcctagaaatgatacaaatttaaactcaaattcacaagcagttttagaaaaaaatctaacgccttttgtttactgaaaaatcaacattccttataagagttatactcttataaatagggcttagctgttgttcccatgtttatattattggatttataaatataagtaatgtaaacatga

SEQ ID NO: 101501 - DNA, 201 bp, Homo sapiens
actttttggcatacatgtagccttctgtgtagaatagatatatatgtgatgtgtgtgtgtgtgtaaatatatatatatatatatatatatatatatatataaacacaacacatacacacactattttttaaaaatctgttttatactctaaataccattctgtaactgcttactcaacatattctgttgctatccatgtac

SEQ ID NO: 101502 - DNA, 201 bp, Homo sapiens
aagttatccagtctctgctggatgttgtggatgaggaagcccagaatcttttaaacgaaaataatgcagcaggatactcctgtggtccaggtacgtgaacyagatgaataaattggtatactatggagtacaaaaacgtctctagggagcattttttgagtaaatatgtaatgcattagttcttcttctgttcctcattca

SEQ ID NO: 101503 - DNA, 201 bp, Homo sapiens
tcaccacccccattctccagttctgtctctgaagttgaccgtgttgggctagggcaagtggttgttttgagggtttttccctccaattcctttaccttctrtgagtttaagataacatttagattggtagccatattgagaaattaggtagacagggggcttatagtctgtcatcactgatgtagagcttttactactgca

SEQ ID NO: 101504 - DNA, 201 bp, Homo sapiens
aactttttggcatacatgtagccttctgtgtagaatagatatatatgtgatgtgtgtgtgtgtgtaaatatatatatatatatatatatatatatatatataaacacaacacatacacacactattttttaaaaatctgttttatactctaaataccattctgtaactgcttactcaacatattctgttgctatccatgta

SEQ ID NO: 101505 - DNA, 201 bp, Homo sapiens
aaactttttggcatacatgtagccttctgtgtagaatagatatatatgtgatgtgtgtgtgtgtgtaaatatatatatatatatatatatatatatatatataaacacaacacatacacacactattttttaaaaatctgttttatactctaaataccattctgtaactgcttactcaacatattctgttgctatccatgt

SEQ ID NO: 101506 - DNA, 201 bp, Homo sapiens
gaaactttttggcatacatgtagccttctgtgtagaatagatatatatgtgatgtgtgtgtgtgtgtaaatatatatatatatatatatatatatatatatataaacacaacacatacacacactattttttaaaaatctgttttatactctaaataccattctgtaactgcttactcaacatattctgttgctatccatg

SEQ ID NO: 101507 - DNA, 201 bp, Homo sapiens
ggaaactttttggcatacatgtagccttctgtgtagaatagatatatatgtgatgtgtgtgtgtgtgtaaatatatatatatatatatatatatatatatwtataaacacaacacatacacacactattttttaaaaatctgttttatactctaaataccattctgtaactgcttactcaacatattctgttgctatccat

SEQ ID NO: 101508 - DNA, 201 bp, Homo sapiens
ggacttttgtcatatctcctaactcttattcctgcttcctgactgttccctctgccactgtcagattaatacccctgatcatgagggtcttttcccctcaraaaccttcattgagttgctccttttttacccaatgaagtacagattccttaaccaaacatgaaaatctctccagagtctggtcccaactaccttatgact

SEQ ID NO: 101509 - DNA, 201 bp, Homo sapiens
tcttctaatctcacactttgaaaaggtgatatggaaaggattctaatcccttgataaattgtgatttcaaaaacaaaagttgctcaacttaaaaaaaaaaacactggttattttcctttgtaagagtaaaaacaaaaatatgtaaaaacttttccaagaattatgtaaaattgattttaatgtttcttgttttactgtaat

SEQ ID NO: 101510 - DNA, 201 bp, Homo sapiens
tagaagtttttaagttgatttcagtttcttcaaattctcccagatagcagggcatattatttaagtgaaattgtatgtatgtgtgtgtgtgtgtgtgtgtkcatgcacatgtgcatatatatctatatatatgcaccttttaagatgcttaccttttatacatgctaccttttaagataaatagttcaggtttcctgttgc

SEQ ID NO: 101511 - DNA, 201 bp, Homo sapiens
atctgagttaaattacacctccccagaacattacaatttcaatttatttccacataacctcctctaacatttattttgttcttcttttcatctttctcacrctgtatacctgagtttctcccatacctgtccttctgtggagtttcccctttttttgtctgttatcgtactctgttttgttttgtttttgtagagattgga

SEQ ID NO: 101512 - DNA, 201 bp, Homo sapiens
ggtcttttaaaaatgctttaaattgttgtaaaattcaaaatagaatttggtaagtgaaaaaataaagaaaaacaaatgctgagatgccttcaaacccatgkgaaaccttgacccttagatttttgtatttctatttaatttaattttaagaactgtgaatcaaactctgggcagatattcacatagtagtgcccagaaagt

SEQ ID NO: 101513 - DNA, 201 bp, Homo sapiens
ttcctcgcctattcaaaatttgatttttacatgttggattacagttaatgccctagttttgttcattattcttgtcaagtacaaataataatctgacatcrcaccatactgaataaagacagaaacatatttgcagctcatagggtctgaaagactttggataataaagtcatgcatgattatggtcttttaaaaatgctt

SEQ ID NO: 101514 - DNA, 201 bp, Homo sapiens
atttcgctcttgtcacccaggctggagtgcaatggcatgacctcggctcattgcaacctccgcctcccagagtcaagcaattctcctgcctcggcctgtcragtagctgggattacaggtgcccaccacgacacctggctaatttttatatttttagtagagatggggtttcaccatgttggccaggctggtctccaactt

SEQ ID NO: 101515 - DNA, 201 bp, Homo sapiens
accacattcctgggatctgtatcaaatctaaagtgctggaattatacactcaaaaatagaaaacatgtttgtgtgtctgaatcctctaaaaagaaaaatarttagtaatgttagcatacctcattgacaattagatattacctctcttcaacagaccagaacagaggaagaaaaccacttctatctggttagtgcctacta

SEQ ID NO: 101516 - DNA, 201 bp, Homo sapiens
attaccaaagagatctgatgggggagggatggaaattgcattttaaatttgttgtataaacatctcatttctagtggttttcactcttattctttagcctyaacacaaaatttattttgttgaagtacattttgagttagggagtttaaccaaattatctataatggtctttggaggtttttgttgttgttttgagacagg

SEQ ID NO: 101517 - DNA, 201 bp, Homo sapiens
aattcattttgactctaacaagaaatctttgtttgtttttctttgttaaggaatcttcctcttcagtgaatacatccaacaagatgaattttaaaactttbtcttcatcacctcctaagcctggagatatctttgaggttgaactggctaaaaatgataacagcttggggataagtgtcacggtactgtttgacaaggttt

SEQ ID NO: 101518 - DNA, 201 bp, Homo sapiens
ggaaatttgctatctttaaaaattagcatttgcctactttcctttcataaacctttttaattcaacttgtcttctaactattaagctgatttataatcacrctttttaggtaaggaaaacattttgattgttataagcagcactttacacctagaaagttcattcattcatttgttcattcaacagatatttattgagtgc

SEQ ID NO: 101519 - DNA, 201 bp, Homo sapiens
agactacaaagacacggaatggttcagacagaggtgagtcatggctgggcctcctaatgagaatttttgtaaagattctaatattttttaaggttcttatkaaaccatttttcttttttgagagttcccatgttagagcataaaaccaaacatttactgcagtgaggggcatttttttttaaatgaggactaattcagaaa

SEQ ID NO: 101520 - DNA, 201 bp, Homo sapiens
gcatttgttcagaaataatgatggagtctaatttttgataatgtgttgtgatcttgggatattttaacttatgagtttatatgactgccttcattttcttsttatattattatagaaaattgtatttttgtaaacattggtattcaaaactacatagaccgtgatcaacaaaaaataatacttcaattttatacttgtttt

SEQ ID NO: 101521 - DNA, 201 bp, Homo sapiens
gtgagtacaagatattggctgagtaagcatttgttcagaaataatgatggagtctaatttttgataatgtgttgtgatcttgggatattttaacttatgartttatatgactgccttcattttcttcttatattattatagaaaattgtatttttgtaaacattggtattcaaaactacatagaccgtgatcaacaaaaaa

SEQ ID NO: 101522 - DNA, 201 bp, Homo sapiens
gagttcgagagcagcctgaccaacatggtgaaaccccatctctactaaaaatacagaaattagctgggtgtggcaatgtgcgcctgtaatcccagctactmtgaggcaggagaatcgcttgaacctgggaggcggaggctgcagtgagccgagattgcaccactgcactccagcctggacaacagaacgagaccctatctc

SEQ ID NO: 101523 - DNA, 201 bp, Homo sapiens
tggtgtcatgtaaatgtagcctgagaatttctctcataatttttgattcatgattttttattgatttacactagcttacctattacttaggctagcacagwtgttcaatattcttccagtgatttatccacttaatccacacatttttatagaactcaacccctttatagagatttggcagtcaacaacacagacaaaaaa

SEQ ID NO: 101524 - DNA, 201 bp, Homo sapiens
cttggtgatagcacaaaatggctcagaagttgcatgttggaaacttgtgtttttatggtcagacctctaagtagactcattgaaactacttttaaaatctktaagtagaaaatattccctcataaaggcaacttaacatatttaggaatacatggataattttagcataaacagttgttattcagatcattcatactgcag

SEQ ID NO: 101525 - DNA, 201 bp, Homo sapiens
ataaaaactttcatttaaaaaggccagaaaaaaatagtgagggacattataaagatttgtatagggagaaccaacctattttaggagtagagagattcgaytgtgaagaattcactatgtatagaatctggtttgttaagttgaggaacaaattatgatattttgcccgaagatttttttcttctaaatatggaggaagct

SEQ ID NO: 101526 - DNA, 201 bp, Homo sapiens
gaggaccagctgacttggatggatgcttgaagccaggtactttacattttggtagttttctaagtattttctgacaggcatgaatttaggaacttaggccraactaaaataattgagaaagagatgatatttctaagattcagaataaatgtatctttgttgttgaaaatactggattgtctatttgtacaggagaccgtt

SEQ ID NO: 101527 - DNA, 201 bp, Homo sapiens
aaggcttgttggtagaattcagtccttgtgattgtaggaccttttcttcctggtcgttggctgggatacacttttggctcctagaggccacccttaggtcyttgcgatatgccccactacgtaggcagtttacaacgtgaaaggaatcttgagggcaatcgcagaatgctgcttagcacactattttttacaatgtaaagg

SEQ ID NO: 101528 - DNA, 201 bp, Homo sapiens
ggtgggtgggcagatttctcatgaatggcttgggtcatccccttggtgataagtgagctcttgctctgggttcatacgaggtcaggttgtttaaaagtatrtgacacctccccacccactctttctctcccttgctcctgctttcaccatgtgatgtgcctactcccccttctccttctaagcttcctgagatctccccag

SEQ ID NO: 101529 - DNA, 201 bp, Homo sapiens
cttaagcttttaaggtcaatttaattattttttctatttatacatgcagaaaatttcaagggaccctttgagtgtataatctcattttcaaatttagtcarttaacatcccataaacactttaaactgcattcatacaattaaaagccaatttttaaagtatttcttgtatctgactgacagaaaaaaccttcccaagtac

SEQ ID NO: 101530 - DNA, 201 bp, Homo sapiens
agaatctttggcaggagtgacaaaacttaataagtaagaacatattaactaacccaattacatatttgtaaattctacatttcatacgtttctttttgttwtgacattttattattttcaccatatttttttacattaacacttccctcctaccttccttttccctcttcagttcaaagtctgttgcgagtttaaatagaa

SEQ ID NO: 101531 - DNA, 201 bp, Homo sapiens
gggcttgagcacatggctcaagagccctgattataatgttcctgggcttttattgaattacaagagcatggtaacacccctaagtaccctttagaggcctytgataggttacaccctacacaaatgaagaattcagcccaggaccaatcagaggcaggattctgcccagaaccaatcagaggcatcctgcctgtgatgtat

SEQ ID NO: 101532 - DNA, 201 bp, Homo sapiens
agaaaatatcaattattaatcttcctaggaagtagaagataaatgaaacaatccaagaatctaagtcagtaatcatttgatattttctttcttccttctcycctccctccctcctcctctgtctcctcttcctcctcctcctcctttttcttcatcttcatcatcatcatcatcatcatcatcatcacctggcacccttga

SEQ ID NO: 101533 - DNA, 201 bp, Homo sapiens
ccagctttgtcctgggctaggtttaaaaaaaaagaaattaaaaaaagaaaaattataattcattttgactctaacaagaaatctttgtttgtttttctttrttaaggaatcttcctcttcagtgaatacatccaacaagatgaattttaaaactttttcttcatcacctcctaagcctggagatatctttgaggttgaact

SEQ ID NO: 101534 - DNA, 201 bp, Homo sapiens
tttgattacaggctactcgtaaagtaaatgaaaatagaatagcattatttgctctaataaaaactatattttgaggtaaagatgattatggaaattttttwttttaatgtagtatcgctctgttgctcaggctggagtgcagtggcgcgatctcagctcactgcaagctctacctcccgggttcacgccattctcctgcct

SEQ ID NO: 101535 - DNA, 201 bp, Homo sapiens
tcacaaatctctttaaatgtgtccattacagaccccacttcagtctccagcacaagtacttccaaacagcagtaaagactcttctcagccatcatgtgtgragcaaagcaccagctcagatgaaaatgaaatgtcagacaaaagcaaaaaacagtgcaagtccccatccagaagagacagttacagtgacagcagtgggag

SEQ ID NO: 101536 - DNA, 201 bp, Homo sapiens
tacctctagaagatagtactactactatactatatgctgctatactatgtaatagcggtaatagtagcagcagcagcagcggcagcagcagcagcagcagyagcagcagcagcagtagtagtagtagatgaatgaatgaccttaggaaagtaagtgactttttagaatctcagtttcttcatccatggagtggggctggga

SEQ ID NO: 101537 - DNA, 201 bp, Homo sapiens
ttaaaattgttttaaagcatatttaaggacttaagaaaatatttatggtagaaccctaatttttgagagtatgagacaaaatatataatactactgtagtkctaacttaaggtataaattgtacaatattaactgttattttatatattattttctctattgaacataaattacttttatcatcagaaaattcaatgcata

SEQ ID NO: 101538 - DNA, 201 bp, Homo sapiens
ccatcatcaacaatgttttacctctagaagatagtactactactatactatatgctgctatactatgtaatagcggtaatagtagcagcagcagcagcggcagcagcagcagcagcagcagcagcagcagcagtagtagtagtagatgaatgaatgaccttaggaaagtaagtgactttttagaatctcagtttcttcatc

SEQ ID NO: 101539 - DNA, 201 bp, Homo sapiens
accatcatcaacaatgttttacctctagaagatagtactactactatactatatgctgctatactatgtaatagcggtaatagtagcagcagcagcagcggcagcagcagcagcagcagcagcagcagcagcagtagtagtagtagatgaatgaatgaccttaggaaagtaagtgactttttagaatctcagtttcttcat

SEQ ID NO: 101540 - DNA, 201 bp, Homo sapiens
acccgccaccacgcccagctaatttttgtatttttagtagagacggggtttcactatgttggccaggctggtctcaaactcctgaccttcgtgatctgccygcctcggcctcccaactcagtaatgatttttacacatgctaaaatacaataaccactgctataatatcattattctctttctgctttgctctgctagaaa

SEQ ID NO: 101541 - DNA, 201 bp, Homo sapiens
tgctgcctttgggtgttttattataggtagtggttctgtagttcttttgactgatcaactaagaagattctttctttcatgtttatgcttgaatcagtgagagagttttacaactatggagttcagtgtctttgcaaattccttgacagtggttaagtggcatgtttgttaggggaaaaaaaaaatgttctccaagtattt

SEQ ID NO: 101542 - DNA, 201 bp, Homo sapiens
cagcctacattagacatttcagataccagaagggaacaaaagcaatcattttggcccggtgcagtggctcacacctttaatccctgcactttgggaggccragggaggcagatcacttgagatcagaagtttaagactagcctggccaacatggtgaaaccccatctctactgaaaaatacagaaattagccgagagtggt

SEQ ID NO: 101543 - DNA, 201 bp, Homo sapiens
gaactaagtacaattacctttttatggctggttttgcagggaaaagaagcaagctgtccccaggctgcccatgataaaccccttatcaaaaatttttaaamagtgccatatgagtcaagagaagcaaaaagaaacaacataaactcctttagaaactataaataaatgagagccaagagccttaaaaacttctgaacgtca

SEQ ID NO: 101544 - DNA, 201 bp, Homo sapiens
gtgctttttatattatcttgaaattaaaacaaaatttttaaatgcttatgtagaaatactggcctccatgggtcagcagagcccagtttaagaaaaactargctaagaaatatctgaaatatgtttggttttctgcaatcaagctgttcgtaaaaagaatttatatgttttacttatggtcacattttagtgtaaaagtat

SEQ ID NO: 101545 - DNA, 201 bp, Homo sapiens
gtgattaccagcatccaaaaatataaatggcttttcatgtcacaagtaacatacacgcacaccattaaaaccagtgtcaatttaaaagtcagattttaatkctatgatggggtcacgttataaaacttaggtcatctttttgttgttgtttttgagggctgcctcctaaatacggtatgtgaatgtgagaattagctaatc

SEQ ID NO: 101546 - DNA, 201 bp, Homo sapiens
tgttcctggagtaatctcccatattaaggaatttctgaagtgtctctcttactttcaccatgtgcttagaagctaatttaaatgaaaagtagtaacagaaytaaatttgataattttttgtaatgagttcctgaggtttttttggggggtgagggggcaggtaaaagtttaagttgcatgtgttatgcagattagaatttc

SEQ ID NO: 101547 - DNA, 201 bp, Homo sapiens
atgccggtacaattgtaatcactcatccatgttgaaggatagaaataaaaccaccaccttctccatcctcaaatggactccttcagtttaaagttcaaaawcgggatctgtccaaggataaattttaaaactgtattaaaccattctacatctcagttgtttacatctaccaataaattttaagaattgtggctttggttt

SEQ ID NO: 101548 - DNA, 201 bp, Homo sapiens
gttgccttctcaactcactgtggttttttaatgaccaaagatgtccttagcctggatggtgagtgaatccttgctcaaactagtggcatacacagagctcyattttatagctgctttgttcttgaaacagcatgtttctattagccctatttctttagattcaagttaaacattcctaattaatctgtctccagacaggtt

SEQ ID NO: 101549 - DNA, 201 bp, Homo sapiens
tatgccggtacaattgtaatcactcatccatgttgaaggatagaaataaaaccaccaccttctccatcctcaaatggactccttcagtttaaagttcaaaracgggatctgtccaaggataaattttaaaactgtattaaaccattctacatctcagttgtttacatctaccaataaattttaagaattgtggctttggtt

SEQ ID NO: 101550 - DNA, 201 bp, Homo sapiens
agtgtccttctggcctcctgttgtagcaaaaggctatacccatcaatagagacttctttaaataaattaagatacattcatattttgcagtagtgggcagmtgctgaaaagaaggagaaagagctatatgccggtacaattgtaatcactcatccatgttgaaggatagaaataaaaccaccaccttctccatcctcaaat

SEQ ID NO: 101551 - DNA, 201 bp, Homo sapiens
agggatactaagatatgttaaaaaaaaaaaaaagctgtttccctcaaggaggacaaacaaggactcatctaactatacaacaaggtaatagttaactacgycatcaaagtgtggtgcagaaatataactgtatcatatatgagataatgctttaacctgtttggaagtatttatacagcatatataagggggaacatcatc

SEQ ID NO: 101552 - DNA, 201 bp, Homo sapiens
cctgtttggaagtatttatacagcatatataagggggaacatcatcactggcctatcagtaatggccagagacaatatttttggtggaaagaacagctcaygaaaagctgagaaagaaaaggatgtattttgccaacagaaaattatctagatgtgcctagtgtttaggttgtgataagggaaggagcgatgacagaagaa

SEQ ID NO: 101553 - DNA, 201 bp, Homo sapiens
atatttcggcttgcagcaaggaggggtacagctgtctggatataccttggccaaatttcagtgtatatagaaaagtgggaggttatcgactatgttaaacmttttccttaaattttcaaacttcgggattattttagtctcatagataaaataacaaggcaagtatttacaaacttttttcaaaaatatgagaatttcagt

SEQ ID NO: 101554 - DNA, 201 bp, Homo sapiens
ttacttatctgcaaaataggaataataataatatgtgtcaatcatccatattattaaactgttgtaaaagtagttatttccacattaatgagctgctttgyggtccttagaagtttctttgctatttctccctttatttataatatgaggataatattgtctaccatatgaggttgtttgaggattaaatagcacaaagtg

SEQ ID NO: 101555 - DNA, 201 bp, Homo sapiens
atttgtgttcagggaattaaagcttatagttgttacactaaagaggcaattgatgtctttaaataaattaacaagcaatttattattattaaggttttagycattattttatattgtatagcagatagatatcacagcgatcacagaaggtagcacatgaaatcttcagtgtttatgggctattgagttagtgactataaa

SEQ ID NO: 101556 - DNA, 201 bp, Homo sapiens
tgtgtttatgtacatttatttacacacaccctatatggtacttcttttttggtgacatcacatttggtgatgtactaaggctgattttactctcccattcrctcttttcttctcattaatatttctaacactgtgattttttgctgaaacttcattttctgtaactgaaaactaaagtactcataggaagtcaaaaagaag

SEQ ID NO: 101557 - DNA, 201 bp, Homo sapiens
ttgctgcctttgggtgttttattataggtagtggttctgtagttcttttgactgatcaactaagaagattctttctttcatgtttatgcttgaatcagtgagagagttttacaactatggagttcagtgtctttgcaaattccttgacagtggttaagtggcatgtttgttaggggaaaaaaaaaatgttctccaagtatt

SEQ ID NO: 101558 - DNA, 201 bp, Homo sapiens
tttgctgcctttgggtgttttattataggtagtggttctgtagttcttttgactgatcaactaagaagattctttctttcatgtttatgcttgaatcagtgagagagttttacaactatggagttcagtgtctttgcaaattccttgacagtggttaagtggcatgtttgttaggggaaaaaaaaaatgttctccaagtat

SEQ ID NO: 101559 - DNA, 201 bp, Homo sapiens
atttgctgcctttgggtgttttattataggtagtggttctgtagttcttttgactgatcaactaagaagattctttctttcatgtttatgcttgaatcagtgagagagttttacaactatggagttcagtgtctttgcaaattccttgacagtggttaagtggcatgtttgttaggggaaaaaaaaaatgttctccaagta

SEQ ID NO: 101560 - DNA, 201 bp, Homo sapiens
tatatttatatactttttcatgaaaatggagttatcagttatctgtttgttactgcatcatctgtttgtaatcattatctcactttgtaaataaaaacacmccttaaaacatgaacaagccaaaactgtgtgcagacaaattagacattttcagtgtgttatttttcaacaacacctaggcccctgggaagacaaggacct

SEQ ID NO: 101561 - DNA, 201 bp, Homo sapiens
tttcttccacaagataccctaaatcatctctctcaagttgaaagttccacaaatctctagggaaagggcaaaatgctgccaatctctttgcaaaaaaaaaagaaaaagaaaaagaaaataacaagagtcacctctgctccagttcccaacaagttcccaacaagttcctcatctccatctgagaccacctcagcctggacc

SEQ ID NO: 101562 - DNA, 201 bp, Homo sapiens
cagcttgaattttgcctcagaaaatggaattttctttctatcacattgtcaggctgcacattttccaaactgttatgccctgtttcccttttaaaactgarcgcctttaacagcacccaagtcacatattgaatgctttgctgcttagaaatttcttccacaagataccctaaatcatctctctcaagttgaaagttccac

SEQ ID NO: 101563 - DNA, 201 bp, Homo sapiens
gtgctgggatacaggtgtgagctactgtgcctggcctagaataatacttttaagattcatccatggtgtggtatatatcagtagtttcttttctttttttyttctgagtagtttttctttgtgcagatacataatttgcttattcttttcattagttgatagatataaagctgttataaacattccagttcacatttttct

SEQ ID NO: 101564 - DNA, 201 bp, Homo sapiens; identical to SEQ ID NO: 15969

SEQ ID NO: 101565 - DNA, 201 bp, Homo sapiens
gagcctgggagtttgaggctgcagtaagctttgatcttgtcactgggttccagcctaagtaacagaacaagaccccatctcaaataaaataaaataaaatwtaaaataaaataaaataaaagtaaaaaattagtataataaaatataaaaatatgtatacagttcagcaatcacctccacagtcttgagaacaagggttag

SEQ ID NO: 101566 - DNA, 201 bp, Homo sapiens
aatgtatttaaaaatagtcttacttctttgtctctgtagtaatccttcccctctaccaccggatatggctcctgggcagagttatcaaccccaatcagaayctgcttcctctagttcgatggataagtatcatatacatcacatttctgaaccaactagacaagaaaactggacacctttgaaaaatgacttggaaaatca

SEQ ID NO: 101567 - DNA, 201 bp, Homo sapiens
cacatgatgggctggcagcctggcagagcttactgtgtggagaactcacagtatacttaaagcctgatgtttctaaataaaattgatctaagaggaagcaaggggctagaagctgtgctgctggagcagcatccttcacaacgttcatcctaaactagagtgatatgaggcccttgaatgtcacacttctcaagcttgctg

SEQ ID NO: 101568 - DNA, 201 bp, Homo sapiens
acagacttgacttcttcacttggacaagttaagtaaccttttaaggtttgactttctcctctgttaagggaaatgatagtcatctttctgtttgtctataktgcagaatagacaacctaaaagtattactgcttttttcccttaggaagtagaactcctcattaccctaattaaatcagaaaaaggaagcctgggttttac

SEQ ID NO: 101569 - DNA, 201 bp, Homo sapiens
tttatttgtagagagtaaataatagttaactaatgacattaaaaaataaaatgataaatgtcattccttctaggtttcagctggtagctcaataataataagtatactagctaatatttattaaatgtttaccgtgtactgtgtgctttaacaagtgtttttattcattatgtcatttgatccttataacaatgctgtaaa

SEQ ID NO: 101570 - DNA, 201 bp, Homo sapiens
ctaaattggcaggacttaataaatttaaaacagacttcttgataggcgattttgagaacactaagtgaataatagaatggttaccacatttatcagttagsatgttttcacttgcaagtaatagaaaataaaactcaacttttgtttaacaagaaagggaatttattgggagtttttttgttttgttttgttttcttttct

SEQ ID NO: 101571 - DNA, 201 bp, Homo sapiens
ttttatttgtagagagtaaataatagttaactaatgacattaaaaaataaaatgataaatgtcattccttctaggtttcagctggtagctcaataataataagtatactagctaatatttattaaatgtttaccgtgtactgtgtgctttaacaagtgtttttattcattatgtcatttgatccttataacaatgctgtaa

SEQ ID NO: 101572 - DNA, 201 bp, Homo sapiens
tgacattaaaaaataaaatgataaatgtcattccttctaggtttcagctggtagctcaataataataagtatactagctaatatttattaaatgtttaccrtgtactgtgtgctttaacaagtgtttttattcattatgtcatttgatccttataacaatgctgtaaagcaagaattcccactagcctgatcttaaagcca

SEQ ID NO: 101573 - DNA, 201 bp, Homo sapiens
ctaaatatcaatgtgttttatctctcaacccagcagttatgttaccagtacctttccatctcacattttctttaattttccacaacttctattcagccttyatgccacccagactctacttgactgaatcctggctcttatcattatatattaataaaaaaattattgttaaactttcattttcttgtatccaatagagta

SEQ ID NO: 101574 - DNA, 201 bp, Homo sapiens
tctttcttccttctcccctccctccctcctcctctgtctcctcttcctcctcctcctcctttttcttcatcttcatcatcatcatcatcatcatcatcatyacctggcacccttgagggagacattttctttataaaaggaagttttcccagttgttgtatgtagcagtcaaacttagttctgtgtagaatgcaacaacat

SEQ ID NO: 101575 - DNA, 201 bp, Homo sapiens
gggattcagaggaaaagtctatagcatagcattggcattgcagtgccagctcacttctggtctcaagatactgactggctgcccacctacaagcccatcamcctacccgcccagtcaccaaatgcctaataagaaatgcctacaagaaatacttccacaaaatttaatatgtgttacctactaatcatttgatatcaatag

SEQ ID NO: 101576 - DNA, 201 bp, Homo sapiens
cttttatttgtagagagtaaataatagttaactaatgacattaaaaaataaaatgataaatgtcattccttctaggtttcagctggtagctcaataataataagtatactagctaatatttattaaatgtttaccgtgtactgtgtgctttaacaagtgtttttattcattatgtcatttgatccttataacaatgctgta

SEQ ID NO: 101577 - DNA, 201 bp, Homo sapiens
tcagagactatgtgactgatactatccctagttgccactatttaaaacgaaaagtacagtgtcatagggttccaagatagtgattacaggtggatatatayatataggcacaaagtagatgtcttttaactatgaccaatttttttgtttttgtctgtttgcttttaattttttttagaggtagggtcttactttgttggt

SEQ ID NO: 101578 - DNA, 201 bp, Homo sapiens
acatttgctgagtagtgttttacttccaattatgtggtcaattttagaataagtgtgatgtggtgctgagaagaatgtacattctgttgatttggggtggkgagttctggatatgtctattaggtccacttgttgcagagctgagtttaagtcctggatatccttcttaaccttctgtctccttatctgtctaatactgac

SEQ ID NO: 101579 - DNA, 201 bp, Homo sapiens
ttttctagtttatttgcatagaggtgtttatagtattctctgatggtagtttgtatttctgtgggatcgatgttgatatcccctttatcgttttttattgwgtctatttgattcttctctcttttcttctttattagtcttgctagcagtacatcaattttgttgatcttttcaaaaaaccagctcctaaattcattgatt

SEQ ID NO: 101580 - DNA, 201 bp, Homo sapiens
caagaagaaggcatagtgacatctttaaagtgctgaaactgtcagcctaaaatttctacccaaagaaaatatctttcaaaaacaaaggcgaaataaagtgktttttttcccccagatatacagtagctgaaagaattgataaccagcagatctgcattaccagaaatgttaaagacagttgttcaggcagtagggtaatga

SEQ ID NO: 101581 - DNA, 201 bp, Homo sapiens
acaaaggggctatacaggtcccacgcaagtctgaaatccagcagggcaggcaaaccttaaagctgcaaaatgatctcctttgactgcatgtctcacatccrggtcaagctgatgcaagaggtgggctcccaaggtcttgggcagctctgcccctgtgtctttgtagggtatagacccctcctggctggtttcatgggctgg

SEQ ID NO: 101582 - DNA, 201 bp, Homo sapiens
gcaagctgtcgttggatctaccattctggggtctggaggacagtggccctcttctcacagctccactaagtggtgctccagttggcactctgtgtgcaggytccaaccccacatttcccttccctactgccctatcacaggttctccattagggccctgcccctgcagcaaacttctccctgggatccaggcatttccata

SEQ ID NO: 101583 - DNA, 201 bp, Homo sapiens
tttccaaactgttatgccctgtttcccttttaaaactgaacgcctttaacagcacccaagtcacatattgaatgctttgctgcttagaaatttcttccacwagataccctaaatcatctctctcaagttgaaagttccacaaatctctagggaaagggcaaaatgctgccaatctctttgcaaaaaaaaaagaaaaagaaa

SEQ ID NO: 101584 - DNA, 201 bp, Homo sapiens
tacttctattaaaatacgttggtgatttcatctgtgactatgagaatttctcatgatctttgactcatgcaatttgtaagactcttgtttaaaatgcatgmtatggatggctctgttttgtggtggaaaattcacagatgatgctacaagagtgcctcttggagatgaaggtggctatatcaatgccagcttcattaagat

SEQ ID NO: 101585 - DNA, 201 bp, Homo sapiens
gtcatctttctgtttgtctatagtgcagaatagacaacctaaaagtattactgcttttttcccttaggaagtagaactcctcattaccctaattaaatcaraaaaaggaagcctgggttttacagtaaccaaaggcaatcagagaattggttgttatgttcatgatgtcatacaggatccagccaaaagtgatggaaggct

SEQ ID NO: 101586 - DNA, 201 bp, Homo sapiens
catttatgatgattcccaagaagctgaagttatccagtctctgctggatgttgtggatgaggaagcccagaatcttttaaacgaaaataatgcagcaggakactcctgtggtccaggtacgtgaaccagatgaataaattggtatactatggagtacaaaaacgtctctagggagcattttttgagtaaatatgtaatgca

SEQ ID NO: 101587 - DNA, 201 bp, Homo sapiens
acgtgatgtgaagtagatttgctaatgggttgtatgtggtgtcagagaaagagtcaaggatgaatgtgtggaaaagttaaaatacagataagcaaaaaagwaacttaaaaggccacttgtattcctactgtcagagagctgttaatgtttttaggagatgttcttatattctttgtcctaaacacatgtgcacactccttc

SEQ ID NO: 101588 - DNA, 201 bp, Homo sapiens
cttttccagaataaatatttctagaaaattgaaaagtaactaaagacattgaaaagcagagctttattaagaaacatctgtggtgcagatacgaatatttwacttaaagctgtgatgtgtacctaaacttcaatgcataaaatgtaaagtttaacatatcaaaactccaggatttttagctttggatcatcttaaaactat

SEQ ID NO: 101589 - DNA, 201 bp, Homo sapiens
gcagagctttattaagaaacatctgtggtgcagatacgaatatttaacttaaagctgtgatgtgtacctaaacttcaatgcataaaatgtaaagtttaacrtatcaaaactccaggatttttagctttggatcatcttaaaactataagatagctcttatcacatttaaagcagtgtgtagagggaaatttatagcactaa

SEQ ID NO: 101590 - DNA, 201 bp, Homo sapiens
aagactatcgatgctgtgaagaaactgcatcaattaacaggcaaaataacgagctaacatcataatgacaagatcaaattcacacataacaatattaaccrtaagtgtgtatgggctaaatgccccaattaaaagacacagactggcaattggataaagagtcaagacccattggtgtgctgtattcaggagacccatctc

SEQ ID NO: 101591 - DNA, 201 bp, Homo sapiens
aattacctgggtttaacttaccttcccccagtggaaatgctggcagagcccatgtctgaaggaaaccttagattgattaattataaatccagttttggacygttttgaaaaggtgacaagtcaaataatcacacagcagtcaactctatgtaatttgccaagctaccacactaacccacatatatagaacgagctgtgatt

SEQ ID NO: 101592 - DNA, 201 bp, Homo sapiens
aaagaaaacaggtttaatcctggagctttcattggcaacaatatctagctagaatttaacaatgttgttatatttctaaaatttctttgaatttatataartaagaaaagtccattgaaaaatttataaataaccaaggctagaaattgtaaagatgacaggattgaagtctgggtaatactctgttattacaacttttga

SEQ ID NO: 101593 - DNA, 201 bp, Homo sapiens
tggactcctacacaataataatgggagactttaacaccccactgtcaatattagacaggtcaacaagacagaaggttaacagggatatccaggacttgaaytcacctctgtaccaagtggacgtaatagatatttacagaactctccaccccaaatcagcagaatatacattcttctcagcaccacatcacacttattcta

SEQ ID NO: 101594 - DNA, 201 bp, Homo sapiens
tataacatgtcatgatccacttattctgttatacaatttcagaccagagaggtgcgccatatttctcatctgaatttcactgcctggccagaccatgatayaccttctcaaccagatgatctgcttacttttatctcctacatgagacacatccacagatcaggcccaatcattacgcactgcagtgctggcattggacgt

SEQ ID NO: 101595 - DNA, 201 bp, Homo sapiens
ctctgtgatccttttgagattcaaatccagttatcctttgaatctaacacatatgtggtttcctctgacagtttgacatctctgatttggtgcgctgcatkagactacaaagacacggaatggttcagacagaggtgagtcatggctgggcctcctaatgagaatttttgtaaagattctaatattttttaaggttcttat

SEQ ID NO: 101596 - DNA, 201 bp, Homo sapiens
ccaacatcacttccaatagtggtatagctatatatatataatatttacattatacatctaaagtattctatctcactttttttggccataggatcaatatrttttctgctatcaagtcatcctttatgtcctgacacgtcttcaagcagaagaagagcaaaaacagcagcctcagcttctgaagtgacatgaaaagagcct

SEQ ID NO: 101597 - DNA, 201 bp, Homo sapiens; identical to SEQ ID NO: 15978

SEQ ID NO: 101598 - DNA, 201 bp, Homo sapiens
tcttttgaccctttagcttactgatactgaattacttgattccaatcaatgataatgtctgctttatcataaaagtaatatttctttcaacacagtttatytaatccttatgccttaaaagcttaataataagcttagtaataaactcatggaaattaaccttacatgcctataataaaaaccaccccagtattcaaaatc

SEQ ID NO: 101599 - DNA, 201 bp, Homo sapiens
ttttctttaattttccacaacttctattcagcctttatgccacccagactctacttgactgaatcctggctcttatcattatatattaataaaaaaattaytgttaaactttcattttcttgtatccaatagagtagaacacatatttattatttccttttcaaacagttttggtgtttgtaaacattaccataaattcaa

SEQ ID NO: 101600 - DNA, 201 bp, Homo sapiens
gatcacttgaggccaggagttcaagaccagcctgggcaacatagggagaccccgtctcttcaaaaatatttaaaaattaaccaggcacagagggtgcatgrctgtggtcccagctacttgggaaactgaggcaggaagatcccttgagcctggtagatcaaggccgcagtgagctgtgattacagaactgcactccatcgt

SEQ ID NO: 101601 - DNA, 201 bp, Homo sapiens
gtttggaagctaagactgtgtcatcaaacttaatggtatttgccacttggtaactactgatgcacagcttacaagaaactgctgtgtggttcatcctatamcccctccttacacacctagaaaagatgtttcctaatcaaagttttattggtttagtatgctctgagtagagtaggaacaataattaatttcaattaaaaa

SEQ ID NO: 101602 - DNA, 201 bp, Homo sapiens
tcttccatttggagcatttaggaaattgccaccactttcattgtcaatagtggattacatttccatttattttctaaaaattgtgtgcatacatgatagawtcttatcattccaggaagaagctctacttctgatgtactagacatacaaaagcctccactctctcatcagacctttcttaacaaagggcttagtaaatct

SEQ ID NO: 101603 - DNA, 201 bp, Homo sapiens; identical to SEQ ID NO: 15979

SEQ ID NO: 101604 - DNA, 201 bp, Homo sapiens
agcaattggtaaatttaaagcaatgtataaaatgttttagtcccacaggattaaaattaatattttgatttatgtggaatagctaatgagtttgctttctratctttttgttttaatccttttagaaccagttcgaagatacaaaacttatcatggtgatgtctttagtacctccagtgaaagtccatctattatttcctc

SEQ ID NO: 101605 - DNA, 201 bp, Homo sapiens
tggaactgattcaaactgaggcagtctggctccagagtccgtgctcataaccagtatactaaacccattattggaacgcattatttgaatacactccagcrattggtaaatttaaagcaatgtataaaatgttttagtcccacaggattaaaattaatattttgatttatgtggaatagctaatgagtttgctttctaatc

SEQ ID NO: 101606 - DNA, 201 bp, Homo sapiens
gataatgatgcttacatagtgtgtgctctgaaagcttcgtgtatgttaattcatttaattctcacaaccttatgcgatgtgcactattattataccccctytttggctgaattaaaagaagagtcatggggagattaaattactttcctaaggtcacacactagaaagtggtggaactgattcaaactgaggcagtctggc

SEQ ID NO: 101607 - DNA, 201 bp, Homo sapiens
tgtattcattcaatttaaattagtattaaataaaattattgttttccatctctacagtccattcaaattacattcataatgagccagaggattattttaarttgtttattttatcataagactttcctgtggtaggatgcaatcatttagaaaaaaaaaagtactggtaaataccttgatttttcaattctaaaactcaat

SEQ ID NO: 101608 - DNA, 201 bp, Homo sapiens
taaaattttaccattacagttataacattgcaatgaaggtggctacacatgcatttaatgtgtattggttatcctaataggtccattgcacatgattcaagaattttggcattcagaaaactttgtaatattctgtaagtatgtagaagcatctttttggtttaaaaaaatagtctgatacattctagttaaaataccagc

SEQ ID NO: 101609 - DNA, 201 bp, Homo sapiens
ttttaaacttaagtgtttccttatttcatcccagtccccttgtctctccatttgtctctctgccgtgcaagtttgaatacctttattctctgctatcagcyatttaccaatgttccatcacctgaacaggataaaattctagctccttggatcatcatacttaaggttccccatgattatatctctcctctcatcttttag

SEQ ID NO: 101610 - DNA, 201 bp, Homo sapiens
ccactctctaaggacggattgatatgtcttaagaaagatcgaaaatggatcttactaacaataggtatcatcacattttttaagacccagcaattttaaacttaagtgtttccttatttcatcccagtccccttgtctctccatttgtctctctgccgtgcaagtttgaatacctttattctctgctatcagccatttacc

SEQ ID NO: 101611 - DNA, 201 bp, Homo sapiens
taatttaaaaataatttaggaagcaatgtaagggatatattaaagtgttgtgagactgtaagaagggtacccacttttattacatatatctgactaatttytaaagaggatttgatacagtttatagaattgaaaaataaaggtgaaaaaataggagccgagtaaataaagacaagaaaataagatgaagctgtagtaagg

SEQ ID NO: 101612 - DNA, 201 bp, Homo sapiens
agtccatctattatttcctctgaatcagatttcagacaaggtaggaggcatctgaaacaagcaaactgtttttaagaaaccacgattattattattttcartagtgttcaaatattaatataaattgccagaaagaataatactgtataaaattgaaaaatttaaaaaagctgctggttactcagtagtagtattatagaa

SEQ ID NO: 101613 - DNA, 201 bp, Homo sapiens
aaactagtatttctttacttccctttgaatagcaagaaaaaaatgattgagttattatttaagttactccgtgagctaaaataaataattttaatattaartttctatttgatttatatcagttccacaaaagtaaatgagaataagcagggattttctgtaatattggtcaaataccacatgtatttcaggcattaatga

SEQ ID NO: 101614 - DNA, 201 bp, Homo sapiens
tacccattattcccccagaggatattttacaacccagttaaacaaacacctaaaaatgttggattattatggaaatacactaccttaaacctccattattrtatagtaacttgaaagcagcaataaattatgtttgctttagactacaggcattaatcaaaaggaatgttagaagtttagaattcaaaagcactaattctt

SEQ ID NO: 101615 - DNA, 201 bp, Homo sapiens
aaccaccagcttcaaattacaaattttgggggcacaactgtagaagattataatttactttgtctggaataaagttttgaatccataccttttgaatcatmgtacattttaggtttacagagtcagcctaggtttgaattagttcctccattagtaactatgtggtctttacttgggcttcatctctccaagtctaaatta

SEQ ID NO: 101616 - DNA, 201 bp, Homo sapiens
ttttgtatgttgatttttgtatcccttaactttactgaatttgtttatcggttccaaaggttttctggtagagtgtttaggtttttctaaatacaagatcrtatcatttgctaataagaataatttgacttcttcttttccaatttggatgtcctttattatttctcttatctaattgctctggctagaacttctagtttt

SEQ ID NO: 101617 - DNA, 201 bp, Homo sapiens
attgtgggcttcatgcatatttacataaaaaaaggtagggttcttattatggtccttgttatgggagtttactgaaatacaaacaagatattttttgtatstttttacatatttctttctgtatgcatgtttaagaagtgtgctaccaaaggacacagagatacataataatctctaatcatattctggtaaggagcttaa

SEQ ID NO: 101618 - DNA, 201 bp, Homo sapiens
ggagtgcagtggcacaatctcagctcactgcaacctccgtctcccggattcaagtgattctcctgcctcagcctccctagtagctgggactacaggtgcaygccaccacgcccagctaatttttttgtattttagtagagacggggtttcaccatgttggccagggtggtgttgatctcctgacctcgtgatccacctgcc

SEQ ID NO: 101619 - DNA, 201 bp, Homo sapiens
cttttatttattctacttttgttttttcaacaggcaggaaaacatgaagccattgtgaagaatgtacatgatctgctagcaaagttggcttgggatttttstcctggacaacttgatcatctttttgattgctttaaggtagtagcttgaatagtaaagtattgccaaatagtaaatattgccagttaattctaagtaaag

SEQ ID NO: 101620 - DNA, 201 bp, Homo sapiens
gatttggaggacagggttctttctgtccatcctggctcttgcaggctgctccagaagtgtttgcaaggcagcatatcacagtggtagttgatggagcgtasgtggctgctgttgagccaagctatgaaattgatcaaatttaattgtagtttactatccaagtcttcttttgaaagctgtaaaccttgagatagactgtag

SEQ ID NO: 101621 - DNA, 201 bp, Homo sapiens
acaccgatgggtcttgactctttatccaatttgctggtctgtgtcttttatttggggcatttagcccatttacatttaaggttaatattgttatgtgtggwtttgatcctgtcattatgatgttagctggttattttgccagttaactgatgcagtttcttcacagccttgatgatctttacaatttggcatgtttttgca

SEQ ID NO: 101622 - DNA, 201 bp, Homo sapiens
actgcaacctctgcctcctgggttcaagcaattctcctgtctcaccctcccaagtagctgggattacaggctcccaccactatgcccagttaattttttgkatttttatattattattattattattttaagaccagatttccctcttgttgcccaggctggagtgtaatggcgtgatcttggctcactgcaacttctgcc

SEQ ID NO: 101623 - DNA, 201 bp, Homo sapiens
taaatattttgtatattctgtattctagataatgtcagtgcatcccagatacatctctttcctttggcaagttgcagacttaggtagcaacctgaatatgycacctcttagagatggagcaagagtacttatgaaacttatgccaccaggtaagaaaatggtccatccccctattccacagaaaggatgctcataactaca

SEQ ID NO: 101624 - DNA, 201 bp, Homo sapiens
gacgtaaaatgattcacttttttcagattaaccaagttactcatgatcaagcagtggtgctacaaagtgcccttcagagcattcctaatccctcatccgartgcgtacttagaaatgagtccatacttcttgctcaggaaatatctaatgaggttagtatgaaagttagacagttctgggatcttgaatgatctctactta

SEQ ID NO: 101625 - DNA, 201 bp, Homo sapiens
tggccatccaagacttttttattttagacctagtctgactctgttgcccaagctggagtgcagtggcctgatctcggctcactgcaacctccacctcccargttcaagccattctcctgcctcagcctcccaagtagctaggactacaggcttgcatcactttgcccagctaagtttttcatttttagtagagacagggtt

SEQ ID NO: 101626 - DNA, 201 bp, Homo sapiens
gctgataccgcttgttcctttccatgtttagtgcttccttcaggagctcttgtaaggcaggcctggtggtgacaaaatctctcagcctttgcttgtctgtraaggattttatttctccttcacttatgaagcttagtttgtctggatatgaaattctgggttgaaaattcttttctttaagaacattgaatactggcccca

SEQ ID NO: 101627 - DNA, 201 bp, Homo sapiens
ctacttttgttttttcaacaggcaggaaaacatgaagccattgtgaagaatgtacatgatctgctagcaaagttggcttgggatttttctcctggacaacwtgatcatctttttgattgctttaaggtagtagcttgaatagtaaagtattgccaaatagtaaatattgccagttaattctaagtaaagtttaattcgtta

SEQ ID NO: 101628 - DNA, 201 bp, Homo sapiens
ggccttaaatcctcactgcaagtttcatatctacaatggtacacgtccgtgtgaattaatttcctcaaatgctcagttgcctgaagatgaattatttgctygttcttcagatcctcgatcaccaaaagtgcgttggtttgttattttcaagattaaatattaatttttttatttgcatttgccacagaccattagtgatgt

SEQ ID NO: 101629 - DNA, 201 bp, Homo sapiens
tttcatgtttgttcaaataattgcagctcttattaagttatgttttcatattctgtgcattatacaaattactattttatttacttaaaaatcattgttcmtttttttcagtgtgggttgtgtctcactgtaaaatgaggacctgtttttgtgtggtcttaaatgttgaaagtaattggcaagtttagttcttttaaaaaa

SEQ ID NO: 101630 - DNA, 201 bp, Homo sapiens
catgaaaagtgaggagtacctatcactgaatgtgcttcttaaatcccccttggagtatatcccaaagagcctctctagccgcaagtgaagagtctgaggcygcatggtctttaccaagtaggcaattgtaaatgttaaccagagggtttgtgaatttcttcttgaatatgtctctaggtaacttgctcctgattctaattt

SEQ ID NO: 101631 - DNA, 201 bp, Homo sapiens
caggtaagaaagtgagatgatagctattttctaagaaagataccaaaaaggagaaaatttttggtaacccttatataatggccagcaatttagtattgccygacttttactaatgcatgtgctgttcatgtagagaaatcttaccaagaatttttaaacaaaaaataacatttttctgtctttgtatatatattcatggta

SEQ ID NO: 101632 - DNA, 201 bp, Homo sapiens; identical to SEQ ID NO: 16043

SEQ ID NO: 101633 - DNA, 201 bp, Homo sapiens
aacaggcaggaaaacatgaagccattgtgaagaatgtacatgatctgctagcaaagttggcttgggatttttctcctggacaacttgatcatctttttgaytgctttaaggtagtagcttgaatagtaaagtattgccaaatagtaaatattgccagttaattctaagtaaagtttaattcgttagatttcttttgcttat

SEQ ID NO: 101634 - DNA, 201 bp, Homo sapiens
gatatgctcttggggtgtgtgtgtgtgcgcacacgcccctgtgtgtatgtgatgaatgtagtttattcaaagacttaaagcagtggttaatgtaaacaaaygtaataaattatgtggtatttatatcatttaaatactttctttaggcaagttggacaaatgcaagtaaaaagcaacgtgaaaagctccttgagttgatac

SEQ ID NO: 101635 - DNA, 201 bp, Homo sapiens
ccttcttaggctttggggtgaacctgttaatctccgtgaacaacatgatgccttagagttttttaattctttggtggatagtttagatgaagctttaaaakctttaggacacccggctatactaagtaaagtcctaggaggctcctttgctgatcagaagatctgccaaggctgcccacataggtaagtgctaattatgtt

SEQ ID NO: 101636 - DNA, 201 bp, Homo sapiens
gtgcaagacaagaagccattcgaatggttagagtattaactgttataaaagagtacattaatgaatgtgacagtgattatcacaaggaaagaatgattctmcctatgtcgaggtttgtgtgaagttgatctctagtgttaatttacaattacttaatattttcttagaaatttacttaggaaagtaataataggttaaaag

SEQ ID NO: 101637 - DNA, 201 bp, Homo sapiens; identical to SEQ ID NO: 16045

SEQ ID NO: 101638 - DNA, 201 bp, Homo sapiens
tatggtattaaatatatagctctagaaggtactactatattttcagtcttttaggatagttttaaagaaaaataggatgtattattttctatgattcttaraaatacatctcatatgtaaaggaacaacagcttctacctttcttagcctttccctcagcctcttaaaaattatgcctacaattataccagtcacttcagc

SEQ ID NO: 101639 - DNA, 201 bp, Homo sapiens; identical to SEQ ID NO: 16047

SEQ ID NO: 101640 - DNA, 201 bp, Homo sapiens
ggtttttctcttataaatttgtagaaacctctgtcacaagtaaggaaatgatcgtgaaatttttgtattagcattttaagctgatactgaaaatcattctraattctaaatagttttatttttttctaaagggtaacggagatcttaaaagaaaatggacctgggcagtggaatggctaggagatgaacttgaaagaagac

SEQ ID NO: 101641 - DNA, 201 bp, Homo sapiens
ccttttaaaagaaaggattcatgatgaaatctgctttttgttttgcagagagcttggagataattctggtggctgtgtggagtatgtgttggaggtgagtygctagctgaagaattaaaacaatagttttagcagtttgggtaagagatgtttacagaaatgttttgtggaataaaactgaacagtcagagacctatgaga

SEQ ID NO: 101642 - DNA, 201 bp, Homo sapiens
catcagaagatgccccattatatcctcattcacctgcctctcagtatcaacaggtaaaaaggatttttcatttttatcccccaaacccattttgatgcttkacttaaaaggtcttcaattattattttcttaaatattttgaaagtccaaactttctctgtacctggctgatatttaaaactggataaactgttccaaacc

SEQ ID NO: 101643 - DNA, 201 bp, Homo sapiens
caaaatggcaaatgtgaaacattaataacacatgagttacactttattttagtctgtgtctttttcctttgcagatagaacagctgtagaaaaattacgarctgtttgtttggaccatgcaaaacttggagaaggcaaacttagtccaccccttgactctcttttctttggtccttctgcctcccaagttctatacctaac

SEQ ID NO: 101644 - DNA, 201 bp, Homo sapiens
ggcatctgcagacagcctacagctatcatgttgaatgcaaattcattattgtgagtggaaaaaaaaagacaggaatggtggatatcgtgtgattgtattagtattaaaattatagaaaatggaaatattctaattggcagaaagcacaaagtggttgcttgagatgggaagaatgggatggcaggggcaaaatggagaggt

SEQ ID NO: 101645 - DNA, 201 bp, Homo sapiens
tctatctatctatctatgaatgagatcacaccattacctccaattttagttcagttccacaagcttctttttgtttcttttctctttccctatacgaaagttttgtctccaggagtgagaaacctggctgagtattattctttaatatatttacttgtttgattaatcctatagttaccaattatttatcttctctaccaa

SEQ ID NO: 101646 - DNA, 201 bp, Homo sapiens
gaatcctcccgctgaggtgacaacgaaaagtcagattcctctctctaaaataaagaccctttttcctctgattgaagccaagaaaaaggatcaagtgactkctcaggaaattttccaagacaagtaagtacttggtatagttgcatttaacattggggtacataagagttgtggtcattttagagtggctctggaagtgtc

SEQ ID NO: 101647 - DNA, 201 bp, Homo sapiens
tattatttgttatctgtctgtgtcctctactagaatagatttggtgtctttattttagatcatcagtttacaaactgactcaaattgtcagggtatacctsttagcatatatatagattctagcagtcacttcttgtgacaaaaatgcttcataacaaattatgccccgaatcagtgacttacagtgaaagcatctgttct

SEQ ID NO: 101648 - DNA, 201 bp, Homo sapiens
tcgtgatccgcctgcctcagcctcccgaagtgctgggattacaggcatgagccaccacgcccggccaatacaactattttctatcctctgaaagagataggctgcctatcacagtattttgttaattgtctatatgtatacttcaatttttatttggctgaaggtgttgatggtatattaatttttgtatattgagagttt

SEQ ID NO: 101649 - DNA, 201 bp, Homo sapiens
accgtattttatgaagagcatagactgcatccgagccttccgggaagaagccattaaggtaatgctatcctagcatctcttttcttcctaaacagttggcractatcacagggaaagaggcatacagcatcctggaaatgagtctgggccgtggaaattatcattctcaatatgaatagcagtgtatgccagtggagctaa

SEQ ID NO: 101650 - DNA, 201 bp, Homo sapiens
cgtgatccgcctgcctcagcctcccgaagtgctgggattacaggcatgagccaccacgcccggccaatacaactattttctatcctctgaaagagataggctgcctatcacagtattttgttaattgtctatatgtatacttcaatttttatttggctgaaggtgttgatggtatattaatttttgtatattgagagttta

SEQ ID NO: 101651 - DNA, 201 bp, Homo sapiens
ttgtttcttcttttgtcccatttttgtcaagcatgtatttattttgtttgaatccttttttgtctcatggactgagaagaaaatataactaaggttggatyatcccacaatttgctctgtgtctaattattctgaggtggattgtaatgaagccagcaagacttatacattggaattttaaatgtatgggattgtaaggag

SEQ ID NO: 101652 - DNA, 201 bp, Homo sapiens
gcaccgctacccctggcttatttttgtgtttttagtagagacggggtttctccatgttggccaggctggactcgaactcctggccttaaatgatctccccrcctcggcctccccaagtgcttggattacaggcatgagccactgcgcccagccacaaaacaacttttaaataggtctgctgctgtttttttattttaacct

SEQ ID NO: 101653 - DNA, 201 bp, Homo sapiens
gtgatccgcctgcctcagcctcccgaagtgctgggattacaggcatgagccaccacgcccggccaatacaactattttctatcctctgaaagagataggctgcctatcacagtattttgttaattgtctatatgtatacttcaatttttatttggctgaaggtgttgatggtatattaatttttgtatattgagagtttag

SEQ ID NO: 101654 - DNA, 201 bp, Homo sapiens
ggaaagggaggcagcttgtttgtagaaggactacatgtagctattgtttttcttttctttttcttcttcattatttttcttttcttcttcttcttttttcttttttttttttggtgcttggaaaataagtttcacaatagcaatctggttttgtattgtttgttctaagagaaattttttttttcttttctagccatgaag

SEQ ID NO: 101655 - DNA, 201 bp, Homo sapiens
agaacaggattcacaagtttaggatttccccaagaatgtatcctttgatacatgagatttttattgaatgagaaattttttggaacttgaaaatactaccwtaattaattaattaattaattaattaatttttatatcttggtcagccaggaggaagaatattttatttaattttagagataggttgtcactgtcacccac

SEQ ID NO: 101656 - DNA, 201 bp, Homo sapiens
ttaggatttccccaagaatgtatcctttgatacatgagatttttattgaatgagaaattttttggaacttgaaaatactaccttaattaattaattaattwattaattaatttttatatcttggtcagccaggaggaagaatattttatttaattttagagataggttgtcactgtcacccacgccggagtacagtagtgt

SEQ ID NO: 101657 - DNA, 201 bp, Homo sapiens
acgcgccaccgtggctggctcatttttaaaattgtttgtagagatggaatctcactatgttgttgtggctggtcttaaactcctgggttcaaacaatcctyacatctcagcctcccaaactgttggaattatgggtgtaagccatcacgtccagcccagaatatttttaaaaacccagtttattgataatttattttgtcg

SEQ ID NO: 101658 - DNA, 201 bp, Homo sapiens
gatttccccaagaatgtatcctttgatacatgagatttttattgaatgagaaattttttggaacttgaaaatactaccttaattaattaattaattaattwattaatttttatatcttggtcagccaggaggaagaatattttatttaattttagagataggttgtcactgtcacccacgccggagtacagtagtgtgatt

SEQ ID NO: 101659 - DNA, 201 bp, Homo sapiens
gccagtcctaaataaatgtcttttttctctgaaggccccatttgctctatttaatggaagaataacatcttcctctcctacttcagaaggtaaaaatattytgagctcttaaaaagaaaaataaagttggaatgctttctttcttttcttttttttttttttttttttttttttctggaagaagcttactttaacaaaaaa

SEQ ID NO: 101660 - DNA, 201 bp, Homo sapiens
tccccaagaatgtatcctttgatacatgagatttttattgaatgagaaattttttggaacttgaaaatactaccttaattaattaattaattaattaattwatttttatatcttggtcagccaggaggaagaatattttatttaattttagagataggttgtcactgtcacccacgccggagtacagtagtgtgattttag

SEQ ID NO: 101661 - DNA, 201 bp, Homo sapiens
atagctccacttcattgaagttttttaggattttgtcgtgagctataaataaaacacttttatgtcacatcttcctattttattttcttccttttttttctttttttttttgagatggagtttctctcttgttgcccaggctggagtgcaatggcatgatttcagcacaccacaacctctgcctcccgagttgaagcgatt

SEQ ID NO: 101662 - DNA, 201 bp, Homo sapiens
cctcctgagtagctggaactacagttgcatacccccacgcccggctaatttttgtatttttagcacagacggggtttcgttatgttggccaggctggtctygaactcttgacctcaagtgatctgcccaccttggtctcccaaagtgctgggattactgtgagccacggtggcatgagccaccgtgcccggcccaaaaatg

SEQ ID NO: 101663 - DNA, 201 bp, Homo sapiens
gccatcctatgaagtagattcttctgttgacccccaacttaaagctcaggagactcaggattagagaagatgagaaacttgcccaagattgtagttggtargtgttggagtaaggatttaagtgtaggcagtctgactccagagcttgtacttcaaactgtaatgccactttgccttagcaatgcatgtcccaagacctct

SEQ ID NO: 101664 - DNA, 201 bp, Homo sapiens
tggtcattgttaattggttgcctttatagttttatattttttgtagaacagagcacctttatagttttaaaaatctccagctcaggctgggcacagtggcrcatgcttgtaatcccagcactttgggaggccgagacgggaggatcacttgagcccaggagtctgagaccagcctgggcaacatagtgggaccctgtctct

SEQ ID NO: 101665 - DNA, 201 bp, Homo sapiens
cctagctgcacagaggtggctggttctaaagacttctataaaaacagctgagatgcaaacaagcacagctactagaacctcttttatttcttccaagaaasagacctgtactgaagggtgtatggaagacagagagtggggacagggagaaggagaagaagggggaggaggaggagcaggaggaagaggaaggggaaaagc

SEQ ID NO: 101666 - DNA, 201 bp, Homo sapiens
aagctgaaagatatcatttcctcatttaattagaaagtcttcctttagtttctttcttatgttagcataatgtctcaatattctactttaagtgtactcckttgtagaattggggaaaattagttacactaggcagtgcatgttctttggtctttagttaactgctgtatgccctataaatattaattgatgaccttcagg

SEQ ID NO: 101667 - DNA, 201 bp, Homo sapiens
cccttgcagcatcggctttctaaagctgattaactcttttaaaaaaatggccattcttatctttacccccaaatcctactctaaagagatgcttgtgattwgagaaccggtatatctttggatcccaatgccgcccgtagttttattgtagtatgactcattagatactgctgctgctttaccatcagtgagacaaaatga

SEQ ID NO: 101668 - DNA, 201 bp, Homo sapiens
atcacttgaagccaggaattcaagaccagcctagccaacatggcaaaaccccatctctactaaaaatacaaaaatcagtcgtgcatgatggcttgggcctktagtcccagctactcaggaggctgaggcacaagaattgcttgaacctgggaggcgggaggttgcagtgagctgtgatcatgccagtgcactccagcctgg

SEQ ID NO: 101669 - DNA, 201 bp, Homo sapiens
caccgtgcccagccccttccttcttttaaacatcctaattggtcctgtcaaagacatataaataaaaacttcaaacaaattggaagtaatctcttcctcasattctcattgtgcttatctagccctttcttatgggacttaactattagaacatacatgtttcatatttgctacatatctcatttctgctaataaagaatg

SEQ ID NO: 101670 - DNA, 201 bp, Homo sapiens
tcaagtgattctaccacctccaccccgccaagtacctggagctacaggcacacactaccacaccaggctaatttttgtagtttttgtagagatgaggtttygccatgttatccaggctggtcctgaactcctgagttcaagcgatctgcctgccttggcctcccaaagtgctgggattacaggtgtgagccaccaagtcca

SEQ ID NO: 101671 - DNA, 201 bp, Homo sapiens
tctttaagagggaaagctcttgcatagttaattaaggattgtctagtaagttttgacagttgtaaacagaggcttataaagctctaacatacatgatagaraaaacgggttgttagacacaaaggtcttctgtgtacatggaaagctaatagctgtcaattctgagacaggaactagaaaataatatctgaagagtaaatg

SEQ ID NO: 101672 - DNA, 201 bp, Homo sapiens
ctatactccttttagagcatttccttttctgggcaggccaaggcctggcccagtagacttgaggcaggataggtggttgaatgaggtggcatgctgtgtasaacttcactcacatgggcagtggagaatttgccctggccttgatcttggcgcccctcccccttggtgttgcttcttgacaccgctgtcaacaactagagc

SEQ ID NO: 101673 - DNA, 201 bp, Homo sapiens
gaagtcatgtgtttttactttgggggtcagtaagggtctgagcacaagatgatagtcttttagtcttatggtggtataggactggcagtttctatatagargttattgatttcattactctgcttgtggccaggattatatttcagtgtacttgaaaagtagtaggttatccatttcataaagttctccaggtaaggaggc

SEQ ID NO: 101674 - DNA, 201 bp, Homo sapiens
gctcagagttccggggcacggtttccccgcccctttcaggcctagcaggaaacgaagcggctctttccgctatctgccgcttgtccaccggaagcgagttrcgacacggcaggttcccgcccggaagaagcgaccaaagcgcctgaggaccggcaacatggtgcggtcggggaataaggtataaagaaagccatggacttg

SEQ ID NO: 101675 - DNA, 201 bp, Homo sapiens
ccgcccggaagaagcgaccaaagcgcctgaggaccggcaacatggtgcggtcggggaataaggtataaagaaagccatggacttgggctttacccggactrgggatccggagagggtggttcggaagcaggaatcgtgggatcgcggtcaagacaaagaatggggcaagagaagatcatggtggtgggctcagtcaggagg

SEQ ID NO: 101676 - DNA, 201 bp, Homo sapiens
gtcggggaataaggtataaagaaagccatggacttgggctttacccggactggggatccggagagggtggttcggaagcaggaatcgtgggatcgcggtcwagacaaagaatggggcaagagaagatcatggtggtgggctcagtcaggagggccgggaccgagggatgcgctatgagaaaagctggagatttggggctcc

SEQ ID NO: 101677 - DNA, 201 bp, Homo sapiens
ttttagcacagacggggtttcgttatgttggccaggctggtcttgaactcttgacctcaagtgatctgcccaccttggtctcccaaagtgctgggattacygtgagccacggtggcatgagccaccgtgcccggcccaaaaatgagagttaaatgcctagaagcactactgcctgcagtaggtctaatgcatcttactact

SEQ ID NO: 101678 - DNA, 201 bp, Homo sapiens
taattctactttttaaaatagctttattgaagtaaaatcttctactataaaatatactggtaagtataatttgatgatcttttgtaaattatagagttgtraaattatcaccacagttcaaagaacatttctctcacacccaaaaattcctgggacctgttcatagtcagtttgggtctggagtgcacacaggtggtggga

SEQ ID NO: 101679 - DNA, 201 bp, Homo sapiens
tgattttctgccaggagtcaagccctaaacagtgaaccttcgagaattgtgatctagcagaaatctctctcgtgtgtgtgtgtgggtttgtgtgtgtgtgkgtgtgtgtgtgtgtgtgtgtgtgtgtgtgattttttttaattgatcctgattcatgtaatcttgggtatgaattatataatgaattatactctgcccaga

SEQ ID NO: 101680 - DNA, 201 bp, Homo sapiens
tcatgaaggctttctcagcatcataactagatgagcccagagtccattcaagcctttacttaatatactaaatcactcctgataccagtcttctatgaaggagagagagagagagagagacacttttaaaccatgagatatcaaaagaactcactgtcacaagaacagcaaaggggaagtcctctgccgtgattcattcac

SEQ ID NO: 101681 - DNA, 201 bp, Homo sapiens
catgaaggctttctcagcatcataactagatgagcccagagtccattcaagcctttacttaatatactaaatcactcctgataccagtcttctatgaaggagagagagagagagagagacacttttaaaccatgagatatcaaaagaactcactgtcacaagaacagcaaaggggaagtcctctgccgtgattcattcacc

SEQ ID NO: 101682 - DNA, 201 bp, Homo sapiens
aaagttggaatgctttctttcttttcttttttttttttttttttttttttttctggaagaagcttactttaacaaaaaaaatacaggaaggccagttgccyatgctggagtgcagtgttgtgatcatagctcactatagcctcaaactcctgtgctcaagcactcttcccgcctcagtctcctgaacagctgggattgcag

SEQ ID NO: 101683 - DNA, 201 bp, Homo sapiens
tttttaatagagacagggtttcgccatgttgaccaggctggttgaactcctgacctgaggtgatcaacctgccttggcctccaagttttgggattacatgsgtgagctgccgtgcctggcccagcttttcaatttatatgaaaaacccactggtattttgatagggattttattgagtctatagaagagttaagggaaaat

SEQ ID NO: 101684 - DNA, 201 bp, Homo sapiens
gaggaggggcttagaagaagaggggagaggcagggagacaaagtgggtgaatttacgcacagtcacggccttctacaatacgtttcaaactcatgaccacraattactcagtgtcagtacaactctggaaatgccaggtttaagtgctgtatttggggaaactggcagtttggtatctggcattatttcatgcagagcaga

SEQ ID NO: 101685 - DNA, 201 bp, Homo sapiens
ggaagaataacatcttcctctcctacttcagaaggtaaaaatattctgagctcttaaaaagaaaaataaagttggaatgctttctttcttttctttttttyttttttttttttttttttctggaagaagcttactttaacaaaaaaaatacaggaaggccagttgcctatgctggagtgcagtgttgtgatcatagctcac

SEQ ID NO: 101686 - DNA, 201 bp, Homo sapiens
accaaatcctattaatctaaaacacacattgcaaacatacaaatatctcttctcttcacatgtcagtgcccattcatgtcatggtttggaaatggggacaktagattccccttgagctgcaagtcagcatatgtttctttatagttaactttagcaaaatttatacaaaatagtaattaacaataatcttctttatttgtt

SEQ ID NO: 101687 - DNA, 201 bp, Homo sapiens
acttcagcttctccaaatttttctttttcaatctttggcagctccctctcagattcctgtgggggctgcttttgtgtgtttttgtgttgatattctgtagratttgtcctcagaaacagcaaacatttattgaaccttatgctgaagataatgggaagccattaaagcaagggtttttaatcagggttccaaagattgata

SEQ ID NO: 101688 - DNA, 201 bp, Homo sapiens
gtttggaaatggggacagtagattccccttgagctgcaagtcagcatatgtttctttatagttaactttagcaaaatttatacaaaatagtaattaacaayaatcttctttatttgttaactcaaaagaaaataccttcaaaactgcattttaagtttctgtactaaaatacagaaaaactacacaaatattgaaaagttg

SEQ ID NO: 101689 - DNA, 201 bp, Homo sapiens
ttttagtggagaataatggaaataatcatttttctttcggcttctctgtttaagaggcacagttgaatgctgttgatgctttgattgactccatgagcttsgcaaagaaagatgagaagacagacacccttgaagacttgtttccaaccaccaaaatcccaaatcctcgatttcagagattatttcaggtaagagaagaag

SEQ ID NO: 101690 - DNA, 201 bp, Homo sapiens
ttttttattcctgttatcactaccacaatttacagggcaatatacttgatgtaatgaaaaagaaacagacaaagctacaacagataaaagagctcaggaaygtacgtctaatcgacactatattgcattcattaatagctgcacttttgcaaactgtggctatgatagtcctgcacaagaagggttttctgtttaagctgc

SEQ ID NO: 101691 - DNA, 201 bp, Homo sapiens
cggatctcggctcactgcaacctctgcctcccaggctcaagcgattctcctgcctcagcctcccgagtagctggcattacaggcgcatgccaccacgcccrgctaatttttgtatttttagtaaagatggggtttcaccatgttggccaggctggtctcgaactcctgaccacaggttattcgcccaccttggcctcccag

SEQ ID NO: 101692 - DNA, 201 bp, Homo sapiens
gcaacttttgtgacaactccttgttctttctcctgctaagaattgtagcccctctctgctgtttttagaaccttctgctaccatatccgtcacgtctaccrccagatccgtaaccaccaccaccacaggaactccccgagcttcttccaccaaaactgcaccctttaatgggttcataatttgattgtttttgtctgctaa

SEQ ID NO: 101693 - DNA, 201 bp, Homo sapiens
aagaagtggcagctatctggagcatgttcctctcctggtagaaacttctgtagcttttagaaagtatcaggactatttaagggttttccatagtgaaaatktatatgtcttacacacattcttatgtagaacacatccctttttcacacctttcctaaatactgatacaggttcatgaatacaataagcaagggacattct

SEQ ID NO: 101694 - DNA, 201 bp, Homo sapiens
cttgctctggcgtgtgcgtgtgttgttaatgtatgcatggaactaatttcagcttgtagaaaatgaggccccatatgcttaacagatgctcttctcttttyctccagggttccgctatggaagtgatatagttcctttctctaaagtggatgaggaacaaatgaaatataaatcggaggggaagtgcttctctgttttggg

SEQ ID NO: 101695 - DNA, 201 bp, Homo sapiens
ggtattgaggggtaaacctttgtctttagttgaattattatagtggactttattttcttgataccctcgaagaagttaaattttatgggtaactaaattartgtactcattttgtattcaatatgtaaattgcttcaaccacagcatccccatgggagaaattataatcttactcagtttcctgtaggctgtggttatatt

SEQ ID NO: 101696 - DNA, 201 bp, Homo sapiens
gagaaattataatcttactcagtttcctgtaggctgtggttatatttctggaactcacctgtaatcccagcttcagtacccctagagcatgctgttgaacyccatagtgcgcaaacttagcctcggccctggtaaaggctatgaaatccacagtgattcccaccctggccacacattagttacttggtgagcttgtttttc

SEQ ID NO: 101697 - DNA, 201 bp, Homo sapiens
caattggtgttggccattttaccaacacccctgtctagagaggtaaagttttctgtgcctcacagcaagctagtggccagcagaattgactggaatccagrcccccagatgcccgctgtagtcgccttatcaccacaccatggcaccagctcttcacgccttcaccttataatgccgccaaccacatctacctagagaaag

SEQ ID NO: 101698 - DNA, 201 bp, Homo sapiens
agaatattaaccatactaaattttactgtgttgtgcatatgactggggctacttttacttgcctggtacgggaaaattgtgtatgtgtctgtttacccttytttccctagaacctcattttggagggttgaagaaattcttcatgtgattcaacttcatattcccccacaacttagctttttatgtgtaatccttcttaat

SEQ ID NO: 101699 - DNA, 201 bp, Homo sapiens
agatactataaaattgctacagtaccaatcactattatcttacatttttcctttcccctactgctcatttggaatggaatcaagcatggtgataaggttcytaattcttctctatcaattttagtaagcattggcaagttttagaattctaggaccttggaaaattgtggagaccctcttcctctgccctccctagtcttc

SEQ ID NO: 101700 - DNA, 201 bp, Homo sapiens
ccggccaggaatctagttctagcactgccctagtccttcattctcctttagtattgagaaagcagtgaagaaagaggatttatccccatggcattgggatyttttttttttttttttttttttttaccagattccaagaggctgagctatatctaaataatcatttgatgtaagctctgtgaaaaaaaaatcattatttta

SEQ ID NO: 101701 - DNA, 201 bp, Homo sapiens
ccaatgccgcccgtagttttattgtagtatgactcattagatactgctgctgctttaccatcagtgagacaaaatgacctccatctggcttttttggtttycattgcgactttaataaaacagtgcttgggagtaataagaatttgaatttttgaattgtagcagatttacttctctggttctttggatcaattcctaagt

SEQ ID NO: 101702 - DNA, 201 bp, Homo sapiens
agtttcttcattggcatttctgacaactttgtatccatttctcttctgctttctaatcatcttctaatttacttctcaggtctgtcttttcctttccatcytatcactatccgaattcaggctttcattattttatcattggacagttccagcatccttcattaataaccttcaaagttctccttcattcctgcccatatg

SEQ ID NO: 101703 - DNA, 201 bp, Homo sapiens
gcccccaaagacaaaccaagtggagacacagcagctgtatttgaagaaggtggtgatgtggacgatttagtaagtacttttaatatgcacctggtgttctrtgattgaagtcacctgagctgtaaatacagccacaaaggctgattatcttacacttgttgcttatttgtgttttaatttccaatacaccagaagcttcct

SEQ ID NO: 101704 - DNA, 201 bp, Homo sapiens
gattaattcgggctgctcaagggaggaacaaaggagactggaagcccgggaaaagatggcgccggtggttggggggcggggcggtctaaaaactaaacaaagaagggcgcagggcacttgatttttcacgtggccctcttggttctcttccaagtgtactctgctttctccagtaaactctcactttgcttaaaataaatt

SEQ ID NO: 101705 - DNA, 201 bp, Homo sapiens
aaaactgcaccctttaatgggttcataatttgattgtttttgtctgctaaaatttccagaatcattatagttcccaccaccaccatagttaccactgccaraatttcctccttcattgtaaccatcatatccttcaccactatccccatacccgccattgtggttttcatatcctggttcaccatctccatagcccccact

SEQ ID NO: 101706 - DNA, 201 bp, Homo sapiens
ttgtagcccctctctgctgtttttagaaccttctgctaccatatccgtcacgtctaccgccagatccgtaaccaccaccaccacaggaactccccgagctkcttccaccaaaactgcaccctttaatgggttcataatttgattgtttttgtctgctaaaatttccagaatcattatagttcccaccaccaccatagttac

SEQ ID NO: 101707 - DNA, 201 bp, Homo sapiens; identical to SEQ ID NO: 16060

SEQ ID NO: 101708 - DNA, 201 bp, Homo sapiens
acttaatccccattctaacggtgttgagaggtgggacctttaagaagtaattaggtcatggaggcatcattctcatgaaaggattcaggccattatcactygagtgggttagttataaaaaggatgagttcggcctgatttcttctctgtctctggcttgcttctgccttctgatgtggggtggtctcctccagctgccgg

SEQ ID NO: 101709 - DNA, 201 bp, Homo sapiens; identical to SEQ ID NO: 16062

SEQ ID NO: 101710 - DNA, 201 bp, Homo sapiens; identical to SEQ ID NO: 16065

SEQ ID NO: 101711 - DNA, 201 bp, Homo sapiens
attaattgacttatagttgttaaatcaaccttgcattccaagtataaaatccagtcgttctataaaatcctttttatatgtactgaattcatttagctaakgctacagtttgaataatgtcacccaaagtttatgtgttggaaacttaatccccattctaacggtgttgagaggtgggacctttaagaagtaattaggtca

SEQ ID NO: 101712 - DNA, 201 bp, Homo sapiens
taaagccacaagacctggaaagtagggggacttctcagagatactaagtagtccacttgggttggtgtattgagcatatacaggttagtacttgagggtarcatctaatggacagcctgcattttctcttttaatcatcagcgaccatcttataaagcaggcactctttgttatttccattttatagataagggaactgag

SEQ ID NO: 101713 - DNA, 201 bp, Homo sapiens
taaaaacaatattgcttatcccaaggccagtgcttttttagctgcttaagaaaaagaaaaaccttttggcagttagaacatagtttattctttaagtttarggggtgcgacttaacccttgcctggcatggccttaggtcctgtttactacagtttgttctctcagtcttatgatacctattttaaaattaatgctggaag

SEQ ID NO: 101714 - DNA, 201 bp, Homo sapiens
gctctagtggaggagctgtttgttgcagatgaactggaagtaaaattctaacagcctgtattgcttcggtatagaaatgaagagttgctatgctacccggkttctctttctcagttttcttactgctgccagataggaactcagaaatatagaccattctgcttccagacaataagttccatatttgaaaccctttgatgg

SEQ ID NO: 101715 - DNA, 201 bp, Homo sapiens
agccatactgtttcttttgattcctaatgccttcttttcctacactttttaaaacaacattatagggtcacatatctgaaaccttgtgcctgttgataggrcttttgatgaaagcctgggaaaggctattcctagtctattcaaaggctgggaaacatggcctccagccaaagcccagagacaggcactatgaaggagggt

SEQ ID NO: 101716 - DNA, 201 bp, Homo sapiens
tgtacacaaaatactggctgtttaagcacattgaagtagtgattgaacaactagaatttttttaagtagctacagtgtatatctccttaatattttttctmaacgaccatttttaatatttctgatgagctataattgacaaaaattatgttctgattttctaaatacagacagccttgaaaaatgataggtaaatttagg

SEQ ID NO: 101717 - DNA, 201 bp, Homo sapiens
cataagcacatcattgccatcatctgggatttgttacctgtcgttgtgggtttcagagtctccagaggctctttacattgagtttatccacttgtttggayatcttccacccagctaatcaacagagttgctaaggaggaatgccatgattttcagctccttgcgctttcccaacttaggaagaatgctaaaataaaataa

SEQ ID NO: 101718 - DNA, 201 bp, Homo sapiens
aaagccatggacttgggctttacccggactggggatccggagagggtggttcggaagcaggaatcgtgggatcgcggtcaagacaaagaatggggcaagaraagatcatggtggtgggctcagtcaggagggccgggaccgagggatgcgctatgagaaaagctggagatttggggctccaagacctgaatttgagcctcg

SEQ ID NO: 101719 - DNA, 201 bp, Homo sapiens
tgtgcccagcaacaaagccaccagactgaggacagacagcacgcacgctgcctagagaaaaccattttctttcctcacgttttttaatgctcctaattaaygtgttttctagctccttctctcactacgtcccagcttttgcaccttatgctttaacccaatacaactattttcttttttttttgttttttttttgttgtt

SEQ ID NO: 101720 - DNA, 201 bp, Homo sapiens
tgatgtcaatcttttttagagacattctcattactaaaatgagtggatacttgaatgtttaactcctaaaataatgagcggtgaataaatgagcaagtacrtgcatgccttccaatgtagagtcattttcattaaaccctctctcaccagagaagcagtggtatgaaattggcctgattcctttctaagtgtgttgttctt

SEQ ID NO: 101721 - DNA, 201 bp, Homo sapiens
gttaggtgggcaccaggctttacagaatcctctctagaaacaactgtctttggttccactccacacccatcaaccttgtgtggtcaagcacacattgctgygtccacctcttcaacacaagagaaagccataaaaccaaagcccctggaatgtttgcttggggttctgtcattaccacacaatctgtgagtgtgccccctt

SEQ ID NO: 101722 - DNA, 201 bp, Homo sapiens
tcttatgtagaacacatccctttttcacacctttcctaaatactgatacaggttcatgaatacaataagcaagggacattcttacagtcttttcttacgasttattttctcaaacactctttggaactttgtttccaggcagctgttgtgctgtgtatggacgtgggctttaccatgagtaactccattcctggtatagaa

SEQ ID NO: 101723 - DNA, 201 bp, Homo sapiens
atttcatcctgcctaaagtgaattcctttacctgtgccctggatccttttttttcttgtttttttttttttaattttagtttttgagacagggtgtctctytgtcacccaggctggagtgcagtggcagggtcacagctcactgcagcctagacctcctgggctcaagtgatctcccaacttgaggatcctcagtagcctc

SEQ ID NO: 101724 - DNA, 201 bp, Homo sapiens
gattttatctttttaagatcccagcttttagttagttttattgattttctccattattctcatttaattaatttctgctctgatctttattattccattccttcttcttactttggctgtaattcacttttcattttcttgtttcttaaggtggaagcttagatgattgatttgaaacctcttttctaatataggcattta

SEQ ID NO: 101725 - DNA, 201 bp, Homo sapiens
gaaaaaggatcaagtgactgctcaggaaattttccaagacaagtaagtacttggtatagttgcatttaacattggggtacataagagttgtggtcattttrgagtggctctggaagtgtcacataggggtctatggaatttaaaaggtgagaggaagaagccttttgctatttggcccttatattgaaatattgatttctt

SEQ ID NO: 101726 - DNA, 201 bp, Homo sapiens
attttatctttttaagatcccagcttttagttagttttattgattttctccattattctcatttaattaatttctgctctgatctttattattccattccttcttcttactttggctgtaattcacttttcattttcttgtttcttaaggtggaagcttagatgattgatttgaaacctcttttctaatataggcatttaa

SEQ ID NO: 101727 - DNA, 201 bp, Homo sapiens
caggatctgaaacattaaatatcttctgttatctattttctgtgagttaacatttgtttacattttctccattggaaaaatggaacattaaagttatttcrtgtatttcccagtagatgtctatgtaggaatgcaatgccaggatgatctggcctcctgctaccttgtagtagtaggtgaaaatcactgaatgttcacatg

SEQ ID NO: 101728 - DNA, 201 bp, Homo sapiens
ttttatctttttaagatcccagcttttagttagttttattgattttctccattattctcatttaattaatttctgctctgatctttattattccattccttcttcttactttggctgtaattcacttttcattttcttgtttcttaaggtggaagcttagatgattgatttgaaacctcttttctaatataggcatttaaa

SEQ ID NO: 101729 - DNA, 201 bp, Homo sapiens
gcctattattttaagaaattcagaggtaaagacaggaaagatactgatagcaatttgtggagagggaaggacaaacaaaagatttgtttaggagggctgayatgagtttatttttagggtaaagataaaaatttagagaaggaaggttgaagcagtaagacggatttagttaatgaggttaagtcccagaagagctacagt

SEQ ID NO: 101730 - DNA, 201 bp, Homo sapiens
tagaatagaaattaaactctgcttcgtatcagaggggtgaactggaaacagcaggtggtgctttttgttcaagatgaagaattattttgtcaacaaggatwactgtccccactggattgttttcttgtaagatgatcagatccccatttctgtaagtttacaataaaagtctttatcaccactagtcagatgtacatgtgg

SEQ ID NO: 101731 - DNA, 201 bp, Homo sapiens
aggacttccagtaaaacaaaacaaaagaatgcctggagaagacttgtgtaggtaggcaggggtgtaggagggatggcagacataatagcactcttcatgcrtttggagaattatcttgtagaatagaaattaaactctgcttcgtatcagaggggtgaactggaaacagcaggtggtgctttttgttcaagatgaagaatt

SEQ ID NO: 101732 - DNA, 201 bp, Homo sapiens
ttgagaattagagtttgatttcgctggaaatcatcaagaacacttactaccctcctatttccacacctcaacttctgctgaaatgaagggtgagacttatrgtcaatgaaaaacatctgttcagaacctaagaattgtcattgtctgtaagtctcatgtttcatcccgcccaatactatatggccccagggacctgccata

SEQ ID NO: 101733 - DNA, 201 bp, Homo sapiens
attacttgtttaaaatacatattatgaaaatgattatgtttatgagataaacttttcacttatactagagatgcaaaatttgtttcaatctctttctgtgygaattctatataaaaagaattgcatacctatctatccgccttctaatgggcaactcttcatcacacaggtaactgttttcctgacagttaatttttcagc

SEQ ID NO: 101734 - DNA, 201 bp, Homo sapiens
ataatgccgagttgccgctactgagcatgcgcatgactagtaaccacactacgcatgcggccccctcttaagcagtagcagggctagtgcgcatgcgttgrttaattcgggctgctcaagggaggaacaaaggagactggaagcccgggaaaagatggcgccggtggttggggggcggggcggtctaaaaactaaacaaag

SEQ ID NO: 101735 - DNA, 201 bp, Homo sapiens
aaggggtaacttagataacacacagacagttcagcaaaggcaataggatggaaggcagactatatgggtgcagatgcaggtaggtgactactttgaagaakaattcgtggaggggccgggtacagtggttcacgcctgtaatcccagcactttgggaggccaaggcgggtggatcacttgaagccaggaattcaagaccag

SEQ ID NO: 101736 - DNA, 201 bp, Homo sapiens
gtaacttagataacacacagacagttcagcaaaggcaataggatggaaggcagactatatgggtgcagatgcaggtaggtgactactttgaagaagaattygtggaggggccgggtacagtggttcacgcctgtaatcccagcactttgggaggccaaggcgggtggatcacttgaagccaggaattcaagaccagcctag

SEQ ID NO: 101737 - DNA, 201 bp, Homo sapiens
actgagaattgaggatagtgagagagagaacctagtggatatctgggaggagagctttgcagacagagggagcagcatgttcttgagaagctcaagatgastatgcttggctagaagcatcagggaggtccgtgtgactggagcaaagaaagtaggagctgagaagtcagagagctggctggggtacatatcacataaggc

SEQ ID NO: 101738 - DNA, 201 bp, Homo sapiens
gcctgcagcttgctcttagaattcacccttgcagtaagtgctaatgagtatgatttgtgagacagagagcagttcaaggatttactcatggcaatttggtyctttctttccacctcctgttaaattctgcagttcttccttccatggtaggtcattgtcatgtcatgtagggtattgtacttggttctccttgaattgggc

SEQ ID NO: 101739 - DNA, 201 bp, Homo sapiens
gaggtatgggggagaatctgttcaatgctctcttgtagcctttggtgacagctggcaattcttgcatcccttgacttgtagatccattactgtaatctctscttctctcttaacaggggagttcttgtatgtctgtatccaagtttgcctcttcttataaggatgtcagtcctattggattagggcctttcctagtgacct

SEQ ID NO: 101740 - DNA, 201 bp, Homo sapiens
atcaggaacttagtgccagtcccatactacattcagaatttcctcccctcccatgactgagattttgtctagggcaagattaccttgccttaagatggatrcttgtctaggcggcagatacctgcccagccagtatgctacgcatgcttgaatccagcagcaggcacccagacaccgttagtccatgtacaactgggaatt

SEQ ID NO: 101741 - DNA, 201 bp, Homo sapiens; identical to SEQ ID NO: 16075

SEQ ID NO: 101742 - DNA, 201 bp, Homo sapiens
atcacaggactgcttccttctgagaggtatgggggagaatctgttcaatgctctcttgtagcctttggtgacagctggcaattcttgcatcccttgacttrtagatccattactgtaatctctccttctctcttaacaggggagttcttgtatgtctgtatccaagtttgcctcttcttataaggatgtcagtcctattgg

SEQ ID NO: 101743 - DNA, 201 bp, Homo sapiens
ttgagtggcttcagtccgtctgaatttattcagacttgttcttatgtggtctcacatatagtctgttctgccagttgttctctatggccttaaaaagtacrtgtattcacctgttactaggacaagtgtgctggaaatgtcagggcaatttggttgatagtttgttcaaatctgtcttttgactttctatctagttgtttt

SEQ ID NO: 101744 - DNA, 201 bp, Homo sapiens
ttgcccaccgtcacctccacatccattatatccaccattacaccctccataaccacctctgctgccaccacctctacttctaccaccagagcctcctcttycaccaaagtttccaccacagccaaaattacttgcaccacttccagagtttcctccacaacccataaagttgtcagatccacctccatcacctctgtgatc

SEQ ID NO: 101745 - DNA, 201 bp, Homo sapiens
ataatcattttaagtattttcatttttcagcgactcttcctaaaaggctttcatctattcttacccagcctttaaaatccttttaagttcctgtcaatctrtatcagaatatccctaattacaggatatagctcttgtaaaatgtagcctggctatccattaagaaagagaaatgtgtggtagcataaaaatgaaagcatg

SEQ ID NO: 101746 - DNA, 201 bp, Homo sapiens; identical to SEQ ID NO: 16076

SEQ ID NO: 101747 - DNA, 201 bp, Homo sapiens
ttggttttgtatggtatagcactatcccatttgcatagctgtttacttacatacattatgtgattttctgccaggagtcaagccctaaacagtgaaccttygagaattgtgatctagcagaaatctctctcgtgtgtgtgtgtgggtttgtgtgtgtgtgtgtgtgtgtgtgtgtgtgtgtgtgtgtgtgattttttttaa

SEQ ID NO: 101748 - DNA, 201 bp, Homo sapiens; identical to SEQ ID NO: 16061

SEQ ID NO: 101749 - DNA, 201 bp, Homo sapiens
tttaatgtattggagtgatcaagacactttcacagtattatacctgttgtctgttcagctgtatattgttacagggtgctcggaaagtggcggagatgctrctgtgacaagtcaatgaactcttgtctatcaagactattgtgtttttgaaggaaaattgagactttcctagctttcaattgtatgtcgtcaattacctca

SEQ ID NO: 101750 - DNA, 201 bp, Homo sapiens
tttttcttgtcctcattcttgccttgagttccagttcctctttggtgtacagacttcttggtacccagtcacctctgtcttcagcaccctcataagtcgtsactaatacacagttttgtacatgtaacattaaaggcataaatgactcatctctctgtgaattgctgctaattattgtctgcaaaagacttcttcagtgct

SEQ ID NO: 101751 - DNA, 201 bp, Homo sapiens
tgagagttaaatgcctagaagcactactgcctgcagtaggtctaatgcatcttactacttgcagtctaggaatcctggcaagatccccagatctactgtgytgttgtccagaggcaagcatgagcagctgagcctcagagagagcttacagtctaccaggcttaaatcctgtcagcaggaatgccaaaggccaaaccatga

SEQ ID NO: 101752 - DNA, 201 bp, Homo sapiens
tgcccctaaatttaatccttctcaaaatggctgcatggtcacttttccttatcaggtagtacctagaatctcatttaggctgtggctaacataaaaatagytttcagggatgcacagagggcctggaactaacattcattcacttgattgcattcaggtttctgttcatttaccctttaaatggtggcaactggcagttgt

SEQ ID NO: 101753 - DNA, 201 bp, Homo sapiens
agagtttgtggcccatttatagtagacctagaaagaccttgatgctgcccctaaatttaatccttctcaaaatggctgcatggtcacttttccttatcagrtagtacctagaatctcatttaggctgtggctaacataaaaatagctttcagggatgcacagagggcctggaactaacattcattcacttgattgcattca

SEQ ID NO: 101754 - DNA, 201 bp, Homo sapiens
ccgaagcactgggattatagtcatgagtcactgcacccagccaaatagtgccttgttctaagcagcattagtgtgaatcaacaaatcttaaaaattggccrataactttttaacacaatgtactaggaaggatagtcagggaataaagggcatgcctttattctcacctcaaacagaaactcagaaaaattgaatgtgtga

SEQ ID NO: 101755 - DNA, 201 bp, Homo sapiens
ctaggactaagggtacatgccaccatacccggctatttttcatagaggtggggtctcagtatgttactcctgggctcaagcaatcctcccgcttcagcctyccgaagcactgggattatagtcatgagtcactgcacccagccaaatagtgccttgttctaagcagcattagtgtgaatcaacaaatcttaaaaattggcc

SEQ ID NO: 101756 - DNA, 201 bp, Homo sapiens
tgagcggtgaataaatgagcaagtacatgcatgccttccaatgtagagtcattttcattaaaccctctctcaccagagaagcagtggtatgaaattggcckgattcctttctaagtgtgttgttcttgttcacagttggacatgatataggtcgtggatgtatggggaatctaagagagctgccatcgctgtgatgctggg

SEQ ID NO: 101757 - DNA, 201 bp, Homo sapiens
aataatgagcggtgaataaatgagcaagtacatgcatgccttccaatgtagagtcattttcattaaaccctctctcaccagagaagcagtggtatgaaatyggcctgattcctttctaagtgtgttgttcttgttcacagttggacatgatataggtcgtggatgtatggggaatctaagagagctgccatcgctgtgatg

SEQ ID NO: 101758 - DNA, 201 bp, Homo sapiens
ttaagtcatcacatagttcagtgtccacaatttccagcacggtggacttcattggaaagagttgcgtgttcacatgaagagactgtttggtgatatccctrtccttaactagctgagtcctggatgcactaatcgtgagcatggatgtgattcaacatgaaacaatgtaagtgttccaaggaagagagctggaagagaatc

SEQ ID NO: 101759 - DNA, 201 bp, Homo sapiens
aaagaagccatatatgtctccatctgtgttttaaaatccttactttttccaacagtgtctgctgcacagagctttacatccccgggagcctctacccccarttcagcagcatatttggaatatgctgaatcctcccgctgaggtgacaacgaaaagtcagattcctctctctaaaataaagaccctttttcctctgattga

SEQ ID NO: 101760 - DNA, 201 bp, Homo sapiens
aaagctgcctctgggggcgctcgaccaataatgccgagttgccgctactgagcatgcgcatgactagtaaccacactacgcatgcggccccctcttaagcmgtagcagggctagtgcgcatgcgttgattaattcgggctgctcaagggaggaacaaaggagactggaagcccgggaaaagatggcgccggtggttggggg

SEQ ID NO: 101761 - DNA, 201 bp, Homo sapiens
taaggagggtagaagctacaaaccaaagataagatatgcctgcagatctgcttcagatttcctgagggcagtagatgaaattatttctaagggcctttttyaccactgctctttaagtatatgagtaataaacaaaaagaacaaagtatgtggttcagaaggaataaaacaaaaaagaaagaaaaggatcaatgaaataga

SEQ ID NO: 101762 - DNA, 201 bp, Homo sapiens
ttttgtgattcattgttaatcaagctgcatgtttgtgtgacaagagaaacattttatagaattgaatggttcagtccaacctctctgttttttaaaagttytaaaaggggaagggctgtactcggtgattatttctctggaagaaataaaacatttggcttatttcagtttacttcctattagacttaagctgattaccag

SEQ ID NO: 101763 - DNA, 201 bp, Homo sapiens; identical to SEQ ID NO: 16070

SEQ ID NO: 101764 - DNA, 201 bp, Homo sapiens
atatgtcttacacacattcttatgtagaacacatccctttttcacacctttcctaaatactgatacaggttcatgaatacaataagcaagggacattcttmcagtcttttcttacgacttattttctcaaacactctttggaactttgtttccaggcagctgttgtgctgtgtatggacgtgggctttaccatgagtaact

SEQ ID NO: 101765 - DNA, 201 bp, Homo sapiens
cattaaggtaatgctatcctagcatctcttttcttcctaaacagttggcgactatcacagggaaagaggcatacagcatcctggaaatgagtctgggccgyggaaattatcattctcaatatgaatagcagtgtatgccagtggagctaaaaatgacttaaattcatgttactatcactgtcatttctgagatgggataaa

SEQ ID NO: 101766 - DNA, 201 bp, Homo sapiens
aacataacatttccataatacccagacattttggccaagatgttcaaagtataaagtgtatcagggttgattatgaatttaataagaacttaattggactrctagaatgtaatcacatttattaactctagatccatttctaagcttctctcctcagtgaccaagtgtatttgaatttgtagaaaaataattcaggagaat

SEQ ID NO: 101767 - DNA, 201 bp, Homo sapiens
gtcgtactagtgtttcaggcggctcaaacaccacacgctcccgactacggcggaatggagagaatgtgcgcatgctcggcgggaatctgcgcatgctcggmgggaatctgcgcatgctcggagagaatctgcgcatgctcggccggaatctgcgcgagctcggcgggaatctgcgcaagctcggcgggaatctgcgcatgc

SEQ ID NO: 101768 - DNA, 201 bp, Homo sapiens
tacaaactgactcaaattgtcagggtatacctcttagcatatatatagattctagcagtcacttcttgtgacaaaaatgcttcataacaaattatgccccraatcagtgacttacagtgaaagcatctgttctcatgtttgtaggtctgcaggtcagctgcagtttgtctgatgtatattgggcataaatgggtttaactc

SEQ ID NO: 101769 - DNA, 201 bp, Homo sapiens
ttcgttttcaagtggattaagttttgtgaatggaatcttggaccaatcatttctaaaatacagtactccctgtctgcttcatctcaacaaatgactttctrgcctagagccaggtggtggttagaataacctggaaagtcatagagtagaccctgtaattttgactcaccttcagtgtacgctgtgttatatctgtcagtt

SEQ ID NO: 101770 - DNA, 201 bp, Homo sapiens
acctttgctggaggagatttagctgacaacctcacagatcttccccgccccttctgccgagctgatctttctcttggaaatcttacccgcagggaagggckagtgtccgtgcctgcctgcctgcctgctgcagcccgcgcaaagctgagcggccagggcgctgctgttcctttaaagtattattaaaaataatatttcagc

SEQ ID NO: 101771 - DNA, 201 bp, Homo sapiens
aagagaccttccatatcattcttcctgtggctacaaactaggattcacagctagctcaaataaaaacagaaataaaaggagagagatctcatagtctgcargaatggattctgacaataaagaccttgcatttactctgttccttgtgcctggggtttttaatttaacacatcaatgaaaaggcaccatttaaaaaagggg

SEQ ID NO: 101772 - DNA, 201 bp, Homo sapiens
ttagtatctgaatgtttttcagtaagaggattttgaatggaatttcttggcaatgtgtgtcatggttatacatgttacttattttggatcaaaagcaattsttttcctctcttgtaggttcagagaagattcttcatgggaaatcaagttctaaaggtctttgcagcaagagatgatgaggtgagttggcagcaggtcttt

SEQ ID NO: 101773 - DNA, 201 bp, Homo sapiens
ccggagtacagtagtgtgattttagctcactgcagccttgaaatcctgagctcaagtggtcctcctgcctcagcctcctgtgtagctaggactaagggtayatgccaccatacccggctatttttcatagaggtggggtctcagtatgttactcctgggctcaagcaatcctcccgcttcagcctcccgaagcactgggat

SEQ ID NO: 101774 - DNA, 201 bp, Homo sapiens
gtttctctctttataattaacattagctcacttctcattgtagaaaatcaaatgcatcatccagcacaagttaacatttaaaaattgttgctttcattttrtatttttctttattaagtgagagtctgagaaaactgtgcgtcttcaagaaaattgagaggcattccattcactggccctgccgactgaccattggctcca

SEQ ID NO: 101775 - DNA, 201 bp, Homo sapiens
cttaatcttcaagtacacacaatttaagttagtataactttcctattttctaacatgcaactttagaacaggattcacaagtttaggatttccccaagaaygtatcctttgatacatgagatttttattgaatgagaaattttttggaacttgaaaatactaccttaattaattaattaattaattaattaatttttatat

SEQ ID NO: 101776 - DNA, 201 bp, Homo sapiens
gagagtaaccacacaatcctgtccagtagccatttttcaaggtaacagacacctggccagactgccagcagtgggtgccgcaaatgctgggctcggtgccmactggaaggaaaatggaagaagggcttttgaatatcttttcgcctttctggggagagtttcgagagatttattccccgtgatgacagaggaacagagaag

SEQ ID NO: 101777 - DNA, 201 bp, Homo sapiens
gactgtgagattatgcttttgtgtctgctttaatatcacatgaaccctttattttgttttccagagtgaaaacttgatcctttgtatgaaaaatgcttttwtttatttatttatttatttatttatttatttatttagagacagagtctccctctgttgcccaagctggagtgtagtggcacggtctcagctcactgcaac

SEQ ID NO: 101778 - DNA, 201 bp, Homo sapiens
acatatagtgaccccaaatgcaagagcttcataactcactgcaattattctaccaccttccatgatttgtactacacagctgcacaagatttattcctcaratgaggattttgccgctgctccattggaacaaagtctatgtccatgagagtaaccacacaatcctgtccagtagccatttttcaaggtaacagacacctg

SEQ ID NO: 101779 - DNA, 201 bp, Homo sapiens
tgatcttttctaatttaaccttggattggtagaagatggggtgtccctggctcattatttttcactgcccagcactgttcgacaattatcctgagtagaaktaggggagggactagaggatctgttttctgtgaatacaataggaaaggcagttttgaattatccaaatggcccctaaattctgggggaaaataaaataac

SEQ ID NO: 101780 - DNA, 201 bp, Homo sapiens
ttggcagaatatatagtttgatatatagaatgtatgaatatatgttagtgaactttggaagaagggcactcaggcaagtactttaagtcatcacatagttsagtgtccacaatttccagcacggtggacttcattggaaagagttgcgtgttcacatgaagagactgtttggtgatatccctatccttaactagctgagtc

SEQ ID NO: 101781 - DNA, 201 bp, Homo sapiens
agcatctcttttcttcctaaacagttggcgactatcacagggaaagaggcatacagcatcctggaaatgagtctgggccgtggaaattatcattctcaatrtgaatagcagtgtatgccagtggagctaaaaatgacttaaattcatgttactatcactgtcatttctgagatgggataaagatgagtaggtagggtgttt

SEQ ID NO: 101782 - DNA, 201 bp, Homo sapiens
caaggcaggtggattacttgaggtcaggagttccagaccagcctggccaacatggtgaaaccctgtctccacacaaaaaaaatacaaaaattggttggctrtggtggcacaagcctgtaatccagccactcgggaggctgaggcacgaaaattgcttgaacctaggaggcggaggtttgcagtgggctgagatcacaccat

SEQ ID NO: 101783 - DNA, 201 bp, Homo sapiens
aacctttgagaagatctgatatttgtcttggacttgttgaatacctagtgttagaagtgatttcatttcaagaggataagagcaccatttgacactgtagwcccaaaatatactaaatattaccctcatcatataaaagcattgcttccatttatgttgctgtacacccttgaaatgaaaatgtcatctcttggacgggga

SEQ ID NO: 101784 - DNA, 201 bp, Homo sapiens
ctgcaagactgtatgtgtttctgaatcctctgcttcgagggaaaaatcatattagtagaggataagtttactcagtactggaaaaattgtgtagattttasgaacttgttggagcagaaaggcgattaattgtgagaaatgaaagtcaattttagtggcagcaggtatatcaagtacatcaagtcttagttcaatgtttat

SEQ ID NO: 101785 - DNA, 201 bp, Homo sapiens; identical to SEQ ID NO: 16068

SEQ ID NO: 101786 - DNA, 201 bp, Homo sapiens
tgaatggagcagctgtgtgggcgaacattgtcccctttctcagatccttaggccatttcagtcctgctggttccacagccctttggttgacctcacccagrttttatctccctgctacttttcatttaccatgttcttggactttccgtttcaacagaccagcatcttcatgtaccaaaaccattcagttcttcacttgca

SEQ ID NO: 101787 - DNA, 201 bp, Homo sapiens
agaatgctaaaataaaataaaataataaaatgtcaaaagatagacagcaggttcaagaaggaaaagccacattacttctttcctccggacaattcctgcgygattatgtctgaatttataaattcccactgagtatgggagataatgtaaaatagcttgaatgttcttggtgtgtcaaaaacaggttttgtgaggatctta

SEQ ID NO: 101788 - DNA, 201 bp, Homo sapiens
gcttggtgtatgagcgaagcaggagcccagcctattggggttgtgagtgaggagaacaagtggctggtgatgcgatcgaggaggcaagcagggctgcatcrtaggaccctagggtatggtgagcagttcattctcggaccacttccagtcagacagtggaaagagaagctgggaaaccagttagaaggtgactggtaggcc

SEQ ID NO: 101789 - DNA, 201 bp, Homo sapiens
ataagaacttaattggactactagaatgtaatcacatttattaactctagatccatttctaagcttctctcctcagtgaccaagtgtatttgaatttgtasaaaaataattcaggagaatgatttcttaatatgataactctctcttttagaggaaagaagtttgagaagaggcatattgaaatattcactgacctcagca

SEQ ID NO: 101790 - DNA, 201 bp, Homo sapiens
ggagcaggaggaagaggaaggggaaaagcaagagggagggagggaaggaggaagggagagagagagagaaaggaagaggaaaaatagagaccatatacaasataaaaacatggacataaagcatgcaaatttccttcactgtattcagtctccagtaattctctttaccagtcttattaaaaatattttttaggctgagcg

SEQ ID NO: 101791 - DNA, 201 bp, Homo sapiens
tccccttttacaaaccaaagaggtttcagtcacttgaaactgggagaatattggctaaggtaggtaagagtcgtttgacagatgagaaatttgaaacttgraaaggttgactgatgtgctcattttctcatagctgatgagttacagttacaggattagaacactaactactgttgatctttcttaatagcttgcctttct

SEQ ID NO: 101792 - DNA, 201 bp, Homo sapiens
gttcttccactttttctgtttctagtttatatgattagatatgccattagcatttgatgtttggtagaatctttgtatagcctttgtgtgctcttcatctrtcagttctcctggctctgtagtgggtggaagaggtaaagtgatgtgtctgagagctcacagtaagtcaccggccaggaatctagttctagcactgcccta

SEQ ID NO: 101793 - DNA, 201 bp, Homo sapiens
aacagtgtctgctgcacagagctttacatccccgggagcctctacccccaattcagcagcatatttggaatatgctgaatcctcccgctgaggtgacaacraaaagtcagattcctctctctaaaataaagaccctttttcctctgattgaagccaagaaaaaggatcaagtgactgctcaggaaattttccaagacaagt

SEQ ID NO: 101794 - DNA, 201 bp, Homo sapiens
gccttgatcttggcgcccctcccccttggtgttgcttcttgacaccgctgtcaacaactagagccctggaaaagagcactttattccttcagctgttatckgccaggtgcttattatgtgccaggtagtatttttggtgcttagaattcattcagcagtaaagaagagaagagccctacttgtaaggaggagggttagata

SEQ ID NO: 101795 - DNA, 201 bp, Homo sapiens
tcttttgtatctatccttaatgtttggaaacttcccgcctttaagcttcatatgacaactgaccaacaaacactacgtactatgatgtcaatcttttttaragacattctcattactaaaatgagtggatacttgaatgtttaactcctaaaataatgagcggtgaataaatgagcaagtacatgcatgccttccaatgta

SEQ ID NO: 101796 - DNA, 201 bp, Homo sapiens
tagatgggactccaggtgtataccattgcccccagccagatgcctcttttatattttttcaggcttttctcctgtattgtatgtaaataacacttttcttygttttctatatcaaaatagtaggagagcttatatgaactctataataatataacattgttagagaagaagtgttctaatgtcacatttctcaaaaatttc

SEQ ID NO: 101797 - DNA, 201 bp, Homo sapiens
tggggcattgggaaggataatggatggcagcccagcttttaaacataatttgcttacacagaaatgtgaagcagatctgtcaggaaaatcagttgcagacratacttagcacttaatgaaaatgtaggatttttgttgctgctcatttcttcctaggaatttggcctagtctcagagatgtgccatttgtgcttaagtata

SEQ ID NO: 101798 - DNA, 201 bp, Homo sapiens
taaattccttatcatttcctctgtctcagagaacttactgtggccgaactggaaagagaaggcacatatcttgacttccaggtcaaccttctggtcacccyagtcttctcatttgttgtattggtcatgcatttgatagcagtcctttagtattcttttatacatttctcttatgcttaatattctttatactgtttgcag

SEQ ID NO: 101799 - DNA, 201 bp, Homo sapiens
ctagaattacttgcagttacaaacattaatgatgaggagtgatatgtggaagagatcagccttgcctggggcattgggaaggataatggatggcagcccarcttttaaacataatttgcttacacagaaatgtgaagcagatctgtcaggaaaatcagttgcagacgatacttagcacttaatgaaaatgtaggatttttg

SEQ ID NO: 101800 - DNA, 201 bp, Homo sapiens
tttaagtaactccttgagtttgaatcaaaagctggaagaacctcctgggctctatgagcacctctgaatatgtctgactctacattctagaggcttcaatrtatttataattttggctcatagattctccacatcttttcagcttcaattcttgcttttcccagaaacaattttcaagcaggagagaatattgattggact

SEQ ID NO: 101801 - DNA, 201 bp, Homo sapiens
gtgtgtcaaaaacaggttttgtgaggatcttaagagccagaaaggatggatatatggggacagataaaaggatggaatgtaacttaactttataatgagaygattctctttcagggaccttgtttttgccactgagattgtagtttctgtattaggcttgtgtgtagtgacagggtggcagagctccatgttaccaaattg

SEQ ID NO: 101802 - DNA, 201 bp, Homo sapiens
acaggcactgagtaaagtagcctttgaattgaactgaaaaagtaatgattctgttatgaaatctgtacaggattctaatggccaggtcttggggtcatagkttttttgtttgtttgtttgttttgtttttacaacagcatggctgggaggtcataggtttttaactttgataaggttaaccgtgatagtgagagaagtaca

SEQ ID NO: 101803 - DNA, 201 bp, Homo sapiens
tgtatcaaataagtgcagcagcatattttgtgactcttaagtttttttaggttatcatgccccaggcattgaaactgggatgtgcattttactgttctcaraggaattttgtggtttattagcacgttttttttttcaaataatctaattttacttcagaaatctcttagtgcattgtgttgtttgtaaactagtgaaaaa

SEQ ID NO: 101804 - DNA, 201 bp, Homo sapiens
aacttccacttactgtctctttatgcaaagaacattctgatcacttcatgagacttgctgggtatgcagtgaggaatcacaaagttgtgttgagacacacrtgttgggtaatgatgtaggcttgctagctaagggcagccttgtggattgtgtaattcaaatctggccttatacaacactaatttctgtatatcataggat

SEQ ID NO: 101805 - DNA, 201 bp, Homo sapiens
tgtaaacactatgtaagcatcagctgtttttatttctgccccttctacttggtatgactgccacttttgctaagtccatgagttcctgcttctttcattgwctactgctgctcctcctggacacttctgtttcttctgtgtgtttacacttccgttgggcactagtacttcccacctgtcattctagatttttaaaaatct

SEQ ID NO: 101806 - DNA, 201 bp, Homo sapiens
gcctcacagcaagctagtggccagcagaattgactggaatccagacccccagatgcccgctgtagtcgccttatcaccacaccatggcaccagctcttcaygccttcaccttataatgccgccaaccacatctacctagagaaaggatgctcatgctccctttttcaagagtacatctggttctgtgtgtgagagtgcaca

SEQ ID NO: 101807 - DNA, 201 bp, Homo sapiens
gtaatctaatttttcacctttcctctcacacagtggcactgtactactccaagagcagttctccaaatgtaccatgcttttacagcactccagacttctaytgatactgttttctctgcctggaacgcttgtgcccagacttttctcttagttcctatttgtccttttaagtctcgacttaggtgtcaccgtttgcagaaa

SEQ ID NO: 101808 - DNA, 201 bp, Homo sapiens
acaacttcctgaaagcccttcaagagaaagtggaaattaaacaattaaatcatttctgggaaattgttgtccagggtaagttgtcatttgccttttttttwaaaaagtatttttaaaatacttatgctattttattctaaatatacatataaattctaaatataaactgtattgtataatgagttatgtgggaaacatgat

SEQ ID NO: 101809 - DNA, 201 bp, Homo sapiens
tagctctagtggaggagctgtttgttgcagatgaactggaagtaaaattctaacagcctgtattgcttcggtatagaaatgaagagttgctatgctacccrgtttctctttctcagttttcttactgctgccagataggaactcagaaatatagaccattctgcttccagacaataagttccatatttgaaaccctttgat

SEQ ID NO: 101810 - DNA, 201 bp, Homo sapiens; identical to SEQ ID NO: 16072

SEQ ID NO: 101811 - DNA, 201 bp, Homo sapiens
tgattgctatgtaatggcttgtgccttagcttatgtgattccgtctgtcacttacttgttcacatgattgactcctactcattaagactcacccaaggaartccacattcaggaagccttttctgccccttcaccgctctggtatcccctccaccagtcttgagtggatgctcctcctgtgtctctcagtgcccagtgcat

SEQ ID NO: 101812 - DNA, 201 bp, Homo sapiens
atggctcactcacatggctggaagacgatgctttctagtggctgtgagctcagttggggctgtccgttagaatctctacatgtggtttctgtatagtttcwattttcacatgaagcagctggttctaaggagtatcccaagaatgggttttctatgagaccctgcctatgtggcttcttaagacctatttttagaagcccc

SEQ ID NO: 101813 - DNA, 201 bp, Homo sapiens
ctcactcacatggctggaagacgatgctttctagtggctgtgagctcagttggggctgtccgttagaatctctacatgtggtttctgtatagtttcaattytcacatgaagcagctggttctaaggagtatcccaagaatgggttttctatgagaccctgcctatgtggcttcttaagacctatttttagaagccccagaa

SEQ ID NO: 101814 - DNA, 201 bp, Homo sapiens
tattaattgatgaccttcaggctttatgggatatgtttagtggttttttaatggttaaactgaatatttttaataaaaaattacaagaccatagaatgccrcagaaccattccacttaccaggaaacttaaaatttgccagctgacctgggaacagatctggtcatatacccaagctatttaagaagaggaatattattca

SEQ ID NO: 101815 - DNA, 201 bp, Homo sapiens
atgtgatatctcatccctgtacatctgcatatatatcttatatagcatgttattctttctgcatttcccccttcaatagagctttattgtaaccatttccrtctctgtaaaattaagggagggaggggataaaagagagttctagactgtctactcccctaagtggcagccagtgctaaatacacagcttatgggtttaaa

SEQ ID NO: 101816 - DNA, 201 bp, Homo sapiens
atattttgttaagactagggctgatcttttctaatttaaccttggattggtagaagatggggtgtccctggctcattatttttcactgcccagcactgttsgacaattatcctgagtagaattaggggagggactagaggatctgttttctgtgaatacaataggaaaggcagttttgaattatccaaatggcccctaaat

SEQ ID NO: 101817 - DNA, 201 bp, Homo sapiens
caggataatatggtatttcattggtagccatttgaagtcaggagccattgctcatataagaactacttttttacaattcccttgctcttggaatccaatartgttttcttggggcattgagagtaagatacactgtctaagttttcatacttattctgtgatagaaacatctagtttctctcttctgtctgtggtaaatct

SEQ ID NO: 101818 - DNA, 201 bp, Homo sapiens
ctgaaaatggaattcatgaaggctttctcagcatcataactagatgagcccagagtccattcaagcctttacttaatatactaaatcactcctgataccartcttctatgaaggagagagagagagagagagacacttttaaaccatgagatatcaaaagaactcactgtcacaagaacagcaaaggggaagtcctctgcc

SEQ ID NO: 101819 - DNA, 201 bp, Homo sapiens
aaattgagaggcattccattcactggccctgccgactgaccattggctccaatttgtctataaggattgcagcctataaatcggtaagtggcaggtacacrtttttaacagaaatgttaccaggcagataaatatgtgtatataaggaacagacaattcatgtgtgtgttactcggaaccataattactgcttttctagtt

SEQ ID NO: 101820 - DNA, 201 bp, Homo sapiens
gcttattttatgcctcatttatcaggacaagtggtctcattgtaacacaaaaatcagtgtgtttggaattgtagagaatacttgctgaaagggtgtgttayctgacatcgtaattatgcaccattggcctttaaggtgttgttcatctttcatgtgggcggactgaggcccagagtagttaggatgacttttcacagataa

SEQ ID NO: 101821 - DNA, 201 bp, Homo sapiens
ccaatttgtctataaggattgcagcctataaatcggtaagtggcaggtacacatttttaacagaaatgttaccaggcagataaatatgtgtatataaggarcagacaattcatgtgtgtgttactcggaaccataattactgcttttctagttgttctccctgctcatttaatctctgtttagctttttgtgtaaaaggca

SEQ ID NO: 101822 - DNA, 201 bp, Homo sapiens
taaaaatatggcgtttttctacacagcgctggtaaatttaagaaaaataagctctttcaaataccttgagcatcttaaagatgctaaatacaaacagtcastaaaattttaaacatctttagccctataaaagtttttttcttaaagaatttgacatacttttttagtcctttctccaaatagcattgatacatctaatca

SEQ ID NO: 101823 - DNA, 201 bp, Homo sapiens
taaaaaaagaagatatacaaaaagaaacagtttattgcttaaatgatgatgatgaaactgaagttttaaaagaggatattattcaaggtatgtcagtaagrgttttcactgttgcctaaaagacattttcttcaacatgatgtgatgcaggctggggtttgtattattctttgtttaaagttatttctttgagttatagaa

SEQ ID NO: 101824 - DNA, 201 bp, Homo sapiens
tccttgtgttggtccctgactgatacacacaccgcctctacccacaatggccaatttatatccgatagtaaagaggcataaagaaagcccgcttttgataygtttcttaaattgcctctgttaaaacagactttcttatcaggcaaatatcttttataagtttctggcttaaacaatgattataatttacaggtggattta

SEQ ID NO: 101825 - DNA, 201 bp, Homo sapiens
ttctcagttggctttaacacacttcgtaacctgcaaaacaatttcctgtcttaagtctcctgtgttaaatatttggagtggtttatattccttgtgttggwccctgactgatacacacaccgcctctacccacaatggccaatttatatccgatagtaaagaggcataaagaaagcccgcttttgatacgtttcttaaatt

SEQ ID NO: 101826 - DNA, 201 bp, Homo sapiens
ttgattaattcgggctgctcaagggaggaacaaaggagactggaagcccgggaaaagatggcgccggtggttggggggcggggcggtctaaaaactaaacaaagaagggcgcagggcacttgatttttcacgtggccctcttggttctcttccaagtgtactctgctttctccagtaaactctcactttgcttaaaataaa

SEQ ID NO: 101827 - DNA, 201 bp, Homo sapiens
attacaggtgtgagccaccaagtccagctcagaaaaaattttgaccacagctgtatatataataatcatctatcagttatgaaagtagggttgtttccctrcatacactattcataagcacatcattgccatcatctgggatttgttacctgtcgttgtgggtttcagagtctccagaggctctttacattgagtttatcc

SEQ ID NO: 101828 - DNA, 201 bp, Homo sapiens
tgattaattcgggctgctcaagggaggaacaaaggagactggaagcccgggaaaagatggcgccggtggttggggggcggggcggtctaaaaactaaacaaagaagggcgcagggcacttgatttttcacgtggccctcttggttctcttccaagtgtactctgctttctccagtaaactctcactttgcttaaaataaat

SEQ ID NO: 101829 - DNA, 201 bp, Homo sapiens
attaattcgggctgctcaagggaggaacaaaggagactggaagcccgggaaaagatggcgccggtggttggggggcggggcggtctaaaaactaaacaaagaagggcgcagggcacttgatttttcacgtggccctcttggttctcttccaagtgtactctgctttctccagtaaactctcactttgcttaaaataaattt

SEQ ID NO: 101830 - DNA, 201 bp, Homo sapiens
aggttagagtggtaagcctttggcttcataaaatgcctgcctgggggtattaagaacttgttttgcatgtgtgagtagtcttctcttaagactacagagcvacatctcctttctgtacgactgtggaaaaagagttcagaataacccatcaaaccaatacttgttaagatggtacttcagagaaattaagtgcttttaagt

SEQ ID NO: 101831 - DNA, 201 bp, Homo sapiens
gaggctgaggcaagtgaatcacttgaacctaggaggcggaggttgcaatgagccaagatcatgccactgcactccagcctgggtgacagagcgagactccrtctcaaaaagaaaagaaaaattagaggccaatatagattactctttaaaaagtgtttttgtttgttttttaaatttttctgtagcatatcagatagggaa

SEQ ID NO: 101832 - DNA, 201 bp, Homo sapiens
ctctatggccttaaaaagtacatgtattcacctgttactaggacaagtgtgctggaaatgtcagggcaatttggttgatagtttgttcaaatctgtctttygactttctatctagttgttttccgtgacgttttgagtattgaaagttattcaccttgagaccttgtgtgctagtgagacctttatgattttggtctcacc

SEQ ID NO: 101833 - DNA, 201 bp, Homo sapiens
ggtaccagtcttaatcatgtgccatacatttccctgttaattttttgttggaaagtttggttttgtcactagctttttaaaaaagacatacatggaaatamaaatgtgtttctattttgagacggagtcttgctctgtcgcccagactggagtacagtggtgtgatctcagctcactgcaacctccacctcccaggttcaa

SEQ ID NO: 101834 - DNA, 201 bp, Homo sapiens
agtgaatctgagcagtatcaaacctgtgactttagtgttctgtgtaaagtctgatgtagctttgaaatgaaaagtgacagtgctgaagattaacttttctytttgccctgtttttgtagtttgcaccaacagtccaagtctcattgttacttatttctggcttttaggagttacttcaggcttgatgtgaaagctcctgat

SEQ ID NO: 101835 - DNA, 201 bp, Homo sapiens
ctcccgggttcaagtgattctcctgtctcagcctcccgagtagctgggattacagatgcctgccacaacgcccggctaatttttgtattttttgtagagawgggggtttcacgatgttggctaggctggtcttgaactcctgacctcaggtgatccacccccccccctcctcggcctcccaaagtgttgggattacagttg

SEQ ID NO: 101836 - DNA, 201 bp, Homo sapiens
gaagtgaatctgagcagtatcaaacctgtgactttagtgttctgtgtaaagtctgatgtagctttgaaatgaaaagtgacagtgctgaagattaacttttytctttgccctgtttttgtagtttgcaccaacagtccaagtctcattgttacttatttctggcttttaggagttacttcaggcttgatgtgaaagctcctg

SEQ ID NO: 101837 - DNA, 201 bp, Homo sapiens
tgaggcacaaacattgcttgaacgggggacacagaagctgcagtgagccgagattgtgccactgcactccagcctgggggacagagtgagactctgtctcaaaaaaaaaaaagtgaaggatgagaatggtgcggtggcattatcaaagaccggggtttccagtgtggttgattaggcaatgatgttaatggaaatagggaa

SEQ ID NO: 101838 - DNA, 201 bp, Homo sapiens
agcttactggagcctcaaactccctgtgtattagttcattttcatactgctgataaagacatacccgagactgggaagaaaaagaggtttaattggacttacagttccacatggctggggaagcctcagaatcttggtgggaggcgaaaggcacttacatggtggcagcaagagaaaatgaggaagaagcaaaagtagaaa

SEQ ID NO: 101839 - DNA, 201 bp, Homo sapiens
  misc_feature (1)...(201): n = A,T,C or G
tgctattcctgatcactgggaagtgctgttgtgttaggagtgacttgcaaatgctacattatggttcgcttcatatttaagaatggactgtggccaccaanaatgggttctagatactattaaatgacataatttttggttaaatgaatgcaatgtgttagattaccttttgtttatatttcttggttgtttttggcagaa

SEQ ID NO: 101840 - DNA, 201 bp, Homo sapiens
gcttactggagcctcaaactccctgtgtattagttcattttcatactgctgataaagacatacccgagactgggaagaaaaagaggtttaattggacttacagttccacatggctggggaagcctcagaatcttggtgggaggcgaaaggcacttacatggtggcagcaagagaaaatgaggaagaagcaaaagtagaaac

SEQ ID NO: 101841 - DNA, 201 bp, Homo sapiens
atggtaactctggccaacttcccttttttgttgtgtgtgtgtatgttttttgttgtttttttttttttgagttggggtcttgttctgtcacccagactagwgtgcagtggtgccaatatagctcacagcaacctcagcttgatctcctgggctcaagagatccttgcatctcagcctcctgagtagctgggactacaggtg

SEQ ID NO: 101842 - DNA, 201 bp, Homo sapiens
ttcaatgtttatagattttgaaaatttataggttcattattcctttcatttgtttcttcttttgtcccatttttgtcaagcatgtatttattttgtttgamtccttttttgtctcatggactgagaagaaaatataactaaggttggattatcccacaatttgctctgtgtctaattattctgaggtggattgtaatgaag

SEQ ID NO: 101843 - DNA, 201 bp, Homo sapiens
tttttttttttttgagttggggtcttgttctgtcacccagactagagtgcagtggtgccaatatagctcacagcaacctcagcttgatctcctgggctcargagatccttgcatctcagcctcctgagtagctgggactacaggtgcacacccaagtccagctaattttaaaatttttatttttgcagagacggtctcact

SEQ ID NO: 101844 - DNA, 201 bp, Homo sapiens; identical to SEQ ID NO: 16073

SEQ ID NO: 101845 - DNA, 201 bp, Homo sapiens
gtgacgtgatctcagctcactgcaacctctgcctcccaggttctagcaattctcatgcctcagcctcccaagtagctgggattacaggcatgcgacaccaygcccagctactcagatcttatatattggatgcccgtctttagaattttccctgaaatagaatctaaatctcatggtgattttaggccatgaggtttatat

SEQ ID NO: 101846 - DNA, 201 bp, Homo sapiens
cattgctagatagatatgcattgctagaacccagctcttagaggcagctgccacatgccttgaaggaaaaggctccccactgctatcccttggagggacasgatggaaaaagagtgttcagataattttcaagggcactcacctcactacccttttaaaatctgagtgtcattcctagatcctcacagacttcacttcctg

SEQ ID NO: 101847 - DNA, 201 bp, Homo sapiens
ttgttctccctgctcatttaatctctgtttagctttttgtgtaaaaggcaggctaggagaggaagtttaaagaattgtctataatagagtttgatttcctyctcttttactttctctccattggtaattgattgttaatcataagttctaggcctgtctcttttttttaaaagaaagaaaatgaaatgcattaagctgtgt

SEQ ID NO: 101848 - DNA, 201 bp, Homo sapiens
aacccatttgagaatctaggatagagtagtttatttaacctttacagataaatcatatgctagtaaatgtatagattttttaatcatttatctgtatttgkctgtcagatatctttattcataatcacccagaataaacagaatgaatgaaacagaagcttcatcacaattctgttacagactgtctgcctccattgctgg

SEQ ID NO: 101849 - DNA, 201 bp, Homo sapiens
cggaaaaccccaaataaaaacccatttgagaatctaggatagagtagtttatttaacctttacagataaatcatatgctagtaaatgtatagattttttawtcatttatctgtatttggctgtcagatatctttattcataatcacccagaataaacagaatgaatgaaacagaagcttcatcacaattctgttacagact

SEQ ID NO: 101850 - DNA, 201 bp, Homo sapiens
ttcagcctcagtagattgtgaaggaatcagctcaccctgatccaatggtgtcttcctgttaaggtgctgtactctgataaaagttatattaaagtcattaraatgcttatgcttcattaccagagaggttttttctttttaatgtttttcttctttagctaattactagtttttaaaatattagctcaatggatactaaat

SEQ ID NO: 101851 - DNA, 201 bp, Homo sapiens
tatttaatggaagaataacatcttcctctcctacttcagaaggtaaaaatattctgagctcttaaaaagaaaaataaagttggaatgctttctttcttttyttttttttttttttttttttttttttctggaagaagcttactttaacaaaaaaaatacaggaaggccagttgcctatgctggagtgcagtgttgtgatca

SEQ ID NO: 101852 - DNA, 201 bp, Homo sapiens
aaaaaataaaaaaattagccgggcatggtagcacgtgcctgtaatccgagcttctcaggaggctgaagtgggagaattgcttgaacctgggagatggagaktggagttagccgagatcacgaccctgtactccagcctgggcggcagaatgagaccgagtctttaaaaaaaaagaaaaaaaaaggttcctaggctggtctt

SEQ ID NO: 101853 - DNA, 201 bp, Homo sapiens
taggttaagtttcctttcagtcattccaaggagaatcagcatgaccaagcaaagcaggttccaaaggcaggaagcagaagcaatatgatgctgtggaggtrcctttctgaaacagtctcttctgctgttgtggggtctttgggcaacccttcaatttaagtgcttggcaacaagtctgctgagataggctgaccttgtagc

SEQ ID NO: 101854 - DNA, 201 bp, Homo sapiens
tcccgagtagctgggactacagatgcccgccaccacgcccggctaatttttttttttttgtatttttagtagagacggggtttcgctgtgttagccaggayagtctcgatctcctgaccttgtgatccgcccgcctcggcctccccaaagtgctgggattgcaggcgtgagccactgcacccggccaagcttacttctttt

SEQ ID NO: 101855 - DNA, 201 bp, Homo sapiens
ctggatttgtattttaaaacagttcaataaaagtctgcagccttttctttctatgacaccttgctgaagtctcactgcaatcacagggctattctctctctgtgtgtgttaaatctccagtccgtgatcttgattaccttctggtgttgtgggaaagaaatgggccattttctgctcttccctttgattaaaatgtaaatt

SEQ ID NO: 101856 - DNA, 201 bp, Homo sapiens
acaggcagagtctttggatttgattttcttctcttttgcaattaacttgacctcctcttgactttaagacaggctgttaaagccagcatgttgcttgaggmaagatgtttgatatacttttccttagcacacagatgctactggactgttagcatattgcacaaaacagaattaggtttataaaagaacaaattaaaaagt

SEQ ID NO: 101857 - DNA, 201 bp, Homo sapiens
tggatttgtattttaaaacagttcaataaaagtctgcagccttttctttctatgacaccttgctgaagtctcactgcaatcacagggctattctctctctgtgtgtgttaaatctccagtccgtgatcttgattaccttctggtgttgtgggaaagaaatgggccattttctgctcttccctttgattaaaatgtaaatta

SEQ ID NO: 101858 - DNA, 201 bp, Homo sapiens
atgtcacagagtgtacttacacgagcccacatggtagaatctactacacatctaggctatgtggtatggccttttgtcctcaaggtacaaacccgtgcagygtgttactatactgaatactgtaggcatttgtaacaaagaggtatttgcatatataaacgtatctaatgatagatgcctagggaggctgaggtgggcaga

SEQ ID NO: 101859 - DNA, 201 bp, Homo sapiens
gtgtattgagcatatacaggttagtacttgagggtaacatctaatggacagcctgcattttctcttttaatcatcagcgaccatcttataaagcaggcackctttgttatttccattttatagataagggaactgaggctgaaagacactcgttcacatattcaaagccacacagttctcaactagcaggacttggatcta

SEQ ID NO: 101860 - DNA, 201 bp, Homo sapiens
atgcctagggaggctgaggtgggcagataaccgaggtcaggagttcgagacagtctggccaacatttttagtagagaatccccatctctactaaaaatacraaaatgaactgggcgtggtggtgtgtgcctatagtcccagctacttgtgaggctgagacaggagaatctcttgaacctgggaggcagaggttgcagtgag

SEQ ID NO: 101861 - DNA, 201 bp, Homo sapiens
ttaatgtctaatgatgaagctatagagagaaatttcagttaatgaccaggtaggtataagatggtgtccttagataattctgatatcagaactgatgttarttgtagtttaagacaactctcctgagacaggagaaccgcttgaacccgggaggcagaggttggggtgagccgagatcgcgccattgcactccagcctgga

SEQ ID NO: 101862 - DNA, 201 bp, Homo sapiens
ggttagctttcccatggtactcacgaacttgtgccagtagaagacctggacttaacttctttgcatcatctgcctacatatagtgaccccaaatgcaagascttcataactcactgcaattattctaccaccttccatgatttgtactacacagctgcacaagatttattcctcaaatgaggattttgccgctgctccatt

SEQ ID NO: 101863 - DNA, 201 bp, Homo sapiens
ttaatgctcctaattaatgtgttttctagctccttctctcactacgtcccagcttttgcaccttatgctttaacccaatacaactattttctttttttttygttttttttttgttgttgttttttgagacggagtgtcactctgtcacccaggctggagtgcagtggcgccattgtggctcactgcaagctctgcctcccg

SEQ ID NO: 101864 - DNA, 201 bp, Homo sapiens
atcatcagcgaccatcttataaagcaggcactctttgttatttccattttatagataagggaactgaggctgaaagacactcgttcacatattcaaagccmcacagttctcaactagcaggacttggatctaggcctgtactgcttcagagtctgtgcctgcattctattctgaatttggactgagtaatgaagggctttg

SEQ ID NO: 101865 - DNA, 201 bp, Homo sapiens
ataaaatacgacaagagccatttcaaaggaataaacaaagtgatctgagatttctaaagaaggggagacttatctagagttgatcaaggaaggcttcatgraacacgtggcatttgacatgcggcctttattgcttattacacaggcaaaaactggagaaaagataatttaagatggtcattgttaattggttgcctttat

SEQ ID NO: 101866 - DNA, 201 bp, Homo sapiens
atagtagttgcacaataagtatatactatcaaacaaagagaaacatttatattatagcttcctaagatttcctattctcatttcaaaagaaatggagaatwtagagtctctaggattattgcccttggcctgtaaaggtttttatttgtgcccaaatatgtaacctcgagtgaactttgtatcagatgatctgggaaagta

SEQ ID NO: 101867 - DNA, 201 bp, Homo sapiens
gcacgaaaattgcttgaacctaggaggcggaggtttgcagtgggctgagatcacaccattacactccagcctaggcaacagagtgagactgtcttaaaaawaaaagagagaaaaaaatttgggtgggaacacaaagcgtaaccgtatcaggtgagaactccgcagttttgtggcccatcttatctcaaaacatacctgttt

SEQ ID NO: 101868 - DNA, 201 bp, Homo sapiens
atggatggcccttccaatggccattttttattttagctactaatgagtattattgagtcactaactaatttcgaaaagcattttggtgaattataattggrgctgtgatttactgagtttgaagactgataagccattcctcagccctgtaattaatgtagaagcagagaaaagcaccctgatgatcagcatttcctttat

SEQ ID NO: 101869 - DNA, 201 bp, Homo sapiens
atgagaaaatcattaagcatgaaaaaatgggctctgactgaacttgtggaacttaaatggtgaggttttaattgagttttttagttattggtaagaataakaataataatttaaaaatacaggactgcatctgtgtgttgaggtggtcagcactttgcatatcttagtccaatttcctgtgccactggtcatgcataatat

SEQ ID NO: 101870 - DNA, 201 bp, Homo sapiens
gaggtccctaaggaaaaataccgtataaaccaaggcattatttatcagtttttagaaggagttatcacatagaatgtggtctttctaaaatttctggtacstaatatttcctttcaaaaaagactcaaattcttgaggcatcctagaagacttgtgtgctgcctcccccttgtccaccctccccaaaagcacattcaacaa

SEQ ID NO: 101871 - DNA, 201 bp, Homo sapiens
catactgctgtgaaacaaagccagggctgcctcaagttaggcccttaggagcccggtggctaggaaagggaggcagcttgtttgtagaaggactacatgtagctattgtttttcttttctttttcttcttcattatttttcttttcttcttcttcttttttcttttttttttttggtgcttggaaaataagtttcacaata

SEQ ID NO: 101872 - DNA, 201 bp, Homo sapiens
gtggtttacttggtgtttttccagtagtagggataggtttgccttaaactcacccaacactgtctagtttttgccttggagcatgtacctaggggaaagcytgatggtaatggatgtccatctctagttgtgagcagagtttgcccctgccgaagtgaatctgagcagtatcaaacctgtgactttagtgttctgtgtaaa

SEQ ID NO: 101873 - DNA, 201 bp, Homo sapiens
ataatgggaagccattaaagcaagggtttttaatcagggttccaaagattgatatcaaggaatctgtgaactacctgaaattacattcagacttcaaaacytaatatgttaagtgctttacatgatgctaagtgctttacacacattatctgtttggacccacgttgccatcctatgaagtagattcttctgttgaccccc

SEQ ID NO: 101874 - DNA, 201 bp, Homo sapiens
gtgggcagagctggctcttgtaggttgcatttcccaggctcctgtgtctaaagacttcctactgggttcggcatgagagatactggtgggaagtagggagrgagaaaccggtgtatctcttcttccctttctatgttgggtagcatctttggtcctcagtgtcttcagctcccataggacagatccctgaactctatttat

SEQ ID NO: 101875 - DNA, 201 bp, Homo sapiens; identical to SEQ ID NO: 16105

SEQ ID NO: 101876 - DNA, 201 bp, Homo sapiens; identical to SEQ ID NO: 16104

SEQ ID NO: 101877 - DNA, 201 bp, Homo sapiens; identical to SEQ ID NO: 16106

SEQ ID NO: 101878 - DNA, 201 bp, Homo sapiens
agactgtgttaatgactaccctcagggtggttataatctgatgagaaagatacacacatgactttcttgttcttgttgttgttgttgttgttgttgttgttcttgttgttgttttgagagaatcttgctctgtggcccaggccggagtgcagtggcacaatctcagctcactgcaacctccgcctcctgggttcaagcgat

SEQ ID NO: 101879 - DNA, 201 bp, Homo sapiens
atgaatctgggagttggtgcctaccgggatgataacggaaagccttacgtgctgcctagcgtccgcaaggtgagcttgctgttcatctccttttgaatggkatgaataaactgaagagagccctggagagtggcaggaatagtgctggaccgggaatcaggagccctgggctttagttctggcactaatggcatgaatcac

SEQ ID NO: 101880 - DNA, 201 bp, Homo sapiens
cagactgtgttaatgactaccctcagggtggttataatctgatgagaaagatacacacatgactttcttgttcttgttgttgttgttgttgttgttgttgttcttgttgttgttttgagagaatcttgctctgtggcccaggccggagtgcagtggcacaatctcagctcactgcaacctccgcctcctgggttcaagcga

SEQ ID NO: 101881 - DNA, 201 bp, Homo sapiens
ccagactgtgttaatgactaccctcagggtggttataatctgatgagaaagatacacacatgactttcttgttcttgttgttgttgttgttgttgttgttgttcttgttgttgttttgagagaatcttgctctgtggcccaggccggagtgcagtggcacaatctcagctcactgcaacctccgcctcctgggttcaagcg

SEQ ID NO: 101882 - DNA, 201 bp, Homo sapiens
caatcccagctactcaggaggctgaggcaggagaattgcttgacttgaatccgggaggcggaggttgcagtgagccaagattgtgcccctgcactccagcstaggcgacagagtgagactccatctcaaaaaaaaaaaaaaaaaatcttcaaaactttaggcaaatgtttcttaaacaagacataaaaagcactgaccata

SEQ ID NO: 101883 - DNA, 201 bp, Homo sapiens
tttgagacagagttttgctcttgttgcccaggctggagtgcaatggcacaatcttggctcactgcaacctctgcttcctgggttcaagtgattcttctgcytcagcctcccaagtagctgggattacaggcatgtgctaccacgcccagctaattttgtatttttagtagagacggggtttctccatgttggtcaggctgg

SEQ ID NO: 101884 - DNA, 201 bp, Homo sapiens
cgctctgtcgcccaggctggagtgcagtggcgggatctcggctcactgcaagctccgcctcccgggttcacgccattctcctgcctcagcctcccaagtasctgggactacaggcgcccgccactacgcccggctaattttttgtatttttagtagagacggggtttcgccatgttggccaggctgttctcaaactcctgg

SEQ ID NO: 101885 - DNA, 201 bp, Homo sapiens
ggacacagaaagaagaccacgctcccaacatgtgaactcgtgcacattgtggttcactttcttttgaaaaaaacatgttttttagtgagtgcatttgtacrtttttctgggtaagcctggggagtgaagaaacatacaaactagcaaaattaagtcaacattttttctgcccttccccctctgaaaagccagaataaatac

SEQ ID NO: 101886 - DNA, 201 bp, Homo sapiens
gtaagctacagcatccagcatgacacatgctctcatgctgggagagaatgccacgagggcatagagcttgtgggtgtgtgtgtgtgtgtgtgtgtgtgtgtccatccatgtccatgtccctccctaccctaagatgaaagaccagtatcgtagattttactgattttcttagccatatattcttcggtgtccttaagtttt

SEQ ID NO: 101887 - DNA, 201 bp, Homo sapiens
cagagttcttacaatatgtgtgtagtctttaccattttaagaaatggaataatgaaaggcatggaggagttgaaagatggttactaatgtggggctaatcraattgagtattccctctaggccaggtgccgtggctcacacctgtaatctcagcactttgggatgctaaggtaggaggatcacttgagctcaagagttgga

SEQ ID NO: 101888 - DNA, 201 bp, Homo sapiens
ggtaagctacagcatccagcatgacacatgctctcatgctgggagagaatgccacgagggcatagagcttgtgggtgtgtgtgtgtgtgtgtgtgtgtgtgtccatccatgtccatgtccctccctaccctaagatgaaagaccagtatcgtagattttactgattttcttagccatatattcttcggtgtccttaagttt

SEQ ID NO: 101889 - DNA, 201 bp, Homo sapiens
gtcagtgttccctagctaggcaaccccttcctctctctctggctaagaataactttccttgtgatctggattataaacttgtctcaagcaatagatacatrgttttcatacctgtgttctttaatctgtacttcattttcaatctcaaaactagcattgtaattgtaaaatgaacataatttattacatttttttaaaaaa

SEQ ID NO: 101890 - DNA, 201 bp, Homo sapiens
ttgcaatcctaactcactgtaactttgtactcctggcctcaagcagtcctccagcctcagcctcccgagtatttgttagcactttgaaccaagttaattgrtatttctctgtaagaggcagtcataatttttaaatggtagttccttttattccgtcatctccgtgttaagtagaacctgctttcccctaaaatcagtttc

SEQ ID NO: 101891 - DNA, 201 bp, Homo sapiens
tggtaagctacagcatccagcatgacacatgctctcatgctgggagagaatgccacgagggcatagagcttgtgggtgtgtgtgtgtgtgtgtgtgtgtgkgtccatccatgtccatgtccctccctaccctaagatgaaagaccagtatcgtagattttactgattttcttagccatatattcttcggtgtccttaagtt

SEQ ID NO: 101892 - DNA, 201 bp, Homo sapiens
tatttagattgtttaaaaattcagtattttgaaattgtgtttagaattcttaaaagacagaggctggagggctggggctgagggagggtggtgggcctgcrgggacattcttactgtgcaaacatagcgataaaaacatgtcattttccaaagcaaaaacaaaaacaaaaaaaaaagaattcttaaaaggtataccagaag

SEQ ID NO: 101893 - DNA, 201 bp, Homo sapiens
aaaaggttggttggagggttgtgggttattgttaaactgattaacattgtctccccccacagccatgcttgatttgctttgtatttaaagagaaagaaaarcagaaaggacctgcatttggtcacaaggtcttacggctgcatatgctccttgaattctctacatactggcctcaccaggctctgtactaggatgcaggat

SEQ ID NO: 101894 - DNA, 201 bp, Homo sapiens
acatactaagccaggtaaggtggctcacacctataatcccagcatgcattttgggaggccaaggcaggtggatcccttgaacccaggagttggagaccagsctgggcaacatagcaagactgtgtctctattaaaataaaagaaaataaaaaaataaaaaataaaaaaattaacctaccaatgggtcatgacacataattt

SEQ ID NO: 101895 - DNA, 201 bp, Homo sapiens
accaggctctgtactaggatgcaggatggttacaaataaaagtggagtgataataatttagtaacgatgactattagcgaacatcaggcactctgccaatytaggttttgagtgtttttttcatcattagaccagccctgtgagataggtagttttatggccccattttacagataaggaaagttgatgcttgatttactt

SEQ ID NO: 101896 - DNA, 201 bp, Homo sapiens
actgcaacctccgcctcctgggttcaagcgattctcctgcctcaggctcccctgagctgggatcacaggcacccaccaccatgactggctaatttctgtayttttagtagagactgggtttcaccacattggccaggctggtctcaaactcctgacctcaatggatccatccacctcagcctcccaaagtgctaggattat

SEQ ID NO: 101897 - DNA, 201 bp, Homo sapiens
gtgagggcataggcgtgggacgtgcattatgcagaacttgtgtagaaagccccaagttgttttcgtgatgaaaacacgaatgtgaggaggactgtgggagrcagccaagctgagaaggtggagcagatcgtgaagcaccctggttgatactgtaagaagtcaacacttgattctccaggcaacaaggaggatggaggggtt

SEQ ID NO: 101898 - DNA, 201 bp, Homo sapiens
gctgcctagcgtccgcaaggtgagcttgctgttcatctccttttgaatgggatgaataaactgaagagagccctggagagtggcaggaatagtgctggacygggaatcaggagccctgggctttagttctggcactaatggcatgaatcacccgggttttctgggctgtagtctccttgactgtaaaggtgagaggttgga

SEQ ID NO: 101899 - DNA, 201 bp, Homo sapiens
agtgcccaatttaaaaacgtttcactgggtgaagtaaaacattactaggtcccatatttggtctttaattggcagtttgtgatctctcttctaaccgtgcrtaacatcattatacagagatggtttaggaaagtgaacacctaagaacagggagataaactgtaaatgggaatgtcgttggtgagagccaagaatgtccca

SEQ ID NO: 101900 - DNA, 201 bp, Homo sapiens
gaggtggaggttgcagtgagccgagatcacactactgcactccagcctgggtgacagagcaaaactccatctcaaaaaaaaaagactttacctccaaaacktaacttataaaactttaaacattaatcatagtaattccaagtaaggagaagaaattcaatggatgtattttctcttgtctaggcagaggcccagattgcc

SEQ ID NO: 101901 - DNA, 201 bp, Homo sapiens
aaagttaactcagcttcttttcagattcacttactataaatcaaaacaaaattcacagccgggtgcagtggctcacgcctgtaatcctagcattttgggargccaaggtgggtggatcacttgaggtcaggaggtagagacctgaccaacagggtgaaaccttgtctctactaaaaatacaaaaattagccaggcggggtg

SEQ ID NO: 101902 - DNA, 201 bp, Homo sapiens
aattatcctacgtcaaatagaatttggtttagttctgtccatacagtcaactgcctgttagcccctcctggaaatttctgtactttttaattcatgtgctyttttgcctagtctctgctccatctaaataacaacctaagtatgaaactggcctaccttaaaataacatcagcttgtcttttataagttgttgtgcctcag

SEQ ID NO: 101903 - DNA, 201 bp, Homo sapiens
  misc_feature (1)...(201): n = A,T,C or G
tgtctttctgcccaaaccaacctggggaaaccacacacccatcttcagggatgctggcatgcagctacaaggttatcggtattatgaccccaagacttgcngttttgacttcacaggcgctgtggaggatatttcagtaagtgtggctttcagggtgagagaggtgaataaaactccttgcttgcggacatttgatgtctc

SEQ ID NO: 101904 - DNA, 201 bp, Homo sapiens
ggccctgcaggaaggcgtgcaacgcaatccctagggaaaggaagtgtggccctcggcggttgccggactcccattcagtgggaggggtgcggatagtactrgggcagcggcgccgggtaacgaccgtgcccttgatagggtgccctgggggcggcgggcgcacctgtcctggcccccggcccgcccgagtcggtgggccgg

SEQ ID NO: 101905 - DNA, 201 bp, Homo sapiens
aatctaagctgcaaacagaatgagacagaaacagcatttggagagcactttcaagataaaatggttctaatgatgttgtctcgtgagtcctgggtataagwtgagtcttccaggattacgttagccccagaaaaggcttattgtgcttattgggaccatgcccacctcacataaacatctttcagacttttataaacatct

SEQ ID NO: 101906 - DNA, 201 bp, Homo sapiens
agaaacagcatttggagagcactttcaagataaaatggttctaatgatgttgtctcgtgagtcctgggtataagttgagtcttccaggattacgttagccycagaaaaggcttattgtgcttattgggaccatgcccacctcacataaacatctttcagacttttataaacatctggggcctcttcagaaagactgctaaa

SEQ ID NO: 101907 - DNA, 201 bp, Homo sapiens
actgttatatatgtatgtgcaggactggttttggttttgtcacttagaattatactaagcttttttacttaatattttcaatgtttttaaaaatattttcrtattctctggttatgaagattttttttaatgcatgcatttcaatacacaatttgagagtctgtagtagacaaagatgccagactgtgttaatgactaccc

SEQ ID NO: 101908 - DNA, 201 bp, Homo sapiens
tagaaggcagagaccatatggcctataaagcctaaaataattactgtttggccatttacagaaagaatgccaacccctactctatgagttcataaaaccaygatgcctgtggaaggtgtgatttgttatatgagtttatcgtatatttgttatatgagctgcttagttgagaggtcacatctctgagcagctcttgggtag

SEQ ID NO: 101909 - DNA, 201 bp, Homo sapiens
actttgggaggccaaggcgggcggttcatctgaggtcgggagttcgagaccagcctgattaacatggagaaaccccatctctactaaaaatacaaaattarccgggcatggtgacacatgcctgtaatcccagctactcaggaggcttaggcaggagaatcacttgaacctggaaggcagaggttgtggtgagccaagatc

SEQ ID NO: 101910 - DNA, 201 bp, Homo sapiens
attcaatactgtactgaaagaaacaaaatggctgtatgggtacttaaagtacggtttctattgaatgtatattgcatttgtgccatcatgaagttgaaaarttgtaagtcaaggactgtctctactcaagtgtgttaactgcttcagttgccttatggaaatagtgttccaatataaaacagaatgctataaaatagcttt

SEQ ID NO: 101911 - DNA, 201 bp, Homo sapiens
cccaggtctgttttaacaaatttgtaattatttaaacaattttaggccaggcgcgatggctcacgcctgtaatcccaccactttgggaggccaaggcgggyggttcatctgaggtcgggagttcgagaccagcctgattaacatggagaaaccccatctctactaaaaatacaaaattaaccgggcatggtgacacatgcc

SEQ ID NO: 101912 - DNA, 201 bp, Homo sapiens
catatcggtcagtgcttaggcagaatgagctgcatctcagggtttctttacaggctgcaagaagtgaaaggcatggctgaccgcatcattggcatgcggaytcaactggtctccaacctcaagaaggagggttccacccacaattggcaacacatcaccgaccaaattggcatgttctgtttcacagggctaaagcctgaa

SEQ ID NO: 101913 - DNA, 201 bp, Homo sapiens
aaaacttccttgtgcctcagttcaccactctggttgttgaaagctttttatttataataaagttattttggggtcctttggatggaaacagataatacgtrgcaaatacactcatgatttgctttagcacattagatagtagaagtagaagacgagatccatttttgtctttcaggtgagcgtgtaggagccttcactatg

SEQ ID NO: 101914 - DNA, 201 bp, Homo sapiens
gtctttaacttgtcaagggagcatgaattaaactctgtactgccatcaagtgtgccccatggaggagtgaggtgtatgagtgctgactagccacaagtacrttaagagaactttgttgggaaagaaatgttcatgaggtaattcacgagtttatcagcatggtgaacacggagaacttccatggtaccatactgaaacatg

SEQ ID NO: 101915 - DNA, 201 bp, Homo sapiens
tgggacctccagatcccattctgggagtcactgaagcctttaagagggacaccaatagcaaaaagatgaatctgggagttggtgcctaccgggatgataayggaaagccttacgtgctgcctagcgtccgcaaggtgagcttgctgttcatctccttttgaatgggatgaataaactgaagagagccctggagagtggcag

SEQ ID NO: 101916 - DNA, 201 bp, Homo sapiens
tactcctcctttcagccttagcactcagctgctaagtcacgtcctctgggaagccttcctaaccttgtgcagtactttccttcccttctccaagctattasgtcctctgctcagggctcccataagtaatatcccataataatgccctgggtaggtgtgtatcactatccatcatctccctgcagtgcccagcctgcatta

SEQ ID NO: 101917 - DNA, 201 bp, Homo sapiens
tgctttagaccaatactactctttttccttaaaaacacacagttgtatttatttgtcactgttgatcctagtgtggtctcaacactcattgcttatcttttaaccaaagtagcttctatttcccagagaaaattaagaagagagggtggtgatgtcagtcctacacaagcattctaaacagactggcaaaactcgtgaaca

SEQ ID NO: 101918 - DNA, 201 bp, Homo sapiens
tccaccatgttggccaggatggtcttgatctcctgacctcgtaatccgcccacctcagcctcctgaagtgctgggattacaggcatgagccactgcacccrgcctgaccttgttatttttaaacatgggtactaccaccttacactggactaagtcccattcatcatgtggtgtctgcagcttgatggttttctgagaagg

SEQ ID NO: 101919 - DNA, 201 bp, Homo sapiens
atcccataataatgccctgggtaggtgtgtatcactatccatcatctccctgcagtgcccagcctgcattacgtgcagatctctgctgatcaccacagtgkactagtcaggtggtaagggattgtgttgtactcttctttacattcccagcccttagcataatgttcttaatgattgctttagaagatcataaagcctaga

SEQ ID NO: 101920 - DNA, 201 bp, Homo sapiens
cagtgagccacgatcgtgccactgcactccagcctgggtgacagagcaagactccgtctcaaaaataaataaataaataaataaataaataaataaataaagcaggccgggggcggctcacgcctgtaatctcagcactttggggggccgaggtgggtggatcatgaggtcaggagttcaagaccagcctggccaacacgg

SEQ ID NO: 101921 - DNA, 201 bp, Homo sapiens
gcagtgagccacgatcgtgccactgcactccagcctgggtgacagagcaagactccgtctcaaaaataaataaataaataaataaataaataaataaataaagcaggccgggggcggctcacgcctgtaatctcagcactttggggggccgaggtgggtggatcatgaggtcaggagttcaagaccagcctggccaacacg

SEQ ID NO: 101922 - DNA, 201 bp, Homo sapiens
atgtatcagtatggattcattaattgtaacaagtgtgccataccaatgtaaaatgttaataggggaaacctgggggtaagggtatatgggactgtactatytgctcaattttctgtaaatcaatactgttttggctcacggaggctgaggcagaattgtttgaaccctggaggcagagactgcagtaagccaagattgcac

SEQ ID NO: 101923 - DNA, 201 bp, Homo sapiens
ttgtgatctctcttctaaccgtgcgtaacatcattatacagagatggtttaggaaagtgaacacctaagaacagggagataaactgtaaatgggaatgtcrttggtgagagccaagaatgtcccagagccatgggaatggagtggaaagggtagattctgaggaaggggaaggttgtattcagaatcaggtgatccccgtg

SEQ ID NO: 101924 - DNA, 201 bp, Homo sapiens
ggcagtgagccacgatcgtgccactgcactccagcctgggtgacagagcaagactccgtctcaaaaataaataaataaataaataaataaataaataaataaagcaggccgggggcggctcacgcctgtaatctcagcactttggggggccgaggtgggtggatcatgaggtcaggagttcaagaccagcctggccaacac

SEQ ID NO: 101925 - DNA, 201 bp, Homo sapiens; identical to SEQ ID NO: 16111

SEQ ID NO: 101926 - DNA, 201 bp, Homo sapiens
caagggaggtaaaaatgcagtgaactccagcatatcggtcagtgcttaggcagaatgagctgcatctcagggtttctttacaggctgcaagaagtgaaagkcatggctgaccgcatcattggcatgcggactcaactggtctccaacctcaagaaggagggttccacccacaattggcaacacatcaccgaccaaattggc

SEQ ID NO: 101927 - DNA, 201 bp, Homo sapiens
taatgttgtatcttagatcaaaatctgaacataggctggtccaagtgtaatggtgtttacaactaattgatcataaccagttacagattttattgttcctkctctcgactaatcttacacaggggaaccacagtgctgcaaaatatgtaccaaaaaaaattccctttttttttttctttaaatacagggtctcactgtgta

SEQ ID NO: 101928 - DNA, 201 bp, Homo sapiens
tggcagtgagccacgatcgtgccactgcactccagcctgggtgacagagcaagactccgtctcaaaaataaataaataaataaataaataaataaataaataaagcaggccgggggcggctcacgcctgtaatctcagcactttggggggccgaggtgggtggatcatgaggtcaggagttcaagaccagcctggccaaca

SEQ ID NO: 101929 - DNA, 201 bp, Homo sapiens
ccattctgggagtcactgaagcctttaagagggacaccaatagcaaaaagatgaatctgggagttggtgcctaccgggatgataacggaaagccttacgtkctgcctagcgtccgcaaggtgagcttgctgttcatctccttttgaatgggatgaataaactgaagagagccctggagagtggcaggaatagtgctggacc

SEQ ID NO: 101930 - DNA, 201 bp, Homo sapiens
gtttatgcatcagaattcatcatcctactttaaagtagctttttttttttctttttttgagatggagtctcactgtgtcgcccaggctggagtgcattggygcaatctcggctcactgcagcctctgcctcccaggttccaggttccaggttccagctattctcctgccttagcctcctgaatagctgggattacaagtgt

SEQ ID NO: 101931 - DNA, 201 bp, Homo sapiens
gctctcgactaatcttacacaggggaaccacagtgctgcaaaatatgtaccaaaaaaaattccctttttttttttctttaaatacagggtctcactgtgtwgcccaggctggagtgcagtggcacaatcatggctcactgcagcctgaccttccaggctcaagtggtcctcctgcttcagcctcccaagtagctgggactg

SEQ ID NO: 101932 - DNA, 201 bp, Homo sapiens
actaaaaatacaaaaattagccaggcggggtggcacacatctgtaatcccagctatttgggaggctaaggcagaagaatcgcttgaacccagagacaggtkgcagtgagccacgatcgtgccactgcactccagcctgggtgacagagcaagactccgtctcaaaaataaataaataaataaataaataaataaataaata

SEQ ID NO: 101933 - DNA, 201 bp, Homo sapiens
gtctccttgactgtaaaggtgagaggttggaaccacctgttttttcccaagattgaactttctatggttctgtgatcatctataaaacagacattaaataygctttagaaatgcttagctatgcctactttaatcctgaaggtgcataagaggaccaagactttaagtgctgtctcttggtgagaggaatagctcttcgtg

SEQ ID NO: 101934 - DNA, 201 bp, Homo sapiens
cttgtggtagggagcaatgggcagtggctttgttatgattgagggtcttggaggatacagaccattgttttttctttttctttttctttttttttttttttcttcctgagacagggtctctatgtagcccaggcttgtctcaaacactaggcttaagtgaccctcccacctcagcctcctgagtagctgggactacaggca

SEQ ID NO: 101935 - DNA, 201 bp, Homo sapiens
ttctgtgatcatctataaaacagacattaaatatgctttagaaatgcttagctatgcctactttaatcctgaaggtgcataagaggaccaagactttaagygctgtctcttggtgagaggaatagctcttcgtggattactatttttattttccatttctctaactgtgattactttaatcaaacctttgtacacaggcat

SEQ ID NO: 101936 - DNA, 201 bp, Homo sapiens
ctataaaacagacattaaatatgctttagaaatgcttagctatgcctactttaatcctgaaggtgcataagaggaccaagactttaagtgctgtctcttgktgagaggaatagctcttcgtggattactatttttattttccatttctctaactgtgattactttaatcaaacctttgtacacaggcatgctctgtccttt

SEQ ID NO: 101937 - DNA, 201 bp, Homo sapiens
actggtcttttaggatggtagttctccctgggaacatgttctgtgttagttatgttagcatgcaatgtgtttccatcattgctattgtcaaatgaatcaawaagtataacaagctgctcagtttttctaatacagtaagtattaatagttataccccacataaataaaagctctttggggttttcagtaagttttaagagt

SEQ ID NO: 101938 - DNA, 201 bp, Homo sapiens
gatacatggttttcatacctgtgttctttaatctgtacttcattttcaatctcaaaactagcattgtaattgtaaaatgaacataatttattacatttttwtaaaaaaaattgagtatccctgctcctatatttagattgtttaaaaattcagtattttgaaattgtgtttagaattcttaaaagacagaggctggagggc

SEQ ID NO: 101939 - DNA, 201 bp, Homo sapiens
  misc_feature (1)...(201): n = A,T,C or G
cctgtccttaccttcagcaggagccggttccctgtgtgtgtgtccgctcgccctctgctccgtcctgcggctgcccactgccctcctacggtccaccatgnccctgctgcactccggccgcgtcctccccgggatcgccgccgccttccacccgggcctcgccgccgcggcctctgccagagccaggtaagccaagggaaa

SEQ ID NO: 101940 - DNA, 201 bp, Homo sapiens
agcttgcagtgagctgagatcgtgccactacagttcagcctgggcaacccagtgagactctgtctcaaaaaaaagaaaagcagaaaaggttggttggaggkttgtgggttattgttaaactgattaacattgtctccccccacagccatgcttgatttgctttgtatttaaagagaaagaaaagcagaaaggacctgcatt

SEQ ID NO: 101941 - DNA, 201 bp, Homo sapiens
atacatggttttcatacctgtgttctttaatctgtacttcattttcaatctcaaaactagcattgtaattgtaaaatgaacataatttattacattttttwaaaaaaaattgagtatccctgctcctatatttagattgtttaaaaattcagtattttgaaattgtgtttagaattcttaaaagacagaggctggagggct

SEQ ID NO: 101942 - DNA, 201 bp, Homo sapiens
tataagacagaatggaataaatgatgactaaagggagagctgttgattctagtggggagttagagaagatgtaatgaggactgcggcatgtgagctgtgcrttaaagaggggaaagggcttttttttttgcaaaggaaatgaaacggacaaggaaactggggagagatctgagtgagggcataggcgtgggacgtgcatta

SEQ ID NO: 101943 - DNA, 201 bp, Homo sapiens
agcctgggtgatagactgagactgggtgatggactgtatctgaaaaaaagaaaaagaaaaagaaaatgggccaggcgtggtggctcacacctgtaatcccrgcactctgggaggcctaggcaggaggattgcttgaaccttggagtttgtaaccaaaccgcgcaacatggcaaaaccccatctctacattaaaagaaaatt

SEQ ID NO: 101944 - DNA, 201 bp, Homo sapiens
cagcagcgggggcttcctcatcagcccttccaaataaggctaggggaactttgagctgctcctccttagactcactcagccttgacgatttttaaaaaatktatctctttaatccattcctgagagggattgtagaaccttctaccagaatttagagtatgctattattctaagtgaagtaactcaggaatggaaaaccaa

SEQ ID NO: 101945 - DNA, 201 bp, Homo sapiens
atatgttcttgaaaaaactgctcattctccattggatttttctgacttcaattgagaagggagccaggagattaggaaaggttatggcagtttcctcctawcatattctgtatactcaccccatcactctcgtgttttttcttttacagtgatgatctaaccacaacagggactgataactgcactttcaacacctgccag

SEQ ID NO: 101946 - DNA, 201 bp, Homo sapiens
actcagattatgctcatattagtcactgctgccagatttttttcttttccatttaatgagatttaaggaaaggaggcatgtagcattttcaaatacccagyctgaaagtcatcaatcgtattatgtaggattgaaaagtattaataaactactgagaatgatgacaaatgtatgacacagaatatgctaagagattatatt

SEQ ID NO: 101947 - DNA, 201 bp, Homo sapiens
tgacacagaatatgctaagagattatattccaacgtattttattatttctgttatcttcaaatttctagttttgctacagacaatgaaagaaattccatayatacttttccttgataactaccaagtccaatttgataactaccaaatagctatttcctttgggaaggcaggaacgggcatgggatttgggaaggggtatt

SEQ ID NO: 101948 - DNA, 201 bp, Homo sapiens
tacagacaatgaaagaaattccatacatacttttccttgataactaccaagtccaatttgataactaccaaatagctatttcctttgggaaggcaggaacrggcatgggatttgggaaggggtattgaagaagcccccattgtatctataaaaagttaaaatttcatagagctggatatagggtcagtgtgttcatcagtc

SEQ ID NO: 101949 - DNA, 201 bp, Homo sapiens
ggggaaacacctgtgaaagaaactaggaggtggctggaaaagattgggagagccctcagattgcaagttaagtctgaaaccagtaaagaaaagaaagagakaaaatgggtaggagcatcctggaacaccctacagtctaggggaggctgaaaaaggccgtcagggagtccttgagccaagtctcagatctcccagctacag

SEQ ID NO: 101950 - DNA, 201 bp, Homo sapiens
tgtgaaagaaactaggaggtggctggaaaagattgggagagccctcagattgcaagttaagtctgaaaccagtaaagaaaagaaagagataaaatgggtargagcatcctggaacaccctacagtctaggggaggctgaaaaaggccgtcagggagtccttgagccaagtctcagatctcccagctacaggccaggcccag

SEQ ID NO: 101951 - DNA, 201 bp, Homo sapiens
ttgcaagttaagtctgaaaccagtaaagaaaagaaagagataaaatgggtaggagcatcctggaacaccctacagtctaggggaggctgaaaaaggccgtyagggagtccttgagccaagtctcagatctcccagctacaggccaggcccagtcattggctgagagccactgtgggaggtgtgacctctgtgtaaaagtgt

SEQ ID NO: 101952 - DNA, 201 bp, Homo sapiens
agatctcctgagggctgtgtcataggccattggttactcatatttgccttagaatgaatctcttcaaatattttacagagtttgactctttttgtcaacakaggctttggaattcctattttccattttatgtaaactctgtctcccatatattcctcttgtgttttaaaagatgcggagaaaaatctacacagtggcccc

SEQ ID NO: 101953 - DNA, 201 bp, Homo sapiens
acccatatctattgagtgcttgttatgaagaaagagagcagcacaccggccctctgtctgctgggggagactgacgagtgaacagattattccagaaaccyggggtaagcaagatagtggataggggacagagggccaaagcttcctagactgatgattagctgagctgagtgataaaagagaagtcagataattacacaa

SEQ ID NO: 101954 - DNA, 201 bp, Homo sapiens
ttacccattcttttcagcttccttcctccttcatgattcagcatccccaagattactcacaagtcaaagcaggattcctgtccctggtaatatcagcatcsccagccagtctcaccctctgttcatcccagtgtggccgtgtggctagggactgccccggagggcctgccctccattcatgaggatcaccatggtgatgtc

SEQ ID NO: 101955 - DNA, 201 bp, Homo sapiens
agttgacatgtggagctgtgaagactagcagaggggacttgcctggttagacttctggtccccagtgtcatgcccttttcacccatctcctaggatgcctmcctcaaatgacacattaattatatctcacacttcagaatcctcttcaattgcttttaccctacacataccacctacttctaactctaatgaattattcac

SEQ ID NO: 101956 - DNA, 201 bp, Homo sapiens
tgaaaaaattattaccctaagggaacttaggatctaattagacagataaggaacaccccaagtaactcaaataactataatacaaggtaaaagattaggcmcaatggttaagggacatggcatttagagccaaattaggcaactgtatttaaatcttaactgtgccagtactggctgcaggaccttgggcaagttactccc

SEQ ID NO: 101957 - DNA, 201 bp, Homo sapiens
tgggccctgcaaccctggcaggggtgggcctggagctggaatatgaatgggggaggaagtgaagacaacaaagctccagaccccttccagtcccctgaggygacacagccgaatattcacctatttggtgacttgagtctgcacgtatttcatcattctaaccgcacacacaatgcttgaaatatataatattggcaccca

SEQ ID NO: 101958 - DNA, 201 bp, Homo sapiens
atgtgtcattaggcaaatttgtggttgtgagaccatcatagtgtgtacttacacaaacctagatggtatagcctactacacgcctaggctatatgctatgscctgtggctcctcggctacaaacctgttcagtagttactctactgaataccataggcaatgacaataataactgtgtatctaaacattgctaaacataga

SEQ ID NO: 101959 - DNA, 201 bp, Homo sapiens
cgcctcgcgcggcgcggcgccgaggagctgggtgggcgggaaggagcgcagccccggcgggtgtcagaggggactcagattctcttcgctggggtcccttycaggcgccccttctcggcggcagccgagcagccttggctcaaccagatgccctcgactcctcctttagtggttaatttgacgagtttaaggccatcccct

SEQ ID NO: 101960 - DNA, 201 bp, Homo sapiens
tgtgtcattaggcaaatttgtggttgtgagaccatcatagtgtgtacttacacaaacctagatggtatagcctactacacgcctaggctatatgctatgasctgtggctcctcggctacaaacctgttcagtagttactctactgaataccataggcaatgacaataataactgtgtatctaaacattgctaaacatagaa

SEQ ID NO: 101961 - DNA, 201 bp, Homo sapiens
ggtgattctgaagttatcttcatcaagtacatgtgactattcatttctagatgagaaatggagtctcggacaagctcatatcacagagctagttaagtgayggagctgagcttagaactcaggtttcctaacccatcttggatcatgcttccgatcagtgtgtcctctgaaagtgcttcctagaatagagacaggagaggg

SEQ ID NO: 101962 - DNA, 201 bp, Homo sapiens
aatttgaggtcagactcctgtcattgaatatccaaggtcatctcttcagatggacatcctgatctccagttcacaccaaggagcctttgatgcctggaagsctttttgccttatttttccacggcacagtcttcagacagtgaagcatgaagttactttgttattcacaactgttactttgtttactcatttaagtttaga

SEQ ID NO: 101963 - DNA, 201 bp, Homo sapiens
tcctcatagtctgtcaagcaatgtcagcttgccaaagacaacacagcttcctgggaaggatgacaataaaattataagaccaagtccacacatcaccccagaaagttatttctaactctcaccagtattcaggctaatagcctagctttccaaaagctaataatcgtaccttacctataagtacttatctgtttaatattc

SEQ ID NO: 101964 - DNA, 201 bp, Homo sapiens
tatgtttataattacccctttcacccttacacaaaagtcccttgacaataattgcataacctccttgggtttcttgttcctggcttgacagccaaatctayggaactttaaattattgatgctttctaatttttaattattttgaggtttgtgtaagctgaagctttaggagatttggcaataataatacctcacattcca

SEQ ID NO: 101965 - DNA, 201 bp, Homo sapiens
cccccaaatggagttctctatacctttgcttgattgctgctagtttcagggaacttactacctaaccaaacagtccttttctttctgggatgcctgtaatkatgaggacattcttcttctggttgcattaaaattatctcctcttagaccttcacatgtttagcctttggaattatgcagaatatatctacattctcatat

SEQ ID NO: 101966 - DNA, 201 bp, Homo sapiens
cccaaatggagttctctatacctttgcttgattgctgctagtttcagggaacttactacctaaccaaacagtccttttctttctgggatgcctgtaattakgaggacattcttcttctggttgcattaaaattatctcctcttagaccttcacatgtttagcctttggaattatgcagaatatatctacattctcatatga

SEQ ID NO: 101967 - DNA, 201 bp, Homo sapiens
acgacaaacagaatggcttaaacaacagacatatactgcctcacagttgtggaggccagaagtctgagatttaggtgtcagcagggttggttccttctgarggctctgagggagaacctgttcctttcctctctcctaacttctggaagtttgctgacaacctttggcattccttgtcttgtagaagcatcatcccaatct

SEQ ID NO: 101968 - DNA, 201 bp, Homo sapiens
ctggactctctgcaaggctactgccttcatgtctgatgctggagtctgcaggccagagggcaagtggtcaggaagggaagatggaggtgaagtgggaagarcaaggaccaggtcgaaccccaaccatgagctggagccccacagggaaagatgaagacctgagcccgttcttgtttgcctttgccctgggtatgtggtgtg

SEQ ID NO: 101969 - DNA, 201 bp, Homo sapiens
tccagaacttttttgttgttttcacaaatataggactatctcagcaaaaactcatcatcaggctgttaacttcaacattttcgagggcatggtttgccacrgggtgccccttgtgactatttcaagaggcaaagtggtatatgaagccggagtgttcagtgtcacggcaggagatgggaagtttattcctcgaaaaccatt

SEQ ID NO: 101970 - DNA, 201 bp, Homo sapiens
tttttatcttttcaaaaggattgcatctgggtgtggtggcttatgcctgtaatcctaacactttggggaggctaaggcaggtggattgcctcggcctcccraagtgttaggattacagttccagaccagcctgggcaacatggtgaaaccccatctctataaaaaattagccaggcatggtggggcataccccaccatgta

SEQ ID NO: 101971 - DNA, 201 bp, Homo sapiens
catggtcactcccccaacattggggattacaattcaacttgagatttgggtggggacacagagccaaaccataaaatgtctgagagaggtagtctagaaawcaaggtttccatgatgcttctctcagggaggaaagtcttttcctttaccctcttatgtttagtaattgggggcctgcaaattaaactgacaaaagagaga

SEQ ID NO: 101972 - DNA, 201 bp, Homo sapiens
tggatatcatgtttttaaaattgctatatgaagtcacaaaagtaataatttaaagtctggaaaaaaatttaaatgtccatgactacaaaacttctccctgwggacggagaagaatcacatgactaaatgtctatgtgttaacttgtccagccagttgacatgtggagctgtgaagactagcagaggggacttgcctggtta

SEQ ID NO: 101973 - DNA, 201 bp, Homo sapiens
catagaataatgaatctggaagaattcaaggagaaagcgtgtttgttgtggttcacgttaaaagagagagatcgttgcagaaactgtatgctgagcccttrtctgggtcgatcacagcaccagctttctctattcttggcctggttgttatgagaaagttgctcatctgggctggctgttcccgaccaaaatttatgctga

SEQ ID NO: 101974 - DNA, 201 bp, Homo sapiens
agaaagctcttgggaaggatgattttaccaagatccccaatggggtgaatggtgttgaagatcggatgtccgtaatatgggaaaaaggcgtggtgggtttyacaggttccagccttgctttgcctagttcttcagccaggatcctgcccatttgaggaccagagtggcacaaattttcatagagaagctttttgattgttt

SEQ ID NO: 101975 - DNA, 201 bp, Homo sapiens
accatagccagcgctgtgaactgtcctctctacattgtgcatgtgatgagcaagtctgcagctaaggtgatagcggatgcaaggagagatggtaattctckaatgtaacctcacttagaactcagtgttagctgaagagaaaagtccacgtctgtagcctctgcttcagtttaggagaaagtgcatgtggatttccactac

SEQ ID NO: 101976 - DNA, 201 bp, Homo sapiens
cagaggcagtggaggcagaggccacgctgagagccatcaccatagccagcgctgtgaactgtcctctctacattgtgcatgtgatgagcaagtctgcagcyaaggtgatagcggatgcaaggagagatggtaattctcgaatgtaacctcacttagaactcagtgttagctgaagagaaaagtccacgtctgtagcctctg

SEQ ID NO: 101977 - DNA, 201 bp, Homo sapiens
ttctggatgtctggctggttattgttggtagtagtggtgttgacacatcacacttggtttaatgtattcctggggtgtcaggattgatatgagagattagrgatgccagtttttagataaaggatcattattggatgcacgcatttccccttgcagactgataggtcagttcgggatttccagattgtggggtaatctggt

SEQ ID NO: 101978 - DNA, 201 bp, Homo sapiens
aaggcctctgagcttccaacggatccagagtggagtctccagctgtcacctcctaggagctgccaatgggtcccatgccaccacggctggctctacagctraaccatgagtttgtgctttcttgggcatgcccgggtccatctgcatcttctactttctccttctaagaactccacccatggctttcagattggaacctga

SEQ ID NO: 101979 - DNA, 201 bp, Homo sapiens
cctttaatgtcttatgaaaaatttttacttgtggattctcagagtccattatgcaagatttatccatttttaaacacttcctaaggctttgattaggtaawcaagttttctcacgtgctttaaattctcagaaaactgcagttctttatatgctgtatttatatgctcagtcaaaataggtggtttaaggttacagttaat

SEQ ID NO: 101980 - DNA, 201 bp, Homo sapiens
aagctaaaccaacctagtctctgtcttaaagtgtgtaccaagtaggaaaagagagccttgtcaagagatcaatgtgataccttcagataatgctaaacgayggaggaaaatgttcagtttcaccccatgtcgtcagggtcagcttctagggaccagggttcttgggtggagttttagggcagggagaagggcagaagtgag

SEQ ID NO: 101981 - DNA, 201 bp, Homo sapiens
ttccccagaggaagtgtgttcaaaggaatgacagatgtccttacaaagatgtgtgactctgaacttgcgtttgttccaataatggaccacatctcccaaastgcacaacaaatgcatagattttaaacactgtttggtagtgatctgataaatcacgtgatgatattgcattgtatttttatgtttaaaactgtctataat

SEQ ID NO: 101982 - DNA, 201 bp, Homo sapiens
ccccacagggaaagatgaagacctgagcccgttcttgtttgcctttgccctgggtatgtggtgtgggtggctgcttttggtcatgaggccaaactcacacmcctggcccaggagttggagcaggtgaaggaggatccgggggaaggtggagcattgcaaacctgaccacattctcacactacgagatgagtcagcaggtat

SEQ ID NO: 101983 - DNA, 201 bp, Homo sapiens
agaagcatcatcccaatctctgccttcatcttcatatgatgttctccccgtggaggtctgcatcccagtttccacttgatataagggcagcagttacattkgataaagcgcacatgctcgtgtcctcatcttaactaattacatctgcaaggactctatttccaaacaaggggttaggacttcaacatatgaatttttggc

SEQ ID NO: 101984 - DNA, 201 bp, Homo sapiens
ctccactatctgagagataggtttatttcccccatttcatggatgaggaagtaggcctggaggcattaattaacttgtcagtttcctatgcgtagtaaatsgcaaatggagaattctaacttagatctgtctcacttcaaaggtcacactgttgatcactacaatgtattagtttgggtggtcaaaatgagacccacaata

SEQ ID NO: 101985 - DNA, 201 bp, Homo sapiens
tactttggatgataaattgtacagtcaccctaggtttaagtgatattcaggcagtctggcttggaaagtcaagtcaggagaagaaaaaaaaaaaaaaaaaacagggaccaaggacctgaaagggaggatgtggccagagagtggggtattagtgagtttaaggtttcagatgtggtggtccaaggtggtagaaatgggagg

SEQ ID NO: 101986 - DNA, 201 bp, Homo sapiens
cttgatgctggttgaggggtgaggaaagatagatggtgatgtcatttactgagatgagaactcaagggaggagcaaacttgagtgggtgggttgtggtcarcattacaagtcaagaattctgtctgagcatgttgggattggaaaccaagtaagcagttagaccaaggaacaggccagtgttatcttgttcattactagga

SEQ ID NO: 101987 - DNA, 201 bp, Homo sapiens
ggaatttgacatatggtgatggatggcgagagagaattgggagtgggcgtagtagggaaggtttggacatcctgatgaaagattacctaagacgtcactarcctgtaaaaagttcctgcaaaaatcaactgcaatagctcttctgtgtcattgcacaataaagaacaaactgcatttagtgtaaagggagcattcaccttt

SEQ ID NO: 101988 - DNA, 201 bp, Homo sapiens
agaggatgaattaagattgcatacaaagagggttattcttcaattctctgaaatggcatagcccttctgcttgatttctcatgctcttgaattccagtgcrtcatgtgtcattggcacgaatgcttgaaatgataaaaaatacacgaaggggcagggtgcagtggctcacacctgtaatcccagcactttgggaggccaag

SEQ ID NO: 101989 - DNA, 201 bp, Homo sapiens
agggaaatgttcttactttgctctcagttctgtcctcctaccaggcatttatttaagagagctaagtttctggaggcagaataatgagaaggcaatttacycacaagaaaaacaaatggagcctttatctgtgtagaaggattgctgaattcctcacatggtggaggcgagggggatgaggacaatgttaatcagttatct

SEQ ID NO: 101990 - DNA, 201 bp, Homo sapiens
agatgattccaaggtgaggaatttgacatatggtgatggatggcgagagagaattgggagtgggcgtagtagggaaggtttggacatcctgatgaaagatyacctaagacgtcactagcctgtaaaaagttcctgcaaaaatcaactgcaatagctcttctgtgtcattgcacaataaagaacaaactgcatttagtgtaa

SEQ ID NO: 101991 - DNA, 201 bp, Homo sapiens
tattccacttgctctatggatttgcctcttctggacatttcatataaatagaatcacacaatatattatctttgtgactagcttttctcacttagcatcakattttcaaacttcacccatgtcatagcgtatgtcagtacttcatttccttttatggtaaaatactatcccattgtatgaatctattagattttatttatc

SEQ ID NO: 101992 - DNA, 201 bp, Homo sapiens
cttgacaaaggagtagtccaaataattgtcctaagttgaggtcatctgtgaagacttcacagatgactggtttgggcttgggaaggggctttgcactaacygaatccttggaggtggctctggacaggtggatggggacagtaaagccatccagatggtggagtcaggggcaaatgaggaaaatgggaaagatacagtcgt

SEQ ID NO: 101993 - DNA, 201 bp, Homo sapiens
ttgcttgtattatttacaactgtatccctaggtttaagcacagctccaggtatatatagaagctcaatagtcatttgttgagtgaagaaaccagatactawtggacaaatgtgtgatttaacatttttgtctgaactttatctgcccatggaactggttcaagagccgtgttttacattcttcccccctttgaattaaaaa

SEQ ID NO: 101994 - DNA, 201 bp, Homo sapiens
tctgaactcttatgcttttaggatcgtccctccttttcttcccttccctcccctcccttctcttcttcttttccctccctccctcccttcctcccttcctyctttcttttcttctcttccctccctcccttccttccttctcttcattttcctattctcctattttataagatggagcaaaggtgatggtgtttgtcctta

SEQ ID NO: 101995 - DNA, 201 bp, Homo sapiens
ccgaatccttggaggtggctctggacaggtggatggggacagtaaagccatccagatggtggagtcaggggcaaatgaggaaaatgggaaagatacagtcrtgggataataaaaactggagaatgagagaggggtcaggatgggaaggagttgaagatgagatttgtccttgtcagactgccaagggctttgaatgttagg

SEQ ID NO: 101996 - DNA, 201 bp, Homo sapiens
gaaaccccctttctactaaaaatgcaaaaattagccgtgagtggtagtgcatgtctataatcccagtttcttgggaggctaaggcagaagaatcatttgarctcagaaggcggaggttgcagtgagctgagatcgtaccactgtactctagcctgagcagcagagtgaggctctgtctcaaaaaaataaataaataaataa

SEQ ID NO: 101997 - DNA, 201 bp, Homo sapiens
cttatcaagttgaaagaacttttattagctaagagcaataatcctatgcttgttacacttttcattgtgtgtgtgtgtatgtgtgggtgggtgggtgtggrtgtgttttaacatatagaagttcaaacagtcttatttggtcaaatctatgagtttttcctttggaatttttgatccttattgagacttgaatctgaccta

SEQ ID NO: 101998 - DNA, 201 bp, Homo sapiens
agtctcactcagttgcccagactagagtgcagtgggatgatcttggctcactgcaacctccacctcctgggttcaagcaattctcctgcctcagcctcccragtagctgggactacaggcgtaggccaccacacctggataatttttgtatttttagtagagacggggtttcaccatgttgaccaggctggtcttgaactc

SEQ ID NO: 101999 - DNA, 201 bp, Homo sapiens
tgaatccttacctcacattaacgttcattcctgctggatccatgattgcttctgttgctgccaacatggcttcaaggtcattttttagaataatttcctcraatcgggagatagatgcagagaattttacatccaagtacagaaataaagcactttgggaaaagctattcactttttcatgatttaaaagtatgagagcag

SEQ ID NO: 102000 - DNA, 201 bp, Homo sapiens
ttctttaccagggtggtaagggcatggccagcagagaagtggtggcttttgctttttgccccagttgtcttttgaattgtgattctgatggtccaggtacyagctctcactgccagagtaagcccaccaatcagacagtgggttctctgaccagatctaccacaccagagccacagaaacaaagctggtgggccctgcaac

SEQ ID NO: 102001 - DNA, 201 bp, Homo sapiens
tgcacatatacacattcctgctgtctttttagggagcaaagaagatgttggctctggggataacaggccctgagggccacgagctgtgccgcccagaggcrgtggaggcagaggccacgctgagagccatcaccatagccagcgctgtgaactgtcctctctacattgtgcatgtgatgagcaagtctgcagctaaggtga

SEQ ID NO: 102002 - DNA, 201 bp, Homo sapiens
taccatgtgccagagacatagtaggtggtggagacaaagtgattaggcataatcccattctttaccagggtggtaagggcatggccagcagagaagtggtrgcttttgctttttgccccagttgtcttttgaattgtgattctgatggtccaggtactagctctcactgccagagtaagcccaccaatcagacagtgggtt

SEQ ID NO: 102003 - DNA, 201 bp, Homo sapiens
aatccttgtgcaagataaaggtgttaactctttcaagatgtttatggcctataaagatctgtacatggtgacagacctggagctgtacgaagccttctctyggtgcaaggaaattggagcaattgcccaggtccatgcggaaaatggagacttaattgcagaggtacgcatttgcattccaaagcttctacagaaatgaca

SEQ ID NO: 102004 - DNA, 201 bp, Homo sapiens
tttcactgctttatactattatgctttatgaatataccataattgatgatatattcttttgctggtggacattcaggttgtttgcaatttttcactatttyagacactgtatgtctttgtatatatgtgtgagagtttctctggggcattcatctatcccctggtttgttttatatgaaatgctctcacattttctcaata

SEQ ID NO: 102005 - DNA, 201 bp, Homo sapiens
aaaaagatcaaggccttaattgcatttttgtggaactaaactattgtccttattttccttattttacttagttctcttccgaatgcaacgttttagagaakgttgaaattatcatttaaattagagtaacatattgttgttatggttgctgcttccttttaggttaaagaagaaatgaaaatccttgtgcaagataaaggt

SEQ ID NO: 102006 - DNA, 201 bp, Homo sapiens
gtataacctgggaaaaagatcaaggccttaattgcatttttgtggaactaaactattgtccttattttccttattttacttagttctcttccgaatgcaamgttttagagaaggttgaaattatcatttaaattagagtaacatattgttgttatggttgctgcttccttttaggttaaagaagaaatgaaaatccttgtg

SEQ ID NO: 102007 - DNA, 201 bp, Homo sapiens
tgctgcctcccgggggcgctcctgcggggctgcgggtcctcgacgccgccggcaagctcgtcctgcccggaggcatcgacacacacacgcacatgcagttycccttcatgggctcgcggtccatcgacgacttccaccagggcaccaaggtacccgccccgccgcgcccccgccccgcggtacccacggaggctcgggcag

SEQ ID NO: 102008 - DNA, 201 bp, Homo sapiens
tgtaaacattcatagaaatgtgcaccagaaggtcatttttattgtaaatttaaaaaatataaaaagatccaagtttccaaccaggtgcagtgactcatgcycgtaatcccaacactttggaaagccaaggtgggtggattgcttgagccttggagtttgagaccatcctgggtgacatggctaaaccctgtctctaccaaa

SEQ ID NO: 102009 - DNA, 201 bp, Homo sapiens
attgtgtatttgtacccgcctcctgcttcttggtgattctttgacatttctttatatcaataagttggttcctaaggtcactgaaagctctttttttttttgctgcagcatacacttaaaatatgacccagcaatttcactcctgggtatttacattagagaaatattcatgcaaaacaggtacctgaatgtttataacag

SEQ ID NO: 102010 - DNA, 201 bp, Homo sapiens
cttaatataaagaatctcttagatgttgtctaattgtcctctttctcttgctaaccccaagtctgagaaagtcaacataatgaccttttttttttttttttggtatgaggcaaagaaatctgatttgatattttgctgtgtcaacctcattttaagatcacaacttacatcaaggaaacagtataacaagaacactgaaga

SEQ ID NO: 102011 - DNA, 201 bp, Homo sapiens
tgatgtttatgttaaaatgactaggattatagtaaatggctggtttctgtgttttaagtctctttgagtagacagtaacttacaacgtccataattttttwaaaaagtacaatatttaatataaacaaaaggtacaaagagtactatagctaacacttgtgtattaaccttcccaggcctgtctccttcctcatctcaaca

SEQ ID NO: 102012 - DNA, 201 bp, Homo sapiens
gtcatatttatatctcagctacatgaacttactagctgtgtaaactggggtgagtgttattaatctttctgtgcctcatcatccttatctagcccatgggrataataataataataataataataataataataataatacctacctcataggaagatgtcatgattattattgtttcacactgaatacataaggcatcac

SEQ ID NO: 102013 - DNA, 201 bp, Homo sapiens
tctgttacctatgagaataaattgtatgcatggcctaaaagaaaacatgacaacttgccttcaatggattcattttttggttgcctatttttgggtaaaggttttgtatagaagtttctgctaatgagtataatctcctatgtagacctaaattccactactcacaggtacatggtaccgtccttttttctaatgttttcc

SEQ ID NO: 102014 - DNA, 201 bp, Homo sapiens
taggtgatcaataaatgcatgtaaaatgaatgagtgtatgataaacccattgaatggtagggattttctacattcttccaccaagatgactttttttttttcttcctgtcttaagccagaagtgaaaagggttgtgtatagttcgtgggctagagctatggaattgtggtcttaagattctggacataggaaacccattta

SEQ ID NO: 102015 - DNA, 201 bp, Homo sapiens
atcatttaaacctgggaggcagaggttgcagtgagccaagatcatgccattgtattccagcctgggcaacaagagtgaaactctatctcaaaaaaaaaaaacaaacaaaaaaacatgtttggaggatccaaatgtattttagaatcctttgattttaaaggcactctgtctgacagcatggactagtggcctcaaggaatg

SEQ ID NO: 102016 - DNA, 201 bp, Homo sapiens
tcctgtcctgcatatttagtttgtatttttttaagattttttaaattttatttaattaattaatttatttctctgtcacccaggctggagtacagtggcaygatcttggctcactgcaatctctgcctccctagttcaagcaattgtcctgcctcagcctcctgagtagctggaattacaggcgtgcaccaccacgcccag

SEQ ID NO: 102017 - DNA, 201 bp, Homo sapiens
tcatgcttccgatcagtgtgtcctctgaaagtgcttcctagaatagagacaggagagggatgaaatatgttcttgaaaaaactgctcattctccattggayttttctgacttcaattgagaagggagccaggagattaggaaaggttatggcagtttcctcctaacatattctgtatactcaccccatcactctcgtgttt

SEQ ID NO: 102018 - DNA, 201 bp, Homo sapiens
aaatatcagctcaacacatcagtaccagagatgaaggaggtctcacgtgctggtctccttgacaaaggagtagtccaaataattgtcctaagttgaggtcrtctgtgaagacttcacagatgactggtttgggcttgggaaggggctttgcactaaccgaatccttggaggtggctctggacaggtggatggggacagtaa

SEQ ID NO: 102019 - DNA, 201 bp, Homo sapiens
cagagagatttataattcttaactgagaatgtaggtccttatggcgtatagtctgttgtcaacatctcaaaggatttatccaccagctgatcctctaagcmtttctgtacttaaaggttgtgaaaacattaaacaaaaacatgttcttcatgagcttaggatcttaaacaaaaaatgatacggtcagagatattaaggtca

SEQ ID NO: 102020 - DNA, 201 bp, Homo sapiens
ccaataactaaaagcatttttggatttgatttcattctctgtcattctttatcaaaggtgagggaaaaaatgaaaatactttattgtgtggtgagactctycagtctaattcttaataatatggagaatctcaggaggccatttgatgtgcttcttcttttgaatcctacacctgagtatctccaacagggcccagcctgg

SEQ ID NO: 102021 - DNA, 201 bp, Homo sapiens
tgctcacaaggagttttctctcacatatttgctggtgattctgaagttatcttcatcaagtacatgtgactattcatttctagatgagaaatggagtctcrgacaagctcatatcacagagctagttaagtgacggagctgagcttagaactcaggtttcctaacccatcttggatcatgcttccgatcagtgtgtcctct

SEQ ID NO: 102022 - DNA, 201 bp, Homo sapiens
gaagcatcatcccaatctctgccttcatcttcatatgatgttctccccgtggaggtctgcatcccagtttccacttgatataagggcagcagttacattgrataaagcgcacatgctcgtgtcctcatcttaactaattacatctgcaaggactctatttccaaacaaggggttaggacttcaacatatgaatttttggct

SEQ ID NO: 102023 - DNA, 201 bp, Homo sapiens
gtttggtatttggaagttctgttgtctttattgatattttagtatcttagcctccatgaacagcattcaatcattaatacctttgggattcttctctgttratcttgctaatttcagaaaatctagcatccagccaggcgtggtggctcacacctgtaatcccagcactttgggatgctgaagcgggtggatcacctgagg

SEQ ID NO: 102024 - DNA, 201 bp, Homo sapiens
aatgtcagaacttgcagttttcagtcatagtgcaagccctttctgttattacagacttatcattaacaaagtgctttgctgatggcagggcatcccattgracactcccacctgcaaggtggggagctgctatttctgaccatgagttgcccactagcatcattctccctcttacagctgagcagtagctttcattctctt

SEQ ID NO: 102025 - DNA, 201 bp, Homo sapiens
ttgaacctgggagatggaggttgcagtgagccaagatcgcaccactgcactccagcctgggcaacgagagtgaaattccatctcaaaaaaaaaaaaaaaaagtgttgtcacctattctcactctataatattctatctaatgtctacatgattatctcataaatcttaggtctgtaataaataagtcagatcataaatgtg

SEQ ID NO: 102026 - DNA, 201 bp, Homo sapiens
taaacagtacttacaaaggggctgtgttgcaatagtctagttcagagtcagttggttggatcccaagaggtaaccactcccaccccccgaaacagctgagrcttcataaagtgaaccagatggggaaatatagataaacataaacattacagtattgacctgaattctgaaagaaaggcattatagagttattttgtcttc

SEQ ID NO: 102027 - DNA, 201 bp, Homo sapiens
acaagtcaaagcaggattcctgtccctggtaatatcagcatccccagccagtctcaccctctgttcatcccagtgtggccgtgtggctagggactgccccrgagggcctgccctccattcatgaggatcaccatggtgatgtctttgtggatgcagcattctgctcacaaggagttttctctcacatatttgctggtgatt

SEQ ID NO: 102028 - DNA, 201 bp, Homo sapiens
aaaattggctgggcgtggtggcttatgcctgtaatcccagttactcgggaggctgaggcacgagaatcacttgaacccaggaggcagaggttgcagtgagyagagatagtgccactgcactccaacctgagtgacagagcaagactctgtctcgaaaaaaaaaaagaaaagagaaaagaaaattctatccttcatggacat

SEQ ID NO: 102029 - DNA, 201 bp, Homo sapiens
tttccttgaatggctgtttaatgattacaaacttaaccttcagactcatcagaggaagcacaaaaaaactcaaagattaactgaaaccacttgatgctaaytaaagctttggttctgttaagggtgttgtgtattaggaatcctttcactgacttagattccaagacttgccttatttcagctttgatagtccatagttca

SEQ ID NO: 102030 - DNA, 201 bp, Homo sapiens
tggcagaggccccagtgagtgtccctgggcctctgtctgaggcagattaatacccacaaaaagtgggacaatccagattctcaaggttgccaggaatttcygtgaaaggccaaggggatggggaggcacgtgataaatttataagattctttttttaaagctctcgcaattcataaagggagctacacttaactttgaact

SEQ ID NO: 102031 - DNA, 201 bp, Homo sapiens
gagggaactacttaagacagggagtataatttcatggtcaaaatttacaaatgaattaggaccttatctggagaaatgaatcttcatattgtaaatacaayggtgttctaaaatttagaataaatgaaaaatgaataaaatgttgctttaggggatataatccttcagaaaaattctttgatagtatctgattatttcaca

SEQ ID NO: 102032 - DNA, 201 bp, Homo sapiens
caaagccccttctgttctgtgagctaacatttatccctaaaactacccccctctctcttttattgctgtcagttaatctcaatgagccatttcctcccacytcggtgacattctacaagtccccttttctgataaaagtttgagttaattaaatgtgggaagtttgttttgtgttgtgttacagggcatttcacgacgtaa

SEQ ID NO: 102033 - DNA, 201 bp, Homo sapiens
tggggcccatccagattccctgaatcagaaagtgcatttataactagaatcccaggtgattcatatgcatatgaaagcctgagaatcacggctccaggagrcacaaaggagatccaattattgattgcttcattgtggtagcctagaaatataatgctattaaatttgattttattgttcaattgccagctctatatccag

SEQ ID NO: 102034 - DNA, 201 bp, Homo sapiens
cacttgctacagtgtattctttactccagtacaagaactcttgttctgtactgagaacagctgacaatgcttttattattatttttacaatattatagagrgaggataggttttgaatgggagttctcatttagaaataaagttctgtttgtgctattgttctctcaaaaaccctttacttgcctccattacttattggat

SEQ ID NO: 102035 - DNA, 201 bp, Homo sapiens
aagtggaaaattccagaaataaacaatcataagttttaaattgtacaacgtcctgagtagtgtgatgaaacctcaagacatcctgctccatcctgcctggkactgggacgtgagtcctccctatgtccagcacattcatgctatagacgctccctgcccgtcagtcacttagtagttggctcggttatcaggtcaactgtt

SEQ ID NO: 102036 - DNA, 201 bp, Homo sapiens
cccaaagtgcaagagtgatgctggctaattgttctattttttattagttattgctgttagtctcttactgtgcccagtaataaattaaactttatcacagrtatgtacatataggaaaaaacatagcatatgtagggttcaatactatcctcagtttcaggcatccactggaggtcttggaatgtatccctcttggataag

SEQ ID NO: 102037 - DNA, 201 bp, Homo sapiens
gaaaacgttttgaggcagcagagatcatcaaatcactggtttcatcagttctcctttgcaaattgttttgtgatttttttggcagaattaatgccaactgmaatttttatgagttcactatcaattctgtgaattattttagtttcttagtatttttttctggtatcaaatttttaggcattttagtgcatcattgtttta

SEQ ID NO: 102038 - DNA, 201 bp, Homo sapiens
aattgaagtaggggaaaattaaaatgacctggaattataccacctagaaccagccactgtaaacattttgtcttggctcagtgtggttttgtgttcgtgcwgagtgttggtatgttccgaagcatgttattgtggctcatgttgtcatgtctggcttctcgctccctggccatttcggccagtctcgggacctctatggca

SEQ ID NO: 102039 - DNA, 201 bp, Homo sapiens
gggattcttctctgttgatcttgctaatttcagaaaatctagcatccagccaggcgtggtggctcacacctgtaatcccagcactttgggatgctgaagcrggtggatcacctgaggtcaggagttcaagactagcctggccaacatggtgaaaccccctttctactaaaaatgcaaaaattagccgtgagtggtagtgca

SEQ ID NO: 102040 - DNA, 201 bp, Homo sapiens
gcctctgtctgaggcagattaatacccacaaaaagtgggacaatccagattctcaaggttgccaggaatttctgtgaaaggccaaggggatggggaggcaygtgataaatttataagattctttttttaaagctctcgcaattcataaagggagctacacttaactttgaactcaagaaaataaaccacaagagagaaatg

SEQ ID NO: 102041 - DNA, 201 bp, Homo sapiens
tcataacagcttctcctaatatttaatcaatgaatcatcaatgctttaagtgtaatgtttaatatactgatttctctttttcttaaattcaatatcccccraatcttttaaacagtattttcccacaggttagaacttcaataaaaaatgtttaatttctcaaaaataaaatcaaggaaattctaaatttagaattctcta

SEQ ID NO: 102042 - DNA, 201 bp, Homo sapiens
ttttttctagattaattaagtagcaattaatttattcaataaatagttattgagtgggcactatgcaccaggcactgttctaggatacagcagtggacaarccttacaaggccccttctctcatggggctgaaatcctggtggggccgacaggtgatcagcaagtaaggactgctatgccgggtgataagcaccatcaaga

SEQ ID NO: 102043 - DNA, 201 bp, Homo sapiens
ccaggcatggtggggcataccccaccatgtagtcccagctattaggttggtgcaaaagtaattgcagtttttgccattaaaagtgatggcaaaacagattbctttcgcaccaacctaatgcttgggaggcagagtggggaggatcacctgagccaagggaggttaaagctgcagtgagccatgatcacaccactgcactcc

SEQ ID NO: 102044 - DNA, 201 bp, Homo sapiens
tttgttatttcttctccatccttgcgaccccaggacatttcctttagccacatgcccccacactcaatgccactagcagccacttttaaatatgatagctraatgcaaagctctccggtttttgtttgtttgttttgtgatggagtctcactttgtcgcccaggctggagtgcaatggtgtgatctcagctcactgcaacc

SEQ ID NO: 102045 - DNA, 201 bp, Homo sapiens
ttttaaatttttttatttttgtggggtacatagtagtgtatatatttatgaggtgcatgagatattttgatacaagcttgcaatgcataagaatcacatcrtggaaaattgggtatccatcccctcaagcatttaccctttgtgttacaaacaatccaattatattattttagttattttaaatggtgcaattatttttta

SEQ ID NO: 102046 - DNA, 201 bp, Homo sapiens
gaatatatctacattctcatatgatagtcctttcatttattcattcaaatgtttgaagaaagttactggctcccagtaagccttcccatcaccagatatgsattcccaggttcttcaccagatccttaggcccatgagtagcaaaatcccaatcacctgacctctcctgtatccacccttctcttgacacacacttgtcca

SEQ ID NO: 102047 - DNA, 201 bp, Homo sapiens
acctggctgtgtttctgacctgcttacttggctgacaagtgagcctgggcaactggccaccatctacacctcaacactgctttgtgctttcttctcacacrtcaagtaacaagttgagaaaggacacttcaattttttctgttatgtttcattgcatctaacagggagactgtattatatagtgatagtcatggatgagtt

SEQ ID NO: 102048 - DNA, 201 bp, Homo sapiens
gtttgctcagacgggcctggattatacttacgttaattatgtttagtgcccttttcatgctaagaagtgtcctactttggatgataaattgtacagtcacyctaggtttaagtgatattcaggcagtctggcttggaaagtcaagtcaggagaagaaaaaaaaaaaaaaaaaacagggaccaaggacctgaaagggaggat

SEQ ID NO: 102049 - DNA, 201 bp, Homo sapiens; identical to SEQ ID NO: 16126

SEQ ID NO: 102050 - DNA, 201 bp, Homo sapiens
tgatagttgaatcattaacttacaattagatcttcaaaacatctctatagcctcatcttctgctgattattttcctcaccccccttcctccaccctaactytaaccatcccagatgacttctcttcacttagattttcttgataaaagttcaagcttccacttgaacttctgttttacaatgaatatctttattatagcag

SEQ ID NO: 102051 - DNA, 201 bp, Homo sapiens
ctcgggcacgacctgctgcctcccgggggcgctcctgcggggctgcgggtcctcgacgccgccggcaagctcgtcctgcccggaggcatcgacacacacasgcacatgcagttccccttcatgggctcgcggtccatcgacgacttccaccagggcaccaaggtacccgccccgccgcgcccccgccccgcggtacccacg

SEQ ID NO: 102052 - DNA, 201 bp, Homo sapiens
agctacctgcctaaggttgtacacctagggctgtaactcactgagtggctcttcaaatttagtactgcctgaccccgtcgctaaagctgttacctattagwgtctgttcttttgaaaaaacatataatgttcagatttgtcagggtggcaagtgatagatgacagagccatataagttgcattttaatgcgaggcatcttt

SEQ ID NO: 102053 - DNA, 201 bp, Homo sapiens
ggaaggacaatggaattttttattcaatgggtagtatgaattcaataaatttgaaagaatcgtgactttgcttttactacattctgtgataagagaatgargtataagagtttggcaagttttcaaatatacataaatttgtattcagaggtgtatgcaggtcagagtgggtggagttgcactgaaaacccggtagtgtca

SEQ ID NO: 102054 - DNA, 201 bp, Homo sapiens
catgcccttctgggtcatttaaacaggcagcatctttttgcaatttcctggacccatcgagtttgcccaagtgcttacaaatgcacattgttcaagatgayaaatgacttaactaggaaattgatagctaatttgttgaaaacctcttatgattccaggctgctctctcaggaggcaccaccatgattattgatttcgcca

SEQ ID NO: 102055 - DNA, 201 bp, Homo sapiens
agaatgaagtataagagtttggcaagttttcaaatatacataaatttgtattcagaggtgtatgcaggtcagagtgggtggagttgcactgaaaacccggyagtgtcagtagctggcaggaggaacatctttttaaaaattgggaaaccatgcaacacatttttctttttttcttttgttttttctttattgtaaaggaca

SEQ ID NO: 102056 - DNA, 201 bp, Homo sapiens
cagaggtgtatgcaggtcagagtgggtggagttgcactgaaaacccggtagtgtcagtagctggcaggaggaacatctttttaaaaattgggaaaccatgyaacacatttttctttttttcttttgttttttctttattgtaaaggacaaaaagttctcaaaattattgagaagggaaattacactttgctttgaaacttt

SEQ ID NO: 102057 - DNA, 201 bp, Homo sapiens
gattgcagattctgttcaggggggttattcgtttgctagggctgctgtaaccctagcaaacagaatgtacgacaaacagaatggcttaaacaacagacatwtactgcctcacagttgtggaggccagaagtctgagatttaggtgtcagcagggttggttccttctgaaggctctgagggagaacctgttcctttcctctc

SEQ ID NO: 102058 - DNA, 201 bp, Homo sapiens
cagcttccaagtctctagtgataagtcaatcttccctggttgtgaaactcctagagaggggatttatgataattgaggtctttggggaggctttgctttayagcagatttgggacttaaggaaaaacaaaaacaaacaaacaaaaaaacacctattctcaaatatctggagctcaaaataatatttatgctacagtggtat

SEQ ID NO: 102059 - DNA, 201 bp, Homo sapiens
gagtggccttctgagactctgtgggcttaggtgagcttgcataaccagctgcagtagtgagaaagcattcagggctttttcaagcagtggttctttttttkttgttgttgtttttgccttataataggatgcagtcttcacaagaacataggaccttggctttttctttaacaaaacctataaatgtgctcaatagagtct

SEQ ID NO: 102060 - DNA, 201 bp, Homo sapiens
aaataagaatatagtccttctttcctacataaaaggtagcatactatacaccttgtctacacattgcttttttttccacttgaaaatatgttctgaaggtsagcccacattagatacagagattttcctcattcttttttgtaagtgcagggtatgctactgtatttattcaacaagtcccctattgatggacatctgggt

SEQ ID NO: 102061 - DNA, 201 bp, Homo sapiens
ttactgctaaacagaaaacagaccaagaaacatcatggagtatgaaacaagctgcttcctatttattttctggtggattaagaatgttttcatcaaccgcrtgctttccaggtagcttcccataaagctttcgaggggcagtattgtctagtggttaagagcacaacctctgaagcgaaaggcccaggcttatctcatatg

SEQ ID NO: 102062 - DNA, 201 bp, Homo sapiens
aagctaagatgccactaagaatgatagttataacaattttacttatttattcattactaatcaacctgtacagcatgctagaaatgttgggtacccaacaraaatgggctggatgtttacctctcatttacttcagtgttctgttcccaaaacacagtcatgtcccagaagacagtggaggcaggaatttaaaccaacctg

SEQ ID NO: 102063 - DNA, 201 bp, Homo sapiens
tctcctatttttgataagcactgggcaaagaaatgatttcactcttttgccaatactggtagagaaaggaggaaaaataaataaggtgcattttactcaawgactttagtcccatggtagcttctgtcatctcaattttaggaatgcagataatcagagacagtgttataattcaaccttgctgtttttgtttgtttttta

SEQ ID NO: 102064 - DNA, 201 bp, Homo sapiens
gaatgcagataatcagagacagtgttataattcaaccttgctgtttttgtttgttttttattaaaacaggctgtatttttgtaagattcattataaaaatmatgggtctcactctgttgcccaggctggagtgcagtggtacaatcttggctcactgaagtctctaacttccaagtgatcctcccatctcagtctcccaag

SEQ ID NO: 102065 - DNA, 201 bp, Homo sapiens
gttctctatacctttgcttgattgctgctagtttcagggaacttactacctaaccaaacagtccttttctttctgggatgcctgtaattatgaggacattsttcttctggttgcattaaaattatctcctcttagaccttcacatgtttagcctttggaattatgcagaatatatctacattctcatatgatagtcctttc

SEQ ID NO: 102066 - DNA, 201 bp, Homo sapiens
cagacttactgtgacagtataatacttgtgaaaataccctcatgcgcagttgtcaaagaggcaaaattgcttcagaataaaatagtttgaaagatttcctrccccatgcatgtgaccaaggcatgggatcaagcaggggcccaaagaggaagcgttggacataaactgtgcccagctgttcacatggtgactgcatcagca

SEQ ID NO: 102067 - DNA, 201 bp, Homo sapiens
ttcatataaaaactctgtctcccaggtttcttgcacacctttaattttcaccactaaatttcagaatgactaaaattaagaagcttggatggattattttrgctaagatagcccgagcctccagaactgacaccttttaaaaattattagcagtgaaactgttcaaacaaacctcctaagattcattttgtggccttcaga

SEQ ID NO: 102068 - DNA, 201 bp, Homo sapiens
gggtttcgccatgttggccaggctggtcttgaactcctgacctcaggtgatccgcccacctctgcctcccacagtgctgggattataggcatgagccactrtgcctggccaatttttcagtttttaaaactcctggtcttcttttttgtgtgtgcgtgtgctgtttgtgttttcttcaaaagtctggtgatccttggctgt

SEQ ID NO: 102069 - DNA, 201 bp, Homo sapiens
tatgtatctggcgttgtttctcatttatgactgaaattgtcaatgcactgctttgctgttgttttggtttacagttaaacttgttttagcttgtcttaatwaagtttacgtctattttaaatccatgttcctttctttagggtaaaaatatgatgctcatttgaacgtaacaaatattttccttatatttttcataaacaa

SEQ ID NO: 102070 - DNA, 201 bp, Homo sapiens
tcaatgcactgctttgctgttgttttggtttacagttaaacttgttttagcttgtcttaataaagtttacgtctattttaaatccatgttcctttctttasggtaaaaatatgatgctcatttgaacgtaacaaatattttccttatatttttcataaacaacaaagttcttggatgccaagcgcatgctaggtactgtgc

SEQ ID NO: 102071 - DNA, 201 bp, Homo sapiens
aacatattctgtatactcaccccatcactctcgtgttttttcttttacagtgatgatctaaccacaacagggactgataactgcactttcaacacctgccrgaaagctcttgggaaggatgattttaccaagatccccaatggggtgaatggtgttgaagatcggatgtccgtaatatgggaaaaaggcgtggtgggtttc

SEQ ID NO: 102072 - DNA, 201 bp, Homo sapiens
ttaagggacatggcatttagagccaaattaggcaactgtatttaaatcttaactgtgccagtactggctgcaggaccttgggcaagttactcccctcttcraggctctttcctccccagtaaaatgtagatatgataataattgtagcaacttttggggcttgttgagaagagttaatgcctttaatatggtgcctggcat

SEQ ID NO: 102073 - DNA, 201 bp, Homo sapiens
gttactcatatttgccttagaatgaatctcttcaaatattttacagagtttgactctttttgtcaacagaggctttggaattcctattttccattttatgkaaactctgtctcccatatattcctcttgtgttttaaaagatgcggagaaaaatctacacagtggcccctctcttcccaagtagtcacgctgagtgctgct

SEQ ID NO: 102074 - DNA, 201 bp, Homo sapiens
aaaatctacacagtggcccctctcttcccaagtagtcacgctgagtgctgcttggcaatgttgaacaagaatacaccaaatttcatttactcatgtgcaaygaactgatgcttaggcactagtgctgtaggaagaatcgatgtgcaactgagtcaaggtgattttgagtctcaagtttcctttcttctcttttttttggaa

SEQ ID NO: 102075 - DNA, 201 bp, Homo sapiens
cttggcaatgttgaacaagaatacaccaaatttcatttactcatgtgcaacgaactgatgcttaggcactagtgctgtaggaagaatcgatgtgcaactgwgtcaaggtgattttgagtctcaagtttcctttcttctcttttttttggaaaaagagtcgcgttctgttgcccaggctggagttcagtggcatgaccttgg

SEQ ID NO: 102076 - DNA, 201 bp, Homo sapiens
cttcagtttaggagaaagtgcatgtggatttccactacttttcttcctccctttttattagcctcctggtttcatttatccttatgtgtgtctgttttccmccacttttgttcatcttcatccttgcctctctaccttcatgttttatttgttatttcttctccatccttgcgaccccaggacatttcctttagccacatg

SEQ ID NO: 102077 - DNA, 201 bp, Homo sapiens
gcatctaacagggagactgtattatatagtgatagtcatggatgagttcctgagcctgaggatcttttcacacagaaaagaccttaacattcacctgaaartaaaacaaaatgtaatcatttttagaagtcaagaaagtatttgaggcatagatacagaaataaactaaaattgtgtttgttaaaagtcttagttaacact

SEQ ID NO: 102078 - DNA, 201 bp, Homo sapiens
aattgtcaatgcactgctttgctgttgttttggtttacagttaaacttgttttagcttgtcttaataaagtttacgtctattttaaatccatgttcctttytttagggtaaaaatatgatgctcatttgaacgtaacaaatattttccttatatttttcataaacaacaaagttcttggatgccaagcgcatgctaggtac

SEQ ID NO: 102079 - DNA, 201 bp, Homo sapiens
tttcacacagaaaagaccttaacattcacctgaaagtaaaacaaaatgtaatcatttttagaagtcaagaaagtatttgaggcatagatacagaaataaaytaaaattgtgtttgttaaaagtcttagttaacactgctttggtaatgaactttggaaaaactgagcattcagccttcagatgtggtctgcattgacactc

SEQ ID NO: 102080 - DNA, 201 bp, Homo sapiens
aatggaaataagtcaatcaggaataaaagcaaaggaaataactaggcttcatgtagctatctgagagaaattggccccagccatcctttcccattcaatayagcttctccaaactcattcccagtctggggttgaggagagggagataagaatggggataagaaacagaacaagaagaaacaaaagataagtggttgttcc

SEQ ID NO: 102081 - DNA, 201 bp, Homo sapiens
ttaacttcaacattttcgagggcatggtttgccacggggtgccccttgtgactatttcaagaggcaaagtggtatatgaagccggagtgttcagtgtcacrgcaggagatgggaagtttattcctcgaaaaccatttgctgaatatatttacaaacgaataaagcagcgagaccgggtgagtgtgccacagtgggatactg

SEQ ID NO: 102082 - DNA, 201 bp, Homo sapiens
aaaataattttaaaatctgaacataaaagacaatgccctccttccactcactccaccctcattaatcaccttaaagagtgatctcttgggtttttctctcrgaaaaatgtaattactttgtaatgaaatgttaatgttatgttctattcttaaagttacttgttacagtgatgaagctatgacttaatagagttgctaagt

SEQ ID NO: 102083 - DNA, 201 bp, Homo sapiens
taatacttaccagcatcctcagatgctctacaatataagaaattaggtgcagttctgtttgtttaagagatgcaagtcttgtcattttatcgataggatamtttttagtatttgatcattagaatgattctttgaattgctttacagcatagtggtaaaatggatgaaaacagatttgtggcagttaccagcacaaatgca

SEQ ID NO: 102084 - DNA, 201 bp, Homo sapiens
ggggcccatccagattccctgaatcagaaagtgcatttataactagaatcccaggtgattcatatgcatatgaaagcctgagaatcacggctccaggaggsacaaaggagatccaattattgattgcttcattgtggtagcctagaaatataatgctattaaatttgattttattgttcaattgccagctctatatccaga

SEQ ID NO: 102085 - DNA, 201 bp, Homo sapiens
agtctccatttgttgttcaagctggtcttgaactcctggcctcaggcgatcttcctgcctcagcttcccacagcactgggattacaggagcgagctaccaygacccgctggctttggtgttttaaaatttgtaattgtaattggtttttgggttttggcattacatttacattttttatttaagacgttatcattttgcta

SEQ ID NO: 102086 - DNA, 201 bp, Homo sapiens
tagagtcgggatttcaccatgttgcccaggctggtctcaggctaacctcccaccatggcctcccacagagctgggattagagctgtgagccaccacgcccrgcctgacatctcttctctacaggctgaagaagaaacttagaggccctaagtgctctctctctctctgcctcctccagatgtctaccagctgtattattat

SEQ ID NO: 102087 - DNA, 201 bp, Homo sapiens
tcttagccacaaaaaaagctactttgtatattccctcttgtatttgcccacatgcatatatatttttctggtagacataatgtacatactctctatcaccrgtttttccattgatattacataattgtcagggtttttgcttcccagagtatttttaattctagtctttcataaatgcctaatattctataggatagactt

SEQ ID NO: 102088 - DNA, 201 bp, Homo sapiens
gtccctcccatcaatataactgtgatgtgtaggaatgcagcagcccaggctatggaaatatttggcagattataatggccataaaaagtcttttcaccctraaggtttgaagcccctctctattgtttcctagctttattttctttgagtttgtatctttcatcaccataattcatcataactcattctatacttagtatt

SEQ ID NO: 102089 - DNA, 201 bp, Homo sapiens
ggcattctaaagatgaaataagatgttataaacgatctccctgacatactagatgctcctctttctcttttccatggcagctatttctcactgagagcagwttattttttattattatcatcaccatgcttttttacagctatttggctcttaggtaacagcctggagccactgagggtttcaagcaggaaagtgacatga

SEQ ID NO: 102090 - DNA, 201 bp, Homo sapiens
cagctggatgcaatacattgtactcaaagttgagtgaaaaaattattaccctaagggaacttaggatctaattagacagataaggaacaccccaagtaackcaaataactataatacaaggtaaaagattaggcccaatggttaagggacatggcatttagagccaaattaggcaactgtatttaaatcttaactgtgcca

SEQ ID NO: 102091 - DNA, 201 bp, Homo sapiens
cccactaaccttcccagcctctagtaaccatccttctattctgtatctccatgagtttaattgttttaatttttagatcccacaaataagtgagaacatgyaatgtttgtctttctgtgtctggcttatttcatttagcataatgacctccagttccatccatgttgttgcaaatgactggatctcattcttttttatggc

SEQ ID NO: 102092 - DNA, 201 bp, Homo sapiens
cttaggctcccctgacttgtgacaatttctctgactctgtttttgatgaccatgacagttttgaggaatatcgatcaggtattttgtagaatggcctctgytgtgattttcctgatgtttttctaattataagcttcgggttgtgggtttgcgggaggaagatcacaaaagtaaagaaccattttcatcaaaagacatacg

SEQ ID NO: 102093 - DNA, 201 bp, Homo sapiens
gctgcacagcacacagtaggcggcacaaaagtctgctcagttaggtcacatgctccagaggcactcactgcaaaagagcctgaagattgaactgaaatatrccatcggctttgctgagtatgaatgccaagaggagcagagagaagtcaagccctctaggtgataggcaggaacgagctgaaagaaggacataaatcttgg

SEQ ID NO: 102094 - DNA, 201 bp, Homo sapiens
tggattatacttacgttaattatgtttagtgcccttttcatgctaagaagtgtcctactttggatgataaattgtacagtcaccctaggtttaagtgataytcaggcagtctggcttggaaagtcaagtcaggagaagaaaaaaaaaaaaaaaaaacagggaccaaggacctgaaagggaggatgtggccagagagtgggg

SEQ ID NO: 102095 - DNA, 201 bp, Homo sapiens
aattgattagcttaattacaggtaaaagctttctgaagtaactaatggaaataatgttctgctttaaagaaatcatatttcattttgttggtctataccaratgtacagtggtcttcagataattcaatatctatgaggaaggacaatggaattttttattcaatgggtagtatgaattcaataaatttgaaagaatcgtg

SEQ ID NO: 102096 - DNA, 201 bp, Homo sapiens
taactgcactttcaacacctgccagaaagctcttgggaaggatgattttaccaagatccccaatggggtgaatggtgttgaagatcggatgtccgtaataygggaaaaaggcgtggtgggtttcacaggttccagccttgctttgcctagttcttcagccaggatcctgcccatttgaggaccagagtggcacaaattttc

SEQ ID NO: 102097 - DNA, 201 bp, Homo sapiens
aggcttcccctaccacatccagctaatttttgtatttttagtagagatgggatttcaccatgttggccaggctggtctcaaactcctgacctcaagtgatmcacctgccttggcctcccaaagtgctgggattacaagcatgagccactgcacccagcctatacctttgctatgtatgtacatatttcttttttttttaaa

SEQ ID NO: 102098 - DNA, 201 bp, Homo sapiens
tctaaaaactaccgtatagaacaaggaatatttatgctaagtggaaatccagaaatttgctaataacttatttgcagataaacaaatacatatataaaatrcctctgtttgctcagtactgtgtgaggcataggaggtgaaggacatggtacctacatacaaggtcagcttgctcatgtctaaatccaatttatctcacca

SEQ ID NO: 102099 - DNA, 201 bp, Homo sapiens
gcagtgactcatgctcgtaatcccaacactttggaaagccaaggtgggtggattgcttgagccttggagtttgagaccatcctgggtgacatggctaaacyctgtctctaccaaaaacaatataaaaattagctgggtgtggtggcacgtgcctgtagtgccagctacttgggaggctgaggtgggaggatcgcttgaact

SEQ ID NO: 102100 - DNA, 201 bp, Homo sapiens
tacagctatttggctcttaggtaacagcctggagccactgagggtttcaagcaggaaagtgacatgatctgatcttcatttttaaaagacaatttgagcarctttgtggagagtggtaaggaatgcaggagggtaagaattgaaacaaagaagccagtaagaagtgttggggttgtccaggtgagagatgacggtatagac

SEQ ID NO: 102101 - DNA, 201 bp, Homo sapiens
ctataggttaagtctaaaatttagaactgtcacagggtaaaattatggaaatattcttctctgtagaaacaattagtgagaagagaacttcagagaaattyatagcactaacttgcagtgcaagttagtgttattcaaattgactctcagagaagcaatttccaagtgtcaaggtcaagtgagttttcttcattccagtag

SEQ ID NO: 102102 - DNA, 201 bp, Homo sapiens
agcagttagaccaaggaacaggccagtgttatcttgttcattactaggactgcagcacacagcagcgggggcttcctcatcagcccttccaaataaggctrggggaactttgagctgctcctccttagactcactcagccttgacgatttttaaaaaatttatctctttaatccattcctgagagggattgtagaaccttc

SEQ ID NO: 102103 - DNA, 201 bp, Homo sapiens
actttttcctgcccttctaataaacttgtgtcttggtaatcacacctctatttccaagaaaacgttcttgttctctaagcgctctttttttccatggttcygtattctttttaatgtttttctttcaatagatgcattactttctttttaaaaataatttggtactttatttgtttttttatttatttttatataaagaca

SEQ ID NO: 102104 - DNA, 201 bp, Homo sapiens
agatggcactcactactggaataaagaatggcaccatgcagcccaccatgtcatgggtccacctttgcgaccagacccctcaacacccgacttcctcatgwatctgttggctaagtaatcattttgcagatgactgggaagtgtattgccaaaagaaggtttgggtagaagggagctcgtcctcccatctggatcctccac

SEQ ID NO: 102105 - DNA, 201 bp, Homo sapiens
tatcttgttcattactaggactgcagcacacagcagcgggggcttcctcatcagcccttccaaataaggctaggggaactttgagctgctcctccttagastcactcagccttgacgatttttaaaaaatttatctctttaatccattcctgagagggattgtagaaccttctaccagaatttagagtatgctattattct

SEQ ID NO: 102106 - DNA, 201 bp, Homo sapiens
ccaagcgtgtctgtttcctgaacttgctgtgtgaatgcacatggggcatagtcactggacagcttcagtttaaggtgcagggacctcaatctagcatcaayaccacctaagaagctttatttcccagcagaggtaagggtgagtgttgacagacccagacctcctcttcccctccccttcactgccctttctgccccagga

SEQ ID NO: 102107 - DNA, 201 bp, Homo sapiens
acaggaatagcttcatggagtgatgtatggtttcagaatactgctgccaaagcttttaaactgggttgtatctttgcaatgataagcataatttgccttgyagataagataaaattgagtggatggctgctttggtccttgagatgggtattctccatttctgaaataaccatttgtcaatgtctttctcaaggtggtagc

SEQ ID NO: 102108 - DNA, 201 bp, Homo sapiens
gactgctagtgtcaactacatgcattaagcaatggctctgccatatgctggggtctgtgtcaggctgggcagttcctacttcggacagaggtttgccatcrtcattagagagaaggaataagacaaggattgctaagagttggaggttaagtctacttagaaaacaaatgtgcagctgaacttctgaataacagcagtgat

SEQ ID NO: 102109 - DNA, 201 bp, Homo sapiens
ccacaacagggactgataactgcactttcaacacctgccagaaagctcttgggaaggatgattttaccaagatccccaatggggtgaatggtgttgaagaycggatgtccgtaatatgggaaaaaggcgtggtgggtttcacaggttccagccttgctttgcctagttcttcagccaggatcctgcccatttgaggaccag

SEQ ID NO: 102110 - DNA, 201 bp, Homo sapiens
agcaagatagtggataggggacagagggccaaagcttcctagactgatgattagctgagctgagtgataaaagagaagtcagataattacacaaaaatgaragcggcagcccagcccatgcaaaagcatggccctgaccggaagctaccaggaaggattctgatgtgcctggcctgggtggtgcctgctcccagagcctgc

SEQ ID NO: 102111 - DNA, 201 bp, Homo sapiens
aattatggccatcggttatggaggaaacagaggacagagtgaaaatggctgaaaagaaatttaatatcagtatctgaaaagaatcccagggtccttatatkcttattgtacagcaaagaaccttgtcttcctataaaggccttagaagaaatcacctataaaagtggtcccctccctctagaagactacagtggaagtcta

SEQ ID NO: 102112 - DNA, 201 bp, Homo sapiens; identical to SEQ ID NO: 16137

SEQ ID NO: 102113 - DNA, 201 bp, Homo sapiens
gcagtgtcgcaatctcagctcactgcaacctccacctcccaggttcaagcgattctcctgcctcagcctcccgagtagctaggattacaggcgcctgccaycttgcccggctaatttttgtatttttagtggagacggggtttcgccatgttggccaggctggtctcaaactcctgacctcaggtgatctgcctgccttgg

SEQ ID NO: 102114 - DNA, 201 bp, Homo sapiens; identical to SEQ ID NO: 16138

SEQ ID NO: 102115 - DNA, 201 bp, Homo sapiens
  misc_feature (1)...(201): n = A,T,C or G
aacatagtttaagtggaaatataaacaattaattgtaattcagtatcacacatttttgggggaggcagtggggtggaggggtagggtctcactctattgcncaggctgaaatgcagtggcacaaccacagctcactgcaacctccgtctcctgggttcaagtgattctcgtgcctcagcctcctgagtagctaggattacg

SEQ ID NO: 102116 - DNA, 201 bp, Homo sapiens
cttctatgggtttggtgagacagaacacactcataagcaacaagttacatgaagtgggtttattacttacagataggcagcaagggacaaaagaagcctakgatccactgtgagatggtttcccaagactcaagaaagctgcctgggtgaatgagtctcgattaagcatgcctcacttgcaccatagctgagagaccccaa

SEQ ID NO: 102117 - DNA, 201 bp, Homo sapiens
ggggccttcccttgtttcttttggctttgcaggagttcactgtcttactttttgagtgaagaatctccatttgagctacaaaaggagcaattggtagaatytgagttaagatgacatagagaatgcatacctaataccatacccaggttttcaacagtgggagggctgaataaatacattcttaaggagataaaaaatgat

SEQ ID NO: 102118 - DNA, 201 bp, Homo sapiens
cctctgcctcctgggttcaagcaattctccttcctcagcctcctgagtagctgggattacaggcgcccgccaccacacccagctaatttttgtatttttaktagaggcggggtttcaccatgttggtcaggttgatctcgaacccttgacctcgtgatccacccgccttggcctcccaaagtgctgggattacaggcgtga

SEQ ID NO: 102119 - DNA, 201 bp, Homo sapiens
tctcctgcctcagcctcccgagtagctgggactacaggtgcccgccaccacactcagctaattttttgtatttttagtagagacggggtttcaccgtgttvgccaggatggtctcgatctcctgacctcgtgatccgcccaccttggcttcccaaagtgctgggattataggcgtgagccactgcgcctggcctgagtgtg

SEQ ID NO: 102120 - DNA, 201 bp, Homo sapiens
ccaattagagaggacaagtgttcaatcaagacataatgtcataggcacggacttctcctcactgtcttcctcagggcgaagaagctgccagcctggagcasaaagctgggtagagacactgctttaactttattccctcagggaaaactgcagccatgaaagtacaacattgagctgacttgacttggcagaaagatgtgt

SEQ ID NO: 102121 - DNA, 201 bp, Homo sapiens
gctggagaggatgtggagaaataggaacacttttacactgttggtgagactgtaaactagttcaaccattgtggaagtcagtgtggtgattcctcagggayctagaactagaaataccatttgacccagccatcccattactgggtatatacccaaaggactataaatcatgctgctataaagacacatgcacacgtatgt

SEQ ID NO: 102122 - DNA, 201 bp, Homo sapiens
atgtctgttaggtccacttggtccagagctgagctcaagtcctgaatatccttgataattttttgtcttgctgatctaatattgacagtgaggtgttaaartctcccactattattgtgttggagtctaagtttcttcataggtctctaagaacttgctatatgaatctgggtgctcatgtactgggtacacgtatattta

SEQ ID NO: 102123 - DNA, 201 bp, Homo sapiens
gatcactcagatgcctcttcttgcctctaaagaatgggaacgggggccaagtgcggtggctcacgcttgtaatcccagcactttgggaggccgaggtgggyggatcacaaggtcaggagatcaagaccatcctggctaacacggtgaaaccccgtctctactaaaaatacaaaaaattagctgggcgtggtggtgggtgcc

SEQ ID NO: 102124 - DNA, 201 bp, Homo sapiens
tggcgtgataacggctcactgcaacctctgcctcctgggttcaagcaattctccttcctcagcctcctgagtagctgggattacaggcgcccgccaccacrcccagctaatttttgtatttttagtagaggcggggtttcaccatgttggtcaggttgatctcgaacccttgacctcgtgatccacccgccttggcctccc

SEQ ID NO: 102125 - DNA, 201 bp, Homo sapiens
aaggccacccagagaactgtcattcagtagaaggtggtaaacctttaactgtgtagtgcctgtaaagtcaccatgggcatacagaagcaccaatcagccaytcaattaacccatgtaacccaatggggagtcatggctccaatttaaaaatgtgacaccttgtcattttaattaggtgatacatttggtcacaagaaagtc

SEQ ID NO: 102126 - DNA, 201 bp, Homo sapiens
tttcctgagttatatacctcaggggccatgtgactcatttagcaaagctttgaaggacatcctgcttctgagagaaaggaacaaaggctgggctgtcccargcagttcctccctatctcaagatgttagattctccaggaaggactggaacaaggcttttgctgtttcaggcagttcctccctatctcaggatactgcact

SEQ ID NO: 102127 - DNA, 201 bp, Homo sapiens
gaagcctaggatccactgtgagatggtttcccaagactcaagaaagctgcctgggtgaatgagtctcgattaagcatgcctcacttgcaccatagctgagrgaccccaaaaggcagcctttcctgagttatatacctcaggggccatgtgactcatttagcaaagctttgaaggacatcctgcttctgagagaaaggaaca

SEQ ID NO: 102128 - DNA, 201 bp, Homo sapiens
ggagtgcagtgctgcaatctcagctcaatgcaacctctgcctcccgagttcaagtgattctcctgcctcagcctccctggtagctgggattacaggcatgygccaccacacccggctaatttttgtatttttagtagagacggggtttcaccatgttggccaggctggtctcaaactcctgacctcaagtgaaccacccgc

SEQ ID NO: 102129 - DNA, 201 bp, Homo sapiens
acatccttctgtttaatgaaagcccatttgtgctcctttgagcactccccacaatacacacagatgggtttacttttagttaatcagaggaaaagaatcawtgaatgaaggtgttactttatatacacagaactggtcctttgggtgaggtatgaagaagagcagaaaactccttcaaggagaactaatagcatgtttggt

SEQ ID NO: 102130 - DNA, 201 bp, Homo sapiens
ggattgagtttcatgaaagtaccagttttattactttttagttaagacctgaaacatgcagggttttatgtggatgtactaatcaatcaaaaggcaggacmaaagcaatggattcctgggacaagaggcactagggatgtttatctgaagagcaaaccatgatagtcccagtggggacacttagaaatttccccaacctcc

SEQ ID NO: 102131 - DNA, 201 bp, Homo sapiens
gcattaacacctatttgataggttttctgaaaaagcttctagcctagtgtctgacatactgtaggcacctgttaaatcaaaacatctattagtttcctgtstgttttgctctttgctgatgtcagaatgccgtccacccaccccaccaccatacacgcacctagtcaaatcctttttgtccttcagaatccatcatattcc

SEQ ID NO: 102132 - DNA, 201 bp, Homo sapiens
agcgttgtcctttttgctcagtattgcttcggctgttcagggtcttctgtagtttcatacaaatttcagaatttgttttttctatttctatgaagaatgtsattggtattttgacagggattgcattgaatctgtagattgctttgggtagtgtggacattttaacaatattaattctttcaatctatgagcatgtgatgt

SEQ ID NO: 102133 - DNA, 201 bp, Homo sapiens
agctagtaactgccagaactggaatttgaacacaggcagtctggctgtagatcagcattgtcaaatagaaatacaatgcaatggatgcacctggaggcgawaaacgtaagcgaattaatgcaggaacagaaaaccaaatattgctgggtgtggtggctcatgcctgtaatcccaacactttgggaggtcgaggcgggcaga

SEQ ID NO: 102134 - DNA, 201 bp, Homo sapiens
ctgtccatatgggcagtctgatatggtttggctgtgtccccactcaaatctcatcttgaattgtagctcccaaaatccccatacgtcgtgggagggacccrgcagcaggtaattgaatcacaggggtgggttttccatgctgttcttgtgatagtgaataaatctcacaagatctgatggttttataaagggcagtccccc

SEQ ID NO: 102135 - DNA, 201 bp, Homo sapiens
ccctggaggaggagggtactgaataatacctactgctgctgattcccatgccctagcagttctctcaattttttgggtggtatcaggaggcaggcaggccmagcagtgaactcaggaaccatcagggtgaaagtgcctctggaattttctcacaatctgttaggccctttttatggagtctggttttcaaaacctgctata

SEQ ID NO: 102136 - DNA, 201 bp, Homo sapiens
accattctcctgcctcagcctcccgagtagctgggactacaggtgcccgccaccacactcagctaattttttgtatttttagtagagacggggtttcaccvtgttagccaggatggtctcgatctcctgacctcgtgatccgcccaccttggcttcccaaagtgctgggattataggcgtgagccactgcgcctggcctga

SEQ ID NO: 102137 - DNA, 201 bp, Homo sapiens
gtggcgtgataacggctcactgcaacctctgcctcctgggttcaagcaattctccttcctcagcctcctgagtagctgggattacaggcgcccgccaccasacccagctaatttttgtatttttagtagaggcggggtttcaccatgttggtcaggttgatctcgaacccttgacctcgtgatccacccgccttggcctcc

SEQ ID NO: 102138 - DNA, 201 bp, Homo sapiens
ggacttctgctctacttggacttcatactcttggctgtctctgaggtagaggcagagagaacatccctgactctctgctgcccattttctgccatgggccsccccccccttccagaggaggaggtgttggggaacctctcccacatggcagaacaaccactcaagtctggggaggtctttggcagtcatcttgggccagat

SEQ ID NO: 102139 - DNA, 201 bp, Homo sapiens
aaccctacacaggtctggccaataaacatttctgcaatgatggaaatgttttataatactagcaccacctaactctggtagccattaacacatgtgaataktgagcattgaaaatgtttctagtgtgactaagaaactaaagttttaattttgtttagttttgattaattaaaatgtaaatagctagtgtggccagtagct

SEQ ID NO: 102140 - DNA, 201 bp, Homo sapiens
aacgcctctatctccacctccatccctttcttctgtctccccagggggcaatggtgcaagtaaaccaaattcgaaatgcttggtcccagtgttgttagcarctgattcataggtgctcccctcattttagataagaagaaattgagatttgcaaaagtcacacaaactggagctcagattgcctgatttgtactggtatat

SEQ ID NO: 102141 - DNA, 201 bp, Homo sapiens
tgctgtgtttctgtggcacacaaactaagaatggtttttacctggttaaatggtaggaaacagtcaaaagaagattttgtgacatgtgaaagttgtatgarattatatgaaattcacatttcattgtccttatggcggggtcatcagaacgcaaccacacttatttatgtgttatttatgctgctttcttgaaacaaaact

SEQ ID NO: 102142 - DNA, 201 bp, Homo sapiens
aagttctgagaagtgacaggaatgtaaaattttgtgtttaaaatgtaagaagtagcaggggatgatgaagaatgcttaaaaatgcttgtttttattatagrcagtggaaaaaatgtgagtctcaatttgcttgccctggaattgctccagctagcagaataaatcaaggctagaaccagatcagaatttcttacgagatga

SEQ ID NO: 102143 - DNA, 201 bp, Homo sapiens
tggcgcgattttggctcactgcaagctctgcctcctgggttcacgccattctcctgcctcagcctcccaagtagctgggactacaggcgcccgccaccacdcccggctaatttttttgtatttttagtagagacgggttttcaccgtgttagccaggatggtctcgatctcctgacctcatgatccgcctgcctcagcctc

SEQ ID NO: 102144 - DNA, 201 bp, Homo sapiens
gcgatctccactcactgcaagctccgcctcccaggttcacaccattctcctgcctcagcctcccgagtagctgggactacaggtgcccgccaccacactcrgctaattttttgtatttttagtagagacggggtttcaccgtgttagccaggatggtctcgatctcctgacctcgtgatccgcccaccttggcttcccaaa

SEQ ID NO: 102145 - DNA, 201 bp, Homo sapiens
ctcgctctgttgctggagtgcagtggcgcgattttggctcactgcaagctctgcctcctgggttcacgccattctcctgcctcagcctcccaagtagctgrgactacaggcgcccgccaccacgcccggctaatttttttgtatttttagtagagacgggttttcaccgtgttagccaggatggtctcgatctcctgacct

SEQ ID NO: 102146 - DNA, 201 bp, Homo sapiens
tgactgtggacatctgtccccatacctaaccctaagcaactctgacaccttgagaaagtcacctagcctctctgaatctgttttctctgctgttaaatgakggggctggctttgctgactaaagtacaaacaaatcgtgagacaagcccccgtcaccactatcaacacaaataatggagctagaaacacgagatcctttcc

SEQ ID NO: 102147 - DNA, 201 bp, Homo sapiens
tcatttttctacatatgttataccacatatagtacaatatagtattatttaattaatttatttattagagatagggtcttgctatgttgcctaggctgttyttgaactcttggcctcaagcagtcctcccacttcagcctccaaaagtgctaggattataggcatgagccactatatctggcctattatttttgatttaaa

SEQ ID NO: 102148 - DNA, 201 bp, Homo sapiens
agcatcccatctggtgttattttccttgtgatgaaagaactttattatttcttatagtgttggtctccttgcaatgaattctccctcaaaaaaggaaaaaraaataagaagtgtaagaattgatagggaagatataaaactatcattacttgcagttggtatgatcatctgcagaagaaaaacaagataatggatagaaaa

SEQ ID NO: 102149 - DNA, 201 bp, Homo sapiens
cctctaattagacacttccccttggaagttgcttcaaccctgtggtgaatggctcgagttctccgtaagctctctctccagggtgtggggcattgtgacasgcagaaactcagtccagaaagagcacccagcctgcatctaggagaaaatgaaagataccttcatcatgctaaaagctctaatctagcaataagatatgtc

SEQ ID NO: 102150 - DNA, 201 bp, Homo sapiens
agatccagattccaattaacttagcacctgatgcctgtgtaactctggatgggtctcagttctctagtagttgaggactggtatctcaaaggttaatgaartttgcctaaggtgaaggtagattaggccttccattctcacacaaattgcccatcttccaatcccctttgtaccttgacattttcaacacaaaggggttgg

SEQ ID NO: 102151 - DNA, 201 bp, Homo sapiens
acctgatgcctgtgtaactctggatgggtctcagttctctagtagttgaggactggtatctcaaaggttaatgaagtttgcctaaggtgaaggtagattargccttccattctcacacaaattgcccatcttccaatcccctttgtaccttgacattttcaacacaaaggggttggggtgctcagaggattacacaagcaa

SEQ ID NO: 102152 - DNA, 201 bp, Homo sapiens
tggcccttctacttgatttctaaggagccagatgcactgtttgcttttaagacaaggtctcgctctgttgcccagcctggagtgcagtggtgcaatcacarctcactgcagccttgacttcccaggctccagccattttcccaactcagcctctcaagtagctaggatgacaggcatgtgccaccacactcagctaatttt

SEQ ID NO: 102153 - DNA, 201 bp, Homo sapiens
ccgcctctcgccaccatcagctctgtcatcctagtccaagccgccatcatttcttacatgggcttctgtaaaagcctactagctggctcccctgcttcctytattggacccctacagtcttgtctaaccacagtgataacccttttaaaatgttaattgagatgttgtcattcctcttttcccagcccagcagtggctctc

SEQ ID NO: 102154 - DNA, 201 bp, Homo sapiens
ctctgttgctggagtgcagtggcgcgattttggctcactgcaagctctgcctcctgggttcacgccattctcctgcctcagcctcccaagtagctgggachacaggcgcccgccaccacgcccggctaatttttttgtatttttagtagagacgggttttcaccgtgttagccaggatggtctcgatctcctgacctcatg

SEQ ID NO: 102155 - DNA, 201 bp, Homo sapiens
ccaacttcatccatgtccctgcaaagaacatgaaatcatcctttttctggctgcatagtattccatggtgtatatgtgccacattttctttatccagtctvtcattgatgggcatttgggttggttccaaaactttgctattgtgaacagtgctgcaataaacatacgtgtgcatgtgtctttatagtagaatgatttatt

SEQ ID NO: 102156 - DNA, 201 bp, Homo sapiens
tgaaatatcaaaacaaattggacactttttccctattaggaagaaaggcatgttaatttaagtgtggagtgtgacatttggaaatgtaaaaagaggctttyggggagtagttgggggtttgagtggaatatctccctttttgtatatctctcttgtttttattcatcctgtgtcttattcagatagtgattttcattcacc

SEQ ID NO: 102157 - DNA, 201 bp, Homo sapiens
tccgtctgcctcggcctcccaaagtgctgcgattacaggcatgagccacaatttatagaataaaaaatgaggctaagggaatgatagtccagcttaaacayacagtcactactaagaaaatgattaaaagcctgtacattctggactcatggagttagaacttaaaaggaccttggagtacatctagtgtcagccccacca

SEQ ID NO: 102158 - DNA, 201 bp, Homo sapiens
gcctgtattagcagtgctggctttaccaatatttccagggcggccctgaaatatgagtttagattggaaaaaaagcagtcagagtagctcccagggcaggmtgatgctatagaaccacggagtgtgctggcttccccaatttccttttttttttccttttcttctgagacggagtctcactctgtcacccaggctggagtg

SEQ ID NO: 102159 - DNA, 201 bp, Homo sapiens
attccaagcgcctaagcaccattcccagcacataggagacaatagatgtttgctgaatgaatgaatgaatatgtttgtgactcctctttattcatctctaygcccccccccccaataatgctagtaatagttctaccacagctggtgctcagaacagatctatggatttgtcaagtgagtggggatgagattgttttagtt

SEQ ID NO: 102160 - DNA, 201 bp, Homo sapiens
atggggtgtcactatgttatccaggttggtcttgaactcctgggctcaagagttcctcccaccttggcttcccaaagtgttgggaatacagacatgagccrctgtgttctgccagaacttcccatatcagtcatttatagcagccacttgagttctgaatcgaacaagatatggtaggcaccctggggtagaaggtgactc

SEQ ID NO: 102161 - DNA, 201 bp, Homo sapiens
cctggctaagcctccttgagagaaaccctgtgcttccttagtttaaccacctctttgtggttgaatagtataggttttcaatcaagtcctaggagggtgtyagtttcttgttgtacttaccaggatgtgataggatttcaaacaaggcccaaaagaatgtattttcaggagttgagatgtagccacactttctacatttac

SEQ ID NO: 102162 - DNA, 201 bp, Homo sapiens
gcacaatggaaaacttttattattttatctcctctcctaccaagctcttgctagcgactggttttactgttcctttaacaggtggaggatttttcagattytagatgcagcaaggtaagtaacaatgtatttttagtttgactgaacccaagtaagctagaaaaaagagactctgcagttgcctgtccgtttaatttcagt

SEQ ID NO: 102163 - DNA, 201 bp, Homo sapiens
tgtcggccaggctggagtgcggtggtgcaatctcggctcactgcaacctctgccccccatgttcaagcaattctcctgcctcagcctcctgagtagctggsattacaggtgcacgccaccatgcccggctaatttttgtatttttagtagagatggggtttcaccatgttggccagtctggtctcaaactcctgacctcaa

SEQ ID NO: 102164 - DNA, 201 bp, Homo sapiens
ctccacctcccaggttcaagcgattctcctgcctcagcctcccgagtagctaggattacaggcgcctgccaccttgcccggctaatttttgtatttttagwggagacggggtttcgccatgttggccaggctggtctcaaactcctgacctcaggtgatctgcctgccttggcctccaaagtgctggcattacaggcgtgg

SEQ ID NO: 102165 - DNA, 201 bp, Homo sapiens
tcaagcgattctcctgcctcagcctcccgagtagctaggattacaggcgcctgccaccttgcccggctaatttttgtatttttagtggagacggggtttcrccatgttggccaggctggtctcaaactcctgacctcaggtgatctgcctgccttggcctccaaagtgctggcattacaggcgtggcctaaaatgtttata

SEQ ID NO: 102166 - DNA, 201 bp, Homo sapiens
actggagttcaatggcgcgatctcagttcactgcaacctccgcctcctgggttcaagcaattctcctgcctcagcctcccaagtagctgggatttcaggcrtgtgccaccacacctggctaattttgtatttttagtagagacagagtttcactatgttggtcaggctggtcttggactcctgacctcaggtgatccaccc

SEQ ID NO: 102167 - DNA, 201 bp, Homo sapiens
attttggccgggcctgtaatcctagcactttgggaggctgaggcgggcagatcacgagctcaggagtttgagaccagtctgaccaacatggtgaaaccccrtctctactaaaaatacaaaaaaaaaaattagctgggtgtggtggcacgcacctgtaatcccagctactcaggaggctgagacaggagaatcacttgaacc

SEQ ID NO: 102168 - DNA, 201 bp, Homo sapiens
  misc_feature (1)...(201): n = A,T,C or G
ttcacattttgatgctagtacattttataagaatctatgaaaagcaactccatcaaaattgtgtttccttagagaaagatagtgcattaggataacaatcngtattgcacccattaccatagtactttcttaagaggtttttgccatcactggaagccttactcttccaggacaagtgagccctgagaacacaggctaggg

SEQ ID NO: 102169 - DNA, 201 bp, Homo sapiens
tttgatctgtgattaagagctggatgaagaaatcaagtaatcagccattgaaattgtaaccataaattgttctataaacaactaacttcccctgtctcccrgactccaagcaacaaacttgaaaacagatacttttcctgttgtttcttcacccgatgggttttagccagtgcttttgagccttgcagaagtcagagggta

SEQ ID NO: 102170 - DNA, 201 bp, Homo sapiens
aaataacattatatttaatggacctttgaaagcactgacatatgaatccattttctcacctgtcagcagaactgttttcattaaagaagtcagtgaaagaycacatgctgagaggagctaaaagttggtggcagggaacatttcagcttggtatcttgtcctttcacctatatctactgtgaaaattaatgaacagttatc

SEQ ID NO: 102171 - DNA, 201 bp, Homo sapiens
tgcaagctctgcctcctgggttcacgccattctcctgcctcagcctcccaagtagctgggactacaggcgcccgccaccacgcccggctaatttttttgtrtttttagtagagacgggttttcaccgtgttagccaggatggtctcgatctcctgacctcatgatccgcctgcctcagcctcccaaagtgctgggattaca

SEQ ID NO: 102172 - DNA, 201 bp, Homo sapiens
tcatgtggctcataactgtctatgaagatagttcccagggaacagctctggaaatgtgaacgccagcagtatccttggaatctgtatacagcttctctggrtaacaactttgagaggaccagcatgcattgggtacaacacaggccctcgtgcgcttgctaaagatctgcttcaatactttgtcacaccgcctacactggc

SEQ ID NO: 102173 - DNA, 201 bp, Homo sapiens
agaattaattaatatgggttttaatttgttaaggtcttaagagggagcctctgtttgctctggtacctttttgtgtgtgtcctctttgattacaggtgaayatgcctttgggaaaagatatctacttctttactgtgctcctcggtaacctatagacaagaaagaaaaaagtgggttcttagtcttcagagagcatcaaat

SEQ ID NO: 102174 - DNA, 201 bp, Homo sapiens
agaattttagaccaatatccttgatgaacattgatgcaaaaatcctcaataaaatactggcaaaccgaatccagcagcacatcaaaaagcttatccaccaygatcaagtgggcttcatccctggtatgcaaggctggttcaatatatgcaaatcaataaatgtaatccagcatataaacagaagcaaagacaaaaaccaca

SEQ ID NO: 102175 - DNA, 201 bp, Homo sapiens
ctcccgagtagctaggattacaggcgcctgccaccttgcccggctaatttttgtatttttagtggagacggggtttcgccatgttggccaggctggtctcvaactcctgacctcaggtgatctgcctgccttggcctccaaagtgctggcattacaggcgtggcctaaaatgtttataacagatttcttatcaatctggtt

SEQ ID NO: 102176 - DNA, 201 bp, Homo sapiens
gatcttcgttatttcttttcttctactgttttgggtttggtttgctcttgtttctctggttcttttttttttttttttttttttgagacggagtctcgctstgtctcccaggttggagtgcagtggcgcgatctccactcattgcaagctccgcctcccaggttcatgccattctcctgcctcagcctcccaagtagctgg

SEQ ID NO: 102177 - DNA, 201 bp, Homo sapiens
tagactgagtcttgctcttttgccaggctggagtgcagtggcatgatctccactcactgcaacctcggcctcccgggttcaagcaattctcctgcctcagyctcctgagtagctgggactacaggtgtgtgccaccacacccagctaattttcgtatttttagtagagacggggtttcaccatgttggccaggatggcctc

SEQ ID NO: 102178 - DNA, 201 bp, Homo sapiens
atcccagtactttgggaggccgaggcgggtggatcacctgatgtcaggagttcgagagcagcctggcgaacatgatgaaaccccgtctctactaaaaatahaaaaattagctgggcgtggtggtgggcacctgtaatcccaactactggggaggctgaggcaggagaatcacttgcacctgggaggcagaggttgcagtga

SEQ ID NO: 102179 - DNA, 201 bp, Homo sapiens
ttttgcccttaccttttttttttgagacggagtctcgctctgttgctggagtgcagtggcgcgattttggctcactgcaagctctgcctcctgggttcacsccattctcctgcctcagcctcccaagtagctgggactacaggcgcccgccaccacgcccggctaatttttttgtatttttagtagagacgggttttcacc

SEQ ID NO: 102180 - DNA, 201 bp, Homo sapiens
aaaactacttgtactccaaaagctattgaaataaaaataaataaataaaaataaaaaatacaaaagccccgttgctaagaaggaactgataactaccagtrtagacccagccagagaatactcagggagcaaggtttttattggaaaaccgcctttatccaccatgcctcagctccccagtgacaggcaaagcagttctgg

SEQ ID NO: 102181 - DNA, 201 bp, Homo sapiens
gtaaatatagtattattggaacacagcacgcccatttctttgcatattttccctggctgctctcatgcaacagtggcaggagtcgttgcaacagagatctyatggccccaaaagcctaaaatacttattttcttgccccccaaagaaaaagttggtcagccctggaacgagagagcagatcaaaatttcctaagtattgaa

SEQ ID NO: 102182 - DNA, 201 bp, Homo sapiens
gtggcgcgattttggctcactgcaagctctgcctcctgggttcacgccattctcctgcctcagcctcccaagtagctgggactacaggcgcccgccaccaygcccggctaatttttttgtatttttagtagagacgggttttcaccgtgttagccaggatggtctcgatctcctgacctcatgatccgcctgcctcagcct

SEQ ID NO: 102183 - DNA, 201 bp, Homo sapiens
cagaatgtagatgtcttttgacaggcttagatttcctccatcaagaagagattaaacagggccacaaatacactgcatcagttcctgacaatatagattgmgttccagcgtggcatatatgtgaaagtatgaaacaattgagcttactgtgtatcagtggtgtggtgtggccgccaaaatggtccatgtgatctgaggcca

SEQ ID NO: 102184 - DNA, 201 bp, Homo sapiens
ttttttccttttcttctgagacggagtctcactctgtcacccaggctggagtgcagtggcgcgatctccactcactgcaagctccgcctcccaggttcacrccattctcctgcctcagcctcccgagtagctgggactacaggtgcccgccaccacactcagctaattttttgtatttttagtagagacggggtttcaccg

SEQ ID NO: 102185 - DNA, 201 bp, Homo sapiens
  misc_feature (1)...(201): n = A,T,C or G
atttgctgacccattggattatccccagaaagcaagtaactgtcaaagctgggcatgtgtagtagccaccaagagcctttataatgttcatttggtattgnaacattttcatactttacatgagaccaattattttgctgaacacaaggacactgagactcaagaaaggtaagtcactttccatgaggcacacacctagct

SEQ ID NO: 102186 - DNA, 201 bp, Homo sapiens
ctatatacatacatatatatgtatatacatatatatacatatatgtgtgtgcgtgtatatatatatgtatatacatatatatacatatatatgtgtgtgtrtatatatatatatatatatgtatatatatgacactgtcctgtggagactgctcctacatatcctgtaaaaatcagtgcttcatagttttggcaccaggaa

SEQ ID NO: 102187 - DNA, 201 bp, Homo sapiens
gatcacgaggtcaggagatcgcaaccatcctggctaacacagtgaaaccctgtctctactaaaaatacaaaaaattagccaggcgtggtggcgggcacctrtagtcccagctactcaggaggctgaggcaggagaatggcgtgaacctgggaggtggagcttgcagtgagccgagatgggccactgcactccagcctggac

SEQ ID NO: 102188 - DNA, 201 bp, Homo sapiens
atcttaacaatattgagttaccatgaactcagggtatctatccatttatttgggttttttaaatttcactcatcagtgttttatagttttcaggatacacrcttttcctattttttttgtcagatatatccctaaatatttcacacttttggtgctatggtaaatagtattgttttatttcaatttctgattatttctaat

SEQ ID NO: 102189 - DNA, 201 bp, Homo sapiens
gagaactacaaaccactgctcaaggaaataaaagaggacacaaacaaatggaagaacattccatgctcatggataggaagaatcaatatcgtgaaaatggycatactgcccaaggtaatttacagattcaatgccatccccatcaagctaccaatgactttcttcacagaattggaaaaaactactttaaagttcatatgg

SEQ ID NO: 102190 - DNA, 201 bp, Homo sapiens
taagtttcctgagtcctctccagccatacagaactgtgagtagtcaattaaacctctttcctttctaaattactcagtctttggaagttctttatggcagkgtgagaacggactaatacaaatagctatgagttttttggtgtgtaaataatttctacccacttaagtctggaaaaagacacatacaataatggagagata

SEQ ID NO: 102191 - DNA, 201 bp, Homo sapiens
agtctcgctgtgtctcccaggttggagtgcagtggcgcgatctccactcattgcaagctccgcctcccaggttcatgccattctcctgcctcagcctcccvagtagctgggactacaggcgcccgccaacacgcccggctaattttttgtatttttagtagaaacggggtttcaccgtgttagccaagatggtctcgatct

SEQ ID NO: 102192 - DNA, 201 bp, Homo sapiens
catcacactctggggcctgttgtggggtggggggagtgtggagggatagcattaggagatatacctaatgctaaatgacgagttaatgggtgcagcacacyagcatggcacatgtatacatatgtaactaacctgcacattgtgcacatgtaccctaaaacttaaagtagaataataataaaaaaaaaaataaaaaaaact

SEQ ID NO: 102193 - DNA, 201 bp, Homo sapiens
gacttaaacgttagacctaaaaccataaaaaccctagaagaaaacctaggcattaccattcaggacataggcatgggcaaggacttcatgtctaaaacacmaaaagcaactgcaacaaaagccaaaattgacaaatgggatctaattaaactcaagagcttctgcacagaaaaagaaattaccatcagagtgaacaggcaa

SEQ ID NO: 102194 - DNA, 201 bp, Homo sapiens
aggctggagtgcagtggcacgatctcagccgcagccacgcgtgatcccaggttcacgccattctcctgcctcagcctcccaagtagctggggctacaggcrcccgccaccacacctggctaattttttttttgtatttttagtagagatggggtttcactgtgttaaccaggatggtctcaatctcctgaccttgtgatcc

SEQ ID NO: 102195 - DNA, 201 bp, Homo sapiens
gaggcgggcagatcacttgagatggtcaggagtttgagaccagcctggccaacatggtgaaacctcatctccactaaaaatacaaaaatcagctgggcatrgtggtgcatgcctgtaatcccagctactcgggaggctaaggcaggagaatcacttaaacctgggaggtggaagttgcagtgagctgagatcgcaccactt

SEQ ID NO: 102196 - DNA, 201 bp, Homo sapiens
ccctaatactttaaaaaatggtcacttcaccattgccaaacttcattaccactcccaggagctaaagcttcgagattaatgatcctcatcttaaagagaasgcagtgaccgctaaaagaaaaaaagaaattacaagcacatggtatttactgttctgcattctttgagaattaatgtcagtaatactgttgcaacattttt

SEQ ID NO: 102197 - DNA, 201 bp, Homo sapiens
cgctagagaaaagattcaggttttcttttttcaaataagaaaaatgaggaccttaactgtattttaatttctacccccttgtagactgcatttttggtacrtacactatgcaaaatttgtaagaggccaaagaatcttgctccttttagaatgttggcatttgtctcattagcagttagttgcattgctttgaccaattgt

SEQ ID NO: 102198 - DNA, 201 bp, Homo sapiens
tttctatcccagctctagtaccttggacaagttaatctctttgagcctcagttttctcatttgtaaaatggggagaataactggaccttcctctctgctaraaattccttgaatgttcactgagatgacttaggcagatcttctggtacatactggtactcattaaatggaatcgttgttattacttatatttcaagacaa

SEQ ID NO: 102199 - DNA, 201 bp, Homo sapiens
cccagactggagttcaatggcgcgatctcagttcactgcaacctccgcctcctgggttcaagcaattctcctgcctcagcctcccaagtagctgggatttyaggcatgtgccaccacacctggctaattttgtatttttagtagagacagagtttcactatgttggtcaggctggtcttggactcctgacctcaggtgatc

SEQ ID NO: 102200 - DNA, 201 bp, Homo sapiens
ataaactctgctaataaatatgaaatagtgagtactagaggcttaatacatatgttagttgttctaatgttcaaaggaattcctacaatggtaggagagaratttgaggccagaaataatgccattaagcatttatcccagctgggcatggtggctcacgcctgaactccaacactttgggaggccaaggtgggaggataa

SEQ ID NO: 102201 - DNA, 201 bp, Homo sapiens
cacgattgatatgccgaggctaacattttcattgcacttgcagagccagaataactatgataaaatatgtgttaccccacacacatttcaggatcttttaraaacattagctctgagaacctcctcccagggctccaggactagaatagctatccccattagttgtttgtttgccactcacaaggataatatctccattga

SEQ ID NO: 102202 - DNA, 201 bp, Homo sapiens
catataccacaccaactcctgaacttctgtaccagcttggacgttatggaaaatgggagctttaaatgttcttgaaggccaggcacggtggctcacgcctrtaatcccagcactttgggaggccgaggcgggtggatcacaaggtcaggagttcgagaccatcctgggcaagatggtgaaatcccgtctctactaaaaata

SEQ ID NO: 102203 - DNA, 201 bp, Homo sapiens
caccttgcccggctaatttttgtatttttagtggagacggggtttcgccatgttggccaggctggtctcaaactcctgacctcaggtgatctgcctgcctyggcctccaaagtgctggcattacaggcgtggcctaaaatgtttataacagatttcttatcaatctggttctctaaaccacagggaccacttggtgaacct

SEQ ID NO: 102204 - DNA, 201 bp, Homo sapiens
agtatgcagccatttatttgaggcttaatgtgcaacagagaaaacatgggggaaacactgaattgggagttaggaaacctgggttctggtcctagacccaytgctgaccaactatatatccttgggaaagttgcctcctttgtttgaggttcagtttccttagctgcaaaatgggaattttatatcttgtcctgtatactt

SEQ ID NO: 102205 - DNA, 201 bp, Homo sapiens
acctaggcattaccattcaggacataggcatgggcaaggacttcatgtctaaaacaccaaaagcaactgcaacaaaagccaaaattgacaaatgggatctmattaaactcaagagcttctgcacagaaaaagaaattaccatcagagtgaacaggcaacctacaaaatgggagaaaattttcgcaacctgctcatctgaca

SEQ ID NO: 102206 - DNA, 201 bp, Homo sapiens
atattttatatatattatatataaaatattatatataatatatatataaaatattatatataatattatatataaaatattatatatatattatatataawatattatatatatattatatataaaatattatatataatattatatatataaaataatatataatattatatatataaaatattatatatataaatatat

SEQ ID NO: 102207 - DNA, 201 bp, Homo sapiens
tgcaagtttttatggatcacatgtttgtctaaagtacacacagatcattcccaaggccagagcaggaatgctctggaagtgccctctctgatctagggcamgcctgtagtttcagggttatcgatagacctcgcggagggcagtgtacaaggcctctggctgcatgaagagaaatctggtgtgtgggactgctctcagaag

SEQ ID NO: 102208 - DNA, 201 bp, Homo sapiens
tggtgttgattagttggaccagattattgccagagcaactaatacctggtcttaatgagagaaaacaagaggagtacagatggtgagatgggaaagaaacrgttttggtaaatatcaatggggccctttttgaattttggtgagctgaatgatgtatgaaaactatttgcaaggctagcatatttttcaaccactagtaaa

SEQ ID NO: 102209 - DNA, 201 bp, Homo sapiens
tgaccagtgagagtattctactgtgtgtggtaatctggaaaggcccctgccttcatccacagatctgtctattcagggcagggggaggggaggaagagaayaggccagcctggaagcactgtttctctctgtctttctctctcgggattttctgggaatcaaaaggaaaatattttcctgatagtttagcaaaacatttaa

SEQ ID NO: 102210 - DNA, 201 bp, Homo sapiens
tagacggggaagctgaggctcaggaaatcacttacccaagacagcagctggcaattctaagaaaatttttgaaattctaaaatgcatctgaggacctggcrctgtggctcatgcctgtaatcccagcactttgagaggccgaggtgggtggatcacttgaggccaggagttcgagactagcctggccaacatggcgaaacc

SEQ ID NO: 102211 - DNA, 201 bp, Homo sapiens
ttgtgggatggcctagtgactaactgactggcttgagtgaatggagaggaatgcagatagtggacaatgaggcgaataaggtaggctggttgccacaatgycagtttaaaagagcggcaggatgcagggggggtttggatagtgactctgccagtagtgtgtaggatggtttggagtgaggatggatgggggaagggctgt

SEQ ID NO: 102212 - DNA, 201 bp, Homo sapiens
actgcatgttctcactcataggtgggaattgaacaatgagtacacttggacacaggaagaggaacatcacacatgagggcctgttgtggggtggggggagbggggagggatagcattaggagatatacctaatgtaaatgatgagttaatgggtgcagcacaccaacatggcacatgtatacatatgtaacaaagctgcac

SEQ ID NO: 102213 - DNA, 201 bp, Homo sapiens
aatccatattcttcagacagctctctttgcaactgtgtcttgcgacaattctcttttcaattatgttgtgccactttcatatttctttcaaaatgttctcratcaattttgccggcactttctctcctccaataatatggcaatgtattatcttattcgccatccaccccatgatcatacaattgttgcaagcacctggaa

SEQ ID NO: 102214 - DNA, 201 bp, Homo sapiens
ggggccaagtgcggtggctcacgcttgtaatcccagcactttgggaggccgaggtgggcggatcacaaggtcaggagatcaagaccatcctggctaacacrgtgaaaccccgtctctactaaaaatacaaaaaattagctgggcgtggtggtgggtgcctgtagtcccagctacttgtgaggctgaggaaggagaatggcg

SEQ ID NO: 102215 - DNA, 201 bp, Homo sapiens
ttctgacaaggaatgaatttagatgaagctcagtgtgcacttcccaaagttgcagttgtacagccctgtgaagagaagaggcagtggttggaagcctaagycacagaaacagagtatagtccaagaaaggttataatgctgtgcccagcagccagagcttctcctgcagctgctttattcctgccaagcaaagccatgagc

SEQ ID NO: 102216 - DNA, 201 bp, Homo sapiens
ccgagttcaagtgattctcctgcctcagcctccctggtagctgggattacaggcatgtgccaccacacccggctaatttttgtatttttagtagagacggvgtttcaccatgttggccaggctggtctcaaactcctgacctcaagtgaaccacccgcctcggcctcccaaagtgttgggattacaagcgtgagctaccac

SEQ ID NO: 102217 - DNA, 201 bp, Homo sapiens
tatatgattcacaggattgttgggagttaacgtataagtgtcaggcacagagcacccccagctcctggctatgtagttggtgtaagaaagtgtcctctttragcagccaaatgtttacccttcatgggggttagtgagttctttcaggcctggttgagtgtgccatcctaggtaactagcagacacaaagagggtctgcta

SEQ ID NO: 102218 - DNA, 201 bp, Homo sapiens
cgaggtgggcggatcacaaggtcaggagatcaagaccatcctggctaacacggtgaaaccccgtctctactaaaaatacaaaaaattagctgggcgtggtrgtgggtgcctgtagtcccagctacttgtgaggctgaggaaggagaatggcgtgaacccgggaggtggaacttgcagtgagccgagatcccgccactgcac

SEQ ID NO: 102219 - DNA, 201 bp, Homo sapiens
tttttttttgagacgagtttttttcgctcttgttacccagactggagttcaatggcgcgatctcagttcactgcaacctccgcctcctgggttcaagcaahtctcctgcctcagcctcccaagtagctgggatttcaggcatgtgccaccacacctggctaattttgtatttttagtagagacagagtttcactatgttgg

SEQ ID NO: 102220 - DNA, 201 bp, Homo sapiens
atagcaaagacttggaaccaacccagatgtccaacaatgatagactggataaagaaaatgtggcacatatacaccatggaatactatgcagccataaaaawtgatgagttcatgtcctttgtagggacatggatgaaattggaaatcatcattctcagtaaactaccgcaaaaacagaaaaccaaacaccgcatattctca

SEQ ID NO: 102221 - DNA, 201 bp, Homo sapiens
tttcatcttcaaatgagctactacctctgttccttgtgtattcaagtgcttggcactcatagccaagcacttgaattctggaattcaaaatgaaaaatagwcccatgagaggcctaaagagaggcaaacaggaagcacttcagagtgtgctgcagccttgtacagtaagtaggatgcagtccccagctctcagtggaggtg

SEQ ID NO: 102222 - DNA, 201 bp, Homo sapiens
gtggagggatagcattaggagatatacctaatgctaaatgacgagttaatgggtgcagcacaccagcatggcacatgtatacatatgtaactaacctgcayattgtgcacatgtaccctaaaacttaaagtagaataataataaaaaaaaaaataaaaaaaacttttgttctttcagttaacatttttttttttttggtaa

SEQ ID NO: 102223 - DNA, 201 bp, Homo sapiens
aagttctggccagggcaatcaggcaggagaaggaaataaagggtattcaattaggaaaagaggaagtcaaattgtccctgtttgcagacgacatgattgtwtatctagaaaaccccatcgtctcagcccaaaatgtccttaagctcataagcaacttcagcaaagtctcaggatacaaaatcaatgtacaaaaatcacaag

SEQ ID NO: 102224 - DNA, 201 bp, Homo sapiens
ggctggagtgcagtggcatgatctccactcactgcaacctcggcctcccgggttcaagcaattctcctgcctcagcctcctgagtagctgggactacaggygtgtgccaccacacccagctaattttcgtatttttagtagagacggggtttcaccatgttggccaggatggcctcaatctcttgacctcgtgatccgcct

SEQ ID NO: 102225 - DNA, 201 bp, Homo sapiens
ggttcataatctatcttgatgtcttctctacattccttaggtttcctttgttgggatctcttttccacacgtacacacacacacacacacacacacacacrcgtgcccacatcttctccctcccccactgcccctttaaatagagcaattcccaaggtcctgtcattgatctgcttctcttctgttgctatattttctccc

SEQ ID NO: 102226 - DNA, 201 bp, Homo sapiens
attatcattaatcttgtttcagtgttttgtttaagaaacgcacgtgccaaggggaaagatgatgtactgaacttgaatgatgagcaggtgggaattttgtsagagcaaatgtgtgtgtagacacatacacatatgctgggtcaggtgtgcctgagattttgaatgtgtgcaaataattctatcagtgatagatttttttct

SEQ ID NO: 102227 - DNA, 201 bp, Homo sapiens
atgtaatccagcatataaacagaagcaaagacaaaaaccacatgattatctcaatagatgcagaaaaggcctttgacaaaattcaacaacccttcatgctraaaactctcaataaattaggtattgatgggacctatctcaaaataataagagctatctatgacaaacccacagccaatatcatactgaatgggcaaaaac

SEQ ID NO: 102228 - DNA, 201 bp, Homo sapiens
tttgggaggccaagacaggtggatcatgaggtcaggagctcgagaccagcctggccaaaatggtgaaacccccatctctactaaaaatacaaaaattagcyggacgtggtggtgggtgcctgtaatcccagctacttgggaggctgaggcaggagaatcgtttgaatctgggagatggaggttgcagtgagctgagatcgc

SEQ ID NO: 102229 - DNA, 201 bp, Homo sapiens
ggtacaaaactaatcatatctcctctttgtacgatataccttttttttttttttttgaaatggagtcttgctctgtcacccaggctggagtgcagtgatgygatcttggctcactgcaacctctgccccctgggttcaagcaattatcgtgcctcagcctcaggagtagctgagattacaggcacccagcaccacacctga

SEQ ID NO: 102230 - DNA, 201 bp, Homo sapiens
gatgcaaaaatcctcaataaaatactggcaaaccgaatccagcagcacatcaaaaagcttatccaccatgatcaagtgggcttcatccctggtatgcaagsctggttcaatatatgcaaatcaataaatgtaatccagcatataaacagaagcaaagacaaaaaccacatgattatctcaatagatgcagaaaaggccttt

SEQ ID NO: 102231 - DNA, 201 bp, Homo sapiens
ttttttgtatttttagtagaaacggggtttcaccgtgttagccaagatggtctcgatctcctgacctcgtgatccgcccgtctcggcctcccaaagtgctrggattacaggcgtgagccaccgcgcccggccgtttctctggttctttaagatgcattgttaggttgcttatttgaagtttttcctcttttttgcaagaag

SEQ ID NO: 102232 - DNA, 201 bp, Homo sapiens
cctttgggtatatacccagtaatgggatggctgcgtcaaatggtatttctagttctagatccctgaggaatcgccacactgacttccacaatggttgaacyagtttacagtcccagcaacagtgtaaaagtgttcctgtttctccacatcctctccagcacctgttgtttcttgactttttaatgatcgccattctaactg

SEQ ID NO: 102233 - DNA, 201 bp, Homo sapiens
gccaaggaaaaggatgtttgaataaaggaaaaaagatcaatagttatgattacataagaataagatatgcttatctgtcaaaaaaaagccaaaacgaaaargtttcaaactggtaataatatgcacaattacaacagacacaaagttgaaatctttactgtacaaagaactctcacgagctgattagagaatcaaaggaca

SEQ ID NO: 102234 - DNA, 201 bp, Homo sapiens
gtttgtcaaagatcagatggttgtagatgtgtggtattatttctgagggctctgttctgttccattggtctatatctctgttttggcagcagtaccatgcwgttttggttactgtagccttgtagtatagtttgaagtcaggtagcgtgatgcctccagctttgttcttttggcttaggattgacttggcaatgtgagctc

SEQ ID NO: 102235 - DNA, 201 bp, Homo sapiens
tggctctctgtatgttattggtgtataagaatgcttgtgatttttgcacattgattttgtatcctgagactttgctgaagttgcttatcagcttaaggagrttttgggctgagacgatggggttttctagatatatagtcatgtcatctgcaaacagggacaatttgacttcctcttttcccaattgaataccctttattt

SEQ ID NO: 102236 - DNA, 201 bp, Homo sapiens
gttgaataggagtggtgagagagggcatccctgtcttgtgccagttttcaaagggaatgcttccagtttttgcccattcagtatgattttggctgtgggtytgtcataaatagctgttattattttgagatacgtcccatcaatacctaatttattgagagtttttagcatgaagggctattgaattttgtcaaaggcctt

SEQ ID NO: 102237 - DNA, 201 bp, Homo sapiens
aatacctaatttattgagagtttttagcatgaagggctattgaattttgtcaaaggccttttctgcatctattgagataatcatgtggtttttgtctttgvttctgtttatatgctggattacatttattgatttgtgtatgttgaaccagccttgcatcccagggatgaagcccacttgatcatggtggataagcttttt

SEQ ID NO: 102238 - DNA, 201 bp, Homo sapiens
aagctttttgatgtgctgctggattcggtttgccagtattttattgaggatttttgcatcaatgttcatcatggatattggtctaaatttcgctttttttktgtgtctctgccaggctttggtatcaggatgatgctggcctcataaaatgagttagggaggattccctctttttctattgattggaatagtttcagaagg

SEQ ID NO: 102239 - DNA, 201 bp, Homo sapiens
ctctgtcggccaggctggagtgcggtggtgcaatctcggctcactgcaacctctgccccccatgttcaagcaattctcctgcctcagcctcctgagtagcygggattacaggtgcacgccaccatgcccggctaatttttgtatttttagtagagatggggtttcaccatgttggccagtctggtctcaaactcctgacct

SEQ ID NO: 102240 - DNA, 201 bp, Homo sapiens
ctgtcggccaggctggagtgcggtggtgcaatctcggctcactgcaacctctgccccccatgttcaagcaattctcctgcctcagcctcctgagtagctgygattacaggtgcacgccaccatgcccggctaatttttgtatttttagtagagatggggtttcaccatgttggccagtctggtctcaaactcctgacctca

SEQ ID NO: 102241 - DNA, 201 bp, Homo sapiens
gccaggctggagtgcggtggtgcaatctcggctcactgcaacctctgccccccatgttcaagcaattctcctgcctcagcctcctgagtagctgggattayaggtgcacgccaccatgcccggctaatttttgtatttttagtagagatggggtttcaccatgttggccagtctggtctcaaactcctgacctcaagtcat

SEQ ID NO: 102242 - DNA, 201 bp, Homo sapiens
agttagaatggcaatcattaaaaagtcaggaaacaacaggtgctggagaggatgtggagaaataggaacacttttacactgttggtgagactgtaaactarttcaaccattgtggaagtcagtgtggtgattcctcagggatctagaactagaaataccatttgacccagccatcccattactgggtatatacccaaagga

SEQ ID NO: 102243 - DNA, 201 bp, Homo sapiens
ggctggagtgcggtggtgcaatctcggctcactgcaacctctgccccccatgttcaagcaattctcctgcctcagcctcctgagtagctgggattacaggygcacgccaccatgcccggctaatttttgtatttttagtagagatggggtttcaccatgttggccagtctggtctcaaactcctgacctcaagtcatctgc

SEQ ID NO: 102244 - DNA, 201 bp, Homo sapiens
caagcaattctcctgcctcagcctcccaagtagctgggatttcaggcatgtgccaccacacctggctaattttgtatttttagtagagacagagtttcacsatgttggtcaggctggtcttggactcctgacctcaggtgatccacccaccttggcctcccaaagtactgggattaccggcgtgagccaccatgcctggcc

SEQ ID NO: 102245 - DNA, 201 bp, Homo sapiens
accaaacaccgcatattctcactcataggtgggaattgaacaatgagatcacgtggacacaggaaggggaacatcacactctggggactgttgtggggtgrggggaggggggagggatagcattgggagatatacctcatgctggatgacgagttagtgggtgcagcgcaccagcatgacacatgtatacatatgtaagta

SEQ ID NO: 102246 - DNA, 201 bp, Homo sapiens
cacgcttgtaatcccagcactttgggaggccgaggtgggcggatcacaaggtcaggagatcaagaccatcctggctaacacggtgaaaccccgtctctacyaaaaatacaaaaaattagctgggcgtggtggtgggtgcctgtagtcccagctacttgtgaggctgaggaaggagaatggcgtgaacccgggaggtggaac

SEQ ID NO: 102247 - DNA, 201 bp, Homo sapiens
gcccgccaccacacctggctaattttttttttgtatttttagtagagatggggtttcactgtgttaaccaggatggtctcaatctcctgaccttgtgatcygcctgcctcggcctcccaaagtgctgggattacaggcatgagccactgtgcttggccaaaactacaagtttcattctcttgtctgattatgctagctagg

SEQ ID NO: 102248 - DNA, 201 bp, Homo sapiens
tgtagtttcatacaaatttcagaatttgttttttctatttctatgaagaatgttattggtattttgacagggattgcattgaatctgtagattgctttggrtagtgtggacattttaacaatattaattctttcaatctatgagcatgtgatgtctttccttttttgtgtcttcttcaatttcttcagagttttattgttt

SEQ ID NO: 102249 - DNA, 201 bp, Homo sapiens
aattagctgggcatggtggcacacgcctgtagtcccagctactcgggaggctgaggcaggtgaatcatttgaacccaggaggcagaggttgcagtgagctragattgcaccactgcattctagcctgggtgacagagtgagactccgtctcaaaaaaaagaaaagaaaaaaatgaaagataaaatgaagtcttgcttgctc

SEQ ID NO: 102250 - DNA, 201 bp, Homo sapiens
cctccgtcacccaagctggagtgcattggtgcgatctcagtttactgcaacctccacctcctgggttcaagtgattctcctgcctcggcctcccgagtagmtgggattacaggcacacaccaccatgcccagctaatttttctatttttagtagacataggttttctccatgttggccagactggtctagaactcctggcc

SEQ ID NO: 102251 - DNA, 201 bp, Homo sapiens
gtccctccccctattatacacatctcattaaagactctctgccactgccaaaccagaaaaggcaacttatttcacgattcattaaagaaaacataattggraaggtaattttgtaaagtcatcatcaaacatagtccaccacccagtaggaattatcctctcattatctctttttctagatagtcattgacattgttcccc

SEQ ID NO: 102252 - DNA, 201 bp, Homo sapiens
tgcggtggtgcaatctcggctcactgcaacctctgccccccatgttcaagcaattctcctgcctcagcctcctgagtagctgggattacaggtgcacgccwccatgcccggctaatttttgtatttttagtagagatggggtttcaccatgttggccagtctggtctcaaactcctgacctcaagtcatctgcccgccttg

SEQ ID NO: 102253 - DNA, 201 bp, Homo sapiens
agagagccaaatcatgagtgaactcccattcacaattgcttcaaagagaataaaatacctaggaatccaacttacaagggatgtgaaggacctcttcaagsagaactacaaaccactgctcaaggaaataaaagaggacacaaacaaatggaagaacattccatgctcatggataggaagaatcaatatcgtgaaaatggc

SEQ ID NO: 102254 - DNA, 201 bp, Homo sapiens
cataaattgtgaagatttcatggacacttatcacttccccaatcaatacacttgtgatttcctatgcctgtctttactttaatctcttaatcgtcatctcrtaagccgaggaggatgtatgtcacctcaggaccctgtgataattgcgttaactgcacaaattgtagagcatgtgtgtttgaacaatatgaaatctggcca

SEQ ID NO: 102255 - DNA, 201 bp, Homo sapiens
tggtgcaatctcggctcactgcaacctctgccccccatgttcaagcaattctcctgcctcagcctcctgagtagctgggattacaggtgcacgccaccatdcccggctaatttttgtatttttagtagagatggggtttcaccatgttggccagtctggtctcaaactcctgacctcaagtcatctgcccgccttggcctc

SEQ ID NO: 102256 - DNA, 201 bp, Homo sapiens
tgcaatctcggctcactgcaacctctgccccccatgttcaagcaattctcctgcctcagcctcctgagtagctgggattacaggtgcacgccaccatgccyggctaatttttgtatttttagtagagatggggtttcaccatgttggccagtctggtctcaaactcctgacctcaagtcatctgcccgccttggcctccca

SEQ ID NO: 102257 - DNA, 201 bp, Homo sapiens
cccccatgttcaagcaattctcctgcctcagcctcctgagtagctgggattacaggtgcacgccaccatgcccggctaatttttgtatttttagtagagayggggtttcaccatgttggccagtctggtctcaaactcctgacctcaagtcatctgcccgccttggcctcccagagtgctgggattacaggcatgagccac

SEQ ID NO: 102258 - DNA, 201 bp, Homo sapiens
ctcctgcctcagcctcctgagtagctgggattacaggtgcacgccaccatgcccggctaatttttgtatttttagtagagatggggtttcaccatgttggmcagtctggtctcaaactcctgacctcaagtcatctgcccgccttggcctcccagagtgctgggattacaggcatgagccactgtgcccggccagttaatt

SEQ ID NO: 102259 - DNA, 201 bp, Homo sapiens
gtagtttcatacaaatttcagaatttgttttttctatttctatgaagaatgttattggtattttgacagggattgcattgaatctgtagattgctttgggyagtgtggacattttaacaatattaattctttcaatctatgagcatgtgatgtctttccttttttgtgtcttcttcaatttcttcagagttttattgtttt

SEQ ID NO: 102260 - DNA, 201 bp, Homo sapiens
  misc_feature (1)...(201): n = A,T,C or G
tcccgagtagctgggactacaggtgcccgccaccacactcagctaattttttgtatttttagtagagacggggtttcaccgtgttagccaggatggtctcnatctcctgacctcgtgatccgcccaccttggcttcccaaagtgctgggattataggcgtgagccactgcgcctggcctgagtgtgctggcttctaacaag

SEQ ID NO: 102261 - DNA, 201 bp, Homo sapiens
ctccaccctcaagtaggccctggtttctattgttcctctctttgtatctaagtgtactcagtgtttagctctcacttataagtaaggacatgcaatatttrgttttctgttcctgtgttaatttgcttagaataaatggcctccagctgtatctatattcataggagacattggtctatagttttcctgtgatgtctttgt

SEQ ID NO: 102262 - DNA, 201 bp, Homo sapiens
ggttcaagcagttctcccacctcagcctcccgaatagctgggattacagacgcatgccaccatgcctggccaatttttgtatttttagtagagagggggtytcaccatgttggccaggctggtctccatactcctggcctcaagtgatctgcctacctaggccccccaaagtactgggattacaggtgtgagccactgcac

SEQ ID NO: 102263 - DNA, 201 bp, Homo sapiens
acctcagcctcccgaatagctgggattacagacgcatgccaccatgcctggccaatttttgtatttttagtagagagggggtttcaccatgttggccaggmtggtctccatactcctggcctcaagtgatctgcctacctaggccccccaaagtactgggattacaggtgtgagccactgcacccagcccttgcagtaaat

SEQ ID NO: 102264 - DNA, 201 bp, Homo sapiens
tcaatgtctctggtcaggggaggagagtgtcaggccaatagggacaaagagcctttccagtggctgggcgcagtagctcatgcctgtaatcccaacacttygggaggccgaggtgggtggatcaccagaagtcaggagtttgagaccagcctggccagcatgacgaaaccctttctctacaaaattaaaatacaaaattag

SEQ ID NO: 102265 - DNA, 201 bp, Homo sapiens
tagcaaagacttggaaccaacccagatgtccaacaatgatagactggataaagaaaatgtggcacatatacaccatggaatactatgcagccataaaaaabgatgagttcatgtcctttgtagggacatggatgaaattggaaatcatcattctcagtaaactaccgcaaaaacagaaaaccaaacaccgcatattctcac

SEQ ID NO: 102266 - DNA, 201 bp, Homo sapiens
cgctgagaatgatggtttccaacttcatccatgtccctgcaaagaacatgaaatcatcctttttctggctgcatagtattccatggtgtatatgtgccacrttttctttatccagtctgtcattgatgggcatttgggttggttccaaaactttgctattgtgaacagtgctgcaataaacatacgtgtgcatgtgtcttt

SEQ ID NO: 102267 - DNA, 201 bp, Homo sapiens
aacaatgagtacacttggacacaggaagaggaacatcacacatgagggcctgttgtggggtggggggaggggggagggatagcattaggagatatacctamtgtaaatgatgagttaatgggtgcagcacaccaacatggcacatgtatacatatgtaacaaagctgcacgttgtgcacatgtaccctggaacttaaagta

SEQ ID NO: 102268 - DNA, 201 bp, Homo sapiens
tttgtatttttagtagaggcggggtttcaccatgttggtcaggttgatctcgaacccttgacctcgtgatccacccgccttggcctcccaaagtgctgggdttacaggcgtgagccaccgcgcccggccgaggatgccctttttcaatggttcacctttgggtatttttatatctatgtttgcctagatcattcctttgtt

SEQ ID NO: 102269 - DNA, 201 bp, Homo sapiens
gcccgccaccacacccagctaatttttgtatttttagtagaggcggggtttcaccatgttggtcaggttgatctcgaacccttgacctcgtgatccacccdccttggcctcccaaagtgctgggattacaggcgtgagccaccgcgcccggccgaggatgccctttttcaatggttcacctttgggtatttttatatctat

SEQ ID NO: 102270 - DNA, 201 bp, Homo sapiens
ggtctaacatttaagtctttaatccatcttgaattaatttttgtataaggtgtaaggaagggatccagtttcagctttctacatatggctagccagttttyccagcaccatttattaaatagggaatcctttccccatttcttgtttttgtcaggtttgtcaaagatcagatggttgtagatgtgtggtattatttctgag

SEQ ID NO: 102271 - DNA, 201 bp, Homo sapiens
agaaaatgtggtatatataacccacggaatactactcagccattaaaaatgaaataatgaaataatgtcttttgcagcaacttggatggagctgaaggccwttattattattattattattattattattattattttttatgaagtctcactcttgcccaggctggagtacagtggtgtgattgatatcagctgactgca

SEQ ID NO: 102272 - DNA, 201 bp, Homo sapiens
aatcccagctacttgagaggctgaggcaggagaatcgcttgaacccaggaggtgcagtgagccaagattgccccactgcactccagcctgggcaacagagygagactccgtctcaaaaaaaaaaaaaaaaagtgtgtggcaactactcttgaccactgtctctctcctcctcctgcttttgccatgtgacatgcctgctac

SEQ ID NO: 102273 - DNA, 201 bp, Homo sapiens
aatgggcaaaaactggaagcattccctttgaaaactgacacaagacagggatgccctctctcaccactcctattcaacatagtgttggaagttctggccasggcaatcaggcaggagaaggaaataaagggtattcaattaggaaaagaggaagtcaaattgtccctgtttgcagacgacatgattgtatatctagaaaac

SEQ ID NO: 102274 - DNA, 201 bp, Homo sapiens
tacttgagaggctgaggcaggagaatcgcttgaacccaggaggtgcagtgagccaagattgccccactgcactccagcctgggcaacagagtgagactccrtctcaaaaaaaaaaaaaaaaagtgtgtggcaactactcttgaccactgtctctctcctcctcctgcttttgccatgtgacatgcctgctaccctttcacc

SEQ ID NO: 102275 - DNA, 201 bp, Homo sapiens
caccttccaccatgattggaatcttcctgaggcctccccaaaagccaagcagatgctaacactctgtttcttgtgcagcctacagaaccatgagctaattwaacctcttttctttataaattacccagtctctggcatttctttctctttttcttttttcttttcttttcttttttttttttttttctgagacagggtttc

SEQ ID NO: 102276 - DNA, 201 bp, Homo sapiens
tttgttcgttttgttttgtttttgagacggagtccccctccgtcacccaagctggagtgcattggtgcgatctcagtttactgcaacctccacctcctggrttcaagtgattctcctgcctcggcctcccgagtagctgggattacaggcacacaccaccatgcccagctaatttttctatttttagtagacataggtttt

SEQ ID NO: 102277 - DNA, 201 bp, Homo sapiens
aagctggagtgcattggtgcgatctcagtttactgcaacctccacctcctgggttcaagtgattctcctgcctcggcctcccgagtagctgggattacagdcacacaccaccatgcccagctaatttttctatttttagtagacataggttttctccatgttggccagactggtctagaactcctggcctcaagtgatcca

SEQ ID NO: 102278 - DNA, 201 bp, Homo sapiens
gaacacagttgcagttgtccgggcacggtagctcacacctgtaatcccagcactttgggaggccgaggcgggtggatcacttgaggtcaggagttcgagabcagcctggacaacatggtgaaaccccgtctctactaaaaatacaaaaattagccgggcctggtggtgcacgcatggcatgtaatcccagctactcaggag

SEQ ID NO: 102279 - DNA, 201 bp, Homo sapiens
agctggagtgcattggtgcgatctcagtttactgcaacctccacctcctgggttcaagtgattctcctgcctcggcctcccgagtagctgggattacaggyacacaccaccatgcccagctaatttttctatttttagtagacataggttttctccatgttggccagactggtctagaactcctggcctcaagtgatccac

SEQ ID NO: 102280 - DNA, 201 bp, Homo sapiens
cagctaatttttctatttttagtagacataggttttctccatgttggccagactggtctagaactcctggcctcaagtgatccacccgccttggcctcccraagtgctaggattataggtgtgagctactgcgctcagccagactgggagttttgaggtgctttgtctcatttatctcacttaaaataatttcaaaatatg

SEQ ID NO: 102281 - DNA, 201 bp, Homo sapiens
ctgcctaggaagttgtttttttgtttggagtagctgggactacaggtgcccgccaccacacctggctaatttgtttggttttgtatttttagtagagacgrggtttcaccatgttagccaggatggtctcgatctcctgacctcgtgatccgcctgcctcggcctcccaaaatgctgggattacaggcgtgagccaccatg

SEQ ID NO: 102282 - DNA, 201 bp, Homo sapiens
acctggctaatttgtttggttttgtatttttagtagagacggggtttcaccatgttagccaggatggtctcgatctcctgacctcgtgatccgcctgcctyggcctcccaaaatgctgggattacaggcgtgagccaccatgcccggccctgcttaggaagttttttgaaagagtgtttatttgtgaaaatgaaggtgctt

SEQ ID NO: 102283 - DNA, 201 bp, Homo sapiens
ggctaatttgtttggttttgtatttttagtagagacggggtttcaccatgttagccaggatggtctcgatctcctgacctcgtgatccgcctgcctcggcstcccaaaatgctgggattacaggcgtgagccaccatgcccggccctgcttaggaagttttttgaaagagtgtttatttgtgaaaatgaaggtgcttcttt

SEQ ID NO: 102284 - DNA, 201 bp, Homo sapiens
tttcatctttcagcattttttttttttgagacagagtcttgctctgtcaccaaggctggagtgcagtggcctaatctcagctcactgcaacctctgttccmaggttcaagcaattctcctgcctcagcctcctgagtagctgggactacaggtgtgtgccactacgctcagctaatttttgtatttttagtagagacgggg

SEQ ID NO: 102285 - DNA, 201 bp, Homo sapiens
ccgggatcactcagatgcctcttcttgcctctaaagaatgggaacgggggccaagtgcggtggctcacgcttgtaatcccagcactttgggaggccgaggygggcggatcacaaggtcaggagatcaagaccatcctggctaacacggtgaaaccccgtctctactaaaaatacaaaaaattagctgggcgtggtggtggg

SEQ ID NO: 102286 - DNA, 201 bp, Homo sapiens
aatcccagctactcaggaggctgaggagggaaaattgcctgaacccaggaggcggaggttgtggtgagctgagattgcgccactgcactccagcctgagtsacagagcaagactccatctcaaaaaaaaaaaaaaaaaaaaaaaaaaaaaaggagtttatttggagatttgcaacttgtcatgggaaacattcccagggtt

SEQ ID NO: 102287 - DNA, 201 bp, Homo sapiens
aacttttttttaattatggagaaagttgagcatttattttggctgagaggagtgagtcagtgaagaaagagctagtaaaaggggagaaatcgggggataayggataaagattggagaggtagcaagaggaccaaaaggaaataggaaaccacagagagatggttagctatggacttgagcccttcctctgagatggggttt

SEQ ID NO: 102288 - DNA, 201 bp, Homo sapiens
ttctctgctccctaaagtaactgaaagtaagttccacccctcttctatggtcctttgaatataaggacacaatttgtatgccttccttaaggcgacttccscagggaaaagagcctttccaaacttttctcatgtatttgtgctttacagactcttccctgtgttggttgttttgtctgttttgtctttgtccctcataaa

SEQ ID NO: 102289 - DNA, 201 bp, Homo sapiens
atttaaaaaaggcatcacattgatgcccaaatcaggactgttatgcacatgtatgtagatgagtaagtttccctttatgaatttaaaaaaacacacacacrtcatttaactttattattcttgttgctttgcaaaatattaaggacatcttgatgctttcagaatgaacaccaaaacccatgtaagtggtataatacttaa

SEQ ID NO: 102290 - DNA, 201 bp, Homo sapiens
ttgttgctttgcaaaatattaaggacatcttgatgctttcagaatgaacaccaaaacccatgtaagtggtataatacttaacaatgttcacacatgaaaayacataagtggtttatttaattcatgatcaattatttgtttttgaaggaattttcagcattttttatttggacattctggaaatgaaatagtaaacatgat

SEQ ID NO: 102291 - DNA, 201 bp, Homo sapiens
ctcacctgttaacagggacaataaaagtacctactcctagggttattatgaagattaaatgagtttgtattgtcaagtgctggaacattgcttggcacataagcaagtgctttcatttatttattttttgagatggggtctggctctgtcacccaggctggagtgcagtggggagatctcagctcatagcaacctccactt

SEQ ID NO: 102292 - DNA, 201 bp, Homo sapiens
caccacacccagctaattttcgtatttttagtagagacggggtttcaccatgttggccaggatggcctcaatctcttgacctcgtgatccgcctgcctcakcctcccaaagtgctgagattacaggagtgagccaccatgcccagccggaaggtgttttaaaattgaaacaaagttgcatagttggttgtgttaattgatt

SEQ ID NO: 102293 - DNA, 201 bp, Homo sapiens
tggtttccaacttcatccatgtccctgcaaagaacatgaaatcatcctttttctggctgcatagtattccatggtgtatatgtgccacattttctttatcyagtctgtcattgatgggcatttgggttggttccaaaactttgctattgtgaacagtgctgcaataaacatacgtgtgcatgtgtctttatagtagaatga

SEQ ID NO: 102294 - DNA, 201 bp, Homo sapiens
catcctttttctggctgcatagtattccatggtgtatatgtgccacattttctttatccagtctgtcattgatgggcatttgggttggttccaaaactttrctattgtgaacagtgctgcaataaacatacgtgtgcatgtgtctttatagtagaatgatttattaccctttgggtatatacccagtaatgggattgctgg

SEQ ID NO: 102295 - DNA, 201 bp, Homo sapiens
gcttagaacacagttgcagttgtccgggcacggtagctcacacctgtaatcccagcactttgggaggccgaggcgggtggatcacttgaggtcaggagttbgagaccagcctggacaacatggtgaaaccccgtctctactaaaaatacaaaaattagccgggcctggtggtgcacgcatggcatgtaatcccagctactc

SEQ ID NO: 102296 - DNA, 201 bp, Homo sapiens
ttagtagagacggggtttcaccatgttagccaggatggtctcgatctcctgacctcgtgatccgcctgcctcggcctcccaaaatgctgggattacaggcrtgagccaccatgcccggccctgcttaggaagttttttgaaagagtgtttatttgtgaaaatgaaggtgcttctttatgtctatagctttctggctttact

SEQ ID NO: 102297 - DNA, 201 bp, Homo sapiens
tggtgtatatgtgccacattttctttatccagtctgtcattgatgggcatttgggttggttccaaaactttgctattgtgaacagtgctgcaataaacatrcgtgtgcatgtgtctttatagtagaatgatttattaccctttgggtatatacccagtaatgggattgctgggtcaaatggtatttctggttctagatcct

SEQ ID NO: 102298 - DNA, 201 bp, Homo sapiens
caggctggagtgcagtggtgcagtctttgctcactgcaacttccggttcccgggttcaagcgattctcctgcctcagcctcccaagtagctgggactacargcacacaccaccatgccccgctaattttttgtgtttttagtagagacatgatttcatcatgttggccaaactggtctcaaactcctggcctcaagtgatc

SEQ ID NO: 102299 - DNA, 201 bp, Homo sapiens
tttattaccctttgggtatatacccagtaatgggattgctgggtcaaatggtatttctggttctagatccttgaggaattgccacactgtcttccacaatkgttgaactaatttacactcccaccaacagtgcagtgtaaaagcattcctatttctccacatcctctccagcatctgttgtttcctgacgttttaatgatc

SEQ ID NO: 102300 - DNA, 201 bp, Homo sapiens
atacagtattagggttctctggaggaacagaactaataggatagatgtatatatatgaaagggagttcattaaggagaattgactcacacgatcacgaggygaagtcccacgataggccatctgcaagctgaggagcaaggaagccagtagtggctcagtttgagtcccacaacctcaaaagtagggaagcagacagtaca

SEQ ID NO: 102301 - DNA, 201 bp, Homo sapiens
atttctctaatgaccactgatgatgagctttttttcatatgtttgttggccacataaatgtcttctttggagaagtgtttgttcatatccttcacccactytttgatggggttgtttgtttttttcttgtaaatttaagttccttgtagattctggatattggccctttgtcagatgggtagattgcaaaaattttctccc

SEQ ID NO: 102302 - DNA, 201 bp, Homo sapiens
gggtctacccataacactctgctgactcaaatgttaatctcctatggcaacaccctcacaaacatatccaggaacaatactttgcatccgtcaatccaatyaagttgacacttaatattaaccatcacactgtccatcatcaaattaaagaaatataatgttttctgttaaacagtataattttacacaattgggtaagca

SEQ ID NO: 102303 - DNA, 201 bp, Homo sapiens
gctgcaatctcagctcaatgcaacctctgcctcccgagttcaagtgattctcctgcctcagcctccctggtagctgggattacaggcatgtgccaccacayccggctaatttttgtatttttagtagagacggggtttcaccatgttggccaggctggtctcaaactcctgacctcaagtgaaccacccgcctcggcctcc

SEQ ID NO: 102304 - DNA, 201 bp, Homo sapiens
gtcatgaagtctttgcccatgccaatgcctgaatggtattgcctaggttttcttctagggattttatggttttaggtcttatgtttaagtctttaatccaycttgagttaatttttgtataaggtgtaaggaaggggcccagtttcagttttctgcatgtggctagctgttttcccaataccatttattaaataggaaatc

SEQ ID NO: 102305 - DNA, 201 bp, Homo sapiens
gaattgtaaacccatcttattaaaagttaccaatgataggctgggcccagtggctcacgtctgtaatcccagcactttgggaggccgaggcaggtggatcrcgaggtcaggagttcgagaccagcctgaccaatgtggtgaaaccctgtctctactaaaaatacaaaaaaaaaaaatagccgggcgtggtggcacacacct

SEQ ID NO: 102306 - DNA, 201 bp, Homo sapiens
gaatctataaattacttcgggcagtatggccattttcatgatattcattcttcctatccatgaaaattgaatatttttccatttgtttgtgtcctctcttrtttccttgaacagtggtttgtagttctccttgaagaggtccttcacatcccttataagttggattcctaggtattttattctctttgtagcaattgtgaa

SEQ ID NO: 102307 - DNA, 201 bp, Homo sapiens
ttttttttttccttttcttctgagacggagtctcactctgtcacccaggctggagtgcagtggcgcgatctccactcactgcaagctccgcctcccaggtwcacaccattctcctgcctcagcctcccgagtagctgggactacaggtgcccgccaccacactcagctaattttttgtatttttagtagagacggggtttc

SEQ ID NO: 102308 - DNA, 201 bp, Homo sapiens
agtgcagtggcgcgattttggctcactgcaagctctgcctcctgggttcacgccattctcctgcctcagcctcccaagtagctgggactacaggcgcccgycaccacgcccggctaatttttttgtatttttagtagagacgggttttcaccgtgttagccaggatggtctcgatctcctgacctcatgatccgcctgcct

SEQ ID NO: 102309 - DNA, 201 bp, Homo sapiens
aattgtaaacccatcttattaaaagttaccaatgataggctgggcccagtggctcacgtctgtaatcccagcactttgggaggccgaggcaggtggatcaygaggtcaggagttcgagaccagcctgaccaatgtggtgaaaccctgtctctactaaaaatacaaaaaaaaaaaatagccgggcgtggtggcacacacctg

SEQ ID NO: 102310 - DNA, 201 bp, Homo sapiens
attggttctctttttgtgatggattacgtttattgatttgcatatgttgaaccagccttgcttcccaggaatgaagctgacttgatcatggtggataagcyttttgatgtgctgctggattcggtttgccagtatttcattgaggattttcacgtcaatgttcataaaggatattggcctgaaattttctttttttgttgt

SEQ ID NO: 102311 - DNA, 201 bp, Homo sapiens
ttattaaaagttaccaatgataggctgggcccagtggctcacgtctgtaatcccagcactttgggaggccgaggcaggtggatcacgaggtcaggagttcsagaccagcctgaccaatgtggtgaaaccctgtctctactaaaaatacaaaaaaaaaaaatagccgggcgtggtggcacacacctgtaatcccagctactc

SEQ ID NO: 102312 - DNA, 201 bp, Homo sapiens
tccttctaaacactgctttagctgtgtcccagagattctggtatgtagtgtctttgttctcgtcggtttcaaagaacttatttatttctgccttaatttcrttatttactcagtagtcattcaggagcaggttgtttagtttccatgtagtcatgaggttttgagtaaggttcttaatcctgaattctaatttgattgcac

SEQ ID NO: 102313 - DNA, 201 bp, Homo sapiens
agccaaaaaacacatgaaataatgctcaccatcactggccatcagagaaatgccaatcaaaaccacaatgagatatcatctcacaccagttagaatggcartcattaaaaagtcaggaaacaacaggtgctggagaggatgtggagaaataggaacacttttacactgttggtgagactgtaaactagttcaaccattgtg

SEQ ID NO: 102314 - DNA, 201 bp, Homo sapiens
tctctactaaaaatacaaaaaaaaaaaatagccgggcgtggtggcacacacctgtaatcccagctactcggggggctgaggcaggagaatagcttgaaccygggaggtggaggttgcagtgagctgagattgcaccattgcactctggcctgggcaacagagagagactctctctcaaaaaaaaaaaaaagttaccaatga

SEQ ID NO: 102315 - DNA, 201 bp, Homo sapiens
actaaaaatacaaaaaaaaaaaatagccgggcgtggtggcacacacctgtaatcccagctactcggggggctgaggcaggagaatagcttgaacctgggargtggaggttgcagtgagctgagattgcaccattgcactctggcctgggcaacagagagagactctctctcaaaaaaaaaaaaaagttaccaatgataaga

SEQ ID NO: 102316 - DNA, 201 bp, Homo sapiens
aaaaacaaacaaccccatcaaaaagtgggcgaaggacatgaacagacacttctcaaaagaagacatttatccagccaaaaaacacatgaaataatgctcaycatcactggccatcagagaaatgccaatcaaaaccacaatgagatatcatctcacaccagttagaatggcaatcattaaaaagtcaggaaacaacaggtg

SEQ ID NO: 102317 - DNA, 201 bp, Homo sapiens
aaaaaaaaaaatagccgggcgtggtggcacacacctgtaatcccagctactcggggggctgaggcaggagaatagcttgaacctgggaggtggaggttgcrgtgagctgagattgcaccattgcactctggcctgggcaacagagagagactctctctcaaaaaaaaaaaaaagttaccaatgataagaacattttatgtt

SEQ ID NO: 102318 - DNA, 201 bp, Homo sapiens
caggaagaggaacatcacacatgagggcctgttgtggggtggggggaggggggagggatagcattaggagatatacctaatgtaaatgatgagttaatggrtgcagcacaccaacatggcacatgtatacatatgtaacaaagctgcacgttgtgcacatgtaccctggaacttaaagtatagtaataaaaaaaaaaagaa

SEQ ID NO: 102319 - DNA, 201 bp, Homo sapiens
cggcattattcacaatagcaaagacttggaaccaacccagatgtccaacaatgatagactggataaagaaaatgtggcacatatacaccatggaatactaygcagccataaaaaatgatgagttcatgtcctttgtagggacatggatgaaattggaaatcatcattctcagtaaactaccgcaaaaacagaaaaccaaac

SEQ ID NO: 102320 - DNA, 201 bp, Homo sapiens
atgggtatgatgggtctgataaagtatttggcatctcttttactaggtagatcccactcaccctgagttttttttttttttttttttgagacagagtctcrctctgtcacccaggctggagtacaatggcatgatcttggctcactgcagcctccacctctggggttcaagtgattctcccaccctagcccccgagtagct

SEQ ID NO: 102321 - DNA, 201 bp, Homo sapiens
ttattattattatttgagacagagtcttgctctgttgcccaggctggagtgcagtggtgcaatctcggctcactgcaacctccacctcctgggttcaagcrattctcctgcctcagcctccggagtagctgggattacaggtgtgcaccaccatgcctggataatttttgtattcttagtagagacagggtttcaccatgt

SEQ ID NO: 102322 - DNA, 201 bp, Homo sapiens
tttttgagacggagtctcgctctgttgctggagtgcagtggcgcgattttggctcactgcaagctctgcctcctgggttcacgccattctcctgcctcagyctcccaagtagctgggactacaggcgcccgccaccacgcccggctaatttttttgtatttttagtagagacgggttttcaccgtgttagccaggatggtc

SEQ ID NO: 102323 - DNA, 201 bp, Homo sapiens
tcccagcactttgggaggcctaggtgggtggatcacctgaggtcagaagtttgagaccagcctggccaacatggtgaaacctcgtctctactgaaaatccaaaaaaaaaaaaaaaaaaattagccgggtgtggtggtggcatgcctgtaatctcagctactcgggaggctgaggcaggagaatcgcctgaatcctagaggc

SEQ ID NO: 102324 - DNA, 201 bp, Homo sapiens
tgggctgggcgcagtggctcatgctgtaatcccagtactttgggaggctgagatgggtggatcacctgaggtcaggagtttgagaccagtctgaccaacayggtgaaaccccatctctactaaaaatacaaaaattagccaggcgtggtggtgggtgcctataatcccagctactcaggaggctgaggagggaaaattgcc

SEQ ID NO: 102325 - DNA, 201 bp, Homo sapiens
gtttgcatgcaggaattgtaaacccatcttattaaaagttaccaatgataggctgggcccagtggctcacgtctgtaatcccagcactttgggaggccgargcaggtggatcacgaggtcaggagttcgagaccagcctgaccaatgtggtgaaaccctgtctctactaaaaatacaaaaaaaaaaaatagccgggcgtgg

SEQ ID NO: 102326 - DNA, 201 bp, Homo sapiens
ttcgttatttactcagtagtcattcaggagcaggttgtttagtttccatgtagtcatgaggttttgagtaaggttcttaatcctgaattctaatttgattrcactgtggtctgagagactgtttgttatgatttctgttcttttgcatttgctgaggaatgttttacttccaattatgtggtcagttttagaataagtgcc

SEQ ID NO: 102327 - DNA, 201 bp, Homo sapiens
tatatttaggatagttagctcttcttgttgcattgatccctttatcattatgtaatgcccttctttgtctttttgatctttgttggtttaaagtctgtttyatctgagactaggattgcaaccctttctttgttttactttccatttacttggtaaacctttctccatccctttattttgagcctatttgtgtctttgcac

SEQ ID NO: 102328 - DNA, 201 bp, Homo sapiens
agacttaaacgttagacctaaaaccataaaaaccctagaagaaaacctaggcattaccattcaggacataggcatgggcaaggacttcatgtctaaaacaycaaaagcaactgcaacaaaagccaaaattgacaaatgggatctaattaaactcaagagcttctgcacagaaaaagaaattaccatcagagtgaacaggca

SEQ ID NO: 102329 - DNA, 201 bp, Homo sapiens
atagccgggcgtggtggcacacacctgtaatcccagctactcggggggctgaggcaggagaatagcttgaacctgggaggtggaggttgcagtgagctgasattgcaccattgcactctggcctgggcaacagagagagactctctctcaaaaaaaaaaaaaagttaccaatgataagaacattttatgttactatagccc

SEQ ID NO: 102330 - DNA, 201 bp, Homo sapiens
atgagatatcatctcacaccagttagaatggcaatcattaaaaagtcaggaaacaacaggtgctggagaggatgtggagaaataggaacacttttacactrttggtgagactgtaaactagttcaaccattgtggaagtcagtgtggtgattcctcagggatctagaactagaaataccatttgacccagccatcccatta

SEQ ID NO: 102331 - DNA, 201 bp, Homo sapiens
aggtgggcggatcacaaggtcaggagatcaagaccatcctggctaacacggtgaaaccccgtctctactaaaaatacaaaaaattagctgggcgtggtggygggtgcctgtagtcccagctacttgtgaggctgaggaaggagaatggcgtgaacccgggaggtggaacttgcagtgagccgagatcccgccactgcactc

SEQ ID NO: 102332 - DNA, 201 bp, Homo sapiens
gttttgtggttggaggaggagagaattccttaagagtgtgtgctcatgaggccaggtgtggtggctgacgcctgtaatcccagcactttgggaggccgagrcaggcagatcacgaggtcaggagatcgcaaccatcctggctaacacagtgaaaccctgtctctactaaaaatacaaaaaattagccaggcgtggtggcgg

SEQ ID NO: 102333 - DNA, 201 bp, Homo sapiens
gaatggcaatcattaaaaagtcaggaaacaacaggtgctggagaggatgtggagaaataggaacacttttacactgttggtgagactgtaaactagttcarccattgtggaagtcagtgtggtgattcctcagggatctagaactagaaataccatttgacccagccatcccattactgggtatatacccaaaggactata

SEQ ID NO: 102334 - DNA, 201 bp, Homo sapiens
ggaggccgagacaggcagatcacgaggtcaggagatcgcaaccatcctggctaacacagtgaaaccctgtctctactaaaaatacaaaaaattagccaggygtggtggcgggcacctgtagtcccagctactcaggaggctgaggcaggagaatggcgtgaacctgggaggtggagcttgcagtgagccgagatgggccac

SEQ ID NO: 102335 - DNA, 201 bp, Homo sapiens
ctaaaatttaaagtataataataataaaaaaaattgttttctttaagaatgttgaatattggcccccattctcttctggcttgtagggtttctgcagagasatctgctgttagtctgatgggcttccgttgatgggtaacgcgacctttctttctggctgcccttaacatttttttccttcatttcaaccttggtgaatct

SEQ ID NO: 102336 - DNA, 201 bp, Homo sapiens
gaggccgagacaggcagatcacgaggtcaggagatcgcaaccatcctggctaacacagtgaaaccctgtctctactaaaaatacaaaaaattagccaggcrtggtggcgggcacctgtagtcccagctactcaggaggctgaggcaggagaatggcgtgaacctgggaggtggagcttgcagtgagccgagatgggccact

SEQ ID NO: 102337 - DNA, 201 bp, Homo sapiens
cagattcaatgccatccccatcaagctaccaatgactttcttcacagaattggaaaaaactactttaaagttcatatggaaccaaaaaagagcctgcatcrccaagtcaatcctaagccaaaagaacaaagctggaggcatcacactacctgacttcaaactatactacaaggctacagtaaccaaaacagcatggtactg

SEQ ID NO: 102338 - DNA, 201 bp, Homo sapiens
atgattttaagaaccaaatatggccagatgcagtggctcatgcctataatccgagcagtttgggaggccaaggcaggaggatcacttgaggcaaggagttygagaccagcctgggcaacacagtgaaaccccgtctcaaaaaaaaaaaaaaaattaagttagctgggtgtgtcactgtgcgcctgcagtcccagctactcg

SEQ ID NO: 102339 - DNA, 201 bp, Homo sapiens
agacaggcagatcacgaggtcaggagatcgcaaccatcctggctaacacagtgaaaccctgtctctactaaaaatacaaaaaattagccaggcgtggtggygggcacctgtagtcccagctactcaggaggctgaggcaggagaatggcgtgaacctgggaggtggagcttgcagtgagccgagatgggccactgcactcc

SEQ ID NO: 102340 - DNA, 201 bp, Homo sapiens
caggatacacatttgtatcttgtctaaaatttcaatcctgtcgaaagatacacatgagggccaggtggtggctcatgcctgtaatcccagcacttagggargccaaggcaggcagatcacttgaggtcaggagttcaagaccagcctggccaacatggtgaaaccccttctctactaaaaaaatacaaaaattagctgggt

SEQ ID NO: 102341 - DNA, 201 bp, Homo sapiens
attattattattattattattattattattattattattattattattattatttgagacagagtcttgctctgttgcccaggctggagtgcagtggtgcvatctcggctcactgcaacctccacctcctgggttcaagcaattctcctgcctcagcctccggagtagctgggattacaggtgtgcaccaccatgcctgga

SEQ ID NO: 102342 - DNA, 201 bp, Homo sapiens
gacaggcagatcacgaggtcaggagatcgcaaccatcctggctaacacagtgaaaccctgtctctactaaaaatacaaaaaattagccaggcgtggtggcvggcacctgtagtcccagctactcaggaggctgaggcaggagaatggcgtgaacctgggaggtggagcttgcagtgagccgagatgggccactgcactcca

SEQ ID NO: 102343 - DNA, 201 bp, Homo sapiens
gtctaaaatttcaatcctgtcgaaagatacacatgagggccaggtggtggctcatgcctgtaatcccagcacttagggaggccaaggcaggcagatcactkgaggtcaggagttcaagaccagcctggccaacatggtgaaaccccttctctactaaaaaaatacaaaaattagctgggtgtggtggcatactatgactgt

SEQ ID NO: 102344 - DNA, 201 bp, Homo sapiens
aggcagatcacgaggtcaggagatcgcaaccatcctggctaacacagtgaaaccctgtctctactaaaaatacaaaaaattagccaggcgtggtggcgggsacctgtagtcccagctactcaggaggctgaggcaggagaatggcgtgaacctgggaggtggagcttgcagtgagccgagatgggccactgcactccagcc

SEQ ID NO: 102345 - DNA, 201 bp, Homo sapiens
ctaaaatttcaatcctgtcgaaagatacacatgagggccaggtggtggctcatgcctgtaatcccagcacttagggaggccaaggcaggcagatcacttgmggtcaggagttcaagaccagcctggccaacatggtgaaaccccttctctactaaaaaaatacaaaaattagctgggtgtggtggcatactatgactgtaa

SEQ ID NO: 102346 - DNA, 201 bp, Homo sapiens
gatcgcaaccatcctggctaacacagtgaaaccctgtctctactaaaaatacaaaaaattagccaggcgtggtggcgggcacctgtagtcccagctactcrggaggctgaggcaggagaatggcgtgaacctgggaggtggagcttgcagtgagccgagatgggccactgcactccagcctggacaacagagcgagactcc

SEQ ID NO: 102347 - DNA, 201 bp, Homo sapiens
ggctaacacagtgaaaccctgtctctactaaaaatacaaaaaattagccaggcgtggtggcgggcacctgtagtcccagctactcaggaggctgaggcagsagaatggcgtgaacctgggaggtggagcttgcagtgagccgagatgggccactgcactccagcctggacaacagagcgagactccgtctcaaaaaaaaaa

SEQ ID NO: 102348 - DNA, 201 bp, Homo sapiens
gctaacacagtgaaaccctgtctctactaaaaatacaaaaaattagccaggcgtggtggcgggcacctgtagtcccagctactcaggaggctgaggcaggmgaatggcgtgaacctgggaggtggagcttgcagtgagccgagatgggccactgcactccagcctggacaacagagcgagactccgtctcaaaaaaaaaaa

SEQ ID NO: 102349 - DNA, 201 bp, Homo sapiens
gctcactgcaagctctgcctcctgggttcacgccattctcctgcctcagcctcccaagtagctgggactacaggcgcccgccaccacgcccggctaatttktttgtatttttagtagagacgggttttcaccgtgttagccaggatggtctcgatctcctgacctcatgatccgcctgcctcagcctcccaaagtgctggg

SEQ ID NO: 102350 - DNA, 201 bp, Homo sapiens
ggcataatattttttaaaaaattctctcagggtacaaaactaatcatatctcctctttgtacgatataccttttttttttttttttgaaatggagtcttghtctgtcacccaggctggagtgcagtgatgtgatcttggctcactgcaacctctgccccctgggttcaagcaattatcgtgcctcagcctcaggagtagct

SEQ ID NO: 102351 - DNA, 201 bp, Homo sapiens
aaaaactggaagcattccctttgaaaactgacacaagacagggatgccctctctcaccactcctattcaacatagtgttggaagttctggccagggcaatyaggcaggagaaggaaataaagggtattcaattaggaaaagaggaagtcaaattgtccctgtttgcagacgacatgattgtatatctagaaaaccccatcg

SEQ ID NO: 102352 - DNA, 201 bp, Homo sapiens
agtttcctatcctgggaatattatcataggagcaaaggtggaaaccaaggtagtagcttgcatacatgccattggcagctaccatgtctatttcagtcagwgactaaccacagcgtttattgctggaggccctgggctactctgcctatctctacattccacttccataatgtatgagccataatatgacaacagccagaa

SEQ ID NO: 102353 - DNA, 201 bp, Homo sapiens
caaaccactgctcaaggaaataaaagaggacacaaacaaatggaagaacattccatgctcatggataggaagaatcaatatcgtgaaaatggccatactgyccaaggtaatttacagattcaatgccatccccatcaagctaccaatgactttcttcacagaattggaaaaaactactttaaagttcatatggaaccaaaa

SEQ ID NO: 102354 - DNA, 201 bp, Homo sapiens
tcccaggttcaagcgattctcctgcctcagcctcccgagtagctaggattacaggcgcctgccaccttgcccggctaatttttgtatttttagtggagacrgggtttcgccatgttggccaggctggtctcaaactcctgacctcaggtgatctgcctgccttggcctccaaagtgctggcattacaggcgtggcctaaaa

SEQ ID NO: 102355 - DNA, 201 bp, Homo sapiens
agtgaaagaagccagacaaaaaagaccacatactgtatgattccatttatatgaataatccacaatagacaaatccatagagacagaaaacagatgattgycaggagctgaggggagggtggaagggagagtgactactttacttaatgggtacaaggttttcttctagggtgatgaactagatagaggtgacagctgcac

SEQ ID NO: 102356 - DNA, 201 bp, Homo sapiens
tccaagcgcctaagcaccattcccagcacataggagacaatagatgtttgctgaatgaatgaatgaatatgtttgtgactcctctttattcatctctatgcccccccccccaataatgctagtaatagttctaccacagctggtgctcagaacagatctatggatttgtcaagtgagtggggatgagattgttttagtttt

SEQ ID NO: 102357 - DNA, 201 bp, Homo sapiens
gtggtaaaggaatcttcaggagaagaggaaccaagagagtttggaaactcctagaaatgcaactctgatttacagtcacagagattcttgacatagaaaargagtggggtatagagaaagaagtgaggaaggcacacagcacagtgagtccttgtatgattttaattgaaaaggctgttattttctgcaggtgagaaaata

SEQ ID NO: 102358 - DNA, 201 bp, Homo sapiens
aaaaaaagcgaaaaaaatctcataatgttttaagaaagcttacgaatttgtgttgggctgcattcaaagccattctgggctgcatgcagcctgcaggctgyggtttgtacaagcttgcttcaaactgaagtatcttcatgatctgaaagtgttaaataactttctctagagcccagctcttaaccagaggggagtttagac

SEQ ID NO: 102359 - DNA, 201 bp, Homo sapiens
aagatacacatgagggccaggtggtggctcatgcctgtaatcccagcacttagggaggccaaggcaggcagatcacttgaggtcaggagttcaagaccagsctggccaacatggtgaaaccccttctctactaaaaaaatacaaaaattagctgggtgtggtggcatactatgactgtaatcccagctacttgcgaggctg

SEQ ID NO: 102360 - DNA, 201 bp, Homo sapiens
tgtggtggcatactatgactgtaatcccagctacttgcgaggctgaggcaggaaaatcacttgaacctgtgaaatggaggttgtggtgagccgagattgcmccactgcactccagcctgggtgacacagcaagactccatgtccaaaaaaaaaaaaaaaaaaaaaaaaaaagatacacatgcctaaggacccagactggaa

SEQ ID NO: 102361 - DNA, 201 bp, Homo sapiens
atcattagacaagatcctgttacaccaggaagtcaagaggctttactggcatttagtgcctcttgtttcaccatcaagattccctgtctacaacagttcayagctgagtctctattcatcaaactttctgcagggttgacatacacaccatttatttggctctcagtgtataacatttggtggtgagtcaccctttcctgt

SEQ ID NO: 102362 - DNA, 201 bp, Homo sapiens
ttcttggttatctatttttgcctaatatccagtactgtaaggaaaataacaaggatgtactttttcttttcttttttttttctttttttttttgagacagmgtctcactctgtcgcccaggctggagtgcagtggcgtgataacggctcactgcaacctctgcctcctgggttcaagcaattctccttcctcagcctcctg

SEQ ID NO: 102363 - DNA, 201 bp, Homo sapiens
ggaggctgaggcaggagaatggcgtgaacctgggaggtggagcttgcagtgagccgagatgggccactgcactccagcctggacaacagagcgagactccrtctcaaaaaaaaaaaaaaaaaagagtgtgtgctcacgaaaggcagctctaaagaggtcacatttaaactgaaatctaagggatcatgggaaagaattagc

SEQ ID NO: 102364 - DNA, 201 bp, Homo sapiens
tttttgcctaatatccagtactgtaaggaaaataacaaggatgtactttttcttttcttttttttttctttttttttttgagacagagtctcactctgtcscccaggctggagtgcagtggcgtgataacggctcactgcaacctctgcctcctgggttcaagcaattctccttcctcagcctcctgagtagctgggatta

SEQ ID NO: 102365 - DNA, 201 bp, Homo sapiens
ctggagtgcagtgctgcaatctcagctcaatgcaacctctgcctcccgagttcaagtgattctcctgcctcagcctccctggtagctgggattacaggcaygtgccaccacacccggctaatttttgtatttttagtagagacggggtttcaccatgttggccaggctggtctcaaactcctgacctcaagtgaaccaccc

SEQ ID NO: 102366 - DNA, 201 bp, Homo sapiens
tgtgtccaagtgttgtcattgttcaattcccacctatgaatgagaacatgcggtgtttggttttctgtccttgggatagtttgctgagaatgatggtttcyagcttcatccatgttcctacaaaggacatgaactcatcctttttatggctgcatagtattccatggcatatatgtgccaaattttcttagtccagtctat

SEQ ID NO: 102367 - DNA, 201 bp, Homo sapiens
tgctgcaatctcagctcaatgcaacctctgcctcccgagttcaagtgattctcctgcctcagcctccctggtagctgggattacaggcatgtgccaccacrcccggctaatttttgtatttttagtagagacggggtttcaccatgttggccaggctggtctcaaactcctgacctcaagtgaaccacccgcctcggcctc

SEQ ID NO: 102368 - DNA, 201 bp, Homo sapiens
ttttttgagacagagtctcactctgtcgcccaggctggagtgcagtggcgtgataacggctcactgcaacctctgcctcctgggttcaagcaattctcctkcctcagcctcctgagtagctgggattacaggcgcccgccaccacacccagctaatttttgtatttttagtagaggcggggtttcaccatgttggtcaggt

SEQ ID NO: 102369 - DNA, 201 bp, Homo sapiens
aatctcagctcaatgcaacctctgcctcccgagttcaagtgattctcctgcctcagcctccctggtagctgggattacaggcatgtgccaccacacccggytaatttttgtatttttagtagagacggggtttcaccatgttggccaggctggtctcaaactcctgacctcaagtgaaccacccgcctcggcctcccaaag

SEQ ID NO: 102370 - DNA, 201 bp, Homo sapiens
gcgtgataacggctcactgcaacctctgcctcctgggttcaagcaattctccttcctcagcctcctgagtagctgggattacaggcgcccgccaccacacscagctaatttttgtatttttagtagaggcggggtttcaccatgttggtcaggttgatctcgaacccttgacctcgtgatccacccgccttggcctcccaa

SEQ ID NO: 102371 - DNA, 201 bp, Homo sapiens
ctcaatgcaacctctgcctcccgagttcaagtgattctcctgcctcagcctccctggtagctgggattacaggcatgtgccaccacacccggctaattttkgtatttttagtagagacggggtttcaccatgttggccaggctggtctcaaactcctgacctcaagtgaaccacccgcctcggcctcccaaagtgttggga

SEQ ID NO: 102372 - DNA, 201 bp, Homo sapiens
ctcctgggttcaagcaattctccttcctcagcctcctgagtagctgggattacaggcgcccgccaccacacccagctaatttttgtatttttagtagaggsggggtttcaccatgttggtcaggttgatctcgaacccttgacctcgtgatccacccgccttggcctcccaaagtgctgggattacaggcgtgagccaccg

SEQ ID NO: 102373 - DNA, 201 bp, Homo sapiens
gttcaagatcagcctggccatcatggtaaaaccctgtgtctattaaaaatataaaaattaactgggcgtggtgggtgcctgtaattccagctactcgggargctgaggcaggagaattgcttgaacccgggaggcagaggttgcagtgagccactccagtctgggcaacagagtgagactccatctcaaaaaacaaaaaga

SEQ ID NO: 102374 - DNA, 201 bp, Homo sapiens
ttagtagaggcggggtttcaccatgttggtcaggttgatctcgaacccttgacctcgtgatccacccgccttggcctcccaaagtgctgggattacaggcrtgagccaccgcgcccggccgaggatgccctttttcaatggttcacctttgggtatttttatatctatgtttgcctagatcattcctttgttttgatatca

SEQ ID NO: 102375 - DNA, 201 bp, Homo sapiens
caacacgcccggctaattttttgtatttttagtagaaacggggtttcaccgtgttagccaagatggtctcgatctcctgacctcgtgatccgcccgtctcrgcctcccaaagtgctaggattacaggcgtgagccaccgcgcccggccgtttctctggttctttaagatgcattgttaggttgcttatttgaagtttttcc

SEQ ID NO: 102376 - DNA, 201 bp, Homo sapiens
tctgaatgcctaccttttacctttgtaaactccagatttaaagtttgtgtagggtggggtgcggtggctgacgcctgtaatctcagcactttgggaggctraggcaggaggatcgcttgagcccaggaattcaagacaagcctgggcaacaaagcaagagaccatctctaaaaaaaaagaaaaaaaaaaaaaagccaggca

SEQ ID NO: 102377 - DNA, 201 bp, Homo sapiens
gctcaggagtttgagacctgcctgggcaacatggtgaaaccccgcctctaccaaaaaatacaaaagctagctgggcatggtggcacacgcctgtggtcccwgctactcaggaggctgaggtgggaggattgcttgagcccaggaggtggaggctgtagtgagccgagatcacacaactgcactccagcctgggttaaagag

SEQ ID NO: 102378 - DNA, 201 bp, Homo sapiens
tgagacctgcctgggcaacatggtgaaaccccgcctctaccaaaaaatacaaaagctagctgggcatggtggcacacgcctgtggtcccagctactcaggrggctgaggtgggaggattgcttgagcccaggaggtggaggctgtagtgagccgagatcacacaactgcactccagcctgggttaaagagcaagagcctgt

SEQ ID NO: 102379 - DNA, 201 bp, Homo sapiens
tgttgtctgctcctgtttgctcgctgtttccttctttccattcccctctctcgcttttattctttttctctcttaccctttctgtttttctcttcttgccggacttttatcacctcgctccttccccgctctggctctggtcttcccgggcgactgggtgtccctctgtcgctattttccgacatccaaggagagctcatg

SEQ ID NO: 102380 - DNA, 201 bp, Homo sapiens
catttgggatgcttctctgcctccgcggatggttaagtgcttgggtgatatataactgctgaatagaaacaaccgtgatcacgttgcctggagaggacaaagagagagagagagagagagcttggctggtgaaaggctcaagttgtttattaagaataatatttctttaaaaaaaatcagaaattggatttcatccatctg

SEQ ID NO: 102381 - DNA, 201 bp, Homo sapiens
atttgggatgcttctctgcctccgcggatggttaagtgcttgggtgatatataactgctgaatagaaacaaccgtgatcacgttgcctggagaggacaaagagagagagagagagagagcttggctggtgaaaggctcaagttgtttattaagaataatatttctttaaaaaaaatcagaaattggatttcatccatctgt

SEQ ID NO: 102382 - DNA, 201 bp, Homo sapiens
atacaactcactataatgtggaatcagtgggagccctgagcttgttttcctgcaattagatggtcccatctggaggtgatgggagacagtgacagatcatmaggcattagattctcataaagagcacacaacttagatccctcacatgtgcagttcacaatagggtttgcactgccatgagaatctaatgccactactgat

SEQ ID NO: 102383 - DNA, 201 bp, Homo sapiens
cttttttttttgagacggagtctcgctctgttgctggagtgcagtggcgcgattttggctcactgcaagctctgcctcctgggttcacgccattctcctgbctcagcctcccaagtagctgggactacaggcgcccgccaccacgcccggctaatttttttgtatttttagtagagacgggttttcaccgtgttagccagg

SEQ ID NO: 102384 - DNA, 201 bp, Homo sapiens
gttaggtagaactagaagctgaaggcttacaaaagagaaattagactgttctacatctgcctacaatttaaacttgttctctgtatttttacacccaaccttttttttttttttttttgtctctttccacatgcaattttcagtgttaaatgacatcaaaagcctagggctccggaactatccacttgttcaaaatttgat

SEQ ID NO: 102385 - DNA, 201 bp, Homo sapiens
ctctcttttttttaagagacagggtctcactctgttgcccaggctggagggcagtggtgcaatcagctcactgcagccttgaactcctgggctcaagcgaycctccctcctcagcctctggaatatttaaaactacaggcgtgcatcaccacacccagctaagttttaaagttttttgtagagacacggtcttgctgtgtt

SEQ ID NO: 102386 - DNA, 201 bp, Homo sapiens
aagtggttgacccagttcacagctcttcagctgctcttactacttctgcagaggctctaatttatttattatttttttttgagacagagtctcactctgtsgctcaggctggagtgcagtggcaaaatctcagctcactgcaaactctgcctgctgggttcaagtgattctcctgctcagcttcccgagtagctgagatta

SEQ ID NO: 102387 - DNA, 201 bp, Homo sapiens
cttcatcaaatctcattaagttgtacaaattctattttcattatgcctggttcaatcttgtgacttcactaatattagtaagatttaatgatgcctaactrggcctaagaaaagtttaacagtttttgtgacttaaaaatgctctactggatttcatgtaacttataaggacctgagaagaacagtcaagtcttaaaagag

SEQ ID NO: 102388 - DNA, 201 bp, Homo sapiens
tggttgacccagttcacagctcttcagctgctcttactacttctgcagaggctctaatttatttattatttttttttgagacagagtctcactctgttgcycaggctggagtgcagtggcaaaatctcagctcactgcaaactctgcctgctgggttcaagtgattctcctgctcagcttcccgagtagctgagattacag

SEQ ID NO: 102389 - DNA, 201 bp, Homo sapiens
gcaacatggtgaaaccccgcctctaccaaaaaatacaaaagctagctgggcatggtggcacacgcctgtggtcccagctactcaggaggctgaggtgggakgattgcttgagcccaggaggtggaggctgtagtgagccgagatcacacaactgcactccagcctgggttaaagagcaagagcctgtctcaaaaaaaaaaa

SEQ ID NO: 102390 - DNA, 201 bp, Homo sapiens
ttcagctgctcttactacttctgcagaggctctaatttatttattatttttttttgagacagagtctcactctgttgctcaggctggagtgcagtggcaaratctcagctcactgcaaactctgcctgctgggttcaagtgattctcctgctcagcttcccgagtagctgagattacaggcgtgcaccaccatgcctggct

SEQ ID NO: 102391 - DNA, 201 bp, Homo sapiens
aacatggtgaaaccccgcctctaccaaaaaatacaaaagctagctgggcatggtggcacacgcctgtggtcccagctactcaggaggctgaggtgggaggwttgcttgagcccaggaggtggaggctgtagtgagccgagatcacacaactgcactccagcctgggttaaagagcaagagcctgtctcaaaaaaaaaaaaa

SEQ ID NO: 102392 - DNA, 201 bp, Homo sapiens
gcagtggcaaaatctcagctcactgcaaactctgcctgctgggttcaagtgattctcctgctcagcttcccgagtagctgagattacaggcgtgcaccacyatgcctggctaatttttgtatttttagtagagatggggtttcaccatgttggccaggctggttttgaactcctaacctcaagtgatttacgtgtctcggc

SEQ ID NO: 102393 - DNA, 201 bp, Homo sapiens
tccacctcagatcatcaagcattagattctcatgaggagcgcaacctagatccgttgcatgcagagttcacaatagggttggcactcctataagaatctamtgacgccactgatctgacaggaggcggagctcaggcagtaatgcttgctggcccgctgctcaccacctgctgtgcagcctggttcctaacaagccatgga

SEQ ID NO: 102394 - DNA, 201 bp, Homo sapiens
ggtttatgacattctcccacctcagcctcccgagtagctgggactacaggtgttcaccaccacgcctgggtaatttttttgtatttttagtagagacgagrttttaccgtgttagccaggatggtctcgatctcctgacctcgtgatccacccgcctccgcctcccaaagtgctgggattacaggcatgagccaacactcc

SEQ ID NO: 102395 - DNA, 201 bp, Homo sapiens
acattctcccacctcagcctcccgagtagctgggactacaggtgttcaccaccacgcctgggtaatttttttgtatttttagtagagacgaggttttaccrtgttagccaggatggtctcgatctcctgacctcgtgatccacccgcctccgcctcccaaagtgctgggattacaggcatgagccaacactcccggctcat

SEQ ID NO: 102396 - DNA, 201 bp, Homo sapiens
attctgtccctttggaaactgtatcatcttttaaaaatgaagtacgtgactttcctaatgatcttttatattataaaaataggccgggctcagtggctcaygcctgtaatcccagcattttgggaggccgaggctggtggatcacttgaggtcaggagctcgagaccagcctggccaacatggtgaaaccctgtctctaca

SEQ ID NO: 102397 - DNA, 201 bp, Homo sapiens
tcgaaacaggaaagtaaaatgtttctagcagatttcttcccccctccaccccagacagtcttgctctgtcacccaagctggagtgcagtgtcgcaatctcrgctcactgcaacctccacctcccaggttcaagcgattctcctgcctcagcctcccgagtagctaggattacaggcgcctgccaccttgcccggctaattt

SEQ ID NO: 102398 - DNA, 201 bp, Homo sapiens
ccagcctggccaacatggtgaaaccctgtctctacaaaaatacaaaaattagtcggacatggtggcacatgcctgtaatcccagctactcaggaggctgargcaggagaatcacttgaaccccagaggcagaggttgcagtgagctgagattgtgccactgcactccagcctgggcaacagaacaagactccatctcagaa

SEQ ID NO: 102399 - DNA, 201 bp, Homo sapiens
cccccctccaccccagacagtcttgctctgtcacccaagctggagtgcagtgtcgcaatctcagctcactgcaacctccacctcccaggttcaagcgattytcctgcctcagcctcccgagtagctaggattacaggcgcctgccaccttgcccggctaatttttgtatttttagtggagacggggtttcgccatgttggc

SEQ ID NO: 102400 - DNA, 201 bp, Homo sapiens
catggtggcacatgcctgtaatcccagctactcaggaggctgaagcaggagaatcacttgaaccccagaggcagaggttgcagtgagctgagattgtgccmctgcactccagcctgggcaacagaacaagactccatctcagaaaagaaaataacatcaaaataaataacataacataacataacataacataacataaca

SEQ ID NO: 102401 - DNA, 201 bp, Homo sapiens
gagattgtgccactgcactccagcctgggcaacagaacaagactccatctcagaaaagaaaataacatcaaaataaataacataacataacataacataamataacataacataacataacataacataacaataggaatttcaaaaaatctgaaacccgggcctggcacagtggctcacacctgtaattccagcactttg

SEQ ID NO: 102402 - DNA, 201 bp, Homo sapiens
catcagagaaatgccaatcaaaaccacaatgagatatcatctcacaccagttagaatggcaatcattaaaaagtcaggaaacaacaggtgctggagaggaygtggagaaataggaacacttttacactgttggtgagactgtaaactagttcaaccattgtggaagtcagtgtggtgattcctcagggatctagaactaga

SEQ ID NO: 102403 - DNA, 201 bp, Homo sapiens
tctcacgacaaccctctgaggtagattttttaatatatactttaagttctagggtacatgtgcacaacgtgcaggtttattacatatgtatacatgtgccrtgttggtgtgctgcacccattaactcatcatttacattaggtacatctcctaatgctatccctcccgcctcccctcaccccatgacaggccccagtgtgt

SEQ ID NO: 102404 - DNA, 201 bp, Homo sapiens
cactttgggaggctgagacgggtggatcacctgacgtcaggagtttgtgactagcctgaccaacatggtgaaaccccatctctactaaaaatacaaaaatyagccgggcgtggtggcgcatgcctgtaatcccagctactcaggaggctgaggtacaagaatcgcttgaacccaggaggtagaggttgcagtgagctgaga

SEQ ID NO: 102405 - DNA, 201 bp, Homo sapiens
gagtgcagtggcgcgatctccactcactgcaagctccgcctcccaggttcacaccattctcctgcctcagcctcccgagtagctgggactacaggtgcccrccaccacactcagctaattttttgtatttttagtagagacggggtttcaccgtgttagccaggatggtctcgatctcctgacctcgtgatccgcccacct

SEQ ID NO: 102406 - DNA, 201 bp, Homo sapiens
taatatatactttaagttctagggtacatgtgcacaacgtgcaggtttattacatatgtatacatgtgccatgttggtgtgctgcacccattaactcatcrtttacattaggtacatctcctaatgctatccctcccgcctcccctcaccccatgacaggccccagtgtgtgatgttccccaccctgtgtccaagtgttgt

SEQ ID NO: 102407 - DNA, 201 bp, Homo sapiens
tgttggtgtgctgcacccattaactcatcatttacattaggtacatctcctaatgctatccctcccgcctcccctcaccccatgacaggccccagtgtgtratgttccccaccctgtgtccaagtgttgtcattgttcaattcccacctatgaatgagaacatgcggtgtttggttttctgtccttgggatagtttgctga

SEQ ID NO: 102408 - DNA, 201 bp, Homo sapiens
ttcaagtgattctcctgcctcagcctccctggtagctgggattacaggcatgtgccaccacacccggctaatttttgtatttttagtagagacggggtttyaccatgttggccaggctggtctcaaactcctgacctcaagtgaaccacccgcctcggcctcccaaagtgttgggattacaagcgtgagctaccacaccca

SEQ ID NO: 102409 - DNA, 201 bp, Homo sapiens
tcattgttcaattcccacctatgaatgagaacatgcggtgtttggttttctgtccttgggatagtttgctgagaatgatggtttccagcttcatccatgtycctacaaaggacatgaactcatcctttttatggctgcatagtattccatggcatatatgtgccaaattttcttagtccagtctatcaatgatggacattt

SEQ ID NO: 102410 - DNA, 201 bp, Homo sapiens
gagacggagtctcgctgtgtctcccaggttggagtgcagtggcgcgatctccactcattgcaagctccgcctcccaggttcatgccattctcctgcctcakcctcccaagtagctgggactacaggcgcccgccaacacgcccggctaattttttgtatttttagtagaaacggggtttcaccgtgttagccaagatggtc

SEQ ID NO: 102411 - DNA, 201 bp, Homo sapiens
aagctctaactagtagggggccaataaggggcaaacaaaggagagaagctggctgcttagctaaccaagtagagagcctcggatctggaaggaactggacmgaacatctgtaactgggcagggctggccttgggcctgtcttgacttccttgaaatgtctcttttacctggcctccttctcatggctgtcatcaagcagcc

SEQ ID NO: 102412 - DNA, 201 bp, Homo sapiens
gtgttttttttttttttttagatagagtctcgctctgtcacccaggctggagtgcagtggcatgatctaggcttactgcaacctccgcctcctgggttcargagattctcctgcctcagcctcccaagtagctgggattacaggtggccgccactgcgcccagctaatttttgtatttttagtagacacaaggtttcacca

SEQ ID NO: 102413 - DNA, 201 bp, Homo sapiens
caggcgcccgccaacacgcccggctaattttttgtatttttagtagaaacggggtttcaccgtgttagccaagatggtctcgatctcctgacctcgtgatscgcccgtctcggcctcccaaagtgctaggattacaggcgtgagccaccgcgcccggccgtttctctggttctttaagatgcattgttaggttgcttattt

SEQ ID NO: 102414 - DNA, 201 bp, Homo sapiens
aaataatgctcaccatcactggccatcagagaaatgccaatcaaaaccacaatgagatatcatctcacaccagttagaatggcaatcattaaaaagtcagvaaacaacaggtgctggagaggatgtggagaaataggaacacttttacactgttggtgagactgtaaactagttcaaccattgtggaagtcagtgtggtga

SEQ ID NO: 102415 - DNA, 201 bp, Homo sapiens
gaagtgcagtggcgcaatctcggttcactgcaagctccgcctcccgggttcacgccattctcctgcctcagcctcctgagtagctgggactacaggcgcchaccaccacgcccggctaattttttgtatttttagtagagacggggtttcactgtgttagccaggatggtctcgatctcctgaccttgtgatccgcccacc

SEQ ID NO: 102416 - DNA, 201 bp, Homo sapiens
cagcatatatatacttaaatatataaatatgtatatgctgtgtatatatttatatatataaatcacacctatgtttgtgtgtgtatgtgtgtgtgtgtgtrtgtgtgtgtgtgtgtgtgtgtgtgtatatatatatatatataaaatatgatatttccattatccccaggaagttttctagtgcctagttggtatgtagtg

SEQ ID NO: 102417 - DNA, 201 bp, Homo sapiens
agtggaaaagcttgttacagaaaaaacattttgtgttattgctgtggtgtgcatgatttgcaaagattaagtgcattttctctgtctatactgattattgkatatagaggatgttataaatatacatatacatttttgccattatgtaaatcccatgatttcaactgtaaacatctgtccattggtgtagctttacaaacc

SEQ ID NO: 102418 - DNA, 201 bp, Homo sapiens; identical to SEQ ID NO: 16136

SEQ ID NO: 102419 - DNA, 201 bp, Homo sapiens
ctcagcctcccgagtagctaggattacaggcgcctgccaccttgcccggctaatttttgtatttttagtggagacggggtttcgccatgttggccaggctvgtctcaaactcctgacctcaggtgatctgcctgccttggcctccaaagtgctggcattacaggcgtggcctaaaatgtttataacagatttcttatcaat

SEQ ID NO: 102420 - DNA, 201 bp, Homo sapiens
atacttaaatatataaatatgtatatgctgtgtatatatttatatatataaatcacacctatgtttgtgtgtgtatgtgtgtgtgtgtgtgtgtgtgtgtrtgtgtgtgtgtgtgtatatatatatatatataaaatatgatatttccattatccccaggaagttttctagtgcctagttggtatgtagtgcccagtcggt

SEQ ID NO: 102421 - DNA, 201 bp, Homo sapiens
tgacgtcaggagtttgtgactagcctgaccaacatggtgaaaccccatctctactaaaaatacaaaaatcagccgggcgtggtggcgcatgcctgtaatcycagctactcaggaggctgaggtacaagaatcgcttgaacccaggaggtagaggttgcagtgagctgagattgcgccattgcaatccagactgggcaacaa

SEQ ID NO: 102422 - DNA, 201 bp, Homo sapiens
atatataaatatgtatatgctgtgtatatatttatatatataaatcacacctatgtttgtgtgtgtatgtgtgtgtgtgtgtgtgtgtgtgtgtgtgtgtrtgtgtgtatatatatatatatataaaatatgatatttccattatccccaggaagttttctagtgcctagttggtatgtagtgcccagtcggtgtctccac

SEQ ID NO: 102423 - DNA, 201 bp, Homo sapiens
ctccttcctcttccccaggatagttcatcaagtaagcagttaaagaagttactgagattctgctttatgccagggatgaaggccaatgtacaaagctggawtggatgggatgagggctatatagaagaataggacagagcccctgtccttgaaaacatagtttaagtggaaatataaacaattaattgtaattcagtatca

SEQ ID NO: 102424 - DNA, 201 bp, Homo sapiens
tgtagaggttatacacaaatactttgccattttatttatttgtgtgtttgggtttctttttaagatggagtctcactctgtcacccaggctggagtgcagkggcacaatctcggctcactgcaacttccacctcccaggttcagatgattctcctgcctcagcttccggggtagctgggattacagacatgcacacccacg

SEQ ID NO: 102425 - DNA, 201 bp, Homo sapiens
atataaatatgtatatgctgtgtatatatttatatatataaatcacacctatgtttgtgtgtgtatgtgtgtgtgtgtgtgtgtgtgtgtgtgtgtgtgtrtgtgtatatatatatatatataaaatatgatatttccattatccccaggaagttttctagtgcctagttggtatgtagtgcccagtcggtgtctccaccc

SEQ ID NO: 102426 - DNA, 201 bp, Homo sapiens
tgagtctcagtttcttcattctggaaaagggaataataatatatgattcacaggattgttgggagttaacgtataagtgtcaggcacagagcacccccagytcctggctatgtagttggtgtaagaaagtgtcctctttgagcagccaaatgtttacccttcatgggggttagtgagttctttcaggcctggttgagtgtg

SEQ ID NO: 102427 - DNA, 201 bp, Homo sapiens
tggagtgcggtggtgcaatctcggctcactgcaacctctgccccccatgttcaagcaattctcctgcctcagcctcctgagtagctgggattacaggtgcvcgccaccatgcccggctaatttttgtatttttagtagagatggggtttcaccatgttggccagtctggtctcaaactcctgacctcaagtcatctgcccg

SEQ ID NO: 102428 - DNA, 201 bp, Homo sapiens
gaggttatacacaaatactttgccattttatttatttgtgtgtttgggtttctttttaagatggagtctcactctgtcacccaggctggagtgcagtggcrcaatctcggctcactgcaacttccacctcccaggttcagatgattctcctgcctcagcttccggggtagctgggattacagacatgcacacccacgccca

SEQ ID NO: 102429 - DNA, 201 bp, Homo sapiens
ataaatatgtatatgctgtgtatatatttatatatataaatcacacctatgtttgtgtgtgtatgtgtgtgtgtgtgtgtgtgtgtgtgtgtgtgtgtgtrtgtatatatatatatatataaaatatgatatttccattatccccaggaagttttctagtgcctagttggtatgtagtgcccagtcggtgtctccacccac

SEQ ID NO: 102430 - DNA, 201 bp, Homo sapiens
aggcacaaatgagaatgaacagcccagtgggtgagagcacacacattggaggctcagacacatctgtcagtgaggacacaaagaccaaatataaagaccarattttatcttcataaagactctatggttttcatgcattgtaaatgagaaaagtagaagcacagagaggttatttgcccaagatgacacagctagtaactg

SEQ ID NO: 102431 - DNA, 201 bp, Homo sapiens
atacacaaatactttgccattttatttatttgtgtgtttgggtttctttttaagatggagtctcactctgtcacccaggctggagtgcagtggcacaatcrcggctcactgcaacttccacctcccaggttcagatgattctcctgcctcagcttccggggtagctgggattacagacatgcacacccacgcccaactaat

SEQ ID NO: 102432 - DNA, 201 bp, Homo sapiens
gttaggaacatcacgagcaagaacttacggctcagcagtggttgtaggtgtaaattcagtgtcccaagtcagaaaccaagaggtgtaagcccaacatgaarggcaaagaggggaggaaattaacaaagatggaggctaggaacaacgttaggggctttcatatgtaataatccatttaatatttgcaataagtttatgagg

SEQ ID NO: 102433 - DNA, 201 bp, Homo sapiens
agttagggtacctgcctcccagacagcacatgtccagcaggcccaggtgaatgcgtgggactggctatcactagctcaaaattgccttaatatttattgayggcctaccatgtgaaaaaggcctcttacttgatttcttgtctctgtggaggtccctaaagaaatgattctgtgtgtctctggatttctcacaatctagag

SEQ ID NO: 102434 - DNA, 201 bp, Homo sapiens
cacaaatactttgccattttatttatttgtgtgtttgggtttctttttaagatggagtctcactctgtcacccaggctggagtgcagtggcacaatctcgsctcactgcaacttccacctcccaggttcagatgattctcctgcctcagcttccggggtagctgggattacagacatgcacacccacgcccaactaatttt

SEQ ID NO: 102435 - DNA, 201 bp, Homo sapiens
tgcctcagcctcctaagtagctgggtctacaggtgggtttttttttttttttttttgtatttttagtggagacagggtttcaccatgttggccaggctggyctcgaactcccaacctcaagtgatccaccagctttggcctcccaaagtgctggctttacaggtatgagccatcgtgcctggcctagaggcattattctaa

SEQ ID NO: 102436 - DNA, 201 bp, Homo sapiens
agaacaaaatgttttatcaactagaactttgcttcattttcaatatggtcttcaaaaacaaaaacaaaaaatcaaaaccacaatgagataccatctcacascagttagaatggcgatcatcaaaaagtcaggaaacaacaggtgctgaagaggatgtggagaaataggaacacttttacactgttgctgggactgtaaact

SEQ ID NO: 102437 - DNA, 201 bp, Homo sapiens
tcagcctcctaagtagctgggtctacaggtgggtttttttttttttttttttgtatttttagtggagacagggtttcaccatgttggccaggctggtctcraactcccaacctcaagtgatccaccagctttggcctcccaaagtgctggctttacaggtatgagccatcgtgcctggcctagaggcattattctaagtga

SEQ ID NO: 102438 - DNA, 201 bp, Homo sapiens
tttaaccatcaccacccccttgcccagcccctggtagctaccattctcctttctgcttctatgagtttgacctgattgtgcttttgatggatgttagaacyatcttccttgacctggcttcagccatataagactgctgcagtgtctgttgaaagttgcatcccctaccccatctcagcacaacattctcctcctcctgtt

SEQ ID NO: 102439 - DNA, 201 bp, Homo sapiens
ctagaactttgcttcattttcaatatggtcttcaaaaacaaaaacaaaaaatcaaaaccacaatgagataccatctcacaccagttagaatggcgatcatyaaaaagtcaggaaacaacaggtgctgaagaggatgtggagaaataggaacacttttacactgttgctgggactgtaaactagttcaaccattgtggaagt

SEQ ID NO: 102440 - DNA, 201 bp, Homo sapiens
tcaagtgatcctcccacctcagcctcccgagtagctgggattacaggcgcatgccaccactctcagctaattttagtatttttagtagagatagggtttcrccatgttgcccaggctgatctcaaactcctgggctcaagcaatcctcctacctcagcctcccaaagtgttggaattataggcgtgaaccaccatgccgtg

SEQ ID NO: 102441 - DNA, 201 bp, Homo sapiens
ttcgttatactggtcttcttcttgtctataaaatgtctgcttttccataccattgcacctatcttgaataacctgtgtccttcaactacccatgtccaaayactagttcattgaaaagagctcattctttcaaaatagataagatatgtatttctatcccagctctagtaccttggacaagttaatctctttgagcctcag

SEQ ID NO: 102442 - DNA, 201 bp, Homo sapiens
gataccatctcacaccagttagaatggcgatcatcaaaaagtcaggaaacaacaggtgctgaagaggatgtggagaaataggaacacttttacactgttgstgggactgtaaactagttcaaccattgtggaagtcagtgtggtgattcctcagggatctagaactagaaataccatttgacccagccatcccattactgg

SEQ ID NO: 102443 - DNA, 201 bp, Homo sapiens
tggacgtggtggtgggtgcctgtaatcccagctacttgggaggctgaggcaggagaatcgtttgaatctgggagatggaggttgcagtgagctgagatcgyaccactgcactccagcctgggcgacagagcaagactctgtattgaaaaaatatatatatatattatataaatataataatatattataaatatatacata

SEQ ID NO: 102444 - DNA, 201 bp, Homo sapiens
tactatgcagccataaaaaatgaggagttcatgtcctttgtagggacatggatgaaactggaaatcattattgtcagtaaactatcgcaaggacaaaaaaycaaacaccgcatgttctcactcataggtgggaattgaacaatgagaacacatggacacaggaaggggaacatcacactctggggcctgttgtggggtggg

SEQ ID NO: 102445 - DNA, 201 bp, Homo sapiens
ctgggattacaggtggccgccactgcgcccagctaatttttgtatttttagtagacacaaggtttcaccatattggccaggctggtctcgaactcctgacytcaggtgatccacctgcttcagcctctcaaaatactgggattacaggcgtgagccaccatgcccagcctggagttgtgatttttcaatgagataacccat

SEQ ID NO: 102446 - DNA, 201 bp, Homo sapiens
agcattaggagatatacctaatgctaaatgacgagttaatgggtgcagcacaccagcatggcacatgtatacatatgtaactaacctgcacattgtgcacrtgtaccctaaaacttaaagtagaataataataaaaaaaaaaataaaaaaaacttttgttctttcagttaacatttttttttttttggtaaacatttggat

SEQ ID NO: 102447 - DNA, 201 bp, Homo sapiens
ctactaaaaatacaaaaattagctgggcgtggtggtgggcacctgtaatcccaactactggggaggctgaggcaggagaatcacttgcacctgggaggcaraggttgcagtgagccgagattgcgccattgcactcagcctgggggacaagagcaagactttgtctcaaaaaaaaaacaaatgttgactagtgtcttctgt

SEQ ID NO: 102448 - DNA, 201 bp, Homo sapiens
catgcacacgtatgtttattgcggcattattcacaatagcaaagacttggaaccaacccagatgtccaacaatgatagactggataaagaaaatgtggcasatatacaccatggaatactatgcagccataaaaaatgatgagttcatgtcctttgtagggacatggatgaaattggaaatcatcattctcagtaaactac

SEQ ID NO: 102449 - DNA, 201 bp, Homo sapiens
gacggagtctcgctgtgtctcccaggttggagtgcagtggcgcgatctccactcattgcaagctccgcctcccaggttcatgccattctcctgcctcagcytcccaagtagctgggactacaggcgcccgccaacacgcccggctaattttttgtatttttagtagaaacggggtttcaccgtgttagccaagatggtctc

SEQ ID NO: 102450 - DNA, 201 bp, Homo sapiens
aaaccgaatccagcagcacatcaaaaagcttatccaccatgatcaagtgggcttcatccctggtatgcaaggctggttcaatatatgcaaatcaataaatktaatccagcatataaacagaagcaaagacaaaaaccacatgattatctcaatagatgcagaaaaggcctttgacaaaattcaacaacccttcatgctaaa

SEQ ID NO: 102451 - DNA, 201 bp, Homo sapiens
ttgctctgtcacccaggctgaagtgcagtggcgcaatctcggttcactgcaagctccgcctcccgggttcacgccattctcctgcctcagcctcctgagtrgctgggactacaggcgcccaccaccacgcccggctaattttttgtatttttagtagagacggggtttcactgtgttagccaggatggtctcgatctcctg

SEQ ID NO: 102452 - DNA, 201 bp, Homo sapiens
ttgggaggctgagatgggtggatcacctgaggtcaggagtttgagaccagtctgaccaacatggtgaaaccccatctctactaaaaatacaaaaattagcyaggcgtggtggtgggtgcctataatcccagctactcaggaggctgaggagggaaaattgcctgaacccaggaggcggaggttgtggtgagctgagattgc

SEQ ID NO: 102453 - DNA, 201 bp, Homo sapiens
ttgaggccaggagtttgagaccagcctagctaacatagcaaaaccctgtctctactaaaaatacaaaaactagccaggcgtggtggcgtgtgcctgtaatyccagctacttgggaggctgaggcaggagaatcacttgaacctgggaggcgccggttgtggtgagccgagagtgcaccactgctctccagcctgggtgacg

SEQ ID NO: 102454 - DNA, 201 bp, Homo sapiens
caaaagtaattgtggtttttgcccttaccttttttttttgagacggagtctcgctctgttgctggagtgcagtggcgcgattttggctcactgcaagctcygcctcctgggttcacgccattctcctgcctcagcctcccaagtagctgggactacaggcgcccgccaccacgcccggctaatttttttgtatttttagta

SEQ ID NO: 102455 - DNA, 201 bp, Homo sapiens
tcaccaacaatataatgttatcatcaggcccaaccttcatccccttcgttatactggtcttcttcttgtctataaaatgtctgcttttccataccattgcrcctatcttgaataacctgtgtccttcaactacccatgtccaaacactagttcattgaaaagagctcattctttcaaaatagataagatatgtatttctat

SEQ ID NO: 102456 - DNA, 201 bp, Homo sapiens
tcagcctcccgagtagctgggattacaggcgcatgccaccactctcagctaattttagtatttttagtagagatagggtttcgccatgttgcccaggctgrtctcaaactcctgggctcaagcaatcctcctacctcagcctcccaaagtgttggaattataggcgtgaaccaccatgccgtgccagcaaatgctttttga

SEQ ID NO: 102457 - DNA, 201 bp, Homo sapiens
taaaaatctacacattagatacaatgtacactgcttgggtgatgggtgcactaaaatctcagaattcaccactgtgtaattcatccatataacacaaaacyacttgtactccaaaagctattgaaataaaaataaataaataaaaataaaaaatacaaaagccccgttgctaagaaggaactgataactaccagtgtagac

SEQ ID NO: 102458 - DNA, 201 bp, Homo sapiens
cgggatcactcagatgcctcttcttgcctctaaagaatgggaacgggggccaagtgcggtggctcacgcttgtaatcccagcactttgggaggccgaggtkggcggatcacaaggtcaggagatcaagaccatcctggctaacacggtgaaaccccgtctctactaaaaatacaaaaaattagctgggcgtggtggtgggt

SEQ ID NO: 102459 - DNA, 201 bp, Homo sapiens
tgagacggagtctcactctgtcacccaggctggagtgcagtggcgcgatctccactcactgcaagctccgcctcccaggttcacaccattctcctgcctcrgcctcccgagtagctgggactacaggtgcccgccaccacactcagctaattttttgtatttttagtagagacggggtttcaccgtgttagccaggatggt

SEQ ID NO: 102460 - DNA, 201 bp, Homo sapiens
ccagcactttgggaggccgaggtgggcggatcacaaggtcaggagatcaagaccatcctggctaacacggtgaaaccccgtctctactaaaaatacaaaarattagctgggcgtggtggtgggtgcctgtagtcccagctacttgtgaggctgaggaaggagaatggcgtgaacccgggaggtggaacttgcagtgagccg

SEQ ID NO: 102461 - DNA, 201 bp, Homo sapiens
aacatggtgaaaccctgtctctacaaaaaatagaaaaattagcaggacatggtggtgcgtgcctgtaatccagctactcgggaggctgaggcatgagaatygcttgagcccaggaggcggaggttgcagtgagctgtgatcatgctgttgcactccagcctgggcaactgtaatgaaactctgatatggtttggctgtgtc

SEQ ID NO: 102462 - DNA, 201 bp, Homo sapiens
gaggccgaggtgggcggatcacaaggtcaggagatcaagaccatcctggctaacacggtgaaaccccgtctctactaaaaatacaaaaaattagctgggcrtggtggtgggtgcctgtagtcccagctacttgtgaggctgaggaaggagaatggcgtgaacccgggaggtggaacttgcagtgagccgagatcccgccac

SEQ ID NO: 102463 - DNA, 201 bp, Homo sapiens
atggggttttgctatgttggccaggctggtctcgaactcctgacctcgtgatccgcctgacttggcctcccaaagtgctgggattacaggcatgagccacygcgcccagcctagacactgactcttaagtgcttggacagttgctatctctctgacttttcctgatcagcctttttccatgcccacacacatctttattac

SEQ ID NO: 102464 - DNA, 201 bp, Homo sapiens
gacatggtggtgcgtgcctgtaatccagctactcgggaggctgaggcatgagaattgcttgagcccaggaggcggaggttgcagtgagctgtgatcatgcygttgcactccagcctgggcaactgtaatgaaactctgatatggtttggctgtgtccccacccaaatttcatcttgaattgtaactctcataattcccacg

SEQ ID NO: 102465 - DNA, 201 bp, Homo sapiens
gtaccagcttggacgttatggaaaatgggagctttaaatgttcttgaaggccaggcacggtggctcacgcctataatcccagcactttgggaggccgaggygggtggatcacaaggtcaggagttcgagaccatcctgggcaagatggtgaaatcccgtctctactaaaaatacaaaaaaattatccgggcgtggtggtgg

SEQ ID NO: 102466 - DNA, 201 bp, Homo sapiens
tcttgctctttaagattttgagaattagtctcttatcccttctaaaatatttctactgatcttgttcttccccagggtcatattacaggtacgctttaggwtaagctttctcaaaattggggtactggatgggttataaactataaaaaatagtgctctgaccctagtctgtgatggtccgaacacaccaacctgtgttct

SEQ ID NO: 102467 - DNA, 201 bp, Homo sapiens
gtgagctgtgatcatgctgttgcactccagcctgggcaactgtaatgaaactctgatatggtttggctgtgtccccacccaaatttcatcttgaattgtarctctcataattcccacgtgtcgtgggagggacctggtgggagataattgaatcatgggggcgggtatttcttgtgctgttcttgtgacagtgaataagtc

SEQ ID NO: 102468 - DNA, 201 bp, Homo sapiens
gccaggcacggtggctcacgcctataatcccagcactttgggaggccgaggcgggtggatcacaaggtcaggagttcgagaccatcctgggcaagatggtraaatcccgtctctactaaaaatacaaaaaaattatccgggcgtggtggtgggtgcctgtaatcccagctacacaggaggctgaggcagagaattgcttga

SEQ ID NO: 102469 - DNA, 201 bp, Homo sapiens
caagcaattctcctgcctcagcctcctgagtagctgggactacaggtgtgtgccactacgctcagctaatttttgtatttttagtagagacggggtttcaycatgttggtcaggctggtctcaaactcctgacctcaagtgatctgccctccttggcctcccaaagtgctgggattacaggcgtgagccaccatgcctggc

SEQ ID NO: 102470 - DNA, 201 bp, Homo sapiens
aaaaaattatccgggcgtggtggtgggtgcctgtaatcccagctacacaggaggctgaggcagagaattgcttgaacctgggaggcaaaggttgcagtgasctgagattgtgccactgcactccagcctgggcgacagagcgagactccatctcaaataaataaataaataaattaaattaaataaatgttcttgaacatg

SEQ ID NO: 102471 - DNA, 201 bp, Homo sapiens
tgaaagactaaattgtcaaataggtgctgtgggaatgttttcagaaacaatgtatcctgccatagccaaggacaagttatagacaaacccgttttccacgraaacaagaatccttcagtgtctagattgttaattagatcagcactagagggcactcttatgatgccaaaatgggaaatttttactaaaatctgctgggca

SEQ ID NO: 102472 - DNA, 201 bp, Homo sapiens
ttagtagagacggggtttcatcatgttggtcaggctggtctcaaactcctgacctcaagtgatctgccctccttggcctcccaaagtgctgggattacagscgtgagccaccatgcctggccctctcagcattttgaatgttactccactacctacagcctccattgtttcagacaaaaagagcattaattgtattgatgc

SEQ ID NO: 102473 - DNA, 201 bp, Homo sapiens
cctgtaatcccagctacacaggaggctgaggcagagaattgcttgaacctgggaggcaaaggttgcagtgacctgagattgtgccactgcactccagcctsggcgacagagcgagactccatctcaaataaataaataaataaattaaattaaataaatgttcttgaacatggggaaacatattttcattgcagtttattt

SEQ ID NO: 102474 - DNA, 201 bp, Homo sapiens
caactctttcccaaggcgacattgcccttcttaccattgtagttacatgggccctgctggaatgagtcacatactctagcttcttccagtttcttcccccscttggttaacttggcttggacattttggattctgtctatatgtaatttgattgcattttcctatagataagaaatataggtataatagcaaggagcacct

SEQ ID NO: 102475 - DNA, 201 bp, Homo sapiens
ggacacatacaccctcccaagactaaaccaggaagaagttgaatccctgaatagaccaataacaggctctgaaattgaggcaataattaatagcctaccarccaaaaaaagtccaggaccagacagattcacagctgaattctaccagaggtacaaggaggagctggtaccattccttctgaaactattccaatcagtaga

SEQ ID NO: 102476 - DNA, 201 bp, Homo sapiens
ctgtaatcccagctacacaggaggctgaggcagagaattgcttgaacctgggaggcaaaggttgcagtgacctgagattgtgccactgcactccagcctgrgcgacagagcgagactccatctcaaataaataaataaataaattaaattaaataaatgttcttgaacatggggaaacatattttcattgcagtttattta

SEQ ID NO: 102477 - DNA, 201 bp, Homo sapiens
gtctcgctgtgtctcccaggttggagtgcagtggcgcgatctccactcattgcaagctccgcctcccaggttcatgccattctcctgcctcagcctcccargtagctgggactacaggcgcccgccaacacgcccggctaattttttgtatttttagtagaaacggggtttcaccgtgttagccaagatggtctcgatctc

SEQ ID NO: 102478 - DNA, 201 bp, Homo sapiens
ttctcacttggtcatgatgaatgatctttttaatatattgttgaattcagtttgctagtgttttgttgaggatttctgcatcaatattcattagcgatatyggcctgtagttttctttttttgatgtgtctttggttttggtatcagggtaatactggcctggtagaatgagtttggaagtattccctcttcctctatttc

SEQ ID NO: 102479 - DNA, 201 bp, Homo sapiens
cagcccagctttcctttgccatgacttggtttgcatgcaggaattgtaaacccatcttattaaaagttaccaatgataggctgggcccagtggctcacgtmtgtaatcccagcactttgggaggccgaggcaggtggatcacgaggtcaggagttcgagaccagcctgaccaatgtggtgaaaccctgtctctactaaaaa

SEQ ID NO: 102480 - DNA, 201 bp, Homo sapiens
taaaccaggaagaagttgaatccctgaatagaccaataacaggctctgaaattgaggcaataattaatagcctaccagccaaaaaaagtccaggaccagayagattcacagctgaattctaccagaggtacaaggaggagctggtaccattccttctgaaactattccaatcagtagaaaaagagggaatcctccctaact

SEQ ID NO: 102481 - DNA, 201 bp, Homo sapiens
agctacacaggaggctgaggcagagaattgcttgaacctgggaggcaaaggttgcagtgacctgagattgtgccactgcactccagcctgggcgacagagygagactccatctcaaataaataaataaataaattaaattaaataaatgttcttgaacatggggaaacatattttcattgcagtttatttatccaactgag

SEQ ID NO: 102482 - DNA, 201 bp, Homo sapiens
gtaatccagcatataaacagtcccaaagacaaaaaccacatgattatctcagtagatgcagaaaaggcctttgacaaaattcaacagcccttcatgctaaraactctcaataaattaggtattgatgggatgtatctcaaaataataagaactatttatgacaatcccacagccaatatcatactgaatgggcaaaaactg

SEQ ID NO: 102483 - DNA, 201 bp, Homo sapiens
atgctaaaaactctcaataaattaggtattgatgggatgtatctcaaaataataagaactatttatgacaatcccacagccaatatcatactgaatgggcraaaactggaagcattccctttgaaaactgacacaagacagggatgccctctctcaccactcctattcaacatagtgttggaagttctggccagggcaatc

SEQ ID NO: 102484 - DNA, 201 bp, Homo sapiens
gcaaaaactggaagcattccctttgaaaactgacacaagacagggatgccctctctcaccactcctattcaacatagtgttggaagttctggccagggcartcaggcaggagaaggaaataaagggtattcaattaggaaaagaggaagtcaaattgtccctgtttgcagatgacatgattgtatatttagaaaaccccat

SEQ ID NO: 102485 - DNA, 201 bp, Homo sapiens
aattaaactcaagagcttctgcacagcaaaagaaactaccatcagagtgaacaggcaacctacagaataggagaaaatttttgcaatctacccatctgacraagggctaatatccagaatctacaaagaactcaaacaaatttacaagaaaaacaaacaaccccatcaacaagtaggcaaagtatatgaacagacacttct

SEQ ID NO: 102486 - DNA, 201 bp, Homo sapiens
gttatctatttttgcctaatatccagtactgtaaggaaaataacaaggatgtactttttcttttcttttttttttctttttttttttgagacagagtctcrctctgtcgcccaggctggagtgcagtggcgtgataacggctcactgcaacctctgcctcctgggttcaagcaattctccttcctcagcctcctgagtagc

SEQ ID NO: 102487 - DNA, 201 bp, Homo sapiens
cagggcaggctgatgctatagaaccacggagtgtgctggcttccccaatttccttttttttttccttttcttctgagacggagtctcactctgtcacccargctggagtgcagtggcgcgatctccactcactgcaagctccgcctcccaggttcacaccattctcctgcctcagcctcccgagtagctgggactacaggt

SEQ ID NO: 102488 - DNA, 201 bp, Homo sapiens
ttttgagacgagtttttttcgctcttgttacccagactggagttcaatggcgcgatctcagttcactgcaacctccgcctcctgggttcaagcaattctcrtgcctcagcctcccaagtagctgggatttcaggcatgtgccaccacacctggctaattttgtatttttagtagagacagagtttcactatgttggtcagg

SEQ ID NO: 102489 - DNA, 201 bp, Homo sapiens
gcttctgggatgacctcagaaagcttccactaatggcagaaggcaagggagagcagacatcacattgtgtgagagaggaagagagtagagagggagtgctrggctctgtttctgaatcacttcttggctgggcatggcggctcatgcctgtaatcccagcactttgggaggccgaggtgggcagatcacctgaggtcagga

SEQ ID NO: 102490 - DNA, 201 bp, Homo sapiens
aggaggctgaggcagagaattgcttgaacctgggaggcaaaggttgcagtgacctgagattgtgccactgcactccagcctgggcgacagagcgagactcsatctcaaataaataaataaataaattaaattaaataaatgttcttgaacatggggaaacatattttcattgcagtttatttatccaactgagtatttatt

SEQ ID NO: 102491 - DNA, 201 bp, Homo sapiens
ggtctgctacttgctgcctgtatgattgggaaaattgatctaatcttaggctttagttttcttcacctgtaaattgggattgctcctcaccttaggggatwgcttgtgaataccaaatgagatcatatatggaaagcacttataacacagtgaatggcacacgaagtacaaacacacacacacacacatgcacacaagcac

SEQ ID NO: 102492 - DNA, 201 bp, Homo sapiens
ggaggctgaggcagagaattgcttgaacctgggaggcaaaggttgcagtgacctgagattgtgccactgcactccagcctgggcgacagagcgagactccrtctcaaataaataaataaataaattaaattaaataaatgttcttgaacatggggaaacatattttcattgcagtttatttatccaactgagtatttattc

SEQ ID NO: 102493 - DNA, 201 bp, Homo sapiens
tgagctgctagccactgtcccatttgactagcagatgcttgagaaaagcaagtacacagtttggattcgatcctacagtgtcttacatagttcttggcacmtgcatgtttgctctaggaacaaccttccttattataccgagctgatccttttgggcagcattcattgagtcaaatggcctgtgtgaaacggggtctgacc

SEQ ID NO: 102494 - DNA, 201 bp, Homo sapiens
ctttttacactatgtaaaatccttatggaaacaagaacaacaaaaccaaacacaaaaacctactttatttaaatgtgggagaagggcttgaataatttctcccccccccaaaaaaaaaaagatatacaaatggccaataagcaaatgaaaagatgctcaacagcattaatcattagggaaatgcaaatcaaaatcacactg

SEQ ID NO: 102495 - DNA, 201 bp, Homo sapiens
acaaaccactgctcaaggaaataaaagaggacacaaacaaatggaagagcattctatgctcatggataggaagaatcaatattgtgaaaatggccatactscccaaggtaatttacagattcaatgccatccccatcaagctaccaatgactttcttcacagaattggaaaaaactactttaaagttcatatggaaccaaa

SEQ ID NO: 102496 - DNA, 201 bp, Homo sapiens
ctgagtgtagtttcctcattttaagctttgtaaatattaatatctggcatacataatttgaaaaaatgctgtaaggattagaagaacgaatatacgtgcaracctttaagaaattataagtgcaaacacacgtagtacatttccatttttagagcttcatttttttcttatctgtaaaatagacatgtaaatgcctacctt

SEQ ID NO: 102497 - DNA, 201 bp, Homo sapiens
taatcattagggaaatgcaaatcaaaatcacactgaaataccacttcacacccattaggatggccattattattattattattattattattattattatyattattattattattattatttgagacagagtcttgctctgttgcccaggctggagtgcagtggtgcaatctcggctcactgcaacctccacctcctggg

SEQ ID NO: 102498 - DNA, 201 bp, Homo sapiens
taatttccatcttgccacattccaaggaaggaattttagtcttgggaggcaccaaataaccctcaggggaaatgtgaccctttgaagctcctggttgtctrtttctgcagctgcccatctactcacaccacccaggttggaggggcccagctcttcagcactcaaatacagtggagctggccacttctttgcacggggatg

SEQ ID NO: 102499 - DNA, 201 bp, Homo sapiens
tatggaaccaaaaaagagcctgcatcgccaagtcaatcctaagccaaaagaacaaggctggaggcatcacgctacctgacatcaaactatactacaaggcyacagtaaccaaaacagcatggtactggtaccaaaacagagatatagaccaatggaacagaacagggccctcagaaataataccacacatctacaaccatc

SEQ ID NO: 102500 - DNA, 201 bp, Homo sapiens
cattttggaaattatcaaaaggccagacggaatgcacaattcacttcttggctgccaggagtgaaggagagaagaggtgaggttgaatgatttgaaattcrgttcgtctgtgttagaacaagtcaaaacaattctagctgttaattttagttagttgagtccagagtaaaggtttgtaaagggcataagaaagcaacatta

SEQ ID NO: 102501 - DNA, 201 bp, Homo sapiens
gaaatgcaaatcaaaatcacactgaaataccacttcacacccattaggatggccattattattattattattattattattattattattattattattaktattattatttgagacagagtcttgctctgttgcccaggctggagtgcagtggtgcaatctcggctcactgcaacctccacctcctgggttcaagcaatt

SEQ ID NO: 102502 - DNA, 201 bp, Homo sapiens
atatgccattccataaatctgagaagttcaggaaggctagatagtgagcttttttccaaaaatcaatcagaaacatattcctaaataaaagaaatatactstgatattctgggactgccttatcagagagtgaagtgaaaaatcagaagtgatatagtctcattcaggccaacacagaaattactcctttaatacttattg

SEQ ID NO: 102503 - DNA, 201 bp, Homo sapiens
aaacagcatggtactggtaccaaaacagagatatagaccaatggaacagaacagggccctcagaaataataccacacatctacaaccatctgatctttgasaaacctgacaaaaaccagaaatggggaagggattccctatttaataaatgctgttgggaaaactggctagccatatgtagaaagctgaaactggatccct

SEQ ID NO: 102504 - DNA, 201 bp, Homo sapiens
gcaggtagaacagtttaatgaggaaggagctgacactcttgcctatggtgtgttgggagattatagattttagttatccatgtttatgttgtaccccaggmctacagattattggcagctggctataaacaaatgaccaaataaatctacagttgaagttacctagtgtctccaagatttcagggatgatcaaggacaggt

SEQ ID NO: 102505 - DNA, 201 bp, Homo sapiens
gcaaatcaaaatcacactgaaataccacttcacacccattaggatggccattattattattattattattattattattattattattattattattattdttatttgagacagagtcttgctctgttgcccaggctggagtgcagtggtgcaatctcggctcactgcaacctccacctcctgggttcaagcaattctcct

SEQ ID NO: 102506 - DNA, 201 bp, Homo sapiens
tttttttttttgagacggagtctcgctgtgtctcccaggttggagtgcagtggcgcgatctccactcattgcaagctccgcctcccaggttcatgccattytcctgcctcagcctcccaagtagctgggactacaggcgcccgccaacacgcccggctaattttttgtatttttagtagaaacggggtttcaccgtgttag

SEQ ID NO: 102507 - DNA, 201 bp, Homo sapiens
aaatgctgttgggaaaactggctagccatatgtagaaagctgaaactggatcccttccttacaccttatacaaaaattaattcaagatggattaaagacayacatgttagacctaaaaccataaaaaccctagaagaaaacctaggcaataccattcaggacataagcatgggcaaggacttcatgactaaaacaccaaaa

SEQ ID NO: 102508 - DNA, 201 bp, Homo sapiens
aatgggatctgttttaaggaaaaagttcttgcatctattctgatttctgtatcaggccaaacaatgctagagttgctgacttaatgaccacattggctccrctgttggtcaagatcatcagactctcatttcagctttcaatgatattgcatcctgcaaacaaaccacttgagatgagcttggtataagggtcctactaag

SEQ ID NO: 102509 - DNA, 201 bp, Homo sapiens
cacactgaaataccacttcacacccattaggatggccattattattattattattattattattattattattattattattattattattatttgagacsgagtcttgctctgttgcccaggctggagtgcagtggtgcaatctcggctcactgcaacctccacctcctgggttcaagcaattctcctgcctcagcctcc

SEQ ID NO: 102510 - DNA, 201 bp, Homo sapiens
acatacatgttagacctaaaaccataaaaaccctagaagaaaacctaggcaataccattcaggacataagcatgggcaaggacttcatgactaaaacaccmaaagcaatgacaacaaaagccaaaattgacaaatgggatctaattaaactcaagagcttctgcacagcaaaagaaactaccatcagagtgaacaggcaac

SEQ ID NO: 102511 - DNA, 201 bp, Homo sapiens
ttatgaataacgtatttgatgggagtcttttggtgtctgagtgtggactcaaggaaggcaccgagggcttttgagactgctaaataaggcatctatttctrtatatactgtcatggtctgggagctggaagaaatactttaagaagctcaagttgccggatgggatttctggattttttatgtgcacaactaatagcctct

SEQ ID NO: 102512 - DNA, 201 bp, Homo sapiens
cactgaaataccacttcacacccattaggatggccattattattattattattattattattattattattattattattattattattatttgagacagrgtcttgctctgttgcccaggctggagtgcagtggtgcaatctcggctcactgcaacctccacctcctgggttcaagcaattctcctgcctcagcctccgg

SEQ ID NO: 102513 - DNA, 201 bp, Homo sapiens
gcttacaagtgagggattcccagcctacaagggtgagttatgtgtgttgagagcagagtggaaaggtgggcatttactcgccctgccccctccactgaacycgaagtgctcattctctcccatgcctgtgtcctctctctcttcacacatggtcatgtatacacacagttgtacatgcacactttctccttgctaaaactt

SEQ ID NO: 102514 - DNA, 201 bp, Homo sapiens
acatgagggcctgttgtggggtggggggaggggggagggatagcattaggagatatacctaatgtaaatgatgagttaatgggtgcagcacaccaacatgkcacatgtatacatatgtaacaaagctgcacgttgtgcacatgtaccctggaacttaaagtatagtaataaaaaaaaaaagaaaaaaaaagttgttggtta

SEQ ID NO: 102515 - DNA, 201 bp, Homo sapiens
tggattttttatgtgcacaactaatagcctctcaacctagagttgtaaggtaacttctaatgttcatagggattttgagaattgcttcctgattaactctragagttgttcagttatttacattctttcagtagaattcttttatacctcctatgtgccaggtaataaatgtggagacctttcccaaagctttttgtatat

SEQ ID NO: 102516 - DNA, 201 bp, Homo sapiens
aggatggccattattattattattattattattattattattattattattattattattattatttgagacagagtcttgctctgttgcccaggctggartgcagtggtgcaatctcggctcactgcaacctccacctcctgggttcaagcaattctcctgcctcagcctccggagtagctgggattacaggtgtgcacc

SEQ ID NO: 102517 - DNA, 201 bp, Homo sapiens
ttttttacacagagtctcactctgccatccaggctggagtgtagtggctcgctgcaacttctgcctcccaggttcaagtgattctcctgcctcagcctccmaagtagctgggactacaggtgcatgccaccacgcccagctaatttttgtatttttaggagagacagtgtttcaccatgttgaccaggctggtctcgaact

SEQ ID NO: 102518 - DNA, 201 bp, Homo sapiens
ttgtgaaattattccccacattgagtggaaatttatctctatgtaactttccccaacttcattttatttgtttgttctctgctccctaaagtaactgaaartaagttccacccctcttctatggtcctttgaatataaggacacaatttgtatgccttccttaaggcgacttccccagggaaaagagcctttccaaacttt

SEQ ID NO: 102519 - DNA, 201 bp, Homo sapiens
attattattattattattattattattattatttgagacagagtcttgctctgttgcccaggctggagtgcagtggtgcaatctcggctcactgcaacctycacctcctgggttcaagcaattctcctgcctcagcctccggagtagctgggattacaggtgtgcaccaccatgcctggataatttttgtattcttagtag

SEQ ID NO: 102520 - DNA, 201 bp, Homo sapiens
ctctttgtggttgaatagtataggttttcaatcaagtcctaggagggtgtcagtttcttgttgtacttaccaggatgtgataggatttcaaacaaggcccaaaagaatgtattttcaggagttgagatgtagccacactttctacatttacaatggcctgaaatgggttacagtttagaacaagctttcttctttatgatg

SEQ ID NO: 102521 - DNA, 201 bp, Homo sapiens
tcttttgccaggctggagtgcagtggcatgatctccactcactgcaacctcggcctcccgggttcaagcaattctcctgcctcagcctcctgagtagctgrgactacaggtgtgtgccaccacacccagctaattttcgtatttttagtagagacggggtttcaccatgttggccaggatggcctcaatctcttgacctcg

SEQ ID NO: 102522 - DNA, 201 bp, Homo sapiens
caggctggagtgcagtggcatgatctccactcactgcaacctcggcctcccgggttcaagcaattctcctgcctcagcctcctgagtagctgggactacargtgtgtgccaccacacccagctaattttcgtatttttagtagagacggggtttcaccatgttggccaggatggcctcaatctcttgacctcgtgatccgc

SEQ ID NO: 102523 - DNA, 201 bp, Homo sapiens
tttagtagaggcggggtttcaccatgttggtcaggttgatctcgaacccttgacctcgtgatccacccgccttggcctcccaaagtgctgggattacaggygtgagccaccgcgcccggccgaggatgccctttttcaatggttcacctttgggtatttttatatctatgtttgcctagatcattcctttgttttgatatc

SEQ ID NO: 102524 - DNA, 201 bp, Homo sapiens
gctacacaggaggctgaggcagagaattgcttgaacctgggaggcaaaggttgcagtgacctgagattgtgccactgcactccagcctgggcgacagagcragactccatctcaaataaataaataaataaattaaattaaataaatgttcttgaacatggggaaacatattttcattgcagtttatttatccaactgagt

SEQ ID NO: 102525 - DNA, 201 bp, Homo sapiens
ggcgcccgccaacacgcccggctaattttttgtatttttagtagaaacggggtttcaccgtgttagccaagatggtctcgatctcctgacctcgtgatccrcccgtctcggcctcccaaagtgctaggattacaggcgtgagccaccgcgcccggccgtttctctggttctttaagatgcattgttaggttgcttatttga

SEQ ID NO: 102526 - DNA, 201 bp, Homo sapiens
taggaagaatcaatatcgtgaaaatggccatactgcccaaggtaatttacagattcaatgccatccccatcaagctaccaatgactttcttcacagaattrgaaaaaactactttaaagttcatatggaaccaaaaaagagcctgcatcgccaagtcaatcctaagccaaaagaacaaagctggaggcatcacactacctg

SEQ ID NO: 102527 - DNA, 201 bp, Homo sapiens
aggcgtggtagcacaggcctgtagtcccagctactctgtaggctgatgcaggagaatggcttgaacccaggaggtggaggttgcagtgagccaagatcacrccagtgcactccagcctgggtgacaaagtgagtgagactccatctcaaaaaacaaacaaacaaacaaaaatgaatgccaggatcccaccttctacttctt

SEQ ID NO: 102528 - DNA, 201 bp, Homo sapiens
ggggaaaggattccctatttaataaatggtgctgggaaaactggctagccttatgtagaaagatgaaactggatcccttccttacaccttatacaaaaathaattcaagatggattaaagacttaaacgttagacctaaaaccataaaaaccctagaagaaaacctaggcattaccattcaggacataggcatgggcaagg

SEQ ID NO: 102529 - DNA, 201 bp, Homo sapiens
acagagtcttgctctgttgcccaggctggagtgcagtggtgcaatctcggctcactgcaacctccacctcctgggttcaagcaattctcctgcctcagccwccggagtagctgggattacaggtgtgcaccaccatgcctggataatttttgtattcttagtagagacagggtttcaccatgttggccaggctgatttcga

SEQ ID NO: 102530 - DNA, 201 bp, Homo sapiens
agagtcttgctctgttgcccaggctggagtgcagtggtgcaatctcggctcactgcaacctccacctcctgggttcaagcaattctcctgcctcagcctcyggagtagctgggattacaggtgtgcaccaccatgcctggataatttttgtattcttagtagagacagggtttcaccatgttggccaggctgatttcgaac

SEQ ID NO: 102531 - DNA, 201 bp, Homo sapiens
cacaggaagaggaacatcacacatgagggcctgttgtggggtggggggaggggggagggatagcattaggagatatacctaatgtaaatgatgagttaatkggtgcagcacaccaacatggcacatgtatacatatgtaacaaagctgcacgttgtgcacatgtaccctggaacttaaagtatagtaataaaaaaaaaaag

SEQ ID NO: 102532 - DNA, 201 bp, Homo sapiens
gagtgcagtggtgcaatctcggctcactgcaacctccacctcctgggttcaagcaattctcctgcctcagcctccggagtagctgggattacaggtgtgcrccaccatgcctggataatttttgtattcttagtagagacagggtttcaccatgttggccaggctgatttcgaactcctgacctcgtgatctgcccacctt

SEQ ID NO: 102533 - DNA, 201 bp, Homo sapiens
ataatccagccattccacttatgaatacagaaccaaaagaactgaaagcaaggatttaaatagatatttgtgactatagtcaataataatttaattgtacrttttaaaataactaaaagagtataattagattatttgtaacacaaaggataataaatacatgaggggacagatatcccattttacgtgatgtgattaata

SEQ ID NO: 102534 - DNA, 201 bp, Homo sapiens
gctactcgggaggctgaggcaggtgaatcatttgaacccaggaggcagaggttgcagtgagctgagattgcaccactgcattctagcctgggtgacagagygagactccgtctcaaaaaaaagaaaagaaaaaaatgaaagataaaatgaagtcttgcttgctctgtttggactcagcatggtgcattttcatgtttgact

SEQ ID NO: 102535 - DNA, 201 bp, Homo sapiens
tacaaaaattagccaggcgtggtagcacaggcctgtagtcccagctactctgtaggctgatgcaggagaatggcttgaacccaggaggtggaggttgcagygagccaagatcacaccagtgcactccagcctgggtgacaaagtgagtgagactccatctcaaaaaacaaacaaacaaacaaaaatgaatgccaggatccc

SEQ ID NO: 102536 - DNA, 201 bp, Homo sapiens
ggagtgcagtggcgcgattttggctcactgcaagctctgcctcctgggttcacgccattctcctgcctcagcctcccaagtagctgggactacaggcgccbgccaccacgcccggctaatttttttgtatttttagtagagacgggttttcaccgtgttagccaggatggtctcgatctcctgacctcatgatccgcctgc

SEQ ID NO: 102537 - DNA, 201 bp, Homo sapiens
aaaataacaaggatgtactttttcttttcttttttttttctttttttttttgagacagagtctcactctgtcgcccaggctggagtgcagtggcgtgataycggctcactgcaacctctgcctcctgggttcaagcaattctccttcctcagcctcctgagtagctgggattacaggcgcccgccaccacacccagctaat

SEQ ID NO: 102538 - DNA, 201 bp, Homo sapiens
  misc_feature (1)...(201): n = A,T,C or G
gcactattatgcccagctaattttgtatttttttagtagagactggctttcaccatgttggccaggctggtcttgaactcctgacctcaggtgatccaccngcctcagcctcccaaagtgctgggattacaggcataagccaccgcacccggcctcaacttgactccctttcttgtcactgtttctagatggtcaactaga

SEQ ID NO: 102539 - DNA, 201 bp, Homo sapiens
attttgacataggttcttgttctgttgctcaggctggagtgtagtggtttgatctcggctcatagcagcctcaacctcccgggctcaagcaatcctcccayctcagcctcccaagtagctgggactataggcacatagctaactaatttttaaaaattttttattttgtagaaatgaggtttcaccatgttgcccaggctg

SEQ ID NO: 102540 - DNA, 201 bp, Homo sapiens
atcaagaccatcctggctaacatggtgaaacccagtctctactaaaaatataaaaaaattagatgggcgtggtggcaggcacctgtagtcccagctactcvggaggctgaggcaggagaatggcgtgaaccaggggggcggaggttgcagtgagtcaagattgctccactgcactccaacctgggcgacagagcaagactc

SEQ ID NO: 102541 - DNA, 201 bp, Homo sapiens
agacttggaaccaacccagatgtccaacaatgatagactggataaagaaaatgtggcacatatacaccatggaatactatgcagccataaaaaatgatgarttcatgtcctttgtagggacatggatgaaattggaaatcatcattctcagtaaactaccgcaaaaacagaaaaccaaacaccgcatattctcactcatag

SEQ ID NO: 102542 - DNA, 201 bp, Homo sapiens
cacatagctaactaatttttaaaaattttttattttgtagaaatgaggtttcaccatgttgcccaggctggtctcaaacttctgagctcaagcgatcctcytgcctcagcctcccaaagtgctgggattacaggtgtgaaccaccatgcccacccccctttttcttatgaatgggtgaagcaggagaagagcagtgagtat

SEQ ID NO: 102543 - DNA, 201 bp, Homo sapiens
ctaatttttaaaaattttttattttgtagaaatgaggtttcaccatgttgcccaggctggtctcaaacttctgagctcaagcgatcctcctgcctcagccrcccaaagtgctgggattacaggtgtgaaccaccatgcccacccccctttttcttatgaatgggtgaagcaggagaagagcagtgagtatggctagagatg

SEQ ID NO: 102544 - DNA, 201 bp, Homo sapiens
aaaccccatcgtctcagcccaaaatgtccttaagctcataagcaacttcagcaaagtctcaggatacaaaatcaatgtacaaaaatcacaagcattcttayacaccaacaacagacaaacagagagccaaatcatgagtgaactcccattcacaattgcttcaaagagaataaaatacctaggaatccaacttacaaggga

SEQ ID NO: 102545 - DNA, 201 bp, Homo sapiens
cctggcactgtggctcatgcctgtaatcccagcactttgagaggccgaggtgggtggatcacttgaggccaggagttcgagactagcctggccaacatggygaaaccccatctctactaaaaatacaaaaattagccaggaatggtggtgggcacctgtaatcccagttactcaggaggctaaggcacgagaatcgcttga

SEQ ID NO: 102546 - DNA, 201 bp, Homo sapiens
actgtatcatcttttaaaaatgaagtacgtgactttcctaatgatcttttatattataaaaataggccgggctcagtggctcatgcctgtaatcccagcaytttgggaggccgaggctggtggatcacttgaggtcaggagctcgagaccagcctggccaacatggtgaaaccctgtctctacaaaaatacaaaaattagt

SEQ ID NO: 102547 - DNA, 201 bp, Homo sapiens
tttgtgactagcctgaccaacatggtgaaaccccatctctactaaaaatacaaaaatcagccgggcgtggtggcgcatgcctgtaatcccagctactcagkaggctgaggtacaagaatcgcttgaacccaggaggtagaggttgcagtgagctgagattgcgccattgcaatccagactgggcaacaagaacaaaacttc

SEQ ID NO: 102548 - DNA, 201 bp, Homo sapiens
ctaagccaaaagaacaaagctggaggcatcacactacctgacttcaaactatactacaaggctacagtaaccaaaacagcatggtactggtaccaaaacasagatatagatcaatggaacagaacagagccctcagaaataacgctgctatctacaactatctgatctttgacaaacctcagaaaaacaaacaatggggaa

SEQ ID NO: 102549 - DNA, 201 bp, Homo sapiens
tttcaacttgacttccttttttttttttttttgagacaaagtctcattctgttgcccaggctggagtgcagaggcgcgatctgggctcactgcaacctccrcctcccaggttcaagcgattctcctgcctcagtctcttgagtagctgggattacaggcatgcactattatgcccagctaattttgtatttttttagtaga

SEQ ID NO: 102550 - DNA, 201 bp, Homo sapiens
ataacaataagcattaacaatttttaaaataatgttttactaagctgtgattaattgcacacaggtctacttttttggttcctggctggttatttcattakcctcttgatatcctgggagcctttaatgaggagagtagcctcagccctaataaaccctcaccctgaaaggcagaggtgatgagtcagacattggctgctg

SEQ ID NO: 102551 - DNA, 201 bp, Homo sapiens
tctctggttcttttttttttttttttttttttgagacggagtctcgctgtgtctcccaggttggagtgcagtggcgcgatctccactcattgcaagctccrcctcccaggttcatgccattctcctgcctcagcctcccaagtagctgggactacaggcgcccgccaacacgcccggctaattttttgtatttttagtaga

SEQ ID NO: 102552 - DNA, 201 bp, Homo sapiens
atgatcaagtgggcttcatccctggtatgcaaggctggttcaatatatgcaaatcaataaatgtaatccagcatataaacagaagcaaagacaaaaaccayatgattatctcaatagatgcagaaaaggcctttgacaaaattcaacaacccttcatgctaaaaactctcaataaattaggtattgatgggacctatctca

SEQ ID NO: 102553 - DNA, 201 bp, Homo sapiens
gtagagacggggtttcaccatgttggccaggctggtctcaaactcctgacctcaagtgaaccacccgcctcggcctcccaaagtgttgggattacaagcgwgagctaccacacccagccccttctaagatttttaacatatgtcatgctgcaggattcctattccattagaggcttgtatttaccgaggcaaatggacgaa

SEQ ID NO: 102554 - DNA, 201 bp, Homo sapiens
ctctggccttccctcccccgacttttcccctcaacatatctctctagctttctcaactgagcctttgatcctgtgtactgtttgcttgggatattttgccyttcttttacatctctccttgctgaaaattgtgccattcttcaaggtccatctcaaatctgcttccctggttttccccatacctgagagactgttctgccc

SEQ ID NO: 102555 - DNA, 201 bp, Homo sapiens
ttgctaattcaacatagatcctaattccttaaatgcttgtaattagaaattctcgtgaactgtattggtttttgtcaagcaatctgtttggggaacttgascaactggggcactgctggctagggtgaagtttatttaatttgtttttatgacattcttcatcttggaaatggggttttcaaatattgctttcccaggcat

SEQ ID NO: 102556 - DNA, 201 bp, Homo sapiens
gtataactttatccttttttatttaggtaatatttgtcccagaatcctttgttgaagactgtttttctttattcattttccttggtaccattatacaaaaycggttgatcataaatgtttggatttatttctggattctattttacttgtctataaagctatctttaatcaagtgacacacagtcttgactactgttgctt

SEQ ID NO: 102557 - DNA, 201 bp, Homo sapiens
aactaccgcaaaaacagaaaaccaaacaccgcatattctcactcataggtgggaattgaacaatgagatcacgtggacacaggaaggggaacatcacactytggggactgttgtggggtggggggaggggggagggatagcattgggagatatacctcatgctggatgacgagttagtgggtgcagcgcaccagcatgaca

SEQ ID NO: 102558 - DNA, 201 bp, Homo sapiens
gacactgaaactttgctgagcctggaaaaatcacagaggctcagtttggtgtttttgcatgcaaaatacgagaggcagaggtgaaggtgcattcctggtgccctgcggttcccaggcagtatctgagtgcattttcacctgttatcgcttgcctttcaaatattcgttagctcccccagaagtttagccacgagtcatctt

SEQ ID NO: 102559 - DNA, 201 bp, Homo sapiens
gagtcttgctctgttgcccaggctggagtgcagtggtgcaatctcggctcactgcaacctccacctcctgggttcaagcaattctcctgcctcagcctccygagtagctgggattacaggtgtgcaccaccatgcctggataatttttgtattcttagtagagacagggtttcaccatgttggccaggctgatttcgaact

SEQ ID NO: 102560 - DNA, 201 bp, Homo sapiens
ttgtgcactttattttgataattattatgttgtaatatataatgaaataattatacaactcactataatgtggaatcagtgggagccctgagcttgttttyctgcaattagatggtcccatctggaggtgatgggagacagtgacagatcatcaggcattagattctcataaagagcacacaacttagatccctcacatgt

SEQ ID NO: 102561 - DNA, 201 bp, Homo sapiens
agagggctgggcacagcagctcacacctgtaatcctagcacttttggaggctaaagtgggtggattgcttgatcccaggagtttgagaccagcctgggcarcatagtgagaccctgtttctaccaaaaaatgcaaaaaacaaaaattaggcaggcgtgatggcatgcacctgtagtatagcttcttgggaggctgaggttg

SEQ ID NO: 102562 - DNA, 201 bp, Homo sapiens
aacttgacttccttttttttttttttttgagacaaagtctcattctgttgcccaggctggagtgcagaggcgcgatctgggctcactgcaacctccacctyccaggttcaagcgattctcctgcctcagtctcttgagtagctgggattacaggcatgcactattatgcccagctaattttgtatttttttagtagagact

SEQ ID NO: 102563 - DNA, 201 bp, Homo sapiens
ttgacttccttttttttttttttttgagacaaagtctcattctgttgcccaggctggagtgcagaggcgcgatctgggctcactgcaacctccacctcccrggttcaagcgattctcctgcctcagtctcttgagtagctgggattacaggcatgcactattatgcccagctaattttgtatttttttagtagagactggc

SEQ ID NO: 102564 - DNA, 201 bp, Homo sapiens
tttgagacaaagtctcattctgttgcccaggctggagtgcagaggcgcgatctgggctcactgcaacctccacctcccaggttcaagcgattctcctgccwcagtctcttgagtagctgggattacaggcatgcactattatgcccagctaattttgtatttttttagtagagactggctttcaccatgttggccaggctg

SEQ ID NO: 102565 - DNA, 201 bp, Homo sapiens
accacgcccggctaatttttttgtatttttagtagagacgggttttcaccgtgttagccaggatggtctcgatctcctgacctcatgatccgcctgcctcrgcctcccaaagtgctgggattacaccgtgcccggccgcccttacttttaatggcaaaaaccacattaacttttgcaccaatctatagcttggttttcatt

SEQ ID NO: 102566 - DNA, 201 bp, Homo sapiens
aaagtctcattctgttgcccaggctggagtgcagaggcgcgatctgggctcactgcaacctccacctcccaggttcaagcgattctcctgcctcagtctcytgagtagctgggattacaggcatgcactattatgcccagctaattttgtatttttttagtagagactggctttcaccatgttggccaggctggtcttgaa

SEQ ID NO: 102567 - DNA, 201 bp, Homo sapiens
cagctaattttgtatttttttagtagagactggctttcaccatgttggccaggctggtcttgaactcctgacctcaggtgatccacctgcctcagcctccsaaagtgctgggattacaggcataagccaccgcacccggcctcaacttgactccctttcttgtcactgtttctagatggtcaactagatcaatactcagat

SEQ ID NO: 102568 - DNA, 201 bp, Homo sapiens
taaatgcttgtaattagaaattctcgtgaactgtattggtttttgtcaagcaatctgtttggggaacttgagcaactggggcactgctggctagggtgaartttatttaatttgtttttatgacattcttcatcttggaaatggggttttcaaatattgctttcccaggcatcattacttatttgctggtttttatttcag

SEQ ID NO: 102569 - DNA, 201 bp, Homo sapiens
cattgcaaagattaaatgagggccaggtgcagtggcttacgcctgtaatcccagaactgtgggaggccgaggtgggtggattgcttgagcccaggagttcragaccagcctgggcaacatggcaaaacccagtctctacaaataataataataataataataataataatcatcatcatcatcatcatccaggagtggtga

SEQ ID NO: 102570 - DNA, 201 bp, Homo sapiens
gtactaagtgctttccatgaaatatttagttgtcacggcaaccctacacaggtctggccaataaacatttctgcaatgatggaaatgttttataatactakcaccacctaactctggtagccattaacacatgtgaatattgagcattgaaaatgtttctagtgtgactaagaaactaaagttttaattttgtttagtttt

SEQ ID NO: 102571 - DNA, 201 bp, Homo sapiens
ggccgaggtgggtggattgcttgagcccaggagttcgagaccagcctgggcaacatggcaaaacccagtctctacaaataataataataataataataatmataatcatcatcatcatcatcatccaggagtggtgaaatgcacctgtagtcccagctaatcaggaaactgaggtgagaggatcgcttgagcctgggagga

SEQ ID NO: 102572 - DNA, 201 bp, Homo sapiens
gtggaggtgtgatatgcccagagagattatatacagtgatccctctccacattagtgccttgtgtaggcatggtacacaatgcattagaattagacaaggygtaggatttggagacaggaaatattgaatattcccatctcagcgccttcacttattaactgtatgaccttgagcaaatttctctttgagcctctctgact

SEQ ID NO: 102573 - DNA, 201 bp, Homo sapiens
ctcactgcaacctcggcctcccgggttcaagcaattctcctgcctcagcctcctgagtagctgggactacaggtgtgtgccaccacacccagctaattttygtatttttagtagagacggggtttcaccatgttggccaggatggcctcaatctcttgacctcgtgatccgcctgcctcagcctcccaaagtgctgagatt

SEQ ID NO: 102574 - DNA, 201 bp, Homo sapiens
ttcccaggttcaagcaattctcctgcctcagcctcctgagtagctgggactacaggtgtgtgccactacgctcagctaatttttgtatttttagtagagahggggtttcatcatgttggtcaggctggtctcaaactcctgacctcaagtgatctgccctccttggcctcccaaagtgctgggattacaggcgtgagccac

SEQ ID NO: 102575 - DNA, 201 bp, Homo sapiens
tggggtattttttttttttttttgaggtggagtcttgctctgtcacccaggctgaagtgcagtggcgcaatctcggttcactgcaagctccgcctcccggvttcacgccattctcctgcctcagcctcctgagtagctgggactacaggcgcccaccaccacgcccggctaattttttgtatttttagtagagacggggtt

SEQ ID NO: 102576 - DNA, 201 bp, Homo sapiens
tcccgggttcaagcaattctcctgcctcagcctcctgagtagctgggactacaggtgtgtgccaccacacccagctaattttcgtatttttagtagagacrgggtttcaccatgttggccaggatggcctcaatctcttgacctcgtgatccgcctgcctcagcctcccaaagtgctgagattacaggagtgagccaccat

SEQ ID NO: 102577 - DNA, 201 bp, Homo sapiens
cttctgctctacttggacttcatactcttggctgtctctgaggtagaggcagagagaacatccctgactctctgctgcccattttctgccatgggccgccscccccttccagaggaggaggtgttggggaacctctcccacatggcagaacaaccactcaagtctggggaggtctttggcagtcatcttgggccagatgtt

SEQ ID NO: 102578 - DNA, 201 bp, Homo sapiens
caagtagctgggactacaggcgcccgccaccacgcccggctaatttttttgtatttttagtagagacgggttttcaccgtgttagccaggatggtctcgayctcctgacctcatgatccgcctgcctcagcctcccaaagtgctgggattacaccgtgcccggccgcccttacttttaatggcaaaaaccacattaacttt

SEQ ID NO: 102579 - DNA, 201 bp, Homo sapiens
ccagctagcagaataaatcaaggctagaaccagatcagaatttcttacgagatgacagggatctgaaggactttacctctatagtcgttttgcctttttargcactgggtgacctggtcccatgtccatcctagtgggccctgtatgatccaatccaaaggcccctttaggtttgcgttttatcattccctctttctcaga

SEQ ID NO: 102580 - DNA, 201 bp, Homo sapiens
gggttcacgccattctcctgcctcagcctcccaagtagctgggactacaggcgcccgccaccacgcccggctaatttttttgtatttttagtagagacggrttttcaccgtgttagccaggatggtctcgatctcctgacctcatgatccgcctgcctcagcctcccaaagtgctgggattacaccgtgcccggccgccct

SEQ ID NO: 102581 - DNA, 201 bp, Homo sapiens
gttggagtgcagtggcgcgatctccactcattgcaagctccgcctcccaggttcatgccattctcctgcctcagcctcccaagtagctgggactacaggcrcccgccaacacgcccggctaattttttgtatttttagtagaaacggggtttcaccgtgttagccaagatggtctcgatctcctgacctcgtgatccgccc

SEQ ID NO: 102582 - DNA, 201 bp, Homo sapiens
aaattatttctccaaactagaatcttaagttccatgggtatgatgggtctgataaagtatttggcatctcttttactaggtagatcccactcaccctgagttttttttttttttttttttgagacagagtctcactctgtcacccaggctggagtacaatggcatgatcttggctcactgcagcctccacctctggggttc

SEQ ID NO: 102583 - DNA, 201 bp, Homo sapiens
aaccccatgctgttctcatgatagggggtgagttctcaggaggtctgatggtttcataaggggcttttcccccttttgctcagcacttctccttgctgccrccatgcaaagaaggatgtgtttgcttccccttccaccatgcttgtaagtttcctgaggcctccccagtcatgctgaactgtgagtcaattgaacctcttt

SEQ ID NO: 102584 - DNA, 201 bp, Homo sapiens
ggtgggtggattgcttgagcccaggagttcgagaccagcctgggcaacatggcaaaacccagtctctacaaataataataataataataataataataatmatcatcatcatcatcatccaggagtggtgaaatgcacctgtagtcccagctaatcaggaaactgaggtgagaggatcgcttgagcctgggaggacagggc

SEQ ID NO: 102585 - DNA, 201 bp, Homo sapiens
gttgttgttgttgttgctgttgaagattttgcatcttctaggttatgtttctttgctgctcaggaggcagaacaagtttctccattgccaaattgtttgcttttttttattggggtgaaattcacataacataacattcactatttaaaattatactattcagtggcatttagtgacactcattatgttgtgaaattatca

SEQ ID NO: 102586 - DNA, 201 bp, Homo sapiens
ggtgaaatgcacctgtagtcccagctaatcaggaaactgaggtgagaggatcgcttgagcctgggaggacagggctgcagtgagccatgatcatgccactrcactccagcctgggcaacagagtaagaccctatttcaaaaataaataaataaataaggagacatatgtgaaagcatttccgaagtctaaagctccacata

SEQ ID NO: 102587 - DNA, 201 bp, Homo sapiens
ggagtgcagtggcgcgatctccactcactgcaagctccgcctcccaggttcacaccattctcctgcctcagcctcccgagtagctgggactacaggtgccygccaccacactcagctaattttttgtatttttagtagagacggggtttcaccgtgttagccaggatggtctcgatctcctgacctcgtgatccgcccacc

SEQ ID NO: 102588 - DNA, 201 bp, Homo sapiens
gcagtggctcatgctgtaatcccagtactttgggaggctgagatgggtggatcacctgaggtcaggagtttgagaccagtctgaccaacatggtgaaaccscatctctactaaaaatacaaaaattagccaggcgtggtggtgggtgcctataatcccagctactcaggaggctgaggagggaaaattgcctgaacccagg

SEQ ID NO: 102589 - DNA, 201 bp, Homo sapiens
agtggctcatgctgtaatcccagtactttgggaggctgagatgggtggatcacctgaggtcaggagtttgagaccagtctgaccaacatggtgaaaccccrtctctactaaaaatacaaaaattagccaggcgtggtggtgggtgcctataatcccagctactcaggaggctgaggagggaaaattgcctgaacccaggag

SEQ ID NO: 102590 - DNA, 201 bp, Homo sapiens
agtactttgggaggctgagatgggtggatcacctgaggtcaggagtttgagaccagtctgaccaacatggtgaaaccccatctctactaaaaatacaaaarttagccaggcgtggtggtgggtgcctataatcccagctactcaggaggctgaggagggaaaattgcctgaacccaggaggcggaggttgtggtgagctga

SEQ ID NO: 102591 - DNA, 201 bp, Homo sapiens
gtactttgggaggctgagatgggtggatcacctgaggtcaggagtttgagaccagtctgaccaacatggtgaaaccccatctctactaaaaatacaaaaaytagccaggcgtggtggtgggtgcctataatcccagctactcaggaggctgaggagggaaaattgcctgaacccaggaggcggaggttgtggtgagctgag

SEQ ID NO: 102592 - DNA, 201 bp, Homo sapiens
gagatgggtggatcacctgaggtcaggagtttgagaccagtctgaccaacatggtgaaaccccatctctactaaaaatacaaaaattagccaggcgtggtsgtgggtgcctataatcccagctactcaggaggctgaggagggaaaattgcctgaacccaggaggcggaggttgtggtgagctgagattgcgccactgcac

SEQ ID NO: 102593 - DNA, 201 bp, Homo sapiens
atcacctgaggtcaggagtttgagaccagtctgaccaacatggtgaaaccccatctctactaaaaatacaaaaattagccaggcgtggtggtgggtgcctrtaatcccagctactcaggaggctgaggagggaaaattgcctgaacccaggaggcggaggttgtggtgagctgagattgcgccactgcactccagcctgag

SEQ ID NO: 102594 - DNA, 201 bp, Homo sapiens
ctactcaggaggctgaggagggaaaattgcctgaacccaggaggcggaggttgtggtgagctgagattgcgccactgcactccagcctgagtgacagagcragactccatctcaaaaaaaaaaaaaaaaaaaaaaaaaaaaaaggagtttatttggagatttgcaacttgtcatgggaaacattcccagggtttcttctag

SEQ ID NO: 102595 - DNA, 201 bp, Homo sapiens
tcattcaatgttccttacaattgcaaaaaaatggacatgtgaaaactcacttgtaacttgaaggggcatcatttctaattgggagatagccacagagaaaygaaggggccaaaacattgctagtgtgaaaagcacataggctttggagtcagatcaacctgcaagtcccattctttatgtcttagatgcatgaccttgtcc

SEQ ID NO: 102596 - DNA, 201 bp, Homo sapiens
gagggttttttagctttttgagacagagtcttgctctatcacccaggctggaatgcagcggtgcagtcatgggtcactgcagcctcaaactcctgggctcragcaatcctcctgcctcagcctcccaagtagccgggactacaagcacatgccaccacatttggctaattaaaaaaaaaaatgtagagacgggatctcacc

SEQ ID NO: 102597 - DNA, 201 bp, Homo sapiens
tctgtcacccaagctggagtgcagtgtcgcaatctcagctcactgcaacctccacctcccaggttcaagcgattctcctgcctcagcctcccgagtagctrggattacaggcgcctgccaccttgcccggctaatttttgtatttttagtggagacggggtttcgccatgttggccaggctggtctcaaactcctgacctc

SEQ ID NO: 102598 - DNA, 201 bp, Homo sapiens
gaactagaaataccatttgacccagccatcccattactgggtatatacccaaaggactataaatcatgctgctataaagacacatgcacacgtatgtttaytgcggcattattcacaatagcaaagacttggaaccaacccagatgtccaacaatgatagactggataaagaaaatgtggcacatatacaccatggaatac

SEQ ID NO: 102599 - DNA, 201 bp, Homo sapiens
gccattctcctgcctcagcctcctgagtagctgggactacaggcgcccaccaccacgcccggctaattttttgtatttttagtagagacggggtttcactrtgttagccaggatggtctcgatctcctgaccttgtgatccgcccaccttcggctcccaaagtgctgggattacaggcgtgagccacctcgcctggccttg

SEQ ID NO: 102600 - DNA, 201 bp, Homo sapiens
gaggctgaggagggaaaattgcctgaacccaggaggcggaggttgtggtgagctgagattgcgccactgcactccagcctgagtgacagagcaagactccmtctcaaaaaaaaaaaaaaaaaaaaaaaaaaaaaaggagtttatttggagatttgcaacttgtcatgggaaacattcccagggtttcttctagagttgttg

SEQ ID NO: 102601 - DNA, 201 bp, Homo sapiens
ctcccgagtagctgggactacaggtgcccgccaccacactcagctaattttttgtatttttagtagagacggggtttcaccgtgttagccaggatggtctygatctcctgacctcgtgatccgcccaccttggcttcccaaagtgctgggattataggcgtgagccactgcgcctggcctgagtgtgctggcttctaacaa

SEQ ID NO: 102602 - DNA, 201 bp, Homo sapiens
gctaatatccagaatctacaatgaactcaaacaaatttacaagaaaaaaaacaaacaaccccatcaaaaagtgggcgaaggacatgaacagacacttctcmaaagaagacatttatccagccaaaaaacacatgaaataatgctcaccatcactggccatcagagaaatgccaatcaaaaccacaatgagatatcatctca

SEQ ID NO: 102603 - DNA, 201 bp, Homo sapiens
gactaatcagggtggtcgttgctaaaggttggggtggctgtggcactttcttaaaataagacaacagtgaagtttgccacatcaattgactcttcctttcmcaaaagatttctctgtagcatgtgatgctgtttgagaggattttacccacagtaaaacttctttcaaaattggagtccatcttctcaaactctgctgttg

SEQ ID NO: 102604 - DNA, 201 bp, Homo sapiens
gcattacaggcatgtaccacaacgcccagctaagttttgtattcttagtagagatgggggtttcgccgtgctcaccaggctggtctcgaactcctgacctyaggtgatccacctgcctcggcctcccaaagtgcagggattacaggcgtgagcctctgtgttaaaaatactttggagtatataggccaggcacggtggctc

SEQ ID NO: 102605 - DNA, 201 bp, Homo sapiens
cctcaggtgatccacctgcctcggcctcccaaagtgcagggattacaggcgtgagcctctgtgttaaaaatactttggagtatataggccaggcacggtgsctcacgcctgtaatcccagcactttgggaggccaagacaggtggatcatgaggtcaggagctcgagaccagcctggccaaaatggtgaaacccccatctc

SEQ ID NO: 102606 - DNA, 201 bp, Homo sapiens
ggtggctcacgcctgtaatcccagcactttgggaggccaagacaggtggatcatgaggtcaggagctcgagaccagcctggccaaaatggtgaaacccccrtctctactaaaaatacaaaaattagctggacgtggtggtgggtgcctgtaatcccagctacttgggaggctgaggcaggagaatcgtttgaatctgggag

SEQ ID NO: 102607 - DNA, 201 bp, Homo sapiens
tttttgctagttttgttttatgtttttagactgagtcttgctcttttgccaggctggagtgcagtggcatgatctccactcactgcaacctcggcctcccrggttcaagcaattctcctgcctcagcctcctgagtagctgggactacaggtgtgtgccaccacacccagctaattttcgtatttttagtagagacggggt

SEQ ID NO: 102608 - DNA, 201 bp, Homo sapiens
tgtaatcccagcactttgggaggccaagacaggtggatcatgaggtcaggagctcgagaccagcctggccaaaatggtgaaacccccatctctactaaaawtacaaaaattagctggacgtggtggtgggtgcctgtaatcccagctacttgggaggctgaggcaggagaatcgtttgaatctgggagatggaggttgcag

SEQ ID NO: 102609 - DNA, 201 bp, Homo sapiens
ggacgtggtggtgggtgcctgtaatcccagctacttgggaggctgaggcaggagaatcgtttgaatctgggagatggaggttgcagtgagctgagatcgcrccactgcactccagcctgggcgacagagcaagactctgtattgaaaaaatatatatatatattatataaatataataatatattataaatatatacatat

SEQ ID NO: 102610 - DNA, 201 bp, Homo sapiens
taatcccagctacttgggaggctgaggcaggagaatcgtttgaatctgggagatggaggttgcagtgagctgagatcgcaccactgcactccagcctgggygacagagcaagactctgtattgaaaaaatatatatatatattatataaatataataatatattataaatatatacatatatatacatatatgtatatata

SEQ ID NO: 102611 - DNA, 201 bp, Homo sapiens
tatctttcctgttctccctgtgagatcagccttgttcttgttctgctctggggtactctgtatttagggaaattactcatgactctcgggtactgaaaagmcacacacacacacacacacacacacacacacacaccatgcacaggggaatgggagagcaagaacgtgtgagagagagccacttgaagagagacagggaga

SEQ ID NO: 102612 - DNA, 201 bp, Homo sapiens
acacctggctaattttttttttgtatttttagtagagatggggtttcactgtgttaaccaggatggtctcaatctcctgaccttgtgatccgcctgcctcrgcctcccaaagtgctgggattacaggcatgagccactgtgcttggccaaaactacaagtttcattctcttgtctgattatgctagctaggactttcagta

SEQ ID NO: 102613 - DNA, 201 bp, Homo sapiens
tttagtagagatggggtttcactgtgttaaccaggatggtctcaatctcctgaccttgtgatccgcctgcctcggcctcccaaagtgctgggattacaggyatgagccactgtgcttggccaaaactacaagtttcattctcttgtctgattatgctagctaggactttcagtactatattggttaacagtggtgacagca

SEQ ID NO: 102614 - DNA, 201 bp, Homo sapiens
aagagcttctgcacagcaaaagaaactaccatcagagtgaacaggcaacctacagaataggagaaaatttttgcaatctacccatctgacaaagggctaayatccagaatctacaaagaactcaaacaaatttacaagaaaaacaaacaaccccatcaacaagtaggcaaagtatatgaacagacacttctcaaaagaaga

SEQ ID NO: 102615 - DNA, 201 bp, Homo sapiens
gagtgcagtggcgcgatctccactcattgcaagctccgcctcccaggttcatgccattctcctgcctcagcctcccaagtagctgggactacaggcgcccrccaacacgcccggctaattttttgtatttttagtagaaacggggtttcaccgtgttagccaagatggtctcgatctcctgacctcgtgatccgcccgtct

SEQ ID NO: 102616 - DNA, 201 bp, Homo sapiens
ccgggaggggtggctcacgtctgtaatcccagcactttgggaggctaaggcgagtggattgcctgaggtcaggagttcgagaccagcctgaccaacatggygaaacctcgtctctactgaaaatacaaaaattagctgggcatggtggcaggcgcctgtaatcccagctacttgggaggctgaggtaggagagtcacttga

SEQ ID NO: 102617 - DNA, 201 bp, Homo sapiens
gctaaggcgagtggattgcctgaggtcaggagttcgagaccagcctgaccaacatggtgaaacctcgtctctactgaaaatacaaaaattagctgggcatrgtggcaggcgcctgtaatcccagctacttgggaggctgaggtaggagagtcacttgaaaccgggagccggaggttgcagtgagctgagacagggccttgg

SEQ ID NO: 102618 - DNA, 201 bp, Homo sapiens
tggattgcctgaggtcaggagttcgagaccagcctgaccaacatggtgaaacctcgtctctactgaaaatacaaaaattagctgggcatggtggcaggcgyctgtaatcccagctacttgggaggctgaggtaggagagtcacttgaaaccgggagccggaggttgcagtgagctgagacagggccttggcactccatcca

SEQ ID NO: 102619 - DNA, 201 bp, Homo sapiens
cgaggtgggtggattgcttgagcccaggagttcgagaccagcctgggcaacatggcaaaacccagtctctacaaataataataataataataataataatmatcatcatcatcatcatcatccaggagtggtgaaatgcacctgtagtcccagctaatcaggaaactgaggtgagaggatcgcttgagcctgggaggacag

SEQ ID NO: 102620 - DNA, 201 bp, Homo sapiens
gcacgtttggaggccaaggcgggcagatcacttgaggccaggagtttgagaccagcctagctaacatagcaaaaccctgtctctactaaaaatacaaaaaytagccaggcgtggtggcgtgtgcctgtaatcccagctacttgggaggctgaggcaggagaatcacttgaacctgggaggcgccggttgtggtgagccgag

SEQ ID NO: 102621 - DNA, 201 bp, Homo sapiens
cagaaaacaaattatcaattacttaaaattatatgaagtgccatgggggaaaagtacaggatgctatgagaacacatactaggagactaactggagttatyataagtgcaacaaattggaaacaatctgaacatccacatggagaagaatggttcaagaaatctcagtacatccacttgaaagattattacaaaaccactt

SEQ ID NO: 102622 - DNA, 201 bp, Homo sapiens
ggcgggcagatcacttgaggccaggagtttgagaccagcctagctaacatagcaaaaccctgtctctactaaaaatacaaaaactagccaggcgtggtggsgtgtgcctgtaatcccagctacttgggaggctgaggcaggagaatcacttgaacctgggaggcgccggttgtggtgagccgagagtgcaccactgctctc

SEQ ID NO: 102623 - DNA, 201 bp, Homo sapiens
gatgaatgctgtgatccttggcctgccatacaaggctcttgttcatctgacctctgttcacctgttgatatggttaggctttgtgtccccacccaaatcayatcttgaattgtaatccccataatccccatgtttcaagggagagaccaggtggaggtgattgaatcatgggggcaattcccaccatgctattcttgtgat

SEQ ID NO: 102624 - DNA, 201 bp, Homo sapiens
ctggggtattttttttttttttttgaggtggagtcttgctctgtcacccaggctgaagtgcagtggcgcaatctcggttcactgcaagctccgcctcccgrgttcacgccattctcctgcctcagcctcctgagtagctgggactacaggcgcccaccaccacgcccggctaattttttgtatttttagtagagacggggt

SEQ ID NO: 102625 - DNA, 201 bp, Homo sapiens
atcctagcactttgggaggctgaggcgggcagatcacgagctcaggagtttgagaccagtctgaccaacatggtgaaaccccatctctactaaaaatacamaaaaaaaaattagctgggtgtggtggcacgcacctgtaatcccagctactcaggaggctgagacaggagaatcacttgaacctgggaggcggaagttgca

SEQ ID NO: 102626 - DNA, 201 bp, Homo sapiens
tggcataatctcggcttactgcaacctcctcctcccgggttcaagtgattctcctgcctcagcctcctttgtagctgggaatacaggcgcctgccaccacrccaggctaatttttgtatttttagtagagacgaggtttctccatgttggccaggctgatctcgaactcctgacctcaggtgatccatctgctccgcctcc

SEQ ID NO: 102627 - DNA, 201 bp, Homo sapiens
tgcaatctcagctcaatgcaacctctgcctcccgagttcaagtgattctcctgcctcagcctccctggtagctgggattacaggcatgtgccaccacaccyggctaatttttgtatttttagtagagacggggtttcaccatgttggccaggctggtctcaaactcctgacctcaagtgaaccacccgcctcggcctccca

SEQ ID NO: 102628 - DNA, 201 bp, Homo sapiens
gcctcccgagtagctgggactacaggtgcccgccaccacactcagctaattttttgtatttttagtagagacggggtttcaccgtgttagccaggatggtytcgatctcctgacctcgtgatccgcccaccttggcttcccaaagtgctgggattataggcgtgagccactgcgcctggcctgagtgtgctggcttctaac

SEQ ID NO: 102629 - DNA, 201 bp, Homo sapiens
cctgtgcaaggagcatattatatattttctcatttaattctcacgacaaccctctgaggtagattttttaatatatactttaagttctagggtacatgtgyacaacgtgcaggtttattacatatgtatacatgtgccatgttggtgtgctgcacccattaactcatcatttacattaggtacatctcctaatgctatccc

SEQ ID NO: 102630 - DNA, 201 bp, Homo sapiens
ccgccaccacgcccggctaatttttttgtatttttagtagagacgggttttcaccgtgttagccaggatggtctcgatctcctgacctcatgatccgcctrcctcagcctcccaaagtgctgggattacaccgtgcccggccgcccttacttttaatggcaaaaaccacattaacttttgcaccaatctatagcttggttt

SEQ ID NO: 102631 - DNA, 201 bp, Homo sapiens
cacgagctcaggagtttgagaccagtctgaccaacatggtgaaaccccatctctactaaaaatacaaaaaaaaaaattagctgggtgtggtggcacgcacmtgtaatcccagctactcaggaggctgagacaggagaatcacttgaacctgggaggcggaagttgcagtgagccaagattatgccactgcactccagcctg

SEQ ID NO: 102632 - DNA, 201 bp, Homo sapiens
agtctgaccaacatggtgaaaccccatctctactaaaaatacaaaaaaaaaaattagctgggtgtggtggcacgcacctgtaatcccagctactcaggagsctgagacaggagaatcacttgaacctgggaggcggaagttgcagtgagccaagattatgccactgcactccagcctgtgcaacagagtgagactccatct

SEQ ID NO: 102633 - DNA, 201 bp, Homo sapiens
cccctgcctctcttgacccaccctaacaccatccttggttccagttaaactttatatacagaatcaggcagccatcctgtgggccatattttcttgacttaaaaaaaaaaaaccattgccttaaatatcatttattcaagtagaatccaaatcttgtttgttttctaatactgtttttcaataaaagcaaccagggctcct

SEQ ID NO: 102634 - DNA, 201 bp, Homo sapiens
tgaccaacatggtgaaaccccatctctactaaaaatacaaaaaaaaaaattagctgggtgtggtggcacgcacctgtaatcccagctactcaggaggctgwgacaggagaatcacttgaacctgggaggcggaagttgcagtgagccaagattatgccactgcactccagcctgtgcaacagagtgagactccatctcaaa

SEQ ID NO: 102635 - DNA, 201 bp, Homo sapiens
accaacatggtgaaaccccatctctactaaaaatacaaaaaaaaaaattagctgggtgtggtggcacgcacctgtaatcccagctactcaggaggctgagrcaggagaatcacttgaacctgggaggcggaagttgcagtgagccaagattatgccactgcactccagcctgtgcaacagagtgagactccatctcaaaaa

SEQ ID NO: 102636 - DNA, 201 bp, Homo sapiens
ccaacatggtgaaaccccatctctactaaaaatacaaaaaaaaaaattagctgggtgtggtggcacgcacctgtaatcccagctactcaggaggctgagamaggagaatcacttgaacctgggaggcggaagttgcagtgagccaagattatgccactgcactccagcctgtgcaacagagtgagactccatctcaaaaac

SEQ ID NO: 102637 - DNA, 201 bp, Homo sapiens
tgacaaatgggatctaattaaactcaagagcttctgcacagaaaaagaaattaccatcagagtgaacaggcaacctacaaaatgggagaaaattttcgcarcctgctcatctgacaaagggctaatatccagaatctacaatgaactcaaacaaatttacaagaaaaaaaacaaacaaccccatcaaaaagtgggcgaagg

SEQ ID NO: 102638 - DNA, 201 bp, Homo sapiens
cacttgaacctgggaggcggaagttgcagtgagccaagattatgccactgcactccagcctgtgcaacagagtgagactccatctcaaaaacaaaaaacamaaaaacaaaacaaaacaaaacaaaacaacgttttttgctcaatccagcatctgatatacattttaactactttattgagttgaatttatatttaatagag

SEQ ID NO: 102639 - DNA, 201 bp, Homo sapiens
gccattctttaaaagtgatatttaggccgggtgtggtggctcaggcctgtaatcccagcactttgggaggcctaggtgggtggatcacctgaggtcagaartttgagaccagcctggccaacatggtgaaacctcgtctctactgaaaatccaaaaaaaaaaaaaaaaaaattagccgggtgtggtggtggcatgcctgta

SEQ ID NO: 102640 - DNA, 201 bp, Homo sapiens
gggtgtggtggtggcatgcctgtaatctcagctactcgggaggctgaggcaggagaatcgcctgaatcctagaggcagaggttgcagtgagccaagatcgygccactgcactccagcctgggcaacagagtgagactctgtctcaaaaaataaataaataaaataaaataaaagtgatatttaaacttcattaaaagtaga

SEQ ID NO: 102641 - DNA, 201 bp, Homo sapiens
gctactcgggaggctgaggcaggagaatcgcctgaatcctagaggcagaggttgcagtgagccaagatcgtgccactgcactccagcctgggcaacagagygagactctgtctcaaaaaataaataaataaaataaaataaaagtgatatttaaacttcattaaaagtagaagaaagccaaatgcatcattttaacttatt

SEQ ID NO: 102642 - DNA, 201 bp, Homo sapiens
tagagtctcgctctgtcacccaggctggagtgcagtggcatgatctaggcttactgcaacctccgcctcctgggttcaagagattctcctgcctcagcctyccaagtagctgggattacaggtggccgccactgcgcccagctaatttttgtatttttagtagacacaaggtttcaccatattggccaggctggtctcgaa

SEQ ID NO: 102643 - DNA, 201 bp, Homo sapiens
cgggaggctgaggcaggagaatcgcctgaatcctagaggcagaggttgcagtgagccaagatcgtgccactgcactccagcctgggcaacagagtgagackctgtctcaaaaaataaataaataaaataaaataaaagtgatatttaaacttcattaaaagtagaagaaagccaaatgcatcattttaacttatttttttt

SEQ ID NO: 102644 - DNA, 201 bp, Homo sapiens
tcggccaggctggagtgcggtggtgcaatctcggctcactgcaacctctgccccccatgttcaagcaattctcctgcctcagcctcctgagtagctgggawtacaggtgcacgccaccatgcccggctaatttttgtatttttagtagagatggggtttcaccatgttggccagtctggtctcaaactcctgacctcaagt

SEQ ID NO: 102645 - DNA, 201 bp, Homo sapiens
caagtgattctcctgcctcagcctccctggtagctgggattacaggcatgtgccaccacacccggctaatttttgtatttttagtagagacggggtttcaycatgttggccaggctggtctcaaactcctgacctcaagtgaaccacccgcctcggcctcccaaagtgttgggattacaagcgtgagctaccacacccagc

SEQ ID NO: 102646 - DNA, 201 bp, Homo sapiens
tcctgagtagctgggactacaggcgcccaccaccacgcccggctaattttttgtatttttagtagagacggggtttcactgtgttagccaggatggtctckatctcctgaccttgtgatccgcccaccttcggctcccaaagtgctgggattacaggcgtgagccacctcgcctggccttgctggggtattttttgaggcc

SEQ ID NO: 102647 - DNA, 201 bp, Homo sapiens
gttaaccccatgctgttctcatgatagggggtgagttctcaggaggtctgatggtttcataaggggcttttcccccttttgctcagcacttctccttgctkccaccatgcaaagaaggatgtgtttgcttccccttccaccatgcttgtaagtttcctgaggcctccccagtcatgctgaactgtgagtcaattgaacctc

SEQ ID NO: 102648 - DNA, 201 bp, Homo sapiens
agaaggatgtgtttgcttccccttccaccatgcttgtaagtttcctgaggcctccccagtcatgctgaactgtgagtcaattgaacctctttcctttatarattacccagtcttgggtatgtctttattagcagcatgagaatggactaatgcagtactgtacttttgtaattttcataattgtttcttacattttgaatc

SEQ ID NO: 102649 - DNA, 201 bp, Homo sapiens
ggaggctgaggcaggagaatcgcctgaatcctagaggcagaggttgcagtgagccaagatcgtgccactgcactccagcctgggcaacagagtgagactcrgtctcaaaaaataaataaataaaataaaataaaagtgatatttaaacttcattaaaagtagaagaaagccaaatgcatcattttaacttattttttttct

SEQ ID NO: 102650 - DNA, 201 bp, Homo sapiens
tagaaataccatttgacccagccatcccattactgggtatatacccaaaggactataaatcatgctgctataaagacacatgcacacgtatgtttattgcrgcattattcacaatagcaaagacttggaaccaacccagatgtccaacaatgatagactggataaagaaaatgtggcacatatacaccatggaatactatg

SEQ ID NO: 102651 - DNA, 201 bp, Homo sapiens
tgcttccccttccaccatgcttgtaagtttcctgaggcctccccagtcatgctgaactgtgagtcaattgaacctctttcctttataaattacccagtctkgggtatgtctttattagcagcatgagaatggactaatgcagtactgtacttttgtaattttcataattgtttcttacattttgaatcaatagtttcatac

SEQ ID NO: 102652 - DNA, 201 bp, Homo sapiens
ggctgaggcaggagaatcgcctgaatcctagaggcagaggttgcagtgagccaagatcgtgccactgcactccagcctgggcaacagagtgagactctgtytcaaaaaataaataaataaaataaaataaaagtgatatttaaacttcattaaaagtagaagaaagccaaatgcatcattttaacttattttttttctttt

SEQ ID NO: 102653 - DNA, 201 bp, Homo sapiens
ccatgcttgtaagtttcctgaggcctccccagtcatgctgaactgtgagtcaattgaacctctttcctttataaattacccagtcttgggtatgtctttaytagcagcatgagaatggactaatgcagtactgtacttttgtaattttcataattgtttcttacattttgaatcaatagtttcataccattatgaccatat

SEQ ID NO: 102654 - DNA, 201 bp, Homo sapiens
aatcgcctgaatcctagaggcagaggttgcagtgagccaagatcgtgccactgcactccagcctgggcaacagagtgagactctgtctcaaaaaataaatwaataaaataaaataaaagtgatatttaaacttcattaaaagtagaagaaagccaaatgcatcattttaacttattttttttctttttactcaaccagata

SEQ ID NO: 102655 - DNA, 201 bp, Homo sapiens
cacaccagttagaatggcaatcattaaaaagtcaggaaacaacaggtgctggagaggatgtggagaaataggaacacttttacactgttggtgagactgtraactagttcaaccattgtggaagtcagtgtggtgattcctcagggatctagaactagaaataccatttgacccagccatcccattactgggtatataccc

SEQ ID NO: 102656 - DNA, 201 bp, Homo sapiens
gtctggttgctagactaaagatttgtatgaggattgtcagaaatgttggctgggcatggtggctcacgcctgtaatcccagtactttgggaggccgaggcrggtggatcacctgatgtcaggagttcgagagcagcctggcgaacatgatgaaaccccgtctctactaaaaatacaaaaattagctgggcgtggtggtggg

SEQ ID NO: 102657 - DNA, 201 bp, Homo sapiens
tgcactccagcctgggcaacagagtgagactctgtctcaaaaaataaataaataaaataaaataaaagtgatatttaaacttcattaaaagtagaagaaarccaaatgcatcattttaacttattttttttctttttactcaaccagatagttggtgacatataatcaacacacatttatcgagggatgctattgtaggta

SEQ ID NO: 102658 - DNA, 201 bp, Homo sapiens
ctttgggaggccgaggcgggtggatcacctgatgtcaggagttcgagagcagcctggcgaacatgatgaaaccccgtctctactaaaaatacaaaaattarctgggcgtggtggtgggcacctgtaatcccaactactggggaggctgaggcaggagaatcacttgcacctgggaggcagaggttgcagtgagccgagatt

SEQ ID NO: 102659 - DNA, 201 bp, Homo sapiens
ttttgccggcactttctctcctccaataatatggcaatgtattatcttattcgccatccaccccatgatcatacaattgttgcaagcacctggaaaaaacttttttttcattttgtcaaacttcatagtatttacattgatgagtttaacaactacatggcatgtagaatgtccatgaagaactccacataatcagcatct

SEQ ID NO: 102660 - DNA, 201 bp, Homo sapiens
ggcgggtggatcacctgatgtcaggagttcgagagcagcctggcgaacatgatgaaaccccgtctctactaaaaatacaaaaattagctgggcgtggtggygggcacctgtaatcccaactactggggaggctgaggcaggagaatcacttgcacctgggaggcagaggttgcagtgagccgagattgcgccattgcactc

SEQ ID NO: 102661 - DNA, 201 bp, Homo sapiens
tttgccggcactttctctcctccaataatatggcaatgtattatcttattcgccatccaccccatgatcatacaattgttgcaagcacctggaaaaaacttttttttcattttgtcaaacttcatagtatttacattgatgagtttaacaactacatggcatgtagaatgtccatgaagaactccacataatcagcatcta

SEQ ID NO: 102662 - DNA, 201 bp, Homo sapiens
tgggactaaaggtgtccaccaccacacctggctaatttttgtatttttagtagagatggggtttcaccatgttggccaggctggtctcaaactcctgaccycaagtgatctgcctgcctcagcctcccaaagtgctgccaccctgagatttgacttaatggagcccatgggagatatagataccttgggtcattagcaaaa

SEQ ID NO: 102663 - DNA, 201 bp, Homo sapiens
acttcaagaccagcttgggcaaaacagcgagacctcttcactactaaaaatttaaaaaatcactgggcatggtgatgtgcgcctgtagtcccagctactcrggatgctgaggtgggaggattgcttgagcactggaagtcgaggctacagtgagctgtgattacgccactgcactccagcctgggtgacagagcgagacct

SEQ ID NO: 102664 - DNA, 201 bp, Homo sapiens
aatgcaaccacatcaccacaggcctcacacccatgcttcctgtgcagtctgtggaactgtgcatcaattaaacctctcttcttcataaattacccagtctyacgtatgtctttatagcagtgtgagtacagactaatatacctggaaaagttgagtgctctaggtcaactggcctgtttagtggcagggctaggattagac

SEQ ID NO: 102665 - DNA, 201 bp, Homo sapiens
ttattattattattattattattattattattattattattattattattatttgagacagagtcttgctctgttgcccaggctggagtgcagtggtgcartctcggctcactgcaacctccacctcctgggttcaagcaattctcctgcctcagcctccggagtagctgggattacaggtgtgcaccaccatgcctggat

SEQ ID NO: 102666 - DNA, 201 bp, Homo sapiens
attctgcttctcatgtgaaactggacttcctgccttttagccttgtattctgtccctttggaaactgtatcatcttttaaaaatgaagtacgtgactttcstaatgatcttttatattataaaaataggccgggctcagtggctcatgcctgtaatcccagcattttgggaggccgaggctggtggatcacttgaggtcag

SEQ ID NO: 102667 - DNA, 201 bp, Homo sapiens
tattgtgctgaacctacagttggcactcaagaaatgttaagtaatattattttaaaatctagggccgggtgcagtggctcatgcctctaatcccagcactktgggaggccaaggcgggaggattgcttgagcccaggagttgaagaccagcctgggcaacaatatgagaccgtgtctttacaaaaaacattagctgggcat

SEQ ID NO: 102668 - DNA, 201 bp, Homo sapiens
cctttgcttttggctggcaggagtcaaatgaaaaacttttcagctttagaaaaataaagtgaaggctgggcgtggtggctcacacctgtaatcccagcacdttgggaggccgaggtgggcggaccatgaggtcaggagatcaagaccaccctgtctaacacagtgaaaccccatctctacaaaaatacaaaaaattagctg

SEQ ID NO: 102669 - DNA, 201 bp, Homo sapiens
gaagcaaagtgcttgagagggctctcttgcaagttcacttttttgtcaggtcaagtgcttggctctgggatggcaggggacatggagcatgacaactgcarttctctctccagatgggaaagtagaagggaggatttcttccaatcctcaaattcttccaaaagagaatgctgttttggaaccttgtctttctttaccatt

SEQ ID NO: 102670 - DNA, 201 bp, Homo sapiens
cctcccaagtagctgggattacaggtggccgccactgcgcccagctaatttttgtatttttagtagacacaaggtttcaccatattggccaggctggtctygaactcctgacctcaggtgatccacctgcttcagcctctcaaaatactgggattacaggcgtgagccaccatgcccagcctggagttgtgatttttcaat

SEQ ID NO: 102671 - DNA, 201 bp, Homo sapiens
atgttccgcggcaaccggcagggcaggttctccgatagcaagttgggtgccgccggctatatccccagggtaatatgagccccgggttccgagcttccttsgaggccgcataccggatgaccaagcgggcgcgggcgccggcaaaaggagggtttcggggcatgcggggagaaacccggacagaggtgtgcgctccaaaga

SEQ ID NO: 102672 - DNA, 201 bp, Homo sapiens
aatgtgcaggcagagtggacattcttgaaaatcccataagaacatattaagtagaaagtgaaacaaagtggtaattcaccagggaggaggaaatgagcctytccaccaacacttagttcgtatcattctgtagtgtaaaatcagaatctcacctccaaatgaataggctgactgacttctctttgttctccgtgtgctaat

SEQ ID NO: 102673 - DNA, 201 bp, Homo sapiens
gtagctgggactacaggtgcccgccaccacactcagctaattttttgtatttttagtagagacggggtttcaccgtgttagccaggatggtctcgatctcstgacctcgtgatccgcccaccttggcttcccaaagtgctgggattataggcgtgagccactgcgcctggcctgagtgtgctggcttctaacaagatttgc

SEQ ID NO: 102674 - DNA, 201 bp, Homo sapiens
aaaactcaacatagctcaaaactgaacatgtcatcttcttccacatactctccccaacaaaaaaagaaggctgtgttgcgggaagtcagggaccccaaacrgagggaccggctgaagccatggcagaagaacgtggattgtgaagatttcttggacatttattagttccccaaattaatacttttataatttcttatgcct

SEQ ID NO: 102675 - DNA, 201 bp, Homo sapiens
catagctcaaaactgaacatgtcatcttcttccacatactctccccaacaaaaaaagaaggctgtgttgcgggaagtcagggaccccaaacagagggaccsgctgaagccatggcagaagaacgtggattgtgaagatttcttggacatttattagttccccaaattaatacttttataatttcttatgcctgtctttact

SEQ ID NO: 102676 - DNA, 201 bp, Homo sapiens
tcttcccccctccaccccagacagtcttgctctgtcacccaagctggagtgcagtgtcgcaatctcagctcactgcaacctccacctcccaggttcaagcrattctcctgcctcagcctcccgagtagctaggattacaggcgcctgccaccttgcccggctaatttttgtatttttagtggagacggggtttcgccatgt

SEQ ID NO: 102677 - DNA, 201 bp, Homo sapiens
gctgaagccatggcagaagaacgtggattgtgaagatttcttggacatttattagttccccaaattaatacttttataatttcttatgcctgtctttactscaatctctaaacataaattgtgaagatttcatggacacttatcacttccccaatcaatacacttgtgatttcctatgcctgtctttactttaatctctta

SEQ ID NO: 102678 - DNA, 201 bp, Homo sapiens
accctttccaaaaacattaagaataggaaaaaaaagaagagtgagttttccctcttgggctatgctagcaacagaggcccaaggggaaatgctgttttaarccaacctcttggaaagggtcattagcagctgacatgatgccaatatggaccaatatgtctgaaagcttgtttctgggtcttttgtggtctctgccattct

SEQ ID NO: 102679 - DNA, 201 bp, Homo sapiens
atggcagaagaacgtggattgtgaagatttcttggacatttattagttccccaaattaatacttttataatttcttatgcctgtctttactgcaatctctraacataaattgtgaagatttcatggacacttatcacttccccaatcaatacacttgtgatttcctatgcctgtctttactttaatctcttaatcgtcatc

SEQ ID NO: 102680 - DNA, 201 bp, Homo sapiens
aagggaagaagtttaattgactcacagtttcgcagggctgaagaggcctcaggaaacttacaattatggtggaaggggaagcaaatatgtccttcttcacmtggtggcaggaaggagaagaatgagcaaaaggggaaaagttccttataaaaacatcagatgtcgtgagaactcactgtcacaagaacagcatgggggtaa

SEQ ID NO: 102681 - DNA, 201 bp, Homo sapiens
gaagatttcttggacatttattagttccccaaattaatacttttataatttcttatgcctgtctttactgcaatctctaaacataaattgtgaagatttcrtggacacttatcacttccccaatcaatacacttgtgatttcctatgcctgtctttactttaatctcttaatcgtcatctcgtaagccgaggaggatgtat

SEQ ID NO: 102682 - DNA, 201 bp, Homo sapiens
aagttccttataaaaacatcagatgtcgtgagaactcactgtcacaagaacagcatgggggtaaccgcctccatgattcaattacctcccaccaagtccckcccatgacacatggggattataggaactgcaactcaagatgagattttggtggggacacagccaaaccatatcatctactctctccctggcctcacccca

SEQ ID NO: 102683 - DNA, 201 bp, Homo sapiens
ttccttttttttttccttttcttctgagacggagtctcactctgtcacccaggctggagtgcagtggcgcgatctccactcactgcaagctccgcctcccrggttcacaccattctcctgcctcagcctcccgagtagctgggactacaggtgcccgccaccacactcagctaattttttgtatttttagtagagacgggg

SEQ ID NO: 102684 - DNA, 201 bp, Homo sapiens
aggttcatgccattctcctgcctcagcctcccaagtagctgggactacaggcgcccgccaacacgcccggctaattttttgtatttttagtagaaacgggstttcaccgtgttagccaagatggtctcgatctcctgacctcgtgatccgcccgtctcggcctcccaaagtgctaggattacaggcgtgagccaccgcgcc

SEQ ID NO: 102685 - DNA, 201 bp, Homo sapiens
ttgtgaagatttcatggacacttatcacttccccaatcaatacacttgtgatttcctatgcctgtctttactttaatctcttaatcgtcatctcgtaagcygaggaggatgtatgtcacctcaggaccctgtgataattgcgttaactgcacaaattgtagagcatgtgtgtttgaacaatatgaaatctggccaccttga

SEQ ID NO: 102686 - DNA, 201 bp, Homo sapiens
tcccagcactttaggaggttgaggcaggaggattgcttgagaccaggagtttgagaccagcctgggcaacatagtgagactccctctctacaaaaaaattwaaaattagccaggcatggtggcatgtgcctgtagtcccagctactcttgaggctgacatgggaggatcacttgggcctgggaggttgaggctgcagtgag

SEQ ID NO: 102687 - DNA, 201 bp, Homo sapiens
tggacacttatcacttccccaatcaatacacttgtgatttcctatgcctgtctttactttaatctcttaatcgtcatctcgtaagccgaggaggatgtatrtcacctcaggaccctgtgataattgcgttaactgcacaaattgtagagcatgtgtgtttgaacaatatgaaatctggccaccttgaaaaaagaacaggat

SEQ ID NO: 102688 - DNA, 201 bp, Homo sapiens
aaaattagccaggcatggtggcatgtgcctgtagtcccagctactcttgaggctgacatgggaggatcacttgggcctgggaggttgaggctgcagtgagycctgatcatgccactgcactccagcctgggcagcagagcaagatcctgtcaaaaaaaaagggtgcaggccgggtgtggtggctcacatctgtaatcccag

SEQ ID NO: 102689 - DNA, 201 bp, Homo sapiens
acacttatcacttccccaatcaatacacttgtgatttcctatgcctgtctttactttaatctcttaatcgtcatctcgtaagccgaggaggatgtatgtcrcctcaggaccctgtgataattgcgttaactgcacaaattgtagagcatgtgtgtttgaacaatatgaaatctggccaccttgaaaaaagaacaggataac

SEQ ID NO: 102690 - DNA, 201 bp, Homo sapiens
ttagccaggcatggtggcatgtgcctgtagtcccagctactcttgaggctgacatgggaggatcacttgggcctgggaggttgaggctgcagtgagtcctratcatgccactgcactccagcctgggcagcagagcaagatcctgtcaaaaaaaaagggtgcaggccgggtgtggtggctcacatctgtaatcccagcact

SEQ ID NO: 102691 - DNA, 201 bp, Homo sapiens
tgatttcctatgcctgtctttactttaatctcttaatcgtcatctcgtaagccgaggaggatgtatgtcacctcaggaccctgtgataattgcgttaactrcacaaattgtagagcatgtgtgtttgaacaatatgaaatctggccaccttgaaaaaagaacaggataacagcaatgtttaggaaacaagagagataacct

SEQ ID NO: 102692 - DNA, 201 bp, Homo sapiens
gcctgggcagcagagcaagatcctgtcaaaaaaaaagggtgcaggccgggtgtggtggctcacatctgtaatcccagcactttgggaggccgaggtgggcrgatcatgaggtcagagatcaagaccatcctggctaacatggtgaaacccagtctctactaaaaatataaaaaaattagatgggcgtggtggcaggcacct

SEQ ID NO: 102693 - DNA, 201 bp, Homo sapiens
aacaatatgaaatctggccaccttgaaaaaagaacaggataacagcaatgtttaggaaacaagagagataaccttaaactctgaccgctggtgagccaggyggaacagagccatatttctcgtctttcaaaagcaaatgggagaaatatcgctgaattctttttctcagtaaggaacatccctgggaaagagaatacgcgc

SEQ ID NO: 102694 - DNA, 201 bp, Homo sapiens
gcagaaggcaaaggagaagcaaagtcacaccttacatggtggcaggcaagagagcttgtgcaggggaactcccatttataaaaccatcagatctcatgagrcttattcactaccacgagaacagtatggggggaacggcccccatgagtcaattatctccacctctccccatgttgacatgggggattattacaatcaagg

SEQ ID NO: 102695 - DNA, 201 bp, Homo sapiens
tttttttttttttttgaggtggagtcttgctctgtcacccaggctgaagtgcagtggcgcaatctcggttcactgcaagctccgcctcccgggttcacgcyattctcctgcctcagcctcctgagtagctgggactacaggcgcccaccaccacgcccggctaattttttgtatttttagtagagacggggtttcactgtg

SEQ ID NO: 102696 - DNA, 201 bp, Homo sapiens
cgagttcaagtgattctcctgcctcagcctccctggtagctgggattacaggcatgtgccaccacacccggctaatttttgtatttttagtagagacgggdtttcaccatgttggccaggctggtctcaaactcctgacctcaagtgaaccacccgcctcggcctcccaaagtgttgggattacaagcgtgagctaccaca

SEQ ID NO: 102697 - DNA, 201 bp, Homo sapiens
ttgggaggccgaggcgggtggatcacaaggtcaggagttcgagaccatcctgggcaagatggtgaaatcccgtctctactaaaaatacaaaaaaattatcygggcgtggtggtgggtgcctgtaatcccagctacacaggaggctgaggcagagaattgcttgaacctgggaggcaaaggttgcagtgacctgagattgtg

SEQ ID NO: 102698 - DNA, 201 bp, Homo sapiens
ctagaaataccatttgacccagccatcccattactgggtatatacccaaaggactataaatcatgctgctataaagacacatgcacacgtatgtttattgyggcattattcacaatagcaaagacttggaaccaacccagatgtccaacaatgatagactggataaagaaaatgtggcacatatacaccatggaatactat

SEQ ID NO: 102699 - DNA, 201 bp, Homo sapiens
ccatttattaaatagggaatcctttccccatttcttgtttttgtcaggtttgtcaaagatcagatggttgtagatgtgtggtattatttctgagggctctdttctgttccattggtctatatctctgttttggcagcagtaccatgctgttttggttactgtagccttgtagtatagtttgaagtcaggtagcgtgatgcc

SEQ ID NO: 102700 - DNA, 201 bp, Homo sapiens
cacccccgctattgtgaatggtttgctgggagagaagctctaggaactgatggggttcagctcattcagaaaatcctgttctcctttggtattgatggctsaaaactctgattacatctgcagagcagtgtgaatagtaggttctaaaaggggctgatacaaaggacaattcacaacagattacgtacaagtaggtaataa

SEQ ID NO: 102701 - DNA, 201 bp, Homo sapiens
ctctgaccgctggtgagccaggtggaacagagccatatttctcgtctttcaaaagcaaatgggagaaatatcgctgaattctttttctcagtaaggaacayccctgggaaagagaatacgcgcctgggggtgggtctctgaactggcccccccccaggcgtggttgtcttctatggtcgaggctgtaggggtgaaatagac

SEQ ID NO: 102702 - DNA, 201 bp, Homo sapiens
aataaattttggtcagactggttgctctcaaaaccctgtctcctgataagatgttatcaatgacaatggtgcctgaaacttcattagcaattttaatttcrccccagtcctgtggtcctgtgatctcgccctgcctccatttgtcttgtgatattctattaccttgtgaagtatgtgatctttgtgaccaacaccctattc

SEQ ID NO: 102703 - DNA, 201 bp, Homo sapiens
gttgctctcaaaaccctgtctcctgataagatgttatcaatgacaatggtgcctgaaacttcattagcaattttaatttcgccccagtcctgtggtcctgygatctcgccctgcctccatttgtcttgtgatattctattaccttgtgaagtatgtgatctttgtgaccaacaccctattcgtacactgcctccccttttg

SEQ ID NO: 102704 - DNA, 201 bp, Homo sapiens
gaaggcaaaggagaagcaaagtcacaccttacatggtggcaggcaagagagcttgtgcaggggaactcccatttataaaaccatcagatctcatgagactyattcactaccacgagaacagtatggggggaacggcccccatgagtcaattatctccacctctccccatgttgacatgggggattattacaatcaaggtga

SEQ ID NO: 102705 - DNA, 201 bp, Homo sapiens
tattctattaccttgtgaagtatgtgatctttgtgaccaacaccctattcgtacactgcctccccttttgaaactccctaataaaaacttgctggttttgyggcttgtggggcatcacggaacctactgacatgtgatgtctcccccagatgcccagccttaaaatgtctctcttttgtactctgtccctttatttctcaa

SEQ ID NO: 102706 - DNA, 201 bp, Homo sapiens
aaggcaaaggagaagcaaagtcacaccttacatggtggcaggcaagagagcttgtgcaggggaactcccatttataaaaccatcagatctcatgagacttrttcactaccacgagaacagtatggggggaacggcccccatgagtcaattatctccacctctccccatgttgacatgggggattattacaatcaaggtgag

SEQ ID NO: 102707 - DNA, 201 bp, Homo sapiens
ttgttggcatggcccttctacttgatttctaaggagccagatgcactgtttgcttttaagacaaggtctcgctctgttgcccagcctggagtgcagtggtrcaatcacagctcactgcagccttgacttcccaggctccagccattttcccaactcagcctctcaagtagctaggatgacaggcatgtgccaccacactca

SEQ ID NO: 102708 - DNA, 201 bp, Homo sapiens
ggggtctccctgggaattccctcaggaggaccctgtgtgcatttgggtgaaagaaagctattgttgaggaaatttgccctgccagggaccccagggcctaytttgggtgtgtgtgggtgggtagagatgaaggggaaagttccagctgcttcagatggtggcgaatgacttaaacaaacaaggactggggcttggaagagg

SEQ ID NO: 102709 - DNA, 201 bp, Homo sapiens
ttaaaatttcagtactattgtagttgtatcagcacaactatttttcagggatctgagatgaattaattccgaaaagagcttacaaaggagatgcagaagtytctatatgccacccatcaaaaaagtgagtcaggtgtgttttaagccacagggttcttctcccacaattagctttgaccaaacagcaaaactcagattgga

SEQ ID NO: 102710 - DNA, 201 bp, Homo sapiens
gtggtggcacacacctgtggtcctagattcttgggcagctgaggtaggaggattgtttgagcccaggagatcaaggctgcagtgagccatgattgcaccastgcactccagcctgggtgacagagtgagaccccgtctcaaaaaaagagcatctggctgtagaaaggtttttcccaagtatgatccaagcgttaggactca

SEQ ID NO: 102711 - DNA, 201 bp, Homo sapiens
tgacagagcaagactccatctcaaaaaaaaaaaaaaaaaaaaaaaaaaaaaaggagtttatttggagatttgcaacttgtcatgggaaacattcccagggwttcttctagagttgttgtggacctgattttgggtgctaagtggtaactcactatatcttaaaaacacatcagctaaaaggtggaagcaatctacatgccc

SEQ ID NO: 102712 - DNA, 201 bp, Homo sapiens
tgggatctaattaaactcaagagcttctgcacagaaaaagaaattaccatcagagtgaacaggcaacctacaaaatgggagaaaattttcgcaacctgctyatctgacaaagggctaatatccagaatctacaatgaactcaaacaaatttacaagaaaaaaaacaaacaaccccatcaaaaagtgggcgaaggacatgaa

SEQ ID NO: 102713 - DNA, 201 bp, Homo sapiens
ccagagctcacatgggtatctcccacttctaagagctgcttttcataccccctagacgttttttgttttgttttattcttgagacggagtctcgcactgtygcccgggctggagtgcaatcgcacaattttggctcactgcaacctccacctcccgggttcaagctattctcctgcctcagcctcccaagtagctgggatt

SEQ ID NO: 102714 - DNA, 201 bp, Homo sapiens
ggcacacacctgtggtcctagattcttgggcagctgaggtaggaggattgtttgagcccaggagatcaaggctgcagtgagccatgattgcaccactgcastccagcctgggtgacagagtgagaccccgtctcaaaaaaagagcatctggctgtagaaaggtttttcccaagtatgatccaagcgttaggactcagctcc

SEQ ID NO: 102715 - DNA, 201 bp, Homo sapiens
gttgtggtgagctgagattgcgccactgcactccagcctgagtgacagagcaagactccatctcaaaaaaaaaaaaaaaaaaaaaaaaaaaaaaggagttkatttggagatttgcaacttgtcatgggaaacattcccagggtttcttctagagttgttgtggacctgattttgggtgctaagtggtaactcactatatct

SEQ ID NO: 102716 - DNA, 201 bp, Homo sapiens
ttttatttttgtatttttagtagagatggggttttgctatgttggccaggctggtctcgaactcctgacctcgtgatccgcctgacttggcctcccaaagygctgggattacaggcatgagccaccgcgcccagcctagacactgactcttaagtgcttggacagttgctatctctctgacttttcctgatcagccttttt

SEQ ID NO: 102717 - DNA, 201 bp, Homo sapiens
cccttaccttttttttttgagacggagtctcgctctgttgctggagtgcagtggcgcgattttggctcactgcaagctctgcctcctgggttcacgccatyctcctgcctcagcctcccaagtagctgggactacaggcgcccgccaccacgcccggctaatttttttgtatttttagtagagacgggttttcaccgtgtt

SEQ ID NO: 102718 - DNA, 201 bp, Homo sapiens
ccgcaaaaacagaaaaccaaacaccgcatattctcactcataggtgggaattgaacaatgagatcacgtggacacaggaaggggaacatcacactctgggkactgttgtggggtggggggaggggggagggatagcattgggagatatacctcatgctggatgacgagttagtgggtgcagcgcaccagcatgacacatgt

SEQ ID NO: 102719 - DNA, 201 bp, Homo sapiens
atgacagttactaagatgtaatacaaatcttaacagtgggaacagtgactactgtttatcacgtgaatactataagtcaagcacaacaaccctttgtggtrctgctagagttaaggaggcatcctcagaggttgaggaatgtgcccaacctcagatgctagcaaatggtagagctttgttcagagtccaggtcctcattct

SEQ ID NO: 102720 - DNA, 201 bp, Homo sapiens
accttttttttttgagacggagtctcgctctgttgctggagtgcagtggcgcgattttggctcactgcaagctctgcctcctgggttcacgccattctccygcctcagcctcccaagtagctgggactacaggcgcccgccaccacgcccggctaatttttttgtatttttagtagagacgggttttcaccgtgttagcca

SEQ ID NO: 102721 - DNA, 201 bp, Homo sapiens
gctctgttgctggagtgcagtggcgcgattttggctcactgcaagctctgcctcctgggttcacgccattctcctgcctcagcctcccaagtagctgggabtacaggcgcccgccaccacgcccggctaatttttttgtatttttagtagagacgggttttcaccgtgttagccaggatggtctcgatctcctgacctcat

SEQ ID NO: 102722 - DNA, 201 bp, Homo sapiens
actgcaagctctgcctcctgggttcacgccattctcctgcctcagcctcccaagtagctgggactacaggcgcccgccaccacgcccggctaatttttttktatttttagtagagacgggttttcaccgtgttagccaggatggtctcgatctcctgacctcatgatccgcctgcctcagcctcccaaagtgctgggatta

SEQ ID NO: 102723 - DNA, 201 bp, Homo sapiens
ctgcctcagcctcccaagtagctgggactacaggcgcccgccaccacgcccggctaatttttttgtatttttagtagagacgggttttcaccgtgttagcyaggatggtctcgatctcctgacctcatgatccgcctgcctcagcctcccaaagtgctgggattacaccgtgcccggccgcccttacttttaatggcaaaa

SEQ ID NO: 102724 - DNA, 201 bp, Homo sapiens
gtgagactgtaaactagttcaaccattgtggaagtcagtgtggtgattcctcagggatctagaactagaaataccatttgacccagccatcccattactgrgtatatacccaaaggactataaatcatgctgctataaagacacatgcacacgtatgtttattgcggcattattcacaatagcaaagacttggaaccaacc

SEQ ID NO: 102725 - DNA, 201 bp, Homo sapiens
gcgtggtaatggagaggaggggacacatataagagagggattgacaagacaggacatgtgaccaatttgatgtggtcagagcaagagtcaaagagagtcamcaatgaaggcatgattttttcagcctgtatgttgtgatgggttgaactgatggactgagataagaagcctgggcatcggtttagaaaaggaaggaaagtc

SEQ ID NO: 102726 - DNA, 201 bp, Homo sapiens
tgtttgagctcaggagtttgagacctgcctgggcaacatggtgaaaccccgcctctaccaaaaaatacaaaagctagctgggcatggtggcacacgcctgyggtcccagctactcaggaggctgaggtgggaggattgcttgagcccaggaggtggaggctgtagtgagccgagatcacacaactgcactccagcctgggt

SEQ ID NO: 102727 - DNA, 201 bp, Homo sapiens
ctctccatataccacaccaactcctgaacttctgtaccagcttggacgttatggaaaatgggagctttaaatgttcttgaaggccaggcacggtggctcaygcctataatcccagcactttgggaggccgaggcgggtggatcacaaggtcaggagttcgagaccatcctgggcaagatggtgaaatcccgtctctactaa

SEQ ID NO: 102728 - DNA, 201 bp, Homo sapiens
gccaccacgcccggctaatttttttgtatttttagtagagacgggttttcaccgtgttagccaggatggtctcgatctcctgacctcatgatccgcctgcytcagcctcccaaagtgctgggattacaccgtgcccggccgcccttacttttaatggcaaaaaccacattaacttttgcaccaatctatagcttggttttc

SEQ ID NO: 102729 - DNA, 201 bp, Homo sapiens
ggaaccaaaaaagagcctgcatcgccaagtcaatcctaagccaaaagaacaaagctggaggcatcacactacctgacttcaaactatactacaaggctacwgtaaccaaaacagcatggtactggtaccaaaacagagatatagatcaatggaacagaacagagccctcagaaataacgctgctatctacaactatctgat

SEQ ID NO: 102730 - DNA, 201 bp, Homo sapiens
aaaaagaaattaccatcagagtgaacaggcaacctacaaaatgggagaaaattttcgcaacctgctcatctgacaaagggctaatatccagaatctacaakgaactcaaacaaatttacaagaaaaaaaacaaacaaccccatcaaaaagtgggcgaaggacatgaacagacacttctcaaaagaagacatttatccagcc

SEQ ID NO: 102731 - DNA, 201 bp, Homo sapiens
ataaacataccagcacccctttgcttttggctggcaggagtcaaatgaaaaacttttcagctttagaaaaataaagtgaaggctgggcgtggtggctcacrcctgtaatcccagcactttgggaggccgaggtgggcggaccatgaggtcaggagatcaagaccaccctgtctaacacagtgaaaccccatctctacaaaa

SEQ ID NO: 102732 - DNA, 201 bp, Homo sapiens
cccaagtagctgggactacaggcgcccgccaccacgcccggctaatttttttgtatttttagtagagacgggttttcaccgtgttagccaggatggtctcratctcctgacctcatgatccgcctgcctcagcctcccaaagtgctgggattacaccgtgcccggccgcccttacttttaatggcaaaaaccacattaact

SEQ ID NO: 102733 - DNA, 201 bp, Homo sapiens
tttgggaggccgaggtgggcggaccatgaggtcaggagatcaagaccaccctgtctaacacagtgaaaccccatctctacaaaaatacaaaaaattagctsggcatggtggcacacgcctgtagtcccagctactcgggaggctgaggcaggtgaatcatttgaacccaggaggcagaggttgcagtgagctgagattgca

SEQ ID NO: 102734 - DNA, 201 bp, Homo sapiens
gggactacaggcgcccgccaccacgcccggctaatttttttgtatttttagtagagacgggttttcaccgtgttagccaggatggtctcgatctcctgacytcatgatccgcctgcctcagcctcccaaagtgctgggattacaccgtgcccggccgcccttacttttaatggcaaaaaccacattaacttttgcaccaat

SEQ ID NO: 102735 - DNA, 201 bp, Homo sapiens
tactttgggaggctgagatgggtggatcacctgaggtcaggagtttgagaccagtctgaccaacatggtgaaaccccatctctactaaaaatacaaaaatyagccaggcgtggtggtgggtgcctataatcccagctactcaggaggctgaggagggaaaattgcctgaacccaggaggcggaggttgtggtgagctgaga

SEQ ID NO: 102736 - DNA, 201 bp, Homo sapiens
agtcaaatcactttgagaaggaggagatctgaatttcataaataaaccctaatttgttaatgggaactgatgccaaaaacaaggagtttttcctccttgcrgtgacactgaatgtcctgggctgtggagggtagaaacaggacattctcagtgttccagctcacaggggtggagttagagtaaatatcctgcccagtttgc

SEQ ID NO: 102737 - DNA, 201 bp, Homo sapiens
ggaggccgaggtgggcggaccatgaggtcaggagatcaagaccaccctgtctaacacagtgaaaccccatctctacaaaaatacaaaaaattagctgggcrtggtggcacacgcctgtagtcccagctactcgggaggctgaggcaggtgaatcatttgaacccaggaggcagaggttgcagtgagctgagattgcaccac

SEQ ID NO: 102738 - DNA, 201 bp, Homo sapiens
aattagctgggcacagtgatgtgctcctgtagtcccagctattcaggaggctgaggcaggaggattgcttgaacctgggaggcagaggttacagtgagccragattgtgccactgcactccagcctgggtgacacagcaagactctgtctcaaaaaaataataataaaaaaacctgtggatattttgctcagtacctgggt

SEQ ID NO: 102739 - DNA, 201 bp, Homo sapiens
gaggccgaggtgggcggaccatgaggtcaggagatcaagaccaccctgtctaacacagtgaaaccccatctctacaaaaatacaaaaaattagctgggcawggtggcacacgcctgtagtcccagctactcgggaggctgaggcaggtgaatcatttgaacccaggaggcagaggttgcagtgagctgagattgcaccact

SEQ ID NO: 102740 - DNA, 201 bp, Homo sapiens
tgtagtcccagctattcaggaggctgaggcaggaggattgcttgaacctgggaggcagaggttacagtgagccaagattgtgccactgcactccagcctgsgtgacacagcaagactctgtctcaaaaaaataataataaaaaaacctgtggatattttgctcagtacctgggtgatgggatcattcttaccccaaacctc

SEQ ID NO: 102741 - DNA, 201 bp, Homo sapiens
gtgggcggaccatgaggtcaggagatcaagaccaccctgtctaacacagtgaaaccccatctctacaaaaatacaaaaaattagctgggcatggtggcacrcgcctgtagtcccagctactcgggaggctgaggcaggtgaatcatttgaacccaggaggcagaggttgcagtgagctgagattgcaccactgcattctag

SEQ ID NO: 102742 - DNA, 201 bp, Homo sapiens
tacagtggtgcaatcatggcccacttcaacctcccaagtaactgatacgactggcacatgccaccatgcctggctaatttttttgtagagatggggtctcrctatgttgcccaggctggtctcaaacaatcctcctgccttggcctcctaaagtggtgggattacaggtgtgagccaatgcacccaaccattcttccttta

SEQ ID NO: 102743 - DNA, 201 bp, Homo sapiens
aattgccctcaaacccatgctgttggccaggcatggtggctcatgcctgtaatcccagcactttgggatactgaggtgggcggatcacttgaggtcaggarttcgagaccagcctgaccaacatggtgaaatccaatctctactaaaaatacacaagttagccaggcatggtggcgtgcttgggatgctgaggcaggagaa

SEQ ID NO: 102744 - DNA, 201 bp, Homo sapiens
tagaaataggccgggaggggtggctcacgtctgtaatcccagcactttgggaggctaaggcgagtggattgcctgaggtcaggagttcgagaccagcctgrccaacatggtgaaacctcgtctctactgaaaatacaaaaattagctgggcatggtggcaggcgcctgtaatcccagctacttgggaggctgaggtaggag

SEQ ID NO: 102745 - DNA, 201 bp, Homo sapiens
atgatcaagctattttgtgccttcaccctaggcaccagggtatgttgttcagttgtgatatttgtcagaaaaatcttaggttggtgcaaaagtaattgcastttttgccattacttttaatggcaaacaccacaattacttttgcaccaacctaatagtatgctgccactgcccactctcctagtactgctcccccttctt

SEQ ID NO: 102746 - DNA, 201 bp, Homo sapiens
attgccctcaaacccatgctgttggccaggcatggtggctcatgcctgtaatcccagcactttgggatactgaggtgggcggatcacttgaggtcaggagytcgagaccagcctgaccaacatggtgaaatccaatctctactaaaaatacacaagttagccaggcatggtggcgtgcttgggatgctgaggcaggagaat

SEQ ID NO: 102747 - DNA, 201 bp, Homo sapiens
gccctcaaacccatgctgttggccaggcatggtggctcatgcctgtaatcccagcactttgggatactgaggtgggcggatcacttgaggtcaggagttcsagaccagcctgaccaacatggtgaaatccaatctctactaaaaatacacaagttagccaggcatggtggcgtgcttgggatgctgaggcaggagaattgc

SEQ ID NO: 102748 - DNA, 201 bp, Homo sapiens
agtcatgcaggtatggaattgctttgagaagtatcattttattaatttgtctggcttgataccaattacctgatgcagttgttaagggcagatccatccakaaacctttgggttctctgctccctgattttgttttgcaaattatataaccatacttcatagaaaacaccagtggtggctatgttgttcacagacacaaag

SEQ ID NO: 102749 - DNA, 201 bp, Homo sapiens
agggtacaaaactaatcatatctcctctttgtacgatataccttttttttttttttttgaaatggagtcttgctctgtcacccaggctggagtgcagtgaygtgatcttggctcactgcaacctctgccccctgggttcaagcaattatcgtgcctcagcctcaggagtagctgagattacaggcacccagcaccacacct

SEQ ID NO: 102750 - DNA, 201 bp, Homo sapiens
cctcttcaaggagaactacaaaccactgctcaaggaaataaaagaggacacaaacaaatggaagaacattccatgctcatggataggaagaatcaatatcrtgaaaatggccatactgcccaaggtaatttacagattcaatgccatccccatcaagctaccaatgactttcttcacagaattggaaaaaactactttaaa

SEQ ID NO: 102751 - DNA, 201 bp, Homo sapiens
gactacaggcgcccgccaacacgcccggctaattttttgtatttttagtagaaacggggtttcaccgtgttagccaagatggtctcgatctcctgacctcrtgatccgcccgtctcggcctcccaaagtgctaggattacaggcgtgagccaccgcgcccggccgtttctctggttctttaagatgcattgttaggttgct

SEQ ID NO: 102752 - DNA, 201 bp, Homo sapiens
attctattaccttgtgaagtatgtgatctttgtgaccaacaccctattcgtacactgcctccccttttgaaactccctaataaaaacttgctggttttgcrgcttgtggggcatcacggaacctactgacatgtgatgtctcccccagatgcccagccttaaaatgtctctcttttgtactctgtccctttatttctcaaa

SEQ ID NO: 102753 - DNA, 201 bp, Homo sapiens
tttcttttcttttctttttttttgagacgagtttttttcgctcttgttacccagactggagttcaatggcgcgatctcagttcactgcaacctccgcctcytgggttcaagcaattctcctgcctcagcctcccaagtagctgggatttcaggcatgtgccaccacacctggctaattttgtatttttagtagagacagag

SEQ ID NO: 102754 - DNA, 201 bp, Homo sapiens
cccagatgtccaacaatgatagactggataaagaaaatgtggcacatatacaccatggaatactatgcagccataaaaaatgatgagttcatgtcctttgyagggacatggatgaaattggaaatcatcattctcagtaaactaccgcaaaaacagaaaaccaaacaccgcatattctcactcataggtgggaattgaaca

SEQ ID NO: 102755 - DNA, 201 bp, Homo sapiens
acaggtgctggagaggatgtggagaaataggaacacttttacactgttggtgagactgtaaactagttcaaccattgtggaagtcagtgtggtgattcctyagggatctagaactagaaataccatttgacccagccatcccattactgggtatatacccaaaggactataaatcatgctgctataaagacacatgcacac

SEQ ID NO: 102756 - DNA, 201 bp, Homo sapiens
atttggttggagatgtagttaagtagccttagcctgtaaactattcatatgtattgtataagtccattttcatactgctataaagaactgcctgagactgrgtaatttataaaggaaagaggtttaattgactcacagttctgcatggttgaggaggcctcaggaaactcacaatcatggcagaaagtgaaggaaaagcaa

SEQ ID NO: 102757 - DNA, 201 bp, Homo sapiens
cgcgattttggctcactgcaagctctgcctcctgggttcacgccattctcctgcctcagcctcccaagtagctgggactacaggcgcccgccaccacgccyggctaatttttttgtatttttagtagagacgggttttcaccgtgttagccaggatggtctcgatctcctgacctcatgatccgcctgcctcagcctccca

SEQ ID NO: 102758 - DNA, 201 bp, Homo sapiens
gaggccgaggcgggtggatcacctgatgtcaggagttcgagagcagcctggcgaacatgatgaaaccccgtctctactaaaaatacaaaaattagctgggygtggtggtgggcacctgtaatcccaactactggggaggctgaggcaggagaatcacttgcacctgggaggcagaggttgcagtgagccgagattgcgcca

SEQ ID NO: 102759 - DNA, 201 bp, Homo sapiens
aatctcggttcactgcaagctccgcctcccgggttcacgccattctcctgcctcagcctcctgagtagctgggactacaggcgcccaccaccacgcccggvtaattttttgtatttttagtagagacggggtttcactgtgttagccaggatggtctcgatctcctgaccttgtgatccgcccaccttcggctcccaaagt

SEQ ID NO: 102760 - DNA, 201 bp, Homo sapiens
ttttttttagatagagtctcgctctgtcacccaggctggagtgcagtggcatgatctaggcttactgcaacctccgcctcctgggttcaagagattctccygcctcagcctcccaagtagctgggattacaggtggccgccactgcgcccagctaatttttgtatttttagtagacacaaggtttcaccatattggccagg

SEQ ID NO: 102761 - DNA, 201 bp, Homo sapiens
ccatccttggttccagttaaactttatatacagaatcaggcagccatcctgtgggccatattttcttgacttaaaaaaaaaaaaccattgccttaaatatyatttattcaagtagaatccaaatcttgtttgttttctaatactgtttttcaataaaagcaaccagggctccttggagaaatgaccgattccaggactgag

SEQ ID NO: 102762 - DNA, 201 bp, Homo sapiens
tggcatgatctaggcttactgcaacctccgcctcctgggttcaagagattctcctgcctcagcctcccaagtagctgggattacaggtggccgccactgcrcccagctaatttttgtatttttagtagacacaaggtttcaccatattggccaggctggtctcgaactcctgacctcaggtgatccacctgcttcagcctc

SEQ ID NO: 102763 - DNA, 201 bp, Homo sapiens
ccacacctgactaatttttgtatttttagtagaaacggagtttaaccatgttggccaggctggtctcgatctcctgacctcaagtgatccgtctgcctcgrcctcccaaagtgctgcgattacaggcatgagccacaatttatagaataaaaaatgaggctaagggaatgatagtccagcttaaacacacagtcactacta

SEQ ID NO: 102764 - DNA, 201 bp, Homo sapiens
ctcacacctgtaatcccagcactttgggaggccgaggcgggtggatcacttgaggtcaggagttcgagaccagcctggacaacatggtgaaaccccgtctytactaaaaatacaaaaattagccgggcctggtggtgcacgcatggcatgtaatcccagctactcaggaggctgaggcaggacaatcacttgaacccagga

SEQ ID NO: 102765 - DNA, 201 bp, Homo sapiens
atctcggctcactgcaacctccacctcctgggttcaagcaattctcctgcctcagcctccggagtagctgggattacaggtgtgcaccaccatgcctggayaatttttgtattcttagtagagacagggtttcaccatgttggccaggctgatttcgaactcctgacctcgtgatctgcccaccttggcctctcaaagtgc

SEQ ID NO: 102766 - DNA, 201 bp, Homo sapiens
gctcccagggcaggctgatgctatagaaccacggagtgtgctggcttccccaatttccttttttttttccttttcttctgagacggagtctcactctgtcrcccaggctggagtgcagtggcgcgatctccactcactgcaagctccgcctcccaggttcacaccattctcctgcctcagcctcccgagtagctgggacta

SEQ ID NO: 102767 - DNA, 201 bp, Homo sapiens
tctcctgcctcagtctcttgagtagctgggattacaggcatgcactattatgcccagctaattttgtatttttttagtagagactggctttcaccatgttrgccaggctggtcttgaactcctgacctcaggtgatccacctgcctcagcctcccaaagtgctgggattacaggcataagccaccgcacccggcctcaact

SEQ ID NO: 102768 - DNA, 201 bp, Homo sapiens
aaccacggagtgtgctggcttccccaatttccttttttttttccttttcttctgagacggagtctcactctgtcacccaggctggagtgcagtggcgcgakctccactcactgcaagctccgcctcccaggttcacaccattctcctgcctcagcctcccgagtagctgggactacaggtgcccgccaccacactcagcta

SEQ ID NO: 102769 - DNA, 201 bp, Homo sapiens
gaaaccctgtgcttccttagtttaaccacctctttgtggttgaatagtataggttttcaatcaagtcctaggagggtgtcagtttcttgttgtacttaccwggatgtgataggatttcaaacaaggcccaaaagaatgtattttcaggagttgagatgtagccacactttctacatttacaatggcctgaaatgggttaca

SEQ ID NO: 102770 - DNA, 201 bp, Homo sapiens
cggagtgtgctggcttccccaatttccttttttttttccttttcttctgagacggagtctcactctgtcacccaggctggagtgcagtggcgcgatctccrctcactgcaagctccgcctcccaggttcacaccattctcctgcctcagcctcccgagtagctgggactacaggtgcccgccaccacactcagctaatttt

SEQ ID NO: 102771 - DNA, 201 bp, Homo sapiens
aactgaggggaaaggctgatggagatgttctctctcctcacttctgtgatctcagtcctgtccatatgggcagtctgatatggtttggctgtgtccccacmcaaatctcatcttgaattgtagctcccaaaatccccatacgtcgtgggagggacccagcagcaggtaattgaatcacaggggtgggttttccatgctgtt

SEQ ID NO: 102772 - DNA, 201 bp, Homo sapiens
gcaatcttggtagtttcttagtatcccaaagggataaggagtcagcttctcaataaaccttttctggttatgaacactgtatgtattaaataataagcaarccttacagagtttatatgatcacattaagggatctgttaaattccaagagttattgttatgtgtgcaaaatactacagaagcacttgattttgttccaga

SEQ ID NO: 102773 - DNA, 201 bp, Homo sapiens
aatttccttttttttttccttttcttctgagacggagtctcactctgtcacccaggctggagtgcagtggcgcgatctccactcactgcaagctccgcctyccaggttcacaccattctcctgcctcagcctcccgagtagctgggactacaggtgcccgccaccacactcagctaattttttgtatttttagtagagacg

SEQ ID NO: 102774 - DNA, 201 bp, Homo sapiens
aaaacatgcctttgctcctcctttgccttccgccatgactgtgaggcctcctcagacatgtggaactgtgagtccattaaacctcttttctttataaattwcccagtctcgggtatgtctttatcagcagcatgggaatggactaatacactctcctcaccaccagtagtcttccttgactgcctgctgggcaccactgaa

SEQ ID NO: 102775 - DNA, 201 bp, Homo sapiens
cttctgcacagaaaaagaaattaccatcagagtgaacaggcaacctacaaaatgggagaaaattttcgcaacctgctcatctgacaaagggctaatatccrgaatctacaatgaactcaaacaaatttacaagaaaaaaaacaaacaaccccatcaaaaagtgggcgaaggacatgaacagacacttctcaaaagaagaca

SEQ ID NO: 102776 - DNA, 201 bp, Homo sapiens
ggctggagtgcagtggcgcgatctccactcactgcaagctccgcctcccaggttcacaccattctcctgcctcagcctcccgagtagctgggactacaggkgcccgccaccacactcagctaattttttgtatttttagtagagacggggtttcaccgtgttagccaggatggtctcgatctcctgacctcgtgatccgcc

SEQ ID NO: 102777 - DNA, 201 bp, Homo sapiens
aaaccccgtctctactaaaaatacaaaaattagctgggcgtggtggtgggcacctgtaatcccaactactggggaggctgaggcaggagaatcacttgcayctgggaggcagaggttgcagtgagccgagattgcgccattgcactcagcctgggggacaagagcaagactttgtctcaaaaaaaaaacaaatgttgacta

SEQ ID NO: 102778 - DNA, 201 bp, Homo sapiens
ctgcaagctccgcctcccaggttcacaccattctcctgcctcagcctcccgagtagctgggactacaggtgcccgccaccacactcagctaattttttgtrtttttagtagagacggggtttcaccgtgttagccaggatggtctcgatctcctgacctcgtgatccgcccaccttggcttcccaaagtgctgggattata

SEQ ID NO: 102779 - DNA, 201 bp, Homo sapiens
cctcagcctcccgagtagctgggactacaggtgcccgccaccacactcagctaattttttgtatttttagtagagacggggtttcaccgtgttagccaggmtggtctcgatctcctgacctcgtgatccgcccaccttggcttcccaaagtgctgggattataggcgtgagccactgcgcctggcctgagtgtgctggctt

SEQ ID NO: 102780 - DNA, 201 bp, Homo sapiens
gggggccaagtgcggtggctcacgcttgtaatcccagcactttgggaggccgaggtgggcggatcacaaggtcaggagatcaagaccatcctggctaacahggtgaaaccccgtctctactaaaaatacaaaaaattagctgggcgtggtggtgggtgcctgtagtcccagctacttgtgaggctgaggaaggagaatggc

SEQ ID NO: 102781 - DNA, 201 bp, Homo sapiens
  misc_feature (1)...(201): n = A,T,C or G
ggtgatccacctgcctcggcctcccaaagtgcagggattacaggcgtgagcctctgtgttaaaaatactttggagtatataggccaggcacggtggctcangcctgtaatcccagcactttgggaggccaagacaggtggatcatgaggtcaggagctcgagaccagcctggccaaaatggtgaaacccccatctctacta

SEQ ID NO: 102782 - DNA, 201 bp, Homo sapiens
aatcccagctactcaggaggctgaggcaggacaatcacttgaacccaggaggtggagtttgtagtgagccaggatcgcattactgcactccactctgggtracagagtgaaactccaactcaaaaaaataaataaataaataaataaaagcacacagttgcagtgctgcaaaattcctctttctttaagggagaagatgaa

SEQ ID NO: 102783 - DNA, 201 bp, Homo sapiens
tcgaggcgggcagatcacttgagatggtcaggagtttgagaccagcctggccaacatggtgaaacctcatctccactaaaaatacaaaaatcagctgggcrttgtggtgcatgcctgtaatcccagctactcgggaggctaaggcaggagaatcacttaaacctgggaggtggaagttgcagtgagctgagatcgcaccac

SEQ ID NO: 102784 - DNA, 201 bp, Homo sapiens
cactaaaaatacaaaaatcagctgggcattgtggtgcatgcctgtaatcccagctactcgggaggctaaggcaggagaatcacttaaacctgggaggtggmagttgcagtgagctgagatcgcaccacttcactccagcctaggagacagagcgagactgcatctccaaaaacaaacaaacaaaaacaaaaatccaagtat

SEQ ID NO: 102785 - DNA, 201 bp, Homo sapiens
gatggagtctcacactctgtcacccaggctggagtgcagtggtgataccatggtgcactgcagcttctacctcctaggctcaagtgatcctctcgcctcarcctccctagtagctgagactacaggtgtgcaccaccacgcccactaatttttctattttttgcagagacagggtttcaccatgttgttcaggctggtctt

SEQ ID NO: 102786 - DNA, 201 bp, Homo sapiens
ggaatcctccctaactcattctatgaggccagcgtcatcctgataccaaagccgggcaaagacacaacgaaaaaagagaattttagaccaatatccttgaygaacattgatgcaaaaatcctcaataaaatactggcaaaccgaatccagcagcacatcaaaaagcttatccaccatgatcaagtgggcttcatccctggt

SEQ ID NO: 102787 - DNA, 201 bp, Homo sapiens
atttttctattttttgcagagacagggtttcaccatgttgttcaggctggtcttgaactattgggttcaagtgatctgcccaccttggcctcccaaagtgmtggaattacaggtgtgagccaccgtgcccagttgcctcatctaattcttgtttttcaaaataaagctgcagaaacccttgtcttatctttaggctaggtt

SEQ ID NO: 102788 - DNA, 201 bp, Homo sapiens
ctggagtgcagtggcgcgattttggctcactgcaagctctgcctcctgggttcacgccattctcctgcctcagcctcccaagtagctgggactacaggcgmccgccaccacgcccggctaatttttttgtatttttagtagagacgggttttcaccgtgttagccaggatggtctcgatctcctgacctcatgatccgcct

SEQ ID NO: 102789 - DNA, 201 bp, Homo sapiens
tttcatttttaattttaattttttgtgggtacatagtaggtgtatatatttctggggtacttgagatgttttggcataggcatgcaatgcataataatcayatcatggaaaatggggtatccatcccctcaagtatttatcctttgtgttacaaacagcctgattacacacctagttattttaaagggtacaattaaatta

SEQ ID NO: 102790 - DNA, 201 bp, Homo sapiens
ttttgtcatatgagtctaggtggctgttatcaccaaggcagcagtgtgtgtatgtgtgtgcccctctaacttctctgctgcagtgaaaatccctacagtgwagacactgaggctgcctacgttgggctgtccgtatttcttaagggcactaggtgaccttcaagttgaatgcatactggatccacacacccacaacatgag

SEQ ID NO: 102791 - DNA, 201 bp, Homo sapiens
aacaccaaaagcaactgcaacaaaagccaaaattgacaaatgggatctaattaaactcaagagcttctgcacagaaaaagaaattaccatcagagtgaacmggcaacctacaaaatgggagaaaattttcgcaacctgctcatctgacaaagggctaatatccagaatctacaatgaactcaaacaaatttacaagaaaaa

SEQ ID NO: 102792 - DNA, 201 bp, Homo sapiens
acctgtctgtttttatgccagtgccatgctgttttggttgctatagctctgtagtataacttgaaatcaagtagtgtgattcctccagttttgttcttttygcttaggatagttttggctattctgggtcttttgtggttccgtagaaattttaggatgatttttttgctatttctgtgaaggatatcactgttattttga

SEQ ID NO: 102793 - DNA, 201 bp, Homo sapiens
tttggggggttagaacaccgagcagcccccattacaatgcatgcctggaaaagctggttgaaaggttaatccaaatgtgtcacagaccttaataaatttctttttttttttttccaaataatcagactaattgccactaaactgttgcctcagggctagcataaaggctcaataagtatgcactgaatggatgagtactaa

SEQ ID NO: 102794 - DNA, 201 bp, Homo sapiens
tggtggagtctttaggttttaccaatataagatcatatcatctgcaaacaaggccaatttgatttcttctttttcaatttggatgccatcatttgtttctttcttttcttttcttttcttttcttttcttttctttttgaaatggagtcttgctttgtcaccaggctggagtgcagtggcacgatctcagccgcagccacg

SEQ ID NO: 102795 - DNA, 201 bp, Homo sapiens
ggtggagtctttaggttttaccaatataagatcatatcatctgcaaacaaggccaatttgatttcttctttttcaatttggatgccatcatttgtttctttcttttcttttcttttcttttcttttcttttctttttgaaatggagtcttgctttgtcaccaggctggagtgcagtggcacgatctcagccgcagccacgc

SEQ ID NO: 102796 - DNA, 201 bp, Homo sapiens
gtggagtctttaggttttaccaatataagatcatatcatctgcaaacaaggccaatttgatttcttctttttcaatttggatgccatcatttgtttctttcttttcttttcttttcttttcttttcttttctttttgaaatggagtcttgctttgtcaccaggctggagtgcagtggcacgatctcagccgcagccacgcg

SEQ ID NO: 102797 - DNA, 201 bp, Homo sapiens
catgagtgaactcccattcacaattgcttcaaagagaataaaatacctaggaatccaacttacaagggatgtgaaggacctcttcaaggagaactacaaascactgctcaaggaaataaaagaggacacaaacaaatggaagaacattccatgctcatggataggaagaatcaatatcgtgaaaatggccatactgcccaa

SEQ ID NO: 102798 - DNA, 201 bp, Homo sapiens
tggagtctttaggttttaccaatataagatcatatcatctgcaaacaaggccaatttgatttcttctttttcaatttggatgccatcatttgtttctttcttttcttttcttttcttttcttttcttttctttttgaaatggagtcttgctttgtcaccaggctggagtgcagtggcacgatctcagccgcagccacgcgt

SEQ ID NO: 102799 - DNA, 201 bp, Homo sapiens
ctggagtgcagtggcacgatctcagccgcagccacgcgtgatcccaggttcacgccattctcctgcctcagcctcccaagtagctggggctacaggcgccygccaccacacctggctaattttttttttgtatttttagtagagatggggtttcactgtgttaaccaggatggtctcaatctcctgaccttgtgatccgcc

SEQ ID NO: 102800 - DNA, 201 bp, Homo sapiens
ccagttagaatggcaatcattaaaaagtcaggaaacaacaggtgctggagaggatgtggagaaataggaacacttttacactgttggtgagactgtaaacyagttcaaccattgtggaagtcagtgtggtgattcctcagggatctagaactagaaataccatttgacccagccatcccattactgggtatatacccaaag

SEQ ID NO: 102801 - DNA, 201 bp, Homo sapiens
tttgtatttttagtagagatggggtttcactgtgttaaccaggatggtctcaatctcctgaccttgtgatccgcctgcctcggcctcccaaagtgctgggrttacaggcatgagccactgtgcttggccaaaactacaagtttcattctcttgtctgattatgctagctaggactttcagtactatattggttaacagtgg

SEQ ID NO: 102802 - DNA, 201 bp, Homo sapiens
ccatgggtatgatgggtctgataaagtatttggcatctcttttactaggtagatcccactcaccctgagttttttttttttttttttttgagacagagtcbcactctgtcacccaggctggagtacaatggcatgatcttggctcactgcagcctccacctctggggttcaagtgattctcccaccctagcccccgagtag

SEQ ID NO: 102803 - DNA, 201 bp, Homo sapiens
gtccttcattctgctgatacgatgtatcacattggttgatttgtgtatgttgaaccattctagcatccacaggatatttctcacttggtcatgatgaatgrtctttttaatatattgttgaattcagtttgctagtgttttgttgaggatttctgcatcaatattcattagcgatattggcctgtagttttctttttttga

SEQ ID NO: 102804 - DNA, 201 bp, Homo sapiens
ggaaacaacaggtgctggagaggatgtggagaaataggaacacttttacactgttggtgagactgtaaactagttcaaccattgtggaagtcagtgtggtrattcctcagggatctagaactagaaataccatttgacccagccatcccattactgggtatatacccaaaggactataaatcatgctgctataaagacaca

SEQ ID NO: 102805 - DNA, 201 bp, Homo sapiens
tcagcctcctgagtagctgggactacaggtgtgtgccactacgctcagctaatttttgtatttttagtagagacggggtttcatcatgttggtcaggctgrtctcaaactcctgacctcaagtgatctgccctccttggcctcccaaagtgctgggattacaggcgtgagccaccatgcctggccctctcagcattttgaa

SEQ ID NO: 102806 - DNA, 201 bp, Homo sapiens
agaaataggaacacttttacactgttggtgagactgtaaactagttcaaccattgtggaagtcagtgtggtgattcctcagggatctagaactagaaataycatttgacccagccatcccattactgggtatatacccaaaggactataaatcatgctgctataaagacacatgcacacgtatgtttattgcggcattatt

SEQ ID NO: 102807 - DNA, 201 bp, Homo sapiens
gaacacttttacactgttggtgagactgtaaactagttcaaccattgtggaagtcagtgtggtgattcctcagggatctagaactagaaataccatttgayccagccatcccattactgggtatatacccaaaggactataaatcatgctgctataaagacacatgcacacgtatgtttattgcggcattattcacaatag

SEQ ID NO: 102808 - DNA, 201 bp, Homo sapiens
gcagtggcgcgatctccactcattgcaagctccgcctcccaggttcatgccattctcctgcctcagcctcccaagtagctgggactacaggcgcccgccavcacgcccggctaattttttgtatttttagtagaaacggggtttcaccgtgttagccaagatggtctcgatctcctgacctcgtgatccgcccgtctcggc

SEQ ID NO: 102809 - DNA, 201 bp, Homo sapiens
agagcagcctggcgaacatgatgaaaccccgtctctactaaaaatacaaaaattagctgggcgtggtggtgggcacctgtaatcccaactactggggaggytgaggcaggagaatcacttgcacctgggaggcagaggttgcagtgagccgagattgcgccattgcactcagcctgggggacaagagcaagactttgtctc

SEQ ID NO: 102810 - DNA, 201 bp, Homo sapiens
gagctagagacctagaggtaaagcaagatactaggaaaacaagtaaaagggagctattttctgggagactaggaaaaagaagagactaggaaaagtaagtkaagaagctctaactagtagggggccaataaggggcaaacaaaggagagaagctggctgcttagctaaccaagtagagagcctcggatctggaaggaactg

SEQ ID NO: 102811 - DNA, 201 bp, Homo sapiens
ctcctgagtagctgggactacaggtgtgtgccaccacacccagctaattttcgtatttttagtagagacggggtttcaccatgttggccaggatggcctcratctcttgacctcgtgatccgcctgcctcagcctcccaaagtgctgagattacaggagtgagccaccatgcccagccggaaggtgttttaaaattgaaac

SEQ ID NO: 102812 - DNA, 201 bp, Homo sapiens
  misc_feature (1)...(201): n = A,T,C or G
aggcgcccgccaacacgcccggctaattttttgtatttttagtagaaacggggtttcaccgtgttagccaagatggtctcgatctcctgacctcgtgatcngcccgtctcggcctcccaaagtgctaggattacaggcgtgagccaccgcgcccggccgtttctctggttctttaagatgcattgttaggttgcttatttg

SEQ ID NO: 102813 - DNA, 201 bp, Homo sapiens
ttcttttcttctactgttttgggtttggtttgctcttgtttctctggttcttttttttttttttttttttttgagacggagtctcgctgtgtctcccaggytggagtgcagtggcgcgatctccactcattgcaagctccgcctcccaggttcatgccattctcctgcctcagcctcccaagtagctgggactacaggcgc

SEQ ID NO: 102814 - DNA, 201 bp, Homo sapiens
ttttttttttttttttttttgagacggagtctcgctgtgtctcccaggttggagtgcagtggcgcgatctccactcattgcaagctccgcctcccaggttsatgccattctcctgcctcagcctcccaagtagctgggactacaggcgcccgccaacacgcccggctaattttttgtatttttagtagaaacggggtttca

SEQ ID NO: 102815 - DNA, 201 bp, Homo sapiens
tctttaagatgcattgttaggttgcttatttgaagtttttcctcttttttgcaagaagggtaataagccatatttattttaaaacataaatttaaaagtamctacatcaattattattaaattgaaccagcaatatataaaataaataatgcattgagtccaatttcagttgggttcacactagaaaacctaattagtata

SEQ ID NO: 102816 - DNA, 201 bp, Homo sapiens
ttcttttcttttctttttttttgagacgagtttttttcgctcttgttacccagactggagttcaatggcgcgatctcagttcactgcaacctccgcctccygggttcaagcaattctcctgcctcagcctcccaagtagctgggatttcaggcatgtgccaccacacctggctaattttgtatttttagtagagacagagt

SEQ ID NO: 102817 - DNA, 201 bp, Homo sapiens
ggataacttgaggtcaggagtttgagaccagaccagcctggccaatatggcaaaaccttatctctactaaaaatacaaaaaattagccgggtgtggtggcrggcacctgtagtcccagctactcaggaggctgaggcaggagaatcgcttgatcctgggaggcagaggttgcagtgagctgagatcatgccgctgcacagc

SEQ ID NO: 102818 - DNA, 201 bp, Homo sapiens
tgaggtcaggagtttgagaccagaccagcctggccaatatggcaaaaccttatctctactaaaaatacaaaaaattagccgggtgtggtggcaggcacctrtagtcccagctactcaggaggctgaggcaggagaatcgcttgatcctgggaggcagaggttgcagtgagctgagatcatgccgctgcacagcctgggcaa

SEQ ID NO: 102819 - DNA, 201 bp, Homo sapiens
agaccagaccagcctggccaatatggcaaaaccttatctctactaaaaatacaaaaaattagccgggtgtggtggcaggcacctgtagtcccagctactcrggaggctgaggcaggagaatcgcttgatcctgggaggcagaggttgcagtgagctgagatcatgccgctgcacagcctgggcaacagagggagactccct

SEQ ID NO: 102820 - DNA, 201 bp, Homo sapiens
cagctcttcagctgctcttactacttctgcagaggctctaatttatttattatttttttttgagacagagtctcactctgttgctcaggctggagtgcagkggcaaaatctcagctcactgcaaactctgcctgctgggttcaagtgattctcctgctcagcttcccgagtagctgagattacaggcgtgcaccaccatgc

SEQ ID NO: 102821 - DNA, 201 bp, Homo sapiens
ttaaaatcatctttcttttcttttctttttttttgagacgagtttttttcgctcttgttacccagactggagttcaatggcgcgatctcagttcactgcarcctccgcctcctgggttcaagcaattctcctgcctcagcctcccaagtagctgggatttcaggcatgtgccaccacacctggctaattttgtatttttag

SEQ ID NO: 102822 - DNA, 201 bp, Homo sapiens
gcaatctcggttcactgcaagctccgcctcccgggttcacgccattctcctgcctcagcctcctgagtagctgggactacaggcgcccaccaccacgcccvgctaattttttgtatttttagtagagacggggtttcactgtgttagccaggatggtctcgatctcctgaccttgtgatccgcccaccttcggctcccaaa

SEQ ID NO: 102823 - DNA, 201 bp, Homo sapiens
acacaaacaaatggaagaacattccatgctcatggataggaagaatcaatatcgtgaaaatggccatactgcccaaggtaatttacagattcaatgccatycccatcaagctaccaatgactttcttcacagaattggaaaaaactactttaaagttcatatggaaccaaaaaagagcctgcatcgccaagtcaatcctaa

SEQ ID NO: 102824 - DNA, 201 bp, Homo sapiens
tttcgctcttgttacccagactggagttcaatggcgcgatctcagttcactgcaacctccgcctcctgggttcaagcaattctcctgcctcagcctcccargtagctgggatttcaggcatgtgccaccacacctggctaattttgtatttttagtagagacagagtttcactatgttggtcaggctggtcttggactcct

SEQ ID NO: 102825 - DNA, 201 bp, Homo sapiens
tgctagcttctccttcagatctctcacggcacaaaacctctcattataatgatgtgcacattggccagtgcttctatttcctttgccttgcgtgagttagrgacattctgttattctcactggaggtaagaatgattaaaaacatccttgaatttagagtctcaaatgcctttattctcatggttttcatcaatcataata

SEQ ID NO: 102826 - DNA, 201 bp, Homo sapiens
ctttaacaggtggaggatttttcagattctagatgcagcaaggtaagtaacaatgtatttttagtttgactgaacccaagtaagctagaaaaaagagactytgcagttgcctgtccgtttaatttcagtacaacaaatagttaagtttttggcttggacaaattctttccagggctttttttttttttttttttttttttt

SEQ ID NO: 102827 - DNA, 201 bp, Homo sapiens
tttttagtttaaaacagctgaaactacccaggcttggagtctcagttctgaaggctgacttagttcagaagggggatgaatgttcagggcgaccaccccaracaggtgtgcagtaggtcattagctctttttcctctttttgctgaaataggatgacacagtagagtgtgttgttgagaagaccccaaccgttggcaaagt

SEQ ID NO: 102828 - DNA, 201 bp, Homo sapiens
ctaatttttgtatttttagtagaggcggggtttcaccatgttggtcaggttgatctcgaacccttgacctcgtgatccacccgccttggcctcccaaagtvctgggattacaggcgtgagccaccgcgcccggccgaggatgccctttttcaatggttcacctttgggtatttttatatctatgtttgcctagatcattcc

SEQ ID NO: 102829 - DNA, 201 bp, Homo sapiens
catatggaaccaaaaaagagcctgcatcgccaagtcaatcctaagccaaaagaacaaagctggaggcatcacactacctgacttcaaactatactacaagkctacagtaaccaaaacagcatggtactggtaccaaaacagagatatagatcaatggaacagaacagagccctcagaaataacgctgctatctacaactat

SEQ ID NO: 102830 - DNA, 201 bp, Homo sapiens
ggagaactacaaaccactgctcaaggaaataaaagaggacacaaacaaatggaagaacattccatgctcatggataggaagaatcaatatcgtgaaaatgrccatactgcccaaggtaatttacagattcaatgccatccccatcaagctaccaatgactttcttcacagaattggaaaaaactactttaaagttcatatg

SEQ ID NO: 102831 - DNA, 201 bp, Homo sapiens
attctttccagggctttttttttttttttttttttttttttttagtttaaaacagctgaaactacccaggcttggagtctcagttctgaaggctgacttakttcagaagggggatgaatgttcagggcgaccaccccagacaggtgtgcagtaggtcattagctctttttcctctttttgctgaaataggatgacacagta

SEQ ID NO: 102832 - DNA, 201 bp, Homo sapiens
ttccagggctttttttttttttttttttttttttttttagtttaaaacagctgaaactacccaggcttggagtctcagttctgaaggctgacttagttcaraagggggatgaatgttcagggcgaccaccccagacaggtgtgcagtaggtcattagctctttttcctctttttgctgaaataggatgacacagtagagtg

SEQ ID NO: 102833 - DNA, 201 bp, Homo sapiens
aatgcaacctctgcctcccgagttcaagtgattctcctgcctcagcctccctggtagctgggattacaggcatgtgccaccacacccggctaatttttgtrtttttagtagagacggggtttcaccatgttggccaggctggtctcaaactcctgacctcaagtgaaccacccgcctcggcctcccaaagtgttgggatta

SEQ ID NO: 102834 - DNA, 201 bp, Homo sapiens
caaaaaagagcctgcatcgccaagtcaatcctaagccaaaagaacaaagctggaggcatcacactacctgacttcaaactatactacaaggctacagtaamcaaaacagcatggtactggtaccaaaacagagatatagatcaatggaacagaacagagccctcagaaataacgctgctatctacaactatctgatctttg

SEQ ID NO: 102835 - DNA, 201 bp, Homo sapiens
aaatttggttggagatgtagttaagtagccttagcctgtaaactattcatatgtattgtataagtccattttcatactgctataaagaactgcctgagacygggtaatttataaaggaaagaggtttaattgactcacagttctgcatggttgaggaggcctcaggaaactcacaatcatggcagaaagtgaaggaaaagc

SEQ ID NO: 102836 - DNA, 201 bp, Homo sapiens
aaattctaaaatgcatctgaggacctggcactgtggctcatgcctgtaatcccagcactttgagaggccgaggtgggtggatcacttgaggccaggagttygagactagcctggccaacatggcgaaaccccatctctactaaaaatacaaaaattagccaggaatggtggtgggcacctgtaatcccagttactcaggag

SEQ ID NO: 102837 - DNA, 201 bp, Homo sapiens
ggtgcccgccaccacactcagctaattttttgtatttttagtagagacggggtttcaccgtgttagccaggatggtctcgatctcctgacctcgtgatccrcccaccttggcttcccaaagtgctgggattataggcgtgagccactgcgcctggcctgagtgtgctggcttctaacaagatttgcctcttggtaggagga

SEQ ID NO: 102838 - DNA, 201 bp, Homo sapiens
tggttggagatgtagttaagtagccttagcctgtaaactattcatatgtattgtataagtccattttcatactgctataaagaactgcctgagactgggtratttataaaggaaagaggtttaattgactcacagttctgcatggttgaggaggcctcaggaaactcacaatcatggcagaaagtgaaggaaaagcaaggc

SEQ ID NO: 102839 - DNA, 201 bp, Homo sapiens
gttggagatgtagttaagtagccttagcctgtaaactattcatatgtattgtataagtccattttcatactgctataaagaactgcctgagactgggtaayttataaaggaaagaggtttaattgactcacagttctgcatggttgaggaggcctcaggaaactcacaatcatggcagaaagtgaaggaaaagcaaggcat

SEQ ID NO: 102840 - DNA, 201 bp, Homo sapiens
cccggctaattttttgtatttttagtagaaacggggtttcaccgtgttagccaagatggtctcgatctcctgacctcgtgatccgcccgtctcggcctccyaaagtgctaggattacaggcgtgagccaccgcgcccggccgtttctctggttctttaagatgcattgttaggttgcttatttgaagtttttcctcttttt

SEQ ID NO: 102841 - DNA, 201 bp, Homo sapiens
catattcttttcaacatgtggtatggtcagtctaaaaaatttcaaccattctaataggtgttcagtggcatcgcatcatgtttttagcatgcatttccctrttgacttaatgatgttgaactttttttatgtttgccatttgtatgttttctttggtaaagtgtctattcaaatattttgcttattctttaaaaactgatt

SEQ ID NO: 102842 - DNA, 201 bp, Homo sapiens
ctaattattctctagatatcttccttctttctccacagatctatttaggtccacctgaggaaagcgctgcaccgccagtgcctccgcctcgggtgacagcmagaaggcacaaaccaatcacgatttcaaagcgcttgctgcgagaaaggacggttttctatacttcttccctggatgaaagcgaaggtcagtactgaggtt

SEQ ID NO: 102843 - DNA, 201 bp, Homo sapiens; identical to SEQ ID NO: 16144

SEQ ID NO: 102844 - DNA, 201 bp, Homo sapiens
gggactcgaagaggaggagggagacccctgcaaccatcaggcgcgattccttggtggtttgggcccagctgtggccctttaatacagttaatgctcacccytcccttacttgcaacgtaggtgctactattgtctccattttacagacagtgaagccgagaatggcaggaggtctccctgtgtgtctctgatgatgcaggg

SEQ ID NO: 102845 - DNA, 201 bp, Homo sapiens
tgggagactgaggtgggtggatcacttgagctcaggagtttgagactagcaaaacctaatgtctacaaaaagtacaaaaatgaggccgggcatggtggctyaagcctgtaattccagcactttgaaaggccaaggcaggagggtcacttgaggtcaggagttcgaaaacagcctggccaacatggggaaactccgtctcta

SEQ ID NO: 102846 - DNA, 201 bp, Homo sapiens
caatacccaagaggggaagggactcgaagaggaggagggagacccctgcaaccatcaggcgcgattccttggtggtttgggcccagctgtggccctttaayacagttaatgctcacccctcccttacttgcaacgtaggtgctactattgtctccattttacagacagtgaagccgagaatggcaggaggtctccctgtgt

SEQ ID NO: 102847 - DNA, 201 bp, Homo sapiens
tgagacagaatctagctcttgtcgcccaggccagagtgcagtgacacaatctcggctcactgcaacctctgcctcctgggttcaagcaatttccggctaatttttttttttttaagacagactcgctcttgtcgcccaggccagagtgcagtggcacaatctctgctcactgcaacctccgcctcccggggttcaagcaat

SEQ ID NO: 102848 - DNA, 201 bp, Homo sapiens
ggctggtctcgaactactgacctcaggtgatccacttgcttcagcctcccaaagcactgggattacacgcataagccaccgcacctggccctggtttcattttatttatttatttatttatttatttatttatttatttatttatttagagacagtgtctcagtctgtttcccaggctggagtgcagtggcgagatcatgg

SEQ ID NO: 102849 - DNA, 201 bp, Homo sapiens
gctggtctcgaactactgacctcaggtgatccacttgcttcagcctcccaaagcactgggattacacgcataagccaccgcacctggccctggtttcattttatttatttatttatttatttatttatttatttatttatttatttagagacagtgtctcagtctgtttcccaggctggagtgcagtggcgagatcatggc

SEQ ID NO: 102850 - DNA, 201 bp, Homo sapiens
ctggtctcgaactactgacctcaggtgatccacttgcttcagcctcccaaagcactgggattacacgcataagccaccgcacctggccctggtttcattttatttatttatttatttatttatttatttatttatttatttatttagagacagtgtctcagtctgtttcccaggctggagtgcagtggcgagatcatggct

SEQ ID NO: 102851 - DNA, 201 bp, Homo sapiens
tggtctcgaactactgacctcaggtgatccacttgcttcagcctcccaaagcactgggattacacgcataagccaccgcacctggccctggtttcattttatttatttatttatttatttatttatttatttatttatttatttagagacagtgtctcagtctgtttcccaggctggagtgcagtggcgagatcatggctc

SEQ ID NO: 102852 - DNA, 201 bp, Homo sapiens
tgaggcaggagaatcacttgaacccaggagatggagattgcagtgagctgagatcacaccgttgcaccccagcctgggcaagggagtgagaccctgtctcaaaaaaaaaaaaaaaaatgaagcactgtcaccctgtcacctgcctgctacagcgtgggggaaccttgtaaacatgtttctcagacaaaaatcagtcagaca

SEQ ID NO: 102853 - DNA, 201 bp, Homo sapiens
gcctcccaaagtgctgggattataggcgtgagccaccgtgcccagcagagacagggtcttgttctgtggcccaggctggggtgcagtggcaggatctccgytcacagcaacctccaacctcctgggttcaggtgattctcccacctcagcctcctgagtagctgggattacaggcatgcgccaccacacccagctaatttt

SEQ ID NO: 102854 - DNA, 201 bp, Homo sapiens
tgaacgggaggtgtgtcctgggccggaagaccaagtggggcatcattgaaggtcagtgcggggcccctgggtaggatgcaggtggggtcagtttggaaacyagagcagccttgggcaaccttcgcacccatcacagggcacagaaaggtgaagcccactagacaaagagccctggggaatggtccctctttccagctggga

SEQ ID NO: 102855 - DNA, 201 bp, Homo sapiens
gtgctgggattataggcgtgagccaccgtgcccagcagagacagggtcttgttctgtggcccaggctggggtgcagtggcaggatctccgttcacagcaayctccaacctcctgggttcaggtgattctcccacctcagcctcctgagtagctgggattacaggcatgcgccaccacacccagctaattttttatttttcc

SEQ ID NO: 102856 - DNA, 201 bp, Homo sapiens
cagcctgcggcccctggacattgagttcctgcagcggctgtgccggactgtgaatgtggtgcccgtgattgccagggccgacagcctgaccatggaggagygagaggccttcaggcgcagggtgatctggatgcccgggcagggctggggtcagcgggggcagagggcagagtgggcagggtgggctgaggtcacctgtgt

SEQ ID NO: 102857 - DNA, 201 bp, Homo sapiens
cctcggcctcccaaagtgctgggattacaggcgtgtgccaccgcgcccggtcaggtgatgtattattataattattagaaatattctatactatatatatrtatttttttgagacagagtcttgctttgtcactcaggctggagtgcagtggagcgatcttggctcactgcaacttccgcctctcaggttcaagcgattct

SEQ ID NO: 102858 - DNA, 201 bp, Homo sapiens
ctgctgtcatccggttgccactcccagggcaaagcgggctgggcaagtccacgatggtgaacacgctgttcaagtccaaagtgtggaagtcaaacccaccrggcttgggggtgcccacaccccagacgctgcagctgcattcactgacccatggtgagtgagcccctgcccacacctcaccccaccctgccccaccccatc

SEQ ID NO: 102859 - DNA, 201 bp, Homo sapiens
caactcagcctcccaaactgctgggattataggcgtgagccaccgcgcccagccagaaatatactatactattgcctatgatatagcacccatgctatcckcagagggtggttccaggacccccagggataccaaaatcggcagatgctcaagtcctacagtgggcacccatggatacagaggccgagtgtacatataata

SEQ ID NO: 102860 - DNA, 201 bp, Homo sapiens
ccacggcaggacagacccacagtgctacgcgtgcctgggcgtgtggcctcacctttggcagcctgtcgcccctccccatctcttaggtgggcctgataatrgcacctcacagggatgttgtcattgaaaatttgagaaatgctgagtcattaaaagacaaaaatgtgcctggagcggtggctcacacctataatccagggt

SEQ ID NO: 102861 - DNA, 201 bp, Homo sapiens
gagcgatcttggctcactgcaacttccgcctctcaggttcaagcgattctcctgcctcagcctcccaaatagctgggactacagattataccaccacaccyggctaatttttgtatttttagtagagacggggcttcactatgtcgtccaggctggtctcaaactcctgacctcaggtgatccacccaactcagcctccca

SEQ ID NO: 102862 - DNA, 201 bp, Homo sapiens
gctgggacgggagccacttcaccccatacacactccctgaagcccctccaggactccagcctggctgcaaacacccatcctggactttgcctggccctccrggctctgctgggggaagcgacctgagaggcccctgcctgggctgtaggtggggacagggcagacccttgggcagcggagcctctctggatgggtgttgag

SEQ ID NO: 102863 - DNA, 201 bp, Homo sapiens
ctccaggtgggggtcacagcaagtgcagatggagctcagattcttcggttaactgtcaccctctcccctcccccatcacacacaccaggccctgccaggayaaggcagctcctggaagctccaccaggacccacgtccaccaggtgtcacagcaggctgcttctctctctctctgccccccgtgggctcttcgcaccgctc

SEQ ID NO: 102864 - DNA, 201 bp, Homo sapiens
tgcagtgagctatgggattataggtgtgagctatataatacgctatataatataatgggattataagctcagctaattttttagtttttgcagagatggcstttcaccatgttgcccaggctggtctcaaactcctagggctcaagtgatcctcccacctcggcctcctaaagtgctgaaattacaggcaagagctacctc

SEQ ID NO: 102865 - DNA, 201 bp, Homo sapiens
ttttaaaaggatctgtttggctacttacagtgttgacaatacccaagaggggaagggactcgaagaggaggagggagacccctgcaaccatcaggcgcgaktccttggtggtttgggcccagctgtggccctttaatacagttaatgctcacccctcccttacttgcaacgtaggtgctactattgtctccattttacaga

SEQ ID NO: 102866 - DNA, 201 bp, Homo sapiens
acctgtttttaaaaggatctgtttggctacttacagtgttgacaatacccaagaggggaagggactcgaagaggaggagggagacccctgcaaccatcagrcgcgattccttggtggtttgggcccagctgtggccctttaatacagttaatgctcacccctcccttacttgcaacgtaggtgctactattgtctccattt

SEQ ID NO: 102867 - DNA, 201 bp, Homo sapiens
tcaaggtgagcaagaaataacagctcacactaacaacccacagaatcggagaaaatgtctgcgaatcacatacccaataaggggcttgtatcctgaatatrtagagaacattgggccgggcacagtggctcacgcctgtaatcccagcagtttgggaggccgaggcaggcagatcgcttgaggtcaggagttggagaccag

SEQ ID NO: 102868 - DNA, 201 bp, Homo sapiens
ggcctcccaaagtgctgggattacaggcgtgtgccaccgcgcccggtcaggtgatgtattattataattattagaaatattctatactatatatatatatwtttttgagacagagtcttgctttgtcactcaggctggagtgcagtggagcgatcttggctcactgcaacttccgcctctcaggttcaagcgattctcctg

SEQ ID NO: 102869 - DNA, 201 bp, Homo sapiens
aggacccacgtccaccaggtgtcacagcaggctgcttctctctctctctgccccccgtgggctcttcgcaccgctccctcccagccatcttccctgcctgrccttggtctctctctctctgtctccgtcaccttcatgcctgtgccgtctttctcgctctctatcaactctgctgtgtgtccccctggggaaagtgggggc

SEQ ID NO: 102870 - DNA, 201 bp, Homo sapiens
tgctttgacgaggacatcaatgacaaaatcctcaacagcaagttacgggtgagaggctgtggggcgggaggcgggcgaggtgatttccttcccacacatcmtttccatccaaagactcatctttctctacatctcagggaaatgtgcacatattcctagcagatatgattctctactcatccacaagctcaaggtgagcaa

SEQ ID NO: 102871 - DNA, 201 bp, Homo sapiens
tacacactccctgaagcccctccaggactccagcctggctgcaaacacccatcctggactttgcctggccctccaggctctgctgggggaagcgacctgasaggcccctgcctgggctgtaggtggggacagggcagacccttgggcagcggagcctctctggatgggtgttgaggcaccctgcagaaacagctccccaca

SEQ ID NO: 102872 - DNA, 201 bp, Homo sapiens
gggtgatctggatgcccgggcagggctggggtcagcgggggcagagggcagagtgggcagggtgggctgaggtcacctgtgtgggatctccagatccagcrgaacctgaggacccactgcatcgacgtctacccccagatgtgctttgacgaggacatcaatgacaaaatcctcaacagcaagttacgggtgagaggctgt

SEQ ID NO: 102873 - DNA, 201 bp, Homo sapiens
ctgtctcaaaaaaaaaaaaaaaaatgaagcactgtcaccctgtcacctgcctgctacagcgtgggggaaccttgtaaacatgtttctcagacaaaaatcartcagacacaaaaggtcacgtattatgggattccatttatatgaaatgtcccaaataggcataggcaaatctatagagacagaaagtagattggtggtagt

SEQ ID NO: 102874 - DNA, 201 bp, Homo sapiens
acccccagatgtgctttgacgaggacatcaatgacaaaatcctcaacagcaagttacgggtgagaggctgtggggcgggaggcgggcgaggtgatttcctycccacacatcctttccatccaaagactcatctttctctacatctcagggaaatgtgcacatattcctagcagatatgattctctactcatccacaagctc

SEQ ID NO: 102875 - DNA, 201 bp, Homo sapiens
gggctggggtcagcgggggcagagggcagagtgggcagggtgggctgaggtcacctgtgtgggatctccagatccagcagaacctgaggacccactgcatcgacgtctacccccagatgtgctttgacgaggacatcaatgacaaaatcctcaacagcaagttacgggtgagaggctgtggggcgggaggcgggcgaggtg

SEQ ID NO: 102876 - DNA, 201 bp, Homo sapiens
gtggtgcccgtgattgccagggccgacagcctgaccatggaggagcgagaggccttcaggcgcagggtgatctggatgcccgggcagggctggggtcagcrggggcagagggcagagtgggcagggtgggctgaggtcacctgtgtgggatctccagatccagcagaacctgaggacccactgcatcgacgtctaccccca

SEQ ID NO: 102877 - DNA, 201 bp, Homo sapiens
gctgggaccccatcctgggctacatcaacgagcaatacgagcagtacctgcaggaggagatcctcatcacccgccagcgccacatcccagacacccgggtrcactgctgcgtgtactttgtaccacccactgggcactggtgagggggctgcacctgcaaggcgaggaccacctgcacggggcagggaggaggagaagggg

SEQ ID NO: 102878 - DNA, 201 bp, Homo sapiens
gaatggcaggaggtctccctgtgtgtctctgatgatgcagggaagtgggggaaagtaccggggtgacccacaggtcccgggccaaccgggacgattcatcrtcccaagggaggaccgcccagaggacacagaggagaggggtggggctctctgggcacagcacagttctgaggggagggtccacctcccgcctcagctggg

SEQ ID NO: 102879 - DNA, 201 bp, Homo sapiens
cgagaatggcaggaggtctccctgtgtgtctctgatgatgcagggaagtgggggaaagtaccggggtgacccacaggtcccgggccaaccgggacgattcrtcatcccaagggaggaccgcccagaggacacagaggagaggggtggggctctctgggcacagcacagttctgaggggagggtccacctcccgcctcagct

SEQ ID NO: 102880 - DNA, 201 bp, Homo sapiens
gagtgcagtgacacaatctcggctcactgcaacctctgcctcctgggttcaagcaatttccggctaatttttttttttttaagacagactcgctcttgtcrcccaggccagagtgcagtggcacaatctctgctcactgcaacctccgcctcccggggttcaagcaattctcctgcctcagcctcccaagtagctgggatt

SEQ ID NO: 102881 - DNA, 201 bp, Homo sapiens; identical to SEQ ID NO: 16152

SEQ ID NO: 102882 - DNA, 201 bp, Homo sapiens; identical to SEQ ID NO: 16153

SEQ ID NO: 102883 - DNA, 201 bp, Homo sapiens; identical to SEQ ID NO: 16157

SEQ ID NO: 102884 - DNA, 201 bp, Homo sapiens
ctcaggctccccagctctaggagccacctacttgatgtcagaactttggagaactggattagcatggcaggtgagtgcggaaaatggagagtcgtggggcraaatgatttcccaagctctctgcaagcctctcggcttatcagggtaaaagtgggcatcctgctgtggccagaggacccggctcacccatcctccaacacg

SEQ ID NO: 102885 - DNA, 201 bp, Homo sapiens
cagtggagtctatctcggctgcggctgtgttctcaccctgggcagtggcctttgggttaagaatggcacagaaggggctgggtgcggtggctcatggctgtattcccagcactttgggaggctgaggtgggtggatcatttgaggtcaggagttcgagaccagcctggccaacatggtgaaaccccgcctctactaaaaat

SEQ ID NO: 102886 - DNA, 201 bp, Homo sapiens
cccattgtgatcactgcatcacggagttgactggaattcaagaaatggtgttttttcctgtctggatatttggctgtgaacgtaagtactttcctgaggaygcagtggagtctatctcggctgcggctgtgttctcaccctgggcagtggcctttgggttaagaatggcacagaaggggctgggtgcggtggctcatggct

SEQ ID NO: 102887 - DNA, 201 bp, Homo sapiens
cagagaagggcccatggctggccctgaaacagcaggggtggcggaagagcagctgagggagacgtgggctctcccagccccattgtgatcactgcatcacrgagttgactggaattcaagaaatggtgttttttcctgtctggatatttggctgtgaacgtaagtactttcctgaggacgcagtggagtctatctcggctg

SEQ ID NO: 102888 - DNA, 201 bp, Homo sapiens
gtctgggtttttcccccaagaaggaaaagaggccaagaaaggtggaagtaggtagagaagagtgcgagagctgccttgggagggtttagggagaatttcarcccgtattacttcaggaagaaagcgagcttggttgtcacaattctgattaacatgcaggccgggtgctgtggctcatgcctgtaatcccagcactttagg

SEQ ID NO: 102889 - DNA, 201 bp, Homo sapiens
cagtgtcctgcacccgcgcccggctcgccgacgtgtggagtcgggatgtggcgctcggccgcgcatccccggcggagatggcgacggcctggcctagcttkgggctaggagtcgcgccttcgaggaccttggcttagcgagttccttggggggcttctcaacaggtgttagatgaggtggggcgagtggctgtgagttcct

SEQ ID NO: 102890 - DNA, 201 bp, Homo sapiens
ccgtggttctagaatcaccataagagcagaacattgactgtatgatgtaaagtaatacttcagggaacaaaattgttttgagaaggagctaacggaatgcrtcccgaaggccagcttgccccagcagatcacgttggcaataattgaagctagtcatcagcttgcaactccctgtcggctctttacactgtaagcttgtcc

SEQ ID NO: 102891 - DNA, 201 bp, Homo sapiens; identical to SEQ ID NO: 16158

SEQ ID NO: 102892 - DNA, 201 bp, Homo sapiens
gaactcctggctgctgtctggcctgcgctggctgtcctcagtacaggtgggcatctgctgtagggcagggactccaacacgcccaaccagcccttgcctarggctcaggctgtgtgtggacagggactgtggacgtgggaaggtgggactgctcttattcaggctggtcaggaagggctggtccttggcacaccaggacct

SEQ ID NO: 102893 - DNA, 201 bp, Homo sapiens
aaaatgtgatggtatcctttgaagcacaagagtttttcattctgatgacatccactttaagttttctttcttttgttgctttgcttttggtgtcatatctragaaaccactgcctaatcgaaggtcataaagattgatgcctgcattttcttctaacagctttttgatctctttcagttttcaaacttccatggtacttta

SEQ ID NO: 102894 - DNA, 201 bp, Homo sapiens
atttcgtgctgggtttcttctgttgcttcatggggtaggtggtgtgggcactggtagggtgggggctgcaccagggtcaactggctgcctctgcctcctcygcagcaggcctcagcctgttcttccctgtctctgattcagatgtgatctgggctgctgcctgatcccctgcctcatcaatgacttcaaggatgtgacgca

SEQ ID NO: 102895 - DNA, 201 bp, Homo sapiens
gggctgcattttcagatcagacattttccattttgtagcttaatttgaacagtactcgttttattggaaaactattttgcttctgatcgtgtgattgaaasattattcttgtagtttttattacaccctacacaacatggttttgtgggaatgcatgtttgattttgtattggaaggcactgggagaatgggtgtttgaat

SEQ ID NO: 102896 - DNA, 201 bp, Homo sapiens
taggaattgcgatgatcagaagtggggggcagtcatggaactgagccctcaacctgtgggatctgacacggtagcatcagacttgaatgccactagaagaygtccacctggtgtccgctgcagaactgactgcttgcttgttattggggagaaacccccacatgttttgccacagaagtcttttctgttgattgttatggt

SEQ ID NO: 102897 - DNA, 201 bp, Homo sapiens
cgggagccctcctccccgggggaagggtctgggcgccagctctcctcaggtcggggcgtgacctcggaccgtggcgccccctccccgcccccgcccgcggsgcctgggcggtgcatgccgggcaccgtagtccccagcctctcagagcgggttgtggtggggggggtgaccgggcggactacaagtcctagaagcctctgg

SEQ ID NO: 102898 - DNA, 201 bp, Homo sapiens
aagggccgcggggagaggcacccacaaaagactagctaatcctcttacaaggaatccgctcccaagatagtgatttgtagccagtctgtcagaagcgcagrtcgcaagctaggaattgcgatgatcagaagtggggggcagtcatggaactgagccctcaacctgtgggatctgacacggtagcatcagacttgaatgcca

SEQ ID NO: 102899 - DNA, 201 bp, Homo sapiens
gtgggcatcctgctgtggccagaggacccggctcacccatcctccaacacggagtgttccctgctcagtggagctatccctggtgacaactgcagccctgyggcaaccacttccttgttcttccttcttccatgccacgctttgttctgtgccaggcccgatgttttatttctgtattttatgccctctactcagcccccc

SEQ ID NO: 102900 - DNA, 201 bp, Homo sapiens
tgacctcggaccgtggcgccccctccccgcccccgcccgcggcgcctgggcggtgcatgccgggcaccgtagtccccagcctctcagagcgggttgtggtggggggggtgaccgggcggactacaagtcctagaagcctctgggcggtggggtgggcggtgggttggggggtttcgttgtgcgcgcaaagccgcgcggggc

SEQ ID NO: 102901 - DNA, 201 bp, Homo sapiens
tcactcgcttctcctccaccccagggagggcatttatctattcatgaggaatccacctcccatgtcccaaacaactcccattaagcctcaccatcagtcaycaaaactgtggtgcttgggaagtccaggatcaaggcactgccagcatctggcaagggccttcttgctgtgtcatcccatggtggaagggccgcggggaga

SEQ ID NO: 102902 - DNA, 201 bp, Homo sapiens
aattccctggccacctccctgcagggctgtgaagcccatgacaggcctcaccttttctctgctggagcacctgctgtcacagaggcgacagctcctgctgrgcttgcctgtgtattttttataagttcttctcaagtgtcacttgtcttgccaggtagatctgcagctccctgagggcagggaccatgaggtgagtgacct

SEQ ID NO: 102903 - DNA, 201 bp, Homo sapiens
gcggtgccgtcacgacgttcactgcagccttgaactccttgtctccagcgatcctcctgagtacctggaactacaggcatgccccaccatgcccggctaattttttttttttttttttttttgtagagatggcatgtcattattttgcccagctggtctctaactcctgggctcaagtgatcctcttgcctcaccctccca

SEQ ID NO: 102904 - DNA, 201 bp, Homo sapiens
catgttgaccatgctggtttcgaacccctggcctcagttcatctgccagcttcagtctcccaaagtgctgagattagattacaggaataagtccctgcacstggccactgctcccttttcttaaccctgtgccattggaattcactgtgcaggcaggagggtgggagagtcatgctggggtcctagacttatgccccgccc

SEQ ID NO: 102905 - DNA, 201 bp, Homo sapiens; identical to SEQ ID NO: 16151

SEQ ID NO: 102906 - DNA, 201 bp, Homo sapiens
gacccttgggcccaggtactttgttccttagccacaaacaccagcccttcaccctactcagttgcctgagtgggagagaaaagataggccctgtgaaaatytgtctccactttgaggaacatggttccaagggtaaggacatgtttttactcatagaagacacagggaaatatggtagttaaagttgtggcattttatagc

SEQ ID NO: 102907 - DNA, 201 bp, Homo sapiens
taaacagctccttcttaatgttgcctttcaagaagtccttgacaaactgggtgttttctgcccggtcgtgtgcttccttggtcccttccttcaggagctcygagaggtcagccattctgtggagagatgggaggtgtttgtgtgtcaattagcccttcccagctttccagaaaggaccatagagagaagattgagtccaca

SEQ ID NO: 102908 - DNA, 201 bp, Homo sapiens
gctccacgtacttctgggcagccttggggcactgcacctgctcctcccagttttcaccaaagaaatactccatgtccttggtcagcgcctccttccggtgyagctccatggggaagtacaaaggggcaaaggctggatggtccttgttgcgctccatttcctcctcgagggctgagtatgtgaagtaaagtgccgtggtgg

SEQ ID NO: 102909 - DNA, 201 bp, Homo sapiens
tcctctctttggtcttcatgttcaggtccagggcgttcatcctggcccggtagagctgcttgaactgctgggcattgtccacattctcaaacaggtagaaytgggtcccttcccctgtgctggggagtttcagtgctcgctgggccaccttcttcagcacctggccccccgagagatcccccatgtagcgggtgtatgcat

SEQ ID NO: 102910 - DNA, 201 bp, Homo sapiens
gtaaagcggggccggcggttggggcgcggcatggcggggcccgtcctcccctcagggcgctgccgagacctagcgcggccctggggatgtcgaagccgctscggtggcggggcccgggcgggcgccccgctgtgtgccgcggggttgtgcgcccggaatggcagcctgctcgcccgcacgtttttccgtcagggaaggttg

SEQ ID NO: 102911 - DNA, 201 bp, Homo sapiens
gttccttcagacctaaggaactgtagagatatatttttgtggtggaggggggatagagtctcactctgttgcccaggctagagtgcattggcgtgacatakctctttgtagcctagaatccctgggctagaacaatcctcccgcctcagcctcccaagtagctgggaccacaggtgtctatcaccatacctggctaatttt

SEQ ID NO: 102912 - DNA, 201 bp, Homo sapiens
tctgttgcttcatggggtaggtggtgtgggcactggtagggtgggggctgcaccagggtcaactggctgcctctgcctcctccgcagcaggcctcagcctrttcttccctgtctctgattcagatgtgatctgggctgctgcctgatcccctgcctcatcaatgacttcaaggatgtgacgcacacatgccccagctgcaa

SEQ ID NO: 102913 - DNA, 201 bp, Homo sapiens
aaatgtgatctgcagtctcctgggggcttcctgagaccactcggggggctaggatcagaactgttttaataataacacggccatgatttgttaccatgccyctttgtttgtgatggctttcacattgatggtgtaggagcagtgcggaaacaagctgtggggcctgcactgactcaagactggcaccacactgtgctggtc

SEQ ID NO: 102914 - DNA, 201 bp, Homo sapiens
ggcggactacaagtcctagaagcctctgggcggtggggtgggcggtgggttggggggtttcgttgtgcgcgcaaagccgcgcggggctgagggtcttgttstgccggcgcctgtccggacccgggcccctctccgctttcggccggcctcgggcaccgggcttctggaggtaaagcggggccggcggttggggcgcggcat

SEQ ID NO: 102915 - DNA, 201 bp, Homo sapiens
atgcagagcgggcccccccgccttttttttttttttttttttttaatattgatgacgtcttgccatgttgtccaggctggtttcgaactcctgggctcaartaatcctcccgtctcggcctccccgagtgctggaattacaggcctgagccaccacacctggcccagagcccatgttcttgactgcttgtttcatttaaag

SEQ ID NO: 102916 - DNA, 201 bp, Homo sapiens
tgtgttacgtatgtaaatacatctaaagaagaatcacactgtgctactgcttttttattcttcactcactgctatattaaaaccatttttctatgtcaatwaaaatctatatcattggccaggcatggtggctcatgcttgtaattccagcactttgagaggccaaggtgggcaaaatcacctgaggtcaagagttcgaca

SEQ ID NO: 102917 - DNA, 201 bp, Homo sapiens
ctttggccttttcctccagacctggtttgggccttgccattctcttttcagacccaagaagcacagagagtgtttgtcttttacctcggctctgcccctcrtggagcagtgggcacctcctttattcagcacatggaagctgcaggcaaggcagaaatcggcctttcagttttcccagcaaagcagaaagccctgttcctg

SEQ ID NO: 102918 - DNA, 201 bp, Homo sapiens
gggcctctgttacgtggtcacctcacagactgtgcttcagcccagccctggggtgcttgggagaataggcggaacagctacgtggtcagcggccatccctygcaagtaacagtccccctcctaatgaccctcacgctgcatggcccgttacagtggttcagtaagtttttatatccatgccttacttaattctcacaccgc

SEQ ID NO: 102919 - DNA, 201 bp, Homo sapiens
atcagtggagtctcctgctacacctgccccaggaggggagctcaggacacacagacctacctttgtcttgttcagcagcgtagaaagggcatttacgcatrtctcctttcccatcgtgtacagggaacccatcctccaaggtctctctggccagtgtggagccggcctggtccagttcattgaatatctgcaggagcagag

SEQ ID NO: 102920 - DNA, 201 bp, Homo sapiens
ttggccaggatggtctcgatctctggacctcgtaatccgccctcctcagcctcccaaagtgctgggattacaggcgtgagccactgcgcccagccagggaygtgtctttaatccccagcctgtatctggcacggaggatgtgctgagtaactatcagaaggaagcaccatcccccgccctccccttagagggcctctgtta

SEQ ID NO: 102921 - DNA, 201 bp, Homo sapiens
agtgattctcctacctcagcctcctaagtagctgggattacaggcacgtgccaccacgcccagctaatctttgtatttttagtagagacggggtttcaccrtgttggccaggatggtctcgatctctggacctcgtaatccgccctcctcagcctcccaaagtgctgggattacaggcgtgagccactgcgcccagccagg

SEQ ID NO: 102922 - DNA, 201 bp, Homo sapiens
ctgcatcacggagttgactggaattcaagaaatggtgttttttcctgtctggatatttggctgtgaacgtaagtactttcctgaggacgcagtggagtctmtctcggctgcggctgtgttctcaccctgggcagtggcctttgggttaagaatggcacagaaggggctgggtgcggtggctcatggctgtattcccagcac

SEQ ID NO: 102923 - DNA, 201 bp, Homo sapiens
cgctgtctttgtttccaagtgccacaatgcaacaaggctgaatggtgccggaggtctcctggggaagcctaaagcctgaggagaagggcctgggacactgyccagctggccttgtcatccttgtcctggagatctgaggtatttgagctctggaacaaaccctgtggctgggtcgctgtgagggccccaggctgccatctg

SEQ ID NO: 102924 - DNA, 201 bp, Homo sapiens
tcccgccagggagtattccccatgccttggcctctgtactggctgaggctgtgtcatgtgacctaaagaaagccatgatccttttgatcatggatcacttraagagaacttgtgttccttcagacctaaggaactgtagagatatatttttgtggtggaggggggatagagtctcactctgttgcccaggctagagtgcat

SEQ ID NO: 102925 - DNA, 201 bp, Homo sapiens
aggcctgcatctgctgttagcgctgaagagatgaagggtccctgacggcagacaaagcaaaaccaatacagagcctgcagtgcagggtgagggggtccagsagcattctgattctttccttgaaagcagttgtgatgcatttttggtaatactggaccatttttccaggaaacatttcttgtcaccttttcagtgctcctg

SEQ ID NO: 102926 - DNA, 201 bp, Homo sapiens
tttcaccatgttagccaggatggcctcaatctcctgatctgtgatccgcctgccttggcctcccaaagtgctgggattacaggtgtgagccaccgtgaccrgctattttttatattttgagacagattctcagactattgcccgggctggagtgcgacggtgtgatctcggctcactgcaacctccgcctcctgggttcaa

SEQ ID NO: 102927 - DNA, 201 bp, Homo sapiens
acaaaaattaaccaggtgtgggggcaggtgcctgtaattccagctactcaggaggctgaggcaggagaattgcttgaactcgggagttgggggttgcagckagccgagatcgcaccaatggactccagcctgggtgacagagtgagactgtttcaaaacaaacaaaaaagaatggcacaggaggtccacttaggtcaaccc

SEQ ID NO: 102928 - DNA, 201 bp, Homo sapiens
cctacgagattggcttgatgaatttcgtgctgggtttcttctgttgcttcatggggtaggtggtgtgggcactggtagggtgggggctgcaccagggtcarctggctgcctctgcctcctccgcagcaggcctcagcctgttcttccctgtctctgattcagatgtgatctgggctgctgcctgatcccctgcctcatcaa

SEQ ID NO: 102929 - DNA, 201 bp, Homo sapiens
aggctccttgggggactttacctcactgggccctgcttcctgggttctgtccttgcccttcagcttccaaacagggaagagcaggtgactactgagaggtraggatggtggctctgggctaggtggccctgggaaaggtgggggatccccagtgcctggaggcagacccttctgaggatggtcacacgccttgtgcagcat

SEQ ID NO: 102930 - DNA, 201 bp, Homo sapiens; identical to SEQ ID NO: 16154

SEQ ID NO: 102931 - DNA, 201 bp, Homo sapiens; identical to SEQ ID NO: 16155

SEQ ID NO: 102932 - DNA, 201 bp, Homo sapiens; identical to SEQ ID NO: 16156

SEQ ID NO: 102933 - DNA, 201 bp, Homo sapiens
cgtggggcctgatgcctgtgccccactcggtgcaagattctgcccctgcagctctgcctgcgacacagggctcatgcttctgttggagggcgcagtggtgkttggggccatggggttgggctgatgtcttttttattttatttttaattttatttttattttattttttattttatttttatttatctttttttttttgag

SEQ ID NO: 102934 - DNA, 201 bp, Homo sapiens; identical to SEQ ID NO: 16150

SEQ ID NO: 102935 - DNA, 201 bp, Homo sapiens
ctgggattataggtgtgagccaccgcggccagcctttttttttttttttttttttttgagacagggttcttccccactgttgtccatgctagagtgcagcrgtgcaatcatggcttactgcagcctccacctcctgggttgagtgttcctccctcttcagccccccaagtaactgggattataggcgtgagccactgtgtc

SEQ ID NO: 102936 - DNA, 201 bp, Homo sapiens
tttttagtagagatggggtttcaccatgttggccaggctggtctcgaactcctgacctcaggtgatctgcgtgcctcagcctcccaaagtgctgggattayaggtgtgagccaccgcggccagcctttttttttttttttttttttttgagacagggttcttccccactgttgtccatgctagagtgcagcggtgcaatca

SEQ ID NO: 102937 - DNA, 201 bp, Homo sapiens
tggcagcagaatcctcaggaaggcccaggtttgcagggaagtggggtgtgggcgtgtttggaggccagggaaagagtacgggggtgggcttgggaagggtggggggatgagatagtttggaggagtgtgagttacgatccggtggtagatctgggatatggtccaagtccagactcttccctgtcacccttgactgttaga

SEQ ID NO: 102938 - DNA, 201 bp, Homo sapiens
caagtgatcctcctgccttgacttcccaaagtgctgagattacagtcctgagccacagtgcctggcctactgtatactatttctgttttttttgtttttgtttttttttttgagatggagtctcgctctgtcgcccaggctggagtgtactggcgcaatctcggctcactgcaagctccacctcgtgggttcaagtgattc

SEQ ID NO: 102939 - DNA, 201 bp, Homo sapiens
agccgagatcacgccactgcactccagcctggtctctgatgtctgagtcatagagaaatatatacatggccaagcagatggcagtcccaatcatgacgtgmgctcctgttttcccaagcttccagaataagtcttctgtcccagccagcatgagtgaactcagggccagatgttgacttagagttacaggaacttaggcaa

SEQ ID NO: 102940 - DNA, 201 bp, Homo sapiens
atgttggccaggctggtctcgaactcctgacctcaggtgatctgcgtgcctcagcctcccaaagtgctgggattataggtgtgagccaccgcggccagcctttttttttttttttttttttttgagacagggttcttccccactgttgtccatgctagagtgcagcggtgcaatcatggcttactgcagcctccacctcct

SEQ ID NO: 102941 - DNA, 201 bp, Homo sapiens
agaaggatcacttgaggtcaggagtttgagaccatggcaaacatggcgaaaccccgtctctaaaaatacaaaaaaaaaaggccgggcacagtgcctcacayctgtaatcccagcactttgggaggccgaggtaggcggatcacgaggtcgggagatcgagaccatcctggctaacacggtgaaaccccatctgtactaaaa

SEQ ID NO: 102942 - DNA, 201 bp, Homo sapiens
tgtgaacccaggaggcggagcttgcagtgagccaagatcccgccactgcactccagcctgggcgacagtgcgagactccgtctaaaaaaaaaaaaaaaagyaacagtgtcttcttttttctcgtgtacttcctctctcaggctcctgtggcaggccttcagtggtgtgctcttcacccatggcctctcccgtgactcatca

SEQ ID NO: 102943 - DNA, 201 bp, Homo sapiens
tgctgtagttccgtcgcgctgcccaggaatctgcatttagtaggctccccagatcattcccgggcgcagctggggctgagaacctgtcccagtgagggggwtggcgggcccgggggcagggacgttccatagtgtttctgccagtttcttctgtattctggggcctgatgctgggcggggcggtgcccgggcaagttactg

SEQ ID NO: 102944 - DNA, 201 bp, Homo sapiens
gcctggcctagcttggggctaggagtcgcgccttcgaggaccttggcttagcgagttccttggggggcttctcaacaggtgttagatgaggtggggcgagyggctgtgagttcctccaaaggtgggctcaagatcctctgcgtcagaaccacctggggctcttgggaaacgggcagattcctggggcccaccccaggtgtt

SEQ ID NO: 102945 - DNA, 201 bp, Homo sapiens
agcagtgcggaaacaagctgtggggcctgcactgactcaagactggcaccacactgtgctggtcttgttgtaattgagtcttcaccaccacacacacagtacacacacacacacacacacaccagtgttgcatcagaaaaagcagtaaaaatcaactttattaagtcctgacccatgagtccacagctttttaagatcctt

SEQ ID NO: 102946 - DNA, 201 bp, Homo sapiens
atccccggcggagatggcgacggcctggcctagcttggggctaggagtcgcgccttcgaggaccttggcttagcgagttccttggggggcttctcaacagstgttagatgaggtggggcgagtggctgtgagttcctccaaaggtgggctcaagatcctctgcgtcagaaccacctggggctcttgggaaacgggcagatt

SEQ ID NO: 102947 - DNA, 201 bp, Homo sapiens
gcagtgcggaaacaagctgtggggcctgcactgactcaagactggcaccacactgtgctggtcttgttgtaattgagtcttcaccaccacacacacagtacacacacacacacacacacaccagtgttgcatcagaaaaagcagtaaaaatcaactttattaagtcctgacccatgagtccacagctttttaagatccttt

SEQ ID NO: 102948 - DNA, 201 bp, Homo sapiens
gctgaggcaggagaatcgcttgaacccgggaggcggaggctgcagtgagccaagattgcgccactgcactccagcctggtgatagagcgagactctgtctaaaaaaaaaaaaaacctaccacttgtcaagtcttgatgtagtattagtccattgtgcttctctaacagaatacctgagactgggtcattcataaagaagag

SEQ ID NO: 102949 - DNA, 201 bp, Homo sapiens
gaccgatggccgcgtttaaatggcagccaaccgcaagcgaggtaaggagctctcctgcaggcaggacaagctgtggcttagggcgaggttcctgtgtgatmctttttttttttttttttgtccctttcttgtgtgtgaggcttaatttattattacaaaacagtacagaagtctatgaaataaaaaattaaaaatttccct

SEQ ID NO: 102950 - DNA, 201 bp, Homo sapiens
ggcagcagctgtggtggtagttatcattattattattaaactttcagacgtcatcccacaattcttctgatgacaagaatcgacgtaattccagtgaggaragaagtaggccaaactcaggtgatgagaagcgcaaacttagcctgtctgaagggaaggtgaagaagaacatgggagaaggaaagaagagggtgtcttcag

SEQ ID NO: 102951 - DNA, 102 bp, Homo sapiens
trctacggaagccccacatgcatgcactgacccctgtgcgttaaacctgcagcgcctctgggaacaaaggggtgtaccttatctccaggctgaaggcctttt

SEQ ID NO: 102952 - DNA, 201 bp, Homo sapiens
acagagcgagactctgtctcaaaaaataaataaagattatgtgcagaatgaatgatggcagataattgttaattctaggctgggcacagtggctcatgccygtaatcccagcactttgggaggccaagacaggaggattgcttgagcccaggagccggagaccagcctggacaacatagcaagaccttgtctctacttaaa

SEQ ID NO: 102953 - DNA, 201 bp, Homo sapiens
aaagattatgtgcagaatgaatgatggcagataattgttaattctaggctgggcacagtggctcatgcctgtaatcccagcactttgggaggccaagacargaggattgcttgagcccaggagccggagaccagcctggacaacatagcaagaccttgtctctacttaaaaaaataaattttttttttcaatagccaggca

SEQ ID NO: 102954 - DNA, 201 bp, Homo sapiens
attctagaagagggagagctcagtggagagccatgagaaccaagaagactgactgaagagatgggatttgtttttctgtttgtttttttttgttgttgttkttttttttttgaaacggagtctcgctctgtcgcccaggctggagtgcagtggcgcgatcttggctcactacaagctccacctcccgggttcatgccattc

SEQ ID NO: 102955 - DNA, 201 bp, Homo sapiens
catagaaattgtttactaagtattcaccaaatccaaatggagaagcaaacccacaccttctggccccatctttgttctcacctgtatttttattcttatcwttatttatttatttatttatttatttatttatttatttattttttgagatggagtctcgctctgtcgccaggctggaatgcagtggcacgatcttggctc

SEQ ID NO: 102956 - DNA, 201 bp, Homo sapiens; identical to SEQ ID NO: 16172

SEQ ID NO: 102957 - DNA, 201 bp, Homo sapiens
ggagtcctgcttccctcgtcctcggcgagatgggtgggaggagaaggcagcggcggggccggggtgggttttcgggacctccgcgtccggggtgagacggrcttgggagtggcggcgaggtccgcggcagggttggaaccacgaccaatggagccaagcgggccaatagggaggaggagcggggacagactgtcctgccgg

SEQ ID NO: 102958 - DNA, 201 bp, Homo sapiens
acttcaccgtctccctgcagctctgccagcagctcaaggacaaggtgggcccgggccgagcgccttcattaggggaaggacttctaagggtccttgccacrccctcagagcgccccaaccttggggtctggtgtaccccacagcactgcgaggcagcaatgccctgtcctgacatattgtccttgggtgaccttgacatct

SEQ ID NO: 102959 - DNA, 201 bp, Homo sapiens
gcacacagattaggagcatagcctctgaaatacatatactgcctagatttaaatcctttcttctagttttgggacatagggaaagtgacttttgatatatrtattttttaaatctgcttctcccaatgtctgggacgacagcagaatctatttctagggtcattgtgaggagaccacacagagtgcctgtagcagcacatg

SEQ ID NO: 102960 - DNA, 201 bp, Homo sapiens
tgtagcagcacatggcacctgtaaatgatggtggcgatggcggcagcagctgtggtggtagttatcattattattattaaactttcagacgtcatcccacrattcttctgatgacaagaatcgacgtaattccagtgaggagagaagtaggccaaactcaggtgatgagaagcgcaaacttagcctgtctgaagggaaggt

SEQ ID NO: 102961 - DNA, 201 bp, Homo sapiens
aataatctgcaacacagtgctttcactggaggaacttgatttgtggttgctgcagtggtggtgatggttgttctgcttgacttgtttcaagaaaatatackttagacataagactctgagatggttgatagcatgttttgaaagaaatggcaaggcctattgcaaagtccagttaaaccaaatggatatttacaccgtgcc

SEQ ID NO: 102962 - DNA, 201 bp, Homo sapiens
gatagacgattgtggaaataaataatctgcaacacagtgctttcactggaggaacttgatttgtggttgctgcagtggtggtgatggttgttctgcttgasttgtttcaagaaaatatactttagacataagactctgagatggttgatagcatgttttgaaagaaatggcaaggcctattgcaaagtccagttaaaccaa

SEQ ID NO: 102963 - DNA, 201 bp, Homo sapiens
gggcaggtgaagtgggcaatgcagccaagatgatgctgatcgtgaacatggtccaagggagcttcatggccactattgccgaggggctgaccctggcccasgtgacaggccagtcccagcagacactcttggacatcctcaatcagggacagttggccagcatcttcctggaccagaagtgccaaagtgagttgtttttgg

SEQ ID NO: 102964 - DNA, 201 bp, Homo sapiens
ccccgtctctactaaaaatacaaaaattacccgagtgtggtggcacgctcctgtaattccaactactcgggaggatgaggcaggagaatcacgtgaacccrggaggcagaggttgcagtgagccgagattgcgccactgcactccagcctgggcgacagagtgagactccgtctcaaagaaaaaaaaaaatttaatataaa

SEQ ID NO: 102965 - DNA, 201 bp, Homo sapiens
gggacctgggaacagtagccactgggctgggtgggagtgggagctaccatgtctgttgttccttaatgcatggggacacgggaggacgcagagccaacccygcctctccctgcagctgatggacgcagtgatgctgcagctgaccagagcccgaaaccggctcaccacccccgccaccctcaccctccccgagatcgccgc

SEQ ID NO: 102966 - DNA, 201 bp, Homo sapiens
tgaggcaggagaatcgctggaacccaggagacagaggttgcagtgagccaagattgtgccactgcactgcagcctgggctacagagcaagactccgtctcaaaaaaaaaaaaagaagatgataataattctgtttcatgaaggggcaagaattacatgagaatgtatgtataaaataggacttattgtgatgtctagcaca

SEQ ID NO: 102967 - DNA, 201 bp, Homo sapiens
aggacttgaagaaacctcgcggaaagaaatgcttctttgtgaaattttttggaacagaagatcagtgagtagtactcaccaggagtctcccttcgcctttytttctgtgttacctggagtctgagctgctttgaaaatattctaaggatccttagttcagtcttcttataatgtgtaatactggcatctcattctgccttc

SEQ ID NO: 102968 - DNA, 201 bp, Homo sapiens
agactgggcaacagcgtaagactctgtctcaaaaaagataaataaacccaaaggccgggcatggtggctcatgcctataatcccagcactttgggaggccraggcgggtggatcacctgaggtcaggagttcaagaccagcctggccaacatggtgaaaccccatctctactgaaaatacaaaaattagctgggcatggtg

SEQ ID NO: 102969 - DNA, 201 bp, Homo sapiens
aaaggccgggcatggtggctcatgcctataatcccagcactttgggaggccaaggcgggtggatcacctgaggtcaggagttcaagaccagcctggccaayatggtgaaaccccatctctactgaaaatacaaaaattagctgggcatggtggtgcattcctgtaatcccagctacttgggagtctgaggcagtagaatcg

SEQ ID NO: 102970 - DNA, 201 bp, Homo sapiens
catggtggctcatgcctataatcccagcactttgggaggccaaggcgggtggatcacctgaggtcaggagttcaagaccagcctggccaacatggtgaaamcccatctctactgaaaatacaaaaattagctgggcatggtggtgcattcctgtaatcccagctacttgggagtctgaggcagtagaatcgcttgaaccca

SEQ ID NO: 102971 - DNA, 201 bp, Homo sapiens
gcagaagcgccggggaccggacctgcgagatctggccggtgccattcggtcaaagcccaggttgcgatgcagccgacctgtgcggccggctcagccggggktgtctaaaccggactgctggcgttgccccgcgaagaaacggcggggggacttctcctttacaaccgatggcttggcagtgaccagtgcacgcttgggtgc

SEQ ID NO: 102972 - DNA, 201 bp, Homo sapiens
ctctggatgacccctgcttccagatccaggatgccagaaaccatgtgagccaagccatttacctgcttaccagccgggaccagagctaccagttcaagacrggcgctgaggtcctcaaggtgagctgcccccgggcctgactcctgggcctagtcccacgttcttgatccggaatcacacctgggttccaatcccagggcc

SEQ ID NO: 102973 - DNA, 201 bp, Homo sapiens
cctgccgactctgtgtctccatttctacctgtggggtcaggggcaagctggagtgactgttcaccataataattcaggtcacggggcccccagtaagcackcggcacacaccactgccggtagcagcagtgaaagccttcacattaaccgcgtggcacatgtgaagagctgacctgggcacctgacctcatgcttgagttc

SEQ ID NO: 102974 - DNA, 201 bp, Homo sapiens
agcactgcataaaaggggcgtttaagaggtggtgtaaacaggtattgcaaggggattttttagggatgagaactaacttgtgaagacaaagccataagtgrctcctgtagaagctggactgcacctcgcctttaacacttgacatcagggagggggcatgtggtccaggcacatcctgggtgggggcaccattggttactg

SEQ ID NO: 102975 - DNA, 201 bp, Homo sapiens
gctaccatgccggcttgttctcacctttatactctatgcttgtgtgtgtgtttgtgtgtgtgtgtgtgctttttctctgtctgtctccctccccctgccawcttctccccgccctttctccttttctctttctcttagcttcacggcttcagcccaggtcacctgtctatccgaaggctgaaacacaggtgagagggttca

SEQ ID NO: 102976 - DNA, 201 bp, Homo sapiens
aaaacacgttctctggagcaagttagctaaagtcagtttccagtttgtacctttcacatggtcttccccagactaaaaacagtgcatcttttacatgatayttttgtactgtttaaatcactaatgctaccagttatttttggtgaacttgtctctgtagagtggaggagataagggcatattaggtgcaaacaaagggga

SEQ ID NO: 102977 - DNA, 201 bp, Homo sapiens
gtggctcatggctgttatcccagcactttgggaggccaaggtgggcggattacctgaggtcaggagttcaagaccagcctggccaacatggtgaaaccctrtctctacaaaaattagccaggcatgatggtgggtgcctttaatcccagctacttgggaggctgaggtgggagaatcgcttgaacccgggaggtggaggtt

SEQ ID NO: 102978 - DNA, 201 bp, Homo sapiens
ctttttctctgtctgtctccctccccctgccatcttctccccgtcctttctccttttctctttctcttagcttcacggcttcaccccgggtcacctgtctmtgtgaaggctgaaacacatgtgacagcgttcaagattagtcataggctgacatctttaatatacagtatctacatgtatgattttcttttttttttttta

SEQ ID NO: 102979 - DNA, 201 bp, Homo sapiens
aaattattttgtgcttggattctataagctgcatgccattcagggaagccatagaaagccagctgcagcagatttgttcaggttagtgtgacagatcagawaccccagaattgacagctgactactttcactttcatgtgttacacattgatggttgaaattaaaaattacatatcggaggtgtatgttcttctaccttta

SEQ ID NO: 102980 - DNA, 201 bp, Homo sapiens
accccgaatcttatttaaaaaattaaaaaataaagaatcccatagaccaggtgagagacacggcctggatgcaggtgtaaagtaggagcgcgaggcaggaragcagtccacttgagccggtgcacaagggctggccctgggaggggcttagcaagaaagaagggtaggcattccaaagatggagggcacagcccgtgtgag

SEQ ID NO: 102981 - DNA, 201 bp, Homo sapiens
caaagcccaggttgcgatgcagccgacctgtgcggccggctcagccggggttgtctaaaccggactgctggcgttgccccgcgaagaaacggcggggggasttctcctttacaaccgatggcttggcagtgaccagtgcacgcttgggtgcctcccgcggtctgcttctgtgtcccagacaaccgcccgaaccaagacttt

SEQ ID NO: 102982 - DNA, 201 bp, Homo sapiens
ggggactgggatcccctgcagactccatgagtgactgcagagccccgctccatccagcctgggctgggggcttgcgagggcctcatcccacctgcctcccrcagcggatgttcgcccctgccctgccgtccgacctgctggtcaacgtctacatcaacctcaacaagctctgcctcacggtgtaccagctgcatgccctgc

SEQ ID NO: 102983 - DNA, 201 bp, Homo sapiens
gtctgcggctcggcgacttggtgtggtgagtccgagcggccgggccaaccgagacgcgccggggagctacccgcctgggcgcggggttcgctgccggcccyggagctgcctttttatgcgctccaggtcgcggagagaggggaagagaaggtgccggcgcttgcgagcggcgccaggcggaaggggcagtccagtcccggg

SEQ ID NO: 102984 - DNA, 201 bp, Homo sapiens
ccagccattcagtttctttttctttttctttttcttttattttgagacagagtcttgctctgtcgcctcaggctcttgccaccacgcccggctaatttttkttttttttttttttttttttttttttttagtagagacagggtttcaccatgttagccaggatggtctcgatctcctgacctcgtgatctgcccgcctcgg

SEQ ID NO: 102985 - DNA, 201 bp, Homo sapiens
attttgagacagagtcttgctctgtcgcctcaggctcttgccaccacgcccggctaattttttttttttttttttttttttttttttttttagtagagacrgggtttcaccatgttagccaggatggtctcgatctcctgacctcgtgatctgcccgcctcggcctcccaaagtgctgggattacaggtgtgagccactac

SEQ ID NO: 102986 - DNA, 201 bp, Homo sapiens
acctggccaagtttctttttcttttatcgtttccttccctctacttagtttagcttttctttgttctttttcttttttttgagacagagtctcactctgtygcccaggctggagtgcagtggtgtgatctcagctcactgcagcctctgcctcctgggttcaatagatttttgtgcctctgcctcccaagtagcctcccaa

SEQ ID NO: 102987 - DNA, 201 bp, Homo sapiens
tccttagttcagtcttcttataatgtgtaatactggcatctcattctgccttcatacctaaataaaggtgcaatttcttgcagaaattgccctagacaacygtcctaggtctataactaagtcaggcaagaactaggttcatttaccttctaactataacaatcacattgaaacagtttctcacatgtttctttacccaac

SEQ ID NO: 102988 - DNA, 201 bp, Homo sapiens
cagcctcccaaagtgctgggatgacaggcatgaaccaccacaaccagctgcctgtatgattttttttttttttttttttgagacggagtttcgctctgtcrcccaagctggagtacagtggcacgatctcggctcactgcaagcttcgtctcccgggttcactccattctcctgcctcaccctcctgagtagctgggactg

SEQ ID NO: 102989 - DNA, 201 bp, Homo sapiens
tctagggggaaactcggccgatatcctccttggccaggaaaggtgagtgtcttgctactaaaggaagagatctgaagttgggtttgaagaggtggagaatstaagatgcattcctctcagtttctagtattgagttaaattgggctcattcagatggcacttagaattttttttcccctagtatcggttattttttaaaag

SEQ ID NO: 102990 - DNA, 201 bp, Homo sapiens
tcgggaggctgaagcaggagaatggcgtgaacccgggaggcagagcagagctggcagtgagccgagatcacaccactgcactccagtctgggcgacagagyaagactccatctcaaaaaaaaaaaaaagaaaaaagaattccagtttcatttatctattttcttttttactttgcctctgcattctttttttagtggttac

SEQ ID NO: 102991 - DNA, 201 bp, Homo sapiens
aggctgaggcaggtgaggcaggaggattgcttgagcccaggagttcgaggctgcaatgagccatgatcctaccactgcactccagcctgggcaacagagcragaccctgtctcaagaaaaaaaaaaaagacagttaatcttgtaccatttcccattaaatgtaaaaactttgcaaccacacagaagcatttctttccccct

SEQ ID NO: 102992 - DNA, 201 bp, Homo sapiens
gcgttgtgcacataagtatacaattttgcattttacttctgagggtgttgggcccagctatgaaagcttttgtttcggcatttgaggatgccagcagagayttaggaaaataaattgcgtattgagtgggttgaaggagatggactggcttttgcagggcaagtgttgactctttgtgttttctctagggggaaactcggc

SEQ ID NO: 102993 - DNA, 201 bp, Homo sapiens
gagacgcgccggggagctacccgcctgggcgcggggttcgctgccggccctggagctgcctttttatgcgctccaggtcgcggagagaggggaagagaagstgccggcgcttgcgagcggcgccaggcggaaggggcagtccagtcccgggggaccgaggccgagggtggccacgtcgggcaccggctttgatccccgagg

SEQ ID NO: 102994 - DNA, 201 bp, Homo sapiens
catgatggtgggtgcctttaatcccagctacttgggaggctgaggtgggagaatcgcttgaacccgggaggtggaggttgcagtgagccaagatcgcaccrctgcactccagcctgggcaacagaacgagactgtgtctcaaaaaaatccagaagctttatcccaggtctactggacttcctagaacaccaagaaaggaaa

SEQ ID NO: 102995 - DNA, 201 bp, Homo sapiens
tgccggccctggagctgcctttttatgcgctccaggtcgcggagagaggggaagagaaggtgccggcgcttgcgagcggcgccaggcggaaggggcagtcyagtcccgggggaccgaggccgagggtggccacgtcgggcaccggctttgatccccgaggccggccgggtggggtctgcactcggggcccagatactggcg

SEQ ID NO: 102996 - DNA, 201 bp, Homo sapiens
gagacagcataatgctgtcactaaaaaaagaaaaaaggctgggtgcagtggctcacgcccataatcctaacactttgggaggctgaggtgagaggattgcytgataccaaaagttcgagaccagcctagccaacatagcaagacccccccatctctctttttaaataaataaataaataaaaattaaaaactataaaaaca

SEQ ID NO: 102997 - DNA, 201 bp, Homo sapiens
ccactacactgcagcctgggcaacagaacaagacactatctcaaaaaataagtaaagtgtgaggccgggcatggtggctcacgcctgtaatccgagcactytgggaggccgaggtgggcagatcacgaggtcaggagtttgagaccagcctggccaacatggtgaaaccctgtctctactaaaaatacaaaaattagctgg

SEQ ID NO: 102998 - DNA, 201 bp, Homo sapiens
tgagatcgccaagggcttggtaccagacacaagtaggccaaaaccctgaaattccagaatagatgtgacttagtttgctgggttatctgctgtgcctgatragtaccgaatttataaagcacaggtatgcttgttaatattttcccacaggctcattggaataatttgtgtaccaacctagcagaatcatctattctttta

SEQ ID NO: 102999 - DNA, 201 bp, Homo sapiens
aaagagtttccagacaattgtgaaaaagagaccagaatccagaggtgttgcagccagaggagagtccagttaccagggagaaggaagtgacctttggtggsagataactggttttatttcactgttttctggtttcagcctgttaaagatgcagatcctcatttccatcatttcctgctaagccaaacagagaaggtgagt

SEQ ID NO: 103000 - DNA, 201 bp, Homo sapiens
aatacaaaaaattagccgggcgtggtggcgggcacctgtagtcccagctgctccagaggctgaggcaggagaatggcatgaacccgggaggcagagcttgyagtgagccgagatcgcgccactgcactccagcctgggcgacagagcaagactccgtctcaaaaaaaaaaaatagaaaatacaaaaattagctgggtatgg

SEQ ID NO: 103001 - DNA, 201 bp, Homo sapiens
ggctcttggcccttggtcaggggctggccaaggagtgctcctccactgggtcctggcctggccatctgaaaagttaggctctgccggtgtattgcccagarcaactagcccagaagcccccatatgggcccgctaatgagccaagcattgttaagattaaaagtaaatccaggccgggcgcggtggctcacacctgtcatc

SEQ ID NO: 103002 - DNA, 201 bp, Homo sapiens
ctgaggcaggagaataacttgaatgtgggaggcagaggttgcagtgagctgagatcgtgtcactgcactccagcctggcaacagaacaagactccgtctcaaaaaaaaaaaaaaatggcacaatctcggctcactgcaacctccacctcccaggttcaagtgattctcctgcctcagactcccaagtagctgggattacag

SEQ ID NO: 103003 - DNA, 201 bp, Homo sapiens
ctaatgagccaagcattgttaagattaaaagtaaatccaggccgggcgcggtggctcacacctgtcatcccagtactttgggaggctgaggcaggtggatyatgaggttagggattcaagaccagtctgaccaacatggtgaaacctcatctctactaaaaatagaaaaattagctgggcatggtggcgcgtgcctgtaat

SEQ ID NO: 103004 - DNA, 201 bp, Homo sapiens
gtggtagtcatcttattaaactggtgactagcctaatccaagtaaatccaaagaagtccccaaagtaaatgctgaggtttattcttttaaatggggtttgtttttttttttttttaaataaaaagaaatgcacacactcacatagattctttttaaagataaatgggagcatgcgggaagtacttttctatcccttgctta

SEQ ID NO: 103005 - DNA, 201 bp, Homo sapiens
acatcgtaagctgtcagcaccccatgaaattgcatggcagacacatcttcaagctcactccaagaggtagtctccaagtcctgcggatgcagagggaggtyctcccaaggtctgcaaggttatggggtggcctgagccgtgctaggatctcatgagagtttgtggctttggagttggatagatgtgggttccaagcttatg

SEQ ID NO: 103006 - DNA, 201 bp, Homo sapiens
gtgggcggatcacgaggtcaggagatcgagaccatcctggctaacacggtgaaaccccatctctactaaaaatacaaaaaaattagccggacgcggtggcrggcacctgtagtcccagctacttgggaggctgaggcaggagagcggcatgaacccaggaggcggagcttgcagtgagctgtgatcgtgccactgcactcc

SEQ ID NO: 103007 - DNA, 201 bp, Homo sapiens
agctaaaggaccttggtatgggtggccgtcccctccagctctggaaggtgatgagcagccgtggccactcagcaacactccttgagtcctgcccagagagygctgggagaggggaggcctccagaagctgtgacttttctttccaggtgattgtgtccaggggggggcgctttctggaagcccccgtctcagggaatcagc

SEQ ID NO: 103008 - DNA, 201 bp, Homo sapiens
ctgctctatgatcaaagaacatgccctgccctgtattgggttttttttgtttttttgttttttgtttttttgttttttttggagacagagttttgctcttycgcccaggctggagtgcagtgtcgcgatctcggctcaccgcaacctctgcctcccaagttcaagcgattctcatgcctcagcctcttgagtagctgggat

SEQ ID NO: 103009 - DNA, 201 bp, Homo sapiens
cctactcatacccaccacagagcaccagccagtgccaacgccaggctgctatttatctccctatcccaccccctaccccacctaacacatttgcactgccrggaatggacactggaagtgccaggaggaaggaaggctggtttggtggggtagtggggaggtcagggaggcggggccaagggtgtcccacattcccaacac

SEQ ID NO: 103010 - DNA, 201 bp, Homo sapiens
tggaatcgtctccaacttgctaaaaatgggtcacacagtgactgtctggaaccgcactgcagagaaagtaagcattcaggggtggtgcctgttggatcggyggagtctggggtaaccctaagagtggacatctccccctgttgtctcagcgttctgcgtgcaatagaatagaagccaagcttttagtccaggcaggtagag

SEQ ID NO: 103011 - DNA, 201 bp, Homo sapiens
tttcatctgcccttgttttattttttattcatttatttatttatttgagacagttttgctctttttttgtttttgagacagagtctcgctctgtcacccaractggagtgcagtggtgtgatctcagctcactgcaacctccgcctcccaggttcaagctattctcctgcctcaacctcctgagtagctgggattacaggc

SEQ ID NO: 103012 - DNA, 201 bp, Homo sapiens
aaaaagggcagcaaggggactttgccctgggagactggccctgaaccatacacatcatacttttttctgtgacagtcaggggtttcaaaatgcctgtttayatcctgggacagctttagaccatggcataagagaagacccatgtgcatgacgcccctggctctgcaggtagattggccactgctgtttctggcagtctga

SEQ ID NO: 103013 - DNA, 201 bp, Homo sapiens
tgaactttctagtgtaaaatttggagttcactaaagtataaaacaaatagttgatgttaacttcccactttgggtctaacctttgaggggattattatgargactggttaagcctgcagtagcacaagtagtctctttcctcctccttcattagccagctgtctgttaccaggcaatcacgaagaagttgaaaatatgtga

SEQ ID NO: 103014 - DNA, 201 bp, Homo sapiens
agactggagtgcagtggtgtgatctcagctcactgcaacctccgcctcccaggttcaagctattctcctgcctcaacctcctgagtagctgggattacagrcacctgccaccatgcccggctaattttttgtattttttttttttaaagaaggggtttcacgacggtcaccaggctggtcttgatctcctgacctcgtgat

SEQ ID NO: 103015 - DNA, 201 bp, Homo sapiens
atctcccaagaaaaatcaggctgcgggacgacccagtacgctaaacaccgacttgcaaccgaaatctctaaccaccacaatgccttggggaaatgcgtgtsgactcgccacctttgccagctggcagtgactcaacaagagcccgacaccaagtctaagtcaatccttaacactgtggagtctgtgatcgggactgggatc

SEQ ID NO: 103016 - DNA, 201 bp, Homo sapiens; identical to SEQ ID NO: 16169

SEQ ID NO: 103017 - DNA, 201 bp, Homo sapiens
gatccccgaggccggccgggtggggtctgcactcggggcccagatactggcggcccccgtgaagggagccgccggtgccgcgaggcttccccggacgaccrgtccccggggtcttgttggggcttcccagaaagcagaagcgccggggaccggacctgcgagatctggccggtgccattcggtcaaagcccaggttgcgat

SEQ ID NO: 103018 - DNA, 201 bp, Homo sapiens
gaacccccgctgaagtcgtctcaacctgcgacatcactttcgcctgcgtgtcggatcccaaggcggccaaggacgtaaggaccccctccctcccctcagcractccgggtcacagccaggattgctggctggcctcttcccctcctcccctgcacaccaagtgagtgtccacatgtggggggctgaatttcccatcagggg

SEQ ID NO: 103019 - DNA, 201 bp, Homo sapiens
tcgggggcaggtgaagggggcctcccctggagagaggtgggtctgagcagaggtgagggtggacagagaagccctgtctgtggcattcttgggctgtgacsgtgagtctttaccctgggcaggtgaagtgggcaatgcagccaagatgatgctgatcgtgaacatggtccaagggagcttcatggccactattgccgaggg

SEQ ID NO: 103020 - DNA, 201 bp, Homo sapiens
aaagcttctctttgaagtgacttccaagttgcctccaccctgactacaggattcattggcttggaagcagagtttttaggttaatttctcaatgcagctckctgctttcaggtcgtttggatggtatgagcttagactctatactgttaggagttcagaggttaggttctgaaggttaactggtgcattgacctttagtag

SEQ ID NO: 103021 - DNA, 201 bp, Homo sapiens
tgctgcaagggatccgccctgggaagtgctacgtggacatgtcaacagtggacgctgacaccgtcactgagctggcccaggtagcagccttccttgggctkgctctccagcatcttttctatcagagcccaagacccaggcttacaagagtgggcagttaagttactctagagccaaagccagagagggaagaggagaggc

SEQ ID NO: 103022 - DNA, 201 bp, Homo sapiens
agactccacctcaaaaaaaaaaaaaaaattccaagtcagttgggttcctgtgtggagaccccagcgtctcatcactgctgtgattcggcctgtgtgacctrcacatggttagctcctgagtttaggtgtcagctaaaggaccttggtatgggtggccgtcccctccagctctggaaggtgatgagcagccgtggccactca

SEQ ID NO: 103023 - DNA, 201 bp, Homo sapiens
tgagtgggcgctaccagctcccctccttccctctgttccacaggaggcctctctgcgcttcactctgccgggctccggcactgaggggcccgccaagcaaragaacttcatcctaggcagctgtgggtgagcctgggctaggcggaaaccggggaaatgggtaccttggggggtaggaggcatggccatagccctgtcctg

SEQ ID NO: 103024 - DNA, 201 bp, Homo sapiens
gtatattttagaagttcaagtgtggtagtcatcttattaaactggtgactagcctaatccaagtaaatccaaagaagtccccaaagtaaatgctgaggttyattcttttaaatggggtttgtttttttttttttttaaataaaaagaaatgcacacactcacatagattctttttaaagataaatgggagcatgcgggaag

SEQ ID NO: 103025 - DNA, 201 bp, Homo sapiens
tgttgaactagaagctttggaactgaatgtgcctttggtccaggtgccaagcttctatgtttagctgtcactgtatttgtatattttagaagttcaagtgyggtagtcatcttattaaactggtgactagcctaatccaagtaaatccaaagaagtccccaaagtaaatgctgaggtttattcttttaaatggggtttgtt

SEQ ID NO: 103026 - DNA, 201 bp, Homo sapiens
tgttctcctaacatagtgattaattactaggacaggtttgagatggtggcagttacaaagagcatctggctggagatgagtttagtgttcgcatatacccctactcactcctccaccatcttcccctttcagaaaccgagagaggaggtagctgatgataccaataaacttgttatgctttgagatgtatctctgtaacta

SEQ ID NO: 103027 - DNA, 201 bp, Homo sapiens
tgttttctgtttttatacacaccgaagtattaaatagatgccagttatttttgtagaaaacaggagggctacactgctgtattgtagctatgatgatggcraccgcgttttacaaacatttgtgttctcctaacatagtgattaattactaggacaggtttgagatggtggcagttacaaagagcatctggctggagatga

SEQ ID NO: 103028 - DNA, 201 bp, Homo sapiens
tttgaccatgttggccagacttgtcttgaactcctgaccttgtgatccagcctccttggcctcccaaagtgctgggattacaggcatgagccaccacgccyagcctgcagaagctttttaacttgacgtgatcccatttgtccatttttactttagttgcttgtgcttgtagggtattactcaagaagtctttgcccagtc

SEQ ID NO: 103029 - DNA, 201 bp, Homo sapiens
gaagctggctgatcacctgaggtcaggagttcgagaccagcacggccaatgtggcgaaaccctgtctttttactaaaagtacaaaaataagccgggcatgrtggtgagcacctgtaatcccagctacttaggaggctgaggcaggagaatcacttgaacctgggaggtggaggttgcagtaagccgagatcgcgccattgc

SEQ ID NO: 103030 - DNA, 201 bp, Homo sapiens
tgtagtcccagctacttgggaggctgaggtggaaggatcatttaagaccagcctgggcaacatagggaaatcctatgtccaaaaaaaaaaaaaaaaaaaaagcatgttaaatttttcatcagagttgacagcttctcaaatggtcagtttttgttatatacattgttgaggctgtgtgttagaaactttcagattcatgaa

SEQ ID NO: 103031 - DNA, 201 bp, Homo sapiens
gataatctcttatcttaaatgttgggactaattgatattttcatggaaataaatatacacatacacacagtcacatcattcagacttgtgtgtgcatacawgttatgtacattttaaaaataaactattttaggatagggttttttttttttttttttgagacaggatctggctctgtcacccgggttggaatgcagtggc

SEQ ID NO: 103032 - DNA, 201 bp, Homo sapiens
aactttctctgctgagcatgttggtgcttgcctgtagtcccagctacttgggaggctgaggtggaaggatcatttaagaccagcctgggcaacatagggaratcctatgtccaaaaaaaaaaaaaaaaaaaaagcatgttaaatttttcatcagagttgacagcttctcaaatggtcagtttttgttatatacattgttga

SEQ ID NO: 103033 - DNA, 201 bp, Homo sapiens
cccagttaggaggtctcttgatttaaaacagtgcttctcatgggatggaccgtcatcaggagcagcaaaacttgaagaccactgagtaaaaaggctcttttaccctcttttctttgtcttaacattgattgatgatggcaaatagggccaaacttgccagttcttcactgcctccaaccttccttttccccttagacttac

SEQ ID NO: 103034 - DNA, 201 bp, Homo sapiens
tgataatctcttatcttaaatgttgggactaattgatattttcatggaaataaatatacacatacacacagtcacatcattcagacttgtgtgtgcatacrtgttatgtacattttaaaaataaactattttaggatagggttttttttttttttttttgagacaggatctggctctgtcacccgggttggaatgcagtgg

SEQ ID NO: 103035 - DNA, 201 bp, Homo sapiens
tcccagttaggaggtctcttgatttaaaacagtgcttctcatgggatggaccgtcatcaggagcagcaaaacttgaagaccactgagtaaaaaggctcttttaccctcttttctttgtcttaacattgattgatgatggcaaatagggccaaacttgccagttcttcactgcctccaaccttccttttccccttagactta

SEQ ID NO: 103036 - DNA, 201 bp, Homo sapiens
taaatgagttacattcagtttggatagattctcttctgtccatatattataattattcagactggatttctatatatgtaaatgatacaattggttggaartgatcaagatttgtgtgtgtatgaaattcatgtgtttattattccttcaagtttactgtatcttccaactttccatcaaaaaacagctgatataaattta

SEQ ID NO: 103037 - DNA, 201 bp, Homo sapiens
tcacctagtatactctcagattccagcagctgtgaaattgacttaccaagatgcagtaaacttacaggtatgaaaccactgaaaagtttcccattccactrtttttttttggctgtcaattatgagaattccagtattaggggaattaaatgttagaaacgtttacatattgacatactgctgctgtatcgaatttagctc

SEQ ID NO: 103038 - DNA, 201 bp, Homo sapiens
ccttagaatttggattgtaaccttagaagaaggggccactggggaattatttagttccttaaagctcagtgctgtaactttttttttttttttttttttttgagatggagtttcgctcttgttgcccaggctcgagtgcagtggcgtgatctctgctcactgcaacttccgcctcccgggttcaagtgattctcctgcctc

SEQ ID NO: 103039 - DNA, 201 bp, Homo sapiens
ttgcaaaaggtaatttatttcagatcctaaatgagttacattcagtttggatagattctcttctgtccatatattataattattcagactggatttctatwtatgtaaatgatacaattggttggaaatgatcaagatttgtgtgtgtatgaaattcatgtgtttattattccttcaagtttactgtatcttccaactttc

SEQ ID NO: 103040 - DNA, 201 bp, Homo sapiens
cctgaccttgtgatctgcccaccctggcctcccaaagtgctgggattacaggcgtgagccacagcgcccgacccccaacttacattttttttttgactttrtgatgggtttattgggggtattaaatgcgtttagactttatgcgtttatgatgagtttatcaggacataaccacatcttcagtcaaggagtatctatact

SEQ ID NO: 103041 - DNA, 201 bp, Homo sapiens
ggttgtggtgagtagaggttataatagttgaaagctgcttgaaattttattgtggtgcaccaaaaaacaaaaaaacaaaaaaatcaataaaaaaaccccccagacattaggttgtgtgggatggagcatcatattaccaaatcagtgaaaaatctcaccatttgattattgagattgttacctaaaagcaatactaaatgc

SEQ ID NO: 103042 - DNA, 201 bp, Homo sapiens
gaacagcccttacatgtaagtgtttctagaaagtgttgtgtgatccaatgaggctatttgtgtcttaatgtgtggtaaactagctaagtatattcagcttrtttataaaaggacaaattttttaaaccaaaaggaatttatttacaatgtaaattacacctaagtttaagaatccagaccaagtactcattttctttttga

SEQ ID NO: 103043 - DNA, 201 bp, Homo sapiens
gcctcccagctagctgggattacaggcacccgccaccatgcccagctaatttttgtatttttagtagagacagggtttcaccatgttgcccaggatatctrtgttttctttagttgcttgtgcttttggtgtcattttaatgaagtgattctcaaagtatggtccctagaacaacaccatcaacctcacctaagagctatt

SEQ ID NO: 103044 - DNA, 201 bp, Homo sapiens
ttaatggttgttatcgcagtttttgcagctaatcccttacagactaggtatttgggcttgtttccagtcttttgctattacagatagtgtgatgaatggcmtcgtgtttttttttgctagtgtgtccctgagatagattcttagacatggaattgctgggtcaaagagcatgtgcatataattttgctagacattgacaaa

SEQ ID NO: 103045 - DNA, 201 bp, Homo sapiens
ttctaatggacaacaatttgctattctacggacacatttattttgataaatgtttgtgattgtactagtttttcatctcaattgttacatgttgtgggtgkgtaagaggttgtaaaatacatagtgatataaaaattcaccgatcaaattgcagcatttcctccacttcaatatttaacccacagggatatttgagaagaa

SEQ ID NO: 103046 - DNA, 201 bp, Homo sapiens
caaggatcaaattttaaaatttgtgaaaattacaaaagccttaggagattcacatcaagtaggagcagaagattatcagacttgtaggtggatggagactractgagctgtagaaaggattgagggtgaaaaaatgggtgagagttcctcagcttttcatcagtttcaccatttcactttctataatgttataatgagaag

SEQ ID NO: 103047 - DNA, 201 bp, Homo sapiens
cagtttcaccatttcactttctataatgttataatgagaagaaattaggagatgtgaatgaggaaactgggaagtcttaacatttccaaactatctgtttkgtacacttataggaaaccatactctggcttgggcttaggaatttaaaaataataataggtaatattctggtggcctttaatgctttcatgccaaaaacta

SEQ ID NO: 103048 - DNA, 201 bp, Homo sapiens
ctttaccaggttcaaaaacatcctgaagtgagatttatcaaaaagtattcatgggtgaccaaattacaatttaaaacagtgcaaaaactttacgtagactraacaaaatggaaattatcaccagtttatttattcaggactatgctaggcagacaaagtgtttggtctaaagtgggaagcaacttaaattcttcatgaaga

SEQ ID NO: 103049 - DNA, 201 bp, Homo sapiens
tgtcccaggaagggagaacgggcagttcctgcaggtcatgggagggtgagagagcccagttgggtatttcgaagtacgtttatgtggcacttgtgtgttaygtgccaggttctctgttagtagtgaattggacacagaccaaaaagatacagatcatgcatgccccctttatctgactggactagaatgaattcaagttat

SEQ ID NO: 103050 - DNA, 201 bp, Homo sapiens
gagtctttaaaccacagatttaccaaatacaatgcaatatgaaagagactgtccccagagaccttggtcctcactcctgtcctgcagagtctaggcctgctcacttttgctgctgggagttgtcctggatcaggaagtgaatagtctctttgagagccacatttttaaagagtttgggattattggtacagttttttagca

SEQ ID NO: 103051 - DNA, 201 bp, Homo sapiens
agagagcctgatatggatttcttttctttctttgatttagaacttgaatccgggatattgaaggcgaatattatttaactttccaaatttacgtttccatrgttactgtgagtcttgttgtagttcatttattttcctctgcattcagctcatgtggcaagtttgaatgcaagaaggaacatgaattttaatcagtctctt

SEQ ID NO: 103052 - DNA, 201 bp, Homo sapiens
ctttttttttttttttcaatttctgtgttaattacaattaactttagagaagcttgcaatttataacatgtattggggaatctaggacaggcaaatcttgwgtcctcaaaggggagtctttaaaccacagatttaccaaatacaatgcaatatgaaagagactgtccccagagaccttggtcctcactcctgtcctgcaga

SEQ ID NO: 103053 - DNA, 201 bp, Homo sapiens
tatgaagctcttgcttctccatccttacatgctagggtgtgagatggtggactatgcacatcatattagaatcatatcattaccatagtgacactgaattktttctatcttttatgtgtttgggtgagaaagtttgtgaacagttaactagtctgtggttttgtgtaagattctagtatctttagtcaatccacacagtac

SEQ ID NO: 103054 - DNA, 201 bp, Homo sapiens
atgtatatgagtatgtgcggaaatacgcagaacacagaatgttggtagttgcagaacagcccttacatgtaagtgtttctagaaagtgttgtgtgatccartgaggctatttgtgtcttaatgtgtggtaaactagctaagtatattcagcttatttataaaaggacaaattttttaaaccaaaaggaatttatttacaat

SEQ ID NO: 103055 - DNA, 201 bp, Homo sapiens
ctactcttatttatttttaaattttatttttcattttgaaataatttgaccttataaaaagtttgcaaaaatagcacaaataatttatgtgtacgttgcayccagcttccgtgttaatgttttacatttacataatcatattatcaaaaccaagaaattaacattgatcactgattaatatacagagtttatttaagtttc

SEQ ID NO: 103056 - DNA, 201 bp, Homo sapiens
ctaaggttgagtagttacttagtcttattttagtagttatcccttctctttcacaccattccccttctccccaactcctaccccctatgccttcttagttyccacccttacgatattctggcttatcagaccctgttttaaaccatagtgagtttgtgcttttttcttatttaaatgtattttttagggagtgatatggag

SEQ ID NO: 103057 - DNA, 201 bp, Homo sapiens
agtagagacagggtttcaccattttggccaggttggtcttgaactccggacctcaggtgatccacccatctcagcatcccaaagtgctgggattacaggcytgagccaccgcacccagcctactcttatttatttttaaattttatttttcattttgaaataatttgaccttataaaaagtttgcaaaaatagcacaaata

SEQ ID NO: 103058 - DNA, 201 bp, Homo sapiens
aaattagataaaattctttatcagattttaatttactaattaattgaatgaagatgctgtttctttcataactgagtttcatatgattacttttttaggtsaattggcatgattttgctttttttgatcctgtaatgtatgagagtttgcggcaactaatcctcgcgtctcagagttcagatgctgatgctgttttctcag

SEQ ID NO: 103059 - DNA, 201 bp, Homo sapiens
attatgtgtggggggatatatgtattctagaattatttaaatcttatttctctgtgtttgtttttaggattcttggactatgtctgttacagaatgaactmtgtcctatcacattgaatagacatgtaattaaagtattgcttggtagaaaagtaagtgattttgatgaacctaattgtattcacaattgcaaaaattttc

SEQ ID NO: 103060 - DNA, 201 bp, Homo sapiens
tttttttgttttgttttgttttttgaaaaagtgtatgtgctgtactttatgctgaatagaaaggaggctgtagagaatttctcaaaatattaatacgtatkatgtgtggggggatatatgtattctagaattatttaaatcttatttctctgtgtttgtttttaggattcttggactatgtctgttacagaatgaactatg

SEQ ID NO: 103061 - DNA, 201 bp, Homo sapiens; identical to SEQ ID NO: 16193

SEQ ID NO: 103062 - DNA, 201 bp, Homo sapiens
ctgtagttggaacacattaatgctgattagtattgcaggaagaattttattttgaatgttctatcaagagtttttctttatatgatatgaaacacaaattmgttatgttttttgtctttatgcataactgtatgtacacattttatagtgaaagaataacagaaaactattatttcttccagcaagtcctcagccttaaac

SEQ ID NO: 103063 - DNA, 201 bp, Homo sapiens
aaaatagagccaccataggacccagcaatccctattatgtacgtacccagaggagatgaaatcatgcatatctgcacttgggccaggcgcggtggctcackcctgtaatcctagcactttgggaggccaaggcgggtggatcacctgaggtcaggagttcgagaccaatctggccaaagtggtgaaaccccgtctctacta

SEQ ID NO: 103064 - DNA, 201 bp, Homo sapiens
aattgaatttatagtacgcatttctaatgaaagccaacaatttaaaattctttaaaaaagaaccaaatatacttcaaaataaagcagttccactctaaaaycatgtagttgaaatatacaaaagtctgcctctaattttttaaaatactagttataatttttatacattcacttgaaagggttgatgttttgaatgttgca

SEQ ID NO: 103065 - DNA, 201 bp, Homo sapiens
cttcatacattttatctatttgaaatgtcttattaaaaattgtaatcagttgaaaatgatgggaaagcccattgaactactattctttgtagtatctttargtgatttattacacattcttatctttggtgcagtgctactctttaaacttgccttccttcagtttgtgcttgtgagtgtcatctgggagagctgtgggga

SEQ ID NO: 103066 - DNA, 201 bp, Homo sapiens
gcatttcaggactgaggctgggcactatgtcccatgcctgtaatcccagcactttgggaggccaagacaagtagatccgttgagcccaggagtttaagacmagcctgggcaacgtgctaaaacgctgtctctacaaaaaatacaaaaattagctgggtgagatggtgcgcacctgtagttctgtttactcaggaggctaag

SEQ ID NO: 103067 - DNA, 201 bp, Homo sapiens
catcagtcaggaaaacaggcaaaaatgtctgcccctgtggagttcacattctagtgacaagatgttgcatgaaacacttttgaaatatgtagcgtttaatyttcatacattttatctatttgaaatgtcttattaaaaattgtaatcagttgaaaatgatgggaaagcccattgaactactattctttgtagtatctttaa

SEQ ID NO: 103068 - DNA, 201 bp, Homo sapiens
gagcacggtggcgcgatctcggctcactgatcctggctctctgcctcccgggttcaagcgattctcctgcctcagcctcccgggtagctgggactacagaygtgcaccaccacacccggctaatttttgaatttttaatagaaacgaggcttagccatgttggtcaggcatgtcttgaactcctgacctcaggtgatccgc

SEQ ID NO: 103069 - DNA, 201 bp, Homo sapiens
cttgtaaaaaaattggagtaaaatttaagccctttttttcccctagtaaattgaccagaattttcatcataacttaaatataaatgaagattcccataagkcatttaaaaaaaattgacttaaagtttcattcattcattgttagtcaacaaataatttactgagggcttgttttgggccagacacttggactacatcagt

SEQ ID NO: 103070 - DNA, 201 bp, Homo sapiens
tgcggaccatgttctgtggttagagataggttgtctttttagaaaggtgcttgtctctaccatctatatagtacacaatagttgctccaaaaaaaaaaaaatggtataggcaagaccaccactccaagacttaggctttaagatttagatggtttgcctttggagaaatgccagaaatattcttacagtatttctttttct

SEQ ID NO: 103071 - DNA, 201 bp, Homo sapiens
ttctgtgttgctttatagatgtcattactaccaagtaatccttcttgttatataagctttgacagttatactttgcatttagaaattaacaagggctctcyctggtttcagtgagttataccttcataatgtcaacataaacctttgtatgtttaaaaaatttcagtttttgtacttgtgtataaattctctatagactca

SEQ ID NO: 103072 - DNA, 201 bp, Homo sapiens
tccatagttaactattcctttaaaaatgtgtattcttaaattggcaacaggaaggctaccaagttgatccaagttgatactttaccaggttcaaaaacatyctgaagtgagatttatcaaaaagtattcatgggtgaccaaattacaatttaaaacagtgcaaaaactttacgtagactaaacaaaatggaaattatcacc

SEQ ID NO: 103073 - DNA, 201 bp, Homo sapiens
gtattcttaaattggcaacaggaaggctaccaagttgatccaagttgatactttaccaggttcaaaaacatcctgaagtgagatttatcaaaaagtattcrtgggtgaccaaattacaatttaaaacagtgcaaaaactttacgtagactaaacaaaatggaaattatcaccagtttatttattcaggactatgctaggca

SEQ ID NO: 103074 - DNA, 201 bp, Homo sapiens
acacacaggaacttcaaaagagaacaaagggaaatttttagaattaaaagggcaatatctaaaagaaaaaaattcacaggatgcatcaatagctgaatgarggtgttggaggaaagtgtcagtcagcttgaagatagatggaaattaccctttctgaagaacagatagagaaaatattttaaaacaaaaggacagtttcag

SEQ ID NO: 103075 - DNA, 201 bp, Homo sapiens
attgtcgtcaataggttcttggaaactgcaactctaattgaaatgaaaccagttttttcttatcaacattataatgaaatgatgttatttgagaacctgcygtttgtcatttcaaagttacagctaagaacctatcaacggctttaattaattaattttttttttttttgagatggagtcccgctccattgcccgtgctgg

SEQ ID NO: 103076 - DNA, 201 bp, Homo sapiens
ctaatactagtgtaatcttgaatcaaattatagcctgaccacttactggaatatgatgcagcaatttaaaaataaatcgtattgtaaataacgtaaaaaawaaaccaaacaaccaaactgtgaaaattgggtgttctctgtagctaacatttatacaagaagctgcacacagaaaagagactagaaagtaataatggttcc

SEQ ID NO: 103077 - DNA, 201 bp, Homo sapiens
aaagcttttattttatgagaaaagaagagtagtcagtagaaattacattaatagtagcttgagactactatatgcgtttgcatccagtttgtagatgtttrttatatattctcatttgtggttatacatagtaaaattattttaataatttgtgacttactggatattaggaaattggacacaaacttgtctttaaggatt

SEQ ID NO: 103078 - DNA, 201 bp, Homo sapiens
gtaatgaactttgggatctgtgggtataatttttttatttttttgagatggagtcttgctctgttgccaggctggaatgcagtggtgcaatcttgcctcaytacaacccccacctcccgggttcaagcaattctcctgcctccgcctcctgagtagctgagactacaggcacgcaccatgcccagctaatttttgtatttt

SEQ ID NO: 103079 - DNA, 201 bp, Homo sapiens
aaattgcattttggaaacaatatataggggagtttcctaatgaagtataattatttggaagaaaatatgtctgttaggcccaggcacagtggctttcggargcccagcactttcggaggccaaggccagaggattgcttgagcctgggagttggagaacagcctgggcaatacagtgagacctagtctctacaaaaaatac

SEQ ID NO: 103080 - DNA, 201 bp, Homo sapiens
tatcccttttgaggagttcagtgctgttttgattctttctgcttgacatctccctaaccctatgccttatgaactcatgccctgagatattttagggtctycctttagtcccttgtgttgagaaatttcacactgatgtaccttgatgtaggtcctttactcattcattgtattttgggtccaaatatttcatgggtcctt

SEQ ID NO: 103081 - DNA, 201 bp, Homo sapiens
atcagtatatttaagagatgtttatcgcagcactagtcacaatagccaagatagggaatcaaaacttaagtgtcccctcagcagatgactggttaaaaatktggtgtatatatacagtggaatactattcagccataaaaaataatgaaatcttgtcatttgcaacaacatggatgagccaggaggacattacattaagtt

SEQ ID NO: 103082 - DNA, 201 bp, Homo sapiens
gggaggctgaggtgggaggatcatttgagtccaggagtttgaggcctgggcaacatagtaagaccttgtcttttttttttttttttttttttaaaaaaaaaggatatgcataatttaatgtggagaaaggagaactctcatatactgttggtgggaatgtaaattagtacagccattatggaaaacagtatggaggatgct

SEQ ID NO: 103083 - DNA, 201 bp, Homo sapiens
agctactggggaggctgaggtgggaggatcatttgagtccaggagtttgaggcctgggcaacatagtaagaccttgtcttttttttttttttttttttttwaaaaaaaaggatatgcataatttaatgtggagaaaggagaactctcatatactgttggtgggaatgtaaattagtacagccattatggaaaacagtatgg

SEQ ID NO: 103084 - DNA, 201 bp, Homo sapiens
gaaattattaagaataattagtgtataaaggccatatcttgaatcttttcttaccaaatttcttcttgtttggcatgtgcattcttttccttttcctgttkcgaacggagctgaaaataacgtgattgattttgctttaaaggtacatgactgggctgggtgcggtggctcacacctgtaatcccagctctcagggaggca

SEQ ID NO: 103085 - DNA, 201 bp, Homo sapiens
gtatattcgttagagaaaggttattaatgttctttgtcagtgtttctgccttttactgataattttgtctgcttgaactgtcagtatctgatagaagtggwtatggcttctcatcttgaattgtgatccccataatccccacatgtcaagggagggacacgatgggaggtgattggatcatgggggtggtttcccccatgc

SEQ ID NO: 103086 - DNA, 201 bp, Homo sapiens
tcttggtcttcctcatgttcttctgcctattggtcttcgaaccagaaaactttcagcgtttacccactattttgaacattattgatcggccttcattattyatattagtttctttggacagggtatgctctctctttttccccctgctcctctctttgcccctccttccctcctttgtaggatcccttctttgcctattta

SEQ ID NO: 103087 - DNA, 201 bp, Homo sapiens
aggtaacagattctgattaatccttctctggaaatgtcgtgtttgacttcctaaaacctttgcataagcactcaggtggtgtacatgatcatttgtgtaayataaataacaaccagaaagccggaattttaaatatttttctacaacaactgtattatcaaggacagggctaaaataactccattataaatgtttctaatt

SEQ ID NO: 103088 - DNA, 201 bp, Homo sapiens
ttgtgtatcagtttgctttccaaccagcaataaagaaactaaagaagaagagggtgagattaagaactatagcaaggtctttaaagggagttttaggcaawtttgaaaatgtaacagttgttaaagaaaagcaaatcactataaagaatttgtgtgtccttttttttttttttttactttctcagaaggtaaagatgggta

SEQ ID NO: 103089 - DNA, 201 bp, Homo sapiens
aacagtgcaaaaactttacgtagactaaacaaaatggaaattatcaccagtttatttattcaggactatgctaggcagacaaagtgtttggtctaaagtgrgaagcaacttaaattcttcatgaagaaattagtgtctgaattatttcaggtatttcatttcctcagggaaattacaggtgcaaatcaagttggactctga

SEQ ID NO: 103090 - DNA, 201 bp, Homo sapiens
aaatgaggaggagtagtggtttgcgagcaggttctcggagggaccgggataggtaaattttgtatctttgattcaataccacctttttggatgaattagarataggcctgtaaatgaaagaatcttaattatggattattttttagaaaagtaaagttttaattttgaacatatgtatagtaactaagaatagtctgttaa

SEQ ID NO: 103091 - DNA, 201 bp, Homo sapiens
caccacacccggctaatttttgtatttttagtagagacgggatttcaccatgttggcccggctggtctggaacttctgacctcaagtgatccacccacctsggcctcccaaagtggtgggattacaggtgtgagccaccgcacccgacctggttcttgcaattttaatggcaaaactgcaattacttttgtaccaacctaa

SEQ ID NO: 103092 - DNA, 201 bp, Homo sapiens
gctctggttagcttatcaattattcaaaaacctagaatatttagcacatttgaatactaggtttcttattactattactaaaatctaatttggaaataaayatgcctgtaaaaatcagatacattttttgattaggagtcaaactttaccattttcccattattataggaatctcccattattcttcgagatggaaatggt

SEQ ID NO: 103093 - DNA, 201 bp, Homo sapiens
ggtgcgatcttggctcactgcaacctctgcctcctgggttcaagtgattctcctgcctcagtccccccaagtagctgagactacaggcacccaccaccaarcctggctaatttttatatttttcgtagagctggggtttcaccaggtaggctaggctggtcccgaactcctgacctcaagtgatccgcccatctcagcctc

SEQ ID NO: 103094 - DNA, 201 bp, Homo sapiens
gaagagctccctaggcagaaggaacagcacatgtggagaccgtgagagactgctgtgtatttgaggaactaaaagaagcccagaatgcttagactgatgartacatagagtttcaaatcagttgaataatgttcttgtagaaaaggataccttgttaattatcttcaataatgactttggtcatatcatgatcaagtaaat

SEQ ID NO: 103095 - DNA, 201 bp, Homo sapiens
atcccaacactttgggaggccaaggcagaagcatctcttgatcccaggagtttgagaccagcctggacaacgtacgagactctgactctaccaaaaatttwaaaagttaactgcgtgtggtggcatgcacctgtggtcccagctatacttgggagactgagataggaggatctgcttgagcccaggagtttgaggcttcag

SEQ ID NO: 103096 - DNA, 201 bp, Homo sapiens
attcattgcccctttcttccctaaaagagctaatggtctattaaaactacatagacaagtacatcagtgattatcgtgtaatttaagtgtttgagcaaggyatgcataatgttgtaggagcacaaaggggagagatataaatcatactgtgactgtaccaaagacttctttaagaagcgatacccggacagatcagatagg

SEQ ID NO: 103097 - DNA, 201 bp, Homo sapiens
gttgtgctaaggttaaggaagcccatcctagatgatcttcaatgcatttggttgtaaaaataagtgaaaatgacttttatgaagaatatttcaagcaatawacgttctttttttttttcttttttgagacacagttttgctttgtctcctaggctggaggcagtggccggatctcggctcaatgcaacgtccacctcctgg

SEQ ID NO: 103098 - DNA, 201 bp, Homo sapiens
caagaaaggctcttagaaaccatttagtccaacagcctcatgttacagatgaaaatactgaggctctgtgacagaaagtcacctttttttcctctactaamtctagacttactcctttggggaaaaaaaacaaaaacaaaaacctgtcttgaggtatgaatgatccctttcctttttagtacaagaaaatatatttaaaat

SEQ ID NO: 103099 - DNA, 201 bp, Homo sapiens
attacgaagagatggttacttttaactttttacgtgttgcctggtttccagatagcaaagcaggaactcaaaagagttgccctagaatatccttagcattsagagcagaatcgactcttagttctagattagtacttctcagcttggtgtgattttgcaccctccacacacaaccccctccccttattgggcagtgtctgg

SEQ ID NO: 103100 - DNA, 201 bp, Homo sapiens
atgaaatgagtggtttagatcaacttcatctctagagtacctgttttctatttcttttcagattttatagatcctgatacttaacttttttttttttttttctgtccctttatatagaattctagatgagctttcccatacaactgtgcttcaggaaatcttaagtttgtttaggtttcctagtcattctaggaaattgga

SEQ ID NO: 103101 - DNA, 201 bp, Homo sapiens
tatgtggaattttcctgtgagatttgccttttggcattacaacgtattgtgcagtcataaacagtctttattgagattgtcatatcaaaaggatttttctmtaagcttagagtttccctttcaggtgtcataacacaaggtaagatactatagacaggagtttcaaactctgcgctggtagcctagtcatttaacctctta

SEQ ID NO: 103102 - DNA, 201 bp, Homo sapiens
ctgccaccacgcctggctaattttttgtatttttagtagagacagggtttcaccatgttagcctggatgatctcgatttcctgacctcatgatccgcctgycttggcctcccaattctgccgtttttaaaccagtatttcctcagtccagtcagccaacttaaatctcatgagtttctgccttctactgaaagaaaaattt

SEQ ID NO: 103103 - DNA, 201 bp, Homo sapiens
agcctgctgtggtggtgcatgctagctacatgggaggctgaggcgggaggattacttgagcccaggaggttgatgccatagtgagctgtgttcacatcacygcactacagcctggaagacagagtgagacactgtctcacacacacacaaaagcctaagaaggtgggagtaagcctggaataaaatttatatcctttgctt

SEQ ID NO: 103104 - DNA, 201 bp, Homo sapiens
tgggaatcttttgaaatacttactgaaaatactaactactcagagttgtcacatagttcctttaaattctgaaataactttttagttatttaacattttgktatgtggttcttagcctgactttacttcattaaagatcttttggagacattaacataaaattttttggtaaaatttagaaacaggctagtagtgaggata

SEQ ID NO: 103105 - DNA, 201 bp, Homo sapiens
ggcagaagattttaggcttttggtaaatggctgcggtgaagtcaatgtgcaaatgctgatcagttttacctctttcaatgatgaatcaggtaggacatttwaaaaaaatgtttaaagaatgaactatatagataggtcagtcagcattttctgagtttctagttcttaaggcctgtttatagggtttgggaaattgctgta

SEQ ID NO: 103106 - DNA, 201 bp, Homo sapiens
tactgtaggtgttaaagatggatcaagagttagtgagacagactgaggtagaagggcttgtactttttgtgtgtgtgtgtgtgtgagatggagtcttgctytgtcgccaggctggagtgtagtggcacaatctcagctcactgcaacctcttgactccctggttcaagcgattctcctgcctcagcctccccagtagctgg

SEQ ID NO: 103107 - DNA, 201 bp, Homo sapiens
agtttagttagggaatgaaagagatgaacgtgtgtgtacacataggagagatggatactgtaggtgttaaagatggatcaagagttagtgagacagactgmggtagaagggcttgtactttttgtgtgtgtgtgtgtgtgagatggagtcttgctctgtcgccaggctggagtgtagtggcacaatctcagctcactgcaa

SEQ ID NO: 103108 - DNA, 201 bp, Homo sapiens
tttcttatcaacattataatgaaatgatgttatttgagaacctgctgtttgtcatttcaaagttacagctaagaacctatcaacggctttaattaattaawtttttttttttttgagatggagtcccgctccattgcccgtgctggaatgcagtggtgtgatcttggctcactgtaaacctccatctcccaggttcaagtg

SEQ ID NO: 103109 - DNA, 201 bp, Homo sapiens
aggatgacctgactgtggcactgcacttcagcctgggttgacagagtgagaccctgtctcaaaaacaaaacattctcaggctggtgttcctgtttttttttgttttgttttgttttttgaaaaagtgtatgtgctgtactttatgctgaatagaaaggaggctgtagagaatttctcaaaatattaatacgtattatgtgt

SEQ ID NO: 103110 - DNA, 201 bp, Homo sapiens
ttgctatatttgcaaaatatgtgtgtatataaataactttgaactatttgaaagttgcagtcattgtaatacttcatttttaaatgcatgtgcttgtatcktctaagtatgaacctttttctatatagccactttaccattatcacactttataggaaattaacaaaaattccctaatatcatccaatactcagtgtatat

SEQ ID NO: 103111 - DNA, 201 bp, Homo sapiens
ttgtatttttttcttcctaatgagttaggaatttagattagatacactcctagagatgtataagctggtaggctgggcactagagctaaacagccacttcyagagccttttaatggtccaagccaaagactgttgagagaactgtattttctttgctgatgctcttttcttctctggattttatgtactgttcgtttattc

SEQ ID NO: 103112 - DNA, 201 bp, Homo sapiens
agggaatcctagcgatgatcctgagcctttgccagcacatcggcaggcacttggagagaggctttatcctcgtgtacaagcaatgcaaccagtgtgtactstgtacttagttacctcttaactggctgtgttatttttttgcttttgaattaaagatggtgtttaaaaaaaattgtcagctactggcaaaaccacatgatt

SEQ ID NO: 103113 - DNA, 201 bp, Homo sapiens
aatgtttgaaattggttagatacattagcgacctttttagtgtgtttttgcttgtatttcctctgacttttgctcctgttcatattatacaaatacttcamgtaaaatgactcacttgtctttttaaaggacgcgagaactcttggaactgggtattgataatgaagattcagaacatgaaaatgatgatgacaccaatca

SEQ ID NO: 103114 - DNA, 201 bp, Homo sapiens
ttgcagatgacttattacatgagaattatttagcaggttaagccaagttacattgaggcaacttttatctaaatttttagaatgtagaggagaaaaatcamttagtgaggtgttatatgtttttggaaggtaaataagctttttttgccataaagtttttaattggctaaatgaagggagaaattgaggacaaagtgttaa

SEQ ID NO: 103115 - DNA, 201 bp, Homo sapiens; identical to SEQ ID NO: 16205

SEQ ID NO: 103116 - DNA, 201 bp, Homo sapiens
ttagcaaaaccgttgttaatattgatgcaaaatagatttaatcaagaaaatgagaattaccagttacagctcccaaatatcagaacgctagcaattaatasaatgaaaagagaaaatatcccaactccagacttttctccaaaagttttaatatcacactttggggtctagtggagtttatttgtgggttgcagttatttc

SEQ ID NO: 103117 - DNA, 201 bp, Homo sapiens
gaagtaaaaaccaaggattggcagactatggcccaaaggccgaatccagccactcctattcatttatgcattgtatgtggctgctttcctgtttcagttgyagagctgagttagttgagaaagctaaaaatatttacttgtccttaacagaaagtttaccctcccttctctattcctgtcgattgtatgttctgcttaaag

SEQ ID NO: 103118 - DNA, 201 bp, Homo sapiens
ttctttgagacaggttcttgctctgctgcccaggatggagtgcagtggcaccatcactgtacgctgcagcatcaacctcccaggctgaagagattctcccwctttggcctctgaagtagaggtggggtctcactatggtgcctaggctgatcttaaactcttgggctctagggattctcccgcctcggcctcccaaattgt

SEQ ID NO: 103119 - DNA, 201 bp, Homo sapiens
ttgcagagcagggctagataccccataggcagtgtaccctattgtctatgtgcttatgtgccccataggcagggtagcccagaatattcttttactgtgtcttcttcattgttgttttgtaccaaatgaatctgcttaattacaggtccttccacagagccatctgtagtagaatccaaggatcgaaaggcgaatgctcat

SEQ ID NO: 103120 - DNA, 201 bp, Homo sapiens
aggctgatcttaaactcttgggctctagggattctcccgcctcggcctcccaaattgttgggattacaggggtgagccaccacacccagcctcgatattcrttgtcttttaattggtctgtgtatatgtttctttgtttctcactgacgtgtatgtacgttttgttgaatttctcaacattgctttccctagacctcatga

SEQ ID NO: 103121 - DNA, 201 bp, Homo sapiens
tcccttacaataaaaattttaaattaagtaacaaaatctagataatctttatttcctaaccatcatctgttttggcactctaccacctaggtaccataacygaacaacctatatgctctggttttctaacttttttactagttgtgctaatatttttacttgttagtcaaaggaaatgaagtcataatagttttccttctc

SEQ ID NO: 103122 - DNA, 201 bp, Homo sapiens
ccgatgtcctttagcacactgcttctcaaactttaatatgtatgaaaatgacttggggctcttattaaaatatagatgcccactctagaggtcttgaggtkgggcctccaacttcgtatgcctttcaagttctcaggtgatgccaattctgctggtttaggggtcagacttttcagtaataatgctgtagatctttggcaa

SEQ ID NO: 103123 - DNA, 201 bp, Homo sapiens
gtattgtcagattaacatcctatgactagcagtggcttagcttcaaaagatgtggaagcaataggccagtttgtgcacttgttaaatttacagggatgttyggagaccatttttccaagagattaatggttggtgagggttttggctttgtcaacttttgtttccttatgcactctcctgactgcagggatgaggaaataa

SEQ ID NO: 103124 - DNA, 201 bp, Homo sapiens
attaatattgatactcccaattcaaattcaggatttaggaccacaaggttgtttttgttatgtttgcttcttagatttctttcttttttttttttttttttttggagacagtcttgctttgtcgccctggccagagcatagtggcatgatcttggctcactgcaacctccgcctcctgggttcaggtgactctactgcttc

SEQ ID NO: 103125 - DNA, 201 bp, Homo sapiens
aaagttaggcaacttctccagtgtaacacagctaattaaagtttagacgctggacttaccttgacagatacttccttttttttttgtattctcctgaatartagatggcagagtagagaggaagactacttggtgcttgctcatagtgttgagccaccacacagttaaccaacactgaaccaggctttatagtgtagagtg

SEQ ID NO: 103126 - DNA, 201 bp, Homo sapiens
accaatggagccagggcccaagaaaatgttgaggttctttctttgttcatcatcctgattttttattgctgggcagtaaaccaacccaaacttaatgggtraaacaacaatcatatattattattatctcttctgggaattgacagtacttggtaggtggttcttactctatgtttctcatgtagttgcagtcaaatgctg

SEQ ID NO: 103127 - DNA, 201 bp, Homo sapiens
aattaatattgatactcccaattcaaattcaggatttaggaccacaaggttgtttttgttatgtttgcttcttagatttctttcttttttttttttttttttttggagacagtcttgctttgtcgccctggccagagcatagtggcatgatcttggctcactgcaacctccgcctcctgggttcaggtgactctactgctt

SEQ ID NO: 103128 - DNA, 201 bp, Homo sapiens
taaaaaatcaaataatgaattaatattgatactcccaattcaaattcaggatttaggaccacaaggttgtttttgttatgtttgcttcttagatttctttyttttttttttttttttttttggagacagtcttgctttgtcgccctggccagagcatagtggcatgatcttggctcactgcaacctccgcctcctgggttc

SEQ ID NO: 103129 - DNA, 201 bp, Homo sapiens
gtatttgctaagaccctttgtttttattgttcagtacagcgttaaaaatatatatccatgtctagttaccatttatagacttgctattagcagctcagctraggggaaactgaataactagaaagagtagaactttctagatttgtgattcacacttatctgtgctccttttccaagtttgtaattctcttacaagaggta

SEQ ID NO: 103130 - DNA, 201 bp, Homo sapiens
ttaaaataggaaacctaagaatctggttaaacttcatgcttgagatagtttggcctggcctgattatcatctttattttttccttttttttttttttttttaaagagacagagtctgactctgtcacccaggctggaatgtgatggtgcgatcaaagctcactgcaaccttgaattcacgggctcaagtaatcttcctgcc

SEQ ID NO: 103131 - DNA, 201 bp, Homo sapiens
tgttgcccaggccggagtgcagtggcgtgatctcggctcattccagcctccacctcccagtttcaagcagttctcctgcctcagcctcccagctagctggsattacaggcacccgccaccatgcccagctaatttttgtatttttagtagagacagggtttcaccatgttgcccaggatatctgtgttttctttagttgct

SEQ ID NO: 103132 - DNA, 201 bp, Homo sapiens
aagtatataatttgggaagattttgtcccattctctgggatatcttttcactttcttggtggtatccttgaaagtacaattttaattttcgtaaattccartgtatatctgggtgtttgtttgtttgtttgtttgttttttgagacagggtctcgctctgttgcccaggccggagtgcagtggcgtgatctcggctcattc

SEQ ID NO: 103133 - DNA, 201 bp, Homo sapiens
tttcatgggctaactggccactcgtatatcttcttaggagaaatgtcttatttggatcctcccgtcgccaccaccccctccatctttttttttttttttttaaatagagtttcactcttgttgtccaggatggagtgcagtggtgtgatcttgggtcactgcaacctctgcctcccgggctcaagtgattctcctgcctca

SEQ ID NO: 103134 - DNA, 201 bp, Homo sapiens
tttctccagcttttctggtcattaaataatgaatgaattttaaagtttctttaaaagatttttattttcttgcctttttttttttttttttttttttaaawtgggtctcattctgtcaccaggctggatattccagtggtgcagtcagagctctttgcagccttgacctcctgagctcctacctcagccccctgagtagct

SEQ ID NO: 103135 - DNA, 201 bp, Homo sapiens
aatggcaaatatattatttgagacagtaacatttacattgcagaatcttctagagtgtttttattccaaaaaatacatcataaatcttataaaatagatawgctcttgaacatagcctctaaaagtaatttttgtgaatgactttttaaaaaaggttccttataaaattaaaaatgtattgacatggaaaaacacatttat

SEQ ID NO: 103136 - DNA, 201 bp, Homo sapiens
aaaagtaggtgattatacattgtaactaggatcagattagtcttttgagaagtatatctacagaatgttcctgagtgtattatgcagcggaggtctcaggycccctgtagtggggtatactaggagaaaattgccataggcctagagggaatcatggtgaatgtttagactgtgtcttaaactaaatgcaacagtctttca

SEQ ID NO: 103137 - DNA, 201 bp, Homo sapiens
ccatctaccgtaccattaagtaattgtataggacaaatgaaaaattttaatagatattaaaagaattctggttggtattttttgttttccttattttaagyacctaaaggtgtgataatctgttgttattgattgttttccaagtgtactagatgccagggtggtggtgaatagtcctgacagtgttcacatccctatcag

SEQ ID NO: 103138 - DNA, 201 bp, Homo sapiens
ggtgggcggatcatctgaggtcagaagtttgagaccagcctggccaacatggtgaaaccccatctctactaaaaatacaaaaattagctgggcatggtggygcatgcctgtagttgcagctactcaagaggctgaggcaggagaattgcttgaacctgggaggtggaggttgcagtgagccaagattgcgccactgcactc

SEQ ID NO: 103139 - DNA, 201 bp, Homo sapiens
gtttaaatgaatttgcttaagtaagattaacagcagggtgtagaatagccaagcaaaatagaaaatcaaaacaaaggcagagcaattttataaatcaggawatctgtgactgaatcataggcctaggaataaacagacacttgtgaagaaaattacaggatacacaggaatacgactaggaataataggtgaaattaggaa

SEQ ID NO: 103140 - DNA, 201 bp, Homo sapiens
atacatatttattttgttttttgagtctcgctcttgcccacgctggaatgcagtggtgccattttggcacaatcttggctcactgcaacctccgcctcccrggttcaagcgattctgctgcctcagcctcctgagtagctgggagtacaggcgcacgccaccatacctggctaatttttgtatttttagtagagatggggt

SEQ ID NO: 103141 - DNA, 201 bp, Homo sapiens
cattttttattgtaacatacacataacgtaaaatttgcacataacataaaacttacattgtaaccatattaaactgttacatttactttaaaaaataccaraattttggactatgaacttgtttttgtgtggcattaaaattttataaaagaggtagtaggaattttggattgagcaggttaaaggtctgttaccctaatc

SEQ ID NO: 103142 - DNA, 201 bp, Homo sapiens; identical to SEQ ID NO: 16204

SEQ ID NO: 103143 - DNA, 201 bp, Homo sapiens
ctctttctccagcttttctggtcattaaataatgaatgaattttaaagtttctttaaaagatttttattttcttgcctttttttttttttttttttttttwaattgggtctcattctgtcaccaggctggatattccagtggtgcagtcagagctctttgcagccttgacctcctgagctcctacctcagccccctgagta

SEQ ID NO: 103144 - DNA, 201 bp, Homo sapiens
agcatcgttgacgtggacatatttatttaacaaatggagattctggttcatggtgaaagtttgaactagaggtggatctgggagtcacctaaatggagatrgacattggactttaaggagaggaggtaaaatgaaagacgaagataagacatagcccagggatttatccgtatgtagaatacagaaggaataagggaggaa

SEQ ID NO: 103145 - DNA, 201 bp, Homo sapiens
ctcactacaacccccacctcccgggttcaagcaattctcctgcctccgcctcctgagtagctgagactacaggcacgcaccatgcccagctaatttttgtrtttttagtagagtcggggtctcaccatgttggccaggatggtcttgatctcttgaccttgtgatccgcccatctccgtctcggcctcccagagtgttgga

SEQ ID NO: 103146 - DNA, 201 bp, Homo sapiens
ctcctgagtagctgggattacaggcgcgcaccaccacacccatctaatttttgtattttttagtagagacggggtttcactatgttggtcaggctggtctygaactcctgacctcgtgatccacctgcctcaacctccctaagtgctgggattacaggtgtgagccaccgcgcccagccaagatattcgtaatgttagaaa

SEQ ID NO: 103147 - DNA, 201 bp, Homo sapiens
tcttagtctcattattaaagtattacatactcttaaactctctttattccattccctttgcttgtttcttgagacaacttcctaaatcttcccagaaggagatctcatgtgataatcaagaaatagtgctaatgttttcttcaactgttaaaagttctttattatagtacagtacattcttacccataaagggtgtatttt

SEQ ID NO: 103148 - DNA, 201 bp, Homo sapiens
ttcttagtctcattattaaagtattacatactcttaaactctctttattccattccctttgcttgtttcttgagacaacttcctaaatcttcccagaaggagatctcatgtgataatcaagaaatagtgctaatgttttcttcaactgttaaaagttctttattatagtacagtacattcttacccataaagggtgtattt

SEQ ID NO: 103149 - DNA, 201 bp, Homo sapiens
ttactgtgtcttcttcattgttgttttgtaccaaatgaatctgcttaattacaggtccttccacagagccatctgtagtagaatccaaggatcgaaaggcraatgctcattttatattgaaattgttatgtgacagtgtggttctccagccctatctacgagaacttctttctgccaagtaagaggatttgatatattttt

SEQ ID NO: 103150 - DNA, 201 bp, Homo sapiens
gttcttagtctcattattaaagtattacatactcttaaactctctttattccattccctttgcttgtttcttgagacaacttcctaaatcttcccagaaggagatctcatgtgataatcaagaaatagtgctaatgttttcttcaactgttaaaagttctttattatagtacagtacattcttacccataaagggtgtatt

SEQ ID NO: 103151 - DNA, 201 bp, Homo sapiens
ctaaagacccttttcctccttttctggaaaacatctctgttaataaggatggcctgctttagtgtttgggatagttcccaagttgttacgcttggatttgrtctgggttggtgttgagtatctgctctcactattctcctatatgccagtatatgtgtcccaatttttcctttaatgtcaggtgtccctttaatctaaatc

SEQ ID NO: 103152 - DNA, 201 bp, Homo sapiens
ttaataaggacctttaggatctaaagacccttttcctccttttctggaaaacatctctgttaataaggatggcctgctttagtgtttgggatagttcccargttgttacgcttggatttgatctgggttggtgttgagtatctgctctcactattctcctatatgccagtatatgtgtcccaatttttcctttaatgtcag

SEQ ID NO: 103153 - DNA, 201 bp, Homo sapiens
atgcaggaaaattattcctgttttctctgaatacacaacttctccatacccagtgtgtgtgtctctgtgtgtgtgtgtgtgtgtgtgtgtgtgtgtgtgtgttttaatgtgattttctctttagcacacacacttttctcataatctctgctcatgtatctgtggttcttggctgtggtcctgtttgctctcaaggagaga

SEQ ID NO: 103154 - DNA, 201 bp, Homo sapiens
acatgcaggaaaattattcctgttttctctgaatacacaacttctccatacccagtgtgtgtgtctctgtgtgtgtgtgtgtgtgtgtgtgtgtgtgtgtgtgttttaatgtgattttctctttagcacacacacttttctcataatctctgctcatgtatctgtggttcttggctgtggtcctgtttgctctcaaggaga

SEQ ID NO: 103155 - DNA, 201 bp, Homo sapiens
gatgctgaggcagaatgttggctttagaaaggacatcatggaaaggaagagaaacttaagatggacttgatcactttgaaggaagaggaggaagaaaaatyaaaatctggtctaagtcagggcattagggaaagagatgttactactgaaaaaaaatcaggagaactgtcattgtggtgaagaagccatattaagttttaa

SEQ ID NO: 103156 - DNA, 201 bp, Homo sapiens
ctagcgatgatcctgagcctttgccagcacatcggcaggcacttggagagaggctttatcctcgtgtacaagcaatgcaaccagtgtgtactgtgtacttrgttacctcttaactggctgtgttatttttttgcttttgaattaaagatggtgtttaaaaaaaattgtcagctactggcaaaaccacatgattgaggactc

SEQ ID NO: 103157 - DNA, 201 bp, Homo sapiens
tgaacaacctatatgctctggttttctaacttttttactagttgtgctaatatttttacttgttagtcaaaggaaatgaagtcataatagttttccttctmttacagagactttagaagacagctttccatcgacactaggccctttagaccagcctctgaagggaatcctagcgatgatcctgagcctttgccagcacat

SEQ ID NO: 103158 - DNA, 201 bp, Homo sapiens
tttcctaaccatcatctgttttggcactctaccacctaggtaccataactgaacaacctatatgctctggttttctaacttttttactagttgtgctaatmtttttacttgttagtcaaaggaaatgaagtcataatagttttccttctcttacagagactttagaagacagctttccatcgacactaggccctttagacc

SEQ ID NO: 103159 - DNA, 201 bp, Homo sapiens
tttatgaaagtataaagtagaaacaaaagtcatttagaatcctgcaacccagagataactacagttaacatttggggtattttaaatctttttttcctctrcataaacatgtactttgcttttacataattgaaagtataggttatagagtatttttttcatttcattgtatgaatattctctaccttatttaattatagc

SEQ ID NO: 103160 - DNA, 201 bp, Homo sapiens
aaataatcgtttgtactgtaatttggttgtttggtacatgaactttaaaactttagtaaaattgttaaataacattttttcttaatcttataaaaataggkgaccagtatagatatgtgggagagtagtaatatcacattctagaaagaacatttaacacatcaatgtattttctttttttctaaatgtattcaggcattg

SEQ ID NO: 103161 - DNA, 201 bp, Homo sapiens
tttatattggtggtgagtctatagggaggaggaatttatcggtgaatgcttgtgtatgtatagaaagatgctttgagtagtggaataccaacatgagaagktcaattaaaagattatgccttatggaagggaaatttcactttggaacaaagtaacattttaaaaaactttaacagttaaatttataaaaatacatactta

SEQ ID NO: 103162 - DNA, 201 bp, Homo sapiens
gtttaaatttgttaaaatcaaataacttaaaaaagtcagcaccttcgtcacattagcttcatttcaagtgctcagtagccacttatggctaatggctgccrtattggacaccgccaatatagaacgttgccattttcaagaaagttctgtcagaccgaaggctgctttaatttaattaggagatgggaggatttcacgggc

SEQ ID NO: 103163 - DNA, 201 bp, Homo sapiens
tccaggatggagtgcagtggtgtgatcttgggtcactgcaacctctgcctcccgggctcaagtgattctcctgcctcagcctcctgagtagctgggattasaggcacccgccacaatgctaatttttttgtatttttagtagagacggggtttcgccatgttggccaggctggtcttgaaccctgacctcaggtgatccac

SEQ ID NO: 103164 - DNA, 201 bp, Homo sapiens
ttggcctggcctgattatcatctttattttttccttttttttttttttttttaaagagacagagtctgactctgtcacccaggctggaatgtgatggtgcratcaaagctcactgcaaccttgaattcacgggctcaagtaatcttcctgccttagccttctaagtatataggacttacaggcgtgtgctaccatgcctgg

SEQ ID NO: 103165 - DNA, 201 bp, Homo sapiens
gtgttgaacaatactggttttgtgctaatcagtatgattgctgatgtctactattaaacttaattattaccgattataaacgggggatagaaactttttttgttttaatgtttagctgttcttttatctgaactgtatgaaagattatttctaatcttacttcaccgcagctttcgttccctgtgcttaagtttgtgtggg

SEQ ID NO: 103166 - DNA, 201 bp, Homo sapiens
agtgttgaacaatactggttttgtgctaatcagtatgattgctgatgtctactattaaacttaattattaccgattataaacgggggatagaaactttttttgttttaatgtttagctgttcttttatctgaactgtatgaaagattatttctaatcttacttcaccgcagctttcgttccctgtgcttaagtttgtgtgg

SEQ ID NO: 103167 - DNA, 201 bp, Homo sapiens
gttacaaatcaagctgtgtatcttcagacttgtcaaatctatcccatgattaaataattctgcttgtgagatctgcttggactctgtatgattttcctgawcttgataccctgtgaggaactcattagttacttaagtggtattactttgtgaattcttagtatacttcccttgatcttgttctggaacataaaaaattga

SEQ ID NO: 103168 - DNA, 201 bp, Homo sapiens
atatcagttgtttcaagtaatggcccaggtaatcgggctggatcatcaagtagccgaaggtaatgtgatttttaccaggaaactttaattggaggaaaaaaccaagtacagaaagcagtatatctcttacctgtcgtgtacatgaattggtgggtccttttttgtttcatttttgttcctcccaataacaccctgggaaaa

SEQ ID NO: 103169 - DNA, 201 bp, Homo sapiens
tgcatactggtatagcttagtccattatagaaaaatcaagaacaatgtacatttttggtgaaaagatttttgtgagtatatgttaagagttgcgtatttartcatgttttctgttgaatgcaaccaatgtacaatattgacagctttcacctggctttctggagtaaacagtgaatttattggtgttctagaatcattaaa

SEQ ID NO: 103170 - DNA, 201 bp, Homo sapiens
ccacaagaaattttttattgaactcactctgccttttgctataagaataactgacagatgtaacatacaatgatgcagagtaaacttttctgcttgtaacrcaactaagtagtattgatactctcagtgtgagagcccatctactatagtctggcaggttggagataagagtttcctgtagagtagtagctgcttctaact

SEQ ID NO: 103171 - DNA, 201 bp, Homo sapiens
actttagaaatcagtgacctagttttatcattatcgaatattatactgtacataaattgtatgtactgtacttctatatgattggcagtacagtaggtttrtttatgccagcactgccacaaacagtatgatttaacaacagctacgatgtcactaggcaataggaacttttcagctccattataatcttatagtaccaca

SEQ ID NO: 103172 - DNA, 201 bp, Homo sapiens
gaggctgaggcacaagaatcacttgaaccccggaggcggaggttgcagtgagccgagatcgcgccactgaactccagcccgggcaacagagcgtgactccrtctcaaaacaaacaaacaaacaaacaaaaaacattttaaaaaaagggaaaaagtcaggcaataatccaggttagaaacaaagtaaatgtcaacttttgga

SEQ ID NO: 103173 - DNA, 201 bp, Homo sapiens
gcacccactgtcctgcgcctactgtctggcactccctagtgagatgaacccggtacctcaaatggaaatgcagaaatcacctgtcttctgagtagctgacrctgggagctgtagactggagctgttcctatttggccatcttggctcctcccccctcatatttatatattaacagttgattttgatggccagatgacagtg

SEQ ID NO: 103174 - DNA, 201 bp, Homo sapiens
tgtagttgccatcattccaatcatgatgtgcagtatattgtatttagtgataggagttggagctgctacctaatgataaaaccagtgtttgctcatagtaraaaaaatgtgaaaaccaagttttgtggggcaaaattcaggaatagagatgccaactttttcacaatatgaattagtaaacataggtgtggccagttaata

SEQ ID NO: 103175 - DNA, 201 bp, Homo sapiens
ttcacgggctatatacttaagtttttcagttgattactgaaaacattcactgactgtaatcactggctgtgtgggtcagttttctctagcaaatgagcctygaatatagatgtcagtagcaaagctcagagtctgtctgggttgattttataacttggtgatcattgaagaaacatacaaagaattggattcctttaacat

SEQ ID NO: 103176 - DNA, 201 bp, Homo sapiens
caaaggggagagatataaatcatactgtgactgtaccaaagacttctttaagaagcgatacccggacagatcagataggccccttagacacagggatggasttgggaggtattatcccaggcaccaagagcaacctttgtgaatcttattaataagttgggagaaagtacttttttttgatatgaccagaattctggtagg

SEQ ID NO: 103177 - DNA, 201 bp, Homo sapiens
ttttttttttgcataaccttctttgaatagaaagatggtatttacagtgttgactatttctgttgtttttcagaattagagttttaaaaagatatgtgaarttcatgatagtaatagaaggaaataattgccactagctagtctatctactcacttttgttgagactcttattattgtaaattgattatgtcttggtcaca

SEQ ID NO: 103178 - DNA, 201 bp, Homo sapiens
ctttaaaaaatcctttcagttgattaaacaataaggaaattgggaaaccatttttagacgaagagaaaagacaggaaaagcagtttgtcactgttgagctstgccttttggaggaggtttctatgttctagatacactctcttgggttctagggtagagatgactaagacttgctctacttcaggaaccttagctctcaaa

SEQ ID NO: 103179 - DNA, 201 bp, Homo sapiens
agcctggaagacagagtgagacactgtctcacacacacacaaaagcctaagaaggtgggagtaagcctggaataaaatttatatcctttgcttaattggcyatcattattaaaagggttctaattagatagataacatgaagtaaaaaccaaggattggcagactatggcccaaaggccgaatccagccactcctattcat

SEQ ID NO: 103180 - DNA, 201 bp, Homo sapiens
cctgatttgtcttaaaaattcatggaagtttttgctttctattctgtaaagtatgaatttaatataaaatctaaaaaatatctaacagattacatatcccyttttccaaggtgacaagtaaaagtgacttaggaagataaggccgggtgcggtggctctcacctgtaatcccagcactttgggaggctgaggcgggcagat

SEQ ID NO: 103181 - DNA, 201 bp, Homo sapiens
ataagggaggaaaaataataagttgtcgggaacaagtagctatggaaaagttctctgttaggacacagtttgaagaagttaagacctcagaatattttttwaaaaaagtaagttactaccattgaacaaaaaccaatcagtctttgaaattggctaaattatttctcccccccaccccttcccttaaacttcttacaggcc

SEQ ID NO: 103182 - DNA, 201 bp, Homo sapiens
agatcaggagttctaggactcctgggactcattcttcaaagaagtagctggtgccaacattgcaaaaacaagtgacatatcatgctatagcataaggaagsctttttagttggcattgaaacaattgcacatagaaggtgagacttccaatttgaacctaagtaggttgattgcctactaaattcatattaatttactaag

SEQ ID NO: 103183 - DNA, 201 bp, Homo sapiens
caataccacctttttggatgaattagagataggcctgtaaatgaaagaatcttaattatggattattttttagaaaagtaaagttttaattttgaacataygtatagtaactaagaatagtctgttaataaaatacaataactaagaatagtctattaactaataaaaagttctgctttaaaaacccagaggcggttgaaa

SEQ ID NO: 103184 - DNA, 201 bp, Homo sapiens
ctgtaaaataaagaaatgttattgaaagcagccaaagaatggttctttacctatagggaaacagtgatttgaaagagtggatttctcactataaagtatgraagccaaaagtcaacaaactcatcaaagtgatgacagaattctgtatccagtgaaaagaattttcaggcaataaagtgaaagaagcttatccgagtttca

SEQ ID NO: 103185 - DNA, 201 bp, Homo sapiens
tattctaatggacaacaatttgctattctacggacacatttattttgataaatgtttgtgattgtactagtttttcatctcaattgttacatgttgtgggwgggtaagaggttgtaaaatacatagtgatataaaaattcaccgatcaaattgcagcatttcctccacttcaatatttaacccacagggatatttgagaag

SEQ ID NO: 103186 - DNA, 201 bp, Homo sapiens
attgattaacaaatattgagtgaacatctatttcgtgccaggtatattctacacaatcacctccaaccctgaaaacccatagggagagaaaggcattaacracacagatgctagggaaggataatctttagctgtcatgttttcttacatttgtctcatttctttgcattgactttgaaatttaaggtagttgaatttgca

SEQ ID NO: 103187 - DNA, 201 bp, Homo sapiens
ttatagttttttccggaggtacatgtcacacatctgataaataagcatgttaaagctgtagcctcctaataattctctttaatcagacctactgatgaatrattttctattagtacaagaatatcatattatgattttttctttttaactctgaccctattaaattcttaaagtgttccagctaaaatgttcttatttaaa

SEQ ID NO: 103188 - DNA, 201 bp, Homo sapiens
catggaagatgttggagcagaacctggatcagtatgtattttgtgcaccttaaattccattctgcctgataagcatgtatttcagggaataatctgtcatrcatttttttttttttaagatcctaactgaattgggtggttttgaggtaaaagaatcaaaattccgcagagaaatggaaaaactgagaaaccagcagtcaa

SEQ ID NO: 103189 - DNA, 201 bp, Homo sapiens
gaatttggttaaactgctgtgcttgtcttatgtatagacagtttagttagggaatgaaagagatgaacgtgtgtgtacacataggagagatggatactgtmggtgttaaagatggatcaagagttagtgagacagactgaggtagaagggcttgtactttttgtgtgtgtgtgtgtgtgagatggagtcttgctctgtcgc

SEQ ID NO: 103190 - DNA, 201 bp, Homo sapiens
tagtgaaagtcctcttgaaagaaaaacttttatctccagtgtttgatttgctgcaattctttcttttgaaagtcctatggtctaggaataggctttttagmtgtgactgtacattagaagctccaagaagttctctgtgaaaggattatacctatattccaagattattatgtacacaaaggtactgatttttttcccctt

SEQ ID NO: 103191 - DNA, 201 bp, Homo sapiens
agtgaaagtcctcttgaaagaaaaacttttatctccagtgtttgatttgctgcaattctttcttttgaaagtcctatggtctaggaataggctttttagctgtgactgtacattagaagctccaagaagttctctgtgaaaggattatacctatattccaagattattatgtacacaaaggtactgatttttttccccttt

SEQ ID NO: 103192 - DNA, 201 bp, Homo sapiens
gtggtgggctccacccagttcaagcttcctggctgctttgtttacctaagcaagcctgggcaatggtgggcgcccctcccccagcctggctgccgccttgyggtttgatctcagagtgctgtgctagcaatcagcgagactctgagcgtaggaccctctgagccaggtgagggatataatctcctggtgtgccatttccta

SEQ ID NO: 103193 - DNA, 201 bp, Homo sapiens
tcaaagctgtcagacagggacatttaagtctgcagaggttactgctgtctttttgtttgtctgtgccctgcccccagaggtggagcctacagaggcaggcyggcctccttgagctgtggtgggctccacccagttcaagcttcctggctgctttgtttacctaagcaagcctgggcaatggtgggcgcccctcccccagcc

SEQ ID NO: 103194 - DNA, 201 bp, Homo sapiens
ttcctctggaagttttgtctcagaggagtacccggccctgtgaggtgtcagtctgcccctactggggggtgcctcccagttaggctgcttgggggtcaggrgtcaggacccacttgaggaggcagtctgcccgttctcagatctccagctgcacgctgggagaactactgctctcttcaaagctgtcagacagggacattt

SEQ ID NO: 103195 - DNA, 201 bp, Homo sapiens
agttttcaacttctttgcctttggtttgaatttcctcctgtagctcggagtagtttgattgtctgaagccttcttctctcaactcgtcaaagtcattctcyatccagctttgttccgttgctggtgaggaactgcgttcctttggaggaggagaggcgctctgctttttagagtttccagtttttctgctctgtttttccc

SEQ ID NO: 103196 - DNA, 201 bp, Homo sapiens
cacttctctgtattggttattctagttatacattcgtctaaatttttttcaaagttttcaacttctttgcctttggtttgaatttcctcctgtagctcggmgtagtttgattgtctgaagccttcttctctcaactcgtcaaagtcattctccatccagctttgttccgttgctggtgaggaactgcgttcctttggagga

SEQ ID NO: 103197 - DNA, 201 bp, Homo sapiens
atgtttagtgcttccttcaggagctcttttaggtcaggcctggtggtgacaaaatctctcagcatttgcttgtctgtaaagtattttatttctccttcacytatgaagcttagtttggctggatatgaaattctgagttgacagttcttttctttaagaatgttgaatattggcccccactgtcttctggcttgtagagtt

SEQ ID NO: 103198 - DNA, 201 bp, Homo sapiens
ttgcttagtagatcttactccatccttttattttgagcctgtgtgtgtctctgcatgtgagatgggtttcctgaatacagcacactgatgggtcttgactstttatccaatttgccagtctgtgtcttttaattggagcatttagtccatttacatttaaagttaatattgttatgtgtgaatttgatcctgtcatgatgt

SEQ ID NO: 103199 - DNA, 201 bp, Homo sapiens
gcttttgaatgtgtttgctcttgcttttctagttcttttaattgtgatgttagggtgtcaattttggatctttcctgctttctcttgtgggcatttagtgytctaaatttccctctacacactgctttgaatgtgtcccagagattctggtatgttgtgtctttgttctcgttggtttcaaataacatctttatttctgcc

SEQ ID NO: 103200 - DNA, 201 bp, Homo sapiens
caaaaaaccagctcctggattcattaattttttgaagggttttttgtgtctctatttccttcaattctgctctgattttagttatttcttgccttctgctmgcttttgaatgtgtttgctcttgcttttctagttcttttaattgtgatgttagggtgtcaattttggatctttcctgctttctcttgtgggcatttagtg

SEQ ID NO: 103201 - DNA, 201 bp, Homo sapiens
gttggtaagctattgattattgccacaatttcagatcctgttattggtctattcagagattcaacttcttcctggtttagtcttgggagagtgtatgtgtygaggaatttatccatttcttctagattttctagattatttgcatggaggtgtttgtagtattctctgatggtagtttgtatttctgtgggatcagtggtg

SEQ ID NO: 103202 - DNA, 201 bp, Homo sapiens
aaaaattaaccgggtgtggttgtgcctgtaatcccagctacttaagaggctcaggcacgagaatcgcttgaacctagtaggtgaaggtggaggttgcagtragctgagatcatgccactgcactccagcctgggcgacagagtgagactctgtcttacacacacacacacacacacacacacacacacattgtgtagctat

SEQ ID NO: 103203 - DNA, 201 bp, Homo sapiens
ttggaaagtttagtattaagctcctcatgaactggagcttgctgttgatgaggtgacttcagagccatagttagttccacaatcaaagtggcctgtctcaygtgtagtggatagtgaaaatagttgtttaggtgtgttttcttgtgtggacatctgttctccacccgctctcaagttggggataggggagagcttattttg

SEQ ID NO: 103204 - DNA, 201 bp, Homo sapiens
cctatattccaagattattatgtacacaaaggtactgatttttttcccctttatttttcctattttgcaagcagcttcagccaaattatatattgtaatartttttgtgctaccttgtaatacagtttttaatactaataagaatttgtctcatttacaaaccaaaaatttaggaaggaaaacagtatccaaataaactgc

SEQ ID NO: 103205 - DNA, 201 bp, Homo sapiens
tagttcatttctcagcttttagccaccctagtaattttgacttagtttgttccccaggtgggtttgatataattggtcagcatttgacttctccagtcttrtggctcttaaaagttcccactagtcaataccataactgtccctgttggtttcaggatcacctaaatagcttaagttctaccacctttagtcagtctttag

SEQ ID NO: 103206 - DNA, 201 bp, Homo sapiens
cacctcccgggttcacgccattctcctgcctcagcctcccgagtggctgggactacaggtgcctgccaccacgcctggctaattttttgtatttttagtakagacagggtttcaccatgttagcctggatgatctcgatttcctgacctcatgatccgcctgtcttggcctcccaattctgccgtttttaaaccagtattt

SEQ ID NO: 103207 - DNA, 201 bp, Homo sapiens
agccaacttaaatctcatgagtttctgccttctactgaaagaaaaatttgctagtgactcaatcttagaaaaaagaaaatctccttctataaagacctcaraatttcctgtcaacagctttagtttgtgaaccttaaactcttattgaaaatctatgtttagggtgtaagcagtttatcatggtatcttcctcccccttac

SEQ ID NO: 103208 - DNA, 201 bp, Homo sapiens
cttctataaagacctcaaaatttcctgtcaacagctttagtttgtgaaccttaaactcttattgaaaatctatgtttagggtgtaagcagtttatcatggkatcttcctcccccttacccttctcctctttttgggaagtcatccttcacatattgtttggtttcatcctgatgcatctagaggacataagaatggggttt

SEQ ID NO: 103209 - DNA, 201 bp, Homo sapiens
gattttaggcttttggtaaatggctgcggtgaagtcaatgtgcaaatgctgatcagttttacctctttcaatgatgaatcaggtaggacatttaaaaaaaatgtttaaagaatgaactatatagataggtcagtcagcattttctgagtttctagttcttaaggcctgtttatagggtttgggaaattgctgtattactca

SEQ ID NO: 103210 - DNA, 201 bp, Homo sapiens
gcctagaggtaagacagtaaaagtttttttgcaatataacatttattaaggacaacttgtcccagcatatagatttttagaaatgcgttaattcagaataytatattttctgaaatgaagtgtcagaaattcctgccttgtggtataatgtaggaagaattccaacactgtcattaacttgctgtcagatcacttcatcca

SEQ ID NO: 103211 - DNA, 201 bp, Homo sapiens
ggtctgttaccctaatccagtaattaaataattttcctaaaaaacaaaacattttatctttttatgtttaggtgctactttgaatgataaggatgatgacyctcttcctgcagaaactggccaaaaccatccatttttccgacgttcagactccatgacattccttgggtgtatacccccaaatccatttgaagtgcctct

SEQ ID NO: 103212 - DNA, 201 bp, Homo sapiens
ctgaaaatgtttgaaattggttagatacattagcgacctttttagtgtgtttttgcttgtatttcctctgacttttgctcctgttcatattatacaaatayttcaagtaaaatgactcacttgtctttttaaaggacgcgagaactcttggaactgggtattgataatgaagattcagaacatgaaaatgatgatgacacc

SEQ ID NO: 103213 - DNA, 201 bp, Homo sapiens
tcttgaggtatgaatgatccctttcctttttagtacaagaaaatatatttaaaatccagttcaaaataatatctccttttaggttattaacataacaatakggctttgtgtatatactgccagagttaagagttaaatattaacctgttaaattcctgttcaggtttacttttggacatcaagcccatcactgccagccag

SEQ ID NO: 103214 - DNA, 201 bp, Homo sapiens
aaacagggacaatttgacttcctcttttcctaattgaataccctttatttacttctcctgcctaattgccctggccagaacttccaacactatgttgaatrggagtggtgagagaggacatccctgtcttgtgccagttttcaaagggaatgcttccagtttttgcccattcagtatgatattggctgtgggtttgtcata

SEQ ID NO: 103215 - DNA, 201 bp, Homo sapiens
ttagccctttgtcagatgagtaggttgcaaaaattttctcccattttgtaggttgcctgttcactccgatggtagtttcttttgctgtgcagaagctcttkagtttaattagatcccatttgtcaattttggcttttgttgccattgcttttggagttttagacatgaagtccttgcccatgcctatgtcctgaatggtat

SEQ ID NO: 103216 - DNA, 201 bp, Homo sapiens
atatgcgttgtttggttttttgtccttgcgatagtttactgagaatgatgatttccaatttcatccatgtccctacaaaggacatgaactcatcattttttatggctgcataggattccatggtgtatatgtgccacattttcttaatccagtctatcattgttggacatttgggttggttccaagtctttgctattgtca

SEQ ID NO: 103217 - DNA, 201 bp, Homo sapiens
cagagtgtgatgttccccttcctgtgtccatgtgttctcattgttcagttcccatctatgagtgagaatatgcgttgtttggttttttgtccttgcgatartttactgagaatgatgatttccaatttcatccatgtccctacaaaggacatgaactcatcattttttatggctgcataggattccatggtgtatatgtgc

SEQ ID NO: 103218 - DNA, 201 bp, Homo sapiens
cccaccccacaacagtccccagagtgtgatgttccccttcctgtgtccatgtgttctcattgttcagttcccatctatgagtgagaatatgcgttgtttgkttttttgtccttgcgatagtttactgagaatgatgatttccaatttcatccatgtccctacaaaggacatgaactcatcattttttatggctgcatagga

SEQ ID NO: 103219 - DNA, 201 bp, Homo sapiens
ccctccccccaccccacaacagtccccagagtgtgatgttccccttcctgtgtccatgtgttctcattgttcagttcccatctatgagtgagaatatgcgktgtttggttttttgtccttgcgatagtttactgagaatgatgatttccaatttcatccatgtccctacaaaggacatgaactcatcattttttatggctg

SEQ ID NO: 103220 - DNA, 201 bp, Homo sapiens
agggtacatgtgcacaatgtgcaggttagttacatatgtatacatgtgccatgctggtgtgctgcacccattaactcgtcatttagcattaggtatatctyctaatgctatccctccccctccccccaccccacaacagtccccagagtgtgatgttccccttcctgtgtccatgtgttctcattgttcagttcccatcta

SEQ ID NO: 103221 - DNA, 201 bp, Homo sapiens
attattattatactttaagttgtagggtacatgtgcacaatgtgcaggttagttacatatgtatacatgtgccatgctggtgtgctgcacccattaactcrtcatttagcattaggtatatctcctaatgctatccctccccctccccccaccccacaacagtccccagagtgtgatgttccccttcctgtgtccatgtgt

SEQ ID NO: 103222 - DNA, 201 bp, Homo sapiens
aaaaaaacaaacaacccagaatcaggcatggacaaacagtgtactcaaagtacaggattagaccaatagatttttataacagtatgaaaaattcattgatrgggcgtcagatttaacattgtaactaatttttgaggaactatgacttgttgagttttgatgtagtatcagagaatatccaatgctggccatggtggaatg

SEQ ID NO: 103223 - DNA, 201 bp, Homo sapiens
taattccagctactcaggaggctgaggcaggagaatcgcttgaaccagggacgcagaggttgcagtgagccgagatcgtgccattgcactccagcctgggygacagagcgagactccgtgactccgtctcaaaaaaaaaaaaacaaacaacccagaatcaggcatggacaaacagtgtactcaaagtacaggattagacca

SEQ ID NO: 103224 - DNA, 201 bp, Homo sapiens
cactgacttattctgtgattccagaattggcatttgtacttcacttcccttgcctggagtgcttgcttgtaggacatactttcatcttctcagatgagaarttctgtacaccgtttcattatgtgtagatatggtagtgagctctgattttgttcatgttcttttagtttgagattacgggaaatgatgagacgttcgttg

SEQ ID NO: 103225 - DNA, 201 bp, Homo sapiens
gacaattttaaaaatgacaaggaatggccccctcatttaatattgaattgactacatcacagcaacaaagttgggagtttgcaagttcaagatgagactayggtctcaatttatcttcatttattcttaatctgctttaagctagaagttggagaatagcccacataatgttttttgtttggcctgcgcaatgttaaaatt

SEQ ID NO: 103226 - DNA, 201 bp, Homo sapiens
ttggtctaaagtgggaagcaacttaaattcttcatgaagaaattagtgtctgaattatttcaggtatttcatttcctcagggaaattacaggtgcaaatcragttggactctgatatggttggtccaatgccagtgctgccatctttttttcatgtcaggattattttgaaggcaaagactaaaaggagcttcaagagtgg

SEQ ID NO: 103227 - DNA, 201 bp, Homo sapiens
gttcttatagacgtgccaccttgcttagcgcccgtcaaggaatgatgtctgcacgaggagacttcctaaattatgctctgtctctaatgcggtctcataaygatgagcattctgatgttcttccagttttggatgtttgctcattgaagcatgtggcatatgtttttcaagcacttatatactggattaaggcaatgaatc

SEQ ID NO: 103228 - DNA, 201 bp, Homo sapiens
ttaaaatggatcctcaacttacaattttttgtttgtttgtttgtttgtttttttgagacggagtctcacactcttacccaggctggagtgcagtggtgccrtctcggctcactgcaagctccgcctcctgggttcatgccattctcctgccccagcctcccgagtagctgggactacaggcacttgccacccacgcccggc

SEQ ID NO: 103229 - DNA, 201 bp, Homo sapiens
ttgccacccacgcccggctaattttttgttttcttagtagagacggggtttcactgtgttagccatggtggtcttgatctcctgaccttgtgatctgcccrccctggcctcccaaagtgctgggattacaggcgtgagccacagcgcccgacccccaacttacattttttttttgactttatgatgggtttattgggggta

SEQ ID NO: 103230 - DNA, 201 bp, Homo sapiens
ttttatttttttgagatggagtcttgctctgttgccaggctggaatgcagtggtgcaatcttgcctcactacaacccccacctcccgggttcaagcaattytcctgcctccgcctcctgagtagctgagactacaggcacgcaccatgcccagctaatttttgtatttttagtagagtcggggtctcaccatgttggccag

SEQ ID NO: 103231 - DNA, 201 bp, Homo sapiens
aaacttaatccttaaaacttagacaaaatggtagttttttattatagaatgtggtgttaatttcttcatctagcactttaaatgcaggtatttttttttttcattacaaggaagtaaaatgtacctattctttttcttcatgataccttttttcttggtcttcctcatgttcttctgcctattggtcttcgaaccagaaaa

SEQ ID NO: 103232 - DNA, 201 bp, Homo sapiens
aataatgatacctaatatttgttgactaattctgtttcctgggcattggtctccatctttataactatgtttggtagaatgcattatcaccctgatttttygggtgagaaatagagtcttgaagagagtaagtaaatttcacgtgggaatgtctgtgtcacacaactagttaagtggtagatctagttttcatatatagat

SEQ ID NO: 103233 - DNA, 201 bp, Homo sapiens
cttttaaaaattggtagagcaaatgtttacttctgaccttaaagatggccttagacattcatttgaataactgctattttgatttgtgtgaaaaagtattwtagtttctagtcttactaagaacctctctgaattacttatttttatagcatttaactcaaaacattttagaactccagtctttaaagtatatatgccttg

SEQ ID NO: 103234 - DNA, 201 bp, Homo sapiens
tgaccaataccacctgagagatctggcaaaggcatcgcagaggagatagcatttaagcagcatttttaaggtgaggtgggcattgaccaaggcacaaaggyattccaaacgtatctgggcatgggcccagagtcacaaaaggtcatgatgtgtttgaggaaccatgaaaaattcagaattgctgctttgtggtggggagta

SEQ ID NO: 103235 - DNA, 201 bp, Homo sapiens
tttctagagatagggtcttgctgtgttgcccaggctggtcttgaactcctggcctcaagtgattctcctgctttggcctcccagagttttgggattacacktctgaggcattgcactcagacacttttatctaaagtttatatactgttaaactaaagaaaccatatacaaatttcaagtcaggtgcttttactcatttta

SEQ ID NO: 103236 - DNA, 201 bp, Homo sapiens
tggtactgtaggcacacaccactgtgcccagctgatttttaaaacttttttctagaggcagagtcttactgtgttgctcaggctagtctcaaactcctggygccaagtgattctccctccttggcctcccaaagtgctgggattacaggcatgacacctggcctaaagtcactaaattcttttaaaaattggtagagcaaa

SEQ ID NO: 103237 - DNA, 201 bp, Homo sapiens
aagaaaattatttatttacatttattagccaagctttttataatttaattgcattccaaatcattgcatgtatgtcaacataaaagtgaacgaatgattaycttaaatatgggcacttgtttccatagcttgaaagagcttacagggaaagaatcttttgatttgacatcgtttttctctgtttcagctccgtattctgtt

SEQ ID NO: 103238 - DNA, 201 bp, Homo sapiens
ttgaacctgggaggtggaggttgcagtgagctgagatcgtaccactgcactgcagcgcaggtgacagtgcgagactccgtctcaaaaaaaaaaaaaaaaaagctttctggtttaaggaaaggcaaaaatattcaagaaaattgctaagaaaagatgttgagaagctagaaaatacagattgacaaagtatggatattatgt

SEQ ID NO: 103239 - DNA, 201 bp, Homo sapiens
ttatagcctcctgttcactgggagccttagcaacaacataaagttgattaacaacatattttgtatgttatatgtagtatatactgtatttatacaataaagtaaattagagaaaatgttattaagaaaatcataaggaaaagaacatacatttagtattcattaagtggaagcggattaccattaaggtctttattctca

SEQ ID NO: 103240 - DNA, 201 bp, Homo sapiens
tttttggatttcacaccaaaaactcaaacttcaaaaggaagaataagtaaatggagctacatgaaacaaaaaacctttgtgtatagtaaagaaaacagtcwacaaaataaaaaggcactctatagactgtgaaaaaatatttgcaaaccatgcatgtcataaggagttaatattcaaaatttataaagcacacttgaagtc

SEQ ID NO: 103241 - DNA, 201 bp, Homo sapiens
tgttagggtacaagcttaattctgttggtaaaggaactggattagtacctactttcccagcatccatttagaggaacaaccagttcttcaaaattttaccytttttttttttttgtgatggagtttcgctcttgttgcccaggttggagtatagtggtgtgatctcggctcattgcaacctctgcctcctgtgttcaagca

SEQ ID NO: 103242 - DNA, 201 bp, Homo sapiens
gtgttatgaatttaaaaataaatgcatactttactgccttaaatgtgtcaagtaatatattttcaaatattccatatctaacataaataactcctttaaakgtctcttcccatgttctcccccctgcccaccccccccttttttttttgagacggagtttcgctcttgttgctcaggctggagtgcaatggtgtgatcttg

SEQ ID NO: 103243 - DNA, 201 bp, Homo sapiens
attaagagcttgctgcatatacttttagtacttaggaataaagttttaaaataacagatctgtggtgatcttttaatatattgaatgcactatgtaatagygttatgaatttaaaaataaatgcatactttactgccttaaatgtgtcaagtaatatattttcaaatattccatatctaacataaataactcctttaaagg

SEQ ID NO: 103244 - DNA, 201 bp, Homo sapiens
atagaaaaatcaagaacaatgtacatttttggtgaaaagatttttgtgagtatatgttaagagttgcgtatttagtcatgttttctgttgaatgcaaccartgtacaatattgacagctttcacctggctttctggagtaaacagtgaatttattggtgttctagaatcattaaattcgctagagaatttgctagtgaatt

SEQ ID NO: 103245 - DNA, 201 bp, Homo sapiens
acataggagagatggatactgtaggtgttaaagatggatcaagagttagtgagacagactgaggtagaagggcttgtactttttgtgtgtgtgtgtgtgtkagatggagtcttgctctgtcgccaggctggagtgtagtggcacaatctcagctcactgcaacctcttgactccctggttcaagcgattctcctgcctcag

SEQ ID NO: 103246 - DNA, 201 bp, Homo sapiens
aggtatgaaaccactgaaaagtttcccattccactatttttttttggctgtcaattatgagaattccagtattaggggaattaaatgttagaaacgtttayatattgacatactgctgctgtatcgaatttagctctatttggatagttttaactattttagtttggtcttcatagaactatgtagaagaaaagcttattc

SEQ ID NO: 103247 - DNA, 201 bp, Homo sapiens
tagagcctccaagatttgcccagcttgcattggagcgtgttctacaggactggaatgccttgaaatctatgattatgtttgggtcgcaggagaataaagayccgtacgtattcattaaaacctttttagatttatgtatttcctacgttagtgtagaccttttacagttcattctgtctttcgtttctcctcaagtcttag

SEQ ID NO: 103248 - DNA, 201 bp, Homo sapiens
agagcttacagggaaagaatcttttgatttgacatcgtttttctctgtttcagctccgtattctgtttttctttttttcccttcactcattcagcacattsattgagcacctacttgtacgctaagttcttaagttacagtggtgaataagacaaagcttatacttgagtgagatagtgtataaacaaataaatatgtcaa

SEQ ID NO: 103249 - DNA, 201 bp, Homo sapiens
attagacatttatgacacttgtgggaagcaatatgttttatttttgttttggtcactatttctttttcattttagattcagatatgccagatcatgatttrgagcctccaagatttgcccagcttgcattggagcgtgttctacaggactggaatgccttgaaatctatgattatgtttgggtcgcaggagaataaagacc

SEQ ID NO: 103250 - DNA, 201 bp, Homo sapiens
acttgaacttgggggacggtggttgcagtgtgccaagatcacaccactgcactacagcctgggcgacagagcaagactcttgtctcaaaaaactaactaamtaaataaataaataaattttattgtgtatatttgaagtttacaacaggttataggatacatgtatttatattgttactataatagattaacacatctatc

SEQ ID NO: 103251 - DNA, 201 bp, Homo sapiens
atcaacagattgaatgcagaagcagacgtgagaatacagctgtcttttattaagtctgacattaagagatttgctaaaatgtaaatgatgttacttttctmgccactatttttttgaaaatctattttccataaaaattgtttatatgaatgtggggttttatcactattaaatatttaaaactttctcaatttcaattac

SEQ ID NO: 103252 - DNA, 201 bp, Homo sapiens
caatgaaaaaattaatataaatacatagtttaataaaaatgtttttaatattcattcttttataagaaaatacttgtctttaaaaaatactagtttccatkatttcatttatctaattataaggagaatcttatttcttatctcaggcctgaaagtaagcaggagccagtgaaaacagaaatgggtcctccaccatctcca

SEQ ID NO: 103253 - DNA, 201 bp, Homo sapiens
ctaggcaatgaggaaaggtctactagatgtgcttccaaaaaattcattagaagatttaacggcagaagattttaggcttttggtaaatggctgcggtgaaktcaatgtgcaaatgctgatcagttttacctctttcaatgatgaatcaggtaggacatttaaaaaaaatgtttaaagaatgaactatatagataggtcagt

SEQ ID NO: 103254 - DNA, 201 bp, Homo sapiens
acttttcttatctgtgtcatctttaaatttctttcagcagtgttttttacttttcagtgtataagtcttaggttttattcctaagtagtttgtttttttttgacgctactgttaagtggggcttgttttcttttttctttcttctcctctccacttggctctctctcccttcctgtcctctttccccctttgctcttctct

SEQ ID NO: 103255 - DNA, 201 bp, Homo sapiens
tttttctctccctctagtccctggcagccaccaattctactttgtttctgtgaatgtctatttaagatgcctcatataagtggaaccactgaggttttttktgtgtgtgtgtgtgtgacaggcttatttcagttatcataatgttttgaaagttcatccatgttgtagcatgtgataggatttccttttaaaagctgaata

SEQ ID NO: 103256 - DNA, 201 bp, Homo sapiens
tttttttctctccctctagtccctggcagccaccaattctactttgtttctgtgaatgtctatttaagatgcctcatataagtggaaccactgaggttttktgtgtgtgtgtgtgtgtgacaggcttatttcagttatcataatgttttgaaagttcatccatgttgtagcatgtgataggatttccttttaaaagctgaa

SEQ ID NO: 103257 - DNA, 201 bp, Homo sapiens
ggaaactatgaagtaaaagtgctgatttaatagttgatttttgttgttgttgttggagacagagtctcactctgtcacccaggctggagtgcagtggtgcratcttggctcactgcaacctctgcctcctgggttcaagtgattctcctgcctcagtccccccaagtagctgagactacaggcacccaccaccaagcctgg

SEQ ID NO: 103258 - DNA, 201 bp, Homo sapiens
ttattgtctgaacagggacgtttttgagtgaaattaatagttaggcttagccaataggcttaaactggcactatcataggcaaactggtatatatagttayaattatatcattttaaggctctttaatgtggtttttcctgttttcacattgaaataatttacatatttagctcttgaatgtttttaaaaatgactgaaga

SEQ ID NO: 103259 - DNA, 201 bp, Homo sapiens
gaaagacttggcaagttgtattctgtctttgcttagagtctgtgaagacagttcggatagaaacacaaatgactagatatgagagaatttgtagacttctrtaggaaggaaattacaactaccaggaaaggttcatggaggaggtggcatttgaactgggtgggaaataagtggaatgagactgaaggaactgcactggtg

SEQ ID NO: 103260 - DNA, 201 bp, Homo sapiens
ttcctcatcatacttttgctcactgagtttagcatttattgatgattctttttttgtctgaatcagttgttactgtggtgttggccaaatggtgatttttwaaaaaaattatcatttcttttacatttattaattggaattcaactgtaaggaagaactttccctcctctaccccatttctttatttgtttacttttttta

SEQ ID NO: 103261 - DNA, 201 bp, Homo sapiens
ggagtctgtgatttagtattgtaggtaaccttcattgactgtatctgttggttctttgcatgaattattaagccctttacttcaaaataaaattgtatggktatgtaaaagttttattccatgagtggatatccagagttggggtgaggtggggtcactttataggcagtttcctaatatgattattgagttacttagtgt

SEQ ID NO: 103262 - DNA, 201 bp, Homo sapiens
gacagaaggacttatgaaattattaagaataattagtgtataaaggccatatcttgaatcttttcttaccaaatttcttcttgtttggcatgtgcattctwttccttttcctgtttcgaacggagctgaaaataacgtgattgattttgctttaaaggtacatgactgggctgggtgcggtggctcacacctgtaatccca

SEQ ID NO: 103263 - DNA, 201 bp, Homo sapiens
ataaagaatttgtgtgtccttttttttttttttttactttctcagaaggtaaagatgggtatgtaagaaaaaaaattttgcaccagtgtgtttttattgtrtttaatactatatgatatatacaaactggatatgtaatgctaaatgaactttactgattttataattgcagatgacttattacatgagaattatttagca

SEQ ID NO: 103264 - DNA, 201 bp, Homo sapiens
gactctcctttatatgttttatgttgtaatgacacttgcagttttacatggactggagcagagcacattaaccaggtaagttatttctacattttcctgtrttaatcatatctttgtgtcttttttcgctatgactatcactagacttacagttttcagctttggaattaagtctgatatgaagaaagttgatttaattcc

SEQ ID NO: 103265 - DNA, 201 bp, Homo sapiens
taaatcacatgtgaaagatcagatagttcagtctgtctgaagtgttagttgctctaaggaggaaaaattgaacaattggttatctagtatgtgaattagartactaaatatatagagattagtgtttagtggactatacatactcagtgtattagttttaaaacttaaattgatcttaattttttctcatttttcagaagc

SEQ ID NO: 103266 - DNA, 201 bp, Homo sapiens
actttttaaaattgatatataatttctggtttatattgtgtgtatgctaaggctttccagttgaagaaaatggatggctaattaagtcctttcctgaaagrtgaactgctatgttcttacttttttagctgaaatatcctcaagtgaaaaagaggaagatgtattcatgggaatggtttgcccatcaggtaccaaccctga

SEQ ID NO: 103267 - DNA, 201 bp, Homo sapiens
ggaggaaaaattgaacaattggttatctagtatgtgaattagagtactaaatatatagagattagtgtttagtggactatacatactcagtgtattagttytaaaacttaaattgatcttaattttttctcatttttcagaagcggagcgttctgaaagaaatacatttgcagaaaggctttctgctgttgaggccattgc

SEQ ID NO: 103268 - DNA, 201 bp, Homo sapiens
tttactgtatcttccaactttccatcaaaaaacagctgatataaatttattgatttaagaataaacactccgtaatgaacagtgtaaaatctttggaaaayaagatggattactgatagaacctcttggtagttaattggtgttaagtgatataactttacagaataatagacagatgtcttgttatttctgacagaattc

SEQ ID NO: 103269 - DNA, 201 bp, Homo sapiens
taaattggcaacaggaaggctaccaagttgatccaagttgatactttaccaggttcaaaaacatcctgaagtgagatttatcaaaaagtattcatgggtgwccaaattacaatttaaaacagtgcaaaaactttacgtagactaaacaaaatggaaattatcaccagtttatttattcaggactatgctaggcagacaaag

SEQ ID NO: 103270 - DNA, 201 bp, Homo sapiens
cacctgactgcccttattttacctttctgacccattagccattgagtttgtgactctggtgtaagcattcttaaaaaggccaaaacatgcatttattttcrggttatttgcagtgtctcccaattattgctgattttttttttctttgtgctttgagtaagacacattaggtaggataccaggtgtctgttgagcttaatt

SEQ ID NO: 103271 - DNA, 201 bp, Homo sapiens
caccccccatagctccccctagttgggttcctgaccctcctgcgatggatcctggtaagagctgttatttaatttcatttagtgtttaacaaaaagagcargtcatgaaaggaaataattttaacattttaaagggatatttagaaatttgaaatatttgaaagtagtatgatgaatattataactagtttagctataaaa

SEQ ID NO: 103272 - DNA, 201 bp, Homo sapiens
attgattttatcctggcccccgctgtgggatctcttaccacagcagcaaccggtactggtcaaggaccaagcacctccactattccaggtaagaatctgtmctctttgtctgcctagtcatctggaagaaaaaaggacacactttggatatagggttctacagatctacactttatctcaaggagactgttctttgctgaa

SEQ ID NO: 103273 - DNA, 201 bp, Homo sapiens
tactattaaacagtgtgtggtgggaccaaatcatgctgcctttcttcttgaggtaaattattcactctaagatacagaaatgaaaaataaactgttaaaayagaattgtgcatcattgtatctcttccattataacaggaaaacagcagttacttgaaagttatcttgaagagctcccagttctctttcctcctctggccc

SEQ ID NO: 103274 - DNA, 201 bp, Homo sapiens
tgataccttaagtcaattaggctttctgttttcatttcatgatatccatgtgcactcaagaatctcttgacatggataacacagttttttgttttgttttgtttttttaaacaattgagcctttggttgggcattggttcagctaccaactttatgctaccttttctataaactctagaagcttcagttttctcacctggg

SEQ ID NO: 103275 - DNA, 201 bp, Homo sapiens
aaccagggacgcagaggttgcagtgagccgagatcgtgccattgcactccagcctgggcgacagagcgagactccgtgactccgtctcaaaaaaaaaaaaacaaacaacccagaatcaggcatggacaaacagtgtactcaaagtacaggattagaccaatagatttttataacagtatgaaaaattcattgatggggcgt

SEQ ID NO: 103276 - DNA, 201 bp, Homo sapiens
tcactgtgaatttatttgaagtacagattgatcagaaaactccaattcataaagcagtagcttaggaaattgttgagaaacttcacttatgtatccctttraagatagtctttcttataaatttagatgaaatctataaagtctcttttacattttctttttggtacttaccattttgttgttgtctaagaacgacgacgg

SEQ ID NO: 103277 - DNA, 201 bp, Homo sapiens
tatgtctttatagcagtgtgaaaacagactaatacagaagtatatgttaactttctctgctgagcatgttggtgcttgcctgtagtcccagctacttgggrggctgaggtggaaggatcatttaagaccagcctgggcaacatagggaaatcctatgtccaaaaaaaaaaaaaaaaaaaaagcatgttaaatttttcatca

SEQ ID NO: 103278 - DNA, 201 bp, Homo sapiens
agtgtattttgttttttcaagtctgattttataaccatgtgcatgtgtgatgatgttttaataaggacctttaggatctaaagacccttttcctccttttstggaaaacatctctgttaataaggatggcctgctttagtgtttgggatagttcccaagttgttacgcttggatttgatctgggttggtgttgagtatctg

SEQ ID NO: 103279 - DNA, 201 bp, Homo sapiens
ctgtgattccagaattggcatttgtacttcacttcccttgcctggagtgcttgcttgtaggacatactttcatcttctcagatgagaagttctgtacaccrtttcattatgtgtagatatggtagtgagctctgattttgttcatgttcttttagtttgagattacgggaaatgatgagacgttcgttgagagcagctggt

SEQ ID NO: 103280 - DNA, 201 bp, Homo sapiens
aggaaaattattcctgttttctctgaatacacaacttctccatacccagtgtgtgtgtctctgtgtgtgtgtgtgtgtgtgtgtgtgtgtgtgtgtgttttaatgtgattttctctttagcacacacacttttctcataatctctgctcatgtatctgtggttcttggctgtggtcctgtttgctctcaaggagagactta

SEQ ID NO: 103281 - DNA, 201 bp, Homo sapiens
tattttcagtcacttccccctaggctaggtcctggctacctagcaaccattgttctgctttctctcactgtaatgcttttcctttttgaatttcatagaawtggaatcatgtgtctgttttcttttgcttagaacagtgcttttgcaacagatctgtgttgcagcatgtagtagtttcttcttttatattaaaagtagtat

SEQ ID NO: 103282 - DNA, 201 bp, Homo sapiens
ttataaaaactagttcttgtcactatattctgatctttaggataaagaatgaatcaagcattggaagtttttgttttttgttttttgttttttttttttttggtatctaatagtcctgataacattgaaagagagcacattataactttacctttttttttttcctgtattttctttaggaggctttccttaagtggagat

SEQ ID NO: 103283 - DNA, 201 bp, Homo sapiens
cttgaaaaacatctaattctctgaattacattccatctgtcagtgcaaatatgtggtgtctgtgtacatacatttagaaatcagatgagatttgtaaaatsgtgttcataggtttaaattatttgtgatgaagttaatttattactgatactagaatattgttctggtagcttatgcctgatatattattccagaatattc

SEQ ID NO: 103284 - DNA, 201 bp, Homo sapiens
tgaaattcatgtgtttattattccttcaagtttactgtatcttccaactttccatcaaaaaacagctgatataaatttattgatttaagaataaacactcygtaatgaacagtgtaaaatctttggaaaataagatggattactgatagaacctcttggtagttaattggtgttaagtgatataactttacagaataatag

SEQ ID NO: 103285 - DNA, 201 bp, Homo sapiens
aatttgaagagtgatactgtgtatccgaaagatactgtgtacctaccacagacaggccctatggaagacagctctgagaactggaaagactgtagagttggagttaggaggcttggtcattccactaaacagtcacatagtcattttcatgcagtgagtttcattttactcatttgtaagatgaggaggtgtatttaatgt

SEQ ID NO: 103286 - DNA, 201 bp, Homo sapiens
aacatctgtggtgttttaggattatggatagggacttcagtataaatggctacaaatgttataatagagaattggactgtaaaaaccatctaccgtaccaytaagtaattgtataggacaaatgaaaaattttaatagatattaaaagaattctggttggtattttttgttttccttattttaagcacctaaaggtgtgat

SEQ ID NO: 103287 - DNA, 201 bp, Homo sapiens
gatacaattggttggaaatgatcaagatttgtgtgtgtatgaaattcatgtgtttattattccttcaagtttactgtatcttccaactttccatcaaaaamcagctgatataaatttattgatttaagaataaacactccgtaatgaacagtgtaaaatctttggaaaataagatggattactgatagaacctcttggtag

SEQ ID NO: 103288 - DNA, 201 bp, Homo sapiens
ccggggagtcggaggttgcagtgagccgagatcgcgccactgcagtccagtctggtgacagagcgagactctgtctcaagaaaaaaaaaatatatatatayatgtgtgtgtgtgtgtgtgtatatatatatatgtgtgtgtgtgtgtgtatatatatatgtgtgtatatatatatatttgaatttagatatatctgttaag

SEQ ID NO: 103289 - DNA, 201 bp, Homo sapiens
aagatccagtgcgaatgaggttatggtaataacacactcagatagggatggggtggcattgcatcgttcctttctctggaaaacataaaactatcagtgcsctcagaacctgtcataaataaataatttacgatgtgagaaaaataaaggcatgtcacagaataatgtaaaatttaaaaacagaaaaatatcagcctaata

SEQ ID NO: 103290 - DNA, 201 bp, Homo sapiens
tccatatattataattattcagactggatttctatatatgtaaatgatacaattggttggaaatgatcaagatttgtgtgtgtatgaaattcatgtgtttrttattccttcaagtttactgtatcttccaactttccatcaaaaaacagctgatataaatttattgatttaagaataaacactccgtaatgaacagtgtaa

SEQ ID NO: 103291 - DNA, 201 bp, Homo sapiens
aaagtgaaactccgtctctactaaaaatacaaaaaaatttgctgggcatggtggcgtgtgcctgtaatcccagctacttgggaggctgaggcaggagaatygcttgaaccggggagtcggaggttgcagtgagccgagatcgcgccactgcagtccagtctggtgacagagcgagactctgtctcaagaaaaaaaaaatat

SEQ ID NO: 103292 - DNA, 201 bp, Homo sapiens
ttgtgatagtgatttatgtatatgaaaagatagattgctgatatttctctttttgttctagcaactttattccacagccaattggaaaatgcaagcgtgtrttccaagcattgctaccttacgctgtggaagaattgtgcaacgtagcagagtcactgattgttcctgtcagaatggggattgctcgtccaactgcaccat

SEQ ID NO: 103293 - DNA, 201 bp, Homo sapiens
tgtcacattctgaaagggcaaattaaaagttcatttacctttaatattgttatacacatatatttaaatatttatgttgctcttcctacctgacttcattwgaatgatttgagagaaccatttcatatgttttgttttttcagtgaatcttggggcttactctctgatattctctgttagcaggaaaaccgaaagcgccat

SEQ ID NO: 103294 - DNA, 201 bp, Homo sapiens
tcaaaacacttctggtcccaagcatttcaggtaagggatgttcaactgtaatacgttttatgtattggtatttttaaattactctttttaaattttttgtwgcgtttgggtctcgctgtgttgcccaggtcggtcttaaattcctgtcctcaagcaatcctcccacctcagcctcccaaaacattgggattacaggcatta

SEQ ID NO: 103295 - DNA, 201 bp, Homo sapiens
gttagggtgagagattttataggaagaagaaaaataatgttaatttgtttgaataagtaccataataggtttccatacatacatacgtaatagctacacartagcacaggaggcattgggaaatcacaggaggctgcacagaatgattacaaagagtgtggactctgaagtcaaactgctggatttcctatcctaatccta

SEQ ID NO: 103296 - DNA, 201 bp, Homo sapiens
agtgttaaaagtgcaaagttaaatgtgaaaacagtgattactgttaagttaaatgtaatttttaacaaaccaaagctattgcactttatacctcattaagkttttgcttttagttttcgtgttctttctctgtcttggttttttaaaaaagatttatagactttctaattacgttggattttgtactaaaaatagaagtaa

SEQ ID NO: 103297 - DNA, 201 bp, Homo sapiens
cagcatttaattgtcagcatttcttcccagtgtccctaaagtagagatgtgtcttatcagtgaagtcttagattagatgaaatgtagttttaaaaaagttmgggctcttgatcccccacccacaaaaattgtttctccccatgtcaggttggcatcgatcttgactcattcctttcccttacctatcagcatcatttagcc

SEQ ID NO: 103298 - DNA, 201 bp, Homo sapiens
tatttattttacttcttaaaatgttttttattatttttttttattttttgagacggagtctccccctctcacccaggctggagtgcagtggtgtgatctcrgctcactgcaaccttcggctcccaggttcaagtgatcctcctgcctcagcctcctgtgtagctgggactacaggcacacactgccatgcctgcctaattt

SEQ ID NO: 103299 - DNA, 201 bp, Homo sapiens
tgtgccagtttgatgcttgtggtatagtctcttattgtgttgtcaatttgcattgactcaatttgcattagtccatgactgataaagctgagtgccttttygtatgattcctgttcttctaaattaaggtatgtttatgactcagaatgtagtctatcttggtgaatgttccatgggagcttgagaagaaagcgtattttg

SEQ ID NO: 103300 - DNA, 201 bp, Homo sapiens
ttagggtaccgaaaaagggaaatagcacatttaattccccttgatacaagaccatggatttaataatggaaaacagggctaacatctttggctcaaagaartatgatgagtgcaaatggagatggtagaatgggctctggggagagaagctactggcttttgcctgactgccccttattggggccacagggaagcatcaca

SEQ ID NO: 103301 - DNA, 201 bp, Homo sapiens
caagtgatccgcccacctcagcctccgaaagcgctgggattacagacatgagacaccacaactggcctataaaagctacttttaatatctcaaaatgcttytttcatactccttttcaaaggtttataggaaacttacattcttagtgtataaggttttcaattttttaggggtcagttttctgttcccccctacccccag

SEQ ID NO: 103302 - DNA, 201 bp, Homo sapiens
cagtgatctgcccaccttggcctcccaaagtgctgggattacaggtgtgaaccactgcacctggctgaaaagtttttagttttgattaaatctgatttctrtattttttcttctgttgcatgtgcttttgttgtcgtatataagaatttaaattcaaggttgtgaaggtatgttcctgttgtttttttcctgagagtatta

SEQ ID NO: 103303 - DNA, 201 bp, Homo sapiens
ggggcaaggctcagcgttctggcgagcggtctccgcgccgcggtccgcagcctttgcagccaggccacctctgttaacgaacgcatcgaaaacaagcgccsgaccgcgctgctgggagggggccaacgccgtattgacgcgcagcacaagcgagtgagtcctgaggggcctaagtgagtcccgcccctggcgtccgcgacc

SEQ ID NO: 103304 - DNA, 201 bp, Homo sapiens
aacttccaggtcccctagagttgacttataggtgctctgacttgaaggccaatccttctaatttccagttcagtctggtcgcctctggccaccgaattgtrtactcaggtcttagggtaccgaaaaagggaaatagcacatttaattccccttgatacaagaccatggatttaataatggaaaacagggctaacatctttg

SEQ ID NO: 103305 - DNA, 201 bp, Homo sapiens
tcaataaaagatttctctgctgtctcagatcatggaccaggccataacggtgggggctccagtgattgggctgaatgactctgggggagcacggatccaaraaggagtggagtctttggctggctatgcagacatctttctggtgagaaacctgttaatagagaataaaaaaatacagggcttaagttctctaagccatgg

SEQ ID NO: 103306 - DNA, 201 bp, Homo sapiens
tagcgtttacaaaagggcaccagctgcagtagtagcagtgggattcgagcttgtcctgtgttgcccaggaggtattctggtttctcaggtgacaacggggkccataaagctgccaaaagtttctgtcctttgtattaagtaaccagggtgggtggaggggtacagccaggtgggggctgggtcaggtgggtctacactctg

SEQ ID NO: 103307 - DNA, 201 bp, Homo sapiens
tgcagtgcacttccccctgcccctgggaggtatgggttctggacaaaggagttcatcctcactcagtgttatatcttgaaatggggagattctttcaaccwgcgaccactacctgagcttgttggctgacttccccaaggtcccctgtgaggtacaataaagaatggcttaccttggtctgcactggagactgggaatgcc

SEQ ID NO: 103308 - DNA, 201 bp, Homo sapiens
acatttgtctcaataaaagatttctctgctgtctcagatcatggaccaggccataacggtgggggctccagtgattgggctgaatgactctgggggagcayggatccaagaaggagtggagtctttggctggctatgcagacatctttctggtgagaaacctgttaatagagaataaaaaaatacagggcttaagttctct

SEQ ID NO: 103309 - DNA, 201 bp, Homo sapiens
gtgctgggattacaggtgtgagccactgtgcccagccgaggctcctggtagattgagagctctgacctcatctcctcaaagaagcttttttttttttttgrgacggagtttcactttgttgcccaggctggagtgcaatggtgcacaatctcggctcactgcaagctctgcctcctgggttcaagcgattcttctgcctca

SEQ ID NO: 103310 - DNA, 201 bp, Homo sapiens
tttcagtagagaccaggttttgccatgttgtccagctggtctcaaactcctgggctcaagcgatgctcgtctcagcctcccaaagtgctgggattacaggygtgagccactgtgcccagccgaggctcctggtagattgagagctctgacctcatctcctcaaagaagcttttttttttttttgggacggagtttcacttt

SEQ ID NO: 103311 - DNA, 201 bp, Homo sapiens
agcgattctcttgcctcagcctcccgagtagctgggactacaggtgggtgctaccaagcccagctaattttttttgtatttttagtagagatagggtttcsccgtgttagccaggatggtctcgatctcctgacctcatgatccgcctgccttggcctcccaaagtgctgggattacaggtgtgagccactgcggctagct

SEQ ID NO: 103312 - DNA, 201 bp, Homo sapiens
caccttcctataggcagtttgtcattgaccagaacctctttgtgtagtgcccaactgtatatgataatgatattttatcaaatctcaggggcaaaaattascttttaataaatgatgctggggcaactgactagccatttaggaaaatataaaattagattcatactttacaccatgtacaaaaataaactacaaatgggt

SEQ ID NO: 103313 - DNA, 201 bp, Homo sapiens
aatttctgagacctttaagggccaaatagtcctagtgccacataaattcttccagagcatagaaagtaaacaaaacacacaagaaccttccaaaatttttwaaaagaagtatgatatcagtacctgaacctgataaaggtagtacttaagatttcagtttcatattgcttatttctttaaaattatatctgtggcctactg

SEQ ID NO: 103314 - DNA, 201 bp, Homo sapiens
ggactttacaccctggtaatgaacaataaatcttattctgaagtgcacatggaatattcacaaaagttgatcatatgtattagatcagaaagaaaacatcrttaaatcccatagagcaaaaaatactgtgaaacaacattgcttaaaattagaaacttttgtagcaactaaaacaaaagtagcctccagccgggaaataaa

SEQ ID NO: 103315 - DNA, 201 bp, Homo sapiens
ctgacctcatgatccgcctgccttggcctcccaaagtgctgggattacaggtgtgagccactgcggctagctttttttttttttttttttttttttttttwaaaagacaggttctcgctttgttgctcaggctggagcacggtggagtgatcacagctcaccacaacctccgcttcccaggttcaagtgattctcctgcct

SEQ ID NO: 103316 - DNA, 201 bp, Homo sapiens
tttgtaatttgtgccacagtttttagatactccagttttgttttgttttttttgatccatttttttctcttcgcttttcaatttgagtggtttctcttgaratatcctcaagctcagagattctttcctcaagcatgcccagtctaccaaaaaacatcaaatgcattctttatttctgttgcagtgtttccaatccctggt

SEQ ID NO: 103317 - DNA, 201 bp, Homo sapiens
tttttttttttttttttttttttttttttaaaagacaggttctcgctttgttgctcaggctggagcacggtggagtgatcacagctcaccacaacctccgyttcccaggttcaagtgattctcctgcctcagcctcttgagtagctgggattacaggcacgtgccaccactcccagctaatttttgtatttttcagtagag

SEQ ID NO: 103318 - DNA, 201 bp, Homo sapiens
acaacaggtgtgcaccactacacctagctttctctgtgtagtttttttttttttttttgtcattcatcttgcttgatggtctctgagtttattggatctgkggtttggtgtctgacaatttggggaacttttctgtcattattgcttcctatattctgttcttttttctctttctgctccttctggaattctcattatgta

SEQ ID NO: 103319 - DNA, 201 bp, Homo sapiens
atctgtttgaacttttgcaagctgtttttgcaaagagtatgttccttttttaatatggacattgaaattttagttctcttatcactgtgtttaaccagcartctgacagtaatttccttaaatgtctgtctcccagaagtgtggaggggtgtggaacaaactacctttttaaatcccttgtggctgggaagctgcttgagc

SEQ ID NO: 103320 - DNA, 201 bp, Homo sapiens
atgaaaccctgtctctactaaaaatacaaaaattagccaagcgtggtggtacgtgcttgtaataccagctactcgggaggctgaggcaggagaatcgcttsaacctgagaggcggaggttgcagtgaaccaagatcgcgccactgcactccagcctgggtggcagagcaagactctgtctcggaaaaaaaaaaaaaaataa

SEQ ID NO: 103321 - DNA, 201 bp, Homo sapiens
agggtctcatgctattgcccaggctggagtgcaggacacagtgatagctcactgtagcctcagtcttccgggctcaagtaattcttctgcctcagcctctmtagtagctgggattacaggtatgtcacatcatacccaggtaatttttatttttaatatttttttgtagagatgtggtctcactgtgttgtccaggttggt

SEQ ID NO: 103322 - DNA, 201 bp, Homo sapiens
cacatccacattgctgaatataactctccacccttcttcaggacccttatactgttccttttctcctttctctttagtatcttcagtctgtccgttggtamtagatcctcccatcaaaacttaatcacactcaggtctttcctatcatcaaaacaaaaactgtcctctagttggcatactcctgtagctcttgctgtgttt

SEQ ID NO: 103323 - DNA, 201 bp, Homo sapiens
aaatctgtatatatgttgccaaattggtttcctgaaaacttactctactttacatgacagtgtataggattgcctgttttttgttttgtttttttttttttaaatgcaacctcaccagctttggctactttcctaaggggaaaataatagccaatttgaggtattttttgtttgtttttgtttttttcggggaggggggga

SEQ ID NO: 103324 - DNA, 201 bp, Homo sapiens
caacaataagagtgtcttttattaatcaaatttaagatgggccatacacagtgtctcacgcctgtaatcccagcacttgggaggctgattcaggtggatcrcttgagctcaggagttttagaccagcctaggcaacgtagcgaaaccccatctctacaaaaaaatacaaaaattagctgggcgtggtggtgcatacctgtg

SEQ ID NO: 103325 - DNA, 201 bp, Homo sapiens
ggaggaagaaacaccatgcaagaataaacattctatgaaagtagtgtaatgaggagttagccctaccaggtgccaggatataaaactacaataactaaaaytgtctgaagaacttgtaggtaaatggacagaaagaccaagggacattacagaattgatacatagatctatatctatttggacattatgatgaaaaggata

SEQ ID NO: 103326 - DNA, 201 bp, Homo sapiens
tgcccacctcagcctcccaaagtgctgggattacaggtgtgagccaccaccatgcccagccttggtttttttttttttttgagatggagtctcactctgtsgcccaggctggagtgctatggtgcagtctgggctcactgtaacctctgcctcccaggttcaagtgattgccctgcctctgcctcccgagcagctgggatt

SEQ ID NO: 103327 - DNA, 201 bp, Homo sapiens
taccaggttagctttagtagtacatagacatactgcttctgtaactctccatccttccttttttatgttgttattgtcatagattatatctttatacatgktatactcattaacaacagatttattgtttcatgcatttgcattttatttttatttatttatttatttattttttgagacggagtttcgctctgtcgccca

SEQ ID NO: 103328 - DNA, 201 bp, Homo sapiens
atttcttactgctccctaaatcagtcccagccctgggtaaggttaaggccttcccccatggcctggattttcaggttccccagtgggaacctgaaagcagyttctctctatctcacactctggagacttacagtttttcccttgtcttatggtttaggctgcagactgccacttctttaaaaggtctgtggattctttcag

SEQ ID NO: 103329 - DNA, 201 bp, Homo sapiens
accatgttagctaggatggtctcgatctcctgacctcgtgatctgcccacctcagcctcccaaagtgctgggattacaggtgtgagccaccaccatgcccrgccttggtttttttttttttttgagatggagtctcactctgtggcccaggctggagtgctatggtgcagtctgggctcactgtaacctctgcctcccagg

SEQ ID NO: 103330 - DNA, 201 bp, Homo sapiens
gccttagtgtgctggctttctcgaatgctggttataatagtagtgaactggtcacgtggacagatgcaggacctcctggttagccagggttttgcaggcartgatgatagcttaggtcatgcactggttttctcctttctgttcacagtgttattctacctagagatgctgtagtggactgtgttggttggcatccagcct

SEQ ID NO: 103331 - DNA, 201 bp, Homo sapiens
cggctaattttttgtatttttagtagagactgggtttcaccatgttagctaggatggtctcgatctcctgacctcgtgatctgcccacctcagcctcccaragtgctgggattacaggtgtgagccaccaccatgcccagccttggtttttttttttttttgagatggagtctcactctgtggcccaggctggagtgctat

SEQ ID NO: 103332 - DNA, 201 bp, Homo sapiens
ccagatgcttttgcttttctgttttggcagaggaatgttacggcatccggagtcatccctcagatttctctgatcatgggcccatgtgctggtggggccgwctactccccagccctaacagacttcacgttcatggtaaaggtaagaaagaagggcctgtttttggtgccgtttgagatttgtgcagttccttacctgcaa

SEQ ID NO: 103333 - DNA, 201 bp, Homo sapiens
ctgagcctcccgagtagctgggactacaggcacctgccatcacgcccggctaattttttgtatttttagtagagactgggtttcaccatgttagctaggayggtctcgatctcctgacctcgtgatctgcccacctcagcctcccaaagtgctgggattacaggtgtgagccaccaccatgcccagccttggttttttttt

SEQ ID NO: 103334 - DNA, 201 bp, Homo sapiens
atcctcctgagtagctgagaccacaggcacatgctaccacatctggcaattttttttcattatttgtagaggtgagggtcccactatgttgcccaggctgktctcaaacttctggacttaaactgtcctcctacctcggcttcctagagtgctggtgttactggcatgagccgatgtgcccagcctctggtggcttttgag

SEQ ID NO: 103335 - DNA, 201 bp, Homo sapiens
tgcaagcctgaacttgggccagggcgggggtgggggttgggggattcctcctgtggagatgcagtcactctgtagtgttccaggaaggctgtctataggtycacctttgccaagctcctgtggagaagccccaactgtgtctgtgtagtggtggacaaggtgggagagaagataccttctccaggacccttcatgagcagc

SEQ ID NO: 103336 - DNA, 201 bp, Homo sapiens
tttttttgagctagggtctcactctgtcacccaggctgaagtgtagtggtgtaatcatggctcactgcagcctggacttcccggggtcaggcagtcctcckgcctcatcctcctgagtagctgagaccacaggcacatgctaccacatctggcaattttttttcattatttgtagaggtgagggtcccactatgttgccca

SEQ ID NO: 103337 - DNA, 201 bp, Homo sapiens
gtcacaaactcctgacctcaggtgatccacctgccttggcctcccaaagtgttgggattacaggcgtgagccactgcccctggcctgtatttaatagatawgtacttgatgtgtgggcaagttcactgtctcctatggggttgagatggaaaggtctcttgaagctcatctcattcccctgtggtgtgtgcttttttattt

SEQ ID NO: 103338 - DNA, 201 bp, Homo sapiens
tattacagtaattctcacctcatagaatgagttggaagggttgcctctgtgaggtaggttccctatgcactggttatgaacttttctgatttcagtaagayagaacactcacacaagttacatgaagtgcccggccacatctgttgttttttgacatttttttttttcccgctgtaggcagagtcttgctctgtttctcag

SEQ ID NO: 103339 - DNA, 201 bp, Homo sapiens
aaaatttgtaggattttaaaggattaaaaatgtttttaaaaaccacatttagaatatacgtgctcccttgttaatgcatttaataacaagatttagcagtrgatctagtaactaccgtaatttcaaagtagtcaaaggtgaaatatttcagggtatctgcaacaactttaataggacgtaaaaatatctgtggcttctaat

SEQ ID NO: 103340 - DNA, 201 bp, Homo sapiens
ttgttttgtgcaatttatgagagctgagaaaaacttgtacagaaggaaccattgaaaagagagatagaacaaagatgttttctggacatgatgttcactcmccactattaagcagatggaagaattcactgaattgatacttttgaccacctcttatgctcatgtggtagggtgggagtgaggagaaggtggagatgactg

SEQ ID NO: 103341 - DNA, 201 bp, Homo sapiens
gccttactcccaagcaggttctgtagtccagcccccgcggctccctacagccagccgatgctgcgcaagcgccgtacccacgctttagcacatgcgtactyaggtgcgccggtaggggacgcgccggcacagcaaaaatggcggcggcattacgggtggcggcggtcggggcaaggctcagcgttctggcgagcggtctcc

SEQ ID NO: 103342 - DNA, 201 bp, Homo sapiens
cttccttggagaacctgtgatagagctggagctgtctacctctacctctgtaattctgtaatagaaatgtcattctgtagtgtcattacatcttatacttstctttaccattttgagctcagaagtaaatttattcctgcaggttgttgatgagcgtgaattttttgagatcatgcccaattatgccaagaacatcattgt

SEQ ID NO: 103343 - DNA, 201 bp, Homo sapiens
ggctcttgggtgtttgggggctttaatcagcctattaaatatctggtcctttgtcttccatgaaggtacccaatcgtgatggggagtgaaaccagtgttaytgcctcctgttttgaaaagtgcactcagaacgttttccagaaaacactgtggtattttgtgaatgtcgttttttatatcaagaacatttgtctcaataaa

SEQ ID NO: 103344 - DNA, 201 bp, Homo sapiens
tcgtgccattgcactccagcctgggcaacaagagcgaaactccatctaaaaaaaaaaaaaagccaggcatggtggtatgcacctgtagtcccagctactgsggaggccaaggtgggagttcacttgagcccaggaagttgagggagcagttaaccatgtttgtgccacggcactctaccctgggtgacagagcaagactct

SEQ ID NO: 103345 - DNA, 201 bp, Homo sapiens
aattactaacccatgaggaaaatctgtcacattagaagtaaaagcaggcccgggcctgccctcagattaacagatgggtcaacatctgctttcatgaaagkactactttgccattctgtctactgtaagttctgtcaaagcagtacctgggaacaaaactggctgctggaagacgttacaacgtgagcctgtggttctaga

SEQ ID NO: 103346 - DNA, 201 bp, Homo sapiens
agctgagaaaaacttgtacagaaggaaccattgaaaagagagatagaacaaagatgttttctggacatgatgttcactcaccactattaagcagatggaaraattcactgaattgatacttttgaccacctcttatgctcatgtggtagggtgggagtgaggagaaggtggagatgactgagacaagagttcccaccctga

SEQ ID NO: 103347 - DNA, 201 bp, Homo sapiens
cacttaacataagcttttgggcaacttattaaatctctgtgggtcattttaataataattcttccttcacaagtgtatcgttagaccatagatagcaaaaygataggcgctcagtaaaaaccatgtgcttattctcgtgccccatgaaagagtgatggtaggttctttctcctttgtggaagcaggaaaactgaacttggg

SEQ ID NO: 103348 - DNA, 201 bp, Homo sapiens
gtgtatgtataggtatgcatgtgtatgtatgtatatgcatgtgtatgtataggtatgcatgtgtatgtatgtatatgcatgtgtatgtatatgcatgcatrtgtatgtatatgcatgcatgtgtatgtacgtatatgcgtacatatgtatgcatgtatatgtatgcatatgtatatgtatacgcatatgcatacatatata

SEQ ID NO: 103349 - DNA, 201 bp, Homo sapiens
ggccaggtgtggtggctcacacctatgatcccagcactttgggaggccgaggcaggtggatcacgaggtcaggagatcaagaccgtcctggctaacacggkgaaaccccatctctactaaaaaaaaacaaaaaattagccaggtgtggtggcgggcgcctgtagtcccagctacttgggaggctgaggcaggagaacggca

SEQ ID NO: 103350 - DNA, 201 bp, Homo sapiens
tgttctccatgatcttgatattttaaaaaatagctttggccaggtgtggtggctcacacctatgatcccagcactttgggaggccgaggcaggtggatcaygaggtcaggagatcaagaccgtcctggctaacacggtgaaaccccatctctactaaaaaaaaacaaaaaattagccaggtgtggtggcgggcgcctgtag

SEQ ID NO: 103351 - DNA, 201 bp, Homo sapiens
gcattgagatcaacgggcaaatctgcccttcaagccctcccatgaacagcccttgctttgcttactaaattgtctgtgatgacatcactgagtgatctttkttccattgtagggaaagctaacagccagggagaggatcagtctcttgctggaccctggcagctttgttgagagcgacatgtttgtggaacacagatgtgc

SEQ ID NO: 103352 - DNA, 201 bp, Homo sapiens
tttggaggcagtctgtcaggagcacatgcccaaaagatctgcaaagtaagtgtttaatactcaaattcaatccattgctttcctcagttacatagtgcttwttgagtatctttggggtacaagacactgagctaggtacttggggtagggcagaggtatgcaagatgtgctaccaacccgaaggggtgcataacaattttc

SEQ ID NO: 103353 - DNA, 201 bp, Homo sapiens
gcacggatccaagaaggagtggagtctttggctggctatgcagacatctttctggtgagaaacctgttaatagagaataaaaaaatacagggcttaagttytctaagccatggcctggccagagcttctccaactctcctcattgttctctgccgcattgtgtctgttctgtgggtcctttctgtgtcactgggggtggga

SEQ ID NO: 103354 - DNA, 201 bp, Homo sapiens
tcctcctgcctcagcctcctgtgtagctgggactacaggcacacactgccatgcctgcctaattttttttttttattttggtagagaactggtctcactgkgttgcttagactggtcttgaactcctgggctcaagcaatcgtcctccctcccaaagtgctgggattacgggtataagccacagcacctggtctataaaaa

SEQ ID NO: 103355 - DNA, 201 bp, Homo sapiens
aagttcaggtattaaccataataaggaaggactttttttttttttttttgatatggagtctcactctgtaacccaggctggagtgctgtggcacaatctcrgcccaccgcaacttccacctcccaggttcaagtgattctcctgcctcagcttcccaggaaggacattttcaactgctaaaagccatagttcacaatgata

SEQ ID NO: 103356 - DNA, 201 bp, Homo sapiens
acccaccaccatgcctggctaattttgtttttgtatttttagtagagacggggtttcaccgtgttagccaggatagtctcgatctcccgacctcgtgatcygcccgccttggcctcccaaagtgttgggattacagatgtgagccactgtgcccggctggctttccaattcttttcttttttttgagatggagtctcactc

SEQ ID NO: 103357 - DNA, 201 bp, Homo sapiens
gactatagctgcatgccaccacatctggctaattttaaaattttttgtagagatggcaactcactatgttgcccaggctggcttttccaattatttatttwtttttttttgagttggagtctggctctgtcgcccgggctggagtgcagtggcgtgatctcggctcactgcaagctctgcctcccgggtacacgccattct

SEQ ID NO: 103358 - DNA, 201 bp, Homo sapiens
gcgaagttgggcttgatggacacatggcctgacccaaggccaaacctcagcccaggagtacgtctcagggtcactgtagcccctggctgcccacactgggmaggagggaatgaaagcctattggagagaagaggttggagaggggcaagttgctgggtcctcctgtagagtgggagtgggctctggcttagtttttctgct

SEQ ID NO: 103359 - DNA, 201 bp, Homo sapiens
tatatatgtatacatatatatatgcatgtgtatatgcgtatatatgtatacgtgtatgtgtatatacatatgttcatgtgtgcatatgtacgtatatgcayatatatgtatacatacatgtatacatatttgtgcatacacacatacacatgcatacatatgcatgcataggtatatatgcatatgtatgtatatgtatgc

SEQ ID NO: 103360 - DNA, 201 bp, Homo sapiens
caacaaatactcatttagaatatgtggaaaaaggcaaatagcaaaggaattaaaaatttaaaatagaataataaaaatgtaaaaaaagaaacaaaacaaamcaaatattcatcgagtacctatgtgtgaagcattgttttaggtgctaggaatacatctgtggacagaacaaaagaaagacacctgcccatatggggctta

SEQ ID NO: 103361 - DNA, 201 bp, Homo sapiens
tttgatggactgtgtctgatgcacttggccctgtatccccagggcaaggcacaaaaaggtgctccgtacatatatttttctctcttttcttttttcttttrtggtaacagctttattgagatgtaattcatataccgtatattttaaacacctatttatagtgtacaattcagtggtttttaaaatacattcagagttgga

SEQ ID NO: 103362 - DNA, 201 bp, Homo sapiens
gattacaggtgtgagccactgcggctagcttttttttttttttttttttttttttttttaaaagacaggttctcgctttgttgctcaggctggagcacggkggagtgatcacagctcaccacaacctccgcttcccaggttcaagtgattctcctgcctcagcctcttgagtagctgggattacaggcacgtgccaccact

SEQ ID NO: 103363 - DNA, 201 bp, Homo sapiens
tgattctcctgcctcagcctcccgagtagctgggattacaggcacacaccaccacgcccagctaatttttatattttagtagagatggggtttcaccatgytggccagggtggtctggaactcttgacctcaagtgatcctcctgccttggcctctcaaagtcttgggattacaggtgcgagccaccatgcccgggcaact

SEQ ID NO: 103364 - DNA, 201 bp, Homo sapiens
tgaggggtggcatcatctcgggatgcagatgatccactcccttttctgtgcttcaccagggtttgtggatgacatcatccaaccttcttccacacgtgccygaatctgctgtgacctggatgtcttggccagcaagaaggtacaacgtccttggagaaaacatgcaaatattccattgtaaacaaatcaaaggaaaagaaa

SEQ ID NO: 103365 - DNA, 201 bp, Homo sapiens
aggagagcctcgcaacagtgtggggagttgtagcaacagtgaccacccatctctttgcacctctgtgatcagaagcagcagtcagcaagcacagattctcmatatttggaggacagggtccttttatgcccaccccggctcctgcaagctgtgtgcaaactgctgcaggaacacttgcggaaatatctgtcatggagctgg

SEQ ID NO: 103366 - DNA, 201 bp, Homo sapiens
tgaaccccagaggcggaggttgctgtgagctgagatcacaccattgtactccagcctgggtgacagaccgagaccctgtcttcacttaccgcccccccccsccccccgaaaaaaaaaaggcaagcctgagtggcatcaaacctttgtttcccatgaatatactagtccctgcttgatggactgttacctgggaacaggggc

SEQ ID NO: 103367 - DNA, 201 bp, Homo sapiens
gccaggtgcatgatggtcatatatcatgtgttgatgaatttggtcatagttgttaacttctttttttttgagacaggatccagctctgtggcccaggctgragtgcagtgacacaatcttagcttattgcaacctccgcctcccaggctcaagcaatcctcccaccacagactcttgggtagctaggactacaggcatgca

SEQ ID NO: 103368 - DNA, 201 bp, Homo sapiens
cagtttttagatactccagttttgttttgttttttttgatccatttttttctcttcgcttttcaatttgagtggtttctcttgagatatcctcaagctcaragattctttcctcaagcatgcccagtctaccaaaaaacatcaaatgcattctttatttctgttgcagtgtttccaatccctggtatattttagttatttt

SEQ ID NO: 103369 - DNA, 201 bp, Homo sapiens
gctggagtgcagtggtgtgatctcagctcactgcaaccttcggctcccaggttcaagtgatcctcctgcctcagcctcctgtgtagctgggactacaggcrcacactgccatgcctgcctaattttttttttttattttggtagagaactggtctcactgtgttgcttagactggtcttgaactcctgggctcaagcaatc

SEQ ID NO: 103370 - DNA, 201 bp, Homo sapiens
ctctgtgccccgagtttcaagccattctctcacctcagcatcccaaatagctgggattacaggcatgtgccaccatgctgggctaatttttgtatttttartagagacggggtttcgccatgttggccaggctggtctcgaactcctgacttccagtgatctgcccaccttggcctcccaaagtgctgggattacaggtgt

SEQ ID NO: 103371 - DNA, 201 bp, Homo sapiens
tcttcctcatgtctaggcacagcacaggaatacgggggcatcatccggcatggtgccaagcttctctacgcatttgctgaggcaactgtacccaaagtcayagtcatcaccaggaaggtgaggacctcatgttggaggccatgaccctgctcactttcctacagcatagccgtggtgggaggtctggcagagttttaccag

SEQ ID NO: 103372 - DNA, 201 bp, Homo sapiens
tgtgttggccagggtggtctccaaactcttggcctcaagtaatctgccggcctcagcctcctaaagtgctgggagtataggcatgagccactgcgcccagytatagtaaatatttcttaacatattcattcattccactgcagatggacatttgaattatttcaagatttttgccattgcaaatgatgctgatgtaaacat

SEQ ID NO: 103373 - DNA, 201 bp, Homo sapiens
taatcacagggcgctgtggagatcatcttcaaagggcatgagaatgtggaagctgctcaggcagagtacatcgagaagtttgccaaccctttccctgcagyagtgcgaggtaggggactgtggtgaagagggcagctttgtttgtttggtcaacttgctcattctttctctacagaaattgtcacataactgcctttttgc

SEQ ID NO: 103374 - DNA, 201 bp, Homo sapiens
gtacgtgcttgtaataccagctactcgggaggctgaggcaggagaatcgcttcaacctgagaggcggaggttgcagtgaaccaagatcgcgccactgcacyccagcctgggtggcagagcaagactctgtctcggaaaaaaaaaaaaaaataataaaaataacccaggtcaggaaatagctcttcaagagccctgtcatca

SEQ ID NO: 103375 - DNA, 201 bp, Homo sapiens
acagggcgctgtggagatcatcttcaaagggcatgagaatgtggaagctgctcaggcagagtacatcgagaagtttgccaaccctttccctgcagcagtgygaggtaggggactgtggtgaagagggcagctttgtttgtttggtcaacttgctcattctttctctacagaaattgtcacataactgcctttttgcctttg

SEQ ID NO: 103376 - DNA, 201 bp, Homo sapiens
aaatacaaaaattagccaagcgtggtggtacgtgcttgtaataccagctactcgggaggctgaggcaggagaatcgcttcaacctgagaggcggaggttgyagtgaaccaagatcgcgccactgcactccagcctgggtggcagagcaagactctgtctcggaaaaaaaaaaaaaaataataaaaataacccaggtcagga

SEQ ID NO: 103377 - DNA, 201 bp, Homo sapiens
caccagggtttgtggatgacatcatccaaccttcttccacacgtgcccgaatctgctgtgacctggatgtcttggccagcaagaaggtacaacgtccttgragaaaacatgcaaatattccattgtaaacaaatcaaaggaaaagaaaccaagaactgaattactgtctgcccattcacatcccattcctgccttttgcaa

SEQ ID NO: 103378 - DNA, 201 bp, Homo sapiens
gatattgaaatctcaggcaaggccagggaagttttcctcaatgattctctcaaataagttttctaaacttttagccttctcttctccctcaggaccaccamgtatttttaggtttggttgttttacataatcccatatttcttggaagctttgttcatttcttctttctttttttttttttctttcttgagatagggtctt

SEQ ID NO: 103379 - DNA, 201 bp, Homo sapiens; identical to SEQ ID NO: 16246

SEQ ID NO: 103380 - DNA, 201 bp, Homo sapiens
taagtaaaggggacagtgttgggcaaactgaaggcatctgtagatggccaatgccttccttaagggtacactgtgctctcggtagtccttgtgcaacacaycgtgatggctctctggtaactctagaagtcagattctccctcttccctagggtttgctgttttctgttattgtttttgtcttttttattcttgtagtctc

SEQ ID NO: 103381 - DNA, 201 bp, Homo sapiens
aaagtgctggggttacaggcgtgagccagcacactcagcctatttttattttattttttagagacagggtcttgctctgttgcctgggctagagtgcgttrgtgcaatcacagctcactgcagccttgaactctgggctcaagcaatcctcctgccttagcctacggagtagctaggactataggcacacactagtacacc

SEQ ID NO: 103382 - DNA, 201 bp, Homo sapiens
cctgcttccttggagaacctgtgatagagctggagctgtctacctctacctctgtaattctgtaatagaaatgtcattctgtagtgtcattacatcttatrcttgtctttaccattttgagctcagaagtaaatttattcctgcaggttgttgatgagcgtgaattttttgagatcatgcccaattatgccaagaacatca

SEQ ID NO: 103383 - DNA, 201 bp, Homo sapiens
ggtgacagagcaagactctgtctcaaaaaaaaaaaaaaaattcaaacttcacagaaaaatgacaagaatagtatgggaactcctatatgtccttttcccarattcaccagttgtttacattttctccatttgttctgttattctctctccatatatacatatttgcatgttacatttttctgaaatatttgagaataaatt

SEQ ID NO: 103384 - DNA, 201 bp, Homo sapiens
ctttggtaaccacaattaaaacaacattgccaaagtgtattaaatttctaggtgttgttccagttgtctagtgctgtgcagaaattcaccctataactcarcagcttaaactaaccaccgtttcccccactgcttatggttctgtggggtccacaatttggtctgggcccagctgagtggttcttgtgctggtcttgcctg

SEQ ID NO: 103385 - DNA, 201 bp, Homo sapiens
aaacatctcaaaaaaaaaaaaaaaacccactagtagtgttttatagtctttttctagtaagttcagtgtctatgcttacttagggatagtttcttcatttyataccttgtgatttttttaattgaaaatggggtatttatacattataatgtggtaacgctggcagtcaaattttcctcttttcccaagctttgttttttt

SEQ ID NO: 103386 - DNA, 201 bp, Homo sapiens
tcctgtgtatgttggttcacatgtgggtgtcccacaggtcccttaggttctgctcatttaatttttttattttctcctcagagtaatttcaattgttttaycttcatattctctgatctttcttctgcctgctcaaatctcctattgaatccttgtagtgaatttttcatttcatttattgtacttttcagctccagaatt

SEQ ID NO: 103387 - DNA, 201 bp, Homo sapiens
ggctcacacctgcagtctcagcactttgggaggccaaggcaggtagatctcttgacgtcaggagttcaagaccagcctggccaacatggtgaaatcctgtstctattaaaaatacaaaaattagctgggcatggtggcacatgcctgtaatcccaactactcaggaggctgaggtgggacaactgcttgaacctgggagac

SEQ ID NO: 103388 - DNA, 201 bp, Homo sapiens
ggatttcttgtaaatgatgagtttttttttttttttttgctgcttttaagattctcttttgtctttcagtaatttgactataatatgtctcagtgtgggtytctgaatgtattcttcttagagttagttgagtttcttatatttctagtttcacatcttgcatcaaacttgggaagttttcggacattatttcatcagatt

SEQ ID NO: 103389 - DNA, 201 bp, Homo sapiens
tctgttggtctgtatgtctgtccatattccagtgtcacactgttttgattactgtagctttgtatatgttttgaaattgggaagtgtgtcttccaactttrttgttgttcttaggattgttttaggcatttggggcccttttaaattccatatgaattttggtagtgactttcccatttctccaaaaaaggctgttggaat

SEQ ID NO: 103390 - DNA, 201 bp, Homo sapiens
atgcctcaaacatctctgtaaccagatgcttttgcttttctgttttggcagaggaatgttacggcatccggagtcatccctcagatttctctgatcatggrcccatgtgctggtggggccgtctactccccagccctaacagacttcacgttcatggtaaaggtaagaaagaagggcctgtttttggtgccgtttgagatt

SEQ ID NO: 103391 - DNA, 201 bp, Homo sapiens
ataatattatgttgcatgtatataccacattttgattgattgtccatttgtcagtggacacctgggttatttccacctttgggttactgtgaataatgctrgaataaacattgatatataagtatctgtttgaacctcagttttcactttttctgggtgtgtacccagaagcaaaataactgggttatgtggtaattctag

SEQ ID NO: 103392 - DNA, 201 bp, Homo sapiens
ctcgggatgcagatgatccactcccttttctgtgcttcaccagggtttgtggatgacatcatccaaccttcttccacacgtgcccgaatctgctgtgaccyggatgtcttggccagcaagaaggtacaacgtccttggagaaaacatgcaaatattccattgtaaacaaatcaaaggaaaagaaaccaagaactgaattac

SEQ ID NO: 103393 - DNA, 201 bp, Homo sapiens
tgtagtgagccggggattgtgtcactgcccgggaggcagaagttacagtgagccgagatcacgccactgcatgacagagtgacactgtccccacctccccmaaaaaaaaattttgtcatggtaaaatatatataacaaaatatgtctgtttggcccatttaaagtagtgcaaccgcagtgattacatacaaagtgtatgca

SEQ ID NO: 103394 - DNA, 201 bp, Homo sapiens
agaaaactgttttggctgggtgtggtgcctcacgcctgtaatcccagcactttgggaggccaaggcgggtggatcacgaggtctggagttagagaccatcytagccaacatggtgaaaccctgtctctactaaaaatacaaaatacaaaaaatgagctgggcgtggtggcacgtgcctgtagtccagctacttgggaggct

SEQ ID NO: 103395 - DNA, 201 bp, Homo sapiens
tgatctcagcacactggaccctctgcctcccagggtcaagcagtccttccacctcggcctcccgagtagctgggactacaggcacataccaccatacctgrctaattttctttttttgtatttttggtagagatggggttttgccatgttgcctgtgctggttttgaactcctgagctcaagtgatccgcccacctcagcc

SEQ ID NO: 103396 - DNA, 201 bp, Homo sapiens
tagcacatgcgtactcaggtgcgccggtaggggacgcgccggcacagcaaaaatggcggcggcattacgggtggcggcggtcggggcaaggctcagcgttmtggcgagcggtctccgcgccgcggtccgcagcctttgcagccaggccacctctgttaacgaacgcatcgaaaacaagcgccggaccgcgctgctgggagg

SEQ ID NO: 103397 - DNA, 201 bp, Homo sapiens
aggaaaaaatctaaatggttgttataaaagctaattttttttttttttttttttttttttttttagacagggtcttactggtgtctaggctggagtgcagkggtgtgatctcagcacactggaccctctgcctcccagggtcaagcagtccttccacctcggcctcccgagtagctgggactacaggcacataccaccata

SEQ ID NO: 103398 - DNA, 201 bp, Homo sapiens
ggcgggtggatcacttgaggctagtagtttgagaccagcatggccaacatgatgaaaccctgtctctactaaaaatacaaaaattagccaagcgtggtggyacgtgcttgtaataccagctactcgggaggctgaggcaggagaatcgcttcaacctgagaggcggaggttgcagtgaaccaagatcgcgccactgcactc

SEQ ID NO: 103399 - DNA, 201 bp, Homo sapiens
gctagagtgcagtggcataatcttggcttgctgcaacctctgccttccagtttaagcgattctcctgcctcagtctcctgagtagctgggattacaggtgyctgccaccacaccaggccaattttttgcatttttagtagagatggggtttcgctacattggccaggctggtcttgaactcctggcctcaggtgatccacc

SEQ ID NO: 103400 - DNA, 201 bp, Homo sapiens
gttgcagtgagcgctttgggaggctgaggcgggtggatcacttgaggctagtagtttgagaccagcatggccaacatgatgaaaccctgtctctactaaamatacaaaaattagccaagcgtggtggtacgtgcttgtaataccagctactcgggaggctgaggcaggagaatcgcttcaacctgagaggcggaggttgca

SEQ ID NO: 103401 - DNA, 201 bp, Homo sapiens
tcggggtgaagggtatatgtactgttcttgaattttttatttttatttatttattttttgagataggatctccctccgttgcccaggctagagtgcagtgrcataatcttggcttgctgcaacctctgccttccagtttaagcgattctcctgcctcagtctcctgagtagctgggattacaggtgcctgccaccacacca

SEQ ID NO: 103402 - DNA, 201 bp, Homo sapiens
gacagcacaggtcgggaatagggtgggcacaggaccagtggccactgagtagtgtgttctggaaagacctagtggctatagataccctagtggcacagatrgacttgagggctggagataggagtagtaagggccagcagagctcaggagtctttagaaggccctctgaggatcataaattaggggccatgtccacagagt

SEQ ID NO: 103403 - DNA, 201 bp, Homo sapiens
ctggtctccctgcttctgaacctgggagctgaaggttgcagtgagcgctttgggaggctgaggcgggtggatcacttgaggctagtagtttgagaccagcmtggccaacatgatgaaaccctgtctctactaaaaatacaaaaattagccaagcgtggtggtacgtgcttgtaataccagctactcgggaggctgaggcag

SEQ ID NO: 103404 - DNA, 201 bp, Homo sapiens
ggaggctgaggcaggtggattgcgtgaggccaagagtttgagaccagcctgcgcaacatagcaagaccctgtctctacaaaaaatataattttttttttttggtggcatatacctgtagtcctagctacttgggaggctgaggtgagagaattgcttgagccctggaggttaaggctgcagtgagctgtgatcatgcttct

SEQ ID NO: 103405 - DNA, 201 bp, Homo sapiens
gagcccagaaggtcaaggcagcagtgagccaagatcgtgccactgcactctagctctgggtgacagaggaagaccctgcctcaaaaaaaaaaaaaaaaaaaaggtaagatgaccacttctcttacttggtggacaatgcagaattttctgaactttgcttactaagtctatatatacacacctagctggtgctacccccat

SEQ ID NO: 103406 - DNA, 201 bp, Homo sapiens
atagttgcactggagtaggattagaattatcagcatgaactcatggtttttcatatagctggactttggacgttttagaaggagtcacacacacacacacmtccctaaaaggaacccaggccttttggagaaatggctgattgtagggctggggcaggaaagaaaccaagatgaaccagaaagtaagatacttccaaaata

SEQ ID NO: 103407 - DNA, 201 bp, Homo sapiens
ggcatttgtttatctgaaaatggctttatctctccttcatttaggaaacttagttttgctggatgcaaaattcttgggtggcagttattctgtttaaggasgctaaagatagaaccccaatcccttctagcttgtaaggtttctgctgagaaatctgctgttagtctgattggttttcctttataggttacctgatgcttt

SEQ ID NO: 103408 - DNA, 201 bp, Homo sapiens
cgtgatctcgactcactgcaagctccgcctcccaggttcacgccattctcctgcctcagcctcccgtgtagctgggactacaggcgcgcaccaccatgccyggctaatttttgtatttttagtagagacggggtttcaccgtgttagccaggatggtctcgatctcctgacctcgtgatctgcccgtctcggcctcccaaa

SEQ ID NO: 103409 - DNA, 201 bp, Homo sapiens
aacatgacgaaactctgtctctacaaaaaataaattagggccaggcaaggtggctcacacctgtaatcccgcactttgggaggccgaggtgggcggatcayctgaggtcgggagttcgagaccagcctgactaacatggagaaacctcgtctttactaaaaatacagaattagccaggtgtggtggtacatgcctgtaatc

SEQ ID NO: 103410 - DNA, 201 bp, Homo sapiens
ttgagcccaggaatttgagaccagcctgggcaacatgacgaaactctgtctctacaaaaaataaattagggccaggcaaggtggctcacacctgtaatccmgcactttgggaggccgaggtgggcggatcacctgaggtcgggagttcgagaccagcctgactaacatggagaaacctcgtctttactaaaaatacagaat

SEQ ID NO: 103411 - DNA, 201 bp, Homo sapiens
cagagctcaggagtctttagaaggccctctgaggatcataaattaggggccatgtccacagagtctagagtgaggccagagtgatcattgttaagtatcaytggggccctctgctcagagggggttttgtctttatagagaagagagtacacagggcatcctagaaggttggactgtgtgtgtggaggtccgtgggagaca

SEQ ID NO: 103412 - DNA, 201 bp, Homo sapiens
tgttattgtcatagattatatctttatacatgttatactcattaacaacagatttattgtttcatgcatttgcattttatttttatttatttatttatttwttttttgagacggagtttcgctctgtcgcccaggctggagtgcagtggcgtgatctcgactcactgcaagctccgcctcccaggttcacgccattctcct

SEQ ID NO: 103413 - DNA, 201 bp, Homo sapiens
ttttatttatttaatttttcccctgtattttatttactaagttgatggttaaggcttcaggccagtaggggagctgtccctgggtaggaaccagttgtggstaaagcaaatgggtaaatgcaatactcagtaaggcagagaggttccacccttgatgaaagtggctgggggaactctcaattagatgcactgaggtcttat

SEQ ID NO: 103414 - DNA, 201 bp, Homo sapiens
atttaatagatatgtacttgatgtgtgggcaagttcactgtctcctatggggttgagatggaaaggtctcttgaagctcatctcattcccctgtggtgtgygcttttttatttatttaatttttcccctgtattttatttactaagttgatggttaaggcttcaggccagtaggggagctgtccctgggtaggaaccagtt

SEQ ID NO: 103415 - DNA, 201 bp, Homo sapiens
ttttagccttctcttctccctcaggaccaccaagtatttttaggtttggttgttttacataatcccatatttcttggaagctttgttcatttcttctttcyttttttttttttctttcttgagatagggtcttactctgttgcccaggctgtagtacagtgttgtgacctttgtctcctgggctcaggcaatcctcacacc

SEQ ID NO: 103416 - DNA, 201 bp, Homo sapiens
agacggggtttcaccatattagccaggttggtctcgaactcctgaccttgtgatccgcccacctcggcctcctaaagtgctgggattacaggtgtgagccmccgcgcccagctggtttttttttttttttttaatatttatttatttagagacagtgtcttggttggccaggctggaatgcagtggcatgatctctgctca

SEQ ID NO: 103417 - DNA, 201 bp, Homo sapiens
gcctgggtcacagagcaagacctgtctcaaaaaaaaaatagtattgtggtaatgtttatttcctgattttgataatatcactgtagttataaaaaagaatsttcttatgtgtttatatatatataaaagagagagtgatggtcgggcacagtggctcacgcctgtaatcacagcatgttggaggccaaggtgggaggattg

SEQ ID NO: 103418 - DNA, 201 bp, Homo sapiens
agtggagaagcaggcactcctgtgcattgctggtaggggactctggtattatccaggactaaattagcatttgccctttaactcagcaatcccattcctarcaatttaccctgaagatacacttcccaccatacaaaattatagatgtacgaggttacgaccattacgttgtcatttgtaattgcgagatactctaaataa

SEQ ID NO: 103419 - DNA, 201 bp, Homo sapiens
agttgtatattctgtttgctaatgttttgagtttctgcattgatattatgtgatactagtgcgtatattttaaggtattttaaaatcaggttttggtatcratgttgtatttgctttacttatttatttatttaaaaaaaatttttttttgagacagagttttgctcttgtcacccaagctggaatgcggtggcacaatct

SEQ ID NO: 103420 - DNA, 201 bp, Homo sapiens
gcagtcagcaagcacagattctcaatatttggaggacagggtccttttatgcccaccccggctcctgcaagctgtgtgcaaactgctgcaggaacacttgmggaaatatctgtcatggagctggggtgggggatgggtagctgctactatgctaagagctgaaattaactccaattttcagtccaatccttcccctggaag

SEQ ID NO: 103421 - DNA, 201 bp, Homo sapiens
cctagaaggttggactgtgtgtgtggaggtccgtgggagacaggagccatttgtacctttttttggtacagcagattcctgggtcattaagtaaaggggayagtgttgggcaaactgaaggcatctgtagatggccaatgccttccttaagggtacactgtgctctcggtagtccttgtgcaacacatcgtgatggctctc

SEQ ID NO: 103422 - DNA, 201 bp, Homo sapiens
attgtccctttggaatcaaccaaagcctacaacatggtggacatcatacactctgtaagtgccacatctgtttgtcttgcctgtcctagtcagccacattyatgggcattgtgcttcggcttagtgaggaagcactggaccacttggcctccatgtcagacagcacaggtcgggaatagggtgggcacaggaccagtggcc

SEQ ID NO: 103423 - DNA, 201 bp, Homo sapiens
ttgactttagatagcccgatgactatgtgccttggtgataatctttttgcaatgaatttcccaggagttctttgagcttcttgcatttggatattgaaatytcaggcaaggccagggaagttttcctcaatgattctctcaaataagttttctaaacttttagccttctcttctccctcaggaccaccaagtatttttagg

SEQ ID NO: 103424 - DNA, 201 bp, Homo sapiens
agtcctagctacttgggaggctgaggtgagagaattgcttgagccctggaggttaaggctgcagtgagctgtgatcatgcttctgcactccagcctgggtsacagagcaagacctgtctcaaaaaaaaaatagtattgtggtaatgtttatttcctgattttgataatatcactgtagttataaaaaagaatgttcttatg

SEQ ID NO: 103425 - DNA, 201 bp, Homo sapiens
cactacacccatctaatttttgtatttgtagtagagacagggtttcaccatattggtcaggctggtctcaaactcctggcctcaggtgatccacctgcctyggcctcccaaattactgggattacaggcatgagcccctgcgcccggctgttttttgactttttaattatggccgtttttgtaggagtaaggtggtatctc

SEQ ID NO: 103426 - DNA, 201 bp, Homo sapiens
gattcaccagttgtttacattttctccatttgttctgttattctctctccatatatacatatttgcatgttacatttttctgaaatatttgagaataaatkggagatactatgtcttctttacctcctaagttcttcattgggtatttctaaagaataaagatattctcttaaataaccagaatacagtaataaaaatcag

SEQ ID NO: 103427 - DNA, 201 bp, Homo sapiens
tgaccccagcctatttatttcttttgattcttttttctttatttttgtctgattgggttaatttgaaagccttgtcttggagctctgaaattcattctttsacttgttctggtctattgttgaaactttccattgcattttgtatttccctaagtgtgtttcatttccggaaattctgattgttttttctttatgatatct

SEQ ID NO: 103428 - DNA, 201 bp, Homo sapiens
accactgcattccagcctgggtgacagagggagaccctgtctcaaaaaaagaaaaaaaaaaaaagcagaatagtttgtagtaaaataataatgaagaatcrgggtgaagggtatatgtactgttcttgaattttttatttttatttatttattttttgagataggatctccctccgttgcccaggctagagtgcagtggca

SEQ ID NO: 103429 - DNA, 201 bp, Homo sapiens
ctgatttccatgtcatctaaagtctactaataacacctatctgccttgggcaggttggatagaatgaaagtacttgcattgagatcaacgggcaaatctgyccttcaagccctcccatgaacagcccttgctttgcttactaaattgtctgtgatgacatcactgagtgatctttgttccattgtagggaaagctaacagc

SEQ ID NO: 103430 - DNA, 201 bp, Homo sapiens
cagatttctctgatcatgggcccatgtgctggtggggccgtctactccccagccctaacagacttcacgttcatggtaaaggtaagaaagaagggcctgtytttggtgccgtttgagatttgtgcagttccttacctgcaataaaaataattcctgacccagatctaggttgttacctgcattctcattggctttcagcat

SEQ ID NO: 103431 - DNA, 201 bp, Homo sapiens
acacagaatgtctttccatttttcttctttttttatttctttcagctgtgttttgtagttttcagagtccaagcctatcacctctttggttaaatttattmctaaatgttttattcttctagatgtcatgtacatggaattgctttctcaatttctttttcggattgttcattgctgctgtatagaagcacaactacaaaa

SEQ ID NO: 103432 - DNA, 201 bp, Homo sapiens
tacaaaaaatgagctgggcgtggtggcacgtgcctgtagtccagctacttgggaggctgaggcaggagaattgcttgagccggggaggaggaggttgttgyagtgagccggggattgtgtcactgcccgggaggcagaagttacagtgagccgagatcacgccactgcatgacagagtgacactgtccccacctccccaaa

SEQ ID NO: 103433 - DNA, 201 bp, Homo sapiens
catttgtctcaataaaagatttctctgctgtctcagatcatggaccaggccataacggtgggggctccagtgattgggctgaatgactctgggggagcacrgatccaagaaggagtggagtctttggctggctatgcagacatctttctggtgagaaacctgttaatagagaataaaaaaatacagggcttaagttctcta

SEQ ID NO: 103434 - DNA, 201 bp, Homo sapiens
gttctttgtcccaattttacctggtttcctggggtctttcagggacatgatctggctgtctcaggctctaacactcagcatttggatctgttttaggcctrtggaggtgcctatgatgtcatgagctctaagcacctttgtggtgataccaactatgcctggcccaccgcagagattgcagtcatgggagcaaaggtgagg

SEQ ID NO: 103435 - DNA, 201 bp, Homo sapiens
aattttacctggtttcctggggtctttcagggacatgatctggctgtctcaggctctaacactcagcatttggatctgttttaggcctatggaggtgcctrtgatgtcatgagctctaagcacctttgtggtgataccaactatgcctggcccaccgcagagattgcagtcatgggagcaaaggtgagggcctcttgcttt

SEQ ID NO: 103436 - DNA, 201 bp, Homo sapiens
accaagaaatttgcacccacacacagtgataatgagttgaaggagatctgtccaggttgggacgaccaaagatgttcatgaactcctctaatcacagggcrctgtggagatcatcttcaaagggcatgagaatgtggaagctgctcaggcagagtacatcgagaagtttgccaaccctttccctgcagcagtgcgaggtag

SEQ ID NO: 103437 - DNA, 201 bp, Homo sapiens
tggggtagagctgcagactttcccttctgagcccagcactgcaattgtgtctctgctgaaaggaacttcccatcagtggaaagatctggaactcaaggcctgccatctgaattcttttgtcccatggggtattcccttggtgtggtggtctcctccttcccttaggagtaagaattcctgagagccaggataagttgattg

SEQ ID NO: 103438 - DNA, 201 bp, Homo sapiens
agttttcagggggaatgctttcaacttttccccattcattacgatgttggctgtgggtttatcatatattgcttttactattttgaagtatatccctcctwtgcctagtttgagagttttttgtcataaagagatgctggattttattgcatgctttttctgcatgcaattgagatgatcatatggtttttgttttaaatt

SEQ ID NO: 103439 - DNA, 201 bp, Homo sapiens
tctggaagttttttaagagggtgtgtgcgacctcaaacctaggtctggcccatttgtagtttaagtgttcccatggtatttgccatccacagctttaggakagttgaaagatgccatttccccaaacgaaagtaatctgttaaattttttatgtaccctaggtggaacggccgccttctccattctccatggccccacaag

SEQ ID NO: 103440 - DNA, 201 bp, Homo sapiens
ccaaatacctcttttactctgtagttctatttcttgcctgccttaagtctgctttgccatatatgaaagtggctacatcacctgtcttttagtatttgcawaacctctgtattataccatttcactcctctatttttttttttttttgtaatatggaacgcttgatgaatttgtgtgtcatccttgcatagaggccatgat

SEQ ID NO: 103441 - DNA, 201 bp, Homo sapiens
agactatagatgtgtgccaccacacctagctaatttttgtattttgtgtagatacggggttttgctgtgttgcccagttttatttttcgatacagttgctyctcaacttaagatggggttatgtcccagtaaacccattgtaaattgaaagtgcattttgacttacagtattttcgactgggtttttccaaatattactcc

SEQ ID NO: 103442 - DNA, 201 bp, Homo sapiens
ctaagtttccaacatgtgaaactgggggacatatttaaatcgtagcattctcaccagcccattgagactactttaaacgcctagttcaaaacccctaatayagggcttactctaatgtattctttcttgaatcttagcctgttaagtcgtggctgcctggttgctctccagtgtcttctttcttttaaagcatatattgcc

SEQ ID NO: 103443 - DNA, 201 bp, Homo sapiens
gtttttttatatgtttttgtagagatggggttttgcaatgttgtccaggctgaattttaattttttagaaatagacacaaagcattttgggaggtcgaggygggcggatcaccagagttcaggagtttgagaccagcctggccaacatggtgaaaccctgtctctactaaaaatacaaaaattagccgggcatggtggcgc

SEQ ID NO: 103444 - DNA, 201 bp, Homo sapiens
tgaaagtgcattttgacttacagtattttcgactgggtttttccaaatattactccattgtaagtagagaagtgtatttgatgtttattacttttgcaccmttgtaaagttgaaaaattgtaagttggggatgtctgtgttgtatttttaagttctagtatttccatgtgatttttaaaaatgtatcgattccatcctttt

SEQ ID NO: 103445 - DNA, 201 bp, Homo sapiens
cttttcttaaagaagttgacctgtattttgaattacgagaattgaaattggtattgagagcttaatgtggctctccttcctttccttgattatggcgatgcctggaattatctctgttatttcactttatgcctcctctccaccccctccccaggacaatagtcccttggaagagctttcgacaggctctacatgaagtgc

SEQ ID NO: 103446 - DNA, 201 bp, Homo sapiens
gaggctgaggcaggagaatcacttgaatccaggaggcggaggtttcagtgagccaagatcactcactgcaacctcaaaaaaaaaataagaatctgtcgcgrcacacacacacacacacacacacacacacacataaagaatttctatctggtggccatccattgattaaaaatgggttggtaaactgtgacccatgggcca

SEQ ID NO: 103447 - DNA, 201 bp, Homo sapiens
actgaagaaataaatgttacctgtactactacctagaatcagacaatagttagcaatttgatacatgttcattgccattcttccttgtatgaaatcatatkgtcattgctggttttcactaaaaatatcttgaacatctttgcatgttattacatattctgttgcaatgattttcaaattatttcacgattatacatcagt

SEQ ID NO: 103448 - DNA, 201 bp, Homo sapiens
acacacacataaagaatttctatctggtggccatccattgattaaaaatgggttggtaaactgtgacccatgggccacctgtttgttcccccggggagccmagatagcttttcctaagagtcgttttgaaaaaaacaatcagagaagaatatgtgacacagactaatgtggcctacaaatcctaaatgattttctatctgg

SEQ ID NO: 103449 - DNA, 201 bp, Homo sapiens
gtgttttttatttttttgaagtattattttttggaagtattttttttttgaagtaagattgatctttatacttacaccacgttgcccttttagaatggagmaactcccagattccatttgtctatattagcaagcactggcaaattggcttaaataaaacccagggttggttactctttacagctatttgtttcctgatgg

SEQ ID NO: 103450 - DNA, 201 bp, Homo sapiens
ttctaactactctggaggccaaggctggaggatcagttgagcccagcaattcgacatagcaagaccgtatctttaccaccactgcccccatgcccccccctaaaaaaaaaaaatagctgggcatgatggtgtacgcctgtagttctaactagtctggagactgagacgggaggattgcttgatcccaggaattcaaggcgg

SEQ ID NO: 103451 - DNA, 201 bp, Homo sapiens
gtcttaaatgtgtcaccacaccttgacttcatgtgctataagtggtgaagaacctactgtcaaatccacagatgtcccacacatttaattctttttaacaraatttctgggccgggccccgtggctcacgcttgtaatcccagcactttgggaggccgaggtgggcggctcacttgaggtcaggagctccagaccagctct

SEQ ID NO: 103452 - DNA, 201 bp, Homo sapiens
tctaactactctggaggccaaggctggaggatcagttgagcccagcaattcgacatagcaagaccgtatctttaccaccactgcccccatgcccccccctaaaaaaaaaaaatagctgggcatgatggtgtacgcctgtagttctaactagtctggagactgagacgggaggattgcttgatcccaggaattcaaggcggg

SEQ ID NO: 103453 - DNA, 201 bp, Homo sapiens
aacaaaaacttaagaaaacaagagttcaagaaatgttgtattgagaatgatgtatttagttttacaattttcatattatcatttgaagagttgtgttttgttttttttttttcttgagaccagaatcttgctgtggcccaggctggagggcagtggcatggtcttggctcactgcaacttccacctcctgggttcaagtga

SEQ ID NO: 103454 - DNA, 201 bp, Homo sapiens
gtggaaaaaaaggtaagtaccacacgtgcactgcatgcgcgtaaaaacgaaacttttacctggctgactgttgcatttgaaatgagcagttgatggaagcrtcagcaagtaggcagtcagaaatccaaggaggcagaatgggaagagtgaagttgagaagtgttgtggcactaagtgaatggcatctcttggttgcagaga

SEQ ID NO: 103455 - DNA, 201 bp, Homo sapiens
agtttgctttttagggatttatcgttaaggactacaaattttactctggcatagaaaaaatacttttctaatgagtgtctcgtatcagacatgtgggtgcmgtacaatcaaaattgtgttgattagtggcctctgcttaagaataatctgtttactaaagagtttctgtattctgtattctttttttttttttgagacgga

SEQ ID NO: 103456 - DNA, 201 bp, Homo sapiens
tgccttggcctcccaaagtgctgggattacaggcatgagccaccgcatctggcctaaatattttcattgggagctgtacttggtacttggtttgaaccttktaagggctggattctgtagcttttgcagattgttggtcacccaattcttgtgttacctgctgctgccttttctctatttcttggttaccagagaccatgc

SEQ ID NO: 103457 - DNA, 201 bp, Homo sapiens
tctgcaacctctgtctcccaggttcaagcgattctcctgcctcagcctcctgagtagctaggattacaagcatgtgccaccaccacgtctggctaattttkgtatatttagtagagacagggtttcaccgtgttggccaggctggtcttgaactcctgacctcaagtgatccacccacctttgcctcccaaagggctggga

SEQ ID NO: 103458 - DNA, 201 bp, Homo sapiens
ctggcagtcaaccatggtttgaaaatattaaatggaaaattctagaaataattcataaattttgaattgcatgcccttcagagtagtgtgatgtaatttcrcaacgttctactttatcccagctgggatgcaaagcatccctttgtacagcatctccatgctgtatacactagcacctattagtcacctagtagctatctt

SEQ ID NO: 103459 - DNA, 201 bp, Homo sapiens
gtctgctttgccatatatgaaagtggctacatcacctgtcttttagtatttgcataacctctgtattataccatttcactcctctattttttttttttttkgtaatatggaacgcttgatgaatttgtgtgtcatccttgcatagaggccatgataatcatggtaatcatctctgtatcgttccagttgtagtgtatgagc

SEQ ID NO: 103460 - DNA, 201 bp, Homo sapiens
tggccaggctggtctcgaactcctgacctcaggtgagccgtctgccttggcctcccaaagtgctaggattacaggcgtgagccaccgcgcctggcctctarattcttttccatggaacatttattgaagatttctctagtttttgtcccttttaatagtcttatattcggacagagaacattccatgttctttctcaagtt

SEQ ID NO: 103461 - DNA, 201 bp, Homo sapiens
agatcttaatctctagttacagtgtcggtcttccccacttccttccacagactaacataggaaactacaattttaatatttttgttgtgaaatgtagtctstttataaatacctgacttacttttggaatgtagcacttgtaaactgggaactgtctgtatttgttttattaatatgagttattaactctgttgtacttag

SEQ ID NO: 103462 - DNA, 201 bp, Homo sapiens
actatctgtggtttcaggcatctgcacatcttggaatgcaaagggggactatttatcttctttggagaaacatctattcaaatcctttgcccattttaaarttgcattatttgtcttttcattgttgagttgtaagattttccttcatattctggatgctagaccagatacatgatttgcaaaactttactcccattctgt

SEQ ID NO: 103463 - DNA, 201 bp, Homo sapiens
tggagaatatgagggagaaataaaagaactggaccctcttttgctaatgcaactagaataagttctgttccctttttttttttttattttaatggagtctkggcattagaaggttggggctgggcatgcccatagctcatgcctataatcccagtactttgggacgttgaggctggaggatcagttgagcccagtttgagg

SEQ ID NO: 103464 - DNA, 201 bp, Homo sapiens
ttcatattctggatgctagaccagatacatgatttgcaaaactttactcccattctgtgggtcatcttttcactttcttaacagtatgccttgaatcacaraagtttttaattatggtgaagaccaatatttatttggtttttgtacttttaagaaattattgcctaattcaaggtcatgaggcctgttttttcctatttt

SEQ ID NO: 103465 - DNA, 201 bp, Homo sapiens
cctgtagttctaactagtctggagactgagacgggaggattgcttgatcccaggaattcaaggcgggagtgagttgtgattgtaccactgcactctaggtkgggtgacagagcgagaccctgtctcataaataaatagtaattgtatacaatgtgtagtgtgacttatttctgtaaaaaaatttttttaagcatatacgta

SEQ ID NO: 103466 - DNA, 201 bp, Homo sapiens
ctgaatagagcagcgttgatgcttgttagggagttgtgggaaatacctttctttggttgcagagaccagattagaaagacttgtgaaagctgggcaggagrgtgagattttgtaacagggcaaattgggagttactggtggtttttgagttggtgagtgtttaagaatggctaagctgatagtggtaagcagaaggatgtg

SEQ ID NO: 103467 - DNA, 201 bp, Homo sapiens
attccctcccatctccctacctgtcttatcctcggttactccgagaaggttggagaaatagcattgattgccctggaattatttatatacttaagcaagtygttgacttttcagcatgtcatcatgttaagactgacaagtaagaactaataatttgttatattgtagagcagtttacaattttacatctgcagataagtt

SEQ ID NO: 103468 - DNA, 201 bp, Homo sapiens
cgcagtcttggctcactgcagcctaaacttcccaggctcaagtgatcctcctgcctcagcctcccgagtagctgggaccacagatgcgaactaccacactmagctaatttttgcattttttgtggagatggggttttgccatgttgcccaggctggtctcgaacttctgggctcaagaggtttgcccgccttggcctccca

SEQ ID NO: 103469 - DNA, 201 bp, Homo sapiens
ggcatcggtggctattaaccttgtcaagaataacctttggcatgttcaaaaatgaaagctgcagtgttggtgcagattttattttctatttttatctctgyttacatggtgtttggcccacagtagacaatcagtaactgttgaatgagataaatgattgcatacatgtaaaaatgaatggctgccccgtattgaaatgta

SEQ ID NO: 103470 - DNA, 201 bp, Homo sapiens
ataggttactagttctttgttagatacttacattacaaatatcttctcccagtctgtggcttaccttttccgttttgctgtattgtctctctatatattawataggttgatttatgcatcaagcttgtatttttaagtataaatataaatatcctaggttttgtcgttttatttttttttttttttgagacaggatgtcac

SEQ ID NO: 103471 - DNA, 201 bp, Homo sapiens
caccctgggcatgtggtgaaacccttctttattttaaaaaaaaattttgaagaagcaaaaagaaatttatactagggccgggcgtggtggcttacacctgwaatctcagcactgagggaggctgaggctggtggatcacttgaggtcagaagttggagaccagcctggccaacatggtgataccctgtctctactaaaaaa

SEQ ID NO: 103472 - DNA, 201 bp, Homo sapiens
tactagttctttgttagatacttacattacaaatatcttctcccagtctgtggcttaccttttccgttttgctgtattgtctctctatatattatataggktgatttatgcatcaagcttgtatttttaagtataaatataaatatcctaggttttgtcgttttatttttttttttttttgagacaggatgtcactctctt

SEQ ID NO: 103473 - DNA, 201 bp, Homo sapiens
aaaggtctgggctcaatggctcatgcctgtaatcccagcactttgggaggctaaggtgggtgtatcacttgtgtccaggagttcgagaccaccctgggcaygtggtgaaacccttctttattttaaaaaaaaattttgaagaagcaaaaagaaatttatactagggccgggcgtggtggcttacacctgaaatctcagcac

SEQ ID NO: 103474 - DNA, 201 bp, Homo sapiens
catttccccaaacgaaagtaatctgttaaattttttatgtaccctaggtggaacggccgccttctccattctccatggccccacaagcttcccttcccccrgtgccaccacgacttgaccttctgccgcagcgagtatgtgttccctcaagtgcttctgctcttggaactgcttctaaggtaaagcattttccattactgc

SEQ ID NO: 103475 - DNA, 201 bp, Homo sapiens; identical to SEQ ID NO: 16256

SEQ ID NO: 103476 - DNA, 201 bp, Homo sapiens
attgtgaaaagttacaaagatagtaaaggtgaaagaattttacagtgaacacccatatactgatcacctggattctacttttagcattttattatacttgktttatcagactatatgtctgtcttttgatgttttcaaagtaaattgtagataccaatacacttctgcctcagaacttcagcatgcgttgcacaaatctta

SEQ ID NO: 103477 - DNA, 201 bp, Homo sapiens
ttttattatacttgttttatcagactatatgtctgtcttttgatgttttcaaagtaaattgtagataccaatacacttctgcctcagaacttcagcatgcrttgcacaaatcttaagtggatatttcccattaacggcaaaaaacacaattacttttgcaccaacctaataaaagtaatatgtagatataagaaaaaacct

SEQ ID NO: 103478 - DNA, 201 bp, Homo sapiens
cttgatctaagctcaaaattcttctgtagctgggactacaggtacgtgccaccatgcccggctaatttttgtatttttagtagagacggggtttcactatrttggccaggctggccttgaactcctgacctcaggtgatccacccctcccaaagtgctgagattacaggcgtgagccaccacgcccagacaaagctgaaaa

SEQ ID NO: 103479 - DNA, 201 bp, Homo sapiens
tgtataatattcagtcccaggcgccatctatcaccgagagcagcacctttggtaagttgccattctgctactttaaaaatcattgatatgtcataggaatsaacatgtaatatttggcaattgagatagcttgatctaagctcaaaattcttctgtagctgggactacaggtacgtgccaccatgcccggctaatttttgt

SEQ ID NO: 103480 - DNA, 201 bp, Homo sapiens
ctccagggtaaaatttggttttctttggttcctccctgggcctcggttcctcttctgtaaagttcttcatgggttgctttggactagaaaccgctaataaratgattatgaagcacttagccaatgtaatgtgcaatttaaatgcttaataagtcctgtgtgtgaattaacactccagtagtgcatgccagtggtttcata

SEQ ID NO: 103481 - DNA, 201 bp, Homo sapiens
acatacaataatatttatactgtgataagtaatttccctaatgattaacctagagtgctaagagcaaaatggactaaatattcgtttgaaaacagcctaawttttttttttttttttgaggttgcgtcttgctgtgttgcccaggctgaccaacatggtgagcttcatctctactaaaaatacaaaaattagctgggcttg

SEQ ID NO: 103482 - DNA, 201 bp, Homo sapiens
ccagcctggtgccacagtgagactccgtctcaaaaaggaaaaaaaaaaaaggaaaaggaaatataggtaagcaacactgaagaaataaatgttacctgtahtactacctagaatcagacaatagttagcaatttgatacatgttcattgccattcttccttgtatgaaatcatattgtcattgctggttttcactaaaaat

SEQ ID NO: 103483 - DNA, 201 bp, Homo sapiens
cagcctggtgccacagtgagactccgtctcaaaaaggaaaaaaaaaaaaggaaaaggaaatataggtaagcaacactgaagaaataaatgttacctgtactactacctagaatcagacaatagttagcaatttgatacatgttcattgccattcttccttgtatgaaatcatattgtcattgctggttttcactaaaaata

SEQ ID NO: 103484 - DNA, 201 bp, Homo sapiens
gaggctatatcttaaaacccttgaacctgtaaaacccagccttgtgactgaagagcacatgtacccagtttacaggaagtcagtaatatcttgatattagyacatttttattgctgttgttaaatgaggatttccccagatttgcaaatattttctttcctatttcttctagatgtcactgaaggttcccaagttcccgag

SEQ ID NO: 103485 - DNA, 201 bp, Homo sapiens; identical to SEQ ID NO: 16261

SEQ ID NO: 103486 - DNA, 201 bp, Homo sapiens
gcctggtgccacagtgagactccgtctcaaaaaggaaaaaaaaaaaaggaaaaggaaatataggtaagcaacactgaagaaataaatgttacctgtactactacctagaatcagacaatagttagcaatttgatacatgttcattgccattcttccttgtatgaaatcatattgtcattgctggttttcactaaaaatatc

SEQ ID NO: 103487 - DNA, 201 bp, Homo sapiens
ctggtgccacagtgagactccgtctcaaaaaggaaaaaaaaaaaaggaaaaggaaatataggtaagcaacactgaagaaataaatgttacctgtactactacctagaatcagacaatagttagcaatttgatacatgttcattgccattcttccttgtatgaaatcatattgtcattgctggttttcactaaaaatatctt

SEQ ID NO: 103488 - DNA, 201 bp, Homo sapiens
gctatgtaataaccttggaaaattcggtattatatagcctttactgatacaaggggtggcctggcttttggggttaggtttaaacttttacttttttttgrtctctaggaaatgtattttctagtagattaatattttaagtattttcagatgcatctgttactatcttttgcttcttctgcaggaatcagaaggtcaggg

SEQ ID NO: 103489 - DNA, 201 bp, Homo sapiens
cagaacttacttattggctctagtagctttttagtaggttccttaggctttcctagataccagatcatgtcacatgcaattagaggtagttttacttcttycttttctttctgcatgcattttatctctttttcttgcctaattattcttggctatgttgaataggaatatcaggagtggccatctttgtctttttggtat

SEQ ID NO: 103490 - DNA, 201 bp, Homo sapiens
tgccacagtgagactccgtctcaaaaaggaaaaaaaaaaaaggaaaaggaaatataggtaagcaacactgaagaaataaatgttacctgtactactacctagaatcagacaatagttagcaatttgatacatgttcattgccattcttccttgtatgaaatcatattgtcattgctggttttcactaaaaatatcttgaac

SEQ ID NO: 103491 - DNA, 201 bp, Homo sapiens
tcaaaacaattagctggacatggtggcatatacctgtaatcccagctgcttgggaggctaaggcacgagaattgcttgaactcggttggtggaggtttgcrgtgagctgagatcatgcccctgcactccagcctgggtgacagggtgagactgttaccaattaaaaaaaaaaagaaaaaaaagaaagaaaaagaaaaattg

SEQ ID NO: 103492 - DNA, 201 bp, Homo sapiens
atctctctctctcgcccattagagctccttaggaccaaggctttgtcttaacacagtccctcattttctgtctaattaattgaggggatctggtagggaawtttttttttttttttttttttttagtgagtgctcattaaggtaacatttactaaaagaggttttaccttataaaggtagtattataattattgtaaaaca

SEQ ID NO: 103493 - DNA, 201 bp, Homo sapiens
gccacagtgagactccgtctcaaaaaggaaaaaaaaaaaaggaaaaggaaatataggtaagcaacactgaagaaataaatgttacctgtactactacctagaatcagacaatagttagcaatttgatacatgttcattgccattcttccttgtatgaaatcatattgtcattgctggttttcactaaaaatatcttgaaca

SEQ ID NO: 103494 - DNA, 201 bp, Homo sapiens
agacccacgctttcaaacccatgttgttgaagggtcaactgtatacctttttttcagaggtattaggcaagtactccgttttatcctaaactctttggggkgtgtgtgtgtgtgtgtgtgtgtgcgcgcgcttgtatgtatgcatgtatttatttatttatttgagacagagtcttgctctgttgcccaggctatgagtgc

SEQ ID NO: 103495 - DNA, 201 bp, Homo sapiens
ccacagtgagactccgtctcaaaaaggaaaaaaaaaaaaggaaaaggaaatataggtaagcaacactgaagaaataaatgttacctgtactactacctagaatcagacaatagttagcaatttgatacatgttcattgccattcttccttgtatgaaatcatattgtcattgctggttttcactaaaaatatcttgaacat

SEQ ID NO: 103496 - DNA, 201 bp, Homo sapiens
gatgtgaaattaaaggtactgaacccatcgtggtagatccgtttgatcctagagggagtggcagcctgttgaggcaaggagcagagggagctccctccccmaattatgatgatgatgatgatgaacgagctgatgatactctcttcatgatgaaggaattggctggtgccaaggtaagatggcagtttaggagactggcaa

SEQ ID NO: 103497 - DNA, 201 bp, Homo sapiens
ctttgtgttcaggaatttgggcttggtgggaagagattttcacttaggttaaaaatgtccttgcatttaggaaagggacagcaacatgggtcctgaaaaasattttcagtccatgagagagacaatgatggcttggaccaaagtgatgggtgtagagatggaaagaagtgggcagaatttgatgtattttaaagctaacat

SEQ ID NO: 103498 - DNA, 201 bp, Homo sapiens
aatggaatttctgagaccaagagtatgcatgtttggtaaatacttttgttgaattacacaacagaaacgtatcaattccttatttctacagctctgtaacmaagtacccattcatttccctacaccttcactgacaccgtgtggccaaataccacattaagaacaaactagggatgggtggggtgactcaggcctgtaatc

SEQ ID NO: 103499 - DNA, 201 bp, Homo sapiens
aatttgggcttggtgggaagagattttcacttaggttaaaaatgtccttgcatttaggaaagggacagcaacatgggtcctgaaaaagattttcagtccaygagagagacaatgatggcttggaccaaagtgatgggtgtagagatggaaagaagtgggcagaatttgatgtattttaaagctaacataccaggacttgct

SEQ ID NO: 103500 - DNA, 201 bp, Homo sapiens
ggcctgtaatcctagcattttgggaggctggggcgggaggatcacttgaacccaagagtttaagaccagcctgggcaacatagtgagactctgtctctacmaaaaaaaaaattttttttaattagcctggtattgtggcacatgtctagtcccacctactgaggaggctgagttgggaggatcacttgagcccgggagatc

SEQ ID NO: 103501 - DNA, 201 bp, Homo sapiens
ttagtattctaggccatgttagattgatgagactagggaggaggaatttaaaatgaagagaggtgggcaaataagaaatagattggggataggtatggtgyaattcctgtaatcccagtgatttgggagactaaggaggatcagtggaggccaagagtttaagaccagcctgaaactgggcacagtggctcacgattgtaa

SEQ ID NO: 103502 - DNA, 201 bp, Homo sapiens
tcacctgaggtcaggagttcgagaccagcgtgaacatggtgaaaccccctcccttctaaaaatacaaaatcagctgggcatggtggcgggtacctgtaatycaagctactcaggaggctgaggcaggagaattacttgaacccaggaggcggaggttgcagtgagccaagattgcaccactgcactctagcctgagtgaca

SEQ ID NO: 103503 - DNA, 201 bp, Homo sapiens
tgaggcaggagaattacttgaacccaggaggcggaggttgcagtgagccaagattgcaccactgcactctagcctgagtgacagagtgagactccatctcaaaaaaaaaaaaaaaaaaagaccagcacggcaccatagagagaccctgaccctgtctctacaaaaaatttaaaaaagaaaaattggctgggtgtggtggca

SEQ ID NO: 103504 - DNA, 201 bp, Homo sapiens
tgtagtgaaacctcgtctctactaaaaatacaaaaattagctgtgtgtggcagtgcacgcctgtaatcccagctacttggcaagctgaggcagcagaatcrctagaatccaggaggtggaagttgcagtgagccgagatcatgccagtgcactccagcctggacgacagagcaagactcaatctcaaaaagaagataagac

SEQ ID NO: 103505 - DNA, 201 bp, Homo sapiens
ccctcccaaagtgctgggattataggcatgaaccactgcgcccagcctactgttaggaatttatcaaagagaattgatcaaggatatgagaccccgtctcaaaaaaaaaaattttttttttttttttttgctgatgaagagtaacgatatgacaatatgttaaataggctatagaattgtatgtttaataatattccattt

SEQ ID NO: 103506 - DNA, 201 bp, Homo sapiens
ctagcattttgggaggctggggcgggaggatcacttgaacccaagagtttaagaccagcctgggcaacatagtgagactctgtctctacaaaaaaaaaaawtttttttaattagcctggtattgtggcacatgtctagtcccacctactgaggaggctgagttgggaggatcacttgagcccgggagatcaaggctgcagt

SEQ ID NO: 103507 - DNA, 201 bp, Homo sapiens
tctccaggtgaagggaatttggccgcagcccatgccaacactggtcccgaggagtcagaaaatgaggatgatgggtatgatgtcccaaagccacctgtgcyggccgtgctggcccgccgaactctctcagatatctctaatgccagctcctcctttggctggttgtctctggatggtgatcctacaacaagtgagtctcca

SEQ ID NO: 103508 - DNA, 201 bp, Homo sapiens
gtccctctttgtcctcctcttctgggactaccttttccggaatgttagaccttttcactatgtctccgagagctcttatgctgatgtcttttttttttttyccattatttttttcttggcatactttattttctttttttcttttctttttttgaggtggagtcttgctctgtcacccaggctggagtgcagtggcgcagt

SEQ ID NO: 103509 - DNA, 201 bp, Homo sapiens
ccggctaatttttgtatttttagtagagacagggtttcactatgttggccaggttggtctcaaactcctgaccttgtgatctgctctccttggcctcccaragtgctgggattacaggcatgagccaccccgcccggactttttttttttttttaaagtcagagtctcgctctgtcacccaggctggcgtacagtctcggc

SEQ ID NO: 103510 - DNA, 201 bp, Homo sapiens
taatagtgcttgtagagcagtagatcataaattactatggtttgtttaattatgaaaacctgataatcagatcatctgttttcttagaaattctaatgtartggtaggttatattagtgcttcaaacatggtttgctttttatttttaattaattttttttttttttgagataaggtctcactctgccgtgcaggctggag

SEQ ID NO: 103511 - DNA, 201 bp, Homo sapiens
aggctggtcttgaatgcctggcctcaagtgattctcccaccttggactccgaaagtgctgggattacaggtgtgagccaccttgcccgaccagtttttttkttttttttaaaccagatatctacctgcttgtctagagcttttttttattaatgcagtttttctctcagccttttggtttgaggacccctttacattctaa

SEQ ID NO: 103512 - DNA, 201 bp, Homo sapiens
cgtgtgccaccacacctggctaatttttgtatttttagtagagatgaggtttcaccatgttggccaggctggtcttgaactcctgacctcaagtgatccayccacttcggcctcccaaagtgttgggattacaggtgtgagccagtgcgcccaggcgagtattagtttcttaaaaggttagttgcagtgtgcaactgcttc

SEQ ID NO: 103513 - DNA, 201 bp, Homo sapiens
aaatcattgatatgtcataggaatgaacatgtaatatttggcaattgagatagcttgatctaagctcaaaattcttctgtagctgggactacaggtacgtrccaccatgcccggctaatttttgtatttttagtagagacggggtttcactatgttggccaggctggccttgaactcctgacctcaggtgatccacccctc

SEQ ID NO: 103514 - DNA, 201 bp, Homo sapiens
ctaatattgccaaccaagacttgctctaaaaccataatacttgtgaagtctacaactgcatttaaattaggacatcttaaagaacaagccccaaaactggctacaagaacgtctttcctgccaggctttagtatacaaagccaacaaatgcctgctagagatacctagtagtgtgaaaatgttagcagcattgtaaacttc

SEQ ID NO: 103515 - DNA, 201 bp, Homo sapiens
tgaagtctacaactgcatttaaattaggacatcttaaagaacaagccccaaaactggctacaagaacgtctttcctgccaggctttagtatacaaagccarcaaatgcctgctagagatacctagtagtgtgaaaatgttagcagcattgtaaacttcaatcctggcagcttagttttttttactcttatttgttgtgatt

SEQ ID NO: 103516 - DNA, 201 bp, Homo sapiens
caagtgttctcatagtttaatcatttcaaagtataaacgttatcaaaacatcacattgtaccccatgaatatagacaattatttgtcatttgaaaaaaaawtttttttaagtattctcataagattgttacaaagtacttagaataatgcctggttcacagaaaacaggacatggtatttgattaaaagaaaattagagcc

SEQ ID NO: 103517 - DNA, 201 bp, Homo sapiens
acaggtgggttttgattatatgaatgaattatatagtgaagtctgagattttggtgcacccattacccgagtagtgtacattgtacccagtatgtagtttktttttttttttttttaatccctccctgccctcccacctccccgcttctgagtctctaaagtccattataccaatctgtatgcctttatgtacccagagct

SEQ ID NO: 103518 - DNA, 201 bp, Homo sapiens
aaattttgtgtatttacttatatattagagccactatgcaaaagtaaacagtatttactaaatttatgtgaatttagtaaacacagtaaatactatttacttttgcataggggctctaatgttcaagttccatataaatataaatatttctggtgggagaattatgatagataccactggatgggtgttagaactccccaa

SEQ ID NO: 103519 - DNA, 201 bp, Homo sapiens
tgaagcaagacattttgatatggctatttgattcaatctggtcaaagtactaaaatgttatttagtcctttaaaaatttaattgaaaacttaaaaacttayagcttaggctttagcataatgtctctttggtgacttccttacctgttccacaaatctctctcattaccttctccaccttgttcactatgctttaatctca

SEQ ID NO: 103520 - DNA, 201 bp, Homo sapiens
acttgggagatagaggctacagtgagctgagtttgtgtcactgcactccagcctgagcgacagagctagactctgtctcaaaaaagaaaaaaaaaagattkgttagaagaggggcatttaacaagtcactatgaaatattttcatgattagcaaattttgtgctggaagaatataggtaggagtaggcacctggaagccag

SEQ ID NO: 103521 - DNA, 201 bp, Homo sapiens
aattttgtgtatttacttatatattagagccactatgcaaaagtaaacagtatttactaaatttatgtgaatttagtaaacacagtaaatactatttacttttgcataggggctctaatgttcaagttccatataaatataaatatttctggtgggagaattatgatagataccactggatgggtgttagaactccccaaa

SEQ ID NO: 103522 - DNA, 201 bp, Homo sapiens
gagggctctgggaaccctctatgctatagagtcactggggctcatgaggcaaaccattaatctctgaggagacaaaaaggggatggggaggaactttagaycagtcaggctcttctgtaataccctcatccacaattgtgtcttaattagtgtatggcatctaaaagtgatactaaaacatttacagtagtcccttcatat

SEQ ID NO: 103523 - DNA, 201 bp, Homo sapiens
attttgtgtatttacttatatattagagccactatgcaaaagtaaacagtatttactaaatttatgtgaatttagtaaacacagtaaatactatttacttttgcataggggctctaatgttcaagttccatataaatataaatatttctggtgggagaattatgatagataccactggatgggtgttagaactccccaaaa

SEQ ID NO: 103524 - DNA, 201 bp, Homo sapiens
cttctgtcctgggcatgaatcatccctttatgcagtgtagatacatactgtggatatagtagtgtatctacaccgtctacactacccaccggttagtcacstagtagtcatcttgattcttagatcaactgttggcagtcttgcagtgcctgtatttgagtcacccttattttgcttaatgaccctcaaagcataagagta

SEQ ID NO: 103525 - DNA, 201 bp, Homo sapiens
gcctcccaaagtgctgggattacaggcgtgagctaccacgtgcagcccatatttttgttttttatgtggatcttgaactgatgttcagactgtgtcaagtratttcttataaaccagtacttctcagattttatcatgaattcagatcaattcaggggatcttgttaaaatactgactttgaataggtctggagtggggcc

SEQ ID NO: 103526 - DNA, 201 bp, Homo sapiens
tctgtctcaaaaaagaaaaaaaaaagatttgttagaagaggggcatttaacaagtcactatgaaatattttcatgattagcaaattttgtgctggaagaawataggtaggagtaggcacctggaagccagcgtcagctttgtccccacagtgctccttcctgcagcagcttccgcaaggagggagagggggtgctaatgat

SEQ ID NO: 103527 - DNA, 201 bp, Homo sapiens
aactgtatacctttttttcagaggtattaggcaagtactccgttttatcctaaactctttggggtgtgtgtgtgtgtgtgtgtgtgtgcgcgcgcttgtaygtatgcatgtatttatttatttatttgagacagagtcttgctctgttgcccaggctatgagtgcagtggcgtgatctcggctcactgcaacctccacctc

SEQ ID NO: 103528 - DNA, 201 bp, Homo sapiens
ttttttttattgaacacataaattattattttaatggccatacgtaactccaactctgtccagcttggcaagacagccaaaatatctatttagcttttcarttgctgctttctgcttgttttctcaaaatctagccccaagcgtaaacagtttagggatttgtaatagctctagggaaaattgctggcatttcaggtatac

SEQ ID NO: 103529 - DNA, 201 bp, Homo sapiens
gtatgtaataaaccctttctatttggatatttatgtcctttaagtcttgaagtcttggaaatgtttgtatttctctgatcacttattttccatttataaayttataaaggttccaccttttctggagccttatatgctatgataaaagaatattgcggccgggtgcggtggctcatgcgtgtaatcccagcactttgggag

SEQ ID NO: 103530 - DNA, 201 bp, Homo sapiens
gtttcctgatggacgaaatcagaatcctgatctgactggcttatgtgaaccaactccccaagaccatatcaaagtgacccaggtgagttttgtttcacatkataaccatatcactggacacaagctttagtatattctttatagaactgacagcataattgaattcattggaacccattgactagattagtgaatttgtgt

SEQ ID NO: 103531 - DNA, 201 bp, Homo sapiens
aaacgtatcaattccttatttctacagctctgtaacaaagtacccattcatttccctacaccttcactgacaccgtgtggccaaataccacattaagaacmaactagggatgggtggggtgactcaggcctgtaatcctagcattttgggaggctggggcgggaggatcacttgaacccaagagtttaagaccagcctggg

SEQ ID NO: 103532 - DNA, 201 bp, Homo sapiens
cagactccatcttaaaaaaagaaagaaagaaaggaagaaagttattgttattcttgatggttcttttgatttttgtctgtatcttgccttgccttccaccstaataccagcataatctactaaagcttctgtttatgtctgttcatagttatatcttccggctgagctgtactcgtctgggtcagtgggctattgggtatg

SEQ ID NO: 103533 - DNA, 201 bp, Homo sapiens
ttgttcttttgtatccttccgattctatctcacttacctccacactcttctcaaagggggaaactcagtttcagcttgattatcttgtacaagggcactakcaaatggaccgttccattcccagagatgccaacaatcttacacagattattcacaaatctgttttcccaagctacctgctagttatactcatgttagtat

SEQ ID NO: 103534 - DNA, 201 bp, Homo sapiens
tcccagctactcaggaggctgaggcaggagaatcacttgaacctgggaggtggaggttgcagtgagccgagatcatgtcattgcactctagcctgggcaayaagagcgaaaccccatctcaaaaacaacaaaaacaaaaaaagaatagagtttatgtgtcttttgcttctggtgtggagtcatggaagaagttactctctt

SEQ ID NO: 103535 - DNA, 201 bp, Homo sapiens
tgttcttttgtatccttccgattctatctcacttacctccacactcttctcaaagggggaaactcagtttcagcttgattatcttgtacaagggcactagyaaatggaccgttccattcccagagatgccaacaatcttacacagattattcacaaatctgttttcccaagctacctgctagttatactcatgttagtatc

SEQ ID NO: 103536 - DNA, 201 bp, Homo sapiens
tttctctggtgttgtctgtgccaatttgcatacacatttatttggaacttattagttgcacctataggccctatcctggttttcagtttgttgttgttcarccccactactgttaattagagctgctttacaaattctagaattttcattttgtgtcaagtttctccctataagcatatattcttttcttcgtagcttttc

SEQ ID NO: 103537 - DNA, 201 bp, Homo sapiens
ttctttttttgcagcaaggtttcactctgttgcccaggctgtagtgcagtggcacgatctcacttgcaacctctgcctccaaagttcaagtgattttcccmcctcagcctccagagtagctggaactaattagtctggctaattttgtttgtttgtttgtttttgtagagacaaagtttcaccatattgcccagtctgggc

SEQ ID NO: 103538 - DNA, 201 bp, Homo sapiens
cagtcttttattatgatctttcttttcttttctcttctcttctcttctcttctcttctcttctcttctcttctcttctcttctttctcttctcttctcttctcttttcttcttttctcttttcttttcttttctttttttgagacagggtctgtctctgtttgcccaggctggaatgcagcggcatgatctctgctgactg

SEQ ID NO: 103539 - DNA, 201 bp, Homo sapiens
tgtttaattattgcattctgatcatttgtaggcgaaacctaaccaaactgtccctcatcttcagccacatgctggcagaactaaaaggaatctttccaagyggactctttcagggagacacatttcggattactaaagcagatgctgcggaattttggagaaaagcttttggggaaaagtaagtctcagaataatgaattt

SEQ ID NO: 103540 - DNA, 201 bp, Homo sapiens
ggcatgtaccaccatgcccgcctaatttttgtatttttagtagaaatggccaggctagtctcaaactcctgacctcaagtgatgcatccgcctcgacctcygaaaattttgggattacaggcgtgaaccaccgcacccggccaaaaaaagatttcaatagcatttttcgaacaagtcatggatataaagacttggataatt

SEQ ID NO: 103541 - DNA, 201 bp, Homo sapiens
gtcttttattatgatctttcttttcttttctcttctcttctcttctcttctcttctcttctcttctcttctcttctcttctttctcttctcttctcttctcttttcttcttttctcttttcttttcttttctttttttgagacagggtctgtctctgtttgcccaggctggaatgcagcggcatgatctctgctgactgta

SEQ ID NO: 103542 - DNA, 201 bp, Homo sapiens
cttttattatgatctttcttttcttttctcttctcttctcttctcttctcttctcttctcttctcttctcttctcttctttctcttctcttctcttctcttttcttcttttctcttttcttttcttttctttttttgagacagggtctgtctctgtttgcccaggctggaatgcagcggcatgatctctgctgactgtacc

SEQ ID NO: 103543 - DNA, 201 bp, Homo sapiens
tctttcttttcttttctcttctcttctcttctcttctcttctcttctcttctcttctcttctcttctttctcttctcttctcttctcttttcttcttttcycttttcttttcttttctttttttgagacagggtctgtctctgtttgcccaggctggaatgcagcggcatgatctctgctgactgtacctccacctccagg

SEQ ID NO: 103544 - DNA, 201 bp, Homo sapiens
gtagctgggactacagctgtgcaccaccatacctggctaatttttttgcattttttgtatagatggggggtctcactatattgcccaggctggtctcaaaytcctgagttcaagcaatctgccggcctcagcctctcaaagagctaggattacaagtgtgagctgctgcgcccagcctaaattactgtttttaaaatgaaa

SEQ ID NO: 103545 - DNA, 201 bp, Homo sapiens
tctctttggtacatggtagaaattctattaaacaataatcaaaggatctcaaggtgctaggaaaaaaacagttaatggactttaaagattggataagtgctttttttttttttttttttggaccgagtctcactctgtcgtccaggctggagtgcagtggtgcaatctcagctcactgcaacctctgcctcagcctcttca

SEQ ID NO: 103546 - DNA, 201 bp, Homo sapiens
tttacttctgtgtccctgtgcctgacacatatttgttgaatgaatatgttgagaaaaataaaaactggtacaacctttaacttacagcctccatatgtacmaattggtctctgtctgaacctatgctcactcttttttttttttcctattctaggaggcgtcctcttcttttaaaatatatgtattttaatgtattctctt

SEQ ID NO: 103547 - DNA, 201 bp, Homo sapiens
tttttgtagagacaaagtttcaccatattgcccagtctgggctcaagcagtctgcccactttggcctctcaaagtgctgggcctcccaaaggcatgcaccrtggctcctggtccccttctttcttttcttaaagaagttgacctgtattttgaattacgagaattgaaattggtattgagagcttaatgtggctctccttc

SEQ ID NO: 103548 - DNA, 201 bp, Homo sapiens
aataaaggaaaggaaaaaggaaaagaaacagctgattcttagttacctcaagtgaaaattatgttgacacttttccacagtcccacttaacataaatgtartagttgctggggagttaaagatgacccggcactcacacttacaatttgtgtgatacaactgaaggtatgtagagggctctgggaaccctctatgctatag

SEQ ID NO: 103549 - DNA, 201 bp, Homo sapiens
cccagctactcgggaggctgaggcaggagaatcccttgaacccgggaagcggaggctgcggtgagccgagatcgcaccattgcatgccagcctgggcaagmagagcaaaactctgtctcaaaataaataaatgaatgaatgaataaataaataaataaataaattttatttttattcattattattaactagtagtatttt

SEQ ID NO: 103550 - DNA, 201 bp, Homo sapiens
attgattaaaaatgggttggtaaactgtgacccatgggccacctgtttgttcccccggggagccaagatagcttttcctaagagtcgttttgaaaaaaacmatcagagaagaatatgtgacacagactaatgtggcctacaaatcctaaatgattttctatctggccctttacagaaaagcttgctaaccaaccccttgat

SEQ ID NO: 103551 - DNA, 201 bp, Homo sapiens
ttttggtaaaggaagaggagtttgggtaaaatttatctctttaaggtctggttcagtgaaagaaagcatttattaggtctggatacttaaaaattcttttwattaagacttatttatcttttatttagatatgttatatgatgataaatatacttgataaatacacctgcaaagcaggaaataatacattggtttcctaac

SEQ ID NO: 103552 - DNA, 201 bp, Homo sapiens
tccagttatacttaatttatgttgtccacttcattttttatttttttctgatcagatagtttagattgtagttcaccttttagcttcagtttattaacatytctctctctcgcccattagagctccttaggaccaaggctttgtcttaacacagtccctcattttctgtctaattaattgaggggatctggtagggaaatt

SEQ ID NO: 103553 - DNA, 201 bp, Homo sapiens
aaatttctgacaatgaactgagagttggtgttgttttttttttttctcattgccctctgagttggttgtacatctgacctgaatagtctgtgattgatctkgtttctttagccctggtcctctttgctcaggaattggaacagccttgctgtaactcatcctggctacatggcttttttgacgtatgacgaagtgaaagct

SEQ ID NO: 103554 - DNA, 201 bp, Homo sapiens
caggaggatttcttgaggccagaagtttgagactactaccctggatgacattacaagacctggtctttatttgtaaattattttttatttttcttttcttkttttgcagcaaggtttcactctgttgcccaggctgtagtgcagtggcacgatctcacttgcaacctctgcctccaaagttcaagtgattttcccacctca

SEQ ID NO: 103555 - DNA, 201 bp, Homo sapiens
cagttatacttaatttatgttgtccacttcattttttatttttttctgatcagatagtttagattgtagttcaccttttagcttcagtttattaacatctytctctctcgcccattagagctccttaggaccaaggctttgtcttaacacagtccctcattttctgtctaattaattgaggggatctggtagggaaatttt

SEQ ID NO: 103556 - DNA, 201 bp, Homo sapiens
gttatacttaatttatgttgtccacttcattttttatttttttctgatcagatagtttagattgtagttcaccttttagcttcagtttattaacatctctytctctcgcccattagagctccttaggaccaaggctttgtcttaacacagtccctcattttctgtctaattaattgaggggatctggtagggaaatttttt

SEQ ID NO: 103557 - DNA, 201 bp, Homo sapiens
agttgcacctataggccctatcctggttttcagtttgttgttgttcaaccccactactgttaattagagctgctttacaaattctagaattttcattttgkgtcaagtttctccctataagcatatattcttttcttcgtagcttttcagagtttttaatctcctgaacacatgtgtcttctctctgagtgatggtataat

SEQ ID NO: 103558 - DNA, 201 bp, Homo sapiens
tatacttaatttatgttgtccacttcattttttatttttttctgatcagatagtttagattgtagttcaccttttagcttcagtttattaacatctctctytctcgcccattagagctccttaggaccaaggctttgtcttaacacagtccctcattttctgtctaattaattgaggggatctggtagggaaatttttttt

SEQ ID NO: 103559 - DNA, 201 bp, Homo sapiens
ctttatctttcttttttccaaatgttaacttattttcaagcctgtgttaggttttaaaatataccaattagcaggaaatttgaccagttatttaactagtyggcattcaagtgattcaatgttcctaatagccataggcctcagtggccttcatctgctttcatcctcacttcgcttttgttcagcagcatttcttcaggc

SEQ ID NO: 103560 - DNA, 201 bp, Homo sapiens
tacaagtaaggcgtttttcaaattattgtctaatgatggggctattgtctagtgatgacacttttttttttcctgtgatcagttgactttaaaatatgttkgttaaaaaaaagtataggtggccggatgcagtggcttacgcctgtaatcccagcactttgggaggccggggtgggcgatcatttgaggccaggagttcga

SEQ ID NO: 103561 - DNA, 201 bp, Homo sapiens
acacacacacacacacacacacataaagaatttctatctggtggccatccattgattaaaaatgggttggtaaactgtgacccatgggccacctgtttgtycccccggggagccaagatagcttttcctaagagtcgttttgaaaaaaacaatcagagaagaatatgtgacacagactaatgtggcctacaaatcctaaat

SEQ ID NO: 103562 - DNA, 201 bp, Homo sapiens
ctctatttttttttttttttgtaatatggaacgcttgatgaatttgtgtgtcatccttgcatagaggccatgataatcatggtaatcatctctgtatcgtyccagttgtagtgtatgagctgctgaagtgagcacaactccttctattctttaatagttatcaagagattccatcatgcactcttgacttactagagtttg

SEQ ID NO: 103563 - DNA, 201 bp, Homo sapiens; identical to SEQ ID NO: 16257

SEQ ID NO: 103564 - DNA, 201 bp, Homo sapiens
tttagttatatttatttgtgttatctgtatatttagcctatgtaattggggtacatagaaatttagaatttttgatactaagtaagtttttattataaccmaatacctcttttactctgtagttctatttcttgcctgccttaagtctgctttgccatatatgaaagtggctacatcacctgtcttttagtatttgcataa

SEQ ID NO: 103565 - DNA, 201 bp, Homo sapiens
cagcaaaccagcatggcacatgtatacctatgtaataaacctgcatgttcagcacatgtatcccagatttgaaataaaattcttttaaaaaagggggggggatttaaagacagagacaggcatgtatacagagaggaaaccatgtgaacatggaagcagggattggggtgaggctctactgaccaagggctgccaaactat

SEQ ID NO: 103566 - DNA, 201 bp, Homo sapiens
tacccgacaggagtgggacttggctaagagcctacagaaaaccatccaagcagcgaggtctgagaattactctctgaccgacttctgggcctacatggttrtctctaagcaaaccagagaagtaagtcattcccagctggggacctggggtgggggtaggagcaaggggtctcagggtgtggggttaccaaagatgctgac

SEQ ID NO: 103567 - DNA, 201 bp, Homo sapiens
tgcatgaggcagaatttgacgctccagtctggaggtagaatttcttcttctctagaaactgttttgccctcaaagccttcaactgagtagatgagacccasccacattactgagaataatcttcttgaagtcaactgattttagctgtcaaccacatctacaaaataccttcacagccacatctaggctagtgtttgatta

SEQ ID NO: 103568 - DNA, 201 bp, Homo sapiens
ggacttggctaagagcctacagaaaaccatccaagcagcgaggtctgagaattactctctgaccgacttctgggcctacatggttatctctaagcaaaccrgagaagtaagtcattcccagctggggacctggggtgggggtaggagcaaggggtctcagggtgtggggttaccaaagatgctgaccagcaccacctttta

SEQ ID NO: 103569 - DNA, 201 bp, Homo sapiens
ggttgattccatgtctttgctattgtgaatagtgctgcaatgagcatacgcatgcatgaggcagaatttgacgctccagtctggaggtagaatttcttctkctctagaaactgttttgccctcaaagccttcaactgagtagatgagacccacccacattactgagaataatcttcttgaagtcaactgattttagctgtc

SEQ ID NO: 103570 - DNA, 201 bp, Homo sapiens
gcaatcctccaactactgggttcaagtgatcctcctatctcagcctcccgaagtgctgggattacgtgtatgagccactgcatccagcctatcctaacacwtcgggtttttgttgttttttgtttgttttgtttattcttgagacagggtttcactctgtcgcccaggctggagtgcagtggtgcaatcacagctcactgc

SEQ ID NO: 103571 - DNA, 201 bp, Homo sapiens
ctgggtgacagactgagacccctctaaaaaaaaaatgtggcctacgtgcagaggttccaccctgtgggacccacatgcctccctcacactgtcttggcacmttctcccaaagctgccggagtctcatttgtccaatatgaagaagcccgtggaagaagggacactaccctacccgatatttgcagccattgacaatgacct

SEQ ID NO: 103572 - DNA, 201 bp, Homo sapiens
atgcctccctcacactgtcttggcacattctcccaaagctgccggagtctcatttgtccaatatgaagaagcccgtggaagaagggacactaccctacccratatttgcagccattgacaatgacctgcaaccttcctggcaggaggcaagagcaccaggtaagcaaacatttagagggagggagaggtagtaagggatgg

SEQ ID NO: 103573 - DNA, 201 bp, Homo sapiens
taccctacccgatatttgcagccattgacaatgacctgcaaccttcctggcaggaggcaagagcaccaggtaagcaaacatttagagggagggagaggtartaagggatggaacagcacggagtggaatggaagaatgtttccctgccctccccttggggagcccaggaagagggaagggctcaggattgcagaaaacagg

SEQ ID NO: 103574 - DNA, 201 bp, Homo sapiens
tttgcagccattgacaatgacctgcaaccttcctggcaggaggcaagagcaccaggtaagcaaacatttagagggagggagaggtagtaagggatggaacrgcacggagtggaatggaagaatgtttccctgccctccccttggggagcccaggaagagggaagggctcaggattgcagaaaacagggtgctcagcttaga

SEQ ID NO: 103575 - DNA, 201 bp, Homo sapiens
agccattgacaatgacctgcaaccttcctggcaggaggcaagagcaccaggtaagcaaacatttagagggagggagaggtagtaagggatggaacagcacrgagtggaatggaagaatgtttccctgccctccccttggggagcccaggaagagggaagggctcaggattgcagaaaacagggtgctcagcttagacgaga

SEQ ID NO: 103576 - DNA, 201 bp, Homo sapiens
caagaaaacctttaagaggccaacatggtggctcacgcttgtaatcccagtggtttgggaggctgaggtgggaggatcgcctgaaaccagaagttggagaycaccctgggcaacatagtgagatcccatctcaaaacaacaacattaaaaaacaaaacaaaacaaaaaaacacaataaattagccaagcatggtggcagga

SEQ ID NO: 103577 - DNA, 201 bp, Homo sapiens
acagagtggatgagagtacagactcccttggaaggaatgttgctctggtacatgtaagctttgtgacctccgaaaagttacttaacctctctgtgcctcgktttctgcctctgtgccatgcgggtgataataacagtagttatgaatatttgatgagttaattcattgaaagcttgtaggacagtgcctggtagataacgg

SEQ ID NO: 103578 - DNA, 201 bp, Homo sapiens
ccaggttcacgccattctcctggcccagcctcctgagtagctgggactacaggcacccaccactgcgcccagctaatttttttttttttttttttttttgkatttttagtagagaccggtgttagccaggatagtctcgatctcctgacctcatgatccacccgcctcagcctcccaaagtgctgggattacaggcatgag

SEQ ID NO: 103579 - DNA, 201 bp, Homo sapiens
cctcccgagtagctgagattacaggcatgcgccaccacacccagctaatttttgtatttttagtagagacggggtttcaccatgttggccaggctggtctygaactcctgaccttgtgatctgcccgcctcggcctcccaaagtgcagggattacaggcgtgagccaccacgcccggccaataaacagaaatttaagcaag

SEQ ID NO: 103580 - DNA, 201 bp, Homo sapiens
tgggtctccaggccccaggggtcttctggaggggtcttctggagaggtcttgcaaccatttcttattgcctccttctcagaccatccgggctaccactgaytactgccgccgccacaagatcccctttccccaagtagaagaggctgagctggatttgtggtccaaggcccccgccagctgctacatcctgaaaggagaaa

SEQ ID NO: 103581 - DNA, 201 bp, Homo sapiens
gcacccgccaccacgcctggctaattttggtatttttagtagagacagggtttcactgtgttggccaggctgatcttgaactcctgacctcaagtgatccrcctgcctcagcccccaaagtgctgggatttcaggcgtgaggcaccgcacccagccagggcttcaacatatgaatctgggaagagagagaagtcagctcct

SEQ ID NO: 103582 - DNA, 201 bp, Homo sapiens
ttacctggtccctcatttaacatttaacccctttaataccctaagaggcagacgcttttgtcccttccattttgctgagatccaccaagtcgtgggaaggrtgcgtgactcacccacactgctggtcagtgagtgcagacgcggggatctataggagaactgggtggtggatctctaggggaatagtgtggtggttctgat

SEQ ID NO: 103583 - DNA, 201 bp, Homo sapiens
tcagcctcccagtgtgctaggattacaggcataaaccaccacgcccgggctgatgttgttctttgacattggtgttcaccatagcttggttaaaaacaaamctaaaaagggaatctatctatatccaacctccaaatggctaactaaaggtgtgagatgggtctgagtgttacttctccagtgggtctgctaagctttctc

SEQ ID NO: 103584 - DNA, 201 bp, Homo sapiens
gtaaaaagttataacatgtacaatattttaattataaggatcaacactgctactattaggtaataatatttttaaatattaagatttttttgtttttttttgaatttttacttcaatagcttttggggtacaagtggtttctgttacacgatgaattatgtagtagtaaattctgagactgtagtccacccatcagtgtat

SEQ ID NO: 103585 - DNA, 201 bp, Homo sapiens
ctctctcggtcttgcatgtttatgcatgttgctgcctctctctgcagccttcttgtcctacctgaatatccaaccccttccacctgggcatcccacattcytcatccagtctcaggtgagcagctgcttggaaggcctagcatccaggatgggtggtcctccggggcctgattgtgccacttcccacagtgggctcctttt

SEQ ID NO: 103586 - DNA, 201 bp, Homo sapiens
cgcccgggctgatgttgttctttgacattggtgttcaccatagcttggttaaaaacaaaactaaaaagggaatctatctatatccaacctccaaatggctractaaaggtgtgagatgggtctgagtgttacttctccagtgggtctgctaagctttctctctaaaaaacaaaaacaaaattcctgatatgtagtgtttgc

SEQ ID NO: 103587 - DNA, 201 bp, Homo sapiens
gccacttcccacagtgggctccttttagcttgtcaatcgtgtctcctgcgatgagactcccattagggataaattgtgtctgttttcttccttcatttaaygaacatttattggttacctatgctgcatcagccatggttccaggagaggcaggctagagtagtaaagaagacaggaagcagggggccaggcgcggtggct

SEQ ID NO: 103588 - DNA, 201 bp, Homo sapiens
ggttaaaaacaaaactaaaaagggaatctatctatatccaacctccaaatggctaactaaaggtgtgagatgggtctgagtgttacttctccagtgggtckgctaagctttctctctaaaaaacaaaaacaaaattcctgatatgtagtgtttgccaattcctgtggtgtaaatgttcccaccgtggccaacttcaggcta

SEQ ID NO: 103589 - DNA, 201 bp, Homo sapiens
cacaccattgcactccagcctgggcaacaagagtgaaacacagtctcaaaaaaaaaaaaagaaaaaagaaaaagaaaaagaaaaaaaagaaatgaaacaamcaaaaaaaaaaaaaaaaagaaaagaaaatcaacaacaacaacaaaattctctgtgacccaatttctcctttgtaaaatggatacaatagtgcatagcccc

SEQ ID NO: 103590 - DNA, 201 bp, Homo sapiens
ttcatttaatgaacatttattggttacctatgctgcatcagccatggttccaggagaggcaggctagagtagtaaagaagacaggaagcagggggccaggygcggtggctcacgcctgtaatcccagcactttgggatgccaagccggggcagatcacctgagatcaggagtttaaggccagcttggccaacagggtgaaa

SEQ ID NO: 103591 - DNA, 201 bp, Homo sapiens
aattcctgtggtgtaaatgttcccaccgtggccaacttcaggctaccaacatgaggtcactgagcacagagttggaagagaggtgcaaaattggctctcgrgagccattggctgccattggagcccatggctgccatttctattaatgaaatatccctgcaggtcatctgtattttttatattataactagggactttgtt

SEQ ID NO: 103592 - DNA, 201 bp, Homo sapiens
accctgaaaggtaagcatcctacttcatcatgaatccctgatgataatggggaccgcacacttgcttgaggccagccattgtcctaggaacattacatgtrtgattcatttggtgcccatttgaattctttatctggtatttcaaagatttcatcttgatttggatctgttgctggagaggtagtgtgatcttttgggggt

SEQ ID NO: 103593 - DNA, 201 bp, Homo sapiens
atcgaggcaatcacacttttgacatattgcatgagatgaaactttttcctacaaattgggtggttacaaagtaataaacagaattttttttttttttttttgagacagagtctcgctctatcacataggctggagtgcagtggcacaatctcggctcactgcaacctccacctcctgggttcaagcaattctcctgcctca

SEQ ID NO: 103594 - DNA, 201 bp, Homo sapiens
atgccaagccggggcagatcacctgagatcaggagtttaaggccagcttggccaacagggtgaaaccccgtctctattaaaaaatacaaaaaattagccargcgtggtgatgcacgcctgtaatcctagctacttgggaggctgaggcaggagaatcgcttgaatctaggaggtggaggttacagtcacccaagattgtgc

SEQ ID NO: 103595 - DNA, 201 bp, Homo sapiens
gagtcttcgtgtgatggctttctcatatgctggttgtagaagcgatgtgctcactgtgtgagcaagttcactgttgcctacagggctggaatggtagaagwctcttgaagcttaactcattccccacaaggcatgcaattttttccccagtattttattgactggtttgatggttcaggcttcaggtctgtaggggagtgc

SEQ ID NO: 103596 - DNA, 201 bp, Homo sapiens
gcctgtaatcctagctacttgggaggctgaggcaggagaatcgcttgaatctaggaggtggaggttacagtcacccaagattgtgccattggactccagcstgggagacaagagcgagcctctgtctcaaaaaaaaaaaaaaaaaaaaaagaaaaaaggaccggaaggggcatggatcataaaaatatagataaatccata

SEQ ID NO: 103597 - DNA, 201 bp, Homo sapiens
gagtctctgcaccatgcctggtccatagctggtgttctggattaacaacaatgcttatctggtgatgatgagaatagcaagagtaataggaagaaaaccggcagcatttgttaaacttcaatcaaagacgacttcagagacctaagctgtccactacagtggttgccggccacatgtggcacttgagcacttgaaatgtgc

SEQ ID NO: 103598 - DNA, 201 bp, Homo sapiens
aattttattgctcttttcttggcaggtttatggggaagtgctcttggtaacactgaagtcattagggaatacatttttggtgagtatttggggaacagaamggtcaaaccctagagatattttatgcaaggagattcacagtacttttcctactcatggcagaagagagacctgtgtgtaattgttctagcaactgctttt

SEQ ID NO: 103599 - DNA, 201 bp, Homo sapiens
tttgggaggctgaggtgggaggatcgcctgaaaccagaagttggagaccaccctgggcaacatagtgagatcccatctcaaaacaacaacattaaaaaacmaaacaaaacaaaaaaacacaataaattagccaagcatggtggcaggaacctgaagaatctacccaggagactggggcaggaggatcactggagcccagga

SEQ ID NO: 103600 - DNA, 201 bp, Homo sapiens
ataaattagccaagcatggtggcaggaacctgaagaatctacccaggagactggggcaggaggatcactggagcccaggaattcaaggcttcggtgagctstgattgcaccattgtactacagcctgagtgacaaagtgagaccctgtccccccaaaaagaagaaagaaaaaagaaaacagaggagaggagggacaaaaga

SEQ ID NO: 103601 - DNA, 201 bp, Homo sapiens
ctggaagtcattatcctcagcaaactattgcaggaacagaaaaccaaacaccacatgttctcacttataagtgggagctgaatgatgagaacacatggacrcagggaggggaacaacacacactggggcctgttgggggcgggtggggagaagaagagcaccaggaaaattagctaatgcatgtggggcttaatacctatg

SEQ ID NO: 103602 - DNA, 201 bp, Homo sapiens
atggtggcaggaacctgaagaatctacccaggagactggggcaggaggatcactggagcccaggaattcaaggcttcggtgagctgtgattgcaccattgyactacagcctgagtgacaaagtgagaccctgtccccccaaaaagaagaaagaaaaaagaaaacagaggagaggagggacaaaagacaaaaaggggccggg

SEQ ID NO: 103603 - DNA, 201 bp, Homo sapiens
ctgccaccagcagcgtagactcaggtctgaggatgagatccccagtggtttctgataccacacagtccatctctaacattctcctgtcatggttgtaattyctcattaatagatttctttttcctgcatacccgctacattcctggttctgtgctgggactcacttgccgttgtatttcctctgcagagacctggttcgag

SEQ ID NO: 103604 - DNA, 201 bp, Homo sapiens
gacccctctaaaaaaaaaatgtggcctacgtgcagaggttccaccctgtgggacccacatgcctccctcacactgtcttggcacattctcccaaagctgcyggagtctcatttgtccaatatgaagaagcccgtggaagaagggacactaccctacccgatatttgcagccattgacaatgacctgcaaccttcctggcag

SEQ ID NO: 103605 - DNA, 201 bp, Homo sapiens
gacaaaaaggggccgggcgcagtggctcacgcctgtaatcccaggactttgggaggccgaggcgggtggatcacgaggtcaggagatcaagaccatcctgrctaacacagtgaaaccccgtctctactaaaaatacaaaaaattagctgggcgtggcggcgggcgcctgtagtcccagctgctcgggaggctgaggcagga

SEQ ID NO: 103606 - DNA, 201 bp, Homo sapiens
tgactctgatgaggcctttctcccatcgtgctctcattttcctgcctgtgaaatggaaggattgtcccagatgattttgagtcctccttcgaacttgatcrttctgcagttgtatttatttaatggaaattttccgtttcctctgtgtgtcgccctctccatgaggcaggtgttcctgtgaaggacctccttgcacacatc

SEQ ID NO: 103607 - DNA, 201 bp, Homo sapiens
atccacccgcctcggcctcccaaagtgctgggattacaggcatgagccaccgcacccggccatctctcactttttagatgtcttccttctccataggtccrattatcacccaaatgctggcagctctccagacattccagtttctcttttgagctcatctctctcctgagatccagacctccttaccctatttcctaagca

SEQ ID NO: 103608 - DNA, 201 bp, Homo sapiens
gagtgtaatggcacgatctcggctcactgcaacctctgcctcccaggttcaagtgattctcctgcctcagcctcccaagtagctgggattataggcatgcrccaccacgcctggctaatttttgtatttttagtagggatggggtgtcaccatgttaatcaggctggtctcgaactcctgaccttaggtgatccactcacc

SEQ ID NO: 103609 - DNA, 201 bp, Homo sapiens
cagctgactccgtcctttccataagccccacaaattcagtcattcccagacctagaaatcaccccctcctcattttcatcctttgtgctcttctacatcayccccagaccaggtctcccagtctcctgggagactcttgtaattagttcctcactggcccgcccatcccaagctgtccacctccttccctggctacctgat

SEQ ID NO: 103610 - DNA, 201 bp, Homo sapiens
gcatacccgctacattcctggttctgtgctgggactcacttgccgttgtatttcctctgcagagacctggttcgagttcacccctcaccacgctggcttcyctgcactgggggcctttgtttccataacccacttcggaagcaaattcaagaagggaagactggtcagaactcaccctgagagagacctgactttcctgag

SEQ ID NO: 103611 - DNA, 201 bp, Homo sapiens
cccaccaaaagatgtggccattgtaacccccagtgcctgtgaatgtgaccttgcatggaaataaggtctttaccaatgtcatcaagtgaagatgaggtcaytcgtgtggaccctaatccacaatgactagtgtccttatgaaaaggagagatttcgccgggcgcagtggctcacgcctgtaatcccagcactttgggaggc

SEQ ID NO: 103612 - DNA, 201 bp, Homo sapiens
tggaaggaatgttgctgtggtacatgtgagctttgtgacctctgaaaagttacctaacctctctgtgcctcagtttctgcctctgtgccatgtgggtgatrataatagtagttatgaggattaaatgagttaattcatcaaaagcacataggacagtgtctggtagataaaggcactcagtaaacattagcaatctggctg

SEQ ID NO: 103613 - DNA, 201 bp, Homo sapiens
ttcctgcatgtggcagaaaagaggcctgtgtataatggttctaacaaccacatttcctgacatttattctcatacactgaacattgattatgggcagccasgaagaccacagagtggatgagagtacagacacccttggaaggaatgttgctgtggtacatgtgagctttgtgacctctgaaaagttacctaacctctctg

SEQ ID NO: 103614 - DNA, 201 bp, Homo sapiens
agctgcagtagtagcagtgggatattcacttgccctatgttgcccagggtggctactcttgtttctcaggcaatgggcagagccacagagttcccaaaagyttccgtcctttgtattaaagccaccagggcgggtggcagggcaaagccaggtgtgggctgggtcaggcagttttgtgctctaactctccctgtgcagggc

SEQ ID NO: 103615 - DNA, 201 bp, Homo sapiens
agccttgacagaggtggctggaggagctctcagtgagttgcatcgagattttttttttttttttttgagacagagtttggctcttgttgcccaggctggartacaatggcatgatctcagctcaccccacaacctccgcctcccaggttcaaggaattctcctgccgcagcctcctgagtagctgggattgcaggcacttg

SEQ ID NO: 103616 - DNA, 201 bp, Homo sapiens
tcatattaccaaagttacttttctgattccttctcatttgagtagactatttcttttaattattcttgaatttatgttggatttgactgtgttttttttttcttttttccgcttaaggatgtgactttaatgtccctagctaattatagcctaatttggtccttggtgctttcaggggtgaagattgtaagagttccttgg

SEQ ID NO: 103617 - DNA, 201 bp, Homo sapiens; identical to SEQ ID NO: 101157

SEQ ID NO: 103618 - DNA, 201 bp, Homo sapiens
ctgaggtgggaggattgccggagcccaggagtttgaggctgcagtgagctatgatggtaccaccccactccaggctgggcgacagagcaagaccttgcctytaaaaaaaaaaaaaaaaaaaaaaaaattaagctgaaagcttaattaagctgagtcatgcaagaaactgtctttccttttgttcctaagccacagataaaa

SEQ ID NO: 103619 - DNA, 201 bp, Homo sapiens
ctcctgggctcaagcaatcctcttgcctcagccttttgagtaagctggggcaacaggcatgcaccatcgtgcctggctaatttttaattatttttttttttgtagagacagggatcttgctatattgcccaggctggtctcaaactcctgagctcaagcaatcctccaactactgggttcaagtgatcctcctatctcagc

SEQ ID NO: 103620 - DNA, 201 bp, Homo sapiens
ctcctccatccttagcatattaagtcaccctcatgctgaactcctccacaccacgggatggcggctgcatccaatgaagctgcaacttttttttttttttttgaagtcagggtctctctctgtcactcaagctgccgtgcaaaagcacagtcatagcccaatacaggtcttgaactcctggcctcaagtgatcttcctgcc

SEQ ID NO: 103621 - DNA, 201 bp, Homo sapiens
ctataggtgcataccaccaggcctggctaatttttgtattttttagtagagatagggtttcaccatgttagccaggctgactttaaactcctgacttcaawtgatccgcccacctcagtctcccaaagtgttagcattacaggcgtgagccaccgtgcctggctgattattcattttttatgtctccctgtatcatataca

SEQ ID NO: 103622 - DNA, 201 bp, Homo sapiens
tctgcttggccatttgatgtcttgaattcactattttattttatttcattttatttttgagacagggtcttgctctgtcacccaggctggagtgcagtggygagatcatggctcactgcagcttcgacctcctgggctcaagcaatcctcttgcctcagccttttgagtaagctggggcaacaggcatgcaccatcgtgcc

SEQ ID NO: 103623 - DNA, 201 bp, Homo sapiens
gtagatagcacccgataagcagcattaagaacatcaaaaatttttattgagcccgggcacggtggctcacacctataatcccagcattttgggaagctgakgtgggaggattgcttcaggccacaagtttgagaccagcgtgggcaacatagtgagactccatctctacagaaaataaatttaaaaatgagcagggcatgg

SEQ ID NO: 103624 - DNA, 201 bp, Homo sapiens
gtggtgcatgcctgtaatcccagctagtcgggaggctgaagcaggagaatcacttgaatctgggaggcagaggttgcagtgagccgagatcacaccactgmactccagcctgggcaacagagcgagatcccatctcaaaataaataaataatacaaagttaggtggctggtgacattggtttagctgtgcaacattaagca

SEQ ID NO: 103625 - DNA, 201 bp, Homo sapiens; identical to SEQ ID NO: 16275

SEQ ID NO: 103626 - DNA, 201 bp, Homo sapiens
aaatgaaataaatattttaaatcatgctagccacacttcaggggctcaagagctatgatgtatgtttaatacattggatggtgtgagggtagatagcaccygataagcagcattaagaacatcaaaaatttttattgagcccgggcacggtggctcacacctataatcccagcattttgggaagctgaggtgggaggattg

SEQ ID NO: 103627 - DNA, 201 bp, Homo sapiens
caggtttattctagattttctgctcctccatccttagcatattaagtcaccctcatgctgaactcctccacaccacgggatggcggctgcatccaatgaarctgcaacttttttttttttttttgaagtcagggtctctctctgtcactcaagctgccgtgcaaaagcacagtcatagcccaatacaggtcttgaactcct

SEQ ID NO: 103628 - DNA, 201 bp, Homo sapiens; identical to SEQ ID NO: 16280

SEQ ID NO: 103629 - DNA, 201 bp, Homo sapiens; identical to SEQ ID NO: 16283

SEQ ID NO: 103630 - DNA, 201 bp, Homo sapiens
tcctccatccttagcatattaagtcaccctcatgctgaactcctccacaccacgggatggcggctgcatccaatgaagctgcaactttttttttttttttkgaagtcagggtctctctctgtcactcaagctgccgtgcaaaagcacagtcatagcccaatacaggtcttgaactcctggcctcaagtgatcttcctgcct

SEQ ID NO: 103631 - DNA, 201 bp, Homo sapiens
ttgccccattgcactccagcctgggcaacagagcaatactctgtctcaaataaataaataaataaataaataaataaataaataaataaataaatgggagmctttgcctccaaccctgaagaaaataagcgtgcaaaagatgagtagaggtggaggcagagatgaaggagctagaaaaaagaggccagaaagtcagagaga

SEQ ID NO: 103632 - DNA, 201 bp, Homo sapiens
tgctcttttcttggcaggtttatggggaagtgctcttggtaacactgaagtcattagggaatacatttttggtgagtatttggggaacagaaaggtcaaascctagagatattttatgcaaggagattcacagtacttttcctactcatggcagaagagagacctgtgtgtaattgttctagcaactgcttttcctgacat

SEQ ID NO: 103633 - DNA, 201 bp, Homo sapiens
actttcctttctccccaggctctactacccgaaggatagtgcccgaagttgctgcttggcatagatgagcctcagcttccagggcactgtgggcctgttgrtctactagggccctgaagtccacctggccttcctgttcttcactcccttcagccacacgcttcatggccttgagttcaccttggctgtcctaacagggcc

SEQ ID NO: 103634 - DNA, 201 bp, Homo sapiens
atgtgctcactgtgtgagcaagttcactgttgcctacagggctggaatggtagaagactcttgaagcttaactcattccccacaaggcatgcaattttttycccagtattttattgactggtttgatggttcaggcttcaggtctgtaggggagtgcataggaagtgattgtggccaaaacatgtgagtaaatgcaacacc

SEQ ID NO: 103635 - DNA, 201 bp, Homo sapiens
tatcagtctattcgaggaacagaaggaaagctgttattgctggatcagggtaggggaagcacggaatgaaatgtgattggagagatggacagagatcagawcttgtgaattctggcaggtatcatgacattcgatgtaggccaaagagttacctcctagcccagctcctgatacatgcttaataagcgtagtgttggataa

SEQ ID NO: 103636 - DNA, 201 bp, Homo sapiens
ttgggaggcccaggcggacagatcacttgaggtcaggggttcgagtgcaagctgggtaacatggtgaaaatgcgtctctactaaaaatacaaaaattagcyaagtatggtggtgcacgcctgtgatcccagctactcaggaggttgaggcacaagaatcgcttgaaaccaggaggcaaaggctgcagtgagctaagatcac

SEQ ID NO: 103637 - DNA, 201 bp, Homo sapiens
atgaacgtggccgggtaggtgggagaccatagtcgctctgatgcctatgctcgttcagtaagtatctgttggagaactttctctgcaacaggcaggagggytgcatgggtgaaaaaagataggcagtgtctcccctacttgagcttgcgtctcagcaggggacagaccatgaacagggtcaggagtgaatggttttctgaa

SEQ ID NO: 103638 - DNA, 201 bp, Homo sapiens
aaaaaaattaaaaaataaagaaatgaggggccgggcgcagtggctcacacctgtaatctcagcactttgggaggctgaggtgggcagatcacctgaggtcrggagtttgagaccagcctgaccaacgtggagaaaccccatctctactaaaaatacaaaattagccgggcgtggtggtacatgcctgtaatcccagctaca

SEQ ID NO: 103639 - DNA, 201 bp, Homo sapiens
tgaagtttccataattcctgggctccagaaagaagaaaaggcggccgtggagagacgaagacttcatgtgctgaaagctctgaagaagctaaggattgagsctgatgaggtaagtgaggggaggagggtggccccagagatcccagaatcgccccctctgtgcccagtgtccagggcccaactcagccagggagagctgga

SEQ ID NO: 103640 - DNA, 201 bp, Homo sapiens
gctgaggcaggagaatctcttgatctcgagaggcggaagctgcagtgagcggagatcgcgccattgcgctccagcctgggctatctcaaaaaaaaaaaaaattttttttttgaggaacgaccataccattttccacagtggctgtaccattttatattctgcccaatggtgtcccaggtttccaatttctccacgtcctca

SEQ ID NO: 103641 - DNA, 201 bp, Homo sapiens
agtgaaaccccgtctctactaaaaatacaaaaaattagctgggcgtggcggcgggcgcctgtagtcccagctgctcgggaggctgaggcaggagaatggcrtgaacccgggaggcggaggttgcagtgagctgagatcgcgccacagcactccagcctgggcgacagagcaagactccgtctcaaaaaaaaaaaaaaaaaa

SEQ ID NO: 103642 - DNA, 201 bp, Homo sapiens
ggcttttattacattgaagtatgtctcttgtataccgattttgttgagggctttaatcataaagggatgtgggattttgtgaaatgcttctgcatctcctrtgatttttgtttttaattctgtttctgtgatatatcacatttgttgacttgcatatgttaagccatccctgcattcctagtatgaaacccacttgatcac

SEQ ID NO: 103643 - DNA, 201 bp, Homo sapiens
tgattgcaccattgtactacagcctgagtgacaaagtgagaccctgtccccccaaaaagaagaaagaaaaaagaaaacagaggagaggagggacaaaagamaaaaaggggccgggcgcagtggctcacgcctgtaatcccaggactttgggaggccgaggcgggtggatcacgaggtcaggagatcaagaccatcctgact

SEQ ID NO: 103644 - DNA, 201 bp, Homo sapiens
atcttgagactggtgccctgcgagctccaccccacccctccatgcagttccccatgggccccgcctgcatcttcttgaggaaaggcattgctgagaaacascgggtgaggtggggagtgagggggaagggcggtgggcggggcaaagggagcaggggtgtgggacaaagaaggggacatgatggtgccacagaaccagggg

SEQ ID NO: 103645 - DNA, 201 bp, Homo sapiens
ccagcctgggcaacatagcaagagcctgtctctatcaaaaaataaattagccgggcatggtgacatgcatctgtagtcccagctacttgggaggttgaggygggtggattgcttgagcccaggaggttgaggctgtagtggcccattattgtaccactgcactccagcctgggtgacagactgagacccctctaaaaaaaa

SEQ ID NO: 103646 - DNA, 201 bp, Homo sapiens
tggagtgcagtggtgcaatcacagctcactgcagccttgacctcctgggctcaagcaatcctcccagctcagcctcccaagtagctgggactacaggcacrcaccactgggcctgacaaatttttttttttttttttttttttttagagatagggtttcgcttttttgctcggggtggtctccaaatcctgggctcaagtg

SEQ ID NO: 103647 - DNA, 201 bp, Homo sapiens
ggcgttttatactgagcgcattccaagttggatgcagaagtctcattagatgttaaaggaggcccggggcagtggctcacacctgtaatcccagcacttcragaggccgaggcaggtggatcacctgaggtcaggagtttgagaccagcctggccaacatggtgaaaccctgtctctactaaaaatacaaaaattagctgg

SEQ ID NO: 103648 - DNA, 201 bp, Homo sapiens
gaatttaattcatagttaaactttgagacaaagaaaactgacccccagtccttgttgagagattgaagccacattcatttactttttatttatttatttakttttgagacagagtttcactcttgttgcccagactggagtgcaatggcatgatctctgctcactggcacctccacctcctgagttcaagtgattctcctc

SEQ ID NO: 103649 - DNA, 201 bp, Homo sapiens
gggcgtggtggcgggcgcctgtagtcccagctactccggaggctgaggcgggagaatggcgtgagcccggaaggcggagcttgcagtgagccgagactgcrccactgcactccagcctagggcacaaagcgagactccatctcaaaaaaaaataaaataaaataaaccaatcaaaccaaattccaggccaccctcaggacc

SEQ ID NO: 103650 - DNA, 201 bp, Homo sapiens
ctggctaacacagtgaaaccccgtctcaactaaaaatacaaaaaattagctgggcgtggtggcgggcgcctgtagtcccagctactccggaggctgaggcrggagaatggcgtgagcccggaaggcggagcttgcagtgagccgagactgcgccactgcactccagcctagggcacaaagcgagactccatctcaaaaaaa

SEQ ID NO: 103651 - DNA, 201 bp, Homo sapiens
ttttttattttattttattttatttatttatttattttttttgagacagcatctcgctctgtcgcctaggctggagtgcagtgacgcgatctcggctcackgcaagctccgcctccggggttcaagcgattctcctgcctcaacctcccgagtagctgggattacaggcgcacaccaccacacccggctaatttttgtatt

SEQ ID NO: 103652 - DNA, 201 bp, Homo sapiens
tgtgcctggcctgaagtcacattcataagacaaggttagaatcatgaaggtgctggaactttgctaaagaacagtcgtgggttgaagaatgacctgccatyccttagcttccttttctatatgtgctccagagtcacgtaaccaggggtcgcatgatttataacttccccagctacttctataaataatatcactgtcgtg

SEQ ID NO: 103653 - DNA, 201 bp, Homo sapiens
gtttcctctgtgtgtcgccctctccatgaggcaggtgttcctgtgaaggacctccttgcacacatctttccccagtcttcatcgtccacacttaaaatgcycaactcactctcttcctctgtcctccagggcaatatcttctctctacaccaatgatggtgacatggaagctctcgaggctgacctgaaacatcgatttac

SEQ ID NO: 103654 - DNA, 201 bp, Homo sapiens
aatgatggtgacatggaagctctcgaggctgacctgaaacatcgatttacccgacaggagtgggacttggctaagagcctacagaaaaccatccaagcagygaggtctgagaattactctctgaccgacttctgggcctacatggttatctctaagcaaaccagagaagtaagtcattcccagctggggacctggggtggg

SEQ ID NO: 103655 - DNA, 201 bp, Homo sapiens
atttacccgacaggagtgggacttggctaagagcctacagaaaaccatccaagcagcgaggtctgagaattactctctgaccgacttctgggcctacatgkttatctctaagcaaaccagagaagtaagtcattcccagctggggacctggggtgggggtaggagcaaggggtctcagggtgtggggttaccaaagatgct

SEQ ID NO: 103656 - DNA, 201 bp, Homo sapiens; identical to SEQ ID NO: 16281

SEQ ID NO: 103657 - DNA, 201 bp, Homo sapiens
ctctgctcactgagataaatgcgtatctgattgcctccagttggaaaggctaatggaaactctaaagaatgttggccggcccgtggctcacgcctgtaatsccagcactttgggaggcagaagcgggtagatcacgaggtcaggagttcaagaccagcctggccaagatggggaaaccctgtctctactagaaatacaaaa

SEQ ID NO: 103658 - DNA, 201 bp, Homo sapiens
gggggcaacatgacataaacaggtaaacaaagaagtcaacaggatggccatggagagtaagtgccatggagacgaccgaacgtgcggtgtgctgaggagtraagtgaaagctttttaggaaagggtctgggggtctgggaaggcatcctgagggagagacctttcacctggggctgaatactgagaaggggtggccatgag

SEQ ID NO: 103659 - DNA, 201 bp, Homo sapiens
agtgagcccagatcacaccactgcactccagcttcgatgacagagcgagaccctgtctcaaaaaaaaaaaaaaaaaaaaaagtcacatactcacaggctcyagggattaggatagggacatcattaggagacattattcaacctgccacaaagacacagacacaaccagatgacagaagccaggggaagagttggaatatt

SEQ ID NO: 103660 - DNA, 201 bp, Homo sapiens
atttttttgtttttttttgaatttttacttcaatagcttttggggtacaagtggtttctgttacacgatgaattatgtagtagtaaattctgagactgtartccacccatcagtgtatgttttagagtatgttgcattcaatatgtagttttttggttttgttttttgtgacagtctcactctgttgcccaggctggagtg

SEQ ID NO: 103661 - DNA, 201 bp, Homo sapiens
agaaaactgttagactcaaatattcaactcaatataaaataagaagaagccgggtgcggtggctcacacctgtaatcccagcactttgggaggtagaggcrggtggatcacctgaggtcaggtgtttgagaccagcctggccaacatggcgaaaccctgtctctactaaaaatacaaaaattagccaggcatggtggcacg

SEQ ID NO: 103662 - DNA, 201 bp, Homo sapiens
gggtgatggcagaggcttactctttcccttacagaagatgttgtccctgtccaagctgacccttgctctgttgtgtgtctgggctgttagctgaggtcccrttgggtctccaggccccaggggtcttctggaggggtcttctggagaggtcttgcaaccatttcttattgcctccttctcagaccatccgggctaccactg

SEQ ID NO: 103663 - DNA, 201 bp, Homo sapiens
aggaagaaaaccggcagcatttgttaaacttcaatcaaagacgacttcagagacctaagctgtccactacagtggttgccggccacatgtggcacttgagsacttgaaatgtgcctggcccaagttgaagtgtgctatgaagataaaatacacctcggattttaatgaccgagtatggaaaacgcatgtcaaagaccttat

SEQ ID NO: 103664 - DNA, 201 bp, Homo sapiens
caccaacccattcatgaaggatccactcccatgatccaaacatctccctctgggccccacctccaacactggggatcacatttcaacatgagatttggagrggacgaatttccaaactatatcagtctattcgaggaacagaaggaaagctgttattgctggatcagggtaggggaagcacggaatgaaatgtgattggag

SEQ ID NO: 103665 - DNA, 201 bp, Homo sapiens
cacatttgttgacttgcatatgttaagccatccctgcattcctagtatgaaacccacttgatcacatcatggcaaatttcaagctaccaacatgaggtcascgagcacagagttggaagacgggtacaaaattagctctccagaacccgtatcaacagactccaacccatggctgccatttctattaaagagacgtcgctg

SEQ ID NO: 103666 - DNA, 201 bp, Homo sapiens
tcccatggtcccagctactcaggaggctgaggcaggaggatcacttgagcccaagaggtcgaggctgtagtgaactatgattgtgccactgcattccagcstgggtgacagagcaagaccctgtctcgaaaaaataataaataagtaaattatatggagagacaaggagaggcgagagcaggtatccggtgaaaaattctg

SEQ ID NO: 103667 - DNA, 201 bp, Homo sapiens
ttattcttgagacagggtttcactctgtcgcccaggctggagtgcagtggtgcaatcacagctcactgcagccttgacctcctgggctcaagcaatcctcycagctcagcctcccaagtagctgggactacaggcacacaccactgggcctgacaaatttttttttttttttttttttttttagagatagggtttcgcttt

SEQ ID NO: 103668 - DNA, 201 bp, Homo sapiens
tacgtgtatgagccactgcatccagcctatcctaacacttcgggtttttgttgttttttgtttgttttgtttattcttgagacagggtttcactctgtcgyccaggctggagtgcagtggtgcaatcacagctcactgcagccttgacctcctgggctcaagcaatcctcccagctcagcctcccaagtagctgggactac

SEQ ID NO: 103669 - DNA, 201 bp, Homo sapiens
gtggcgagatcatggctcactgcagcttcgacctcctgggctcaagcaatcctcttgcctcagccttttgagtaagctggggcaacaggcatgcaccatcrtgcctggctaatttttaattatttttttttttgtagagacagggatcttgctatattgcccaggctggtctcaaactcctgagctcaagcaatcctccaa

SEQ ID NO: 103670 - DNA, 201 bp, Homo sapiens
gagcagccccatgaggaccccgaaaggaaaggtaccatgtgtagtgtgataagtgtcatcaacagtaagtgccaccaaccttctcccccctcttgctcttycccacccctgtgggccagtcctgcaggggacatgaccagatgtcccactggtacagtttggatatttgttcccttccacatctcatgttggaatgtaatc

SEQ ID NO: 103671 - DNA, 201 bp, Homo sapiens
catttgagcctgggggtttgagactgcagtgagccaagatcatgccactgcactctagtctgggcaacagagcaagacctgtctcaaaaaaaaaaaaaaawatatatatatatatatatatagactctatgtgacacaccagctcccttgccttctgccatgagtagaagctttttgcaccatgcttcttgtacagcctgc

SEQ ID NO: 103672 - DNA, 201 bp, Homo sapiens; identical to SEQ ID NO: 101214

SEQ ID NO: 103673 - DNA, 201 bp, Homo sapiens
cacgatgggagaaaggcctcatcagagtcaaatgttttttgcagccagcatttattaaaggtttacatgtgacagcaacaaactgtgctgatctcacaggrctgtttgagaattaaatgatgaaacacatgcaaatcgtcccaacctgagctatcaagtagagctatgtaacatgagccacatctattctatcattttaaa

SEQ ID NO: 103674 - DNA, 201 bp, Homo sapiens
agagcttgggagtgggaaaggtcctgcagagtcacaccggacccctctattcctccaaggctcatctaacatgttgagtgacatggcgtgggggtttagcygtactgcacattgcagaactccagggggcgctattgagataggaaccccatgatttcttctggaatctttccgagactgctgtggttaaaaaggcaggcc

SEQ ID NO: 103675 - DNA, 201 bp, Homo sapiens; identical to SEQ ID NO: 16274

SEQ ID NO: 103676 - DNA, 201 bp, Homo sapiens
ggagctccaggtcttctcaatgaatgaaagaatggatgaatgtctttctcctaagtcatgtatgacctgtagaggcttccaggtcttctaatcttatccartgtgcaacactgcctacaaagcacagtggtaacttctaactttcctttctccccaggctctactacccgaaggatagtgcccgaagttgctgcttggcat

SEQ ID NO: 103677 - DNA, 201 bp, Homo sapiens
gagaggcaagaattttccttctgagggtctagtttgcccagctcttaaatttcttgggggaaagaaaaggacttggtaggcttccagaaagaggaatggtrtattccttctgctgagtcttcagtgtctctcaaaggtctccttaatgcggcagatacctgatatcctatcaaacaatccaggagagggagcttaatagag

SEQ ID NO: 103678 - DNA, 201 bp, Homo sapiens
gctgaggtcccgttgggtctccaggccccaggggtcttctggaggggtcttctggagaggtcttgcaaccatttcttattgcctccttctcagaccatccrggctaccactgactactgccgccgccacaagatcccctttccccaagtagaagaggctgagctggatttgtggtccaaggcccccgccagctgctacatc

SEQ ID NO: 103679 - DNA, 201 bp, Homo sapiens
gttggaagacgggtacaaaattagctctccagaacccgtatcaacagactccaacccatggctgccatttctattaaagagacgtcgctgcaggtaatctrtattttctataactagtgactttacagttaaacattccccctgcctctgctcttttgcagcccgattactgaggctgcaagaaagttcacaaggggaaca

SEQ ID NO: 103680 - DNA, 201 bp, Homo sapiens
attacactggacttgtagattgcttttggcagtatggtcattttcacaatattgattctacccatccatgagcatgggatgtgtttccatttgtttgtgtyatctatgatttctttcagcagtgttttgtagttttccttgtagcagtctttcacctccttggttaggtatattcctgagtattttattttatttttttgc

SEQ ID NO: 103681 - DNA, 201 bp, Homo sapiens
ccctggggagcagaggttgcagtgagcccagatcacaccactgcactccagcttcgatgacagagcgagaccctgtctcaaaaaaaaaaaaaaaaaaaaargtcacatactcacaggctccagggattaggatagggacatcattaggagacattattcaacctgccacaaagacacagacacaaccagatgacagaagcc

SEQ ID NO: 103682 - DNA, 201 bp, Homo sapiens
gatcagagtaccagtagggttggattctggggaaccctcttctgggttgcagagagccaacttcttgccacatggcgggctttaatgttgttttttgacaycagcattcaccatatgctggttatagacaagtctggaaggagaatctatctccaacctgcaaatggctaactaatgttgtgggatggtaggctggtgatt

SEQ ID NO: 103683 - DNA, 201 bp, Homo sapiens
ggagtgcaatggtacaatcatagctcactgcagccttgaactcctgggctcaagcaatcctcccatctctgcctttggagcagctgggactacaggtgtgygccaccatgcacggctaatttttttattttttgtaaagacagcctctccgtatgttgctcagctggtctcaaactcctgggctcaagcaatcctcccacc

SEQ ID NO: 103684 - DNA, 201 bp, Homo sapiens
accttggctgtctcggcttctttccctaggctcactcagtaacttgatggattttgtgaagaaaacaggcatttgcgcttcaaagtgggaatgggggaccmctcacaacttcctgtacaaacacggtgagaagaccctcttcccaccgccctggtctgtccttgcgtgtgaatgggctggagtaggggaagggggtgggcc

SEQ ID NO: 103685 - DNA, 201 bp, Homo sapiens
agtgggagctgaatgatgagaacacatggacgcagggaggggaacaacacacactggggcctgttgggggcgggtggggagaagaagagcaccaggaaaaytagctaatgcatgtggggcttaatacctatgtgatgggttgataggtgcagcaaaccgccatggcacatgtttacctgtgtaacaaatctacacgtcctg

SEQ ID NO: 103686 - DNA, 201 bp, Homo sapiens
tacaggcacatgtatgttcactgcagcactattcacaatatcaaagacatggaatcaacccaaatgcccatcagtgatagactggataaagaaaatgtggyacatatacaccatggaatactatgcagccagaaaaaggaacaagatcatgtcctctgcagggatatgggtggagctggaagtcattatcctcagcaaact

SEQ ID NO: 103687 - DNA, 201 bp, Homo sapiens
caacaacaacaacaacaaaaaagaaatggcaaccccaaggtgatggtattaagagatggggcctttgggaggtgttgagaccatgagggtggagccctctwgatttggattaatcccttataaaagaagcctcagagagctcactccaaggaatgcggtgaaggttgaagggtagaatttatgcaaaatgccaagatgagc

SEQ ID NO: 103688 - DNA, 201 bp, Homo sapiens
aaaagaaaaagaaatgtaatccccagtgttggaggtggggcctggtgggaggtgattggatcatgggggcggatccctcatgaatggcttagcgtcatccycttggtgattagtaagtgcttgctctgagttcatgtgagatacggttgtttagaagtgtgtggcaccttccccctcgctctcttgctcctgctctcggca

SEQ ID NO: 103689 - DNA, 201 bp, Homo sapiens
ggatcatgggggcggatccctcatgaatggcttagcgtcatcctcttggtgattagtaagtgcttgctctgagttcatgtgagatacggttgtttagaagygtgtggcaccttccccctcgctctcttgctcctgctctcggcaagtgatgtgcctgctccccattcactttccatcatgattggaagcttcctgaggccc

SEQ ID NO: 103690 - DNA, 201 bp, Homo sapiens
tcatgaatggcttagcgtcatcctcttggtgattagtaagtgcttgctctgagttcatgtgagatacggttgtttagaagtgtgtggcaccttccccctcrctctcttgctcctgctctcggcaagtgatgtgcctgctccccattcactttccatcatgattggaagcttcctgaggccccaccagaagcagatgccagc

SEQ ID NO: 103691 - DNA, 201 bp, Homo sapiens
ggatgcctagtttgcaaatatttgctcgcattcagtgggttgtgtgtttactctgataattacttcctttgctgtacagaagctttttaatttactcaggkcccatatatttgtttatttttgagacggagtctcactccatcacccaggcttcagtgcagcagcacgatctcggctcactgcaatctccgcctcccagac

SEQ ID NO: 103692 - DNA, 201 bp, Homo sapiens
ggcatgaatgttgagcctggctggcctgatttgttttcatttctgtgctcaaagtttgatctggagctgggttctgagctggatgtggaggatgaggttcmtggaggcgacagcatgaagagcagagctgcagagcttgggagtgggaaaggtcctgcagagtcacaccggacccctctattcctccaaggctcatctaac

SEQ ID NO: 103693 - DNA, 201 bp, Homo sapiens
tcagattgctttctgacacataaatgggattatttttttcctcctgacaccaaatgtgtgtggttttttccaacgctgcttctcgagctctctggtactarctgggtgtcctacaattctgagcaattctgacgctggctacctggagttcacatcagattccacaggtgaaaggggctcagtcccaaaaaactgctccca

SEQ ID NO: 103694 - DNA, 201 bp, Homo sapiens
ggtggccccagagatcccagaatcgccccctctgtgcccagtgtccagggcccaactcagccagggagagctggaccgaaggatatgaacttctatgggayagaaatagaaggatatgaacttctatgggacaggcattgcccctgcctaagggagatcctaggtctcctccttctcctcctcctcctttctttttctttt

SEQ ID NO: 103695 - DNA, 201 bp, Homo sapiens
cttgttcagcaactgtgtcctggtaagttctcacgatacatcaggcaatgttaccagttacctgtggttgggcgtctcctggcatctcaaggctcagaagyccccagtgtgaatggtgtttgtctgtttgtttgtttgagacagagttttgctcttgttgcccaggctggagtgtaatggcacgatctcggctcactgcaa

SEQ ID NO: 103696 - DNA, 201 bp, Homo sapiens
acccacctcaccctcccaaagtgctgggattacaggtgtgagccaccgcgtctggccccaaaattaaccattttgaaaagtgaataattgactggcattcratgcattcacagtgttgtacaaccatcacctctatctagtttcagaatattttcctcaccccaaaaggaaaccatgtacccgtgggctggtggctacctg

SEQ ID NO: 103697 - DNA, 201 bp, Homo sapiens
actgtgttggccaggctgatcttgaactcctgacctcaagtgatccgcctgcctcagcccccaaagtgctgggatttcaggcgtgaggcaccgcacccagycagggcttcaacatatgaatctgggaagagagagaagtcagctcctagttggcaacctcacaactgctgtctacactgacaacgatcattttcccatccc

SEQ ID NO: 103698 - DNA, 201 bp, Homo sapiens
ttactttcttcaagtgcagcaagtagacaattgaaaagtacctttacggccgggcgcggtggctcatgcctgtaatcccagcactttgggagactgagacyagcggatcacctgaggatcaccaacctgaccaacatggagaaaccctgtctctactaaatatatgaaattagccgggcgtggtggagcatgtctgtaatc

SEQ ID NO: 103699 - DNA, 201 bp, Homo sapiens
tggtcgctgaagccactgccttcctgagatgacccaggtacagccagtctcacccccagacatccaacctctcacctctgtgatgacccggtgtccaggcrcagacacacccagagtcctcctgaccagctcatcagcagctcaccaaggaaaggaaatcaaggtgtactctcttcagactctagatttcccttcctcctc

SEQ ID NO: 103700 - DNA, 201 bp, Homo sapiens
ttgttctgtggattaaattaatacttgttaatacatgtgaagtgcttagcacagtatctgccacttactgtggggtttataaacattttcctcccctcccytcccctcccctcatggcctcctttcgagactgggtcttatggtgtgatcatagctcactgcagcctcaacctcctgggctcaagcgatcctcccacctca

SEQ ID NO: 103701 - DNA, 201 bp, Homo sapiens
agcaaaccagcatggcacatgtatacctatgtaataaacctgcatgttcagcacatgtatcccagatttgaaataaaattcttttaaaaaagggggggggwtttaaagacagagacaggcatgtatacagagaggaaaccatgtgaacatggaagcagggattggggtgaggctctactgaccaagggctgccaaactatt

SEQ ID NO: 103702 - DNA, 201 bp, Homo sapiens
tgacctcctgaggctgtgtcacggttgtgcatccttaaccttggcaaaataaactttctacactgaccgagacctgtctcagaaacattgggttaacaacrctctcacatattgctgctgagaaggcagcttcatttggaacttcacgccaaaaaccccattttaccttaattacctctttaaagaccctgtctccaaata

SEQ ID NO: 103703 - DNA, 201 bp, Homo sapiens
ttggtagggtacttggacagtgtctgagaccacctggatttcttgacgtagatgaaggcggtgagcctgaacacacctggctgactgagatgctcgagaaytggaccaggacctccctggaaaagcaggagcagccccatgaggaccccgaaaggaaaggtaccatgtgtagtgtgataagtgtcatcaacagtaagtgcc

SEQ ID NO: 103704 - DNA, 201 bp, Homo sapiens
tgcccaatggtgtcccaggtttccaatttctccacgtcctcatcaacacttattgttttctggggttttttggataccagccatcctaatgggtgtgtctwtttttttttttttttttttttttttgagatggagtctcactctgtctcccaggctggagtgcagttgtgtgatctctgctcactgcaacctcccaggttc

SEQ ID NO: 103705 - DNA, 201 bp, Homo sapiens
tgctctgagttcatgtgagatacggttgtttagaagtgtgtggcaccttccccctcgctctcttgctcctgctctcggcaagtgatgtgcctgctccccaytcactttccatcatgattggaagcttcctgaggccccaccagaagcagatgccagcaccacgcttcctgtacagcatccagaactgtgagacaattaaac

SEQ ID NO: 103706 - DNA, 201 bp, Homo sapiens
tgggtaatggagagagatggaatgtgccacacgaagcctcactatgactttctataatgcctggctcctgtgctgaaatgagaacatgcatcctagccggscatggtggtgcgtgcacctgtagtcccagctattcggggaggctgaggtgggaggattccttaagcccaggagttggaggctgcagtgagctatgaatgc

SEQ ID NO: 103707 - DNA, 201 bp, Homo sapiens
gataatggcttccagctccatccctgtccctgcaaaggacatgatcttgttcctttttctggctgcatagtattccatggtgtatatgtgccacattttcyttatccagtctaccattgatgggtatatttggttgattccatgtctttgctattgtgaatagtgctgcaatgagcatacgcatgcatgaggcagaatttg

SEQ ID NO: 103708 - DNA, 201 bp, Homo sapiens
gaggattccttaagcccaggagttggaggctgcagtgagctatgaatgcaccactgcactcagagtgagacccccatcccttaaaaagttttcttttaaaraacgtacttttttttgttttgttttttgtttttgtttgtttgtttgagatggagtctcgctctgtcacccaagctggagtgcggtggtgcaatcttggct

SEQ ID NO: 103709 - DNA, 201 bp, Homo sapiens
gaggttgcagtgagctgagatcgcgctcctgcactccagcctggggacagagcaagactccttctcaaataaataaataaatacataccatcaggtctcgygagaactcaactcactgtcacgagaacagcatgagggtaaccacttccatgcttcaattacctcccacgacacttggggattatgggaactacaattcaa

SEQ ID NO: 103710 - DNA, 201 bp, Homo sapiens
acttactataagatatacttgagcccaggtattcaagactagcctggaaaacactgtgagacctcatcttttttaaacaaaattaataaatagataaaacrtttaaaaaagccaggtgtgatggctcacgcctgtagtcccagctactcaggaggctgaggcgggagggtcgcttgaggccaggagttcaagaccagcaag

SEQ ID NO: 103711 - DNA, 201 bp, Homo sapiens
tcccaggttcacgccattctcctggcccagcctcctgagtagctgggactacaggcacccaccactgcgcccagctaatttttttttttttttttttttttgtatttttagtagagaccggtgttagccaggatagtctcgatctcctgacctcatgatccacccgcctcagcctcccaaagtgctgggattacaggcatg

SEQ ID NO: 103712 - DNA, 201 bp, Homo sapiens
gttcaagaccagcaagcctgggcaacgtagtgagacctcctctctaaaataaataaataaaaatataagatagaatggccgggtgtggtggctcatggctktaatcccagcactttgagaggccaaggtgggcggatcgcttgaggtcaggagcttgagaccagcctggccaacatggcaaactctgtctctactaaaaat

SEQ ID NO: 103713 - DNA, 201 bp, Homo sapiens
acgtagtgagacctcctctctaaaataaataaataaaaatataagatagaatggccgggtgtggtggctcatggctttaatcccagcactttgagaggccraggtgggcggatcgcttgaggtcaggagcttgagaccagcctggccaacatggcaaactctgtctctactaaaaatgcaaaaatacaaaattcgccgggc

SEQ ID NO: 103714 - DNA, 201 bp, Homo sapiens
acattcataagacaaggttagaatcatgaaggtgctggaactttgctaaagaacagtcgtgggttgaagaatgacctgccatcccttagcttccttttctrtatgtgctccagagtcacgtaaccaggggtcgcatgatttataacttccccagctacttctataaataatatcactgtcgtgaaacacagaactcagctt

SEQ ID NO: 103715 - DNA, 201 bp, Homo sapiens
cactcttgacctcaagtgatctgactgcctcggcctcccaaagtgctgggattacaggcatgagccactgctcctggcaataatgtttcgttttgtttttrttttaaaaaaaagaaattgtctttgagatagttttcagagtgagcattttggcagaccaagagctaccacctggtcctgagacccgctcccaggaactga

SEQ ID NO: 103716 - DNA, 201 bp, Homo sapiens
tcactgcaacctccggctcatgggttcaagtgatcctcctgcctcagcctcccaagtagctgtgattacaggcacccgccaccacgcctggctaattttgrtatttttagtagagacagggtttcactgtgttggccaggctgatcttgaactcctgacctcaagtgatccgcctgcctcagcccccaaagtgctgggatt

SEQ ID NO: 103717 - DNA, 201 bp, Homo sapiens
gcttcctacaaggcacacaggacttcagctgtgtctgcgcaccatgccatgcagctgccgggtcttatggcctcggaatacaccatcaagcatcaagtcastggatcatggcgatgagtgttttagcatcaaatttctccctgaaggggttggatgaagtcgctttctcagtagcaatatatgagagtgtaaaccaaaaat

SEQ ID NO: 103718 - DNA, 201 bp, Homo sapiens
ttagtagagacagggtttcactgtgttggccaggctgatcttgaactcctgacctcaagtgatccgcctgcctcagcccccaaagtgctgggatttcaggygtgaggcaccgcacccagccagggcttcaacatatgaatctgggaagagagagaagtcagctcctagttggcaacctcacaactgctgtctacactgaca

SEQ ID NO: 103719 - DNA, 201 bp, Homo sapiens
acctgtattagtccatgctcacactgctaataaaaacatacctgagactgggtaatttacaaaggaagaaggtttaattgactcacagttcagcatggatkgagaggcctcaggaaacttacagtcatggtggaaagcgaaggccaagcaagtcaccttcttcacaaggcggcaggaaggagaagtgagtgccagcagggc

SEQ ID NO: 103720 - DNA, 201 bp, Homo sapiens
gtccaagctgacccttgctctgttgtgtgtctgggctgttagctgaggtcccgttgggtctccaggccccaggggtcttctggaggggtcttctggagaggtcttgcaaccatttcttattgcctccttctcagaccatccgggctaccactgactactgccgccgccacaagatcccctttccccaagtagaagaggctg

SEQ ID NO: 103721 - DNA, 201 bp, Homo sapiens
tgatccgcccacctcagtctcccaaagtgttagcattacaggcgtgagccaccgtgcctggctgattattcattttttatgtctccctgtatcatatacaratgtgtttggctaaaagtcactaaccaaccacagtgccccgaggacatgtgggattaattttcttacaaaagaaaaagacagactgagcaccgtgactca

SEQ ID NO: 103722 - DNA, 201 bp, Homo sapiens
agaagaaaaggcggccgtggagagacgaagacttcatgtgctgaaagctctgaagaagctaaggattgaggctgatgaggtaagtgaggggaggagggtgsccccagagatcccagaatcgccccctctgtgcccagtgtccagggcccaactcagccagggagagctggaccgaaggatatgaacttctatgggatagaa

SEQ ID NO: 103723 - DNA, 201 bp, Homo sapiens
gtattttttagtagagatagggtttcaccatgttagccaggctgactttaaactcctgacttcaattgatccgcccacctcagtctcccaaagtgttagcrttacaggcgtgagccaccgtgcctggctgattattcattttttatgtctccctgtatcatatacaaatgtgtttggctaaaagtcactaaccaaccacag

SEQ ID NO: 103724 - DNA, 201 bp, Homo sapiens
agcctcccaagtagctgggactataggtgcataccaccaggcctggctaatttttgtattttttagtagagatagggtttcaccatgttagccaggctgaytttaaactcctgacttcaattgatccgcccacctcagtctcccaaagtgttagcattacaggcgtgagccaccgtgcctggctgattattcattttttat

SEQ ID NO: 103725 - DNA, 201 bp, Homo sapiens
acttattgttttctggggttttttggataccagccatcctaatgggtgtgtctttttttttttttttttttttttttttgagatggagtctcactctgtckcccaggctggagtgcagttgtgtgatctctgctcactgcaacctcccaggttcaagttattcccctgcctcagcctcccaagtagctgggactataggtg

SEQ ID NO: 103726 - DNA, 201 bp, Homo sapiens
ccccgcagtcttcacccgcggagattccggctgaaggagctgtccagcgactacaccgctaagcgcagggagcccaagcctccgcaccggattccggagcmcaagctccaccgcgcatgcgcacacgccccagacccaggctcaggcaagccgtgggggcagggagggctgtttcatcccgctggggcggccataaccaag

SEQ ID NO: 103727 - DNA, 201 bp, Homo sapiens
ggctatctcaaaaaaaaaaaaaattttttttttgaggaacgaccataccattttccacagtggctgtaccattttatattctgcccaatggtgtcccaggkttccaatttctccacgtcctcatcaacacttattgttttctggggttttttggataccagccatcctaatgggtgtgtcttttttttttttttttttttt

SEQ ID NO: 103728 - DNA, 201 bp, Homo sapiens
tccccaagtagaagaggctgagctggatttgtggtccaaggcccccgccagctgctacatcctgaaaggagaaactggaccagtggtgatgcattttcccytgttcaacatagatgcctgtggaggtaggtgcaggggaggagcaggtgagaagccacctgtattagtccatgctcacactgctaataaaaacatacctga

SEQ ID NO: 103729 - DNA, 201 bp, Homo sapiens
tttttttttttttttgagatggagttttgctctttttgcccaggctggagtgcaatggcgcgatctcagctcaccgcaacctcggcctcctgggtttaagygattctcctgcctcccgagtagctgggattacaggcatgcgccaccacgcccggctaattttgtatttttagtagagacagggtttctccatgttggtca

SEQ ID NO: 103730 - DNA, 201 bp, Homo sapiens
acccgggaggcggaggttgcagtgagctgagatcacgccattgcactccagcctgggcaacaagagtgaaactctgtctcaaaaaaaaagaagaagtatgkagtcctcaggccacatttagttttctttaacatgttaaatattaaagggctatcaaagcaatgtaggtgtgatttgcttttctgctgctaaactcttgta

SEQ ID NO: 103731 - DNA, 201 bp, Homo sapiens; identical to SEQ ID NO: 101274

SEQ ID NO: 103732 - DNA, 201 bp, Homo sapiens
gctcaagcaatcctcccacctcagcctcccaaagcgctgggactacagacatgagcaccacatccagcctctaatccccatttataaaatgcactttccarttccactctggggataaaggcgtcacagaacctgactctgcatttccccacccatatcattcaagccagatggggaggcagggacagctctggtccctcc

SEQ ID NO: 103733 - DNA, 201 bp, Homo sapiens
gtttccatttgtttgtgtcatctatgatttctttcagcagtgttttgtagttttccttgtagcagtctttcacctccttggttaggtatattcctgagtaytttattttatttttttgcagctgttgtaaaaggggttgagttcttgatttgaatctcagcttggtcattgttggtgtatagcagtgctactgatttgtgt

SEQ ID NO: 103734 - DNA, 201 bp, Homo sapiens
ccacccgccctctctccccttccttctctatctgcgaggctttgctctctgccgtgcaagtctgtgccaggcttactttgctgtctgtcactgtgactcakcctccctgtctctcttcctgtgtctccatcatggtctcttgtgcacacaatctcttgggcattctgtttctatttgttgtagcccaagaagacaacattg

SEQ ID NO: 103735 - DNA, 201 bp, Homo sapiens
ttattttcttacaattctgcaggcaggaagtccaagatcaaggtgccagtggggtcagtttctcctgaggcctctctccatggcttgcagagggatggccrccttctcaccgcatcctctcagcccagcctttcctcagtgcacacgcattcttggtattcttggtgtcttcctttttttcttttttttttttttttagat

SEQ ID NO: 103736 - DNA, 201 bp, Homo sapiens
ctgtccaagctgacccttgctctgttgtgtgtctgggctgttagctgaggtcccgttgggtctccaggccccaggggtcttctggaggggtcttctggagaggtcttgcaaccatttcttattgcctccttctcagaccatccgggctaccactgactactgccgccgccacaagatcccctttccccaagtagaagaggc

SEQ ID NO: 103737 - DNA, 201 bp, Homo sapiens
atggattttgtgaagaaaacaggcatttgcgcttcaaagtgggaatgggggaccactcacaacttcctgtacaaacacggtgagaagaccctcttcccacygccctggtctgtccttgcgtgtgaatgggctggagtaggggaagggggtgggcctgaaacaatcccaggctggtccttccccagagctttggaggggggt

SEQ ID NO: 103738 - DNA, 201 bp, Homo sapiens
attggtgcagcaaaccagcatggcacatgtatacctatgtaataaacctgcatgttcagcacatgtatcccagatttgaaataaaattcttttaaaaaagkgggggggatttaaagacagagacaggcatgtatacagagaggaaaccatgtgaacatggaagcagggattggggtgaggctctactgaccaagggctgcc

SEQ ID NO: 103739 - DNA, 201 bp, Homo sapiens
gtccttgcgtgtgaatgggctggagtaggggaagggggtgggcctgaaacaatcccaggctggtccttccccagagctttggaggggggtggtgtcaaagkgcccagggatctgattaggggaactttcgctcagtggtgtggtccatactgaaaaatgtgtggcctcgctgcgagtcccagtcatcgtgaaaagcctcac

SEQ ID NO: 103740 - DNA, 201 bp, Homo sapiens
gctgtgtgtggcctgggaagggaaccctggctggatgtcagtcctgctcacctctcctggggtgcttcctacaaggcacacaggacttcagctgtgtctgmgcaccatgccatgcagctgccgggtcttatggcctcggaatacaccatcaagcatcaagtcactggatcatggcgatgagtgttttagcatcaaatttct

SEQ ID NO: 103741 - DNA, 201 bp, Homo sapiens
agctgggcgtggtggcgggcgcctgtagtcccagctactccggaggctgaggcgggagaatggcgtgagcccggaaggcggagcttgcagtgagccgagaytgcgccactgcactccagcctagggcacaaagcgagactccatctcaaaaaaaaataaaataaaataaaccaatcaaaccaaattccaggccaccctcag

SEQ ID NO: 103742 - DNA, 201 bp, Homo sapiens; identical to SEQ ID NO: 16290

SEQ ID NO: 103743 - DNA, 201 bp, Homo sapiens
agtagagacaggatttcaccatgttggtcaggctggtcttgaactcctgacctcaggtgatccacccaccttggcctcccaaagtgctgggattacaggcrtgagccaccgtgcccggccaaaatagagtaattatgaaaattaatcctttatcacaaatacttgtagcagagcacatctccccatgtttttttgttgttg

SEQ ID NO: 103744 - DNA, 201 bp, Homo sapiens
tgttgttgttttcctatatataacaaaaggaggaggtggttgcatttctcctcttactttccgtaacaccctactctgtggagtaacgattctttcacccytttgctttcttaacagacttgctttcgctttgcactgtggactcaccctgaattctttcttgtatgagatccaagaaccctttcttggggtctggatcgg

SEQ ID NO: 103745 - DNA, 201 bp, Homo sapiens
caaaaaataaattagccgggcatggtgacatgcatctgtagtcccagctacttgggaggttgaggtgggtggattgcttgagcccaggaggttgaggctgyagtggcccattattgtaccactgcactccagcctgggtgacagactgagacccctctaaaaaaaaaatgtggcctacgtgcagaggttccaccctgtggg

SEQ ID NO: 103746 - DNA, 201 bp, Homo sapiens
atctgggaagagagagaagtcagctcctagttggcaacctcacaactgctgtctacactgacaacgatcattttcccatccccctctctgccttccatttmcaagtcttgctttcagtccccagaagcagctgatcctctttcttcctgggcaccacaggtggcatccgggacaagataatgagcagccggaagcacctcc

SEQ ID NO: 103747 - DNA, 201 bp, Homo sapiens
gctgtagtggcccattattgtaccactgcactccagcctgggtgacagactgagacccctctaaaaaaaaaatgtggcctacgtgcagaggttccaccctstgggacccacatgcctccctcacactgtcttggcacattctcccaaagctgccggagtctcatttgtccaatatgaagaagcccgtggaagaagggacac

SEQ ID NO: 103748 - DNA, 201 bp, Homo sapiens
gggaggttcacctcatcctctccttcgacttcagtgccggagatcctttcgaggtaatcgagaagggctttggggccggtcctgggtgggaggtgggctgyggcgaagctgactttgcggaggaactgaggacgcgggctgggaagcgggcaatggggaggtgctggctgggaagtccagagagccaaatcaactcaccca

SEQ ID NO: 103749 - DNA, 201 bp, Homo sapiens
caaatctttagaaggtacttatgacagtaaattcctctgtaatacaggtatgaagcaccttcatgatatttctgttttatgtgtagaaaagtggctgggtrcggtggctcactcctgtaatctcagtgctttgggaggccaaggtgggaggatcacttgagatcagcaatttgagaccagcctgggcaacatagcaagacc

SEQ ID NO: 103750 - DNA, 201 bp, Homo sapiens
agtgtttgattaaataactggttactgtggcccagcctagttgacatgttaaaccatcctcccaacatcctaagtgctataggcaggctcttacttattcytcataaatctataagggataggtgttactctcttcctggttttacagatgagaacagagatgttaagtaacttgctcaggggcccggtgcagtggctcat

SEQ ID NO: 103751 - DNA, 201 bp, Homo sapiens
ttgtctcaaaacaaacaaacaaacaaacaaacaaacaaaaaactagaatgtgttttgggcaccagcaaagcaaggggcatacaattttttttaaatggggyatttccagaaaaaattacaacaaaaaccaaaaacaaaacagtcatagtgagtaaaatcagaacttgattaaatgtccttgactgtagcttacacactggt

SEQ ID NO: 103752 - DNA, 201 bp, Homo sapiens
atttatgcccacagacaatcctccatgcaatcgtgtggctacactcttcccttgcactccaggattccatggagttgcagccacaatgagatggaagagaraggcagggctgagggttcaagctctggaaaatattggaaacaggctgctgtggaagttatgagctgccaccagcagcgtagactcaggtctgaggatgag

SEQ ID NO: 103753 - DNA, 201 bp, Homo sapiens
ggagtgtaatggcacgatctcggctcactgcaacctctgcctcccaggttcaagtgattctcctgcctcagcctcccaagtagctgggattataggcatgygccaccacgcctggctaatttttgtatttttagtagggatggggtgtcaccatgttaatcaggctggtctcgaactcctgaccttaggtgatccactcac

SEQ ID NO: 103754 - DNA, 201 bp, Homo sapiens
ggtgttgagaccatgagggtggagccctctagatttggattaatcccttataaaagaagcctcagagagctcactccaaggaatgcggtgaaggttgaagkgtagaatttatgcaaaatgccaagatgagcctggcaggtgacgttctcagcaaacgtgagcagagctattatcagtgtgtgtgtgtgagagagagagagt

SEQ ID NO: 103755 - DNA, 201 bp, Homo sapiens
agatttatgcccacagacaatcctccatgcaatcgtgtggctacactcttcccttgcactccaggattccatggagttgcagccacaatgagatggaagaragaggcagggctgagggttcaagctctggaaaatattggaaacaggctgctgtggaagttatgagctgccaccagcagcgtagactcaggtctgaggatg

SEQ ID NO: 103756 - DNA, 201 bp, Homo sapiens
agcagagtcttccctaactcccccggggaaagggagactccctttcctggtctctaggcactgacgcaaccgctagaccaaggtccgctaggcaatgggcrtcttcccagacgctggcgttaccccaagaccaaggggccctctagtggccctattcgggcatgacagagggctcacacttgtcttctggtcactcttgac

SEQ ID NO: 103757 - DNA, 201 bp, Homo sapiens
gttcatcatttaaccctttgaatgacctgaagaagtggatgctgttgtcccctccattttgctgagagccaccgggtcatggaaaggatgcgtgactcacytatgtaactggttggtgagtgcagacacagggatctataggggaatcgtatggtggttctgatccaaagcctgtctgcctgaatccacatcccagctcca

SEQ ID NO: 103758 - DNA, 201 bp, Homo sapiens
gcgtagagagagaggatagcttatgtcattatttcttttatgttcttttcagaaagatcaaagactttaatattttaatactttcactaattctgctactsctatctagagggtgcagccaggtatacagagtggaacaggaaagtgaaacaggagtgtgaccactgaagcacagcatcacagggagatggtcaggcctct

SEQ ID NO: 103759 - DNA, 201 bp, Homo sapiens
gactgagaattttctgaccgcagtgcaccatgggaaggtaagtcctcttagagctgaccactatggggaagcagagcatttgtgtaatggaatgcatagtragtgtcaagaggtgagggctgtgacagttcctctcgcttggtggagatagatggaaagagctgaaggttgggcatggtggcccatgcctgtaaccccagc

SEQ ID NO: 103760 - DNA, 201 bp, Homo sapiens
aggaactgaggacgcgggctgggaagcgggcaatggggaggtgctggctgggaagtccagagagccaaatcaactcacccatcgctcccgaagcacccgcrgtcggccacatccaacgaacttctgatccaaagccatcccagaccttcccgggcccctcttcctggcagatgactctccccgcttctgcgtcctgcctgc

SEQ ID NO: 103761 - DNA, 201 bp, Homo sapiens
caccacccaaggctaggattacaggcacaagccgccctgcccagctattttattaaaaaatatatacacctacataatatataactatatctattacatgrtacataccaatacatagtagtatatataaaataatcatggtaaaacatatcatctattatatttatgtgtaatgtaatatatatttatattcacacactt

SEQ ID NO: 103762 - DNA, 201 bp, Homo sapiens
atatttatgtgtaatgtaatatatatttatattcacacacttctatcagtttacattctgtaatatgaattaggaacatccatcctcctccccataccatratccagaaccaacttgtcaccatctttctagacccttggcccaggaatacccaggctttctggtcttaggatttctgctgaaataaatatcccaagacaa

SEQ ID NO: 103763 - DNA, 201 bp, Homo sapiens
atgagatccccagtggtttctgataccacacagtccatctctaacattctcctgtcatggttgtaattcctcattaatagatttctttttcctgcataccygctacattcctggttctgtgctgggactcacttgccgttgtatttcctctgcagagacctggttcgagttcacccctcaccacgctggcttctctgcact

SEQ ID NO: 103764 - DNA, 201 bp, Homo sapiens
ccacatgtggcacttgagcacttgaaatgtgcctggcccaagttgaagtgtgctatgaagataaaatacacctcggattttaatgaccgagtatggaaaaygcatgtcaaagaccttattcgtaattggtatattgacatactaggcagggctctccagagggacagaaccaataggatctatgtctagatgaaagggagt

SEQ ID NO: 103765 - DNA, 201 bp, Homo sapiens
tcttgggcatcagagattttgaaattgtcactcccaggtactccctataacattattatttccttagatgtatgtatcacctactgaagggattctgtacrtgtattttatccctcccctcacacaccagggtgctttttatttattattataaaataaacataacataaaatttgccattttaaccattttaaagtgtca

SEQ ID NO: 103766 - DNA, 201 bp, Homo sapiens
cctgtatcatatacaaatgtgtttggctaaaagtcactaaccaaccacagtgccccgaggacatgtgggattaattttcttacaaaagaaaaagacagacygagcaccgtgactcacagctgaaatcccagcactgtgggaggccgaggcgggcagatcacttgaggtcaagagttcaagaccagacgggccaacatggtg

SEQ ID NO: 103767 - DNA, 201 bp, Homo sapiens
tgaagtgtgctatgaagataaaatacacctcggattttaatgaccgagtatggaaaacgcatgtcaaagaccttattcgtaattggtatattgacatactwggcagggctctccagagggacagaaccaataggatctatgtctagatgaaagggagtttcaggatcacaaggtggagtcctacaataggccgtctgcgag

SEQ ID NO: 103768 - DNA, 201 bp, Homo sapiens
tgtatcatatacaaatgtgtttggctaaaagtcactaaccaaccacagtgccccgaggacatgtgggattaattttcttacaaaagaaaaagacagactgrgcaccgtgactcacagctgaaatcccagcactgtgggaggccgaggcgggcagatcacttgaggtcaagagttcaagaccagacgggccaacatggtgaa

SEQ ID NO: 103769 - DNA, 201 bp, Homo sapiens
tagagttgcatgccaccatacctggcctgctccttctgagaaggagaacaagcactttgcagaagtccccccagcagtgtgcatggaccagagcttgaccktcccctagctgcaagggaggctgggaaatatttgcccttcctgcctgtgtgctgagaagggttggcatggacaggagcttgaaatggccttggggtagcc

SEQ ID NO: 103770 - DNA, 201 bp, Homo sapiens
caggcatgcgccaccacacccagctaatttttgtatttttagtagagacggggtttcaccatgttggccaggctggtcttgaactcctgaccttgtgatcygcccgcctcggcctcccaaagtgcagggattacaggcgtgagccaccacgcccggccaataaacagaaatttaagcaagacatatctgtaacaatttaac

SEQ ID NO: 103771 - DNA, 201 bp, Homo sapiens
gcagtgtgcatggaccagagcttgaccgtcccctagctgcaagggaggctgggaaatatttgcccttcctgcctgtgtgctgagaagggttggcatggacrggagcttgaaatggccttggggtagccagtctacagtgcccggctggctccacccatagaaggttcgtgaggacaaggaccttatctgtcttgtttactg

SEQ ID NO: 103772 - DNA, 201 bp, Homo sapiens
gcccggctaattttttgtaattttagtagagatggggtttcactgtgttagccaggatggtctcgatctcctgacctcgtgatccacccacctcagcctcycaaagtgctgggattataggcatgagccatgagccaccatgcccagcctctttcttgctcttgtcacccaggttggagtgcaatggcgctatctgggctc

SEQ ID NO: 103773 - DNA, 201 bp, Homo sapiens
gagaagggttggcatggacaggagcttgaaatggccttggggtagccagtctacagtgcccggctggctccacccatagaaggttcgtgaggacaaggacyttatctgtcttgtttactgctctattccaacagccagaagagtgccgggtgcccactaattgcttcataaatatttatggaatggaagaaagatctttct

SEQ ID NO: 103774 - DNA, 201 bp, Homo sapiens
gacaaggaccttatctgtcttgtttactgctctattccaacagccagaagagtgccgggtgcccactaattgcttcataaatatttatggaatggaagaawgatctttcttcctgctgcagatccctgcagtgctttatgccagtctgctggtgctttgaatatcaaacatgacagtcacgtgatggagaatgtttgaatt

SEQ ID NO: 103775 - DNA, 201 bp, Homo sapiens
aattgcttcataaatatttatggaatggaagaaagatctttcttcctgctgcagatccctgcagtgctttatgccagtctgctggtgctttgaatatcaarcatgacagtcacgtgatggagaatgtttgaattttattgctcttttcttggcaggtttatggggaagtgctcttggtaacactgaagtcattagggaata

SEQ ID NO: 103776 - DNA, 201 bp, Homo sapiens
cctgcctgctgtggccacccacccggaggagctctgtctgctgtccctgtccctggcctctcgctggcttaattgtccctttcattcctccactcaaatcragcgatatcagcacgccaggccctggacgtgttttgtgggaacaaacaggcctgtttgtctacgtcccaggcgtagagaagttcgtcccggggccagatt

SEQ ID NO: 103777 - DNA, 201 bp, Homo sapiens
gcctgctgtggccacccacccggaggagctctgtctgctgtccctgtccctggcctctcgctggcttaattgtccctttcattcctccactcaaatcgagmgatatcagcacgccaggccctggacgtgttttgtgggaacaaacaggcctgtttgtctacgtcccaggcgtagagaagttcgtcccggggccagatttgt

SEQ ID NO: 103778 - DNA, 201 bp, Homo sapiens
tcctccactcaaatcgagcgatatcagcacgccaggccctggacgtgttttgtgggaacaaacaggcctgtttgtctacgtcccaggcgtagagaagttcrtcccggggccagatttgttttacaaggtggacagcaggcacagggtacctgttttaggaatgcgagaatgcagccacgtaggcatgtgggtgggggacag

SEQ ID NO: 103779 - DNA, 201 bp, Homo sapiens
ctgagaggccaccacagcttgggttcaaatcccagctctgttcagctcttgtgtggccacagtcaaatcgcttccctccttgaagctccatgtcctctctrtagcaatggaagctacagcggagcccaattctaccccacccactgcacgacaattggtttgtttctatgtttgttactagagtcagggtctcactctgtc

SEQ ID NO: 103780 - DNA, 201 bp, Homo sapiens
ttatatatattttgagatggagtttcactcttgtcgcccaaactggagtgcaatggtgccgtgatctcggctcactgcaacctccgcctcctgggttcaarcgattctcctgcctcagcctccggagtaactgggagtacaggcatgcgccaccacgcctggctgatttttgtctttttagtaggggcggggtttcaccat

SEQ ID NO: 103781 - DNA, 201 bp, Homo sapiens
tgcagactatgagctactctctgttttaaccttttttttttttttttttttttttttgagacagagtctcgctctgtcccctgggctggagtgcaatggcrcagtctcggctcattgcaacctccacttcttggattcaagcaattatcctgcctcagcctcccgagtagctgggattgcaggtgcccaccaccacacctg

SEQ ID NO: 103782 - DNA, 201 bp, Homo sapiens
gggtagcagctgggagaaccggctgggtgctgcccctccccttgggccgggcacggagtaggcacctggcgggctccccaggtggcagacgctgtcgctgygcacacctggcctctgtgccgcctgctccctgctcgtcctcccctccccaccctcacccacctgccatggacgggcccgccgagccccagatcccgggct

SEQ ID NO: 103783 - DNA, 201 bp, Homo sapiens
caggcgctcagtggctaatcctcctgaaaactaattacctcactgcgcctgcccactggactaaatttgcctggtaaccgatgacatcatcactaattccrcgcccacgctcaacctatgggataactgatgacatcactgaacaaacaaagtaactgcagtttattgaaggcctactgtgtgcgcaaggctgtgctaggc

SEQ ID NO: 103784 - DNA, 201 bp, Homo sapiens
ccctggtgccccctcttctccaggggtctgtggcgactggaagaaccacttcacggtggcccagagcgaagccttcgatcgtgcctaccgcaagcagatgsgggggatgccgaccttcccctgggatgaagacccggaggaggacggcagcccagatcctgagcccagccctgagcctgagcccaagcccagccttgagcc

SEQ ID NO: 103785 - DNA, 201 bp, Homo sapiens
tgtttaatgaaaactatgatggctgctgtgtgaccttaggggactatattaacctctctgggcctccatttcttggagcatgaagtggtcctttcactacycacttcctgaggttctgggagaagtctaggatcatgcatgttcttggcatagagtttctgtacaggtggctcccctcctggtgccaggccctttcctggg

SEQ ID NO: 103786 - DNA, 201 bp, Homo sapiens
tctagctgtaaacaggatgctctagggtagccctcatgataaggggtgacatttggaacaaagacttgaaaaaggtgaggacaagaggcatgaggcaccaygcccggctgcacttgtgtttaatgaaaactatgatggctgctgtgtgaccttaggggactatattaacctctctgggcctccatttcttggagcatgaag

SEQ ID NO: 103787 - DNA, 201 bp, Homo sapiens
ccctctgcccacagtgcagtttggctcctggttcgaccacattaagggctggcttcggatgaagggcaaagacaacttcctatttatcacctacgaggagytgcagcaggtgagtccccacctcctccaggtgcagcgtcccccccataccctctgctcacaccccacactctccccttcccgagggtctcaggacccctc

SEQ ID NO: 103788 - DNA, 201 bp, Homo sapiens
catatgtcaactgtagagtagctcaggagtgagtgacaggtgtgatggtaggcagagcaggggaagagggtgcagggggtctagctgtaaacaggatgctstagggtagccctcatgataaggggtgacatttggaacaaagacttgaaaaaggtgaggacaagaggcatgaggcaccacgcccggctgcacttgtgttta

SEQ ID NO: 103789 - DNA, 201 bp, Homo sapiens
tgtagatgttggtttgaacatataggcttccatttctcttggacaaacacccagaagggagagtgactctggtttttgctggtttttgttttccgtttttktttttgttttttttttctgagacagagtctcactctgttccccaggctggagtgcagtggcgcgatctcggctcactgcaacctctgcctcccaggttca

SEQ ID NO: 103790 - DNA, 201 bp, Homo sapiens
ttggtttgaacatataggcttccatttctcttggacaaacacccagaagggagagtgactctggtttttgctggtttttgttttccgtttttgtttttgtkttttttttctgagacagagtctcactctgttccccaggctggagtgcagtggcgcgatctcggctcactgcaacctctgcctcccaggttcaagattctc

SEQ ID NO: 103791 - DNA, 201 bp, Homo sapiens
ggagtttcgctctgtccccaggctggagtgcagtgatgtgatctcaggacactgcaacctctgcctcccgggttcaagcgattctcctgcctcagcctccygagtagctgagattacaggcgcccaccaccgtgcctagctaatttttgtatttttagtagagatggggtttcaccatgttggccaggctggtcttgaact

SEQ ID NO: 103792 - DNA, 201 bp, Homo sapiens
tgtgatctcaggacactgcaacctctgcctcccgggttcaagcgattctcctgcctcagcctcccgagtagctgagattacaggcgcccaccaccgtgccyagctaatttttgtatttttagtagagatggggtttcaccatgttggccaggctggtcttgaactcctgacctcaggtgatccgcccacctcagcctccca

SEQ ID NO: 103793 - DNA, 201 bp, Homo sapiens
cctgggtccttcaataaatattgacaagcacctccctgctgccaggctctgctgagagtactttaggtacattggcaaacaagacagaacaataacaaaaraaaaaaaaaccagattttttaaattcccaggctcatggagcttacatgcaagcggagatgttcaataaaccatcaatgtcatatgtcaactgtagagtag

SEQ ID NO: 103794 - DNA, 201 bp, Homo sapiens
tttaggtacattggcaaacaagacagaacaataacaaaaaaaaaaaaaaccagattttttaaattcccaggctcatggagcttacatgcaagcggagatgktcaataaaccatcaatgtcatatgtcaactgtagagtagctcaggagtgagtgacaggtgtgatggtaggcagagcaggggaagagggtgcagggggtct

SEQ ID NO: 103795 - DNA, 201 bp, Homo sapiens
ttctgagacagagtctcactctgttccccaggctggagtgcagtggcgcgatctcggctcactgcaacctctgcctcccaggttcaagattctcctgcctsagcctcccgagtagctgggactacaggcgcccgccaccacgcccggctaattttttgtatttttagtagagacggggtttcaccatgttagccaggatgg

SEQ ID NO: 103796 - DNA, 201 bp, Homo sapiens
cacataaggccccgtggtgcctgctactgcatgaaatagccataataattttaactcaaagttatggaatgcagactatgagctactctctgttttaaccttttttttttttttttttttttttttgagacagagtctcgctctgtcccctgggctggagtgcaatggcacagtctcggctcattgcaacctccacttctt

SEQ ID NO: 103797 - DNA, 201 bp, Homo sapiens
cagagtctcactctgttccccaggctggagtgcagtggcgcgatctcggctcactgcaacctctgcctcccaggttcaagattctcctgcctgagcctccygagtagctgggactacaggcgcccgccaccacgcccggctaattttttgtatttttagtagagacggggtttcaccatgttagccaggatggtctcgatc

SEQ ID NO: 103798 - DNA, 201 bp, Homo sapiens
acataaggccccgtggtgcctgctactgcatgaaatagccataataattttaactcaaagttatggaatgcagactatgagctactctctgttttaaccttttttttttttttttttttttttttgagacagagtctcgctctgtcccctgggctggagtgcaatggcacagtctcggctcattgcaacctccacttcttg

SEQ ID NO: 103799 - DNA, 201 bp, Homo sapiens
cataaggccccgtggtgcctgctactgcatgaaatagccataataattttaactcaaagttatggaatgcagactatgagctactctctgttttaaccttttttttttttttttttttttttttgagacagagtctcgctctgtcccctgggctggagtgcaatggcacagtctcggctcattgcaacctccacttcttgg

SEQ ID NO: 103800 - DNA, 201 bp, Homo sapiens
gcgatctcagctcactgaaacctccacctcctgacctcgtgatccacccgccttgacctcccaaagtgctgggacaacaggtgtgagccaccgcgcctggkatctttattaactttttaaaattaaaaatatatatatatatatatttatatatattttgagatggagtttcactcttgtcgcccaaactggagtgcaatg

SEQ ID NO: 103801 - DNA, 201 bp, Homo sapiens
cctggctgaaatagcgtcctcgttctgttcctccctttcccctttaccctctacttttttttttttttttttttttttttttttgtagagatggggtctcrctacattgcccaggctggtcttgaactcctgatctcaagtgatccttctgccttggcctcccaaagtgctgggattacaggcgtgaaccaccacacctga

SEQ ID NO: 103802 - DNA, 201 bp, Homo sapiens
gaacattatcatcatccaacaagaaactctggacctataagccatcacctcccaatcctcatatcccctcccccctgggccctggtaaccaccaatctccrttctgtttctatggatttttctattttgggcatttcatggaaatggaatctacactatgtggcctcttgtgtctggtttcttcctgagcatcacgttgtc

SEQ ID NO: 103803 - DNA, 201 bp, Homo sapiens
aaatggaatctacactatgtggcctcttgtgtctggtttcttcctgagcatcacgttgtcaaggttcaaccacattgtagcatgtgtcagagtctcattcwtttttatggtccaataatattttatgttatgtataaactatattttatttattcatcagttgataagcatttggattatttccactctggggcttattat

SEQ ID NO: 103804 - DNA, 201 bp, Homo sapiens
gacccggaggaggacggcagcccagatcctgagcccagccctgagcctgagcccaagcccagccttgagcccaacaccagcctggagcgtgagcccagacycaactccagccccagccccagccccggccaggcctctgagaccccgcacccacgaccctcataataaacacgtcgattctgtccaggttccttgatgcgc

SEQ ID NO: 103805 - DNA, 201 bp, Homo sapiens
cttcctgcttcagggtcagaagagaggggtctccagggcaggaggcctcaggggctggggtcttgcctgtgtctgacgccttctcccctctcctcaccatycgcacacaggtgatctacatgggccgcaacccccgggacgttgtggtctccctctatcattactccaagatcgccgggcagttaaaggacccgggcacac

SEQ ID NO: 103806 - DNA, 201 bp, Homo sapiens
atgagctgagatggcgccactgcactccagcctgggcgaaacagagtcagactccatcgcaaaaaaaaaagagtctgccctgagtccttcctgcttcaggrtcagaagagaggggtctccagggcaggaggcctcaggggctggggtcttgcctgtgtctgacgccttctcccctctcctcaccatccgcacacaggtgat

SEQ ID NO: 103807 - DNA, 201 bp, Homo sapiens
tccgctgacccctctcccctgcctgcaggacttacagggctccgtggagcgcatctgtgggttcctgggccgtccgctgggcaaggaggcactgggctccrtcgtggcacactcaaccttcagcgccatgaaggccaacaccatgtccaactacacgctgctgcctcccagcctgctggaccaccgtcgcggggccttcct

SEQ ID NO: 103808 - DNA, 201 bp, Homo sapiens
agtgattctcctgcctcagcctcccaaaaagctgggattacaggcgtgcaccaccatacccagctaatttttgtattttattagagacggggtttcgccaygttggccaggctggtctcaaactcctgacctcaggtgatttccctgcgtcagcctcccaaagtactgggattacaggcgtgagccaccgagcccggccag

SEQ ID NO: 103809 - DNA, 201 bp, Homo sapiens
ctcctgacctcgtgatccacccgccttgacctcccaaagtgctgggacaacaggtgtgagccaccgcgcctgggatctttattaactttttaaaattaaaaatatatatatatatatatttatatatattttgagatggagtttcactcttgtcgcccaaactggagtgcaatggtgccgtgatctcggctcactgcaacc

SEQ ID NO: 103810 - DNA, 201 bp, Homo sapiens
ggaagacccaagccctgaagacagagaaggagctggccttgaatcctgtaaatgttcccaaacgatctccctaagaggttatgccagtcacactcctgccragagagtatctctgcgccacggccaagggtgagtcatcctgctgagaggttgagctggggacgcctgcccagatgggctccaagtgagggagagcctggc

SEQ ID NO: 103811 - DNA, 201 bp, Homo sapiens
tggaggtcgagggtgcagtgagccaagatcaagccactgcattccagcctgtgcaacagagtgagactccgtctcaaaaaaaaaaaaaaaaagtattaaawagggccgcaaaggaggccagcaggatgcggagatgggcagtaatgtgcacggggtgggaggtctcttgctttagccaaggtggtcagggaagacccaagc

SEQ ID NO: 103812 - DNA, 201 bp, Homo sapiens
tcctgacctcgtgatccacccgccttgacctcccaaagtgctgggacaacaggtgtgagccaccgcgcctgggatctttattaactttttaaaattaaaaatatatatatatatatatttatatatattttgagatggagtttcactcttgtcgcccaaactggagtgcaatggtgccgtgatctcggctcactgcaacct

SEQ ID NO: 103813 - DNA, 201 bp, Homo sapiens
cctgacctcgtgatccacccgccttgacctcccaaagtgctgggacaacaggtgtgagccaccgcgcctgggatctttattaactttttaaaattaaaaatatatatatatatatatttatatatattttgagatggagtttcactcttgtcgcccaaactggagtgcaatggtgccgtgatctcggctcactgcaacctc

SEQ ID NO: 103814 - DNA, 201 bp, Homo sapiens
ttttttttttttttttttttttttgtagagatggggtctcactacattgcccaggctggtcttgaactcctgatctcaagtgatccttctgccttggcctcccaaagtgctgggattacaggcgtgaaccaccacacctgaccatttttatttttatttttcgagacaaggtcttgctctgtcactcaggctggggtgcag

SEQ ID NO: 103815 - DNA, 201 bp, Homo sapiens
aggctggggtgcagtggtgcaatatcagctcatcaaacctcccaccttggcctcccaaagtgctgggactacaggtgctggtcaccaccaaattgtatactttttttttttttttttttttggaggtcttgctctgctgcccaggcttcagtgtgatggtacaatctcggctcatttcagccttgacctcctggactcaca

SEQ ID NO: 103816 - DNA, 201 bp, Homo sapiens
ggctggggtgcagtggtgcaatatcagctcatcaaacctcccaccttggcctcccaaagtgctgggactacaggtgctggtcaccaccaaattgtatactttttttttttttttttttttggaggtcttgctctgctgcccaggcttcagtgtgatggtacaatctcggctcatttcagccttgacctcctggactcacat

SEQ ID NO: 103817 - DNA, 201 bp, Homo sapiens
gctggggtgcagtggtgcaatatcagctcatcaaacctcccaccttggcctcccaaagtgctgggactacaggtgctggtcaccaccaaattgtatactttttttttttttttttttttggaggtcttgctctgctgcccaggcttcagtgtgatggtacaatctcggctcatttcagccttgacctcctggactcacatg

SEQ ID NO: 103818 - DNA, 201 bp, Homo sapiens
ctgggtccttcaataaatattgacaagcacctccctgctgccaggctctgctgagagtactttaggtacattggcaaacaagacagaacaataacaaaaaraaaaaaaaccagattttttaaattcccaggctcatggagcttacatgcaagcggagatgttcaataaaccatcaatgtcatatgtcaactgtagagtagc

SEQ ID NO: 103819 - DNA, 201 bp, Homo sapiens
ctggggtgcagtggtgcaatatcagctcatcaaacctcccaccttggcctcccaaagtgctgggactacaggtgctggtcaccaccaaattgtatactttttttttttttttttttttggaggtcttgctctgctgcccaggcttcagtgtgatggtacaatctcggctcatttcagccttgacctcctggactcacatga

SEQ ID NO: 103820 - DNA, 201 bp, Homo sapiens
caacatggtgagacctcatctctacaaaacatacaaaaattagccaggcacgatagtgtatgcctgtagttccagctacttgggaggctgagatgcgaggwttgcttcagtctgggaggtggaggttgcagtgagacgcgttcaccccaccgcactccagcttgggtggcagagactgtctcaaaaacaaaaaactgagtg

SEQ ID NO: 103821 - DNA, 201 bp, Homo sapiens
ttattatgaatgaagctgctacgaacattgcatgcaagttctttttttttttttttttgagacggagtctcgctctgtcgcccaggctggagtgcagtggmgtgaccttggctcactgcaaactccgcctcccgagttcacgccattctcttgcctcagcctcccaattagctgggactacaggcgcccaccaccataccc

SEQ ID NO: 103822 - DNA, 201 bp, Homo sapiens
gcagggtcgggggacatttccaggagcgggaacagcagctccaggggcccagaggtaggactactgctcggtgcatttggaggtcttggctggactgtggsgttcatggggaaggagggactgagtctacagggctgagaggccaccacagcttgggttcaaatcccagctctgttcagctcttgtgtggccacagtcaaa

SEQ ID NO: 103823 - DNA, 201 bp, Homo sapiens
acagtggcttacgcctgtaatcccagcactttgggaggctgaggcaggcagatcacgaggtgaagagattgagatcatcctgaccaacatggtgaaacccygtctctactaaaaatacaaaaattagctgggcatgctggcgtgcgcctgtagtcacagctattcgggaagctgaggcaggagaatcacttgaacccggga

SEQ ID NO: 103824 - DNA, 201 bp, Homo sapiens
agggggtcaggttcattcggggatctggcaaatagaacacagtatttaaccaggcacggtggctcacacttgtaatcccagcactttgggaggctgaggcrggcagatcacgaggtcaggagtttgagaccagcctgaccaacatggagaaatcccgtctctactaaaaatacaaaaattagccaggcgtggtggtgcacg

SEQ ID NO: 103825 - DNA, 201 bp, Homo sapiens
gaggctgaggcaggagaatcgtttgaacatgggaggcaaggttgcagtgagccaagttgatgccattgaactccagcctgggcaacagagacttcctctcaaaaaaaaaaaaaaacaaaagaagaggaagaagaagaagaagactgggctgaggtgggttgatcacgaagtcaggagatcgagaccatcctggccaacatg

SEQ ID NO: 103826 - DNA, 201 bp, Homo sapiens
ctcgacctccccagctcaggcaatccttccacctcagcctcccaagtagctgagaagacaggcacatgccaccacaccaggctattttttttttttttagrcggagtctcactctgttacccaggctggagtgcaatggcatggtcttggctcactgcaacctccgcctcctgggttcaagtgattctcccacctcagcct

SEQ ID NO: 103827 - DNA, 201 bp, Homo sapiens
  misc_feature (1)...(201): n = A,T,C or G
aagttacagacatctgaatgtttcaccctaaacattccaggctgcatattattaactacttcagtatttgtttatgggggtgtgtgtgtgtgtgtgtttgngtgtatgtgtgagagagagagacagagagatggagagagagagagatggaatctccctctgtcacctaggctgaagtgcaatggctagatcttggctcac

SEQ ID NO: 103828 - DNA, 201 bp, Homo sapiens
cttttgatgcatttcaaagtaagttacagacatctgaatgtttcaccctaaacattccaggctgcatattattaactacttcagtatttgtttatgggggkgtgtgtgtgtgtgtgtttgcgtgtatgtgtgagagagagagacagagagatggagagagagagagatggaatctccctctgtcacctaggctgaagtgca

SEQ ID NO: 103829 - DNA, 201 bp, Homo sapiens
atggcttgatcttggctcactgcaacctctgccccccaggttcaagcgattcttctgcctcagcctcccgagtagctgggactacaggtgcgtgccaccaygcccggctaatttttgtatttttagtacagattgtgtttcactatattggtcaggctggtcttgaatgcctggactgatgatacacctgcctcagcctcc

SEQ ID NO: 103830 - DNA, 201 bp, Homo sapiens
cttgcattccctgcgtgctgggctacggagagtgtcaaggccagagaagccacgccggcctttggacctggggcgcctcgggcagccaaggagagctgcgrtggccgctcctccccgcgctctgatctcgggagtccctggcgccggcaccttctgatctctgcctcttattgacggggagggcgaggaggggccagctct

SEQ ID NO: 103831 - DNA, 201 bp, Homo sapiens
ttttttttgagacggagtctcgctctgtcgcccaggctggagtgcagtggagtgaccttggctcactgcaaactccgcctcccgagttcacgccattctcytgcctcagcctcccaattagctgggactacaggcgcccaccaccatacccagctaattttttgtatttttagtagagacggggtttcaccgtgttagcca

SEQ ID NO: 103832 - DNA, 201 bp, Homo sapiens
agctactcaggaggttaaggcaggagaatcgcttgaacccaggaggcggaagttgcagtgacctgagatcctgccactgtactccagcctgggcaacagarcaagactctgtctcaaaaaaaaaaaagttgtcctaggccaggcatggtggctcctgtccattgcagtactttgggaggccaaggcaggagtatcatttga

SEQ ID NO: 103833 - DNA, 201 bp, Homo sapiens
gaggggcagggagtgctgggaaagggaatggttggggcacagggacacaggtggcttcaggagagtaaggggcagctgggtcaggagagggccagctgccrtggaaactccccgtggtgggccatcctgcagcagacctgagtggctctcaaatggttcgttttttaagcacctccagggagagaaactattgttttcaga

SEQ ID NO: 103834 - DNA, 201 bp, Homo sapiens
ctgacctcatgatccacccgtcttggcctcccaaagtgctgggattacaggcacgagccaccgcgcccggcctttttcttttcttttctttctttctttctttctttttttttttttttttttttgagacgaagtctcgctcttgtcccccaggctggaatgcaatggcgcagtctcggctcactgcaacctctgcctcct

SEQ ID NO: 103835 - DNA, 201 bp, Homo sapiens
tgacctcatgatccacccgtcttggcctcccaaagtgctgggattacaggcacgagccaccgcgcccggcctttttcttttcttttctttctttctttctttctttttttttttttttttttttgagacgaagtctcgctcttgtcccccaggctggaatgcaatggcgcagtctcggctcactgcaacctctgcctccta

SEQ ID NO: 103836 - DNA, 201 bp, Homo sapiens
acctcatgatccacccgtcttggcctcccaaagtgctgggattacaggcacgagccaccgcgcccggcctttttcttttcttttctttctttctttctttctttttttttttttttttttttgagacgaagtctcgctcttgtcccccaggctggaatgcaatggcgcagtctcggctcactgcaacctctgcctcctagg

SEQ ID NO: 103837 - DNA, 201 bp, Homo sapiens
tggttggtctcgaatgcctgggctcaagcgatcttcctgcctcagcctcccaaagtgctgggattacaggcatgagccactgtgcctggccagtttttttytaaagctattttgataggtgcctactggtgtttcactgtagtattaatttgcatttccctaacagctaatggtgtttgagcatcttttcatgtgctcatt

SEQ ID NO: 103838 - DNA, 201 bp, Homo sapiens
ctcactgtaacctccacctcccaggttcaagtgattctcctgcctcagcctccctagtagctgggattacaggcatgtgccaccatgcctggtttttgcatttttttttttttttagtagatcgggggtttctccatgttggtcaggctggtctcgaactcccaatctcaggtgatccgcccaactcggcctcccaaagtg

SEQ ID NO: 103839 - DNA, 201 bp, Homo sapiens
tcactgtaacctccacctcccaggttcaagtgattctcctgcctcagcctccctagtagctgggattacaggcatgtgccaccatgcctggtttttgcatttttttttttttttagtagatcgggggtttctccatgttggtcaggctggtctcgaactcccaatctcaggtgatccgcccaactcggcctcccaaagtgc

SEQ ID NO: 103840 - DNA, 201 bp, Homo sapiens
ttggaaggcggaggttgcagtgagccgagatcgtgtcactgtactccagcctggtgacagagcaggactccatctcaaaaaaaaaaaaaaaaaatttacaygtccagggggcttgcaggcagagccattcaccctccaggaggctgagtcattcccggggatcacctgcctgctgtggccacccacccggaggagctctgt

SEQ ID NO: 103841 - DNA, 201 bp, Homo sapiens
tgccactgacttgaagctcacaaatatattatttggtaaagtgttgaaatatttttcctcttttgaattggattgttttcttatcattgagatttgagagttttttttttttttttttgagacagagtctcgctctgtcacctaggctggagtgcagtggcgcgatctcagctgcctcccaggttcacgccattctcctgc

SEQ ID NO: 103842 - DNA, 201 bp, Homo sapiens
caagtaatcctcctgtcttggcctcccaaagtgctgggactacaggtgcaagccactgcgcccagcccttgaggagttttcaaagtatccacagcacccarggctgagaactgctacagcagctgaaagccataagtgtctttgactttccttttgtcctggtaaaccccttcattccttccttccttccttcctacactc

SEQ ID NO: 103843 - DNA, 201 bp, Homo sapiens
gccactgacttgaagctcacaaatatattatttggtaaagtgttgaaatatttttcctcttttgaattggattgttttcttatcattgagatttgagagttttttttttttttttttgagacagagtctcgctctgtcacctaggctggagtgcagtggcgcgatctcagctgcctcccaggttcacgccattctcctgcc

SEQ ID NO: 103844 - DNA, 201 bp, Homo sapiens
tttttttgagacagagtctcgctctgtcacctaggctggagtgcagtggcgcgatctcagctgcctcccaggttcacgccattctcctgcctcagcctccygagtagctgggactacaggcgcccaccaccacgcccggctaattttttgtatttttagtagagacggggtttcaccgtgttagccaggatggtctcgatc

SEQ ID NO: 103845 - DNA, 201 bp, Homo sapiens
cacagttcactgaagcctcgacctccccagctcaggcaatccttccacctcagcctcccaagtagctgagaagacaggcacatgccaccacaccaggctattttttttttttttagacggagtctcactctgttacccaggctggagtgcaatggcatggtcttggctcactgcaacctccgcctcctgggttcaagtgat

SEQ ID NO: 103846 - DNA, 201 bp, Homo sapiens
agcaacctctgagccggagcttccaggatgagtcagggttagcagacggggaggaggggcagggagtgctgggaaagggaatggttggggcacagggacasaggtggcttcaggagagtaaggggcagctgggtcaggagagggccagctgccgtggaaactccccgtggtgggccatcctgcagcagacctgagtggctc

SEQ ID NO: 103847 - DNA, 201 bp, Homo sapiens
tgacctcgtgatccacccgccttgacctcccaaagtgctgggacaacaggtgtgagccaccgcgcctgggatctttattaactttttaaaattaaaaatatatatatatatatatttatatatattttgagatggagtttcactcttgtcgcccaaactggagtgcaatggtgccgtgatctcggctcactgcaacctccg

SEQ ID NO: 103848 - DNA, 201 bp, Homo sapiens
tcaacacgggcaatttaggatttttggccaggggaatgagagaatgcaggcagacacccacgccaggtcccaggtccctgatcacgctggtctagcttcaratctgccccgtggcaccaaaatattggcctgttcgtggataggaaatgaatgtaggaaatctgtgaaaaggacgtcaagaatgaatgaatgaatggaggc

SEQ ID NO: 103849 - DNA, 201 bp, Homo sapiens
ccaccacacccagctaatttttgtttttttttggagatggagtcttgctctgtcacccaggctggagtgcagtgatgcgaacttggctcattgcaacctcygcctcccaggttcaagcgattcttctgcctcagcctcctgagtagctgggattacaggcacactctaccatgcccggctaattttttgtattttagtaga

SEQ ID NO: 103850 - DNA, 201 bp, Homo sapiens
agaaagggtttcaccatgtcggccaggctgttcttgaactccttgcctcaggtgatccacctgcctcggcctcccaaagtgctgggattacaggcgtgggscaccacgcctggccgcctcatttcattccactgtttcaggccctcccctcccctccctcagccagaagctggggcatgaagaggccttcctgggtgcctg

SEQ ID NO: 103851 - DNA, 201 bp, Homo sapiens
ggctaattttatttttgtatttttagtagagaaagggtttcaccatgtcggccaggctgttcttgaactccttgcctcaggtgatccacctgcctcggccycccaaagtgctgggattacaggcgtgggccaccacgcctggccgcctcatttcattccactgtttcaggccctcccctcccctccctcagccagaagctg

SEQ ID NO: 103852 - DNA, 201 bp, Homo sapiens
ccagcctcagcttcccaagtaactgggattacaggagcccgccaccatgcccggctaattttatttttgtatttttagtagagaaagggtttcaccatgtyggccaggctgttcttgaactccttgcctcaggtgatccacctgcctcggcctcccaaagtgctgggattacaggcgtgggccaccacgcctggccgcctc

SEQ ID NO: 103853 - DNA, 201 bp, Homo sapiens
cagacttagctggaggggctgggctgggctggggcatccagtgtggtgtataggtccctcctgagaagggagtgaggacccgaccgtgttgagtcaccagyggggatgcctggggtgtccctgtcgctctccgggcctcagtttttctgtctgtcaaaggggcccacaagccctgtgtctccctgatagagcagtggaaga

SEQ ID NO: 103854 - DNA, 201 bp, Homo sapiens
tcgtcccggggccagatttgttttacaaggtggacagcaggcacagggtacctgttttaggaatgcgagaatgcagccacgtaggcatgtgggtgggggayaggggggtcctggctctgcgctcaggcccagagagtggcagggtcgggggacatttccaggagcgggaacagcagctccaggggcccagaggtaggacta

SEQ ID NO: 103855 - DNA, 201 bp, Homo sapiens
gatcagatacttgttttgcaaatattttctcccaatctatggcttgtcttttcattttcatatcagcgtcttctcagagtatgttttattattattattawattattattattattattattattattagagatgaagtctcgctctgtcgcccaggctggagtgtagtggtgccatcttggcttactgcaacctccgcct

SEQ ID NO: 103856 - DNA, 201 bp, Homo sapiens
ccaaatgttgttattatccctattttatcgacgaggaaactggaggtttgtaacttaagagagggttgataatttgcccagggcacatggctcttgcctgyagactccatgtttattttttcccaacctggtaactttcttttaatggaaagctccagaagaggtgtcggtgctactcctccccctcttttccagcaagca

SEQ ID NO: 103857 - DNA, 201 bp, Homo sapiens
tttcattttcatatcagcgtcttctcagagtatgttttattattattattatattattattattattattattattattagagatgaagtctcgctctgtygcccaggctggagtgtagtggtgccatcttggcttactgcaacctccgcctcctgggttcaagcgattctcctgcctcaacctcccgagtagctgggatt

SEQ ID NO: 103858 - DNA, 201 bp, Homo sapiens
ctcggcctcccaaagtttttatatttggaccagttatatatttatataactggtcggccccgccaactagtttttattttaagatggtaattttggctggkcacggtggctcacgcctgtaatcccaacactttgggaggccgaggtaggcagatcacctgagctcaggagttccagaccagccttgccaacatggtgaaa

SEQ ID NO: 103859 - DNA, 201 bp, Homo sapiens
ctaatttttgaattattagtagagacggggttttgccatgtgggccaggctggtctcgaacccctgacctcaggagatccacctgcctcggcctcccaaastgcagggattacaggcgtgagccactgtgaccagccttgattttgcttatgtttttctttctccttataccttgacattgtcccatcttggaactttaaa

SEQ ID NO: 103860 - DNA, 201 bp, Homo sapiens
acttgaaaccgggaggcggaggttgcagtgagccaagatcgcgccattgcactccagcttgggcaacaagagcaaaactccgtctcaaaaagaaaaaaagkgggggtaggggggagggatagcattaggagatatacctaatgttaaatgatgagttaatgggtgcagcacaccaacatggcacatgtatacatatgtaac

SEQ ID NO: 103861 - DNA, 201 bp, Homo sapiens
gaggcaggagaattgcttgagcctgggaggtggaggttgcagtgagccgagatcgcgccattgcactccagcgtgggcaacagagtaagactctgtcttaaaaaaaaaataataaaaggtggcaaattgctcaataagtgctgttgtgattattctgatgatatctccctcttcagccctcccacacccaattaatctgct

SEQ ID NO: 103862 - DNA, 201 bp, Homo sapiens
gctgaggtgggaggatcacttgagcccagcaggtcaaggctgcactgagctgaaatcaccttactgcactccatcctaggcaacagggcaagactgtctcaaaaaaaaaaaaaaaaaaaaaaaaaaaaagccggtgctggcatggtggctcacgcctgtaatcccagcactttgggaggcagaggcaggcagatcacttga

SEQ ID NO: 103863 - DNA, 201 bp, Homo sapiens
tttctgggacacgtcagtggttcaagaaggtaaagagatggaaggttatgaaaccaggagtgacctggaaaatcggagccatggggttggcggagctgacyagagggctgaccatgctgggtgctgcatatcagaaggtagtgatggccgggcatggtggctcatgcctgtaatcccagcactttgggaggccgaggcagg

SEQ ID NO: 103864 - DNA, 201 bp, Homo sapiens
ctgaggtgggaggatcacttgagcccagcaggtcaaggctgcactgagctgaaatcaccttactgcactccatcctaggcaacagggcaagactgtctcaaaaaaaaaaaaaaaaaaaaaaaaaaaaagccggtgctggcatggtggctcacgcctgtaatcccagcactttgggaggcagaggcaggcagatcacttgag

SEQ ID NO: 103865 - DNA, 201 bp, Homo sapiens
aaggcaggagaattgctggaacctgggaggtggaggttgcagtgagctgagatggcaccactgcactccagcctgggagacagaccaagatttcatctcaaaaaaaaaaaaaaaaattacagccaggcgcagtggctcacgtttgtactcccagcactttgggaagccaaggtgggcagatcacctgaggtcaggagtttg

SEQ ID NO: 103866 - DNA, 201 bp, Homo sapiens
tgaggcaggagaatcgcttgaacccgggaggcagaggttgcggtgagacgagatcatgccattgcactccagcctggacaaaaagagtgaaactccgtctaaaaaaaaaaggcagaggggcacggggaggactaagggctccagggacctgagctcctctctggctgtgtggccttggacaagtgtctctccctctctggg

SEQ ID NO: 103867 - DNA, 201 bp, Homo sapiens
aggtgagaccgggaggatttgctgacagactggatgtgggtgtgagagaaggggatgagtcaagggtgactccaaggtttcggcggaagcaactgtcaggrtggggcaactgggaaggggaggagggaggggagcaggcgggggaggaagacacgggctctgcggcggcccatcccacgtccagcagaggctgccggtggg

SEQ ID NO: 103868 - DNA, 201 bp, Homo sapiens
ctactcgggaagctgaggcaggagaatcgcttgaacccgggaggcagaggttgcggtgagacgagatcatgccattgcactccagcctggacaaaaagagygaaactccgtctaaaaaaaaaaggcagaggggcacggggaggactaagggctccagggacctgagctcctctctggctgtgtggccttggacaagtgtct

SEQ ID NO: 103869 - DNA, 201 bp, Homo sapiens
cttgcaaagctgatggtgggatcggcacaaatgtatggggggcttggatcagagcttggtacatagtagacactcggaaaggaaggtgatatttgagctgyagccgtggcaatgggcccttctggaagccccatgccaaggcccagagggaggaatgtgtagggaatggtgagtcccagaaggagagggtgggaaaggtat

SEQ ID NO: 103870 - DNA, 201 bp, Homo sapiens
gcaacaggccactgaaatttgctagggggaggggtaaacgtcactgcgtgtctagtgcagggctggcccctgtccatcacaagatcccgctaagaggagcycgtgagaatcaggaagagccccatcctcattcagtgttcctccagcgccctctgctgacaaggtttaacactgagctagctggcagaggagaaatgttta

SEQ ID NO: 103871 - DNA, 201 bp, Homo sapiens
gagtctctgtatccagaagcagagagggagtggagagtcacgtggcgtgcgtttatgggccaggcctggaaatagccgcacatcacatcgccgccacctayacttccttggccagacccagtctcttggccccacacatagcagcaggggagaagagaaaaggtcatcacgccatattcccagcagaaaaatgaaatgggg

SEQ ID NO: 103872 - DNA, 201 bp, Homo sapiens
agtgactgatattaatgttcaatcttttgcctatgtatatacaatgtaaactttaaacacaatgccttgtacatgcagtacttggcattgaacacacttayctctaggacaaatatctggacaaagaattgcttggtcagagtctgtacatttgtaattttgatatgtaatggctacatttccctctatagaaattgtgga

SEQ ID NO: 103873 - DNA, 201 bp, Homo sapiens
agaacagaggccctgagcctgtgagcaagaccacagacaaaatccctaaaccacacagcaggctggcggggcagaggagctaaggagcaaaggcgagtggraaggaagataaggaatggtcaggggcgagatttaacccaggagggttggccggacacagtggtagtggctcacacctgtaatcctaatgctttgggagcc

SEQ ID NO: 103874 - DNA, 201 bp, Homo sapiens
atttttgtattgttagtagaaacagggttttaccatgttggccagactggtctcgaactcccgacacctgtctcagcctcccaaagtgctgggattacagrcatgagccactgcacctgccccacatctgtgcttgaaagccgggtctgggtctgggactgtgtcccagggcactcgggagccacggaagagttgggagcc

SEQ ID NO: 103875 - DNA, 201 bp, Homo sapiens
aatgggggcctgggggaggagcaggtttgagatgtagaccagccaatgcctgtctctaacctgaaggagggtgattccaggtaaggtgatgcactgacctstgcccccggatgtgacctctgccccccactgtgacctctgcccccggctgtgacctctgcccccggctgtgacctctgccccctgctgtgacctctgccc

SEQ ID NO: 103876 - DNA, 201 bp, Homo sapiens
gcagccttgacctcctgggctcaagctatcctcccacctgagcctcctgagtagctgggacgacaagtgcacaccaccacgcccagctaattaaaaaaactttttttttttttcacagacgagatctcactgtgttgcccagactggtttcaaactcccgagctcaagcaattctccctccttggcctcccaaagtgttag

SEQ ID NO: 103877 - DNA, 201 bp, Homo sapiens
tgaggcaggagaattgcttgaatccaggaggcagaggtttcagtgagccgagatagagccactgcactccagcctgggcaacagagtgagactccttctcaaaaaaaaaaaaaaaaaaaaaaaagctgggtacatgtggtctagctactccagaggctgaggtgggaggatcacttgagcctgggagttggaggctgaagc

SEQ ID NO: 103878 - DNA, 201 bp, Homo sapiens
agtttggccagtttctttccattgcccactcaggcacaacctcaggccctactgctccccaaccttcctgtgccccggggatgcctccgcacctgcctgcragtttccctctcaggatccctaaggacctgggcattcccttccccagactctccctaaccccccaccccagcagcacacagagccagggacaaagggtca

SEQ ID NO: 103879 - DNA, 201 bp, Homo sapiens
aggagtgagactatgtctcaaaataaatacataaatagaaataaaaaatcatatgcatgtttatatggatttttattattattattttatttatagatcayagttttacttgttttgaggatatatgcaatatttatatagactttatttatttatttattttttgagacagagtctcacttcctcacccaatccagagtg

SEQ ID NO: 103880 - DNA, 201 bp, Homo sapiens
cacggccaagggtgagtcatcctgctgagaggttgagctggggacgcctgcccagatgggctccaagtgagggagagcctggcggggagaacagcccggasagaggcagggcagggcgccgggacactgcttggcgcgtcctgggagtgaagcgcattgaacccagctcaggctggtggtgggggagtcttggcaatgctc

SEQ ID NO: 103881 - DNA, 201 bp, Homo sapiens
cagcggcaccgccagggctgctgagaaatccctcctgctgtccgatcgcattcctggaagggtgggccgctcagggccccccagctccagtcccactcagrccccagaatcccagcagcccaccactcacttcctttgcgcgcactcttccttctggtccccacacaccgctccctctctcgctaccttcagtctttgctc

SEQ ID NO: 103882 - DNA, 201 bp, Homo sapiens
cagcctccctaatagccaccacacccagctaatttttgtagcgataagggtctctggttggtctcgaatgcctgggctcaagcgatcttcctgcctcagcytcccaaagtgctgggattacaggcatgagccactgtgcctggccagtttttttctaaagctattttgataggtgcctactggtgtttcactgtagtatta

SEQ ID NO: 103883 - DNA, 201 bp, Homo sapiens
gggaagatcatggctcactgcaacctcgaactcctgggcacaagtgatgctcccaccccagcctccctaatagccaccacacccagctaatttttgtagcrataagggtctctggttggtctcgaatgcctgggctcaagcgatcttcctgcctcagcctcccaaagtgctgggattacaggcatgagccactgtgcctgg

SEQ ID NO: 103884 - DNA, 201 bp, Homo sapiens
aaccctgtctctactaaaaatacaaaaattagctgggcatgctggcgtgcgcctgtagtcacagctattcgggaagctgaggcaggagaatcacttgaacycgggaggtggaggttgcagtgagctgagatcgcgccactgcactccagcctggaaacacagcaagactccgtctcaaacaaacaaaaaacaccacacaca

SEQ ID NO: 103885 - DNA, 201 bp, Homo sapiens
tgtccgtgtgtctctgtctccgccctccgtgtatctctgttgcgtctctcaaggtctctggcccctgtgcatctcagtcccctcctggtctctgtctcccrtgccctctgccctctccctttctccctggctcccgccctgtctgtgctgccgtggtcctggctgtgcctctgtccctgtgtctgtttccagggtgcccct

SEQ ID NO: 103886 - DNA, 201 bp, Homo sapiens
ccaaccttcctgtgccccggggatgcctccgcacctgcctgcgagtttccctctcaggatccctaaggacctgggcattcccttccccagactctccctamccccccaccccagcagcacacagagccagggacaaagggtcattgaatagaaaacaaaggtgaagacagcccagccggaggcctggtggggtgtcatggt

SEQ ID NO: 103887 - DNA, 201 bp, Homo sapiens
cttttgcctatgtatatacaatgtaaactttaaacacaatgccttgtacatgcagtacttggcattgaacacacttacctctaggacaaatatctggacawagaattgcttggtcagagtctgtacatttgtaattttgatatgtaatggctacatttccctctatagaaattgtggaagcttgttctctgagccgggggt

SEQ ID NO: 103888 - DNA, 201 bp, Homo sapiens
caatgcctgtctctaacctgaaggagggtgattccaggtaaggtgatgcactgacctctgcccccggatgtgacctctgccccccactgtgacctctgccsccggctgtgacctctgcccccggctgtgacctctgccccctgctgtgacctctgccccaagcccacctattccctcccacctagagaaccctccaaagac

SEQ ID NO: 103889 - DNA, 201 bp, Homo sapiens
atggggcacgtgcacttgccaaaaggcaaactacggtcctctgaatgccatgagccccaggtttccaggtgaggggtgatgcccctgtgatagccccacartgagaaaactgaggcttgggaggggtgccgtggctcacacctgtaatcccagcactttgggaggccgaggcaggtggaccacctgaggtcaggagtttga

SEQ ID NO: 103890 - DNA, 201 bp, Homo sapiens
gaaggagggtgattccaggtaaggtgatgcactgacctctgcccccggatgtgacctctgccccccactgtgacctctgcccccggctgtgacctctgccsccggctgtgacctctgccccctgctgtgacctctgccccaagcccacctattccctcccacctagagaaccctccaaagacagaaactgcaaaaaccctt

SEQ ID NO: 103891 - DNA, 201 bp, Homo sapiens
atgcctgggcgacagagcgagactctgtctcaacaacaaccaaaaaagaacacagtgttacccgtgtgtcggacattggctttgaaggtaggaaggacatrgcacagggaaaaattctgccacttcccagctctcctgctagtgaggaaggcagatttaaagaaggcaacagaccaggtgcggtggctcatgcctgtaacc

SEQ ID NO: 103892 - DNA, 201 bp, Homo sapiens
ttggagttggggaaactgaggcaaagaggcagcgtccctcaggcagccccaggttaggacccagacatgcggatcccaggttccacgctccttccttggcygagtgccctccctccgctgacccctctcccctgcctgcaggacttacagggctccgtggagcgcatctgtgggttcctgggccgtccgctgggcaaggag

SEQ ID NO: 103893 - DNA, 201 bp, Homo sapiens
ggagggtgattccaggtaaggtgatgcactgacctctgcccccggatgtgacctctgccccccactgtgacctctgcccccggctgtgacctctgccccckgctgtgacctctgccccctgctgtgacctctgccccaagcccacctattccctcccacctagagaaccctccaaagacagaaactgcaaaaacccttaga

SEQ ID NO: 103894 - DNA, 201 bp, Homo sapiens
cttgctgcgccaatcagcaaattgtttgcaagccctgagcacagagcctgcagaagggggtcccttccatgtccaagcagtaatggctgcagcatggagcrttgtgggggcattgagacaggaggccttgttctagcaggggaggtttgggactggtcgcagaggaggtgacacaagctgtaaggtgggcaggaattcagg

SEQ ID NO: 103895 - DNA, 201 bp, Homo sapiens
aggccccccaagatgggcaaccaggggagaagcaggttggaagagccccagaacttggtggaaatgtgggggctctgggggagggcatccagctctggggrctggacctgggggtttgtggggcacagctagttagacccatgagccccagtggggctgggggaaccccgccactcagccctcaccccacttgtccctctg

SEQ ID NO: 103896 - DNA, 201 bp, Homo sapiens
agacacaggacaggcaaaggacagaggagacagagacagggagagacacagatacaaaaagactgagagagagggcaacaaaagagacaggggcccggcayggtggctcatgcgtgtaatcccagcactttgggaggctgaggcaggcggatcacaaggtcaggagattgagaccatcctggctaacatggtgaaaccccg

SEQ ID NO: 103897 - DNA, 201 bp, Homo sapiens
acatggtgaaaccccgtctctactaaaaatacaaaaaattagccgggtgtggtggcggtgcctgtagtcccagctacttgggaggctgagacaggagaatsgcttgaacttgggaggtggagcttgcagtgagccaagatcgtgccactgcactccagcctgggcgacagagtgagactccgtctcaaaaaaaataaaaaa

SEQ ID NO: 103898 - DNA, 201 bp, Homo sapiens
ctcccctcctcccagccatccagtgaattcctcagcgcccagccctcacccaccccgcccccccagcctcctcacctgcattccagctactctactgctttttttttttttttttttttttttttgagactgaatctggctctgtcacccaggctggagcgcagtggaacgatctcggctcactgcaacctccgcctccca

SEQ ID NO: 103899 - DNA, 201 bp, Homo sapiens
tcgagatcatctgcttaatcctgaaggaaggggatccatcctggatccgctccgtgcccatctgggagcgggcaccctggtgtgagaccattgtgggtgcyttcagcctcccggaccagtacagcccccgcctcatgagctcccatcttcccatccagatcttcaccaaggccttcttcagctccaaggccaaggttggga

SEQ ID NO: 103900 - DNA, 201 bp, Homo sapiens
ccccagcctcctcacctgcattccagctactctactgctttttttttttttttttttttttttttgagactgaatctggctctgtcacccaggctggagcrcagtggaacgatctcggctcactgcaacctccgcctcccaggttcaggtgtattacctcatctaatcctcacagccatctgagatgaacccactttgact

SEQ ID NO: 103901 - DNA, 201 bp, Homo sapiens
gttgggagccagtgaggagcagggtcagctggggtgtgggggatgagctggagggggatggagactggaggcaggaaggctgtggagcagccggctgctgrggcatggatccaggaaggggaggatgaggcctaagcagttctaggctacagggacacagaggaggggatatggcaaggggaggcaggtggggagggacag

SEQ ID NO: 103902 - DNA, 201 bp, Homo sapiens
gtggggggaggcagttgtgcctggtgggcctgtgtacggactggcagaggaaaggttggaagtggtgatgttcagagttcaggacccatttggttttgttttttgttttgttttgttttgttttgttttgttttgttttggagacagagtcttgctctgtcgcccaggctggagagcagtggcgtgattttagctcactgc

SEQ ID NO: 103903 - DNA, 201 bp, Homo sapiens
tggggggaggcagttgtgcctggtgggcctgtgtacggactggcagaggaaaggttggaagtggtgatgttcagagttcaggacccatttggttttgttttttgttttgttttgttttgttttgttttgttttgttttggagacagagtcttgctctgtcgcccaggctggagagcagtggcgtgattttagctcactgca

SEQ ID NO: 103904 - DNA, 201 bp, Homo sapiens
ccaggaaggggaggatgaggcctaagcagttctaggctacagggacacagaggaggggatatggcaaggggaggcaggtggggagggacagggctcatgayggacaggttttgggggtgaggggtacccagagagggaggccaggctcctgggtggatggtggggccatcctgcaatgggggcctgggggaggagcaggtt

SEQ ID NO: 103905 - DNA, 201 bp, Homo sapiens
cagaacatgcaagactgggctgatgcaatctgtacggtgggggacgtagaggggtggcctctggggacagggcagggactgattgagacaagatgcaggcyggggcgcaggcaccgtggctcacacttgtaatcccagcactttgggaggccgaggtgggtggatcacttgaggccaggagttcaagaccagcctgaccaa

SEQ ID NO: 103906 - DNA, 201 bp, Homo sapiens
aatcgcttccctccttgaagctccatgtcctctctgtagcaatggaagctacagcggagcccaattctaccccacccactgcacgacaattggtttgtttstatgtttgttactagagtcagggtctcactctgtcacccaggctggagtgcagtggcgcaatctcagctcactgcagcctcaaactcctggctcaattga

SEQ ID NO: 103907 - DNA, 201 bp, Homo sapiens
tggttgaacaccaacaagtcccagcactgtgggctccaccctggcctctggggagtgggggagggacccccgatttggagattgtaggtgccaagaggaaygggcaagatgccctcctattcattcatttattccttcagggcctctccaagggcacagggtcttttcttgttggcatctgggttttcctctcctgtaagc

SEQ ID NO: 103908 - DNA, 201 bp, Homo sapiens
tctctactaaaaatacaaaattagccaggcgtggtggtgggcgcttgtaatgctagctactcggctgaggctgaggcaggagaattgcttgagcctgggargtggaggttgcagtgagccgagatcgcgccattgcactccagcgtgggcaacagagtaagactctgtcttaaaaaaaaaataataaaaggtggcaaattg

SEQ ID NO: 103909 - DNA, 201 bp, Homo sapiens
ttactagagtcagggtctcactctgtcacccaggctggagtgcagtggcgcaatctcagctcactgcagcctcaaactcctggctcaattgatcctcccgyctcagactcccaagtagctgggactacacgtgtatgctaccacagtcggctaattttttatttttaaacagagacagtgttctcgctatgttgctcatgc

SEQ ID NO: 103910 - DNA, 201 bp, Homo sapiens
ggctgaggcgggaggatcactttgggccaggagtttgagaccagcttgggcaacatagtcagaccacatcattacaagaaattttaaaaatcagtcagacrtggtggcacacacttgtagtcccagctacttggaatgctgaggtgggaggatcacttgagcccagcaggtcaaggctgcactgagctgaaatcaccttac

SEQ ID NO: 103911 - DNA, 201 bp, Homo sapiens
tcatggggaaggagggactgagtctacagggctgagaggccaccacagcttgggttcaaatcccagctctgttcagctcttgtgtggccacagtcaaatcscttccctccttgaagctccatgtcctctctgtagcaatggaagctacagcggagcccaattctaccccacccactgcacgacaattggtttgtttctatg

SEQ ID NO: 103912 - DNA, 201 bp, Homo sapiens
atctcagctactcaggagtctgaggcaggagaatcgcttgaacccagaaggcagaggttgcagtgaactaagatcatgcctgggcgacagagcgagactcygtctcaacaacaaccaaaaaagaacacagtgttacccgtgtgtcggacattggctttgaaggtaggaaggacatagcacagggaaaaattctgccacttc

SEQ ID NO: 103913 - DNA, 201 bp, Homo sapiens
ggctggtcttgaactcctgacctcaggtgatccgcccacctcagcctcccaaagtgctgggattacaggcttgagccacagtgcccagcctgcccaggctrgtcttgaattcctggcttcaagcgatcctcctgcctgggtccttcaataaatattgacaagcacctccctgctgccaggctctgctgagagtactttagg

SEQ ID NO: 103914 - DNA, 201 bp, Homo sapiens
cttcaataaatattgacaagcacctccctgctgccaggctctgctgagagtactttaggtacattggcaaacaagacagaacaataacaaaaaaaaaaaamaccagattttttaaattcccaggctcatggagcttacatgcaagcggagatgttcaataaaccatcaatgtcatatgtcaactgtagagtagctcaggag

SEQ ID NO: 103915 - DNA, 201 bp, Homo sapiens
tttggccacgtgttcctttctctgctgctgtcagagaccctggctttggagggaaatccaggtgtgtggaggcggactggatggacagatagacaaaggcmccccaagatgggcaaccaggggagaagcaggttggaagagccccagaacttggtggaaatgtgggggctctgggggagggcatccagctctgggggctgg

SEQ ID NO: 103916 - DNA, 201 bp, Homo sapiens
gccgagatcgtgtcactgtactccagcctggtgacagagcaggactccatctcaaaaaaaaaaaaaaaaaatttacatgtccagggggcttgcaggcagarccattcaccctccaggaggctgagtcattcccggggatcacctgcctgctgtggccacccacccggaggagctctgtctgctgtccctgtccctggcctc

SEQ ID NO: 103917 - DNA, 201 bp, Homo sapiens
cagactggatgtgggtgtgagagaaggggatgagtcaagggtgactccaaggtttcggcggaagcaactgtcagggtggggcaactgggaaggggaggagrgaggggagcaggcgggggaggaagacacgggctctgcggcggcccatcccacgtccagcagaggctgccggtgggcacagaaatgcacccatcgggatct

SEQ ID NO: 103918 - DNA, 201 bp, Homo sapiens
cagcacccacctccctactctccctcatggcgtctcccccacctttccacagccagaagttgccaggtgaatacttccggtacaagggcgtccccttcccygtcggcctgtactcgctcgagagcatcagcttggcggagaacacccaagatgtgcgggacgacgacatctttatcatcacctaccccaagtcaggtacct

SEQ ID NO: 103919 - DNA, 201 bp, Homo sapiens
tccatttcttggagcatgaagtggtcctttcactacccacttcctgaggttctgggagaagtctaggatcatgcatgttcttggcatagagtttctgtacrggtggctcccctcctggtgccaggccctttcctgggattggagggggatggacagagggaattcagaggtttaaggaggctgtggccccatctcctgggg

SEQ ID NO: 103920 - DNA, 201 bp, Homo sapiens
tcgggggctggggagagtggggagggggtgcggcagaggacaggaaaggcacatagagaaggaggggaggaggaaaagtggggccgggtctgttcagagcrgtgcccctgccagaagtagcctcccagggatacccacccggtgcccagcctctcccctccaggtcagttctcaacacttcaccttccctgacctccctgg

SEQ ID NO: 103921 - DNA, 201 bp, Homo sapiens
cccgggaggtgatggtgggagccacagaggtttctagaggaagagcatttcaggcaagagggaaaagcaggtgcaaaggccctgaggtgggtgtatctgargtgcaagagggaggtcggtgtggccggagccaagtgagcaagtggggaaaggagtggagatgaggtccgggtggggaggcaacaggggccaaaatgtgca

SEQ ID NO: 103922 - DNA, 201 bp, Homo sapiens
tcgggggacatttccaggagcgggaacagcagctccaggggcccagaggtaggactactgctcggtgcatttggaggtcttggctggactgtggcgttcakggggaaggagggactgagtctacagggctgagaggccaccacagcttgggttcaaatcccagctctgttcagctcttgtgtggccacagtcaaatcgctt

SEQ ID NO: 103923 - DNA, 201 bp, Homo sapiens
aaaaaaagccggtgctggcatggtggctcacgcctgtaatcccagcactttgggaggcagaggcaggcagatcacttgaggccaggagttcaataccagcytggccaacatggtgaaaccatgtctctactaaaaatacaaaaattagtcggatctggtggtgggtgcctgtaatcccagctactcaggaggctaaggcag

SEQ ID NO: 103924 - DNA, 201 bp, Homo sapiens
tgtgtgtcagttgggaggggctgcatgggtgtatggggtaatggggggacggagcataactcattgattcattcagcacctatttgttaaacacctactawgtgcctgactctgatctagcacagtggtcaatatacacacagaaatgcctgccctttggcagggagtgatggctcatgcctgtagtcccagcactttggg

SEQ ID NO: 103925 - DNA, 201 bp, Homo sapiens
tgctagctactcggctgaggctgaggcaggagaattgcttgagcctgggaggtggaggttgcagtgagccgagatcgcgccattgcactccagcgtgggcracagagtaagactctgtcttaaaaaaaaaataataaaaggtggcaaattgctcaataagtgctgttgtgattattctgatgatatctccctcttcagccc

SEQ ID NO: 103926 - DNA, 201 bp, Homo sapiens
ttgtaatgctagctactcggctgaggctgaggcaggagaattgcttgagcctgggaggtggaggttgcagtgagccgagatcgcgccattgcactccagcstgggcaacagagtaagactctgtcttaaaaaaaaaataataaaaggtggcaaattgctcaataagtgctgttgtgattattctgatgatatctccctctt

SEQ ID NO: 103927 - DNA, 201 bp, Homo sapiens
ggggggaggcagttgtgcctggtgggcctgtgtacggactggcagaggaaaggttggaagtggtgatgttcagagttcaggacccatttggttttgttttttgttttgttttgttttgttttgttttgttttgttttggagacagagtcttgctctgtcgcccaggctggagagcagtggcgtgattttagctcactgcaa

SEQ ID NO: 103928 - DNA, 201 bp, Homo sapiens
aaaaatacaaaattagccaggcgtggtggtgggcgcttgtaatgctagctactcggctgaggctgaggcaggagaattgcttgagcctgggaggtggaggytgcagtgagccgagatcgcgccattgcactccagcgtgggcaacagagtaagactctgtcttaaaaaaaaaataataaaaggtggcaaattgctcaataa

SEQ ID NO: 103929 - DNA, 201 bp, Homo sapiens
gggggaggcagttgtgcctggtgggcctgtgtacggactggcagaggaaaggttggaagtggtgatgttcagagttcaggacccatttggttttgttttttgttttgttttgttttgttttgttttgttttgttttggagacagagtcttgctctgtcgcccaggctggagagcagtggcgtgattttagctcactgcaac

SEQ ID NO: 103930 - DNA, 201 bp, Homo sapiens
aggtcaggagttcgagaccagcctggccaacatggggagacctcgtctctactaaaaatacaaaattagccaggcgtggtggtgggcgcttgtaatgctasctactcggctgaggctgaggcaggagaattgcttgagcctgggaggtggaggttgcagtgagccgagatcgcgccattgcactccagcgtgggcaacaga

SEQ ID NO: 103931 - DNA, 201 bp, Homo sapiens
ggggaggcagttgtgcctggtgggcctgtgtacggactggcagaggaaaggttggaagtggtgatgttcagagttcaggacccatttggttttgttttttgttttgttttgttttgttttgttttgttttgttttggagacagagtcttgctctgtcgcccaggctggagagcagtggcgtgattttagctcactgcaacc

SEQ ID NO: 103932 - DNA, 201 bp, Homo sapiens
ggcttatgcctgtaatcccaacactttgggaggctgaggcgggcggatcacctgaggttaggagttcaaggccagcctggctaacatggtaaaaccccgtytctactaaaaatacaaaaaattagccaggcgtggtggcacatgcctgtaatcccagctactcgggtggctgaggcagaagaatcacttgaaccctggagg

SEQ ID NO: 103933 - DNA, 201 bp, Homo sapiens
aatagaaataaaaaatcatatgcatgtttatatggatttttattattattattttatttatagatcatagttttacttgttttgaggatatatgcaatatktatatagactttatttatttatttattttttgagacagagtctcacttcctcacccaatccagagtgcagtggcgcgatctcagctcattgcaaccactg

SEQ ID NO: 103934 - DNA, 201 bp, Homo sapiens
ggctcacgcctgaaaccccagcactttgggaggccgaggcgggcggatcacgaggtccaaagatcgagaccagcctggctaacacggtgaaaccctgtctytactaaaaatacaaaaaattagctgggcgtggtggcaggtgcctgtagtcccagctacttgggaggctgaggaaggagaatcgcttgaacccaggaggca

SEQ ID NO: 103935 - DNA, 201 bp, Homo sapiens
gccgggaaggggaaggaggttgctggaatgttggaggtaggggcgcagtgctccccagaggctcctcaccccctggtgccccctcttctccaggggtctgyggcgactggaagaaccacttcacggtggcccagagcgaagccttcgatcgtgcctaccgcaagcagatgcgggggatgccgaccttcccctgggatgaag

SEQ ID NO: 103936 - DNA, 201 bp, Homo sapiens
gaacccaggaggcaaggttgcagtgagccgagatcacaccactgcactccagcctgggcaacagagcgagactccgtctcaaaaaaaaaaaaaaaaaaaaraaagaaagaaaaaaagaggaacttacaagaacaatggaaagattaccccatgaacacccctatgcccaccaccactaaaatttggggttttttaaatttt

SEQ ID NO: 103937 - DNA, 201 bp, Homo sapiens
agtggaaaaagatgctcacggttccctccttctccacccagcccctgacgagggactcagccttgaagagtgagggacaggatgcgttttcctttccactygctctttggggtggggggaggcagttgtgcctggtgggcctgtgtacggactggcagaggaaaggttggaagtggtgatgttcagagttcaggacccatt

SEQ ID NO: 103938 - DNA, 201 bp, Homo sapiens
ccggctaatttttgtatttttagtacagattgtgtttcactatattggtcaggctggtcttgaatgcctggactgatgatacacctgcctcagcctcccawagtgctgggattacaggaataagccactgagcccagcctaatttttgttttttttagtagagacagggtttcgccatgttagacgggctggtctcaaaca

SEQ ID NO: 103939 - DNA, 201 bp, Homo sapiens
tacaggtgtgcaccactacgcccggctaatttttgtatttttagtagagatggggtttcaccatgttggccaggctagtctcaaactcctgacctctggtratctgcctgcctcggccttccaaagtgctgagattacagatgtgagccactgcacctagctagtggttttgtttgtttgtttgttttaatagaagtttac

SEQ ID NO: 103940 - DNA, 201 bp, Homo sapiens
agtgagggacaggatgcgttttcctttccactcgctctttggggtggggggaggcagttgtgcctggtgggcctgtgtacggactggcagaggaaaggttrgaagtggtgatgttcagagttcaggacccatttggttttgttttttgttttgttttgttttgttttgttttgttttgttttggagacagagtcttgctct

SEQ ID NO: 103941 - DNA, 201 bp, Homo sapiens
gaggcgggtggattgcttgagctcgggagttccagaccagcctgggcaacatggtaaaaccccgtttttactaaaatataaaaaattagctgggcgtggcrgtgtgctcctgtaatcccagctagtcaggaggctgagatgggagaatcacttgaacccgggaggcagaggttgcagtgagccaaaattgtgtcactgcac

SEQ ID NO: 103942 - DNA, 201 bp, Homo sapiens
ggggggacttgtcacccttatggtttccatgaccctggccaccctccatagatatataccgtgagcccataggaaaacattttctcgtagccacctttttaaaaaaacaaaagaaacaagtgaaattaattttaatcacatatctaatctatctgaaatatcatttccacatatagtcaatttcaaaaactgtcaatgagg

SEQ ID NO: 103943 - DNA, 201 bp, Homo sapiens
gccacctttttaaaaaaacaaaagaaacaagtgaaattaattttaatcacatatctaatctatctgaaatatcatttccacatatagtcaatttcaaaaaytgtcaatgaggctgggcgtggtggctcatgcctataatcccagcactttgggaagccgagacgtgtggatcccttgaggtcaggagttcgagaccagcct

SEQ ID NO: 103944 - DNA, 201 bp, Homo sapiens
ttgggaggccgaggtgggcagagcacctgaggtcaggagttcgagaccagcctggccaacatggggagacctcgtctctactaaaaatacaaaattagccrggcgtggtggtgggcgcttgtaatgctagctactcggctgaggctgaggcaggagaattgcttgagcctgggaggtggaggttgcagtgagccgagatcg

SEQ ID NO: 103945 - DNA, 201 bp, Homo sapiens
gatgcctctgctcccagcaccttgggaggctgaggcaggaggattgcttgagcccaggagttcaagaccagcctgggcaacatagtgggaccgtatgtctwctaaaaataaaaataagaaattagccaggtgtggttgtgtgcacctgtggtctcagctactcgggaggctgaggcaggaggatctcttaagcccgggatt

SEQ ID NO: 103946 - DNA, 201 bp, Homo sapiens
ctccagcttgggcaacaagagcaaaactccgtctcaaaaagaaaaaaagtgggggtaggggggagggatagcattaggagatatacctaatgttaaatgaygagttaatgggtgcagcacaccaacatggcacatgtatacatatgtaactaacctgcacgttgtgcacatgtaccctaaaacttaaagtataataaaaaa

SEQ ID NO: 103947 - DNA, 201 bp, Homo sapiens
cagcctgggcaacacagtgagaccccatctctacaaaaattttaaaaattaggtgggcgcaggctgggcatggtggctcatgcctataatcccagcacttygggaggccaaggcaggtggatcacctgaggtcaggagtttgagaccaacctggccaacatggcaaaaccccatctctactaaaaatacaaaaactagcca

SEQ ID NO: 103948 - DNA, 201 bp, Homo sapiens
cctcccaaagtgctgggattacaggcatgagccaccgcacccggccatatattcctttttgtttgttctattacttgccactgacttgaagctcacaaatrtattatttggtaaagtgttgaaatatttttcctcttttgaattggattgttttcttatcattgagatttgagagttttttttttttttttttgagacaga

SEQ ID NO: 103949 - DNA, 201 bp, Homo sapiens
gtggcagacgctgtcgctgcgcacacctggcctctgtgccgcctgctccctgctcgtcctcccctccccaccctcacccacctgccatggacgggcccgcygagccccagatcccgggcttgtgggacacctatgaagatgacatctcggaaatcaggtgaggcccagacctgggcaggagccaggagatcccagggagga

SEQ ID NO: 103950 - DNA, 201 bp, Homo sapiens
tgcccagactggtttcaaactcccgagctcaagcaattctccctccttggcctcccaaagtgttaggattataggagtgagcctctgcactgggccctgcrcacaagttcttacgtggacatatgttttctttgttttttatggagacaggttctcactgttgcccaggctggagtgcagtggcgagatctctgttcactg

SEQ ID NO: 103951 - DNA, 201 bp, Homo sapiens
caggctggagtgcagtggtgcagtctcagctcactgcagccttgacctcctgggctcaagctatcctcccacctgagcctcctgagtagctgggacgacargtgcacaccaccacgcccagctaattaaaaaaactttttttttttttcacagacgagatctcactgtgttgcccagactggtttcaaactcccgagctca

SEQ ID NO: 103952 - DNA, 201 bp, Homo sapiens
cactttagctagagaggtcgaggctccagtgagctgcgatcacaccactgcacttcagcctgggcaacagagtgagaccctgtctcaacaaatagaaaaasgtacaattcaatgactttgccatgtgcgtggagctggtcatccatcaccacaatcaattttagaatattttcagccgagcacagtggctcacacccataa

SEQ ID NO: 103953 - DNA, 201 bp, Homo sapiens
ccaggtcagttctcaacacttcaccttccctgacctccctggctgaaatagcgtcctcgttctgttcctccctttcccctttaccctctactttttttttyttttttttttttttttttttgtagagatggggtctcactacattgcccaggctggtcttgaactcctgatctcaagtgatccttctgccttggcctccca

SEQ ID NO: 103954 - DNA, 201 bp, Homo sapiens; identical to SEQ ID NO: 16334

SEQ ID NO: 103955 - DNA, 201 bp, Homo sapiens
aattagctgggcgtggcagtgtgctcctgtaatcccagctagtcaggaggctgagatgggagaatcacttgaacccgggaggcagaggttgcagtgagccraaattgtgtcactgcactccggctttggtgacacagtgagactctgtcaaaaaaaaaaaaaattagagggacgtgttggcacacacctgtaatcccagct

SEQ ID NO: 103956 - DNA, 201 bp, Homo sapiens
gatctcaagtgatccttctgccttggcctcccaaagtgctgggattacaggcgtgaaccaccacacctgaccatttttatttttatttttcgagacaaggkcttgctctgtcactcaggctggggtgcagtggtgcaatatcagctcatcaaacctcccaccttggcctcccaaagtgctgggactacaggtgctggtcac

SEQ ID NO: 103957 - DNA, 201 bp, Homo sapiens
ggttgcagtgagccaaaattgtgtcactgcactccggctttggtgacacagtgagactctgtcaaaaaaaaaaaaaattagagggacgtgttggcacacayctgtaatcccagcttcttgggaagttgagacatgagaatcacttgaacctgggaggtgctagttgcagtgagccgtgattgtgtcactgcactccaacct

SEQ ID NO: 103958 - DNA, 201 bp, Homo sapiens
ggaaaactgaggcttggagggttcctgaggctcgcttgctgcgccaatcagcaaattgtttgcaagccctgagcacagagcctgcagaagggggtcccttycatgtccaagcagtaatggctgcagcatggagcgttgtgggggcattgagacaggaggccttgttctagcaggggaggtttgggactggtcgcagaggag

SEQ ID NO: 103959 - DNA, 201 bp, Homo sapiens
acaggcatgagccaccgcacccggccatatattcctttttgtttgttctattacttgccactgacttgaagctcacaaatatattatttggtaaagtgttraaatatttttcctcttttgaattggattgttttcttatcattgagatttgagagttttttttttttttttttgagacagagtctcgctctgtcacctagg

SEQ ID NO: 103960 - DNA, 201 bp, Homo sapiens
agatgcatgtataacccaagtccctgtcaagatgtaaactccttttgagtggctgaattccagcgtttttccaggtccagactcatttaccccgtcccctrttgtttctggcctctcttggaacatcattgccatgatcgccctgggatatatttcactgcgcgcttcctcaagggcatctgtctattccttatgtttcta

SEQ ID NO: 103961 - DNA, 201 bp, Homo sapiens
tttgtttgttctattacttgccactgacttgaagctcacaaatatattatttggtaaagtgttgaaatatttttcctcttttgaattggattgttttcttrtcattgagatttgagagttttttttttttttttttgagacagagtctcgctctgtcacctaggctggagtgcagtggcgcgatctcagctgcctcccagg

SEQ ID NO: 103962 - DNA, 201 bp, Homo sapiens
acccaagtccctgtcaagatgtaaactccttttgagtggctgaattccagcgtttttccaggtccagactcatttaccccgtcccctgttgtttctggccyctcttggaacatcattgccatgatcgccctgggatatatttcactgcgcgcttcctcaagggcatctgtctattccttatgtttctagggggtcaggttc

SEQ ID NO: 103963 - DNA, 201 bp, Homo sapiens
cggtggctcacacttgtaatcccagcactttgggaggctgaggcaggcagatcacgaggtcaggagtttgagaccagcctgaccaacatggagaaatcccstctctactaaaaatacaaaaattagccaggcgtggtggtgcacgcctgtaatctcagctactcaggagtctgaggcaggagaatcgcttgaacccagaag

SEQ ID NO: 103964 - DNA, 201 bp, Homo sapiens
aggctgaggcaggcagatcacgaggtcaggagtttgagaccagcctgaccaacatggagaaatcccgtctctactaaaaatacaaaaattagccaggcgtrgtggtgcacgcctgtaatctcagctactcaggagtctgaggcaggagaatcgcttgaacccagaaggcagaggttgcagtgaactaagatcatgcctggg

SEQ ID NO: 103965 - DNA, 201 bp, Homo sapiens
gatggaattacacagagtttaccttccaagtctggctctttcactcagtgcaatgcctgggagagccttccctgtggctgtgggaaccgccggtttgttcttttttttttttctgaggcggagtttcactcttgttgcccaggctggagtgcaatggcgcgatctgggctcactgcaacctccacctcccaggttcaagtg

SEQ ID NO: 103966 - DNA, 201 bp, Homo sapiens
gaggatcgtttgagcccaggagccggagggtggaggtcgagggtgcagtgagccaagatcaagccactgcattccagcctgtgcaacagagtgagactccrtctcaaaaaaaaaaaaaaaaagtattaaatagggccgcaaaggaggccagcaggatgcggagatgggcagtaatgtgcacggggtgggaggtctcttgct

SEQ ID NO: 103967 - DNA, 201 bp, Homo sapiens
ggcgtgcaccaccatacccagctaatttttgtattttattagagacggggtttcgccatgttggccaggctggtctcaaactcctgacctcaggtgatttscctgcgtcagcctcccaaagtactgggattacaggcgtgagccaccgagcccggccagttctttttcatcgctgagtagtatcgcatggcacagaatact

SEQ ID NO: 103968 - DNA, 201 bp, Homo sapiens
ggtcaagtgtagatgttggtttgaacatataggcttccatttctcttggacaaacacccagaagggagagtgactctggtttttgctggtttttgttttcygtttttgtttttgttttttttttctgagacagagtctcactctgttccccaggctggagtgcagtggcgcgatctcggctcactgcaacctctgcctccc

SEQ ID NO: 103969 - DNA, 201 bp, Homo sapiens
agtgtagatgttggtttgaacatataggcttccatttctcttggacaaacacccagaagggagagtgactctggtttttgctggtttttgttttccgtttytgtttttgttttttttttctgagacagagtctcactctgttccccaggctggagtgcagtggcgcgatctcggctcactgcaacctctgcctcccaggtt

SEQ ID NO: 103970 - DNA, 201 bp, Homo sapiens
gtactgggattacaggcgtgagccaccgagcccggccagttctttttcatcgctgagtagtatcgcatggcacagaatactgctgtttatccacttacccrtgcaaggacgtttgagctgttcccagggtttggcaattatgagtacagtggctataaacatgagtgtagatgagggtcaagtgtagatgttggtttgaac

SEQ ID NO: 103971 - DNA, 201 bp, Homo sapiens
cagctggtttttgtatttttagtagagatggggtttcaccatgttggccaggctggtctcaaactcctgacctctggtgatctgcccacctcagcttcccraagtgctgggattacaggcgtgagccaccacatccagcctatatatgcagtttatttaaataaaaatacaaaactctctactgttttccacaaggtcctg

SEQ ID NO: 103972 - DNA, 201 bp, Homo sapiens
gttgggcaggggtccctcggaggcctcctggggatgggggctgcagctcgtctgagcgcccctcgagcgctggtactctgggctgcactgggggcagcagstaagacctggggttcccgggaggagcccccgagggagggtggaggtggggatgccaaggagagggattcaggctgctctcttcccagctcacatcggacc

SEQ ID NO: 103973 - DNA, 201 bp, Homo sapiens
ggggcagcaggtaagacctggggttcccgggaggagcccccgagggagggtggaggtggggatgccaaggagagggattcaggctgctctcttcccagctmacatcggaccagcacctgaccccgaggactggtggagctacaaggataatctccagggaaacttcgtgccaggtgccgccaaggcggggacccaggagtc

SEQ ID NO: 103974 - DNA, 201 bp, Homo sapiens
catgaagaccttcaagtagttcagcctactgctgaatctggacgtcccgattcccccctcctattggcttcttgtggttcagcccagtgcttctcgacctrgtacattctggttccccgctcgcagacttccgacggtagggcccagcgcggcgcagcccacgccccctgcacaccccccgccccttccatcctatactga

SEQ ID NO: 103975 - DNA, 201 bp, Homo sapiens; identical to SEQ ID NO: 54263

SEQ ID NO: 103976 - DNA, 201 bp, Homo sapiens
tactccgaccccacccccagggcctcctttctggggcctggtgaatgcagcgtggagtctgtgtgctgtggggaagcggcagagccccgtggatgtggagstgaagagggttctttatgacccctttctgcccccattaaggctcagcactggaggagagaaggtaaggggcttggagggaggagctattgaacccactgg

SEQ ID NO: 103977 - DNA, 201 bp, Homo sapiens
tcagaggctaaggcaggatgatgacttgagcccaggaatttaagaccagcctgggcaacatagggagaaccctctctaccaaaaaaaaaaaaaaaaaaaaaagaaaattgaaaattagttgggcatggtggtatgtgactgtggtcccagctacttgagaggctgaggcaggaggatcgtttgagcccaagagtttgaggc

SEQ ID NO: 103978 - DNA, 201 bp, Homo sapiens; identical to SEQ ID NO: 54265

SEQ ID NO: 103979 - DNA, 201 bp, Homo sapiens
cccaaactgggtcacggtcccgccccccagtaccgcctcccattgggcaaatgtaggtcagtgtcccgcctcccaccgaaaggcaaggcaacttcacgcgmtgagcccctcacgcgccctcctgggccctggcggacccagaggccccattggctgtgcgtctcaaggtgtcggagacgattggtccgtgtttgcagccgg

SEQ ID NO: 103980 - DNA, 201 bp, Homo sapiens
ttcaaccaggaactctacgggaatttcagcgctgcctcccgcggccccaatggcctggccattctcagcctctttgtcaacgtgagcggaggcgagattcrgagggagggagcagttgggtgcctggaacccggggtctgagggaagcggggtgctgggaggcccagactcctgggtcctgggggaggagaaggttgaggg

SEQ ID NO: 103981 - DNA, 201 bp, Homo sapiens
cacctttgcagggaagcttttcctgacatcccccatctaagctgagctccccatgacacctcagagctcccagttcccccaaacatgagctcaggatgtarttaattaagcagttacttatgtgattcacaattgtctgtcttgccttcattagaacataaactccataaggcccaggacttttgtctacttgtttattgc

SEQ ID NO: 103982 - DNA, 201 bp, Homo sapiens
catggggacacagtccctttctaacaagatgtatgctctcatggaggtagcacaggacattgtgaatgttcacagcaagcactgacccagcctggggcggsgggggggcggtcagggaaggcttcctggaggaggaaagccctacattttaggtagagtctgctcttcttgcagtatcagtcagcctttcactttctgtat

SEQ ID NO: 103983 - DNA, 201 bp, Homo sapiens
tcgcttgaacccaggagtcagaggttgcagtgaggcgagatctcaccactgcactccagcctcggcagcagagtgagattctatttaaaaaaaaaaaaaamaaaaacaaaaagccgggcgcggtggctcatgcctgtaatcccagcactttgggaggctgaggcgggcggatcacgaggtccggagatccagaccatcctg

SEQ ID NO: 103984 - DNA, 201 bp, Homo sapiens
agctacttgagaggctgaggcaggaggatcgtttgagcccaagagtttgaggctgcagtgagctgtgatggcaccactgcaatctagcctgggtgccagartgagactttgtctcaaaataataaataaataaaaataaaatgtcacctttgcagggaagcttttcctgacatcccccatctaagctgagctccccatgac

SEQ ID NO: 103985 - DNA, 201 bp, Homo sapiens
aacccgtgagcctgggggcaggtgccaggcgatggcgcggcctgtgagcgacaggaccccggcccctctgctgctgggcggcccggccgggacaccccctrgcgggggagcgctgcttgggttgcggagccttctgcaggggaccagcaagcccaaagagccggccagctgtgagttctaacccccatctcacccacttcg

SEQ ID NO: 103986 - DNA, 201 bp, Homo sapiens
ccataacctctctctcctctgttcactggactttgatgaagtctctttgctgttactcaaacaggccacctcagggcctttgcacttgctgttccctcttyttggaatgcccttctctttgttcttttgcaagtcacccctgcttatccttcaggtccccattaaaatgtcacctttggccaggtgcagtgcttcatgcgt

SEQ ID NO: 103987 - DNA, 201 bp, Homo sapiens
cactggcctgcctctcaacttcctgcaatctattcaccccacagctagagagatgtttaaaacacaaataagatcatatcactcctgctcaaaatcctcctattaggatatgtaataacagcaaacatttacatagcacttactatatgtttggcattctggcaaatgtgttatatatatgcagtttatttatttttattt

SEQ ID NO: 103988 - DNA, 201 bp, Homo sapiens
tcactggcctgcctctcaacttcctgcaatctattcaccccacagctagagagatgtttaaaacacaaataagatcatatcactcctgctcaaaatcctcctattaggatatgtaataacagcaaacatttacatagcacttactatatgtttggcattctggcaaatgtgttatatatatgcagtttatttatttttatt

SEQ ID NO: 103989 - DNA, 201 bp, Homo sapiens
ggggcaggtaggcagcagaggggtaggctggtagcactggggcctgctgggagttgtagttccatctacagtggcttaagatgggtttgatcggctgggcrcggtggctcacgcttgaaatcccagcactttaggaggccgaggtgggtggattacctgtggtcaggagttcaagaccagcctggccaacttggtgaaacc

SEQ ID NO: 103990 - DNA, 201 bp, Homo sapiens
gctcgtctgagcgcccctcgagcgctggtactctgggctgcactgggggcagcaggtaagacctggggttcccgggaggagcccccgagggagggtggagrtggggatgccaaggagagggattcaggctgctctcttcccagctcacatcggaccagcacctgaccccgaggactggtggagctacaaggataatctcca

SEQ ID NO: 103991 - DNA, 201 bp, Homo sapiens
ctcactggcctgcctctcaacttcctgcaatctattcaccccacagctagagagatgtttaaaacacaaataagatcatatcactcctgctcaaaatcctcctattaggatatgtaataacagcaaacatttacatagcacttactatatgtttggcattctggcaaatgtgttatatatatgcagtttatttatttttat

SEQ ID NO: 103992 - DNA, 201 bp, Homo sapiens
aacctgggttcccagctccctcctcccccccaggaccaggagtcccagccccctcctctgtccctcaggagtcgggccagcttctgaaccccaggggctcmccatgggacattatacatgcgcatttcaagtagtgagtgggagtgagtggaaggaaagtgtgggggtggagattatgtgtgtgtttgccgggagaggaag

SEQ ID NO: 103993 - DNA, 201 bp, Homo sapiens
cctgggccctggcggacccagaggccccattggctgtgcgtctcaaggtgtcggagacgattggtccgtgtttgcagccggagggaggcacgcggctgggktgcatgcccatagaggctggcggggctggacgcgccgggcggggacccggaggaggggcgcgcgctgtggcgtcgggtgttttggtttggattttttttt

SEQ ID NO: 103994 - DNA, 201 bp, Homo sapiens
tgcagctcgtctgagcgcccctcgagcgctggtactctgggctgcactgggggcagcaggtaagacctggggttcccgggaggagcccccgagggagggtrgaggtggggatgccaaggagagggattcaggctgctctcttcccagctcacatcggaccagcacctgaccccgaggactggtggagctacaaggataatc

SEQ ID NO: 103995 - DNA, 201 bp, Homo sapiens; identical to SEQ ID NO: 54262

SEQ ID NO: 103996 - DNA, 201 bp, Homo sapiens
tctcctgcctcagcctcccgaggagctgggactacaggcgcccgccaccgcgcccggctaattttttgtatttttagtagagatggggtttcaccgtggtytcaatctcctgacctcgtgatccgcccgcttcagcttcccaaagtgctaggattacaggtgtgagccactgtgcccggcctgtttttttctttttcataa

SEQ ID NO: 103997 - DNA, 201 bp, Homo sapiens
cactggcccagtcagattaacatcgaaaaagactgagcaccgaacaaagagtcaagttacattttaagtatttcgtggggtagggggagatctgtgcaggsggaagcatattatagcagcgagaaacaaagacagttattcaattgagacatgcattacattatttcttacttttcaaggaaaaacatgttttaggacttg

SEQ ID NO: 103998 - DNA, 201 bp, Homo sapiens; identical to SEQ ID NO: 16363

SEQ ID NO: 103999 - DNA, 201 bp, Homo sapiens
cttctgagaagcgatgtcttcgagggtcaaaggtctcgtggccaggaatgcttgatagggcaagatcagctgggtcgggttcaaaggtcatcaacacctcsacggtgtctgggtccacagggctgggtgtgtcccgagaggtcaggccttggggaaacagcacgtgtcagctgagtgtgtattttaaggagggggtttcct

SEQ ID NO: 104000 - DNA, 201 bp, Homo sapiens; identical to SEQ ID NO: 16371

SEQ ID NO: 104001 - DNA, 201 bp, Homo sapiens
ggaggtgtgtctttcagtctttgcatgtctgtttctgcatatccaatcccactatccattccccttcctgtgccttcttttcccccaaagcccgttatcaycacccaaccacctgtatatttcaatcctttctcttgtttatctattcctatgaaggcaaggatttggggctattttgtctcctgctgtgtttgctaggcc

SEQ ID NO: 104002 - DNA, 201 bp, Homo sapiens
tgtgtctttatttttctgtgtgtctgggtgatgtatctctctggatccgttaggagtgatacacagggatgggctacagaaggaacaaaaagacaagaggrccggatgtggtggctcatgtctgtaatcctagcaatttgggaggctgaggcgggtggatcacctgaggtcaggagttcgagaccagcctggctaacatgg

SEQ ID NO: 104003 - DNA, 201 bp, Homo sapiens
atgcctgggaaagggagttagataaggctcactagccacaaacagaaaaacaggcagttaatttttaaaggactcaatctcgggccgggcgcagtggctcrcgcctgtaatcccagcactttgggaggccgagatgggcggatcacgaggtcaggagatcgagaccatcctggctaacacggtgaaaccccgtctctacta

SEQ ID NO: 104004 - DNA, 201 bp, Homo sapiens
ccgacagcccgcgggaggactcagactccagcacttccagcagcgcctgccctctatggacgacagcccggagctgcccacgggctgcagccagtatgccwgggagctgccctcttcttccacaacagctggctctggggttctcaagatttattcaggatcgtgttaacggaggcggtgggaggatagggtccctgacgt

SEQ ID NO: 104005 - DNA, 201 bp, Homo sapiens
acccaggccgtgttctcgatagctttccggaagaaagggatctgggagcgagatgcgtgtagctagcacgatgcgtcgcgcggtgacgctctggcccgacrccgacggcctctcagtggctcccggaggacccggcgggcccagtgttggaggtgaggaggcggggctggcagggctagtcggggcatctggaaatttccg

SEQ ID NO: 104006 - DNA, 201 bp, Homo sapiens
agtccaaacccgtcgaccacgtatcactcaccggagagcaggacagtgccacagcccttaggggagtccagggccagctggtcgaaagtgaggatcttgcmccctgccctgaggatgcggctgcgggcccggctggtcacgcgcagtgcacatacctggtggagaggacaaggctggcgggtcagacccctgcgtggtcac

SEQ ID NO: 104007 - DNA, 201 bp, Homo sapiens; identical to SEQ ID NO: 16364

SEQ ID NO: 104008 - DNA, 201 bp, Homo sapiens
cacgtatcactcaccggagagcaggacagtgccacagcccttaggggagtccagggccagctggtcgaaagtgaggatcttgccccctgccctgaggatgyggctgcgggcccggctggtcacgcgcagtgcacatacctggtggagaggacaaggctggcgggtcagacccctgcgtggtcacccaggggctgccaggac

SEQ ID NO: 104009 - DNA, 201 bp, Homo sapiens
gacaacggcgctgtctatggggccgcgacgtcgtctccgctgcgcgtcggccctcacccacgatggcggccagtctcccgaagcgcgaggccccgcccagytctcggcctctcccgcggccggtccctgcaccaagctcgcgagctgactggctccaccccccgcgccctcgtattggtgcggcccaggccggctgcacgg

SEQ ID NO: 104010 - DNA, 201 bp, Homo sapiens
cctggacatttttgcctgcctgcttcccagctgtatcccgagcgcccagaactctgcctggcatgggaggcactcagtgaattgtagggagcaaatgaaagagatgaccaggaacctggccccgtaaggagtcgcctggaggtggccccacggctgtggtgggcctgggccatggccttcgtggtctcattgccagctgct

SEQ ID NO: 104011 - DNA, 201 bp, Homo sapiens
cccaggtctaccgtgctctctggaccagccactcaccatccgggaaagggacagaggcggccggttggtgcgactcataaacaacctcttcaacacaaccwggttgaatgtggagttggttcttctggccagaaacctgtataactggagggacgggaagacagtgagaagctgggacagcctgctcccccgcagccttcc

SEQ ID NO: 104012 - DNA, 201 bp, Homo sapiens
ctccatctcaaaaaaaaaaaaaaaaaaaagagagagagacgggggtttctccatgttggtcaggctggtctcggactcctgacctggcgatccacccgcckcggcctcccagagtgctgggattacaggcgtaagccaccacgcctggcctacagcctacatttgtcactttctagtgagctctgtccttgtctcctaatg

SEQ ID NO: 104013 - DNA, 201 bp, Homo sapiens
cagaccttctgcccttcctccatccgacagcccgcgggaggactcagactccagcacttccagcagcgcctgccctctatggacgacagcccggagctgcycacgggctgcagccagtatgccagggagctgccctcttcttccacaacagctggctctggggttctcaagatttattcaggatcgtgttaacggaggcgg

SEQ ID NO: 104014 - DNA, 201 bp, Homo sapiens
gctcgctttttcttaaaaatataaatgtatttatctgcattatcacgtccctggggcacccagctggccggcccgtgggccacagggcaggaagggaacakggcgtaagtctcagcaaggcggaggagagctccgccaggtggggatgtggggcagcctcacagggccccgtgctgggcctggtatcgggacagcacggcg

SEQ ID NO: 104015 - DNA, 201 bp, Homo sapiens; identical to SEQ ID NO: 16362

SEQ ID NO: 104016 - DNA, 201 bp, Homo sapiens
gctaaggacacaggttcagggccgagtcacgtgctgacgcctgcttccctcctcctcccttcctcccaggcccccgccatcggcgccctcacgttcccccggccccgcccccctcgcgcttgaaggcgcctgcgcgaagcgcggaggagggatgggaggactcacgtggcgcaggaatgtgccgctgggaagggtagggcc

SEQ ID NO: 104017 - DNA, 201 bp, Homo sapiens
ggcgtgaacccgggaggcggagcttgcagtgagtcgagatcgcgccactgcactccagcctgggcgacagagcgaaactccgtctcaaaaaaaaaaaaaataaaaaaaaataaaggactcaatctctttctcttcctcagggggaattgggttttttacatacaactgagtttttgcttacacattctttaatttctttta

SEQ ID NO: 104018 - DNA, 201 bp, Homo sapiens
gtgtcattccttggcacatactatctggtgctgttgctactgtgggttggatgctaggtacatgatttggcaataagcaaacttcttcctacatttgtctstcttttttttttttttttttttttttttgagacagagtcttggtctgttgcccaggctggagtgcagtggcatcatctcggctcactgtaacctccgcct

SEQ ID NO: 104019 - DNA, 201 bp, Homo sapiens
agtgatacacagggatgggctacagaaggaacaaaaagacaagaggaccggatgtggtggctcatgtctgtaatcctagcaatttgggaggctgaggcggktggatcacctgaggtcaggagttcgagaccagcctggctaacatggtgaaaccccatgtctactaaaaatacaaaaaattagccgggtgtggtgctgcgc

SEQ ID NO: 104020 - DNA, 201 bp, Homo sapiens
atgggctacagaaggaacaaaaagacaagaggaccggatgtggtggctcatgtctgtaatcctagcaatttgggaggctgaggcgggtggatcacctgagrtcaggagttcgagaccagcctggctaacatggtgaaaccccatgtctactaaaaatacaaaaaattagccgggtgtggtgctgcgcacctgtaatcccag

SEQ ID NO: 104021 - DNA, 201 bp, Homo sapiens
gcaccctgggaccggagtccactccttccagcgccgccagctgggaggccgccatcggggtcactcgggtgggaggactgactgtgagaggctgggtcccygggggtctggctgtctctggggactgtgatcatctgggggttctcctgataggcagaccctacgtggccatccgaggcctccggcggggccctgcagatg

SEQ ID NO: 104022 - DNA, 201 bp, Homo sapiens
gaggcaggagaatcgcttgaacccaggaggcagaggttgcagtgagctgagatcgtgccattgcactccagcttgggcaacaagagcaaaactctgtctcmaaaaaaaaaaaaaaaaaaaaaaagcacaggcagaggtcgcgtgcagtggctcatgcctataatcccagcactttgggaagccaaggcaggcagatcacct

SEQ ID NO: 104023 - DNA, 201 bp, Homo sapiens
tcctggacatttttgcctgcctgcttcccagctgtatcccgagcgcccagaactctgcctggcatgggaggcactcagtgaattgtagggagcaaatgaaagagatgaccaggaacctggccccgtaaggagtcgcctggaggtggccccacggctgtggtgggcctgggccatggccttcgtggtctcattgccagctgc

SEQ ID NO: 104024 - DNA, 201 bp, Homo sapiens; identical to SEQ ID NO: 16368

SEQ ID NO: 104025 - DNA, 201 bp, Homo sapiens; identical to SEQ ID NO: 16366

SEQ ID NO: 104026 - DNA, 201 bp, Homo sapiens
cagcacagggcaggcatacagtaggtgctcagtaagtactcgagaaagagcaaatggccccaggtccttcctatgccaggcgctccttggcagccccaccrcactttccccgtttgctgggcagcagcagtcgcagctgtcgtagctggtgagatacaatatctgttgcactaaatcatgacctccttggggaccgtggcc

SEQ ID NO: 104027 - DNA, 201 bp, Homo sapiens
agataagcagcagctcacctccttcagtcactcacatgccagagtaggagagagacttctgtgcaggcctgagaggcggagatgaatcgagcctcgccccrggctggcatggaacgctcactgcggacaggacatcatggggcttctggggagtgccctcccagagacagagtggacgctggagcttccctgggagccagg

SEQ ID NO: 104028 - DNA, 201 bp, Homo sapiens
tcgcttttccaactacaaatctgtatttgtaggctgaattttatttttatacttcaaccaaaagagcttatcaccacagattgaatgtgaaagcagatatkagagtcaacagtcttttattaaaaaggcagacactaaaaagatttgcaagaacaaaaagcagtgccattcttctcactaattcttgttggaaatgaagta

SEQ ID NO: 104029 - DNA, 201 bp, Homo sapiens
gccagttcacgatgtcacagagttatgcacttgtaaatgatccatttaaaagcacaagacagaaaaataaattttaacctaacaaagtagaaaaagtttaytgataggatttcagattctatattggcacctaccctttcaagaacctactgtttctcaagtttgatgtactgtggtgtcaaagaacaatattcacaatta

SEQ ID NO: 104030 - DNA, 201 bp, Homo sapiens
gaagtctgaacgcccagcaactataccacacaaggaaattacacaaagattctgcagagacaacatggattccagaaaacaaattaatgataggatcataractgagatgaaagaaagtgtagcagaattaagagaataatgtaaagaaacaatatcaccggccaggcatggtggctcacgcctgtaatcccagcactttg

SEQ ID NO: 104031 - DNA, 201 bp, Homo sapiens
atcctttatgatgaaatggggagtacacgtagcgcctttctactggggccaggcgtggtggctcatgcctgtaatcccagcactttgggaggccaaggcgrgcggatcacctgaggtcaggagttcgagaccagcctgaccaacacagtgaaaccccatctctactaaaaatagctgggtgtggtggtgtgcgcctttaat

SEQ ID NO: 104032 - DNA, 201 bp, Homo sapiens
agtaaaaaataaataaataaatacataaaaaataaagctgagctgtggtcagcacatctgttgaaactgggcttttcttatttaagccctcccatttttgrgtgtgacctcacaaaaacaaacactacaatttttttaaatagaggaaatcatggtgagaataaagaaaaagaataatggaaaaggtttcaaaagatgctg

SEQ ID NO: 104033 - DNA, 201 bp, Homo sapiens
actcggggggctgaggcagaagaatggcgtgaacctgggaggcagagtttgcagtgagccgagatcgcaccactgcactccagcctgggtgacagagcgakactccatctcaaaaaaaaaaaaggaatggccttgatgaggtggtaaaaattattagtctgtaaattgcaactctttgtaatatcctttatgatgaaatgg

SEQ ID NO: 104034 - DNA, 201 bp, Homo sapiens
gccctcccatttttgagtgtgacctcacaaaaacaaacactacaatttttttaaatagaggaaatcatggtgagaataaagaaaaagaataatggaaaagrtttcaaaagatgctgtgggagaaatctttcccgaactgaaggaaaacttgagttggatatccaaagaagggatcaaaaatagtcaatagaccaggcacag

SEQ ID NO: 104035 - DNA, 201 bp, Homo sapiens
tagtgattttctggacaggaacacacctgtgttcagggatgacgtttgctttttcatcagccagtcaggtaagggacacaggcattgtggccagccttgcrtcaggtcagctctgggctctctcctcttctccttcattcagttaagtcctctgcatggctaccctgtgctgcgaaccctctcttgcagcggtcatttaac

SEQ ID NO: 104036 - DNA, 201 bp, Homo sapiens
gctactcggggggctgaggcagaagaatggcgtgaacctgggaggcagagtttgcagtgagccgagatcgcaccactgcactccagcctgggtgacagagygagactccatctcaaaaaaaaaaaaggaatggccttgatgaggtggtaaaaattattagtctgtaaattgcaactctttgtaatatcctttatgatgaaa

SEQ ID NO: 104037 - DNA, 201 bp, Homo sapiens
agaagtccctgagaagggagcacacactgggcgtattgtccaaggggaggcccctacactgaggaggaggtggagcagacacaggcccatgcagggtgcgrgaggacgagaggggtccgggcctctcagagcccatcctgtcagacagcagtgccacccagtagctcccccagggctgtggcagcctggacactggcccag

SEQ ID NO: 104038 - DNA, 201 bp, Homo sapiens
agatcgagaccatcctggctaacatggtgaaaccccgtctctactaaaaatacaaaaaattagccgggcgtggtggtgggcacctgtagtcccagctactyggggggctgaggcagaagaatggcgtgaacctgggaggcagagtttgcagtgagccgagatcgcaccactgcactccagcctgggtgacagagcgagact

SEQ ID NO: 104039 - DNA, 201 bp, Homo sapiens
cctgagaagggagcacacactgggcgtattgtccaaggggaggcccctacactgaggaggaggtggagcagacacaggcccatgcagggtgcgggaggacragaggggtccgggcctctcagagcccatcctgtcagacagcagtgccacccagtagctcccccagggctgtggcagcctggacactggcccagagtccag

SEQ ID NO: 104040 - DNA, 201 bp, Homo sapiens
cctcaaggtcctcagaactctccagtcccctcacctttccctaagaccaggtgacttgtggctccctgaacacagcaagcaggtcctcacatctgagcatktgggcctgagcgccctttctgcctaagtcacaggcccaacacatcctgctcggcagcctcagcaacaacttcctcctgcccagaaggccttcctcaattg

SEQ ID NO: 104041 - DNA, 201 bp, Homo sapiens
aggcaggcagatcatgaggtcaggagatcgagaccatcctggctaacatggtgaaaccccgtctctactaaaaatacaaaaaattagccgggcgtggtggygggcacctgtagtcccagctactcggggggctgaggcagaagaatggcgtgaacctgggaggcagagtttgcagtgagccgagatcgcaccactgcactc

SEQ ID NO: 104042 - DNA, 201 bp, Homo sapiens
gtcccagctatcatttcctgtgactctcactgccccgtctacccagctggcacccctgccgggctccctgtgggcctgggcaagccgcacatcgctcaccrtggaattcacatgttctggtttgtggtacttcccgtggcaccgtctgttttgctttccctcgtgatgtcaccccggatgcgctgttctgcactcagctcc

SEQ ID NO: 104043 - DNA, 201 bp, Homo sapiens
aaaggctgggcacggtggctcatgcctgtcatcctagcactttgggaggtcgaggcaggcagatcatgaggtcaggagatcgagaccatcctggctaacayggtgaaaccccgtctctactaaaaatacaaaaaattagccgggcgtggtggtgggcacctgtagtcccagctactcggggggctgaggcagaagaatggc

SEQ ID NO: 104044 - DNA, 201 bp, Homo sapiens
cttcttattaataaattaatgtgtagaggggaaaggcacacatcctttcgtaactactgcacttttacctgcctggttttgaagaaccgcaggtttagagmgcatgtgttaccagagtgagcctcttatttctgtgcacacctatggtagattttatttgcatgctgtaatttataagaatgagcaaaggattagattttg

SEQ ID NO: 104045 - DNA, 201 bp, Homo sapiens
ggatgacgtttgctttttcatcagccagtcaggtaagggacacaggcattgtggccagccttgcatcaggtcagctctgggctctctcctcttctccttcwttcagttaagtcctctgcatggctaccctgtgctgcgaaccctctcttgcagcggtcatttaacccgtagagccatggattactgtcgccattgtacggg

SEQ ID NO: 104046 - DNA, 201 bp, Homo sapiens
cctgcctcagcctcccgagtagctgggactacaggcacccgccccacacccggctcattttttgtatttttagtagagacggggtttcaccgtgttagccrggatggtctcgatctcctgacctcgtgatccgcccgcctcggcctcccaaagtgctgggattacaggcgtgagcccccgtgcccggcccccatatcttca

SEQ ID NO: 104047 - DNA, 201 bp, Homo sapiens
gtgagtgcttctttggtttgtttttgtttgcattcctctcacactgtagccatttaaatgcttttgcagtggtactgtgctattgggggatcttttacacratttggctgacacagccaaagctaaaaattgcaaatttctcccacacatattcagaggggaaattggttccttgctgcatattatgcaaacaaaacatcc

SEQ ID NO: 104048 - DNA, 201 bp, Homo sapiens
tatcttcattttttttatttttatttttattttatttatttattttttttgagacggagtctcactctgtcgcccaggctggagtgcaggggcgcgatctyggctcactgcaagctccgcctcccgggttcacgccattctcctgcctcagcctcccgagtagctgggactacaggcacccgccccacacccggctcattt

SEQ ID NO: 104049 - DNA, 201 bp, Homo sapiens
gtctgggcaacaagagcaaaactccgtctggaaaaagagaaaaagcctttctgctctacactgaagtgtgatgcttgtctcaagagaagcagccatcccaytgagtagcaagctgattttggtgtttgttagacattttctcaaaatgaaaaatcagctgacgcatcagtagaagcaacccatggtatttgttgccaatga

SEQ ID NO: 104050 - DNA, 201 bp, Homo sapiens
caggtcagctctgggctctctcctcttctccttcattcagttaagtcctctgcatggctaccctgtgctgcgaaccctctcttgcagcggtcatttaaccygtagagccatggattactgtcgccattgtacggggagggcaagagatgtctaaggccatgcagtcagggggtgacagctgggattgggctggaaatccac

SEQ ID NO: 104051 - DNA, 201 bp, Homo sapiens
tcattcagttaagtcctctgcatggctaccctgtgctgcgaaccctctcttgcagcggtcatttaacccgtagagccatggattactgtcgccattgtacrgggagggcaagagatgtctaaggccatgcagtcagggggtgacagctgggattgggctggaaatccacgcacgttagtctttcccctgccccgtggcttc

SEQ ID NO: 104052 - DNA, 201 bp, Homo sapiens
aatcagagccctggaaatgcctgtgtggctggaaaggtttttttttttttttttttgagacggagtcttgctctgtcgcccaggctggagtgctgtggcgsgatctcggctcactgcaagctccgcctcccgggttcacgccattctcctgcctcagcctcccaagtagctgggactacaggcgcccgccactacgcccgg

SEQ ID NO: 104053 - DNA, 201 bp, Homo sapiens
ccactcaaatcagagccctggaaatgcctgtgtggctggaaaggtttttttttttttttttttgagacggagtcttgctctgtcgcccaggctggagtgcwgtggcgcgatctcggctcactgcaagctccgcctcccgggttcacgccattctcctgcctcagcctcccaagtagctgggactacaggcgcccgccacta

SEQ ID NO: 104054 - DNA, 201 bp, Homo sapiens
ctatcatagagcacaccaaccgggtcatcttcctggaggacgatgacatcgccgcagtggctgatgggaaactctccattcaccgggtcaagcgctcggcyagtgatgacccatctcgagccatccagaccttgcagatggaactgcagcaaatcatgaaaggcaggtgtcctccagagtccacgtgcggcagcctcggga

SEQ ID NO: 104055 - DNA, 201 bp, Homo sapiens
tgccagccttatccatccatgataaagcttcgtccagctttttaccttctggtttcaacagccatgaatggtccttgattagagctattaataattaggasttcataaattgattcttctattatttcttcattactagctgtatcacttcttagagaaacttgccttcataaagtatgtggttgttctgaaagacagatt

SEQ ID NO: 104056 - DNA, 201 bp, Homo sapiens
tggaacttcaggaagtgattctgtcgcgtgtagtgtagagataagaaagacaacacatgctgagaaaggaatggcaggtggccctcccagatgtgagcacrctgtccagcttttgggcaacggtggccagtgtgtgcggggcacggtatgagagcctcaccaggatcccatgcgataatcatgacagacctctggggaagg

SEQ ID NO: 104057 - DNA, 201 bp, Homo sapiens
attgtcccatcagcaccatccaatcccactcaaatcagagccctggaaatgcctgtgtggctggaaaggtttttttttttttttttttgagacggagtctygctctgtcgcccaggctggagtgctgtggcgcgatctcggctcactgcaagctccgcctcccgggttcacgccattctcctgcctcagcctcccaagtag

SEQ ID NO: 104058 - DNA, 201 bp, Homo sapiens
accctgcagccccattgtcccatcagcaccatccaatcccactcaaatcagagccctggaaatgcctgtgtggctggaaaggtttttttttttttttttttgagacggagtcttgctctgtcgcccaggctggagtgctgtggcgcgatctcggctcactgcaagctccgcctcccgggttcacgccattctcctgcctca

SEQ ID NO: 104059 - DNA, 201 bp, Homo sapiens
ctaacacggtgaaaccccgtctctcctaaaaatacaaaaaagtagccgggcatggtgtcgggcacctgtagtcccagctactcgggaggctgaggcaggakaatggcgtgaacccgggaggcagagcttgcagtgagtggagatcgcgccactgcactccagcctgggcgacagagcgagactctgtctcaaaataaataa

SEQ ID NO: 104060 - DNA, 201 bp, Homo sapiens
cttgccttcataaagtatgtggttgttctgaaagacagattgtttagaaaggcgagataaatgctttattctttcccttcacgattcagaataatgtgttsgttctcgagtatcttccagaggtgacattgtttggatcctgatttgaagaaaccggttataaaaagacagccgtgagattattggagatatgtaaacatg

SEQ ID NO: 104061 - DNA, 201 bp, Homo sapiens
aggcctgtaatcccagcactttgggaggccgaggcagggggatcacctgaggtcaggggtttgagaccagcctggctaacacggtgaaaccccgtctctaytaaaaacacaaaaattagtcgggtgtggtggcgggtgcctgtaatcccagctactcgggaggctgaggcaggagaatcgcttgaacctggtaggtggagg

SEQ ID NO: 104062 - DNA, 201 bp, Homo sapiens
caagcgctcggccagtgatgacccatctcgagccatccagaccttgcagatggaactgcagcaaatcatgaaaggcaggtgtcctccagagtccacgtgcrgcagcctcgggagccagcgcgcctggtggagctcctgacactctgcctggtcctagtagaggccacagccctcctgccctctgtggccaccagggcgggg

SEQ ID NO: 104063 - DNA, 201 bp, Homo sapiens
atcatgacagacctctggggaaggcacagctcttttctgtttacagaggcggaacctgagacaggaactccagggggttatgtatgttgcccacgggcacrggtctggcaagtgacagaggccccgagtccacctcaagcctaactggtgggccattggttttaatgactagattacatgactacccattttggaaataaa

SEQ ID NO: 104064 - DNA, 201 bp, Homo sapiens
ccattcaccgggtcaagcgctcggccagtgatgacccatctcgagccatccagaccttgcagatggaactgcagcaaatcatgaaaggcaggtgtcctccrgagtccacgtgcggcagcctcgggagccagcgcgcctggtggagctcctgacactctgcctggtcctagtagaggccacagccctcctgccctctgtggc

SEQ ID NO: 104065 - DNA, 201 bp, Homo sapiens
attgcaaatttctcccacacatattcagaggggaaattggttccttgctgcatattatgcaaacaaaacatcccagtgggatttgcaacccattcctccayttgctaggcactctggagaatgtgaagaatatctgtaagacacggatgaagaggctggacagctccgcctgcctgcatgctgtgggcgacaaggccgtgg

SEQ ID NO: 104066 - DNA, 201 bp, Homo sapiens
cgctccttggcagccccaccacactttccccgtttgctgggcagcagcagtcgcagctgtcgtagctggtgagatacaatatctgttgcactaaatcatgmcctccttggggaccgtggcctcccctttcttcattcatccaccacatatattaagaaccagtgccgtgccctgtcccatgtgctatccctggcctgccaa

SEQ ID NO: 104067 - DNA, 201 bp, Homo sapiens
cttgcagtgagccgagatcgcgccactgcactccagcctgggcaacagagcgagactccgtctcaaaacaaaacaaaacaaaacaaaacaaaacaaaacaaaaccctccatattattttatttgtttatgcctttggaacttcaggaagtgattctgtcgcgtgtagtgtagagataagaaagacaacacatgctgagaaa

SEQ ID NO: 104068 - DNA, 201 bp, Homo sapiens
gggggtgggggtacactttctccctacaaggagagcctctctgtctgcacccatttctgtccccttacaacctctaccccacagggcagcctgagcaaacktctaagaacatgaatcagcccctgtgatcatcccgctgctcaaggccctccaatggtttcctactgttcttagaataaaatccaaactccctgccacagc

SEQ ID NO: 104069 - DNA, 201 bp, Homo sapiens
ggggatcttttacacgatttggctgacacagccaaagctaaaaattgcaaatttctcccacacatattcagaggggaaattggttccttgctgcatattakgcaaacaaaacatcccagtgggatttgcaacccattcctccatttgctaggcactctggagaatgtgaagaatatctgtaagacacggatgaagaggctg

SEQ ID NO: 104070 - DNA, 201 bp, Homo sapiens
gcttgcagtgagccgagatcgcgccactgcactccagcctgggcaacagagcgagactccgtctcaaaacaaaacaaaacaaaacaaaacaaaacaaaacaaaaccctccatattattttatttgtttatgcctttggaacttcaggaagtgattctgtcgcgtgtagtgtagagataagaaagacaacacatgctgagaa

SEQ ID NO: 104071 - DNA, 201 bp, Homo sapiens
gtctccatctcctgacctcatgatccgccctcctcagcctcccaaagtgctgggattacaggtgtgagccaccgcgcccatccagatgtttcttttttttwaaaaaaaaggcatgaatgcctgaaaggagaggaaataattatttgtaggcaatactattacacatttttaaatccagccaaaaggctgttagaactgata

SEQ ID NO: 104072 - DNA, 201 bp, Homo sapiens
tggagtgcagtggtgtgatctcggctcactgcaagctccgcctcctgggttcaagtgattctcctgcctcagcctctgagtagctgggactacaggtgccygccaccacgcccggctaattttttgtatttttagtagagatggggtttcactgtgttagccaggattgtctccatctcctgacctcatgatccgccctcc

SEQ ID NO: 104073 - DNA, 201 bp, Homo sapiens
ttacgtgtgtgttgtacttccttgtgtgtgtgtgtgtgtgtgtgtgtgtgtgtgtgtgttgtaagtacttccttacctgcacaacaatattctccaggctygtcttgtccatcccctgtcccggccctagaatcaaccatttctccagggatccctggttccttttatggcgaatgacattagagaacaagatctgggctc

SEQ ID NO: 104074 - DNA, 201 bp, Homo sapiens
ctacaaacagcagatgattctcaaaaactttcagtgcactgagaatttagctgaaatgacactttggttttattgacatctgaaagttgctggcattttgstgactttctgcgacagaaaatttacaatatttcctccctgtctctctcctttccttctctgcttcctttttcattcagccactagtggaaatgcccagtg

SEQ ID NO: 104075 - DNA, 201 bp, Homo sapiens
gttttacttggcccagatcaaggtaccttcagggctgagcctcctccagaggctctgaggagaatctgtcgccggcctctcccagctcctggggctgccgygttccttggcttgtggctgtgtcgctccagtctctgtgctggctgcagccctccactgtctcctcaggggtttcccaagttcagaaaaaccttcttttta

SEQ ID NO: 104076 - DNA, 201 bp, Homo sapiens
acctgcctggttttgaagaaccgcaggtttagagagcatgtgttaccagagtgagcctcttatttctgtgcacacctatggtagattttatttgcatgctrtaatttataagaatgagcaaaggattagattttggaatcaggatatcatttaaatcatgagatccttttatttatttatttatttatttatttagagatg

SEQ ID NO: 104077 - DNA, 201 bp, Homo sapiens
attcttctttgcttctgatgcaaggtaactgagccttcttctcttcgcttcctgggattacataatcaaagaatgcctgtctaaacactgccggttcttaytcatccttccatgtgagctatcgtggctcagcaagtcgcagggccaaagaagagttcagccatccctgggcctgggcctggagtccttgtcctaggagca

SEQ ID NO: 104078 - DNA, 201 bp, Homo sapiens
tttacctaattataattatgcaattttgtaattttatattcttctcttttcacttggcatttctaggatcctaaactcattcattctttttttttttttttcgagatggagtctcgctctgtcacccaggctgaagtgcagtggcgcgatctcagctcactgcaagctccgcctcctgggttcacgccattcttctgcctc

SEQ ID NO: 104079 - DNA, 201 bp, Homo sapiens
aggagattcgacgatgccgacggctcatcgtgattggctgtggaaccagctaccacgctgccgtggctgtaagtgtgacacatgtgcgtggggaagtcgayggcagtctaggaccagacactggccttcagttttatcactcatgtggccttctgaatttggctaagcccttgtacccattcccatgagctagcgtgagaa

SEQ ID NO: 104080 - DNA, 201 bp, Homo sapiens
gtcactgaaagagggatgtgtatttcctccggatcccattgtagtagccgctgccctagacatccctggtgctaatccctggttccactgtagttgctgcygtaaacatctgtgctaatcactgtaaacaaagtgtgcttaacagaagtcttgaggcctggagtttgcagagagttctcaagccttgaaatcatctctctt

SEQ ID NO: 104081 - DNA, 201 bp, Homo sapiens
tacagaggctacgactcggcaggtgggtgtgcggccgcccgcctcgtggctggggaccgggctccgctgctgtggtctcacccatctccactgcaggggggtttacaaccagggcattttttctgctactttttaacgtctcttttcaatataaaaataacacttgtccgttaaagaaattcgaaaactatggaaaaatag

SEQ ID NO: 104082 - DNA, 201 bp, Homo sapiens
ggagattcgacgatgccgacggctcatcgtgattggctgtggaaccagctaccacgctgccgtggctgtaagtgtgacacatgtgcgtggggaagtcgacrgcagtctaggaccagacactggccttcagttttatcactcatgtggccttctgaatttggctaagcccttgtacccattcccatgagctagcgtgagaaa

SEQ ID NO: 104083 - DNA, 201 bp, Homo sapiens
taaacatctgtgctaatcactgtaaacaaagtgtgcttaacagaagtcttgaggcctggagtttgcagagagttctcaagccttgaaatcatctctcttcwcatctgacatgaacctccttctcaatagcatttctctcttaacttttctttcagaatttgttgtcatccacaatgggatcatcacaaattacaaagatct

SEQ ID NO: 104084 - DNA, 201 bp, Homo sapiens
ggcctaccttgaacataaggattctgcaggggccaaggggcatgagatggttttattcttgctgtcataaaagtagtgcttttttttttttttttttttttgagacagagtctagctctgtcgccaggctggagtgctgtggcacgatctcggctcactgcaacctccagctccctggttcaagcaattctcctgccccag

SEQ ID NO: 104085 - DNA, 201 bp, Homo sapiens
attcccatgagctagcgtgagaaatgacacggagcccttttatcttcgaggtggcctgtgggtgaccgaagtcccctcgccacctggacagtgaggttccrtgtcacaaactgtccctagaagcccagctgccccatgtccctgtcgtgcctgtgactgactttagtctccatgcttgcttgttggcttcagacgcggcaa

SEQ ID NO: 104086 - DNA, 201 bp, Homo sapiens
atggcaaggaagacaaaaatagcctaccgagaaaattgcccttggctgattttaaaggaaaacgcctgtaactgctcagaaagcatagtgtacatatttttatatataaatcccccaccttaatacatatgtgcaaacatatcctgtgtacagtagctttcagtaagaatttaagtataatttatagtactatttaatttt

SEQ ID NO: 104087 - DNA, 201 bp, Homo sapiens
aagatttttgaaatgttttaattacggataattccaagcctttataaaagtagaattttcatataatgaatatcctagccttatccagcccatcttgtgcyggtcggacacactcatattaacccctcgtctccatggggttactttgaagccaatcccgggcatcatgatattcatccatataaatacttcaggctgcat

SEQ ID NO: 104088 - DNA, 201 bp, Homo sapiens
ccccttgggtgatggacacaaactcgcctgttctcccagtccttcccagctgcctccctcactcatgggactctgcacaacagaggcaggagctgaccttyctaggaagaaggggagggacctggggcagtgccacaaggacccagacacgagcacgggccctgcagagaggagggggtggcaggcacgctgggctggggc

SEQ ID NO: 104089 - DNA, 201 bp, Homo sapiens
taaaacaattagccgggcgtggtggcgggcgcctgtagtcccggctactcaggaggctgaggcaggagaatggtgtgaacccgggaggcggagcttgcagygagctgagatcgcgccactgcactccagcctgggcgacagagcgagactccgtctcaaaaaaaaaaaaaagaaaaagaaaaacgtatgaccacggtgtta

SEQ ID NO: 104090 - DNA, 201 bp, Homo sapiens
ccgggcgtggtggcgggcgcctgtagtcccggctactcaggaggctgaggcaggagaatggtgtgaacccgggaggcggagcttgcagtgagctgagatcrcgccactgcactccagcctgggcgacagagcgagactccgtctcaaaaaaaaaaaaaagaaaaagaaaaacgtatgaccacggtgttactaccacaacta

SEQ ID NO: 104091 - DNA, 201 bp, Homo sapiens
ctctacaaacagcagatgattctcaaaaactttcagtgcactgagaatttagctgaaatgacactttggttttattgacatctgaaagttgctggcattttgctgactttctgcgacagaaaatttacaatatttcctccctgtctctctcctttccttctctgcttcctttttcattcagccactagtggaaatgcccag

SEQ ID NO: 104092 - DNA, 201 bp, Homo sapiens
acaggggagagctctctgcacggtcaggctggtggctgctggtcactgaaagagggatgtgtatttcctccggatcccattgtagtagccgctgccctagwcatccctggtgctaatccctggttccactgtagttgctgccgtaaacatctgtgctaatcactgtaaacaaagtgtgcttaacagaagtcttgaggcctg

SEQ ID NO: 104093 - DNA, 201 bp, Homo sapiens
taatcccagcactttgggaggccgaggcagggggatcacctgaggtcaggggtttgagaccagcctggctaacacggtgaaaccccgtctctactaaaaayacaaaaattagtcgggtgtggtggcgggtgcctgtaatcccagctactcgggaggctgaggcaggagaatcgcttgaacctggtaggtggaggttgcagt

SEQ ID NO: 104094 - DNA, 201 bp, Homo sapiens
gcagggggatcacctgaggtcaggggtttgagaccagcctggctaacacggtgaaaccccgtctctactaaaaacacaaaaattagtcgggtgtggtggcrggtgcctgtaatcccagctactcgggaggctgaggcaggagaatcgcttgaacctggtaggtggaggttgcagtgagccgagatcgagccactgcactcc

SEQ ID NO: 104095 - DNA, 201 bp, Homo sapiens
ccgtctctactaaaaacacaaaaattagtcgggtgtggtggcgggtgcctgtaatcccagctactcgggaggctgaggcaggagaatcgcttgaacctggkaggtggaggttgcagtgagccgagatcgagccactgcactccagcctgggtgacacagcaagactttgtctcaaaaacaaaatagaaataaataaataga

SEQ ID NO: 104096 - DNA, 201 bp, Homo sapiens
ccggcctctcccagctcctggggctgccgcgttccttggcttgtggctgtgtcgctccagtctctgtgctggctgcagccctccactgtctcctcaggggwttcccaagttcagaaaaaccttctttttataactttatggtatagcatcagtaaacagtgcttttcaattgagagattatttttgtatctagcaaaatta

SEQ ID NO: 104097 - DNA, 201 bp, Homo sapiens
ccctaaacaaataagtcccatggaattcatatatattcttgcaagaaaagttaatttttaacagtacacaccaagttacctgtgtttaaaagcatgaaccktattctttaaatcatgttaacagatcatgacacacatcaggtgcacagtaaatgtttattgagggactaaaccttatacggttaaatgaggcttctggac

SEQ ID NO: 104098 - DNA, 201 bp, Homo sapiens
agcactctgcagggcctcaccagctcaccccgcccaatttggaagggaaggcgtcccccagaaaacggaaggagagccccatccaccctgctcagcagagmagcttggtggtagcacaggagccagggctactcatgcatcctagtgatcagggtcttgagggagtgaggtttttgcgagggcctcttccttgggtctggc

SEQ ID NO: 104099 - DNA, 201 bp, Homo sapiens
acacgcgctgggccacccacggggtccccagtgctgtcaacagccaccctcagcgctcagacaaaggcaacggtatgtggcatgcttccccgtccccatgrttccacctcaccctgagctgtgtcagggccagtgcccgccaaagcaggttccgcgcccacctctaactgacttctcagcctacttcatcttcccaagaga

SEQ ID NO: 104100 - DNA, 201 bp, Homo sapiens
tagccgagggcctgggagcgcctgcagcggggaagtgtcccgaggggctcaccctagctaggcaggagcagggctgggggcagctgcggcctggaggaggyaggggcttcctcacttgctgttaagcctggccgcagtcacagcctctttcagagcagatttcctgaaaactgtacagctctccaacctgccataaacgga

SEQ ID NO: 104101 - DNA, 201 bp, Homo sapiens
cagtcactcacatgccagagtaggagagagacttctgtgcaggcctgagaggcggagatgaatcgagcctcgccccaggctggcatggaacgctcactgcrgacaggacatcatggggcttctggggagtgccctcccagagacagagtggacgctggagcttccctgggagccagggccaaaccccagagcaggcagttg

SEQ ID NO: 104102 - DNA, 201 bp, Homo sapiens
ggacgaggaaggagatcttcgaaaccctcatcaagggcctgcagcggctggagtacagaggctacgactcggcaggtgggtgtgcggccgcccgcctcgtrgctggggaccgggctccgctgctgtggtctcacccatctccactgcaggggggtttacaaccagggcattttttctgctactttttaacgtctcttttca

SEQ ID NO: 104103 - DNA, 201 bp, Homo sapiens
gcggagatgaatcgagcctcgccccaggctggcatggaacgctcactgcggacaggacatcatggggcttctggggagtgccctcccagagacagagtggrcgctggagcttccctgggagccagggccaaaccccagagcaggcagttggggaagggccatcatagagaatggtcaattccaggccctcggggcctgaca

SEQ ID NO: 104104 - DNA, 201 bp, Homo sapiens
ccctgctcatcggagtccggagcaaatacaagctctccacagaacagatccctatcttatacaggacgtgtaagtttctcaagaagtaccggaacagcacrgctgctggtgtcgcaggactcggcagctgctctggcacagtcagctcccctctgaggcaaggaaaccccactctgagccagacccaacaggcgcacagct

SEQ ID NO: 104105 - DNA, 201 bp, Homo sapiens
tcgccaaatgccagaacgccctgcagcaagtcacggcccgccaggtgagggctctccactggactgggccagctctctcctgcttttccccatgcatgccyacctcaccactgtctgccagtaccagtgatggatggtctggccagtgagtggctgtgaccacacaccctcccccgggccccctgtggggagtgcacacac

SEQ ID NO: 104106 - DNA, 201 bp, Homo sapiens
atgagatcaaggtgacttcaacaaggtgatttttaaagaacattttataataaaagtgtccattttaagaagatttacatacctttgtggccagttcacgrtgtcacagagttatgcacttgtaaatgatccatttaaaagcacaagacagaaaaataaattttaacctaacaaagtagaaaaagtttattgataggattt

SEQ ID NO: 104107 - DNA, 201 bp, Homo sapiens
agggtctattttatgatgctatttctctgctctagggtcgccccattatactgtgctccaaggacgatactgaaagttccaagtttgcgtataagacaatygagctgccccacactgtggactgcctccagggcatcctgagcgtgattccgctgcagctgctgtccttccacctggctgttctccgaggatatgacgtgc

SEQ ID NO: 104108 - DNA, 201 bp, Homo sapiens
gcacctaccctttcaagaacctactgtttctcaagtttgatgtactgtggtgtcaaagaacaatattcacaattatttgtaaaataatttaaatactcctygcttttccaactacaaatctgtatttgtaggctgaattttatttttatacttcaaccaaaagagcttatcaccacagattgaatgtgaaagcagatatta

SEQ ID NO: 104109 - DNA, 201 bp, Homo sapiens
cacctaccctttcaagaacctactgtttctcaagtttgatgtactgtggtgtcaaagaacaatattcacaattatttgtaaaataatttaaatactcctcrcttttccaactacaaatctgtatttgtaggctgaattttatttttatacttcaaccaaaagagcttatcaccacagattgaatgtgaaagcagatattag

SEQ ID NO: 104110 - DNA, 201 bp, Homo sapiens
aatgtgaaagcagatattagagtcaacagtcttttattaaaaaggcagacactaaaaagatttgcaagaacaaaaagcagtgccattcttctcactaattyttgttggaaatgaagtaatgtaatagatttagtgttgttattttaaagtgaatatttttaaatttctcattgttagtttctttctttctttttcttcttt

SEQ ID NO: 104111 - DNA, 201 bp, Homo sapiens
acttactgatttaaaacaacagaaatgtattcgctcacagttctggagaccacaagtccagaatcggttttacttggcccagatcaaggtaccttcagggmtgagcctcctccagaggctctgaggagaatctgtcgccggcctctcccagctcctggggctgccgcgttccttggcttgtggctgtgtcgctccagtctc

SEQ ID NO: 104112 - DNA, 201 bp, Homo sapiens
ttcttttaattaaatatatatcacttccctctttgtttttggtgaaactgtaagaatgaaagggacactggcaacttttctattaaaaaatagaaatggcygggcacggggactcacacctgtaatcccagcactttgggaggccgaggtgggtggatcacgaggtcaggagatcgagaccatcctggccaacatggtaaa

SEQ ID NO: 104113 - DNA, 201 bp, Homo sapiens
ccagtgagcccagccaagagggtagagcttatgctaagtcctcttatcacacacagaacaatacataaagagggcaggagcagactctcggaggtgatagrttgatggcatagacggcagtggtggtttcatgggggcacacgtgcctccaagctcatcgagttgtagacattaagtatgcgcagcgttgtgtttgtcagc

SEQ ID NO: 104114 - DNA, 201 bp, Homo sapiens
agactctcggaggtgataggttgatggcatagacggcagtggtggtttcatgggggcacacgtgcctccaagctcatcgagttgtagacattaagtatgcscagcgttgtgtttgtcagctccttcattaaaaaaggagcccccatcagtctttgggacccttctccggtcgctgttgtctgtgggggtggtctgtggtgg

SEQ ID NO: 104115 - DNA, 201 bp, Homo sapiens
tgcacaggcttataccagtcagttcatctctctggtgatgtttggtttgatgatgtctgaagaccgaatttcactacaaaacaggaggcaagagatcatcygtggcttgagatctttacctggtatgttctagaattcagctttccatgttttcagatctagtggactgttgctggccattctctgttgactctcacctgt

SEQ ID NO: 104116 - DNA, 201 bp, Homo sapiens
cacactgtagccatttaaatgcttttgcagtggtactgtgctattgggggatcttttacacgatttggctgacacagccaaagctaaaaattgcaaatttmtcccacacatattcagaggggaaattggttccttgctgcatattatgcaaacaaaacatcccagtgggatttgcaacccattcctccatttgctaggcac

SEQ ID NO: 104117 - DNA, 201 bp, Homo sapiens; identical to SEQ ID NO: 16388

SEQ ID NO: 104118 - DNA, 201 bp, Homo sapiens
aagcagatattagagtcaacagtcttttattaaaaaggcagacactaaaaagatttgcaagaacaaaaagcagtgccattcttctcactaattcttgttgraaatgaagtaatgtaatagatttagtgttgttattttaaagtgaatatttttaaatttctcattgttagtttctttctttctttttcttctttttttttt

SEQ ID NO: 104119 - DNA, 201 bp, Homo sapiens
aagtgatgcggtttcaaaagctcctcttaaaccccagcatttgtcttcatgaatattgctttaaagtcggcctgactggttttctccctctgctccgtgcrtggcccagagctgatcaaggaagtgctgtctctggaggagaagatccacgacttggccctggagctctacacgcagagatcgctgctggtgatggggcgg

SEQ ID NO: 104120 - DNA, 201 bp, Homo sapiens
tatgacgtgcgtctaaaaactgcacctaacagcagagaggagagacataaccccagagttcctttctgttctttaaatacttggagtaaatagtcatagartaaataattttatttaaagtagctttcttttttttttttttgagattgagtctcgctctgtcgcccaggctggagggcagtggcacaacctcggctcact

SEQ ID NO: 104121 - DNA, 201 bp, Homo sapiens
tgtttattgagggactaaaccttatacggttaaatgaggcttctggactaaggaatctgcctccaagacgcaggtctctaggttggtgaccatggtgaacrtctgtctcttgtttttaagtactctgaaaattgtctgtgagaggtagcatgttgctgagatctttggggtcctgaacagtcactttctttcattttaggt

SEQ ID NO: 104122 - DNA, 201 bp, Homo sapiens
gcagagatcgctgctggtgatggggcggggctacaactatgccacctgcctggaaggagccctggtgagcccccacccccagcccccacccccacggaggrcaggcacaggagaccctgaggagccagcgggaaggagggcagggcgttgggcttggggagggccgggcctaaggaccccttggccagtcctgtgagcctg

SEQ ID NO: 104123 - DNA, 201 bp, Homo sapiens
gcccgatggttttaaatccttgtcgactcttaataggaagcacgtccgatagacgacgggaggaacactaacgcagtggagataccaacgaaatatcacartgcgaggagcccttgggataaatgccctgcctgggcccattgccattagccgagggcctgggagcgcctgcagcggggaagtgtcccgaggggctcaccc

SEQ ID NO: 104124 - DNA, 201 bp, Homo sapiens
gagcaccagctctccaccaggtttctagccctgggcacacagagatgggtgaggcaggtgcctgcccccagggatctcccaatctactgaggagaaagggrcagggcgcctggggtgtgcccctccggctgtccaggcactgccagggtccacttggaacagctcactcagacctcatgagctgcttctgagaggttggcg

SEQ ID NO: 104125 - DNA, 201 bp, Homo sapiens
tgagccaagatcatgccactgcactccagcctgggagacagaacgagactcccatctcaacgaaaaaaaaaaaaaagaaagaaagaaaaaaaaaagaaagmcaatgccagttacaagtggttaccggaaacattcagagttgatttccttggtcttggtggggagtgcagggctgtcctcactgagctccatctcctgcac

SEQ ID NO: 104126 - DNA, 201 bp, Homo sapiens
tgcactgtcagtccccagatgactctgcgtcatgggtgggggctgagctgcggtggctgaacgtgctggcgggagatgcacattgcagctatgcctccgcmtgagtctgctgaaggaagaagcgtttaggtggctgctggcacgagcccatggtcctctggtcactgggaggccggcactgcagctgtctgcgcctccaga

SEQ ID NO: 104127 - DNA, 201 bp, Homo sapiens
gatctacctgaacacaggaaaaaaattaattcaaataacaccccagtttgtgtgattttgcttggaaccactctttagaagttattaatgggcaaatgctyaatcagataattaactgaaggtgtagctaagctgaatacgatgctgtcgttatacacgtggctggctagggaggagcagggggtgagctaggctgactcc

SEQ ID NO: 104128 - DNA, 201 bp, Homo sapiens
ggatgatggtctgagtatgtatgacaagtgatactgattttccttttatggttgttttcttttggcatgaattcatttaaatttttgaaaatttaatcaawttctgcagaagaaaaagtagtgattatgctattagtacaaggatactgcaagaatcgtgaagatgctcctagaaagaaccagataagctcttcactttac

SEQ ID NO: 104129 - DNA, 201 bp, Homo sapiens
attaactgaaggtgtagctaagctgaatacgatgctgtcgttatacacgtggctggctagggaggagcagggggtgagctaggctgactccgacttgtttktcctaaggggtggctgtgcgtgggactggagagagacaacagcagtgcccggggctggtgtggggacacagaggttgtgtcccgggctggtgcatgctct

SEQ ID NO: 104130 - DNA, 201 bp, Homo sapiens
tgcttttccccatgcatgcccacctcaccactgtctgccagtaccagtgatggatggtctggccagtgagtggctgtgaccacacaccctcccccgggccscctgtggggagtgcacacacttggaaaggagctggtcagcccgcagctgtcccacacagctctttggtggggcccagggacccacactgctgtgagcagc

SEQ ID NO: 104131 - DNA, 201 bp, Homo sapiens
tggggctgccgcgttccttggcttgtggctgtgtcgctccagtctctgtgctggctgcagccctccactgtctcctcaggggtttcccaagttcagaaaamccttctttttataactttatggtatagcatcagtaaacagtgcttttcaattgagagattatttttgtatctagcaaaattagcttataaagagtgatta

SEQ ID NO: 104132 - DNA, 201 bp, Homo sapiens
gcaggctcctctgtctttctgtaagagcctggcgtgggatcacatgcatccgcggcacctccagctttgatcttgtttctgcaaggaggtggcaggaattrtcatccctgcttcaccaagtgacctttcccagtgtatgagaggccacagctcctcagcagcccttgcccaaggcccaggggactctccacacctgtgggc

SEQ ID NO: 104133 - DNA, 201 bp, Homo sapiens
gggtgcagagccctattgttatagggatgcgctgccgtcgaggctgggtggagacctagagtgcccctgtgccccaccagcgcctcctctgctgccaaacrctcagcctccgccatctaaccttgtgggttggtcacatgtggggacttgactggactggaggaggcccggcctaggagggtgggagtgagacaggttacc

SEQ ID NO: 104134 - DNA, 201 bp, Homo sapiens
gcaacagatggtgggagaaagacagatctctgaggggtgagtcctggcctgggtgggtggtgacatagcttccagagccaacctgtcctgtgtggagcacyggctgggcctctccctggaacggtcccctcactcagagtgagggctgggctttcgttgggaagccgatgcttggaaagttggagagatttttcaaaacaa

SEQ ID NO: 104135 - DNA, 201 bp, Homo sapiens
atttaaatgcttttgcagtggtactgtgctattgggggatcttttacacgatttggctgacacagccaaagctaaaaattgcaaatttctcccacacataytcagaggggaaattggttccttgctgcatattatgcaaacaaaacatcccagtgggatttgcaacccattcctccatttgctaggcactctggagaatgt

SEQ ID NO: 104136 - DNA, 201 bp, Homo sapiens
gagcttcagaggccctgcctgcgtgccccttcatggtgtctttgctcctgacttcctgtgtgatctctcgggccttgtgcagagaaagtgctggaagcccyagaatatagcagtgagccggggccaagaggctacagtctcctctcggagggctcatgtcgaatcccttctggaatccccttgagtttttctcggtccctc

SEQ ID NO: 104137 - DNA, 201 bp, Homo sapiens
gcaacccatggtatttgttgccaatgataaactttaagctcccaggcaaaacttttgagtgttagaaaacacctctgttaccatgagcttgaccagttccyaacatttaaagacttctctagggccgggcacggtggctgatgcctgtaatcccagcactttgggaggccgaggtgggtggatcatgaggtcaggagttca

SEQ ID NO: 104138 - DNA, 201 bp, Homo sapiens
ggcccattgccattagccgagggcctgggagcgcctgcagcggggaagtgtcccgaggggctcaccctagctaggcaggagcagggctgggggcagctgcrgcctggaggaggcaggggcttcctcacttgctgttaagcctggccgcagtcacagcctctttcagagcagatttcctgaaaactgtacagctctccaacc

SEQ ID NO: 104139 - DNA, 201 bp, Homo sapiens
gagtgagacaggttaccaagctttctgggcaggtgggtgatgccaagtcagggacctgggactcaggagctggcctttccatcctgtgctccaggcgtccrtcctgtgggacctaaacaggatcctccaccactgggaaagggctagatttggggatcctacctcagatgctgggcagacacccagcactgggcgtcaaag

SEQ ID NO: 104140 - DNA, 201 bp, Homo sapiens
gaggccacagccctcctgccctctgtggccaccagggcggggctgcaggtagcctgtggcttgcacaggtgaggggatgtggggaggctggcctggcaccyccaagcgggggctcctgtgtgcagccagccgccaggtctttcctactggaactgagcccagtgtgtcagctgccttccttcaccgactccgcgggacaca

SEQ ID NO: 104141 - DNA, 201 bp, Homo sapiens
ggggccaggcgtggtggctcatgcctgtaatcccagcactttgggaggccaaggcgagcggatcacctgaggtcaggagttcgagaccagcctgaccaacrcagtgaaaccccatctctactaaaaatagctgggtgtggtggtgtgcgcctttaatcccagctacttgggaggctgagtcaggagaatcacttgaacctg

SEQ ID NO: 104142 - DNA, 201 bp, Homo sapiens
ggtttccccaggttctgcggccaagcagctccgatgggaactacctggagttaggtcaggtctcatagggcaggggcacagctttccataagactgccctygattcaggcacctgttgcaagccaggggtccacccacacatctgagcaactgactatgaatccaaggattcccactctcccctgaagttcagtaattttc

SEQ ID NO: 104143 - DNA, 201 bp, Homo sapiens
caatggttccagcaacagccactgggggctctttcagttggctcttgtgtctctttgacatagccccatctgtgtgtgtgtgtgtgtgtgtgtgtgtgtgkgtgtggtaagtacttccgtgtgtgtgtgtggggggggtaagtacttccgtgtgtgtacttccttacgtgtgtgttgtacttccttgtgtgtgtgtgtgtg

SEQ ID NO: 104144 - DNA, 201 bp, Homo sapiens
tcgcccgggagctcccctgagctgctagctccagtgtccagagtttgtattgtggttttattaagtaggcaggatggagtgaaccattggccatgtgatcraactcagtcgccagccccacttttgtccttggaggttgggaggtcagactgacaggctcatgtctcaaagccccaaccttctaatcatgtggctggcctt

SEQ ID NO: 104145 - DNA, 201 bp, Homo sapiens
cattttaaataccatttccattttgttgacaagtgaagaaaaaccagtacagatacaccgaccatccggcccaccaccttatgacgcaggagctgctgccrtgttcacctttgggtttctgatcccaccagagcctcagactattttataaattggtgggagacattaacaaaagaacagaggtggagctaatatgaaaat

SEQ ID NO: 104146 - DNA, 201 bp, Homo sapiens
gagtgaaccattggccatgtgatcaaactcagtcgccagccccacttttgtccttggaggttgggaggtcagactgacaggctcatgtctcaaagccccarccttctaatcatgtggctggcctttctagcagggccagacgccatcctggaactatctacaggcccaccacgagtcgtcaccttagcataaagttaggta

SEQ ID NO: 104147 - DNA, 201 bp, Homo sapiens
ggggccaagaggctacagtctcctctcggagggctcatgtcgaatcccttctggaatccccttgagtttttctcggtccctctccttctgggacctttccmggttcattttatctatcaattttgaggatagggccctgaaaggctgtctggaagctctgggtgggtgaccacagggcacatgaccaaactgggtggtggg

SEQ ID NO: 104148 - DNA, 201 bp, Homo sapiens
ccccaaccttctaatcatgtggctggcctttctagcagggccagacgccatcctggaactatctacaggcccaccacgagtcgtcaccttagcataaagtyaggtatagtccaagggacctcccataaataacaaagatgcttttgtcacatgggaaagtccagaagccaggagctcccttcctggaaccggccacaaaga

SEQ ID NO: 104149 - DNA, 201 bp, Homo sapiens
gagtaacagaaaggggaaaactttcccccaaagaagtttggtgttatttactgccccgttctcagctcatttaaaatcctgtcgcctgccagtgatgcctytcttacgccgtgggcagccctgggagtggaggctaggaaagagcagtagatcaaggtagaaagtgacagatgccttgaaaaggggacggaaagttggaaa

SEQ ID NO: 104150 - DNA, 201 bp, Homo sapiens
ctgcctgtcaagccacagagacccacagtcctgcgttatctggccctttcctcctgtttcagtgagttccaggcactccagctttccttctgcgtcccackctcattgcgcccgcgcccgcctccgggcctttgcgctggccgctcctgctgtctggaatgcccttcccacagaatgctccgccgagggttgtcccctcat

SEQ ID NO: 104151 - DNA, 201 bp, Homo sapiens
ggcaactctgctctctatttaaaagcgtgcacaatcaaaagtactatgcaattttaggacaataaagaacatacagtttttttgtgtgtgtttgcattttrttaacctcattctttttgtgtactttgaattttgaggactgtgcaggagctcggcagtgtttggaggggcagccctgtttgttagtaacattggcctcgt

SEQ ID NO: 104152 - DNA, 201 bp, Homo sapiens
ttaaccgagagttctggtggcaccgtgctcccattgtaagggtctggcactcagggacctcctgcctctgtgtccctcttgtccttgctgtgggtcccagygagcggagctgcttatgcttggctgaacgtggctgtctcagacccagctcaaaggctaccttctctggcattcctccatctgttcattcattcactcaac

SEQ ID NO: 104153 - DNA, 201 bp, Homo sapiens
taaccgagagttctggtggcaccgtgctcccattgtaagggtctggcactcagggacctcctgcctctgtgtccctcttgtccttgctgtgggtcccagcragcggagctgcttatgcttggctgaacgtggctgtctcagacccagctcaaaggctaccttctctggcattcctccatctgttcattcattcactcaaca

SEQ ID NO: 104154 - DNA, 201 bp, Homo sapiens
ctcaacatggatttattgagcacctaagatgtgccaggccctgggccaggtgctggggactcagcaatggatgagacagatgtggtcccatcctccagaasgttacaatccagcggggagccgaagaaaaagacaaggaagcaagtgcagcgtggaataaccagggctatgtggctggagaaggtggtgggaaagatctgc

SEQ ID NO: 104155 - DNA, 201 bp, Homo sapiens
gagacataaccccagagttcctttctgttctttaaatacttggagtaaatagtcatagagtaaataattttatttaaagtagctttcttttttttttttttgagattgagtctcgctctgtcgcccaggctggagggcagtggcacaacctcggctcactgcaagctccacctcctgggttcaagcgattctcctgcctca

SEQ ID NO: 104156 - DNA, 201 bp, Homo sapiens
ctcaagggataatttctcaagctccttgccctgtggcaggcactattgtagccatcaccctgtttcactgacagggaaactgaggtccgaacattcagtgrcttgctggagagtgcactgaaatcaaggggtggagctggggttcgaggtgggttccggcactggccacggcctctgtgcttctgggtatgccttggctgg

SEQ ID NO: 104157 - DNA, 201 bp, Homo sapiens
agagacataaccccagagttcctttctgttctttaaatacttggagtaaatagtcatagagtaaataattttatttaaagtagctttcttttttttttttttgagattgagtctcgctctgtcgcccaggctggagggcagtggcacaacctcggctcactgcaagctccacctcctgggttcaagcgattctcctgcctc

SEQ ID NO: 104158 - DNA, 201 bp, Homo sapiens
cagcgtgaacgctattttattcacttgagtgcagtagagtgcagggaggatccagccaagaggatgagctgcaaaagcaaagaaacagagcttccttcatkaaagaagtgaccgaagggatgtcactacgcaagagggctcgtggtgaaaatgagatttatgctttcttgcgccaagatggtgaaaaccacactccttggc

SEQ ID NO: 104159 - DNA, 201 bp, Homo sapiens
gcccccgccaccacacccggctaattttttgtattttttagtagagacagggtttcaccatgttagccaggatggtctcgatctcctgacctcgtgatccrcccgcctcagcctcccaaagtgttgggattacaggcgtgagccaccacgcccggcctggaattcatctttatttcttggtttgcttgtctaggtttttgt

SEQ ID NO: 104160 - DNA, 201 bp, Homo sapiens
tctcggctcactgcaagctccgcctcccaggttcacgccattctcctgcctcagcctccccagtagctgggactacaggcccccgccaccacacccggctmattttttgtattttttagtagagacagggtttcaccatgttagccaggatggtctcgatctcctgacctcgtgatccgcccgcctcagcctcccaaagtg

SEQ ID NO: 104161 - DNA, 201 bp, Homo sapiens
aaaatagcctaccgagaaaattgcccttggctgattttaaaggaaaacgcctgtaactgctcagaaagcatagtgtacatatttttatatataaatccccyaccttaatacatatgtgcaaacatatcctgtgtacagtagctttcagtaagaatttaagtataatttatagtactatttaattttattgcctatttttga

SEQ ID NO: 104162 - DNA, 201 bp, Homo sapiens
tcctgttttctagccttggtggcatttctttggaattcattttttttttttttttgtgacggagtctggctctgtcgcccaggctggagtgcagtggcgcmatctcggctcactgcaagctccgcctcccaggttcacgccattctcctgcctcagcctccccagtagctgggactacaggcccccgccaccacacccggc

SEQ ID NO: 104163 - DNA, 201 bp, Homo sapiens
gtgtacatatttttatatataaatcccccaccttaatacatatgtgcaaacatatcctgtgtacagtagctttcagtaagaatttaagtataatttatagkactatttaattttattgcctatttttgactgtttatagattaattaagtttatatgatgggaccccactcactgtttaggaatataacattcatttcatt

SEQ ID NO: 104164 - DNA, 201 bp, Homo sapiens
atggggcttctggggagtgccctcccagagacagagtggacgctggagcttccctgggagccagggccaaaccccagagcaggcagttggggaagggccaycatagagaatggtcaattccaggccctcggggcctgacactggccgagacagcttgctgaaagtttatttctgagaaaagcattcttcctttaagccagg

SEQ ID NO: 104165 - DNA, 201 bp, Homo sapiens
cccgtcatcatggtcattatgaaggatccttgcttcgccaaatgccagaacgccctgcagcaagtcacggcccgccaggtgagggctctccactggactgrgccagctctctcctgcttttccccatgcatgcccacctcaccactgtctgccagtaccagtgatggatggtctggccagtgagtggctgtgaccacacac

SEQ ID NO: 104166 - DNA, 201 bp, Homo sapiens
tctcgaactcctgggctcaagcaatcccaaagatctcaaacttttgccccccaaagtggtgggattacaggcatgagccattgcacccagcgtgcctggcyttttttttttttttttttttttttttttactttttgtaaagatgggtctccctgttgcccaggctggtctccaacttctggcctcaagcagttctcccac

SEQ ID NO: 104167 - DNA, 201 bp, Homo sapiens
aagcagtgaaatataatgaaattaaaactgaccagacgtttatttgaccaggtaacttcagtgcgtttatgcagaaggagatcttcgaacagccagaatcmgttttcaatactatgagaggtcgggtgaattttgaaaccaacacaggtaattcctacactcggtggggagcctccgcccgagcctagtctcagggaatgc

SEQ ID NO: 104168 - DNA, 201 bp, Homo sapiens
taaggaccgcggcgctctcaccgtgggcgtcaccaacaccgtgggcagctccatctctcgcgagaccgactgcggcgtccacatcaacgcagggccggagrtcggcgtggccagcaccaaggtaggaggagccacgggcgcccgtcccagggagagcctggcggaggcaggtgcaccagaggccgccctcctccggcctgc

SEQ ID NO: 104169 - DNA, 201 bp, Homo sapiens
tgtgcgcacctggcgtctgagcaggcctcgggtctcagatctcctgggccgttccctcaggggcggagacctaaggcccttccttatcacttggctgatgrcactgctgagattatgtcttgctgtcctttatcctgctgcttctctcatgggaagccaggactcggcagtagttgatcctctacaaacagcagatgattc

SEQ ID NO: 104170 - DNA, 201 bp, Homo sapiens
ctgcagcaagtcacggcccgccaggtgagggctctccactggactgggccagctctctcctgcttttccccatgcatgcccacctcaccactgtctgccartaccagtgatggatggtctggccagtgagtggctgtgaccacacaccctcccccgggccccctgtggggagtgcacacacttggaaaggagctggtcagc

SEQ ID NO: 104171 - DNA, 201 bp, Homo sapiens
tttggagacctcaccagtctcccaatgacattatcctgttttctagccttggtggcatttctttggaattcattttttttttttttttgtgacggagtctsgctctgtcgcccaggctggagtgcagtggcgcaatctcggctcactgcaagctccgcctcccaggttcacgccattctcctgcctcagcctccccagtag

SEQ ID NO: 104172 - DNA, 201 bp, Homo sapiens
tgtgtgtaagaaactaggtcttttgtcctgatgagtttcccattgtctgggttttgctgagtgcaacccctggtgtcatttaccatcttcctctgtccccwgtgtttcctgtacgctggagtttacaagtgttaaaagctcgatcttattcaggtttgattttttttggcaagactacatagttggtggtgtgtccttcca

SEQ ID NO: 104173 - DNA, 201 bp, Homo sapiens
agagagctttggagacctcaccagtctcccaatgacattatcctgttttctagccttggtggcatttctttggaattcattttttttttttttttgtgackgagtctggctctgtcgcccaggctggagtgcagtggcgcaatctcggctcactgcaagctccgcctcccaggttcacgccattctcctgcctcagcctcc

SEQ ID NO: 104174 - DNA, 201 bp, Homo sapiens
ataccacctcacccatgactccagcaaatgcaaaagaggactgttctcatcacagtaatgtagcttccagatactctgtatgcatcagggatagcttcttycagagagggtctattttatgatgctatttctctgctctagggtcgccccattatactgtgctccaaggacgatactgaaagttccaagtttgcgtataag

SEQ ID NO: 104175 - DNA, 201 bp, Homo sapiens
ctggaaaaatttcaatcctgatcagacctttctctcatcccagcaaaacatagttgggaaaataaaccttcttgtaaccctcgtggcatccatcccggggyaccggccagtgggtaggagtgtttaagtcctgagtcggggattcttggttccactctggctctggacgagtcacaggctcccctgtggctctggtccaga

SEQ ID NO: 104176 - DNA, 201 bp, Homo sapiens
gagagagctttggagacctcaccagtctcccaatgacattatcctgttttctagccttggtggcatttctttggaattcattttttttttttttttgtgayggagtctggctctgtcgcccaggctggagtgcagtggcgcaatctcggctcactgcaagctccgcctcccaggttcacgccattctcctgcctcagcctc

SEQ ID NO: 104177 - DNA, 201 bp, Homo sapiens; identical to SEQ ID NO: 16391

SEQ ID NO: 104178 - DNA, 201 bp, Homo sapiens
gaaaaatttcaatcctgatcagacctttctctcatcccagcaaaacatagttgggaaaataaaccttcttgtaaccctcgtggcatccatcccggggtacyggccagtgggtaggagtgtttaagtcctgagtcggggattcttggttccactctggctctggacgagtcacaggctcccctgtggctctggtccagaagt

SEQ ID NO: 104179 - DNA, 201 bp, Homo sapiens
tttgagagagctttggagacctcaccagtctcccaatgacattatcctgttttctagccttggtggcatttctttggaattcattttttttttttttttgwgacggagtctggctctgtcgcccaggctggagtgcagtggcgcaatctcggctcactgcaagctccgcctcccaggttcacgccattctcctgcctcagc

SEQ ID NO: 104180 - DNA, 201 bp, Homo sapiens
agccaagagcagtggccctgcaaacagaacagcctcccgactcatgaggatttcaacagttttgattttatagtctggcttatgctgaatttaatttgagygctttaggactcacaaacatagggagcttgtgctggtttatgcatgaagctgtttagctttattctaaaaacaatttgagtccacactgagaggcttgca

SEQ ID NO: 104181 - DNA, 201 bp, Homo sapiens
aaaaaaacctccagagagaccctggccccttccaccgtatgaggttggaatgagcagtcactgtctgtgaggaacgggccctcaccagacactgaatctcyggcaccttgatcttggacttctcggcctccagaactgtgagaataaacatctgtggcttataacccaggcagtctgtggtattttgttacagcagcccaa

SEQ ID NO: 104182 - DNA, 201 bp, Homo sapiens
atttttgcatttttagtagagatggggtttcaccatgttggccaggctggtctcgaactcctgacctcaggtgatccacccacctcggcctcccaaagggytgggattacaggcatgagccaccgcccccggctcaagtagtgcttatttaaggtcaagttccagccttacggagaaggggaccgtggaagcaaaggcccc

SEQ ID NO: 104183 - DNA, 201 bp, Homo sapiens
tttttgagagagctttggagacctcaccagtctcccaatgacattatcctgttttctagccttggtggcatttctttggaattcattttttttttttttttgtgacggagtctggctctgtcgcccaggctggagtgcagtggcgcaatctcggctcactgcaagctccgcctcccaggttcacgccattctcctgcctca

SEQ ID NO: 104184 - DNA, 201 bp, Homo sapiens
cttaaaaccctcccatacctgcctgtcaagccacagagacccacagtcctgcgttatctggccctttcctcctgtttcagtgagttccaggcactccagcyttccttctgcgtcccactctcattgcgcccgcgcccgcctccgggcctttgcgctggccgctcctgctgtctggaatgcccttcccacagaatgctccgc

SEQ ID NO: 104185 - DNA, 201 bp, Homo sapiens
cccagagggtgggcagagagccgtgcagggtcctgcatctcggacttgccctttcctcgctgtcagcatgccatgcacggagcagatgctcagcccaggtracggggacagtgctccagctgaggctgcactggccaccaagacgagggcattaaccgtggcccagctgggctgccatcctctcccatctcctccccacca

SEQ ID NO: 104186 - DNA, 201 bp, Homo sapiens
gggcagggacagggtgccagggccacagggctgcccagagggtgggcagagagccgtgcagggtcctgcatctcggacttgccctttcctcgctgtcagcrtgccatgcacggagcagatgctcagcccaggtgacggggacagtgctccagctgaggctgcactggccaccaagacgagggcattaaccgtggcccagct

SEQ ID NO: 104187 - DNA, 201 bp, Homo sapiens
tctcgatgaagaactttacagtaagtggaggacctctgagtgggaggagccgctgcagcgccggccgctttctaggaccgtattccaacagcgccggagamtggagattctcctttgtcccagctcagataaacagagggagggctaagcccgtgctgtaaaaccgggcttcgcagggtatgggatggtttattttaggtg

SEQ ID NO: 104188 - DNA, 201 bp, Homo sapiens
tggccctggagctctacacgcagagatcgctgctggtgatggggcggggctacaactatgccacctgcctggaaggagccctggtgagcccccacccccagcccccacccccacggaggacaggcacaggagaccctgaggagccagcgggaaggagggcagggcgttgggcttggggagggccgggcctaaggacccctt

SEQ ID NO: 104189 - DNA, 201 bp, Homo sapiens
agcacgggtggtttgtgggcctgcgcggactcccagggtgggagctggtggggaggtgccatcggtgtgggtgacgtgacttgggtaacgacaccaggttrcactcacagtcctgggtcgaggcttgttgttcaagtgcggcaaactgattttcctttcatttagaacaagacagcatggacttaaaagtggagtttgaga

SEQ ID NO: 104190 - DNA, 201 bp, Homo sapiens
gttcacgccactctcctgcctcagcctcccgagtagctgggactacaggcgcccgccaccatgcccggctaattttttgtatttttagtagataccaggtytcaccatgttagccaggatggtctcgatctcctgacctcgtgatccgcctgccccagccttccaaagtgctgggattacaggcgtgagccaccgcaccca

SEQ ID NO: 104191 - DNA, 201 bp, Homo sapiens
ccctgctcagcagagcagcttggtggtagcacaggagccagggctactcatgcatcctagtgatcagggtcttgagggagtgaggtttttgcgagggcctsttccttgggtctggctcatgccctgaaccatagggcatttcgtgactgaggcacacaccctatgtccaggaggaggacagcagaccccatggtgctgagg

SEQ ID NO: 104192 - DNA, 201 bp, Homo sapiens; identical to SEQ ID NO: 16387

SEQ ID NO: 104193 - DNA, 201 bp, Homo sapiens
gaagtccaaggttgaggggctgcacctggtgagggccttcttgctgctggggactctgcagagtcctgagggtggcgcaggtgtcacatggccagggggcsgagcatattcacaggccagctcaggtcttccttcctcttctaatgaagtcaccagtcccactccggtgataaccctttaatccatgaatccatcgacagg

SEQ ID NO: 104194 - DNA, 201 bp, Homo sapiens
ctgggtgacagagcgagactccatctcaaaaaaaaaaaaggaatggccttgatgaggtggtaaaaattattagtctgtaaattgcaactctttgtaatatyctttatgatgaaatggggagtacacgtagcgcctttctactggggccaggcgtggtggctcatgcctgtaatcccagcactttgggaggccaaggcgagc

SEQ ID NO: 104195 - DNA, 201 bp, Homo sapiens
ctcgaactcctgggctcaagcaatcccaaagatctcaaacttttgccccccaaagtggtgggattacaggcatgagccattgcacccagcgtgcctggctwtttttttttttttttttttttttttttactttttgtaaagatgggtctccctgttgcccaggctggtctccaacttctggcctcaagcagttctcccacc

SEQ ID NO: 104196 - DNA, 201 bp, Homo sapiens
cacacccccgtgcaccccctccactgagatggggcggggagagcaccgaggctgctcttcctctcctgggccgtcctctgagcagcagacggggctaagcrttccccagctcgccttcacacacagcccgtgccaccacaccgacggtaccatgaaggacgaggtagctctactggctgctgtcaccctcctgggagtcct

SEQ ID NO: 104197 - DNA, 201 bp, Homo sapiens
agcaccgaggctgctcttcctctcctgggccgtcctctgagcagcagacggggctaagcgttccccagctcgccttcacacacagcccgtgccaccacacygacggtaccatgaaggacgaggtagctctactggctgctgtcaccctcctgggagtcctgctgcaaggtgggctggttcctatctaggaagagggtgggc

SEQ ID NO: 104198 - DNA, 201 bp, Homo sapiens
ggggattcggtgggcgagccctggcggcggccagaggaagtccccgtggggccagggttgcggcggggaagaagcgggcctcctcgcgccacctccccgcygaccgccgcccgcaggctggcaccgctgtacgcgagcgcgcgcgccctctggctgctggtggcgctggctgcgctcggcctgctcgcccacttcctcccg

SEQ ID NO: 104199 - DNA, 201 bp, Homo sapiens
tgcactgagctggatggccaccctgtgacacccatctgcagagggcccagaaccaaaggtgccagggctgcaggactcagggggagatggtccgacgggakgtctggggagggagcgcacagccagcactggtctgtgtgtggtctggcctggcctcacctgaccaagagaagggctcctgcccacagagaaactttaggg

SEQ ID NO: 104200 - DNA, 201 bp, Homo sapiens
acacacagcccgtgccaccacaccgacggtaccatgaaggacgaggtagctctactggctgctgtcaccctcctgggagtcctgctgcaaggtgggctggktcctatctaggaagagggtgggccttagatccctacagcttgccctctgccccctaggcccaggtggagggcagaggtggggactccagcccaggcccaa

SEQ ID NO: 104201 - DNA, 201 bp, Homo sapiens
gctgctgtcaccctcctgggagtcctgctgcaaggtgggctggttcctatctaggaagagggtgggccttagatccctacagcttgccctctgccccctakgcccaggtggagggcagaggtggggactccagcccaggcccaagctggaagagggtggggactttcagggaactggggggcacctggctgtgagagctgt

SEQ ID NO: 104202 - DNA, 201 bp, Homo sapiens
gggagtcctgctgcaaggtgggctggttcctatctaggaagagggtgggccttagatccctacagcttgccctctgccccctaggcccaggtggagggcasaggtggggactccagcccaggcccaagctggaagagggtggggactttcagggaactggggggcacctggctgtgagagctgtaggacttgggggtggca

SEQ ID NO: 104203 - DNA, 201 bp, Homo sapiens
gactacggcgggccaccctgaggacagagcccacgcagggccaggtggagaggaaaggtggcacccgaggactcctgcctggagttctgggtgtctccctygccccgcctggagcgcccccggccgcccccctcgccctgcctggagtgcccctggccgccagccttcccagttgggcctaacggtcacttcctcttttgg

SEQ ID NO: 104204 - DNA, 201 bp, Homo sapiens
ttgggcctgggctggagtccccacctctgccctccacctgggcctagggggcagagggcaagctgtagggatctaaggcccaccctcttcctagataggamccagcccaccttgcagcaggactcccaggagggtgacagcagccagtagagctacctcgtccttcatggtaccgtcggtgtggtggcacgggctgtgtgt

SEQ ID NO: 104205 - DNA, 201 bp, Homo sapiens; identical to SEQ ID NO: 16412

SEQ ID NO: 104206 - DNA, 201 bp, Homo sapiens
tcgtaatggtagctaccttgtgaggactaagtcaggcagcccctaggagctcagggatgtttcctgtcaccatcctcccagaggaaggccctggtctctttgcacagcctgacagctgcctggggggccctcctggcgcaggcctggcctttctctgctgggccctgggtgctgtgctggaacgctgcccctgcagcagct

SEQ ID NO: 104207 - DNA, 201 bp, Homo sapiens
ctcgtaatggtagctaccttgtgaggactaagtcaggcagcccctaggagctcagggatgtttcctgtcaccatcctcccagaggaaggccctggtctctttgcacagcctgacagctgcctggggggccctcctggcgcaggcctggcctttctctgctgggccctgggtgctgtgctggaacgctgcccctgcagcagc

SEQ ID NO: 104208 - DNA, 201 bp, Homo sapiens
aatggaggtggaggggtctgaacttctgaggccccgccccggcccacaggtggaggaccaaacagaacctcgattactgcttcctcatgatgtacgcgcastccaaaggcatctactacgtgcaggtcagccccaagccctgcgttgccctgccctgccctgcgccgccctgccctgcgatgggtctggtccatctgggtg

SEQ ID NO: 104209 - DNA, 201 bp, Homo sapiens
acccctggtgaaaccagacgtagccagtcggaggccagattggaacctggcctccactttgcagccagcgggggtccaggaacttgagggaaggacccagkaagtggaatctgcagggaaggaaggaggtgggcagggaaccagagaggaagggcagcaggtgtgggcatcatcctggaaacgcaaggtcaagcccaggac

SEQ ID NO: 104210 - DNA, 201 bp, Homo sapiens
atctgggtgcccttcctcagccccagcccctctctgctcacctcgcagctggaggatgacatcgtggccaagcccaactacctgagcaccatgaagaactytgcactgcagcagccttcagaggactggatgatcctggagttctcccagctgggcttcattggtgtgcccctccccttacctgacggtgcctttcagtcc

SEQ ID NO: 104211 - DNA, 201 bp, Homo sapiens
aatgaaggcgtgggcccccatcaatatcgggctgggctgggcggggcgaggtggcccctacaccaccgggggcagggcccgttgctcccgttagcggcgckctcgggccgcccctgccccgggaagccggtacggttctgggctggtcactgctctgcatccacgagcatcggccctgataccgcctagaaaggcccatcg

SEQ ID NO: 104212 - DNA, 201 bp, Homo sapiens
gccctgcgttgccctgccctgccctgcgccgccctgccctgcgatgggtctggtccatctgggtgcccttcctcagccccagcccctctctgctcacctckcagctggaggatgacatcgtggccaagcccaactacctgagcaccatgaagaactttgcactgcagcagccttcagaggactggatgatcctggagttct

SEQ ID NO: 104213 - DNA, 201 bp, Homo sapiens; identical to SEQ ID NO: 16413

SEQ ID NO: 104214 - DNA, 201 bp, Homo sapiens
ctactacgtgcaggtcagccccaagccctgcgttgccctgccctgccctgcgccgccctgccctgcgatgggtctggtccatctgggtgcccttcctcagmcccagcccctctctgctcacctcgcagctggaggatgacatcgtggccaagcccaactacctgagcaccatgaagaactttgcactgcagcagccttcag

SEQ ID NO: 104215 - DNA, 201 bp, Homo sapiens
gtctccccacagactgactcacagtacacttcggcagtgacagagaacatcaaggccttgtgagtactggcgaccccagagagctggtggcgggagagctyggtgcggggtgttgtgctggcaggttcctgcctccccatgagatagtgcctttcctatctcgtggggaggcagggacctggtgggggaggggtgggtgtg

SEQ ID NO: 104216 - DNA, 201 bp, Homo sapiens
acccttactcctaggaggttgcagggtctggagaggaggcagacacctgccacacacatgcatggtgacagcagaccgttaacgggcctgatatctgcctmtgcccctctgagcctgtcccttttccctgagtacaaggcacaaaggttgtgccccagcttggctctttaatctttccccaaccaagagggaagcaggggg

SEQ ID NO: 104217 - DNA, 201 bp, Homo sapiens
gaattctccatgggaggacccgtgcatgggggtggggggacagaagctgcccacccagcggcttctctgcggagccacaatggaggtggaggggtctgaamttctgaggccccgccccggcccacaggtggaggaccaaacagaacctcgattactgcttcctcatgatgtacgcgcagtccaaaggcatctactacgtgc

SEQ ID NO: 104218 - DNA, 201 bp, Homo sapiens
tgctgagaacccatctactggtgtttgagtccagggtgtttccctgcagtgccctgaattctccatgggaggacccgtgcatgggggtggggggacagaarctgcccacccagcggcttctctgcggagccacaatggaggtggaggggtctgaacttctgaggccccgccccggcccacaggtggaggaccaaacagaac

SEQ ID NO: 104219 - DNA, 201 bp, Homo sapiens
ctctgcattcaaggggttaggtttccagggtaaccgagcccctgagcccagcgtggagcctggcagagccagtaatctgactcccctttccctcccgccasgggctgtccagaggctccgctttgcctcagcctttagccccagagaggcagggtgtggagggtgggggctggcttcttgggtaagagatgcctcagggaa

SEQ ID NO: 104220 - DNA, 201 bp, Homo sapiens
cgggaggaagtgggcgagcaggccgagcgcagccagcgccaccagcagccagagggcgcgcgcgctcgcgtacagcggtgccagcctgcgggcggcggtcrgcggggaggtggcgcgaggaggcccgcttcttccccgccgcaaccctggccccacggggacttcctctggccgccgccagggctcgcccaccgaatcccc

SEQ ID NO: 104221 - DNA, 201 bp, Homo sapiens
ctgtgctgagaacccatctactggtgtttgagtccagggtgtttccctgcagtgccctgaattctccatgggaggacccgtgcatgggggtggggggacasaagctgcccacccagcggcttctctgcggagccacaatggaggtggaggggtctgaacttctgaggccccgccccggcccacaggtggaggaccaaacag

SEQ ID NO: 104222 - DNA, 201 bp, Homo sapiens
ctgggctcctggaggtcatctcaccctccccccacttctaccctgacttctcccgcctccgagagtcctttggggaccccaaggagagagtcaggtactakttactcccccataccctcagcaacccgcctgcctgtgctgagaacccatctactggtgtttgagtccagggtgtttccctgcagtgccctgaattctcca

SEQ ID NO: 104223 - DNA, 201 bp, Homo sapiens
gctctgctacctcagttggctgggtgtagggggtggtggggggctggcactgggtgagcctcaagaaagggccacagtctggtgggctcggcccctctcakcccctggaggctgcatacggactaggccttcccgtcccccaggttccccacggagatccattctgggctcctggaggtcatctcaccctccccccacttc

SEQ ID NO: 104224 - DNA, 201 bp, Homo sapiens
tggacctgagcctgattgtagagttcattctcatgttctaccgggacaagcccatcgactggctcctggaccatattctgtgggtgaaagtctgcaacccygagaaggatgcggtgagcaagagctggcgggactggcaggggcagggccaaggggcaggcagcctccaccccaaactgtgtccctgtccttgcatctgct

SEQ ID NO: 104225 - DNA, 201 bp, Homo sapiens; identical to SEQ ID NO: 16454

SEQ ID NO: 104226 - DNA, 201 bp, Homo sapiens
cagcaatgggtgagccctggggatagccagctctgcattcaaggggttaggtttccagggtaaccgagcccctgagcccagcgtggagcctggcagagccrgtaatctgactcccctttccctcccgccaggggctgtccagaggctccgctttgcctcagcctttagccccagagaggcagggtgtggagggtgggggct

SEQ ID NO: 104227 - DNA, 201 bp, Homo sapiens
gcagtgggaacatcgagcacccggaggacaagctcttcaacacgtctgtggaggtgctgcccttcgacgtaagttcggtgggtgtggtgtgcactgaagcygggcctcctgtgaccacctgcctcagcccttgattctgcccccagaaccctcagtcagacaaggaggccctgcaggagggccgcaccgccaccctccggt

SEQ ID NO: 104228 - DNA, 201 bp, Homo sapiens
cagacaaggaggccctgcaggagggccgcaccgccaccctccggtaccctcggagccccgacggctacctccagatcggtgggtagggtttgggggagagygtgggctggggttcagggacaccctctcaccactgccctcccacaggctccttctacaagggagtggcagagggagaggtggacccagccttcggccctc

SEQ ID NO: 104229 - DNA, 201 bp, Homo sapiens
taaacatttttcatttagaaaaactttcttcatggaggggtgggcgcggtggctcacgcctgtaatcccagcactttgggaggccgaggcgggcggatcaygaagtcaggagatcgagaccatcctggctaacacggtgaaaccccgtctctactaaaaatacaaaaaatcagccgggcgtggtggcgggcgcctgtagtc

SEQ ID NO: 104230 - DNA, 201 bp, Homo sapiens
acagctctcacagccaggtgccccccagttccctgaaagtccccaccctcttccagcttgggcctgggctggagtccccacctctgccctccacctgggcmtagggggcagagggcaagctgtagggatctaaggcccaccctcttcctagataggaaccagcccaccttgcagcaggactcccaggagggtgacagcagc

SEQ ID NO: 104231 - DNA, 201 bp, Homo sapiens
acatttttcatttagaaaaactttcttcatggaggggtgggcgcggtggctcacgcctgtaatcccagcactttgggaggccgaggcgggcggatcatgargtcaggagatcgagaccatcctggctaacacggtgaaaccccgtctctactaaaaatacaaaaaatcagccgggcgtggtggcgggcgcctgtagtccca

SEQ ID NO: 104232 - DNA, 201 bp, Homo sapiens
acgagcccagcccctaggggatagaagcctaaggatcctgtgaggtatgagtatggggtgacataggcctcccttgtcgaggggctgtcactgtttctgtrgtgacccagtagtaccaggtctttggaggcctcaagagaagctgggaatctgggctcttatgtgaacccatctcgttgtcacatgtagaaaatctgtctt

SEQ ID NO: 104233 - DNA, 201 bp, Homo sapiens
ggctgaggcaggagaatcgcttgaacctgggaggctgaggttgcagtgagccgagatggtgccactgcactccaacctgggcgacagaccgagactccgtyttaaaaaaaaaaaaaaaaaaaaaggccggggtggtgactcacgcctgtaatcccagcattttgggaggccgaggcaggtagatcacgaggtcaggagatc

SEQ ID NO: 104234 - DNA, 201 bp, Homo sapiens
cgggacccctttagacttggctgtctcacttggattacaggcgtaggccacagtgcccaactgagtcactttttttttttccttaaaaaaattgttggccygcagacacatgaaaaaatgctcagcatcactggccatcagagaaatgcaaatcaaaaccacattgagatagcatctcacaccagttagaatgccaatcat

SEQ ID NO: 104235 - DNA, 201 bp, Homo sapiens
tcctgcctcagcctcccgagtagctgggactacaggtgcccgccaccactcccggctaatttttagtagagacggggtttcaccgtgttagctaagatggyctcggtctcctgacctcgtgatccgcccgtctcggcctcccaaagcgggacccctttagacttggctgtctcacttggattacaggcgtaggccacagtg

SEQ ID NO: 104236 - DNA, 201 bp, Homo sapiens
aggcatctactacgtgcaggtcagccccaagccctgcgttgccctgccctgccctgcgccgccctgccctgcgatgggtctggtccatctgggtgcccttyctcagccccagcccctctctgctcacctcgcagctggaggatgacatcgtggccaagcccaactacctgagcaccatgaagaactttgcactgcagcagc

SEQ ID NO: 104237 - DNA, 201 bp, Homo sapiens
ccctaaagtttctctgtgggcaggagcccttctcttggtcaggtgaggccaggccagaccacacacagaccagtgctggctgtgcgctccctccccagacmtcccgtcggaccatctccccctgagtcctgcagccctggcacctttggttctgggccctctgcagatgggtgtcacagggtggccatccagctcagtgca

SEQ ID NO: 104238 - DNA, 201 bp, Homo sapiens; identical to SEQ ID NO: 16455

SEQ ID NO: 104239 - DNA, 201 bp, Homo sapiens; identical to SEQ ID NO: 16450

SEQ ID NO: 104240 - DNA, 201 bp, Homo sapiens
tcagtcccgatccttcccgacccacccagaggacccccgattgaagccgtggaacggctcacaccggcacgtgctgcacctgcccaccgtcttccatcacytgccacacctgctggccaaggagagcagtctgcagcccgcggtgcgcgtgggccagggccgcaccggaggtatgggcgcagacagggaggagcacggggt

SEQ ID NO: 104241 - DNA, 201 bp, Homo sapiens
tgcggggtgttgtgctggcaggttcctgcctccccatgagatagtgcctttcctatctcgtggggaggcagggacctggtgggggaggggtgggtgtgcaraagtggcccagcccctctggagctctgctacctcagttggctgggtgtagggggtggtggggggctggcactgggtgagcctcaagaaagggccacagtc

SEQ ID NO: 104242 - DNA, 201 bp, Homo sapiens
aactgtggccctcggtcaagcacctgctgaggatctgcccagggaggcagacccttgggggcagcccggggtctcagccatgcagcgctcccagccttcargctgtccgcctccccaggcctggacttcagcaatgatggacacccttactcctaggaggttgcagggtctggagaggaggcagacacctgccacacacat

SEQ ID NO: 104243 - DNA, 201 bp, Homo sapiens
ggcttcaccggcaagttatcctcacgttcttcagtttccgcatctgaagtgggcctcgtaatggtagctaccttgtgaggactaagtcaggcagcccctasgagctcagggatgtttcctgtcaccatcctcccagaggaaggccctggtctctttgcacagcctgacagctgcctggggggccctcctggcgcaggcctg

SEQ ID NO: 104244 - DNA, 201 bp, Homo sapiens
ctctcttcgccccacctcccgtgggctcctggctaattcctcgctgtcccttggatcctagctccactgctactcctcctctgaagccatctatgacttayatccttgctggcccccaactctccaaccaagaaagtcctcttgctcaggacagtgtctctcttggcctctccatgttttcccctgtgccgcagttactaa

SEQ ID NO: 104245 - DNA, 201 bp, Homo sapiens
ctcaagtgatcctcctgcctcggcctcccacagtgctgggattacagacatgaaccacagcacccagcccgtgtggccttatttagtggattttaatgccyctgttttacagagaagggcctgtggctcggaaggttaataactaacaagtctaaagctacacagttagtaggtcacaaacctatcatatgaatctaagtc

SEQ ID NO: 104246 - DNA, 201 bp, Homo sapiens
tccatcccatctgtttctctgccaacttgaagctcagggcaactctcctcttccctggactcatagtggctgctgcgacccctccccccagcttcacttcyttccatccagagataagatcctgggcccaaagaggggtcctgatgagcttggggggccattgatcccgagaatcggacacagctctgtgtgtgagtgcat

SEQ ID NO: 104247 - DNA, 201 bp, Homo sapiens
tctggcctgatggatccctgcctggctcacattagacactacatgcattttattaaatgaatgaacaaataaattatttgatttttatttaattttatttygataaaatgtatttaattttattttgataaaatgtattttattttgataaaatgtattttattttgataaaatgtatttaattttattttgataaaatgt

SEQ ID NO: 104248 - DNA, 201 bp, Homo sapiens
tgtctgtccagcggtagcgccctcaacagcacctgagggcctgagggtctaggaggcattcggaggcttactgggtgtggccaggttactagggagcacargatgggtttctgcagctcatttagctagaaagtgagtccacactagaatgagcccctgacaaaccagtttcctcttggcaggtgtggacactgcaagaaa

SEQ ID NO: 104249 - DNA, 201 bp, Homo sapiens
cacagaagagtccctgggaagcagttgctcctggggtgagcctaggaatcccaggggtcatcatggccaagggcaggcctcctgggacttctagctccgtttttttttttttttttcctagataaggttacgcactgttgcccaggcttgagtgcactgtcctgatcatggcttacttaagcctcaaactcctgggctcat

SEQ ID NO: 104250 - DNA, 201 bp, Homo sapiens
ggtgctgggggctggcaggcatgggccatgggaagtgggcagttcttagtgcccctgctcaggcgtgtgccctgctcccaggaatcgttgattacatgatygagcagtccgggcctccctccaaggagattctgaccctgaagcaggtccaggagttcctgaaggatggagacgatgtcatcatcatcggggtctttaagg

SEQ ID NO: 104251 - DNA, 201 bp, Homo sapiens
ttcactgtcaaaacctgtcatagattcactgataacttgtccaacagatttatttcaagtctgcactacctcacccctcaagtgtttcaagtctcgaggcttttttttttctttttgcttctgttacattttagatttagacagcacagtggtgtctaggtacttaaatgccctccttcccccaacatggttactaaatac

SEQ ID NO: 104252 - DNA, 201 bp, Homo sapiens; identical to SEQ ID NO: 16472

SEQ ID NO: 104253 - DNA, 201 bp, Homo sapiens
attttattttgataaaatgtatttaatttttgagacggagttttgcttctgtggcccaggctgcagtacgatggcgcaatctcagctcaccgcaacctccrcctcccggattcaagtgattctcctgcctcagcctccagagtagctgtgattacagggacacaccaccacgcccggctaatttttgtattttcagtagag

SEQ ID NO: 104254 - DNA, 201 bp, Homo sapiens
tggcaggtcctggggctgggcagagctccacttggttttgccagaacagttgctgccaccctttgtccctcctggcaggcaatcaccagtctccctccagygcctgttccactgtgggtttggcctgggccagcacatggtgctccgttgaggccaagtcgtgtttgttcgggcagctccagctgggggctacagagggac

SEQ ID NO: 104255 - DNA, 201 bp, Homo sapiens
aatgtggagatgaacttgggaattcatttgtctcatgctgaggaaggttgcatcttttcagagggtgctgaaaggctctggacatatatatatatatatatttttttttttttttttttttgagatggagtttcactcttgttgtccaggctggagtgcaatggcgtcatctctcgagtagctgggattacaggcatgtgt

SEQ ID NO: 104256 - DNA, 201 bp, Homo sapiens
aggtgaagtgcctgccagtttgggccttgtgtgctcagtcttgcttggtttctttcagaaattgttgccaaggtcagagaagtctcccagcccgactggaygcctccaccagaagtcacgcttgtgttgaccaaagagaactttgatgaagttgtgaatgatgcagatatcattctggtggagttttatgccccatggtaa

SEQ ID NO: 104257 - DNA, 201 bp, Homo sapiens
gtggcagccgctgattggtggttgtggcgcagccaatcagaagggggcacctcacgttagggctcggagttttaaacgcgcagccgagggccgcgcgcagragtagggagggcctagggcggcggagccgactcgtcgcggccgaggcgcgcgcggtccgtgccggcgtcagtctgggattggccggcccgcgacttcctc

SEQ ID NO: 104258 - DNA, 201 bp, Homo sapiens
acccagcccgtgtggccttatttagtggattttaatgcccctgttttacagagaagggcctgtggctcggaaggttaataactaacaagtctaaagctacrcagttagtaggtcacaaacctatcatatgaatctaagtccatctgactctgaaagccacaggcttatccaggctgcccccgcatcccctgccctcccaaa

SEQ ID NO: 104259 - DNA, 201 bp, Homo sapiens
tcagaagggggcacctcacgttagggctcggagttttaaacgcgcagccgagggccgcgcgcaggagtagggagggcctagggcggcggagccgactcgtmgcggccgaggcgcgcgcggtccgtgccggcgtcagtctgggattggccggcccgcgacttcctccgccccctgccaatcgccggggacgacttccgtggg

SEQ ID NO: 104260 - DNA, 201 bp, Homo sapiens
ctcacgttagggctcggagttttaaacgcgcagccgagggccgcgcgcaggagtagggagggcctagggcggcggagccgactcgtcgcggccgaggcgcrcgcggtccgtgccggcgtcagtctgggattggccggcccgcgacttcctccgccccctgccaatcgccggggacgacttccgtgggtttttccggctccc

SEQ ID NO: 104261 - DNA, 201 bp, Homo sapiens
tttacctcctggaaaacacatctccagaaaagaataattggccccggaaacattctggcttcagcgttaatgaaattgccgtgcttgctgtgcccagttcrgtttactggtgtgacagtagccagagaacctggttaataaaaatggcaattccatgttctttgtatctgtggtttggcaaaaaaaataaaataaaataag

SEQ ID NO: 104262 - DNA, 201 bp, Homo sapiens
ctaacaagtctaaagctacacagttagtaggtcacaaacctatcatatgaatctaagtccatctgactctgaaagccacaggcttatccaggctgcccccscatcccctgccctcccaaaaacatggtttaccatctcagccacatgtgtcctataacccagctgagagtcacaaacctctagaccaagagcccttcaagg

SEQ ID NO: 104263 - DNA, 201 bp, Homo sapiens
ggctcggagttttaaacgcgcagccgagggccgcgcgcaggagtagggagggcctagggcggcggagccgactcgtcgcggccgaggcgcgcgcggtccgygccggcgtcagtctgggattggccggcccgcgacttcctccgccccctgccaatcgccggggacgacttccgtgggtttttccggctcccccgcgtcgct

SEQ ID NO: 104264 - DNA, 201 bp, Homo sapiens
gtcacttgatgtcaggagttcgagaccagcctggccaacatggtgaaaccctgtctctactaaaattacataacatagccaggcatgatggcatatgcctrtagtcccagctacttgggaggctgaggcaggaaggagaattggcttgaacttggaaaacagagactgcagtgagccgaaatcacgccacttcactccagc

SEQ ID NO: 104265 - DNA, 201 bp, Homo sapiens; identical to SEQ ID NO: 16480

SEQ ID NO: 104266 - DNA, 201 bp, Homo sapiens; identical to SEQ ID NO: 16479

SEQ ID NO: 104267 - DNA, 201 bp, Homo sapiens
ccctcctggcaggcaatcaccagtctccctccagtgcctgttccactgtgggtttggcctgggccagcacatggtgctccgttgaggccaagtcgtgtttrttcgggcagctccagctgggggctacagagggacagcatccctgtctgttcaccagagggagctgttgaccttggtgggtggattttgcctttctttcca

SEQ ID NO: 104268 - DNA, 201 bp, Homo sapiens
caggcagtgggaagggagagggagagccactggagagaaggggcgagggcgtgaagaaacaagtgcgagttctttggaacagcaagcattccttttcaaartgtggtctgtagatttggaaatgattaatccatagattctggagaaagggatggcttggtttgcacctttgagaaactagagataccattccttctgcat

SEQ ID NO: 104269 - DNA, 201 bp, Homo sapiens
gcggaaaagcatatagcactgtcttggttttgatccagtgattctgtttttggggggattcttgagaggcctgggagagtggctttaggagctgttaggaycagcaagtttatccttccggtcagaggtctttaacacagaagagtccctgggaagcagttgctcctggggtgagcctaggaatcccaggggtcatcatgg

SEQ ID NO: 104270 - DNA, 201 bp, Homo sapiens
catgctccacccccagtgtgtgaatgctgtgggatgaagtttgtgtctgtccagcggtagcgccctcaacagcacctgagggcctgagggtctaggaggcrttcggaggcttactgggtgtggccaggttactagggagcacaggatgggtttctgcagctcatttagctagaaagtgagtccacactagaatgagcccct

SEQ ID NO: 104271 - DNA, 201 bp, Homo sapiens
agttggttgtaatgcagcctgagaaattccagtccaagtatgagccccggagccacatgatggacgtccaggtaagcgggcccctctgccatgccagcccyggacaccccgcaggcatgaggactctgctttgagccacctctgaggtttcaaacgtggaggtttcgctcttgtctgcagggtctggaactccttttccag

SEQ ID NO: 104272 - DNA, 201 bp, Homo sapiens; identical to SEQ ID NO: 16467

SEQ ID NO: 104273 - DNA, 201 bp, Homo sapiens; identical to SEQ ID NO: 16468

SEQ ID NO: 104274 - DNA, 201 bp, Homo sapiens
aggaagaaaatggagtcttggtcctaaatgatgcaaactttgataattttgtggctgacaaagacacagtgctgctggagttttatgctccatggtaaggwccgcgttctaatttctgcaggtggacaagcgctgtgctccattcgctcagcccttcacccggtcatccagaccttggggggtggggtaggagtgtctggg

SEQ ID NO: 104275 - DNA, 201 bp, Homo sapiens
ccattaggtctgggctggagccacctgcaacctctctggcctttgcaaggacagagagtagagagtagcagctactactttctacagtagtgggctcttcytgtgtgactggcccgtctggtggccacaccaacctcactgcctggtccagagagagcccccagaatctttggcctttgcagcactgacgccccctcccgc

SEQ ID NO: 104276 - DNA, 201 bp, Homo sapiens
ttctgggatcccaggggcaggttttcagaccctgacctcatccacagcccaaaacagtaactagcagcgttcatttacctcctggaaaacacatctccagraaagaataattggccccggaaacattctggcttcagcgttaatgaaattgccgtgcttgctgtgcccagttcagtttactggtgtgacagtagccagaga

SEQ ID NO: 104277 - DNA, 201 bp, Homo sapiens
ctttgcagcactgacgccccctcccgccttgctttccttggcaggaaaactgaagccagtcatcaaatcccagccagtgcccaagaacaacaagggacccrtcaaggtcgtggtgggaaagacctttgactccattgtgatggaccccaagaaggacgtcctcatcgagttctacgcgccatggtgcgggcactgcaagca

SEQ ID NO: 104278 - DNA, 201 bp, Homo sapiens
tttgataaaatgtatttaattttattttgataaaatgtattttattttgataaaatgtattttattttgataaaatgtatttaattttattttgataaaatgtatttaattttattttgataaaatgtatttaatttttgagacggagttttgcttctgtggcccaggctgcagtacgatggcgcaatctcagctcaccgc

SEQ ID NO: 104279 - DNA, 201 bp, Homo sapiens
ttgataaaatgtatttaattttattttgataaaatgtattttattttgataaaatgtattttattttgataaaatgtatttaattttattttgataaaatgtatttaattttattttgataaaatgtatttaatttttgagacggagttttgcttctgtggcccaggctgcagtacgatggcgcaatctcagctcaccgca

SEQ ID NO: 104280 - DNA, 201 bp, Homo sapiens
agtggggaagggaaactccctaacaggaagctgccattgaaggtgctgggggctggcaggcatgggccatgggaagtgggcagttcttagtgcccctgctyaggcgtgtgccctgctcccaggaatcgttgattacatgatcgagcagtccgggcctccctccaaggagattctgaccctgaagcaggtccaggagttcct

SEQ ID NO: 104281 - DNA, 201 bp, Homo sapiens
tacagggacacaccaccacgcccggctaatttttgtattttcagtagagacgaggtttctccatgttggtcaggctggtctcaaactcccaacctcaggtsatccgcccacctcggcctcccaaagtgctggaattataggcgtgagccactgtgcccggcctcttattttaataaaattatttaattttattgaatgaac

SEQ ID NO: 104282 - DNA, 201 bp, Homo sapiens
cccggattcaagtgattctcctgcctcagcctccagagtagctgtgattacagggacacaccaccacgcccggctaatttttgtattttcagtagagacgrggtttctccatgttggtcaggctggtctcaaactcccaacctcaggtcatccgcccacctcggcctcccaaagtgctggaattataggcgtgagccactg

SEQ ID NO: 104283 - DNA, 201 bp, Homo sapiens
acacagaagagtccctgggaagcagttgctcctggggtgagcctaggaatcccaggggtcatcatggccaagggcaggcctcctgggacttctagctccgtttttttttttttttttcctagataaggttacgcactgttgcccaggcttgagtgcactgtcctgatcatggcttacttaagcctcaaactcctgggctca

SEQ ID NO: 104284 - DNA, 201 bp, Homo sapiens
agcacctgagggcctgagggtctaggaggcattcggaggcttactgggtgtggccaggttactagggagcacaggatgggtttctgcagctcatttagctrgaaagtgagtccacactagaatgagcccctgacaaaccagtttcctcttggcaggtgtggacactgcaagaaacttgcccccgagtatgagaaggccgcc

SEQ ID NO: 104285 - DNA, 201 bp, Homo sapiens
ggtgagcctaggaatcccaggggtcatcatggccaagggcaggcctcctgggacttctagctccgtttttttttttttttttcctagataaggttacgcaytgttgcccaggcttgagtgcactgtcctgatcatggcttacttaagcctcaaactcctgggctcatgggatcctcctgcctcagcctcccgaggagctgg

SEQ ID NO: 104286 - DNA, 201 bp, Homo sapiens; identical to SEQ ID NO: 16473

SEQ ID NO: 104287 - DNA, 201 bp, Homo sapiens
gtttgggattactggcgtgagccacggtgtgggcttaccttgaccctttctcatccctgagggcatccctcggccattcactgtcaaaacctgtcatagaytcactgataacttgtccaacagatttatttcaagtctgcactacctcacccctcaagtgtttcaagtctcgaggcttttttttttctttttgcttctgtt

SEQ ID NO: 104288 - DNA, 201 bp, Homo sapiens; identical to SEQ ID NO: 16475

SEQ ID NO: 104289 - DNA, 201 bp, Homo sapiens
caattagtttcccttcctctcctagctgtgattcctacctggaagagttgattaagttccccagtgcattatttccgaccttcctccaatcttcccatccrtctgcttgcaagtaactttgactcctactgggcagagcagctaggtagtgagagtggatatggatggtcccaaagcactacttaactgccagccggggcc

SEQ ID NO: 104290 - DNA, 201 bp, Homo sapiens
ggcacagacccaaggagtaggctggaggagcagagggcaggcacagccatgtggggtgggtgcaggctgcctccgtggctaggcagccacagagtccacgyggggttccttcatcagggttggtgagccccaggagttctgggatcccaggggcaggttttcagaccctgacctcatccacagcccaaaacagtaactagc

SEQ ID NO: 104291 - DNA, 201 bp, Homo sapiens
tctgtatttttagtagagacggggtattgccatgttggccaggctggtctcaaactcctggcctcaggtgatccacctgcctcggcctcccaaagtgctgsgattacaggagtgagccactgcgcccggccagttcttgtgggcaatgggctgtgtgacgcaatactgactccaagggactctccctcatctcctccctgg

SEQ ID NO: 104292 - DNA, 201 bp, Homo sapiens
ctgcctcagcctccctagtagctgggaccacaggtgtgtgccaccacgcccagctaatataaaaaatatttttagagatgaggtcttgctatgttgccccrgttggtcttgaactcctggcctcaagcgaccctcccgcctcagcttctggaagcactgatattacaggaatgaactactgtgccagccaacaaatggttt

SEQ ID NO: 104293 - DNA, 201 bp, Homo sapiens; identical to SEQ ID NO: 16498

SEQ ID NO: 104294 - DNA, 201 bp, Homo sapiens
taggtgaggacaaggaagatgaagtcgccagaatagtgtagtgatggcctttgtacagggcagagagactgccctgaggggttgtctgggtctggacagasgccagaacaaagtcctggctgctttttcatccctaggatggggcagcagctctacactggacctgtggggttatttatactctttcctttcttccttttt

SEQ ID NO: 104295 - DNA, 201 bp, Homo sapiens
ctctcacaaagttctgagcaattcagagcactggtcggtgtgttctagactctaactacttgttaaaggtcacaggatatcaaaagtgtcctcaaagaaayaggaaaccttgctgggtttttgagggcagtcaggaacatggtccacagttagtgaggagcatcaggggtcaaggctggggaataggtgaggacaaggaag

SEQ ID NO: 104296 - DNA, 201 bp, Homo sapiens
gctttctctctattctattctagcctgaagaggtgtgggagagaactggagctcagctcatgctgagcgagccccttgtgggagggctagcctctgttctrtcttcccagactcccttaaagtcttgtcccagagccccctccaccagccagtggtgtccctctgtcaccactccaggctctgggtagtccccaagtatgg

SEQ ID NO: 104297 - DNA, 201 bp, Homo sapiens
gtggctcacacctgtaatcccagcactttgggaggccgagcctggcagatcatgaggtcaagattgagaccatcctgggcaacatggtgaaaccccatctytactaaaaatacaaaaattagctgggcatggtggcgggcgcctgtagtcccagctactcaggaggctgaggcaggaaaatcacttgaacccgggaggcag

SEQ ID NO: 104298 - DNA, 201 bp, Homo sapiens
catgcaaaacaacaatactttttttttttaggggtacatagatgtgtagtaaaaaagcttaaaaacatgcaaaacagcaatacttttttttttttttttttagggatacatatatgtgtagtaaaaaagaaaatgcatggaaatgccaaattcttgtcagaatagtggttacctgagaggaaaatgtgattctttgaatca

SEQ ID NO: 104299 - DNA, 201 bp, Homo sapiens
acatgcaaaacaacaatactttttttttttaggggtacatagatgtgtagtaaaaaagcttaaaaacatgcaaaacagcaatacttttttttttttttttttagggatacatatatgtgtagtaaaaaagaaaatgcatggaaatgccaaattcttgtcagaatagtggttacctgagaggaaaatgtgattctttgaatc

SEQ ID NO: 104300 - DNA, 201 bp, Homo sapiens
tggagtatactgacatgatcatagctcaccgtaaactcaaactcctgggctcaaagcagtcctcctgcctcagcctcctaaggagctgggactacaggcaygtgctaccacatctggctgaattttaaaatttttttgtgagccaggtgcagtggttcacgcctataatcccagcacttgggaagccaaggagggaggatt

SEQ ID NO: 104301 - DNA, 201 bp, Homo sapiens
taatttttgtagagacgagtttcaccatgttgcttaggctggtctcaactcctgggcttaagagatccgcccccttcagcctcccaaagtgttgggattayaggtgtgagccacttgtacctggccagaaaagaatcttgaaggttcttttctaacctgtaatcaaaggttagaaaacaggtcttggccgggtgtggtggc

SEQ ID NO: 104302 - DNA, 201 bp, Homo sapiens
acagtgactaagaggaggaggaagggacatcacaggagtcacagggatgagaaaagggttttttgtgttttgtttttaagaaacaacacaggccaggcacrgtggctcacacctgtaatcccagcactttgggaagccgaggtaggcagatcacctgaggtcaggagtttgaggccagcctgaccgacatggagaaatccc

SEQ ID NO: 104303 - DNA, 201 bp, Homo sapiens
caggagatagctcagagagtagcagagtgcccaatcgtggggggtgttgtaagctgtggtgaggattgtggattttgttctcagagtgatacagtgttgayggagggtttcaagcaggggagtgctgcgattaggcttgtttgaaaaggatccctgtggctaccatgtgaagaatagagggtggggaaagagggaggcaag

SEQ ID NO: 104304 - DNA, 201 bp, Homo sapiens
tctgccctgacctttttgtttactggagctgttgtcctctccctctgcagcatgggaatcattgtgctggagctgtactggaagcatgctccaaagacctstaagaactttgctgagttggctcgtcgaggttactacaatggcacaaaattccacagaattatcaaagacttcatgatccaaggaggtgacccaacaggg

SEQ ID NO: 104305 - DNA, 201 bp, Homo sapiens
ctgtgtttcttcttcttcttcttcttcttctttttttttttttttttgagatggagtttcacttttgttgtgcagggtggagtgcaaaggcaaaatctctkctcactgcagcctccaccttccgtgttcaagtgattctcctgcctcagcctccgaagtagcagggattacaggcatgcaccactatgcccagcttatttt

SEQ ID NO: 104306 - DNA, 201 bp, Homo sapiens
gctttaacttaaatgaattttattttccatcacctaggttaagggtggcaaataggtttcaactctggggctattactgattaattaataacggctgcctragttctgggttgataacattcagaggcaaatctagctcagcagggaagaatactgattgattggcaatgtctgtgatgggcacagggataggacttgggg

SEQ ID NO: 104307 - DNA, 201 bp, Homo sapiens
gatggctgctgctgttctggcatcaccctactttcaaagaaggaagatgggaaagagctgtagatgaaggacaaaagagtatgtctgtttttatcaggaawgctgtagctttctcagaagcttgactcagcgacttctgtttgtatcagtaagtcacaactgggtcatctggccacgcctgtctgcaaaatggacttgtca

SEQ ID NO: 104308 - DNA, 201 bp, Homo sapiens
gccacttaccagctatttctccttcagctggatagctttaacttaaatgaattttattttccatcacctaggttaagggtggcaaataggtttcaactctkgggctattactgattaattaataacggctgcctgagttctgggttgataacattcagaggcaaatctagctcagcagggaagaatactgattgattggca

SEQ ID NO: 104309 - DNA, 201 bp, Homo sapiens
cagcttcccaaagtgctgagattttagatgtgagccaccacacctggccctgttttctcttaatgatgtactgcctcacctctcagtggactctgccgacygtaatgtccctttctgccacattgccacttaccagctatttctccttcagctggatagctttaacttaaatgaattttattttccatcacctaggttaag

SEQ ID NO: 104310 - DNA, 201 bp, Homo sapiens
gggcaacgtagcaagaccccatctctaaaaaaaaaaaatttatggagtcagggtctcgctctgtggcccagctcaaactcctggcctccagcagtcctccygcctcagcttcccaaagtgctgagattttagatgtgagccaccacacctggccctgttttctcttaatgatgtactgcctcacctctcagtggactctgc

SEQ ID NO: 104311 - DNA, 201 bp, Homo sapiens
gaggattgcttgacgccaggagtttgagaccagcctgggcaacgtagcaagaccccatctctaaaaaaaaaaaatttatggagtcagggtctcgctctgtkgcccagctcaaactcctggcctccagcagtcctcctgcctcagcttcccaaagtgctgagattttagatgtgagccaccacacctggccctgttttctct

SEQ ID NO: 104312 - DNA, 201 bp, Homo sapiens
tccagcccagcaccctgctcttgtgggcataatataaataacatttggtggtgatgctgctagcaaataattcccaatcccatgtttcttcattttccctktattcatttatttagagtcaaggttttgcctcttgcctagactggagtatactgacatgatcatagctcaccgtaaactcaaactcctgggctcaaagca

SEQ ID NO: 104313 - DNA, 201 bp, Homo sapiens
gtctcgaactcatgacctcgtgatccacctgccttggccttccaacgtgctgggattataggcatgagccaccgcgcctggtctaacttacatccttttgytcttagagcaaaacctgcctgagcttagggtatccagcccagcaccctgctcttgtgggcataatataaataacatttggtggtgatgctgctagcaaat

SEQ ID NO: 104314 - DNA, 201 bp, Homo sapiens
gacagaggattagtatctatagtatatagttgagcctttaccaacatgggtttgaaccatggaggtccatacagttttctcagagcccacagcgggacttsagcgagcagggattttggtgtcacagggatcctggaaccaatcccctgagtataccaagggatgactgtatgtatcaattccaaaatgtcataccactga

SEQ ID NO: 104315 - DNA, 201 bp, Homo sapiens
cctagtctgttaggattcacccccatccctctttgcatgagaacagtgttttcttccggaaaagaaacgggggctgtgacaggctccctgtggtgaagccractaaaaggtaaagcaaaggatttttgccatggaaacaccttagccatgcccaggggccttgggggtggacttggtgctacttttatagcaggcagtaga

SEQ ID NO: 104316 - DNA, 201 bp, Homo sapiens
ttattagtgatggggtttcaccatgttggtcaggctggtctcaaactcctgacctcatgatctgcctgcctcggcctcccaaagtgctggaattacaggtrtgagccaccatgcccagcccatctgtgactcttgactgacctattccttaatgcacttcttgtttgtggtgatgtttgtgtgatagtttaccattcctag

SEQ ID NO: 104317 - DNA, 201 bp, Homo sapiens
agaagcataggtagcctgggccaagtgggaggtttcccctagtctgttaggattcacccccatccctctttgcatgagaacagtgttttcttccggaaaaraaacgggggctgtgacaggctccctgtggtgaagccgactaaaaggtaaagcaaaggatttttgccatggaaacaccttagccatgcccaggggccttgg

SEQ ID NO: 104318 - DNA, 201 bp, Homo sapiens
aactcctgacctcatgatctgcctgcctcggcctcccaaagtgctggaattacaggtgtgagccaccatgcccagcccatctgtgactcttgactgacctrttccttaatgcacttcttgtttgtggtgatgtttgtgtgatagtttaccattcctagagggcagggtcctggggggtttgttctggtagccctcaggttg

SEQ ID NO: 104319 - DNA, 201 bp, Homo sapiens
ccctactttcaaagaaggaagatgggaaagagctgtagatgaaggacaaaagagtatgtctgtttttatcaggaaagctgtagctttctcagaagcttgaytcagcgacttctgtttgtatcagtaagtcacaactgggtcatctggccacgcctgtctgcaaaatggacttgtcagcacctgccttttttgtctctgagg

SEQ ID NO: 104320 - DNA, 201 bp, Homo sapiens
agaggccttagaccagagtgtgcctggcaggaaacagcacaggggccagtgtagctggaacacctgagagagtggcaggagatagctcagagagtagcagrgtgcccaatcgtggggggtgttgtaagctgtggtgaggattgtggattttgttctcagagtgatacagtgttgatggagggtttcaagcaggggagtgct

SEQ ID NO: 104321 - DNA, 201 bp, Homo sapiens
gacaggttggaatttttggaatgagttttacacagtttagtgtggttcagtatttttccagaagcataggtagcctgggccaagtgggaggtttcccctastctgttaggattcacccccatccctctttgcatgagaacagtgttttcttccggaaaagaaacgggggctgtgacaggctccctgtggtgaagccgacta

SEQ ID NO: 104322 - DNA, 201 bp, Homo sapiens
gaagtctctgtcgtaaataggtgataaggcagccagagctctcttttccacttactaaggtctgtgttggttgattctggtgacaacgcctgccttcctcraacacacatgtgtggaattgaccagaaaccaacctttactcctaggcttggtagagtttttcataacttacatgtactgctcactaagaacaaataatat

SEQ ID NO: 104323 - DNA, 201 bp, Homo sapiens
ccacagtgactaagaggaggaggaagggacatcacaggagtcacagggatgagaaaagggttttttgtgttttgtttttaagaaacaacacaggccaggcrcagtggctcacacctgtaatcccagcactttgggaagccgaggtaggcagatcacctgaggtcaggagtttgaggccagcctgaccgacatggagaaatc

SEQ ID NO: 104324 - DNA, 201 bp, Homo sapiens
cacacacagagtaactgtcaatctgtgttgaatgggagcagtgtgaaagatgaattggatgaatttcaggcagaaaggctgttagctattttctagcacaytcctcatatacttatagagtgtttacactgtgcaaggcactgggtatccagactatacagagttgactcaattctcacatctggccaggtgccatagctc

SEQ ID NO: 104325 - DNA, 201 bp, Homo sapiens
agaatgtaagcttcatgagggaaagagtaccacacacagagtaactgtcaatctgtgttgaatgggagcagtgtgaaagatgaattggatgaatttcaggyagaaaggctgttagctattttctagcacactcctcatatacttatagagtgtttacactgtgcaaggcactgggtatccagactatacagagttgactca

SEQ ID NO: 104326 - DNA, 201 bp, Homo sapiens
tagctctattcattccattgcctctttggaaaaagctcaaagtgatctttacaaagtaggacaaggaagggatcctgctcaaaaaacctttaataacgtcwtgctgctataacagtataaagtaaaaacgtattaatcctgacattcaaggtgatttttttcatctggcccttgtctacctgccattctcccctcaacagc

SEQ ID NO: 104327 - DNA, 201 bp, Homo sapiens
ccagagaacccggcactctgttgcaaactcccccgccggccccctccgcaggccagctgcctccaaggggctgtcagcagcagctcctgcagcctgacacytgagccttacgcaggctcctgacagaattatcagagaactggggaacaaatacttcccgtaatcggggcgacggttcttagccagaggtggaggaggcaa

SEQ ID NO: 104328 - DNA, 201 bp, Homo sapiens
acacagctagtaactggaagaacctcgtttggagcctggtgtgctcgtctcaccttgctagatcctttagctctattcattccattgcctctttggaaaamgctcaaagtgatctttacaaagtaggacaaggaagggatcctgctcaaaaaacctttaataacgtcttgctgctataacagtataaagtaaaaacgtatt

SEQ ID NO: 104329 - DNA, 201 bp, Homo sapiens
tatttaactttctccctttcaatattagcaggaggaaacgccggaatttacagcttaaagccttgaccaaagccacacagctagtaactggaagaacctcktttggagcctggtgtgctcgtctcaccttgctagatcctttagctctattcattccattgcctctttggaaaaagctcaaagtgatctttacaaagtagg

SEQ ID NO: 104330 - DNA, 201 bp, Homo sapiens
tcctggcagccacccaacgtttacttggagaccaggtgagggggttcgggcgtctggggctggcagaggagacgcggagcccgggcctcaccacgggtctscgttcctggcgcgttcctccgggaggccggcctccacgtggaggggcgtggagcagcggccgagacggcccccagagggttgagaggggaccgccatcgc

SEQ ID NO: 104331 - DNA, 201 bp, Homo sapiens
tgtagcgtaccttctaaagggctagttccctcttggctgtttaatattctgctttacagttgaattcattcattcaacaagtaattttggagctcctcttrtacatccaccaccagcaaatattttaaaagaatcagagaaagtcaacgaaaaggaaccttagaggaaagcaaaaagttattgtcccttctgtgtttcatg

SEQ ID NO: 104332 - DNA, 201 bp, Homo sapiens
cacaaagccccttggaggactgtggcattgttcccgtctggtatattaacaaagtgtttgtgtcaggtagcactgcttttggctacaagtaacagaaaacytaatcccacgggctgttttttcttacacaacagaacgtctggaagtgagcagttattgtcatctcttcaccagcccagaagagttgtcagggatctaggc

SEQ ID NO: 104333 - DNA, 201 bp, Homo sapiens
aaatgcatcaaatgtgattcaaaggcccctgtaaaatttacagatctcggaactgcctgtttaggggacagtaaggagcagtttggggccagttaatggasactcctagacagaggagttcagatttgattgagcatgactcagggaccatttgggactcttgagtctgggataagacaaatctgaggaaatttcatccag

SEQ ID NO: 104334 - DNA, 201 bp, Homo sapiens
atatgttcagttgtttatgtataaaaataactttctggattttgtggggaggagcaggagaggaaggaagttaatacctatgtaatacatagaaacttccmcaataaaatgccattgatggttgaaattgctgctgtggtctgattctaaatattgtatgaggttccaatggtcattttaatcccagtcatcttaagtagt

SEQ ID NO: 104335 - DNA, 201 bp, Homo sapiens
gtggaactggttgtcttccccacttcaaatgttaggttgctttctctctattctattctagcctgaagaggtgtgggagagaactggagctcagctcatgytgagcgagccccttgtgggagggctagcctctgttctatcttcccagactcccttaaagtcttgtcccagagccccctccaccagccagtggtgtccctc

SEQ ID NO: 104336 - DNA, 201 bp, Homo sapiens
ggccatcattcttgctgtgagatagaatgtgtgactggctgattcatgtgtcatcttccaatcgggcaggtcgaggtggtgcatctatctatggcaaacartttgaagatgaacttcatccagacttgaaattcacgggtaagtgtataatttggctggactgggtaggaacggggattttaaaagctcactcttttggcc

SEQ ID NO: 104337 - DNA, 201 bp, Homo sapiens
agtgtgggtcctacgtttcagtgtatttagtgttcacaacttgcttcgcttttaccttcgcaagtgctggagggcaggatttcttgtctagtggttttttrgtgtttttttttcagaatgctcaagaatcacaattgtccagtggttttttgttacaagagctggaatgtgttgtatttttaagttcattcatgtttcaga

SEQ ID NO: 104338 - DNA, 201 bp, Homo sapiens
gtccccaagtatggcccagcaccctggaaggtggccagccctgcgtgcctgccctgccactcccgagcccctgtgatatgtgtgggcttctgccctcaagsgctttgttttcagagctgctcacccactcccctgttggctgttcagaatcggagggtatttgtgagaatctcagcatgacatttctttcctggttactgg

SEQ ID NO: 104339 - DNA, 201 bp, Homo sapiens
tagctgcctgattgtcctccttcccccagtccgctcattcattcattcattcattcaacaaacgtgtaatgagtccgcaagccaggcatatggaatatgarttctgaggatacagaggtagataaaacacagacagccctgcctttaggagcttacggtataatgaaagagacagacatgtaaacattacgtgataagtaa

SEQ ID NO: 104340 - DNA, 201 bp, Homo sapiens
cgaggtggtgcatctatctatggcaaacagtttgaagatgaacttcatccagacttgaaattcacgggtaagtgtataatttggctggactgggtaggaayggggattttaaaagctcactcttttggccatgattcaaggtgaatgcctgacaccgtggcatggtgccagatagctgcccagccatggcgccatgaagtg

SEQ ID NO: 104341 - DNA, 201 bp, Homo sapiens
ctatgctcatgagtaagtagttggataggaatatggggttcagggaaagacctggtatggaggtattaatttgggagttactggcatttagatggggtttrttagtgaactggtggaacccttactcatttcaagggcccttgcttctcagtctgcttcttctctgctaatttctgctcgtttgcctttaaacaagtttgg

SEQ ID NO: 104342 - DNA, 201 bp, Homo sapiens
tgaaattcacgggtaagtgtataatttggctggactgggtaggaacggggattttaaaagctcactcttttggccatgattcaaggtgaatgcctgacacygtggcatggtgccagatagctgcccagccatggcgccatgaagtgccctggtggattagagaaagcagcgcctctcacaaagttctgagcaattcagagc

SEQ ID NO: 104343 - DNA, 201 bp, Homo sapiens
gtgtattatcttgtctttgagcttttgttatattatatttttacttctcttgaatcatccatagcttgagatagccatggagaagccactttctcccaggytgagttcctgggttttcttttcctttctcccctcctcctttctgtccttctgttggttgtggtatgtttgcctagtttccatgccatttgttttcatctt

SEQ ID NO: 104344 - DNA, 201 bp, Homo sapiens
cagaacaaagtcctggctgctttttcatccctaggatggggcagcagctctacactggacctgtggggttatttatactctttcctttcttcctttttccyaccaggggctggaattctcgcaatggccaatgcggggccagataccaatggcagccagttctttgtgaccctcgcccccacccagtggcttgacggcaaa

SEQ ID NO: 104345 - DNA, 201 bp, Homo sapiens
ctaaccaagtataatgacatgtggcaaggtctgtcatctatggtaatgtactctagaacattacagcaaattcttttaattaaactattaaaaactaacaraacacataaaacttgtccatttcatgtgtttaattttaaagctgtttttggtcaagatcccccggaaccactcttgagatggagatttgtatccaagaag

SEQ ID NO: 104346 - DNA, 201 bp, Homo sapiens
gaatctcataattcagtttgtactataagagatgctttttcagggaaaatggcctgagaagtggttgagacacttaaaatttaaatatgaaatccagattwgttaggtggctgttcttttatttaatatctatgtattaaatgcctactgtgtcaggtatggtgctgagcactaaggattcagcagtagaaaaaaccaaaa

SEQ ID NO: 104347 - DNA, 201 bp, Homo sapiens
ggacaatattcacttggaaaactggctgttccagtatatgttatgtcctggttcttaattctatttacaaagctatttcaagagttataacttcaaacacsaaaaagaacagtctaaccaagtataatgacatgtggcaaggtctgtcatctatggtaatgtactctagaacattacagcaaattcttttaattaaactat

SEQ ID NO: 104348 - DNA, 201 bp, Homo sapiens
gatatcttataaaaaagtatctactgccattgtaggacaatattcacttggaaaactggctgttccagtatatgttatgtcctggttcttaattctatttacaaagctatttcaagagttataacttcaaacaccaaaaagaacagtctaaccaagtataatgacatgtggcaaggtctgtcatctatggtaatgtactct

SEQ ID NO: 104349 - DNA, 201 bp, Homo sapiens
gggtttcaccgtgttagccaggatggtctcaaactcctgacttcgtgatccacctgcctcggcctcccaaggtgctgggattacagatgtgagccaccgcrccccgccctgttcaggtttaaaagtagcaatctgtcttcaggtgttcttaaccactacagaaccctgtctttgctaccatctcttttctcctttctgcgt

SEQ ID NO: 104350 - DNA, 201 bp, Homo sapiens
ttgagagtgaataagaagaggggtaagaagagcccttgttaagctggctctcagtacattagccctccctatccttcaggccccatgaatgactttctctrccctttattctatagtagtcatttgataaggattaggaatatgccaaatgaaggaatattgactagcttaataaaacttgatgagctggtaggttttgtg

SEQ ID NO: 104351 - DNA, 201 bp, Homo sapiens
tcacttattattagttatttggttcatagctaatacttatttaggtgttggtcacaacaagcatgtgctcaaactcaaaagaaaaaacatggacctctgascctagccatacagctcttgagtctcatcttccctcctttgaaagcaatttccatggaggtgtttcttccttccttggggaagtatgccactcttgagagt

SEQ ID NO: 104352 - DNA, 201 bp, Homo sapiens
ctgcgtgagtattcttcagaaacatttatttcaggaaatcatagatgattaatggccataggtttaattttgtggagtaccttaataggaaaatttcactstttagactccatattgaaattgtagtgccaggcagaagtagaccaagatatagggggaagggtacacaaggagagagatcccaagttatcctcctagaca

SEQ ID NO: 104353 - DNA, 201 bp, Homo sapiens
tactgcgtgagtattcttcagaaacatttatttcaggaaatcatagatgattaatggccataggtttaattttgtggagtaccttaataggaaaatttcastctttagactccatattgaaattgtagtgccaggcagaagtagaccaagatatagggggaagggtacacaaggagagagatcccaagttatcctcctaga

SEQ ID NO: 104354 - DNA, 201 bp, Homo sapiens
agctaagcaaaattcatcagtgaaaatctgttacaattactagcaaagtaactcagtgtatattgtcctctagcgtcttatgtgtggcacgctttaaaatrtaatcctaaccagttttcagaattgctttagaactttaagctttgcatgaatttttctttactcctgcattaatcaaattagatattagaggctttaaga

SEQ ID NO: 104355 - DNA, 201 bp, Homo sapiens
gagatcccaagttatcctcctagacatccaaggttgttgaaaagaatcgtgatactctaagtatagaggcaggcagaatagggtatgtaggcagataggtrgacagatagacaggtgggtagcacagacaccatgagcatgtacagccgggaggcgatgtacctagtgatccgcgcatgggcttaatgtctgagttcctgg

SEQ ID NO: 104356 - DNA, 201 bp, Homo sapiens
gaaattggtagcccttgacacttgggcctgtattctggaaaagagaccattgtttcaggtttacaacactgaggatcattcactgccttcatctctctacyacagcagaaatgcacttgggggagcgaagaaaggagtgatttagggaaggagaaggcccagtagtgaaaccaagttaagaatcaagagtcacttttgtaa

SEQ ID NO: 104357 - DNA, 201 bp, Homo sapiens
gtctcatgtgcagtgacagggagtttagatcttaccctggagataatgaaaagctactaggaaattttgaacagaaaggagactagatttgcatcatatawaaatcacttctaacaattggaggacagatcagcaaaggctgagtgagaacttttgaggctaaccaacccatttaggaaggataaccccatagggccagat

SEQ ID NO: 104358 - DNA, 201 bp, Homo sapiens
tcatcttgaacttgtatagtttggttttatgctttgtgtgtagttacgtggaaaacccaagatgtttttcaaactttaagctggtatgagtcagtttccargatctatagatcttggcagagcttggtttttggcttcattatgggaggtttgtaataggtttcactcaagggcgtggcttttattcttaaagagcagcct

SEQ ID NO: 104359 - DNA, 201 bp, Homo sapiens; identical to SEQ ID NO: 16506

SEQ ID NO: 104360 - DNA, 201 bp, Homo sapiens
ggagtgcagtggcgggatctcggctcactgcaacctctgcctcctgggttcaagctattctcctacctcagcctcccgagtagctgggattagaggtgcgygccaccacgcctggctaatttttgtatttttagtaagagacggggtttcaccatgttggccaggctggtctctcctgacctcttggtctgcccacctcag

SEQ ID NO: 104361 - DNA, 201 bp, Homo sapiens
tagctaagagagtaagcttttgttacacaataagaacattgtcattcactaccagtaataattgtcaaataataattcatcaaatgattatattggtatakctataaaagtaattttgtgtaaattaggagacctactttaagggtctactccaaaaattagagtagtttatttttaaccttgagcaaatgatgaattttt

SEQ ID NO: 104362 - DNA, 201 bp, Homo sapiens
ttttggtatcacttgaaggtgttgcccatcatccctgtttccgtctgcctgtgcctttccaaagtgtgtcttacagattttagcccaacactgccaagttkttttttaaaatatatgccatacattagtcttcaaagagttctttgctttatacggtgcaaaacaccgtgtaaataggtatttgctttttgaagatttttt

SEQ ID NO: 104363 - DNA, 201 bp, Homo sapiens
ctggggggatgattcctatgatttgcaaagtaggggaaaaggagggggactgagcatacaaaagctataactaacctggagttaattttgtataggaaaakaaggtatgaggaagcatttgttctggattgttctcatttataaattgttttccaaaactctaatgtgctattgacctgtagtgcttttctggaacaaaaa

SEQ ID NO: 104364 - DNA, 201 bp, Homo sapiens; identical to SEQ ID NO: 16504

SEQ ID NO: 104365 - DNA, 201 bp, Homo sapiens
atagtctgggccacaaagactacagttcttgggcaagtcctggtgttgtgctggacttggagccagtggacttggggggcatgtgacctagtgagacaccrgccaaggtagctaagggagtgcttgtgcccctcttcccccaaccgcaggcagcacagcatgcagctccaggagaggctccttccctccacttgaggagaa

SEQ ID NO: 104366 - DNA, 201 bp, Homo sapiens
ggcagtgagggtggcagagcatggtataagatgaaagtgtagactgaattttgtctctttttttagagcagtggaaagccatggagttttaagggcagggraggtgtgaatgccatatttgtgtcttggaaagatggctttggctgcatgacagcatttggattagagatgtctaagaatggaaagaggtacacacattag

SEQ ID NO: 104367 - DNA, 201 bp, Homo sapiens
gatagatagcgacaggtttgatatgccctttatgattagtgcaaatttgctcacttattattagttatttggttcatagctaatacttatttaggtgttggtcacaacaagcatgtgctcaaactcaaaagaaaaaacatggacctctgagcctagccatacagctcttgagtctcatcttccctcctttgaaagcaattt

SEQ ID NO: 104368 - DNA, 201 bp, Homo sapiens
aaatttaaaagaataacagtaatcaatcactaatagttgcatacttggcagtgtaactcgtggccctcaccacattttgagaatcactgatgcaagtttcraaattcatggttggccaaacacagtggcttacacctgtaattcagcactttggaggctgaggtgggaggatcacttgagaacagcctgggcaacctgggc

SEQ ID NO: 104369 - DNA, 201 bp, Homo sapiens
ttgagcatagaaaacaaaacatttacattcaaatgtctttttattcaaaagaaatgagaatggcgtactctaagatctcagtcttgtcatgactgatttgyaaaatcagggtttaaaacagcccttcagaactattctggcctctcaagtaactgagaaagactattgcttgggcaataaaatgggaacatgatgataaac

SEQ ID NO: 104370 - DNA, 201 bp, Homo sapiens
aaatatggttcacctgctttccatcaaccatttatttgtgtgttgtcagttgcttttttactttctttgagcatagaaaacaaaacatttacattcaaatrtctttttattcaaaagaaatgagaatggcgtactctaagatctcagtcttgtcatgactgatttgcaaaatcagggtttaaaacagcccttcagaactat

SEQ ID NO: 104371 - DNA, 201 bp, Homo sapiens
tccaccgtgctcgaatctcagtgcctcagatagaggctatccatactctatgtaccccagtggcagtcctcattgccagccagccagctagccagtgattytgcctcttagttctcattttagagctatcttcctctaaccattcctggtgccagctatcttagattgagttccctaggaaacagactccaatgtagagat

SEQ ID NO: 104372 - DNA, 201 bp, Homo sapiens
aggggtattttaaaaattaggtgagaaacgtagtgagagcctatagcacactgcctggctaactgaaagtgctcagggaaagttaagttgttattaatacrtatacatgaataggtaaataaatgtattcatatctgtattagactgaacttccagtaaataacaataaagttaaaaatacagtttttggacgagaatccc

SEQ ID NO: 104373 - DNA, 201 bp, Homo sapiens
cagctaaaatgaataaaaagtaaaacactgagtctttgagagggcagttacagttcagatctgttagatacctataatatactcaaatgcagaattgtaayggtaattctgttttaaaatgtgttattcatgtgtctactatattttaatgtctgtttctgtttttagggacttacccttttgtaacctcttcaaattgta

SEQ ID NO: 104374 - DNA, 201 bp, Homo sapiens
tcataaagtcaggtaatttattcttgttctggttatgttaaacgtttattagtatacatggaaattggtttttgtctttgtgtatagggttatatggaaargattaaaccaatggtgagagatggagtttattttctatatgaggccctacatggaccaccaaagaaaatcttggtagaaggtgcaaatgcagcactatta

SEQ ID NO: 104375 - DNA, 201 bp, Homo sapiens
tcaaggtaatgctttctggcatctttaatgttctttttaatacttgtttgccaaattggcatctagatcttttcattcatgcaggctttgggtaagaactrgcaaaggaaattgtttgtcttggacatggtatgtttgagtgactttacatgatatggcttagacaaaatattgagtagggagcaggaggagtacctgaag

SEQ ID NO: 104376 - DNA, 201 bp, Homo sapiens
gagagtgaataagaagaggggtaagaagagcccttgttaagctggctctcagtacattagccctccctatccttcaggccccatgaatgactttctctacyctttattctatagtagtcatttgataaggattaggaatatgccaaatgaaggaatattgactagcttaataaaacttgatgagctggtaggttttgtgac

SEQ ID NO: 104377 - DNA, 201 bp, Homo sapiens
accctgctctttatctactttactgaatttcttggtcctattttctttattatatctcctaaactaacttcagaatacatgtttgtatgtcaaaacaaccrtagaaggggaggcttaatattccaggtttaccttttagcacattaccgaggaggttctcttccttaatctataaggaatatattttaaaaataaatcttc

SEQ ID NO: 104378 - DNA, 201 bp, Homo sapiens
taatttgaatgtcttacttattcatatggctgatctcctttattaaattttatttctcagaaggtgacttcagtttcaggattaatttgctgttaagatcrtttaccatctgcagaaaccatttgaatgaaatgatattatttgaaatatttttcacagagtggtaatgtcttgatttatctgtgtttctcaggtttaaag

SEQ ID NO: 104379 - DNA, 201 bp, Homo sapiens
aatattctattatatggatataccacattttcttcattcatctgttcatagacacttgagttattttcagggtttttttttatattgtgatagtactgctrtgagcatttgcatttaagtctttgtgtggacataggtttttgtttctcttaggtagatacctaggaatggaatctctgggtcagatcatacatttatgtt

SEQ ID NO: 104380 - DNA, 201 bp, Homo sapiens
tgctgggtcttatttgtacatcctgtttagaaatcggcacagtctgctaacagaatagagaacagcaaaaaggcacatagggaaaagttatggtgatactkagaaaagtaggggactacctgttttaatcccaacgagtgaacattagagatgaattgattcaattccttttctctttgtattctcctagttaagtggatt

SEQ ID NO: 104381 - DNA, 201 bp, Homo sapiens
ttcctctttcttttctaatgtaagcatttaaaattacatgtgttcctctaacacatgtaattatgttagcgatattccgcaaatattatttttacaatcayttccattcagttcaaaataacataatttctattttaacttataagttgagtatgatgttcatgtttccaaatattggaagattttcatgatttctctcta

SEQ ID NO: 104382 - DNA, 201 bp, Homo sapiens
gatcgaaatcttgattatggatcctctggcaagtgatttcctttccggtcattagttccccaatcagtaaaacaccttacacaggttgtgtccacaaaggraagaattttatttattttattcatatatgtatacacccaacagctaatttaagtgctgtacttggtcaagatgtactgttttttatcctgacaaatactg

SEQ ID NO: 104383 - DNA, 201 bp, Homo sapiens
actgtggtcaggaaatggtccctaggcagaaagttgggtggcttctggacttgcttgtgagttttctctcccaggagccatggctttgtgcctgcctgtcrttcactgcctagaaagagttgtcattttgagagctggttgggaactgtgtattttatgatgactagaaatggaagccccactgattctcttaattcctcc

SEQ ID NO: 104384 - DNA, 201 bp, Homo sapiens
ctgtaataaaaattatgtgaatgtgtctctctctcaaaatatcctctattgtactgtatttccccttcttgtgatcatgggagatgctacagtgcctccgygatgagatgcagtgaggtgatgtaggcattgtgatgtggcgatgggctactgttggccgtctgtgtaatggcttggtgtcactcatttcaagggattcct

SEQ ID NO: 104385 - DNA, 201 bp, Homo sapiens
atttctgacagaggactgagcctgtagaagataagcgcagactgaaatgtaggtgttagtggtcatatgtgtcataatgggtgtgttaatgctttaaaacrtatatcactaaaagcctgtaaggttcacttcccagggcccttaaaaagtcttataagaaacatattttttattttattttattttattatttttttgaga

SEQ ID NO: 104386 - DNA, 201 bp, Homo sapiens
ttaaaggaaagtatttctgacagaggactgagcctgtagaagataagcgcagactgaaatgtaggtgttagtggtcatatgtgtcataatgggtgtgttaatgctttaaaacgtatatcactaaaagcctgtaaggttcacttcccagggcccttaaaaagtcttataagaaacatattttttattttattttattttatt

SEQ ID NO: 104387 - DNA, 201 bp, Homo sapiens
aaggaggttgtcatttttgttgcctattttaagcttctgattttaaaaatatttatattttgtttgttagcttatcttagaacttgaattttaaacttatrtatcactattgtgctataatataggaagcaatagagtattactaatattcttttttttttagacagagtctcactttgtcacccaggctggagtgcagtg

SEQ ID NO: 104388 - DNA, 201 bp, Homo sapiens
tcttctctgttatttttctctttcagaaccaatggagttgttaattagcagtgacatgatttaagagacaataaccagaaaagaaataagtaaaaaccacrtaggaaacttctctgtgattgatctgcactcttaaattgtatttaagtatgcgtgtgtcctgtggcagtagctgctctagttttaacactggcctctatt

SEQ ID NO: 104389 - DNA, 201 bp, Homo sapiens
taatgaaaaagtttattttctttaccttttttttttttttttttttttttaaagatggagtcttgctctgttgccaggctggagtgcagtggcacaatctyggctcactgcagtctccgcctcccgggttcaagtgattctcctgcctcagcctcccgagtagctgggattacaggcgcccgccatcacgtacccagctaa

SEQ ID NO: 104390 - DNA, 201 bp, Homo sapiens
ggaagaagagaaggacagaggtggaggaggatgaaggaggaagaagagaaggacagaggtagaggaggaggatgaaggaggaagagaaggaggaggaagargaaacaaacttcgtttcatgcacaaaattatttaaaatattgtataaaattgcctcaattgatatgtaaggtgtatatgaaacataaatgaatttcatgt

SEQ ID NO: 104391 - DNA, 201 bp, Homo sapiens
atgtgcgaccttgtttctgactttgatggcttctctgagaggtaactaacttgtgtttcaaaatggaaggaatgaatgcattttttgattttttttaaaayctagggtgcaaaatgatacagtcggtattctagttaaatagtggtggttggcttttttaggtttgaaatattaaagttatttttattacattctaattca

SEQ ID NO: 104392 - DNA, 201 bp, Homo sapiens
tcggtattctagttaaatagtggtggttggcttttttaggtttgaaatattaaagttatttttattacattctaattcatccttggttacagattaacttyatgaaatataacatgacggtgatttaatagaatgtcctaagaagacaaagccagagttatatttaagaattgaaatatggaatggtttcctgagaaatag

SEQ ID NO: 104393 - DNA, 201 bp, Homo sapiens
tctagttaaatagtggtggttggcttttttaggtttgaaatattaaagttatttttattacattctaattcatccttggttacagattaacttcatgaaawataacatgacggtgatttaatagaatgtcctaagaagacaaagccagagttatatttaagaattgaaatatggaatggtttcctgagaaatagaatgatt

SEQ ID NO: 104394 - DNA, 201 bp, Homo sapiens
ctgggtcagatcatacatttatgtttaatgtttaaaagaaatttccaaagtgactacatcactttacattccccccaacaatgtataaggatttccatttyttcacatcctcatcaatacttgtcattgtgtatcttttgattataacctttctagtgggtatgaaccgttggtttcttgttttaatttgtgtttccctaa

SEQ ID NO: 104395 - DNA, 201 bp, Homo sapiens
aaaatgataataaatgaagcattccaaataatgcctccctcagataaaattcatcatctctgtggaattctatcttcaatttagttattacctgaaagatktttatctcaaagaggctttgctatgatctctagcatatattattccaccagatatatagcactgctattctaatcctaaagttcaattttctgttctgta

SEQ ID NO: 104396 - DNA, 201 bp, Homo sapiens
atttgggggagatacttgttaagtccatgtaagaatacaaatttcaggtcacagagttgcttgacacactcttaggatgatgggaattctatgaatatttrcatcaagttagggtaactggatagattactctatcttaagagattttttgtgtgtgtgtagatggaatatcatggttagattgccataatcctccatagc

SEQ ID NO: 104397 - DNA, 201 bp, Homo sapiens
agagaaggatggaggtagaggaggaggatgaaggaggaagaagagaaggacagaggtggaggaggatgaaggaggaagaagagaaggacagaggtagaggdggaggatgaaggaggaagagaaggaggaggaagaggaaacaaacttcgtttcatgcacaaaattatttaaaatattgtataaaattgcctcaattgatat

SEQ ID NO: 104398 - DNA, 201 bp, Homo sapiens
aatttgcaaattttttttctagtctgtggcttgccatttcattgtcttggtgatgttttttgaagtgcaaaagttttaaattttggtcaaatccaacttaycagtttttccttacctaggttgtttttggtgtcacatttaaggaatctgccaatccaaggtcattaaaagtttcatttgatgttttaaaaaaatgtatag

SEQ ID NO: 104399 - DNA, 201 bp, Homo sapiens
aggaagagaaggatggaggtagaggaggaggatgaaggaggaagaagagaaggacagaggtggaggaggatgaaggaggaagaagagaaggacagaggtagaggaggaggatgaaggaggaagagaaggaggaggaagaggaaacaaacttcgtttcatgcacaaaattatttaaaatattgtataaaattgcctcaattg

SEQ ID NO: 104400 - DNA, 201 bp, Homo sapiens
attcctttttaatgctgaataatattctattatatggatataccacattttcttcattcatctgttcatagacacttgagttattttcagggtttttttttatattgtgatagtactgctgtgagcatttgcatttaagtctttgtgtggacataggtttttgtttctcttaggtagatacctaggaatggaatctctggg

SEQ ID NO: 104401 - DNA, 201 bp, Homo sapiens
gagccaccatacctggccaaaacccatgttttacatgaaagaagaagactataatataatacaagacatacagtagttccccccttatccatgagagataygttcaaagacccccagtggatgcctaaaactgtgggtagtagtaccaaatcatatatatactgttttttccaatacatacctgtgataaagtgtaattta

SEQ ID NO: 104402 - DNA, 201 bp, Homo sapiens
tagtgccaggcagaagtagaccaagatatagggggaagggtacacaaggagagagatcccaagttatcctcctagacatccaaggttgttgaaaagaatcrtgatactctaagtatagaggcaggcagaatagggtatgtaggcagataggtggacagatagacaggtgggtagcacagacaccatgagcatgtacagccg

SEQ ID NO: 104403 - DNA, 201 bp, Homo sapiens
acagaagaccaacatcttatgtcattgtattaagtcctgatttttttacacattagtcatctacaaactttatcttaagatagctagaattacaatatgtrggtgacaaaactaggaaattcctgagtttgcacactgtcagtcttgttttctagaggatctggagctctcctttcgttgctacaactcagggataaaagg

SEQ ID NO: 104404 - DNA, 201 bp, Homo sapiens
gaggctaaccaacccatttaggaaggataaccccatagggccagattctttagcactgcactcttaagagacaaataaggtaattgaccaaagattagtcwtttcttggcaactagtaggtgtcagtggtgcttacattggccagtagttgaaattcctgtcctcttcattctttcaccttttacgatttttgatgaactt

SEQ ID NO: 104405 - DNA, 201 bp, Homo sapiens
tacagtggggaaaggagacagccaaactattttaaagccttttacaaatgagtagaggtggtaaatatttgggctctcttaagttgaccttttggcaggargtcattaattcactttggagggagataggttatttgtagtatttatcatcaggctcaattttcccctatcttacattttagggaggaaataatgctggcc

SEQ ID NO: 104406 - DNA, 201 bp, Homo sapiens
agtttggatcccagccacagtaggggcagggcactgggcggagtcctgagttccccgtcacaggccctagttccagggcaaatttctagacataccctggkccagaaaggaagttgctaccttgaagggaaggacccagttctggcaggattcgttacctactagctaaaaagcccatgagccttgaataattagcagcgt

SEQ ID NO: 104407 - DNA, 201 bp, Homo sapiens
aggatttggtcttgcagtttggatcccagccacagtaggggcagggcactgggcggagtcctgagttccccgtcacaggccctagttccagggcaaatttstagacataccctgggccagaaaggaagttgctaccttgaagggaaggacccagttctggcaggattcgttacctactagctaaaaagcccatgagccttg

SEQ ID NO: 104408 - DNA, 201 bp, Homo sapiens
aacaaatgaggggccttgttgggcagacttccctcacctgtgtatttttgacttaactaccttccttatagaatccttatgttcttttagtgctttttaaragtgtatcattaggattctttattagtcttgttagcaaaaaatagatgagtaatgaatagatttaagcattatctcttttgtgatttaccttggtaactt

SEQ ID NO: 104409 - DNA, 201 bp, Homo sapiens
tcaaaggacaaccactactgctgccttaattttaaatcaatatttattttaagaagaagagagaagaattaaatagaggcccaaccctgggtacaggtcaytcatctagtaaacattgagtatctgcaggggatcacttagcctgggagtcaaaaatctgaaaaaggcagggattgtgcccacaaggagctcacaatctgg

SEQ ID NO: 104410 - DNA, 201 bp, Homo sapiens
catggcactgaacggacagttctgtaagctccattgtaatttaaggcattagaattctcatttcagaactgaatacaggatctggcatatagatgcttcaraatgttcatttatttccaaggatttaaaaaattttccataatatgagattctgtataaaagtgtgctgggtgatatggagcgtagtacaatggaaaaaac

SEQ ID NO: 104411 - DNA, 201 bp, Homo sapiens
tggtactgagagctgcttgcaatttgaaactcataaattatttttggaattttcaatgtaatatttttggggcaggtttggcctccagtaactaaaaccamcgaaaatgaaaccacagatgggggagagactactgtattacgcttaagaaggccctaatgggagcacaggaaaattgctaaaactgtatgctctaaattt

SEQ ID NO: 104412 - DNA, 201 bp, Homo sapiens
aataattggtatagaaaatgggaaatctcactagaaaaaatgtaagaaaaaatttttaaaaataattaagcctatttattaaagaacaaatataagatggygagggagttaggcataacaacgtatggctgtatctagttatgtgaagtcattcttttaacagatggctttttccttgtatcgttttgttggcattgatgg

SEQ ID NO: 104413 - DNA, 201 bp, Homo sapiens
tccctatctgttcactcaataacaatgaaatttgcttaatttatattagctactttttttctgttagtctaacatttagaccatctcgagcttctcttgaytattcttttgcttggttgtggatcactgtttctatgcctaatgactattgattgatagtcattggttgactattagacattgtggatgatatattaaaga

SEQ ID NO: 104414 - DNA, 201 bp, Homo sapiens
gacatgtggcaaggtctgtcatctatggtaatgtactctagaacattacagcaaattcttttaattaaactattaaaaactaacaaaacacataaaacttktccatttcatgtgtttaattttaaagctgtttttggtcaagatcccccggaaccactcttgagatggagatttgtatccaagaagtgtagtagagaatgc

SEQ ID NO: 104415 - DNA, 201 bp, Homo sapiens
gcccggctaatttttgtatttttagtagagacagggttttgccacgttggccaggctggtctcgaactcctggcctcaagagattcacctgccttggcctyctaaattgatgggattacaggcgtgagccagcgtgcccggtcagaatatactccattttcttgatccattcttctgtcagtagacacgagttgtttccgt

SEQ ID NO: 104416 - DNA, 201 bp, Homo sapiens
tcagttcctcctgttgggttttataataccttattcctaatacttcatactgtgggatatgaagatgggaaaagagtgataaccgctctagcttctttctsctgacagggagcgtagtcagggtaggtgttgacccaaaggtaggaggagtgaaaccactttgcagctgtctgcttctactcaggggttcctggttagggt

SEQ ID NO: 104417 - DNA, 201 bp, Homo sapiens; identical to SEQ ID NO: 16511

SEQ ID NO: 104418 - DNA, 201 bp, Homo sapiens; identical to SEQ ID NO: 16512

SEQ ID NO: 104419 - DNA, 201 bp, Homo sapiens
gaggatcaccggagtccagggaggtcgaggctgcgatgagctatgaccatgccactgcactccagcttgggtgacaagtgagaccctatctcaaaaaaaawttttttctttaatttttaaataagaaaataagacttatgtacttgtgttacccttagagttttggtctcctgattattgtgtggcttatgactgttgtat

SEQ ID NO: 104420 - DNA, 201 bp, Homo sapiens
aggatcaccggagtccagggaggtcgaggctgcgatgagctatgaccatgccactgcactccagcttgggtgacaagtgagaccctatctcaaaaaaaaawtttttctttaatttttaaataagaaaataagacttatgtacttgtgttacccttagagttttggtctcctgattattgtgtggcttatgactgttgtatt

SEQ ID NO: 104421 - DNA, 201 bp, Homo sapiens
aaaattgaggcagaagatcaaaatcggagtggtaggcggatcggactttgagaaagtgcaggagcaactgggaaatgatggtaaatgatgggttgctaatkacatctggtaaaagattaacttcttatgaggatattgttgccaagtatcataggctgccctaaaaccttgtccccatatggcgggctttctgcttccttt

SEQ ID NO: 104422 - DNA, 201 bp, Homo sapiens
tcccaaaagtgggatccttacatgttgttttagttttagttttctttctcttaacgtattttatttttatcatattagtgaatattctttgcaaagaagattttttttttttttttgagacagagtcttgctctgtcacccaggctggagtgcagtggcgtgatctcggctcactgtaagctccacctcccgggttcacac

SEQ ID NO: 104423 - DNA, 201 bp, Homo sapiens
ctttaaggcagttgcaacatgaaaacattctaacacttcatgaatatcaagcagctggtttggtttttgacttgacgcttccattttgggtaatttggctrtcagtgcactcaagcatgtgtgaaagactcacgcagagggttcagggttggggacagccccgctgctcctcaggaggctggccacatgacagtggtctgt

SEQ ID NO: 104424 - DNA, 201 bp, Homo sapiens
cccaaaagtgggatccttacatgttgttttagttttagttttctttctcttaacgtattttatttttatcatattagtgaatattctttgcaaagaagattttttttttttttttgagacagagtcttgctctgtcacccaggctggagtgcagtggcgtgatctcggctcactgtaagctccacctcccgggttcacacc

SEQ ID NO: 104425 - DNA, 201 bp, Homo sapiens
ctcagagcctttttctgtgtagctttgcttggtactatcagtctgttcagaagctccgtagcaaaatagatgtctggtacatgtattttcaaactcttcarggaaatgactgctgttgccagtgctggaaatcattttcatagctctttattaaccacaaaattatctgcccagtagcagcactgtgcaacagaaatagaa

SEQ ID NO: 104426 - DNA, 201 bp, Homo sapiens
atgttagccaggatggtcatgatctcctgacctcgtgatccgtccgcctcggcctcccaaagtgctgggattacaggcgtgagccactgcgcctggcgcaaagaagatttttaatggctgtataatattctctcattaggcatcagttactcacctcccttgcagaggcacgttgggtggtttaaggggttttgctatcat

SEQ ID NO: 104427 - DNA, 201 bp, Homo sapiens
gattgggtaataaaatgtatattgagaataagacggccttttgaccttttagggtctaggggctgaggaagaattggaacctagctcggcctggcgaggaggggagaggtcagatgggtctgtagaaaaggaagattagaaagactcagcaacgcttggggttgggactgagggaacaggcaggagggaaagaaggaagat

SEQ ID NO: 104428 - DNA, 201 bp, Homo sapiens
attgggtaataaaatgtatattgagaataagacggccttttgaccttttagggtctaggggctgaggaagaattggaacctagctcggcctggcgaggaggggagaggtcagatgggtctgtagaaaaggaagattagaaagactcagcaacgcttggggttgggactgagggaacaggcaggagggaaagaaggaagatt

SEQ ID NO: 104429 - DNA, 201 bp, Homo sapiens
tgttagccaggatggtcatgatctcctgacctcgtgatccgtccgcctcggcctcccaaagtgctgggattacaggcgtgagccactgcgcctggcgcaaagaagatttttaatggctgtataatattctctcattaggcatcagttactcacctcccttgcagaggcacgttgggtggtttaaggggttttgctatcata

SEQ ID NO: 104430 - DNA, 201 bp, Homo sapiens
tcatctgtacttcgtgtctttccagggtggcaatgaccatgagatcttcacagaccccagaaccatgggctactccgtgacagcgcctgaggacacgcgcwggatctgtgaactgctgttctcctaacgtgggagcgggaggggcggggtcccggctgacaagccagcatagggcattcggtggccagagccgagggtcct

SEQ ID NO: 104431 - DNA, 201 bp, Homo sapiens
gttagccaggatggtcatgatctcctgacctcgtgatccgtccgcctcggcctcccaaagtgctgggattacaggcgtgagccactgcgcctggcgcaaagaagatttttaatggctgtataatattctctcattaggcatcagttactcacctcccttgcagaggcacgttgggtggtttaaggggttttgctatcataa

SEQ ID NO: 104432 - DNA, 201 bp, Homo sapiens
tagctcggcctggcgaggaggggagaggtcagatgggtctgtagaaaaggaagattagaaagactcagcaacgcttggggttgggactgagggaacaggcrggagggaaagaaggaagatttgggacgagttgcactgggcacagagactaggaagggactgatgtgtaaaagaatgcctggacatcaggcacctcagact

SEQ ID NO: 104433 - DNA, 201 bp, Homo sapiens
atctattgaaaaataaaatttttaaatcaacttgagaaaaggatctgagtaatccctgtaatcctggctactagggaggctgaagtgggaggattacttgrgcctaggagttcaagattatagtgagccacgattgcgccactgcactccagcctaggcaacagagcgagacctcgtctcttaaaaaaaaaaaaaacaata

SEQ ID NO: 104434 - DNA, 201 bp, Homo sapiens
atgtgtaaaagaatgcctggacatcaggcacctcagactgtttgcccattttacgacaagaattatttagatcttgcaggatggaaaaattgaaagtgccrttttctggctatttggaactactgtcgagtttgtattggggtcaagcggcattgcagaagaaaataaggcatttatttaggttttaggtcaggtatgagt

SEQ ID NO: 104435 - DNA, 201 bp, Homo sapiens
ctgtaatcctggctactagggaggctgaagtgggaggattacttgagcctaggagttcaagattatagtgagccacgattgcgccactgcactccagcctrggcaacagagcgagacctcgtctcttaaaaaaaaaaaaaacaataaaaattaaaaatttttaaaaattgaaaaaagggaggaaatgtaaatcttccagca

SEQ ID NO: 104436 - DNA, 201 bp, Homo sapiens
ttaccctccagaaaagcgggaaaggggttggggcatggaaataagggattggggcacagagatacgagtttggggtacttgcctctcccccagaaaagcgrgacttgccgctaagggtgaaggagaaggggttggggggttcttgcccctgccccagaaaatcagagaaggggtagagacacggaaagaaggggttggggt

SEQ ID NO: 104437 - DNA, 201 bp, Homo sapiens
tacagaggaagcacagtgggaagtccagggtctcagctagtcagagactaagctgggatctgaaagcctcgcctctgtcattctcctacatcgcttctaamatgctacctgccttccttttaagtaaattgtgcaacattttattctccagaaatgttaataaggaagatctgcctttaaaattagcttaaaaatacaaaa

SEQ ID NO: 104438 - DNA, 201 bp, Homo sapiens
attgatctcccaagggaggtctcccgatctgagtcacggcaccaaatttcatgcgcgtccatgtgaagagaccaccaaacaggctttgtgtgagcaacacrgctgtttatttcacctgggtgcaggcgggctgagtccgaaaagagagtcggcaaagggtggtggattatcattagttcttatgggttttgggataggcgg

SEQ ID NO: 104439 - DNA, 201 bp, Homo sapiens
ccattcaccagtgaccttgtgacagtgaggacagtgacagtgacctcgtcagcccagtgaggacacagttcttctttttttttttttttttcctgagacamggtctcactctgtcacccagactggagtgcagtggcgcaatcttggttcactgtaatcttgaactcctgggctcaagtgatcctcccacttcagcctcct

SEQ ID NO: 104440 - DNA, 201 bp, Homo sapiens
cagtgacctcgtcagcccagtgaggacacagttcttctttttttttttttttttcctgagacaaggtctcactctgtcacccagactggagtgcagtggcrcaatcttggttcactgtaatcttgaactcctgggctcaagtgatcctcccacttcagcctcctgagtagctgggattaccggtgcccaccaccacgcctg

SEQ ID NO: 104441 - DNA, 201 bp, Homo sapiens
tcacagtcttccagcatgaggggtacacagtggtagtagaggcttgttacttattttcagaatgataaaactgaaacccataaagggtaagggatttgccraaggtcacacggctaatgacagagctggtggcaccagaagaagtctacctgttctttgtatgttttaaatagctttattgaggtataattgatcagcaaa

SEQ ID NO: 104442 - DNA, 201 bp, Homo sapiens
cattttcttgatccattcttctgtcagtagacacgagttgtttccgtatcttggccattatgaataatgcttcagtgaacacgggggtacagatacctctytgagatcctgacttcgtccttttggccatctacccatggattaaagacttaaacacaggacctgaaactgtaaaactcctagaaaaaaaacatagggaaa

SEQ ID NO: 104443 - DNA, 201 bp, Homo sapiens
taggcgccaaggggtggctaaggaccgcctacgtcctcacggcgctgaaccctattctgggtgcactggaggaatgagagggaggccctaaccagctcttsaagagctctggtgcttggaaagatgagacggggctgaagaactcttaagagcaggaaacttgtgctaggttggaaaatgtaatctggactcaccgctagt

SEQ ID NO: 104444 - DNA, 201 bp, Homo sapiens
aaaatagtgttgaagtgttggggcggtgaaaatttttagggggtggtatggagagagaatggacgatgtttctcagggctgcttcaagcgggattaggggyggcgtgggaacctagagtgggagagattaagctgaagggaggtcttgtggtaaggggtgatattgtggggatgttagaagaaacatctgtcgtatagaat

SEQ ID NO: 104445 - DNA, 201 bp, Homo sapiens
gatttgtttaccagaaatacctacaaaaaagtttgcaggccgggcgcgatggctcacacttgtaatcccagcactttgagaggccgagatgggcagatcayctgaggtcaggggttcaagaccatcctgcccaacatgatgaaacctggtctctactaaaaatacaaaaattaaccgggtgtggtggcgcatgcctgtaat

SEQ ID NO: 104446 - DNA, 201 bp, Homo sapiens
gcatgggagccacgagcttcagatgttcctgctagcccaccttcctcctgagtgccagactccacagagtccatggccctgggtgttggtcccaagaatasgactgtggctaacaaccagcccacagagtgagcatccctgcctgtgtctgtgctgaagctctttcattcagggagacactggcttcaaacccctggagtg

SEQ ID NO: 104447 - DNA, 201 bp, Homo sapiens
agcacagcctccaggaggcagagtctggtgttacataaagggtgccatctgcttggagcaactcgagagcagagtgaggaagtgtggcgttggccgttgcytttcaaaatatttgccatcttcagaaaccctgtcattcttcccatcagccacaaaagccagtgtttcttaaaatctggctctgagttcagcatggaggcc

SEQ ID NO: 104448 - DNA, 201 bp, Homo sapiens
aatgtcgggagcagattgggtaataaaatgtatattgagaataagacggccttttgaccttttagggtctaggggctgaggaagaattggaacctagctcrgcctggcgaggaggggagaggtcagatgggtctgtagaaaaggaagattagaaagactcagcaacgcttggggttgggactgagggaacaggcaggaggg

SEQ ID NO: 104449 - DNA, 201 bp, Homo sapiens
tttattggtggtcattgttaatcaaggagtaaaaacacaggttttgattctttgcattctaagtgtttttttggttttgattgtagtggttgaaaaatackattatgtgtttccagaaaatggcttggtagcatacaaagatgggaaactcttgtgtagacaggtaggttcttgagtatctgaattactatatactattaa

SEQ ID NO: 104450 - DNA, 201 bp, Homo sapiens
tgttacccttagagttttggtctcctgattattgtgtggcttatgactgttgtattttctttcttgaaatttagaaaattaccaaagaaatggatgacttyctacaaaaattgaggcagaagatcaaaatcggagtggtaggcggatcggactttgagaaagtgcaggagcaactgggaaatgatggtaaatgatgggttg

SEQ ID NO: 104451 - DNA, 201 bp, Homo sapiens
ggtggtcattgttaatcaaggagtaaaaacacaggttttgattctttgcattctaagtgtttttttggttttgattgtagtggttgaaaaatacgattatrtgtttccagaaaatggcttggtagcatacaaagatgggaaactcttgtgtagacaggtaggttcttgagtatctgaattactatatactattaaaagtgt

SEQ ID NO: 104452 - DNA, 201 bp, Homo sapiens
aggctgaagtcagggacataagataacctgtcaccaagtccctaatctcctgcccagtcatcatcgtttaaatgtgtaaccaaaaagagccattaaaaaarcaaggaacttttttccatactcttctcttagtctgtaagatgagatagtctttcacagtccttgctggagtttagcggttttattggtggtcattgttaa

SEQ ID NO: 104453 - DNA, 201 bp, Homo sapiens
agtattttcttcatctagaatattcaaagtcatctgggtgaggccctaatccaagatttaatcaactactgtctgagctacattgcgaaaattaaactccygaagaagaggtgggtttgcttttaacaaagaggcgtcacaggaacatagcgtagtgtcacatggtgggctaatgtgggcattctccaaataggattataa

SEQ ID NO: 104454 - DNA, 201 bp, Homo sapiens
ccgaaatgggatgttaaacgtgtcccctattggaagaagctgcagccaagaagaacgcattgagttctacgaactcgataaagtacgtctttctgaaatayctttggtgaatggctgggtttatggaaataagatatggcctggtgtggtggttcatgcctgtaatcccaacactttgggaggccaaggcaggaggatcac

SEQ ID NO: 104455 - DNA, 201 bp, Homo sapiens; identical to SEQ ID NO: 16552

SEQ ID NO: 104456 - DNA, 201 bp, Homo sapiens
gctttttagaatttcccaagattttaggctgtttatctatgatgttgcccaaatgaataacgtgtttttggagaaactctgtcaccctttcattcccaggsgtactttcattgaattccgaaatgggatgttaaacgtgtcccctattggaagaagctgcagccaagaagaacgcattgagttctacgaactcgataaagt

SEQ ID NO: 104457 - DNA, 201 bp, Homo sapiens
gaatttcccaagattttaggctgtttatctatgatgttgcccaaatgaataacgtgtttttggagaaactctgtcaccctttcattcccaggggtactttmattgaattccgaaatgggatgttaaacgtgtcccctattggaagaagctgcagccaagaagaacgcattgagttctacgaactcgataaagtacgtcttt

SEQ ID NO: 104458 - DNA, 201 bp, Homo sapiens
ttcttatgaggatattgttgccaagtatcataggctgccctaaaaccttgtccccatatggcgggctttctgcttccttttttgggaaacattttcttggmctttgcttttcctctgcttttaatccagtacatttctggagttactgatggagaactgggtactcagatgtgtgagtagattcacctagaaaggtcagtg

SEQ ID NO: 104459 - DNA, 201 bp, Homo sapiens
tgaggaattatgtctgacagaagggaagaaatgactgcggtggccttctcagaccctgtaggaaaggcctctacttatctagtgaaagtgtctacttagastaagaggtattttagttacctgactcggggcatgttgagtgaagctaatttgccagtcctgggtgggggcaaatcctcaagcttgatgtgtagggaaggg

SEQ ID NO: 104460 - DNA, 201 bp, Homo sapiens
ggacagagtaagagccgctgacaaaggattctgccaagacagaatcccaaggtcacaggagagaggcttggggcagtgaaagccctctcgggtcttggctktggaagtgtggactgtaccagcagatgggcccttgggaagccaacagggaacaattcaaggctggagagaaaaggccacctttgacccagcagaaggcag

SEQ ID NO: 104461 - DNA, 201 bp, Homo sapiens
attaggggcggcgtgggaacctagagtgggagagattaagctgaagggaggtcttgtggtaaggggtgatattgtggggatgttagaagaaacatctgtcrtatagaatgattggtgatggcctggatacggttttggatgaattcagaaactaaatggaataagagaaggagaaaaacaggtataaaaggtctaagaatt

SEQ ID NO: 104462 - DNA, 201 bp, Homo sapiens
gaaaatgctcctgctaaatcaagtaactcaagtattttcttcatctagaatattcaaagtcatctgggtgaggccctaatccaagatttaatcaactactktctgagctacattgcgaaaattaaactcccgaagaagaggtgggtttgcttttaacaaagaggcgtcacaggaacatagcgtagtgtcacatggtgggct

SEQ ID NO: 104463 - DNA, 201 bp, Homo sapiens
gcctgacattcctgccttcttatattaataagaaaaataaaatagtgttgaagtgttggggcggtgaaaatttttagggggtggtatggagagagaatggrcgatgtttctcagggctgcttcaagcgggattaggggcggcgtgggaacctagagtgggagagattaagctgaagggaggtcttgtggtaaggggtgata

SEQ ID NO: 104464 - DNA, 201 bp, Homo sapiens; identical to SEQ ID NO: 16509

SEQ ID NO: 104465 - DNA, 201 bp, Homo sapiens
catcctcccgagtagcttggactataggtgcccaccaccacgcccggctaattttttgtatttttagtagagatggggttcaccatgttagccaggatggkcatgatctcctgacctcgtgatccgtccgcctcggcctcccaaagtgctgggattacaggcgtgagccactgcgcctggcgcaaagaagatttttaatgg

SEQ ID NO: 104466 - DNA, 201 bp, Homo sapiens; identical to SEQ ID NO: 16514

SEQ ID NO: 104467 - DNA, 201 bp, Homo sapiens
atttcccaagattttaggctgtttatctatgatgttgcccaaatgaataacgtgtttttggagaaactctgtcaccctttcattcccaggggtactttcaytgaattccgaaatgggatgttaaacgtgtcccctattggaagaagctgcagccaagaagaacgcattgagttctacgaactcgataaagtacgtctttct

SEQ ID NO: 104468 - DNA, 201 bp, Homo sapiens
gattttaggctgtttatctatgatgttgcccaaatgaataacgtgtttttggagaaactctgtcaccctttcattcccaggggtactttcattgaattccraaatgggatgttaaacgtgtcccctattggaagaagctgcagccaagaagaacgcattgagttctacgaactcgataaagtacgtctttctgaaatacct

SEQ ID NO: 104469 - DNA, 201 bp, Homo sapiens
agattttaggctgtttatctatgatgttgcccaaatgaataacgtgtttttggagaaactctgtcaccctttcattcccaggggtactttcattgaattcbgaaatgggatgttaaacgtgtcccctattggaagaagctgcagccaagaagaacgcattgagttctacgaactcgataaagtacgtctttctgaaatacc

SEQ ID NO: 104470 - DNA, 201 bp, Homo sapiens
tttggagaaactctgtcaccctttcattcccaggggtactttcattgaattccgaaatgggatgttaaacgtgtcccctattggaagaagctgcagccaaraagaacgcattgagttctacgaactcgataaagtacgtctttctgaaatacctttggtgaatggctgggtttatggaaataagatatggcctggtgtggt

SEQ ID NO: 104471 - DNA, 201 bp, Homo sapiens
tcaccctttcattcccaggggtactttcattgaattccgaaatgggatgttaaacgtgtcccctattggaagaagctgcagccaagaagaacgcattgagytctacgaactcgataaagtacgtctttctgaaatacctttggtgaatggctgggtttatggaaataagatatggcctggtgtggtggttcatgcctgtaa

SEQ ID NO: 104472 - DNA, 201 bp, Homo sapiens
tcccaggggtactttcattgaattccgaaatgggatgttaaacgtgtcccctattggaagaagctgcagccaagaagaacgcattgagttctacgaactcrataaagtacgtctttctgaaatacctttggtgaatggctgggtttatggaaataagatatggcctggtgtggtggttcatgcctgtaatcccaacacttt

SEQ ID NO: 104473 - DNA, 201 bp, Homo sapiens
atcaataagataatcctacctttgtggccagtagttaaaactgtgctttctaaactgcaatacaagaaacaattggtatctttttgtttttctcagaaagraaatataagacaaaagtttgtagcagatctacggaaagagtttgctggaaaaggcctcacgttttccataggtattgtatatattgcctgtgttccaaac

SEQ ID NO: 104474 - DNA, 201 bp, Homo sapiens
aagataatcctacctttgtggccagtagttaaaactgtgctttctaaactgcaatacaagaaacaattggtatctttttgtttttctcagaaagaaaatayaagacaaaagtttgtagcagatctacggaaagagtttgctggaaaaggcctcacgttttccataggtattgtatatattgcctgtgttccaaacttggat

SEQ ID NO: 104475 - DNA, 201 bp, Homo sapiens
caagaaacaattggtatctttttgtttttctcagaaagaaaatataagacaaaagtttgtagcagatctacggaaagagtttgctggaaaaggcctcacgktttccataggtattgtatatattgcctgtgttccaaacttggatacccatttcccagagtttgttgtgggccagtgagctattgataatgaagtatgtgc

SEQ ID NO: 104476 - DNA, 201 bp, Homo sapiens
ataagatatggcctggtgtggtggttcatgcctgtaatcccaacactttgggaggccaaggcaggaggatcacttgagcccaggagttcaagaccagcctrggcaacatagtgagacctcatctctacaaataataaaaacaaaaattagctgggcatggtggcacacacctgtggtcccggctatttgtttggctgaggt

SEQ ID NO: 104477 - DNA, 201 bp, Homo sapiens
attggtatctttttgtttttctcagaaagaaaatataagacaaaagtttgtagcagatctacggaaagagtttgctggaaaaggcctcacgttttccatasgtattgtatatattgcctgtgttccaaacttggatacccatttcccagagtttgttgtgggccagtgagctattgataatgaagtatgtgcagttttagg

SEQ ID NO: 104478 - DNA, 201 bp, Homo sapiens
cagctttgatgtctttcctgatggatgggacaagagatactgtctgcgacatgtggaaaatgacggttataagaccatttatttctttggagacaaaactrtgccagtaagtagagaagtgtttgtgcaccttcattgttgcatttgcgcttgatgggggaaattgacaactgggctgtttttcctgtacctacactttac

SEQ ID NO: 104479 - DNA, 201 bp, Homo sapiens
tgcaacttccacctcccgagttcaagcaattctcctgcctcagcctcccgagcagctgggatttcagacgtgcgccaccatgcccagctaatttttgtatyttaagtagaaatggagttttgctgtgttagccaggttggtctcaaattcctgacctcaagtgatccacccttctcagcctcccaaagtgctgggattaca

SEQ ID NO: 104480 - DNA, 201 bp, Homo sapiens
agatggggagttggcgcagccacactgctgctcagtggtagaaccagcatctgacccaggccacctgttccagagaccctgcttttagccagcagctcagwccccagtcatgtggggccatttatttatttatttaagatagagtctccctttgtcgcccaggctggagtgcagtggtgcgatctcggcttactgcaactt

SEQ ID NO: 104481 - DNA, 201 bp, Homo sapiens
acaaagaaccttcttaagggtgggggagattacaaagtacattgatcagtttgggtggggcagaagcaaatcacaatggtgggatgtcatcagttaaggcyatttttacttttgcggatcttcagttacttcaggccatctggatgtatacgtgcaagtcacaggggatgcgatggcttggcttgggctcagaggcctgac

SEQ ID NO: 104482 - DNA, 201 bp, Homo sapiens
ttagttcttatgggttttgggataggcggtgaagttaagagcaatgttttgcgggcaggagtggatctcacaaagtacatcctcaagagtggggagaattwcaaagaaccttcttaagggtgggggagattacaaagtacattgatcagtttgggtggggcagaagcaaatcacaatggtgggatgtcatcagttaaggcc

SEQ ID NO: 104483 - DNA, 201 bp, Homo sapiens
agcagataatttaaagtgtctcggcctaataagggaactgggcaggtggggataactaaaaggagtgcttaaaagagtaatgtctaaattggcaccagagytggggagttttaagaggtttagaagcctggccgtcaatacccacaacagttacggaggcaagggaaacaggcccttgaaaagaaggtaatgtggagtggg

SEQ ID NO: 104484 - DNA, 201 bp, Homo sapiens
tgttgcccaaatgaataacgtgtttttggagaaactctgtcaccctttcattcccaggggtactttcattgaattccgaaatgggatgttaaacgtgtccsctattggaagaagctgcagccaagaagaacgcattgagttctacgaactcgataaagtacgtctttctgaaatacctttggtgaatggctgggtttatgg

SEQ ID NO: 104485 - DNA, 201 bp, Homo sapiens
gggaagcagataatttaaagtgtctcggcctaataagggaactgggcaggtggggataactaaaaggagtgcttaaaagagtaatgtctaaattggcaccmgagttggggagttttaagaggtttagaagcctggccgtcaatacccacaacagttacggaggcaagggaaacaggcccttgaaaagaaggtaatgtggag

SEQ ID NO: 104486 - DNA, 201 bp, Homo sapiens
agccttcatctgtacttcgtgtctttccagggtggcaatgaccatgagatcttcacagaccccagaaccatgggctactccgtgacagcgcctgaggacabgcgcaggatctgtgaactgctgttctcctaacgtgggagcgggaggggcggggtcccggctgacaagccagcatagggcattcggtggccagagccgagg

SEQ ID NO: 104487 - DNA, 201 bp, Homo sapiens
gaatactcagggaagcagataatttaaagtgtctcggcctaataagggaactgggcaggtggggataactaaaaggagtgcttaaaagagtaatgtctaarttggcaccagagttggggagttttaagaggtttagaagcctggccgtcaatacccacaacagttacggaggcaagggaaacaggcccttgaaaagaaggt

SEQ ID NO: 104488 - DNA, 201 bp, Homo sapiens
cctagacatgggcccttgcagactttctgaggcctcggtttcgtcatcttaccaaggtgtgaccccaaccatcatctcctgaacttctggccacagagctstgagcaagcttccatcatgaccccattttggagatggggagttggcgcagccacactgctgctcagtggtagaaccagcatctgacccaggccacctgtt

SEQ ID NO: 104489 - DNA, 201 bp, Homo sapiens
tagttcaggaatactcagggaagcagataatttaaagtgtctcggcctaataagggaactgggcaggtggggataactaaaaggagtgcttaaaagagtawtgtctaaattggcaccagagttggggagttttaagaggtttagaagcctggccgtcaatacccacaacagttacggaggcaagggaaacaggcccttgaa

SEQ ID NO: 104490 - DNA, 201 bp, Homo sapiens; identical to SEQ ID NO: 16540

SEQ ID NO: 104491 - DNA, 201 bp, Homo sapiens
ctgtagttcaggaatactcagggaagcagataatttaaagtgtctcggcctaataagggaactgggcaggtggggataactaaaaggagtgcttaaaagastaatgtctaaattggcaccagagttggggagttttaagaggtttagaagcctggccgtcaatacccacaacagttacggaggcaagggaaacaggccctt

SEQ ID NO: 104492 - DNA, 201 bp, Homo sapiens
ttggttgccaaggagggagtagaggtatcttatacttgtgggttaaggttgggggatacaagaggaggacacaaaggaggctttggattgggaagaagggyggcaatgagatgtagctgtagttcaggaatactcagggaagcagataatttaaagtgtctcggcctaataagggaactgggcaggtggggataactaaaa

SEQ ID NO: 104493 - DNA, 201 bp, Homo sapiens
gcccaaatgaataacgtgtttttggagaaactctgtcaccctttcattcccaggggtactttcattgaattccgaaatgggatgttaaacgtgtcccctahtggaagaagctgcagccaagaagaacgcattgagttctacgaactcgataaagtacgtctttctgaaatacctttggtgaatggctgggtttatggaaat

SEQ ID NO: 104494 - DNA, 201 bp, Homo sapiens
tgggtactcagatgtgtgagtagattcacctagaaaggtcagtggctgtatctgcacatgataatctctctgcctggaatacttcttgcttgtacccgttsacagcccttctagccccagtcagaccgatcttcatattgtccctctgacagcccccctcacctccccatcactgaaacagaatctccagcacaggacccc

SEQ ID NO: 104495 - DNA, 201 bp, Homo sapiens
tacgtcctcacggcgctgaaccctattctgggtgcactggaggaatgagagggaggccctaaccagctcttgaagagctctggtgcttggaaagatgagayggggctgaagaactcttaagagcaggaaacttgtgctaggttggaaaatgtaatctggactcaccgctagtgctcgggactgatagaccaggatttcaac

SEQ ID NO: 104496 - DNA, 201 bp, Homo sapiens
caacactttgggaggccaaggcaggaggatcacttgagcccaggagttcaagaccagcctgggcaacatagtgagacctcatctctacaaataataaaaamaaaaattagctgggcatggtggcacacacctgtggtcccggctatttgtttggctgaggtaagaggatcacttgtgcctgggaggttgaagctgctgtga

SEQ ID NO: 104497 - DNA, 201 bp, Homo sapiens
tacttcgtgtctttccagggtggcaatgaccatgagatcttcacagaccccagaaccatgggctactccgtgacagcgcctgaggacacgcgcaggatctstgaactgctgttctcctaacgtgggagcgggaggggcggggtcccggctgacaagccagcatagggcattcggtggccagagccgagggtcctcccacac

SEQ ID NO: 104498 - DNA, 201 bp, Homo sapiens
gcagatctacggaaagagtttgctggaaaaggcctcacgttttccataggtattgtatatattgcctgtgttccaaacttggatacccatttcccagagtwtgttgtgggccagtgagctattgataatgaagtatgtgcagttttaggtgggcaggaagattaaatgagcagtccagtctatagacaaaaaccaaccact

SEQ ID NO: 104499 - DNA, 201 bp, Homo sapiens
ccccgcactgtggtgggatgtaaagtgataacagctaaacgacgcatgcacaacatgtcctggtgccttctgcgtgaccccagagcagcaggttctgcacrtggcaggtaagagcacagctgccaagaccccaagcctagttctgctgctacaagctgctgcgtgacttaaggtgagttcatcttcgcctcagtttcctcc

SEQ ID NO: 104500 - DNA, 201 bp, Homo sapiens
ccacctgaggaggccatctgcctggggataggttcttgcaaaaatgaaaacactcatttccagaggcaattaattcttttaaaggatgtcagatttttggyacaaaatcatggtttccacgttggcttcatgctcggtgctttatgagaaaaatcccttttttctacggttgtgttcattgtattgtaaagcaatcgtaga

SEQ ID NO: 104501 - DNA, 201 bp, Homo sapiens
ggtgtggggcatgctcatgatctgtccgggaaggtctctccagctactggaaggggagtgcccacaggggccaggagaaggcagttgggcagatgttgccrtagtccggacacatccaggcatacgtggttttgaatcacttcctctccaagggctgctgcttcctctccacccctcccaagtgttctggctctgggcccc

SEQ ID NO: 104502 - DNA, 201 bp, Homo sapiens
cacaccctcagccttcctgttaatccaggcgacccagggttacccagaggtccaggtcccagttgttcacttgagcatctgatgtaccccaaacacctgtrtgaaacgctctctgtccaggatgcgtccatagcgcagggtgacgtagaaggtctgtttcccactgtaccgctggatacgcacaaacatctcctgaggccg

SEQ ID NO: 104503 - DNA, 201 bp, Homo sapiens
acgataagctctctctcagtggggtagaaagatcttgttctaaatcccagatgaactgggtactttgaaggaggtgtagcattcaggtttgttcttaatgrcagttacatatggttttataaccacatccttttgttgaaatgcttttgatgcagaaatgctttcagtgcaggctttgaaaaagatcaccgtctgacttca

SEQ ID NO: 104504 - DNA, 201 bp, Homo sapiens
cctgagttcaagcaattgtcccgcttcagcctcccaagtagctggaattagaggcgtgcactaccacagctggtgatacctgctgtttaaatgagtgtgckttccactacgataagctctctctcagtggggtagaaagatcttgttctaaatcccagatgaactgggtactttgaaggaggtgtagcattcaggtttgtt

SEQ ID NO: 104505 - DNA, 201 bp, Homo sapiens
atgtggggaggttcagactcttgcagccagaggctccgtggctccaaaaccataatttctaatcttgtaactaatttgttagtcctacaaaggcagactgstccccaggcaagaagggggtttatttcaggaaagagctgttatcctttgtttcaaagttgaactataggccgggcagggtggctcacgcctgtaatccca

SEQ ID NO: 104506 - DNA, 201 bp, Homo sapiens
tggtgccagtgtcagcccccagtcgaagagaactaggtggccgcctgggctggcctctggatccatcaccagtgaggggggttggggaggctactgaatcrctggaagatagccacaagggagatcacagatgagcccccaaatttgtaaccccctccacaggttctccttgcccacagcctagacagccaatttatcaag

SEQ ID NO: 104507 - DNA, 201 bp, Homo sapiens
cctagaaaggtcagtggctgtatctgcacatgataatctctctgcctggaatacttcttgcttgtacccgttgacagcccttctagccccagtcagaccgrtcttcatattgtccctctgacagcccccctcacctccccatcactgaaacagaatctccagcacaggaccccgaaaaaccagagaggcttattgacccct

SEQ ID NO: 104508 - DNA, 201 bp, Homo sapiens
gtgcgatcttagctcactgcagcctccacccaccgggttccagtgattttcctgcctcagcctccagagtagctggggatttgtattcacagcacagagtrcaccagattccctacagcctaagtctaggctcataagattttttctattaatcagacccttgcagaggagacaaacagtgatgttttccattcatacacg

SEQ ID NO: 104509 - DNA, 201 bp, Homo sapiens
atctggagatattttaattgaataaaagtggcagcagtaagctctttggaccttacaggaagcatttgaacaataatgagtacaaaaatcttgggtgatgwagcagaaaatgcttttgactaaagcttttctggcttgcctaatgcttttgaccagagaaataagagaaggaattaaacagacagtggggcatgtcaccat

SEQ ID NO: 104510 - DNA, 201 bp, Homo sapiens
cagcaatggcccgggacagacgagggggagccttcatctgtacttcgtgtctttccagggtggcaatgaccatgagatcttcacagaccccagaaccatgbgctactccgtgacagcgcctgaggacacgcgcaggatctgtgaactgctgttctcctaacgtgggagcgggaggggcggggtcccggctgacaagccagc

SEQ ID NO: 104511 - DNA, 201 bp, Homo sapiens
gtggtagaggacaggctgggcctctgccaactccgggacggcctggacatgggattattgagagagatttttaggctcgcatattttgttacatcatttgsctctttctctgcaagttgagcaaaataggagagaggatccagacgattgagattttgctgtttttactttaatgagtattcattgcttcccactttacaa

SEQ ID NO: 104512 - DNA, 201 bp, Homo sapiens
gttggaaaatgtaatctggactcaccgctagtgctcgggactgatagaccaggatttcaacccaagatcaggcccccttatcagctatgtgccggccccartcctgtaaccaatgggctgtgccgtgagtcatgatattaaaaacaggtttccaggtcaaaccgacctagtggagtctcatcttcacctcttgacatctgt

SEQ ID NO: 104513 - DNA, 201 bp, Homo sapiens
ttagttctccattatgaaggctgtcctgtgcattgtagggtctttagcaacatcccaggcctctacccactagatgcccacagcatacacacacgcacacmtacggctatgactaccagaaatgtctccagacattgccaaatgacctctgtgtaaaattacccccgtttgagaactactgttctcaaagatgtaatatgt

SEQ ID NO: 104514 - DNA, 201 bp, Homo sapiens
gcttatgactgttgtattttctttcttgaaatttagaaaattaccaaagaaatggatgacttcctacaaaaattgaggcagaagatcaaaatcggagtggyaggcggatcggactttgagaaagtgcaggagcaactgggaaatgatggtaaatgatgggttgctaattacatctggtaaaagattaacttcttatgagga

SEQ ID NO: 104515 - DNA, 201 bp, Homo sapiens
tgacatatcattagcccctttttcaccttttgcctttgtgtgccccgtccccacccggcaggaggccagatcagctttgatgtctttcctgatggatgggrcaagagatactgtctgcgacatgtggaaaatgacggttataagaccatttatttctttggagacaaaactatgccagtaagtagagaagtgtttgtgcac

SEQ ID NO: 104516 - DNA, 201 bp, Homo sapiens
aatggcccgggacagacgagggggagccttcatctgtacttcgtgtctttccagggtggcaatgaccatgagatcttcacagaccccagaaccatgggctmctccgtgacagcgcctgaggacacgcgcaggatctgtgaactgctgttctcctaacgtgggagcgggaggggcggggtcccggctgacaagccagcatag

SEQ ID NO: 104517 - DNA, 201 bp, Homo sapiens
tagaagagactaaaaaatctagttatcttactcttttacatttttgttttgttttgggtgattgcaataaaatcaattctaagcttctccttttttttttkttttgttttgttttgttttgttttgagacgaagtctcgctctgtgacccaggctggagtgcagtggcacgatcttggctcactgcaacctctgactcccg

SEQ ID NO: 104518 - DNA, 201 bp, Homo sapiens
cgggggctttcctgcagggctcggggttgcgggagcggcagataacctgattcattaacatgagcccagtgggattggtgggggtgatggggacacagatkggagcactcaactcaggcacaggaccccagcagaacatgcccaggtcctcctagacatgggcccttgcagactttctgaggcctcggtttcgtcatctta

SEQ ID NO: 104519 - DNA, 201 bp, Homo sapiens
tcagcctcccgagtagctgggactacaggcgcccaccagcgcgcccgcctaatttttgtatttttaatagagacagggtttcgccacgttggccaggctgrtctcgaactctgacctcaggtgatccacccgcctcggcctcctaaagtgccgggattacaggcatgagcctccatgtctggccctaagcttcctctttaa

SEQ ID NO: 104520 - DNA, 201 bp, Homo sapiens
caacattataaatatatagaccgaagaagatgcattagttaagatttttcatttgctgattttttaggggttttttttccccattttacaaatcttgtcaygactcacagagaccatctatgccatgcttggactgtctgacttgtcctatgtgtccctctttcgtgaataatcagtcgttctattttaggacaagaattt

SEQ ID NO: 104521 - DNA, 201 bp, Homo sapiens
aacttaaatccataaatggagtatagtgtagcatttaaaaggaatgatgagctagatctgtgttggcatgaaaagatcaccacagcatagtgctgaaaaascaaagtccctgcacaggacatgattccatttatgtttcaaaaataagacctatttgtatatgtgcccatagatgggtatataaatgcatagaaaaatagc

SEQ ID NO: 104522 - DNA, 201 bp, Homo sapiens
ttgcccaggctggagtgcagtggcacattctcagctcactgcaacctctgcctctcaggttcaagcaattcttctgcctcaacctcccgagtagctgggaytacaggcgtgtgccaccacgcccggctaatttttgtatttttagtagagacaggatttcaccatatgggccaggctggtttcgaacttctgacctcgtga

SEQ ID NO: 104523 - DNA, 201 bp, Homo sapiens
tacaggcacccaccaccactcctggctaatttttgtattttttagtagagactgggtttcgccatgttggccaggctggtcttgaactcctgaccccacgwgatcgcccacctcagcctcccaaagcgctgggattacagttgtgagccaccactcctagccaaagctagtttttaataaaattttacaaacaaatgtatc

SEQ ID NO: 104524 - DNA, 201 bp, Homo sapiens; identical to SEQ ID NO: 16545

SEQ ID NO: 104525 - DNA, 201 bp, Homo sapiens
aattttttaattttttgtagagatagggtcttgccatatggcccaggctggtctccaactcctggcctcaagcgatcctcccacttcactctcccaaaatkttgggattacaggcattagccactgcccctggctttcataaatgtttggtttggggacctaccttctgccatgggtacaattatctcagttccattttta

SEQ ID NO: 104526 - DNA, 201 bp, Homo sapiens
aacagtagaagagacctggtgaatccaggaggcagaactgagacccaccttgatccacatttgtccacatttgcctgacaacactaactacatgccccacracggccaggcagatgcagtaagacttcagagagcccaggtctttagggcggaactgattgcttagtaaaccaccttcagccttgttttggggaaggcttt

SEQ ID NO: 104527 - DNA, 201 bp, Homo sapiens
tgtcatgcatgggagccacgagcttcagatgttcctgctagcccaccttcctcctgagtgccagactccacagagtccatggccctgggtgttggtcccargaatacgactgtggctaacaaccagcccacagagtgagcatccctgcctgtgtctgtgctgaagctctttcattcagggagacactggcttcaaacccct

SEQ ID NO: 104528 - DNA, 201 bp, Homo sapiens
gatactgtctgcgacatgtggaaaatgacggttataagaccatttatttctttggagacaaaactatgccagtaagtagagaagtgtttgtgcaccttcaytgttgcatttgcgcttgatgggggaaattgacaactgggctgtttttcctgtacctacactttacccacccgccctgctcaaactgagcagtggcttctg

SEQ ID NO: 104529 - DNA, 201 bp, Homo sapiens
gttccagactggcctgggcaacatggcaaaactttgtctctacaaaatataaaaaaattagccaggtgtgctggcacataactatggtcccagctactcaggaggcagagataggaggatcaccggagtccagggaggtcgaggctgcgatgagctatgaccatgccactgcactccagcttgggtgacaagtgagaccct

SEQ ID NO: 104530 - DNA, 201 bp, Homo sapiens
agacctcgtctcttaaaaaaaaaaaaaacaataaaaattaaaaatttttaaaaattgaaaaaagggaggaaatgtaaatcttccagcacttcctcagtgtsagaccctgagctggacacttatgttgtacatgctcccaggggagacagcagcatcctccctcttacagaggaagcacagtgggaagtccagggtctcagc

SEQ ID NO: 104531 - DNA, 201 bp, Homo sapiens
tggtctcctgattattgtgtggcttatgactgttgtattttctttcttgaaatttagaaaattaccaaagaaatggatgacttcctacaaaaattgaggcwgaagatcaaaatcggagtggtaggcggatcggactttgagaaagtgcaggagcaactgggaaatgatggtaaatgatgggttgctaattacatctggtaa

SEQ ID NO: 104532 - DNA, 201 bp, Homo sapiens
atctctaacccctgacctcaagtgatccgcccacctcagcctcccagagtgctgggattacaggcatgagccaccacacccagccttttcttctttttttwaaaagatggggtcttgctgtgttaaccaggctggagtgcagtggtgcaatcccagtggcctagaactcctgggcacaggtgatcctctgcctcagcctcc

SEQ ID NO: 104533 - DNA, 201 bp, Homo sapiens
tttaaattttctgtagccacattttgaaagaatgaaaaggaagaggtgaaatgaattttaataatatattttatttagcctgatatttctaaaatatgacttttttttttttttttttgagacagggtctcactctgtcacccagactggagtgcagtggtgtgatctcagctcactataacccctatctcccaggctcat

SEQ ID NO: 104534 - DNA, 201 bp, Homo sapiens
tcctcctgtcctcaggttccaagttaggctttggatggcagttggcctttgcgatcctggacttaaccatgcctagcatctgtagctctttcaggactcawggctaaggagggcacagaatggattctgtggatagatctgtcttactacttattgctgggaccacatgatttgagacccaggtcttcttgtgtggctggt

SEQ ID NO: 104535 - DNA, 201 bp, Homo sapiens
tttttcccgcaaaatatgccggatgcaacctgcttccgggcatttccccctgagggtgtgttaaagcccgagacaagcacagcagaatgaggctggtatcmgatttttcataagcatgcttcctttaaaccacacgcttgacagggcgcttaaacgcaaatgcatttctcactctgagttggcattctgtgcctcaatttt

SEQ ID NO: 104536 - DNA, 201 bp, Homo sapiens
cctggcttatacctgtaatctcagcactttgggaggccaaggctggtggatctcctgaacccaggagttccagactggcctgggcaacatggcaaaacttwgtctctacaaaatataaaaaaattagccaggtgtgctggcacataactatggtcccagctactcaggaggcagagataggaggatcaccggagtccaggg

SEQ ID NO: 104537 - DNA, 201 bp, Homo sapiens
gaatctcgctctgtcgcccaggctagagtgcagtggcaccatcttggctcactgcaacctccacctccctggttccctggttcaagtgattctcgtgcctyagcctcccgattagtggctgggattacaggagcctgccaccacgcccggctaatttttgtatttttagtagagacagggttttgccacgttggccaggct

SEQ ID NO: 104538 - DNA, 201 bp, Homo sapiens
ataatcccagcacttggggaggccgaggcggatggatcacctgaggtcaggagtttgagaccagcctggccgacatgatcaaaccccatttctactaaaamtacaaaaaatgagctgggcgtgatgacgggcacctgtaatcccagctactcaggaggccgaggcaggagaattgcttgaacccaggaggcagaggttgca

SEQ ID NO: 104539 - DNA, 201 bp, Homo sapiens
ctgccttggcctcctaaattgatgggattacaggcgtgagccagcgtgcccggtcagaatatactccattttcttgatccattcttctgtcagtagacacragttgtttccgtatcttggccattatgaataatgcttcagtgaacacgggggtacagatacctctttgagatcctgacttcgtccttttggccatctacc

SEQ ID NO: 104540 - DNA, 201 bp, Homo sapiens
tgagccgagatcacaccattgcactccagcctgggcaataagaacgaaactccgtcttggaaaaaaaaaaaaaattataagtggagaggtggatgaattgrttgttcttttaacccctgttgtccccagagtcctcacatcttggaaccagctcctctagagcaagatttctcaccttcgcactattgatattttggacca

SEQ ID NO: 104541 - DNA, 201 bp, Homo sapiens
tcatgagcctgaaacaggagaggacaccagcaacagcaaagaggccaagtgagtcccaggcatcacacacggcgggtgcttggagctgcccccaagggatktcagaaatctcgagttcagggccaaatctaaactgagaactgagagcagagcccagtgttaaaggccagggccagcaggaggaatacatagaagaaatgc

SEQ ID NO: 104542 - DNA, 201 bp, Homo sapiens
ctggagtacagtggcacgatctcagctcactgcaagctctatctcctgggttcatgtcattctcctgcttcagcctcccgagtagctgggactacaggcgygtgccaccacgcctggctaattttttgtattttttagtagagacggggtttcaccatgttagccaggatggtcttgatctcctgacctcgtgatccaccc

SEQ ID NO: 104543 - DNA, 201 bp, Homo sapiens
tcatttgcctctttctctgcaagttgagcaaaataggagagaggatccagacgattgagattttgctgtttttactttaatgagtattcattgcttcccastttacaaagtacctttacataactggcatgtttgatttttaacaaggccctttggaggtaaccagagcaagtgccattagcctttctgtaggtgaataag

SEQ ID NO: 104544 - DNA, 201 bp, Homo sapiens
gtttttgttgttgtttgaggtggagtctcgctctgttgcccaggctggagtacagtggcacgatctcagctcactgcaagctctatctcctgggttcatgycattctcctgcttcagcctcccgagtagctgggactacaggcgcgtgccaccacgcctggctaattttttgtattttttagtagagacggggtttcacca

SEQ ID NO: 104545 - DNA, 201 bp, Homo sapiens
atactcacaaatagtttccaaattctggagaaatcagagagaaggcaatatgctctaaattttgctcacagaagtatactttaactcaattgttaaagttrtaaatagctcaaaagaaaaatagttttctggactctgaaaaacaaaaggattaacaatgtttaacacatcagctctccatgaggatcctagaagtttttt

SEQ ID NO: 104546 - DNA, 201 bp, Homo sapiens
gttttgaaaatgctcctgctaaatcaagtaactcaagtattttcttcatctagaatattcaaagtcatctgggtgaggccctaatccaagatttaatcaastactgtctgagctacattgcgaaaattaaactcccgaagaagaggtgggtttgcttttaacaaagaggcgtcacaggaacatagcgtagtgtcacatggt

SEQ ID NO: 104547 - DNA, 201 bp, Homo sapiens
tagcccctttttcaccttttgcctttgtgtgccccgtccccacccggcaggaggccagatcagctttgatgtctttcctgatggatgggacaagagatackgtctgcgacatgtggaaaatgacggttataagaccatttatttctttggagacaaaactatgccagtaagtagagaagtgtttgtgcaccttcattgttg

SEQ ID NO: 104548 - DNA, 201 bp, Homo sapiens
aagagggcaaaggaatttctctttttgttagcttataaatgcataaaaggagtctgaatggatgaaatttacagaggttactgtgggggtggggaggacargagagagaattgccacctaggtcttaactctttcttaatatgtttgaactatatgaatgtgctatctattgaaaaataaaatttttaaatcaacttgaga

SEQ ID NO: 104549 - DNA, 201 bp, Homo sapiens
tccgggccgagttcctcgtgccaacgtgtcttgtaaggtgcggctagaaactggggacatggcagcgcctggcccagcgctctgcctcttcgacgtggatsggaccctcaccgccccgcggcaggtaagtggcggccggcgggctgctggcagccgacgcggagcccgtgctgttcccagttggggctatcgaccacccag

SEQ ID NO: 104550 - DNA, 201 bp, Homo sapiens
ttgtgtggcttatgactgttgtattttctttcttgaaatttagaaaattaccaaagaaatggatgacttcctacaaaaattgaggcagaagatcaaaatcrgagtggtaggcggatcggactttgagaaagtgcaggagcaactgggaaatgatggtaaatgatgggttgctaattacatctggtaaaagattaacttctt

SEQ ID NO: 104551 - DNA, 201 bp, Homo sapiens
gcagagggttcagggttggggacagccccgctgctcctcaggaggctggccacatgacagtggtctgtctctgcactgggatgccatgtagctgtaaaaasagtccatgtggacccatctctagggctttttgttaggtgatcaaagcaaagtgcaggacaatataagtaatgtgctggctacatttttgtctaaagaggg

SEQ ID NO: 104552 - DNA, 201 bp, Homo sapiens
acagacgagggggagccttcatctgtacttcgtgtctttccagggtggcaatgaccatgagatcttcacagaccccagaaccatgggctactccgtgacarcgcctgaggacacgcgcaggatctgtgaactgctgttctcctaacgtgggagcgggaggggcggggtcccggctgacaagccagcatagggcattcggtg

SEQ ID NO: 104553 - DNA, 201 bp, Homo sapiens
gttttattggtggtcattgttaatcaaggagtaaaaacacaggttttgattctttgcattctaagtgtttttttggttttgattgtagtggttgaaaaatrcgattatgtgtttccagaaaatggcttggtagcatacaaagatgggaaactcttgtgtagacaggtaggttcttgagtatctgaattactatatactatt

SEQ ID NO: 104554 - DNA, 201 bp, Homo sapiens
tgactgctgttgccagtgctggaaatcattttcatagctctttattaaccacaaaattatctgcccagtagcagcactgtgcaacagaaatagaaagtgarctatgtataattttaaattttctgtagccacattttgaaagaatgaaaaggaagaggtgaaatgaattttaataatatattttatttagcctgatatttc

SEQ ID NO: 104555 - DNA, 201 bp, Homo sapiens
cttcatctgtacttcgtgtctttccagggtggcaatgaccatgagatcttcacagaccccagaaccatgggctactccgtgacagcgcctgaggacacgcscaggatctgtgaactgctgttctcctaacgtgggagcgggaggggcggggtcccggctgacaagccagcatagggcattcggtggccagagccgagggtc

SEQ ID NO: 104556 - DNA, 201 bp, Homo sapiens
gtcccagcctttctatgtatatgatcccaaaagtgggatccttacatgttgttttagttttagttttctttctcttaacgtattttatttttatcatattrgtgaatattctttgcaaagaagattttttttttttttttgagacagagtcttgctctgtcacccaggctggagtgcagtggcgtgatctcggctcactgt

SEQ ID NO: 104557 - DNA, 201 bp, Homo sapiens
gcactatagtgaactccataagggagacatggaattgaaccccttaggtaaactagaccgatgttttggaatcatagaatgtttcaacagcaaggaacctyaggggccaattgggtggcttttacagatcaagaaactgaggcccagaaaggagaagagacttgtccaagttcacaaagctgttgtttacacagccagtgt

SEQ ID NO: 104558 - DNA, 201 bp, Homo sapiens
ggatttcaccatatgggccaggctggtttcgaacttctgacctcgtgatctgcctgcgtcggccttccaaagtgctaggattacaggcatgtgccaccgcrtctggcataaaaccctattattttgatatatgggcccagattctggccctgcatcagtatgcttttaatatttaatttatggaaaaaattaaataatacc

SEQ ID NO: 104559 - DNA, 201 bp, Homo sapiens
tcccaggggagacagcagcatcctccctcttacagaggaagcacagtgggaagtccagggtctcagctagtcagagactaagctgggatctgaaagcctcrcctctgtcattctcctacatcgcttctaaaatgctacctgccttccttttaagtaaattgtgcaacattttattctccagaaatgttaataaggaagatc

SEQ ID NO: 104560 - DNA, 201 bp, Homo sapiens
cccgggacagacgagggggagccttcatctgtacttcgtgtctttccagggtggcaatgaccatgagatcttcacagaccccagaaccatgggctactccrtgacagcgcctgaggacacgcgcaggatctgtgaactgctgttctcctaacgtgggagcgggaggggcggggtcccggctgacaagccagcatagggcat

SEQ ID NO: 104561 - DNA, 201 bp, Homo sapiens
aggaggacacaaaggaggctttggattgggaagaagggcggcaatgagatgtagctgtagttcaggaatactcagggaagcagataatttaaagtgtctcrgcctaataagggaactgggcaggtggggataactaaaaggagtgcttaaaagagtaatgtctaaattggcaccagagttggggagttttaagaggtttag

SEQ ID NO: 104562 - DNA, 201 bp, Homo sapiens
ccttcatctgtacttcgtgtctttccagggtggcaatgaccatgagatcttcacagaccccagaaccatgggctactccgtgacagcgcctgaggacacgsgcaggatctgtgaactgctgttctcctaacgtgggagcgggaggggcggggtcccggctgacaagccagcatagggcattcggtggccagagccgagggt

SEQ ID NO: 104563 - DNA, 201 bp, Homo sapiens
ttcatcatgttggccaggctggtcttgattcctggcctcaaggaatctgcctgcctcagcgatccacccacctcggcctctcagttctgggatgacaggcygcgcccagccccatcaccttttcagttactcccatcctctgggcccctctgcctccctcccacatgcaggctgggggtgttggttaccttgccatcagca

SEQ ID NO: 104564 - DNA, 201 bp, Homo sapiens
tataagaccatttatttctttggagacaaaactatgccagtaagtagagaagtgtttgtgcaccttcattgttgcatttgcgcttgatgggggaaattgayaactgggctgtttttcctgtacctacactttacccacccgccctgctcaaactgagcagtggcttctgtcctggagaggtgggtgattgagccaccttcc

SEQ ID NO: 104565 - DNA, 201 bp, Homo sapiens; identical to SEQ ID NO: 16542

SEQ ID NO: 104566 - DNA, 201 bp, Homo sapiens
ttcaccttttgcctttgtgtgccccgtccccacccggcaggaggccagatcagctttgatgtctttcctgatggatgggacaagagatactgtctgcgacrtgtggaaaatgacggttataagaccatttatttctttggagacaaaactatgccagtaagtagagaagtgtttgtgcaccttcattgttgcatttgcgct

SEQ ID NO: 104567 - DNA, 201 bp, Homo sapiens
tgcaccctgggagttgcggtccaggaatcgtggctgccgctactcccaggcgttatgggaacggagtcccctcctcttcccgacgtgccctgcgactcagsggccgaacccggaagttccgggccgagttcctcgtgccaacgtgtcttgtaaggtgcggctagaaactggggacatggcagcgcctggcccagcgctctg

SEQ ID NO: 104568 - DNA, 201 bp, Homo sapiens
gcatctctaattgtatcctattacaaaagaaaacagattgttactgcccttgcacaaataattatactgccataagttgagaatactcacaaatagtttcyaaattctggagaaatcagagagaaggcaatatgctctaaattttgctcacagaagtatactttaactcaattgttaaagttataaatagctcaaaagaaa

SEQ ID NO: 104569 - DNA, 201 bp, Homo sapiens
ctactatacctgcaaagataaacctgtatgagttgggtgaaattttttcttctcatggtcctaagataatttggggctcctgggcctgtcaaaaagtgacrgtctttatttaccacagttcaggaaccccgtacagggactgtgtagacaaggtatgaggccagcttttccaagggacttctattggctctgttagtcaac

SEQ ID NO: 104570 - DNA, 201 bp, Homo sapiens
tctcagagcctttttctgtgtagctttgcttggtactatcagtctgttcagaagctccgtagcaaaatagatgtctggtacatgtattttcaaactcttcwgggaaatgactgctgttgccagtgctggaaatcattttcatagctctttattaaccacaaaattatctgcccagtagcagcactgtgcaacagaaataga

SEQ ID NO: 104571 - DNA, 201 bp, Homo sapiens
actgtgagatggacatctttctgacaaagctttgaaagggtttttgttgcccgtgagcactgcctgtaaatcaccttcagtgaagattctcatttttcccrcaaaatatgccggatgcaacctgcttccgggcatttccccctgagggtgtgttaaagcccgagacaagcacagcagaatgaggctggtatcagatttttc

SEQ ID NO: 104572 - DNA, 201 bp, Homo sapiens
tccgggcatttccccctgagggtgtgttaaagcccgagacaagcacagcagaatgaggctggtatcagatttttcataagcatgcttcctttaaaccacaygcttgacagggcgcttaaacgcaaatgcatttctcactctgagttggcattctgtgcctcaattttagacctatgtgaaataatgctggaaaaaaacaat

SEQ ID NO: 104573 - DNA, 201 bp, Homo sapiens
ttttgcctttgtgtgccccgtccccacccggcaggaggccagatcagctttgatgtctttcctgatggatgggacaagagatactgtctgcgacatgtggmaaatgacggttataagaccatttatttctttggagacaaaactatgccagtaagtagagaagtgtttgtgcaccttcattgttgcatttgcgcttgatgg

SEQ ID NO: 104574 - DNA, 201 bp, Homo sapiens
ggaggaatcctgggctgcaggcattccttggccctggtagtcagatttctggcacgtgtagcaagctcctgggggaggaggttctggaggaacgcctggcygctgcggttcaggcatttggaagttcttgtgtgctggagatgtggctggggtttgtctcacagtggaggcaaggaattgcaacttttttctattattgta

SEQ ID NO: 104575 - DNA, 201 bp, Homo sapiens
gcatttggaagttcttgtgtgctggagatgtggctggggtttgtctcacagtggaggcaaggaattgcaacttttttctattattgtacaccttgaaggtraggttaattaagtcctgttgtggagtttgagggccagattctaatttttggagttttatttaatgtcgggagcagattgggtaataaaatgtatattgag

SEQ ID NO: 104576 - DNA, 201 bp, Homo sapiens
atgacagaactgagacttctgactccaaatcttacgctcccccgccacacctctttgcctttctctttcacaccaatggactctatgggtgaccttggcayaggttcttctaagaactggctcttaacaaaaacttctggccattatctgactgaatgtcacaaacaagtgctgtaagaacttgcttagagcctttttcct

SEQ ID NO: 104577 - DNA, 201 bp, Homo sapiens
tgaacgatgggaggatagggaatgatctcatgagcctgaaacaggagaggacaccagcaacagcaaagaggccaagtgagtcccaggcatcacacacggcrggtgcttggagctgcccccaagggatgtcagaaatctcgagttcagggccaaatctaaactgagaactgagagcagagcccagtgttaaaggccagggcc

SEQ ID NO: 104578 - DNA, 201 bp, Homo sapiens
cttttcagttactcccatcctctgggcccctctgcctccctcccacatgcaggctgggggtgttggttaccttgccatcagcaggcccgtgtcaggctttstcgccatcctgcacctagcaggtgcatcataaatgctgcatattcagagtttctcatccctctgatctctggtccactccaaaatccttgctgcactgct

SEQ ID NO: 104579 - DNA, 201 bp, Homo sapiens
gcagaatctcgctctgtcgcccaggctagagtgcagtggcaccatcttggctcactgcaacctccacctccctggttccctggttcaagtgattctcgtgsctcagcctcccgattagtggctgggattacaggagcctgccaccacgcccggctaatttttgtatttttagtagagacagggttttgccacgttggccag

SEQ ID NO: 104580 - DNA, 201 bp, Homo sapiens
ttgatgggctggttttttcccaatatgctttggaaatcattgtataatactgacaagaaaagtgtccatctctgcaccacccaaaatcactgcctcccttrggagacaccggccagagcaaagccttcccaacagagcacagcgaccccagagtggcccctgcctgtcactgctctcctggaaaccaagaacaggagttct

SEQ ID NO: 104581 - DNA, 201 bp, Homo sapiens
tttcagattagtgatgatgaaccaggttatgaccttgatttattttgcatacctaatcattatgctgaggatttggaaagggtgtttattcctcatggacyaattatggacaggtaagtaagatcttaaaatgaggttttttactttttcttgtgttaatttcaaacatcagcagctgttctgagtacttgctatttgaac

SEQ ID NO: 104582 - DNA, 201 bp, Homo sapiens
tcagattagtgatgatgaaccaggttatgaccttgatttattttgcatacctaatcattatgctgaggatttggaaagggtgtttattcctcatggactawttatggacaggtaagtaagatcttaaaatgaggttttttactttttcttgtgttaatttcaaacatcagcagctgttctgagtacttgctatttgaacat

SEQ ID NO: 104583 - DNA, 201 bp, Homo sapiens
cagattagtgatgatgaaccaggttatgaccttgatttattttgcatacctaatcattatgctgaggatttggaaagggtgtttattcctcatggactaaytatggacaggtaagtaagatcttaaaatgaggttttttactttttcttgtgttaatttcaaacatcagcagctgttctgagtacttgctatttgaacata

SEQ ID NO: 104584 - DNA, 201 bp, Homo sapiens
attagtgatgatgaaccaggttatgaccttgatttattttgcatacctaatcattatgctgaggatttggaaagggtgtttattcctcatggactaattakggacaggtaagtaagatcttaaaatgaggttttttactttttcttgtgttaatttcaaacatcagcagctgttctgagtacttgctatttgaacataaac

SEQ ID NO: 104585 - DNA, 201 bp, Homo sapiens
tagtgatgatgaaccaggttatgaccttgatttattttgcatacctaatcattatgctgaggatttggaaagggtgtttattcctcatggactaattatgracaggtaagtaagatcttaaaatgaggttttttactttttcttgtgttaatttcaaacatcagcagctgttctgagtacttgctatttgaacataaacta

SEQ ID NO: 104586 - DNA, 201 bp, Homo sapiens
gatgatgaaccaggttatgaccttgatttattttgcatacctaatcattatgctgaggatttggaaagggtgtttattcctcatggactaattatggacargtaagtaagatcttaaaatgaggttttttactttttcttgtgttaatttcaaacatcagcagctgttctgagtacttgctatttgaacataaactaggcc

SEQ ID NO: 104587 - DNA, 201 bp, Homo sapiens
cccaggttggtgtggaagtttaatgactaagaggtgtttgttataaagtttaatgtatgaaactttctattaaattcctgattttatttctgtaggactgdacgtcttgctcgagatgtgatgaaggagatgggaggccatcacattgtagccctctgtgtgctcaaggggggctataaattctttgctgacctgctggat

SEQ ID NO: 104588 - DNA, 201 bp, Homo sapiens
aggttggtgtggaagtttaatgactaagaggtgtttgttataaagtttaatgtatgaaactttctattaaattcctgattttatttctgtaggactgaacrtcttgctcgagatgtgatgaaggagatgggaggccatcacattgtagccctctgtgtgctcaaggggggctataaattctttgctgacctgctggattac

SEQ ID NO: 104589 - DNA, 201 bp, Homo sapiens
ggtgtggaagtttaatgactaagaggtgtttgttataaagtttaatgtatgaaactttctattaaattcctgattttatttctgtaggactgaacgtcttsctcgagatgtgatgaaggagatgggaggccatcacattgtagccctctgtgtgctcaaggggggctataaattctttgctgacctgctggattacatcaa

SEQ ID NO: 104590 - DNA, 201 bp, Homo sapiens
gtgtggaagtttaatgactaagaggtgtttgttataaagtttaatgtatgaaactttctattaaattcctgattttatttctgtaggactgaacgtcttgytcgagatgtgatgaaggagatgggaggccatcacattgtagccctctgtgtgctcaaggggggctataaattctttgctgacctgctggattacatcaaa

SEQ ID NO: 104591 - DNA, 201 bp, Homo sapiens
tctctactaaaaatacaaaaattagctgggtgtggtagcgggctcctgtcatccaagctactcgggagggtgaggcatgagaatcacttgaacccgggagktggaggttgcagtgagcccagattgtgccactgtactccagcctgggtgacagagtgagactctgtctcaaaaaagaaaaaaaaaaaaaaagagacacca

SEQ ID NO: 104592 - DNA, 201 bp, Homo sapiens
atcccagcactttgggaggccaaggtgggtggatcacgaggtcaggagtttgagaccagcctggccaatgtagtgaaacaccatctctactaaaaatacaraaattagctgggtgtggtagcgggctcctgtcatccaagctactcgggagggtgaggcatgagaatcacttgaacccgggagttggaggttgcagtgagc

SEQ ID NO: 104593 - DNA, 201 bp, Homo sapiens
ggattagtgcccttatatgaaaagacaccaggacgggcgcagtggctcacacctgtaatcccagcactttgggaggccaaggtgggtggatcacgaggtcrggagtttgagaccagcctggccaatgtagtgaaacaccatctctactaaaaatacaaaaattagctgggtgtggtagcgggctcctgtcatccaagctac

SEQ ID NO: 104594 - DNA, 201 bp, Homo sapiens
agctaatttttgtgtttttagtagagacggggtttcaccatgttgggcaggccaggggtgatccgcccacctcagcctcccaaagtgctgggattacaggygtgagccaccgcatctggccaacatgtcttttttttttttttcctttttaaccacaaagagacttaagcagtccttgtcacagatgatgaattgatgttg

SEQ ID NO: 104595 - DNA, 201 bp, Homo sapiens
tatatatatatacacacacatatataaatatatatacatatatatatatacacacatatataaatatatatacatatatatatatacacacacacacacayatatatatatatagttttttttttttttaagtagagatggggttttgccatgttggccaggctggtctggcctcaagccatcctcccacctcggcctcgc

SEQ ID NO: 104596 - DNA, 201 bp, Homo sapiens
tatgtgtgtgtgtgtatatatatatatacacacacatatataaatatatatacatatatatatatacacacatatataaatatatatacatatatatatayacacacacacacacatatatatatatatagttttttttttttttaagtagagatggggttttgccatgttggccaggctggtctggcctcaagccatcct

SEQ ID NO: 104597 - DNA, 201 bp, Homo sapiens
ttgcccagactgtagtgcaatggtgcaatctcagctcactgcaatctctgcctcctgggttctagcaattctcctgcctcagcctcccgagtagctggaamtacaggcgcccgccaccacgcccagctaatttttgtgtttttagtagagacggggtttcaccatgttgggcaggccaggggtgatccgcccacctcagcc

SEQ ID NO: 104598 - DNA, 201 bp, Homo sapiens
tgatctcagctcactaactactctgcctcccaggttcaagcaattctcatgtctcagcctcccaagtagctgggactacaggtgtgcgccaccatgcctgrctaattgtgtgtgtgtgtgtgtgtatgtatgtatgtatatatgtgtgtgtgtgtatatatatatatacacacacatatataaatatatatacatatatat

SEQ ID NO: 104599 - DNA, 201 bp, Homo sapiens
tgttgcccagactgtagtgcaatggtgcaatctcagctcactgcaatctctgcctcctgggttctagcaattctcctgcctcagcctcccgagtagctggrattacaggcgcccgccaccacgcccagctaatttttgtgtttttagtagagacggggtttcaccatgttgggcaggccaggggtgatccgcccacctcag

SEQ ID NO: 104600 - DNA, 201 bp, Homo sapiens
gtgcagtggtatgatctcagctcactaactactctgcctcccaggttcaagcaattctcatgtctcagcctcccaagtagctgggactacaggtgtgcgcyaccatgcctggctaattgtgtgtgtgtgtgtgtgtatgtatgtatgtatatatgtgtgtgtgtgtatatatatatatacacacacatatataaatatata

SEQ ID NO: 104601 - DNA, 201 bp, Homo sapiens
tttttttgagatggagtcttgctctgtcaccaggcaggagtgcagtgatgcaatctcggctcactctagccaccgactccctggttcaagcgattctcctrcctgagccttctgagtagctgggattacaggcaggcaccaccacgcccagctaatttttgtagagacaggatttcaccgtgttggccaggatggtctcca

SEQ ID NO: 104602 - DNA, 201 bp, Homo sapiens
accaggctggagtgcagtggtatgatctcagctcactaactactctgcctcccaggttcaagcaattctcatgtctcagcctcccaagtagctgggactayaggtgtgcgccaccatgcctggctaattgtgtgtgtgtgtgtgtgtatgtatgtatgtatatatgtgtgtgtgtgtatatatatatatacacacacatat

SEQ ID NO: 104603 - DNA, 201 bp, Homo sapiens
catgatctcggctcagtgcaacctctgcctcccgggttcaagcgattctcctacctcatccccctgagtagctgggattacaggcgcctgccaccatgccyggctaattttttgtatttttaatagagacgaggtttcaccatgttggccaggctactctcgaactcctgatctcaggtgatccacccgccttggcctccc

SEQ ID NO: 104604 - DNA, 201 bp, Homo sapiens
ccttccttgatacccctttcctcttcaattcacttggaccttttgcatttaattttaatttttattttttttaagacagagtctcactctgtcaccaggcwggagtgcagtggtatgatctcagctcactaactactctgcctcccaggttcaagcaattctcatgtctcagcctcccaagtagctgggactacaggtgtg

SEQ ID NO: 104605 - DNA, 201 bp, Homo sapiens
agtacagtggcatgatctcggctcagtgcaacctctgcctcccgggttcaagcgattctcctacctcatccccctgagtagctgggattacaggcgcctgycaccatgcctggctaattttttgtatttttaatagagacgaggtttcaccatgttggccaggctactctcgaactcctgatctcaggtgatccacccgcc

SEQ ID NO: 104606 - DNA, 201 bp, Homo sapiens
tcaaatgtttgtatcctgtaatgctctcattgaaacagctatatttctttttcagattagtgatgatgaaccaggttatgaccttgatttattttgcatamctaatcattatgctgaggatttggaaagggtgtttattcctcatggactaattatggacaggtaagtaagatcttaaaatgaggttttttactttttctt

SEQ ID NO: 104607 - DNA, 201 bp, Homo sapiens
tttagtttgaagtattttctttctaaacataactctctctctctatttatctatatataatatatacatatatatcttatattttatgtatatatatatawcttgcttagattttgtcttatgtaatatttggtacataaaaaataatatttataatttatagactattttccatgtgttattatgtgctaaagtattttg

SEQ ID NO: 104608 - DNA, 201 bp, Homo sapiens
caatcactgctcactgcagcctcgacttcccgggctcgggtgattctccccaggctcaggggattctcccacttcagcctcccaagtagctgggactacargtgcgcaccaccatccctggctaatatttgtactttattttatttatttatttatttattttttgagatggagtttcgctcttgttgcccgggctggagt

SEQ ID NO: 104609 - DNA, 201 bp, Homo sapiens
ctggagtgcagtagtacgatcttggctcactgcaacctccccttcccagttcaagtgattctcctgcctcagactcccaagtagctgggattacaggcgcrcgccaccatgcctggctaatttttttatctttagtagagacagggtttcaccatgttgaccaggctgatctccaactcctgatctcaggtatccacctgc

SEQ ID NO: 104610 - DNA, 201 bp, Homo sapiens
ccaatcaaatgtttgtatcctgtaatgctctcattgaaacagctatatttctttttcagattagtgatgatgaaccaggttatgaccttgatttattttgsatacctaatcattatgctgaggatttggaaagggtgtttattcctcatggactaattatggacaggtaagtaagatcttaaaatgaggttttttactttt

SEQ ID NO: 104611 - DNA, 201 bp, Homo sapiens
gccaccacgcccagctaattttttgtattttttgtagagacggggtttcaccctgttgcccaggctggtctagaactcctgggcttaagcgatcctcccamctcagcctcccaaagtgctaggattacaggcatgagccaccatgcctggcagaaaataccaggtttttaagtatcagcacttactcttcaatcttttcta

SEQ ID NO: 104612 - DNA, 201 bp, Homo sapiens
tccaatcaaatgtttgtatcctgtaatgctctcattgaaacagctatatttctttttcagattagtgatgatgaaccaggttatgaccttgatttattttkcatacctaatcattatgctgaggatttggaaagggtgtttattcctcatggactaattatggacaggtaagtaagatcttaaaatgaggttttttacttt

SEQ ID NO: 104613 - DNA, 201 bp, Homo sapiens
aggactgaacgtcttgctcgagatgtgatgaaggagatgggaggccatcacattgtagccctctgtgtgctcaaggggggctataaattctttgctgaccwgctggattacatcaaagcactgaatagaaatagtgatagatccattcctatgactgtagattttatcagactgaagagctattgtgtgagtatatttaat

SEQ ID NO: 104614 - DNA, 201 bp, Homo sapiens
tggaagtttaatgactaagaggtgtttgttataaagtttaatgtatgaaactttctattaaattcctgattttatttctgtaggactgaacgtcttgctcvagatgtgatgaaggagatgggaggccatcacattgtagccctctgtgtgctcaaggggggctataaattctttgctgacctgctggattacatcaaagca

SEQ ID NO: 104615 - DNA, 201 bp, Homo sapiens
gtggaagtttaatgactaagaggtgtttgttataaagtttaatgtatgaaactttctattaaattcctgattttatttctgtaggactgaacgtcttgctbgagatgtgatgaaggagatgggaggccatcacattgtagccctctgtgtgctcaaggggggctataaattctttgctgacctgctggattacatcaaagc

SEQ ID NO: 104616 - DNA, 201 bp, Homo sapiens
aagtttaatgactaagaggtgtttgttataaagtttaatgtatgaaactttctattaaattcctgattttatttctgtaggactgaacgtcttgctcgagrtgtgatgaaggagatgggaggccatcacattgtagccctctgtgtgctcaaggggggctataaattctttgctgacctgctggattacatcaaagcactg

SEQ ID NO: 104617 - DNA, 201 bp, Homo sapiens
taaagctatgcaatgtcttcttttttgaaaggatataattgacactggcaaaacaatgcagactttgctttccttggtcaggcagtataatccaaagatgktcaaggtcgcaaggtatgtatgacattttgacacagaatattttcctcatttgaagggggattaagtgattgcttctttttaaggataaatgttttcaac

SEQ ID NO: 104618 - DNA, 201 bp, Homo sapiens
caatgtcttcttttttgaaaggatataattgacactggcaaaacaatgcagactttgctttccttggtcaggcagtataatccaaagatggtcaaggtcgmaaggtatgtatgacattttgacacagaatattttcctcatttgaagggggattaagtgattgcttctttttaaggataaatgttttcaactgtcatttta

SEQ ID NO: 104619 - DNA, 201 bp, Homo sapiens
gcaatgtcttcttttttgaaaggatataattgacactggcaaaacaatgcagactttgctttccttggtcaggcagtataatccaaagatggtcaaggtckcaaggtatgtatgacattttgacacagaatattttcctcatttgaagggggattaagtgattgcttctttttaaggataaatgttttcaactgtcatttt

SEQ ID NO: 104620 - DNA, 201 bp, Homo sapiens
gcacggatgaaatgaaacagtgtttagaaacgtcagtcttctcttttgtaatgccctgtagtctctctgtatgttatatgtcacattttgtaattaacagsttgctggtgaaaaggaccccacgaagtgttggatataagccagactgtaagtgaattactttttttgtcaatcatttaaccatctttaacctaaaagagt

SEQ ID NO: 104621 - DNA, 201 bp, Homo sapiens
ttttgtaatgccctgtagtctctctgtatgttatatgtcacattttgtaattaacagcttgctggtgaaaaggaccccacgaagtgttggatataagccakactgtaagtgaattactttttttgtcaatcatttaaccatctttaacctaaaagagttttatgtgaaatggcttataattgcttagagaatatttgtaga

SEQ ID NO: 104622 - DNA, 201 bp, Homo sapiens
tttgtaatgccctgtagtctctctgtatgttatatgtcacattttgtaattaacagcttgctggtgaaaaggaccccacgaagtgttggatataagccagwctgtaagtgaattactttttttgtcaatcatttaaccatctttaacctaaaagagttttatgtgaaatggcttataattgcttagagaatatttgtagag

SEQ ID NO: 104623 - DNA, 201 bp, Homo sapiens
gcttagagaatatttgtagagaggcacatttgccagtattagatttaaaagtgatgttttctttatctaaatgatgaattatgattctttttagttgttgratttgaaattccagacaagtttgttgtaggatatgcccttgactataatgaatacttcagggatttgaatgtaagtaattgcttctttttctcactcatt

SEQ ID NO: 104624 - DNA, 201 bp, Homo sapiens
ttgctgaggaaaaaatgttgatttttcatctctaaacatcaacttacttaattctgccaatttcttttttttgagacagggtctcactctgtcacctaggmtggagtgcagtggcacaatcactgctcactgcagcctcgacttcccgggctcgggtgattctccccaggctcaggggattctcccacttcagcctcccaa

SEQ ID NO: 104625 - DNA, 201 bp, Homo sapiens
gctggagtgtagtggtgcaatctcatctcattgcagtcttgacctcccaggctcaggttatctcccacctcagcctcccaagtagctgggactacaggcahatgccaccacgcccagctaattttttgtattttttgtagagacggggtttcaccctgttgcccaggctggtctagaactcctgggcttaagcgatcctcc

SEQ ID NO: 104626 - DNA, 201 bp, Homo sapiens
ggctggagtgtagtggtgcaatctcatctcattgcagtcttgacctcccaggctcaggttatctcccacctcagcctcccaagtagctgggactacaggcrcatgccaccacgcccagctaattttttgtattttttgtagagacggggtttcaccctgttgcccaggctggtctagaactcctgggcttaagcgatcctc

SEQ ID NO: 104627 - DNA, 201 bp, Homo sapiens
tttcactttgatgtagtccttatcaggtaactgaggttttatataagtcccctgattcttagaacatgaaggtgtagtagtcaaggttggtcccttgaaascacaaattttgtgaaaaaaaattaagaaaattgaataatttcctcagcaaatacatattgatcatctgttatacagccatgagaagtggttctgttgcac

SEQ ID NO: 104628 - DNA, 201 bp, Homo sapiens
ttatcttctgtaaatctgtctctatttccatctctgtctccatctttgtctctatctctatctgtctatctctatctatctatctatctatctatctatcyatctatctatctatctatctaaagcaaattcatgcccttctcctatttattgaatcgagaccatagacaggggtgagagaaagaatttggcaggaatggg

SEQ ID NO: 104629 - DNA, 201 bp, Homo sapiens
ggtctcaaactcctggtctcaagcaatccttctgccttggtctcccaaagtgctgagattacaggtgtcagccgttgcacctggccaaaacgataacttaaaatacacacacacacacacacacacaaacacatatgtgtatttgtgtgtgtgtgtgtgtgtgtgtgtctcaaaaggtatcaaaagagaatagctataact

SEQ ID NO: 104630 - DNA, 201 bp, Homo sapiens
tggtctcaaactcctggtctcaagcaatccttctgccttggtctcccaaagtgctgagattacaggtgtcagccgttgcacctggccaaaacgataacttaaaatacacacacacacacacacacacaaacacatatgtgtatttgtgtgtgtgtgtgtgtgtgtgtgtctcaaaaggtatcaaaagagaatagctataac

SEQ ID NO: 104631 - DNA, 201 bp, Homo sapiens
ctggtctcaaactcctggtctcaagcaatccttctgccttggtctcccaaagtgctgagattacaggtgtcagccgttgcacctggccaaaacgataacttaaaatacacacacacacacacacacacaaacacatatgtgtatttgtgtgtgtgtgtgtgtgtgtgtgtctcaaaaggtatcaaaagagaatagctataa

SEQ ID NO: 104632 - DNA, 201 bp, Homo sapiens
  misc_feature (1)...(201): n = A,T,C or G
attaaattcctgattttatttctgtaggactgaacgtcttgctcgagatgtgatgaaggagatgggaggccatcacattgtagccctctgtgtgctcaagnggggctataaattctttgctgacctgctggattacatcaaagcactgaatagaaatagtgatagatccattcctatgactgtagattttatcagactgaa

SEQ ID NO: 104633 - DNA, 201 bp, Homo sapiens
ttaaattcctgattttatttctgtaggactgaacgtcttgctcgagatgtgatgaaggagatgggaggccatcacattgtagccctctgtgtgctcaaggrgggctataaattctttgctgacctgctggattacatcaaagcactgaatagaaatagtgatagatccattcctatgactgtagattttatcagactgaag

SEQ ID NO: 104634 - DNA, 201 bp, Homo sapiens
tatcctgtaatgctctcattgaaacagctatatttctttttcagattagtgatgatgaaccaggttatgaccttgatttattttgcatacctaatcattakgctgaggatttggaaagggtgtttattcctcatggactaattatggacaggtaagtaagatcttaaaatgaggttttttactttttcttgtgttaatttc

SEQ ID NO: 104635 - DNA, 201 bp, Homo sapiens
atatttgtagagaggcacatttgccagtattagatttaaaagtgatgttttctttatctaaatgatgaattatgattctttttagttgttggatttgaaaytccagacaagtttgttgtaggatatgcccttgactataatgaatacttcagggatttgaatgtaagtaattgcttctttttctcactcatttttcaaaac

SEQ ID NO: 104636 - DNA, 201 bp, Homo sapiens
tgatgttttctttatctaaatgatgaattatgattctttttagttgttggatttgaaattccagacaagtttgttgtaggatatgcccttgactataatgwatacttcagggatttgaatgtaagtaattgcttctttttctcactcatttttcaaaacacgcataaaaatttaggaaagagaattgttttctccttccag

SEQ ID NO: 104637 - DNA, 201 bp, Homo sapiens
ttttctttatctaaatgatgaattatgattctttttagttgttggatttgaaattccagacaagtttgttgtaggatatgcccttgactataatgaatacktcagggatttgaatgtaagtaattgcttctttttctcactcatttttcaaaacacgcataaaaatttaggaaagagaattgttttctccttccagcacct

SEQ ID NO: 104638 - DNA, 201 bp, Homo sapiens
ctttatctaaatgatgaattatgattctttttagttgttggatttgaaattccagacaagtttgttgtaggatatgcccttgactataatgaatacttcasggatttgaatgtaagtaattgcttctttttctcactcatttttcaaaacacgcataaaaatttaggaaagagaattgttttctccttccagcacctcata

SEQ ID NO: 104639 - DNA, 201 bp, Homo sapiens
ttatctaaatgatgaattatgattctttttagttgttggatttgaaattccagacaagtttgttgtaggatatgcccttgactataatgaatacttcaggdatttgaatgtaagtaattgcttctttttctcactcatttttcaaaacacgcataaaaatttaggaaagagaattgttttctccttccagcacctcataat

SEQ ID NO: 104640 - DNA, 201 bp, Homo sapiens
cctcagcctcccgagtagctggaattacaggcgcccgccaccacgcccagctaatttttgtgtttttagtagagacggggtttcaccatgttgggcaggcmaggggtgatccgcccacctcagcctcccaaagtgctgggattacaggtgtgagccaccgcatctggccaacatgtcttttttttttttttcctttttaac

SEQ ID NO: 104641 - DNA, 201 bp, Homo sapiens
tatctaaatgatgaattatgattctttttagttgttggatttgaaattccagacaagtttgttgtaggatatgcccttgactataatgaatacttcagggdtttgaatgtaagtaattgcttctttttctcactcatttttcaaaacacgcataaaaatttaggaaagagaattgttttctccttccagcacctcataatt

SEQ ID NO: 104642 - DNA, 201 bp, Homo sapiens
  misc_feature (1)...(201): n = A,T,C or G
atgatgaattatgattctttttagttgttggatttgaaattccagacaagtttgttgtaggatatgcccttgactataatgaatacttcagggatttgaangtaagtaattgcttctttttctcactcatttttcaaaacacgcataaaaatttaggaaagagaattgttttctccttccagcacctcataatttgaacag

SEQ ID NO: 104643 - DNA, 201 bp, Homo sapiens
gctggtctcaaactcctggtctcaagcaatccttctgccttggtctcccaaagtgctgagattacaggtgtcagccgttgcacctggccaaaacgataacttaaaatacacacacacacacacacacacaaacacatatgtgtatttgtgtgtgtgtgtgtgtgtgtgtgtctcaaaaggtatcaaaagagaatagctata

SEQ ID NO: 104644 - DNA, 201 bp, Homo sapiens
ggctggtctcaaactcctggtctcaagcaatccttctgccttggtctcccaaagtgctgagattacaggtgtcagccgttgcacctggccaaaacgataacttaaaatacacacacacacacacacacacaaacacatatgtgtatttgtgtgtgtgtgtgtgtgtgtgtgtctcaaaaggtatcaaaagagaatagctat

SEQ ID NO: 104645 - DNA, 201 bp, Homo sapiens
aaattcctgattttatttctgtaggactgaacgtcttgctcgagatgtgatgaaggagatgggaggccatcacattgtagccctctgtgtgctcaaggggsgctataaattctttgctgacctgctggattacatcaaagcactgaatagaaatagtgatagatccattcctatgactgtagattttatcagactgaagag

SEQ ID NO: 104646 - DNA, 201 bp, Homo sapiens
tttatttctgtaggactgaacgtcttgctcgagatgtgatgaaggagatgggaggccatcacattgtagccctctgtgtgctcaaggggggctataaattmtttgctgacctgctggattacatcaaagcactgaatagaaatagtgatagatccattcctatgactgtagattttatcagactgaagagctattgtgtga

SEQ ID NO: 104647 - DNA, 201 bp, Homo sapiens
gactgaacgtcttgctcgagatgtgatgaaggagatgggaggccatcacattgtagccctctgtgtgctcaaggggggctataaattctttgctgacctgstggattacatcaaagcactgaatagaaatagtgatagatccattcctatgactgtagattttatcagactgaagagctattgtgtgagtatatttaatat

SEQ ID NO: 104648 - DNA, 201 bp, Homo sapiens
agttgagatggggtttcaccatgttggccaggctggtctagaactcttgacctctggtgatccacccgcctcggactcccaaaatgctgggattacaggcktgagccaccgtgcctggccagtggttttttgttgttgttgttgttgttgttttgtttttgtttttgtttttgttttgagacaggatcttgctctgtcacc

SEQ ID NO: 104649 - DNA, 201 bp, Homo sapiens
actgaacgtcttgctcgagatgtgatgaaggagatgggaggccatcacattgtagccctctgtgtgctcaaggggggctataaattctttgctgacctgcwggattacatcaaagcactgaatagaaatagtgatagatccattcctatgactgtagattttatcagactgaagagctattgtgtgagtatatttaatata

SEQ ID NO: 104650 - DNA, 201 bp, Homo sapiens
tcaagctatactcctgccttggccccccgagtagctgggattacaggcgcctgctaccatgcctggctaatttttgtatttttagttgagatggggtttcrccatgttggccaggctggtctagaactcttgacctctggtgatccacccgcctcggactcccaaaatgctgggattacaggcgtgagccaccgtgcctgg

SEQ ID NO: 104651 - DNA, 201 bp, Homo sapiens
gaacgtcttgctcgagatgtgatgaaggagatgggaggccatcacattgtagccctctgtgtgctcaaggggggctataaattctttgctgacctgctggwttacatcaaagcactgaatagaaatagtgatagatccattcctatgactgtagattttatcagactgaagagctattgtgtgagtatatttaatatatga

SEQ ID NO: 104652 - DNA, 201 bp, Homo sapiens
taatttttgtgtttttagtagagatggggtttcaccttgttggtcaggctggtctcgaacccctgacctcaggtgatccacccacctcagcctcccaaagygctgggattataggcatgagccaccgtgcccggccgacatgttaattttttaaaaaaggctttactggggtatattttatataatataataatcacatgt

SEQ ID NO: 104653 - DNA, 201 bp, Homo sapiens
gctaatttttgtgtttttagtagagatggggtttcaccttgttggtcaggctggtctcgaacccctgacctcaggtgatccacccacctcagcctcccaargtgctgggattataggcatgagccaccgtgcccggccgacatgttaattttttaaaaaaggctttactggggtatattttatataatataataatcacat

SEQ ID NO: 104654 - DNA, 201 bp, Homo sapiens
ggctaatttttgtgtttttagtagagatggggtttcaccttgttggtcaggctggtctcgaacccctgacctcaggtgatccacccacctcagcctcccaragtgctgggattataggcatgagccaccgtgcccggccgacatgttaattttttaaaaaaggctttactggggtatattttatataatataataatcaca

SEQ ID NO: 104655 - DNA, 201 bp, Homo sapiens
gaaaagtaatgtaatctcatataagacttaagatataatccttttaaataattttgtcatgtgttaataaagctcataattacagtcacttccttgcctamtattaacatttggtttttcagcatgctaattatatcagtttgtcctgaatagcatggcagaggattttgggcccccttgcaaaattaagaataaggattc

SEQ ID NO: 104656 - DNA, 201 bp, Homo sapiens
cgcatgtctgtaatcccagctactcgggaggctgaggcaggagaatggcgtgaacccgggaggcggagcttgcagtgagccaggatcgcgccactgcactycagcctgggcgacagagcgagactccgtctcaaaaaaaaaaaaaaaaaaaaaattagtatttgatatttgatcattaaatatgaattaagaggacttaga

SEQ ID NO: 104657 - DNA, 201 bp, Homo sapiens
aatactacccacttaaaaatggatgtaacccattttttaggactcttaaaaacatcaaatcagtaatggccgattaggactttttaatttttactaatctstacttgaaagttttctagtcattcatttcaggaaacctaattcttataattcatatcatttagaatatcataatgctatggatattagctagctaacttc

SEQ ID NO: 104658 - DNA, 201 bp, Homo sapiens
aatgtatgaaactttctattaaattcctgattttatttctgtaggactgaacgtcttgctcgagatgtgatgaaggagatgggaggccatcacattgtagmcctctgtgtgctcaaggggggctataaattctttgctgacctgctggattacatcaaagcactgaatagaaatagtgatagatccattcctatgactgta

SEQ ID NO: 104659 - DNA, 201 bp, Homo sapiens
aaccccatctctactaaaaatacaaaattagccgggcgtggtggcgcatgtctgtaatcccagctactcgggaggctgaggcaggagaatggcgtgaaccygggaggcggagcttgcagtgagccaggatcgcgccactgcactccagcctgggcgacagagcgagactccgtctcaaaaaaaaaaaaaaaaaaaaaatta

SEQ ID NO: 104660 - DNA, 201 bp, Homo sapiens
tatcccccctttttcttttttctttctttctttcttttttttttttttttttttgacagtcttactctgttgcccaggcaggagtgcagtggcgcaatctyggctcactgcaacctctgcctcccaggttcaagtgattctcctgcctcagcctcctgagtagctgcgagtacaggcacaagccaccacgcccggctaatt

SEQ ID NO: 104661 - DNA, 201 bp, Homo sapiens
tacaagtaaacaaattaacttgttacctgagcatatgtcctttcatacttattttttctgcatacatattttggaaaatggaatatctgcccttttttttwatctgagatacagtctacctctaaaaatacatgattctaacattctcacttttgttggcatttgatcagggtatagaaaaacagttaaaaggacagagaa

SEQ ID NO: 104662 - DNA, 201 bp, Homo sapiens
atgcccggctaatttttgtgtttttagtagagatggggtttcaccttgttggtcaggctggtctcgaacccctgacctcaggtgatccacccacctcagcytcccaaagtgctgggattataggcatgagccaccgtgcccggccgacatgttaattttttaaaaaaggctttactggggtatattttatataatataata

SEQ ID NO: 104663 - DNA, 201 bp, Homo sapiens
ctatgcccggctaatttttgtgtttttagtagagatggggtttcaccttgttggtcaggctggtctcgaacccctgacctcaggtgatccacccacctcarcctcccaaagtgctgggattataggcatgagccaccgtgcccggccgacatgttaattttttaaaaaaggctttactggggtatattttatataatataa

SEQ ID NO: 104664 - DNA, 201 bp, Homo sapiens
agtagctgggactacaggtgcctgccactatgcccggctaatttttgtgtttttagtagagatggggtttcaccttgttggtcaggctggtctcgaacccmtgacctcaggtgatccacccacctcagcctcccaaagtgctgggattataggcatgagccaccgtgcccggccgacatgttaattttttaaaaaaggctt

SEQ ID NO: 104665 - DNA, 201 bp, Homo sapiens
ggctggagtgcagtggcatgatcgtagctcactgcaacctccacctcccgggttcaagcaattcttctgtctcagcctcccgagtagctgggactacaggkgcctgccactatgcccggctaatttttgtgtttttagtagagatggggtttcaccttgttggtcaggctggtctcgaacccctgacctcaggtgatccac

SEQ ID NO: 104666 - DNA, 201 bp, Homo sapiens
attgatatgtttattttattttattttattttattttattttattttattttatttatttatttttttttttgagacagagtctcactctgttgcccaggmtggagtgcagtggcatgatcgtagctcactgcaacctccacctcccgggttcaagcaattcttctgtctcagcctcccgagtagctgggactacaggtgc

SEQ ID NO: 104667 - DNA, 201 bp, Homo sapiens
tggtatttattgatatgtttattttattttattttattttattttattttattttattttatttatttatttttttttttgagacagagtctcactctgtygcccaggctggagtgcagtggcatgatcgtagctcactgcaacctccacctcccgggttcaagcaattcttctgtctcagcctcccgagtagctgggact

SEQ ID NO: 104668 - DNA, 201 bp, Homo sapiens
atttttttggtatttattgatatgtttattttattttattttattttattttattttattttattttatttatttatttttttttttgagacagagtctcrctctgttgcccaggctggagtgcagtggcatgatcgtagctcactgcaacctccacctcccgggttcaagcaattcttctgtctcagcctcccgagtagc

SEQ ID NO: 104669 - DNA, 201 bp, Homo sapiens
tatttttttggtatttattgatatgtttattttattttattttattttattttattttattttattttatttatttatttttttttttgagacagagtctyactctgttgcccaggctggagtgcagtggcatgatcgtagctcactgcaacctccacctcccgggttcaagcaattcttctgtctcagcctcccgagtag

SEQ ID NO: 104670 - DNA, 201 bp, Homo sapiens
atatactatttttttggtatttattgatatgtttattttattttattttattttattttattttattttattttatttatttatttttttttttgagacaragtctcactctgttgcccaggctggagtgcagtggcatgatcgtagctcactgcaacctccacctcccgggttcaagcaattcttctgtctcagcctccc

SEQ ID NO: 104671 - DNA, 201 bp, Homo sapiens
ttcacatagaaaacagtttattttatgtgaaattctatgtagatatactatttttttggtatttattgatatgtttattttattttattttattttatttwattttattttattttatttatttatttttttttttgagacagagtctcactctgttgcccaggctggagtgcagtggcatgatcgtagctcactgcaacc

SEQ ID NO: 104672 - DNA, 201 bp, Homo sapiens
aattcctgattttatttctgtaggactgaacgtcttgctcgagatgtgatgaaggagatgggaggccatcacattgtagccctctgtgtgctcaagggggkctataaattctttgctgacctgctggattacatcaaagcactgaatagaaatagtgatagatccattcctatgactgtagattttatcagactgaagagc

SEQ ID NO: 104673 - DNA, 201 bp, Homo sapiens
cagggttcgccatgttacccagcctcccaaagtgctgggattacaggcatgagccactggcccagtttctacagtctctcttaatattgtatattatccargaaatttcatttaatcagaacctgccagtctgataggtgaaaatggtatcttgtttttatttgcatttaaaaaaaattatgatagtggtatgcttggttt

SEQ ID NO: 104674 - DNA, 201 bp, Homo sapiens
agggttcgccatgttacccagcctcccaaagtgctgggattacaggcatgagccactggcccagtttctacagtctctcttaatattgtatattatccaaraaatttcatttaatcagaacctgccagtctgataggtgaaaatggtatcttgtttttatttgcatttaaaaaaaattatgatagtggtatgcttggtttt

SEQ ID NO: 104675 - DNA, 201 bp, Homo sapiens
gtttttatttgcatttaaaaaaaattatgatagtggtatgcttggtttttttgaaggtatcaaattttttaccttatgaaacatgagggcaaaggatgtgwtacgtggaagatttaaaaaaaatttttaatgcatttttttgagacaaggtcttgctctattgtccaggctggagtgcagtggcacaatcacagttcactc

SEQ ID NO: 104676 - DNA, 201 bp, Homo sapiens
aaagtgattttcccacctcacctctcaagtagctgggactacaggtacatgctaccatgcctggctaatttttttttttttgcaggcatggggtctcactrtattgcccaggttggtgtggaagtttaatgactaagaggtgtttgttataaagtttaatgtatgaaactttctattaaattcctgattttatttctgtag

SEQ ID NO: 104677 - DNA, 201 bp, Homo sapiens
ggactacaggcatgtgtcaccacacccggctaatttttttgtatttttagtagagacgggatttcaccgtgttgcccaggctggtctcgaactcctgagckcaggcagtctgcctgcctcagcctcccaaagtgctgggattacacgtgtgaaccaacccgcccggcctgttgttttcttacataattcattatcatacct

SEQ ID NO: 104678 - DNA, 201 bp, Homo sapiens
gtagctgggactacaggcatgtgtcaccacacccggctaatttttttgtatttttagtagagacgggatttcaccgtgttgcccaggctggtctcgaactyctgagctcaggcagtctgcctgcctcagcctcccaaagtgctgggattacacgtgtgaaccaacccgcccggcctgttgttttcttacataattcattat

SEQ ID NO: 104679 - DNA, 201 bp, Homo sapiens
ggttcaagtgattctcctgcctcagcctcccaagtagctgggactacaggcatgtgtcaccacacccggctaatttttttgtatttttagtagagacgggrtttcaccgtgttgcccaggctggtctcgaactcctgagctcaggcagtctgcctgcctcagcctcccaaagtgctgggattacacgtgtgaaccaacccg

SEQ ID NO: 104680 - DNA, 201 bp, Homo sapiens
cctcccaggttcaagtgattctcctgcctcagcctcccaagtagctgggactacaggcatgtgtcaccacacccggctaatttttttgtatttttagtagmgacgggatttcaccgtgttgcccaggctggtctcgaactcctgagctcaggcagtctgcctgcctcagcctcccaaagtgctgggattacacgtgtgaac

SEQ ID NO: 104681 - DNA, 201 bp, Homo sapiens
cattcttggctcactgcaaccttcacctcccaggttcaagtgattctcctgcctcagcctcccaagtagctgggactacaggcatgtgtcaccacacccgrctaatttttttgtatttttagtagagacgggatttcaccgtgttgcccaggctggtctcgaactcctgagctcaggcagtctgcctgcctcagcctccca

SEQ ID NO: 104682 - DNA, 201 bp, Homo sapiens
gcgcattcttggctcactgcaaccttcacctcccaggttcaagtgattctcctgcctcagcctcccaagtagctgggactacaggcatgtgtcaccacacscggctaatttttttgtatttttagtagagacgggatttcaccgtgttgcccaggctggtctcgaactcctgagctcaggcagtctgcctgcctcagcctc

SEQ ID NO: 104683 - DNA, 201 bp, Homo sapiens
ggcctcccaaagtgctgggattacaggcgtgagccaccgcgcccagcctgtttttttgtttgtttgttttgttttttttgagacagagtcttgctctgttycccaggctggagtgaagtggcgcattcttggctcactgcaaccttcacctcccaggttcaagtgattctcctgcctcagcctcccaagtagctgggacta

SEQ ID NO: 104684 - DNA, 201 bp, Homo sapiens
agacggcggggggaggtttcaccatgttgacaaggctggtctggaactcctgacctcaggtgatccacccgcctcggcctcccaaagtgctgggattacargcgtgagccaccgcgcccagcctgtttttttgtttgtttgttttgttttttttgagacagagtcttgctctgtttcccaggctggagtgaagtggcgcat

SEQ ID NO: 104685 - DNA, 201 bp, Homo sapiens
caccacgcctggctaatttttgtatttttagtagagacggcggggggaggtttcaccatgttgacaaggctggtctggaactcctgacctcaggtgatccrcccgcctcggcctcccaaagtgctgggattacaggcgtgagccaccgcgcccagcctgtttttttgtttgtttgttttgttttttttgagacagagtctt

SEQ ID NO: 104686 - DNA, 201 bp, Homo sapiens
tgcaatggtgccatctcagctcagtgcaacctctgccttctgggtacaagcgattctcctgcctcagcctcccaagtagctgggattacaggctcctgccrccacgcctggctaatttttgtatttttagtagagacggcggggggaggtttcaccatgttgacaaggctggtctggaactcctgacctcaggtgatccac

SEQ ID NO: 104687 - DNA, 201 bp, Homo sapiens
tttactaatctctacttgaaagttttctagtcattcatttcaggaaacctaattcttataattcatatcatttagaatatcataatgctatggatattagmtagctaacttctcaaatcttctagttctcatttaatttgaagtttgtgtgtgtacataaggatatacatatacatatgtgtgtgtagatatatatatata

SEQ ID NO: 104688 - DNA, 201 bp, Homo sapiens
tttctattaaattcctgattttatttctgtaggactgaacgtcttgctcgagatgtgatgaaggagatgggaggccatcacattgtagccctctgtgtgckcaaggggggctataaattctttgctgacctgctggattacatcaaagcactgaatagaaatagtgatagatccattcctatgactgtagattttatcaga

SEQ ID NO: 104689 - DNA, 201 bp, Homo sapiens
atgaaactttctattaaattcctgattttatttctgtaggactgaacgtcttgctcgagatgtgatgaaggagatgggaggccatcacattgtagccctcygtgtgctcaaggggggctataaattctttgctgacctgctggattacatcaaagcactgaatagaaatagtgatagatccattcctatgactgtagattt

SEQ ID NO: 104690 - DNA, 201 bp, Homo sapiens
tggctataggccaggcaagagagttaagaaaaaataaatagccaggtatggtgactcaagcctgtaatctcggcactttaggaggccgaggcaggaggatmgcttgagtccaggagttcaagaccagcctgagcaaaatagtgagatcctgtctctattttttaaaaaagccttggggcaaacaggagtatggaggtttgg

SEQ ID NO: 104691 - DNA, 201 bp, Homo sapiens
ataatttgatgtgagtcactgtcatctgaagcttgttgccttttctttctttcttctttcttttttttccccatcaattctgtatgtttgaaatgctgggwtttaagttagttagaataagggatgtctgtaatttccctaaattgagaagtaatatgcaaaggttgatatcagaagtcatatgctcaccttgcaacacca

SEQ ID NO: 104692 - DNA, 201 bp, Homo sapiens
tcgtttttctcatttattaagtagagatgtaactacttgatataattcaaaaactcaataatggcattcttttgttttttagactctagtgtctgtactcsttgtaccatgctgggattcatttgaacaattgcatggcttttttagtgtattattaaatttgcagtttacttagaatttactgggacctcatacaaatgg

SEQ ID NO: 104693 - DNA, 201 bp, Homo sapiens
tttgagttattgtacaaatataattcttagaatgttagagtcaggagactataagagaccaactgcttcaagtttcatttaacacatgggaaactaaggcsagagaaatttcaagacttgcccaagattagacctcttgttaagtaatgaaagtgttttaaaaacaggtgggtcaaattctgtttttaaaatttccattat

SEQ ID NO: 104694 - DNA, 201 bp, Homo sapiens
ctgtctaacagcctctctttatatatatataatctatagattatatatatatgcagcattgtgcaatcattatcacgctcaattttaaaacattttcattkccccacaaagaaacccaatccccttagccatcactccccatttccccttcccccagcacctagcaaactgatcatctacctacttgctgtctataagatt

SEQ ID NO: 104695 - DNA, 201 bp, Homo sapiens
attatatatatatgcagcattgtgcaatcattatcacgctcaattttaaaacattttcattgccccacaaagaaacccaatccccttagccatcactcccmatttccccttcccccagcacctagcaaactgatcatctacctacttgctgtctataagatttgcctattctggacattttgtataaatagaatcatacaa

SEQ ID NO: 104696 - DNA, 201 bp, Homo sapiens
atatatatgcagcattgtgcaatcattatcacgctcaattttaaaacattttcattgccccacaaagaaacccaatccccttagccatcactccccatttycccttcccccagcacctagcaaactgatcatctacctacttgctgtctataagatttgcctattctggacattttgtataaatagaatcatacaatatgt

SEQ ID NO: 104697 - DNA, 201 bp, Homo sapiens
ggagtgcaatggtgccatctcagctcagtgcaacctctgccttctgggtacaagcgattctcctgcctcagcctcccaagtagctgggattacaggctccygccaccacgcctggctaatttttgtatttttagtagagacggcggggggaggtttcaccatgttgacaaggctggtctggaactcctgacctcaggtgat

SEQ ID NO: 104698 - DNA, 201 bp, Homo sapiens
atctcgctcttgtcccccaggctggagtgcaatggtgccatctcagctcagtgcaacctctgccttctgggtacaagcgattctcctgcctcagcctcccragtagctgggattacaggctcctgccaccacgcctggctaatttttgtatttttagtagagacggcggggggaggtttcaccatgttgacaaggctggtc

SEQ ID NO: 104699 - DNA, 201 bp, Homo sapiens
ctcctgacctcaggtgatacgcccacctgggcctcccaaaatactgggattacaggcatgagccgctgcatcagccagcagtttttcttgtggttttttttgtttgttttgttttgttttgtttttgagatagggtcttactctgttgtccacgctggagtgctgtggtatgatcgtagctcactgcagcctcaaactcct

SEQ ID NO: 104700 - DNA, 201 bp, Homo sapiens
agatgtcactgattttaagacttaacactatttttcatactgccaagaaagaaaacactaccagttataaatgtaaattgccatcaattgtaatacatcarttttagagctattattaataaaatgtgaatgtgcatcttagagcaatgaaatatagtactatatatttgatgaccttttctgccctgtgatattcagaaa

SEQ ID NO: 104701 - DNA, 201 bp, Homo sapiens
aggtgatcctcctgcttcagcctccccagtaactgggactacaggcgcgtgccacatgcctggctaattttgtatttttagtagagatggggtttcaccaygttggccaggctggtctctaactcctgacctcaggtgatacgcccacctgggcctcccaaaatactgggattacaggcatgagccgctgcatcagccagc

SEQ ID NO: 104702 - DNA, 201 bp, Homo sapiens
acctccacctcccgggctcaggtgatcctcctgcttcagcctccccagtaactgggactacaggcgcgtgccacatgcctggctaattttgtatttttagyagagatggggtttcaccatgttggccaggctggtctctaactcctgacctcaggtgatacgcccacctgggcctcccaaaatactgggattacaggcatg

SEQ ID NO: 104703 - DNA, 201 bp, Homo sapiens
gctcactgcaacctccacctcccgggctcaggtgatcctcctgcttcagcctccccagtaactgggactacaggcgcgtgccacatgcctggctaattttktatttttagtagagatggggtttcaccatgttggccaggctggtctctaactcctgacctcaggtgatacgcccacctgggcctcccaaaatactgggat

SEQ ID NO: 104704 - DNA, 201 bp, Homo sapiens
tttgggattggggtagcggggacagcaacttttcttttctttttcttttttattttgaggtagggtattgctgtgtcacccaggctggagtgcagtggtgkgatctcggctcactgcaacctccacctcccgggctcaggtgatcctcctgcttcagcctccccagtaactgggactacaggcgcgtgccacatgcctggc

SEQ ID NO: 104705 - DNA, 201 bp, Homo sapiens
gatttgggattggggtagcggggacagcaacttttcttttctttttcttttttattttgaggtagggtattgctgtgtcacccaggctggagtgcagtggygtgatctcggctcactgcaacctccacctcccgggctcaggtgatcctcctgcttcagcctccccagtaactgggactacaggcgcgtgccacatgcctg

SEQ ID NO: 104706 - DNA, 201 bp, Homo sapiens
ttggatttgggattggggtagcggggacagcaacttttcttttctttttcttttttattttgaggtagggtattgctgtgtcacccaggctggagtgcagyggtgtgatctcggctcactgcaacctccacctcccgggctcaggtgatcctcctgcttcagcctccccagtaactgggactacaggcgcgtgccacatgc

SEQ ID NO: 104707 - DNA, 201 bp, Homo sapiens
atcctagcactttgggaggccaagccggacagatcacttgaggtcaggagttcgagaccagcctggcaaacatgatgaaaccccacctttactaaaaatayaaaaattagccaggcgtagtggtgtgtgcctgtaacccagctacctgggaggctgaggcaggagaatcactggaacccgggaggcagaggctacagtgag

SEQ ID NO: 104708 - DNA, 201 bp, Homo sapiens
cctagcactttgggaggccaagccggacagatcacttgaggtcaggagttcgagaccagcctggcaaacatgatgaaaccccacctttactaaaaatacamaaattagccaggcgtagtggtgtgtgcctgtaacccagctacctgggaggctgaggcaggagaatcactggaacccgggaggcagaggctacagtgagcc

SEQ ID NO: 104709 - DNA, 201 bp, Homo sapiens
ccccatctctactaaaaatacaaaattagccgggcgtggtggcgcatgtctgtaatcccagctactcgggaggctgaggcaggagaatggcgtgaacccgrgaggcggagcttgcagtgagccaggatcgcgccactgcactccagcctgggcgacagagcgagactccgtctcaaaaaaaaaaaaaaaaaaaaaattagt

SEQ ID NO: 104710 - DNA, 201 bp, Homo sapiens
gtatgaaactttctattaaattcctgattttatttctgtaggactgaacgtcttgctcgagatgtgatgaaggagatgggaggccatcacattgtagcccyctgtgtgctcaaggggggctataaattctttgctgacctgctggattacatcaaagcactgaatagaaatagtgatagatccattcctatgactgtagat

SEQ ID NO: 104711 - DNA, 201 bp, Homo sapiens
caggagaatggcgtgaacccgggaggcagagcttgcagtgagcagagatcgtgccactgcactccagtctgggtgacagagcaagactccgtctcaaaaamaaaaacaaaaacaagaaacaaattaaactaatgtgatagactactgctttgttttcaaaagatacactccccaaaagttactgatctaaaatacagtagt

SEQ ID NO: 104712 - DNA, 201 bp, Homo sapiens
tgtatgaaactttctattaaattcctgattttatttctgtaggactgaacgtcttgctcgagatgtgatgaaggagatgggaggccatcacattgtagccytctgtgtgctcaaggggggctataaattctttgctgacctgctggattacatcaaagcactgaatagaaatagtgatagatccattcctatgactgtaga

SEQ ID NO: 104713 - DNA, 201 bp, Homo sapiens
ctactcgggaggctgaggcaggagaatggcgtgaacccgggaggcagagcttgcagtgagcagagatcgtgccactgcactccagtctgggtgacagagcragactccgtctcaaaaaaaaaaacaaaaacaagaaacaaattaaactaatgtgatagactactgctttgttttcaaaagatacactccccaaaagttact

SEQ ID NO: 104714 - DNA, 201 bp, Homo sapiens
cccgtctctactaaaaaatagaaaaaattagctggggtggtggcgggcgcctatagtctcagctactcgggaggctgaggcaggagaatggcgtgaacccrggaggcagagcttgcagtgagcagagatcgtgccactgcactccagtctgggtgacagagcaagactccgtctcaaaaaaaaaaacaaaaacaagaaaca

SEQ ID NO: 104715 - DNA, 201 bp, Homo sapiens
taatgtatgaaactttctattaaattcctgattttatttctgtaggactgaacgtcttgctcgagatgtgatgaaggagatgggaggccatcacattgtasccctctgtgtgctcaaggggggctataaattctttgctgacctgctggattacatcaaagcactgaatagaaatagtgatagatccattcctatgactgt

SEQ ID NO: 104716 - DNA, 201 bp, Homo sapiens
ttttatttctgtaggactgaacgtcttgctcgagatgtgatgaaggagatgggaggccatcacattgtagccctctgtgtgctcaaggggggctataaatkctttgctgacctgctggattacatcaaagcactgaatagaaatagtgatagatccattcctatgactgtagattttatcagactgaagagctattgtgtg

SEQ ID NO: 104717 - DNA, 201 bp, Homo sapiens
gttataaagtttaatgtatgaaactttctattaaattcctgattttatttctgtaggactgaacgtcttgctcgagatgtgatgaaggagatgggaggccrtcacattgtagccctctgtgtgctcaaggggggctataaattctttgctgacctgctggattacatcaaagcactgaatagaaatagtgatagatccatt

SEQ ID NO: 104718 - DNA, 201 bp, Homo sapiens
atatttctttttcagattagtgatgatgaaccaggttatgaccttgatttattttgcatacctaatcattatgctgaggatttggaaagggtgtttattcytcatggactaattatggacaggtaagtaagatcttaaaatgaggttttttactttttcttgtgttaatttcaaacatcagcagctgttctgagtacttgc

SEQ ID NO: 104719 - DNA, 201 bp, Homo sapiens
tctttttcagattagtgatgatgaaccaggttatgaccttgatttattttgcatacctaatcattatgctgaggatttggaaagggtgtttattcctcatrgactaattatggacaggtaagtaagatcttaaaatgaggttttttactttttcttgtgttaatttcaaacatcagcagctgttctgagtacttgctattt

SEQ ID NO: 104720 - DNA, 201 bp, Homo sapiens
tgatgaaggagatgggaggccatcacattgtagccctctgtgtgctcaaggggggctataaattctttgctgacctgctggattacatcaaagcactgaakagaaatagtgatagatccattcctatgactgtagattttatcagactgaagagctattgtgtgagtatatttaatatatgattctttttagtggcaacag

SEQ ID NO: 104721 - DNA, 201 bp, Homo sapiens
gcagatcacctgaggtgggaaattcaagaccagcctgaccaacatggagaaaccccatctctactaaaaatacaaaattagccgggcgtggtggcgcatgmctgtaatcccagctactcgggaggctgaggcaggagaatggcgtgaacccgggaggcggagcttgcagtgagccaggatcgcgccactgcactccagcct

SEQ ID NO: 104722 - DNA, 201 bp, Homo sapiens
agctatgcaatgtcttcttttttgaaaggatataattgacactggcaaaacaatgcagactttgctttccttggtcaggcagtataatccaaagatggtcraggtcgcaaggtatgtatgacattttgacacagaatattttcctcatttgaagggggattaagtgattgcttctttttaaggataaatgttttcaactgt

SEQ ID NO: 104723 - DNA, 201 bp, Homo sapiens
agctactgctttgtgaggctgaggcaggcagatcacctgaggtgggaaattcaagaccagcctgaccaacatggagaaaccccatctctactaaaaatacraaattagccgggcgtggtggcgcatgtctgtaatcccagctactcgggaggctgaggcaggagaatggcgtgaacccgggaggcggagcttgcagtgagc

SEQ ID NO: 104724 - DNA, 201 bp, Homo sapiens
cccagctactgctttgtgaggctgaggcaggcagatcacctgaggtgggaaattcaagaccagcctgaccaacatggagaaaccccatctctactaaaaakacaaaattagccgggcgtggtggcgcatgtctgtaatcccagctactcgggaggctgaggcaggagaatggcgtgaacccgggaggcggagcttgcagtg

SEQ ID NO: 104725 - DNA, 201 bp, Homo sapiens
ccccgtctctactaaaaaatagaaaaaattagctggggtggtggcgggcgcctatagtctcagctactcgggaggctgaggcaggagaatggcgtgaaccygggaggcagagcttgcagtgagcagagatcgtgccactgcactccagtctgggtgacagagcaagactccgtctcaaaaaaaaaaacaaaaacaagaaac

SEQ ID NO: 104726 - DNA, 201 bp, Homo sapiens
ggcggggtggctcacgcctgtaatcccagcactttgggaggctgaggcgggcggatcatgagatcaggagatcgagaccatcctggctaacatggtgaaaycccgtctttacaaaaaaaatacaaaagaattaaccaagtgtggtggtgggtgcctgtagtcccagctactgctttgtgaggctgaggcaggcagatcacc

SEQ ID NO: 104727 - DNA, 201 bp, Homo sapiens
tcctgattttatttctgtaggactgaacgtcttgctcgagatgtgatgaaggagatgggaggccatcacattgtagccctctgtgtgctcaaggggggctrtaaattctttgctgacctgctggattacatcaaagcactgaatagaaatagtgatagatccattcctatgactgtagattttatcagactgaagagctat

SEQ ID NO: 104728 - DNA, 201 bp, Homo sapiens
cggtgaaaccccgtctctactaaaaaatagaaaaaattagctggggtggtggcgggcgcctatagtctcagctactcgggaggctgaggcaggagaatggygtgaacccgggaggcagagcttgcagtgagcagagatcgtgccactgcactccagtctgggtgacagagcaagactccgtctcaaaaaaaaaaacaaaaa

SEQ ID NO: 104729 - DNA, 201 bp, Homo sapiens
ttttgtatttttagtagagacggggttttaccacgttggccaggctggtctcgaactcttgacctcgagcgatcaacttgccttggcctcccaaagtgctrggattacaggcatgagccacagcgcccagccgtctttttttttaaatagcaatttaacactgttcacagttactcatgtacatgtcatgccatctattac

SEQ ID NO: 104730 - DNA, 201 bp, Homo sapiens
aacaaaacaaaaaacaaaaaactacgtattaagacaagaaacagactgggcgcggtggctcacgcctgtaatcccagcactttgggaggctgaggcgggcrgatcacaaggtcaggagatcgagaccatcctggctaacacggtgaaaccccgtctctactaaaaaatagaaaaaattagctggggtggtggcgggcgcct

SEQ ID NO: 104731 - DNA, 201 bp, Homo sapiens
aattttttttttgtatttttagtagagacggggttttaccacgttggccaggctggtctcgaactcttgacctcgagcgatcaacttgccttggcctcccraagtgctgggattacaggcatgagccacagcgcccagccgtctttttttttaaatagcaatttaacactgttcacagttactcatgtacatgtcatgcca

SEQ ID NO: 104732 - DNA, 201 bp, Homo sapiens
tcaaaacaaaacaaaaaacaaaaaactacgtattaagacaagaaacagactgggcgcggtggctcacgcctgtaatcccagcactttgggaggctgaggckggcggatcacaaggtcaggagatcgagaccatcctggctaacacggtgaaaccccgtctctactaaaaaatagaaaaaattagctggggtggtggcgggc

SEQ ID NO: 104733 - DNA, 201 bp, Homo sapiens
tggcaaacatgatgaaaccccacctttactaaaaatacaaaaattagccaggcgtagtggtgtgtgcctgtaacccagctacctgggaggctgaggcaggrgaatcactggaacccgggaggcagaggctacagtgagccaacatcacgccactgcactccagcctgggtgacagagcaagactctgtctcaaaacaaaac

SEQ ID NO: 104734 - DNA, 201 bp, Homo sapiens
ttttgttacagattatgagctttattatgctatacagttagttgtatgtatatatgcctttcccactagattttaagctttttttttttttttttttttgkgacggagtcttgctcttgtcgcccaggctgaagtggagtgcagtggcacaatctcggctcactgcagcctccacctcctaggttcaagcgattctcctgc

SEQ ID NO: 104735 - DNA, 201 bp, Homo sapiens
ctggcgggtgcctgtagtcccagctactcaggaggctgaggcgggagaatggcgtgaacccaggaggcagagcttgcagtgagcggagatcgcgccactgyactccagcctgggcaacagagcgagattccgtctaaaaaaaaaaaaaaagaatgttgtgataaaaggtgatgctcacctctcccacacccttttatagtt

SEQ ID NO: 104736 - DNA, 201 bp, Homo sapiens
ggtgaggcatgagaatcacttgaacccgggagttggaggttgcagtgagcccagattgtgccactgtactccagcctgggtgacagagtgagactctgtckcaaaaaagaaaaaaaaaaaaaaagagacaccagagagcttgttagaagaggtcatgtgagcacacagttagaagaccttcaagccaaagaagaggcctga

SEQ ID NO: 104737 - DNA, 201 bp, Homo sapiens
aaagaaaagaaaagaatgttgtggccaggcgcggtggcttacgcctgtaatttcagcactttgggagaccgaggtgggcggatcacgaggtcaggagatcragaccatcctggctaacacagtaaaaccccatctctactaaatacaaaaaaaaattagccgggagtgctggcgggtgcctgtagtcccagctactcagga

SEQ ID NO: 104738 - DNA, 201 bp, Homo sapiens
gggagggtgaggcatgagaatcacttgaacccgggagttggaggttgcagtgagcccagattgtgccactgtactccagcctgggtgacagagtgagactytgtctcaaaaaagaaaaaaaaaaaaaaagagacaccagagagcttgttagaagaggtcatgtgagcacacagttagaagaccttcaagccaaagaagagg

SEQ ID NO: 104739 - DNA, 201 bp, Homo sapiens
tacatcggtttgtggggagtcaaaagtcctttggagctaggtttgacaaataaggtgggttaacacttgtttcctagaaagcacatggagagctagagtaytggcgaattgaagaaatccccctttttttttaacacacttaagaaaggggactgcaggtatactcaagagagtaagtcgcaccagaaaccacttttgatc

SEQ ID NO: 104740 - DNA, 201 bp, Homo sapiens
ctcacgcctgtgatcccagcactttgggaggccgaggtggacggatcacctgaggttgggagttcgagaccagcctgaccaacatggagaaaccctgtctytactaaaaaaaatacaaaattagccgggcgtggtggcacatgcctgtagtcccagctactcggcaggctgaggcaggagaatcgcttgaacctgggaggc

SEQ ID NO: 104741 - DNA, 201 bp, Homo sapiens
gccgggcgcagtggctcacgcctgtgatcccagcactttgggaggccgaggtggacggatcacctgaggttgggagttcgagaccagcctgaccaacatgsagaaaccctgtctctactaaaaaaaatacaaaattagccgggcgtggtggcacatgcctgtagtcccagctactcggcaggctgaggcaggagaatcgct

SEQ ID NO: 104742 - DNA, 201 bp, Homo sapiens
ctgagaattagttttggcttccttggaggtgatatcgcctctgttgagtataagtggcctactgtgatcacaccactgcactccagcctgggtgacagagygagaccctgtctcagaaaaaaaaaaaaaaaaaaagaatgcatggcctagatgacttctaaggtttttcccacccagttccagttttcatgttctaggcag

SEQ ID NO: 104743 - DNA, 201 bp, Homo sapiens; identical to SEQ ID NO: 16712

SEQ ID NO: 104744 - DNA, 201 bp, Homo sapiens; identical to SEQ ID NO: 16713

SEQ ID NO: 104745 - DNA, 201 bp, Homo sapiens
ttacaccctaaggagttgactgttttctgagtgagagagaaaagttgggggatggggagttatgattccctgtttgttttggaaatgtcactctagtgtaragttcttaacccttttgggtcccagaactctaaaacttgacttcttgccagtccctttcctagggtctgcaaagctacaactgcagcactcaactgagca

SEQ ID NO: 104746 - DNA, 201 bp, Homo sapiens
ccatctgaaatttcctaaatcagaattgtcatattgaattatgagtgatgcttagaagggtccttgggaagtgcagaagcagacatttttgtcccttttasatgagactatttttagacttttctttttagtaggaggctaaagtagcttaagctattaaggtttgttatgcttatgtctgcaggaagaagtagctaaaaa

SEQ ID NO: 104747 - DNA, 201 bp, Homo sapiens
ttaggtaaaaccacaagcactagtgcaaaaatggggctggtaacacagttgccttgtgcccagcagctgggaacatcaggccttgttgccaggatcgtcgrctaatcgggtaggttatccaactggactctggtagcctgtctgctgcaggcaagtttgtatcctgactctccaagaaagtctcaagtgtgtattttccta

SEQ ID NO: 104748 - DNA, 201 bp, Homo sapiens; identical to SEQ ID NO: 16714

SEQ ID NO: 104749 - DNA, 201 bp, Homo sapiens; identical to SEQ ID NO: 16715

SEQ ID NO: 104750 - DNA, 201 bp, Homo sapiens
ttcctgtcaactataaaagcttaaagactgccttgcaagtttacgacaaggaggttcagtggacccttggagccatcctctacaggacccgctttctaccrttaaggtagggctgtgaatttgggaacgagaatcaaaaagatgcttttctgcagttacagcacctcatggcagctgtggtctgtggctgtttggggcatt

SEQ ID NO: 104751 - DNA, 201 bp, Homo sapiens; identical to SEQ ID NO: 16718

SEQ ID NO: 104752 - DNA, 201 bp, Homo sapiens; identical to SEQ ID NO: 16717

SEQ ID NO: 104753 - DNA, 201 bp, Homo sapiens
tgaaacatgaaatcttggtgatgcaaaaacaggtcttgagagaaaaaaaatctaaatcgcaagtgaaaaatgtgaagttgtgctgtgcttctgtttaagaycttttttcttccagggcccagtgaggtattttaatgcatgaagcactcttcaaggtgaagagtaaagaaattaactgtaaaataatagaatttatcccaa

SEQ ID NO: 104754 - DNA, 201 bp, Homo sapiens
ctgcagaagaagttgctagaaggataggaaaaactaaggaagtgtaatgtgtagcatgatttccctaaaattagccactctgaagaaacatcacatgttayagctaaaatatctgcttcttaactaaagtatcctgtttctctaggcatttcagaatttgctacctctccagagaaagtcagtgattacatttctccactt

SEQ ID NO: 104755 - DNA, 201 bp, Homo sapiens
atgcttgttacaaatataaatttggtaaaccatttttaaagtgagaattttaataagcctttactagtgatctattttggtgaatttgttttcaggattaytgtgcaacaaagtggtccattttgcgggaacgctttgaccgaggactgtacgcctctcatgctgacctccacaggcttaagtaagtactagaaggtcaag

SEQ ID NO: 104756 - DNA, 201 bp, Homo sapiens
atttgcaaacctaggtctctcctcataaaaaacagacccaggcaaagtgggaagaactcaattagcaaaagtgtgttgcactgttagctttttattccccsactagctgagcagggagaagagatgaaagcacaccagggtcctgcctttggccctctgtcccaccgtgccctgaaggaggtgtgtgcgtgcgctctctca

SEQ ID NO: 104757 - DNA, 201 bp, Homo sapiens
ttctgaccgatatccccgtgcactttgactttctgttttctgactctcatgcagaagtaatttctgggaaacaagaaggttggtatattggtcttcagttkaaaatttgggaagctgttcctttaaatcctccccattttcaccaatgtaccctttgttatactcctattgtcttaacatttgggaaataatagccttgaa

SEQ ID NO: 104758 - DNA, 201 bp, Homo sapiens; identical to SEQ ID NO: 16721

SEQ ID NO: 104759 - DNA, 201 bp, Homo sapiens; identical to SEQ ID NO: 16722

SEQ ID NO: 104760 - DNA, 201 bp, Homo sapiens
aaatagaccatgaaaagaaggtgactcttcagaagagcccagttctctggattagttctgttccagtgaacactttctgttctttctagatgatgaggccrttgtggaagttaacattcctggaagtgaaagcagcgaagccattgtccgtaaaaggacagcgggcattctcgacatgggcggcgtgtcgactcagatagc

SEQ ID NO: 104761 - DNA, 201 bp, Homo sapiens; identical to SEQ ID NO: 16726

SEQ ID NO: 104762 - DNA, 201 bp, Homo sapiens
gaggttgccttccgagcgtgggtgaggggagggcgggcggccgaaggggccggcgagtgggttggagtgcgggggccggcggcgcggcgagcgggccgcgracgagcctttttgccccaggcccccacagccgcctgattagccccgcggaccggttcccgcttcccctgccgcgcggccacatccgagcgccccgggacc

SEQ ID NO: 104763 - DNA, 201 bp, Homo sapiens
ttaaaatttgggaagctgttcctttaaatcctccccattttcaccaatgtaccctttgttatactcctattgtcttaacatttgggaaataatagccttgmaatattacaatttttaaattactaaatcagtttcttatatgactagtctttgttgccctaacattaagccactgaaagataaccgtttgtcttcaccaca

SEQ ID NO: 104764 - DNA, 201 bp, Homo sapiens; identical to SEQ ID NO: 16728

SEQ ID NO: 104765 - DNA, 201 bp, Homo sapiens
acaaacctcagatgacacaaagtttcctaagtgcgctgtgatcattctctcggtcaccttcctcttcgaagtgtgttctttctcaccccatctagaattgwcctcccacctctaggaatcttttcctgctaaagctagccttctctgtgctcttctctgagctcttataacaagaatcccagtaatttaacattgccttta

SEQ ID NO: 104766 - DNA, 201 bp, Homo sapiens
agcgtattttgagaaacactggtttgcagccacttcctgaaaacacagttttctgtaggactcacgatgaagtttcttgttttgccataggctcctgggtraacagactggtctgactcctgatatgccgtacttggacccctgcctacccctagacattaaagatgaaatccagcaaaatggacaaaccatatacctacg

SEQ ID NO: 104767 - DNA, 201 bp, Homo sapiens
tgcaccgaggatgtgttacgaatggggggagactacaatgctgctaaatttactaaagctgcaaaggtacccttgagagacgccgtctgctctgcatgctyttgagagaccagtgtggacggtgacgggttatgtcctcctttcacattgacagggaaagacggagtatagaaggctgcactgcagcatgttgggatcctg

SEQ ID NO: 104768 - DNA, 201 bp, Homo sapiens; identical to SEQ ID NO: 16731

SEQ ID NO: 104769 - DNA, 201 bp, Homo sapiens
aatggggggagactacaatgctgctaaatttactaaagctgcaaaggtacccttgagagacgccgtctgctctgcatgcttttgagagaccagtgtggacrgtgacgggttatgtcctcctttcacattgacagggaaagacggagtatagaaggctgcactgcagcatgttgggatcctgttccctttgcttggagggag

SEQ ID NO: 104770 - DNA, 201 bp, Homo sapiens
acactgagaaatatcaaatctttgttctattttcaaagaaatgattctccttgagaatgaaatgtcaagtcaatgaaattatttggggtatagcttgctaraaatgtataccaaaaagtatttcaaaagccgtctgtcatttcagcattaatacttcctatgtgaaagagactgtagagaatacagaaatggggtgaaatt

SEQ ID NO: 104771 - DNA, 201 bp, Homo sapiens
gcccctgatcttcaggttcttggatggtctcatccatattcagggtttgctgctgcctctcaagaagaggctccaatcctgacccctgcccggttgcctgstagattccacaactccagacaaacccaccatcctctctccattctgttcctgttcttctctcggttaatggcatcgccaaccatccagtccccttccctg

SEQ ID NO: 104772 - DNA, 201 bp, Homo sapiens
aatagttactcatgatttgtgtggcaggcactggtcacgggggaaacagaagaataagaggctgtccctgccctagtggggcttgtcatgtaatgaggaasccaaccacacgtataatactttagcccactgctgtgataagcaaatactctggggatatgaggattagggaaactcaccgaggactcatgcttgatttgt

SEQ ID NO: 104773 - DNA, 201 bp, Homo sapiens; identical to SEQ ID NO: 16732

SEQ ID NO: 104774 - DNA, 201 bp, Homo sapiens
cattatgccgagaccgggttcatgcactgattgatttgacaggtgaactgctccatgttgtgggaccagggatgtgaagcaagtacatcaaccttgaaacrcgcgcagttggtttgggagagccggcctgaggaagcccctgccccaaggctgcccacagagggaaggattgtgtgtgtgtgtgtgtgtgtgccatcttga

SEQ ID NO: 104775 - DNA, 201 bp, Homo sapiens
gagtcggagaactgactagggacaaagtgccttgcacagtactttgtacataaaagggcagtctaatagacatttatcaagtgaatggatatttcaggttyacattcagcttattctgcctttctcctacctccaccccaaatctcccttgtaccataaggtatttaaggcctatttgatatcctgatattttggggtcac

SEQ ID NO: 104776 - DNA, 201 bp, Homo sapiens; identical to SEQ ID NO: 16711

SEQ ID NO: 104777 - DNA, 201 bp, Homo sapiens
gccaatcatcccgcatcaggctccgccccccagcgctcaacgcgcccctcggcgtgcgcgctcccgccgccagcgggcgcgctccgggcgcaggcggtgamgtgttgccggcgggggccgggcgggggtgcggctccaggaaaggagcgcggcctccaggaagccggctggccgtgatgctgcccaatggtggtcccccgc

SEQ ID NO: 104778 - DNA, 201 bp, Homo sapiens
ttttctgggcattagtattttctctgtagcaatctgcaaactccatgaaatttggagttgggtttgttactcctcatgtcaccttcgtagtcctgactttyttcctcaaggaccagtttgcctttaaccatgactttaagctgttaaataaaactgtcttttctttggttctcagttcagctatcacacaactatcactga

SEQ ID NO: 104779 - DNA, 201 bp, Homo sapiens
ataaaggcgaggtcactggttgagactgccggtagaagactagttaggctgctctttagagcaggcaagagataagagcctgatctcaggcaaagatgatraggaaagggattttagataagctgaggttaaagaaattaaaggaatctgtaagaaattacatttggggccaggcacagtggctcacgcctgtaatcccag

SEQ ID NO: 104780 - DNA, 201 bp, Homo sapiens
tacagacaattgagctacacagttagctgttctatgagggttttaggtaccagaaaaaagatgaggaaaaaatatcacaggagttcttaagagggaggcatttttttttttccagctagggccatgatggagaaagtgacatctgaactgcacctcaagggaagggatagttctaaatagaacatgccagagcatgggaag

SEQ ID NO: 104781 - DNA, 201 bp, Homo sapiens
cagtatgaaattaacttagaagtgtgttgctcagaataaacccttccaacagcttcagtgcaaggatcatgtatagattatatgtggttggatttaagcamacacttaaagaacgtagatgttttctttgatgatgctatctttgtgatttgtctcacttcctggaacaggagggctctaactccgtgaggaccccagcat

SEQ ID NO: 104782 - DNA, 201 bp, Homo sapiens
aggtgacaatgaaacccaggtgtagggaatgtgaaaatagaatcagacttggcagctgagtgaatggagggataaaggaaagagcagaagataccttgaatttttttttttttttgagatggagtctcgctctgtcaccaggctggagtgcagtggcacgatcttgactcactgcaacctccacctcccgggttgaagtga

SEQ ID NO: 104783 - DNA, 201 bp, Homo sapiens
ccacttcctgaaaacacagttttctgtaggactcacgatgaagtttcttgttttgccataggctcctgggtaaacagactggtctgactcctgatatgccrtacttggacccctgcctacccctagacattaaagatgaaatccagcaaaatggacaaaccatatacctacgagggactggagactttgacctgtgtcgag

SEQ ID NO: 104784 - DNA, 201 bp, Homo sapiens
gcgtattttgagaaacactggtttgcagccacttcctgaaaacacagttttctgtaggactcacgatgaagtttcttgttttgccataggctcctgggtaracagactggtctgactcctgatatgccgtacttggacccctgcctacccctagacattaaagatgaaatccagcaaaatggacaaaccatatacctacga

SEQ ID NO: 104785 - DNA, 201 bp, Homo sapiens
gctgtggcaggctggcagagggcgtgtccaaagggatgaggagtaaagtcatgtgagaggaaccaaggagaggcgatctatgaaacccaggttgtgtgttrggatgagggagagggacttcatctaagaccctggcttgggctgctgggtgcccagcgctgatggcctcggagggaggtaaccagcagtgagagcaggttt

SEQ ID NO: 104786 - DNA, 201 bp, Homo sapiens
caggtcttgagagaaaaaaaatctaaatcgcaagtgaaaaatgtgaagttgtgctgtgcttctgtttaagaccttttttcttccagggcccagtgaggtaktttaatgcatgaagcactcttcaaggtgaagagtaaagaaattaactgtaaaataatagaatttatcccaaaggcagtgaaatttttttaaatcctaatc

SEQ ID NO: 104787 - DNA, 201 bp, Homo sapiens
tgttatgcttatgtctgcaggaagaagtagctaaaaacttgttagctgaatttaacttgggatgtgatgttcaccaaactgagcatgtgtatcgagtctaygtggccacgtttcttgggtttggtggcaatgctgctcgacagagatacgaagacagaatatttgccaacaccattcaaaagaacaggtaaagcacctttc

SEQ ID NO: 104788 - DNA, 201 bp, Homo sapiens
cgaacaaggcagacctcagctgagccgcttgtgtgtgttcattgaaatcagctggtttgttttctgaacgtagagtttttctttggtatatacgcagtcgyatgcttgagtttcagtttatattttctcttcaatcacgtcttttctcaacaggttttatgaaatgtaaaataataacatctgattttttaagttagaatt

SEQ ID NO: 104789 - DNA, 201 bp, Homo sapiens
atcaggcttaacattggtctgtcttgcactatacaaagtgtatgaaatggaaatcaaaatacctttttattgcactactctgtcctgaagcatggacttcsgtgtataacattgcagcaaggctctagaaatttcttaatagggtctggctagtttagggcttcgagtgcattgaaattgaattgtatgtgttgtcaaaaa

SEQ ID NO: 104790 - DNA, 201 bp, Homo sapiens
aaacagaagataccaagctgtaatcttttgatttgtaaatgtttttattactttacagccagcagaaagctattctggaagaccttctgaccgatatcccygtgcactttgactttctgttttctgactctcatgcagaagtaatttctgggaaacaagaaggttggtatattggtcttcagtttaaaatttgggaagctg

SEQ ID NO: 104791 - DNA, 201 bp, Homo sapiens
gttgtaatgagacaggcaagtaaataggtaattttgatatggtgtaatgaatgtacatctagcaaaaggaagtaagcatggaatttaacaagagttgtctwcagggttctgttagggtgacttccatggaggctggagccaagtgggtgtgcaggaattaaccaggtgaaaaggggtagggaggtggatggagaagactct

SEQ ID NO: 104792 - DNA, 201 bp, Homo sapiens
ggcattgctgttagagccggccacggcagaattgtagggacagtgacgtttgcttttggtcttgccccctccccacaagtgcttcctcccttctcaccctrccatcccgtaatacacagcactcctgtcctactgccctgtgtttggttattctcaactgtctgttccccagccccggcaaaagggtcagttccggggttc

SEQ ID NO: 104793 - DNA, 201 bp, Homo sapiens
taatttcagtgtagtcaatgagcgtcaatgatattttgaggcattgatgataccataatgggacatgaaagatctgtgattttcgttagtaacaaagttgyaggtgctgccaacgctaatgatagtttgttgtctgcattcatggtcaaagaaatgctacatctcagtcagcgcttgggtagaacaaagatgtgcgttttt

SEQ ID NO: 104794 - DNA, 201 bp, Homo sapiens
ggaaagatagagaccgcttgtcctttggcttcagcagattggaaggaggccctggctaaaggcatctgtctgctctgcaatttgaggcctggaggctggargaggagtgataatggtggagtcggagaactgactagggacaaagtgccttgcacagtactttgtacataaaagggcagtctaatagacatttatcaagtg

SEQ ID NO: 104795 - DNA, 201 bp, Homo sapiens
acttcagagtatactttcacatgttatctcactgatacttagaagccccctgcattgggctgttccgttctccatttcagaggtagggttgcagttcctamagtgcagctctggggcctgggtcccgccgtccccctgtgcaccctttccacccctttccttgcttactgtcctgtttgttgtttggtgttcacatgggca

SEQ ID NO: 104796 - DNA, 201 bp, Homo sapiens; identical to SEQ ID NO: 16730

SEQ ID NO: 104797 - DNA, 201 bp, Homo sapiens
gtttgtcttcaccacatgtagtgacatagcttgatataaactcactttgatagaaaaggcttgtgtgccttgcctaagttgtgtggcttcctgggacgttratcattattgagctgttggagcttcttctcgactttgatacactgagaaatatcaaatctttgttctattttcaaagaaatgattctccttgagaatgaa

SEQ ID NO: 104798 - DNA, 201 bp, Homo sapiens
tgtaatatgttttaagctgatttttgagttggtagtttagaaatagaattttgcattttggaatttgtttgaacttctgtaatggagtgtgtgtctgattkagatgatctttatcatcatcacttgttttgttttcttttgactcttcaattattcaacagttgtattgatgttatagtggtgctgctacatagcttagaa

SEQ ID NO: 104799 - DNA, 201 bp, Homo sapiens
gggattataggcatgagccaccatgcccggccaagatttttcaatacttttatatgtgctattttagtgagtattgaaaaaaactgtgtggctagcgcatsacacctgtgattttagagctgttattgcttaggatgtggctcttaattttaaaaatggattgtttaaagaaaaatgttaagtacaagtggtatttggata

SEQ ID NO: 104800 - DNA, 201 bp, Homo sapiens
ctgcgcagctcgtctgagagtctgacagaccaggctagaaccacagggggctgcattcttgggtggattaaagggtacaggtgatctcttggatctggagsggagactgcttccattgtttcccaaagatggttttaggaagtacaagacaaattttattttattatttatttatttttgagacagagtttcactcctatt

SEQ ID NO: 104801 - DNA, 201 bp, Homo sapiens
tagctgagactacagatgtgcgctgcacctggctgattcatttttaaatttttgtagagatgggatttattgttatgttgcccagtctggccttgaactcytggggtcaagtgatcctctggcctcggcctcccaaagtgctggaagtacaggtgtgaaccactgcacccagtgtgttacctagttttgtttgtttgtttt

SEQ ID NO: 104802 - DNA, 201 bp, Homo sapiens
aaaaaaaaaagaaaggtcaggcgtggtgtggtggcacacacctgtagtccctgctactcaggaggctgaggtggggggtatggcttaagcccaggaggtcsaggctgtggtgaaccaagatctcgccactccagcctgggtgtcagagaccctgtctcaaaaaaaaaaaaaaagtttgtttcttagagtagcccaaggaat

SEQ ID NO: 104803 - DNA, 201 bp, Homo sapiens
actcccccactcattgggccccaccctgttctcaggtggtagattactacaaggaggcatgccgggccttggagaaccccgacactgcctcactgctgggycggatccagaaggactggaagaaacttgtgcagatgaagatctactacttcgcagccgtggctcatgtgagggcctggggccccagggcggggcagggcg

SEQ ID NO: 104804 - DNA, 201 bp, Homo sapiens
aagtgcaggtgtacatctggctggtagccaccctgcctgtcacttggcttctcttcatctcccatcctcccactctggctgagttgatctctaaatctctactttcccatcaggctgctcatggcctgtccccagcttgcttcagcctgtctctctaacttcactccccagtcctctcctatgagaactttcagcttctct

SEQ ID NO: 104805 - DNA, 201 bp, Homo sapiens
agggaaggggatggccagggagggggcagttgggcctggatcctggaccaaggcagtgagggacaagcaaggggccttggctttgttgaatcaggagcacsgtggtgctgcttggagtgggggcagctgggggagagggcagtgaagagggatccctcagtctgcccctggggaaggataaagggaaggggaagcgggagg

SEQ ID NO: 104806 - DNA, 201 bp, Homo sapiens
cagctcctggacaggtttgtgtggccctggggctgtggtgcggctcgggtccagacaggctggggtgatgggagcctggccccactttttccttgcctgtygcacagggagctgaagaagaagccgccgccacggcccacagccccaaagccgctgctgccccgcagggaggagagtgaggcagtggaagcaggagacccc

SEQ ID NO: 104807 - DNA, 201 bp, Homo sapiens
gttccttggcttcctgagctggcagactcctggactttgtagagagactgcagcgttaggaggacctgccagagtgttggtgcagggtcaaggctctcgtggtcagcattttggtgctgcctgttcaggaggcgaagttcctggtggtccaggagacacgcttatggttgtaggtctgcacttaatcctgagtcctggttg

SEQ ID NO: 104808 - DNA, 201 bp, Homo sapiens
ctacttctccccttcctctctcacttcctgttccagcccatactgaactgcaacagcttaatcctgaccccttgctggcctcaagtttgggtcctgggctrtctgtgtcctgtggccaagcagccgcctccttctttgctcagtaatgctatgatgtagtctcccaattcccagcctgctctggactcagctgttgtgcct

SEQ ID NO: 104809 - DNA, 201 bp, Homo sapiens; identical to SEQ ID NO: 16785

SEQ ID NO: 104810 - DNA, 201 bp, Homo sapiens
agcggccgctgcacacgcccatcattgtgcactgcaggtagagggtgggcctgagggtctctcctctatgggctcttggcctagcctcataccccggcctyataaccccttcttggcacagctctggtgtgggccgcacgggagcctttgcactgctctatgcagctgtgcaggaggtggaggctgggaacggaatccctg

SEQ ID NO: 104811 - DNA, 201 bp, Homo sapiens; identical to SEQ ID NO: 16778

SEQ ID NO: 104812 - DNA, 201 bp, Homo sapiens
gaacattcatgtaatttcattttcttctgctctaactccaactggaatgaagctaggcccttgactaagtcttgaaagggtttgaggtctcacaacaaagkgacctgggctctaccttgtgggtgaagcctgtcttagaatcccagatcccacccacatcccacggtctccataatttttctttttcttttcttttttttt

SEQ ID NO: 104813 - DNA, 201 bp, Homo sapiens
ggaccagctcccaggagtcagcaaacatgggccacagactctgtaccccctaccccacctgcaggccgcttacctggtcaatgtacacggtcgtgatggcycctgagtggccctgaagggtgaagaggcagcacgagtcctccagacggaacacctgggacagggatgggcctcaggttctggtctctgggattttccaag

SEQ ID NO: 104814 - DNA, 201 bp, Homo sapiens
cagaatgctgtccgtgtcccacgagactttgagggctgtagtgtcctccgcaagtacctcggccagcttcattacctgcagagtcgggtccccatgggctygggccaggaggccgctgtccctgtcacctggtgagagccgcaggcagggctggaggatcccacggggagtctgggtggtgggggtgctcctcccctccct

SEQ ID NO: 104815 - DNA, 201 bp, Homo sapiens
actcctgacatcaggtgatccgcttgcctcggcctcccaaagtgctgggattacaggccttcatctgctgtttcatacaaatacaattggatgaatttttytaagacacaacagaactcctgttttctttttcttttcttttttttttttttttttttttttttgagacggagtctcactctgtcacccaggctggagtgc

SEQ ID NO: 104816 - DNA, 201 bp, Homo sapiens
attgtgtgaccagtgacttccctccatgcacctgggcctccaggagaggagttgctcattagccctttagcccgaggtggtatcagatatgaaacaattaytcctatagacactggaggagactgtgcagacaccactgcagcctggggactcttcccaacctgcacccccttccccaactgcagagccccttctctgcct

SEQ ID NO: 104817 - DNA, 201 bp, Homo sapiens
gagcttctcagtgggcacagtctcttactcccatttctgctgcctttggccctgcctggcccagcctgcacccctgtggggtggaaatgtactgcaggctytgggtcaggttctgctcctttatgggacccgacatttttcagctctttgctattgaaataataaaccaccctgttctgtggcccgtgtctgagtctgccc

SEQ ID NO: 104818 - DNA, 201 bp, Homo sapiens; identical to SEQ ID NO: 16779

SEQ ID NO: 104819 - DNA, 201 bp, Homo sapiens
gagttccttggcttcctgagctggcagactcctggactttgtagagagactgcagcgttaggaggacctgccagagtgttggtgcagggtcaaggctctcgtggtcagcattttggtgctgcctgttcaggaggcgaagttcctggtggtccaggagacacgcttatggttgtaggtctgcacttaatcctgagtcctggt

SEQ ID NO: 104820 - DNA, 201 bp, Homo sapiens
agttccttggcttcctgagctggcagactcctggactttgtagagagactgcagcgttaggaggacctgccagagtgttggtgcagggtcaaggctctcgtggtcagcattttggtgctgcctgttcaggaggcgaagttcctggtggtccaggagacacgcttatggttgtaggtctgcacttaatcctgagtcctggtt

SEQ ID NO: 104821 - DNA, 201 bp, Homo sapiens
ggcagcacttcccgggcctctgggggccccagggctgcctatgctgggagaggaatgaaatgtccattccaaacaggtttcccaatgctgccttcccgccyggggtggtggggctagtgtgtaaggcaggagtcatgtcttgggaggaggaggtgccttctgttccactgtttccagcagtgccctgggcatgttctgtga

SEQ ID NO: 104822 - DNA, 201 bp, Homo sapiens
cccgtgactgcccactccccctgctcctgatccccaggtacaattctgccaagaaggacaacgacttcatttaccatgaggctgtcccagcattggacacycttcagcctgtaaaaggtcggggagctgagaggtgggggcagaggtgacggtggggtggggacaggacacaggaggctgcctcaaggactctgcgtgggc

SEQ ID NO: 104823 - DNA, 201 bp, Homo sapiens
actgcagcctccacctcccaggctcaatcacttctcccccttcccaagcctgtagtcctgagtagctgggactacaggtatgcatcaccgcacctggccartttttgtattttttgtagaggcggagtctcgccatgttcttcaggctggtctcaaaatcctgggctcaagtgatcctcccactttggcctcccaaagtgc

SEQ ID NO: 104824 - DNA, 201 bp, Homo sapiens
tgtagtctcagctaattgggaggctgaggcaggagaattgcttgaacccaggaggttgcagtgaatactgcattccagcctgggtgacagaatgagactcttttttttttttttttttaaaaaaggaaaaactatgtgggatagattcagtcggccagctgccagccctggcttgtggaatgttttgttgaacgactatag

SEQ ID NO: 104825 - DNA, 201 bp, Homo sapiens
cctaaaatcccaagaatcctatgatccccatcccctctacctgctgaatggagtagaacttgatgcctgtgctgcggtcccagatgctgatgaggtcatcyaggccactgctgatgacacaggaggtggtacaggtaagggaggtgacatccccacggtgagcaaacacatggctgacccggctgccagtcagtacatccc

SEQ ID NO: 104826 - DNA, 201 bp, Homo sapiens
cttgacctcgagcttaacacggacctgaacctttgctcttcccttgttttcccttatcagtaaacagccccacagccacccacctgcacaagccagaagcytggaaatcatattcgacgtcctcatgcccttacatccatccattccaagttctgatacttttgtctccaaaatattcctcaaatatttctcaaagtgggc

SEQ ID NO: 104827 - DNA, 201 bp, Homo sapiens
ttcaccaacagtgagctgcaccgtgccatgaacctgcacgtcggcaacctgcgcctgctcagcgggccgcttgaccaggtccgggctgccctgcccacacyggccctctccccaggtgagccccaccagaccccattgggagactcgagctgggggtttctctggcctcactgaccactgctgcccacagaggacaaggcc

SEQ ID NO: 104828 - DNA, 201 bp, Homo sapiens
ccggatccagaaggactggaagaaacttgtgcagatgaagatctactacttcgcagccgtggctcatgtgagggcctggggccccagggcggggcagggcrgggctgagtggccacagctcaggaagcaagtcgtggcgtctcttcttctttcccagctgcacatgggaaagcaggccgaggagcagcagaagttcgggga

SEQ ID NO: 104829 - DNA, 201 bp, Homo sapiens
tggttctcagagccatgttgtcctgattgtggataacagcagtgccccctctgtctcaccttcacatgggtgtgagcagccccaggcccctaacactgtcycctccctccccaggagcgctgcactccatgctgggggccatggacaagcgggtgtctgaggaggtgaggagaggggcagtagtggaacatgtggacatac

SEQ ID NO: 104830 - DNA, 201 bp, Homo sapiens
tggaggggaggatgtcagccaaagcccatgcagaacctgtggtgacaggaatgacggcagcagcccactggcagaaatcaacatcactaagggcaagggaygccccctccccaaggaaaaagactccagctctaggtcagatggtgctgccaccaacagtcaaggagccttggaggaggagccagtgtgggacaggcaggc

SEQ ID NO: 104831 - DNA, 201 bp, Homo sapiens
ggagactgagggctgggcaggacttctgagtttccctgttccctccagcttgggtgtccttggactcgttgccctggttctcagagccatgttgtcctgaytgtggataacagcagtgccccctctgtctcaccttcacatgggtgtgagcagccccaggcccctaacactgtcccctccctccccaggagcgctgcactc

SEQ ID NO: 104832 - DNA, 201 bp, Homo sapiens
gacctcctcgctgctgcagcacagcaccccttcaatggcgtcccacacctacgagtccagaggctgtgagcacctgccagccagaaaggcccacaatcccyggggcggacagccgctctgcccacctttagcccctctgcccacctccagccggccgctgctccgccccaccacgatgaggttgccctgcagctccaagct

SEQ ID NO: 104833 - DNA, 201 bp, Homo sapiens
ggtccatgagcagaaagtgtcagtcattgtcatgctggtttctgaggctgagatggagaaggtgagaagagggggtgggtgcccacgagggcagtgtgggrtggcagggcaggggatcctggaaaaccaggtctgtcttggcttatctgtccctcagcaaaaagtggcacgctacttccccaccgagaggggccagcccat

SEQ ID NO: 104834 - DNA, 201 bp, Homo sapiens
gactcaagagagtatggcctagccaacaaaggctggggacatctggggctgaggcaggccacgctcaccttttgtccaagaacaccagagcggtaatgccygaggagacctcctcgctgctgcagcacagcaccccttcaatggcgtcccacacctacgagtccagaggctgtgagcacctgccagccagaaaggcccaca

SEQ ID NO: 104835 - DNA, 201 bp, Homo sapiens; identical to SEQ ID NO: 16783

SEQ ID NO: 104836 - DNA, 201 bp, Homo sapiens
agtccgctgagttccttggcttcctgagctggcagactcctggactttgtagagagactgcagcgttaggaggacctgccagagtgttggtgcagggtcamggctctcgtggtcagcattttggtgctgcctgttcaggaggcgaagttcctggtggtccaggagacacgcttatggttgtaggtctgcacttaatcctga

SEQ ID NO: 104837 - DNA, 201 bp, Homo sapiens
gttggccaaggtaaagctgaggaaggcctggctgccctgagggtataggagcaagcccggtaggactgagggggtgtcctggtgccagccttggttagtgmtaaggccccacccctgtccctaaccccacagggccagcctgacactgtgcaagacgcgcttcgcttcactatggatgtcattgggggaaagtgagtctgt

SEQ ID NO: 104838 - DNA, 201 bp, Homo sapiens
tgtgggtagtgacctccccttctcaccttctcccacctgggccattctcctcacacagctgcaagtctttcctcacagatgaggacactgcagatcacatrtttctatgctgtcctttcccaggccaggagaatgggttggtgagagaggctttctgttcccactcttgtttggtgcctcttgcctgcagttgctatcagc

SEQ ID NO: 104839 - DNA, 201 bp, Homo sapiens
gatatggcagaggtcatgatggaggggtatgataagaatgactagatttgagaagcattggcctaatgctgtgagctgcagctgtgacatgccttatcctkgcactgggcattctagaagcctcactaccagggagattatcatccctgtttaaagaagagactgagtttcagagtctcccaagacactgctgggaagtgg

SEQ ID NO: 104840 - DNA, 201 bp, Homo sapiens
ccgatgagtagatagaaatgaggacgtaaaacaatactgatggtaggcaactctttcctgagtttggctgtgaatggtagttgagagaaagggtggtaagsgaagaggggaggggaaggagatttgagattcaagggagatatttgggagttattaattttttgtcgttatttttaggatgggaatgtgggtgcatatttt

SEQ ID NO: 104841 - DNA, 201 bp, Homo sapiens
agtgcagtggcgcgatcttggctcactgctgcaacctccgcctcccgtgttcaagcaattctcctgcctcagctttcctgagtagctgggactacaggcaygcaccaccacacccggctgatctttttagtagagacgggggtttcaccatattgaccaggctgggctcaaactcctgacctcgtgatctgcccgcctcgg

SEQ ID NO: 104842 - DNA, 201 bp, Homo sapiens
aaagggtggtaagggaagaggggaggggaaggagatttgagattcaagggagatatttgggagttattaattttttgtcgttatttttaggatgggaatgygggtgcatattttaatacctgtatataaagaaaggatttaataaagagggaaaggttgtagataggaaggaaataatcaactgcgtaaggtctttgagaa

SEQ ID NO: 104843 - DNA, 201 bp, Homo sapiens
tctttctttctttttctttctttctttctttctttctttctttctttctttctttctttctttctttctttcttttttggaaggtcattgaaagtcatgaraggatatagtaaataagtcaggtatttagagagatgagcaaagagcccatgtgggtaagagaatataagaacagagaaaagccacagatgaagaagagta

SEQ ID NO: 104844 - DNA, 201 bp, Homo sapiens
ttatttttattttacagttaaggaaattaaggtatagagaggttaagtaacttgccccaaattacacatatattctaattccagaacctacactctttacstatatactgttattactgcccagaagtgcaaagcagatgggccttttttcttttcctatttccttcactcagtgggcaacgaagtgaaaatggaatgttt

SEQ ID NO: 104845 - DNA, 201 bp, Homo sapiens
cccaactccggcgccgggctagagctggcctcctttcctggatcccgcggactgggtgcaaccagcatctgggcggaggaaaaaggggtgtcagccgtgcmgccccgagaacagaccgccgagcccacgtcggggaaagccgaaagatttctccagaagttcattccggagccccaatccaacccgtctagttcagcggcc

SEQ ID NO: 104846 - DNA, 201 bp, Homo sapiens
acagtgatcctcaaacttttttttttttttttttttttttgagacagagtctcactctgtcgcccaggctggagtgcagtggcgcgatcttggctcactgmtgcaacctccgcctcccgtgttcaagcaattctcctgcctcagctttcctgagtagctgggactacaggcacgcaccaccacacccggctgatcttttta

SEQ ID NO: 104847 - DNA, 201 bp, Homo sapiens
attcattcaagtaatagtttaatttcaaattatctgaagagtggcagtatagtgaggctgaaagggaacagtaaaacttaggagtcttgagatagagtccraattcttttattaaataactataattaaacttaattccatccaggaaaatgtttttgttatctgtgaaatgactaagttggacaggatttttctatttaa

SEQ ID NO: 104848 - DNA, 201 bp, Homo sapiens
gaagttcattccggagccccaatccaacccgtctagttcagcggcctgcagtgggacccgggagcctgcgttttgggaggaggtggtcaccccctgggccsggctgcaggagcgcgggctgcgatctgtgtcccagttcgagctgtgaacccggcgttccccacggcttagactcgccgcgcggtagtgaacttgggaccc

SEQ ID NO: 104849 - DNA, 201 bp, Homo sapiens
cactaatttggatatgaagagtaacaattcacttacttttcctattgcatatatatatttttaagatgttctcattccggaggggaagaacgtctagaaaytccttctgctaaaaaattaacagatataggaattcgaagaatcttttctccagagcatgacattttccggaaaagtgtaaggaagtttttccaagaagaa

SEQ ID NO: 104850 - DNA, 201 bp, Homo sapiens
taatttcaaattatctgaagagtggcagtatagtgaggctgaaagggaacagtaaaacttaggagtcttgagatagagtccgaattcttttattaaataastataattaaacttaattccatccaggaaaatgtttttgttatctgtgaaatgactaagttggacaggatttttctatttaaggtgctttccaattttaag

SEQ ID NO: 104851 - DNA, 201 bp, Homo sapiens
gtgctttggccaatgaaagtgttgcaatatacaaaaaagatatttgaaaaagaggcagaatacctacatcctcattccagtctgccaatgatgtgttgttrgtgaccattaaatagcaaccattaattaggaaatatattaacttctctctactttagttcctttaccagggaaacagtattaacatttatccctccccaa

SEQ ID NO: 104852 - DNA, 201 bp, Homo sapiens; identical to SEQ ID NO: 16799

SEQ ID NO: 104853 - DNA, 201 bp, Homo sapiens
ctaaaacacttataccaaggccaggcatagtggctcacacctgtaatcccagcacgttgggaggcctaggcaggcagattgcttgagcccaggactttgasaccaacctggacaacgtggcaaaacctcatctctacaaaaaatacaaaaattagccaggtgtggtggtgtgtgtctgtagtctcagctactcaagaggct

SEQ ID NO: 104854 - DNA, 201 bp, Homo sapiens
aagaggctgaggtgggaggattgcttgaacccaggattttgaggctgcagtgatccatgattgtgccactgcacaccagcctgggtgacagtcctgtctcaaaaaaaaaaaaaaaaaaaagcagaaaaaaggaggaacagaagtgataaaagagtcagaggcaaatagaagcatatggctaatgtaaataactacctttaa

SEQ ID NO: 104855 - DNA, 201 bp, Homo sapiens
aaattgtgtgaaaatcacttgcataattagagtaatgtttaagacctaatttttgtgttataggaaaggctgttaattgctgatgtggcaatttcagctastgaattcatgtttgaagaaaccaggaactatgttaaacaaagaaaagcttttggcaaaacagttgctcacctacaggtaagcttgtcactgtggtttagt

SEQ ID NO: 104856 - DNA, 201 bp, Homo sapiens
ctctggccttatctgtggttaagtgtatataattaagaaggaaacctgagaatgaagatggagaaaataagcagatttctttctttctttctttctttttytttctttctttctttctttctttctttctttctttctttctttctttctttctttcttttttggaaggtcattgaaagtcatgagaggatatagtaaata

SEQ ID NO: 104857 - DNA, 201 bp, Homo sapiens
gtaatatccaatcaaagcttataaagtaagtaggaaaaacagatatttcagttctgtgattccttcttagaatgattttagcttcttaactacaattcaaraacttttagctctttgtaaggaaatgtcttgcaaaacatttgatagtttgccagtttttaaataataactgtgaatcaaagggaaaagtataaaattcag

SEQ ID NO: 104858 - DNA, 201 bp, Homo sapiens
gcggagggtgacacacccgatgagtagatagaaatgaggacgtaaaacaatactgatggtaggcaactctttcctgagtttggctgtgaatggtagttgaragaaagggtggtaagggaagaggggaggggaaggagatttgagattcaagggagatatttgggagttattaattttttgtcgttatttttaggatgggaa

SEQ ID NO: 104859 - DNA, 201 bp, Homo sapiens; identical to SEQ ID NO: 16797

SEQ ID NO: 104860 - DNA, 201 bp, Homo sapiens
ttgcctcctaagggtaatgtgttcaactgtaatttgatgggtgtaactctagaaacacatactacgctcctggcaatatgaaggaagtgttaccacttgawatcactctgattttctcaactgtacccaaagtggaatgagtatcatttgcttctgaaatccaaccaccaccacttaaacatcaaaaatgtttactaaaac

SEQ ID NO: 104861 - DNA, 201 bp, Homo sapiens
tgcatattttaatacctgtatataaagaaaggatttaataaagagggaaaggttgtagataggaaggaaataatcaactgcgtaaggtctttgagaaaggstgagtttgtggatgctgacacatggaaagataggccttcccatcaacaggagagggattccttcatttgcacaggaagaaaggagcaaaggacatctatg

SEQ ID NO: 104862 - DNA, 201 bp, Homo sapiens
cctcctaagggtaatgtgttcaactgtaatttgatgggtgtaactctagaaacacatactacgctcctggcaatatgaaggaagtgttaccacttgatatcactctgattttctcaactgtacccaaagtggaatgagtatcatttgcttctgaaatccaaccaccaccacttaaacatcaaaaatgtttactaaaacact

SEQ ID NO: 104863 - DNA, 201 bp, Homo sapiens
ggaatattgcctggcaaagtaagcccacattaaaattagctgttatccttattttattccttacataatgccttgctccattttgtttcaatatgggagamctttttaccatctacttcctcttgctcttgatctagaccctctctttgtcgttttgggaactgtttgctaccggtattgtcatcaaattaactttttcca

SEQ ID NO: 104864 - DNA, 201 bp, Homo sapiens
tgctcagactgatatggaattctgccaattttaagctcagccttgagggtcttaaaggaagaaatctgtgaaatgaaaaataaaagtgagactccactttaaaaaaaaaatgctaaaaagttccattaagcatatgtataatgtgctaaaaatgtttcaagttggtatttaatttttttatcctaataggcaagcaaagtt

SEQ ID NO: 104865 - DNA, 201 bp, Homo sapiens
catctcaaaaataaacaaataaataaataaataacaatagagaaagtccttgaaagacaggtgagtgaaggaggcatggaggtgttgcagaagggtgaggsaggtatgaaatatcttcttcagaatgagaaactaaactactttctgctttttgtgtatcaatcagctttatgataagagtttagcttcccaggtacaaac

SEQ ID NO: 104866 - DNA, 201 bp, Homo sapiens
gctctgtcacccaggttggagtacagtggcatgatctgggttcactgcaacctccaccttccaggttcaaataattcttgtgcctcagtctccagagtagstggaattaacaggtgcgtgccatgacacctggctaatttttttgtatttttagtagaggtgtggttttgccatgttggccaggctggtctcaaacccctg

SEQ ID NO: 104867 - DNA, 201 bp, Homo sapiens
agaataaatgaaatcttgatttatctctaatttatacatgcaaacaaaggttcatgtgatttttgtttaaagtctctggccttatctgtggttaagtgtawataattaagaaggaaacctgagaatgaagatggagaaaataagcagatttctttctttctttctttctttttctttctttctttctttctttctttcttt

SEQ ID NO: 104868 - DNA, 201 bp, Homo sapiens
attcatcacctttcaaacagttcatgtgacctgattcttcctggatgctgggcaagaacccaggtgccgagagggcaggggctgccaccctgaccctccamtaagctggttggcacttggccatcctggatgcagagctgaaagagcattggttgaatacacttgaacaccactacagggttcgcacggagcctgctccca

SEQ ID NO: 104869 - DNA, 201 bp, Homo sapiens
  misc_feature (1)...(201): n = A,T,C or G
agggatacagtgaggtttgaaatgttatgtgagtcccactggggtctcgaatgttagttgggctttgttatactactgtataaaacctggctaatttatanaataaatcttaatcatatatttatttgtataagtgctttagaatataatagatcagcatggtttttcagtgcaattgtgtgaacattcttaatactcagc

SEQ ID NO: 104870 - DNA, 201 bp, Homo sapiens
cagattaagcactttattccccagatgactgcaggcaaatgtattggtgcaatagcaatgacagagcctggagctggaaggtaagttaatatttagttggytttggattcttggaagcagtgccttaacattttcttagtacttggttaatacatagactgagctatatgctaggaggaaggcaaagatgaacacgggata

SEQ ID NO: 104871 - DNA, 201 bp, Homo sapiens
tctttcatattgtaaagacagtgcataaattcccaaatgtggcatcatgtaggcaaaaaaatatcttgagacttgttggatccacccttattttccaaatraagtgtcatacatagtgtcattgaactaaactaggagtaggcttagaaaccatcttcagggattttcatggaatactcatctgttttcgatatatagatt

SEQ ID NO: 104872 - DNA, 201 bp, Homo sapiens
ctgagaaggtgacttttctttaggatacatacttaactcttccttggaacattataagacagtgatcctcaaacttttttttttttttttttttttttgaracagagtctcactctgtcgcccaggctggagtgcagtggcgcgatcttggctcactgctgcaacctccgcctcccgtgttcaagcaattctcctgcctca

SEQ ID NO: 104873 - DNA, 201 bp, Homo sapiens
ctttttttgttccatctttatattgtctaagagtaaacttcaatgtgtgggttgggagtgggaaactttgtgctgattaaagggtagatatttgacctaaktaaatatatgatgaatagaaatggagatagaaaaaattaagggaaacaataagcggggaagaaagttttgatgtgacccagcatgttcagaactagaggc

SEQ ID NO: 104874 - DNA, 201 bp, Homo sapiens
gaagatggagcaagagagacagaaggattgagagttttaaagaaatctagacatgagtaggaagagaagtcagttggaaaggctgtaggaaaggagaaagwagttagtaatgtcaaggccaccgtgatgttgagaatggagaagaggttttggcaggcctgatgatcctttgtgatttcagtggggtggaggggcagaagt

SEQ ID NO: 104875 - DNA, 201 bp, Homo sapiens
accacacaggaaaagtaccactgactctgtttcaaaaactctattagaaatagcaaaaaactgaaagcaagtaaaagtaaaggaatgggtaagcaaatacrgtgcatctgaacgaatgtgcagccattaacactagcaacacaaagtttttaacagtacaggaaataattatacattaagtgaaaaaacaggatatagaat

SEQ ID NO: 104876 - DNA, 201 bp, Homo sapiens
gaacatttttactatattaaaatttaaaaatatgagaaaggaaattatcaatgatagttgtattatgtacttatggagaattatattttcctttttcttthgaactttacattctctatacaatatctgcaatgattttctgttattttataagcatttaatatcctcctaccacccaaaaatgttggccctcattaggga

SEQ ID NO: 104877 - DNA, 201 bp, Homo sapiens
ggagggtgacacacccgatgagtagatagaaatgaggacgtaaaacaatactgatggtaggcaactctttcctgagtttggctgtgaatggtagttgagaraaagggtggtaagggaagaggggaggggaaggagatttgagattcaagggagatatttgggagttattaattttttgtcgttatttttaggatgggaatg

SEQ ID NO: 104878 - DNA, 201 bp, Homo sapiens
tttatcttttctttcaattacagtgacttacagggaataaaaacaaatgctaaaaaggatggaagtgactggattctcaatggaagcaaggtgtgtaaaaraggacttctatagcccttcttttcagagtcatgccatgggtaacaatgtctcaaagacaactcattaattctattaaatctagggactcaggcaggaatt

SEQ ID NO: 104879 - DNA, 201 bp, Homo sapiens
ttattgtataatttctgatatgttaagtgggttgaagtttatatttctaccatgctcacttttttcttttatttcctttaaattcaagacagtgcaacatmaattagcagaattaaaaacacatatatgtgtaacccgagcatttgtggacaactgtctccagctgcatgaagcgaaacgtttggactccgccactgcttg

SEQ ID NO: 104880 - DNA, 201 bp, Homo sapiens
attaactactccaacttggcttccaatttgtgttttgtttttttggaaaaaataatattcacttcaatattcactgggttattggaagatttaaatgagaycattctctacattttttgtatggtctcttaggataccgcagaactattctttgaagatatacggttgccagctagtgccctacttggagaagagaataaa

SEQ ID NO: 104881 - DNA, 201 bp, Homo sapiens
gggatcaattgctgcttaggggaaaaataagacgaagggcaaagagtgttcattgaatacaatgatatggagattatttagtaagagccattaatggaggyggagggtgacacacccgatgagtagatagaaatgaggacgtaaaacaatactgatggtaggcaactctttcctgagtttggctgtgaatggtagttgaga

SEQ ID NO: 104882 - DNA, 201 bp, Homo sapiens
cccccttcagaatgaattgttcttgaatcttaaagtcacacctgccagaggagtgctgtccctgttggagtagtctgtagtttgtattgtgctatgtcctygtctgttggaaggtcttctaagtgtagtttttaatagaaacaatattaggaatggtttggttccatggctgattaaccaaaacttacttgactaggctct

SEQ ID NO: 104883 - DNA, 201 bp, Homo sapiens
cttaaagaaaacccaaaaagtaatggaggaaacatgttccacagttatggggaaataaaaattagaaaatttcatgataaaagctcatttatttttgtttycccaccccgagctttccaagttctcctaaggataaaataagaataaatgtgtttattcggccgggtgcagtggctcatgcctgtaatcccagcactttgg

SEQ ID NO: 104884 - DNA, 201 bp, Homo sapiens
gggattacaggcatgagccactgcacccagccaaattctttacgtaagatttttgagggaatatgttcttgctacagttttatgacatatcactgtggctsctatgcaaaatagtggtttcattatttttaaaaattgtggtaaaataaaacattaaatttaccatctcaaccatttttaagtatacagttcaggggcaat

SEQ ID NO: 104885 - DNA, 201 bp, Homo sapiens
aattagaaaatttcatgataaaagctcatttatttttgttttcccaccccgagctttccaagttctcctaaggataaaataagaataaatgtgtttattcrgccgggtgcagtggctcatgcctgtaatcccagcactttgggaggccaaggccggcagatcatgaggtcaggagttcgagaccagtctggacaacatggt

SEQ ID NO: 104886 - DNA, 201 bp, Homo sapiens
cgcagtctcggctcaccacaaccaccacctcccaggttcaagtgattcttgtgcctcagcctcccttgtagctgggactacaggcatgcaccaccaggccyggctaatttttgtattgttagtagagacagagtttcaccatgttggccaggctggtcttgatctcctgacctcaagtgatccacctgcctcggcctccca

SEQ ID NO: 104887 - DNA, 201 bp, Homo sapiens
ttaaaatatatgatcccactgtcttcagcctccaagatttctaatgagaaattggcggataatcccattgagaatctcttgtgtgtgatgagtctcctctytcttgctgcttttcaggattccgtttttgtctttcagctatgtgattataatgtttttggtgtgggtctccttagagttcagagcttgggtttgtagatt

SEQ ID NO: 104888 - DNA, 201 bp, Homo sapiens
acaaattgtgcactacaatgggagcaaagcttcgtttgtacaggcaagttgttatgtctgttaggcagtcagcgagttggccttttctgcttggattatarttttctgtcatgttgaaatttccctcttttcccttctctgttcttatgtaatatttttatctatggtgcagaaaaagttcaccccaaaaaaggaaaatcc

SEQ ID NO: 104889 - DNA, 201 bp, Homo sapiens
gtttgccatagcggctgcaccattttgtattcccaccaacaatacaccagagttccagtttcttcatatccttgctgacaattgttgttttctggtgtgtktgtgtgtgtgtgtgtgtgtgtgtgtgtgtgtgtgtttaatgatagccatcccaatgggtgtggagtagtgttgagttgatttacatttctctaatgattt

SEQ ID NO: 104890 - DNA, 201 bp, Homo sapiens
ttctatttctgcaaacaatgtcattgggattttagtagcaattgcattgaattgacagattgatcactttgactagtactgtcgtcttaataatattgtttgcagtccatcaactcagatgtctttttatttatttatgttttaaaaaatttcagcaatattttgcagttttcagtgtacatgcatttcacctccttgttt

SEQ ID NO: 104891 - DNA, 201 bp, Homo sapiens
gtgctgtggattagagcttcagattaggtggaatttggacctagtcctgtgaagaagtctggttgagagaatgggttttagggcattcagggaataggatrtaggtgggaacacagagttttgagaaagaggatagcattagaatgagtctttctagaaacaccaactggtttggaattgggttgtgcccctggggagtct

SEQ ID NO: 104892 - DNA, 201 bp, Homo sapiens
tctatttctgcaaacaatgtcattgggattttagtagcaattgcattgaattgacagattgatcactttgactagtactgtcgtcttaataatattgtttgcagtccatcaactcagatgtctttttatttatttatgttttaaaaaatttcagcaatattttgcagttttcagtgtacatgcatttcacctccttgttta

SEQ ID NO: 104893 - DNA, 201 bp, Homo sapiens
ctatttctgcaaacaatgtcattgggattttagtagcaattgcattgaattgacagattgatcactttgactagtactgtcgtcttaataatattgtttgyagtccatcaactcagatgtctttttatttatttatgttttaaaaaatttcagcaatattttgcagttttcagtgtacatgcatttcacctccttgtttaa

SEQ ID NO: 104894 - DNA, 201 bp, Homo sapiens
tgtttttatcaagaagaggtgttgaattttgtcaaatacttttctgtatcaatcgagatgctcgtttgttttttttcccttcattctactaatgtggtatrttatactgatggatttttgtgtattgaaccagccttacattgtgggaataaatccttttggtcatggtatatactttttaaatatgctgcagaatttggt

SEQ ID NO: 104895 - DNA, 201 bp, Homo sapiens
aaactgatttttcaaataatacccaattgttctttataaatcttgtactatttgcatgtattacccatttaagaattttttttttttttttttttggctgkgggctgtggctcacgcctgtaatcccagcactttgggaagccaaggcagatggatcacctgaggtcaggagttcaagaccagcttggccaacatgtcaaa

SEQ ID NO: 104896 - DNA, 201 bp, Homo sapiens
gtgttccgaagcaattgcatggattgtctagatagaaccaatgtgatccagagtttgttagctcgtcgttcacttcaggcccaacttcaggtgcgaatgctttttttttttttaattgaaaaacgacacagcaaaaaattaaacatctttaaaacccagtaacaaaaaatattcacattgcccacaccctaacccagctct

SEQ ID NO: 104897 - DNA, 201 bp, Homo sapiens
ttttatatatttgtgtatatgcaaaaaatactctacaaaatatacataacttcagaaaagttatgtataacttatgtttggtatttatgaatattctattaattttttgtgcaggtgttttgacaatagctcatatctgttatagaactatgaattaaacttaatagttatttgtattattaaaatatactaaaagtgatc

SEQ ID NO: 104898 - DNA, 201 bp, Homo sapiens
cccttggccacaaagtcagatcatacagccaagccatggtagagctagccttggaatacggctggtccagagtccagtgatctttccatttcattgcattrtccatatgacctttttttctcttaccagattgctctcgcattagtcctcagacatgccaggtattgaaatgagtcacttacaaccaaatatagttgacat

SEQ ID NO: 104899 - DNA, 201 bp, Homo sapiens
ccactggtttaaaccttaattaagaggttcttatatttttcctgtgaatgtgctagtaaactttaatgttgccaaaatgtgctaaacagctgaaaactgggtctgatatcaacaaacgacttatttagctttttgtttcttaatatcaacaggtgacacttggacagaaacactggcctatgtgctcttctggggagttgc

SEQ ID NO: 104900 - DNA, 201 bp, Homo sapiens
atgataaaatacttccacgcaaagtcagtactgatgagcgactgacttgctgacagtttcttagccagtttcttttcaccactgcgaatgcagactatgtyattcctaatgggattattttttcttccatgaaaaaacctaacatacattctaggagttatcacagttttattgctgttacactccagtttacataactta

SEQ ID NO: 104901 - DNA, 201 bp, Homo sapiens
cactggtttaaaccttaattaagaggttcttatatttttcctgtgaatgtgctagtaaactttaatgttgccaaaatgtgctaaacagctgaaaactgggtctgatatcaacaaacgacttatttagctttttgtttcttaatatcaacaggtgacacttggacagaaacactggcctatgtgctcttctggggagttgca

SEQ ID NO: 104902 - DNA, 201 bp, Homo sapiens
catgataaaatacttccacgcaaagtcagtactgatgagcgactgacttgctgacagtttcttagccagtttcttttcaccactgcgaatgcagactatgktattcctaatgggattattttttcttccatgaaaaaacctaacatacattctaggagttatcacagttttattgctgttacactccagtttacataactt

SEQ ID NO: 104903 - DNA, 201 bp, Homo sapiens
attgtttaagtccagcttatctagtttttcttttgttgcctctgctcttggtgtcaaattcaagaaattgtcaccaaatccaataacataaacttaccccwatattttctttttaggagtctttatagttttagatcttacagttaggtctttggtctgttttgagttgatttttgtttcgtgtatgtgtgtctgtgtatt

SEQ ID NO: 104904 - DNA, 201 bp, Homo sapiens
ctcttgataaatttttttacaaagaaaatattttttattctcggtgtttctaatgttttaaattatagtgtgctaaatattagttttacaatttgttcatktatgcttataatttactatatataacttacaagttacatctacaacgtaactatataagttaatatctataactaatatctataacttacaatagagttt

SEQ ID NO: 104905 - DNA, 201 bp, Homo sapiens
atccttgctgacaattgttgttttctggtgtgtgtgtgtgtgtgtgtgtgtgtgtgtgtgtgtgtgtgtttaatgatagccatcccaatgggtgtggagtrgtgttgagttgatttacatttctctaatgatttgtgtgattttgagcatctttgcatgtgctcattggccatttgtgtatcttctttggagaaatgtcta

SEQ ID NO: 104906 - DNA, 201 bp, Homo sapiens
ataaaattttcaatgcatcagtggaacagggtattctacaccttcagccctgtagtaataggacatagtgcatattagcaaatgttacttggttctgagtkgttaagaaggtgatttttgtttagatttaatttgattgagcttgtttgaagttcctattttttcaggcatcatgctagatgctgagttataaaggctgaa

SEQ ID NO: 104907 - DNA, 201 bp, Homo sapiens
tccagtatagaccacgtactagcactgcaaaaagaacacagtctagggtaatttggaatgtatcgttttgaagaaacacagcttaaaagtcatttcatgtrtattgtcttcccagtgtctctgtgaggtcataggttgataggtatcctgtcattgttgaaaacagtctcataattgcccttggccacaaagtcagatcat

SEQ ID NO: 104908 - DNA, 201 bp, Homo sapiens
tagatcatatggtgattctatgtttaactctttgaggaaccaccatactgtttgccatagcggctgcaccattttgtattcccaccaacaatacaccagarttccagtttcttcatatccttgctgacaattgttgttttctggtgtgtgtgtgtgtgtgtgtgtgtgtgtgtgtgtgtgtgtgtttaatgatagccatcc

SEQ ID NO: 104909 - DNA, 201 bp, Homo sapiens
tcacgtgtgtatcttgcatgccttttttgttggttaaaaatagaagcttaatagcattataatttgcatgtaaagaatgtatttattccgcataaatcaaygttcaacatctttgaggctattcttcttggttccggcacatagtaaacccctaaaccaaaaggtgtgtgggtggcatgttagaaatatagaaaaacaaac

SEQ ID NO: 104910 - DNA, 201 bp, Homo sapiens
taaaacctcttggatagacatttgctcagttttcaaaaatatctttttatatacattaggtaatcaactacagttatttaaatctgctttttttctgtgasgttttgccatgaacacagaagggaaattgacctcctgttgttgggcaattagagaaaacattggctggccctggcatgttgttggaggaggtagttcctt

SEQ ID NO: 104911 - DNA, 201 bp, Homo sapiens
caggagcagccgtggtgatggtgagacccctgtgccccacgttccctgtgccccgtgtccctgtggcagccgactgcgccgcccccacccctgtgtggccragtggggcctgcctccaggcctggagccaccactgctctggaccctggtccgcgttaccaccactgttgcttgctgttgccaggagggcggagagtccct

SEQ ID NO: 104912 - DNA, 201 bp, Homo sapiens
gatggtctccatctcctgacctcgtgatccgcctgcctcgtcctccctgagtgttgggattccaggcctgagccactgtgcctggcccagaatttcctttytaaggctgaataatattccattatatgtatgtaccacatttcgtttgttcatttgttaatagacacataggtggcttccacctttttggctattgtgagt

SEQ ID NO: 104913 - DNA, 201 bp, Homo sapiens
ggcagttaggcatagataccgcatttcttttgcagggaaatgacaccaaaatgtggtttgggcacttaagctcctcagacctcaacctcactagtaacttyctgaaaggttcagtggaaagttagaggtgcaaaattcagagaggtcatctattccacattgtatgtgttgcaaaaaagatgattgctttttctacagtgc

SEQ ID NO: 104914 - DNA, 201 bp, Homo sapiens; identical to SEQ ID NO: 16815

SEQ ID NO: 104915 - DNA, 201 bp, Homo sapiens
ggtttgagaaccactggtttaaaccttaattaagaggttcttatatttttcctgtgaatgtgctagtaaactttaatgttgccaaaatgtgctaaacagcygaaaactgggtctgatatcaacaaacgacttatttagctttttgtttcttaatatcaacaggtgacacttggacagaaacactggcctatgtgctcttct

SEQ ID NO: 104916 - DNA, 201 bp, Homo sapiens
aggagatcaccaggttgcctaaggaatggtgaactagtacaggttggaaacagcaggacaaaactttcatgctgatcagtagtggaatggtgcttgtgaayagccactgcactctagcctgggcaacacagcaagaccccatctctaaagaaaatgttattgacttttgttttatatatttgtgtatatgcaaaaaatact

SEQ ID NO: 104917 - DNA, 201 bp, Homo sapiens
ggtgtgctcactggctgtcattccctgtatgtatttctccttctgcaaatgaggccagtagtgttgcagagagagaagctattctctaggttcagctattsaaggagtaaaacaaagtagatctttgcccaccggcctgctgctaacctttatgaacttcggactttggaaaatgcatatcagcagagttgggttaaatat

SEQ ID NO: 104918 - DNA, 201 bp, Homo sapiens
gacatgactgcaggttttagggcaggaaggaagaggcagcatgtgccggttcctcagcggccagccctgctttcatttcctctctgggtcctctgccttcyttcctgaaaacactgcccagcgcatgccatttttggggagccactctactgttaaattagttcattttgttgttgtgactatacccacatttacttaaag

SEQ ID NO: 104919 - DNA, 201 bp, Homo sapiens
acatatttagaatttcatatttcacttgtttaaagattctattcacccccagagttctatatttatttttttcttaaagtacaatatttgaataaccatasagtaggcattcagtaaatagcctttgagtgggtgaagtgaagtacgaaaatatattccatgagataatggggtgtaagacaagtatggctataaaatttc

SEQ ID NO: 104920 - DNA, 201 bp, Homo sapiens
atcctgagtcagtccctcaccatgctgagttgcttgcctgaactatttaagttgtttcttgagaaaccaactgttatttttgttagactctaattacaaarttgcataaattttaagtagtctctctcaaccgtgtttctacctcctttattttttattttccagagtgagtttttttcaggaacatatatatgggtttct

SEQ ID NO: 104921 - DNA, 201 bp, Homo sapiens
tgtattgttttcctgatttcttttagttgtttgtctgtgtttccccttagctctttgagtgtttttaagacagttgctttaaagtctttgtctaataagtstagtctttgtctaataagccaagtcctgtcttggcttccacaggaacagtttctgtcaatttcttatgttccattgaatgagtcatgtttttctgtttat

SEQ ID NO: 104922 - DNA, 201 bp, Homo sapiens
tgctgtatttgaagcagatttgctttctttgttgtattgattttcctttacttagcatatccccccaaatgaaggaaactagcctaatatttagttagttmcagatgaaccatagaaggttgtaagttatatttgggtaattaaggattgattattcctcagagaacttacagtaaaaaagagtcaaaagtttgttttgct

SEQ ID NO: 104923 - DNA, 201 bp, Homo sapiens
atatatgtgccatatgatccagctgttccacttctagggagttaaccaagagaagtgaacatctgccttaagacttttatacaagaatgttcctagaacckttcctttattcatagtaacccaaaaccaaagttaccaaatagccatcaacaaatgaatggatcaacaaattatgatatatccgtacaatggaatgctatt

SEQ ID NO: 104924 - DNA, 201 bp, Homo sapiens
ctgtaatccctcctttttctcccttcctgcacaagttaaacatatatgtgccatatgatccagctgttccacttctagggagttaaccaagagaagtgaayatctgccttaagacttttatacaagaatgttcctagaaccgttcctttattcatagtaacccaaaaccaaagttaccaaatagccatcaacaaatgaatg

SEQ ID NO: 104925 - DNA, 201 bp, Homo sapiens
tttacacccatgaaaccattgccagtattacaatattgaacgtatccgtcaccctgaaacgtttcctcgtgcctgtaatccctcctttttctcccttcctrcacaagttaaacatatatgtgccatatgatccagctgttccacttctagggagttaaccaagagaagtgaacatctgccttaagacttttatacaagaat

SEQ ID NO: 104926 - DNA, 201 bp, Homo sapiens
aaaaaaaatggcttaagactagatgtctcgaatttctttatatttctttggttttaggacctttcactttgttttctttttatagctttattgaagtttgrttgacatacaataaactacacacatggaaaagggaagtgtacagtttgataaattttgacatttttacacccatgaaaccattgccagtattacaatatt

SEQ ID NO: 104927 - DNA, 201 bp, Homo sapiens
ctataggatcaaacttgcatttcttagccatctgtatattctagcctttttataatctgtcgcctaatttatttcccgtaactgcccagagccttttcccyacttctgcaaaacttggctcatccccttctagcttcaaacttgggtgttattttgatccttctacccagaatgccttcttcctctctgttctctttacat

SEQ ID NO: 104928 - DNA, 201 bp, Homo sapiens
gaatggtcatcttctaagagaactttctgcacagccagaggtaatgtacacgaaataaaatctgcttaattgttacagtccaagctttaattcaatgcatrctataaagtgacttcctaatcaccaagaatttcgagaaacaattctaatttaactgtttataacttacaaacttggatcaggtctaccctgtcacatcat

SEQ ID NO: 104929 - DNA, 201 bp, Homo sapiens
agcttggcaggagatattttattaaattttaaaacttctctcaggcagatcagcggtttgtatggaatggtcatcttctaagagaactttctgcacagccrgaggtaatgtacacgaaataaaatctgcttaattgttacagtccaagctttaattcaatgcatgctataaagtgacttcctaatcaccaagaatttcgag

SEQ ID NO: 104930 - DNA, 201 bp, Homo sapiens
ctttatataaagaaaggcttttggggagatacagtctttcatactgaggttcaccttttctatttcaaggataaggtagagtcaaaatttccatttctagrtaacctttgtttaattcactttgatctgtgaatcttcatatgcttaccagctgttacatggctaatttataattatgtgtcatgcatttcattttttttc

SEQ ID NO: 104931 - DNA, 201 bp, Homo sapiens
ctccttagagccatttctgcttatttgtacagagatgtttattgcaacactgttcataatagtaaaactggaaacagctggcatgtccatggacagtagartggataagtaactgtaatctagtcatatagtggaatattatacagccatagcagcagcaaatgaacctcatgactataatgagcaaataaagaaaactga

SEQ ID NO: 104932 - DNA, 201 bp, Homo sapiens
caacctctctctgcctgtctgaattccaccatcctcagggcaccattcatatgctcccctctcacagagtgtctctcccacacagaagtcttcaccttctrtctggatttccacagcactcctggtcctctctcccagcactttcctcttttaacctcattaatacatagggagttatttttcagaggtggtatacctctt

SEQ ID NO: 104933 - DNA, 201 bp, Homo sapiens
ttgtgagactcagttcccaagtttaactttttcctttggcatagtaaatttggagtcctgagattttattttcctttcacattaccaaagtaatacatagyaattatagaaagcacacgtaggcagaaaaggagaaaatattatttatcatcatacctttgagagagaagctaaccactcttaacattttgatgttttaat

SEQ ID NO: 104934 - DNA, 201 bp, Homo sapiens
agcggctcgccggcctttctccaccgtgctcggccccagcgcccacggctgaagagagaagctgccgactggcccccaccgagccggggtcggcgttatgrtgcggcccttcagggcacgcttgtccccactttctatgcagagctaccgactaaatttatctgtatgacttaacagagaaaaagagttttctcttactta

SEQ ID NO: 104935 - DNA, 201 bp, Homo sapiens
ccctgctcatttttgtgccctggctcgaaatagataatttgggtaagggagcaaatattacattggagtcttctctagtgctatgggcttcaaaggaaagygaattgggagctcaagaggagcccttatcaagtctgatgataccaggtaatagagatgagtcattagcagctcaactcattgctgatgtcattaggtacc

SEQ ID NO: 104936 - DNA, 201 bp, Homo sapiens
gtaactgattgatgaaagactagaagtaaatacactcacattttaaaagttatgctgatgggattcagtttttattttactcttgttccttccatgctttmtggattctctaaagtgtgtagatgtttttgtcttgtaatcagaggaacatgattcataaagcagtcagtcatattctctgctagatttagctctctaaga

SEQ ID NO: 104937 - DNA, 201 bp, Homo sapiens
gtgcagtggcgtgatctcagctcactgcaacctccacctcctgggttcaagcaagcgattcccctgtctcagcctcccgagtagctgggactacaggcacrtgccaccgcacccagctaatttttttgtttgtattttagtagagacgggtttcaccatgttggccaggatggtctcgatctcctgaccttgtgatccacc

SEQ ID NO: 104938 - DNA, 201 bp, Homo sapiens
ggtttcaccatgttggccaggatggtctcgatctcctgaccttgtgatccacccgcctcggcctcccaaagtgctgggattttgcatgagcctctgcgccyggcctgtaatacagtttttaaatcttatttttatttcaatcttatgtatacggtttaaaagtaagtagtatacaaagcttataataacagaggcatctac

SEQ ID NO: 104939 - DNA, 201 bp, Homo sapiens
gtattgcttttaggttttttgcatgcatgaagctagtcatttggctttgtgccttcaactttgtaaacatttacattttgagcatttattttctaggcttygtactagcaacatgcttattttgctaaactaaactttaaaaatctgtattaaagcttactgtcattatgaaaagaagtttctccaacctttgtatttttt

SEQ ID NO: 104940 - DNA, 201 bp, Homo sapiens
gatgtgacaggaagaaaaataacatacctagtagtttgatggttgtcgttttttttaacctcagattttaaaaacatgtttttcttattactgtaaaccartgagtgtctgagacaggtctcagtcagtttagaggcttaatttgccaaggttgaggacctgcccaggaaaaagagacacaagatacagtaggatcagtat

SEQ ID NO: 104941 - DNA, 201 bp, Homo sapiens
actaccatttgttgtgtttctcctctactcctcctgagggccccagaagaacctgtgaggatagatatatatgcatatattttcatgtttatatctgcacrtatcatatatatattttttcctctgctaggtatgagcatgagaaggggtgtgtgtgtgcatgtagtatatgtatagtgataaacccagagtgaaggaggt

SEQ ID NO: 104942 - DNA, 201 bp, Homo sapiens
tgaaggaaactagcctaatatttagttagttacagatgaaccatagaaggttgtaagttatatttgggtaattaaggattgattattcctcagagaacttrcagtaaaaaagagtcaaaagtttgttttgctgcaggacatttttctataatgccaaatagcttatacacaattggtaaatagaaaatgatgtccatgatg

SEQ ID NO: 104943 - DNA, 201 bp, Homo sapiens
ggctatgtggatacgtccaggtgtgtaaggcagcctcagggactgccaccacttggtcacatacatgtccctccaactaatcctagctctcaaggacaggyggttctggggcctgtgttgcccatgagacttggtccacggcaagcctgtgacggagtgaaagtgaggggacacccaatttgaaaactcggcaggaagcca

SEQ ID NO: 104944 - DNA, 201 bp, Homo sapiens
atcatggttgttgccttttcaatgtgcattatctgtttgcttatggctggtaagtctgctccacacatttgtttcttagttagaatgttgacctttctttkacaacatcttaagtttttgagttcaccgaacacttgatgtttccctattaaatttaatgggtaaagtggatgtgacattagattgtcattagatgtgaca

SEQ ID NO: 104945 - DNA, 201 bp, Homo sapiens
tggtcatggtatatactttttaaatatgctgcagaatttggtgtgctagtgtttggttggggatttttacattaatattcataaaggatattggcctgtarttttcttgtaatatctttgtttggttttgatatcaggataatcttatctttacagaataagttagaaagtgttctctcttcttcagctttttggtagagt

SEQ ID NO: 104946 - DNA, 201 bp, Homo sapiens
tctattacacataaatctgggtgtggttttttattccagagactaggagttttgcatgtgggacaaaagcttgaagaacaagatgaatttgagaagatttwcaaaaatggtaggtcatttctttaatatagacaaagttggtcagattttgaaataaattaatattctggatttagaactttgtttgtcatcttaataatt

SEQ ID NO: 104947 - DNA, 201 bp, Homo sapiens
ttttgtgtattgaaccagccttacattgtgggaataaatccttttggtcatggtatatactttttaaatatgctgcagaatttggtgtgctagtgtttggytggggatttttacattaatattcataaaggatattggcctgtagttttcttgtaatatctttgtttggttttgatatcaggataatcttatctttacaga

SEQ ID NO: 104948 - DNA, 201 bp, Homo sapiens
gctatatatagtattatgaaacctaaccaacctgcagagagtgggggcaggagcctctcaagcagctttgcctactagtgtaggggctgtctacttgtgcstctccaagtctgccagtgaaggcagagttcttacccagctaaaggtcaccaaggtggctcctgtgctgtgtctgagggtgggaatgactccttctgaggt

SEQ ID NO: 104949 - DNA, 201 bp, Homo sapiens
tgtcattagatgtgacaggaagaaaaataacatacctagtagtttgatggttgtcgttttttttaacctcagattttaaaaacatgtttttcttattactstaaaccaatgagtgtctgagacaggtctcagtcagtttagaggcttaatttgccaaggttgaggacctgcccaggaaaaagagacacaagatacagtagg

SEQ ID NO: 104950 - DNA, 201 bp, Homo sapiens
ttccttgggttcacccattaactgctgccgtacaagagtgtaagaaagaaggagagttgactccagagtttgtgttcgttgctgttcactgtggtccacarggagagcagagctttcactggtgactttcagatgatctctcgagacttttttctaagggttttgggggtagtgggaagaatctgggctttgggatccaac

SEQ ID NO: 104951 - DNA, 201 bp, Homo sapiens
agatgaattaaggtaagctatattatttccttaaggaggtagagggaagaggtatatatatcagtcatattttattatgcgtcatccagcagacttacaartacagttcactggattgtcattgcttgtctgtactattttattatttttaatttctttactggaaagatgagacttggtgacttcaaaatatttttgaat

SEQ ID NO: 104952 - DNA, 201 bp, Homo sapiens
gcatacctgattgctgtacttgagcttacttcactaccatttgttgtgtttctcctctactcctcctgagggccccagaagaacctgtgaggatagatatmtatgcatatattttcatgtttatatctgcacgtatcatatatatattttttcctctgctaggtatgagcatgagaaggggtgtgtgtgtgcatgtagtat

SEQ ID NO: 104953 - DNA, 201 bp, Homo sapiens
tctttgtctaataagtctagtctttgtctaataagccaagtcctgtcttggcttccacaggaacagtttctgtcaatttcttatgttccattgaatgagtyatgtttttctgtttatttttgtacctgtgattttttttttaattatatgtttgattattataatatcataactctggaagtcagagtctccttttcccct

SEQ ID NO: 104954 - DNA, 201 bp, Homo sapiens
aatgagaggaagagaacagtaagggcatatatgtaggtgccgtgagttaggatgatacctgctgttatggttaacagaattgtgagtcattacttctaatkagcatccctagaaatgttgattccctggcagtcactgttcacattttcattgctccaattcttaagcctagagataccactttcagtgacattatcagaa

SEQ ID NO: 104955 - DNA, 201 bp, Homo sapiens
tatttttaatttttaatgggccaccatactgttttcccatagtggctgcaccgttttacattcccacccacaaagcaccaggattccagtgtctccgcatyctagccaacactcgttattttctatcctgggtttgttttttttttccttctagataatagccattttaatgggtatgaggttggtaagtagtaatgtttt

SEQ ID NO: 104956 - DNA, 201 bp, Homo sapiens
aatgtgtttaagccatatggagccatggcttcatgcagcttagcgtggcaaagattgaataggatggagaacttgagaattatgatgattgtttttcagckgccagaacactaaatttaaccagttcagaccttaaaacaaacccaaatcctcgcatacataaaagagaaaggaaatttgtccctgaagtagtaagaatga

SEQ ID NO: 104957 - DNA, 201 bp, Homo sapiens
ctgcgtttctggccaggccactgtcacatgtgctctgctagctaattaggttattgtgtatctgataggcactgaagggtttaatgtgatcctacaccagktctcaaatgtgtttaagccatatggagccatggcttcatgcagcttagcgtggcaaagattgaataggatggagaacttgagaattatgatgattgtttt

SEQ ID NO: 104958 - DNA, 201 bp, Homo sapiens
agagttataaaataggtgtttttaagggttttggtttgtcttggattaaaaacaacatgtgtttatttcccttagtgttacccattagcatccacactttycttgtctgtgaataattttgttgtactcacttcgtgtttaatgctttacccctaggctgtttgaaaatctggtggccacagcctgggaatatctggtagg

SEQ ID NO: 104959 - DNA, 201 bp, Homo sapiens
ttccaaaggcttttgcaaccctttactctgggaatgaagtggagagatcagcctttagaatttctaggtgtatgactgtttatattactgaatggtgtagraagtgtcctataccatatactattatcagtagtaagggaaataactttatataaagaaaggcttttggggagatacagtctttcatactgaggttcacct

SEQ ID NO: 104960 - DNA, 201 bp, Homo sapiens
cacactgtgtgttgtcagatttttgaattcatagaattatcaaggagcttgttaaagaaaacatgggaactggtaactgtggttggttgcagtgcagacawctggatgtttaaggggaggaagggaaactgatttttcaaataatacccaattgttctttataaatcttgtactatttgcatgtattacccatttaagaat

SEQ ID NO: 104961 - DNA, 201 bp, Homo sapiens
ccaactatggtgttttttgttttttgtttttttttcaaaatgagattgtgaatggacaaacaatattaagtgagattatagaacctttttttctaggcaawtttagaaacagcttactcatttacctttaaattgaaagctttaaatgagcttttctttagtgtagtttgttgactagaagtaaaatcatatgtttcacac

SEQ ID NO: 104962 - DNA, 201 bp, Homo sapiens
ccatcactccagtaagaaattcttacccatttaatatcaactccccatactaaatgggtatttaactattgtaaatagttacacacattatactttactgkttattatatttcataataaaaacatttaatgtaagaggtatgccaattccaaaggcttttgcaaccctttactctgggaatgaagtggagagatcagcct

SEQ ID NO: 104963 - DNA, 201 bp, Homo sapiens
gcgtctgtaatgatagtgtttaatggcttttctatattctgttttatcataacatagttctaagaaagtgcttttcttcaccctgagcacctggtttattkcctttcctctttctatcatgaaagattgtggtgccatgaatcattatatatattttacatctgttaaatttatttctttaaaaaaattcttcagagtagg

SEQ ID NO: 104964 - DNA, 201 bp, Homo sapiens
tacaaaaattttttaaaaattaggcatggtagcatgtgcctgtagtcccacctgctcaggaggctgagtcaggaggatcacttgaccccattttgaagctkcagtgagctatgatcacaccactgtgttctagcctgggtgacagcgcaagacctctactcaaaagattttggagaaggggaaaattggtgaaggtgcatg

SEQ ID NO: 104965 - DNA, 201 bp, Homo sapiens
ccagagtccagtgatctttccatttcattgcattatccatatgacctttttttctcttaccagattgctctcgcattagtcctcagacatgccaggtattraaatgagtcacttacaaccaaatatagttgacatgtccatattaatttccatatgtttaatgtggaaaacagaatattgatttgctcagaatttaaaatt

SEQ ID NO: 104966 - DNA, 201 bp, Homo sapiens
gtatataagctaaaataccttggcagttcggcgtaggtgtcacatttcctttgcagggaaatgacatcaaatgtggtttgggcacttcttaggcccctcaracctcaagctcataataactttctaaaaggttcagtggaaagttagaggtgcaaaattattggatacatttaaagcattttttcttctttttttttcttt

SEQ ID NO: 104967 - DNA, 201 bp, Homo sapiens
atctctgccttgttgaatttcacctttctaatgctctggttttatcctctactttcctgcttacaatttccagttccatcttactgacctataggatcaarcttgcatttcttagccatctgtatattctagcctttttataatctgtcgcctaatttatttcccgtaactgcccagagccttttccccacttctgcaaaa

SEQ ID NO: 104968 - DNA, 201 bp, Homo sapiens
tgtacagcgtctgtaatgatagtgtttaatggcttttctatattctgttttatcataacatagttctaagaaagtgcttttcttcaccctgagcacctggyttatttcctttcctctttctatcatgaaagattgtggtgccatgaatcattatatatattttacatctgttaaatttatttctttaaaaaaattcttcag

SEQ ID NO: 104969 - DNA, 201 bp, Homo sapiens
acactctataatgtatagaattgcctaacgatgcatttctcagaatgtacccctattaagtcatgcatgactgtaatcaggattgtgccctgaagaaaacrgtgatgacatctatcaagcacatgtaagaagcttatcaatacaagtctattatttatttattcagtatgttaatataatttcactaaacttaatgcttgt

SEQ ID NO: 104970 - DNA, 201 bp, Homo sapiens
aatgcaactgattattgtgtcttgatttttgtatgctccaactttgttgaatttcttatctccaattgatattttgcagaatttttagggttttctatatrtaagatcgtgtcacctgtgaacagagataattttatgcttcctttccaatttggatgccttttttttttttcttgcctaattggtgttgctagaactact

SEQ ID NO: 104971 - DNA, 201 bp, Homo sapiens
tccaattgatattttgcagaatttttagggttttctatatgtaagatcgtgtcacctgtgaacagagataattttatgcttcctttccaatttggatgccytttttttttttcttgcctaattggtgttgctagaactactaatactatgttgaacagaaattgtgaaagcaagcatccttgtcttattccttttcttagg

SEQ ID NO: 104972 - DNA, 201 bp, Homo sapiens
tcacatttcctttgcagggaaatgacatcaaatgtggtttgggcacttcttaggcccctcagacctcaagctcataataactttctaaaaggttcagtggmaagttagaggtgcaaaattattggatacatttaaagcattttttcttctttttttttctttttcttttaaaaggtcagttgaaactaggtgtaaggcagg

SEQ ID NO: 104973 - DNA, 201 bp, Homo sapiens
gcaaaattattggatacatttaaagcattttttcttctttttttttctttttcttttaaaaggtcagttgaaactaggtgtaaggcagggaatcctttagwtactgcatcaggctgcagcatgcctctgaagagtactgtttcctcaggaaattgccatttttaaaagagtctcataactgtgaggtcatcagtcagggca

SEQ ID NO: 104974 - DNA, 201 bp, Homo sapiens
ctcataactgtgaggtcatcagtcagggcagatatgatccaaccttgaaaacagatgtaacctaagctaccttgtgatacagacacatataatctgttcartataatgaacattcatattattcacagaagtctcccggtggagggaagggtgtagggcagctcagattattctcatgagttttagcacagacaatatggg

SEQ ID NO: 104975 - DNA, 201 bp, Homo sapiens
gggtaaagtggatgtgacattagattgtcattagatgtgacaggaagaaaaataacatacctagtagtttgatggttgtcgttttttttaacctcagattktaaaaacatgtttttcttattactgtaaaccaatgagtgtctgagacaggtctcagtcagtttagaggcttaatttgccaaggttgaggacctgcccagg

SEQ ID NO: 104976 - DNA, 201 bp, Homo sapiens
ttgatgtttccctattaaatttaatgggtaaagtggatgtgacattagattgtcattagatgtgacaggaagaaaaataacatacctagtagtttgatggwtgtcgttttttttaacctcagattttaaaaacatgtttttcttattactgtaaaccaatgagtgtctgagacaggtctcagtcagtttagaggcttaatt

SEQ ID NO: 104977 - DNA, 201 bp, Homo sapiens
gacggaggttgcagtgagccgagatcgtgccactgcactccagcctggatgacacagcaagactccatctcaaaaaaaaaaaaaagtgtttatccttattwagtgccttaaatgatttgggccaactatggtgttttttgttttttgtttttttttcaaaatgagattgtgaatggacaaacaatattaagtgagattata

SEQ ID NO: 104978 - DNA, 201 bp, Homo sapiens
ggttaaaaatagaagcttaatagcattataatttgcatgtaaagaatgtatttattccgcataaatcaacgttcaacatctttgaggctattcttcttggktccggcacatagtaaacccctaaaccaaaaggtgtgtgggtggcatgttagaaatatagaaaaacaaactatgattgaatggcatggcaagtaaggattt

SEQ ID NO: 104979 - DNA, 201 bp, Homo sapiens
gaacacttgatgtttccctattaaatttaatgggtaaagtggatgtgacattagattgtcattagatgtgacaggaagaaaaataacatacctagtagttygatggttgtcgttttttttaacctcagattttaaaaacatgtttttcttattactgtaaaccaatgagtgtctgagacaggtctcagtcagtttagaggc

SEQ ID NO: 104980 - DNA, 201 bp, Homo sapiens
tggttaaaaatagaagcttaatagcattataatttgcatgtaaagaatgtatttattccgcataaatcaacgttcaacatctttgaggctattcttcttgrttccggcacatagtaaacccctaaaccaaaaggtgtgtgggtggcatgttagaaatatagaaaaacaaactatgattgaatggcatggcaagtaaggatt

SEQ ID NO: 104981 - DNA, 201 bp, Homo sapiens
aggtgtgtagtaggctgtgccatctaggtttgtgtaagtacactctataatgtatagaattgcctaacgatgcatttctcagaatgtacccctattaagtsatgcatgactgtaatcaggattgtgccctgaagaaaacagtgatgacatctatcaagcacatgtaagaagcttatcaatacaagtctattatttatttat

SEQ ID NO: 104982 - DNA, 201 bp, Homo sapiens
atttaaaatgcatttcttactgtttttagctaatacctcttgcttactatgcgtcagatgttcaaagtacttaccaaagattagctcatttaattcacacratgctgcgtgatgaatctggtattatcgttattttacagaaagggaataagaggatcagagagaatgagtaacttgtctaaggtcacactactggtagtc

SEQ ID NO: 104983 - DNA, 201 bp, Homo sapiens
ctgtatcttttctatgtttagatatgttgagatacacaaataccattgtgttacagttgcctacagtatttagtacagtaacatgctatacaggtttgtarctaaggagcgatgggctataccgtgtagcctaggtgtgtagtaggctgtgccatctaggtttgtgtaagtacactctataatgtatagaattgcctaacg

SEQ ID NO: 104984 - DNA, 201 bp, Homo sapiens
ttctttagaaagtgattgagaatatcaggaaaagggaagcatatcatttaaataaaaacaccatagtgaacttcttaaacatactaccttcgtgtcatagrgttattaacttgacaaaacttcacagttgattatagtactaagggcttgtgaatattcatgaagatttgtatactcttgtcattttttctcttaaagacc

SEQ ID NO: 104985 - DNA, 201 bp, Homo sapiens
atacttaattctttagaaagtgattgagaatatcaggaaaagggaagcatatcatttaaataaaaacaccatagtgaacttcttaaacatactaccttcgygtcatagggttattaacttgacaaaacttcacagttgattatagtactaagggcttgtgaatattcatgaagatttgtatactcttgtcattttttctct

SEQ ID NO: 104986 - DNA, 201 bp, Homo sapiens
aactggaattagtgtgtttctttgtgcctcctttggtaatattttagaaagaaaataggtatttcttggacctacaagtgatttcttttgtgaagtatctrtattttcagggatagtttttaaaatctgtcactcacttatttctataccttatgcttattggccataaaacagtgtgagaattcagtgtacaaacctgta

SEQ ID NO: 104987 - DNA, 201 bp, Homo sapiens
ttatttgaaagttaatctattttaaatttatgttttccattcagagtagatttttcagtgatgtggttaatacttaattctttagaaagtgattgagaatrtcaggaaaagggaagcatatcatttaaataaaaacaccatagtgaacttcttaaacatactaccttcgtgtcatagggttattaacttgacaaaacttca

SEQ ID NO: 104988 - DNA, 201 bp, Homo sapiens
aggttcatcggtttgcccttccagtgttacatggctgtatccttacatgatattactctttagtttctagatgcctttatttaaattttattataaggcasatttagagatagtctcaaatactccataaggagagtatttcagaattaatataaattgctgttgataagaaaatcaaactcattgctattttggtttttt

SEQ ID NO: 104989 - DNA, 201 bp, Homo sapiens
acctacttttctacctaggcataaaaaatattttttaaatcatttgttgctcttgtttttttttttttaaagattcagttcttaaattatgcaatttcatrtggagagaagggaaaacagaaatgcacgggtactcaacaccagatttaacttcatatcctctttgtaaagaaataaaatataaatacctttgaagttcta

SEQ ID NO: 104990 - DNA, 201 bp, Homo sapiens
gaaaataagtagagtacaaagaatattgcctaagggagaaatcagagtacagatacaaaatgagtaatgattatctaattgtaggttcatgttaaaaacaratctatgtcatagacatcataataaaaataaagcagccacgtgagctggctcttaaaggatatataagcacaatatgctgatgagtgcctatccagttat

SEQ ID NO: 104991 - DNA, 201 bp, Homo sapiens
ctcccttcagtcacccaggagagacatgcacaggcaccgccctcttctgtcctttgtctacacatatgaggtataaacagggaggcccagctagggaaacrtgatatattattgaatctaggtaaatagatgtgtctaattgctttatttcttgtcatttgctatgctttttttggaaaagtagtttgagctgcaaacaat

SEQ ID NO: 104992 - DNA, 201 bp, Homo sapiens
gtaggttcatgttaaaaacaaatctatgtcatagacatcataataaaaataaagcagccacgtgagctggctcttaaaggatatataagcacaatatgctsatgagtgcctatccagttatgtgccacatactgacatttcagtcggtgacagaccacatatatgaaggtggtcctataagattataataccatatttcta

SEQ ID NO: 104993 - DNA, 201 bp, Homo sapiens
gtatcgctaattgatcccctcccacaaccaatcagactggtcttaggccaagtcttcatttgcctaggagtataactttgtaacttcagcctctgattggkcgttttacacaaccagtcagatgtttgtatagggtggtgtaactttgtaactttgcttcagcctctgattggtcccctcccacaaccaatcaaactgatc

SEQ ID NO: 104994 - DNA, 201 bp, Homo sapiens
atcagagtacagatacaaaatgagtaatgattatctaattgtaggttcatgttaaaaacaaatctatgtcatagacatcataataaaaataaagcagccamgtgagctggctcttaaaggatatataagcacaatatgctgatgagtgcctatccagttatgtgccacatactgacatttcagtcggtgacagaccacata

SEQ ID NO: 104995 - DNA, 201 bp, Homo sapiens
acttgactaggctctgcaatccatattttacaattttacatgctatatatagtattatgaaacctaaccaacctgcagagagtgggggcaggagcctctcmagcagctttgcctactagtgtaggggctgtctacttgtgcctctccaagtctgccagtgaaggcagagttcttacccagctaaaggtcaccaaggtggct

SEQ ID NO: 104996 - DNA, 201 bp, Homo sapiens
gtttaatgctttacccctaggctgtttgaaaatctggtggccacagcctgggaatatctggtaggagaaacaaatgtaattttttagaagcttatctatcyctgtatatgagctaaaataccttggcagttaggcatagataccgcatttcttttgcagggaaatgacaccaaaatgtggtttgggcacttaagctcctca

SEQ ID NO: 104997 - DNA, 201 bp, Homo sapiens
tttacccctaggctgtttgaaaatctggtggccacagcctgggaatatctggtaggagaaacaaatgtaattttttagaagcttatctatccctgtatatragctaaaataccttggcagttaggcatagataccgcatttcttttgcagggaaatgacaccaaaatgtggtttgggcacttaagctcctcagacctcaac

SEQ ID NO: 104998 - DNA, 201 bp, Homo sapiens
tggagatgtgttttaagaaatatccatgcaaaagagatagttcgattattttattacaaaaggattgctaaaaggatttatttaaatgttgaaatgcttgytttttttttcttttgtttcgttttgtctttaaagagatggggtctcattctgttgcccaggctggagtacagtggtttgatcatagctcactgcagcctc

SEQ ID NO: 104999 - DNA, 201 bp, Homo sapiens
attaatggaaaatactttgattggattctcatctcgaggaggagctgtttcagagctggtgtgcgctattatgtaagaggtgagaattttgtcagcatggstcatatctgtaattaatattttgtcttacggtgacacgaatgtaaccttttgtattttatttgttttcattatcatttgatagccttgctaagtatttat

SEQ ID NO: 105000 - DNA, 201 bp, Homo sapiens
ctattgtaaatagttacacacattatactttactgtttattatatttcataataaaaacatttaatgtaagaggtatgccaattccaaaggcttttgcaamcctttactctgggaatgaagtggagagatcagcctttagaatttctaggtgtatgactgtttatattactgaatggtgtaggaagtgtcctataccatat

SEQ ID NO: 105001 - DNA, 201 bp, Homo sapiens
ggtctcaaacttctggcctcaagtggtccacccgccttggcctcccaaagtgctggcattacaggcgtgagccactgcgcctggccaactgttgtttactytgaatgaatgtattacaacatatgtattcatttggatctatttatgacggtcacaaatcattttttgtctagtctaatattgatggatattctggttgtt

SEQ ID NO: 105002 - DNA, 201 bp, Homo sapiens
atttaactattgtaaatagttacacacattatactttactgtttattatatttcataataaaaacatttaatgtaagaggtatgccaattccaaaggcttktgcaaccctttactctgggaatgaagtggagagatcagcctttagaatttctaggtgtatgactgtttatattactgaatggtgtaggaagtgtcctata

SEQ ID NO: 105003 - DNA, 201 bp, Homo sapiens
tcgccagtaattgaccatttttgaccaataaaaatggttatttcatgtggttcaacctaaattaatattttagttgactggcttttttgggtgagattttmaactctaatttggtaaaattgtatgtaggcttagatggaagtttaggtgcaggctaagcattcaagaaacttggcttttaactacaaagagacttgcttt

SEQ ID NO: 105004 - DNA, 201 bp, Homo sapiens; identical to SEQ ID NO: 16812

SEQ ID NO: 105005 - DNA, 201 bp, Homo sapiens
ttaactacaaagagacttgcttttaaaagcagttgctacattctccatttgtttatgaaacatctctacaacgtcagccatgtaccaggaactatactagyccctggggacccagaatgaagctgtggaccctgtcttgtgggagcctacagtctgctggggaagtggtagtcaaagaatggttgctataatggtgatatg

SEQ ID NO: 105006 - DNA, 201 bp, Homo sapiens
gggagcctacagtctgctggggaagtggtagtcaaagaatggttgctataatggtgatatgtaccaaagtgaggtgggatcctgaaggaatgagggtcttygcctgaggttgtcagggacaactttataaagtaaggtatctacagaggacagtaactttacacagaaaggtaacttttgagctgagacttgatgaagatt

SEQ ID NO: 105007 - DNA, 201 bp, Homo sapiens
aaggcagatttagagatagtctcaaatactccataaggagagtatttcagaattaatataaattgctgttgataagaaaatcaaactcattgctattttgktttttttttttttttagaatgaacttttcagactatacgattctctctctgttcaagagttctggggttggttgtttaaagaaaaggaatatgtgtactg

SEQ ID NO: 105008 - DNA, 201 bp, Homo sapiens
tgataggacaagctgatggcttataattgactttacctgctactgtgagatgtctcttctgttgccttatggagttgtacaccacttgctgctccagagcrttagtggccaaatacattcatatgttcataaacatattcatttgaaaatgaataaagcaattttctaattttttcataatgccaaattatataacagatg

SEQ ID NO: 105009 - DNA, 201 bp, Homo sapiens
gagggcagtaagggagccacagggaaaggagcttcagagatgctagtgggtacaaaggggtgtgtgtatgtgtaatttttaaaattatgatcaaatatacytcataaacaatttgcctttttggtcatttttagatgtgtaattcagtgagtggcattaatttcattcacagtgttgtgcaaccagcatcctgtttccatc

SEQ ID NO: 105010 - DNA, 201 bp, Homo sapiens
ctttaagctgcctgctgggaaatgattagcagaggtctgtatcccttgggggtgatgaaagagagaaagagaagtattttctgtctctactttccatttastaagacaaatcctttggttatgaaaagcttttgcttttatcttttttgagaaaaacatgacctttcagtaagaatttttctaaataatatgctgaccttt

SEQ ID NO: 105011 - DNA, 201 bp, Homo sapiens
cctacaaagttggctcagacagcttctgggtttttttgatgtttctgtgggagaatgatgagagcttagagcttcctagtttgtcctttttctgataccaytctctcctttgaaataaactggaaactatagtgtttgaaattttttacagattaaccagaagggctcggagaagccacttgagcagacatttgcaacaat

SEQ ID NO: 105012 - DNA, 201 bp, Homo sapiens
ccatgtatataaaactagaaggagaaaaagttctaaatgtttttccataaaatatgaactttaggagcagatacacgtggacttttaaagttgtcggtagrttgtattagttttttcccttgcatattcattaatatatacacccctgacaataagtaaggtgagaaaaacaagtatgtttgtgtttcttttcacatttct

SEQ ID NO: 105013 - DNA, 201 bp, Homo sapiens
aagaatttgtttagtggcaaaactagaaagacaagggaataatgaactgagtggatagtagttacttcttagagggcagtaagggagccacagggaaaggwgcttcagagatgctagtgggtacaaaggggtgtgtgtatgtgtaatttttaaaattatgatcaaatatacttcataaacaatttgcctttttggtcattt

SEQ ID NO: 105014 - DNA, 201 bp, Homo sapiens
aaattgatggtttcatagcaaatcaaaacctagtcagcatcaaatatacaagtgaaaagagttgcagtgaactcataaggacagcaaacttaacagattcrtccttttagaagctgggaaaatgatgtcaaatttatactctgtaattgtcataataagtagttttttagaagtcttcatttcatttggttagttatttat

SEQ ID NO: 105015 - DNA, 201 bp, Homo sapiens
tacaaagttggctcagacagcttctgggtttttttgatgtttctgtgggagaatgatgagagcttagagcttcctagtttgtcctttttctgataccactytctcctttgaaataaactggaaactatagtgtttgaaattttttacagattaaccagaagggctcggagaagccacttgagcagacatttgcaacaatgg

SEQ ID NO: 105016 - DNA, 201 bp, Homo sapiens
gctttttttccccctgaaaaaaaagtttagagtgtttctgtaaatgtgaaggtacaacttttttgcacctttttctttaccaaggggtttatgagttagartttccatttttattccttccttttggcccttcctgctctgaggctgctgttgaaggttttcaaatgtggctcctgccctaaggagtattcttttttggat

SEQ ID NO: 105017 - DNA, 201 bp, Homo sapiens
tttttacacccaatttataagaatgtttctagaagaaaatatattattctaaaacatataacttaggataaacattttaaaaaataaaattatagcactgyctacctgagtaaaactacaggatatgctttttatactttagaatttcttttttattatatatatcaagaaatatatatcaatatcttcattctctactag

SEQ ID NO: 105018 - DNA, 201 bp, Homo sapiens
tttttttgatgtttctgtgggagaatgatgagagcttagagcttcctagtttgtcctttttctgataccactctctcctttgaaataaactggaaactatrgtgtttgaaattttttacagattaaccagaagggctcggagaagccacttgagcagacatttgcaacaatggtgtcttccttgggaagtggaatgatgag

SEQ ID NO: 105019 - DNA, 201 bp, Homo sapiens
agtttttacaattgactgttaagatagcttaagattattaagatgaaaataacatggtaatttttacattcccactttacaaagtaaagactgcctgtatycatatttaaacaggatctgtttttgctcggagtgtgtatgaaacttacatgaatggcattgccctgttctgattctttgaaacttactttttaaagtcaa

SEQ ID NO: 105020 - DNA, 201 bp, Homo sapiens
gagaaaaagagttttctcttacttaacggacctacagcagcaatttagagtctacgcacaaatcaacaaatctttgttttgcttacagcctatctgggtaycgaagcctgcctgccccctcttcagtgtgcagaaaaaatttaaagtacagtcagtagtcttaaggtcctgaaggagtttactttggtttaaattttaaac

SEQ ID NO: 105021 - DNA, 201 bp, Homo sapiens
ttttcggtaaatccaagttcttgagtctttgatacagaggctgtggttgttaagagttataaaataggtgtttttaagggttttggtttgtcttggattamaaacaacatgtgtttatttcccttagtgttacccattagcatccacacttttcttgtctgtgaataattttgttgtactcacttcgtgtttaatgcttta

SEQ ID NO: 105022 - DNA, 201 bp, Homo sapiens
agagctagccttggaatacggctggtccagagtccagtgatctttccatttcattgcattatccatatgacctttttttctcttaccagattgctctcgcrttagtcctcagacatgccaggtattgaaatgagtcacttacaaccaaatatagttgacatgtccatattaatttccatatgtttaatgtggaaaacagaa

SEQ ID NO: 105023 - DNA, 201 bp, Homo sapiens
ggaaagcaacagattttgatgtcctttcttataagaagacaatgttgcacttaactgatattcaggtaagaactggaaattgttactaattgcagcgcccraagaagtagcatgggctggggagaggagggtgagggtgttgtggaatacaaagaatgctataattattttaacaacctatagagtaagatcactctacct

SEQ ID NO: 105024 - DNA, 201 bp, Homo sapiens
ggcaaggtcaggattggtgtattgtgcatgatgttgtgatgactccttgattcctgaccactcatccttgtaatattgcagcagccagttaggtatactgmcccagcacatttctctaccatttagagagagacatgaaggacataggagtggtgtggaagggacattgccctgtagtgtcagatctcacgtcctgatgct

SEQ ID NO: 105025 - DNA, 201 bp, Homo sapiens
aattaattgagtaggaaagggttactctgttttatgtatttctggggtgaggaggtggcaaggtcaggattggtgtattgtgcatgatgttgtgatgactmcttgattcctgaccactcatccttgtaatattgcagcagccagttaggtatactgccccagcacatttctctaccatttagagagagacatgaaggacat

SEQ ID NO: 105026 - DNA, 201 bp, Homo sapiens
acaattaaatgtaagggaaagaaataccgtaaaactcctcccaggtttctgtctggcctgagacaatgagacagaaatgcccacaggaggtacagatttgmgggggagatgtattttgtttgaggcctgtcaaagaaactggcttctagccatcagaaagagacattgattggtgtagttttctttctgtagaaagtaagc

SEQ ID NO: 105027 - DNA, 201 bp, Homo sapiens
ctcataattgcccttggccacaaagtcagatcatacagccaagccatggtagagctagccttggaatacggctggtccagagtccagtgatctttccattycattgcattatccatatgacctttttttctcttaccagattgctctcgcattagtcctcagacatgccaggtattgaaatgagtcacttacaaccaaata

SEQ ID NO: 105028 - DNA, 201 bp, Homo sapiens
ttttcagttcttttaggcttatacttagaagtagaattgctagatcatatggtgattctatgtttaactctttgaggaaccaccatactgtttgccatagyggctgcaccattttgtattcccaccaacaatacaccagagttccagtttcttcatatccttgctgacaattgttgttttctggtgtgtgtgtgtgtgtgt

SEQ ID NO: 105029 - DNA, 201 bp, Homo sapiens
atatgcaaaaaatactctacaaaatatacataacttcagaaaagttatgtataacttatgtttggtatttatgaatattctattaattttttgtgcaggtrttttgacaatagctcatatctgttatagaactatgaattaaacttaatagttatttgtattattaaaatatactaaaagtgatcattattatttgtataa

SEQ ID NO: 105030 - DNA, 201 bp, Homo sapiens
tttttttagttgccactcccactccaaattcaacagcagttttgttttagcaacttgcctcttatcaagttacattccaaatcatttaactttatagaaayagcagtgtgtttttcatcttatttcattggtttataaaatagttaaactatgtaatgatgaaataataataagtatgactggtacaaattcgggaacaca

SEQ ID NO: 105031 - DNA, 201 bp, Homo sapiens
acctgaagaattaattgagtaggaaagggttactctgttttatgtatttctggggtgaggaggtggcaaggtcaggattggtgtattgtgcatgatgttgwgatgactccttgattcctgaccactcatccttgtaatattgcagcagccagttaggtatactgccccagcacatttctctaccatttagagagagacatg

SEQ ID NO: 105032 - DNA, 201 bp, Homo sapiens
tataaatttgacttctctagatgcctcatgaagtggcagtatttgtccttttatgactggtttatttcacttagcataatgtccttaaggttcatccattktgtagcatgtgtcagaatttccttttttttttttttttttgagatggagtctcgctctgttgcctatgctggagtacagtggtgcgatctcggcccactg

SEQ ID NO: 105033 - DNA, 201 bp, Homo sapiens
aagcaacaactctggaagagaaattgaaattgaacataaatggagcatagaagaagtagctgaccatgggaatgctgacactattcaccattcaagggacwgtaggtatgcagccagaggtcctggtgcaggcgaactgaccgacattaatgatggagtggctgtgacgaaagggatgacagtatcccagagaaagtgatg

SEQ ID NO: 105034 - DNA, 201 bp, Homo sapiens
atggcgcaatctctgctcactgcaacctccgcctcccaggttcaagcgattctcctgcctcagcctcctgagtagctgggattacaggcgcctgccaccaygcctggctaatttttgtatttttagtagagatagggtttcaccatgttggccaggctggtcttgactgaactcctaacttcacggagtcttgctctgtca

SEQ ID NO: 105035 - DNA, 201 bp, Homo sapiens
ataaaaatacattgctttgtctaactaagagagatacaggggatcttggtacatggataatggagaaatgaggggccagggccaagtttcctggccaaggrgagagctcttttttgtcttcctttggggatgagactcccttcagtcacccaggagagacatgcacaggcaccgccctcttctgtcctttgtctacacata

SEQ ID NO: 105036 - DNA, 201 bp, Homo sapiens
ggtattttactccatatctagcgcaccagcatggcacatgtatacatatgtaactaacctgcacaatgtgcacatgtaccctaaaacttaaagtataattwaaaaaaataaataaataaaaaaataatagtagcagtaatggtaaaaataaaaaaataaaaaaatgctcatattaggctgggctctggtttatgtagctgt

SEQ ID NO: 105037 - DNA, 201 bp, Homo sapiens
tgctataaagtgacttcctaatcaccaagaatttcgagaaacaattctaatttaactgtttataacttacaaacttggatcaggtctaccctgtcacatcrttctaggttgaagaagcctaactattttactctgatcttctatagaagccttaaataaaaatacattgctttgtctaactaagagagatacaggggatct

SEQ ID NO: 105038 - DNA, 201 bp, Homo sapiens
ttttactccatatctagcgcaccagcatggcacatgtatacatatgtaactaacctgcacaatgtgcacatgtaccctaaaacttaaagtataattaaaawaaataaataaataaaaaaataatagtagcagtaatggtaaaaataaaaaaataaaaaaatgctcatattaggctgggctctggtttatgtagctgtggtt

SEQ ID NO: 105039 - DNA, 201 bp, Homo sapiens
cagcatggcacatgtatacatatgtaactaacctgcacaatgtgcacatgtaccctaaaacttaaagtataattaaaaaaaataaataaataaaaaaataatagtagcagtaatggtaaaaataaaaaaataaaaaaatgctcatattaggctgggctctggtttatgtagctgtggttcaaatgaagcctcatggtgtat

SEQ ID NO: 105040 - DNA, 201 bp, Homo sapiens
agcatggcacatgtatacatatgtaactaacctgcacaatgtgcacatgtaccctaaaacttaaagtataattaaaaaaaataaataaataaaaaaataatagtagcagtaatggtaaaaataaaaaaataaaaaaatgctcatattaggctgggctctggtttatgtagctgtggttcaaatgaagcctcatggtgtatc

SEQ ID NO: 105041 - DNA, 201 bp, Homo sapiens
catggcacatgtatacatatgtaactaacctgcacaatgtgcacatgtaccctaaaacttaaagtataattaaaaaaaataaataaataaaaaaataatagtagcagtaatggtaaaaataaaaaaataaaaaaatgctcatattaggctgggctctggtttatgtagctgtggttcaaatgaagcctcatggtgtatcat

SEQ ID NO: 105042 - DNA, 201 bp, Homo sapiens
taaattttataaaattataaattataaattaaatgtttttaatttcctagaattaaaaagtgccttggttcttgttatttgcttgacgtttttttgagackgagtctcactctgtcgcccaggctggaatgcaatggcatgatcttggctcactgccgcctccatctcctgggttcaggcaattctcctgccttagcctta

SEQ ID NO: 105043 - DNA, 201 bp, Homo sapiens
aagtgccttggttcttgttatttgcttgacgtttttttgagactgagtctcactctgtcgcccaggctggaatgcaatggcatgatcttggctcactgccrcctccatctcctgggttcaggcaattctcctgccttagccttagcggggattacaggcatgcgccaccacacctggctaatttttgtatttttagtagag

SEQ ID NO: 105044 - DNA, 201 bp, Homo sapiens
aaggcaaagtttatttttgatgcttctctcctttttgactcctctgttcaccagaccctgcaagagccgctctggattttctttccagtgtgtcaagtgcyctggaatggaagggaggcctagtgttctaggtcctcatctgggcatcctccttccatttagcaccctttggcttggagcaaaagcatgcttcttccgatc

SEQ ID NO: 105045 - DNA, 201 bp, Homo sapiens
tatagaaatagcagtgtgtttttcatcttatttcattggtttataaaatagttaaactatgtaatgatgaaataataataagtatgactggtacaaattcrggaacacacacttgaatctcaggaagtgcgattcagctggttgtggtcaagtgcaaaagccattccctgtgacttttagagtcggcggtgctggtggttc

SEQ ID NO: 105046 - DNA, 201 bp, Homo sapiens
agttttacattggtcaatgtttttatgtacggccataggattttctttgtttttggttccttgattctgaattgtcttccctgtgtaaattacatccatarggctttcccatttgggccactttaaagactttgacacttacagagaaatctgtgtgcagaatcctgtacatttttactatgttcttttatatttttttag

SEQ ID NO: 105047 - DNA, 201 bp, Homo sapiens
aatttttaaaaatgtgttaaaacttgttttttggcctagatatagtttgtcttagagaatatttcatgtgtacttgtaaaaaaatgtgtattctgctgctrttgggtacagtaatatggtctgattggtttatgatggtgtttaaattctctattttcttattcatctctgtctgattgttctgttgttgaaagtagggta

SEQ ID NO: 105048 - DNA, 201 bp, Homo sapiens
tgtctagatagaaccaatgtgatccagagtttgttagctcgtcgttcacttcaggcccaacttcaggtgcgaatgctttttttttttttaattgaaaaacracacagcaaaaaattaaacatctttaaaacccagtaacaaaaaatattcacattgcccacaccctaacccagctctttttatttttgtgtcttgcccatg

SEQ ID NO: 105049 - DNA, 201 bp, Homo sapiens
taaaatggcctatctttacgttgagtattgtgttgttactaagtataattacctaaattgatagttttacctttcaaactagtatttttcaaattaggatytatggacattttctcaggggtctttgagattttttttttctttaaaagatgtctcaagtttgagaaacactactttagaggaattttgtatgtagaaaca

SEQ ID NO: 105050 - DNA, 201 bp, Homo sapiens
gacgtacttaccattgaccgtgtgtccacagaggttacccttgcaggtattttacagccagatttagaagtttagggagaaagattttatacataaattayagtaattaaaaaacatcactcagaggtgtgtcagtgtgtggatctctgagtgcattcttattaaaatttttattcttgctacctcattcataggttggtg

SEQ ID NO: 105051 - DNA, 201 bp, Homo sapiens
taattagcaaggtagttaaattgttaatattagagtgagtatacgatgaagtaatactttgtatcatgctttaagcagtaaatctcttggttaagtatttrtcattaatttttaaaagaaatactccccaaatggtaaaatttatcagcgtgagcttctattatttaaaaaaaagttttgtattttgttgtgtttcagtta

SEQ ID NO: 105052 - DNA, 201 bp, Homo sapiens
ctgaagctgtgagtcccacgggccagaggcctgaggcgcggcgggcggggcggcaggtgcgggccctggcctcggggagggcttctgagtcccggattgcrgatagggtgtgggagctcctcgcatttaccggttttcctcagccggcgcggcctctcctaggcctcgcccgagtagccataggccgggaaccagcggctc

SEQ ID NO: 105053 - DNA, 201 bp, Homo sapiens
aaggataaaatgtcagaagttggtttagacttaggaaggtgtatgacagttcaccagggatagaagaaatattctgtatcttaatctatatgacaagaagscggcaagcactgttcaagtctcttgataaatttttttacaaagaaaatattttttattctcggtgtttctaatgttttaaattatagtgtgctaaatatt

SEQ ID NO: 105054 - DNA, 201 bp, Homo sapiens
cgaggtggcggcgcggggcggggcgggcggagagagaaggaaggaggtggttgtgcaggatggcgacggcggcctacgagcagctgaagctgtgagtcccrcgggccagaggcctgaggcgcggcgggcggggcggcaggtgcgggccctggcctcggggagggcttctgagtcccggattgcagatagggtgtgggagct

SEQ ID NO: 105055 - DNA, 201 bp, Homo sapiens
ttattttaacaacctatagagtaagatcactctacctacttttctacctaggcataaaaaatattttttaaatcatttgttgctcttgttttttttttttwaaagattcagttcttaaattatgcaatttcatatggagagaagggaaaacagaaatgcacgggtactcaacaccagatttaacttcatatcctctttgta

SEQ ID NO: 105056 - DNA, 201 bp, Homo sapiens
atggcaaaactttcagagggggaacttgtgggtagaatgttgaacagacctgaagaattaattgagtaggaaagggttactctgttttatgtatttctggrgtgaggaggtggcaaggtcaggattggtgtattgtgcatgatgttgtgatgactccttgattcctgaccactcatccttgtaatattgcagcagccagtt

SEQ ID NO: 105057 - DNA, 201 bp, Homo sapiens
aatatattccatgagataatggggtgtaagacaagtatggctataaaatttctgtttttttgattatgtggtaattctggtaggtactatatatagtttgkctttgatcaaatggaattagagctctgttttagtttgataatttgacatttcctatttgtctgttgcttggtggctgctctctcaagatagctgactggt

SEQ ID NO: 105058 - DNA, 201 bp, Homo sapiens
ctccttctgcaaatgaggccagtagtgttgcagagagagaagctattctctaggttcagctattcaaggagtaaaacaaagtagatctttgcccaccggcytgctgctaacctttatgaacttcggactttggaaaatgcatatcagcagagttgggttaaatatgtcattaaaataggttattggctgggtgctgtggtg

SEQ ID NO: 105059 - DNA, 201 bp, Homo sapiens
actggtacaaattcgggaacacacacttgaatctcaggaagtgcgattcagctggttgtggtcaagtgcaaaagccattccctgtgacttttagagtcggsggtgctggtggttcagttggtatgcttcataaatagaattgattaatctactgagtagagtcagttattttgtttgttttttcttttttgagacagagtc

SEQ ID NO: 105060 - DNA, 201 bp, Homo sapiens
agccaccgcgcccagccgagaaaaacttttaattgcttataatggagatagttttttttctgtgtgtgcgtttgacttttgtgctcttataaacagctgaytttataataaatactttattgctgactgaaatgtacctattaagttgtacctccaaagttgtatgtggaaacaagtgtgacttttcagttcattgatttt

SEQ ID NO: 105061 - DNA, 201 bp, Homo sapiens
acttgcctcttatcaagttacattccaaatcatttaactttatagaaatagcagtgtgtttttcatcttatttcattggtttataaaatagttaaactatrtaatgatgaaataataataagtatgactggtacaaattcgggaacacacacttgaatctcaggaagtgcgattcagctggttgtggtcaagtgcaaaagc

SEQ ID NO: 105062 - DNA, 201 bp, Homo sapiens
catcctaatgttataagtatctaatttggattgataccagaagcatataaaagctctactcctgtaaagccttcatgcttcctttttatgttgacatttcmaattccatctttatatattgtgtttcagtaacatcaatatataattatttttatgcagttggctcttatttatgtatatatgtatttattttttagagaa

SEQ ID NO: 105063 - DNA, 201 bp, Homo sapiens
tgcctggctaatttttgtatttttagtagagatagggtttcaccatgttggccaggctggtcttgactgaactcctaacttcacggagtcttgctctgtcrccagcctagagtgcagtggcgtgatctcagctcactgcaacctccacctcctgggttcaagcaagcgattcccctgtctcagcctcccgagtagctggga

SEQ ID NO: 105064 - DNA, 201 bp, Homo sapiens
atacctcttgcttactatgcgtcagatgttcaaagtacttaccaaagattagctcatttaattcacacgatgctgcgtgatgaatctggtattatcgttaktttacagaaagggaataagaggatcagagagaatgagtaacttgtctaaggtcacactactggtagtctggttctgtaggctctggtcctactatgctac

SEQ ID NO: 105065 - DNA, 201 bp, Homo sapiens
attttatttaaaatgcatttcttactgtttttagctaatacctcttgcttactatgcgtcagatgttcaaagtacttaccaaagattagctcatttaattyacacgatgctgcgtgatgaatctggtattatcgttattttacagaaagggaataagaggatcagagagaatgagtaacttgtctaaggtcacactactgg

SEQ ID NO: 105066 - DNA, 201 bp, Homo sapiens
gcatgcgccaccacacctggctaatttttgtatttttagtagagacagggtttcactgtgtcggccaggctggactcaaacttctcacctcaaacgatctkcccgcttccacctcctaaagtgctgggattacaggtgtgagccaccgcgcccagccgagaaaaacttttaattgcttataatggagatagttttttttct

SEQ ID NO: 105067 - DNA, 201 bp, Homo sapiens
gattacaggcgcctgccaccatgcctggctaatttttgtatttttagtagagatagggtttcaccatgttggccaggctggtcttgactgaactcctaacytcacggagtcttgctctgtcaccagcctagagtgcagtggcgtgatctcagctcactgcaacctccacctcctgggttcaagcaagcgattcccctgtct

SEQ ID NO: 105068 - DNA, 201 bp, Homo sapiens
gtcacactactggtagtctggttctgtaggctctggtcctactatgctacattgccttctgtaccctgttgaatataataaactagatttgattatggcatttttttgtatatgttaaattgatggtttcatagcaaatcaaaacctagtcagcatcaaatatacaagtgaaaagagttgcagtgaactcataaggacagc

SEQ ID NO: 105069 - DNA, 201 bp, Homo sapiens
gcttctattatttaaaaaaaagttttgtattttgttgtgtttcagttagagttgaaatccttagctagataattttcacaaatggagtatgtaaataaaatttttttttttttttttttttttgagttggagttttattcttgttgcccaggctggagtgcaatggcatgatctcagctcactgcaccctccgcctcccgg

SEQ ID NO: 105070 - DNA, 201 bp, Homo sapiens
caggctggccttgaactcctggcctcaagtgatccacccacctcatcctcccaaagtgctgggattacaggcgtgagccactgtgcctgcccagtctgccttttttttttttttttttaatatacagtgaatatatctttaaaattaggtttcatatgatctcaacttaaagtttcttttgttcaggaacctggatgattg

SEQ ID NO: 105071 - DNA, 201 bp, Homo sapiens
aggctggccttgaactcctggcctcaagtgatccacccacctcatcctcccaaagtgctgggattacaggcgtgagccactgtgcctgcccagtctgccttttttttttttttttttaatatacagtgaatatatctttaaaattaggtttcatatgatctcaacttaaagtttcttttgttcaggaacctggatgattgc

SEQ ID NO: 105072 - DNA, 201 bp, Homo sapiens
tttaatgagaagacagaatttaaaaggtcgctccatcttacttattaggttggacaatgtgaagtcgccagtaattgaccatttttgaccaataaaaatgkttatttcatgtggttcaacctaaattaatattttagttgactggcttttttgggtgagattttcaactctaatttggtaaaattgtatgtaggcttagat

SEQ ID NO: 105073 - DNA, 201 bp, Homo sapiens
aaggcaacagcaagacggtctaaaaaaaaaaagttaatgttaacatagggaatcataaaagtgataaatggaacatatataccctaaatattttaacttaraacctaaaagttttacattggtcaatgtttttatgtacggccataggattttctttgtttttggttccttgattctgaattgtcttccctgtgtaaatta

SEQ ID NO: 105074 - DNA, 201 bp, Homo sapiens
atagcgtagtttcatttttacgaaaaagcaagctgcgtgtttctaagtatggttgcatgtgatgaaactaaaaagataggagaatggtctccatgaacctsagaatagttacttctaggtgagaacacaattggataaaatagggaaggagcagataaatagattcagggttttggtactgttttgaagtcggatggtagg

SEQ ID NO: 105075 - DNA, 201 bp, Homo sapiens
ataggagacaggacatgttagagaactcctgctggtagcattgtggaaaaatgagtggcgagggctaatgcctaaactggaggcaagggaaggtgtgttaggttaggctggagtcagatgttggtaaagatagtgggagtagaaatgtaaaaaatatggattttgaaggagatttagtacttgacaattaaatgtaaggga

SEQ ID NO: 105076 - DNA, 201 bp, Homo sapiens
ccatgaacctgagaatagttacttctaggtgagaacacaattggataaaatagggaaggagcagataaatagattcagggttttggtactgttttgaagtyggatggtaggttcacaaatatttattttattatgctgttatactttataatggatgcatcaaattatattaagaaaaagtgttacatatagaaaatacca

SEQ ID NO: 105077 - DNA, 201 bp, Homo sapiens
tctactgaaaatacaaaaattagctgggcgtggtggctcacacctgtaatgccagctactcgggagactgaggaaggaatattgcttgaacccaggagacrgaggttgcagtgagccgagatcgtgccactgcactccagcctggatgacacagcaagactccatctcaaaaaaaaaaaaaagtgtttatccttatttagt

SEQ ID NO: 105078 - DNA, 201 bp, Homo sapiens
gcttgaacccaggagacggaggttgcagtgagccgagatcgtgccactgcactccagcctggatgacacagcaagactccatctcaaaaaaaaaaaaaagygtttatccttatttagtgccttaaatgatttgggccaactatggtgttttttgttttttgtttttttttcaaaatgagattgtgaatggacaaacaatat

SEQ ID NO: 105079 - DNA, 201 bp, Homo sapiens
cgcactccaacccgccgcgtcggcggcatctctcgcgtgctcttgcttgcgcactaatttgtcctccaccgcctcccgttcaggccggctctcctgcgggscggggaaaggggtgggaagaggctgggagctgcggccgctgtgccagggtgaccggtagagttgtagccgaggtggcggcgcggggcggggcgggcggag

SEQ ID NO: 105080 - DNA, 201 bp, Homo sapiens
accgcctcccgttcaggccggctctcctgcggggcggggaaaggggtgggaagaggctgggagctgcggccgctgtgccagggtgaccggtagagttgtasccgaggtggcggcgcggggcggggcgggcggagagagaaggaaggaggtggttgtgcaggatggcgacggcggcctacgagcagctgaagctgtgagtcc

SEQ ID NO: 105081 - DNA, 201 bp, Homo sapiens
ggacttataatggatggctggaactcaatgatacgatattataagaacaacttttccgatggatttagacaagtaagtttgtatttgatgctttcctggcmttacgtggttgtatctttgcattgttcatcactaatgttatctcacactgagtttacgaatttcttcctttctgttctaggattccatagacttatttct

SEQ ID NO: 105082 - DNA, 201 bp, Homo sapiens
ttttattccagagactaggagttttgcatgtgggacaaaagcttgaagaacaagatgaatttgagaagatttacaaaaatggtaggtcatttctttaatayagacaaagttggtcagattttgaaataaattaatattctggatttagaactttgtttgtcatcttaataattatcagctgtttttacttttttctacagc

SEQ ID NO: 105083 - DNA, 201 bp, Homo sapiens
attttcatgtttatatctgcacgtatcatatatatattttttcctctgctaggtatgagcatgagaaggggtgtgtgtgtgcatgtagtatatgtatagtkataaacccagagtgaaggaggttctagtgttcccaagaaatatgtatgcactgatataaagaggaaaatcagcttatgaaggtattattaatagaaggaa

SEQ ID NO: 105084 - DNA, 201 bp, Homo sapiens
tagtctggaaagcaacagattttgatgtcctttcttataagaagacaatgttgcacttaactgatattcaggtaagaactggaaattgttactaattgcarcgcccaaagaagtagcatgggctggggagaggagggtgagggtgttgtggaatacaaagaatgctataattattttaacaacctatagagtaagatcact

SEQ ID NO: 105085 - DNA, 201 bp, Homo sapiens
accaggaggtctttccagaatgttcacagtaccacgttagagcaataccatgaacgtcacaagggcttgaagtttataaatagcgtagtttcatttttacraaaaagcaagctgcgtgtttctaagtatggttgcatgtgatgaaactaaaaagataggagaatggtctccatgaacctgagaatagttacttctaggtga

SEQ ID NO: 105086 - DNA, 201 bp, Homo sapiens
gtgggtagaatgttgaacagacctgaagaattaattgagtaggaaagggttactctgttttatgtatttctggggtgaggaggtggcaaggtcaggattgstgtattgtgcatgatgttgtgatgactccttgattcctgaccactcatccttgtaatattgcagcagccagttaggtatactgccccagcacatttctct

SEQ ID NO: 105087 - DNA, 201 bp, Homo sapiens
ttaaagtataattaaaaaaaataaataaataaaaaaataatagtagcagtaatggtaaaaataaaaaaataaaaaaatgctcatattaggctgggctctgrtttatgtagctgtggttcaaatgaagcctcatggtgtatcataattacatttctttataaaaatgttttgtttttataaatttatataaattttataaaa

SEQ ID NO: 105088 - DNA, 201 bp, Homo sapiens
ctagaagtaaaatcatatgtttcacacacatacagagacattaataagtaaaatgaccccaagacaggaacatgactggaatagagagtggacagagaggygggagctgtgttcagagaattagctcagcccagatgactcagggccttataagccatgggaagaactgtggcttttactttaaatgtgatggggccaggc

SEQ ID NO: 105089 - DNA, 201 bp, Homo sapiens
tttcaacattttttgtagagatgagatctcgctgtgttgaccaggctggtctcaaactcctggcctcaagatcctcctgctttgtttttcttttcttttcytttttttttttttttttttttttttaagacaggctcttgctctgttgcccaggctggagtgtagtggtgcgatcttggctcagagcagcctctgcctccc

SEQ ID NO: 105090 - DNA, 201 bp, Homo sapiens
cactttgatctgtgaatcttcatatgcttaccagctgttacatggctaatttataattatgtgtcatgcatttcattttttttccccttagctgcagtagyctagccttccctccccattttgtgtttcttatttgaaagttaatctattttaaatttatgttttccattcagagtagatttttcagtgatgtggttaata

SEQ ID NO: 105091 - DNA, 201 bp, Homo sapiens
ttgtgcctcagcctcccttgtagctgggactacaggcatgcaccaccaggcccggctaatttttgtattgttagtagagacagagtttcaccatgttggcyaggctggtcttgatctcctgacctcaagtgatccacctgcctcggcctcccaaagtgttgggattacaggcatgagccactgcacccagccaaattcttt

SEQ ID NO: 105092 - DNA, 201 bp, Homo sapiens
tttcaaggataaggtagagtcaaaatttccatttctagataacctttgtttaattcactttgatctgtgaatcttcatatgcttaccagctgttacatggmtaatttataattatgtgtcatgcatttcattttttttccccttagctgcagtagcctagccttccctccccattttgtgtttcttatttgaaagttaatc

SEQ ID NO: 105093 - DNA, 201 bp, Homo sapiens
cagcctggatgacacagcaagactccatctcaaaaaaaaaaaaaagtgtttatccttatttagtgccttaaatgatttgggccaactatggtgttttttgktttttgtttttttttcaaaatgagattgtgaatggacaaacaatattaagtgagattatagaacctttttttctaggcaaatttagaaacagcttactca

SEQ ID NO: 105094 - DNA, 201 bp, Homo sapiens
gaatattatacagccatagcagcagcaaatgaacctcatgactataatgagcaaataaagaaaactgaaagaatacatacagattaattcctgttatgttaaaaaaaaaaaagtcaaaagctgttcagactaaacaagaatttgtttagtggcaaaactagaaagacaagggaataatgaactgagtggatagtagttact

SEQ ID NO: 105095 - DNA, 201 bp, Homo sapiens
gttgaccaaagcattgttacatggcacatggctgtactttgtttctccaaccagtttacaccttaacattttcttctctagtcctcctcagtacctaacayagagccttgtgcagagcagctcctcagtgaatcaactgagtaaatgaaaggaactttccagtatagaccacgtactagcactgcaaaaagaacacagtct

SEQ ID NO: 105096 - DNA, 201 bp, Homo sapiens
acttaatccttctgaattggtgtttcagtctgtaaaatgggaatgttgatacttcacaggattattgtaaggtttgaaagagagtttttttttttttattwtttttgtgagacagggtctcacttgtcacccaggctggagtgcagtggtgtgagctcagctcactgcagcctcagcctcccaggctcaagtgatcctctc

SEQ ID NO: 105097 - DNA, 201 bp, Homo sapiens
ctttacatactggtcacatccatggtagagccaagagatctcaggttttgttagtcagaatggatatggattcatatcttaacttgactacttgttttgtrtcctgggcatagtacttaatccttctgaattggtgtttcagtctgtaaaatgggaatgttgatacttcacaggattattgtaaggtttgaaagagagttt

SEQ ID NO: 105098 - DNA, 201 bp, Homo sapiens
gttcatccatcttgtagcatgtatagaatttcattctttttttaagactgaggaatattccattgtgtatgtgtatgcatatatgcacacacacacacagacacacacacacacacacacatatacatgcataccacattttgtttatccattaatctattgatggacatttgggttgttttcattttttggctattatga

SEQ ID NO: 105099 - DNA, 201 bp, Homo sapiens
ttcatccatcttgtagcatgtatagaatttcattctttttttaagactgaggaatattccattgtgtatgtgtatgcatatatgcacacacacacacagacacacacacacacacacacatatacatgcataccacattttgtttatccattaatctattgatggacatttgggttgttttcattttttggctattatgaa

SEQ ID NO: 105100 - DNA, 201 bp, Homo sapiens
aatgatgatctctttctattgtcttttccagttgcctattatcatggttgttgccttttcaatgtgcattatctgtttgcttatggctggtaagtctgctycacacatttgtttcttagttagaatgttgacctttcttttacaacatcttaagtttttgagttcaccgaacacttgatgtttccctattaaatttaatgg

SEQ ID NO: 105101 - DNA, 201 bp, Homo sapiens
tcatccatcttgtagcatgtatagaatttcattctttttttaagactgaggaatattccattgtgtatgtgtatgcatatatgcacacacacacacagacmcacacacacacacacacatatacatgcataccacattttgtttatccattaatctattgatggacatttgggttgttttcattttttggctattatgaat

SEQ ID NO: 105102 - DNA, 201 bp, Homo sapiens
tctaggtcctcatctgggcatcctccttccatttagcaccctttggcttggagcaaaagcatgcttcttccgatcttaccacatcccccatctaaagtctrgggcagttgtgattgaacccataaataataatgttttgttgacaaaagatattagctgtgtattagctgacagatgagttttattcttttcccaagcaat

SEQ ID NO: 105103 - DNA, 201 bp, Homo sapiens
tactgtttgccatagcggctgcaccattttgtattcccaccaacaatacaccagagttccagtttcttcatatccttgctgacaattgttgttttctggtgtgtgtgtgtgtgtgtgtgtgtgtgtgtgtgtgtgtgtgtttaatgatagccatcccaatgggtgtggagtagtgttgagttgatttacatttctctaatg

SEQ ID NO: 105104 - DNA, 201 bp, Homo sapiens
actgtttgccatagcggctgcaccattttgtattcccaccaacaatacaccagagttccagtttcttcatatccttgctgacaattgttgttttctggtgtgtgtgtgtgtgtgtgtgtgtgtgtgtgtgtgtgtgtgtttaatgatagccatcccaatgggtgtggagtagtgttgagttgatttacatttctctaatga

SEQ ID NO: 105105 - DNA, 201 bp, Homo sapiens
ctgtttgccatagcggctgcaccattttgtattcccaccaacaatacaccagagttccagtttcttcatatccttgctgacaattgttgttttctggtgtgtgtgtgtgtgtgtgtgtgtgtgtgtgtgtgtgtgtgtttaatgatagccatcccaatgggtgtggagtagtgttgagttgatttacatttctctaatgat

SEQ ID NO: 105106 - DNA, 201 bp, Homo sapiens
tgtttgccatagcggctgcaccattttgtattcccaccaacaatacaccagagttccagtttcttcatatccttgctgacaattgttgttttctggtgtgtgtgtgtgtgtgtgtgtgtgtgtgtgtgtgtgtgtgtttaatgatagccatcccaatgggtgtggagtagtgttgagttgatttacatttctctaatgatt

SEQ ID NO: 105107 - DNA, 201 bp, Homo sapiens
atttagggtgggaatcgcgttaatattcccaataattttatatattttaaaaatctataattttatcaggggaaaacgttatgttgcggaaattaattgaycgattgagtgattggttaacggacagtgtccgatgactcatataatcccccggttcgagtccctttaggccgcagacgtttcgcgccttctcgggtgtcc

SEQ ID NO: 105108 - DNA, 201 bp, Homo sapiens
cttcagcctccaagatttctaatgagaaattggcggataatcccattgagaatctcttgtgtgtgatgagtctcctctttcttgctgcttttcaggattcygtttttgtctttcagctatgtgattataatgtttttggtgtgggtctccttagagttcagagcttgggtttgtagattcatatgtttcatcacatttggg

SEQ ID NO: 105109 - DNA, 201 bp, Homo sapiens
gagttgttaagaaggtgatttttgtttagatttaatttgattgagcttgtttgaagttcctattttttcaggcatcatgctagatgctgagttataaaggmtgaaagtccattttgccctgcagttcacagtctagtgagagaggcgtgtaagtagtaaattactgcagtacagtgtgacaagttccaggagagacatgta

SEQ ID NO: 105110 - DNA, 201 bp, Homo sapiens
tatgactgtttatattactgaatggtgtaggaagtgtcctataccatatactattatcagtagtaagggaaataactttatataaagaaaggcttttgggsagatacagtctttcatactgaggttcaccttttctatttcaaggataaggtagagtcaaaatttccatttctagataacctttgtttaattcactttgat

SEQ ID NO: 105111 - DNA, 201 bp, Homo sapiens
cacagctctacaaaaaaatttaaaaattaatcaggtgtggcggcacgcacctgcaatcccagctactcgggaggctgaggtgggaggttcacttgagataraagccacagtgtgctgtcatcacgccactgcactccagccaaggcaacagcaagacggtctaaaaaaaaaaagttaatgttaacatagggaatcataaaa

SEQ ID NO: 105112 - DNA, 201 bp, Homo sapiens
tccctattaaatttaatgggtaaagtggatgtgacattagattgtcattagatgtgacaggaagaaaaataacatacctagtagtttgatggttgtcgttwtttttaacctcagattttaaaaacatgtttttcttattactgtaaaccaatgagtgtctgagacaggtctcagtcagtttagaggcttaatttgccaagg

SEQ ID NO: 105113 - DNA, 201 bp, Homo sapiens
agtcaggtcatccccatcaaggatgtacactctggctaatagaatagaatttcctgatgtaatgcttgttgagtgctttcaggagacaggatcttggctcrtcttggagacctcagttttggtgatggatctggctattaacacttggtgggcatggtctgtcgcccctcggagcctcagcttcttgccaagggaatgctt

SEQ ID NO: 105114 - DNA, 201 bp, Homo sapiens
cccagtcaggtcatccccatcaaggatgtacactctggctaatagaatagaatttcctgatgtaatgcttgttgagtgctttcaggagacaggatcttggytcatcttggagacctcagttttggtgatggatctggctattaacacttggtgggcatggtctgtcgcccctcggagcctcagcttcttgccaagggaatg

SEQ ID NO: 105115 - DNA, 201 bp, Homo sapiens
aaagagagctttccctgaattgtcttttcatatgtggctttattcttttttttttttgagacagagtcttgctatgtcaccagggtggagtgcaatggcaygatcttggctcactgcaacctccacctcccgggttcaagccattctcctacctcagcctcccaagtagctgggactacaggcacacgccacgacgcccag

SEQ ID NO: 105116 - DNA, 201 bp, Homo sapiens
ggaggtggagcttgcagtgagccgagatcacaccactgcactccagcctgggcgacagagcgagactccgtctcaaaaaaaaaaaaaagaaatcttatctytagggagatacacctgagcaaggataaagttgtaattagtaaagaaatagcagtccctcatatctgcctagagaaggggatgtttgatattttgtgtgtt

SEQ ID NO: 105117 - DNA, 201 bp, Homo sapiens
atctcagcactttgggaggatgaagtgggaggatcacttgagcctaggagttcaagaccagcttaggcaatatcgagaccccaatttctaccaaaaaaaaraaagaaagaaagaaagaaagaagcagaaggggcagtgccaaaaactgttccttttgtctagaaaacaaaaacttcctcaaaaatccccagtagaattcca

SEQ ID NO: 105118 - DNA, 201 bp, Homo sapiens
cctccagtcacaactctgtctctcctctctataggtaaccactgttctgacattgatgatcattactgccttgttttccttttttttctttttttttttttgaggcggagttttgctcttcttgctcaggctggagtacaatggcacgatcttggctcactgcaacctctgcctccctcattgaagcaattctcctgcctc

SEQ ID NO: 105119 - DNA, 201 bp, Homo sapiens
ttccacactattgtaaagtcaaaatataggtctaaccattgtacatcacggactatcagtagtagtagtagtgtagcagcagcatcagtagtagtagttcyatatgatttaattacatgtgtagatttgtgtaaccaccaccacctgatccgttgtattttgatggagaagtctgagagcagccagaattgtctctgtaca

SEQ ID NO: 105120 - DNA, 201 bp, Homo sapiens
attcagcaaacaatatttaaaaaccccatcccacatatgtacataaaagaagggttatgaatattctgtttcgtgtttgtttgcattacttcaggggaagmaaattcttaaagaactggagtaaagttctagcaagggaataaggccaggaagaaaaaacagaaggcagaaataaataaaagcagaagttctgacccttag

SEQ ID NO: 105121 - DNA, 201 bp, Homo sapiens
ttgtcatcagtaactcctggtcttccatggtaacagctggcccccactcctctctgatctcaaagtaaggcaggttatgcagtcctgctagcgttcttgtsctggtccttgaccagtttgctgttagatccatcccttgctttttgtacggcagaagggctgactcctgcaggtccggttcccaagctggccccctcctgg

SEQ ID NO: 105122 - DNA, 201 bp, Homo sapiens
acctcggccttccaaagtgctaggattacaggtgtgagccactgtgcccagccactagcactgtttttctaagcacctactatgagaaccaacagtatccyagatatgtggaagaatagtcttaaacagtggaaacagtgttgactttgaattttaaaatatttgtgtagatgaaacatagcgattatttgagatagtaga

SEQ ID NO: 105123 - DNA, 201 bp, Homo sapiens
gcggtgagctgagattgcgccattgcactccatcctgggcaatgagagcgaaactccatctccaaaaaaaaaaaaaaaatgctaaatagctaatgtttacrtgcaaaattatttcctaagaacacataactaactgtaattgcttggtcagaagagatacaaaagattaaggcttttgatgcacactctcaaatcaaattc

SEQ ID NO: 105124 - DNA, 201 bp, Homo sapiens
cttttatagttgtttttactctagataagtcccctgcattagttttctgctgctaccataacaaattatcacaaacttagcatcttaaaacaacatcagcrtattatctgacagtttctgtaggtcagaagtttgggtgagcttgatagggtcctctgcgagggtcttacaaggccaaaatcaaggtgttggtagagctgt

SEQ ID NO: 105125 - DNA, 201 bp, Homo sapiens
ctggtcttccatggtaacagctggcccccactcctctctgatctcaaagtaaggcaggttatgcagtcctgctagcgttcttgtgctggtccttgaccagyttgctgttagatccatcccttgctttttgtacggcagaagggctgactcctgcaggtccggttcccaagctggccccctcctggttttgaacagtaggaa

SEQ ID NO: 105126 - DNA, 201 bp, Homo sapiens
tcatgttgcttgattaccggcacctccttagagcatacatgtttaagccagtccagtcatagctgggctgcacttcccatggtgccatgtcactgcttgaygcccctgtaaatccagagacctggttactggttttgcttctgccacccaggagctgggcagctttgggtgagtttcctcatgtataaagcagtgctcacc

SEQ ID NO: 105127 - DNA, 201 bp, Homo sapiens
agatttggttaggttttaagcaggcattgttccagaattagcatatgaaaacattcatatttcatcctatttgaatctgtcatcctcatcaagatctgaayattttaagcaaggtacctccataagaagtttcccagccttgacgattacatctagaagaaaaagcacaatgagagggtgaatacactagtggctcagtaa

SEQ ID NO: 105128 - DNA, 201 bp, Homo sapiens
cttctcttggctacagtagattctgctcccagtcccagggatctggttttgactccctgtctcacaaagctaattaatagttaaattctgctccttcttayataatatctcctgcttctgttttctgttttccctgcctctccagcgtcttttctctcctaagctattctaaactgaactctctgcttttctatcctccat

SEQ ID NO: 105129 - DNA, 201 bp, Homo sapiens
gtttcgtgtttgtttgcattacttcaggggaagcaaattcttaaagaactggagtaaagttctagcaagggaataaggccaggaagaaaaaacagaaggcwgaaataaataaaagcagaagttctgacccttagtgacgaaacagaatcagttacccagttacctgttgctcttcctttctctccagcccctccacccttg

SEQ ID NO: 105130 - DNA, 201 bp, Homo sapiens
atctcttccttcaggcagcttaacactccttggtaatttctagaggatgggcagcacaaagaaaagttctactctagtttttgtgggtttctttttgccaygtgctaatggttccgttaaaggtttgtttaacttctttgctgaaagaagtttacgaactccttggcaagaatctgatttctggtttcttctgctctactg

SEQ ID NO: 105131 - DNA, 201 bp, Homo sapiens
tcctgactcccagcacacttgccaggtgagaaaagtaccttaccccaaacctattcttggccaggtaattccaccccccgccccagggctagaggattackcaatatggtggaagaaggtgcctcactcatcatgcagtcaattaggaatcaagaggtcgagacctgcccaagcccaggaggcagttgttgctacgctggg

SEQ ID NO: 105132 - DNA, 201 bp, Homo sapiens
ggttattaatcccttgtcagatgaataatttgcgaatattttttccccttctgtaggctatctctttactctgttcattgtttcctttgctgtgcagaagyttttttgcttgatgtaatcccatttgtctgtttttgcttttattgcttgtgcttttatggtcttacccaaaaaaaaaatttgtccaagccaatgtcctgt

SEQ ID NO: 105133 - DNA, 201 bp, Homo sapiens
ccttttctgctgtgttcctgtgtatttttcttagttttcatctatctggctgtttgggtagaggtgggggtttccctcccttactggtagggaagaaaggratgaacttcagtacttcagtacttcagtagttgggcatggtggtgcacgcctgtaatcccagctactcgggaggctgaggcaggagaattgcttgaaccc

SEQ ID NO: 105134 - DNA, 201 bp, Homo sapiens
gatggcaacaacgactgtggaccttgacaactcggtttattgaggccagggcttctgggaagtctccccagcctcagctgctgagtaacaaggagaaagcygaggccaggaagctctgggagtacaagaactccgtcatctctcaggtcagaaactctccaattccaggggttaactctgtaaccaagcactctttgggaa

SEQ ID NO: 105135 - DNA, 201 bp, Homo sapiens
tccctccctctcctgtggaagcctctctcttatcttgtagacccaggggcagggaggtgacataggtggctctgagaatcagaagcaatctcatcagacargtggctctgtcattaggagagtttggccttcatcgtctgcattcttaccagtgtagtggtgacatttgagaacctgtagtcaccttctctccaaagttag

SEQ ID NO: 105136 - DNA, 201 bp, Homo sapiens
ctggattgggatatgtccagtcagtttcttaaaactgcatagaatagatatactcagggaatgttagaatttttagaaaagacatgtatgcactgcggggrtctaactcacagaccctgacccagcaacaaatgaataacatacactgacacagatagtatgcctgtcagtccagctgagcatctgcgccacttacagact

SEQ ID NO: 105137 - DNA, 201 bp, Homo sapiens
atgatgatgctgcttgggtttatctacaatgagggctttttcttaaaagctctgtggcttcgaagctcttactgcatttatccccaccatgcccctctgtrgtcagacagggctgagggtggctttatccctcctcactttaaaaatgattagatactgtggggtaggaggccagagcccatgccggctctggacccctat

SEQ ID NO: 105138 - DNA, 201 bp, Homo sapiens
atgcactgcgggggtctaactcacagaccctgacccagcaacaaatgaataacatacactgacacagatagtatgcctgtcagtccagctgagcatctgcrccacttacagactccaaggagagtgctgtaaagagttgcagccgaggccctgactcactggccctgccggcatttattcagcacacattcaatgacaaag

SEQ ID NO: 105139 - DNA, 201 bp, Homo sapiens
gtatatacccagtaatgggattgctgggtcaaatggtaattctgttgtcagctttttgaagaatccctacactagcttccacaatggttgaaccaatttaygctcccaccaagagtgtgtaaacattcccttttctctgcaaaggttctatttcatgaaaacaaataagcaggctcctatatatgtgtacatatgtttgta

SEQ ID NO: 105140 - DNA, 201 bp, Homo sapiens
tcaggatgggtgtggatgcaggaattgaagatagtagcttgggatcatctcagcctggaaatccaaggtgtcccagattcccaaaactgggaaatgcagcwtaggatgtggcaagccagcctcccctggggcaacagcaagcttgagaggtccacaggactgcttgttcagtaagcacatatcccttacagaaagcagttt

SEQ ID NO: 105141 - DNA, 201 bp, Homo sapiens
caggcagggttcagtctggaatttgggtgctgtggggcagattctcatagatgatctttaaacgtttagttgttcaacaactattttatgggaagggatgractcatgttgtatcaagaaaaactgtatgcaacttcaaaataggaaatttactacacaaatttattatgtagattttccaagtcagacaactacttggag

SEQ ID NO: 105142 - DNA, 201 bp, Homo sapiens
ttaataatctctgaaattattccaaatggaacattacacttggcagtaaaattttccaattctaattttcagagtagaaatactctttttgcagatgtcartatattcaaaatctctaaattaatttgcacatcacgtccctggatttttgacatcatagtcacagaaggccagtacagtgcattgagtgtaatacaatgt

SEQ ID NO: 105143 - DNA, 201 bp, Homo sapiens
aaagcagttttcagtgggtcacatccaccaccaccttcaatatggcaaagtctactgtagggcagagtccttgcctggggcaattggaggcaggccccatycttccagtgcacagatggctgccttctgctgatggactgctcctggtccaatcagctgtggcaagaacagccgggctgcttttaatcgaagcacctgatg

SEQ ID NO: 105144 - DNA, 201 bp, Homo sapiens
ataaagtggtgtttttgcctcccacctgcactgttagaaatagttcacattcaactgagcacaacatgactaccaccatggcctgaggcattctttatackgccaaatacattctgtggttacagtgtctccttttaaacattactcctggttcttccaaattctattttagaatgtagtaaatgactattttcctttctt

SEQ ID NO: 105145 - DNA, 201 bp, Homo sapiens
tgcctgagtctggtcctcatgttgaaggcctttgcttcttaactagcattcggtgtgggtctctgggcctgtcagctactgtgtgtggaatatcttctacrctttcttctttgcccaacattttactgtgaacatgtttttatctccattcctggaaccacctgaaaataagatggggcaacatagtgtctcaggaaggaa

SEQ ID NO: 105146 - DNA, 201 bp, Homo sapiens
ggcaggccccatccttccagtgcacagatggctgccttctgctgatggactgctcctggtccaatcagctgtggcaagaacagccgggctgcttttaatcraagcacctgatgtgaatcattaactattcaggaaagaagcactgctgggcctcttttactgaaaagggggccaagtacttgattggccctttgagcctgt

SEQ ID NO: 105147 - DNA, 201 bp, Homo sapiens
tgaatattttaagcaaggtacctccataagaagtttcccagccttgacgattacatctagaagaaaaagcacaatgagagggtgaatacactagtggctcrgtaatgctggtaaaggaatggacgtaaagtgctatcagaattggacttagtcagggagattgagccaattttcagatcatgtaatgtggatttgatatga

SEQ ID NO: 105148 - DNA, 201 bp, Homo sapiens
tggtccgttcggtttgggtaagaacttccaatgcctagcaccaaccttctgcagaggcttgttagaagtaacccacccttaggaacgtacatgtttgtgtraggatctgtgtgagattcaggtattaatatcttccgtcctcttgtcagaaagcaactatgttaaatgtggccaaagagatggaggctgaaattgtggtaa

SEQ ID NO: 105149 - DNA, 201 bp, Homo sapiens
cttcttttattcttaaattaaaaatacactcaagcccatacatgctaaattagcagaagatttatcagttcctcttgggattcctcatcccttctccccarattctccaataacacccaaagacttacactgcccaaagcgcaatatttggaggggcgatgagcttcacatccatgccttagaagggagagcctgctatgg

SEQ ID NO: 105150 - DNA, 201 bp, Homo sapiens
agcatgatatccgggttagatcatcatttatttacacatcttctttagacctgagtgtcttagaaagggatggtcttatgttcttgcaaatattcaatctrtagggaggcttccaacttgaaggtaagtgagtagaatgtcccctgggatggctgttaccattttgttttttatgattagaccaataaaagctttcagcct

SEQ ID NO: 105151 - DNA, 201 bp, Homo sapiens
atgcagtcctgctagcgttcttgtgctggtccttgaccagtttgctgttagatccatcccttgctttttgtacggcagaagggctgactcctgcaggtccrgttcccaagctggccccctcctggttttgaacagtaggaaatcctggtaacattggaggacaggagaaagggagaggccagaaaatttctctctctctct

SEQ ID NO: 105152 - DNA, 201 bp, Homo sapiens
gatgtttttaaaagcatacaactcctttgtttaagtctggactaagtgttcattgtgcatatatagcccagaataatgtttctcaaactttagaactcacrtatctcagtgacaaaatccttgggctcaagtttggtaaatattgaattaaaagttaaactctgtcattctagatgattacttgacatttagatgattata

SEQ ID NO: 105153 - DNA, 201 bp, Homo sapiens
acagctggaagctgctcaggtgttgtccttgaagtattgcagaactttctagtaatactgcccatatccccagcattggattcttttttttttttttttgstcttgaaatttaaaaagaaaaagagaaagaattgcagaacttagtagcaaatacagaagaatgtttgtcatctatggatcaagcaatattcaagtgaaaa

SEQ ID NO: 105154 - DNA, 201 bp, Homo sapiens
tattccagtgctctggctcatggtgggaagaacaattctgacttcaagatgcaaaacggccttcccacaatctgattctgttattctctctagggcaaacrtttgtttttttgttaatttttggtaagaatctgaaatattaagaaactttgagatttttctaactttattttcatggacagcttagataacatgtaagct

SEQ ID NO: 105155 - DNA, 201 bp, Homo sapiens
tgatgtgcagtggccgctcacctttctgacatgcttacagggccgccggatgattgacttgataaacatgttgcctcgggttttttgttttgttttgtttkattaaattcctggtagctaacctaaatatcctgaggttgtgatgccaccaaaatacatgacagctttgaatgagctgttctgaaatctagggccatcact

SEQ ID NO: 105156 - DNA, 201 bp, Homo sapiens
caattctcctgcctcagccttccaagtagctgagattacaggcacccaccaccacactcagctaatttttgtatttaattagagacggggtttcaccatgktggtcaggctggtctcgaactcctgacctcagatgatccgcccgccttgggacagttaagcttttatagcaactgtacatttatgatagggtgcagggaa

SEQ ID NO: 105157 - DNA, 201 bp, Homo sapiens
tgccagttacacaagtgtgttttatattgtgaagattcatcattataccgctaggacttacacttttcaatatgtgtgctatacctcaacagtttaccttaaaaaaaaaaaagttataaaagacgaggcaaaagttgcagccttaggctgaacagctggggttagtcagtttttcgcaggttgcaattctgtccgttctcg

SEQ ID NO: 105158 - DNA, 201 bp, Homo sapiens
tcattgtcctctctgtcttgcttttgtcattatttactccagtgctctgtccttaccctgggttcttctgagcccagctgcagagagaccagtaaagaccratccaatggctgctgctatgaaggaagcaaatagtcattaacagatacatacatgtcaatactgtgtttttcaaaataaccattctcttatgcagagaga

SEQ ID NO: 105159 - DNA, 201 bp, Homo sapiens
tgcagagaaagttatttccacactatttcctagcacacagaaatagcatttcttcttaaattcacatttttcccctcataacgctcagatcagtgtttcawgaagttgtttgaagaaacgtcaaagcagaaaatcgatgttactctcttctaaccatttaaacctagaaaatgtgttgtttaaagaaataattccttctgt

SEQ ID NO: 105160 - DNA, 201 bp, Homo sapiens
tccacatggtcacccctaccaaaaggaaagacacttccctgctttgaataatgtgcccagactaatgtgggtgttgatgttaccatcttaatcccttctcrtgactcagccccccagtatccacatattatgacctgcgtggtctttttaagataaaaactcatgtttaataccactgtacaggtggaaattaagttatag

SEQ ID NO: 105161 - DNA, 201 bp, Homo sapiens
agaagtgagtgggtcacgacagccctgtcctaataaatggattaatgttattattgtgggaatgagctcccaataaaaggatgagttcagccaaattctckgtgtgtgtgtgtcatacggtcacttgctgttctacttactgccatgggataatgcagcacagaggcccttgcagatgttggcaccatgctcttggacttc

SEQ ID NO: 105162 - DNA, 201 bp, Homo sapiens
ttttcccagataactgtttttcattatttctgctatgtttattagaaagaggtgggacaggccaggcatggtggctcatgcctgtaatcccagcactttgrgaggccgaagtgggcagatcacctgaggtcgggaggtcaagaccagcctgaccaacatggagaaaccccatctctactaaaaatacaaaattagccaggc

SEQ ID NO: 105163 - DNA, 201 bp, Homo sapiens
ggaagaaagggatgaacttcagtacttcagtacttcagtagttgggcatggtggtgcacgcctgtaatcccagctactcgggaggctgaggcaggagaatygcttgaacccaggagacactccaatctgggcaacagagtgagacattgtcttggaaaaaaaaaaaaagaaagggatgaacttcaggaagaaatggggagt

SEQ ID NO: 105164 - DNA, 201 bp, Homo sapiens
tgatgatggaactcttctggctcttggctgtgttaactgatggtggttacatgaaactacacatggttatgctaagttacacacacacacacacacacacmcacacacacatacacacacattagttattaaactgatggaatccaaataagctctgtggattgcattcatgtcaacttcctggttttgatattgtgatat

SEQ ID NO: 105165 - DNA, 201 bp, Homo sapiens
gataatttataatcacagagactcggaaccccagtgtcctctgatgggggaattgtgaaatgacttatgtcatatcaataagaaaggaatgtgccaccacmattaacctcatgtcttgaagaatacttaatatcagaaactgtttatgatataatgttaagtaaaaacacatgacacaaggccaggcacagtggctcacgc

SEQ ID NO: 105166 - DNA, 201 bp, Homo sapiens
tgtgatgatggaactcttctggctcttggctgtgttaactgatggtggttacatgaaactacacatggttatgctaagttacacacacacacacacacacmcacacacacacatacacacacattagttattaaactgatggaatccaaataagctctgtggattgcattcatgtcaacttcctggttttgatattgtgat

SEQ ID NO: 105167 - DNA, 201 bp, Homo sapiens
ccttgacctcctgggctcaagcagacctcgtgcctcagcctcccaagtagctgggactgtaagcacatgcccctacgcccggctaatttttgtattttttytttttatagagatggtgtctcactgtgttgcccaggctagtcctgagctcctgggctcaagcagtcctccctccttggcctcccaaagtgctgggattat

SEQ ID NO: 105168 - DNA, 201 bp, Homo sapiens
atcaccctctagaaataaacagccaccatcagcatcttagcgcagatcattgcagtggatatggtggctgggtgcagtggctcacgcttgtaatcccagcrctttggaaggcccaggcaggaggatcacttgagcccaagagttcaagaccagcttgggcaacatagggagaccccatctctacaaaaaattttaaaatta

SEQ ID NO: 105169 - DNA, 201 bp, Homo sapiens
ttaaatttttatttgcatatttgttttctatcctaattccctactgatcttactttaacaggtaaaatcctcttagattttctaggattctatgatcagcraataaggatgttttcttcttctaatagttatgccatggtgtctgattattttctttattatactttttagaaaaccctatgcagtgttaaagaatgctgg

SEQ ID NO: 105170 - DNA, 201 bp, Homo sapiens
gttgtttctgctgttctcactcatgatgcctagttctttgggggatggggtgcaaggggtgttttaactgaccttatatttcttgaaccattttttttttrtaggaactctttggaacctctctgctagaggtgattttgtgttagcttctccctgttgcctggagatgctaccaatccaagatcactttaaactgaattt

SEQ ID NO: 105171 - DNA, 201 bp, Homo sapiens
aatgcattgctattaactgtagtcaccaggatgcacagtagatctccagaacttattccaatggcatataattttttaaatttttatttgcatatttgttktctatcctaattccctactgatcttactttaacaggtaaaatcctcttagattttctaggattctatgatcagcaaataaggatgttttcttcttctaat

SEQ ID NO: 105172 - DNA, 201 bp, Homo sapiens
tttagtcatttgttgtttctgctgttctcactcatgatgcctagttctttgggggatggggtgcaaggggtgttttaactgaccttatatttcttgaaccmttttttttttataggaactctttggaacctctctgctagaggtgattttgtgttagcttctccctgttgcctggagatgctaccaatccaagatcacttt

SEQ ID NO: 105173 - DNA, 201 bp, Homo sapiens
tgtgccaggagttctttggaggaggtggcggaggatgttagagcgaagagacagcctcagagaagcagtgaggcagggtccagcctccaagagtcatctgractctggaatgaagaccgttagggggacctttgttccacctctgaggcactgggatacttatgaaagcatttggctgccctctagaaattgggcctcttg

SEQ ID NO: 105174 - DNA, 201 bp, Homo sapiens
ggctgggtaccgtggctcatgcctgtaatctcagcactttgggaggatgaagtgggaggatcacttgagcctaggagttcaagaccagcttaggcaatatygagaccccaatttctaccaaaaaaaagaaagaaagaaagaaagaaagaagcagaaggggcagtgccaaaaactgttccttttgtctagaaaacaaaaact

SEQ ID NO: 105175 - DNA, 201 bp, Homo sapiens
atgttagagcttccttcggaaaaacaaacagttctttaaggacctagatagaagctgtcttaaaagagaagtgtttttttgttttgttttgttttgttttktttttttaatggagtagccattcttttatccctttactttcctaataatcttgctttcgctttcttctacagactggcgctgaattctttcttgcgtgag

SEQ ID NO: 105176 - DNA, 201 bp, Homo sapiens
tacaggcgcccgccaccacgcccagctaattttttgtacttttagtagagacgtggtttcaccgtggtctcgatctcctgaccttgtgatccacccgcctyggcctcccaaaatgctgggattacaggcgtgagccaccgcacctggccctttgcccatttttaaaattcgatttttagtgtttcttttcacacacatgag

SEQ ID NO: 105177 - DNA, 201 bp, Homo sapiens
tccgaaagtgctgggattacaggcgtgagccaccagaccgggccttctttgcccatttttatttttattatttatttatttatttatttatttatttatttttgagacggagtctcgctctgtcacccaggctggagtgcagtggcgtgatctcagctcactgcaagctccgcctcccgggttcacgcctttctcctgcct

SEQ ID NO: 105178 - DNA, 201 bp, Homo sapiens
ctccgaaagtgctgggattacaggcgtgagccaccagaccgggccttctttgcccatttttatttttattatttatttatttatttatttatttatttatttttgagacggagtctcgctctgtcacccaggctggagtgcagtggcgtgatctcagctcactgcaagctccgcctcccgggttcacgcctttctcctgcc

SEQ ID NO: 105179 - DNA, 201 bp, Homo sapiens
cctccgaaagtgctgggattacaggcgtgagccaccagaccgggccttctttgcccatttttatttttattatttatttatttatttatttatttatttatttttgagacggagtctcgctctgtcacccaggctggagtgcagtggcgtgatctcagctcactgcaagctccgcctcccgggttcacgcctttctcctgc

SEQ ID NO: 105180 - DNA, 201 bp, Homo sapiens
gcctccgaaagtgctgggattacaggcgtgagccaccagaccgggccttctttgcccatttttatttttattatttatttatttatttatttatttatttatttttgagacggagtctcgctctgtcacccaggctggagtgcagtggcgtgatctcagctcactgcaagctccgcctcccgggttcacgcctttctcctg

SEQ ID NO: 105181 - DNA, 201 bp, Homo sapiens
ttctcattaccttcccatttcaacatttttgttgaaagataggctctcaatacaatggggaaactcaggacccaaattggtactttaggatcctgttattrctgctaaacctacgtcagaatgcagctatagagaatttaggaagagactccatttttagagatgttacatctatgtgattcaactattgcttctttgaat

SEQ ID NO: 105182 - DNA, 201 bp, Homo sapiens
agcctccgaaagtgctgggattacaggcgtgagccaccagaccgggccttctttgcccatttttatttttattatttatttatttatttatttatttattwatttttgagacggagtctcgctctgtcacccaggctggagtgcagtggcgtgatctcagctcactgcaagctccgcctcccgggttcacgcctttctcct

SEQ ID NO: 105183 - DNA, 201 bp, Homo sapiens
tgacaaaaataataggacccacttataaaagccatcctttccctatcatttaaatcttaatctcttttaaaggcttaaattcttatacttttatataattrtgaaaatttccctttcaatcagattcttgctcaattataacagaaactcccatcattccttctctcttttccacccccagatgatagaactcatttcatt

SEQ ID NO: 105184 - DNA, 201 bp, Homo sapiens
tgaggcaggcagatcacctgaggtcaggagtttgagaccagcctggccaacatggagaaaccccatctctactaaaaataccaaaaaaaaaaaaaaaaaaattttagccaggcatggtggtgggctcctgtaatcccagctactctggaggctgagacaggagaatcgcttgaacctgggaggcggaggttgcagtgagct

SEQ ID NO: 105185 - DNA, 201 bp, Homo sapiens
ctgaggcaggcagatcacctgaggtcaggagtttgagaccagcctggccaacatggagaaaccccatctctactaaaaataccaaaaaaaaaaaaaaaaaaattttagccaggcatggtggtgggctcctgtaatcccagctactctggaggctgagacaggagaatcgcttgaacctgggaggcggaggttgcagtgagc

SEQ ID NO: 105186 - DNA, 201 bp, Homo sapiens
gctgaggcaggcagatcacctgaggtcaggagtttgagaccagcctggccaacatggagaaaccccatctctactaaaaataccaaaaaaaaaaaaaaaaaaattttagccaggcatggtggtgggctcctgtaatcccagctactctggaggctgagacaggagaatcgcttgaacctgggaggcggaggttgcagtgag

SEQ ID NO: 105187 - DNA, 201 bp, Homo sapiens
aggcaggagaatcacttgaacccgggaggtggaggttgcagtgagccaagatcatgccactgcactccagcctgggcaacagagcaagactctgtctcaaraaaaaaaaagaaagaaagaaaacagttggagacatgcagtatacatagggacagctgtgagaaacccccagcactgtgaccattacatttagaaaaacta

SEQ ID NO: 105188 - DNA, 201 bp, Homo sapiens
ctggggtaatggtttggttttccatcaaactgtttcaagtagaattctttgatgttatgtgaagggaaaagcttctgtgctcaaaaaatctggaataaacaaaaaaaaacaggtatctttgctttggacttctcagaacctttgctgtgctaatgtgcactgtgactgtctgagagaggaagtcataggcactcttgtcac

SEQ ID NO: 105189 - DNA, 201 bp, Homo sapiens
taggcactcttgtcacacccagttgaccacggagccctgtttccatgcagtatccctagaaactagttatatggactgccgccttggtgaacaccaaatgwaagtcatttgtctgtttttccagagggtgtgagagacctgccttctttccagtgggtgccctgagggcaaaggacagatacctttttgtctggaatgttt

SEQ ID NO: 105190 - DNA, 201 bp, Homo sapiens
attccagcacttcgggaggccaaaatgataggattgtgtgagcccagtagttcgagaccagcctgggcaacatagggacatcctggctctacaaaaaattaaaaaaaaaaaaaaaattagctgggtttggtggtacatacctgcagttccagctactcaggaagctgaggtgggaggatcagggtgaaaccctatttctaa

SEQ ID NO: 105191 - DNA, 201 bp, Homo sapiens
ttccagcacttcgggaggccaaaatgataggattgtgtgagcccagtagttcgagaccagcctgggcaacatagggacatcctggctctacaaaaaattaaaaaaaaaaaaaaaattagctgggtttggtggtacatacctgcagttccagctactcaggaagctgaggtgggaggatcagggtgaaaccctatttctaaa

SEQ ID NO: 105192 - DNA, 201 bp, Homo sapiens
ttttattttttgaggcagggtctcactctgttgtccaggctggagtacagaggcacaatctgggcttattgcagccttgacctcctgggctcaagcagacytcgtgcctcagcctcccaagtagctgggactgtaagcacatgcccctacgcccggctaatttttgtattttttttttttatagagatggtgtctcactgt

SEQ ID NO: 105193 - DNA, 201 bp, Homo sapiens
agcttgcagtgagccgagatcacaccactgcactccagcctgggcgacagagcgagactccgtctcaaaaaaaaaaaaaagaaatcttatctttagggagrtacacctgagcaaggataaagttgtaattagtaaagaaatagcagtccctcatatctgcctagagaaggggatgtttgatattttgtgtgtttcacagtg

SEQ ID NO: 105194 - DNA, 201 bp, Homo sapiens
gttatggtggtagaaagaaaggaattggaattctaaaacctaacaggagagtttggagttcttcccagtgaatggacaatcttggccatagagaaatcaarggcaagaaagtgtaccatgtatctagaggtatttgatctgaacggtgcatgagacatgtacaaggctggcaagggaagcacctaacccagtgtatttcac

SEQ ID NO: 105195 - DNA, 201 bp, Homo sapiens
ggaagtttattttgtggatttccaagttatagctactggtactttttcttgattccatctctgagtagtattacatttattatttcaaaattatcattagkagtcttctgccaccctctgtgatgtcacattcctatctttccaaattgacatgatacatatttcaaagtgtattttcagtagatgtttttaaaaataaaa

SEQ ID NO: 105196 - DNA, 201 bp, Homo sapiens
gatgggctgggtgtggtggctcatgcctgtaatcccagcactttgggaggctgaggcaggcagatcacctgaggtcaggagtttgagaccagcctggccarcatggagaaaccccatctctactaaaaataccaaaaaaaaaaaaaaaaaaattttagccaggcatggtggtgggctcctgtaatcccagctactctggag

SEQ ID NO: 105197 - DNA, 201 bp, Homo sapiens
gttctgttccgttcagttccagcttgacggagggttcgtgcagactacacagtcttcagctcttggctttcatggttgcccctgacatcaaatccagcccrcagataagggggagagaggtggagtgtcacagtggctttggccaggtctggaaacagtgtacatcacttctgcccacttcctcttggccagaattcagtc

SEQ ID NO: 105198 - DNA, 201 bp, Homo sapiens
cactgcttgacgcccctgtaaatccagagacctggttactggttttgcttctgccacccaggagctgggcagctttgggtgagtttcctcatgtataaagyagtgctcaccatccctgcctctcagaccactgcgggaatggtctgagaggcaggcatggtgagtgcttctttatatgtgagaatgtataaagatgagagg

SEQ ID NO: 105199 - DNA, 201 bp, Homo sapiens
atctcactctggtatcagattcacttgaaatccactcacataagttttttgaaatggaatgtcttgaaatcaccatatttatcatttaaaaaataatttgyatttaatgagcatttaaccatgtgccaggcactgtctttcaattgattatctcatttaatcctgaaacaacccagcgggtaggtattattatcctcattt

SEQ ID NO: 105200 - DNA, 201 bp, Homo sapiens
attaaaaagtttgtgtttagctcaattgaattgctaaagtattcttttcagggaaagaaattattaaaagtaagaggaaagcacagggccagaacactggwctgtgccaaatggaaagataagctctggggagggtttgaggcagctcatagtgtgctttctgccctctttttcagggccttctcaccttctgaagaatgg

SEQ ID NO: 105201 - DNA, 201 bp, Homo sapiens
attttgaatcacaactggatatcctggtaggccccaacctatgagttgtatttcaaaaaatagcactcaccgtgaccacatgttatatatttttgtttctyatctgcctcccttattgtttgtttcttatctgcttccctgctagtatgtaagtgctacgaaagaagggactctgggccaggtgtggtggctcacgcctat

SEQ ID NO: 105202 - DNA, 201 bp, Homo sapiens
aggccaaatcctgatagaagtggaattttgagagaatcaaagaacatcagcttagagtgccgggtttctttatttctctctggttttgaaaagatctgttktcatctgttttttcactgtagcacttcttgaatgctgttatgccagaaggagaaagtttaggctatttagtctagtatttatatcttaaatatttgataa

SEQ ID NO: 105203 - DNA, 201 bp, Homo sapiens
ggtagtgcaactgatttaaagtaggaggggaaagagagaggaggaggagaaggcaattataaggacttcatgagttgagcaagattttaaacgtaaagacraaggaggtgaggaaagatgggaaaaactgaaatgtgttttcagtggatctacaggggagacagtttttaagtttctcacattttgaatctttaagggaga

SEQ ID NO: 105204 - DNA, 201 bp, Homo sapiens
atttttagtgtttcttttcacacacatgagctcaagagtagaaaccttttgtttttgcagttttgctgaacattttctcgtagctaattgcttgctttccmattctgttcttaatggttttgatatacagattttttagcatcagatttattaacattttcctttgtgaattttttcattgtttttatactcaggacagaa

SEQ ID NO: 105205 - DNA, 201 bp, Homo sapiens
ccgggaagcggagcttgcagtgagccgagattgcgccactgcagtccgcagtccggcctgggcgacagagcgagactcgtctcaaaaaaaaaaaaaaaaaagaaaagccgtttgtattgttagaatgccttgatgaaattcttgcaagctggcaaagagcaatttccaagaaattaagagaattgttgcttcttgtctgat

SEQ ID NO: 105206 - DNA, 201 bp, Homo sapiens
tttgggaggccgaggcgggtggatcatgaggtcaggagatcgagaccatcctggctaacaaggtgaaaccccgtctctactaaaaatacaaaaaattagcygggcgcggtggcgggcgcctgtagtcccagctactcgggaggctgaggcaagagaatggcgtgaacccgggaagcggagcttgcagtgagccgagattgc

SEQ ID NO: 105207 - DNA, 201 bp, Homo sapiens
gcatgtgtggtttcaaaaatccctcacctctggtgagattctgatctgtgctttcctaacccttctcttaaaaatcactggactctcaaaatgattttctrtgatttttccaagtttagagttttatttcttgtccgtgtcacgtatgaaatatttcaggtcatggcatgtttctactactcattgtttatagaatttgca

SEQ ID NO: 105208 - DNA, 201 bp, Homo sapiens
tttcctcttcctctggatccatgcctgtgtctaacaaatagtccttatattattcaggaaacctagagaactggcatcacaaaaacatcttccagatgatkctgtcctgttgatcctgaaattttaaaggatgttgtagattaaattaatgttctttctttcaaaaaaaaaaaaacaaaaacagggaacatttgtagtttg

SEQ ID NO: 105209 - DNA, 201 bp, Homo sapiens
taaactaagcatctggtgttcggagtgggacctggttggaaccctgtctccatcatcaactacatatgtgaccttaggtaagctgtgtccaacctttggamctcagtgtccttgtctttgaagaggattggactagaagttctaagctctttatgatcttccattctgcaacttgagaagggcactattctgccagaatgg

SEQ ID NO: 105210 - DNA, 201 bp, Homo sapiens
ttctttctctcctctctcttctttctttttcttttctctgtactcattggcatttctgggttaccagttttgttagctgcaattctggggcttaccgggcmtttaaaaagtcaacaggacttaccattgtcattccttaggtactcatgtccctaacctgacttctcttcttcactgtttagagtcttatgtttcattcat

SEQ ID NO: 105211 - DNA, 201 bp, Homo sapiens
caacttgtctgcttcatttaataatgtattcaagcaagccctttaagagtgaaaaggatttactttcatgctactgccttctttgaagtaaaaatagcaastttccagtaaagtaagtgacttttagaaaaattctatttgaaataatcttctagaaatgtcaatgttaaatgtaattcacgataggcaagacagattttc

SEQ ID NO: 105212 - DNA, 201 bp, Homo sapiens
caggagaatcgcttgaacctgggaggtggaggttgcagtaagccgagatcacgccactgcactccagcctgggtgaaagtgcaagactctgtctcaaaaaraaaaaaacaaaaaaaaaaactgacatgacatgagcatttggaaagcctatacattatgtgtgtgtgtgtgtatatatatatgtgaaactgaaagaaactc

SEQ ID NO: 105213 - DNA, 201 bp, Homo sapiens
tcctggacttacaagggggttatcctaaattgaataagactgtcctaaattgaaaatattgtaggcatataatacatctaaccatcatagcttcacctaamctaccttaaatgtgctcaggacacttacattaacgtacagttgggcaaaatcatctgacaacacagtctcttgcagagtatcggttgtttaccctcatga

SEQ ID NO: 105214 - DNA, 201 bp, Homo sapiens
gtggtggcgtgtgcctgtagtcccagctactcgggaggctgatgcaggagaatcgcttgaacctgggaggtggaggttgcagtaagccgagatcacgccaytgcactccagcctgggtgaaagtgcaagactctgtctcaaaaaaaaaaaaacaaaaaaaaaaactgacatgacatgagcatttggaaagcctatacatta

SEQ ID NO: 105215 - DNA, 201 bp, Homo sapiens
tagagtgataactagcctagtcctgcacaggaatatcaacgataaatgacttaaaagttgttagattgttttcctaatcatcacagaggattagaacatayagaaaagtataaagagcataatgtggctaatttaatattttggtatggttccttgcagtcttttattttggaattataaacatttatataatttacaaag

SEQ ID NO: 105216 - DNA, 201 bp, Homo sapiens
cagaaatatagaggtgtgaagtgggaaatcaggggtctcacagccttcagagctgagagccccgaacagagatttacccacatatttattaacagaaaggsagtcattagcattgcttctatagatattaaattaactaaaagtatcccttatgggaaaggaagggatgggccaaattaaaggaataggttgggctagtta

SEQ ID NO: 105217 - DNA, 201 bp, Homo sapiens
aggaaggacttgatggcagggagcactcttcttcctctttgagttgggagaaggcaagggtgggaggcaggaagcaggagggaaggattagcactcttcaraaagtatcctgagtggataatttgcttggaaacaagtaattttctgtgggattaaactgagagttaacttcctatttaactttggagttggctatgattt

SEQ ID NO: 105218 - DNA, 201 bp, Homo sapiens
acgcctgttatcccagctactcaggaggctgagatatgagaatcacttgaacccgggaggctgaagttgtagtgagccgagatcgtgccactgcactctawcctgggcaacagagcaagactctgtctcaaaacaaaaacaaaaacaaaaactaagcagaggaaaaagacttaaaggaagtaataccaatatggtaaacta

SEQ ID NO: 105219 - DNA, 201 bp, Homo sapiens
gcacgagaattgcttgaacctgggaggcggaggctgcagtgagccaagatcgtgccactgcactccagcttgggtgacagaacaagactctgtctaaaaaytaaaaaaaaaagcaaagaaaagaaaaagaaattgagtttaatcccttgaaacaaacagataaaagtttatattcttcaaaggaaatgttctccagttcat

SEQ ID NO: 105220 - DNA, 201 bp, Homo sapiens
tgatagatagaaaaatattacttttaaaacttttgaaatgcagacagaaacccattttcattacaatgaagcacattgaaagctccttcccttcacttaascctcggaccagatggccgactctgcacatgcatgcatggattaaaagaagtctactgtacagaaaattaatttagggtctaaattaaatgcttaaaataa

SEQ ID NO: 105221 - DNA, 201 bp, Homo sapiens
tcctcataaaaatgaataacccttcatttaatcatcccttgtttcagaactacattttgaaaatatactaggtatattgtactttgctcgttgctactgawaataagaagtatctgacctacaaatcttgccagtagagtttgttgttaagacttgtacatatgatacgaggaacaatgcaactcagatgaaaatccaatt

SEQ ID NO: 105222 - DNA, 201 bp, Homo sapiens
aaattagccaggcatggtagcgcacgcctgttatcccagctactcaggaggctgagatatgagaatcacttgaacccgggaggctgaagttgtagtgagcygagatcgtgccactgcactctatcctgggcaacagagcaagactctgtctcaaaacaaaaacaaaaacaaaaactaagcagaggaaaaagacttaaagga

SEQ ID NO: 105223 - DNA, 201 bp, Homo sapiens
aaatacaaaaattagccaggcatggtagcgcacgcctgttatcccagctactcaggaggctgagatatgagaatcacttgaacccgggaggctgaagttgyagtgagccgagatcgtgccactgcactctatcctgggcaacagagcaagactctgtctcaaaacaaaaacaaaaacaaaaactaagcagaggaaaaagac

SEQ ID NO: 105224 - DNA, 201 bp, Homo sapiens
cctcagtcttcttacttttttttcctcttccttagcaagcctctcagagcgtcattctccacagccccgagtttgaggatgctttgtgtgccctgatggtratggctgctccactggcccctcatgtaacctcagagatctgggcaggtacgtggcagagtccttttttgaccagttactactaactagaatttgtcgaag

SEQ ID NO: 105225 - DNA, 201 bp, Homo sapiens
ggccgatgcgggcggatcacgaggtcaggagatcgagaccatcctggctgacatggtgaaaccctgtctctactaaaaataaaaaaaattagctgggtgtrgtggcgtgtgcctgtagtcccagctactcgggaggctgatgcaggagaatcgcttgaacctgggaggtggaggttgcagtaagccgagatcacgccactg

SEQ ID NO: 105226 - DNA, 201 bp, Homo sapiens
tactggctaccatattggacagcacagctccataaatgaaaaatactggccgggcacagtggctcacgcctgtaatcccagcactttaggaggccgatgcrggcggatcacgaggtcaggagatcgagaccatcctggctgacatggtgaaaccctgtctctactaaaaataaaaaaaattagctgggtgtggtggcgtgt

SEQ ID NO: 105227 - DNA, 201 bp, Homo sapiens
ctcatcaatacaatgagcaggttggaccaagcagtctttaaggtgccttctagctctttccgtgttcagagattcaaggcaaaaccaatcattgaaagcargggcttgcttattaagtcaccaagagcctggacaaaaaatcggttctgtaggtactggaaccactctgtgcaatttgccctttgagcttaccaagtttca

SEQ ID NO: 105228 - DNA, 201 bp, Homo sapiens
ggtaacctccagttccattcattttattgttttttatggctgaataatattccatagtgtgtatataccacattttttaaatccattaatccactgatggwcacttgggttgattgatatcttggctattgtgaatagtgccacaataagcatagaagtgcagatatctcttcggtaatcctgatttcaattcctttggat

SEQ ID NO: 105229 - DNA, 201 bp, Homo sapiens
atggggttggagggtccattatacatggacctggctgttggcagttggcttcatttcttcagcatatagccttttctataggctaatgatgtggcttaccyccagggtaagtgatgcaagacacacacagtgagaatgacctagatagaagatgcaatatctcttataacctaatctagaaagtgagatactattacttct

SEQ ID NO: 105230 - DNA, 201 bp, Homo sapiens
gcggcggggcaccagggctcatcttgaccaagcttctgagctcatgaccgttggtgggtggcactttgagtggccctgccatccagtgctctgaatctggscactaaaatgagatagaattggtcctggtctgaattctcagacactgaaggccagggaggatccttcagcctgccctcagaggaatccatcagggtgcag

SEQ ID NO: 105231 - DNA, 201 bp, Homo sapiens
gcacgcctgtaatcccagctactcgggaggctgaggcaggagaattgcttgaacccaggagacactccaatctgggcaacagagtgagacattgtcttggraaaaaaaaaaaagaaagggatgaacttcaggaagaaatggggagtgggcctttcaggagagtattgcctcaatcaggggagagagagagagatagaagaa

SEQ ID NO: 105232 - DNA, 201 bp, Homo sapiens
taatatggcttaaatgcttgcagaatattgacgtctggacgggccagcagtgcacatctcaaaggggttgcctatttgaatggccaggggaaggggcagtyctcaaggccaaagaccattgtggtttctagtggattctgtatatgtccaaataatgggtgtcttctaatctgttggtattttttgctgattcttagtggt

SEQ ID NO: 105233 - DNA, 201 bp, Homo sapiens
agaaatatatggccactttattctgggtgtggttttctccaaggcggaacacactcgcaatcccacccaagcctcaggcttctactacacgtgggccagcrgtgctcattcctctccctcctgctaaagtcctgagggcctcaccctagaacttggcagaatcctctggggccactgcatcagctcatttcacaaaggcct

SEQ ID NO: 105234 - DNA, 201 bp, Homo sapiens
gcctgggtgaaagtgcaagactctgtctcaaaaaaaaaaaaacaaaaaaaaaaactgacatgacatgagcatttggaaagcctatacattatgtgtgtgtrtgtgtatatatatatgtgaaactgaaagaaactctttataatttcagaaaaacaatttgggttcaatatagagactatagaaaagaagaaaataaaaagt

SEQ ID NO: 105235 - DNA, 201 bp, Homo sapiens
agcggtactggggcacaccaatccccattgtccactgcccagtctgtggccccacacctgtgcccctggaggacttgcctgtgaccctgcccaacatcgcrtctttcactggcaagggaggccccccactggccatggcttcagagtgggtgaactgctcctgcccaaggtaaggagccacatccctgcagtggtgactgt

SEQ ID NO: 105236 - DNA, 201 bp, Homo sapiens; identical to SEQ ID NO: 16824

SEQ ID NO: 105237 - DNA, 201 bp, Homo sapiens
aacattgttgtctccctccctgcacgccactctttagccctttcctcgacttttaggtttctttttatttctgccaggaaaatattttgcctatccccacrtgtgtttttattgatatagtcattttaaatgttgcttatattgcatacatgtcctttgcttctttgacctaataatgtagcttggtggtctttccatatc

SEQ ID NO: 105238 - DNA, 201 bp, Homo sapiens
aatgagcaaggaggcgaaaacgctacataaaaaccagggtcctgagtttctgttcctcactgctgaacaggatggccccactcccatctatatggaaatgytggcaggggcccaggctactataaataagcatcctgactgctccaggaaggctgggcttcctcattttttttaaagtggaatttgtaacagcttctgccc

SEQ ID NO: 105239 - DNA, 201 bp, Homo sapiens
gacagggggagcatgattggcacctactcaccctgaagggactgccttggtaaggcaactcaggggaggcctggggagccagaaccgtgtgagggtgcccraggcagcaagggaaagactcagagcacgatggccacattcagagatcacatgccctgcccccaaagccccagctgtggacaagaatgactcaggtccctt

SEQ ID NO: 105240 - DNA, 201 bp, Homo sapiens
tgggtggttggtgatggtgctggtagggaggggagagcctggagcagccagggaaaggccagtcctgtaggcagaggcctcagatccaagggtgggcccartgacctcactccaggcctccagtgccctccctcagcctgtccacatgaggggctggaggcagctgtgcagagataatgaggccctggaggggaggtggtg

SEQ ID NO: 105241 - DNA, 201 bp, Homo sapiens
aaaaagcactcaaaaatgtatatattaggattgtaactattaaaaaaaaataggctggacacagtggctcacacctgtaatcccagcactttgggagggtraggtgggcgatcacttgaggtcaggagtttgagaccagtctggtcaacatggcgaaaccccttttctactaaaaatacaaaaattagccaggcatggtag

SEQ ID NO: 105242 - DNA, 201 bp, Homo sapiens
ggcttcccaccggctcctcacacagctccaagccaggctgtgttgggatggaagctttggtcctgctctcataagcctccctgttcttagagtgaccccaygcttctgtgcctcggcattgcaggcctggcgctggtgccgaggaagctctgtgcccactacacttgggatgccagtgtgctgctccaggcatggcctgct

SEQ ID NO: 105243 - DNA, 201 bp, Homo sapiens
ggcgcctgccaccatgcccggctaatttttgtatttttagtagagacggggtttcacctgcattgtttacccctgctcttggggacagttcccaagcaacygagtatttctgagaatcatgtgcagacaatagccagtcagcgtgtgttgcaggaaggcagcacattagcgataggaaatgcagtaagtacagaatgggca

SEQ ID NO: 105244 - DNA, 201 bp, Homo sapiens
caagcagatagatagggcattaggccagcagatgttagttactagaaaacattttcaccaaagaacaatagaattctgatcaaaaaaccaaatgtccaaartgggacctattcttaagaaaataagataaatgcaacagtaaaatcttcagtgaaatcctggagttcaattcagcatgaacgtagttcccagccaagggtg

SEQ ID NO: 105245 - DNA, 201 bp, Homo sapiens
acacacagaaatatagaggtgtgaagtgggaaatcaggggtctcacagccttcagagctgagagccccgaacagagatttacccacatatttattaacagmaagggagtcattagcattgcttctatagatattaaattaactaaaagtatcccttatgggaaaggaagggatgggccaaattaaaggaataggttgggct

SEQ ID NO: 105246 - DNA, 201 bp, Homo sapiens
aggcaagagcatcatagtgtggcctagaactgtccaggatgatagccactagccacatgtggttgcttaaatttaaagtaattaaaattaaatagtatttwaaaagtcagagctgggacagtggctcacacctgtaatctcagcactttgggagattgatgcaggaggattgcttgatgccaggagttcaagactagcctg

SEQ ID NO: 105247 - DNA, 201 bp, Homo sapiens
accttgaaaaaaatcagtaccctaaaatatatattttactagccttctggaacctgaagctgacagtatattcagaaaaggtctttgatagtttaaaaaaraaagaaagaaaagaaaagcagagcttgaggggagagaggcggggaaaacaatggagagtagccaagggccagaggagtgatatgctggccaagagacaaa

SEQ ID NO: 105248 - DNA, 201 bp, Homo sapiens
ttttccatttttcgtcagagtgtatctcagcgtcaatttgtttgctttaattttgcctggtgctcagtgaccacttttgattaacagttgtaggtctttcmttgtgacagtttcataggagccctttctcaagaacactgtccgtatactcatttcattgtcttccattgtcatcaccatctctctcatgattttggtctc

SEQ ID NO: 105249 - DNA, 201 bp, Homo sapiens
ctagtgtatcaatttggagctttatcagccagagggagtggagtagaagctgccctgtaaggctgttgttcactgaaacaaactcagaacgtgacctcacrctcgtccctgcaagccatgtgggctaagagagatttagagtgtggttatctgcagagctgcggaagagtttgtttgtgaatggaagtggtcagcagcaca

SEQ ID NO: 105250 - DNA, 201 bp, Homo sapiens
ttagtggaaaggctttcaattttttcccattcagtgtggtattagctataggcttgtcatatatggcctttatcatgttgaggtgtgttcctactataccygatttgttgaggtattttttttttttatcatgaaggatgttgaattttattgaatgcttttttagcatctatggaaattatgtgttttggtccttgattt

SEQ ID NO: 105251 - DNA, 201 bp, Homo sapiens
ggttttgtttatcagcactcatattaggaatgggagttatattttacttaatgcctattgtccagttgttgaggtgatgtattatttgcttttaattttcycttttgccctttagatatgatttatgttcagttaattgattgcctaatattgagatatcctcagataaattcatattgaccatgtcatggtagacttaat

SEQ ID NO: 105252 - DNA, 201 bp, Homo sapiens
ggaggtggaggttacagtgagccgagattgcaccattgcactccagcctgggcaacagagcaagactccatctcaaaaaaaaaaaaaatatatatatatakagagagagagagagggagagagagagagagagagagagagagaggctattttagaaattagtgtaaatgatgtatagggcttagtccaaagccttacttt

SEQ ID NO: 105253 - DNA, 201 bp, Homo sapiens
agcatgatctacctccagggatgtaccgaaggagtaggaagaaagctgactcagaaatccagggccttcttcaaggcagaggccctgcctaatactcccgygtttgatggtccctgagtcagaacggtttgttagtggtttagagttgcagattttccactcacttataaaggcccctgctgtgcacagtcactatgatga

SEQ ID NO: 105254 - DNA, 201 bp, Homo sapiens
tcaattttttcccattcagtgtggtattagctataggcttgtcatatatggcctttatcatgttgaggtgtgttcctactatacctgatttgttgaggtattttttttttttatcatgaaggatgttgaattttattgaatgcttttttagcatctatggaaattatgtgttttggtccttgattttgtcgtatgacatga

SEQ ID NO: 105255 - DNA, 201 bp, Homo sapiens
agctcccatgagaagggcaggccgcctgctgaccgtggagagcacagcaagcccctatccacagagctttcttctctgttactctgatcatgccagaaacrgggctactgggaaaaggaacaggaagggaagagaagctttacttgggtcctgctgtattagtaaaccctccttctgcgccactaactggctgctaggaaa

SEQ ID NO: 105256 - DNA, 201 bp, Homo sapiens
ttattttctcttttaagctgcacaataggaatgccaaggctagtttctctgcctttgagctgtattatgcttttagaatccctccactttagaattaaagkacctgggaaggcataaaagacaaagccatcactaaacatgtttccttttgatctgttgcaaatgacaaaagtgcacattacaaaagatcaaaaagcatgt

SEQ ID NO: 105257 - DNA, 201 bp, Homo sapiens
gaggtgtgttcctactatacctgatttgttgaggtattttttttttttatcatgaaggatgttgaattttattgaatgcttttttagcatctatggaaatyatgtgttttggtccttgattttgtcgtatgacatgatatttattgatttctatatgttgaaccatccttgcatccctgggatgaatccctgttgatcatg

SEQ ID NO: 105258 - DNA, 201 bp, Homo sapiens
tgcccaaggtaaggagccacatccctgcagtggtgactgtgcctatggccccatacctgctagggcttcagacagcctcctccctcctggtgctaactctsctccctttttccctgacttccatgaggctggaaagaacactgtgggtctttggggccctttaagagaagggtctggaatctgtggccctgcctctgcaat

SEQ ID NO: 105259 - DNA, 201 bp, Homo sapiens
gggcagatcacaagatcaagagattgagaccatcctggctaacatggtgaaaccccgtttctactaaaaacacaaaaaattagcctggcatggtggcacgygcctgtaatcccagctactcgggaggctgaagcaggagaatcgcttgaacctgggaggcagaggttgcagtgagctgagatcgcgccactgcactccaac

SEQ ID NO: 105260 - DNA, 201 bp, Homo sapiens
cctggcctactctgaagtcattgaaactttgccagatggcacagagagactgagcagctctgctgaggttggtgactaagaacttacttccagaatgatcrccttgatacgactttgatagacattttccttcaggtgcaaattacaacctgttccttcactcgtccccatacctaacagccttgtggcctcatatctatc

SEQ ID NO: 105261 - DNA, 201 bp, Homo sapiens
tcaaaaagcaaagtaaggggctgggggcagtggctcatgcctgtaatcctggcactttgggagggagaaggatagctcgcagccaggagttcgagattacrgtgaactgatcgtggcgccactgcacttcagcctcggcaaccaaacaagaccctgtctcttaaaaaaaaaaaaggcagcaaaataaaacttaccccaggt

SEQ ID NO: 105262 - DNA, 201 bp, Homo sapiens
tgaggttggtgactaagaacttacttccagaatgatcaccttgatacgactttgatagacattttccttcaggtgcaaattacaacctgttccttcactcrtccccatacctaacagccttgtggcctcatatctatcagaacaaaataatattcttcaagatctagaagtttgccaattgtaaatcaaattcagtccttg

SEQ ID NO: 105263 - DNA, 201 bp, Homo sapiens
ttaatcttttgattattcactggtgtgaattatctattaatacccttcaaaggacaacttatttaacaattagcagaaagcacagaagttctagtgcttasttttctcacttgtttcctctgagattcagatggtgttggtgtctcagttgagtggcatccacagttatttgctctcattttcagattgcctcacgcctgt

SEQ ID NO: 105264 - DNA, 201 bp, Homo sapiens
taaatttttcaatggaggtccagaagagattatctaaaagaattgaagagatggccggcctccatgagagaaggccaagtgaaaatgaactaagccaggcrctaaagcttgataaactggttcttgggccttagttttctcatcaatacaatgagcaggttggaccaagcagtctttaaggtgccttctagctctttccgt

SEQ ID NO: 105265 - DNA, 201 bp, Homo sapiens
ggcagatcacctgaggtcaggagttcgagaccagcctggccaacacggtgaaaccctgtctctactaaaaatacaaaaattagctgggcgtggtggtgggygcctagagtccccgctactcgggaggctgaggcaggagaatcacttgaacccaggaggcagaggttgcagtgagctgagattgtgccactgcacccctgc

SEQ ID NO: 105266 - DNA, 201 bp, Homo sapiens
agagtcaaagcaggacaggggactagagtgcgagagaaaggtcattcctccagcacattctagagggaatgtctatatttttaaacatcttgctgccttcrtaattggttttccttttttagaacttaattatatattgtgcctccccccccaccaaaaaaagaaattttggcaacaagagtaagttttagaaaaatatat

SEQ ID NO: 105267 - DNA, 201 bp, Homo sapiens
attcttggaccaccttcaacttgggaatgcctgcatgcctggtgtggggcaagtggtagggggtgtttctgaaagaggaactgtgatcctcttctcagctycttccaggcaccatctcaatccccacacccctggcccagtggtcagagctgtggtcactgttggggaatgaggagggaaggggaaggggatacagttagg

SEQ ID NO: 105268 - DNA, 201 bp, Homo sapiens
ttcagtgttaatttaaggttcatttcaatacaggcttgactttattttacaaataaggctagttaactacaaaggaacatggaattggcttcagtaggtgrtagacagcataaatgccaaccagggaaatgaatagagtcagtgaagttgcccagaaattatatcctattcataagactgtgcttgcttaaaaatcagcat

SEQ ID NO: 105269 - DNA, 201 bp, Homo sapiens
gctgatgggtacatcagcccacctctgagtggtacggtaatgaagccagcctcactcacccctgccatcacacactcttttttttttttttttttgagacrgagtcttgctctgtcgcccaggctggagttcagtggcacagtctcggctcactgcaacctccacctccaggttcaagcaattctcctgcctcagccatcc

SEQ ID NO: 105270 - DNA, 201 bp, Homo sapiens
gcatttttggagacaaggataaaatatacctttttttctaggttgtataattatgagtagtttttcatttcctgtatattctgtgctgagtgtgtgttagytttttaatcagaaaaaataaagcaagacactgaaatgaaactgtaatgaatttctgtctttccattccggaatttgggaagtccttaataataacacaca

SEQ ID NO: 105271 - DNA, 201 bp, Homo sapiens
ggggagaaaatgttctcttctccaccttgcagttttccaatatagtgactgtaacaacagtggagattttatcatgagtagcagagtagttgctaagagarcaagtgtgctcagggctgcattctttaatatgctgaagcaccatggttcctttctcctcattttggaagtgggattatgtttttctgtctattcactggc

SEQ ID NO: 105272 - DNA, 201 bp, Homo sapiens
cacttctgcccagggatctatttttctgtggtgtgtattccctgtgcctttgggggcatctcttatactcatgaaatcaacagaggcttgcatgtatctatctgtctgtctatctatctatctatctatctatctatctatctatctatctatctatctatgagacagggtcttgctctgtcacccagattggactgcagt

SEQ ID NO: 105273 - DNA, 201 bp, Homo sapiens
tgcctgtgaatgtgcaaaatatttttaatgctaaaaaccaggtattacagaatgtagaaatgcagcttggaggaacaattctagttggaatcccagattcrtaaatttggtctcttggcagctagattgcactttctagagctcaggaagatataaaagttgacacttttatgtagatttatgtggagtgtggctgaattg

SEQ ID NO: 105274 - DNA, 201 bp, Homo sapiens
agtagctttagcagcacgggagacctgcccaacagaggtgatgaccttcactagaggcacatgacccctgctagcccatggccaggaagcagccagtgtgyctgtcattggttgaacccaaccggaagataagggtccaagggaatgcaggtcgcagaggtcaacttcttgggccacagatcagggcaggaagagggtctg

SEQ ID NO: 105275 - DNA, 201 bp, Homo sapiens
acttctgcccagggatctatttttctgtggtgtgtattccctgtgcctttgggggcatctcttatactcatgaaatcaacagaggcttgcatgtatctatctgtctgtctatctatctatctatctatctatctatctatctatctatctatctatctatgagacagggtcttgctctgtcacccagattggactgcagtg

SEQ ID NO: 105276 - DNA, 201 bp, Homo sapiens
cttctgcccagggatctatttttctgtggtgtgtattccctgtgcctttgggggcatctcttatactcatgaaatcaacagaggcttgcatgtatctatctgtctgtctatctatctatctatctatctatctatctatctatctatctatctatctatgagacagggtcttgctctgtcacccagattggactgcagtgg

SEQ ID NO: 105277 - DNA, 201 bp, Homo sapiens
ttctgcccagggatctatttttctgtggtgtgtattccctgtgcctttgggggcatctcttatactcatgaaatcaacagaggcttgcatgtatctatctgtctgtctatctatctatctatctatctatctatctatctatctatctatctatctatgagacagggtcttgctctgtcacccagattggactgcagtggg

SEQ ID NO: 105278 - DNA, 201 bp, Homo sapiens
ataagcctagcttctctgcatgatcaaaaagcaaagtaaggggctgggggcagtggctcatgcctgtaatcctggcactttgggagggagaaggatagctsgcagccaggagttcgagattacagtgaactgatcgtggcgccactgcacttcagcctcggcaaccaaacaagaccctgtctcttaaaaaaaaaaaaggca

SEQ ID NO: 105279 - DNA, 201 bp, Homo sapiens
actgggattgcaagatgcacctaggttgggacactttgaagtgtaagtgcttatgggacctgaggcataggtggccagtgggtagtacaagtgtgcttgtsctggacataaagatggaggaaaactccaggtgctcatgtgcaggtggaagtgtggttcgctgcagtctttctggggatgccatttggctgtatatgtcaa

SEQ ID NO: 105280 - DNA, 201 bp, Homo sapiens
agggatctatttttctgtggtgtgtattccctgtgcctttgggggcatctcttatactcatgaaatcaacagaggcttgcatgtatctatctgtctgtctrtctatctatctatctatctatctatctatctatctatctatctatctatgagacagggtcttgctctgtcacccagattggactgcagtgggggaatcat

SEQ ID NO: 105281 - DNA, 201 bp, Homo sapiens
gggtaggaactcttttgtcttaggatgtctggaaatctcttcccttctttctgctcagtcattttctactccctctccacttccatcttcaagtgttatgrtggtttggaatttctgatgtccctggtttcactacagatggactttgtgtttctcatcttctgtatatttgaggtatttttcaaaaggaaaagacagtga

SEQ ID NO: 105282 - DNA, 201 bp, Homo sapiens
cagaattagtaagtaatgtgcctcaggctccactgatagtaaacaggcagagttagatttaggacctttgccctcaacaggctcctggagaacaagccttkgttagcatttcctgtgcactagccaaaggagtaagagcagctctattttagagagatggtctcagttctttagatggaattgtttcatcggactactaaa

SEQ ID NO: 105283 - DNA, 201 bp, Homo sapiens
ggagccgcaggccagagcctgtgagcaggtaaacccccggaccgggcgcagcgagatgagagacgaggcccagtctcctcttcctccggctcgggagattstgacttgctgagggcaggaagggaaggtgcgggctgggttaggtggtcctggaaccttgcagtttcgaaactgaaaatatctgagatctaggtcttcagg

SEQ ID NO: 105284 - DNA, 201 bp, Homo sapiens
ttatcattgtattatgccatttcatttgttaaattaagcttgtattacgtttgtaatttgaaaaaacatcaacttatgtaaaaagaaaagcagcctattcygattgacctcaggatgggtgtggatgcaggaattgaagatagtagcttgggatcatctcagcctggaaatccaaggtgtcccagattcccaaaactggga

SEQ ID NO: 105285 - DNA, 201 bp, Homo sapiens
tctttttagtcgaaaagccaatatttgttaaggagcagaacactattttttaccccagttctttctctcccttgtgccttaccccagtaggctgatgggtdcatcagcccacctctgagtggtacggtaatgaagccagcctcactcacccctgccatcacacactcttttttttttttttttttgagacggagtcttgct

SEQ ID NO: 105286 - DNA, 201 bp, Homo sapiens
agatccctgatataatgttaaatgaaaaaaggtcataaaataatgtatataatcatttctattttctttctctttttaaaataagctttttaacttttttwaaaaatttattttaggttcaggagtacatgtgcaggttatatagctatactcctgccagagtttacctagattattttgtgacccagatactaagcctag

SEQ ID NO: 105287 - DNA, 201 bp, Homo sapiens
ttatcatccctggagaacaacaaccttctccctttttaaaaggatcttctcattaccttcccatttcaacatttttgttgaaagataggctctcaatacartggggaaactcaggacccaaattggtactttaggatcctgttattactgctaaacctacgtcagaatgcagctatagagaatttaggaagagactccatt

SEQ ID NO: 105288 - DNA, 201 bp, Homo sapiens
ctgagattcagatggtgttggtgtctcagttgagtggcatccacagttatttgctctcattttcagattgcctcacgcctgtaatggctgtgaacatgctyacccagcaggaggtccctgtcgttattttggccaaagctgacttggaaggctctctggattcaaaaataggtaagcagctattaaaatgtaaccacaacg

SEQ ID NO: 105289 - DNA, 201 bp, Homo sapiens
gattcaactattgcttctttgaattatatggatatatgtatgttagagcttccttcggaaaaacaaacagttctttaaggacctagatagaagctgtcttraaagagaagtgtttttttgttttgttttgttttgttttgtttttttaatggagtagccattcttttatccctttactttcctaataatcttgctttcgct

SEQ ID NO: 105290 - DNA, 201 bp, Homo sapiens
gcagctgagatcagcctttgggctttgttaactctgctttctcactttgtctctgcagtctagagattgtggtaatgtcctgcccttccaaactgctaggyagattcacccatttccttggcttcccactcaactttaaacatatagagtattagttaaacgaaccaggtggaaatgatggtttttcagactttggaagtt

SEQ ID NO: 105291 - DNA, 201 bp, Homo sapiens
catgagtaagttatttagtggtgatttgtgagattttggtgcacccctcacccgagcagtataggctgtactctatttgtagtcttttatccttcaccccsctttccacccttcccccaaagtccccaaagtccattgtatcattcttatgcctcatagcttagctcccacatatcagtgagaacataagatgtttggttt

SEQ ID NO: 105292 - DNA, 201 bp, Homo sapiens
cagcctgggcaacagagtgagacactatcttaaaaaaaaaagaatctgatatgggccttgaagaatgaggtgaaatttattgtgagagaggaggacaaacrcccttccttggctgatgtgggccattcctctttaccccccgcctgctttttaaaaaaatttttttgagacagggtctcattttgtcaccccggctggagt

SEQ ID NO: 105293 - DNA, 201 bp, Homo sapiens
attcctctttaccccccgcctgctttttaaaaaaatttttttgagacagggtctcattttgtcaccccggctggagtgctgtggttgcaatcacagttcaytgcagcctcgacctcccaggctcaacttccgactctgtctcccaagtagctgggactataggtgtgtgccaccacgctcagctaattttttgtaattttt

SEQ ID NO: 105294 - DNA, 201 bp, Homo sapiens
acacaccagcacctgagagccaactatgtatatctctgcccaatgttgtgtttattagtcaccttggcagcttgaaatctgccattgagggagtatttacrtcatggtaatcagcaaacctacaaatcatggccttttcctccagagagccaattgttaattaaacatttactggaaccccagtggccattgctactatga

SEQ ID NO: 105295 - DNA, 201 bp, Homo sapiens
gaagccagagataaattattctctttcagtaatcagaaaaggctgtactgccaatcggtttcttcttaaactcatagaatgcctgatgacatatttaaaayttagctccatatggtgattttgttgtgttttcatatgttgtatgcacagatggttggaaaataaaattccccacctcccacctcggctggtctccccagc

SEQ ID NO: 105296 - DNA, 201 bp, Homo sapiens
tccagcctgggcaacagagcaagactctgtctcaaaaaaaaaaaagaaagaaagaaaacagttggagacatgcagtatacatagggacagctgtgagaaayccccagcactgtgaccattacatttagaaaaactagtgcataatggatgagattaggtcacacgacaaccctgtaaatggtaggcagcctctccagccaa

SEQ ID NO: 105297 - DNA, 201 bp, Homo sapiens
ttcttcttaagctgatttaaaaaaaaaaaagttatgctgattcagacataaagttaatcagtgtcgctcatctgcactctgataatgaacacaatgatgcrtggcaggtttttgcctctctggtttgtataacctgaagtggccctgggtccagcatggtcttatttgttgacacttcttcagctttatttctggcctctg

SEQ ID NO: 105298 - DNA, 201 bp, Homo sapiens
ccctaggtgtttcacagtttaacacctttgagcaggtctcagtgcatttctctgtggacctgcagcacagaggaaacctagcagagtgggtaagagtttgkctacagtgtgcctgggggcagattgccctcccttgctgatccttagctgcttcatctgtccaatggggtaagaataccaccctcaaagagtggtgaggac

SEQ ID NO: 105299 - DNA, 201 bp, Homo sapiens
tttcgagaccagcctgagcaatatagtgagataccccatctctatttaaaaaaaaattaatttttaaaattaaaaaaaaggaagtgttcatatggcaagawtaccaatcctgaaaatgttacatgtgtaataagcatttatatacacatttttgcatttttggagacaaggataaaatatacctttttttctaggttgtat

SEQ ID NO: 105300 - DNA, 201 bp, Homo sapiens
ccctatcttagaagggaaacaaatgcatgtctttcccacccaactctagacttcacatacttaaattttccaatgggggtactgcttctatatgtaaaatygcagcccacaaattacaacccacagataggttagcctcccctcacccctactttttatgtaacttttagacatgtctctggatcagtcagggtcccagca

SEQ ID NO: 105301 - DNA, 201 bp, Homo sapiens
gtttatgatataatgttaagtaaaaacacatgacacaaggccaggcacagtggctcacgcctgtaatcccagcactgcgggaggtcaaggcagatagatcrcttgaggtcaggagttcaacaccaacctgctcaacatggtgaaaccctgtctctactaaaaatacaaaaaatcagccagggtgtggtggtgcacacctgt

SEQ ID NO: 105302 - DNA, 201 bp, Homo sapiens
tgctggagagtccctgggctggcccatggggaggggagggagggcactccatgccttccatgcaacttgtgaggttgcgcaggagctggccagctgatggyctccattttttcctacaggatttttgcatctttgatgttaggggttactgaccctttatattttctattaaaaagtttgtgtttagctcaattgaattgc

SEQ ID NO: 105303 - DNA, 201 bp, Homo sapiens
ctgctaaaaatctatcctaaggaaataatcagaaatgcaaacttatgcaccaagatgttcatgtaagtgttatttcaagtagctaaaaatttggatacaayctaaatgccccaaaatgctgagacagggtaaataaagtataatccatctacgtggagcacacttatacaacactttcaattaaattacaaagaatgttta

SEQ ID NO: 105304 - DNA, 201 bp, Homo sapiens
gagccaagatcacgccactgcacttcagcctgggcgacaaagcaagactccgcctcaaaaacaaagtaaaaaaataaaataattagcctggcatggtggcrtacagctgtagctgtagctactcgggaagctgaggcgagaggatcgcttgaacccatcctgggcaacagagcaggagactctgtctctaaaaataaaatt

SEQ ID NO: 105305 - DNA, 201 bp, Homo sapiens
tttttgtttttttaacatataaacttttaaaataaccacattaggctgggcgctgtggctcacgcctgtaatcccagcactatgggaggccgaggcgggcrgatcatgaggtcaaagatcaagaccatcttggccaacatggtgaaaccccatctctattaaaaatacaaaaattagctgggcatggtggcatgtgcctgt

SEQ ID NO: 105306 - DNA, 201 bp, Homo sapiens
atttccagggcatattctctcagatctccttcgaaggagagaacgaactgctggtccagtgccttgactggaaactggcagatttatctgcctgtcacatycctccacattcccagaggaggtctgctgctttgggcctaggtactgtcatttggtttttataatctgaagtattcacttgatttttatccccaatctgta

SEQ ID NO: 105307 - DNA, 201 bp, Homo sapiens
tatgattgtgtatattggtgtttgtcttttaacatattgtattcttatctaagaaatattcagagagggttttggatatttgttcatgtgttcattttgakgctttgttatttacagttatttttccttcgagtatttacattcggtaggaaaaagaagagggttaggaaaaagaagagggtcgcatttgttaaatttcta

SEQ ID NO: 105308 - DNA, 201 bp, Homo sapiens
tttgtgcttcagtttatttatctgtaaaagagggatagtcatagttcctatctcatgtgattggataaagactaagcacttctctgcaaagtgcttagcayagggtcttgcattaaataagctgccattagctaatcagagattatacagaagattttttcatggtttttcatatttttagtctgctagaaactaaaagag

SEQ ID NO: 105309 - DNA, 201 bp, Homo sapiens
tgcttagcacagggtcttgcattaaataagctgccattagctaatcagagattatacagaagattttttcatggtttttcatatttttagtctgctagaawctaaaagaggatgcagtagaaatgaattagtcctttttctttaaaaaaatgaaagagaaaaaggtttatttctttattccatgttatattataagttggt

SEQ ID NO: 105310 - DNA, 201 bp, Homo sapiens
aaaaggaaaagacagtgaagggaatgtcattactccacatctggaaagcaaaaatgttttttcacttttcatgagcatggaagaacattttttcatgtgcrtatttaatcttttgattattcactggtgtgaattatctattaatacccttcaaaggacaacttatttaacaattagcagaaagcacagaagttctagtgc

SEQ ID NO: 105311 - DNA, 201 bp, Homo sapiens
gtatgaccttattatctctttggatccctagagagctctaaaaggcaggtacttttattgacgtcattttattgctggtcacccaagtggcaaggctgggstgatccattggtcaagttatgactgccgtgctcctcccccaaacttaaggcagaaatctcagtgcagatgatcctggacttacaagggggttatcctaaa

SEQ ID NO: 105312 - DNA, 201 bp, Homo sapiens
cattgtttatcttggcttttctccttctcagatcaacaataaagcttgtggcaaaattcctgtgccccaacaagttgcccgggaccaggacaaagtccacraatttgttcttcaaagcgagctgggtgtcaggcttttgcaaggacgaagcatcaagaagtccttcctttccccgagaactgccctcatcaacttcctggt

SEQ ID NO: 105313 - DNA, 201 bp, Homo sapiens
taagactgtcctaaattgaaaatattgtaggcatataatacatctaaccatcatagcttcacctaacctaccttaaatgtgctcaggacacttacattaaygtacagttgggcaaaatcatctgacaacacagtctcttgcagagtatcggttgtttaccctcatgactgtgtggctaactgggagccgaggctcagtttt

SEQ ID NO: 105314 - DNA, 201 bp, Homo sapiens
tgcgtgtctacaccatcagcgacaccatagcacggttccagaagatgagagggatgcaggtaagaacaggtgcctgctggagcagcccttgtctgccacaygcagggttggcatgtagtaatatgtgttcaagacaaatgaagaaaaccaactttagttaagattaggacagctttgaagatggacatgaaaagctcagtg

SEQ ID NO: 105315 - DNA, 201 bp, Homo sapiens
tgtttaccctcatgactgtgtggctaactgggagccgaggctcagttttgctgcccagcatctcaagagtatcatactgctttctactgaatgcatatctytttcacatcattgtaccactgtaaagtcgaaaaattgttaaggcaagccgtcataagttgggaaccatctatacacatattttattatttccttaaaatg

SEQ ID NO: 105316 - DNA, 201 bp, Homo sapiens
tgtgagatagaggcttagccttgccaggtgctcttactagtcctctccagtagggcttggcaacaaggtcacctcatccaaatgcggccatttaagacccyttccatcagcaccatctagaccagtggtatgtgagtaggggaggagacagttccaaagaatagggtgtgggtggctggcaccacaaagggaccaacacat

SEQ ID NO: 105317 - DNA, 201 bp, Homo sapiens
ctttatatatacaagcacatatatacacatactcaaagcaagagaaaagacttgaaaaactcatgccaacatgttaacactagctatctctgggtggtgakcccaatatacttctgattttttccagattttttacaatgattgtgtaactttatcatttacagtatggtatatattccaaagaaggaaaatatgctgagc

SEQ ID NO: 105318 - DNA, 201 bp, Homo sapiens
tagttaattttaaaaatttcttttggtttttcacaatattcatagatttggttaggttttaagcaggcattgttccagaattagcatatgaaaacattcayatttcatcctatttgaatctgtcatcctcatcaagatctgaatattttaagcaaggtacctccataagaagtttcccagccttgacgattacatctagaa

SEQ ID NO: 105319 - DNA, 201 bp, Homo sapiens
gcaggtacgtggcagagtccttttttgaccagttactactaactagaatttgtcgaagcctctttttgaacatcattcgggactcagatgtcctcagatayagggtccaacatttggcatctatactcagcaacctctctgtcctgtactctgaatggtagtacttcatccacatggtcacccctaccaaaaggaaagaca

SEQ ID NO: 105320 - DNA, 201 bp, Homo sapiens
gggaagttcattgtcccaagcagaaatggatggcaaagggggtttcttcctaccagcttgtgtctctggacttcagatacattaatggtctttcttacccrtgcttatttttacacctcagtcttcttacttttttttcctcttccttagcaagcctctcagagcgtcattctccacagccccgagtttgaggatgctttg

SEQ ID NO: 105321 - DNA, 201 bp, Homo sapiens
tcggcattgcaggcctggcgctggtgccgaggaagctctgtgcccactacacttgggatgccagtgtgctgctccaggcatggcctgctgtggacccggakttcctgcagcagcctgaggttgtccagatggcagttctggtaagtatctcccctcaaccccagaacccagcagtccctgccctgctggtggcccctaaat

SEQ ID NO: 105322 - DNA, 201 bp, Homo sapiens
gcccagggatctatttttctgtggtgtgtattccctgtgcctttgggggcatctcttatactcatgaaatcaacagaggcttgcatgtatctatctgtctrtctatctatctatctatctatctatctatctatctatctatctatctatctatgagacagggtcttgctctgtcacccagattggactgcagtgggggaa

SEQ ID NO: 105323 - DNA, 201 bp, Homo sapiens
tttataaattgagcccgcattttctccctcacttggacctcacttgcacaaggtaagtgaggaagatgaagtaatctttattttctaattatttcccaaartagtgtctgtgttctggttgattgctctccaaataaaaagacctggcttcaatttagaggcgcactgttgagatcagcttcttagagcagccctgggtgg

SEQ ID NO: 105324 - DNA, 201 bp, Homo sapiens
gggcttattgataggatctttattctgggactacaggcgcccaccagcacgcccagctaatttttgtatttttagtagagatggagtttcaccatgatggkcaggctggtctcaaacttctgacctcaagtaatccgcctgcctcggcctcccgaagtgctgggattacaggcatgagccactgtgcccagccaatttctt

SEQ ID NO: 105325 - DNA, 201 bp, Homo sapiens
aatctcagcactttgggaggatgaagtgggaggatcacttgagcctaggagttcaagaccagcttaggcaatatcgagaccccaatttctaccaaaaaaargaaagaaagaaagaaagaaagaagcagaaggggcagtgccaaaaactgttccttttgtctagaaaacaaaaacttcctcaaaaatccccagtagaattcc

SEQ ID NO: 105326 - DNA, 201 bp, Homo sapiens
gcttcccaccggctcctcacacagctccaagccaggctgtgttgggatggaagctttggtcctgctctcataagcctccctgttcttagagtgaccccacrcttctgtgcctcggcattgcaggcctggcgctggtgccgaggaagctctgtgcccactacacttgggatgccagtgtgctgctccaggcatggcctgctg

SEQ ID NO: 105327 - DNA, 201 bp, Homo sapiens
atatttttataacaatacagagggagagaaagcggcttgttaagtgaattagtgtgattcttcaaatggacactttccatcgctcacccagtttttacttwttgatgctatttctatagaagcaattcacaatgacacataccatacctatggattattttggcatctaggttccgttcctgttcatgcaaaaacgaaaga

SEQ ID NO: 105328 - DNA, 201 bp, Homo sapiens
ccaacagtatcccagatatgtggaagaatagtcttaaacagtggaaacagtgttgactttgaattttaaaatatttgtgtagatgaaacatagcgattatktgagatagtagatatatttataaatatctttgcatcccattcattttcctttttttttgttttgataattcagtctttttgtggaaagcttaaaagaatt

SEQ ID NO: 105329 - DNA, 201 bp, Homo sapiens
ccaggtaatggaaagtgtggtgattagaggttttctgttttgttcttggtggaattgactcattgtcctctctgtcttgcttttgtcattatttactccartgctctgtccttaccctgggttcttctgagcccagctgcagagagaccagtaaagaccgatccaatggctgctgctatgaaggaagcaaatagtcattaa

SEQ ID NO: 105330 - DNA, 201 bp, Homo sapiens
tctggacatttcatgtagatggaatcaaatataatatttgtcatcttattgtctggctcctttcacttagcataatgttttctttcctttttatttccaartaatcctccattatatggataggccacattttatttatccattttattaattgatggacatttgggttatttctacttttttactatagttataaataat

SEQ ID NO: 105331 - DNA, 201 bp, Homo sapiens
atatttgtcatcttattgtctggctcctttcacttagcataatgttttctttcctttttatttccaaataatcctccattatatggataggccacattttrtttatccattttattaattgatggacatttgggttatttctacttttttactatagttataaataatacttctatgaacattaataaagatttttgtgtg

SEQ ID NO: 105332 - DNA, 201 bp, Homo sapiens
gtgaggctgaggaagcctgggcagtgggagtcatgaggaatcacagttcaggaaggaggaagacgtggctatgtggtctaggagagagctgctggctgggmctatagatgacaagaaatcatttgtagtggtacaagtactgggtcacttatgcttggattctaattttgcctcctagtggctgtgtgaccttaaacaagt

SEQ ID NO: 105333 - DNA, 201 bp, Homo sapiens
tgcaggggtaaggtgggaatatcacttgagcccaggagactgaggctgcagtgagctgtgattgtgccactgcaccccagcctgggtgacagaacaagacyctgtctcaaaaaaaaatcatcctcctactcctcacaggagaaagacaggcaagcagcttacctaaatacacaataaaatgtaatagctgctagatacaat

SEQ ID NO: 105334 - DNA, 201 bp, Homo sapiens
attggagggaaagaacatgccgtcatgcacttgttctatgcaagattctttagtcatttttgccatgatcaaaaaatggttaaacataggtaagcacttayactgctttgcaaaataattgagttccatgaatagcaactttaagcaggtgtcagttcttctgaagcaaggtaaatgcatgtagtagaatactagttttct

SEQ ID NO: 105335 - DNA, 201 bp, Homo sapiens
ctcccatgtggacatcccctgagagctctcactaagaaatggctacaagcgggttagaaacaggcagatgaaataatagtgttagcagtcaggctataggrgcccatagtgaggagacagtgcctagaagcggatggaaggttgatttcacgttctgctaattgggctgaatgccagttacacaagtgtgttttatattgt

SEQ ID NO: 105336 - DNA, 201 bp, Homo sapiens
taaaaacatcagtaaattcttttcctgttggcctattgtaaccctttcctcataatgttcagaaaaatgtgtgtgtacttttccccatgaaacgtatcatrtataaaaattacatatttaatgtatttaaagaatggtacaacacattaaatatggaatttttatatatgaacatacatgccccactcctcagtttaagaa

SEQ ID NO: 105337 - DNA, 201 bp, Homo sapiens
acctcccagcctcctggtaacatcatattataattgcaaaatttgcaaatacacatttcttctttgagaaaagatagtgtggaggccaggtgcaatggctyatgtttgtaatcccagcactttgggaggctgagacaggcagatcatctgaggtcaggagttcgagaccagcctggccaacatggtgaaaccccatctcta

SEQ ID NO: 105338 - DNA, 201 bp, Homo sapiens
gacagagatgatgtccagatatcttgcctaacgtcacacggctagtgaggaactgagcagagattagaatcccagtcctccacatagtgaggactttcccrctcagttactttgttacacaatatccatgtgaactattgtgggttaatttctgcaaatctgaagtcattgtaatgggtatctgatatcccaaattcttct

SEQ ID NO: 105339 - DNA, 201 bp, Homo sapiens
gcatatttcattttttctaaaacacttacctttcatataccttcagttttattcctgcatcttagaaagataactccagaatgactaaagaaaacatggtccaccaaggtggcatgtcagaaatgaccattcctagagttcccctgagaggctgattttcaaagaagttctccccaaagagcaacagaattgagatctata

SEQ ID NO: 105340 - DNA, 201 bp, Homo sapiens
gtaatcccaacactttgggattgcaagacaggaagatcatttgagtgcaggggttcgagaccagcctgggcaacacagcaagaccccatttctatgatttwaaaaaaaaaaatttccctcactggcaaatataaattattcagcagtgagatgccatcttccatgtagtaaggaagctagcataagagcagctctcatata

SEQ ID NO: 105341 - DNA, 201 bp, Homo sapiens
tagcattcggtgtgggtctctgggcctgtcagctactgtgtgtggaatatcttctacgctttcttctttgcccaacattttactgtgaacatgtttttatstccattcctggaaccacctgaaaataagatggggcaacatagtgtctcaggaaggaagcatctcagtcctacagggtagaccacatctatgcctctgtgt

SEQ ID NO: 105342 - DNA, 201 bp, Homo sapiens
atatgtggaagaatagtcttaaacagtggaaacagtgttgactttgaattttaaaatatttgtgtagatgaaacatagcgattatttgagatagtagatayatttataaatatctttgcatcccattcattttcctttttttttgttttgataattcagtctttttgtggaaagcttaaaagaattttgaaataagtaaat

SEQ ID NO: 105343 - DNA, 201 bp, Homo sapiens
aaacgaaagagaagttagaggtgacgtgggagaagatgagtaagtccaaacacaacggggtggacccagaggaagttgtggagcagtatgggatcgacacrattcggctctacatcctttttgctgcccctcctgagaaggatatcttgtgggatgtgaaaagtaagtcaccttcctcttcctgacttgcttcctttgtga

SEQ ID NO: 105344 - DNA, 201 bp, Homo sapiens
gactgtggaccttgacaactcggtttattgaggccagggcttctgggaagtctccccagcctcagctgctgagtaacaaggagaaagccgaggccaggaakctctgggagtacaagaactccgtcatctctcaggtcagaaactctccaattccaggggttaactctgtaaccaagcactctttgggaacctttgcctgtg

SEQ ID NO: 105345 - DNA, 201 bp, Homo sapiens
atttactgatgctgaattcagctgatgctctccctggggtgctgagatggcaacaacgactgtggaccttgacaactcggtttattgaggccagggcttcygggaagtctccccagcctcagctgctgagtaacaaggagaaagccgaggccaggaagctctgggagtacaagaactccgtcatctctcaggtcagaaact

SEQ ID NO: 105346 - DNA, 201 bp, Homo sapiens
ataagctctggggagggtttgaggcagctcatagtgtgctttctgccctctttttcagggccttctcaccttctgaagaatggcttctgtttggcagagaytgggtttttatgcctctcttctgaaaagacagctaaatggtgggccagatgtcatcaagtgggaaaggagagtaattcccggatgtaccagaagcatcta

SEQ ID NO: 105347 - DNA, 201 bp, Homo sapiens
ctcctgggttcaagcgattctcctgcctcagcctcccgagcagctgggattacaggtgcctgccaccatgcccagctaatttttgtatttttgttagagayggggtttcaccatgttggtcaggctggtctcaagctcctgacctcgtgatccgcccgcctcggcctcccaaagtgctgggattacaggggtgagtcactg

SEQ ID NO: 105348 - DNA, 201 bp, Homo sapiens
tcaggaacacaagaacaagactgagggagaagtcattatgagattttgcaatggtgactcgggcacagcgtgtctccaagaagtaactgactgaccacttkaccacttcacccttagggctagctcaaggacaaatttatgggacctattcccatcctctcccagtggacaaacaacattcaagatagtacacaagcagat

SEQ ID NO: 105349 - DNA, 201 bp, Homo sapiens
ttattttttgaggcagggtctcactctgttgtccaggctggagtacagaggcacaatctgggcttattgcagccttgacctcctgggctcaagcagacctygtgcctcagcctcccaagtagctgggactgtaagcacatgcccctacgcccggctaatttttgtattttttttttttatagagatggtgtctcactgtgt

SEQ ID NO: 105350 - DNA, 201 bp, Homo sapiens
ataccatggaaatctgatcagttaagaaaaatatatgtagactgataaaaaactataagaaagaattaatctattaatctaatagattaatccaagtaacwtgaatcctctggaatatatgaggaaaataactcattattttcttagtataattgattttttaaatcttttaaatttttttaaatttatttttattttttg

SEQ ID NO: 105351 - DNA, 201 bp, Homo sapiens
ttagatacaggcatgtatccccacagggactccgctgacaccatggagagcactgagcagtgtggaattcctgcctctccattcgacctcctctgacactrttttatcaaggagagggaggtgtacctcattcctgctagttgggggtaggagtccagacttgtcctgtgggctgcactgataccaccaagagggggatgg

SEQ ID NO: 105352 - DNA, 201 bp, Homo sapiens
tgtttctaaatggtacagagacagtacaggccatcaggtttccctccctgaatgcagggccttcctgctgacctcccagatgtcccccaccaatgcctagwcacatctgtatgtagtctctattaggtcaattctctatcatcatctcatttcccttagccctgacttcttgcgcacactccactgtccgtccctgtcagg

SEQ ID NO: 105353 - DNA, 201 bp, Homo sapiens
cagccaaagtgccacctcagcttctggcagggttttcatttgtatgtaacagagtcaactcaggcatgacctcctatcccagaccatctttgaaagcccamctcagggatagagcccccaggcccaagacacattcttccagaactggggtactcccagtgtttctcccaacatgttctagtggcacatttcagaaccttg

SEQ ID NO: 105354 - DNA, 201 bp, Homo sapiens
cgtggctcatgcctgtaatctcagcactttgggaggatgaagtgggaggatcacttgagcctaggagttcaagaccagcttaggcaatatcgagaccccartttctaccaaaaaaaagaaagaaagaaagaaagaaagaagcagaaggggcagtgccaaaaactgttccttttgtctagaaaacaaaaacttcctcaaaaa

SEQ ID NO: 105355 - DNA, 201 bp, Homo sapiens
caactggcttagaatgcaagtgaggtcaggctctttcctttctcagagtgcttcaaaggaaagccttcacacagatgagagagacctcaagttaccgtggmgggagagacatcctgagaccgtcacagcccccagtttgtgaacagcagtgagcacttcatttccctcatgacacactgtagttagcttcagccccagcac

SEQ ID NO: 105356 - DNA, 201 bp, Homo sapiens
tgagaaatcctgcccttacaaaaccaaagagctggggggaaaagaaaaaaaaaacccattcttatgaatacccgaagccaaaacagcaggccttggccccsctgggtgagtgatttattaatgctcaacttctcctcaaggacatatgtgagttaaagaataaatgtctacttagaatgtactattgcctttgggaacaaa

SEQ ID NO: 105357 - DNA, 201 bp, Homo sapiens
tttaccagtttaaataaagtgtagaggccttacttccctttgcatgcctttacttactctttcccatttgtaacaattgttttaaatgtttcctctatatrcattgaaatccacatagacaatgataatttttgcttcaaccatcaaatacaattcagaaaactcaagagaaagaaagtctatcgtatttacccctatttt

SEQ ID NO: 105358 - DNA, 201 bp, Homo sapiens
ctgcatagagaactttctttagccattcctttagagtagacctgcttaatgacaaattccctttgtttttctttatctaagaatgcttgatttccccttcrtttctgaaggatattttcaagagatatggaattttgggttaacagttcttttcttttagtacttgaaaaatgtgccacttctttcaggcctctgtggttt

SEQ ID NO: 105359 - DNA, 201 bp, Homo sapiens
agtcataatgaatgcatctgtttctaacctttcctggcttcctctgacttagtgaacaaggagagagctaaatcctggatcttctttagtgtccctgcttytcctaccttaacaagctgcaaatcatttgctttttcttaaataagccttgtgcctctacttctttgttctcctttcatttgcacaggccatgcaggacgc

SEQ ID NO: 105360 - DNA, 201 bp, Homo sapiens
ttgatctcctgacctcgtgatctgcccgcctcggcctcccaaagtgctaggattataggcgtgagccactgcgcccggccaatctttttttttttttttttgagtcagagtctcgccctgtggcccaggctggagtgccgtggcgcgatctcagctcactgcgagcttcgcctcccgagttcacgtcattctcctgcctca

SEQ ID NO: 105361 - DNA, 201 bp, Homo sapiens
actgcacaggagggtgactctagtcagtcataatgttttgtatatttcgagataactgaaagagtaaatttatcaccacaaaaaatgttaagtaagtgagrtgatgggtattttaattgcttaattattctacattgtgtacatatatcaaaatatcacactgtattctataaatacagttatgatttgtcaattaataat

SEQ ID NO: 105362 - DNA, 201 bp, Homo sapiens
taagtagcctgctgttaattctgtcgtagtcttttctataaaacaatactgatccaatttgtgataaactcacccactctcatcgcagaatatatatttckcccgttcatcttccttctttggcccactttatctgtctacctccttcattttgtttctcccaggaaggactgatgtaaatgggattttcagaaactccct

SEQ ID NO: 105363 - DNA, 201 bp, Homo sapiens
tggaactcttctggctcttggctgtgttaactgatggtggttacatgaaactacacatggttatgctaagttacacacacacacacacacacacacacacmcacatacacacacattagttattaaactgatggaatccaaataagctctgtggattgcattcatgtcaacttcctggttttgatattgtgatataatcat

SEQ ID NO: 105364 - DNA, 201 bp, Homo sapiens
aggctgggtgaagggtgcacaggacctcacataggacctcctgaacatttctttgtaacttcctgtgaatctataattattgcagaataaaggattttttwaattgcctttctaaactcataagtcttgagtgttgagattctaattctggaaaataatatagactatgagaggaaggaagggaggaaggaatttatttcc

SEQ ID NO: 105365 - DNA, 201 bp, Homo sapiens
gcattcaacgttacaagagagtgtgtcctaagctgtcactcagttgcttcccagagaacctttgtcaccaatgctatgtttaatctgacagaagcatgtgrtggatggatgtgacatgtctacctttatagagatgttaacatcctatacaaacattttttgctcttactgttctttagagtagttctgtatcaacactat

SEQ ID NO: 105366 - DNA, 201 bp, Homo sapiens
tagtcccttgtccaaaatatgttatttaaaataagtaagatctccttaacatttctgtttctctggccatttttatagttctgtgtgacttttccttctcratatttgcctctggtgtgtgactcgtgatctccaagtaatccatcagcaccttaattttgagagcacagtgagagagcctttacgtcccttagggattct

SEQ ID NO: 105367 - DNA, 201 bp, Homo sapiens
ttctcgctccatgtgatctcactttgtgtcctggccagaaacaggctgcaagcgcagttcgatgtcattcagttcaattgtgcccatgttctttgtgcctrtgacatgctgggctctgcccacaccagggatacagagacaagagctaccgccttgtcaccttggaacaaaggtctgggggcacatgagctgtcacacaca

SEQ ID NO: 105368 - DNA, 201 bp, Homo sapiens
ttccattctttttttaacagagatagggtgtcctaaccagtgaatgtagtgatgggcatttgggtgatggtccttcttttgctctgtgtgtgtgtgtgtgtatgtgtgtgtgtgtctttgtctttgtgtgcctctttgagattagtcccttgtccaaaatatgttatttaaaataagtaagatctccttaacatttctgtt

SEQ ID NO: 105369 - DNA, 201 bp, Homo sapiens
tcaaaacagtatttcataatatgccaggactttgtgttttattcgtcctctccctgtgacctaggctaatgcagacaataaaaatgccaccaagttctgcraaactgaaaaaatgaagtgggtgattaggggacatttgataatgtgctttggttgaaacttgagaaattattcctagtaacttttcctaagactgtgact

SEQ ID NO: 105370 - DNA, 201 bp, Homo sapiens
tccattctttttttaacagagatagggtgtcctaaccagtgaatgtagtgatgggcatttgggtgatggtccttcttttgctctgtgtgtgtgtgtgtgtrtgtgtgtgtgtgtctttgtctttgtgtgcctctttgagattagtcccttgtccaaaatatgttatttaaaataagtaagatctccttaacatttctgttt

SEQ ID NO: 105371 - DNA, 201 bp, Homo sapiens
atggtttcaatctctgactttgtgatccgcccgccttggcctcccaaagttctaggattacaggcgtgagccaccgcacccggccatttttttttttttttaatttttttgagacagagtctggctctgtcgcccaggctggagtactgtggcgtgatcacggctcactgcaagctcagcctcccaggttcacgccattct

SEQ ID NO: 105372 - DNA, 201 bp, Homo sapiens
gtccctgctgatgtctttgagcatttgtcagtgtggctcctcctagaagcaaagaccaagatggaattagacatgcaagagatttcttggggggaaatgcytgtgcagattaaaggggagaagaggaggagtgggcagagagtgctcttagaccacgatggagctgtgacaggtgtgaaaggagaagggaaaggaaggagg

SEQ ID NO: 105373 - DNA, 201 bp, Homo sapiens
gacagagtcttgctctgtcgcccaggctggagtgtagtggcgcgatctcggctccctgcaagcttggcctcctgggactacaggtgcctgccaccacgccwggccaattttttttgtatttttagtagagatggggtttcactgtgttagccaggatggtttcaatctctgactttgtgatccgcccgccttggcctccca

SEQ ID NO: 105374 - DNA, 201 bp, Homo sapiens
atgtccaagaagttaacttctaggaagttgagagggttcaggtgggctcaagcatataaatagagatgccaataatttatttttatttttattttttttttagggaaattgcctagttagcacatgtgagctgtaagttcatttcagtccagttactttttcaactgtggatggattaaaataagttatggtggtagaaag

SEQ ID NO: 105375 - DNA, 201 bp, Homo sapiens
aggtcaagtgatccacctgcctcaggctcccaaagtgctggacttacaggcatgagccaccatgcccagcctcttttttttttttttttttttttttttttgagacagagtcttgctctgtcgcccaggctggagtgtagtggcgcgatctcggctccctgcaagcttggcctcctgggactacaggtgcctgccaccacg

SEQ ID NO: 105376 - DNA, 201 bp, Homo sapiens
gatcccaccctagtctaataagatccctatatgatttgtatgcacattagaagtttgagaatactggcttagagcactcttaaacttaactgcacattggraacacctgagagttttaaaataatactgatgcctgggtctcactccagatactccaatttgatggttattggtggtgaggggggcatggatcagacatca

SEQ ID NO: 105377 - DNA, 201 bp, Homo sapiens
tagaaagcaaagcaaacaaaacactgcagcgtaccaagagataaatatgattgtgtatattggtgtttgtcttttaacatattgtattcttatctaagaartattcagagagggttttggatatttgttcatgtgttcattttgatgctttgttatttacagttatttttccttcgagtatttacattcggtaggaaaaag

SEQ ID NO: 105378 - DNA, 201 bp, Homo sapiens
tataacaatacaaattttcaaacacttagaaaggttgaaagaatagtacaataaacattcatatacctttcacctagattcaataattattgctgtattcrctttatctctttttatttatacatattatatatatatatttctccccctgaattatttgagtatgtattgcagacatcatggctcttgaccccaaagtac

SEQ ID NO: 105379 - DNA, 201 bp, Homo sapiens
tgggctgaggcaggagaatcacaggaacctaggaggtggaggttgcagtgagtcgagatcacgccactgcactctagcccgggcgacagtgcgacactccmtgtcaaaaaaaaaaaagagtactcaccagattgtgccattttgtttcatgaattatacaggccctggttaactgggacccagtggatcaaacagtgcttg

SEQ ID NO: 105380 - DNA, 201 bp, Homo sapiens
aaattatcacaaacttagcatcttaaaacaacatcagcgtattatctgacagtttctgtaggtcagaagtttgggtgagcttgatagggtcctctgcgagsgtcttacaaggccaaaatcaaggtgttggtagagctgtgttccttactgggtcctctggggaaaaatccacttctgagatcatttaggttgttggttgaa

SEQ ID NO: 105381 - DNA, 201 bp, Homo sapiens
agtgtcccctcctcagaggccagacacccctcagaggacagggggctaccagggtgtgtgagcaggagagagaggggctgtgtcaggtcatcccgtctctwccactgcctggggtggagcctaggtggacaagtgacttcacttcatgtgcctcagcttccctatctgtaaaatgggatgggatattcatgcatcgactca

SEQ ID NO: 105382 - DNA, 201 bp, Homo sapiens
agtatatactcagtgttttaagtaaatttatatacttgtgcacccatcaccatgatcagttttagaactggatttccattactgaaaaaaggttccccacrccattagtcaatcccacacccactccaacccccagcatgactaatctttctgtctctgtagttttgccttttccagaaatgttatataaatgaaatcata

SEQ ID NO: 105383 - DNA, 201 bp, Homo sapiens
acttgagaaattattcctagtaacttttcctaagactgtgactatattttccaagtgaaaaataagagctagtgaaagtaatgtgtgtgtagatttcggarcaatgggattgaggatttggaagcatgacttcagaaactgagccacgtggtcaccttccctcattgaatcaatattcggtgaatacccacctgtgtctgg

SEQ ID NO: 105384 - DNA, 201 bp, Homo sapiens
aggccaggaagctctgggagtacaagaactccgtcatctctcaggtcagaaactctccaattccaggggttaactctgtaaccaagcactctttgggaacytttgcctgtggtctttgctgccctccctgccttgggttgggccactgtgggtcttccttcctggcaatggcggtccttcttgctttgattgattggccct

SEQ ID NO: 105385 - DNA, 201 bp, Homo sapiens; identical to SEQ ID NO: 16821

SEQ ID NO: 105386 - DNA, 201 bp, Homo sapiens
tgactgtgagtggaaaagccaccttgttactgttcctgtgggtacagctgcccaagctataattgttctatttttctagaagaaaaataacattaattttrtctgcagcatcctttgaaaatgttaggatcaacaggacagaatcatctgaaagatgcttttgtgatgtcagttctctaggtttcctgaataatataaggg

SEQ ID NO: 105387 - DNA, 201 bp, Homo sapiens
ccctaaactgccaatgctggaccaagtactttgtcagcccctggtaagcattagctgttactgttgttattactgttgtcattcctaaaagaatattcacygtgcagttcctttatctaggagtactccagttcactcatgttgcttgattaccggcacctccttagagcatacatgtttaagccagtccagtcatagctg

SEQ ID NO: 105388 - DNA, 201 bp, Homo sapiens
gaagataaaacaaaaagttgtcattcacaacccagtgttattggggctggttttggtggaattgactccctctgtcacaaactcagcttcagcccataccstgagccatagacctatccctctaatgcattgtactagtctcagggctaataacaagggagaggtgtcaaagggccagttccacctccaccaccagtggaa

SEQ ID NO: 105389 - DNA, 201 bp, Homo sapiens; identical to SEQ ID NO: 16822

SEQ ID NO: 105390 - DNA, 201 bp, Homo sapiens
gacagctacaatgtgggcaaagccctttgactggctggtggttcactagttgccttgaagtgggaaggtagagccaatagtcagagttgtgttattttccytttaaaagaattgttttctaatagttattactctgctgtttttataaaacagcacaaaaaaggactcaggagtcttacataagaaaaatagcccactggg

SEQ ID NO: 105391 - DNA, 201 bp, Homo sapiens
tctatttaagactcttgatatatattaacaaattattttcctaagaagttattccatcttccactctaggatctgtttttgaattgtacattgtgcttcartgatttaactattgcatttttacagacagttttaacacctggcagactagcctttcttcatttcttttcttataattattttacctcttctcacctgttt

SEQ ID NO: 105392 - DNA, 201 bp, Homo sapiens
acattagtgtcaccttgctaaaacgttttgctaacttatcagatataaaatgataatacttcaagatcactctaattttcatctctttttaaaaactaatytgttttttaaagtccaagtgatatatgtatattatatgaaaagtcaaagagtactaataataacaagaacaataaaagcagcctccttaaccaaacactt

SEQ ID NO: 105393 - DNA, 201 bp, Homo sapiens
ggtccaggctgggtgggctggggaaccccactgagagtgaccacccctggcttcccctcaggtgtcttctgctgtgggccatcaccactgaccgccatccrcaaaggtgacatctttattgtctatgacaccagattcgtcttctcagaagtgaatggtgacaggctcatctggttggtgaagatggtgaatgggcaggag

SEQ ID NO: 105394 - DNA, 201 bp, Homo sapiens
atcctagcatcgccaaacacaccctggtggtgctcgacccgaggacgccctcagaccactacaactggcaggcaacccttcaaaatgagtctggcaaagasgtgagcacccactgggctggcgggtgggctggctggcttctggcggaatgctcctaatgtgagcagcccctatccccttcctcacctgtcagctggtaac

SEQ ID NO: 105395 - DNA, 201 bp, Homo sapiens
gtggtgtctgtcaactgctacacttgatggtgtccctcaggtctctgaggctctgttcactcttcctcattgtttttcctttctgtctctcagactagatmatcttatgacctgtcttcaagtttgctgattttcctgcaagctctaatctgctattattgtacttttcaactccagaatttatatttggttcttttttaa

SEQ ID NO: 105396 - DNA, 201 bp, Homo sapiens; identical to SEQ ID NO: 16832

SEQ ID NO: 105397 - DNA, 201 bp, Homo sapiens
ctatgagtacaagtatccagaaggtgctagcatcacagggctccttctgactcagcccctgagtcacccagaacatgaaaatagtcaagattgggggtggrcctgggcaacatggtgaaaccccatccctaccaaaaaaaaaaaaaaaaaaaaaaattagctgggtgtggtggcatgtgcctgtggtcccagctactcagg

SEQ ID NO: 105398 - DNA, 201 bp, Homo sapiens
atgccaaaacaggcataggcttaacccaggtcatcctcaaaacaacctaaagggaccgggcatagtgattcacacctgtaatcccagcactttgggaggtygagacagttggattacttgagctcaggagtttgaaaccaacctggccaacatggtgaaaccctgcctctacaaaaaactacaaaaattaaccaagtgtgg

SEQ ID NO: 105399 - DNA, 201 bp, Homo sapiens
tattcccactgagcaggggcttcagtttgctggctatttttatgaagataatgccaatgacagtactgttaagagcaatgagatggtggcacttaagggtwccctactgcataccatgcgcagtacctacatgatccattttactcacaactaacctttcaaagtaggttgtcattatcgtcattttacaaatgaggaaac

SEQ ID NO: 105400 - DNA, 201 bp, Homo sapiens
gcaggggcttcagtttgctggctatttttatgaagataatgccaatgacagtactgttaagagcaatgagatggtggcacttaagggttccctactgcatrccatgcgcagtacctacatgatccattttactcacaactaacctttcaaagtaggttgtcattatcgtcattttacaaatgaggaaactgaggctcaggg

SEQ ID NO: 105401 - DNA, 201 bp, Homo sapiens
gctattcccactgagcaggggcttcagtttgctggctatttttatgaagataatgccaatgacagtactgttaagagcaatgagatggtggcacttaagggttccctactgcataccatgcgcagtacctacatgatccattttactcacaactaacctttcaaagtaggttgtcattatcgtcattttacaaatgaggaa

SEQ ID NO: 105402 - DNA, 201 bp, Homo sapiens
ctgacgtcaagttctctttggaaagcctgggcatctcctcactacagacctctgaccatgggtgagtctgcctgaggtattcttagaaatatgcttctggrcatatatcttgcacatgtgtgcatattcctgagaagtgaattcccagtatggggtcacagggtcaaaatgtagatacattttgctagtgccaaattactt

SEQ ID NO: 105403 - DNA, 201 bp, Homo sapiens
ggacggccgggcgtggtggctcaggcctgtaatcccagcactttgggaggccgaggcaggcagatcacgaggtcaggagatcgagaccatcctggctaacrtggtgaaaccccatctctactaaaaatacaaaaaattagctgggtgtggtggcacacacctgtagtcccagctactggggaggctgaggcaggagaatca

SEQ ID NO: 105404 - DNA, 201 bp, Homo sapiens
tgcttcaaacactgcagatgtcaagacagataagatttagttctgcttcgagttcaccatctctagtggtgaagactcccaggctctttgaaatccatagrcagggtgacggtctcatgaggttcccccagccctgccccctgcacacaactctgtgccctgggaggctttctgagaggcaggtgggactcaccggtggcc

SEQ ID NO: 105405 - DNA, 201 bp, Homo sapiens
cagcctagtgcatttcacccattcatccaggaaaaatttattaggtgtctgttatgcttcaaacactgcagatgtcaagacagataagatttagttctgcytcgagttcaccatctctagtggtgaagactcccaggctctttgaaatccataggcagggtgacggtctcatgaggttcccccagccctgccccctgcaca

SEQ ID NO: 105406 - DNA, 201 bp, Homo sapiens
ttcattgagcagcctagaaaaggtcagtccctttctggggaaagctgtatttaataatcaaactgccttaccagaaggaaggagaaggaaattgtattagyttattttctgttgcttataaaagaatacctaaaactcaggtaatttataaagaaaagaaattcatttattacagttatggaggctgagactccaaggtcg

SEQ ID NO: 105407 - DNA, 201 bp, Homo sapiens; identical to SEQ ID NO: 16837

SEQ ID NO: 105408 - DNA, 201 bp, Homo sapiens
ttccatacattgataaatttttgtgtgtgagttaacacaaacatttattgagcacctaccccttggtagtcacaagaaagccagccacagaagaaaagtgrgccaaagagaccactggactaggagcctgggtctatcgtagagttataaattaggggtgctgaaagtgtcatgagaagtcttctatggtggcagaaattt

SEQ ID NO: 105409 - DNA, 201 bp, Homo sapiens
gggtccaggctgggtgggctggggaaccccactgagagtgaccacccctggcttcccctcaggtgtcttctgctgtgggccatcaccactgaccgccatcygcaaaggtgacatctttattgtctatgacaccagattcgtcttctcagaagtgaatggtgacaggctcatctggttggtgaagatggtgaatgggcagga

SEQ ID NO: 105410 - DNA, 201 bp, Homo sapiens; identical to SEQ ID NO: 16842

SEQ ID NO: 105411 - DNA, 201 bp, Homo sapiens
actgaccccacccctacgtgtgtggcagatgagctttgagaaaggccagggcgtgctcattgggaattggactggggactacgaaggtggcacagccccayacaagtggacaggcagtgccccgatcctgcagcagtactacaacacgaagcaggctgtgtgctttggccagtgctgggtgtttgctgggatcctgactac

SEQ ID NO: 105412 - DNA, 201 bp, Homo sapiens
agagtcttccctggcattgcaggagagaatctgaagggatgatggatgcatcaaaaggtgagtgggtgaaatctccatggagccccacatgccccttcagmcagctggccctaaactgctctcttgcctctgccgggtgcctggggccattgccctctcaccctgacttgtggccctggtgctgcttgctttctgtctcat

SEQ ID NO: 105413 - DNA, 201 bp, Homo sapiens
acattttacatggtagcaggtgagagagagcgagaaagagcaggggaaactgccttataaaaccatcagagctcatgagcactcactgactatcatgagamcagcatgggggaaactgcccccatgattcaatcacctcccaccaggtccctcactcaacatgtggggattatggggattacaatacgagacgagattcga

SEQ ID NO: 105414 - DNA, 201 bp, Homo sapiens
caagcctgctcctgtcccagggcagaatataacctctgtggatgtgtggtcttgcttcagaggacatggttttcatgcctgatgaggacgagcgcaaagartacatcctcaatgacacgggctgccattacgtgggggctgccagaagtatcaaatgcaaaccctggaactttggtcaggtaatgatttgtcgtcttgtgg

SEQ ID NO: 105415 - DNA, 201 bp, Homo sapiens
atgatatagacagatagatagacaaatatatattttttgaactcttgagagtaagttgcagatattacattattaaatattttggtgtgtatttcctaaaracaaggacattctcttacgtaaccaatacaattatgaagaccaggacatgaacaccatttcaatactgttatccaacccacagattttatgcagatttca

SEQ ID NO: 105416 - DNA, 201 bp, Homo sapiens
cattgggtttttgtggaagcagaatctgctggtggaaatgagatgaatgggccagctgctgctggaatcctcgctagtgccccggcctcttccttcctctycctcccatccagatcccagactctcaaccccaattttgcatctgagtgtttttcagggtatcatgaaaatctctcctgaggtgggcatgggttgtgggca

SEQ ID NO: 105417 - DNA, 201 bp, Homo sapiens
cctcccgcttacctccctcccccaacattgggtgttccaagcccctcacaaagaccttgaatctcccccagcacagacagtccccattggcaagcctgctyctgtcccagggcagaatataacctctgtggatgtgtggtcttgcttcagaggacatggttttcatgcctgatgaggacgagcgcaaagagtacatcctca

SEQ ID NO: 105418 - DNA, 201 bp, Homo sapiens
ctatatacacattccacagggccaactgtaggacttgagtgtgtatggatttgggtatactcaggggtcctggaaccaataccctgtggataccgaggaaygactgttaattgtctacctagaaaaccaagagcaccaacttaaaaatagcaagatttaatatgagaattcagagactggccagttacaaagttgctgatc

SEQ ID NO: 105419 - DNA, 201 bp, Homo sapiens
cccctacagctggctcgggaagttcttttggatactttccctcccgcttacctccctcccccaacattgggtgttccaagcccctcacaaagaccttgaakctcccccagcacagacagtccccattggcaagcctgctcctgtcccagggcagaatataacctctgtggatgtgtggtcttgcttcagaggacatggttt

SEQ ID NO: 105420 - DNA, 201 bp, Homo sapiens
cgtcaagttctctttggaaagcctgggcatctcctcactacagacctctgaccatgggtgagtctgcctgaggtattcttagaaatatgcttctggacatmtatcttgcacatgtgtgcatattcctgagaagtgaattcccagtatggggtcacagggtcaaaatgtagatacattttgctagtgccaaattactttgag

SEQ ID NO: 105421 - DNA, 201 bp, Homo sapiens
ttcaggctcctctgaggagaggcaggtcatggatcatgccttcctccttctcagttctgagagggagcacagacgacctgtaaaagagaactttcttcacrtgtcggtacaatcagatgatgtgctgctgggaaactctgttaatttcaccgtgattcttaaaaggaagaccgctgccctacagaatgtcaacatcttggg

SEQ ID NO: 105422 - DNA, 201 bp, Homo sapiens
ctcctttgcaatctctactatccacaggctcatacgctgcctctgttcttgatgttcctcaatctgacagatttgtatttcccctgtggcccattggctgyggttcctgtaccacgtggtaaggaaaggaagacaactccatatagcatcctcaaagggtgcaagagtccagacaggggcaaactgaagatgggatgtgat

SEQ ID NO: 105423 - DNA, 201 bp, Homo sapiens
ctgttacaattagaatgttggccttgacaaagagctctaaagaagagggagagttttttagagacttgtgtggaggcctctgctgagtggagggccaatgscttcgtgcagccatgaggcagagaagctggggtgtgaggatgccagacaccagatgcttcccacctcccctcccccaagatttgacaacaaaaaactcct

SEQ ID NO: 105424 - DNA, 201 bp, Homo sapiens
gggtcttacttctttaatgttgtttttaagttttaaaaatagatcaagtaagctgggcatggcagctcatgcctgtaatcccagcattttgggaggccgargcaggcagatcacctgaggtcaggagttcgagatcaacctggccaacatggtgaaaccctgtctctactaaaaatacaaaaattagctgggcatagtggc

SEQ ID NO: 105425 - DNA, 201 bp, Homo sapiens
gcaggaggagttacacgtaatttcaatggagaccacaagcatcgggaaaaacatcagcaccaaggcagtgggccaagacaggcggagagatatcacctatsagtacaagtatccagaaggtgctagcatcacagggctccttctgactcagcccctgagtcacccagaacatgaaaatagtcaagattgggggtgggcctg

SEQ ID NO: 105426 - DNA, 201 bp, Homo sapiens
agatacctagatactttatagtgattttctctggagaaaggatctgggagtctgggatgggagagaaacttaatttttgtaatgggcatttattacttttrttttattattattattattattattattattattattattattattattatttgagatgaggtctcactctgtcacccaggctggagcacagtgacgtga

SEQ ID NO: 105427 - DNA, 201 bp, Homo sapiens
tactgctgagacgttctagttcacgtaccaagatgagaaaaaacagaaagacttgaaacttttggaaaggaggcactaaccagtattatttgtagatgatrtacagttgacccttgaacagcatcggtttgaactgtgcaggtccactcataggcagattttttcaactgagtacaggtgtatttgtgggaggtgaaacct

SEQ ID NO: 105428 - DNA, 201 bp, Homo sapiens
tacctagatactttatagtgattttctctggagaaaggatctgggagtctgggatgggagagaaacttaatttttgtaatgggcatttattacttttgttttattattattattattattattattattattattattattattattatttgagatgaggtctcactctgtcacccaggctggagcacagtgacgtgatct

SEQ ID NO: 105429 - DNA, 201 bp, Homo sapiens
acctagatactttatagtgattttctctggagaaaggatctgggagtctgggatgggagagaaacttaatttttgtaatgggcatttattacttttgttttattattattattattattattattattattattattattattattatttgagatgaggtctcactctgtcacccaggctggagcacagtgacgtgatctc

SEQ ID NO: 105430 - DNA, 201 bp, Homo sapiens
cctagatactttatagtgattttctctggagaaaggatctgggagtctgggatgggagagaaacttaatttttgtaatgggcatttattacttttgttttattattattattattattattattattattattattattattattatttgagatgaggtctcactctgtcacccaggctggagcacagtgacgtgatctcg

SEQ ID NO: 105431 - DNA, 201 bp, Homo sapiens
agtggcttattcctttctcatcattctgatttattctcttaggtccctagccatttttgacttggctattttatggtctctctctctctctctctctctcwatatatatatatatatatatatatagtttatttaatttaattaatttatttatttatttttgagatggagtttcactcttattgcccaggctagagtgcc

SEQ ID NO: 105432 - DNA, 201 bp, Homo sapiens
gagagcgttgggcatcccagcacgcagtgtgacaggcttcgattcagctcacgacacagaaaggaacctcacggtggacacctatgtgaatgagaatggcragaaaatcaccagtatgacccacgactctgtctggtagggttcctccttctcaacctgccctgtctccttctcccaggaattttcttttttctttttaga

SEQ ID NO: 105433 - DNA, 201 bp, Homo sapiens
gttcttctgaggggcggacactgaccccacccctacgtgtgtggcagatgagctttgagaaaggccagggcgtgctcattgggaattggactggggactaygaaggtggcacagccccatacaagtggacaggcagtgccccgatcctgcagcagtactacaacacgaagcaggctgtgtgctttggccagtgctgggtgt

SEQ ID NO: 105434 - DNA, 201 bp, Homo sapiens
tttttagttttttgaatatattcaaaatagctaatttaaagtctttgtctagtaggttcaatgtcagggcttccttagggacagtttttattgactgtttycatgttcctaccctgccacccccacaccaccatgtatggcctatagtttgtttgcatgtcttgtaattttttgttaaaaattggacattttaaagaacat

SEQ ID NO: 105435 - DNA, 201 bp, Homo sapiens
gttaaaaattggacattttaaagaacataatatggcaactctggaaatcagatcctgtcccccatcccagggttgcttttgtggttgctatttgtttaacracttctctgatataattccagaaattctataatctttcttgtccatgaccactgaattctctgctcagtttgctgaatggtcagctaatgattagatgga

SEQ ID NO: 105436 - DNA, 201 bp, Homo sapiens
gcaggggcatgctctgctgagtgcctgtgctcctgccaatcctgacgccagtagacgctggggaaatgggccaaagagaggaacaaaggcacgtggagggrgtgggtggtgaatccacttcttataccaaacggggataagaacccttctgttgggctttgtgcagaagatgctgcttcagcaaccactggaatggggttt

SEQ ID NO: 105437 - DNA, 201 bp, Homo sapiens
gggctacagagcaagatcctctctcaaaaaacaaacaaaaccaacctaaaggtaggtgttgtaatgatcatcattttacaagggaggaaactgaggcatasagcagtgagcatcctccccggtcactcaaacagctggcatgctccttggcccttctgggcaccccacctgttctggaaagcccacgtcctccaagtactc

SEQ ID NO: 105438 - DNA, 201 bp, Homo sapiens
gcagtgagccgagctcacaccactgtactccagcctgggctacagagcaagatcctctctcaaaaaacaaacaaaaccaacctaaaggtaggtgttgtaaygatcatcattttacaagggaggaaactgaggcatacagcagtgagcatcctccccggtcactcaaacagctggcatgctccttggcccttctgggcaccc

SEQ ID NO: 105439 - DNA, 201 bp, Homo sapiens
tgtgtgagttaacacaaacatttattgagcacctaccccttggtagtcacaagaaagccagccacagaagaaaagtgagccaaagagaccactggactagragcctgggtctatcgtagagttataaattaggggtgctgaaagtgtcatgagaagtcttctatggtggcagaaattttaatctcagatgcccagtcagat

SEQ ID NO: 105440 - DNA, 201 bp, Homo sapiens
gaaaccacgatttttcatcctttgtacacttatgagagaatgagagtgaagaaggcaaatattaccttgggattattatgcaagtagttttgatcacagarcttggaactcccagggatctcccaatgccagtgaggaccactctccaaaggtccactgagttcagccaactggctgctcttgccatctgtgggtggcagg

SEQ ID NO: 105441 - DNA, 201 bp, Homo sapiens
agcagcaggtcagggcggggctgactctgtcggtgctgactctgtcagggttggaagggcttccctgggaagtgaccctgctgagacccacgtcccaccaygtgaagagctgagagcagggtgttcccagccatgagcacggcaagtgccagggccctgaggagacaacacttgtgtcacatgctctttgtcatgagctaa

SEQ ID NO: 105442 - DNA, 201 bp, Homo sapiens
ttttgggaggccgaagcaggcagatcacctgaggtcaggagttcgagatcaacctggccaacatggtgaaaccctgtctctactaaaaatacaaaaattasctgggcatagtggcaggtgcctgtaatcccagctattcgggaggctgaggtagaattgcttgaacctgggaggtggaggttgcagggaggcaagatagtg

SEQ ID NO: 105443 - DNA, 201 bp, Homo sapiens
ttcccactgagcaggggcttcagtttgctggctatttttatgaagataatgccaatgacagtactgttaagagcaatgagatggtggcacttaagggttcmctactgcataccatgcgcagtacctacatgatccattttactcacaactaacctttcaaagtaggttgtcattatcgtcattttacaaatgaggaaactg

SEQ ID NO: 105444 - DNA, 201 bp, Homo sapiens
agagtgccatggcgtgatctcggctcactgcaacctctgcctccccggttcaagcaattcttctgcctcagcctctcgagtagctgggattacaggcatgygccaccaagcctggctaatttttttttttttttttgagacagagtctcactctgtcgcccaggctggagtgcagtggcgcaatctcggctcactgcaagc

SEQ ID NO: 105445 - DNA, 201 bp, Homo sapiens
ttttctaaagagagtatgggacatgtccaaagttatccagttcaattcacacaaagttaatctaattctgtgcttgatgaggagaactcatactggggggstatgatgaatgacctctcccctccaccctgactctttggcagtatcagaagtgactctgaccttggactccaagacctacatcaacagcctggctatatt

SEQ ID NO: 105446 - DNA, 201 bp, Homo sapiens
ctattcccactgagcaggggcttcagtttgctggctatttttatgaagataatgccaatgacagtactgttaagagcaatgagatggtggcacttaagggktccctactgcataccatgcgcagtacctacatgatccattttactcacaactaacctttcaaagtaggttgtcattatcgtcattttacaaatgaggaaa

SEQ ID NO: 105447 - DNA, 201 bp, Homo sapiens
ataagggttttagttaaacaaacggacatctttaacatcctgggaaacatgaggcactgtaactgtgcttttcacaaggcatgatgaggtttgcaaaggaygttagtgtgcaggccaggaggggatgggtggatgtggtcaaagccaggccaccaccagatcaaagatttgtgactgtgtcacctttcatgttttcggagg

SEQ ID NO: 105448 - DNA, 201 bp, Homo sapiens
cccagtctccaggccctcccaacccagagattctgctgagctgtggggccccttcagcctccctcagagactgattcaagttgtaggccagtgctcactgytcctgaaattcaatatttttcaacatttggccttggacaatctgtgctggaatcacctgggggtgattgttaaaaaatgcagattcttggccaggcatgg

SEQ ID NO: 105449 - DNA, 201 bp, Homo sapiens
tgcacagcctagtgcatttcacccattcatccaggaaaaatttattaggtgtctgttatgcttcaaacactgcagatgtcaagacagataagatttagttytgcttcgagttcaccatctctagtggtgaagactcccaggctctttgaaatccataggcagggtgacggtctcatgaggttcccccagccctgccccctg

SEQ ID NO: 105450 - DNA, 201 bp, Homo sapiens
cccaggagtccaccatgcctgctctttccccttcacccccatgctggtatgttcattctctagcccaggggccagcaggtggccaggctggatgctgagaragaacaagtaaaggagaccaagtcattagcaggcagaacttgccatgaggggctctagttctcagtggtgcaggtggactggcacgtacctggctgcttc

SEQ ID NO: 105451 - DNA, 201 bp, Homo sapiens
cgtgtgtggcagatgagctttgagaaaggccagggcgtgctcattgggaattggactggggactacgaaggtggcacagccccatacaagtggacaggcastgccccgatcctgcagcagtactacaacacgaagcaggctgtgtgctttggccagtgctgggtgtttgctgggatcctgactacaggtaagtggcagatc

SEQ ID NO: 105452 - DNA, 201 bp, Homo sapiens
ggtgacagttaagatgggaggtatttcctgctttgcctaggaccctttgcctgtctctctttcatctgttttcattccgtctgaccactcttgagtctggsggtggcctctgctctctctctgattttgatgaatgaagaggcttgtccagccacaggacctgagaggtcacgggaggcccaggccacaccattgtttgag

SEQ ID NO: 105453 - DNA, 201 bp, Homo sapiens
ggggaatgtgatttcttgtggcaaaaagtacaaagaaaaatcagcaaagggaaaagcctgctggggtgaggtcctgagggagctaggcaggtcttccaagmgtcctctccagtgtcacacaggatgtgtttaattcctttagcaattagttgtgacatgttttttctctgtgtatctcattcattcagcaatcataacttt

SEQ ID NO: 105454 - DNA, 201 bp, Homo sapiens
cctgctatgtgcaatgcatagtctatgagcttttgtttgctctcaaggtacttgcaaactagtttaagggatgtgacccaggaacagatcacagacaccamtggagcgttttctttgtgaccaggccccttagaatggaggtccttattccctgtttccacttctccccagtgcctcgccctgccccagctggcttctgcc

SEQ ID NO: 105455 - DNA, 201 bp, Homo sapiens
cctggccaacatggtgaaaccctgtctctactaaaaatacaaaaattagctgggcatagtggcaggtgcctgtaatcccagctattcgggaggctgaggtrgaattgcttgaacctgggaggtggaggttgcagggaggcaagatagtgtcattgcacttcatcctggcgacaagagtgaaactccgtctcaaaaaaaaat

SEQ ID NO: 105456 - DNA, 201 bp, Homo sapiens
caacccatggtgtaaaggtactgtgaatctcaggtctgctggggaatggcaggtgaccccggcaaaacctgctatgtgcaatgcatagtctatgagctttkgtttgctctcaaggtacttgcaaactagtttaagggatgtgacccaggaacagatcacagacaccaatggagcgttttctttgtgaccaggccccttaga

SEQ ID NO: 105457 - DNA, 201 bp, Homo sapiens
gggtgctggacatcttgcagcctcaaatgtggcacatcctatgtcaacccttttccacacctgccctttctcctggggccttcctgaagtcaaaagccatcagatgcccatgctagaagccagttgcactccagcctgggtgagagagaaggactctgtctcaaaaaaaagggggaagagtagagctgggatttgaactga

SEQ ID NO: 105458 - DNA, 201 bp, Homo sapiens
tgactatcatgagaacagcatgggggaaactgcccccatgattcaatcacctcccaccaggtccctcactcaacatgtggggattatggggattacaataygagacgagattcgagtggggacacagagccagccatgtcagcaccttatgcgtactttatccacagcatcttcccaacaacctggagatggtatcacctc

SEQ ID NO: 105459 - DNA, 201 bp, Homo sapiens
aaatgatgtaatgaacaacctataccctttatcatccaggctcacctgttgttaacattttgctccatttgcttaatcattttccctccctccctcctctmcacacacacacacacacacacacacaagctttttatttttgaaccatttgagagtaagttacatataagttggttctttacaacccctaaacccttcaat

SEQ ID NO: 105460 - DNA, 201 bp, Homo sapiens
tcccagctacttgggtgactgaggcatgagaattgcttgaacctgggaggcggaggctgcagtgagctgagactgcactccagtctgggcaacagagcgakactttgtctcaaaaataaataaataaataaaaataaaaattagccagacatggtggtgcatatcggtagttccagctactcagctactcaggttcaaggc

SEQ ID NO: 105461 - DNA, 201 bp, Homo sapiens
cagagctgggacacaaacccggcgtgtgttcatttcatgccacactatgctgcctccctgctgggcacaatttgactttactctcaaggtctaaatcaccraagacagtcatctcctggccaccagtgttggggtgttggtgaggggagctgacgctccctgaggtgtcctttctgatgggcttgtgcaagtaaccatcac

SEQ ID NO: 105462 - DNA, 201 bp, Homo sapiens
attcccactgagcaggggcttcagtttgctggctatttttatgaagataatgccaatgacagtactgttaagagcaatgagatggtggcacttaagggttccctactgcataccatgcgcagtacctacatgatccattttactcacaactaacctttcaaagtaggttgtcattatcgtcattttacaaatgaggaaact

SEQ ID NO: 105463 - DNA, 201 bp, Homo sapiens
gtccatggcaaatgctggacccaatacaaatggttcccagtttttaatctgcactgccaagactgagtggttggatggcaagcttgtggtctttggcaagstgaaggcatgaatattgtggaggccatggagtgctttgtgtccaggaatggcaagaccggccagaagatcaccattgctgactgtggacagctcttataa

SEQ ID NO: 105464 - DNA, 201 bp, Homo sapiens
tgacagagcaagaccctgtctcatacaaacaaaaagacaaatcctaattgaggcctttgcattgtttgaccagctcattcaccttgctaagactgtccgtkctccccagtgcccagtaaattagacatcttctcagcctggctttctggcccctgcagagctggcctctggctcccttcctgagcttaagttcatccccta

SEQ ID NO: 105465 - DNA, 201 bp, Homo sapiens
tggagcttttagcggaactccaaaaccattctgtcccctccagaggtggctaggctgctggttttcactgtgatttggtgctgtggtttttgagtctactstggagctggaaagaaggggagatgggaatcagaatgccacaaaactattcttactgagattgtgctgtttttcttgaataaatgctccttagattattat

SEQ ID NO: 105466 - DNA, 201 bp, Homo sapiens
cagaaccagagggaggagaggcctcaagtgggctcagggtcccacaatctgaaatccctcttctcctctgtggacaacttccatacattgataaatttttrtgtgtgagttaacacaaacatttattgagcacctaccccttggtagtcacaagaaagccagccacagaagaaaagtgagccaaagagaccactggactag

SEQ ID NO: 105467 - DNA, 201 bp, Homo sapiens
gtctgagcttttcaaagcccccgtggacattttgtccctcagcttttccttttaagctttttggtcggcttcttttcccctcaactcccttcttttccttrttgccttaggaaactgcagttgtaaacaattgctgcaggttgtttgtcttaacaaatgctccagggaaaaggctgttggtaatgagggagctctgagtca

SEQ ID NO: 105468 - DNA, 201 bp, Homo sapiens
tgaagatgggatgtgattaagaggaaggcaggaaatcgtaaggactcatagacgagggagcaatttgctatgctatgggatggcagatggtacccatgcakctggggcttttcccaccctccattgcagtatagttacaagcaggtcagtttggacccctgggttgattgtgagcttgtgtaaaaccttgtacaaggtagg

SEQ ID NO: 105469 - DNA, 201 bp, Homo sapiens
tatttggttcttttttaaaaataattttaatctctctcgatattctctatttggcaagccatttgttctcacactttttttttagttttttgaatatattyaaaatagctaatttaaagtctttgtctagtaggttcaatgtcagggcttccttagggacagtttttattgactgtttccatgttcctaccctgccacccc

SEQ ID NO: 105470 - DNA, 201 bp, Homo sapiens
tgctattattgtacttttcaactccagaatttatatttggttcttttttaaaaataattttaatctctctcgatattctctatttggcaagccatttgttytcacactttttttttagttttttgaatatattcaaaatagctaatttaaagtctttgtctagtaggttcaatgtcagggcttccttagggacagttttta

SEQ ID NO: 105471 - DNA, 201 bp, Homo sapiens
cccaggaacagatcacagacaccaatggagcgttttctttgtgaccaggccccttagaatggaggtccttattccctgtttccacttctccccagtgcctygccctgccccagctggcttctgcctccaccactgtacagaggctgccttcgtgggggtggggaggggccaccaaggacttcttccttgccagctccaggt

SEQ ID NO: 105472 - DNA, 201 bp, Homo sapiens
tatgcctcataaatgctggggctcctgttcccctgcaccttaggggctgatgggattaccgggggccctcacgctgactctctggggcccaggagtccacyatgcctgctctttccccttcacccccatgctggtatgttcattctctagcccaggggccagcaggtggccaggctggatgctgagaaagaacaagtaaag

SEQ ID NO: 105473 - DNA, 201 bp, Homo sapiens
cctgtacaaccttctttagagattccattaagtgctttcaaaggtgaactcacaaggctttgtcctctctctggttttaataaggtggaaaggatcgtctrgccagggctcctcaggggttaagagaggtgcaggccactgacaatttaaaaacggaagatgccaaaacaggcataggcttaacccaggtcatcctcaaaa

SEQ ID NO: 105474 - DNA, 201 bp, Homo sapiens
gagcacagtgacgtgatctcggttcactgcagcctccagttcccaggttcaagcgattctcctacctcagcctcctgaatagctgggattacaggcatgcrccacattacccagctaattttttatttttagtagagatggggtttcaccatgttggccaggctggtcatgaactcctggcctcaagtgatccgcctgtcc

SEQ ID NO: 105475 - DNA, 201 bp, Homo sapiens
ttttgttttattattattattattattattattattattattattattattattatttgagatgaggtctcactctgtcacccaggctggagcacagtgaygtgatctcggttcactgcagcctccagttcccaggttcaagcgattctcctacctcagcctcctgaatagctgggattacaggcatgcgccacattaccc

SEQ ID NO: 105476 - DNA, 201 bp, Homo sapiens
gccaggcttgtctcaaccacctgacctcaggtgatctgcttgtctcggcctcccaaagtgccgggattacaggtgtgaaccaccgcacccagcctcaaacttttttttttttgaaaaaagcagtccaactgctcagaaggaaacttcgtgtgccacctcataatgtaaagcagaactactccagctgaagtgtgcccaggg

SEQ ID NO: 105477 - DNA, 201 bp, Homo sapiens
agtggtgtctgtcaactgctacacttgatggtgtccctcaggtctctgaggctctgttcactcttcctcattgtttttcctttctgtctctcagactagataatcttatgacctgtcttcaagtttgctgattttcctgcaagctctaatctgctattattgtacttttcaactccagaatttatatttggttctttttta

SEQ ID NO: 105478 - DNA, 201 bp, Homo sapiens
atccttaagtctgaagaaaacatcctataccttctcttcaacccatggtgtaaaggtactgtgaatctcaggtctgctggggaatggcaggtgaccccggyaaaacctgctatgtgcaatgcatagtctatgagcttttgtttgctctcaaggtacttgcaaactagtttaagggatgtgacccaggaacagatcacagac

SEQ ID NO: 105479 - DNA, 201 bp, Homo sapiens
ggtgatcagggaataaacattctctgtgctctctttccacatgtgctgcgttgctgacagagctgcaagttctccacattgacttcttgaatcaggacaaygccgtttctcaccacacatgggagttccaaacgagcagtcctgtgttccggcgaggacaggtgtttcacctgcggctggtgctgaaccagcccctacaat

SEQ ID NO: 105480 - DNA, 201 bp, Homo sapiens
gatcagggaataaacattctctgtgctctctttccacatgtgctgcgttgctgacagagctgcaagttctccacattgacttcttgaatcaggacaacgcygtttctcaccacacatgggagttccaaacgagcagtcctgtgttccggcgaggacaggtgtttcacctgcggctggtgctgaaccagcccctacaatcct

SEQ ID NO: 105481 - DNA, 201 bp, Homo sapiens
atttattttttcatattggtatggtgtctttacacagtagagtgttatgtgctgtgaatttttttatagcagttttgtattcaattttttaaatttgattyttatttattttgaggtggagtctcactttgttgcccaggctggagtgcagtgacacgatcttggctcactgcaatctccatccgtccccaggttcaagtg

SEQ ID NO: 105482 - DNA, 201 bp, Homo sapiens; identical to SEQ ID NO: 16840

SEQ ID NO: 105483 - DNA, 201 bp, Homo sapiens; identical to SEQ ID NO: 16845

SEQ ID NO: 105484 - DNA, 201 bp, Homo sapiens; identical to SEQ ID NO: 16846

SEQ ID NO: 105485 - DNA, 201 bp, Homo sapiens
ggtgggctggggaaccccactgagagtgaccacccctggcttcccctcaggtgtcttctgctgtgggccatcaccactgaccgccatccgcaaaggtgacrtctttattgtctatgacaccagattcgtcttctcagaagtgaatggtgacaggctcatctggttggtgaagatggtgaatgggcaggaggagttacacgt

SEQ ID NO: 105486 - DNA, 201 bp, Homo sapiens; identical to SEQ ID NO: 16868

SEQ ID NO: 105487 - DNA, 201 bp, Homo sapiens
gacccaattaatgtggatggtataggatttgaaacttgaggagatttgatttctcaactgtgggcattgcaatgatcatgaatactaagagttaaaaaggragataacgaaatgcatccagtctaccaattattacttgagtgcctgccatattgtagaatgttctagggacaaatatggcagagaacaaaacaaaccaaa

SEQ ID NO: 105488 - DNA, 201 bp, Homo sapiens
tgtatacatttcgaaatatgataccaagcttactggtctaattttaaacctagaaaaattaaaccacaaaatgctaataatatatttattgaaacctactraaaagaaccagttctgtacctcagcagcccttatcctggctacatatagaatcacctgagaagcttaaacaaaatctatgtctcagccttatcccaggcc

SEQ ID NO: 105489 - DNA, 201 bp, Homo sapiens
agaaaaggaaaaagggttttgaactattccaataagagaaaaagtaaggagagatgtacaagttattgaggaaatagtttatatatatatatatatatatwttgtgagttttgtgagtgcagtaaagctttttaattttatttgcccttttttagttgtctcctaaaaagacttgggaaggattcattggtggtttctttt

SEQ ID NO: 105490 - DNA, 201 bp, Homo sapiens
gtaactgtccattctgctaagtcaggtgtcatcacactctttctgtaaagggcaaacaatacatttattaggatgtgcagaccatatattctatcaaagcwtctcaaccctgaaccctgctgttacagtgagaaagccccccgtggacaatatgtcaatgaatgggcatggctggatttaataaaactttatttataaaaa

SEQ ID NO: 105491 - DNA, 201 bp, Homo sapiens
ggcgctcgccaccacatctcgctaaattttgtattttaagtagagacgggtgttgctatgttggccaatctggtctcaaactcctggtctcaagtgatccrcctgcttcggcttcccaaggtgctgggattacaagcatgagccattgtgcctggcctgaagattaattaagctttctttaaaagtgggattcagatttgt

SEQ ID NO: 105492 - DNA, 201 bp, Homo sapiens
cacttatccctattaaaataacacgaacttgtcttctttgccttttatcattaggggcccaaatcccagcaaagtgctacagcagttgttggtgcttcaasctgaacagcagttaaatatatataaaaccctgaagactcatctcattgagaaaggaatcctacaacccaccttgaaggtataactggatccagagaggga

SEQ ID NO: 105493 - DNA, 201 bp, Homo sapiens; identical to SEQ ID NO: 16870

SEQ ID NO: 105494 - DNA, 201 bp, Homo sapiens
aaaaaaccttaagaacacgttaaatactaactttacattttctttgtaggtggaaaaactggtggatacgtggaattctcactctaactatgatctcgttktttttcctgatcatctatatgggatccttcatgctgatgcttcttgtaagtttttgacttttccctgagtgtctcttgctttgtttttcaacatttatat

SEQ ID NO: 105495 - DNA, 201 bp, Homo sapiens
ttgatcctgggaggtggaggttgcagtgagctgagatcacaccacggcactccagtctgggtgacagagtgagatcctgtctcaaaaaaaaaaaaaaaaaragaatattaaagatctaagtaaagtaggtttgaactgttattggttatttaagtttattacatacacatacatgcatagatatatatatatatattatgt

SEQ ID NO: 105496 - DNA, 201 bp, Homo sapiens; identical to SEQ ID NO: 16867

SEQ ID NO: 105497 - DNA, 201 bp, Homo sapiens
aagagagaaatgggttggcaaaaattaaccaaagactttttcagtaattattttaaaaagaaaaatgttatatttagaatggtattttctttaatggtctycaatccaagattttttgttaaatggtgagttttttttgcatgttggaaaccaaacagctattgctgttgtagtttagatatttttagggtgcctgagtga

SEQ ID NO: 105498 - DNA, 201 bp, Homo sapiens
cacaccttgtcatccaaaatctgtttgaaggcatgatatggtaaggcaacagaattatgctgctttataagtatgtcatagcacttttatagttctttaaygttggatagtgtcttacagatttctactaaaatgtactgtttgttgttcttatattccattaaactatcttactgagttttgcttactctttgacaacta

SEQ ID NO: 105499 - DNA, 201 bp, Homo sapiens
aggcaacagaattatgctgctttataagtatgtcatagcacttttatagttctttaacgttggatagtgtcttacagatttctactaaaatgtactgtttrttgttcttatattccattaaactatcttactgagttttgcttactctttgacaactaaagacaaaatgcttcattaacaactggataccattcttattca

SEQ ID NO: 105500 - DNA, 201 bp, Homo sapiens
catggtggctcacacctgaaatcccagcactttgggaggccaaggcaggaggatcacttgagcccaggagttagagaccagcctgggcaagatagtaagaycctgtctctatttttttttaaaaaaaaggagtgaggacttgtgcttagaatacactgcatatatgttactagactttaagttgaatcaaaatctcttgta

SEQ ID NO: 105501 - DNA, 201 bp, Homo sapiens
ttttttattttcttaaactgtagctagtacaactgtacaatgcaatgtagtattcagatctgtaaattcatgtgatagtgaggcttattttggacttggawtatattttctgttctttatgcttagcttttctccattaagacattctgctgaacataattgctgggaaattgttgtgtttcttgtatttctaatttaagg

SEQ ID NO: 105502 - DNA, 201 bp, Homo sapiens
cataacccattttaatacttcagagactttattctgatatttggtttctgtccctcattaatgacctgatgaccaaatcctcccacacatcacagtctttrtctcccctgagcaacaactttcactttttgctcctgaatcttttcctcctgccccaacaccactaacttctagatttttttccagatttctttccatgaa

SEQ ID NO: 105503 - DNA, 201 bp, Homo sapiens
gctcaaagcttgaggatggccactctggagcttagattcaagttgccctgagtatacactctgatcagcagcagttacaaggttttttttgttttttttttctcgtttagatagagtcttgctctgtcacccaagctggagtgcagtggcacaatcttggctcactgcaacctctgtctcccagattcaagcgattctcct

SEQ ID NO: 105504 - DNA, 201 bp, Homo sapiens
tctttaaaaaatataaaaatccattcttagctcaaggacagtataaaaacaagcccttggggtgtgttctctagacgctgaaaagctagtctgctgtattsacaaagatttttacctcttaattcatgataataagtgttcaacttgccatttgctctttgagtcttggaatcgacaggtcaagcaccgggtgtgatgcta

SEQ ID NO: 105505 - DNA, 201 bp, Homo sapiens
ctgtcattgggtgatttcaggcgcctagatttaaaacagcacttcaagtgtttcatcgcttacttatgatcaatttcaagaaatcattagcctttatttcwttttatagctgtttatactttatttggttgagaaatgtttcagaacttatttaatgagaatgacatcacattttgaaacaactctagaaatggagaggaa

SEQ ID NO: 105506 - DNA, 201 bp, Homo sapiens
tagctggggcttcaggtgcatgccaccacacccggctaatttttgtatttttggtagagacagagtcttgccatgttgttcaggcttgtcccaaactcctrggctcaagcagtctgcccatttcagcctcccaaagtactgggattaaaggcgtgagccaccgcccctgggctctgtggttttttctctcggccattggtg

SEQ ID NO: 105507 - DNA, 201 bp, Homo sapiens
tttgacacacacacacatatatatatatatatatatatatatatatatatatatatatatatgcctatgaagccatcattataatcaagataatgagctartctatcaccactaaaagtttgcccctttttgtagttcttccctcatccttagacacgtactaatctgctttctggcactatagatgagtttgcattttct

SEQ ID NO: 105508 - DNA, 201 bp, Homo sapiens
cgggttaggaatggtagttaacttgagatttctaaagaatatctgagggttaccatgtgaattttcacttagtgtttatgatctttaaacagttcattttmttattattttgagagatactaccatagaatgtcatcaactacatcaagctttggatgtgtaccacagtgggtttttttgatgctgtcatcctaaggaaga

SEQ ID NO: 105509 - DNA, 201 bp, Homo sapiens
ataagaagttaatttctttttctgctaatttgctaagatcttaaagtgctttttctcacaaaggaaaaatggataataaataggatagacttaatgtgagrgcagaggaagcggagcttgaaagccaagtgggcaggcgtgggaaattgtctgcatttgattccaggaagaggcccccagctcccagtcttctgtcgctga

SEQ ID NO: 105510 - DNA, 201 bp, Homo sapiens
aagagggagagtgaggaggtgccacagacttttcaacaaccagatatcatgagaactcatgggacagcaatagggggatggtgcttaaccattagaaaccscctccctgacccagtcacttcccaccaggccccacctccgacactgaggattacaagtggacgtgacatttgggtggagacacagatccaaaccatatca

SEQ ID NO: 105511 - DNA, 201 bp, Homo sapiens
ctcatccttagacacgtactaatctgctttctggcactatagatgagtttgcattttctggaattttatataaatggaataatataatacgtgtgtgtgtrtatatatatatatgtattacatgtacattttgtctggcttcttttactcagcataattattttgagattcatccatgtatcaattgttcacttattttta

SEQ ID NO: 105512 - DNA, 201 bp, Homo sapiens
gaggaacacttccacagagccttggtagtatttcagagggggagaggcaagttgtaacgtatttgagaattggaagtttggtttaaggcaggtcttttttkttttgttttgttttgagacggagtctcactctgttgcccaggctggagtgcagtggcgcgacctcggctcactgcaagctctgcctcccgggttcacgcc

SEQ ID NO: 105513 - DNA, 201 bp, Homo sapiens
tttaaaagtgtcagactctcagttagtctttcctagatccagacaagagagaaccttcagagaaggccaggttgcatcaatgcagattttctctacagacrcaaatctacctcacaaaagacagctttgcagggctgtttgtttgcaggccctctgaacagccatctcaaaatatgtcaaagaagtataatttggggtgaa

SEQ ID NO: 105514 - DNA, 201 bp, Homo sapiens
atatagttaacatattttccatgtttatttttatttctgttattttaattagtaattttttggttaaattttattccagcctctctttttcattgtttctygtgtataaagctatttctttcatcatgttcttaaatagcaattactcccttatagtgggtttaaaaagtgcttgttaagaatcactccaggccgggtgcg

SEQ ID NO: 105515 - DNA, 201 bp, Homo sapiens
gacagcctaaatgccctgctcagaatcatggtatttagagccaggatttaccttaaattttctaattaaaaaatgtaaaggagaaatcagatgtgtggtcytaaatgtataaaatcaatttaaaacattaagaaaatttttactgttactaccttgtgtgactttggactaatttggtctttttgaatctatgaaatgttg

SEQ ID NO: 105516 - DNA, 201 bp, Homo sapiens
tgaaaaaaatacttcttacctgcagaggaatgttcccaagtgttaaatgttggagtggtacttgaaaaatgacaagggacatcttcaaggaaccctgcagragacatatatgagttagatttattggaagtctgtacaaggctcattgttagcatagagggcatgcttggcgtctacctggagactgtaggaaaagctcta

SEQ ID NO: 105517 - DNA, 201 bp, Homo sapiens
tgtgaaaattatatgtgctaaaatgtccatgttttgttgtactgattctatttttggccaatagcaggtcaatactgactgtgtgtacttggaatgaataygtctcattcttattccaagaacttacaccaactattatcaggttttatattagcataagagtcatgggacagttattttagtatagagtttatactcttt

SEQ ID NO: 105518 - DNA, 201 bp, Homo sapiens
ttcagagaaggccaggttgcatcaatgcagattttctctacagacgcaaatctacctcacaaaagacagctttgcagggctgtttgtttgcaggccctctkaacagccatctcaaaatatgtcaaagaagtataatttggggtgaaatattctgatttccttcacttgctagaccctgaagtgggagaaaagagggtgcac

SEQ ID NO: 105519 - DNA, 201 bp, Homo sapiens
cagaaagttttaaaaaataagcttggagtagtggttcacgcctatagtcccagctactggggaggctgaggtgggggatcacttgagcctgggaggttgakgctgctgtgagctgtggttgtgctactgcactgcagcctgggcaacacagaccatctcaaaaaaaaaaaatgacagaaatacacacacatataacatcaa

SEQ ID NO: 105520 - DNA, 201 bp, Homo sapiens
ccctatttttcaaatgccagacagaaataggtatttttttcttttttcttttctttctttcattttttaaataagatggggttttaccacattgcccaggytggtcttaaactcctgggctcaagcagtctgcccactttgacctcccaaagtgctgggattacaggcgtgaaacatggcaccaggccagtattttctttt

SEQ ID NO: 105521 - DNA, 201 bp, Homo sapiens
gtctgcccactttgacctcccaaagtgctgggattacaggcgtgaaacatggcaccaggccagtattttcttttcttttaactgagtttaagattattgtstaaaactccacaatccattaccattttatatttgtgcaacatttaaaaatgtgtgatgaccacaaaatttcagctaattatattacccttcattgtatac

SEQ ID NO: 105522 - DNA, 201 bp, Homo sapiens
tataccacattccaagacacacaaatgtatattttaactgctgcaaaaatgttatgaaacaattcttcccattactgtgtaataccctctgatttcttttstatttgatgctgttctatgttattgaacaaaaaatgctacatgtaacttattcaatggattttactacccttgggtcatagcctgcgatctgaaaaccac

SEQ ID NO: 105523 - DNA, 201 bp, Homo sapiens
ttatcaaagatatgacatgagcctgggcaaaaaaacacaagcctgagacctcgtctctacagaaagttttaaaaaataagcttggagtagtggttcacgcytatagtcccagctactggggaggctgaggtgggggatcacttgagcctgggaggttgatgctgctgtgagctgtggttgtgctactgcactgcagcctgg

SEQ ID NO: 105524 - DNA, 201 bp, Homo sapiens
cattgtgccaagcatattttatcaaagatatgacatgagcctgggcaaaaaaacacaagcctgagacctcgtctctacagaaagttttaaaaaataagctwggagtagtggttcacgcctatagtcccagctactggggaggctgaggtgggggatcacttgagcctgggaggttgatgctgctgtgagctgtggttgtgc

SEQ ID NO: 105525 - DNA, 201 bp, Homo sapiens
aagtaatgaaaatgaataagaagttaatttctttttctgctaatttgctaagatcttaaagtgctttttctcacaaaggaaaaatggataataaataggayagacttaatgtgagggcagaggaagcggagcttgaaagccaagtgggcaggcgtgggaaattgtctgcatttgattccaggaagaggcccccagctccca

SEQ ID NO: 105526 - DNA, 201 bp, Homo sapiens
tgtttgcaaaatgactattcagtgtgttcattcagcagagaccaagtttgtataacaggtacatatctatgtgtctgacattgtgccaagcatattttatmaaagatatgacatgagcctgggcaaaaaaacacaagcctgagacctcgtctctacagaaagttttaaaaaataagcttggagtagtggttcacgcctata

SEQ ID NO: 105527 - DNA, 201 bp, Homo sapiens
caaagggttattctgatggttcattatgaatcataacctttccgaatatctgccacttactcaggtgaacttttttctgctgacttttttttttttttttwaaaacaggttccttgttccaatatcaagtgttatctgcaatgacataactgcttacctttttggatttttttttgggagaactccattaattaaggtaat

SEQ ID NO: 105528 - DNA, 201 bp, Homo sapiens
tagcctcctaaccagcccctttttagtaattctttgttccatatatgactttttggactctacttctataaaatacaatcaatgttgtgtcttttttttttgaaacacagtctcactccattgcccaggctggagtgcagtggcgcgatctcggctcatggcaacctctgcctcctgggttcaggtgattctcatgcctca

SEQ ID NO: 105529 - DNA, 201 bp, Homo sapiens
gcggaacttgcagtgagccaagatcctgccactgcactccagcctgggagacagagcaagactctgtctcaaaaaaaaaaaaacaaacaaaaaaaaaaaaactagtttttttttttaaatgaaaatatatgcccatgataaaaatttagactagaaaggagtattccatgaaatcctcctccacctcagtgccttacttac

SEQ ID NO: 105530 - DNA, 201 bp, Homo sapiens
acctgggtggcggaacttgcagtgagccaagatcctgccactgcactccagcctgggagacagagcaagactctgtctcaaaaaaaaaaaaacaaacaaamaaaaaaaaactagtttttttttttaaatgaaaatatatgcccatgataaaaatttagactagaaaggagtattccatgaaatcctcctccacctcagtgc

SEQ ID NO: 105531 - DNA, 201 bp, Homo sapiens
agaatggcatgaacctgggtggcggaacttgcagtgagccaagatcctgccactgcactccagcctgggagacagagcaagactctgtctcaaaaaaaaamaaacaaacaaaaaaaaaaaaactagtttttttttttaaatgaaaatatatgcccatgataaaaatttagactagaaaggagtattccatgaaatcctcct

SEQ ID NO: 105532 - DNA, 201 bp, Homo sapiens
atgcgatattactatctgtttaaagctagaaaaggaattcgggcgtgtttggtaatatagtggtgcaagtaagaacttgtgaagaaatgcagttttatgaycttatggactggatggtttgggaaattggaccagagaatagattgttgtatcaaaccgtctgtttagaaaattccattttatttgagaaacccaaaacac

SEQ ID NO: 105533 - DNA, 201 bp, Homo sapiens
ccctgagtgtctcttgctttgtttttcaacatttatataggattgaagtaatttgagcatatcataaaaaagaagctaattcaacactcagtcacagaatmtttagttcctttaagtgtcttttatttcatgatatgatctaacttaatcttttctgtttgcaaaatgactattcagtgtgttcattcagcagagaccaag

SEQ ID NO: 105534 - DNA, 201 bp, Homo sapiens
ttactttttaaaattttaaatttcattttattttcccagagattaggtctccccatgtggcccaggctggtctcgaactcctgggctcaagggatccttcygccttggcctcccaaagtgctgggattacaggcacaagccactgcacccagcctttcattcaggtttattgttcagttcagctttccaaatttgttcctt

SEQ ID NO: 105535 - DNA, 201 bp, Homo sapiens
tttgagaccagcctggccaacatggcgaaacccgatctctactaaaaatacaaaaaaaaattagccgggtgcggtggcaggtgcctgtaatcccagctatytgggaggctgaggcaagagaatcgctgtaacctgggaggcagaagctgcagtgagctgaaatcatgccgctgcactccagcctgggcgacagagcgagac

SEQ ID NO: 105536 - DNA, 201 bp, Homo sapiens
agaaatctttggaatccaagtctttctgttaaacaatattccaagtgccctgtgaaaattttagttctattacagtggtcaaatgacttcagaaaatgtaygtcttaccagatttaaaaagcagagacagttcaaattacttcattgacattgaattttatttaaataaaatgtaggtatctccaattctgaccccctcat

SEQ ID NO: 105537 - DNA, 201 bp, Homo sapiens
agctatgtgcgggttaggaatggtagttaacttgagatttctaaagaatatctgagggttaccatgtgaattttcacttagtgtttatgatctttaaacarttcattttcttattattttgagagatactaccatagaatgtcatcaactacatcaagctttggatgtgtaccacagtgggtttttttgatgctgtcatcc

SEQ ID NO: 105538 - DNA, 201 bp, Homo sapiens
agtgccttacttacgatatctggaggcttactactgttattccagaaattgtctgagtattcaagcttttatgtttatatcccccctccctttttcttatrcaagtaagagtatctcttctgtaccatttttccacttcatatattaatagcttatagatggatttatattggcacatctacatctatcattgtatccata

SEQ ID NO: 105539 - DNA, 201 bp, Homo sapiens
ggcacccacagttcaggaggggggtttcgggcactggggtggggcattagagggccctgagcctggctgcccgcaggaaggaggtctacaccacgctgaarggcctctacgccacgcacgcctgcggggagcacctggaggcctttgctttgctggagcgcttcagcggctaccgggaagacaatatcccccagctggagg

SEQ ID NO: 105540 - DNA, 201 bp, Homo sapiens
ctgatcacatcccctacccttagcccaaccctggacaggagtctgtcggctccaggagcctccgtggcctgtgcccccaccccagcacagcctcctgaccygtgcatcccctctgccctcagggcttctcggaccaggtgtaccgccagcgcaggaagctgattgctgagatcgccttccagtacaggcagtgaggggccc

SEQ ID NO: 105541 - DNA, 201 bp, Homo sapiens
ggagcgggaggcggcggtggcagcagcggccgctgcagtcccctcggagcccggggaccccctggaggctgtggcctttgaggagaaggaggggaaggccrtgctaaacctgctcttctccccgagggccaccaagccctcggcgctgtcccgagctgtgaaggtgtttgaggtgagctggtggccttcgtgtccctgggg

SEQ ID NO: 105542 - DNA, 201 bp, Homo sapiens
agggatcctgagcccacccctagggctgaggctaccaagccccactgtgcctcttgccttgcccatcccctggatccccctcacccaccatttcccacgtsgggggctcccagcagggcagcacaagaggcaggggcagggcagtgtgccctctcccacccacccagcacagcggctcaggtgaccactgattgcattagt

SEQ ID NO: 105543 - DNA, 201 bp, Homo sapiens
ccacctgagccctgtgcacaccacagccaggccatggctagaccctgcagagccacagggcgatgcctgtcagccaggggacccagaacacctcctgggcycctccccagcacatggctgggctcctccagcaggcctggatttgggaagggcccgtggtgggcaaggctggtgctggggagcaggcctggtggcctcaga

SEQ ID NO: 105544 - DNA, 201 bp, Homo sapiens
ggctctccccaaagcggccatgcctgtcggctgcctgctgcccccaccctgtggctcagggtccagtatgggagctgcgggggtctctgaggggccagggrtggtggggccactgagaagtgacttcttgttcagtagctctggactcttggagtccccagagaccttgttcaggaaagggaatgagaacattccagcaat

SEQ ID NO: 105545 - DNA, 201 bp, Homo sapiens; identical to SEQ ID NO: 16878

SEQ ID NO: 105546 - DNA, 201 bp, Homo sapiens
gtgcatccgatcgactggcagggcggctgttccggggcccacctcgtccatgcgctccgcccgccctgctgtggggctccatctgatggcctcattagggmtaattgctctggcatttgggtctgacagggacggcggattctgtcctgtgttggggcgtcttggttcttccagcttgggggatggaggggagctgcttcc

SEQ ID NO: 105547 - DNA, 201 bp, Homo sapiens
ctcccctgagccgtgagtgcgcgccctggccgccagcccgagggtggggggtgcgacgggcggcccctcagcccccttctccctcctacgcgcagggactkctgccacgagctgctggggcacgtgcccatgctggccgaccgcaccttcgcgcagttctcgcaggtacgccgcggcctcggagggagccggggtcaccca

SEQ ID NO: 105548 - DNA, 201 bp, Homo sapiens
ctgccccagcaggcacacagtaggcgctcaaaaacgtgctctcatcccctgcctctgtgtgccatcagcgctgcccgactgtgggaccagctgtgggtggrggtccccgggtctcagcaggtggaggaggcatgggtgccccttgtccccacagtccccgcggttcattgggcgcaggcagagcctcatcgaggacgcccg

SEQ ID NO: 105549 - DNA, 201 bp, Homo sapiens
tgatgccattggcctcctgccagcactgcctgtctgaggagcctgagattcgggccttcgaccctgaggctgcggccgtgcagccctaccaagaccagacrtaccagtcagtctacttcgtgtctgagagcttcagtgacgccaaggacaagctcaggtgggctaggctgctagggcaagccccccatggtgcccccaaac

SEQ ID NO: 105550 - DNA, 201 bp, Homo sapiens
ccctccctcctgcccttctcactccccgaggggacctgctgaccactggccccctccccagcggcgacccgattccccgtgtggagtacaccgccgaggarattgccacctggtgagacctccgtgcagctaggggctggggaggagcccgggggatgcctcctggaatcctggcgtgtgagggccgcctccagggacctt

SEQ ID NO: 105551 - DNA, 201 bp, Homo sapiens
tcccccgtcctcccccgccctcccctaccctcccccaccaggctccccatcaggcatcccctccccagggcgccccggggcccagcctcacaggctctccrtggcctggaactgcagccccagctgcatcctacacccccaccccaagggtaagtaagaggggactctgggaggggcttctgctgctccccttcatgttcc

SEQ ID NO: 105552 - DNA, 201 bp, Homo sapiens
ggccttcagcctgcctcagccctgcctgtcacccagatcactgtccttctgccatggccctgtggatgcgcctcctgcccctgctggcgctgctggccctstggggacctgacccagccgcagcctttgtgaaccaacacctgtgcggctcacacctggtggaagctctctacctagtgtgcggggaacgaggcttcttct

SEQ ID NO: 105553 - DNA, 201 bp, Homo sapiens
tggtgagacctccgtgcagctaggggctggggaggagcccgggggatgcctcctggaatcctggcgtgtgagggccgcctccagggaccttggcacaacargagagactaaggccgggaagaagagggacttgcagggctcagaatgttgggttgggaggaagaggctacccatcctgtcgggccatccccagtgtgctga

SEQ ID NO: 105554 - DNA, 201 bp, Homo sapiens
cccctccccagcggcgacccgattccccgtgtggagtacaccgccgaggagattgccacctggtgagacctccgtgcagctaggggctggggaggagcccrggggatgcctcctggaatcctggcgtgtgagggccgcctccagggaccttggcacaacaagagagactaaggccgggaagaagagggacttgcagggctc

SEQ ID NO: 105555 - DNA, 201 bp, Homo sapiens
tcagccctgcctgtcacccagatcactgtccttctgccatggccctgtggatgcgcctcctgcccctgctggcgctgctggccctctggggacctgacccrgccgcagcctttgtgaaccaacacctgtgcggctcacacctggtggaagctctctacctagtgtgcggggaacgaggcttcttctacacacccaagaccc

SEQ ID NO: 105556 - DNA, 201 bp, Homo sapiens
ccacatagccggctcacggcacagtcagctggggtgcaccctcctgtccatcctccaacccaaaggcctcgctgcactaggcgggtgtggacctgtgcccwgtgaagctccctccctccctcctgcccttctcactccccgaggggacctgctgaccactggccccctccccagcggcgacccgattccccgtgtggagta

SEQ ID NO: 105557 - DNA, 201 bp, Homo sapiens
  misc_feature (1)...(201): n = A,T,C or G
tctgcgcggcacgtcctggcagtggggcaggtggagctgggcgggggccctggtgcaggcagcctgcagcccttggccctggaggggtccctgcagaagcntggcattgtggaacaatgctgtaccagcatctgctccctctaccagctggagaactactgcaactagacgcagcccgcaggcagccccccacccgccgcc

SEQ ID NO: 105558 - DNA, 201 bp, Homo sapiens
cccatggtgcccccaaactgggccagccaggccttccttctggccttgagcagggctggacctgtgagcccaggtcacagatgagaaaaccgacccctggytgcagcagcccccacacagcagggacaccatccgtgagaaggaccccagcgtctggggaggggcagacctacaggactgggggctgctgggtggccgggt

SEQ ID NO: 105559 - DNA, 201 bp, Homo sapiens
gcacgtcctggcagtggggcaggtggagctgggcgggggccctggtgcaggcagcctgcagcccttggccctggaggggtccctgcagaagcgtggcattktggaacaatgctgtaccagcatctgctccctctaccagctggagaactactgcaactagacgcagcccgcaggcagccccccacccgccgcctcctgcac

SEQ ID NO: 105560 - DNA, 201 bp, Homo sapiens
catggccctgtggatgcgcctcctgcccctgctggcgctgctggccctctggggacctgacccagccgcagcctttgtgaaccaacacctgtgcggctcasacctggtggaagctctctacctagtgtgcggggaacgaggcttcttctacacacccaagacccgccgggaggcagaggacctgcagggtgagccaaccgc

SEQ ID NO: 105561 - DNA, 201 bp, Homo sapiens
ctcccacggcctgtgctgccacctgccggctacctgggaacggcgcccacgggcttacgaatatggtcaaggagggctgcctggcggaggaggcccggtgkaggtgcggatcctgggcggccagggaaggtctctgccgcccgggaagtgtcccagagacccctggaggggctgctgacacccccggtgcccccacctcga

SEQ ID NO: 105562 - DNA, 201 bp, Homo sapiens
ccctctggggacctgacccagccgcagcctttgtgaaccaacacctgtgcggctcacacctggtggaagctctctacctagtgtgcggggaacgaggcttsttctacacacccaagacccgccgggaggcagaggacctgcagggtgagccaaccgcccattgctgcccctggccgcccccagccaccccctgctcctggc

SEQ ID NO: 105563 - DNA, 201 bp, Homo sapiens
gagtgcgacctagggctggcgggcaggcgggcactgtgtctccctgactgtgtcctcctgtgtccctctgcctcgccgctgttccggaacctgctctgcgyggcacgtcctggcagtggggcaggtggagctgggcgggggccctggtgcaggcagcctgcagcccttggccctggaggggtccctgcagaagcgtggcat

SEQ ID NO: 105564 - DNA, 201 bp, Homo sapiens
cagtgtgggccatgagcctccggcgtggtgttcatcaggcatgtctctcctcctggcctgggcacctgagcactggggccgccctgggcagagctggggcrgggtgctggggggcctggagctgcctcaccgagggatcctcagcagccgaccctgggggaggcaaatgagactctttctggggaccttgaggggagctcg

SEQ ID NO: 105565 - DNA, 201 bp, Homo sapiens
aggctgacccagcactgagctctaccaagaccaggggccagccgtgtgctccctccaggcctgtgcccagcgtggagaggcctcgtcccgtgggcgctggrgtggagccttcctggtgtttgtggacatctctggagagggccagaggcaggtgggtgacacggggcatggctcaatcatgggtggtccagactggagagg

SEQ ID NO: 105566 - DNA, 201 bp, Homo sapiens
agttgacgagggctctgccgctctcctccccaggagctatgcctcacgcatccagcgccccttctccgtgaagttcgacccgtacacgctggccatcgacrtgctggacagcccccaggccgtgcggcgctccctggagggtgtccaggatgagctggacacccttgcccatgcgctgagtgccattggctaggtgcacgg

SEQ ID NO: 105567 - DNA, 201 bp, Homo sapiens
ctggggagcaggcctggtggcctcagagactcgccctgtgggcggagcagcctcacagccaggtcgaagtcagcactctgcccctgccccacgcggggagygggcaccagtcccagggcacagacgtgctgggtgattaatctgggtgattaagcctcgggctgagaggctgttgagagagaacacgctccattgtggagc

SEQ ID NO: 105568 - DNA, 201 bp, Homo sapiens
cgtggtgggcaaggctggtgctggggagcaggcctggtggcctcagagactcgccctgtgggcggagcagcctcacagccaggtcgaagtcagcactctgmccctgccccacgcggggagcgggcaccagtcccagggcacagacgtgctgggtgattaatctgggtgattaagcctcgggctgagaggctgttgagagag

SEQ ID NO: 105569 - DNA, 201 bp, Homo sapiens
gtgaaggcctatggtgccgggctgctgtcctcctacggggagctcctggtgagagtctctccttgctgcagcccccagcagaggggcagggctgggggacrgtgcagggaggggacaggctcccagtgggaggaaactgaggcctggacctccaggactcaggctctgtttgggagaaggcttgtctctgcccagtcctca

SEQ ID NO: 105570 - DNA, 201 bp, Homo sapiens
agactctgcccgccagttgacgagggctctgccgctctcctccccaggagctatgcctcacgcatccagcgccccttctccgtgaagttcgacccgtacaygctggccatcgacgtgctggacagcccccaggccgtgcggcgctccctggagggtgtccaggatgagctggacacccttgcccatgcgctgagtgccatt

SEQ ID NO: 105571 - DNA, 201 bp, Homo sapiens
actggttcacggtggagttcgggctgtgtaagcagaacggggaggtgaaggcctatggtgccgggctgctgtcctcctacggggagctcctggtgagagtytctccttgctgcagcccccagcagaggggcagggctgggggacggtgcagggaggggacaggctcccagtgggaggaaactgaggcctggacctccagga

SEQ ID NO: 105572 - DNA, 201 bp, Homo sapiens
gccctctggggacctgacccagccgcagcctttgtgaaccaacacctgtgcggctcacacctggtggaagctctctacctagtgtgcggggaacgaggctycttctacacacccaagacccgccgggaggcagaggacctgcagggtgagccaaccgcccattgctgcccctggccgcccccagccaccccctgctcctgg

SEQ ID NO: 105573 - DNA, 201 bp, Homo sapiens
cacagtccccgcggttcattgggcgcaggcagagcctcatcgaggacgcccgcaaggagcgggaggcggcggtggcagcagcggccgctgcagtcccctcrgagcccggggaccccctggaggctgtggcctttgaggagaaggaggggaaggccgtgctaaacctgctcttctccccgagggccaccaagccctcggcgc

SEQ ID NO: 105574 - DNA, 201 bp, Homo sapiens
cagtgacccgcgtggccccttgcagagcgcacgggcttccagctgcggcctgtggccggcctgctgtccgcccgggacttcctggccagcctggccttccrcgtgttccagtgcacccagtatatccgccacgcgtcctcgcccatgcactcccctgagccgtgagtgcgcgccctggccgccagcccgagggtggggggt

SEQ ID NO: 105575 - DNA, 201 bp, Homo sapiens
gagccggggggccggggatggtcagccaagcgccccaccccagcgcggctccagcccgtcccggctcggcagtgacccgcgtggccccttgcagagcgcaygggcttccagctgcggcctgtggccggcctgctgtccgcccgggacttcctggccagcctggccttccgcgtgttccagtgcacccagtatatccgccac

SEQ ID NO: 105576 - DNA, 201 bp, Homo sapiens
tttctttcccacttacttcacttttactacttcacattttcaccaaatcaaggtgtgcagagtttatttcacattaatgtattaattggattttttttttktttgtcaaatagggaattctctttaaacaatctctgtatttcacagctggtccaagagcaaatgagaacaaattctaatatatccaggggaaattatcac

SEQ ID NO: 105577 - DNA, 201 bp, Homo sapiens
ccagattcaactggtgagatttgtccccagtaatctactgtagagctttcttttcttcaactcatagacagtatgctgtcaatcaagtgccaggcagaccstctttccctttccttttacttacccccggagtcttggccgtacagaattgagggtctaaaagtacttttgtcatcaaaagtattgcatggcctctgatag

SEQ ID NO: 105578 - DNA, 201 bp, Homo sapiens
gcagtgagctgagattgcaccactgcactccagcttgggcgacagagcaagattgtgcctcaaaaaaacaaacaaacaaaaacaaaataacaacaaaaaamcgctattagcttgatcttgtagatgaggaagtgagagttagaggggtaggcaaagtaattgtccatggttacacagctagtaagtggcaaagttgggaat

SEQ ID NO: 105579 - DNA, 201 bp, Homo sapiens
ggcaggagaattgcttgagcccaggtgtttgagaccaccctaggcagtatagtgagatcttgcctctgttaaaaaaaaaaaaaaaaaaaaaggccatgtgygggcagctgatgcctgtaatcccagcactttgggaggccaaggggtggatcacctgaggtcagtagttcaagaccagcctgaccaacatggtgaaaccct

SEQ ID NO: 105580 - DNA, 201 bp, Homo sapiens
ggctgaggcaggagaatcacttcaacccggcaggtggaggttgcagtgagccaagatcactgccactatactccagcctaagcgatggagcaagactgatmcaaaaaaacaaaaaaattagtaaagagaaagaagtaatattagataaacatacctaatgaattaaaaagaagatagaaatataagaataggacagcatat

SEQ ID NO: 105581 - DNA, 201 bp, Homo sapiens
ctgcactccagcttgggcgacagagcaagattgtgcctcaaaaaaacaaacaaacaaaaacaaaataacaacaaaaaaacgctattagcttgatcttgtasatgaggaagtgagagttagaggggtaggcaaagtaattgtccatggttacacagctagtaagtggcaaagttgggaatactggcagttagacctcagagc

SEQ ID NO: 105582 - DNA, 201 bp, Homo sapiens
gcgaggccgagtcaagtggatcccttgaggtcaggagttcgagaccagcctggccaacatggtgaaaccctgtctctgctaaaaatacaaaaaattagccrggcgtgatggcacacacctgtagtcccagctactcaagagtaaaataaataaatgaagtgatattccttgttcatagaagtctcaatattgtaagctatc

SEQ ID NO: 105583 - DNA, 201 bp, Homo sapiens
cgagtcaagtggatcccttgaggtcaggagttcgagaccagcctggccaacatggtgaaaccctgtctctgctaaaaatacaaaaaattagccaggcgtgrtggcacacacctgtagtcccagctactcaagagtaaaataaataaatgaagtgatattccttgttcatagaagtctcaatattgtaagctatccattctt

SEQ ID NO: 105584 - DNA, 201 bp, Homo sapiens
ttgattatatgcaatcctagtcaaaaccccgcaggttttgttattattggacattccaagctaattcaagacttattataaagcactaattatgtgcagakacttaattaggagacaatataaaagattgttatataacactgatgattttctagataaataggaaatttatggacctttagaattgttcttatggcagta

SEQ ID NO: 105585 - DNA, 201 bp, Homo sapiens
acaaaagtatatatatcaggcaaaagaaaagtgatctcacatacaagatctgtgatgcaagacaaaaaatgaaggacagagaaaatggtaaatatgaaggmaaatctaaataaacatcaattgtataaaactgtagtcttgggggattaaaaaatttttgaatatagcatataaatatacgggcgaggggtgatagtgatg

SEQ ID NO: 105586 - DNA, 201 bp, Homo sapiens
aaaagtgatctcacatacaagatctgtgatgcaagacaaaaaatgaaggacagagaaaatggtaaatatgaaggcaaatctaaataaacatcaattgtatraaactgtagtcttgggggattaaaaaatttttgaatatagcatataaatatacgggcgaggggtgatagtgatgaatgaagtagtgttctaagtttcctg

SEQ ID NO: 105587 - DNA, 201 bp, Homo sapiens
tatttattcaaaatatttagagtgcccttttctttataatccaagagccataatataacaaatactttatttgatttggacaaatatttcttcagccagakccttactttgaccctgttggcttgtgttatttttcctgaagttcattaaaactaattttctctggtatattttaatttctcacatttaatattctataac

SEQ ID NO: 105588 - DNA, 201 bp, Homo sapiens
ttttgtgccaggcgtggtggctcacgcctgtaatcccagtactttgggaggctgaggtgggtggatcacaaggtcaggagatcaagaccatcctggctaaygcggtgaaaccccttctctactaaaaataaaaaaaaattagccaggcgtgttggcaggcgcctgtagtcccagctactcaggagggctgaggcaggagaa

SEQ ID NO: 105589 - DNA, 201 bp, Homo sapiens
ctattggactgtctgtgatggatctggtaggatccattttgaaaaatcttaggagagtgcacccagtttccaccatggttaaggtaggcttaaattaaatmttcatttatcattctttcctttaatatttattgggtcactactatatgccaggcagtgtacaagatgttgaggatataatagtgaataaaaaatacaaag

SEQ ID NO: 105590 - DNA, 201 bp, Homo sapiens
gtggatcacaaggtcaggagatcaagaccatcctggctaacgcggtgaaaccccttctctactaaaaataaaaaaaaattagccaggcgtgttggcaggcrcctgtagtcccagctactcaggagggctgaggcaggagaatggcatgaacccaggaggcggagcttgcagtgagccgagatcgcgccactgcactccagc

SEQ ID NO: 105591 - DNA, 201 bp, Homo sapiens
ttatgaatttgattttcttactttctacaactgtagtgcctatgaaattatcaagctgaaggggtatacctcttgggctattggactgtctgtgatggatytggtaggatccattttgaaaaatcttaggagagtgcacccagtttccaccatggttaaggtaggcttaaattaaatcttcatttatcattctttccttta

SEQ ID NO: 105592 - DNA, 201 bp, Homo sapiens
atcattgtgtgtgtttttgttttgttttgttttgtttttttgtttttgagatggagtcttgctctgtcccaggctggagtgcagtggcatgaccttggctyaccacaatctccttgtcgcaggttcaagcgattctcctgttcagcctcccatgttgctgggactgcaggtgcacaccaccacgcctggctaatttttgta

SEQ ID NO: 105593 - DNA, 201 bp, Homo sapiens
tgagcccaggcgttttaggctcaactcaaactcgcagaggtatgatcacaccactgcacactagcctggacagcagagaaaaatcctgtctctaaaaaaawaaataaataaaataaaataaattaaaaaattaactagttgtagtgttgcatacctgtagtcttagctacctgggagattgagatgggaggattacttgag

SEQ ID NO: 105594 - DNA, 201 bp, Homo sapiens
tctgggctgcagtgagctgtggttgtgccactgcactccagcctgagtggcagagtgaaaccttgtctcaaaaaaaaaaaccaaagcaaacaaaaaaaaaacagttttaaattttagctaatccaggccaggcgtggtggctcacacctgtaatccccgcaacactttgggagcctaaggcaggtggatcacctgaggtca

SEQ ID NO: 105595 - DNA, 201 bp, Homo sapiens
ggcagggagaaatccaaaagcccgctggtgccccagccctcccattgcctggtagactgggccttgctttaccctccccgcatcctttgaccaggaaattmtttctttggcttccccccatccccggctccaacattctgcaaactgaagaggtagtttcttagatgttcagtgtggttaatccaatgaaattgcattatc

SEQ ID NO: 105596 - DNA, 201 bp, Homo sapiens
tgaaccagggaggcataggttgcagtgagccaagatcacgccactccactccagcctgggcaacagagcaagactccgtctcaaaaaaaaaaaaaaaaaaagatatttgtggaaagaagggagtaatgtgaaatcagtgaaatcagaacctattattaatattatggtgcttatgattaagttaggggtttaaataagaca

SEQ ID NO: 105597 - DNA, 201 bp, Homo sapiens
cattgccttgggccttcataacacaggggaatttgggcaaaaggggatgttagtttctattgttataaaaatttttgaggtagctatgtgaaatttggcamgtcatagtgacaaggcttccttcagattataaaggttagaaaagtccgttcatctccaaaatgccagacataaaggtacatggatactttaatataatac

SEQ ID NO: 105598 - DNA, 201 bp, Homo sapiens
aaaaaaaagaaaaaagaaaaaagaaaatacatattgtgaggtctaatggggaagagcaatgatggaacatcgttgattagccacaatttttttttttttttactttttagtttagagatggctgttcatgggcacaatcacagtgcactgcagcctctaactcctgggttcaagtgaccctcttgattcagcttcctaagt

SEQ ID NO: 105599 - DNA, 201 bp, Homo sapiens
agactctgtctcagaaaaaaaaagaaaaaagaaaaaagaaaatacatattgtgaggtctaatggggaagagcaatgatggaacatcgttgattagccacaatttttttttttttttactttttagtttagagatggctgttcatgggcacaatcacagtgcactgcagcctctaactcctgggttcaagtgaccctcttga

SEQ ID NO: 105600 - DNA, 201 bp, Homo sapiens
gggaatcgcttgaacccaggaggtggaggttgcagtgagcctagatcgcgccactgcactccagcctgggccatggaatgaaactctgtctcaaaaaaaaacaaaaaaaccccacgagtttgtcattacctggtgaagttgaacatgaacatatcccacaacctggaaattacacttctaaatatagtcccaagaaaactt

SEQ ID NO: 105601 - DNA, 201 bp, Homo sapiens
attggacattccaagctaattcaagacttattataaagcactaattatgtgcagagacttaattaggagacaatataaaagattgttatataacactgatrattttctagataaataggaaatttatggacctttagaattgttcttatggcagtagttatcattatggaaaaaataaattgataccacacacacacccta

SEQ ID NO: 105602 - DNA, 201 bp, Homo sapiens
tgtaatcccagcattttggaaggcctaggtgggctgatcatgaggtcaggagatcaagaccatcctggccaatatggtgaaactccgtctctactaaaatmcaaaaaaaaaaaaaaaaaaaattagccgggtgtggtggtgtgcccctgtaatcccagctactcaggaggctgcggcaggagaatcgcctgaacctgggag

SEQ ID NO: 105603 - DNA, 201 bp, Homo sapiens
acagagcaagactccctctcaaaaaaaaaaaaaaagaaaaagaaatacctggccaggagtagtggctcatgcctgtaatcccagcacttttggaggccaaygcgtgtggatcacttgaggccaggagtttaagaccagcctggccaacatagcgaaaccccatctctactaaaaatacaaaaaaaagctgggtgtggtggc

SEQ ID NO: 105604 - DNA, 201 bp, Homo sapiens
agggcacctggaaaatctgacataaaaataagacataaagctagtaaagatgatttggagccagatttttttttttttttttgagatggagtctcgctctktcactcaggccggaatgcagtggcacagtctcggctcactgcaacctccacctcctaggttcaagtgattttcctgctttaccctcctgagtaactggga

SEQ ID NO: 105605 - DNA, 201 bp, Homo sapiens
ccaccacggcctgtcgatttctctatttttagtgaaaggagatagtgaaaggagtaggataacgggagtgggagcagaaggtttcataagtgaaaaaagtytagagagtggaaagaaagggaattttggttggattattcatatgtatattgaagttaacaaggataatggcagaaattgagatagacagggaagactgtg

SEQ ID NO: 105606 - DNA, 201 bp, Homo sapiens
tggtgaaaggataccaggaagaaaacacagtatagcatatcagtatcttctttagaaggtatttcttttcttttttttttatttgagatggggtcttgctytgtcgccaggctggagtgcagtggtgtggtctctgcactccgcctcccgggttcaagcaattctcctgcctcagcctcctgagtagctgggactacaagc

SEQ ID NO: 105607 - DNA, 201 bp, Homo sapiens
gtcctggcctcaagtgatccacctacctaagcctcccaaagtgccaggggataacaggcatgagccaccgcacccagccagtgatttgcttcactttgtartaaatctgtatttgactctaaaacaattcatctatgtattcaggaaaaaaaaaatttttttaagttatgatgaatctttttctaacacaaaatttttctt

SEQ ID NO: 105608 - DNA, 201 bp, Homo sapiens
ggtagagacagtttcaccatattggccaggctggtttcaaagtcctggcctcaagtgatccacctacctaagcctcccaaagtgccaggggataacaggcrtgagccaccgcacccagccagtgatttgcttcactttgtagtaaatctgtatttgactctaaaacaattcatctatgtattcaggaaaaaaaaaattttt

SEQ ID NO: 105609 - DNA, 201 bp, Homo sapiens
cccacaaccccagactcagccccaaagagaggggtaaagagtgatgagtggtaggaggcagggaagtgtgagggatctactgggtgtctttttttttttttaactgggtgtcttttaacattttttaaattttaattttttgggggtatattgagttttcctatcttccaagaccagggaggatagtatggaggtggtgga

SEQ ID NO: 105610 - DNA, 201 bp, Homo sapiens
attacaggcacgtgccaccacgcctggctattttttgtatttttagtagagaaggggttttgtgctgctgccaggctggtcttgaactcgtgacctgaagygatccaaccacctcggcttcccaaagtgctgggattacaggcgtgagccaccgcgccctgctgagttatattttatagggaacatttaaacatttgacgt

SEQ ID NO: 105611 - DNA, 201 bp, Homo sapiens
gtgtatttttctggtgtcacttctgtgccttccttcaaaggtggtgctttgtccctgtgggtcatctgtactgattgcgccaagcaaagcatttgtgagcstgtggtgctggggtgaaagtggtggctgggggcagggagaaatccaaaagcccgctggtgccccagccctcccattgcctggtagactgggccttgcttt

SEQ ID NO: 105612 - DNA, 201 bp, Homo sapiens
ataggcacccaccaccacacccggctaattttttttgtatttttagtagagacagggtttcactgtgttaaccaggatggtcttgatctcctgacctcgtratctgcctgcctcagcctcccaaattgctgggattacaggcgtgagccaccacggcctgtcgatttctctatttttagtgaaaggagatagtgaaaggag

SEQ ID NO: 105613 - DNA, 201 bp, Homo sapiens
gcgtagactgaggaaattaagacaagtgtaatagctatttttaggaatttggttgtgaaggtaaggaaaatcagggcaagaagtttgtttgtttgtttgttacacagataagatgcttatagtaaagatcaagtaccaagggagaggatgaagacagaagtggtaagcagagggggatgcagtccagagcatagttgtagg

SEQ ID NO: 105614 - DNA, 201 bp, Homo sapiens
tgcgtagactgaggaaattaagacaagtgtaatagctatttttaggaatttggttgtgaaggtaaggaaaatcagggcaagaagtttgtttgtttgtttgttacacagataagatgcttatagtaaagatcaagtaccaagggagaggatgaagacagaagtggtaagcagagggggatgcagtccagagcatagttgtag

SEQ ID NO: 105615 - DNA, 201 bp, Homo sapiens
cagatttaagaagccaaataatctcaagaagaataaatataatatccctacctggacatattcttgtgaaattagagaacactaaaggcaaaaagaagttyttaaaaattgtcagagagaacataaattacctacagaaaagggagagggtgacaatagcagcagtgaaaccagaagacaatggaatatttttaatgtgct

SEQ ID NO: 105616 - DNA, 201 bp, Homo sapiens
cagtttcttaatgccttaatagtcagtcttaagaataaatatcacggacaaaaatcaagtagttgatccttgctttttgtgagataaataactctaggctyctgaaaaccactaaattcagacttatacatagctttctttttgggggcatttttcaaaaagaaaaagtacttattatttcacaactcatatatttgagag

SEQ ID NO: 105617 - DNA, 201 bp, Homo sapiens
ttgcgtagactgaggaaattaagacaagtgtaatagctatttttaggaatttggttgtgaaggtaaggaaaatcagggcaagaagtttgtttgtttgtttgttacacagataagatgcttatagtaaagatcaagtaccaagggagaggatgaagacagaagtggtaagcagagggggatgcagtccagagcatagttgta

SEQ ID NO: 105618 - DNA, 201 bp, Homo sapiens
tttttttttttgttttgaaaaagggtcttgctttgttgcccaggctagagttcaggggtgtgatcatagctcaccacaacctcaaactcttgaattcctgrgttcaagcagtcctcccacctcagcctccagaggacaaatgtgaactagatgtttattgtgcagttttggcagagttaatatttttaatttttttcatta

SEQ ID NO: 105619 - DNA, 201 bp, Homo sapiens
cttgcgtagactgaggaaattaagacaagtgtaatagctatttttaggaatttggttgtgaaggtaaggaaaatcagggcaagaagtttgtttgtttgtttgttacacagataagatgcttatagtaaagatcaagtaccaagggagaggatgaagacagaagtggtaagcagagggggatgcagtccagagcatagttgt

SEQ ID NO: 105620 - DNA, 201 bp, Homo sapiens
agtccaggcccaacctgctgtgttcaggtggtatatatatatatatatatgccttatcttggcaaccaagtgtgttatgtgcattcttggggctttaaaayggggtagttgtaagacctcctgatatgaatgatatatgctggacagtctttgcttcttgtcctgtatcctttctaaaagttaaataaacttagtgctaaa

SEQ ID NO: 105621 - DNA, 201 bp, Homo sapiens
gggctgtcacagtgttggtctttatctacccagtcactaataattgtaccacagagaatggtagttcttttttttctttctttctttttttttttttttttgagacacagtctggctctgtcatccaggctggagtgtagtggcatgatcttggcttactgcaacctctgactcccaggctcaagccatcctcacacctca

SEQ ID NO: 105622 - DNA, 201 bp, Homo sapiens
gacaaagttagtaatcagaataggccgggcacgatggcccatgcctgtaatcccagcactctgggaggctgaggtggtggatcacttaaggccaggagttygagatcagcctgggcaacatggtgagacccctgtctctactaaaaatacaaaaattagccaggcgtaatggtgcacacctgtaatccagctacttggtac

SEQ ID NO: 105623 - DNA, 201 bp, Homo sapiens
aacatacctaatgaattaaaaagaagatagaaatataagaataggacagcatataaaactaaaagtttagcaaggatgacagacaaagttagtaatcagaataggccgggcacgatggcccatgcctgtaatcccagcactctgggaggctgaggtggtggatcacttaaggccaggagttcgagatcagcctgggcaaca

SEQ ID NO: 105624 - DNA, 201 bp, Homo sapiens
aggaggcagaggttgcagtgagccaatattgtgccagtgcaatccagcctgggcaacagagcaagactctgtctcagaaaaaagataaataaataaaatawtaggctgggcgcagtggcttatgcctgtaatcccagcattttggaaggcctaggtgggctgatcatgaggtcaggagatcaagaccatcctggccaatat

SEQ ID NO: 105625 - DNA, 201 bp, Homo sapiens
attagccagctgtggttgtgcgtgcctgtaatcccagctacttgggaggctgaggcacaagaattgcttgaacctaggaggcagaggttgcagtgagccartattgtgccagtgcaatccagcctgggcaacagagcaagactctgtctcagaaaaaagataaataaataaaataataggctgggcgcagtggcttatgcc

SEQ ID NO: 105626 - DNA, 201 bp, Homo sapiens
gtgggcggatcacgaggtcaggagtttgagaccagcctgaccaacatggtgaaaccctgtctctactaaaaatacaaaaattagccgggcatggtggtgcrcgcctgtaatcccagctactcaggagtctgaggcaggggaatcgcttgaacccaggaggtggaggttgcagtgagcctagatcgcgccactgcactccag

SEQ ID NO: 105627 - DNA, 201 bp, Homo sapiens
aaaaaaaaaaaacaaaaattagccagctgtggttgtgcgtgcctgtaatcccagctacttgggaggctgaggcacaagaattgcttgaacctaggaggcaraggttgcagtgagccaatattgtgccagtgcaatccagcctgggcaacagagcaagactctgtctcagaaaaaagataaataaataaaataataggctgg

SEQ ID NO: 105628 - DNA, 201 bp, Homo sapiens
ctgggcatggtggctgacgcctgtaatcctagcactttgggaggccgaggtgggcggatcacttgaggtcaggagttccagaccagcctggccaccatggygaaaccctgtctctactaaaaatacaaaaattagctgggtgtggtggcacgtgcctgtaattccagctactcgggaggctgaggcaggagaatcgcttga

SEQ ID NO: 105629 - DNA, 201 bp, Homo sapiens
cgtctctactaaaaaaaaaaaaaaaaaaaaaaaaacaaaaattagccagctgtggttgtgcgtgcctgtaatcccagctacttgggaggctgaggcacaaraattgcttgaacctaggaggcagaggttgcagtgagccaatattgtgccagtgcaatccagcctgggcaacagagcaagactctgtctcagaaaaaagat

SEQ ID NO: 105630 - DNA, 201 bp, Homo sapiens
aggcaagagaatcacttgaaccaggaggcagaggttgcagtgaactgagatggcaccactccacactccagcctgggcgacaaagtgagactccgtcttaraacaacaacaacaacaacaacaacctctatggatacaatgatagattagacacatttgaagagagaagtggcaaatctaaggcaattacccagaagacaa

SEQ ID NO: 105631 - DNA, 201 bp, Homo sapiens
acttaacaaaaaccacaagtctactgtatgtatacttaaaacaaccctacaaaaatgtgtaagaggccaggcatggtggctcacgcctataatcccaatastttgggaggccaaggtgggcagatcacctgaggtcaggagttcgagaccagcctggccaacatggtgaaaaccgtctctactaaaaaaaaaaaaaaaaaa

SEQ ID NO: 105632 - DNA, 201 bp, Homo sapiens
gagtgttgtatatgtcgatgtattcagggttgcaaggttaatcccttgaaagcaattatgtatcctttgacctttcctccctccctccctccctcccttccttccttccttccttcctttttctttctctctttcttttcctttttttttaaacttcttctttcttttcctttctttttttttctgactttccttttcttt

SEQ ID NO: 105633 - DNA, 201 bp, Homo sapiens
ctctagcaaggccggggaatttttccttgattatctccccaaataccaaatatgttttctaagcttttagaattgtcttcttcctcaggaacaccgattaytcttaggtttggttgtttattgtaatcccagacatcctggaggctttgttcatatcttcttattctttttctttgtctttgttggattgggttaatttga

SEQ ID NO: 105634 - DNA, 201 bp, Homo sapiens
agagtgttgtatatgtcgatgtattcagggttgcaaggttaatcccttgaaagcaattatgtatcctttgacctttcctccctccctccctccctcccttccttccttccttccttcctttttctttctctctttcttttcctttttttttaaacttcttctttcttttcctttctttttttttctgactttccttttctt

SEQ ID NO: 105635 - DNA, 201 bp, Homo sapiens
caggcatgagccaccgcacccagccagtgatttgcttcactttgtagtaaatctgtatttgactctaaaacaattcatctatgtattcaggaaaaaaaaawtttttttaagttatgatgaatctttttctaacacaaaatttttcttcttagtggatattttgacatatatagtctggaagataagtggcttacctgtaac

SEQ ID NO: 105636 - DNA, 201 bp, Homo sapiens
ttgcttgaacctgggaggcagaggttgcagtgagctgagatcatgccactgcactccagcctgggcaacagagcaagactccatctcaaaaaaaggaaatwaaaaaaaaaaaaagaggttctgttttgatgtgtctccaggatttgtttcaagatttagagctccatttagcagttcttatagtggtggcttggtaatggc

SEQ ID NO: 105637 - DNA, 201 bp, Homo sapiens
acctgagtggcagacgttgcagtgagctgagatggcaccaccatactccagcctgggcaacagagtgagacactatctcagaaaaaaaaaaaaaaagaagmccagtatgagttagtaagtgcttcatagtagtgacattgtattcaacaggtgaaacaactggtcatttagtacgtagtttattttcttgggtgggtcaag

SEQ ID NO: 105638 - DNA, 201 bp, Homo sapiens
tgttatggagcagcccatctacctcccatagggctgtcacagtgttggtctttatctacccagtcactaataattgtaccacagagaatggtagttctttyttttctttctttctttttttttttttttttgagacacagtctggctctgtcatccaggctggagtgtagtggcatgatcttggcttactgcaacctctga

SEQ ID NO: 105639 - DNA, 201 bp, Homo sapiens
ttaatgttttggggagggatgaagtcttactctgttgcccaggctggagtgcagtggcgcaatctcagctcactgcaacctctgcctcctgggttcaagcrattcttgtgcctcagcctcctaagtagctgggattacaggcacgtgccaccacgcctggctattttttgtatttttagtagagaaggggttttgtgctgc

SEQ ID NO: 105640 - DNA, 201 bp, Homo sapiens
ttcagagtgttgtatatgtcgatgtattcagggttgcaaggttaatcccttgaaagcaattatgtatcctttgacctttcctccctccctccctccctcccttccttccttccttccttcctttttctttctctctttcttttcctttttttttaaacttcttctttcttttcctttctttttttttctgactttcctttt

SEQ ID NO: 105641 - DNA, 201 bp, Homo sapiens
acggtggctcacgcctataatcccagcactttgggaggctgaggtggacggatcacgaggtcaggagattgagaccatcctggctaacacagtgaaaaccygtctctactaaaaatacaaaaaattagccaggcgtggtggtgggcacctgtagtcccagtgactcgggaggctgaggcgggagaatggcgtgaacccggg

SEQ ID NO: 105642 - DNA, 201 bp, Homo sapiens
ctgggactacaggcatataccaccacacctggctaagttttgtatttttagtagagatggggtttcgctgtgttggccagtgttggccaggctggtctcgmacttctgacctcgtgatccacccacctcggcctcccaaagttctgggattacagatgtgagccattgcccctggccactagtaacaattttaaatggtcc

SEQ ID NO: 105643 - DNA, 201 bp, Homo sapiens
taagaaattattatttgtagagatgcggtgtcactctgttgctcaggctggtctcaaactcctaggctcaagcagttgcaggtgtgagccaccacgcccarcccatttttatccctttctcaaacctagaaggacaatttttaaacaatttgcttttaatgtcttcccagggattaacttacttttcatagaaacaattat

SEQ ID NO: 105644 - DNA, 201 bp, Homo sapiens
gcacttcagagtgttgtatatgtcgatgtattcagggttgcaaggttaatcccttgaaagcaattatgtatcctttgacctttcctccctccctccctccctcccttccttccttccttccttcctttttctttctctctttcttttcctttttttttaaacttcttctttcttttcctttctttttttttctgactttcc

SEQ ID NO: 105645 - DNA, 201 bp, Homo sapiens
gaggctgagtaatttataaagaaaaggggtttaatttagcttgtgcttctgcaggttgtacaggcatggctccaagatatgctcttgatgaggacctcagraagcttgcaatcatggcagaaggcaaaggaggagtagatgtgtcacatagtgagggcagaaacgagagagaggaggtgccatatacttttaaacaaccag

SEQ ID NO: 105646 - DNA, 201 bp, Homo sapiens
ggggttttgtgctgctgccaggctggtcttgaactcgtgacctgaagcgatccaaccacctcggcttcccaaagtgctgggattacaggcgtgagccaccrcgccctgctgagttatattttatagggaacatttaaacatttgacgttacaagcagagtcatttgtatattcttattttttctttctttcccacttactt

SEQ ID NO: 105647 - DNA, 201 bp, Homo sapiens
agcacttcagagtgttgtatatgtcgatgtattcagggttgcaaggttaatcccttgaaagcaattatgtatcctttgacctttcctccctccctccctccctcccttccttccttccttccttcctttttctttctctctttcttttcctttttttttaaacttcttctttcttttcctttctttttttttctgactttc

SEQ ID NO: 105648 - DNA, 201 bp, Homo sapiens
gagcacttcagagtgttgtatatgtcgatgtattcagggttgcaaggttaatcccttgaaagcaattatgtatcctttgacctttcctccctccctccctccctcccttccttccttccttccttcctttttctttctctctttcttttcctttttttttaaacttcttctttcttttcctttctttttttttctgacttt

SEQ ID NO: 105649 - DNA, 201 bp, Homo sapiens
ccactgtactcgggcagttcctttttaatttgagacacttgctttaagggaacaaggattaagatcacatttcccattgaagtcctgtgtgatttgaataycaaatattccaatgtgtttcagatcagtacttatcactattggtcctctcaactctgcagtatctaaaattaaattatttgcctcttgatcatttagcag

SEQ ID NO: 105650 - DNA, 201 bp, Homo sapiens
actgtgttaaccaggatggtcttgatctcctgacctcgtaatctgcctgcctcagcctcccaaattgctgggattacaggcgtgagccaccacggcctgtygatttctctatttttagtgaaaggagatagtgaaaggagtaggataacgggagtgggagcagaaggtttcataagtgaaaaaagtctagagagtggaaag

SEQ ID NO: 105651 - DNA, 201 bp, Homo sapiens
aaacccagtttaaattagggtaagcagaaaaagacgaaatattgttcatgtaactggaaatagggcaaaactgcttcaggtactaccggattctgaagttsacacatatcaagacatagtctttgtatatcttggtttagattttctctgttggcttaattcgtagagcctttctatgtggtggtaaagatggctgtacag

SEQ ID NO: 105652 - DNA, 201 bp, Homo sapiens
ggcttaaaatgccacccgtagcacccattgtccaaactcaatgatgctccctgctgtaaaggtatgaagcagagccttcccagtcacctcctgcttcactrttgcctcgatgtagtttggactacacacaagttacttgattctcatagtactccttttgataaaatggcatcatgaaagaccgcatggcatcctttcccg

SEQ ID NO: 105653 - DNA, 201 bp, Homo sapiens
tggacatattcttgtgaaattagagaacactaaaggcaaaaagaagttcttaaaaattgtcagagagaacataaattacctacagaaaagggagagggtgmcaatagcagcagtgaaaccagaagacaatggaatatttttaatgtgctgagggaggagtaagtgtcaatctggaatctacccagcaaaaacatctttcaa

SEQ ID NO: 105654 - DNA, 201 bp, Homo sapiens
atcaggcaaaagaaaagtgatctcacatacaagatctgtgatgcaagacaaaaaatgaaggacagagaaaatggtaaatatgaaggcaaatctaaataaayatcaattgtataaaactgtagtcttgggggattaaaaaatttttgaatatagcatataaatatacgggcgaggggtgatagtgatgaatgaagtagtgtt

SEQ ID NO: 105655 - DNA, 201 bp, Homo sapiens
gtatactctcattttgatgcccttttgcatagctgcttttccatatcaggttatttgaacaatatcttatcttgcctttcagggattatatggaataaaasaagaactctttctcagtatcccttgtgtcttggggcggaatggtgtctcagatgttgtgaaaattaacttgaattctgaggaggaggcccttttcaagaa

SEQ ID NO: 105656 - DNA, 201 bp, Homo sapiens
tttcatccgttagagtaccagcatattcacttcattacattagcgtcatatgtttatgtataatcattataaatgtggccgggcactgcagcctgggtgamagagtgaggctctgtctcaaaaaaaatcattataaatgcttatttttaagaccatatatatcaaaaagaaataaaaagctgagtgctgtggctcatggct

SEQ ID NO: 105657 - DNA, 201 bp, Homo sapiens
tctttcccacttacttcacttttactacttcacattttcaccaaatcaaggtgtgcagagtttatttcacattaatgtattaattggattttttttttttktgtcaaatagggaattctctttaaacaatctctgtatttcacagctggtccaagagcaaatgagaacaaattctaatatatccaggggaaattatcacta

SEQ ID NO: 105658 - DNA, 201 bp, Homo sapiens
ggcggggggcggagcttgcgtgctgacgcataagagccgagcgggggaacgtgcgtgtctcgagtcgcacggagggcaaccgtcgacgggcttagcgcctyaactgtcgttggtgtatttttctggtgtcacttctgtgccttccttcaaaggtggtgctttgtccctgtgggtcatctgtactgattgcgccaagcaaag

SEQ ID NO: 105659 - DNA, 201 bp, Homo sapiens
gcccgcgcctgggccggcggggggcggagcttgcgtgctgacgcataagagccgagcgggggaacgtgcgtgtctcgagtcgcacggagggcaaccgtcgmcgggcttagcgcctcaactgtcgttggtgtatttttctggtgtcacttctgtgccttccttcaaaggtggtgctttgtccctgtgggtcatctgtactga

SEQ ID NO: 105660 - DNA, 201 bp, Homo sapiens
tttttcattaaaaaattattatattttagagactaggtcttgccctgttaacccaggctggagtgcagtggcacgatctcagctcactgcaatctctgccycccaggttcaagtgattgtcgtgcctcagcctccccagtagctgggattacaggtgtgagccactgtgcttggccttttgtgtggttttaacagagttgt

SEQ ID NO: 105661 - DNA, 201 bp, Homo sapiens
atggtcttgatctcctgacctcgtaatctgcctgcctcagcctcccaaattgctgggattacaggcgtgagccaccacggcctgtcgatttctctattttyagtgaaaggagatagtgaaaggagtaggataacgggagtgggagcagaaggtttcataagtgaaaaaagtctagagagtggaaagaaagggaattttggt

SEQ ID NO: 105662 - DNA, 201 bp, Homo sapiens
tcaatctattttattaatacctgagaggataaatctgtcatccagattcaactggtgagatttgtccccagtaatctactgtagagctttcttttcttcarctcatagacagtatgctgtcaatcaagtgccaggcagaccctctttccctttccttttacttacccccggagtcttggccgtacagaattgagggtctaa

SEQ ID NO: 105663 - DNA, 201 bp, Homo sapiens
tattttgcggacttggctatgaactataaacagtaagtatatttaaaaaaatatagtcaactttgagataataaaataagtgaatagaataaattgtgttyatttggtaagtagaaagtgaaataagtgccactatttattaaatgctaattcaaaacaactccttccctttatctcattagtggagaccccattccaaag

SEQ ID NO: 105664 - DNA, 201 bp, Homo sapiens
ataaataaagatccttgggtgccttttacacaaagaagagaggaagaacaaagccatggagaggatcttgggggtatttacagggaagggcaagccatttyttttgctggagtgtactgtgggttgaatagagctataggaaataagtttggaattgtagattggggccattgcattagtaatatgtttagaggtgagcca

SEQ ID NO: 105665 - DNA, 201 bp, Homo sapiens
agaatatgtagtctttgtgtgtgcgtatattagtaatttatataatcatattgtgctataaagattctttttcccatccagcactgtgtttttaagacctrtgcacgctgctgtgtgaacatctcattcattcttctaactgctacatggtgttctctgggtgtgtctccacctgcctagtggagacaacctagttatccc

SEQ ID NO: 105666 - DNA, 201 bp, Homo sapiens
tatattcttcgcagcccttacctagttacacaggtgttcattaagttattttaggatgcactggttagtattggagattatctgctctaaccttctcattkttttagatgaaaaaactatagggtgattagtgctcatgtttcattatcatgtccccagcactcttcctcagctacccaaattggtaagagaacataccct

SEQ ID NO: 105667 - DNA, 201 bp, Homo sapiens
tccatctctcttcattccaaagttccatttaatttttttgcaaccttgtgtgcagaagcttgagttaatcacactcattaaatcacgtgtacactatcatygttgatttgtgcaacctcttcctgttttatttcattcttgaattctatctccatttctctcttctgatagagagctgctctcatgtttgatatgtacatt

SEQ ID NO: 105668 - DNA, 201 bp, Homo sapiens
gctctggtctccagagacaggccacctggattcatatccttgctctgtcagttattacctgggtgatcgtgggcaaattgattaatctctccacacttcakgatttatgtccataaaatgagaactctacctacctcatagggtcattgtgagcattagtagagttaatatctctaaaatgcttaggatggtacagtacaa

SEQ ID NO: 105669 - DNA, 201 bp, Homo sapiens
taagatattcaatgcttttctaactagataaccgcatgaagctgatgtaactcatgtactcaaacagtatatcccaaaaggttaactacagaagcagacaygagactccatctgtcttctagccagacattaaaaaggtttataacattgtgaaacaatgctacttttcttagttttttgttttgtataatatagttattt

SEQ ID NO: 105670 - DNA, 201 bp, Homo sapiens
ccaaactgcttaacctctctatgcctctgtttctgtaactgaaatgtctgatagggaatgtttcacttactacttctactttatctgaattttccagaccrtatttttcttccagatgaacttggaaattatttaattacatttcctcaccaaattccattgagattttaatttaggaatgattgacatttttgcatcttt

SEQ ID NO: 105671 - DNA, 201 bp, Homo sapiens; identical to SEQ ID NO: 16941

SEQ ID NO: 105672 - DNA, 201 bp, Homo sapiens
cccagtccttccaaatctgatacttttattattacttttagctattctattgattacctttgggtctttaaataaaatacctgtatgtcttcttccatcarctttttttaaatttaatttttaatcgaagaataattgtgcatagcttaaaaacaactcaacctgtactataaaacatatttttaaaaaagtagtgttttg

SEQ ID NO: 105673 - DNA, 201 bp, Homo sapiens
agagcttgtaatgaaaagcatcagttttcttacctaacacataccatattctcagtcccactccctagaggcaacctcttttaactatttctggtcgttartttttttggtggtgagtttatgaaatctaaacattgctcttatatgtcttttcaagttatcaacttcacactatattcatttactttctattatgaacaa

SEQ ID NO: 105674 - DNA, 201 bp, Homo sapiens
gctgggattacatgcatgtgtcatcatgccaggctaatttttgtatttttagtagagacggggtttcaccatgttggccaggctggtcttcaactcctgamctcaagtgatccacccactttggctttccaatgtgctgggattacaggcatgagccgcagcagctggcctcatatagttttatatgaagagttttattcc

SEQ ID NO: 105675 - DNA, 201 bp, Homo sapiens
aggaggtaggaccattcctagtctattttggggtgtgtgagtatgtgtgtgtgtgtgttatatgttatataaacacacaggttacatatgtgagtaggtakagttatataaggcatgactgagggatctgttactatgtggttaagtgttgtaatgaaacagttttacgtctactgataaaactacagtagttggtctcct

SEQ ID NO: 105676 - DNA, 201 bp, Homo sapiens
gtaccactgcactcccgtttgggtgacagaacaagaccctgtcaaaaaaaaaaaaagaaaggaaagagagaaagaaagaaagaaagaaaaaagaaagaaaaagaaagaaaagaaagaaagaaagaaaaagaaagacagacaatttggcataatcagaaattgataattgattatctctcaatttccaaatcatcaacattt

SEQ ID NO: 105677 - DNA, 201 bp, Homo sapiens
aagagcttgtaatgaaaagcatcagttttcttacctaacacataccatattctcagtcccactccctagaggcaacctcttttaactatttctggtcgttmgtttttttggtggtgagtttatgaaatctaaacattgctcttatatgtcttttcaagttatcaacttcacactatattcatttactttctattatgaaca

SEQ ID NO: 105678 - DNA, 201 bp, Homo sapiens
aataatcatatgacatactattatatagctgtttgcaaagaatatttcaaagaattaaaaatcttaaatatagatagtctagaagagcttgtaatgaaaarcatcagttttcttacctaacacataccatattctcagtcccactccctagaggcaacctcttttaactatttctggtcgttagtttttttggtggtgagt

SEQ ID NO: 105679 - DNA, 201 bp, Homo sapiens
atagctacttcgagaaatgggggagaaaagattcactttatagattttagagaagcaaattttaattttattttaataaaatattaaaattttatcaatayataatcatatattattaattatatacttgagatttaatgatatagtcatagtatatttaatgatattattttcatgtagcaaagattctataatgacagt

SEQ ID NO: 105680 - DNA, 201 bp, Homo sapiens
taccactgcactcccgtttgggtgacagaacaagaccctgtcaaaaaaaaaaaaagaaaggaaagagagaaagaaagaaagaaagaaaaaagaaagaaaaagaaagaaaagaaagaaagaaagaaaaagaaagacagacaatttggcataatcagaaattgataattgattatctctcaatttccaaatcatcaacatttc

SEQ ID NO: 105681 - DNA, 201 bp, Homo sapiens
ctccaatgcacctttggcacaaggataaatttgtgtaccatgtagggaaactatctggtaatatgtattatgagccttaaaatgttcatatttttgacccrtaattctaatttcataaatctgtcttaaaaatatggatcagtcaggcagaacacgaatatttattgagtccttactatgtgtcaggtaccacaccagaca

SEQ ID NO: 105682 - DNA, 201 bp, Homo sapiens
accactgcactcccgtttgggtgacagaacaagaccctgtcaaaaaaaaaaaaagaaaggaaagagagaaagaaagaaagaaagaaaaaagaaagaaaaagaaagaaaagaaagaaagaaagaaaaagaaagacagacaatttggcataatcagaaattgataattgattatctctcaatttccaaatcatcaacatttct

SEQ ID NO: 105683 - DNA, 201 bp, Homo sapiens
tagctacttcgagaaatgggggagaaaagattcactttatagattttagagaagcaaattttaattttattttaataaaatattaaaattttatcaatatmtaatcatatattattaattatatacttgagatttaatgatatagtcatagtatatttaatgatattattttcatgtagcaaagattctataatgacagtg

SEQ ID NO: 105684 - DNA, 201 bp, Homo sapiens
caaacaatttacagaagaggagatacaaatagctacttcgagaaatgggggagaaaagattcactttatagattttagagaagcaaattttaattttattytaataaaatattaaaattttatcaatatataatcatatattattaattatatacttgagatttaatgatatagtcatagtatatttaatgatattatttt

SEQ ID NO: 105685 - DNA, 201 bp, Homo sapiens
gcagtggctcgcgcctgtaagcccagcactttgggaggccgatgcgggtggatcacgaggtcaggagatcgagatcatcctggctaacatagtgagacccygtctctactaaaaatacaaaaaaattagccgggcgtggtggcgggcgcctgtagtcccagctactcgggaggctgaagcaggagaatggcgtgaacctgg

SEQ ID NO: 105686 - DNA, 201 bp, Homo sapiens
catacttggggatgtcactaatcattacctgaatgtatttttctctatttcccaattatatattatatcatataatccaaatatgtgtgtgtgtatatgtdtagatagatagatagataaaataagaattttataagggcatttatggggaacagcaagctacttcttttgctggagtatactgtgggttgaatagagctg

SEQ ID NO: 105687 - DNA, 201 bp, Homo sapiens
tgctgttttaaatttttacattgtacattttaatagctaatcaactcttaagtatacatttgatggtaaatagatgctagctaatctagaatcatttgaartattgattatctgatttatagtttggttgcaaggaaatctactgtaagcaaatcataatagatagcaaatcttagaacatgtagaaaaaaagaaattaaa

SEQ ID NO: 105688 - DNA, 201 bp, Homo sapiens
taagattttataattttagcaagaaaaaagatggtgctagtagaggcataaacaaagggtaaggacaattttgttccttttagttctttatatttgtttgrtccaggcctctttacttttttctagctagtataggaagtaaaatgatcagtgatctatcttcaagggtttacaatatttaagaagtataaattttccctt

SEQ ID NO: 105689 - DNA, 201 bp, Homo sapiens
agatccttgggtgccttttacacaaagaagagaggaagaacaaagccatggagaggatcttgggggtatttacagggaagggcaagccattttttttgctkgagtgtactgtgggttgaatagagctataggaaataagtttggaattgtagattggggccattgcattagtaatatgtttagaggtgagccaattatgga

SEQ ID NO: 105690 - DNA, 201 bp, Homo sapiens
tcaagcgattctcttgccatggcctcccaaagtgctgggactacaggcacctgccaccacaccctgctaatttttgtatttttagtagggatggggtttcsccatgttggccaggctggtcttgaacttctgacctcaagtgatccaccctcctcagcctcccaaagtgctggaattacaggcgtgagccaccacacccga

SEQ ID NO: 105691 - DNA, 201 bp, Homo sapiens
tggctaatttattattttttgtagagacagggtcttgctatgtggtccaggctggtcctgaactcctgggctcaagtgattcttccaccttggcctcccaragtgttggaattacaggcgtgagccaccacgcctggcctattctatctattctttaagattcatttaagttcccacctgctccatgaaactttctactct

SEQ ID NO: 105692 - DNA, 201 bp, Homo sapiens
acagttatgtcaaatgagatagcctatagcaaagttcacattgctctgggagcatagagaacctggggaaggtttcctgggagaaggacatctggattagytgatggaaaatgagtgatgtgctcagcaaggaaggaagaaatgcatctcaggatgagggcacacaaggaaagacaaggtggtgcttggtgtgtctgggga

SEQ ID NO: 105693 - DNA, 201 bp, Homo sapiens
tatcacccgatcattagaataaaatattggatttcgatttgattgaatggttgattataaacgtatgttaagcactgcagcgtgacaaacttgtacctctmtttcagagatacctgccatgaactcttaggtcatgtcccgcttttggctgaacctagttttgcccaattctcccaagaaattggcttggcttctcttggc

SEQ ID NO: 105694 - DNA, 201 bp, Homo sapiens
tgtaccactgcactcccgtttgggtgacagaacaagaccctgtcaaaaaaaaaaaaagaaaggaaagagagaaagaaagaaagaaagaaaaaagaaagaaaaagaaagaaaagaaagaaagaaagaaaaagaaagacagacaatttggcataatcagaaattgataattgattatctctcaatttccaaatcatcaacatt

SEQ ID NO: 105695 - DNA, 201 bp, Homo sapiens
tatatgctacggaagttgtaacatcaaatttgcatgagatttggaggaaacgctttgtaatgcacacaaaactgaaagctgatctcttagggtctggagcstgggctggctgcagaatgtgctgctgaaaatgcttcaaggtcaaataccaaagagaaatcaaaactaacagaaagttcaagcaaaagttggaaggggata

SEQ ID NO: 105696 - DNA, 201 bp, Homo sapiens
gattcagttaagtcactatttcaaatattaattactttttattattaattactattacaggtaaatataacaagatatagtcaaatgattaaggaaaaaamccctcacccttggaaaagagccatgtatttaactgggatggtggtttacttattctttaaactgttttatctttgtaggcacaattccatctttgtatcc

SEQ ID NO: 105697 - DNA, 201 bp, Homo sapiens
aacttttcaagatgtctactttgtatctgaaagttttgaagatgcaaaggagaagatgaggtacagtatatcttcttcacgccttcattttcttcagggaragatcagccccattatggtaacaagtcacagaagtaagcagctagataatttgaagcccacaaggagccttctgtctgtaacacatcttcctttcataac

SEQ ID NO: 105698 - DNA, 201 bp, Homo sapiens
tattttcacctggggtagggtgtatgagtatctgtgtagtttaaaagtacatattcagaatgaccattagaaaatttgtctttgcttggaggttgcagtgrgccgagattgtgccactgcactccagcctgggcaacagagagagactctgtcagaaaagaaaagaaaagagaggaaaggataaaaaagagaaaagaaaga

SEQ ID NO: 105699 - DNA, 201 bp, Homo sapiens
ttgtttgtttgtttgtttgtttgttttaatcactgtgctatttccactcttcttttgtgtcttagctcgagagtcatcactgggaagccttccctgaaccmcacaatcgtcttaagtgtgcatgccgttctgtacaatatgatgagacatttattgtatcattttacaataacaggttcatgtaaactcctttaagcccca

SEQ ID NO: 105700 - DNA, 201 bp, Homo sapiens
cttgtattccagtgggggaaacagataataaacaaacaagtaaatgtatgcaaatgttgcatcgagtggtgttgagtcccatggagaaaaataaagctgaraaagggggatggaggaaagtgtaggtgggtgggagtgtgtgtgtgtgttgctgttttgaaaagggtgatcagggaaggccttgctgagaaggtgatatct

SEQ ID NO: 105701 - DNA, 201 bp, Homo sapiens
acaaacaatttacagaagaggagatacaaatagctacttcgagaaatgggggagaaaagattcactttatagattttagagaagcaaattttaattttatyttaataaaatattaaaattttatcaatatataatcatatattattaattatatacttgagatttaatgatatagtcatagtatatttaatgatattattt

SEQ ID NO: 105702 - DNA, 201 bp, Homo sapiens
acagttcagatcccttctataccccagagccgtaagtacttctatttcagccaggaattcatcaaatggttatttataataatggcatctaccttatgggktcttttttttttttttttttttttttggtgtgcgaggattaaataaattagcacatgtgaagcatttagaatggtacctggcatgaaatacatgttccat

SEQ ID NO: 105703 - DNA, 201 bp, Homo sapiens
gggcgggctgactgggaggcggctccggggctgtcgtccggccccgcccaccactgatccccagtggcccgagggcccggccgcaccctctctcccggccygcgggccgcttcccaccacagaccccgccccgcgccctacccatcacgcgtccccggtccggctccggcgctcacctacccccggcaggcgccgcccccg

SEQ ID NO: 105704 - DNA, 201 bp, Homo sapiens
ttataaaaccccatagtcttatgagggcttgcgtgtctgaggaatggtgagaagatcaaggtggcaaagacaaatgatttctaagatcttttccatcggcmaaaataaatgaagtttttattaagtttgtaccttggtctgtaaataaagttgtgcatctttattctgcttttgttgaataactaaatatgtagcttaagc

SEQ ID NO: 105705 - DNA, 201 bp, Homo sapiens
gtgagacacagttcagatcccttctataccccagagccgtaagtacttctatttcagccaggaattcatcaaatggttatttataataatggcatctaccytatgggttcttttttttttttttttttttttttggtgtgcgaggattaaataaattagcacatgtgaagcatttagaatggtacctggcatgaaatacat

SEQ ID NO: 105706 - DNA, 201 bp, Homo sapiens
aatccttggagttcactcgaggcaaaagacaaatagataatttaggtacattttatatatggtactcaatctaaaataatctcttcagattatgtccacartatttgaggtgtaatcaggactgctattcatctgctatgtgttcgtacagctatataattattaaaatactgatatatctccacttctggctggcagaga

SEQ ID NO: 105707 - DNA, 201 bp, Homo sapiens
aagagatttcttatcaggtttagcctttcgagtttttcactgcactcaatatgtgagacacagttcagatcccttctataccccagagccgtaagtacttytatttcagccaggaattcatcaaatggttatttataataatggcatctaccttatgggttcttttttttttttttttttttttttggtgtgcgaggatta

SEQ ID NO: 105708 - DNA, 201 bp, Homo sapiens
gcctgttaggaaccaggctgcacagcagcaggtgggcagcaggcccggcgatccttaccgcctgagctccgtctaggagcgtaaaccctattgtgaactgygagtgcgagggatctaggttgtgtgcttcttatgagaatccaatgcctgatgaaaccatctcccacctccccgtctttccttcttggaaaaattgtcttc

SEQ ID NO: 105709 - DNA, 201 bp, Homo sapiens
gtcctgtggctggttacttatcaccaagagatttcttatcaggtttagcctttcgagtttttcactgcactcaatatgtgagacacagttcagatcccttytataccccagagccgtaagtacttctatttcagccaggaattcatcaaatggttatttataataatggcatctaccttatgggttctttttttttttttt

SEQ ID NO: 105710 - DNA, 201 bp, Homo sapiens
tctattctggtaaagattttctttgttttctcctttgctttgcagagcgtacaggtttttccatccgtcctgtggctggttacttatcaccaagagatttyttatcaggtttagcctttcgagtttttcactgcactcaatatgtgagacacagttcagatcccttctataccccagagccgtaagtacttctatttcagc

SEQ ID NO: 105711 - DNA, 201 bp, Homo sapiens
gagatttcttatcaggtttagcctttcgagtttttcactgcactcaatatgtgagacacagttcagatcccttctataccccagagccgtaagtacttctrtttcagccaggaattcatcaaatggttatttataataatggcatctaccttatgggttcttttttttttttttttttttttttggtgtgcgaggattaaa

SEQ ID NO: 105712 - DNA, 201 bp, Homo sapiens
aatactctgtgctcaagctgttcatctaatttaattaaatggatttttgaaagggaaactcttctttctccaggactaacattggtatcactttttgaaarctagcttttatttatgagaattttcaaaagattcctcttacccaggaaacttaataatattttgatttgaattctgattaattctgacatctgaaggacc

SEQ ID NO: 105713 - DNA, 201 bp, Homo sapiens
aattcctgggctgaagccatcctcctgcctcaccttcctgaggagctgggacaacaggcatgcaccatcacacttggctagttataattgttattttaaattttttttgtacagacagggtctccctttgttgcccaggctggtctcaaactcctgggctcaagtgattctccttcgtaggtctcccaaagtgttgagatt

SEQ ID NO: 105714 - DNA, 201 bp, Homo sapiens
atatcccacaattggaagatgtctccaactttttaaaaggtaataagctaattaattttttgtaagggagttgctgaactctgttttgatcatgacagcattttttttttttttttttttttgagacagagtctctctttctgttgcccaggctggagtacagtgatgccatcttggctcactgcagcctctgtcactgca

SEQ ID NO: 105715 - DNA, 201 bp, Homo sapiens
gaccattgtgccaacagagttctgatgtatggatctgaactagatgcagaccatcctgtaagtattttctttttttttaagagcaagtcttgctctgctgyccagactggagtgcagtggcacgatctcggcttactgcaacctctgcttcttgggttcaagtgattctcctgccttagcctcccaagtagctgggatcac

SEQ ID NO: 105716 - DNA, 201 bp, Homo sapiens
gcacatgtgaagcatttagaatggtacctggcatgaaatacatgttccatgctctatatgtgttagccattatgattattaattgacaacctattaggtgmtagctgctattctgagcatagggaatgtaacactgaaaaaaatcagacacaaatttctgcctgcataaagcttgtattccagtgggggaaacagataata

SEQ ID NO: 105717 - DNA, 201 bp, Homo sapiens
catgtagaaaaaaagaaattaaaaaaagcaaatcttagaacatgtagaaaaaggaaattaaaaaatagatagcaaataacacaaattatgcatactatatrtggttattttcatacaactttgataacggtgaagaatcatacttattgaattttaaaatgatgatgtttaaaatcactctatgactaaagcacatgagaa

SEQ ID NO: 105718 - DNA, 201 bp, Homo sapiens; identical to SEQ ID NO: 16943

SEQ ID NO: 105719 - DNA, 201 bp, Homo sapiens
caggctgtgtgtttatgcacaagtcacttaaccttgctggagctccagtccctcatctgtgagcagaaacaatagcaatatgaatatttatcctcacaagkgtcctgggggaataaataaatgtaaccactcagtcattcactcaagtacttattgagcacctactaggtctcaggtactaggtgctagatatatagcggt

SEQ ID NO: 105720 - DNA, 201 bp, Homo sapiens
ttgctgagaaagcttcctgccctggaagatggcacccttccccatccagacaccttgggaatgaattatgagggagccaggtgagtgagcgtttacgccgkccccctgcaacccgcccactgaggaggccaagccttctccatctggatgctctgggacacgtgacccattctcatgaggtgttcagcctgatcattcctt

SEQ ID NO: 105721 - DNA, 201 bp, Homo sapiens
ctgcaacccgcccactgaggaggccaagccttctccatctggatgctctgggacacgtgacccattctcatgaggtgttcagcctgatcattccttttccrtgaaaccagcatgccctctgcccctgcctgctgaacatgctgatgaaaatctggatggcattatgggcctcttcctggctatggtttggccatcttcttt

SEQ ID NO: 105722 - DNA, 201 bp, Homo sapiens
gagtcgacatgaaacagcccctcgcctcccattcctctgcaagcctttcgggagggatttgtgggcctcaatggtggcagcatatgggcatctggaatcarttctgaagattcttgcaaaactaacaatgtgtgtatttcatcatctgcctaaagatgttgtctggtataaattataaattacagttgtgaaaataaccat

SEQ ID NO: 105723 - DNA, 201 bp, Homo sapiens
tgccagctcctgtgaagagcctgagtgtggggatggggtcctgggagcactgcctctgaccctgacagcctggacttggctggccgcagggctatggtggrgaggagaaggtgtacatcgccactcagggacccatcgtcagcacggtcgccgacttctggcgcatggtgtggcaggagcacacgcccatcattgtcatga

SEQ ID NO: 105724 - DNA, 201 bp, Homo sapiens
tgcaaagaggtgatggccttccaggcaagagagacaacgtaagcaaagggtgaagggaaggatgtccttcatggtcacgggggtgatgaggaggcagttayggtctgaaatcagagtgactggagcaggtggcccagcaagggggcagtccccagctgcagtcccaggctaggatgccccatctcttacctgattgacaca

SEQ ID NO: 105725 - DNA, 201 bp, Homo sapiens
aattcctaactttgggctaatgtaagggataaactgttcacagccaaatttcctggttagtccagtagcaaaataaagaccctaaattgccctccttttttgtggtgaggtagttggttggagtcattagagagacacaccaagtcctgaagtgtctttctgaagagtcgacatgaaacagcccctcgcctcccattcctc

SEQ ID NO: 105726 - DNA, 201 bp, Homo sapiens
ggccaagacgggcggatcatgaggtcaagagttcgagaccagcccggccaacatggcgaaaccccgtctcaactaaaaatacaaaaattagctgggcatgstggcgggcgcctgtagtcccagctactcggaaggctgagacaggagaatcgcttgaacccaggaggcaggggttgcagtgagctgagatggagccactgc

SEQ ID NO: 105727 - DNA, 201 bp, Homo sapiens
gctttcacctctccgggcctttgccctgcagtgttccctgcctggaatgtcctccctgtatctggtgaactcctgcttgtccttcgggtctcttctgtgcmgcttcccagactctgtttttgtgccctcctgagtgctcccataagacagcctcagtgggcctttaatgcatttctcactcaactcactaggccgaatgct

SEQ ID NO: 105728 - DNA, 201 bp, Homo sapiens
gctctgtgtgaggctgggagactggcatcaacagataatgaccgtatggaggggtaagaacagaagacggagtacccagttcttcctaagggagttggggrgggttctattgaggaggtgacatttgaacagagtcttaaaaggcaaataagaattttccaagcagagaagggaaaagggggctttccagtggaggaaaaa

SEQ ID NO: 105729 - DNA, 201 bp, Homo sapiens
aggagttgcataatcagagtgtgagagccctaaagcatgattcaaggccacctggatcgtgggcctgatctgtcctctcatgaccctggtactgagtgtcrtgcagcagcccttccctcttccttcactcctttccactcatgtctttcttctttttctcccacttggtctttccttcccatcttccttccaaatctgagt

SEQ ID NO: 105730 - DNA, 201 bp, Homo sapiens
cttggtctttccttcccatcttccttccaaatctgagtgtaaaggaaagagctggacctgccttccatgtttttttctcctctgcactgggctttctgtcrtgggggataaagagggggttttatcccttgccccttgtcagcctgggaagtttacagaagccaaagttatggacaagagagccagggagcagcccgggac

SEQ ID NO: 105731 - DNA, 201 bp, Homo sapiens
gtcgacatgaaacagcccctcgcctcccattcctctgcaagcctttcgggagggatttgtgggcctcaatggtggcagcatatgggcatctggaatcaatyctgaagattcttgcaaaactaacaatgtgtgtatttcatcatctgcctaaagatgttgtctggtataaattataaattacagttgtgaaaataaccatac

SEQ ID NO: 105732 - DNA, 201 bp, Homo sapiens
gagggaacagcacaaacaaggctcgaagggaggaatggacaggtttgattcagcgaatagagatgtcaggtggggttggagctttaagagggtggtaggarctccacgttgacagtgaggggtatttacggggtaccaggagcacaaagcccaggatagagggcatgtctgcctgggcttggctcagcctcacacccagga

SEQ ID NO: 105733 - DNA, 201 bp, Homo sapiens
ggaggaatggacaggtttgattcagcgaatagagatgtcaggtggggttggagctttaagagggtggtaggagctccacgttgacagtgaggggtatttayggggtaccaggagcacaaagcccaggatagagggcatgtctgcctgggcttggctcagcctcacacccaggaatcctggcttcagcatcccagttccccc

SEQ ID NO: 105734 - DNA, 201 bp, Homo sapiens
tttgcaggacaagatgctatcatctccagtaaactgacagattcccaaaaagagaaggcagtggggagggagaaattatttatagacatataaatgcttcrggcacctaatcagttgttgaaatggatctacaggtggagatgggaaaactggctggaccatgtgaggggctaggtgacatgcaggctcagtcttagaatc

SEQ ID NO: 105735 - DNA, 201 bp, Homo sapiens
cgggagtggggacacacaagggagctagagccccgagcgggtagagggagagacccacatgtgcatgggcggggggtgaggggcagatggaaaacactggyacggactgatgggcagacaaggagtagcgaggacagctgggtagaggggcaggatccagacagtggggggccagatgaagagggaagaaaagcagagctg

SEQ ID NO: 105736 - DNA, 201 bp, Homo sapiens
tcacatggagggaagagcaggcaattgaaggtgtgctaggaagtgaaaagaaggacgaagagctgaggagtacagggctcctagggaatgaccactgaccrttcagggctgggctgacttcaagaggtaagggtaggaagcaaaacctgaaggcagcatgagccaaggatggggtgggggatgtggagaactacctgacct

SEQ ID NO: 105737 - DNA, 201 bp, Homo sapiens
agggacccccgtccccattctaagtgtctgctacattgcgccctacactaagtatcttgttctcaaattaatctttatgacaatctcaagaggtcggcggygttcactccgctgccaagatgaggagatgtgaggctcggtaaggttaagtcatttgccccgggcttcacagatagaggcatgcctggaggtggcctctcc

SEQ ID NO: 105738 - DNA, 201 bp, Homo sapiens
gcagttcataccttaaccagtagggggtgccattgctcaaaacacttgggacagcctgttgagacggtctaagatgggaccgtctgtctagaagagaattmtctgaaaagatgtgagaacttcctgaatatctgaatggctgtcttgcggaaggggcagcagatctattctgtgtatcttaggatgacgtaagcccaaggc

SEQ ID NO: 105739 - DNA, 201 bp, Homo sapiens
tcaccccaccggtcccctcggccctcagtgcagggattgggaggaccggctgcttcattgccaccagcatctgctgccagcagctgcggcaggagggtgtrgtggacatcctgaagaccacgtgccagctccgtcaggacaggtcagcccacgggcgggagtggggacacacaagggagctagagccccgagcgggtagag

SEQ ID NO: 105740 - DNA, 201 bp, Homo sapiens
gagttgttagaggattcagtgaattaacagaaagcttagaacagtgcctggcatatagcaaatgctgtacagacatttgctattaaggaaaaatagacaamaaataaaataagtaagtcatgccacatagtatggttaatagtagtaagtgctatgaagacaattaaagccatgaagagggggatgggaaagaactgggga

SEQ ID NO: 105741 - DNA, 201 bp, Homo sapiens
tgcctggaaaatcccatcatcctgtgcaagaggtgagtccatgaggagcccaatgttaaatcacttgtcagcaagctgcctctgagtcagggtttcatgcrtggcaaagcagctacctcgctgtgaactattgaaaagccagcccttgacacaagcagccgcctctcactgacaaaacagggctgacgatgatcgtgtcta

SEQ ID NO: 105742 - DNA, 201 bp, Homo sapiens
ctgggcctctaggggtgacaggactggaggaggtgggacagagggctgggggttgctggctgaagggaagcgctgccctggtgaggccagaggcgagtacrtttcctcgcacagcactctctggtcctttgccctgcctggccacatgttgtgctggaccctctagaaacccaaagagaaagggtggtaatgacagcagtt

SEQ ID NO: 105743 - DNA, 201 bp, Homo sapiens
catacttcccagtgagtactcactgtcccagagggatgggggcaggctcagcttcacctggggatcccctcaccctgaggaggaccctcagctgggcctcyaggggtgacaggactggaggaggtgggacagagggctgggggttgctggctgaagggaagcgctgccctggtgaggccagaggcgagtacatttcctcgc

SEQ ID NO: 105744 - DNA, 201 bp, Homo sapiens
gaggattcagtgaattaacagaaagcttagaacagtgcctggcatatagcaaatgctgtacagacatttgctattaaggaaaaatagacaacaaataaaayaagtaagtcatgccacatagtatggttaatagtagtaagtgctatgaagacaattaaagccatgaagagggggatgggaaagaactggggaatggtttga

SEQ ID NO: 105745 - DNA, 201 bp, Homo sapiens
cagacacagcccaataggaggaggagtgggaggcttaggagtaggggctatgaatctaccagggaccataatgagccctcctgaaaagctggttcatcaakcaccctaaactatcaagaaccagttcattcattcatttattctctgaatacatataaacatctgttacatgccaggttgttctagcccctagggatacgt

SEQ ID NO: 105746 - DNA, 201 bp, Homo sapiens
gaaggcttcctctaagaagtgacctagaacatgaatagggtctcgattcatgtcttcaggaacctgctgtgtcaagcattttaaggagcaggtttacctcwtaatgggcctcatccctgatctgctagcccctgttttcacaaagctccccagagtggtgcttatattggtttaagctggtctgtgggcaggtgcagaagc

SEQ ID NO: 105747 - DNA, 201 bp, Homo sapiens
ggaagaataagtgatggcaaggctttgaggctgaatggccaaggatgtcattcacagacacagcccaataggaggaggagtgggaggcttaggagtagggrctatgaatctaccagggaccataatgagccctcctgaaaagctggttcatcaagcaccctaaactatcaagaaccagttcattcattcatttattctctg

SEQ ID NO: 105748 - DNA, 201 bp, Homo sapiens
tgacacttaaagagagtctttgcaactgaaagaaggaatgcatctggtccagtcccctgcatcttcaaaggttgatgccaatgcccttttagacaaatggrcatccatcgtactcctaacatatgcagtgacagatgccattacctttctctttggtctggctcagggacaaatcaccccagctctcaggaattctttata

SEQ ID NO: 105749 - DNA, 201 bp, Homo sapiens
gacattaacatcctagggcagaaccaccagtttccagacttttctgcttcccatactggttccaacagaggatctggaagaagccagagcagagaaaactaggagaaggtgtgggtagagtctggggaggtaagcaggggccagagcatggtggtcctttgttgttagccatggcaagggcaaagattttggtttttatcc

SEQ ID NO: 105750 - DNA, 201 bp, Homo sapiens
aatctcaggtctgcacttacttggccaagacacttaacctctctaagccttgatttttcttgcctggaaaatcccatcatcctgtgcaagaggtgagtccrtgaggagcccaatgttaaatcacttgtcagcaagctgcctctgagtcagggtttcatgcgtggcaaagcagctacctcgctgtgaactattgaaaagcca

SEQ ID NO: 105751 - DNA, 201 bp, Homo sapiens
ggagtgagccaccgcgtcaggcccaaaaaagatcatcttttttcccatatccctgttgaacatcacctagcttgaggcaaaccccttatcaatcacaagcragaccatttggaattgtgcattagtcctctacccagcccagtgccaccctctgccagtcttgagtagcctcccagtgggtcctggtatccagaagcaggg

SEQ ID NO: 105752 - DNA, 201 bp, Homo sapiens
aattttagcacagtaaaaagagtagtttcagaccagatcggacactaccagctgggtctaaagtccattccttaaacgtaagctgctgctcccccacttcstgttacagacctacccagccagaccaggtgtgagagagccagcatcactctcagtgcagggaagccacagggaagccacatgatcaagtggaagagggct

SEQ ID NO: 105753 - DNA, 201 bp, Homo sapiens
cagccctcaagtactctttccactctctgtcttacccagaggcgaggcagagtgagggccagccatgcctggtggctcatttgttcccacacccaccttcrgatgggggcaacatggccaacactccgagccaccacgatcacccagatctgagccaacacaggacaggtcatacagtcccatcagagctttcttggtgga

SEQ ID NO: 105754 - DNA, 201 bp, Homo sapiens
ttaccagtttccaagtcacaaaaagtgctgggggaaggattgagccagaggagaggtcaacacaccctagactcactagggaggtttcctggaggagaccygggctgaggtgggccttggaagggcaggaaaccacagcacaaagaggaggagcaggaaggcctttcctggccaggcctgagtgcagaagggttaaattag

SEQ ID NO: 105755 - DNA, 201 bp, Homo sapiens
gcacagcatgttagccaggtctctctgcctctgaattcatccttttcccggaggaccagggttgccttacaatatgtgatctcagaatggtcagtctgtcrtgctttgaggaattcagcccgtgactgaggacctctgttgacagcctgccctgggcccaggtttccagctgtccactggcacagggaaaggagagaatca

SEQ ID NO: 105756 - DNA, 201 bp, Homo sapiens
cagctctcccaccatcttgggcaagctgctttccctctgagcttcagtttcctcatctggaaaatggggatgaaaataatagaattgttgcaaagattaargagacttataacatgtgcagagcacccagccaggtgatggaggtacagtgacaatgctaagtctttattgcccagtgctgtgctctgaaagccacagaga

SEQ ID NO: 105757 - DNA, 201 bp, Homo sapiens
atggtcagtctgtcgtgctttgaggaattcagcccgtgactgaggacctctgttgacagcctgccctgggcccaggtttccagctgtccactggcacaggkaaaggagagaatcagccatccttggcccaggaccagggagaccacgtacctgctctcatgtcagtccctaacctctcttaagtgcctatagctcctgcag

SEQ ID NO: 105758 - DNA, 201 bp, Homo sapiens
tacgaggcctaggagtggcagtgaaaatcatatatccaccttctgtgccacatcactgtcccaagatactcccaccaccacagagccctgtcttaccaaartacagatgtggccaagtctctggtgtttccatccttctgtggctccccatagcttgcagccgtatttctcaacagggacctactggcctttgggtgggag

SEQ ID NO: 105759 - DNA, 201 bp, Homo sapiens
taatgaatggtggcccctgggtttttgccatgtagggatttctgccttgagagtgaagggatctggattccagtcccagtctcttcctcactggctgtacrgtgtcagtatataacccttttgggtctcaatttctccatccaaaaaaataacatcattggattgatgatgttatgaactatttggcggtggggtgggagc

SEQ ID NO: 105760 - DNA, 201 bp, Homo sapiens
cacggtaagtcttcaacgttcaggctctgcccttggctggctgtggacctggggcaagccacttccgctctctgggcctgtttctccatctgagaaattartgggctgaaccagatatccctcagggcccatcaggctctgacagccggtaattcatgaagtccaggcaggtctgagtgtcatgttcttttgggtagggct

SEQ ID NO: 105761 - DNA, 201 bp, Homo sapiens
acattaacatcctagggcagaaccaccagtttccagacttttctgcttcccatactggttccaacagaggatctggaagaagccagagcagagaaaactaggagaaggtgtgggtagagtctggggaggtaagcaggggccagagcatggtggtcctttgttgttagccatggcaagggcaaagattttggtttttatcct

SEQ ID NO: 105762 - DNA, 201 bp, Homo sapiens
ccaagaaatccttttcccaaccccccattcacctaaaaacatattttaaaaaccagtccctggccgggcgcggtggctcacgcctgtaatcccagtacttkgggaggctgaggcaagcaggatcacctgaagtcaggagtttgagaccagcctgactaatacggtgaaacctcgtatctactaaaaatacaaaaattagct

SEQ ID NO: 105763 - DNA, 201 bp, Homo sapiens
tactacatgtaaagcacttggaaccgcacccagcacacggtaagtcttcaacgttcaggctctgcccttggctggctgtggacctggggcaagccacttcygctctctgggcctgtttctccatctgagaaattaatgggctgaaccagatatccctcagggcccatcaggctctgacagccggtaattcatgaagtccag

SEQ ID NO: 105764 - DNA, 201 bp, Homo sapiens
cattaacatcctagggcagaaccaccagtttccagacttttctgcttcccatactggttccaacagaggatctggaagaagccagagcagagaaaactaggagaaggtgtgggtagagtctggggaggtaagcaggggccagagcatggtggtcctttgttgttagccatggcaagggcaaagattttggtttttatccta

SEQ ID NO: 105765 - DNA, 201 bp, Homo sapiens
tcacttgtcagcaagctgcctctgagtcagggtttcatgcgtggcaaagcagctacctcgctgtgaactattgaaaagccagcccttgacacaagcagccrcctctcactgacaaaacagggctgacgatgatcgtgtctacctcatagggctgtcaaaagaagcaaatgcaattgcgtatgcagaggcactttgggaact

SEQ ID NO: 105766 - DNA, 201 bp, Homo sapiens
cagcgcctcccgtgtcctccaagcagaagagcttcatgaaaaggccctggaccctttcctgctgcaggcggaattctttgtgagttcccttgagccggtcrccccactgtgtgcagacccatgtcaatcatccacctgcccaggtggtggagcgtggtgcctggaactcagcatctgcagtagattagtatcactttatta

SEQ ID NO: 105767 - DNA, 201 bp, Homo sapiens
gcccagtgaggtggtattattcccagaacaagatagtgagtaaaggagagggcagggaaaggataagagctgacgtcatttctaggagcaggacagagccsaaaagaacaaacgggcctaggaccacagtggtccgtgcaagtggaggctgtttccttcactgctgtgtccccagagcctagcccgtgcttgacaaagtag

SEQ ID NO: 105768 - DNA, 201 bp, Homo sapiens
agtgaggcagagacctccatcccttccccagaggacctagcatcatgggaagtggcatggatgagtgcaaagtagcgcagctcagggagtcaagggggccrgggcggggccgggggggtgcggcaaagatcagagtcaatctcagaaggctgcctggaggaggtgagttccaaaggttttcaaagaggtctctgtgtcaag

SEQ ID NO: 105769 - DNA, 201 bp, Homo sapiens
aatcccatgggcactccaggaacacggggggcagccagcgtggtccgaaatctgtgatgctgtacaccccaaccaggtgtggcacctcctgaggacacccscagagccacccaccccactgccccctgaggacaggcgccagtcagtgagccgccagccctccttcacctactcagagtggatggaggagaagatcgagga

SEQ ID NO: 105770 - DNA, 201 bp, Homo sapiens; identical to SEQ ID NO: 16950

SEQ ID NO: 105771 - DNA, 201 bp, Homo sapiens
tgatgcaggagaattgcttgaacccaggaggtggaagttgcagttagccgagatcacgccactgcactccagcctgggtgacagagcaagactctgtctcaaaaaaaaaaaaaaaatgcagccaagtccaagatcatgttattccccatagtcccatgttccctctcctctgaggtttgcagaaacatctaagaagcgctg

SEQ ID NO: 105772 - DNA, 201 bp, Homo sapiens
cacactctcctctccatcttctaccattgtcaccaaaatgaggcaaaacaaatctaattgtgtcattctcttccttaaatgccatcattgttgtcaccctygtaatcctcaggtttaagtccagcttttttttttttttttggggagacagagtctcactctgctgcccaggctggagtgcagtggcacagtctcggctca

SEQ ID NO: 105773 - DNA, 201 bp, Homo sapiens
gatgcaggagaattgcttgaacccaggaggtggaagttgcagttagccgagatcacgccactgcactccagcctgggtgacagagcaagactctgtctcaaaaaaaaaaaaaaaatgcagccaagtccaagatcatgttattccccatagtcccatgttccctctcctctgaggtttgcagaaacatctaagaagcgctga

SEQ ID NO: 105774 - DNA, 201 bp, Homo sapiens
atgcaggagaattgcttgaacccaggaggtggaagttgcagttagccgagatcacgccactgcactccagcctgggtgacagagcaagactctgtctcaaaaaaaaaaaaaaaatgcagccaagtccaagatcatgttattccccatagtcccatgttccctctcctctgaggtttgcagaaacatctaagaagcgctgaa

SEQ ID NO: 105775 - DNA, 201 bp, Homo sapiens
tgcaggagaattgcttgaacccaggaggtggaagttgcagttagccgagatcacgccactgcactccagcctgggtgacagagcaagactctgtctcaaaaaaaaaaaaaaaatgcagccaagtccaagatcatgttattccccatagtcccatgttccctctcctctgaggtttgcagaaacatctaagaagcgctgaat

SEQ ID NO: 105776 - DNA, 201 bp, Homo sapiens
gactccattggcacttagatttattgcttaatgcactgtattgtaaacatgtctttactggtctgttttagccacgagactggagccttttgaagacaagwattatgtgttagcattataatctgccatttattgggtacttactaaatgctgaacactatgctaggtgtttcgtctgtagtatctaaaatatttataaca

SEQ ID NO: 105777 - DNA, 201 bp, Homo sapiens
cactgctgttgactaagacgaaatagtaaaacgtacctgaaatgactgtaaaacaatgaaaataacatttttggtctttcttcatcctcctccccgcacaratatacatccttctggcttcatttcaaattttctcttgcactctcaaccatttccttcatagaggttttaaggaaactcatctctaacacaaagacccat

SEQ ID NO: 105778 - DNA, 201 bp, Homo sapiens
ggaggacgcagttcttcctgagagatcagggagtgctccgtggaagacgcaccgcctgagtcgcaccttggagaatgagtaagatttgacaaaaggggaaraggatcttccaggctgagggaacagcacaaacaaggctcgaagggaggaatggacaggtttgattcagcgaatagagatgtcaggtggggttggagcttt

SEQ ID NO: 105779 - DNA, 201 bp, Homo sapiens
tgtagttgctatggttacacagtctctaggtagttccggttaaacaaagagccatttaaggccaggatgcattattcagggatgctcacctcttccctcgwcttgccctccccgatcccagccctacctggagggagggactcgagtatcctagaaccttggactttgctggctgctcagaatggccactgggggaaggtg

SEQ ID NO: 105780 - DNA, 201 bp, Homo sapiens
ttttttttttttttttgagacagggtttcactcttgttgcccaggctggagtgcagtggtgcgatcttgtctcactgcaacctccgccttccagttccaarcgattctcctgcctcagcctccctagtggctgggattacaggggcccgccaccaggtccagctaatttttgtattcttattagagatggggtttcaacat

SEQ ID NO: 105781 - DNA, 201 bp, Homo sapiens
ttggtaccacctgcatacaccatcagcaccccttacctcgtgtggccccagcctccttttccagccttatgccccatgccccacccctgcagggactgtcyacttcaaactgggccagtctcgtccgtgcctttctcctcctgtgcctttgctcacatcatcactcactccagatgcctctagaaagccttctttaaccac

SEQ ID NO: 105782 - DNA, 201 bp, Homo sapiens
gtctccagtccacccctgctctgtccagcaccacaaggacactcatgagcacttgggtagatgggtaccccagcccacacatctgagctccaaacacaccktctgcaaacagtcaccttagccagttctaggaatacacacagcacagtgtactctcatgaagcagtcaaaaaagagggccaccaggtccaggaatcaggc

SEQ ID NO: 105783 - DNA, 201 bp, Homo sapiens
gtcacagaaagaacactgggtgtggagtcaggaaacctagctttttgtttcagctctgccacccccttactgggagagcctggacaactcttggcccttcmtggggactcagtttctctttctatgtaatgaagccccatcctgtcctgtgtctgagactctgagtatagtagagtttgcccattgtagacatccttgcgg

SEQ ID NO: 105784 - DNA, 201 bp, Homo sapiens
tgaggcaggaaaattgtttgaacccaggaggcggaggttgcagtgagccaagatcgcaccactgcactccagcctgggtgacagaacaagactccatctcaaaaaaaaaaaaaatgtatatatatatatatatatatatatatatatatatatttatatttataacagcttttcaaagtatgtattattatctccatttat

SEQ ID NO: 105785 - DNA, 201 bp, Homo sapiens
tcagagtctaggtgggtgagccagatcacaccaaatttgagttacccatgtgatgtcacagaaagaacactgggtgtggagtcaggaaacctagctttttrtttcagctctgccacccccttactgggagagcctggacaactcttggcccttcatggggactcagtttctctttctatgtaatgaagccccatcctgtcc

SEQ ID NO: 105786 - DNA, 201 bp, Homo sapiens
tgtttgaacccaggaggcggaggttgcagtgagccaagatcgcaccactgcactccagcctgggtgacagaacaagactccatctcaaaaaaaaaaaaaakgtatatatatatatatatatatatatatatatatatatttatatttataacagcttttcaaagtatgtattattatctccatttatcaggcaaaaaaaac

SEQ ID NO: 105787 - DNA, 201 bp, Homo sapiens
ggacactcatgagcacttgggtagatgggtaccccagcccacacatctgagctccaaacacaccgtctgcaaacagtcaccttagccagttctaggaatayacacagcacagtgtactctcatgaagcagtcaaaaaagagggccaccaggtccaggaatcaggctgaggagcatttgaccagggaatctggggttttgaa

SEQ ID NO: 105788 - DNA, 201 bp, Homo sapiens
tagcctccagccccagttagggcatggcccacatgagacaaaaatccacagggcaggcatgggtgggttgctcagggtcatggcctggttatgccatgtctttttttttttcctgctgctgcttcttttttaattgagtttgaggtggttgttttttgtttccttaagaaatggaaaagaatgaagctgcgtaaatacaac

SEQ ID NO: 105789 - DNA, 201 bp, Homo sapiens
gtctgcagctgctatttattaaatttgaattcaagaggtcaggctcctttcaaccttgactcttggtcccacctgggattttttcctagtttacactctatttttttttttttccttgcaaaagagcctcaaatccagctaatgtttccaaacccagcctcgctgtgtcttcccctccaggccctgcttctgactcagtta

SEQ ID NO: 105790 - DNA, 201 bp, Homo sapiens
tcttgacagtaaactaaatcctgtgagtttgggtgcagacctccaatatctgggactcactgaggtggccgcagctagaattcccatgctatagccagggrctcagatctaagccaatggtattcagactctttagtagcagaactctgccttgaaataatcttagcagaaatccagtatatggtacagggacaggcagag

SEQ ID NO: 105791 - DNA, 201 bp, Homo sapiens
tctgcagctgctatttattaaatttgaattcaagaggtcaggctcctttcaaccttgactcttggtcccacctgggattttttcctagtttacactctatttttttttttttccttgcaaaagagcctcaaatccagctaatgtttccaaacccagcctcgctgtgtcttcccctccaggccctgcttctgactcagttag

SEQ ID NO: 105792 - DNA, 201 bp, Homo sapiens
catgttttggtccctcttttcttgacagtaaactaaatcctgtgagtttgggtgcagacctccaatatctgggactcactgaggtggccgcagctagaatycccatgctatagccagggactcagatctaagccaatggtattcagactctttagtagcagaactctgccttgaaataatcttagcagaaatccagtatat

SEQ ID NO: 105793 - DNA, 201 bp, Homo sapiens
gggattttttcctagtttacactctatttttttttttttccttgcaaaagagcctcaaatccagctaatgtttccaaacccagcctcgctgtgtcttcccytccaggccctgcttctgactcagttagactcttccaccaaacctgaagatgccaagatcttcccaggttgccatgacgtgagccaggcctgagcacagaa

SEQ ID NO: 105794 - DNA, 201 bp, Homo sapiens
tatgtgatagagcaggacctacttcaggggacatctgattgaggtctacaagatgaataggtgttaccttggcaaagtgtgtgggaggcaggggaggggarcagagtgttggagggatgttccaggcagagagaacagcatgtcaaagcatagggggcgggcttacctgaggaactgcaaggagtgaagctgaaatgggcc

SEQ ID NO: 105795 - DNA, 201 bp, Homo sapiens
cctgagcacagaagggttaaatcaggctgagggtaggggccctgatgagaagctggagctcacagcagggtgtggcaggagctaggggcccctctagttgsaggtgggagcaaactgagctctgaacttcagctttcccctctgtaagtacatcccagccccatgagaaggagccttgtaagcaatgaggagcggagcaga

SEQ ID NO: 105796 - DNA, 201 bp, Homo sapiens
tagtagcaactccataggggtgctgtgaagaattaaaaaattaacccaggcacacagagaagggcccctgcacattccaggcatattgctgctgctgctgmtgatgatgatgatatgaaagagaggcatggggtgctcgtatgtgatagagcaggacctacttcaggggacatctgattgaggtctacaagatgaataggt

SEQ ID NO: 105797 - DNA, 201 bp, Homo sapiens
actacatgtaaagcacttggaaccgcacccagcacacggtaagtcttcaacgttcaggctctgcccttggctggctgtggacctggggcaagccacttccsctctctgggcctgtttctccatctgagaaattaatgggctgaaccagatatccctcagggcccatcaggctctgacagccggtaattcatgaagtccagg

SEQ ID NO: 105798 - DNA, 201 bp, Homo sapiens
acgagactggagccttttgaagacaagaattatgtgttagcattataatctgccatttattgggtacttactaaatgctgaacactatgctaggtgtttcrtctgtagtatctaaaatatttataacagctgccgggcgcagtggctcacacctgtaatcccagcactttgggaggccaaggtgggtggatcacttgaggt

SEQ ID NO: 105799 - DNA, 201 bp, Homo sapiens
tctcaaaaaaacaaaaacaaaaaaactgcaatgctggccacatgcagtggctcacacctataatcccagcactttgggaggccaaggcaggcggatcaatygaggctaggagtttgagaccagcctggccaacaagatgaaaccctgtctctactgaaaacacaaaaattagctgggcatggtggcacgtgcctgtaaacc

SEQ ID NO: 105800 - DNA, 201 bp, Homo sapiens
tgtgggaacacaggagagacacctgcccaggacggaggtcagagaaggctttccgaaggcaggggtcaggtgagtattttcacgcaagtcagctgtgttcytctttagcccatgatgtaaaacagtgctttcctatagtagcagcagtagcgttcagccctgcttccagggactctagacactcagggagaccccttcact

SEQ ID NO: 105801 - DNA, 201 bp, Homo sapiens
aagggccaggaagtgaaaagcagaagtagtggtcactgtcacagccaggtaactcaggacttgagaaaatggcttcctgagtagaaattccccagaaagasaggctgagatgaggcagggctgctcaccttctcaatgccatggagatgatgagggaagaaccagggcatcttggagtttgagggaatttacttttgtcca

SEQ ID NO: 105802 - DNA, 201 bp, Homo sapiens
tggaggaggggtgggctccacgggcccttgagctcttagctcctgatcagaagagtggatgcctgactctgactcctggtgcccagggcagagctggcctyatagcttagccagtgtagacatgtgctatccaggtcattcatagagatcaaagtgccccaagatgaatgctgagaaatactgttactgcacacgcacaca

SEQ ID NO: 105803 - DNA, 201 bp, Homo sapiens
ggaatgacttagccgcatggcctaagtcagtctggcctgatctctcacaacatctcaagttgttgaccagggctgcaataatccccaaactcgactgtggmtgaagaatccacttctaagctcactcacaggtgattggcaggctccagttccttgcagcctctgggccagaggtctcagtacctcgccacacaagccact

SEQ ID NO: 105804 - DNA, 201 bp, Homo sapiens
tgtcaggaataacagcaactgatacttcgtgttggtcctagttactggcataaggactctagttgttaaagttaactcctttacaagataagcaaggtcaytgtggaatgaccatccccagattacagataaggcacagggagataaagtaaattgtccatgttgacactgctagtaagtcagaatcaggatttgaaccta

SEQ ID NO: 105805 - DNA, 201 bp, Homo sapiens
tacataacaaattacccccaaaactttgtaatttaaaacaacattccttatcccccacagtttctaagtcaggaaaccaggaatgacttagccgcatggcytaagtcagtctggcctgatctctcacaacatctcaagttgttgaccagggctgcaataatccccaaactcgactgtggctgaagaatccacttctaagct

SEQ ID NO: 105806 - DNA, 201 bp, Homo sapiens
tagtagtagcaactccataggggtgctgtgaagaattaaaaaattaacccaggcacacagagaagggcccctgcacattccaggcatattgctgctgctgmtgctgatgatgatgatatgaaagagaggcatggggtgctcgtatgtgatagagcaggacctacttcaggggacatctgattgaggtctacaagatgaata

SEQ ID NO: 105807 - DNA, 201 bp, Homo sapiens
tggtgggtagaggagacgatattcaaaaattattttacaacccatggcaagtgtaatgtagcctgaagcctatctgactgccctggattgaagccacctcyacccttaccagctaagcaaccttgggcagctctgttaacctctctgcacctcatcttccttttctgtaaaatggggataatagtagtagcaactccatag

SEQ ID NO: 105808 - DNA, 201 bp, Homo sapiens
tggatgcatctggtccccagggctgccaggtgaccagtagtcttaaaaaaattgtaagcctccccctctctgagctacacatctagggccctatgagcctrcagtttttcctaccacctccataatgtgcaagacagttaacctatctttcatatgcaaaagtaatgatcacacattatccgagggacctgcctctggagt

SEQ ID NO: 105809 - DNA, 201 bp, Homo sapiens
ttgcatgacattgaatctttgtgttcccagtgcttgacgtataatcggcgcttaataaatgtgtgttggactcaggcacaaatcagcagagactaaaaccwgagtggcaggctcctagcccagttctccatctttgaaactaacaccaatttccatcacagacatccactgcccacccccgagatcaggggttcttaacct

SEQ ID NO: 105810 - DNA, 201 bp, Homo sapiens
cctccatactacatgtatactttgaggcttcatcagctggggaccaggcacaaaatctgcaccgtggcccccatgcagctgattaaggttcaaggttctgscccccaccctcccccgaccccagacataggacctccctgccttgctgcagtgaccctttactgagaagcggcatggcaaaatggaaacatcacttgatgc

SEQ ID NO: 105811 - DNA, 201 bp, Homo sapiens
ggccaggtaggcaaacctgctccaccaatcccccttgtgggtttccagacctttctgtggagtaagagaaaaatcatagactgtggagacccaccaacctrggttcaagtccagttttgtcactgcctggctatgtgatcccaggccagtcacttaacctctctgtgcctcagtggctccccatgtaagacatgggcaatc

SEQ ID NO: 105812 - DNA, 201 bp, Homo sapiens
agcagaaaatagggagccacctccagcctctcccagtgagaacagagatcacagcagtgcccagcaaggccaggctgttcctctcagagcccacgggagtrctgagggtgtgatattgcagtggcagaagtagctgattgggtgtattccttctagactcttccaccactccgcccttctcagttcctctagcagtacctc

SEQ ID NO: 105813 - DNA, 201 bp, Homo sapiens
aaaggtagcagaaaatagggagccacctccagcctctcccagtgagaacagagatcacagcagtgcccagcaaggccaggctgttcctctcagagcccacrggagtgctgagggtgtgatattgcagtggcagaagtagctgattgggtgtattccttctagactcttccaccactccgcccttctcagttcctctagcag

SEQ ID NO: 105814 - DNA, 201 bp, Homo sapiens
atgagaggatggagcaagatgctctctcaagtctgtcccttcctccccaagcatttgtgcttaagtctcaggcactggggacctctggtacctccctgccrcagggcctctgctgtcagctcttttagttctcagcatgggcagctgctgggggaagcaacaccctcagagtttcattgacccttttcaccctcgtacttc

SEQ ID NO: 105815 - DNA, 201 bp, Homo sapiens
tgtggacaactcccaggagagcagagctgctctagacacactgagggagtgggggggcgtcaatcccatgggcactccaggaacacggggggcagccagcrtggtccgaaatctgtgatgctgtacaccccaaccaggtgtggcacctcctgaggacacccccagagccacccaccccactgccccctgaggacaggcgcc

SEQ ID NO: 105816 - DNA, 201 bp, Homo sapiens
aagcccaaatggacaaacctccagaagatggacctggttgtagtagtactgctgagatgtcaccggtagctgtcaacactcagtggtagaggttctgttgmtttttatttctttgttgaattgatggttctgttttcattcaagacttcaaatacatttagagatatttattgtcattgatggtacgatgagttttttact

SEQ ID NO: 105817 - DNA, 201 bp, Homo sapiens
tagggtagcagggatctgttgggggcctctagtcccaccctccccaacctccagattgggcttctctgagttcagaagatacttccaagcccctgaagttsttctgcctgctccccatcccagacctgggacgtgattttcagaatcttggttttgtcatcattgcaagagctgagaactctgcccccaccaccaccctga

SEQ ID NO: 105818 - DNA, 201 bp, Homo sapiens
gccaggcatggtggcacacacctgcgataccagctactccggaggctgaggcaggaaaattgtttgaacccaggaggcggaggttgcagtgagccaagatygcaccactgcactccagcctgggtgacagaacaagactccatctcaaaaaaaaaaaaaatgtatatatatatatatatatatatatatatatatatattt

SEQ ID NO: 105819 - DNA, 201 bp, Homo sapiens
ttgggctgaagagttcacttcctgtcacctggattttcctagacctctgagggcatttaacaggatgtttcaaagaaccccaagccagaacccagccttcyactgccatggggcctcaagccttagactttccagatatccacaggcaatccctgttgaacttcatatgctagcttaatgagagagctgaactagaggctt

SEQ ID NO: 105820 - DNA, 201 bp, Homo sapiens
agaagtgtgatcacacctttgcatttgtgattgcctgttttctcccggtaaattaaactgcatacctgggggcaggtgcagggagagggagcagaatgcartgttttcagagtcttggagaacagaggatcagaccggataacctttgaactccaaaatcctgcctttctatcttttgggtccgtgaccgccgcaccattt

SEQ ID NO: 105821 - DNA, 201 bp, Homo sapiens
cccaaggcctgcttcctgggctgttgcttcaagtggagaaacccgaggtcgtggtcccgcgcaggacttccagtcgttcttctggggagaacagcagtgakcccaagcaaggacacaggcacagggatctccctcttgctccttcactcgtttgcttgggtcacttcaccccctgagccttagttttctcgtctgtaaaaa

SEQ ID NO: 105822 - DNA, 201 bp, Homo sapiens
ggtctcagcaagaggccactgcccatcccgagtgccactttttaaagtaaaggagctggaggcctgaatcaaggaaagctttgtcaccctaatcctgcagygcctatctctgaccagcaggaaagaacaagtcatagctttcatagccttcctaccatgccacagatgaggtcttggaccagtagccaacaagggcagttg

SEQ ID NO: 105823 - DNA, 201 bp, Homo sapiens
atagaaagcaactgccatgatatgctgtctcttcctattgtatttgcggaatattttttcttaccaaaagctaaaaagtgaaagagaggttaggaatgtgkgcaatgggggaagttctgtgataactagctgtgtggccttaggcaggtcactttacttctctgaatttccatttccgcctttagaaaatgcaggaaacgt

SEQ ID NO: 105824 - DNA, 201 bp, Homo sapiens
agccatgacaatccctaccaacctgagatttcagtgtgtcatgattagctggctttatgcaaggtcatgagtatgctgaaggcctgagtaggccattgcayttttggtaggaacaactggcctcttgggctggtgattctgagacctactcttcaccttagatcctgatgtcttgcaacctgtccccaacccagccctagg

SEQ ID NO: 105825 - DNA, 201 bp, Homo sapiens
tgtttcccccattggaccttggctcagcttccaactcggtggttttgttttgggtttacttggagaggaaaaggtggttttcgagaatttctagagcatcktccatcatactcctcagtgcatggtcctgttatctccagtgggccatactggctctctctttagttttattcacttatttacttccttttatgtcccact

SEQ ID NO: 105826 - DNA, 201 bp, Homo sapiens
ccctcaatttccgttcgttgtttcccccattggaccttggctcagcttccaactcggtggttttgttttgggtttacttggagaggaaaaggtggttttcragaatttctagagcatcgtccatcatactcctcagtgcatggtcctgttatctccagtgggccatactggctctctctttagttttattcacttatttac

SEQ ID NO: 105827 - DNA, 201 bp, Homo sapiens
tcactttacttctctgaatttccatttccgcctttagaaaatgcaggaaacgttagtacgttcctccaggggctgctgtgaggactgagtttgctaacacmtgccctggagcagttcctggcctgtgtggtccgggtgcagtagtgacagctgccctttctgttgtgaagatactgtcattgttatcctcttcggtcggga

SEQ ID NO: 105828 - DNA, 201 bp, Homo sapiens
ccagggtttctctctctccagctctcccagttccaggatgcaaacagggtgaagggccctcaatttccgttcgttgtttcccccattggaccttggctcarcttccaactcggtggttttgttttgggtttacttggagaggaaaaggtggttttcgagaatttctagagcatcgtccatcatactcctcagtgcatggtc

SEQ ID NO: 105829 - DNA, 201 bp, Homo sapiens
aaaatgcaggaaacgttagtacgttcctccaggggctgctgtgaggactgagtttgctaacacatgccctggagcagttcctggcctgtgtggtccgggtrcagtagtgacagctgccctttctgttgtgaagatactgtcattgttatcctcttcggtcgggagctaagatgttactgaacaggtggtccgaagattgct

SEQ ID NO: 105830 - DNA, 201 bp, Homo sapiens
aaccagctcggaggaaaggagattcaggggtctccttgacagtcggctgtgctgcagctcagtccatgagtctttctccgttcggagttgttgattcccaracagccagggtttctctctctccagctctcccagttccaggatgcaaacagggtgaagggccctcaatttccgttcgttgtttcccccattggaccttgg

SEQ ID NO: 105831 - DNA, 201 bp, Homo sapiens
tccgtgttagacatatgagaaaaatttaaggctcagagtgataaagacactttcctagagccacacagtttgactagagcagagtgaagacctatccccasggaaggcttcctagagcaattcaagattaagctggagcttaaagtctgagtttgattttaaggaggggtgcaaagaggtgatggccttccaggcaagaga

SEQ ID NO: 105832 - DNA, 201 bp, Homo sapiens
gactcagaggtcatgttggtgaaccagctcggaggaaaggagattcaggggtctccttgacagtcggctgtgctgcagctcagtccatgagtctttctccsttcggagttgttgattcccaaacagccagggtttctctctctccagctctcccagttccaggatgcaaacagggtgaagggccctcaatttccgttcgtt

SEQ ID NO: 105833 - DNA, 201 bp, Homo sapiens
gagaaaagtacatcaaaaggaaaacaacgcctttctcagtgaggcaagagtatggatgacttggttttgctttatgcttttattgtagggggaggtcttcrtattttctaaaatcattaagaaaaaatgattggccactccaaaatactaattaatccttgccaagcaagagtgatagctggtgagagagtgggccctctg

SEQ ID NO: 105834 - DNA, 201 bp, Homo sapiens
tcccatcgaggccaggggcagtgccttgtggacaactcccaggagagcagagctgctctagacacactgagggagtgggggggcgtcaatcccatgggcaytccaggaacacggggggcagccagcgtggtccgaaatctgtgatgctgtacaccccaaccaggtgtggcacctcctgaggacacccccagagccacccac

SEQ ID NO: 105835 - DNA, 201 bp, Homo sapiens
gttctgattctgggctgtctgtgtagcaagaggcaagcagggcaccaggggaggagaaaggtgactcccagaaggaaatcaggattttaactacctgaaarcaaattgttggcacactgtgtgacctgagactagtcacttaatctctctttgccccgttttcccagctggatgatctgaagctgccctctctccttcatt

SEQ ID NO: 105836 - DNA, 201 bp, Homo sapiens
gaagcccaaatggacaaacctccagaagatggacctggttgtagtagtactgctgagatgtcaccggtagctgtcaacactcagtggtagaggttctgttkatttttatttctttgttgaattgatggttctgttttcattcaagacttcaaatacatttagagatatttattgtcattgatggtacgatgagttttttac

SEQ ID NO: 105837 - DNA, 201 bp, Homo sapiens
tttgggatccagaacactcaagtttgcagtctgctcagacgtgaggacagatggctggacagtggacagctgggcaaggagggtaggcagcttggcaggayggaaatagcagtgaactaagcattgggagtcctgggctcagagcctattcattccacgagtttgctgcacgcatcagtctgggttctgtggttgccagca

SEQ ID NO: 105838 - DNA, 201 bp, Homo sapiens
tccagaagcagggcaacccgcatcctcttaggcctgtctctcctcattgggaatacagcctgctatgaaaatccatattacctgaggaagggataaaaccrcttgcattagttatattttgctacataacaaattacccccaaaactttgtaatttaaaacaacattccttatcccccacagtttctaagtcaggaaacca

SEQ ID NO: 105839 - DNA, 201 bp, Homo sapiens
tggcctgtgtggtccgggtgcagtagtgacagctgccctttctgttgtgaagatactgtcattgttatcctcttcggtcgggagctaagatgttactgaayaggtggtccgaagattgcttctgccctttttcctgcttcctttctctctcagatcacctcctcctgttcccttccatcctcaccaacctgaccatgaaat

SEQ ID NO: 105840 - DNA, 201 bp, Homo sapiens
ccaaaaaagatcatcttttttcccatatccctgttgaacatcacctagcttgaggcaaaccccttatcaatcacaagcaagaccatttggaattgtgcatyagtcctctacccagcccagtgccaccctctgccagtcttgagtagcctcccagtgggtcctggtatccagaagcagggcaacccgcatcctcttaggcct

SEQ ID NO: 105841 - DNA, 201 bp, Homo sapiens
cagaagcccaaatggacaaacctccagaagatggacctggttgtagtagtactgctgagatgtcaccggtagctgtcaacactcagtggtagaggttctgktgatttttatttctttgttgaattgatggttctgttttcattcaagacttcaaatacatttagagatatttattgtcattgatggtacgatgagtttttt

SEQ ID NO: 105842 - DNA, 201 bp, Homo sapiens
tacaatcagggatggcaccactgactagaagaaatctgcagaaaataggacaggatgaataggagtccagagagtagcacggtgtggaggaagaaagagcrtgggatttggcgtttgagtccgcctgttctgcttcaggctgtgtgtttatgcacaagtcacttaaccttgctggagctccagtccctcatctgtgagcag

SEQ ID NO: 105843 - DNA, 201 bp, Homo sapiens
aatgccactgaattgtaccctttaaaatggtcaaaatgttgaattttatgctatgggaattttagcacagtaaaaagagtagtttcagaccagatcggacrctaccagctgggtctaaagtccattccttaaacgtaagctgctgctcccccacttcctgttacagacctacccagccagaccaggtgtgagagagccagc

SEQ ID NO: 105844 - DNA, 201 bp, Homo sapiens
gaagctgaaatgggcccggctgggaagcaggagcctgtgctacaaacacagctccaggaccgggttctctgcaccacagtcttgatccaggccatgggagrtgctcagtaaatgtttgtcaagtgagcgagcagctcatggacaaacggctatgctgggcccacatggttctgttgtcacccaagtccattgtcccatata

SEQ ID NO: 105845 - DNA, 201 bp, Homo sapiens
atcaggatgagggacattttcctgggtgtaaagacagtgctgagtgtgtctgcccttgtattgggcattgcctttcactgatgggcttggacaaaccctgyactgctccatccctcccatgaggcatttccactgtgaaatgagaaaagcaatttttttcatggtagttataagaattcagtgagacaatggatgggaatg

SEQ ID NO: 105846 - DNA, 201 bp, Homo sapiens
tagaatgtccgagaaagcttttattatatgtctggcacctcagtgctcctaccttgggcttcctcacagcatgatggtctcatggtagttggacttcttaygtgattaccaagaaggagcactctaagaggggcaaaaaagaagcttcagatctcttaaggcccagctccagaagttacacaatgtcactccactacattt

SEQ ID NO: 105847 - DNA, 201 bp, Homo sapiens
cccaaagtgctgagattacaggcgtgagccaccgcgcccgggcagaggtgaactttaaagggtgggaacaacttggagagatgggggtaggggagaccagygccctcaggaggcagaacgtcacaagctcagactcagaggcaggactgagaacagcagattaacaacaggggagaaacaggcctaactggaagtaaagag

SEQ ID NO: 105848 - DNA, 201 bp, Homo sapiens
catgcagggtttagctgggtgattcttccattccatgtggcatcagctgaggtcactcattcagctgaacacacctcattctgtgctgggatagaatgtcsgagaaagcttttattatatgtctggcacctcagtgctcctaccttgggcttcctcacagcatgatggtctcatggtagttggacttcttatgtgattacc

SEQ ID NO: 105849 - DNA, 201 bp, Homo sapiens
caccacaggtctgagacctcactgaaccagcacagccacaggcaggagtgttttatgcttacatatttaaggggccagggttggtggggagaatgatcctycgttttccttcaccaggatagaaacagttctcatattctagggagttgcctggatgtgtgatgacacttaaagagagtctttgcaactgaaagaaggaat

SEQ ID NO: 105850 - DNA, 201 bp, Homo sapiens
ccccaaaactttgtaatttaaaacaacattccttatcccccacagtttctaagtcaggaaaccaggaatgacttagccgcatggcctaagtcagtctggcytgatctctcacaacatctcaagttgttgaccagggctgcaataatccccaaactcgactgtggctgaagaatccacttctaagctcactcacaggtgatt

SEQ ID NO: 105851 - DNA, 201 bp, Homo sapiens
gactcttaatgactcccctatactgcctgtgagagcctcctaatgtgcacactggaagtgcctttagtccagtcctccctattataggaaagaaactgagkcctggacaagtgagctgatgacaaaactaaaccagaacccaggaatctggggccccagccagcttcccccttaccccatacaacctcagtcttggcctct

SEQ ID NO: 105852 - DNA, 201 bp, Homo sapiens
gaatgactctgacccactgctgtgacccccatgccagggatgtttcaaggaaaccacactgattatagctgagataccccagccccactgaagagcccctytgggtctgcagactctgtgccttctgtcgggaggacgccgtgtggggtgcagcggaagccctgcaggctgagatccagccctctctatgcactcagtgcc

SEQ ID NO: 105853 - DNA, 201 bp, Homo sapiens
ctccttctacctggagcaccccaccccctcctgtctcatcccacggcctctcacccccactcctctttcacatctcaccagagatggcccttcctgggtaycaaacgtctcctgagtcctctgcctccttaggggtctggctggcactcccagggcaccctgctcgtctccccgcacacgggtcacctgtgtcaccattgc

SEQ ID NO: 105854 - DNA, 201 bp, Homo sapiens
tcctgagtcctctgcctccttaggggtctggctggcactcccagggcaccctgctcgtctccccgcacacgggtcacctgtgtcaccattgccttttcttsttacctacatcccccatgagatgcttgtcgttcattgtattcccagggtcccacacgtagcctgaacatagcaggtgtttagtaaacgggttgaacaaat

SEQ ID NO: 105855 - DNA, 201 bp, Homo sapiens
agtcctctgcctccttaggggtctggctggcactcccagggcaccctgctcgtctccccgcacacgggtcacctgtgtcaccattgccttttcttgttacstacatcccccatgagatgcttgtcgttcattgtattcccagggtcccacacgtagcctgaacatagcaggtgtttagtaaacgggttgaacaaatgaatg

SEQ ID NO: 105856 - DNA, 201 bp, Homo sapiens
gtcgttcattgtattcccagggtcccacacgtagcctgaacatagcaggtgtttagtaaacgggttgaacaaatgaatggtccaatccctgaatcagactsaaatgaaaaatggacaactgttgcccgagcccctcagcaggctgggcctaccctgcacttttcatcttcccttccctggggtccctgccatgcccgcacc

SEQ ID NO: 105857 - DNA, 201 bp, Homo sapiens
tatgagggagccaggtgagtgagcgtttacgccgtccccctgcaacccgcccactgaggaggccaagccttctccatctggatgctctgggacacgtgacycattctcatgaggtgttcagcctgatcattccttttccgtgaaaccagcatgccctctgcccctgcctgctgaacatgctgatgaaaatctggatggcat

SEQ ID NO: 105858 - DNA, 201 bp, Homo sapiens
tctggatgctctgggacacgtgacccattctcatgaggtgttcagcctgatcattccttttccgtgaaaccagcatgccctctgcccctgcctgctgaacrtgctgatgaaaatctggatggcattatgggcctcttcctggctatggtttggccatcttctttaattgggatgctcctagctggagtctgccttcctaga

SEQ ID NO: 105859 - DNA, 201 bp, Homo sapiens
atgggcctcttcctggctatggtttggccatcttctttaattgggatgctcctagctggagtctgccttcctagagcccctaaagctaccaaccctgagaycctgccactaccctgcatttggcctttaaggtgtacatcaacaggctcaggccctgtgctaaacacctgggatgcagaggtggttgagggggtgaggatg

SEQ ID NO: 105860 - DNA, 201 bp, Homo sapiens
gatgaccttcaagttacaacaggcttggagtctgaccaccatattttcataagtgaggcctcagacccagagcgcagaaaggattgcccaaaaccacaagygtgatgggaggagagtggaaacagagcagtttggttcacaggagcactactcacaaatagccaaaaggtagaaacaagccaaatgttcaactgatgaata

SEQ ID NO: 105861 - DNA, 201 bp, Homo sapiens
tctctgacttctgtggacaacagctgtggaggagagctcccagctacttagcaaagacccgtccacaaagcagctcagatgatggctgtgtttgagattcmtaatgttttctcaagaacgtcaggtcaacatttacttattccataagtgtttatttattgaacatcctactacgaaccaggcactgtgcgaggctttgaa

SEQ ID NO: 105862 - DNA, 201 bp, Homo sapiens
agctgctaacagactctagttgagtatatctcctgagccctatggacttctctgctcatggggagtgccatggacagaagagacggggcacagggcccagrtctaaggacaacgctgctcttgggaacaaagtactcctggagccttcctgcgggcagctggctggagccatgacaatccctaccaacctgagatttcagt

SEQ ID NO: 105863 - DNA, 201 bp, Homo sapiens
gcttcattgccaccagcatctgctgccagcagctgcggcaggagggtgtagtggacatcctgaagaccacgtgccagctccgtcaggacaggtcagcccaygggcgggagtggggacacacaagggagctagagccccgagcgggtagagggagagacccacatgtgcatgggcggggggtgaggggcagatggaaaacac

SEQ ID NO: 105864 - DNA, 201 bp, Homo sapiens
tgcaagacaccaggtggcactgctaatgttggggactccactccttcccccatccagcaccagtacaggcctagcccagcatagtcctagctcccagcagytgccgcggaggtacaaggtagaagaaggaggtagataaagcagcagtaggtgccagtgggggccagcacatggaatagagcaacatcaccaggtgttgct

SEQ ID NO: 105865 - DNA, 201 bp, Homo sapiens
tcccggccgaggagccggcgcccgcccccgccacgcccccgtggggctctgggcgcccgcatgctgggggaggggtcccccatgcagaggagggggcttgkcgcttggtagccgggagggagcggcagccactccccacgaagcccgtgcgcggttccggggaggaatcgggatagtggtttggggtctgagcctctgcgg

SEQ ID NO: 105866 - DNA, 201 bp, Homo sapiens
cacccaaacactttggtacattcaaactcacaatctctcttcttctatgtgtaggtgttcacatttgcaagacaccaggtggcactgctaatgttggggaytccactccttcccccatccagcaccagtacaggcctagcccagcatagtcctagctcccagcagctgccgcggaggtacaaggtagaagaaggaggtaga

SEQ ID NO: 105867 - DNA, 201 bp, Homo sapiens
ctcctcttctctttcactcttcctttcttgctcacttcatttgctcacagtcacccaaacactttggtacattcaaactcacaatctctcttcttctatgkgtaggtgttcacatttgcaagacaccaggtggcactgctaatgttggggactccactccttcccccatccagcaccagtacaggcctagcccagcatagt

SEQ ID NO: 105868 - DNA, 201 bp, Homo sapiens
tggccctggcgtctggagtagaaaaagaacagggagcttggtgcagtggctcatgcctgtaatcccagcactttgggaggctgaggcaggggatcatttgrggtcaggagtttgagaccagcctggccaacacggtgaaactctgtccctagtaaaaatataaaaattagccaggcatggtggcgcacacctgcagcccct

SEQ ID NO: 105869 - DNA, 201 bp, Homo sapiens
taatgatggtataaaaatccagccctcaagtactctttccactctctgtcttacccagaggcgaggcagagtgagggccagccatgcctggtggctcattygttcccacacccaccttcggatgggggcaacatggccaacactccgagccaccacgatcacccagatctgagccaacacaggacaggtcatacagtccca

SEQ ID NO: 105870 - DNA, 201 bp, Homo sapiens
aaaggtgactcccagaaggaaatcaggattttaactacctgaaagcaaattgttggcacactgtgtgacctgagactagtcacttaatctctctttgcccygttttcccagctggatgatctgaagctgccctctctccttcatttatatcaccagcttgctttttgctgagaaagcttcctgccctggaagatggcaccc

SEQ ID NO: 105871 - DNA, 201 bp, Homo sapiens
tatcctattcaccttatattctttgtgcctagcaaaccaagcctggcccttcacagtaaatcattgttgaatgagtgaatgaatgaatgaatgaatgaatgttggaaatgaccatttatgtgtgagactgcatatcttagacttatatgaaccaataaataaagatattataccatagtaagggtatagtaatctgtacta

SEQ ID NO: 105872 - DNA, 201 bp, Homo sapiens
caggggcaaggcctggcaagtgattgctactccatggcttttggggcacctcccacagcccatccctccacgaccctgcccccactgtgcatctctgccgkgcaggggcggcatgatccagacatgcgagcagtaccagtttgtgcaccacgtcatgagcctctacgaaaagcagctgtcccaccagtccccagaatgact

SEQ ID NO: 105873 - DNA, 201 bp, Homo sapiens
atatcctattcaccttatattctttgtgcctagcaaaccaagcctggcccttcacagtaaatcattgttgaatgagtgaatgaatgaatgaatgaatgaatgttggaaatgaccatttatgtgtgagactgcatatcttagacttatatgaaccaataaataaagatattataccatagtaagggtatagtaatctgtact

SEQ ID NO: 105874 - DNA, 201 bp, Homo sapiens
aggctgtgtgtttatgcacaagtcacttaaccttgctggagctccagtccctcatctgtgagcagaaacaatagcaatatgaatatttatcctcacaagtstcctgggggaataaataaatgtaaccactcagtcattcactcaagtacttattgagcacctactaggtctcaggtactaggtgctagatatatagcggta

SEQ ID NO: 105875 - DNA, 201 bp, Homo sapiens
catatcctattcaccttatattctttgtgcctagcaaaccaagcctggcccttcacagtaaatcattgttgaatgagtgaatgaatgaatgaatgaatgaatgttggaaatgaccatttatgtgtgagactgcatatcttagacttatatgaaccaataaataaagatattataccatagtaagggtatagtaatctgtac

SEQ ID NO: 105876 - DNA, 201 bp, Homo sapiens
acatatcctattcaccttatattctttgtgcctagcaaaccaagcctggcccttcacagtaaatcattgttgaatgagtgaatgaatgaatgaatgaatgaatgttggaaatgaccatttatgtgtgagactgcatatcttagacttatatgaaccaataaataaagatattataccatagtaagggtatagtaatctgta

SEQ ID NO: 105877 - DNA, 201 bp, Homo sapiens
cctccagctcagatgatctgactccagattctgaactctttgttctgtgtcgtattgcctgtcctttccctagacttgccctaaaagagaggcggataacyccttaaaaacagttgaaagaggacttttattctcctcacaggtcagtaacggcttcttggagaagccaagtagcatttaaactgggtgaatgatttgtac

SEQ ID NO: 105878 - DNA, 201 bp, Homo sapiens
ttgcatcctcatagcttagctctcacttatgagtgagaacatacaatgtttggttttccattcctgagttacttcacttagaatcatagtctccagttccrtcgagaacttcctttttgaggggggtgagcagctcatcatggagctgagccagggtggccaagtggcagaacttcaggggctgccactgacagtgtagtc

SEQ ID NO: 105879 - DNA, 201 bp, Homo sapiens
gacttcagcagcctccagcactgtgcttataattgagggttcatcatgactttgagatcctccttagaaacatctcttcacctgggatcctgggcttctgrcctgtagtgcccaatctgtccacaagagggcaggcactctttgctgctttggggttgtacagggggctgtggttacagaaaacagcaagaaaaaggaaga

SEQ ID NO: 105880 - DNA, 201 bp, Homo sapiens
gagggtgggaagaagacagctcagatcacccactgagtttgtccctctactctgacaaaccccatgagctgcagggcagagggtacagttctgatccccartggtccccgttactggatccccagactcctgaaccaacttacgctgtcctctttcctgacaggattgtcctggcacgatgacctcacccagtatgtgatc

SEQ ID NO: 105881 - DNA, 201 bp, Homo sapiens
cctaattgatggagagaaggggaaggaagtgggcaccaaggccagcatgctggggcacaggtaaagaggtgcaggaatggtcactctctgacatgctcacrtgaccaagaggagctgagctcatctctagggatccagaaaaacgggcattttttgaatgttttgaaaaacattgacattggctactttaaaagaagcatc

SEQ ID NO: 105882 - DNA, 201 bp, Homo sapiens
caggtcacagactcccctctcaaggcccaagtcccagcgtgcaggtgctatgagctttccttcatcctcggctcactgtccctctccaagccaaccccaabgggtcacccagtgtcctcccctcccccaggcctccaggcctcctcgcctcctccgtccctccccctttctgctgcatctcaagctaaacctgtcactaac

SEQ ID NO: 105883 - DNA, 201 bp, Homo sapiens
ggccaggcttaggatgagaccagtaacagggtcttggtcactgactgagatgaagaccacagcaaatgttccaggctcagggtctctggccctttctcccrcttgtgttgtgtagaccttggccatggccatttttccagactcttgtttttcctgtctcgcaggaggggttgtaaatgttggagctgatatcaagaaagt

SEQ ID NO: 105884 - DNA, 201 bp, Homo sapiens; identical to SEQ ID NO: 16975

SEQ ID NO: 105885 - DNA, 201 bp, Homo sapiens
ctttggaaggcctcttattcaagccccctgctgacaccacttttgtgcccttagatggcttgtttgggcagtgccaggtgggagtggggcaggcccggccycttttgcaagtcacctccccagttctccaacgcttacaaggtgtgctccgacaactcatgtcccaaggtaaggtctgggtgcactggaggagagagattg

SEQ ID NO: 105886 - DNA, 201 bp, Homo sapiens
gccttcgcccaagcagcccctccccgcagttctctttctcaccagcagatggcgtaggtgtcccctccctgcaggaccagccctctgtagtaaaaaggccygagaactagttgagccgcccttagtctgctggagcacagtctccaaattccaagggaacaccttgcacagaaaggacattatactcaaaatatgttttgt

SEQ ID NO: 105887 - DNA, 201 bp, Homo sapiens
tctcaccagcagatggcgtaggtgtcccctccctgcaggaccagccctctgtagtaaaaaggcctgagaactagttgagccgcccttagtctgctggagcrcagtctccaaattccaagggaacaccttgcacagaaaggacattatactcaaaatatgttttgtttgtttgtctgagacagagtttcactcttgctgtcc

SEQ ID NO: 105888 - DNA, 201 bp, Homo sapiens
acaccaagacaggtcagccctccagcgtcccctgcttttcctagccccagacaggtacttgggaagcccactaccaagggcaggggcccacccacactgcrcccttctcctggttctctgtcccttgccaagctggcctgatgtctctaggtactggacagaggagcagagctgggggtggggacatgggtatagtttctg

SEQ ID NO: 105889 - DNA, 201 bp, Homo sapiens
gagaactggagccgaaacgtgtccgtaggcacggctggctggaggcggccttcgcccaagcagcccctccccgcagttctctttctcaccagcagatggcrtaggtgtcccctccctgcaggaccagccctctgtagtaaaaaggcctgagaactagttgagccgcccttagtctgctggagcacagtctccaaattccaa

SEQ ID NO: 105890 - DNA, 201 bp, Homo sapiens
ttaaatgcaaacactcctggtgggggcctctggcactgcactgtggttgagttgatccgatggggattgagaaggagaatctgagcccatctggctgtacyaccatacccctaatctcccagctttgccccaggagatgtcctaacagggggtgtggcatgggaccggggtgaggagcagctctgaaacctccctatgcca

SEQ ID NO: 105891 - DNA, 201 bp, Homo sapiens
tattctacccacttttctgcttcttgtcttcgggtttatcgttctggacccacctatctttcctggccccccacttaacttaacccttttcacccaccctrgggcggggagacagaggtgatcctagaagagggctacagggatggggccaagtgggaattctagcgaggcgcctactatttgatggaggagggatgggct

SEQ ID NO: 105892 - DNA, 201 bp, Homo sapiens
gcaggcatagtccaaatccagcacaccacctgtttttaatggccaagacctaagcgtggcattcacagttttaaatgggtgaagaaaaaagaagaaaagtrtgtgatacaaactgtatgtggcccacaaagttgaaaatattgaccattggccccctatacacaaaaagctggctgaaggctagagaggcccatccaattc

SEQ ID NO: 105893 - DNA, 201 bp, Homo sapiens
ttccccgtggtcacctgccaccccaccaaccccctggagtggtggggcctgatatcctagcaagggggaactgccagccttctcagaccctgacccacttrctctgaccacgcctgtccatagtggcatttcccacactggctcatggtgtatcttccctgcctccagattgagcatgaccctcggatgccagcctacata

SEQ ID NO: 105894 - DNA, 201 bp, Homo sapiens
tcatgtgatcattgtaagaaccctaaggaggtttttcttactatcctccattttacaggtaagaaaactgaggctcaaagaggttaaatcagttgttccasgtgcatagcttgggcacctagcttgcaagtgacaaggcgagcccaatgccacccacaccagctctggttctttgcctccagccctggctcctttctccaa

SEQ ID NO: 105895 - DNA, 201 bp, Homo sapiens
tacaggtaagaaaactgaggctcaaagaggttaaatcagttgttccaggtgcatagcttgggcacctagcttgcaagtgacaaggcgagcccaatgccacycacaccagctctggttctttgcctccagccctggctcctttctccaaccatcttccctctctgccccgggcaggtggggagaaaaggaagaaagagaggc

SEQ ID NO: 105896 - DNA, 201 bp, Homo sapiens
cccaagtctgaatataacgcagccacagaatgcctgtgctgaagtgagactgctccagggagacaagcagtagcacaatgtcccgagttgaggggttggggttgtcctcccctggcccagggaacactatgcccagggcagcctgatgtcacaactggtaaggaccactggagcctgagtcgggaggaaaacagcctgggt

SEQ ID NO: 105897 - DNA, 201 bp, Homo sapiens
taatgttcgcttgcctcctgctatgcggctcggttcccaacaggccatagactgacactggtccatggcccagggattggggacccctgctttagagggckgttgcaagatttgataaagtatgtaaaatctagtgtaagtgcctgatacatagcaagggctccgttaattctagatgctgcctattatcattattaaatg

SEQ ID NO: 105898 - DNA, 201 bp, Homo sapiens
taagactactgccacctcccacccggcccccacccgccacccaggccccggctctacactcagcatgggtgagggggagaaatggagggtcccctcccagygcatgggggaaggcgctgtcctgttggaactgtgcagcgattctggaacccggcatccagctcagaacacatctggggagagagcaggggcggggtgaca

SEQ ID NO: 105899 - DNA, 201 bp, Homo sapiens
ggaaggtgaacaagtgctaccggggccgctcctgccccatcatcgtgcactgcaggtgggtggagaggagattcatctctctggtcccactccctgtgtgygtctcctgtgcacattgcctgcctgtccccttggtgctagcaaactgcaggcatagtccaaatccagcacaccacctgtttttaatggccaagacctaag

SEQ ID NO: 105900 - DNA, 201 bp, Homo sapiens
aaagctggctgaaggctagagaggcccatccaattccctcctgctgcctctgcttctgggctgagccatggctctcctctttggttgtcccattgcccaartgacacccacaggtcacagactcccctctcaaggcccaagtcccagcgtgcaggtgctatgagctttccttcatcctcggctcactgtccctctccaagc

SEQ ID NO: 105901 - DNA, 201 bp, Homo sapiens
gacaagggctgggaaagggagggcatctcttggtgtcctggtgtctgggaagactctcttaacatgctagtcccttcccaccctcactcactcatctgcawccctcaagttcactgcgcaatcagccctaagctctgtgtctggctcccagcagatgcggctctgcagaggctggccgctgtgctggcgggctatggggta

SEQ ID NO: 105902 - DNA, 201 bp, Homo sapiens
cctatgccactgcctcccttgattctagccttgttcccacagagggaggaggcagctgcagtccttccccaaactgcgcacagcacctcacccatgcgctyagtgctgctcactctggtggccctggcaggtgtggctgggctgctggtggctctggctgtggctctgtgtgtgcggcagcatgcgcggcagcaagacaag

SEQ ID NO: 105903 - DNA, 201 bp, Homo sapiens
ggtgtatttacaatccattagctagacataaaagttctccaagtccccaccagactcaggaggccagctggcttcacccagtggatcccacaccggggccrcaggtggagctgcctgccagtcccgagccatgtgcccgcactcctcagcctttgggtggtcgatgggaccgggcgccgtgaagaagggggcggcgctcgt

SEQ ID NO: 105904 - DNA, 201 bp, Homo sapiens
gcaccctcctgggtcccccccaagcctggatcttggtgctgggccttgggccgcccctgccgtcggtgctgtgcctcccgcccacctgcgggtttcttccsagctgcctccatctctgacaggctgtaggccatggccagctgcaggtcctcatcctcagagaggtcgctgtccaaggggcatgaggcaggggtctgctgg

SEQ ID NO: 105905 - DNA, 201 bp, Homo sapiens; identical to SEQ ID NO: 16969

SEQ ID NO: 105906 - DNA, 201 bp, Homo sapiens; identical to SEQ ID NO: 16970

SEQ ID NO: 105907 - DNA, 201 bp, Homo sapiens
tgtgaccccttcctctctggtaaccgcctccaaggccagcccttggcggcgccagactcagagcttcagcaccgcggacagcgccagcggctcgggacagygcgaggagagatgcctaagagacaccctccccagccccacccatgccctctttcccccgaccgggggaagtgtgctagaacctcttctgagttccaggcc

SEQ ID NO: 105908 - DNA, 201 bp, Homo sapiens
gcctgcctctgactcacacttgggcgctctgccctccctggcctcacgcccagcctcctcccaccaccctcccaccatgcgctgctcaacctctctccttytggcgcaagagaacatttctagaaaaaactacttttgtaccagtgtgaataaagttagtgtgttgtctgtgcagctgcaacccagactcctacgcatttc

SEQ ID NO: 105909 - DNA, 201 bp, Homo sapiens; identical to SEQ ID NO: 16972

SEQ ID NO: 105910 - DNA, 201 bp, Homo sapiens
ctttggctgatgtgacccaacaagcaggtaaatatctctgcgacctcaatcccaggcttggccccagccccactcctaagaggatatatccaggcctgttrctgatgcccccttgaaatgttcccagcccacatgggccctgcctgctgcttggcagagcaagacagaggatggagaccacatggggctggagcaagcctg

SEQ ID NO: 105911 - DNA, 201 bp, Homo sapiens
aacagacaatggaggggccggtggagggcagagacacagcagagcttccagcccgcacatcccccatgcctggacaccccactgccagccctacctccagkgaagtccagcaggtgccaagccctgtctcctctgagcctcccaaagctgccagaccccctgtgacacctgtcctgctagagaagaaaagcccactgggcc

SEQ ID NO: 105912 - DNA, 201 bp, Homo sapiens
gcaagttattgcctaaggtctcccatcaagttgatggcagaactggagccagaaaactgaattcttaattcattcctcttttcactacaatcatttcagascatgctctgaggattcctaggggaggagggaagtttcgagcagagagcccttcctgagcttctgtagcaggaggagctctgcttctttctgtttcatgtg

SEQ ID NO: 105913 - DNA, 201 bp, Homo sapiens
tcacctgccaccccaccaaccccctggagtggtggggcctgatatcctagcaagggggaactgccagccttctcagaccctgacccacttgctctgaccaygcctgtccatagtggcatttcccacactggctcatggtgtatcttccctgcctccagattgagcatgaccctcggatgccagcctacatagccacgcagg

SEQ ID NO: 105914 - DNA, 201 bp, Homo sapiens
ttaaatgggtgaagaaaaaagaagaaaagtatgtgatacaaactgtatgtggcccacaaagttgaaaatattgaccattggccccctatacacaaaaagcyggctgaaggctagagaggcccatccaattccctcctgctgcctctgcttctgggctgagccatggctctcctctttggttgtcccattgcccaaatgaca

SEQ ID NO: 105915 - DNA, 201 bp, Homo sapiens
aagaagacagctcagatcacccactgagtttgtccctctactctgacaaaccccatgagctgcagggcagagggtacagttctgatccccaatggtccccrttactggatccccagactcctgaaccaacttacgctgtcctctttcctgacaggattgtcctggcacgatgacctcacccagtatgtgatctctcaggag

SEQ ID NO: 105916 - DNA, 201 bp, Homo sapiens
aagtgacaaggcgagcccaatgccacccacaccagctctggttctttgcctccagccctggctcctttctccaaccatcttccctctctgccccgggcagrtggggagaaaaggaagaaagagaggcccacgtcatgtgtttcagcttccctttccctctctgctggtgcccactggccctcacacccatttcttgttgca

SEQ ID NO: 105917 - DNA, 201 bp, Homo sapiens
atggcagcacgcccccttgccaaacctaaatttcaaattcaggacctagaatctgtatcctcccacccctcattttgggggaaaccaaggcccagagaccrcaagttattgcctaaggtctcccatcaagttgatggcagaactggagccagaaaactgaattcttaattcattcctcttttcactacaatcatttcagac

SEQ ID NO: 105918 - DNA, 201 bp, Homo sapiens
tttagaatgaaagaataaattgcatctgcttctcccgttcccagcctgtccacccatctgcccattctctgtgagtgggtgtctgagcctctgctcacctkttcctctacaggctgtctatttgaccgcaggctctgctctcacctggaagtctgtattcagggtgagtgaggcccaagcatagaactcacaagatcgggg

SEQ ID NO: 105919 - DNA, 201 bp, Homo sapiens
aaggaggcatcgggaaggatgggttggtgacaatgagggcctaaaaacgggcatagccagtactaagaagaagccagtaattgatgggtagagaaataacygaacaaagaatagctttgagagagatggccaatggtagagggaggagttaataaaacagtaaattgggaggaggaagcaaaaaggaatgaggccaggctt

SEQ ID NO: 105920 - DNA, 201 bp, Homo sapiens
tcttggccaccccagggaaagcagcagctgccaacctttcccacctgcttctgcgcctcctccaggagggctcccttcctcccaggggacctgcccagggycctccccccaccaaaagccccccatcttgagggcagagcacaggtcagccctctccatgaccatcctaccactgcccttcctcaggaccagtttgaattt

SEQ ID NO: 105921 - DNA, 201 bp, Homo sapiens
tctgctctcacctggaagtctgtattcagggtgagtgaggcccaagcatagaactcacaagatcggggggagaggggcaataaaaaacaagaaggggagakaaggcccagaaaggaagagggctactgggcttgagaagaaggaagacttgcctggaggaggagaggtaggggagaaagtgaagagagtacagtccatttg

SEQ ID NO: 105922 - DNA, 201 bp, Homo sapiens
accgggcagagggtccaccggagccttcacgggtgagcagtgtgtcctcccagttcagcgacgcagcccaggccagccccagctcccacagcagcaccccstcctggtgcgaggagccggcccaagccaacatggacatctccacgggacacatgattctggtcaggacagggcctgggcccagagtgggtgaaggaatgg

SEQ ID NO: 105923 - DNA, 201 bp, Homo sapiens
tttccttcatcctcggctcactgtccctctccaagccaaccccaacgggtcacccagtgtcctcccctcccccaggcctccaggcctcctcgcctcctccrtccctccccctttctgctgcatctcaagctaaacctgtcactaactcctgtttcagtgatggtgcggggaggaccggcacctacatcctcatcgacatgg

SEQ ID NO: 105924 - DNA, 201 bp, Homo sapiens; identical to SEQ ID NO: 16968

SEQ ID NO: 105925 - DNA, 201 bp, Homo sapiens
tgcacctggaaggtttcttccctatcactcagttaagcaaacagaggcttttaaggatacagactcacaaattcttaaaatccaaaacaagatcccatgcytccttttaagaaattcaggcctgattcctactctcctcccagcttaaggccttctttagaatgaaagaataaattgcatctgcttctcccgttcccagcc

SEQ ID NO: 105926 - DNA, 201 bp, Homo sapiens
ctgtttacagaacatacatgtgtgtgtgtgtgtgtgtgtgtgtgtgtcctgtctagagtcaaaaagcgttcatagagacttatgataaaggcacagagatmaaactataaaaccaccaaaaccgaggtaagaagctaacagctaagtgtatattagacagggaagataaggatacccaaagactgagattaagacctacgt

SEQ ID NO: 105927 - DNA, 201 bp, Homo sapiens
tctggttctttgcctccagccctggctcctttctccaaccatcttccctctctgccccgggcaggtggggagaaaaggaagaaagagaggcccacgtcatrtgtttcagcttccctttccctctctgctggtgcccactggccctcacacccatttcttgttgcaggaaggtgaacaagtgctaccggggccgctcctgcc

SEQ ID NO: 105928 - DNA, 201 bp, Homo sapiens
actacagaatttcatccaagtttatggcacgtgtagcaccgatactctggtagaccctgcgaggaagagggaggagaaactccgacctcgagaggctcacratagctgtgtctgggtggaaaagctactagtggtcctgagcagtagataagtgacaggcagccagggttcctgggaccgctggaacttagaatttgaacc

SEQ ID NO: 105929 - DNA, 201 bp, Homo sapiens
gaacttagaatttgaaccggcctgggaggccgggcggtggttggagagaccgagaaggtcgcgaggagagcgcgcgcaacgcggggactggggcagcccgyggcgctcaggcctgggcccctgccgggcaggtgaacctggtgtcggagcacatctggtgcgaggactttctggtgcggagcttctacctgaagaacgtgc

SEQ ID NO: 105930 - DNA, 201 bp, Homo sapiens
tgagggggcccatggtgacactacctttgagtaccaggtgtgcagccccagaagctgattgagcaaaggaaatgcaaggggcctgggagtctgggtcttgmgtggactaagggtcggaactgaatggggagtgagccctcatccctgggaaggtccagtggaggctggagaagccccagtgggagggagtatggtaggggc

SEQ ID NO: 105931 - DNA, 201 bp, Homo sapiens
gcagcagccgggcagaggactccccagagggctatgagaaggaaggactaggggatcgtggagagaagcctgcttccccagctgtgcagccaggtaacaargtcctcagcatccacctccctgtgagggctgctttgggggaaccatggtggggcccttccctgacaatctatgcgtttgttaacttgtccttaaagtcat

SEQ ID NO: 105932 - DNA, 201 bp, Homo sapiens
acagcagctgctgacccaggtgctaagcccctcactgcccggggccggcggggctggccggccgctccgagtgcggggcccgccgagcccaagcccacccrgaactcgcgctagcccgcaagtgccacgcgcagccccggttcccgcccgcgcctctccctccacacctccccgcaatctgagggagccggctccggcctt

SEQ ID NO: 105933 - DNA, 201 bp, Homo sapiens
tccaatgtggatgtcctacttagggcctcagatgcacgtgaacctggccagtgccccgctcttggagcaagtgatgcggcaagagggcaagtacccagtayggaacgacatggagctatggaaggagcaccgggaccagcacgacctgacctatgggccgttcaccacgtgagctggggcctgaagggactggaacagggc

SEQ ID NO: 105934 - DNA, 201 bp, Homo sapiens
agccaggcatgatggtgcacacctgtaatcccagctactcaggaggctgaggcaggagaatcgcttcaacctgggaagtggaggttgcagtgagctgacayggtgccactgcactccagcctgagcaacagagtgagactccatctcaaaaaaaaacccaaaaaacaaaaacaattattttttgcaaataagtacatgcag

SEQ ID NO: 105935 - DNA, 201 bp, Homo sapiens
tgggaggccgaggtaggtagatcatctgaggtcaggagtttgagaccagcctggccaacatggcaaaaccctatctctactaaaaatacaaaaattagccrggcgtggtggcgggcacctctaattccagctactctggaggctgagaccggagaattgcttgaaccgggaggcggaggttgcagcgagccaggattgcac

SEQ ID NO: 105936 - DNA, 201 bp, Homo sapiens
gacagtctggttctagatgcccgccatacccacttccactctgctatagcgagattctggtttggggattctaagattctgtcacttgagattttggtgaktctataattctaaattctaggagtatgggatttcccttgactctggatggagggggtggtggacttcagggtgagaagatctcccttaattgaaccccca

SEQ ID NO: 105937 - DNA, 201 bp, Homo sapiens
cagcttgcttaggaaaggaaataggtttgaggaacagctgggagtgggggcagtccctggacattaatcttgcttatggaaagtatgtttccacccacgtkagcacccttgcctaaccaaggaggaggcctgaccacctaccttgcctaaccagggagggggcctgaccatctaccgcatgactgaggcaagagcctacag

SEQ ID NO: 105938 - DNA, 201 bp, Homo sapiens
caggtgtctggctacctgcacttcttactggccagtggacagctcagtcctcgggaggccatgggcagcctgcctgagctgctcatggctggagtggacayggtgcgtgaagggggagggtgagaccaggggcccccagctcccaacctgaaccagttccctattatccctcacctgatcccgaccttcatccctccaagg

SEQ ID NO: 105939 - DNA, 201 bp, Homo sapiens
gcacgaggaagtggtgggtgtggtgccagccgggcaagtgccccagcacaaggactttgcccacatgccgttgctcaaagctgtgcttaaggagactctgyggtaggacagaatgctgttctggggggcacaggatctctttgtggggagggaatcagaggaggaaatctgaagtgaagacaggtgggctggggctagtga

SEQ ID NO: 105940 - DNA, 201 bp, Homo sapiens
cacgaggaagtggtgggtgtggtgccagccgggcaagtgccccagcacaaggactttgcccacatgccgttgctcaaagctgtgcttaaggagactctgcrgtaggacagaatgctgttctggggggcacaggatctctttgtggggagggaatcagaggaggaaatctgaagtgaagacaggtgggctggggctagtgac

SEQ ID NO: 105941 - DNA, 201 bp, Homo sapiens
actgctgtaggcaaagagacatgcaagaatattcaaggcagccttatttgtagtcaggaaaattagaatgatttaaatgtcccatagtagggggctaattaaattatggtacatccatatgatgaaatttcatgcagccattaaaaaggttagggacagatctattaatatttattgcttgctaagagatggaaagaacgt

SEQ ID NO: 105942 - DNA, 201 bp, Homo sapiens
ctggattccatatgtcctggttctgcctcctgtgatggcctctgtgcactactcagctatttgctacatcctgttcgagaaacgcattggctgcctgcagygatccatccccgaggacaccgtgaccttcgtcagatccatcgggttaatgttccagaactcactctatgccaccttcctccccaagtggactcgccccgt

SEQ ID NO: 105943 - DNA, 201 bp, Homo sapiens
atgggagaggtaggggagaaggagtggggcactttgtacccccatgaatccagagcagactccagacattcttttccctgcagtctctaccctgtggtccscacaaactcccggatcatagaaaaggaaattgaagttgatggcttcctcttccccaagaacgtgagtggggctagagagcccgattgcccaggagtgccc

SEQ ID NO: 105944 - DNA, 201 bp, Homo sapiens
gctagcgaaatgtacctgaaatttttattgtcttcccaggaatatgggtttgacaaaccaaatattggtcataaactattttagcaatgtagaagtcactmcacacacacacacacacacatttaatttggatcattttatgtttttcatgatgagttatggaatgcagaacttttaataaaaaaaagctttaaggactca

SEQ ID NO: 105945 - DNA, 201 bp, Homo sapiens
ttgcatccctgaatcctgacaactgcgacagggtgccacccatgggtgtcaaagcggcctgaacccatgaagcagggagggcctagagaataggaattatscactctcacctatgtctctattcccactagtgtcagtagccttggagttccctagacctcatttatgccatggatactagcatgactttatccatgaaat

SEQ ID NO: 105946 - DNA, 201 bp, Homo sapiens
atcctgacaactgcgacagggtgccacccatgggtgtcaaagcggcctgaacccatgaagcagggagggcctagagaataggaattatccactctcacctrtgtctctattcccactagtgtcagtagccttggagttccctagacctcatttatgccatggatactagcatgactttatccatgaaatgagaggcttggc

SEQ ID NO: 105947 - DNA, 201 bp, Homo sapiens
ccactagtgtcagtagccttggagttccctagacctcatttatgccatggatactagcatgactttatccatgaaatgagaggcttggcttaatcagcagraattagccatgctcacctgtgctgtgccttttaacctctgttatcatctgcctctggatcctgtagatccagttttctttcctagggctttgacccgaag

SEQ ID NO: 105948 - DNA, 201 bp, Homo sapiens
gggaggctgagagatgagaattgcttgaacccgggaggcggaaattgtagtgagctgagattgtgccactgcagtccagcctgggtgacagagcgagactygatctcaaaaaacaaacaaacaaacaaacaaacccatgaaattggtagactttgagtaaagcagattaccctccgtaatgtaggtgggccttgttcaagc

SEQ ID NO: 105949 - DNA, 201 bp, Homo sapiens
atgagaattgcttgaacccgggaggcggaaattgtagtgagctgagattgtgccactgcagtccagcctgggtgacagagcgagactcgatctcaaaaaamaaacaaacaaacaaacaaacccatgaaattggtagactttgagtaaagcagattaccctccgtaatgtaggtgggccttgttcaagcagtggaaggcctt

SEQ ID NO: 105950 - DNA, 201 bp, Homo sapiens
acctgagaggtgatgagaagctgtcttgggacacctctgaggaagatggggaggccagtgaagagtgggaggggcctcccattcttcggtgttccaggagkatcacagggcaatcagtcttcaaggctcagggaaggctgagtccaagcctttgtttatatggaaggtcttaacggtgctatggcaaagtaacgcagcctg

SEQ ID NO: 105951 - DNA, 201 bp, Homo sapiens
cattttgttgttcttacacaccttgcatataaatctattttcagttgtttcaattacatgttataatggtaactcctggcaattttaactttaatgtaaarcctggtaaattgttttttgtgctaggtgtagccaaggtttgaatccttccagcataattaagggtgtggttaattccatatgtcccacttaccaattgtg

SEQ ID NO: 105952 - DNA, 201 bp, Homo sapiens
taatcttttattaaaaatacattttgttgttcttacacaccttgcatataaatctattttcagttgtttcaattacatgttataatggtaactcctggcamttttaactttaatgtaaagcctggtaaattgttttttgtgctaggtgtagccaaggtttgaatccttccagcataattaagggtgtggttaattccatat

SEQ ID NO: 105953 - DNA, 201 bp, Homo sapiens
attcagctcaaatgtcactgcctctgcagggccctccctgacctctctgagcaatcctgtgccccaccttcccctcctctgcttacagagctgagctgtcrgcatgctcaccttgttagagatccagctctctccccaaccaactgtgaatcccctgaaggccacaagtcaggcttctttaatgttggatcccagtgtcta

SEQ ID NO: 105954 - DNA, 201 bp, Homo sapiens
gatctcggctcactgtaacctctgcctcctggattcaagcaattctcatgcctcagcctcccgagtagctgggattacaggcatgcaccaccacacttggmtaatttttttgtatttctagtagagatggggtttcaccatgttggccaggctagtctcaagctcctgacctcaggtgatccacctgccttggcctcccaa

SEQ ID NO: 105955 - DNA, 201 bp, Homo sapiens
ggagtgcaatggcatgatcttggctcactgcaatctccctctgcctcccagtttcaagcaattctcctgcctcagcctcctgagtagctgggattacaggygcccaccaccacacctggctaatgttttgtattgttagtagagatggggtttcaccatgttggccaggcaggttttgaactcctgatctcaggtgaccca

SEQ ID NO: 105956 - DNA, 201 bp, Homo sapiens
ccaatgtggatgtcctacttagggcctcagatgcacgtgaacctggccagtgccccgctcttggagcaagtgatgcggcaagagggcaagtacccagtacrgaacgacatggagctatggaaggagcaccgggaccagcacgacctgacctatgggccgttcaccacgtgagctggggcctgaagggactggaacagggcc

SEQ ID NO: 105957 - DNA, 201 bp, Homo sapiens
gcctgaaagcttccagccccaccgctggctgagaaacagccagcctgctacccccaggatccagcacccatttggctctgtgccctttggctatggggtcygggcctgcctgggccgcaggattgcagagctggagatgcagctactcctcgcaagggtgagctgggagaggctagtagggtgtgtgggcagggaggggtg

SEQ ID NO: 105958 - DNA, 201 bp, Homo sapiens
tgataagtttggggttctcaaatttttgttttaacatatatatttttaaaatatcattttatgaagcattgtttcctccaagtgattttttaacaaccacrtttaagttctgtatatccgattcctactgttgagagagttttacttttggaacaacgtgaagtcccaacaaataggtctattctggttttcatttctttt

SEQ ID NO: 105959 - DNA, 201 bp, Homo sapiens
actccagcctgggcaacagagtgagactccatctcaaaaaagaaaaaaaaaaaaactttttaacttgacatctgccactgagggtaagatttaggttgcakgttttcactgggccaggccacctatgacatgacagctcagatttagaatcggagctaaacattatgtagagccctttgtaatctatttacatttttttct

SEQ ID NO: 105960 - DNA, 201 bp, Homo sapiens
ccttatctaggatctaggaactgatactgttattttctttttttctctctttttaagccattctagtggttaacagtggctttggtttgcatttccttaawgacaaatgatgttgaacatcttttcttgtggttaacagtggctttggtttgcatttccttaatgacaaatgatgttgaacatcttttcttgtgattatag

SEQ ID NO: 105961 - DNA, 201 bp, Homo sapiens
aagatatactttttcacataatctatcttggatatctttctgtattagtacacaaggaatttcttcatccctttttaaggtgacatagtatttcattatgkggatatctcatgctttgtttataaatttgctcgtacttttgtaaatattaacaaatcgtcctccaagtagggatgtgttattttggagtcctaccagcag

SEQ ID NO: 105962 - DNA, 201 bp, Homo sapiens
ctggaagaaaaatagtactccatttcctgtagaaaagagagacagccgatgttttcttcggagggcaaataaataagaataaacccagcctctgctccctyatctaggatctaggaactgatactgttattttctttttttctctctttttaagccattctagtggttaacagtggctttggtttgcatttccttaatgac

SEQ ID NO: 105963 - DNA, 201 bp, Homo sapiens
aatgacttgtgcccagtgtcggaaaaggctgaacaggttcgacaactgtggttgccatcaagtccccagcacaccttgatcagtgcataaagcctctgatyctccttagagaaggagggacttgggtttctgccctagtcctgttcatcttgacgggggtaagatcttgccaaaacacaaggagacagatgactgcaatgc

SEQ ID NO: 105964 - DNA, 201 bp, Homo sapiens
ttgtgaaggttagagtagagggtacctccttatggtgggatgtcctgtttacagaagaaaaacaaaacttagtctgttctaggatctatttgtttccttawagtcttagtttgattatgtcacatttagcataaatgactctattttggtttggtgtggtctgttggaggctagtgcatgagcttagtcgaaaacaatggc

SEQ ID NO: 105965 - DNA, 201 bp, Homo sapiens
tcctattgtttcttttttttttctggagaatccttattaatatatccacaaaattacatcagtccactgtccaatctgagagtttcttccaaatccagttraagtaattttttgaccataaccatgggtatttctcggtgccccaatgacttgtgcccagtgtcggaaaaggctgaacaggttcgacaactgtggttgcca

SEQ ID NO: 105966 - DNA, 201 bp, Homo sapiens
cagacacgcattgctctaatattctagctccttgtgtgcccattttttaaatttgctcttcctctggaacaacaggccatcctggtgcctacatcatacayaatgcccttttttttttttttttttttttgcccagctcatttgctcttgtgtagccatcagacccttcctcacctcatctcctgtcctgggagcacctgc

SEQ ID NO: 105967 - DNA, 201 bp, Homo sapiens
ccttaattgaacccccatagaggcttatctttgtgctgttcctctgcgtccctgcagggaaggacaccactggtaccagctgcgccaggctctgaaccagyggttgctgaagccagcggaagcagcgctctatacggatgctttcaatgaggtgattgatgactttatgactcgactggaccagctgcgggcagagagtgc

SEQ ID NO: 105968 - DNA, 201 bp, Homo sapiens
ctgttaagggggcagccggcaggttaacaaaaacttgcttgcctgactttgagtctatttttcctttctctcgggtaacctcacaccaacctccataatcmtgtgagccaattctgtaaaataaatctttccctatatacatacatcctattgtttcttttttttttctggagaatccttattaatatatccacaaaatta

SEQ ID NO: 105969 - DNA, 201 bp, Homo sapiens
taatattaaacctaccccaaacagctgtagtgaggattgaatgagctaatataagtaaaattcttggaacagtgtctggttcatggtcagctctatggaarcacgtgcaattattattgttaatgtcttaaactggaaacaaattaagcctacttttaggacaggtctcctagggaatttttttttttttttttttttttt

SEQ ID NO: 105970 - DNA, 201 bp, Homo sapiens
atagaggcttatctttgtgctgttcctctgcgtccctgcagggaaggacaccactggtaccagctgcgccaggctctgaaccagcggttgctgaagccagyggaagcagcgctctatacggatgctttcaatgaggtgattgatgactttatgactcgactggaccagctgcgggcagagagtgcttcggggaaccaggtg

SEQ ID NO: 105971 - DNA, 201 bp, Homo sapiens
gctagaagtgagagatcagggtgccagtggttggtttctgatgagggctgtcttcctggcttgtagttggctgccttcttcctgtgccctagagggcaagmtctctggtgtctcctattatgaagacactaattctatcagatcagggccccacccttatgaccccatttaaccttagttacttccttagaggccccatca

SEQ ID NO: 105972 - DNA, 201 bp, Homo sapiens
tccatgaacatggatgactttccacttatttaggtctttaatttccttcagcagtgtctagtagttttcagtgttcaaatgtttcacctccttggttaaawgtattcctaggtattttatcttttggatactatcattagtctgtttgggctgccataacaaaataccacagactggatggcttaaacaacaaatttattt

SEQ ID NO: 105973 - DNA, 201 bp, Homo sapiens
ttcccccaagcctctttatgtttctaagcccttatctagacgccgcggtgaagccagcagacttcacttatcagaccttgctgtgataaggaaaccccaaytacaaaccatccagacggcacagggggaggtcatgggaagcataaacaaactttacctacaccctcctgtaagttcctgttcatctagctgctaccataa

SEQ ID NO: 105974 - DNA, 201 bp, Homo sapiens
aggccaagtacggtccaatgtggatgtcctacttagggcctcagatgcacgtgaacctggccagtgccccgctcttggagcaagtgatgcggcaagagggmaagtacccagtacggaacgacatggagctatggaaggagcaccgggaccagcacgacctgacctatgggccgttcaccacgtgagctggggcctgaaggg

SEQ ID NO: 105975 - DNA, 201 bp, Homo sapiens
ctctggaacaacaggccatcctggtgcctacatcatacacaatgcccttttttttttttttttttttttgcccagctcatttgctcttgtgtagccatcaracccttcctcacctcatctcctgtcctgggagcacctgcccagcttggcccagttattcagttttgattgaactccacaggtgctttacaaggccaagta

SEQ ID NO: 105976 - DNA, 201 bp, Homo sapiens
aaatatgagttacgattacatgctaattttgtggctatataccacatttaatagaaaatgccatttagaattgaaataacttgcagaagtagtgtatgcayattttagagaaatgagaaaatataaagaaacaaaaagaagaaaatctaaatcttccataatcccaacacccatcacatagcacaatgccttatacccata

SEQ ID NO: 105977 - DNA, 201 bp, Homo sapiens
atatctttttcaataaacacacttatataacaatttttaatggctgaaaagcatttcattggatggctacatcagaatttactggaccctgttggtatacwtttagattttttatgtataaagctttgattaacattaatctatctagcactaaatgtttgtgtacattctcaattattttcttagaataaaactcctaaa

SEQ ID NO: 105978 - DNA, 201 bp, Homo sapiens
tgaggcaggagaatcgcttcaacctgggaagtggaggttgcagtgagctgacacggtgccactgcactccagcctgagcaacagagtgagactccatctcaaaaaaaaacccaaaaaacaaaaacaattattttttgcaaataagtacatgcagaatatatatcacaaagacataccattttcaactatgatatttgcaaa

SEQ ID NO: 105979 - DNA, 201 bp, Homo sapiens
agggtagttacagttagaaacacagttgacaaagaagtctggttatctctggtttacaataacttaacataacaacctgaattataatttttttttgagayggagttttgctcttgttgcccaggctggagtgcaatggcatgatcttggctcactgcaatctccctctgcctcccagtttcaagcaattctcctgcctca

SEQ ID NO: 105980 - DNA, 201 bp, Homo sapiens
ttcccctcccttgtccaagtgtgcgctcaccattgctccatctgtaagggtgcaccctccatagaagtaacttgccttgctgagaattaaaaagaaaattaaaaaaaaaaaagactaggttaagatgtgaagaaacagaactacttgcgttgttactccatgctttttccatctgctaattatttatttacttcctataag

SEQ ID NO: 105981 - DNA, 201 bp, Homo sapiens
ttgcatcctgttgcaaaagaaaaatggattcttattgcactgatgcaaacaactatattgccataaattaagaatactctgctgggtgcagtggctcacgmctgtaatcccagcactttggggggctgaggcggatggatcacctgaggttaggagttcgagactagcctggccaacatggtgaaacccccgtctctacta

SEQ ID NO: 105982 - DNA, 201 bp, Homo sapiens
actacttgcgttgttactccatgctttttccatctgctaattatttatttacttcctataaggtctttactatttcttgctcattcaaagagctttgattmtcaggatgcatgagtttgtgctgctttttggaacgttgttctagcagcttgtcaaaagtgaggaagcactcacatttctgtttactcttccagaaggctg

SEQ ID NO: 105983 - DNA, 201 bp, Homo sapiens
tgcaggataattgctcagaaccagaatattgacccagatttttacattatccatctgagctgcagccaaagattgctggttggttcacaggagcaggcagkgttagtctaaaatgtaggcaaaaacttaagaacaatgaatgagtttagaatttaattacaaatgtataagttttgaaacataatttctctctctccagtc

SEQ ID NO: 105984 - DNA, 201 bp, Homo sapiens
ctgctaattatttatttacttcctataaggtctttactatttcttgctcattcaaagagctttgattctcaggatgcatgagtttgtgctgctttttggarcgttgttctagcagcttgtcaaaagtgaggaagcactcacatttctgtttactcttccagaaggctgcttactacgagtttgttgctggaagaaaaatag

SEQ ID NO: 105985 - DNA, 201 bp, Homo sapiens
tttcatttctttttcagcaacactttcagtttatctttttgcaattttcccttaacataataaaggcagctcctggggtggggtgttgaaggtcattaaakaaaaaatatatattaaaaaaaatttgactgggtgcggtggctcacgcctgtaatcccagcactttgggaggccaaggtgggcggatcatgaggtcaggag

SEQ ID NO: 105986 - DNA, 201 bp, Homo sapiens
tgttggccaggatggtctcgatctcttgacatcgtgatctgtccacttcggcctctcaaagtgctgggattacaggtgtgagccaccgtgcccccgtcttttttttttttttttttttttttttttagatgggagttttactctgttgctcaggctggagcgtattggtgcaatctcagctcactgcagcctccacctccc

SEQ ID NO: 105987 - DNA, 201 bp, Homo sapiens
gtaatctatttacatttttttctctaaagccagtttcctgaatagatgatatcatatgcatgcatttaaaagctcttttgtgaatctttgagtcagatgaytggggaaaaaaagctattctgctaactcatgataagtttggggttctcaaatttttgttttaacatatatatttttaaaatatcattttatgaagcattg

SEQ ID NO: 105988 - DNA, 201 bp, Homo sapiens
atctgcccacctcggcctcccaaagtgctgggattacaggtgtgagccaccatgcctggccaaaagtttttaatttttatgaagaactatttatctatttaaaaaaaattcctcatgcatttgttatcaaatctaagaattcattgacatatccagggtcatgaagacttacccttatattttattcagagttttatagtt

SEQ ID NO: 105989 - DNA, 201 bp, Homo sapiens
tcctgtcacctgacaggatttgcaggataattgctcagaaccagaatattgacccagatttttacattatccatctgagctgcagccaaagattgctggtyggttcacaggagcaggcagggttagtctaaaatgtaggcaaaaacttaagaacaatgaatgagtttagaatttaattacaaatgtataagttttgaaaca

SEQ ID NO: 105990 - DNA, 201 bp, Homo sapiens
aaccttagttacttccttagaggccccatcaacaaatgcagcaacacggggtttagggtttcaacataagaatttgaggggagtgcagacattcagtccawaacagaggttattgtaaatggaattattttcttaatttcctttcagattgttcttccaggttcttaaaactctagacgagctactgttaacaagtttcct

SEQ ID NO: 105991 - DNA, 201 bp, Homo sapiens
acctccaagtgatgggcatcctacttattcctgtcacctgacaggatttgcaggataattgctcagaaccagaatattgacccagatttttacattatccrtctgagctgcagccaaagattgctggttggttcacaggagcaggcagggttagtctaaaatgtaggcaaaaacttaagaacaatgaatgagtttagaatt

SEQ ID NO: 105992 - DNA, 201 bp, Homo sapiens
tctggatcctgtagatccagttttctttcctagggctttgacccgaagcttggaattgagtttgggacaaaattgtgtctcagggggtgttgcatggactycttatcataagccaaatgctaaggtgaaactgtggaatcgagtcctcctgcaacaagggagagaaagggatgtcttgtgacacacccagataactggtgg

SEQ ID NO: 105993 - DNA, 201 bp, Homo sapiens
ggctgcctgcagcgatccatccccgaggacaccgtgaccttcgtcagatccatcgggttaatgttccagaactcactctatgccaccttcctccccaagtrgactcgccccgtgctgcctttctggaagcgatacctggatggttggaatgccatcttttcctttggtgaggactcccagatggggcccagggaagagaga

SEQ ID NO: 105994 - DNA, 201 bp, Homo sapiens
cccactgcaacctccgcccccaggttcaagcaattctcatgcctcagactcccaagtagctgggattataggtatgcgccaccatgcttggctaatttttygtattttagtagagacagagttttgccatgttggccaggctgttgtaggactttcttcttagttcaattaaaaatggggtccttgtcacacaaccaggaa

SEQ ID NO: 105995 - DNA, 201 bp, Homo sapiens
ttgcccacatgccgttgctcaaagctgtgcttaaggagactctgcggtaggacagaatgctgttctggggggcacaggatctctttgtggggagggaatcmgaggaggaaatctgaagtgaagacaggtgggctggggctagtgacaaggatgagatgggagaggtaggggagaaggagtggggcactttgtacccccatg

SEQ ID NO: 105996 - DNA, 201 bp, Homo sapiens
attactggcctctttcctagaaatcgccctcacctgatctcccactctatcttctagacatccaacacgctgacatgggccctgtaccacctctcaaaggrccctgagatccaggaggccttgcacgaggaagtggtgggtgtggtgccagccgggcaagtgccccagcacaaggactttgcccacatgccgttgctcaaa

SEQ ID NO: 105997 - DNA, 201 bp, Homo sapiens
tcttggagcaagtgatgcggcaagagggcaagtacccagtacggaacgacatggagctatggaaggagcaccgggaccagcacgacctgacctatgggccrttcaccacgtgagctggggcctgaagggactggaacagggccccagagggccagggcgaaagacagtgggcacagggcaggcaggtggataaccggcaga

SEQ ID NO: 105998 - DNA, 201 bp, Homo sapiens
aggtcaccataaaacaatagtcattcatttaaccaaagtgataattaaaagattctttttatttgtttgtttgttttttgagacaaagtctcactctgtcrcccaggctggagtgtgatggcaccatctcggctcactgcaacctccgcttcctgggttcaagtgattctcctggctcagcctcccgagtagctgggacta

SEQ ID NO: 105999 - DNA, 201 bp, Homo sapiens
gtgcctttctctttcctaataaaaattacattgaatgctggaaaaatggaatgtaaacatatgttgcatttatgccaaattaatatatttcaaacatattkatcctgagaattatgagatatctattctgtagctctttttgtgcactgcctggcttggtgacccttcctgtgccccccagtgcccaggagattaatgatt

SEQ ID NO: 106000 - DNA, 201 bp, Homo sapiens
agttccaccagacacgcattgctctaatattctagctccttgtgtgcccattttttaaatttgctcttcctctggaacaacaggccatcctggtgcctacmtcatacacaatgcccttttttttttttttttttttttgcccagctcatttgctcttgtgtagccatcagacccttcctcacctcatctcctgtcctggga

SEQ ID NO: 106001 - DNA, 201 bp, Homo sapiens
aaggagctataggctttctatctcacctcactaaagggctcagtttccctcaaatgctggcctccaacatacacctcaacgtacctcagtttgccatatakcccatttttccaaactttcactcctccaaggacctcaatgcctccagttccaccagacacgcattgctctaatattctagctccttgtgtgcccattttt

SEQ ID NO: 106002 - DNA, 201 bp, Homo sapiens
ggaggcaattatgttggattggtcctaggagaatccagtttttaacaccaaaactaagatccagtaaagttggagtttttctggactatgggttgggtgaygtttccttctgtaatttgaatgatagatttcatctccacaattggtaatgtctcttttatagaaggtctttggcctaatttctatactggaaccgattct

SEQ ID NO: 106003 - DNA, 201 bp, Homo sapiens; identical to SEQ ID NO: 16986

SEQ ID NO: 106004 - DNA, 201 bp, Homo sapiens
gtagctgggattacaggcgcccaccaacatgcccagctaattttttgtatttttagtagagacggcgtttcaccatgttggccaggttggtctcgaactcytgaccttgtgatttgcccacctcagcctcccaaagtgctgggattacaggcgtgagccactgtgcccggccctcctagggaatttaatagaggaaaatag

SEQ ID NO: 106005 - DNA, 201 bp, Homo sapiens
aggatcaggttttccatttctgcaaaaaggctatggaattttgaaagggaatgcattgaatttgtagtttgccttggggagtactgctgttttaacaataktaagtctcctaatccatgaacatggatgactttccacttatttaggtctttaatttccttcagcagtgtctagtagttttcagtgttcaaatgtttcacc

SEQ ID NO: 106006 - DNA, 201 bp, Homo sapiens
gcacccttgtcaaaaatcagttgactgtagatgttctagtgtatttctgaattctcagttgtattccattggtctatatgtctacacttacactagtaacwtactgttttgattactgtagctttgcagtaagttttgaaatcagaaaatgggaatgttccaacattgttttcttttttaatattgttttggctatttagg

SEQ ID NO: 106007 - DNA, 201 bp, Homo sapiens
ggtctgtgcacccttgtcaaaaatcagttgactgtagatgttctagtgtatttctgaattctcagttgtattccattggtctatatgtctacacttacacyagtaacttactgttttgattactgtagctttgcagtaagttttgaaatcagaaaatgggaatgttccaacattgttttcttttttaatattgttttggct

SEQ ID NO: 106008 - DNA, 201 bp, Homo sapiens
gcacaaacttacagtcccccagctacttgggaggctgaggcagaaggatcccttgagttcaggagtttgagaccagactgagaaacatagcaagaccccayctctaaatttaaaaaatggcagctctgtttttctgcagttcccttggctcagctgtcttgcaggagttggttgactggcttggcctgggttaattgccta

SEQ ID NO: 106009 - DNA, 201 bp, Homo sapiens
cttctttttagattgttgatccattttgaattaatttttgtatatggagtgaggtaggggtccagcttcattcttttgcatttagttatccagtggtcccrgtaccatttgttgaagagactttctttccccattgaatggtctgtgcacccttgtcaaaaatcagttgactgtagatgttctagtgtatttctgaattct

SEQ ID NO: 106010 - DNA, 201 bp, Homo sapiens
cccaaagtgctgggattacaggtgtgagccaccatgcctggccaaaagtttttaatttttatgaagaactatttatctatttaaaaaaaattcctcatgcrtttgttatcaaatctaagaattcattgacatatccagggtcatgaagacttacccttatattttattcagagttttatagttttagctcttctttttaga

SEQ ID NO: 106011 - DNA, 201 bp, Homo sapiens
caccatgttggccaggctagtcttgaattcctgacctcaggtaatctgcccacctcggcctcccaaagtgctgggattacaggtgtgagccaccatgcctrgccaaaagtttttaatttttatgaagaactatttatctatttaaaaaaaattcctcatgcatttgttatcaaatctaagaattcattgacatatccaggg

SEQ ID NO: 106012 - DNA, 201 bp, Homo sapiens
agatgtatgaacagaaaaaggaaagtgacatacaaaaaatggaagtgaggtacagaaacagccggattgattacagcttggcattagcctaatttgaacayggtttgaacagttggccacctctgattggccaaaacttggtgattggcacaagagtaggctacagtctgtatacaactccatttacgttatagtttgtaa

SEQ ID NO: 106013 - DNA, 201 bp, Homo sapiens
gccccaccgctggctgagaaacagccagcctgctacccccaggatccagcacccatttggctctgtgccctttggctatggggtccgggcctgcctgggcygcaggattgcagagctggagatgcagctactcctcgcaagggtgagctgggagaggctagtagggtgtgtgggcagggaggggtggaggagtcctgggag

SEQ ID NO: 106014 - DNA, 201 bp, Homo sapiens
tcttggtccttggagatcatgacttttggctttgtcctttcctcttctctgttgctttcacagggaagaagctgattgatgagaagctcgaagatatggargcccaactgcaggcagcagggccagatggcatccaggtgtctggctacctgcacttcttactggccagtggacagctcagtcctcgggaggccatgggca

SEQ ID NO: 106015 - DNA, 201 bp, Homo sapiens
ggttcatggtcagctctatggaagcacgtgcaattattattgttaatgtcttaaactggaaacaaattaagcctacttttaggacaggtctcctagggaatttttttttttttttttttttttttgagatggagtctcacattgccacccaggctggagtgcagtggcatgatcttggctcactgtaacctcctcctcctc

SEQ ID NO: 106016 - DNA, 201 bp, Homo sapiens
tccttggagatcatgacttttggctttgtcctttcctcttctctgttgctttcacagggaagaagctgattgatgagaagctcgaagatatggaggcccarctgcaggcagcagggccagatggcatccaggtgtctggctacctgcacttcttactggccagtggacagctcagtcctcgggaggccatgggcagcctgc

SEQ ID NO: 106017 - DNA, 201 bp, Homo sapiens
gaaccagcggttgctgaagccagcggaagcagcgctctatacggatgctttcaatgaggtgattgatgactttatgactcgactggaccagctgcgggcakagagtgcttcggggaaccaggtgtcggacatggctcaactcttctactactttgccttggaaggtacccttgctgggagaggggctggggaagggaatgg

SEQ ID NO: 106018 - DNA, 201 bp, Homo sapiens
gatttaacaattccccactttcggttatttcagttttagaggatgaccaagactttactcattgatgtcattatcaccattgtaaatgtatttatttggtmttggaacccactgggaaatagcagagcagtgggttttgtaaggtgggaacaaggacttcaggttatttttttgtgaaggttagagtagagggtacctcct

SEQ ID NO: 106019 - DNA, 201 bp, Homo sapiens
gttcatggtcagctctatggaagcacgtgcaattattattgttaatgtcttaaactggaaacaaattaagcctacttttaggacaggtctcctagggaatttttttttttttttttttttttttgagatggagtctcacattgccacccaggctggagtgcagtggcatgatcttggctcactgtaacctcctcctcctcc

SEQ ID NO: 106020 - DNA, 201 bp, Homo sapiens
ctctcaaaggaccctgagatccaggaggccttgcacgaggaagtggtgggtgtggtgccagccgggcaagtgccccagcacaaggactttgcccacatgcygttgctcaaagctgtgcttaaggagactctgcggtaggacagaatgctgttctggggggcacaggatctctttgtggggagggaatcagaggaggaaatc

SEQ ID NO: 106021 - DNA, 201 bp, Homo sapiens
gacatagtatttcattatgtggatatctcatgctttgtttataaatttgctcgtacttttgtaaatattaacaaatcgtcctccaagtagggatgtgttattttggagtcctaccagcagtatattttccttccaggaaaataggcatattcactgcagtttgcagacgatcagctgttcaaaattagaacacactggcag

SEQ ID NO: 106022 - DNA, 201 bp, Homo sapiens
cattgctctaatattctagctccttgtgtgcccattttttaaatttgctcttcctctggaacaacaggccatcctggtgcctacatcatacacaatgcccttttttttttttttttttttttgcccagctcatttgctcttgtgtagccatcagacccttcctcacctcatctcctgtcctgggagcacctgcccagcttg

SEQ ID NO: 106023 - DNA, 201 bp, Homo sapiens
gtgttgaaggtcattaaagaaaaaatatatattaaaaaaaatttgactgggtgcggtggctcacgcctgtaatcccagcactttgggaggccaaggtgggyggatcatgaggtcaggagatcaagaccatcctggctaacacggtgaaaccccgactctactaaaaaaaaatacaaaaaattagctgggtgtggtggcatg

SEQ ID NO: 106024 - DNA, 201 bp, Homo sapiens
cttaatgataaagtgaccttgagcaacttctttgggcctcagtttcctcatcggcaaaattgtggtaatattaaacctaccccaaacagctgtagtgaggrttgaatgagctaatataagtaaaattcttggaacagtgtctggttcatggtcagctctatggaagcacgtgcaattattattgttaatgtcttaaactgg

SEQ ID NO: 106025 - DNA, 201 bp, Homo sapiens
tctttaaattttagtagagacgggggtttcaccatgttggtcaggctagtctcgaactcctgacctcaaatgatctgcctgcctcggcctctcaaagtacygggattataggcatgagccattgtgtccagccagcaccttctttctttatggttcctatttccagtgctttcatcctgttgggtttctctgtgttgccgt

SEQ ID NO: 106026 - DNA, 201 bp, Homo sapiens
tgcctcggcctctcaaagtactgggattataggcatgagccattgtgtccagccagcaccttctttctttatggttcctatttccagtgctttcatcctgttgggtttctctgtgttgccgtcccctcctccactgaaggtgcgattcttcatcatatcggccctcatcccactgtggattcatgtttagcatggagactg

SEQ ID NO: 106027 - DNA, 201 bp, Homo sapiens
agcacccatttggctctgtgccctttggctatggggtccgggcctgcctgggccgcaggattgcagagctggagatgcagctactcctcgcaagggtgagmtgggagaggctagtagggtgtgtgggcagggaggggtggaggagtcctgggaggagaggaagggaggcacagggtaggagtgtgcagagcggggagtgga

SEQ ID NO: 106028 - DNA, 201 bp, Homo sapiens
agctggagatgcagctactcctcgcaagggtgagctgggagaggctagtagggtgtgtgggcagggaggggtggaggagtcctgggaggagaggaagggargcacagggtaggagtgtgcagagcggggagtggatggcaaacacacaatccacccaaccacatgtgctctttaccccccagctgatccagaagtacaagg

SEQ ID NO: 106029 - DNA, 201 bp, Homo sapiens
tttgtgttctgccactatgtggtgtcccgggaccccactgccttctctgagcctgaaagcttccagccccaccgctggctgagaaacagccagcctgctacccccaggatccagcacccatttggctctgtgccctttggctatggggtccgggcctgcctgggccgcaggattgcagagctggagatgcagctactcctc

SEQ ID NO: 106030 - DNA, 201 bp, Homo sapiens
attggctgcctgcagcgatccatccccgaggacaccgtgaccttcgtcagatccatcgggttaatgttccagaactcactctatgccaccttcctccccargtggactcgccccgtgctgcctttctggaagcgatacctggatggttggaatgccatcttttcctttggtgaggactcccagatggggcccagggaagag

SEQ ID NO: 106031 - DNA, 201 bp, Homo sapiens
acctattttctgcatagatatactatttatatttctttttttgtaaattccctatttctgtttttatgtctatttttctaacgagtttttgaattgtgtaktcatacatattttcttcttgtatttttgtagtttcttttaaaatctttatcccacctgggattagtttctgtgtatggtgtgaggtgcacaaggcaggtg

SEQ ID NO: 106032 - DNA, 201 bp, Homo sapiens
tgcagaatatatatcacaaagacataccattttcaactatgatatttgcaaaaacagtctctgcaaatatcatagttgaaagtggtatatcttcatgatayatattctgcatgttcttatttgtaagattggacctattttctgcatagatatactatttatatttctttttttgtaaattccctatttctgtttttatgt

SEQ ID NO: 106033 - DNA, 201 bp, Homo sapiens
ccgctcttggagcaagtgatgcggcaagagggcaagtacccagtacggaacgacatggagctatggaaggagcaccgggaccagcacgacctgacctatgrgccgttcaccacgtgagctggggcctgaagggactggaacagggccccagagggccagggcgaaagacagtgggcacagggcaggcaggtggataaccgg

SEQ ID NO: 106034 - DNA, 201 bp, Homo sapiens
ttttccctcatgctaccagttgtcggagtggctcttggtccttggagatcatgacttttggctttgtcctttcctcttctctgttgctttcacagggaagwagctgattgatgagaagctcgaagatatggaggcccaactgcaggcagcagggccagatggcatccaggtgtctggctacctgcacttcttactggccag

SEQ ID NO: 106035 - DNA, 201 bp, Homo sapiens
tatttatttatttatttatttatttttttgagatggagtctcactcttgtagcccaggctggagtgcaatggcgtgatcttggctgactgcaacctccgcytcctgggttcaggcaatttcttctgcctcagcctcctgagtagctgggattacaggtgtgcgccaccacacccagctaatttttgtatttttgatagaga

SEQ ID NO: 106036 - DNA, 201 bp, Homo sapiens
gcccaggctggtcttgaactcctgagctcaagcaattcacccactttggcctcccaaagtactgggattataggcataaattactgtacctggccatcatrtatcttgtttcttatcatcacttgtttatatggcttagagattgggctgtgaagctgtgagggctgggcctatgtctttcctacctctttcccccaagtg

SEQ ID NO: 106037 - DNA, 201 bp, Homo sapiens
cctgaaagcttccagccccaccgctggctgagaaacagccagcctgctacccccaggatccagcacccatttggctctgtgccctttggctatggggtccrggcctgcctgggccgcaggattgcagagctggagatgcagctactcctcgcaagggtgagctgggagaggctagtagggtgtgtgggcagggaggggtgg

SEQ ID NO: 106038 - DNA, 201 bp, Homo sapiens
aactataaagcagctttattggctcatagaactgaaaagaccaatagttgagtgtccttcaggtgtatttattctagagattcaggaagtcatcaaagctrcagctttggctgggtgtgatggcacaaacttacagtcccccagctacttgggaggctgaggcagaaggatcccttgagttcaggagtttgagaccagact

SEQ ID NO: 106039 - DNA, 201 bp, Homo sapiens
tacatctataaaactcagttaataaccttttaaaattagagaatgtgtttcagttactcactttgtatcagaatttgttaggttgccactcaaactggctyaaactataaagcagctttattggctcatagaactgaaaagaccaatagttgagtgtccttcaggtgtatttattctagagattcaggaagtcatcaaagc

SEQ ID NO: 106040 - DNA, 201 bp, Homo sapiens
gggtgggaaagggcaggccaggacctccttccaaccgcttcctggagattccctgcaaggcctgagccgttaggcctccctggcgtctcttcaccttggtycctattaacctcttcctttctcagttatgtgccctggaactaccacgagccacagcctggggtctataactttaatggcagccgggacctcattgccttt

SEQ ID NO: 106041 - DNA, 201 bp, Homo sapiens
aacttgaggtggtttccgcccccttgctcgctgaggttccctcccaggaatccgacacgtgacggtctgtccgccgtctcagactagaggagcgctgtaarcgccatggctcccaagaagctgtcctgccttcgttccctgctgctgccgctcagcctgacgctactgctgccccaggtaagatgagacggtgaaccagcc

SEQ ID NO: 106042 - DNA, 201 bp, Homo sapiens
ggtcatactgagaccaggaccttacatctgtgcagagtgggagatggtgagttagctggagaagggatagaaccagttatccttgtgcagttcctagactwctcccatctgcccacactctagggccatctccagcactatattcaattccttcccttccttccttcccttcctagcttccccaccacaccccaaaacaaa

SEQ ID NO: 106043 - DNA, 201 bp, Homo sapiens
gcaggatcccttggtgctggccacggtgaccctaaggaactaaaggccacagtgcctctgaatgtaagtacaagtacacattccttgccaaactttattgkgattaaaattccagagacagtaccagctccacatacctctagccctgtctttgccctagttcccgagtgtccttcacccccatcttccaaatcatctctg

SEQ ID NO: 106044 - DNA, 201 bp, Homo sapiens
aaggactcaagtgtggctccctccggggactctataccactgtagattttggcccaggtctcaagcaagggctgggagtggagtctggggaaaggacaccwcttccacgacatttatctttttcttttgcctcctttccgcagctgacaacatgaccaaaatctttaccctgcttcggaagtatgaaccccatgggccatt

SEQ ID NO: 106045 - DNA, 201 bp, Homo sapiens
cccaggtgacgtcgatgaagctggttcgtgaactgcactttaacatgatgtagaaattttacaaactagtagagtaagggggtggctgcaggctggagagraagtccaggctaaacgcctggcaacttgaggtggtttccgcccccttgctcgctgaggttccctcccaggaatccgacacgtgacggtctgtccgccgtc

SEQ ID NO: 106046 - DNA, 201 bp, Homo sapiens
gacccataccatttttgagccaacaccattctgggtgccaaataatggagtccatgaccgtgcctatgtgatggtggatggggtgagaacctaattccagrctgtgagccccaaactcctcccttccccaggaagcgttagccttaagttccccatatttacactttcccacctgcctgttcacgtttgcagagggttcca

SEQ ID NO: 106047 - DNA, 201 bp, Homo sapiens
agggtgggaaagggcaggccaggacctccttccaaccgcttcctggagattccctgcaaggcctgagccgttaggcctccctggcgtctcttcaccttggktcctattaacctcttcctttctcagttatgtgccctggaactaccacgagccacagcctggggtctataactttaatggcagccgggacctcattgcctt

SEQ ID NO: 106048 - DNA, 201 bp, Homo sapiens
gggacaggaagactgccaggactcctaggccaagggtgggaaagggcaggccaggacctccttccaaccgcttcctggagattccctgcaaggcctgagcygttaggcctccctggcgtctcttcaccttggttcctattaacctcttcctttctcagttatgtgccctggaactaccacgagccacagcctggggtctat

SEQ ID NO: 106049 - DNA, 201 bp, Homo sapiens; identical to SEQ ID NO: 17030

SEQ ID NO: 106050 - DNA, 201 bp, Homo sapiens
cccagggccaagtctggatcaatgggtttaacttgggccggtactggacaaagcaggggccacaacagaccctctacgtgccaagattcctgctgtttccyaggggagccctcaacaaaattacattgctggaactagaagatgtacctctccagccccaagtccaatttttggataagcctatcctcaatagcactagta

SEQ ID NO: 106051 - DNA, 201 bp, Homo sapiens
ctagaggagcgctgtaaacgccatggctcccaagaagctgtcctgccttcgttccctgctgctgccgctcagcctgacgctactgctgccccaggtaagaygagacggtgaaccagcctgccgggtgcggtgagcgggatcagatccagcggatgagagaaagtccaaagtaacaaccaaacaacccgcagggctagttcc

SEQ ID NO: 106052 - DNA, 201 bp, Homo sapiens
ggagtgcagtggtgcagtctcggctcactgcaacctctgcctcccgggttcaagcgattctcctgtctcagcctcctgagtagctgggattacaggcaccygccaccatgcccagctaatttttttgtatttttagtagagacagtgtttcaccatgttggccaggatggtctcaatctcttgacctcgtgatctgcctgc

SEQ ID NO: 106053 - DNA, 201 bp, Homo sapiens
tggggcactttgcccaaacaaaatctccatgcctcctcccaggaaccttgagccagaaacccactgctctccctgtctctccccccgactgcatgcactgccccccccccacattctgccctgttaccaaacctcatcccagtccatctaccactcattctcactgtcaggaagctcatcccctggggggcggaggcaggt

SEQ ID NO: 106054 - DNA, 201 bp, Homo sapiens
ggaatgtgagatcaggcaaggatcttggagacaatgtaaagccgtagcatggagactcttaatgataaccaagcacaaattcatatccttgatcacattgwtgctcatttctttattgcttttcgtattgagccaggcaaggttttggtttgaattcagtctctgcctgctgtgaggtctgcaacaaataacacaccctct

SEQ ID NO: 106055 - DNA, 201 bp, Homo sapiens
gctggcagacctgggccagtacagcatcaacgtcaccaaccccttcggccagtgctccgactcggcgcgcatcctcgtggaaggtacgcgcgccccgggcrcagcgccagggcgcagaccagcaccactcagccagagcccgcagcccggtccagctgcgcgtgtttacctctgggcctagctacagggtccccgccagcc

SEQ ID NO: 106056 - DNA, 201 bp, Homo sapiens
tcccaactctggcaatttccactacccggagcggtctctgaggcaccgcgagatgtgtgaacattcaggggctttcgcccgccttatctctcttgatcctmtattcgaccccgagaagtaggagaggcagggataagtccctttaacagccaaggagatgaaaccagagaggctaatgatttgctcaacgtcacactgcga

SEQ ID NO: 106057 - DNA, 201 bp, Homo sapiens
tcatccatgctgcaggctgccgagtccggatccctgccgaggtgctcatcctgaactcgattgttctgccacacaaggagctgagccgaagcttcaccaaycagatcatcctctgagtagggctgccagaaggcccccagctcctacccactccccttgaggctgctgcctgcttggccagcctctgtccagaaaggacca

SEQ ID NO: 106058 - DNA, 201 bp, Homo sapiens
gaggttgggctggagtggtaggcgggatgggggcagaggaaggcaggaggccgaaatgttctcctctctcctctcccaggaactcgcttcagacctttgtyttttgaggtgcccaaaccattgtttcctgtggcaggggtccctatgatccaacaccatattgaagcctgtgcccaggtaacctcaggggctcccctctct

SEQ ID NO: 106059 - DNA, 201 bp, Homo sapiens
gcccgcatggacagtgagagcctcttcaaggacgggaagctgctgcctgctatcaccatcctgggtatggcttcctgggggccagggctgggggaaccccwcagctgatggccagtggccccggggagcattcgttcctctgtgtgcacgcgtgtttcttcttttagcaaacagttaccaagggcctgctgtgtgccaggc

SEQ ID NO: 106060 - DNA, 201 bp, Homo sapiens
ggatgtcttccagcgtaatcagcaggatgggcaattgtgaggcaggccccatagccctgtgaccccaagtacccccagtcacggaccccaacacataccartctctgcaggctccatctcaacttgctcaccttcctcctcccctctcccttctccacttgccatctccagcagagcctcctgagtccctccccttctaac

SEQ ID NO: 106061 - DNA, 201 bp, Homo sapiens
tgtgttagccccacagtcggggctcagctgggggactaatgtcagcattcttcctctctgccagggaggactcaccaggcttgtggccaggggcaggtacyatccgcctagagcaggatgtgttttcagccctggcagggcagggccagatatacgtgcatctcactgatggtatctggagtcagatcaagtccgcagggt

SEQ ID NO: 106062 - DNA, 201 bp, Homo sapiens
gagagggccgaaccagacctggagagaggggcttagagaggtggtgggaatcctcctactcctgtccctgggagactgtgttagccccacagtcggggctyagctgggggactaatgtcagcattcttcctctctgccagggaggactcaccaggcttgtggccaggggcaggtaccatccgcctagagcaggatgtgttt

SEQ ID NO: 106063 - DNA, 201 bp, Homo sapiens
tcccctcctattagatattcttcatcccagcctcttcccttgtcctcaggtccctggaatgcaggagattctgctcattggcttctaccaacctgatgagyccctcacccagttcctagaagccgcccagcaggagtttaaccttccagtcaggtgtttgtgcacacactcgtatatgggggggtggggatgccctaggcc

SEQ ID NO: 106064 - DNA, 201 bp, Homo sapiens
ccggttcctgctgcctcctgcctcttccccttacctttcactgtcctctttggcaggagcacacgtgtgttctgcatagcatcgtgggctgggggagcacygtgggacgctgggcccgcgtggagggtacccccagtgaccctaaccccaacgatccccgagcccgcatggacagtgagagcctcttcaaggacgggaagc

SEQ ID NO: 106065 - DNA, 201 bp, Homo sapiens
ccgattaatcatcttatatccctttaagagagattgaccagggggagggggggaatggttaatttccctgggggtggtgctgtaataaatgtatgcacagkgcatgatgggaacaccaagggggccccaacccagccttgctggggtgggagtagagagggcttcctggaggaagcaaggtctgagcagagtcccatttgt

SEQ ID NO: 106066 - DNA, 201 bp, Homo sapiens; identical to SEQ ID NO: 17066

SEQ ID NO: 106067 - DNA, 201 bp, Homo sapiens
taaccccaacgatccccgagcccgcatggacagtgagagcctcttcaaggacgggaagctgctgcctgctatcaccatcctgggtatggcttcctgggggycagggctgggggaaccccacagctgatggccagtggccccggggagcattcgttcctctgtgtgcacgcgtgtttcttcttttagcaaacagttaccaag

SEQ ID NO: 106068 - DNA, 201 bp, Homo sapiens
cctggagcaggcgggtcactgtctcgggtgtgtctgtctttcaggctaacaggacgcaatccctcaactacggctgcatcgttgagaatccacagacacasgaggtgagagcagagtgggggctgggtgggtgcctactctgtgtcatcatcccctctacctcaggcctctagagaatgctggcacagtatggggtgggct

SEQ ID NO: 106069 - DNA, 201 bp, Homo sapiens
cacagccctcacttttcccacttatctccttggccctagtgtcttgccctcaaccttctcctccctgccccaccccccaattcccacaccgctccccacakgcccctcggagctctaatccctcctgctgctgtgccgccttatctgctcccagcagctttcgctgctgcaaagccctctccccctccttcctcagctctc

SEQ ID NO: 106070 - DNA, 201 bp, Homo sapiens
tctcttcatgggagtgggagggggctgcaggtccccactctgggctggggtcatcaccccaaggaaggggctgggagagggtgggccataggaccaggggmtaggtcccttccctctcctcccccctagtcctgacccttctgttccgagtggttggcagaggccatggcagctccatcataaatatgataatttaattat

SEQ ID NO: 106071 - DNA, 201 bp, Homo sapiens
ccacgacgctgaccattcgccgggccacgcctcaggacagcggcaagtacgaggtgtacgtggagaacagcctgggcatggaccagagcttcgctcgcgtsgacgtggcctgaacggcacccccggaccttccgccctggcgccgagcccgggggtggtgggacccacagccctccaccagcttgcttaataaagctgctc

SEQ ID NO: 106072 - DNA, 201 bp, Homo sapiens
agagtcagttgtggggttcagagggtcagcaatcaatcaatcctccgaatccagagatttagacccagtcgtccgtattaggactggaggggggtcaatargttcagtgtttgagatgccaagggaacctgtcttttgatttggggttcaacatacagaggttagttttaggattcatgtttagcatatagaggatttttg

SEQ ID NO: 106073 - DNA, 201 bp, Homo sapiens
actgtgaggtttgaaggccgactggaatctgggttgggatttgagatgtgtgggatttgtgaggttctgtccaggcagggactatattgagctttgggttkacatcttgggggagggctaagtgctgctatttggggtttggggtttggttggggtgtgagatctgagcttgatttctctgctgggatttgagatgtgtgg

SEQ ID NO: 106074 - DNA, 201 bp, Homo sapiens
caggctgccgagtccggatccctgccgaggtgctcatcctgaactcgattgttctgccacacaaggagctgagccgaagcttcaccaaccagatcatcctytgagtagggctgccagaaggcccccagctcctacccactccccttgaggctgctgcctgcttggccagcctctgtccagaaaggaccagagaaagccagg

SEQ ID NO: 106075 - DNA, 201 bp, Homo sapiens
ctgaatggggatgagaatgtgaaaatggggggaactccttatggaaatggggcagggatgggaagcaggcctctgcctggggctcccttgtgatagcaccyacccaagtgggggctgggtgggagaggttcctgggatgtgagcagccacatcccagagagggccgaaccagacctggagagaggggcttagagaggtggt

SEQ ID NO: 106076 - DNA, 201 bp, Homo sapiens
gttggtgtgggagctggcgtcaggagggagatgcgctgctctggcagcatggaggtgttagtggagaccccgagccctctggctgttcagaagtagggagsgggagggcagctgtcagtttccacccttgctgaaggcctgtcagtggcagagctgcatgccaggtgctgtagcggagggaaagaaagaaaaaacagacgt

SEQ ID NO: 106077 - DNA, 201 bp, Homo sapiens
tgggactataggcatgagccaccatgcccagctgatttttttttttttttgagacagagtctcactctgttgcccaggctggagtgcagtggtgcgatctyggctcactgcagcctctgcctcctgggttcatgccgttctcctgcctcagcctcctgagtagctgggattacaggcaggtgccaggctaatttttgtatt

SEQ ID NO: 106078 - DNA, 201 bp, Homo sapiens
acgtttaggggtctggcgggtccagggggcaggtaggagatggtgcgctcgcggtaagggctgtggccgggcctgtcttaggaactctgggccctgactckgcccgcgggtaggtcccggaaggagctgcgcgagaaggggccgccgcgggtgctggagccgctgaaggacgtggtgctgatcgaaggcagcgcggccaag

SEQ ID NO: 106079 - DNA, 201 bp, Homo sapiens
cgcgagatgtgtgaacattcaggggctttcgcccgccttatctctcttgatcctctattcgaccccgagaagtaggagaggcagggataagtccctttaasagccaaggagatgaaaccagagaggctaatgatttgctcaacgtcacactgcgagtttaaatgcatctgtatttagtgccgggtattagccggtgaggtg

SEQ ID NO: 106080 - DNA, 201 bp, Homo sapiens
ggccagcagtcactcacactcgctctgtcctcctgtccagtggatacagccctgggcgctctgctggcccaaggatgtccccactgcccctccatggcctytggccttcttcccattcatatttatttatttattgacttttatgaagtttccccttccatccgatccctactgcccatgttgtcctgaccatccctccca

SEQ ID NO: 106081 - DNA, 201 bp, Homo sapiens
tctgtcctgttttgtgaaactcccttctcctaagccccttgactttcacataaccctccctcctttatttatttatgtatgtatgtgtttatttatttatyttgagacagagtctcactttgtcttccaggctggagtgcagtggcatgatcttgggtcactgcatcctcgacctcccaggtttaagccatcctcccactt

SEQ ID NO: 106082 - DNA, 201 bp, Homo sapiens
tcctgcctcttccccttacctttcactgtcctctttggcaggagcacacgtgtgttctgcatagcatcgtgggctgggggagcaccgtgggacgctgggcscgcgtggagggtacccccagtgaccctaaccccaacgatccccgagcccgcatggacagtgagagcctcttcaaggacgggaagctgctgcctgctatca

SEQ ID NO: 106083 - DNA, 201 bp, Homo sapiens
aaaggcaatgaggtcccggctgccattaaagttatagaccccaggctgtggctcgtggtagttccagggcacataactgagaaaggaagaggttaataggraccaaggtgaagagacgccagggaggcctaacggctcaggccttgcagggaatctccaggaagcggttggaaggaggtcctggcctgccctttcccaccc

SEQ ID NO: 106084 - DNA, 201 bp, Homo sapiens; identical to SEQ ID NO: 17080

SEQ ID NO: 106085 - DNA, 201 bp, Homo sapiens
tacctgtccagccatttttcttcctcttgttcagacgctgctggagttgtggggcatccctccaaggcctgactccctttcactacctcgacttctctttytgctccacacgttgcctccaggatcatcgccgtcaggcagggaggccctcttcctgatctcttacagctctacctggggccaactcagggacctgagagg

SEQ ID NO: 106086 - DNA, 201 bp, Homo sapiens
atgagttgctgcctcagactccactctattacccacctgctagcagaactcaaggctatggtgtcctcttgacttgcagcccttacctggcactacagacytgagcaggcaaaaaggcgtctggcagagtgaccttgacgggttcagtagggtgaagactgtggttcaccatcttgttggcaaataggatgtcatagtcca

SEQ ID NO: 106087 - DNA, 201 bp, Homo sapiens
tcatattgtctgtcttcaggagatctttccagcatctcgggatcagaagactcagactcagccagtgaggaggacttgcagacactggatcgggagagggytacatttgagaagttgagccgacccccaggcttttaccctcatcgagttcttttccagaatgcccagggccagtttctttatgcctaccgctgtgtccta

SEQ ID NO: 106088 - DNA, 201 bp, Homo sapiens
tgagggattccccaggagccttagtcctctattctttctccgtgttatcctctactttccaccccttgcacttctgtgggccattttttttagttggagayttataaatagcaagtgaaggtatgcaggactgagttactctcttctctaggatgttcgtgacctgctggcagggccaagctgggctaaggcgctggagga

SEQ ID NO: 106089 - DNA, 201 bp, Homo sapiens
gcgggtcttggacagtcagcggcccaatagtgtgctctacgtggggcggggctcaggtgcggacgccgccggttgtcctcttcgctgctccgtagtgacgrggattgttgtgttgcagaaatccggcaatcgacctgaggacttgcgagccgctcagctcccgggacgtttggtgcgtcttctaagggcgtgggcgagttt

SEQ ID NO: 106090 - DNA, 201 bp, Homo sapiens
cattggctacttggcaatattcccttggtctggttgggtgatgttgggaaaggcaggaggcaagttaaacccatttttggagtttttgcacctagggactstcgggcccggccaccttatactgttgcggctgacaaatcaacacgtaatgagttccgaaggttcatggagaagaatccagatgcctacgattacaacaag

SEQ ID NO: 106091 - DNA, 201 bp, Homo sapiens
acttggcaatattcccttggtctggttgggtgatgttgggaaaggcaggaggcaagttaaacccatttttggagtttttgcacctagggactctcgggccyggccaccttatactgttgcggctgacaaatcaacacgtaatgagttccgaaggttcatggagaagaatccagatgcctacgattacaacaaggctcaggt

SEQ ID NO: 106092 - DNA, 201 bp, Homo sapiens
tcaccatgttggccaggctggtcttgaagtcctgacctcaggtaatccacccgtctcagcctcccaaagtgctgggattacaggcatgagccaccatgccyggcctacctttcagtgcccacttaactccattggttcagaggcactcagtgtatcagctgaaagggaattgatatgtgtcctgtgcaaagtactagtgct

SEQ ID NO: 106093 - DNA, 201 bp, Homo sapiens
tactagtgctattgaggataggcttatccaaaaattggacttggggctggagaggtacatcttctagttccagcaatgtaattttgttgagggctcccctrggaaacagcaggaatcttggcacgtagagggtctgttgtggcccctgctttgtccagtaccggcccaagttaaacccattgatccagacttggccctggg

SEQ ID NO: 106094 - DNA, 201 bp, Homo sapiens
gcaggcagatcacgaggtcaagagattgagaccatcctggccaacatggtgaaacactgtctctactaaaaatacaaaaaaattagctgggcatggtggcrggtgcctgtaatcccagctactcaggaggctgagacaggagaatcgcttgaacccgggaggcagaggttgcagtgagccgagactgcaccactgcactcc

SEQ ID NO: 106095 - DNA, 201 bp, Homo sapiens
tgagctctgggatcactgttccaggactgggcagcccagcggtgcaccatctcctaccgagccccagagctcttctctgtgcagagtcactgtgtcatcgrtgagcggactgatgtctgggtgaggagcatgtgggtgggtatctgggtagggagggctgtggctctgtacccaccgtggagtagagtaggttgttggttt

SEQ ID NO: 106096 - DNA, 201 bp, Homo sapiens
gaattagggctgaaatccagcccaggctcccaagcagtgtgcccctggtataggactgcctttgtgtgactcaggagaggtgtctttttgcggttttcccraagacactgtatgttccagcatcatcccaggccacctggctccctcctctcccagtacctggggatgaccatgctggcgaacatccatctgagcaaagga

SEQ ID NO: 106097 - DNA, 201 bp, Homo sapiens
tgcaataaacatagtgaataggctccaggcagctgctttattcttctccctcatcctcgtcctcataggagtcgatgcccacctcctcataatccttctcmagggcagccatatcctcacgggcctcggagaactcaccctcctccatgccctcacccacataccagtgcacaaacgccctcttggcatacatcaggtcga

SEQ ID NO: 106098 - DNA, 201 bp, Homo sapiens
ctttattgacccctttggcccacagtgggttcagctatgtggacctagtggaagggttacatgatggacacttctacgccctgaagcgaatcctgtgtcaygagcagcaggaccgggaggaggcccagcgagaagccgacatgcatcgcctcttcaatcaccccaacatccttcgcctcgtggcttactgtctgagggaac

SEQ ID NO: 106099 - DNA, 201 bp, Homo sapiens
tagatctggtggtactgatccatactttttttgcatctctgttcaactcactgttaagtagggaggtttttgactcatatccttccaattttcattatagrtagacaaaggtagatgagggattccccaggagccttagtcctctattctttctccgtgttatcctctactttccaccccttgcacttctgtgggccattt

SEQ ID NO: 106100 - DNA, 201 bp, Homo sapiens
atcaagtgtttcagactcccccctggtattagctgagttgacagataggtgtcatccggtcaccctgggctcctccctccacaggcattcttcagcattgyggcagctcctgaactcgatgatgaccgtggacccgcatcagcgtcctcacattcctctcctcctcagtcagctggaggcgctgcagcccccagctcctgg

SEQ ID NO: 106101 - DNA, 201 bp, Homo sapiens
gatccatactttttttgcatctctgttcaactcactgttaagtagggaggtttttgactcatatccttccaattttcattataggtagacaaaggtagatragggattccccaggagccttagtcctctattctttctccgtgttatcctctactttccaccccttgcacttctgtgggccattttttttagttggagatt

SEQ ID NO: 106102 - DNA, 201 bp, Homo sapiens
tttgttttggggtgtggtggggaagctaggaagggaaggaaggaagggaaggaattgaatatagtgctggagatggccctagagtgtgggcagatgggagwagtctaggaactgcacaaggataactggttctatcccttctccagctaactcaccatctcccactctgcacagatgtaaggtcctggtctcagtatgacc

SEQ ID NO: 106103 - DNA, 201 bp, Homo sapiens; identical to SEQ ID NO: 17085

SEQ ID NO: 106104 - DNA, 201 bp, Homo sapiens
tgtctatggtgagcctttgctccagatcccaattccctagaccttcctgttctctccaacctaagcctccattctcattggtatatccagaggattttctragccttggactgcagcccagctacatctgcattgagagaaacctgcgctagcttctcctcagctaaggttgagaaagatcttttcttttatggcagaaga

SEQ ID NO: 106105 - DNA, 201 bp, Homo sapiens; identical to SEQ ID NO: 17087

SEQ ID NO: 106106 - DNA, 201 bp, Homo sapiens
gacggcggacagaccgtcacgtgtcggattcctgggagggaacctcagcgagcaagggggcggaaaccacctcaagttgccaggcgtttagcctggacttyctctccagcctgcagccacccccttactctactagtttgtaaaatttctacatcatgttaaagtgcagttcacgaaccagcttcatcgacgtcacctggg

SEQ ID NO: 106107 - DNA, 201 bp, Homo sapiens
ggcattcttcagcattgcggcagctcctgaactcgatgatgaccgtggacccgcatcagcgtcctcacattcctctcctcctcagtcagctggaggcgctkcagcccccagctcctggccaacatactacccaaatctgaaaaagcagcatgttgagaagatggccccttgtgccttggaaagaggttcccatccctcatt

SEQ ID NO: 106108 - DNA, 201 bp, Homo sapiens
aaggcaatgaggtcccggctgccattaaagttatagaccccaggctgtggctcgtggtagttccagggcacataactgagaaaggaagaggttaataggamccaaggtgaagagacgccagggaggcctaacggctcaggccttgcagggaatctccaggaagcggttggaaggaggtcctggcctgccctttcccaccct

SEQ ID NO: 106109 - DNA, 201 bp, Homo sapiens
aagcagcatgttgagaagatggccccttgtgccttggaaagaggttcccatccctcattggaatcaccacccattccatccaggacttctcttacacttgrgggtagcggggtcaggacaatcatctcagtcctgcatcttttcttctgctttcttccctccaagagcaaaacctgggcaaggggacttactgagtggggg

SEQ ID NO: 106110 - DNA, 201 bp, Homo sapiens
atagaccccaggctgtggctcgtggtagttccagggcacataactgagaaaggaagaggttaataggaaccaaggtgaagagacgccagggaggcctaacrgctcaggccttgcagggaatctccaggaagcggttggaaggaggtcctggcctgccctttcccacccttggcctaggagtcctggcagtcttcctgtccc

SEQ ID NO: 106111 - DNA, 201 bp, Homo sapiens
gatcttagtctcagtgttcctggagtgagagaagaggtgcaaggggcccaaagtcaggttgccatttcaggcgaactgcctgggaaggaggaatggtgcaragtcggcaatggtgtgacttcattctacaggaggttggttagcagtggacagttctagcttgtcttagatcaaaacttaaagctgcttgggctcaagctg

SEQ ID NO: 106112 - DNA, 201 bp, Homo sapiens
ctggaataggaaggacaagcagagtgggaaggcatcacagatcctggctagatcctttctacttcttgcagttttaccaaagataacttatagggtcttayatttgaaatcctccaggtgccaggaccattgacaccagaaatggaggcacggcaggctacacggaaaagggagcagaaggcagcccggcggcaacgggag

SEQ ID NO: 106113 - DNA, 201 bp, Homo sapiens
ggggtgcgggatgagggagtgggtggactgtaatgttgcagggaccattgggggcaagagaaatgagtacctgcacagtattcagaagggtggttgagggratttgggatgttctggcagatgctgcagtgaaaacagaaatggcaggaggagggacggggagagcgtggattggaaagtttctggggtacctgtccagcc

SEQ ID NO: 106114 - DNA, 201 bp, Homo sapiens; identical to SEQ ID NO: 17078

SEQ ID NO: 106115 - DNA, 201 bp, Homo sapiens; identical to SEQ ID NO: 17079

SEQ ID NO: 106116 - DNA, 201 bp, Homo sapiens
ggctggttcaccgtctcatcttacctggggcagcagtagcgtcaggctgagcggcagcagcagggaacgaaggcaggacagcttcttgggagccatggcgyttacagcgctcctctagtctgagacggcggacagaccgtcacgtgtcggattcctgggagggaacctcagcgagcaagggggcggaaaccacctcaagtt

SEQ ID NO: 106117 - DNA, 201 bp, Homo sapiens; identical to SEQ ID NO: 17081

SEQ ID NO: 106118 - DNA, 201 bp, Homo sapiens
ccagggcccgtgggcgcaggcagaagatgaggatgaggggtgtgacaatggggctcagcaactcttccaaaatgaacacctaaaagggcgggaccaaggtmacaagcgagcaggagggagcccagccctcaccaccgagctaccagccagtctctagcaggccctaactccaactccactcactgccttgtactggaagag

SEQ ID NO: 106119 - DNA, 201 bp, Homo sapiens
aatggcccatggggttcatacttccgaagcagggtaaagattttggtcatgttgtcagctgcggaaaggaggcaaaagaaaaagataaatgtcgtggaagwggtgtcctttccccagactccactcccagcccttgcttgagacctgggccaaaatctacagtggtatagagtccccggagggagccacacttgagtcctt

SEQ ID NO: 106120 - DNA, 201 bp, Homo sapiens
tggaaccctctgcaaacgtgaacaggcaggtgggaaagtgtaaatatggggaacttaaggctaacgcttcctggggaagggaggagtttggggctcacagyctggaattaggttctcaccccatccaccatcacataggcacggtcatggactccattatttggcacccagaatggtgttggctcaaaaatggtatgggtc

SEQ ID NO: 106121 - DNA, 201 bp, Homo sapiens
tctggttgggtgatgttgggaaaggcaggaggcaagttaaacccatttttggagtttttgcacctagggactctcgggcccggccaccttatactgttgcrgctgacaaatcaacacgtaatgagttccgaaggttcatggagaagaatccagatgcctacgattacaacaaggctcaggtcatctggaataggaaggaca

SEQ ID NO: 106122 - DNA, 201 bp, Homo sapiens
agtgaccgagagaaggtgaggctggaggttctcttgtccatggcaaggcttcctagaggtctaaccccttccccagcgtgcagctgtcacctcttgggtgscctactcgccactggggccttgtccttaacacaacttgtctccctcagagagctctggctgcagagcgccgactcgctgcccagttgggagcccctacct

SEQ ID NO: 106123 - DNA, 201 bp, Homo sapiens
ggaactagccctgcgggttgtttggttgttactttggactttctctcatccgctggatctgatcccgctcaccgcacccggcaggctggttcaccgtctcrtcttacctggggcagcagtagcgtcaggctgagcggcagcagcagggaacgaaggcaggacagcttcttgggagccatggcgtttacagcgctcctctag

SEQ ID NO: 106124 - DNA, 201 bp, Homo sapiens
ggaacaagaaaccgtgcaaggaaactgtttatttcgaaaggattttgcaataaacatagtgaataggctccaggcagctgctttattcttctccctcatcytcgtcctcataggagtcgatgcccacctcctcataatccttctccagggcagccatatcctcacgggcctcggagaactcaccctcctccatgccctcac

SEQ ID NO: 106125 - DNA, 201 bp, Homo sapiens
actcgccactggggccttgtccttaacacaacttgtctccctcagagagctctggctgcagagcgccgactcgctgcccagttgggagcccctacctctcyaatccctgactctgcaatcgtcaatactcggtatggggtgcgggatgagggagtgggtggactgtaatgttgcagggaccattgggggcaagagaaatga

SEQ ID NO: 106126 - DNA, 201 bp, Homo sapiens
cagatgcgtggatgtgttgcatggatctcacatagtttatctttgattggatgctgtggtttgaggctgagggctgcttccatgctttcctctattgtgcrgcaccctaaggctactcatacggagagtccagggacttgttcttgtctgggctgagagcctcatttctgcatgtgatataatggactcagctcttgatgt

SEQ ID NO: 106127 - DNA, 201 bp, Homo sapiens
tgtaatggtgggtggggagaggtagacatttgatttgtcttaataaaggtccatgctttgactgaggcagttggtgttacctggttgtacttcctagaatwctataactggtcttggccagtacaaggccaggctggggcatatttccacctttatctcactctttgtctttgtactagagggaacattataagcttgact

SEQ ID NO: 106128 - DNA, 201 bp, Homo sapiens
gtaaattccttgaaggcagtatcatgccatctcttttgtatcctcctctgctttgtatatcacactctgaatataattcttgtcactgtggatttgggctscctttctatgtccaattcctcttcccttatttaggctcaggggagagagaaagcccagaaagaaagctactccagggtcctatggatatttcagagaagt

SEQ ID NO: 106129 - DNA, 201 bp, Homo sapiens
ggaaagaacaaaaatggggtaccaaacttgtgtatctcatattgtctgtcttcaggagatctttccagcatctcgggatcagaagactcagactcagccastgaggaggacttgcagacactggatcgggagagggctacatttgagaagttgagccgacccccaggcttttaccctcatcgagttcttttccagaatgcc

SEQ ID NO: 106130 - DNA, 201 bp, Homo sapiens
cgggccaagcggggcacagcccaggggcttcgggatgcccgaggtgggccatcacactctgctggagccaacctgaggcgctacaatgaagccacactatrtaaggtgagttaagccttttagatctggtggtactgatccatactttttttgcatctctgttcaactcactgttaagtagggaggtttttgactcatatc

SEQ ID NO: 106131 - DNA, 201 bp, Homo sapiens
tttgattactatctggcaactgtcagatctgagtttctgtcctaaaaatgcactggcaaattccctactctcataactgacccatttccttatttaaacayacacccacagtgtctatcttagcaattactgagacatgtttagtgacctttccaaatctattatctcttttgttatggatgtttccccagagctaagaaa

SEQ ID NO: 106132 - DNA, 201 bp, Homo sapiens
cagcccagcggtgcaccatctcctaccgagccccagagctcttctctgtgcagagtcactgtgtcatcgatgagcggactgatgtctgggtgaggagcatrtgggtgggtatctgggtagggagggctgtggctctgtacccaccgtggagtagagtaggttgttggtttctgttgcatggggcgccaggaaccacaatat

SEQ ID NO: 106133 - DNA, 201 bp, Homo sapiens
tcagcatagctgaagaaggcatagaggatttgccatatgaggatgagggggcacagcaggaagttagcgatgccaatccacaggatgcggttgctgaggcsctgggccagctctagccgttgccccccacgtttgtactcggccttgaggctccattcattgagaaacagagagccaggtccccagaagaggatcagctca

SEQ ID NO: 106134 - DNA, 201 bp, Homo sapiens
cagtgagtaaaggtccccatcctgagtcattttgggtatagagaggataatttggaggttaaagttggcattggctacttggcaatattcccttggtctgrttgggtgatgttgggaaaggcaggaggcaagttaaacccatttttggagtttttgcacctagggactctcgggcccggccaccttatactgttgcggctg

SEQ ID NO: 106135 - DNA, 201 bp, Homo sapiens
ttggactaggtggttggcatttgtcctgctcaagcctcagaacaaccagggaggaaagcgggtttcctgtctttgtgccaagtactttgttttatcctccycatcctcacaactttgccatgaaataggccattttttgggtaaggaaccaagaccctgagaagaaactggcctaggccagcccaactctgcaggtggcat

SEQ ID NO: 106136 - DNA, 201 bp, Homo sapiens
agctaggctggtctgtttccagacctgaggtaggagattgtatagtaccccatctgaggtttttagggaaaggaggtagcagctttcctgttctgtaaacrtgccctgggatttccttgttgccactgtatttgaggcaatcacagcgtggtttagaaggtgtctggctctaaggtcacgccggaccagcagtcgggcagt

SEQ ID NO: 106137 - DNA, 201 bp, Homo sapiens
agaagggaggggcatcaccacctccattttctggaaggtggcagggatggtgtcattcctgggactcctgggccagcctggagcctggcacatagtgagcyctctgctgagtgaataaaaggctcgctgggtgggtgggggtacctgtgctggggtcagagcgccaggcaggaattaggagggtggtggcaaggcgggtgg

SEQ ID NO: 106138 - DNA, 201 bp, Homo sapiens
gcttcttacaactagtttctccctcatccttaaggtcccattgcaaaggctgtttttttacaaaagccttccctgactttctctcacacaagggcggagcstcttccccttgaggcagagcttctgccccctggggcggagcctcttctccctggggtggagccacgctctgcttgctgtgccagctctgtctgaaggtgc

SEQ ID NO: 106139 - DNA, 201 bp, Homo sapiens
catcatcaccactactgatgtcatgagagtgctacatgagggcaaaccaccactgatgtcttgagagtgctacatgagggcaaactggggcccttaatgcygcacaccagagcctcctttccccaaagcttcttacaactagtttctccctcatccttaaggtcccattgcaaaggctgtttttttacaaaagccttccct

SEQ ID NO: 106140 - DNA, 201 bp, Homo sapiens
ttcgggagcggccccttccgtggagatggagcctatttggccggcgctgcaggaggatgggcccagggccgccacccatccctgcttctccctttacctgkctggctgtgtgaccttggacaggtcactcaacctctctgttcctgaatcctgcccaacctttgatgagtgcaaagtcctggtgttcacctgggaagggag

SEQ ID NO: 106141 - DNA, 201 bp, Homo sapiens
gcctcagagggaagctggttcaggtcatgttctgccgcatccagtagtttcacaaatgttaggggaccacctggtctgtagctcagacggcccttcctgcmcccataggccaagttcaaagggatccaggaatagatctggaatgttccagatccatttccaaggcttcctttagttcagtagctggccggacagcaagtg

SEQ ID NO: 106142 - DNA, 201 bp, Homo sapiens
ccagtagtttcacaaatgttaggggaccacctggtctgtagctcagacggcccttcctgcccccataggccaagttcaaagggatccaggaatagatctgraatgttccagatccatttccaaggcttcctttagttcagtagctggccggacagcaagtggccccagcagttctcttgtttgcgtttcaggaagagttgg

SEQ ID NO: 106143 - DNA, 201 bp, Homo sapiens
aatggcgtgggaagggccagggctgcctgtgatgcccagagcagtgcactcccgcggcagatcatactcgctcctgggatgtttattaaacacctgccacrtgccaggtgccgttctaggtgctggggacccagcactgaacaggagtagagtctccctggtgggccccagcggggggtgtggaatggcaccaggaggtgg

SEQ ID NO: 106144 - DNA, 201 bp, Homo sapiens
gagtttgtgctcctatgagaatctcgtgttcccgctgatctgacaggaggcagagctcaggctggaatgctttcccgcccagtgctcgcctcctcctgtgygtctcggttcggaacaggccacagacccgtggcctgggggttggggacccctggactagaaggcagagtgagctgggtggcagcagagagccagggagga

SEQ ID NO: 106145 - DNA, 201 bp, Homo sapiens
aacaaagacaatgggagcaacaacttctcttgtcatgttgagctgtctttcgtttttccaaagccttcataaaccagcgtagaccggtgcctgcagtttakcccacagctcagccctcccttgtggctgccaggaagaggtctgggtttctgactaagcctgggctagagcagctgggggctgtgcccagactcattttat

SEQ ID NO: 106146 - DNA, 201 bp, Homo sapiens
ttagttttgcttttgctgtgttttgttatccttggatgtgaccttctccaaaataccccttttggttcacgtgtgtgtgtgtgtgtgtgtgtgtgtgtgtgtgaagcagcgtcgagaacatactgtgtgcccatatgctccttcccttgggtttgctttatcatggtttaccttggttttgctttatttcagttctttgat

SEQ ID NO: 106147 - DNA, 201 bp, Homo sapiens
ccatgtccactcttccctgcgtggtgggtgactcacctcacttcatggagtcggtcattcgactgcacctgctccatgccaggcactgttcccggcactgyggatgcggcaggggacagagaaagccctgcctctgtggagtttgcattccagtggggtagacaggcgacagaacccaagatcagttcaggcccaagcgtg

SEQ ID NO: 106148 - DNA, 201 bp, Homo sapiens
tttagttttgcttttgctgtgttttgttatccttggatgtgaccttctccaaaataccccttttggttcacgtgtgtgtgtgtgtgtgtgtgtgtgtgtgtgtgaagcagcgtcgagaacatactgtgtgcccatatgctccttcccttgggtttgctttatcatggtttaccttggttttgctttatttcagttctttga

SEQ ID NO: 106149 - DNA, 201 bp, Homo sapiens
ttctataaatggggtggaggagaaagggtaaaagcatgggagatgcgggtgcacctgtgggtccaggtgtcgggacctcccagtctctgcctgggagccckgtgttcagcgttgcgcactgtggtgcccgaggccggcccctccaactgtgcttccccactgggaattccaaagcctgtcttcctgatttcctgtggaagg

SEQ ID NO: 106150 - DNA, 201 bp, Homo sapiens
caccgcggtttcatctccctcaccggagcttggcgttgcctctttggaacctgtcaggtgtggaactcgcatgggttttgctgtctggcttctgcgcagayggcgaggctcctccacctgcgtggcgcggagctctgttctttcctgtgctgtggtcggtgctccgttgcagcacgaatgtgccaccgcttcatccatcca

SEQ ID NO: 106151 - DNA, 201 bp, Homo sapiens
tttttagttttgcttttgctgtgttttgttatccttggatgtgaccttctccaaaataccccttttggttcacgtgtgtgtgtgtgtgtgtgtgtgtgtgtgtgtgaagcagcgtcgagaacatactgtgtgcccatatgctccttcccttgggtttgctttatcatggtttaccttggttttgctttatttcagttcttt

SEQ ID NO: 106152 - DNA, 201 bp, Homo sapiens
gcgcactgtggggacccagggaggagctggcgcccacaccagctgactcccacaccagcggtcagagaacattttcttttaaggtttccgaagtgctgcawtaaagaaattaaatcatcttttcactgtaggactttttagaggctttaatgtgggaatttgctttacaaaccttccagagaggaaacagcctccagcatc

SEQ ID NO: 106153 - DNA, 201 bp, Homo sapiens
cgcgggaagctcagggctgcggtgtggctgcgggaagctcagggcagcggtgggggcgcgggaagctcagggccgcggtgggggcgcgggaagcacagggmcgcggtgggggcgcgggaagcacagggacgcggtgggggcgcgggaagcacagggccgcggtgtgggtgcgggagtgccggcctcttggaggtcaggaca

SEQ ID NO: 106154 - DNA, 201 bp, Homo sapiens
gggcactgttgcggtccactgccaggtaccacagggaccaccttctcagaggctgtcacccccatggtcaggccttcaaggcgtgccgaaggcgggagggytgggatggctcaagacgtgagtgcctcgggggcctttgccagacttgtccgcagggatcacgatgtcctcatcacggctgctgggtggcaggagggcagc

SEQ ID NO: 106155 - DNA, 201 bp, Homo sapiens
atgtgctgttctctggcttccattccagcccctgaggaggagcgaggctgggttccaccctgccctgctctcaaggaaggcgggaccaggcctcttgtctyggtcccactcgctcccagtccttactctcttgccccgctgggccacctttcccttgggagtggtggcagagctcctcagtgcagttctgttcctgccttc

SEQ ID NO: 106156 - DNA, 201 bp, Homo sapiens
tgggggcgcgggaagctcagggctgcggtgtggctgcgggaagctcagggcagcggtgggggcgcgggaagctcagggccgcggtgggggcgcgggaagcwcagggccgcggtgggggcgcgggaagcacagggacgcggtgggggcgcgggaagcacagggccgcggtgtgggtgcgggagtgccggcctcttggaggtc

SEQ ID NO: 106157 - DNA, 201 bp, Homo sapiens
cactgttgagctgtgagtggataatggcgtgggaagggccagggctgcctgtgatgcccagagcagtgcactcccgcggcagatcatactcgctcctgggrtgtttattaaacacctgccacgtgccaggtgccgttctaggtgctggggacccagcactgaacaggagtagagtctccctggtgggccccagcggggggt

SEQ ID NO: 106158 - DNA, 201 bp, Homo sapiens
ggaggacgctgtgtagacaggctccctgtggcacctgcagttggaggacgctgtgtggacagggtccctgtggcacctgcagtcggaggacgctgtgtagrcaggctccctgtggcacctgcagtgtgaggacgctgtgtagacaggctccctgtggcacccgcagtgtggcatgcagcctctgtgaccgtgtcttctctg

SEQ ID NO: 106159 - DNA, 201 bp, Homo sapiens
caccagcggtcagagaacattttcttttaaggtttccgaagtgctgcaataaagaaattaaatcatcttttcactgtaggactttttagaggctttaatgygggaatttgctttacaaaccttccagagaggaaacagcctccagcatcttcctaatgggaccaaggcacctctaggtgacagctcagggctgtgattgag

SEQ ID NO: 106160 - DNA, 201 bp, Homo sapiens
tgattttgggcaaggccctgattctttcccagctggtcttggccagactgtcccccgtgtgtgcagattgactagatccctgcttcgggctgggcttggcrggggcagctgtgctccaggcacctctttttctcttcctgggactagcagcctagcctgggccaatggccttctcttggcgacagtggaagtgcagaagaa

SEQ ID NO: 106161 - DNA, 201 bp, Homo sapiens
gacctgcaaccgctgctgcaggagtcagcgcactgtggggacccagggaggagctggcgcccacaccagctgactcccacaccagcggtcagagaacattktcttttaaggtttccgaagtgctgcaataaagaaattaaatcatcttttcactgtaggactttttagaggctttaatgtgggaatttgctttacaaacct

SEQ ID NO: 106162 - DNA, 201 bp, Homo sapiens
gcacgtgcaggagttctgggagcaccgcatggactcgaacgtgctttttctcaagtatgaagacatgcatcgggtgagtgctgccggagcagctgtcctcsgggtgccctggccctcggcctggcagctcctgacgcaggagccctttacagtgggcgtgtgggaggaggaggaggggtctgaggagggacagaggagggg

SEQ ID NO: 106163 - DNA, 201 bp, Homo sapiens
gcgaggccagaatcagacctgcaaccgctgctgcaggagtcagcgcactgtggggacccagggaggagctggcgcccacaccagctgactcccacaccagyggtcagagaacattttcttttaaggtttccgaagtgctgcaataaagaaattaaatcatcttttcactgtaggactttttagaggctttaatgtgggaat

SEQ ID NO: 106164 - DNA, 201 bp, Homo sapiens
acggctcctggtttgagcacgtgcaggagttctgggagcaccgcatggactcgaacgtgctttttctcaagtatgaagacatgcatcgggtgagtgctgcyggagcagctgtcctcggggtgccctggccctcggcctggcagctcctgacgcaggagccctttacagtgggcgtgtgggaggaggaggaggggtctgagg

SEQ ID NO: 106165 - DNA, 201 bp, Homo sapiens
ccaagcccttaaagggaagttcatccttctctgccttccaggctccccagtgaaagtggtcagacctgttgctttcagtccgtcagggtcaaggccaccakccctgcctggaactttaagagctgccggggtcagtgctgggacttcattttctatcaaagccggtctgtgactcaatggcatccctgggacagtcagcgt

SEQ ID NO: 106166 - DNA, 201 bp, Homo sapiens
agattctcactctgttgcccaggctggagtgcagtggtgcagtcacagctcactgcagcctctacctcctgggttcaagcgatcctctcacctaagcctcytgagtagctggcactacagatgtatgccactatgcccagctaatgtttttattttttattttttgtagggacaatgtcttgctatattgcgcaggctggt

SEQ ID NO: 106167 - DNA, 201 bp, Homo sapiens
cgggcgtggaggccattttcactttggggtggtcatgaataaagcctccgtggacgttctggagtcttggtggacgtcagcacttgtgcttatcgggcccrtacccaggagtggaatttctggggtcctgggtgtgcatttgtcagctggtcactattttgccaccaatgacatagcattgaacatgcactgcccagggcc

SEQ ID NO: 106168 - DNA, 201 bp, Homo sapiens
ggtaggaaggccagccttgtactttccccacacctgcaggaagacgccagacctggctgtgaacagagccacacgaggtcccctatggcgctggggtgggrgctgtgccttgtggccctggggtggtggggtgtttgttgtggccctggggcgggtggtgtgtgcactgtgatcctggggtgggggtgtgtgcgttgtagc

SEQ ID NO: 106169 - DNA, 201 bp, Homo sapiens
gacgatggggtgcagatgtggactgtgaggttgctcctgtggggcagaggcctgagtgccagctggaaaccatgtcgatgtaggggacagacaaggccagsctgtggggctgctagtgtcagtggctgacagacaagcaggtttaggttgagtagcagtgggtgggagctgggatggggaggaggtctgctgggagacaga

SEQ ID NO: 106170 - DNA, 201 bp, Homo sapiens
aggccgttctgatcagttctgatgctttctgtgagttctggtgggaattttgatgggctctgtgcccggtgttgagaaaggccatgccctagagtcctggrgagttccaccccagaacagcagtggcctcccacaggcctcgacccaagtccaggtgtcactgtgcactgctcgctgctgcagggggtattgatcggtttg

SEQ ID NO: 106171 - DNA, 201 bp, Homo sapiens
gggggcgcgggaagcacagggccgcggtgggggcgcgggaagcacagggacgcggtgggggcgcgggaagcacagggccgcggtgtgggtgcgggagtgcmggcctcttggaggtcaggacaggactccctgcccgtcttcagctttcaggtcccatggagagttcctcgatttactgaggctactgcctgtcgccctctt

SEQ ID NO: 106172 - DNA, 201 bp, Homo sapiens
cattgagctgtggtctctgcggagggagaagagaccacctcggcccgctgatgtgtggctgtgaggatgagcaaaatggcgggtgagaacgcttagcccasgtccagacacacgctggaaaggctcgtggttaatgctgacttttaagccctgaacacctgttgtgcccagatgctttgctaggggctggggaagccgaga

SEQ ID NO: 106173 - DNA, 201 bp, Homo sapiens
atatttccctgccccctgtccctatcacaggtgcaactggtgaatcctgtgagtgaaaatcagagggtttcagccacagggtcctagtggtttccaggccrttctgatcagttctgatgctttctgtgagttctggtgggaattttgatgggctctgtgcccggtgttgagaaaggccatgccctagagtcctggggagtt

SEQ ID NO: 106174 - DNA, 201 bp, Homo sapiens
ctccctcagtctccagaaaggggcgcagccctgcccacacctcgactttgggacttctggcctccagaactgtgagagaatacgtttcttttgttttaagscaccacgttttgggtgatctccagcagcaccccaggaaactaaaacagtgactaagaccagttccctgccctcacagggcttgccccagccaggcacagc

SEQ ID NO: 106175 - DNA, 201 bp, Homo sapiens; identical to SEQ ID NO: 17123

SEQ ID NO: 106176 - DNA, 201 bp, Homo sapiens; identical to SEQ ID NO: 17124

SEQ ID NO: 106177 - DNA, 201 bp, Homo sapiens
actccccaccccagccaggctgctttctctgcctgcttagggagccgagtccggtccctgttgccctccctgctctccttttacagcagtctgtagctggmccatggcctgtgctctgttagctggtgcccatggatggcacagtgctcatggagtgacggagtaccctgcccgctggtgtttgcattgcctccaagcaaa

SEQ ID NO: 106178 - DNA, 201 bp, Homo sapiens
acgctgtgtaggcaggctccctgtggcacctgcagttggaggacgctgtgtagacaggatccctgtggcacctgcagtgtgaggacgctgtgtagacaggstccctgtggcacctgcagtgtgaggacgctgtgtagacagggtccctgtggcacctgcagttggaggacgctgtgtagacagggtccctgtggcacctgc

SEQ ID NO: 106179 - DNA, 201 bp, Homo sapiens
tgaggacgctgtgtaggcaggctccctgtggcacctgcagttggaggacgctgtgtagacaggatccctgtggcacctgcagtgtgaggacgctgtgtagrcagggtccctgtggcacctgcagtgtgaggacgctgtgtagacagggtccctgtggcacctgcagttggaggacgctgtgtagacagggtccctgtggca

SEQ ID NO: 106180 - DNA, 201 bp, Homo sapiens
ttgatgtgtagacaggctccctgtggcacctgcagttggaggacgctgtgtagacaggatccctgtggcacctgcagtgtgaggacgctgtgtaggcaggstccctgtggcacctgcagttggaggacgctgtgtagacaggatccctgtggcacctgcagtgtgaggacgctgtgtagacagggtccctgtggcacctgc

SEQ ID NO: 106181 - DNA, 201 bp, Homo sapiens
tcagtttgatgtgtagacaggctccctgtggcacctgcagttggaggacgctgtgtagacaggatccctgtggcacctgcagtgtgaggacgctgtgtagrcaggctccctgtggcacctgcagttggaggacgctgtgtagacaggatccctgtggcacctgcagtgtgaggacgctgtgtagacagggtccctgtggca

SEQ ID NO: 106182 - DNA, 201 bp, Homo sapiens
gtccctgtggagccttcagtttgatgtgtagacaggctccctgtggcacctgcagttggaggacgctgtgtagacaggatccctgtggcacctgcagtgtsaggacgctgtgtaggcaggctccctgtggcacctgcagttggaggacgctgtgtagacaggatccctgtggcacctgcagtgtgaggacgctgtgtagac

SEQ ID NO: 106183 - DNA, 201 bp, Homo sapiens
gtgaggatgctgtgtagactgggtccctgtggagccttcagtttgatgtgtagacaggctccctgtggcacctgcagttggaggacgctgtgtagacaggmtccctgtggcacctgcagtgtgaggacgctgtgtaggcaggctccctgtggcacctgcagttggaggacgctgtgtagacaggatccctgtggcacctgc

SEQ ID NO: 106184 - DNA, 201 bp, Homo sapiens
ttttcagtttgtatggcctgccttggggagaaaaaggaacaggtgaaaggggtgggggcaggagaaggtcagagagagagagagagagagagagagagagagagatgctgtttactgagacctgcttctaaggcctggagtggtccaatattatgacaaaagactgtaataagggctggggggataatgagccaggagcca

SEQ ID NO: 106185 - DNA, 201 bp, Homo sapiens
attttcagtttgtatggcctgccttggggagaaaaaggaacaggtgaaaggggtgggggcaggagaaggtcagagagagagagagagagagagagagagagagagatgctgtttactgagacctgcttctaaggcctggagtggtccaatattatgacaaaagactgtaataagggctggggggataatgagccaggagcc

SEQ ID NO: 106186 - DNA, 201 bp, Homo sapiens
tggaagggcccatcttggttgagtgaaactaggatcttgtattttatctgacctctccctgttagtgtgggggcagctctttccagtgtcctgcatctagrgggaagtggccctagtggtccctcctgatctccgaccactagatcaggtggtgggcatgtctgtagctcctgggatgtgggacaggatgttgcacagtgt

SEQ ID NO: 106187 - DNA, 201 bp, Homo sapiens
tcccagcactttgggaggctgaggcaggagaattgcttgagcctaggagttcaagaccgtctgggcaacatagggagacccccatctctacaaaaaaaaaacaacaaaaaaaaacctagccaggtgtggtggtgtgtgcctgtggtcccagctacttaggaggctgaggtgggaggatcccttggacccaggagggtgagg

SEQ ID NO: 106188 - DNA, 201 bp, Homo sapiens
ggtccaggcggggccccgcttcctcctgcctgcaccaggtgtggagccggtcacagtgcctgctcccctgggccgtagcagggaggagagggcctgtcccrtgcatcccagggtgtgcactgcaggtgatcccggccatcagaaaaggccgacttgaaggggcaggggctctgagacagctgtgcctaggctgaggctggg

SEQ ID NO: 106189 - DNA, 201 bp, Homo sapiens
cccaaagtgctgggattacaggtgtgagtcacagtgcttggccatagtttcttttctttctttctttttttttctttctttccttttttttttttttttttgagacaggatcttactctattgcccaggctggagtgcagtgatgcaatcatggctcactgcagcctccacctcctgggctcaagcaatcctcctgcctca

SEQ ID NO: 106190 - DNA, 201 bp, Homo sapiens
aggagccagtggcagaaactggagccgccgatatgaagggaccacagtgggttaagctgtgcccgtttcttctgggaggtcagacaaggtgatgactgagratcactggggacctggagctgtttttgggcctgggaatagaggctggagaaggcgcagagggccgcctttctccctgggagttacctttggtcccggcac

SEQ ID NO: 106191 - DNA, 201 bp, Homo sapiens
gccacagggtcctagtggtttccaggccgttctgatcagttctgatgctttctgtgagttctggtgggaattttgatgggctctgtgcccggtgttgagamaggccatgccctagagtcctggggagttccaccccagaacagcagtggcctcccacaggcctcgacccaagtccaggtgtcactgtgcactgctcgctgc

SEQ ID NO: 106192 - DNA, 201 bp, Homo sapiens
ctcctgctcgaggctagtggagggaaccacagggttggctgtgggcattgctttgcctgctccaggtgtgtggcttcatcggtaggtcccaggagggtcckgtcctgtgctgtggatgagggttgccaggtttgctgtgagactgtggcgtgtccttgcacgggagcaggccctgttgctggtgccccatcttgatttcag

SEQ ID NO: 106193 - DNA, 201 bp, Homo sapiens
cgggaaaacggggatgtaagctgtcactttgggtcttggtatcaggccttttggcttgagggtgggacccctgctggggacctgccgtcttctgccccatmtttccctgccccctgtccctatcacaggtgcaactggtgaatcctgtgagtgaaaatcagagggtttcagccacagggtcctagtggtttccaggccgtt

SEQ ID NO: 106194 - DNA, 201 bp, Homo sapiens
tggagaaaggaccagtgcacccaaggtagggggaggtccaggaagatcctgtgcagccatgccaggccgttcactcagatgagggagggagagcagagggracaggggcatgtccccaagcagcaaacaggatcgagcgaacacccacccatgtctctggccacgttgaggcttgttagagttgtggaaggaatgattaat

SEQ ID NO: 106195 - DNA, 201 bp, Homo sapiens
cccatcgtgctctgtgtcgagggcattgtgttgagagctgagagacagtgtgcggaagcacagggacaaggactggccgcagcaggcgtttaacagacgtycttcaccttttccttttccttttggaggtggggagcattctcagtgtctgctggggggcagttcccacctggatgggggcaggagctcccaggtcctggg

SEQ ID NO: 106196 - DNA, 201 bp, Homo sapiens
acgggaaccctgaaagcacaccatgtccagacaggccaggatcagaggccacagcacagggcaacagcaggagggtcctgcataaacaaccacgcgtgagsctggtgaccagctctgcgaggctggagggcaaagggccctggaggcaggtgacacctgcagtgtgaggatgccccgtgacaggcttcctgtgacacctgc

SEQ ID NO: 106197 - DNA, 201 bp, Homo sapiens
gcagcacccagcagccgtgcacatgggccccagctggacgctggaagcaggtgttggtttgtgaggtgcaccagcaggttcagggaggctggcctgtgtcrgggcagccctgcctgggagggaaggagacacggactcatcctgctcctgtcacccacaggtcatctatatggctcgcaaccccaaggatctggtggtgtc

SEQ ID NO: 106198 - DNA, 201 bp, Homo sapiens
cgtcctctggtccccctgctcctggccttacccctccctctggcctcacccctccctcttacctgacgctctcctgacccctccgctaccctagacccgcygttccctctgataactccacttcccctgaaccccaccccttccttcctcctctggcccccttccccttggccccactcctccccttggtctcaccctttc

SEQ ID NO: 106199 - DNA, 201 bp, Homo sapiens
aggctgggttccaccctgccctgctctcaaggaaggcgggaccaggcctcttgtctcggtcccactcgctcccagtccttactctcttgccccgctgggcyacctttcccttgggagtggtggcagagctcctcagtgcagttctgttcctgccttcctgagggggctccccatggccagccatggctttgggaggtcctg

SEQ ID NO: 106200 - DNA, 201 bp, Homo sapiens
catcaggccaggttgctgtgcggtccagcgccagcctggcagcacccactggggctggtgcctcctgctgcctctgctgccctccgacgccactccaagcyggggcagtagctcccaggccccctgagcagatcctgtggctgtggctatgatgggtggactccccaggccaaagtcaaggacccttgtctctaccgccag

SEQ ID NO: 106201 - DNA, 201 bp, Homo sapiens
gacagcatcaggcccggcctttcagcccaggaagccatagtagctagccagcgatcagcgctgggaggggagcagatcagggggggaccagcagtctcctstggggatgtctgaggcaggtcctgaaagaggagaggagcagagggacccgtgagcaaagaccccacggcacgaggggcctggccttccagagcagtaggc

SEQ ID NO: 106202 - DNA, 201 bp, Homo sapiens
gccaccgcgttcaaggcactgctcttggcattgggggcagcagtgactgacagcatcaggcccggcctttcagcccaggaagccatagtagctagccagcratcagcgctgggaggggagcagatcagggggggaccagcagtctcctgtggggatgtctgaggcaggtcctgaaagaggagaggagcagagggacccgtg

SEQ ID NO: 106203 - DNA, 201 bp, Homo sapiens
tcccaaagtgctgggattacaggtgtgagtcacagtgcttggccatagtttcttttctttctttctttttttttctttctttccttttttttttttttttttgagacaggatcttactctattgcccaggctggagtgcagtgatgcaatcatggctcactgcagcctccacctcctgggctcaagcaatcctcctgcctc

SEQ ID NO: 106204 - DNA, 201 bp, Homo sapiens
ccatggctggccatagtttcttttgccttggcctcccaaagtgctgggattacaggtgtgagtcacagtgcttggccatagtttcttttctttctttcttkttttttctttctttccttttttttttttttttttgagacaggatcttactctattgcccaggctggagtgcagtgatgcaatcatggctcactgcagcct

SEQ ID NO: 106205 - DNA, 201 bp, Homo sapiens
actgtcacaacttactcattctattgctgatgggtatttgtgtttccaagtgactttatgaatgatgtggccaagactgttctagaacctgcgtactggtrgacaagcactggcttcccttgggtgtctccccaggatagttcctggatcatgggctatgtgtatatagcttcagtagatactgggcagacgtcatttcct

SEQ ID NO: 106206 - DNA, 201 bp, Homo sapiens
tcgtatggaggtccccgtggaagaaaccgtcacagtggtgggcacggcatgtggcaggcaggggaggatccatagcttttataaagaacactgcaaagcargctggagactccatgagttggtccctgcctgtgtgccccaccccacaccaagggctctgaggcagcgcaggccacgcaggaagctcagggctgcggtggg

SEQ ID NO: 106207 - DNA, 201 bp, Homo sapiens
ggaaccctggggctcagcctgccaggatcccttgagagacgacatgaacacagccaggagccttctttggcgtgtggggggcaggtgccaactcttgtccyttagtggttgggtgtggctcagggcgtcggctccctgcacttctgggcctgttcctctgtggccaggtgggaagcaggtgcaggtgcttgaggtcagaag

SEQ ID NO: 106208 - DNA, 201 bp, Homo sapiens
acgcgtgtcggggccctggcccagtgcctggcacagatcagcagcgcgctaagcacgtgttgaatggacgactacctttcagggccttccagccagggtayctcatgcgtctgtgttgagcgcttgctgagtgacagaagctatgagcggaatgaacgcacgcacgactgaggaggctgcagaccgcgggccagggtctct

SEQ ID NO: 106209 - DNA, 201 bp, Homo sapiens
cccctgtggccctccagggcccctgtctgcaccccagcctctcgggcctgaacggccattttgctctccttgtccgtgcggaaccatctgggagtcgttcygtactgccgtgccgagggccaccgcgttcaaggcactgctcttggcattgggggcagcagtgactgacagcatcaggcccggcctttcagcccaggaagc

SEQ ID NO: 106210 - DNA, 201 bp, Homo sapiens
gtgggtgacacatcagcgtcagggagtctgtgaagtggaaaggaagtcaatgcctggggggcacagggctgaggggccatttgtggggagcaggccctggkcctccccctcgctttcccctgggggccctcctctgagggagctgggtaggatgtgtttgcatcaaatatttggtatcaagaatgaataaatgttacccca

SEQ ID NO: 106211 - DNA, 201 bp, Homo sapiens
tcctggcccctctgagaatcagagccgactggcccatgacccagcacgggggattcaggctgagaccgtgcggggcgcgctcctcttcccagactcagtcrccctgggccccacctggggctcttgagccccttcttgggcagcaggtgttgacccgagcacagggccgggcgcgtgggcctcctctgagcaccccgcgct

SEQ ID NO: 106212 - DNA, 201 bp, Homo sapiens
ggggcttggccatgctgtgtctgcagttccgtcacatcctatctgtggggcttggccgtgctatgtctgcagttcattcttttttgttgctgtgtagtacmccatggtgactgtcacaacttactcattctattgctgatgggtatttgtgtttccaagtgactttatgaatgatgtggccaagactgttctagaacctgc

SEQ ID NO: 106213 - DNA, 201 bp, Homo sapiens
tcacttctgtcactatagttgagttttgcccatccttgaacctcatgccaatgggacatacaggattgtaccctggagcgccttggggtgggaggactccktcacatcctgtctgtggggcttggccatgctgtgtctgcagttccgtcacatcctatctgtggggcttggccgtgctatgtctgcagttcattctttttt

SEQ ID NO: 106214 - DNA, 201 bp, Homo sapiens
agtgccagggtgtcctcagcacacacgagctcccccgcaggcctctccctgcctttaatggcacggcacgctgggcttgcccaggctcttcccgttggccrcatctccccacagtcttaggagaggaggttatgctgaccaggccactggcgggcggaggtgatttgtctctttttaattgaattatatcttacatgtgcg

SEQ ID NO: 106215 - DNA, 201 bp, Homo sapiens
cgtcggacctgagtgcgaaatgtgctgtttgtcctagagggacggttcccagacccaggcaggaggcctggctcagccgcgtggctgatttgtgaggagggagaattggtccataggtctctagccctgtgggcagctgtggtcctgtgagtgagtgccagggtgtcctcagcacacacgagctcccccgcaggcctctcc

SEQ ID NO: 106216 - DNA, 201 bp, Homo sapiens
ggcaaggacagaggagaggagccgggtgagccacagtgaggccaccatccggcctgagcctctgtcagctggaggggctgcttgctgagacgggctgcggrtgctgcggaggagacagccttggatgctgcccccagagctggctgggtcccactgaggcgctgggcagcgggtgaggtactggagttggtgggcatgtgc

SEQ ID NO: 106217 - DNA, 201 bp, Homo sapiens
ctgggtggcagcagagagccagggaggagccctcgtaggaagcagttcaggtgtgaggacgcagtgtcacagggggagggtcagctctggacacacccgayggcagggtcggcggggctcactgaggcaaggacagaggagaggagccgggtgagccacagtgaggccaccatccggcctgagcctctgtcagctggaggg

SEQ ID NO: 106218 - DNA, 201 bp, Homo sapiens
agtttgtgctcctatgagaatctcgtgttcccgctgatctgacaggaggcagagctcaggctggaatgctttcccgcccagtgctcgcctcctcctgtgcrtctcggttcggaacaggccacagacccgtggcctgggggttggggacccctggactagaaggcagagtgagctgggtggcagcagagagccagggaggag

SEQ ID NO: 106219 - DNA, 201 bp, Homo sapiens
gaggagcggtgactttcaggcctcccagagtcactggcagagctaggctgggaatctggtctccaggtcagagtctcatcagacagaggctggggccaagycagggttgccggagcttcctggactggtcaggcctgactgtggaacccagcatgccacagctgcctggcatcaccccagcaggaggagggaggcacggcc

SEQ ID NO: 106220 - DNA, 201 bp, Homo sapiens
gtgcggcccagcgacgtgtggatcgtcacctaccccaagtccggtgagccccgcgccgaccgcgcccgccacgccatgccccagccctgcagcgcggccgsgtagacgccgcgcccgcgcccggggcttctgctgggccgggtggtcgcccttggcctccgcccctgccgtgcccaccgctctcccgatgctcggatccct

SEQ ID NO: 106221 - DNA, 201 bp, Homo sapiens
cagagcaagcccaagctggccaggcagagggcagcctgttgaaggctttgggccactggggcgctgggcttggaagggggtgggaggctggccagagaagrgggggtgggtggagggctggcagggccacatcactgggacctcaggagcccctgggtgcagatggccacagcaagggtgggtggaggggctgtgcagggc

SEQ ID NO: 106222 - DNA, 201 bp, Homo sapiens
ttcagttgctgagttgacatttgtttatattgattctctttgggcctcagcaggtcactttgtggcccttctgcgtgtcatctcctttgaccccagcagcyctgtgaagaagggaggggcatcaccacctccattttctggaaggtggcagggatggtgtcattcctgggactcctgggccagcctggagcctggcacata

SEQ ID NO: 106223 - DNA, 201 bp, Homo sapiens
ttactttttctctctctgctggctgaattctggggtttttataagcacaggattgggggcagggagtggttttggaagagataacatctgagcgggaaaayggggatgtaagctgtcactttgggtcttggtatcaggccttttggcttgagggtgggacccctgctggggacctgccgtcttctgccccatatttccctg

SEQ ID NO: 106224 - DNA, 201 bp, Homo sapiens
ggaagcttgtgagtaagggaacttggctaagtcctcatctttcgtagtcgaaaatcattagcccatctaaaatgtgcagatcataaaataatgatatcagyacactttttggaaatttgagggtaaaaataatctaccaaaggtctccttccggggagtgggattagaggaggagagaaccgtgggtctttgtgccttaca

SEQ ID NO: 106225 - DNA, 201 bp, Homo sapiens
cgtgctgcgactgtatcggcaggagggaagcttgtgagtaagggaacttggctaagtcctcatctttcgtagtcgaaaatcattagcccatctaaaatgtrcagatcataaaataatgatatcagcacactttttggaaatttgagggtaaaaataatctaccaaaggtctccttccggggagtgggattagaggaggaga

SEQ ID NO: 106226 - DNA, 201 bp, Homo sapiens
aacccttgccaactgtctggcctagtgaatgagtaaactggggcaaagggaagatctcaaagctcccacagagagaaaaatggtcccccaggatctcagcrgcaccatcggcagtgagaagacaggatgacggaaagcgatctccagcctgggcttctgtacccgaccagactgtccctcacatgggaggtggatgtggac

SEQ ID NO: 106227 - DNA, 201 bp, Homo sapiens
tcctcagctggtgctgtgagctgggctccggaagtcttggttccccatctagttgccagccgggtgaccaggaactctacttttcctcttagagcttcccrtcgtgctctgtgtcgagggcattgtgttgagagctgagagacagtgtgcggaagcacagggacaaggactggccgcagcaggcgtttaacagacgtcctt

SEQ ID NO: 106228 - DNA, 201 bp, Homo sapiens
ttcaggcctcccagagtcactggcagagctaggctgggaatctggtctccaggtcagagtctcatcagacagaggctggggccaagccagggttgccggakcttcctggactggtcaggcctgactgtggaacccagcatgccacagctgcctggcatcaccccagcaggaggagggaggcacggccagtgactgtgcctg

SEQ ID NO: 106229 - DNA, 201 bp, Homo sapiens
cgagctcctgggtctctgtcagcatgtcctcagctggtgctgtgagctgggctccggaagtcttggttccccatctagttgccagccgggtgaccaggaastctacttttcctcttagagcttcccatcgtgctctgtgtcgagggcattgtgttgagagctgagagacagtgtgcggaagcacagggacaaggactggcc

SEQ ID NO: 106230 - DNA, 201 bp, Homo sapiens
gctgtgtttggaggagtgtgtgtggtctgtgtgttatgtatgtggtgtgcgtgagtatacatgtgtgtctgtgtgtctgatgggtgtgtaaagcactctgkttctggagcgaaagtttgaggtgctgggttcactgcccactggcctctgtggccctggacattccatccctgaacttgtgtggtcctgtgtgaagctgga

SEQ ID NO: 106231 - DNA, 201 bp, Homo sapiens
agcaggagaggagggcgtggtggattagaaacccagaagatcacaggcagggctgagtgctgtctcactgggcaggcggggagcctgaatgccgcagtcgkgagggtggccaggtgggaacgaattccagcagcccagcccaggaagcagctgaggtggtgtccatgacactggggatggaaactagaggctgtcaccaag

SEQ ID NO: 106232 - DNA, 201 bp, Homo sapiens
gtgcctgtttccgctctgcatccagcaggggtctggctgtggacgtggcccagagtgggcaggggtggggtggggatggctgcaattcgtttcccagggtyccaggcccagaagtgagctgccactgtcatgggtggaggtcagtcccagcaactgccccatctgtttcacccttgcttgatcgtagctagaaaatggtca

SEQ ID NO: 106233 - DNA, 201 bp, Homo sapiens
tcagtcccacaagactgcccccagttctgatgccaaccacaagccccaggttgttttgcctgtgtgtctcacccactggctataaattggggttcgcacamcctccctgcccacgtttgactaatttgccagagcggctcacagaactcagggcaacactgacatttcctggtttattataaaggatgttacaaaggcttc

SEQ ID NO: 106234 - DNA, 201 bp, Homo sapiens
actcccagagcaggagaggagggcgtggtggattagaaacccagaagatcacaggcagggctgagtgctgtctcactgggcaggcggggagcctgaatgcygcagtcgggagggtggccaggtgggaacgaattccagcagcccagcccaggaagcagctgaggtggtgtccatgacactggggatggaaactagaggctg

SEQ ID NO: 106235 - DNA, 201 bp, Homo sapiens
agaagaataagcagagacatgcaaaggtctctgttggccatgtcacatggtcgtgcccagagtcagagcaggacctttatgaggggccgtgaagtcccgcrgcaaagatgtgcatggggcatgtgttggggtcattgccctgtctgccattgttgtccgcaccatcatcaccactactgatgtcatgagagtgctacatga

SEQ ID NO: 106236 - DNA, 201 bp, Homo sapiens
ttagtcccacagctagtgaaggagactgtgctgactgagcggcatctgagcaggcgcagggaggagtcagggagtgaggaggctccaggcagggacaccartgtcggcagcctggggaagggccggttgggctcagaggctggagggagctcaggggagagccaggtggtgagggagtggaacatggtgaaggccttgcgt

SEQ ID NO: 106237 - DNA, 201 bp, Homo sapiens
agcttccatgccctctctgggcaagccaccctccaggaacccccatgtgttcagctctttggaagctcctcaaagcctgtcctcttgggccttttatggarccctcattggctaggcatggtggaagcatgtagaaatgggactggacaaaagggctgtgagcccaacactgtcagtcggagtggggagcccaggaaggcc

SEQ ID NO: 106238 - DNA, 201 bp, Homo sapiens
caataaaagacacccccaacccttgccaactgtctggcctagtgaatgagtaaactggggcaaagggaagatctcaaagctcccacagagagaaaaatggkcccccaggatctcagcagcaccatcggcagtgagaagacaggatgacggaaagcgatctccagcctgggcttctgtacccgaccagactgtccctcacat

SEQ ID NO: 106239 - DNA, 201 bp, Homo sapiens
acccattacagatgctgttttgccctccacccactttgattctcaggacggccctgtgctcttgtgattatttcctttttatagatgtgaaaatgagggcytagggaggacaaagggctggggtagtggcagcaccgagtgtagatcctggagagaaaccacccacaggagggggtaagagaggcgtgggggtgggagcta

SEQ ID NO: 106240 - DNA, 201 bp, Homo sapiens
atttttttttccttttcaaattctcccgaagccaatgacgccttggtggcactgttgagctgtgagtggataatggcgtgggaagggccagggctgcctgygatgcccagagcagtgcactcccgcggcagatcatactcgctcctgggatgtttattaaacacctgccacgtgccaggtgccgttctaggtgctggggac

SEQ ID NO: 106241 - DNA, 201 bp, Homo sapiens
taaaattttctgcactttgaatgatttttttttccttttcaaattctcccgaagccaatgacgccttggtggcactgttgagctgtgagtggataatggcrtgggaagggccagggctgcctgtgatgcccagagcagtgcactcccgcggcagatcatactcgctcctgggatgtttattaaacacctgccacgtgccag

SEQ ID NO: 106242 - DNA, 201 bp, Homo sapiens
ctattggactagaccaacctaagattttatattaacaaagacaatgggagcaacaacttctcttgtcatgttgagctgtctttcgtttttccaaagccttyataaaccagcgtagaccggtgcctgcagtttatcccacagctcagccctcccttgtggctgccaggaagaggtctgggtttctgactaagcctgggctag

SEQ ID NO: 106243 - DNA, 201 bp, Homo sapiens
caggtgggaggtggtctcagaaggcaaggggggaagaagccaggaaaggggttcctctgtggaaccctggggctcagcctgccaggatcccttgagagacracatgaacacagccaggagccttctttggcgtgtggggggcaggtgccaactcttgtcccttagtggttgggtgtggctcagggcgtcggctccctgcac

SEQ ID NO: 106244 - DNA, 201 bp, Homo sapiens
gcattttctggaagctaaaccagtcattttgtgggggctggtgagccagaggccctggcttgggcttcaggacttggctcagcttgaaatgagccagactytcctgggacctgttgaccccaccagcggcaggggcattggactaggtggttggcatttgtcctgctcaagcctcagaacaaccagggaggaaagcgggtt

SEQ ID NO: 106245 - DNA, 201 bp, Homo sapiens
gagctggtgcttgcctcctgccactctgtggaagggcccatcttggttgagtgaaactaggatcttgtattttatctgacctctccctgttagtgtgggggcagctctttccagtgtcctgcatctagggggaagtggccctagtggtccctcctgatctccgaccactagatcaggtggtgggcatgtctgtagctcctg

SEQ ID NO: 106246 - DNA, 201 bp, Homo sapiens
tgtgtttgggtgtgaactctgctcagtgtgagattctctggcttctctggcttcagaggttctgtgctgtcacatgggctcacccttggcttttaccagcrtggaaacattttacctgaattcctctcgccacctgcatgggctggcttctcttcctccagggccctgtctcaagtgagctggtgcttgcctcctgccact

SEQ ID NO: 106247 - DNA, 201 bp, Homo sapiens
gggtacaagtaggatgtttttcttttcctacagccatgatactgaggaaggctctctccaaagcatgctgcccccaactctttctcctgagcacctggcckaggtctggagaagagcctgtgtttgggtgtgaactctgctcagtgtgagattctctggcttctctggcttcagaggttctgtgctgtcacatgggctcac

SEQ ID NO: 106248 - DNA, 201 bp, Homo sapiens
ttccttgggaacctttaacatgttaatcagacttcttaaaaattccatgagtctaattctgttgattgctttgtctcttgacagttttgtttgtgtgtgtrcgcgtgtgccttttttgtgaatagtaccttttgactgctcaacacagcatattagatagtagagactaaggtcagccatatttatgcttgcaaatgaggc

SEQ ID NO: 106249 - DNA, 201 bp, Homo sapiens
tttcctcagcctcctgagtagctgggtctgcaggcatactgctgcacctggcttctttctttttctctttttgttccagtttgggtaatctctgtggaccratctgtggctaactgctcctttcttctgctgtgtcaagtctgctgatgagctgtcagaagcattcaatgtttctgttatgtttttttccctctagcattt

SEQ ID NO: 106250 - DNA, 201 bp, Homo sapiens
atatgttagattgtttgatgttgtcctccagctcttggatgttgtattctgttttctgttttcttccctcttttttctttcctttttttttttttttttttgagacaggatctcactgtgctgctcagactggcctagaattcctgggcttaagcagtcctctttcctcagcctcctgagtagctgggtctgcaggcatac

SEQ ID NO: 106251 - DNA, 201 bp, Homo sapiens
ttgtagagatagggtctcaccatgttgcctaggctggtcttggactcatgggctcaaatgatcctcttacctcggcctcccaaagtgctgagattacaggygtgagctgctatgccaggccttggcttgtttagcttctgctgaaatgttggcttgttcttttttccactgggtaatgtgcctgttttcctctggctgcct

SEQ ID NO: 106252 - DNA, 201 bp, Homo sapiens
tttcttttctttctttctttttttttctttctttccttttttttttttttttttgagacaggatcttactctattgcccaggctggagtgcagtgatgcawtcatggctcactgcagcctccacctcctgggctcaagcaatcctcctgcctcagcctcccaagtagctaggactgcaggtgtgcgccaccacacctggct

SEQ ID NO: 106253 - DNA, 201 bp, Homo sapiens; identical to SEQ ID NO: 17125

SEQ ID NO: 106254 - DNA, 201 bp, Homo sapiens
acggtccctggctcagccagagcacccactgccctgagtttattttgcccctggttccggccagtcctgaagtgtgtgcgcattctcactgatgcagacgraagcttctgggcctgggcgtgggtgagccacctggtttctttgaacctcagtttgctcattaaaaatgagaggatttgaccagattgattcatttaagtc

SEQ ID NO: 106255 - DNA, 201 bp, Homo sapiens
ttgaaaaacctgaggtcctgcctggacaaggaccgctgttaataacggagctagtgaaggacatttgctggagacagagctctgatctcagagagctgacratggaaagaattctaaacgagcagttcttcaaaagcagggaggcagtactcgggtgatgtgctcacagctcccataactgggaagtttggaatccccgcc

SEQ ID NO: 106256 - DNA, 201 bp, Homo sapiens
gcggggcgcgctcctcttcccagactcagtcgccctgggccccacctggggctcttgagccccttcttgggcagcaggtgttgacccgagcacagggccgrgcgcgtgggcctcctctgagcaccccgcgctggggcttctcccctccaggcaccagcttgctgcaggaggtggtctacttggtgagccagggcgctgacc

SEQ ID NO: 106257 - DNA, 201 bp, Homo sapiens
gcatgtctgtagctcctgggatgtgggacaggatgttgcacagtgtgactgtgttatggttagcagggagcgggctcctagcgtgggcttctggagggagygagaggagagtggagggcccattgagaggtggaagcctccctaaagcatgctttggagacttgctggcattttctggaagctaaaccagtcattttgtgg

SEQ ID NO: 106258 - DNA, 201 bp, Homo sapiens
agctggaagccctgacggagcactgccaccagctggtggaccagtgctgcaacgctgaggccctgcccgtgggccggggtacgtgccccaccctgcctccygcccaggcactccccaccccagccaggctgctttctctgcctgcttagggagccgagtccggtccctgttgccctccctgctctccttttacagcagtct

SEQ ID NO: 106259 - DNA, 201 bp, Homo sapiens
gttggtttgatgcaatcactgccactggttttgtcaacaggttgatttgaattgggtgctcgtccccgagggggcacagccccaaagtcatggagcttggrctttgaaatacggtccctggctcagccagagcacccactgccctgagtttattttgcccctggttccggccagtcctgaagtgtgtgcgcattctcactg

SEQ ID NO: 106260 - DNA, 201 bp, Homo sapiens
cctgcccgtgggccggggtacgtgccccaccctgcctcccgcccaggcactccccaccccagccaggctgctttctctgcctgcttagggagccgagtccsgtccctgttgccctccctgctctccttttacagcagtctgtagctggcccatggcctgtgctctgttagctggtgcccatggatggcacagtgctcatgg

SEQ ID NO: 106261 - DNA, 201 bp, Homo sapiens
tggctaaggcaatgataattagatcctgccttcgcttcctgtccggtattttttcccacaaccccgtgctgcttgctcggattctttttgtgcttgtgacrttctagcttagatggcgggttaggactgtgctctccagcgtaggaccctctgcccacaggcggctgcttacatctaatgaattaaaatgaaataaaagtg

SEQ ID NO: 106262 - DNA, 201 bp, Homo sapiens
aacaaacaaacaaaaaatacaaaaaattagccaggcatggtggcatgtgcctgtagtcccagctactcgggaggctgagccaggagaatggcgtaaaccckggaggtggagcttgcagtgagctgagatcgcgcccctgcactccagcctgggcgacacagcgagactccatctcaaaaaaaaaaaaaaaaaaaaaagcaa

SEQ ID NO: 106263 - DNA, 201 bp, Homo sapiens
ctggtggctaaggcaatgataattagatcctgccttcgcttcctgtccggtattttttcccacaaccccgtgctgcttgctcggattctttttgtgcttgygacattctagcttagatggcgggttaggactgtgctctccagcgtaggaccctctgcccacaggcggctgcttacatctaatgaattaaaatgaaataaa

SEQ ID NO: 106264 - DNA, 201 bp, Homo sapiens
ctagccttctttcttggaggctttaaaatgctggaagtctcagccacttagggattttgaggtttgtgtcacttctctgaggcccctccaagtggacttctggtagcccagttcatattttcttttcctttccttccatctgctactggggatggatttgtagcaggcatcagtgcttacacattaagaacctggcttcgg

SEQ ID NO: 106265 - DNA, 201 bp, Homo sapiens
cctgggaagggagataacatgggcgtcagggctttcagcgtggaaacgtaacgtccctcctttccagcctgggctccgggtgggggatgggaccagtcccygcctggagtgccttgcttgtacattctcttgtttcagggctgcctccatcaccgaggcaggacctggggcattcacatttcccagcattagctgacgtca

SEQ ID NO: 106266 - DNA, 201 bp, Homo sapiens
acgctgtgtagacaggctccctgtggcacctgcagttggaggacgctgtgtggacagggtccctgtggcacctgcagtcggaggacgctgtgtaggcaggstccctgtggcacctgcagtgtgaggacgctgtgtagacaggctccctgtggcacccgcagtgtggcatgcagcctctgtgaccgtgtcttctctggggtg

SEQ ID NO: 106267 - DNA, 201 bp, Homo sapiens
ccccactcagggtggatctactggggcctgggctggcttccagctgcccagctgtgatgaggaagattggtgccctcccaggcccccacctcggcagcggygtatttgccctcactgctctgcaaggggcccagtgtggccacagccccatgccccctgtttgtcccacagcaacatgacaggcctcactaggactcctcc

SEQ ID NO: 106268 - DNA, 201 bp, Homo sapiens
agttttgcttttgctgtgttttgttatccttggatgtgaccttctccaaaataccccttttggttcacgtgtgtgtgtgtgtgtgtgtgtgtgtgtgtgtkaagcagcgtcgagaacatactgtgtgcccatatgctccttcccttgggtttgctttatcatggtttaccttggttttgctttatttcagttctttgattt

SEQ ID NO: 106269 - DNA, 201 bp, Homo sapiens
ctgcaggagtcagcgcactgtggggacccagggaggagctggcgcccacaccagctgactcccacaccagcggtcagagaacattttcttttaaggtttcygaagtgctgcaataaagaaattaaatcatcttttcactgtaggactttttagaggctttaatgtgggaatttgctttacaaaccttccagagaggaaaca

SEQ ID NO: 106270 - DNA, 201 bp, Homo sapiens
gtgtgtgcactgtgatcctggggtgtgggggtgtgccttgcgtttcctgcagttgttcttgggttgctttgtgctcacacactggggcctgtggtcagcaygggccaggtcggccttcgcaggagcgtggcctttcggggcttgctcgatgtgcaggaaggaccccgtctgcaggtctgctgccggctggcgcatgctgtc

SEQ ID NO: 106271 - DNA, 201 bp, Homo sapiens
ggaaaaatagtttggttgctctagcagcttctaattttgccccttaggtatcattaaagggttacaagaataatttttcttgtttttctctccaacactgrtaattttttgttaccaaagagaaagtccgtgttacgttgggtattttagctcagcatttgcagggttgcagtttgaaaaacctgaggtcctgcctggaca

SEQ ID NO: 106272 - DNA, 201 bp, Homo sapiens
cagcttctaattttgccccttaggtatcattaaagggttacaagaataatttttcttgtttttctctccaacactgataattttttgttaccaaagagaargtccgtgttacgttgggtattttagctcagcatttgcagggttgcagtttgaaaaacctgaggtcctgcctggacaaggaccgctgttaataacggagct

SEQ ID NO: 106273 - DNA, 201 bp, Homo sapiens
taattttgccccttaggtatcattaaagggttacaagaataatttttcttgtttttctctccaacactgataattttttgttaccaaagagaaagtccgtrttacgttgggtattttagctcagcatttgcagggttgcagtttgaaaaacctgaggtcctgcctggacaaggaccgctgttaataacggagctagtgaag

SEQ ID NO: 106274 - DNA, 201 bp, Homo sapiens
tgaaaggtaacagttctaggctcctgtgtgcactggaaatacgtaactcgcaggttctgggaaagggatttctcggaacttaaaccgggaagtgatttgawaacttccagtatcactccctttatcctctcagaaaagtatttttttaagccactgaatgaatcacccttgagttgcacaagaaggaaacattgcatagaa

SEQ ID NO: 106275 - DNA, 201 bp, Homo sapiens
gcgaggtgtggccagggaggaagggccctagaaaggcaatggtcacgggagggactatcttcctgccccttagccttgtgccagctggctgcactgtagamgcaggagggccgtgtgggcccagccctggctccgcagtacgggagctccctttagggacagcctcaccatgcccagctgccttccggtgcctctgcgcag

SEQ ID NO: 106276 - DNA, 201 bp, Homo sapiens
agcacacatcctggtctagcaccagcaagaggtgcctcctacctggggccctgcaaaggggcaggcttggctgaggtgggaagcccgacctgggccccacygcgtcgctgtccgaaggaggctgggccacatccgtgctgggcagggtcttggtctcagccccaactggggtccctgtccctctaccctgggaggtctgag

SEQ ID NO: 106277 - DNA, 201 bp, Homo sapiens
actggacgtgggatcacagaggtcagggggacccactggacgtgggagcacagaggtcgggggagccactggacgtgggagcacagaggtcgggggagccmctggacgtgggagcacagaggtcgggggagccactggacgtgggatcacagaggtcgggggagcccctggacgtgggatcacagaggtcggggcagccac

SEQ ID NO: 106278 - DNA, 201 bp, Homo sapiens
gtcactcgtaaccagcctggtctcacacctgctcaggtagctgggccttcaggccccacagagcccctgcgcaccggccttgggcacctctgcctggtgcyaggtgccggagaggggctggactgacacagggagcctgtgcccggccacgtggacactgcagctccctttgcgctgagggcgtttcctcggcttctccaa

SEQ ID NO: 106279 - DNA, 201 bp, Homo sapiens
cacagaggtcagggggagccactggacgtgggatcacagaggtcagggggacccactggacgtgggagcacagaggtcgggggagccactggacgtgggakcacagaggtcgggggagccactggacgtgggagcacagaggtcgggggagccactggacgtgggatcacagaggtcgggggagcccctggacgtgggatc

SEQ ID NO: 106280 - DNA, 201 bp, Homo sapiens
ggccaagctcaagaggaatccgggggacctgtcactcgtaaccagcctggtctcacacctgctcaggtagctgggccttcaggccccacagagcccctgcscaccggccttgggcacctctgcctggtgccaggtgccggagaggggctggactgacacagggagcctgtgcccggccacgtggacactgcagctcccttt

SEQ ID NO: 106281 - DNA, 201 bp, Homo sapiens
ggtccaggtcatcactggggacctgagcccagagcagtcacccgagggtctcaggaatcatcgttctgtgcatggcgacacacacatgctctgaggtgcayagaaggctgccgggcgtggacagcatctgccagggcggtgtgggcagatcaggatggagggctcttctgcaagaaaggcacccctggcaccttgagatgc

SEQ ID NO: 106282 - DNA, 201 bp, Homo sapiens
ggagccactggacgtgggagcacagaggtcgggggagccactggacgtgggagcacagaggtcgggggagccactggacgtgggatcacagaggtcggggsagcccctggacgtgggatcacagaggtcggggcagccactggacgtaggatcacacaggtcagggggagctaacagttgccccagctccctagggagccg

SEQ ID NO: 106283 - DNA, 201 bp, Homo sapiens
agcagtaagtaacagtggtagagccgactgtgaccagccttcttgtccctcccccagaagctggggaaactgtgccccccgacacctccaagatgctgaarctagcacagcagtgtctggagagggcccagtcgacggccgccaagcttggtgggtctcctgcagtaggcggctctcctggggcatcccccaagcccgcat

SEQ ID NO: 106284 - DNA, 201 bp, Homo sapiens
ccgccctgacagccccacctgcccaccctcagcacccaggtcctgaactgggagggcagacactaccttctggagggccgggggtgtccttctgttcgttyagatgacaccggctgcccctgccatccatgcaggtacctgatcggagaggagggctactgcctcacatcactgcagagtgccctgagctacgtggagctg

SEQ ID NO: 106285 - DNA, 201 bp, Homo sapiens
aggccagggtatggcatgtttatgatttagccttggaattcattccacatcagttctattccatgggttgaggcaggtgcaaaaacccacccaggcctatkggaggagagctaggcccactgctggatggatggactggtgttgccaaattcagtgaggacaaaggcagaacagttacctccaccctcctccgcatcagaa

SEQ ID NO: 106286 - DNA, 201 bp, Homo sapiens
catctcctctgtgggatgtggcccaccgcttgacccctggttacccatggcttgcagggaaaacacgcctgaagccaaccatgcctgcagctgctcccatyccccagcctgccggccgacaccgccgtgtatactccgatgaaggaggaaagctctctccttttctgccacccgagatcttccagaagcttcagggggcag

SEQ ID NO: 106287 - DNA, 201 bp, Homo sapiens
ggggacccactggacgtgggagcacagaggtcgggggagccactggacgtgggagcacagaggtcgggggagccactggacgtgggagcacagaggtcggrggagccactggacgtgggatcacagaggtcgggggagcccctggacgtgggatcacagaggtcggggcagccactggacgtaggatcacacaggtcaggg

SEQ ID NO: 106288 - DNA, 201 bp, Homo sapiens
tgctgaagctagcacagcagtgtctggagagggcccagtcgacggccgccaagcttggtgggtctcctgcagtaggcggctctcctggggcatcccccaarcccgcatctcctctgtgggatgtggcccaccgcttgacccctggttacccatggcttgcagggaaaacacgcctgaagccaaccatgcctgcagctgctc

SEQ ID NO: 106289 - DNA, 201 bp, Homo sapiens
tgcttcctccatgctggacaaattgtgggcatcctagcccttgatgggtgccaggcttcggcgggggtctcttgtatccttccagcctgaccatttgtagyaggtggaccagcccacactcagtgtgatatagtggcaggaagggaccagcgttgtggataagaagatggagactggggtgtggcaagacactggctccag

SEQ ID NO: 106290 - DNA, 201 bp, Homo sapiens
tttgagggagaggacagcctgggagtggagcctcaggtgaggactgaggatggcagtggccagaccacccaggatgggagcagtaaacggcctcggggtgygtcctgaaggtggaacagagcagacttgcaggaggcagatggggcaggagcaaactggcaaggagaggaatagcaagttccgcaatgaacacattaagtt

SEQ ID NO: 106291 - DNA, 201 bp, Homo sapiens
tcacagaggtcagggggacccactggacgtgggagcacagaggtcgggggagccactggacgtgggagcacagaggtcgggggagccactggacgtgggakcacagaggtcgggggagccactggacgtgggatcacagaggtcgggggagcccctggacgtgggatcacagaggtcggggcagccactggacgtaggatc

SEQ ID NO: 106292 - DNA, 201 bp, Homo sapiens
cactggacgtgggagcacagaggtcgggggagccactggacgtgggagcacagaggtcgggggagccactggacgtgggagcacagaggtcgggggagccmctggacgtgggatcacagaggtcgggggagcccctggacgtgggatcacagaggtcggggcagccactggacgtaggatcacacaggtcagggggagcta

SEQ ID NO: 106293 - DNA, 201 bp, Homo sapiens
tgggagcacagaggtcgggggagccactggacgtgggagcacagaggtcgggggagccactggacgtgggagcacagaggtcgggggagccactggacgtrggatcacagaggtcgggggagcccctggacgtgggatcacagaggtcggggcagccactggacgtaggatcacacaggtcagggggagctaacagttgcc

SEQ ID NO: 106294 - DNA, 201 bp, Homo sapiens
agaggtcgggggagccactggacgtgggagcacagaggtcgggggagccactggacgtgggagcacagaggtcgggggagccactggacgtgggatcacasaggtcgggggagcccctggacgtgggatcacagaggtcggggcagccactggacgtaggatcacacaggtcagggggagctaacagttgccccagctccc

SEQ ID NO: 106295 - DNA, 201 bp, Homo sapiens
cactggacgtgggagcacagaggtcgggggagccactggacgtgggagcacagaggtcgggggagccactggacgtgggatcacagaggtcgggggagccmctggacgtgggatcacagaggtcggggcagccactggacgtaggatcacacaggtcagggggagctaacagttgccccagctccctagggagccggtgag

SEQ ID NO: 106296 - DNA, 201 bp, Homo sapiens
accggctgcccctgccatccatgcaggtacctgatcggagaggagggctactgcctcacatcactgcagagtgccctgagctacgtggagctgctgccccrgggaggcctggccaagtagtacagctagagcccagggtccctgcagggcctggcctcgcctcccagggctgtctctcctacacctggagccatgggatct

SEQ ID NO: 106297 - DNA, 201 bp, Homo sapiens
ctgagggtggcccctggagggacccccgcccggggagggcgaggacggggccggctcgggctggagacttgggagcgggcgccagccgggatcccgggccrcggttcccgggcgaggacgggggcggggcgcagccgggcgtgcagtgaccttggacagctcagatcctgcggaccttggctttccactccgctcgctgag

SEQ ID NO: 106298 - DNA, 201 bp, Homo sapiens
ctgcccgcccctggggccgctgcggggagggcctggccccggcacccaccgcgtgcctttctccccaggaggttttgcagccaagtcgccctgaccccggaggaacgggagcagcgggccctttacgccgccatcctggagtacgaacaggaccatgtgcgtcccccacgggcccaggctttgtaggaggagcccagcgag

SEQ ID NO: 106299 - DNA, 201 bp, Homo sapiens
agaatggtggagatgagctgtgtcttgaacaaatcctggcgtgggagcccctgctggcttggcatcggggccacacctgcagcctgcacactgtgggggcygggaacgtcctggctcagctgtatccctggcgctgagacccggcagacatgttcaagtgctgctgtttgctgtgcagctttgccctcgctgagcctgcag

SEQ ID NO: 106300 - DNA, 201 bp, Homo sapiens
cctcctctagcccagccgccctgacagccccacctgcccaccctcagcacccaggtcctgaactgggagggcagacactaccttctggagggccgggggtrtccttctgttcgttcagatgacaccggctgcccctgccatccatgcaggtacctgatcggagaggagggctactgcctcacatcactgcagagtgccctg

SEQ ID NO: 106301 - DNA, 201 bp, Homo sapiens
cggacccaccgtgctttccttcaaggccccctgtcccgtaggactggccgaagcactggaaggccaagctcaagaggaatccgggggacctgtcactcgtraccagcctggtctcacacctgctcaggtagctgggccttcaggccccacagagcccctgcgcaccggccttgggcacctctgcctggtgccaggtgccgg

SEQ ID NO: 106302 - DNA, 201 bp, Homo sapiens
agacagcaggagctgggggctgtcccctgagcagcatctgcctggggaggggataaggatccagtgccatccctggctctaccgtccaaggacgagcacayagtgggtgggaaaggcctcctctagcccagccgccctgacagccccacctgcccaccctcagcacccaggtcctgaactgggagggcagacactaccttc

SEQ ID NO: 106303 - DNA, 201 bp, Homo sapiens; identical to SEQ ID NO: 17136

SEQ ID NO: 106304 - DNA, 201 bp, Homo sapiens
gcccctgctctggcggggcctggcttcccagtccccttgtttctgcaatgtggcttcagggcagggtggccaggcgtcaggctctgactttcctccttgtyctccattgtccctgacagtgggaaggtacgagggaacaaagctttcaaggtggagtggctgttgggaactgtataaaggagacaggacacttcttccttt

SEQ ID NO: 106305 - DNA, 201 bp, Homo sapiens
aggacagtgtcctctgaaggtggggcagggccccgcagctggccgcatgtccatgcacccaccccaccaagccgtgcaggcactgggggctggatgtgatmagatccactgcagagagtcaacagagatgtcagatccacggctggtcggcacccagcccaccctccaccgggggaggactcacccagacacgctccctcc

SEQ ID NO: 106306 - DNA, 201 bp, Homo sapiens
ccaactggggtccctgtccctctaccctgggaggtctgaggggcatccccagggttccaccctcggtgctggggcagccgtggcgccgtctctttgtcccrtggccacttgactgccagcgcactgtccagcaagaaggccttgcagctggagctggtatccatggtgtagtcgtggccctggtcgcagccccacacgacc

SEQ ID NO: 106307 - DNA, 201 bp, Homo sapiens; identical to SEQ ID NO: 17137

SEQ ID NO: 106308 - DNA, 201 bp, Homo sapiens; identical to SEQ ID NO: 17141

SEQ ID NO: 106309 - DNA, 201 bp, Homo sapiens
cgagaccatcctggccaacaaggtgaaaccccatctctactaaaaatacaaaaaattagctgggcgtggtggcgggcacctatagtcccagctactcaggwggctgaggcaggagaatcccttgaacccaggaggcagaggttgcagtgagttgagattgcgccactgcattccagcctgggcgacagagcaagactccat

SEQ ID NO: 106310 - DNA, 201 bp, Homo sapiens
gccactggacatagagcacagaggtcagggggagccactggacgtgggatcacagaggtcagggggacccactggacgtgggagcacagaggtcgggggasccactggacgtgggagcacagaggtcgggggagccactggacgtgggagcacagaggtcgggggagccactggacgtgggatcacagaggtcgggggagc

SEQ ID NO: 106311 - DNA, 201 bp, Homo sapiens
agccgcaggcagaagccccaagctctgctccttctcacaccacaccccagccaccacctagagcagtggagacattcactttctgctgaaaaccctgcccsactgaggagcacacatcctggtctagcaccagcaagaggtgcctcctacctggggccctgcaaaggggcaggcttggctgaggtgggaagcccgacctgg

SEQ ID NO: 106312 - DNA, 201 bp, Homo sapiens
cactccgctcgctgagccggtgcatcacagcctgggctccacctgtagaggagatgtagcaggagggtccgccaggccaccttccaaaatccgagtgacgrgcaggtccgtgcgttcgtgcatttttctgggcagagatggtagatttaatccggttgccacaggggacggcatgcagagaaggccacatacctgctcatt

SEQ ID NO: 106313 - DNA, 201 bp, Homo sapiens
gttgcctcattttatctcagcagtaagtaacagtggtagagccgactgtgaccagccttcttgtccctcccccagaagctggggaaactgtgccccccgayacctccaagatgctgaagctagcacagcagtgtctggagagggcccagtcgacggccgccaagcttggtgggtctcctgcagtaggcggctctcctgggg

SEQ ID NO: 106314 - DNA, 201 bp, Homo sapiens
ttccagacagcacctggggtacataaaagatatttccggaaaataaaaaatctcatttcagcatttcagaagccagatcaaggcattgtaatacctctgcmgtatccagttgagaagaagtcctcagctagaagtacacaaggtactacaggtatgatttcctcttaatttttgacagggtttggaagctcagagttatga

SEQ ID NO: 106315 - DNA, 201 bp, Homo sapiens
tgaataggaagtgatatactcaatatctccatcttcttcttaagaaatgccaaaatgtttctcttcgatttactactgattagtagttttgttttttttttctttcctccctcaagctttaggagttgtaaaaagaataataatagttcaaggcagtattaaaaccacagctgtaagtaataaaaagtgcatttcctgaat

SEQ ID NO: 106316 - DNA, 201 bp, Homo sapiens
caggccatggacgcagtggctgtgtatcatggcaaaatcagcagggaaaccggcgagaagctcctgcttgccactgggctggatggcagctatttgctgasggacagcgagagcgtgccaggcgtgtactgcctatgtgtgctgtgagtatgatacggtggacatgggcctgctgagggtgtgggcggtgggcaacagcag

SEQ ID NO: 106317 - DNA, 201 bp, Homo sapiens
gcacctggggtacataaaagatatttccggaaaataaaaaatctcatttcagcatttcagaagccagatcaaggcattgtaatacctctgcagtatccagktgagaagaagtcctcagctagaagtacacaaggtactacaggtatgatttcctcttaatttttgacagggtttggaagctcagagttatgagtcaacctg

SEQ ID NO: 106318 - DNA, 201 bp, Homo sapiens
aaagataaaaaagttgaagaattatgtcaaacttttagtgactatgtgaaatcttagaaagcatatcaaaagtaggtaaaataattaaatgaacaattatktaccaaatgataccaatatgagtattggtatcgtgggagattaaaaaacatgatgcttattttctaagagactacaatatacttgggaagttataacttg

SEQ ID NO: 106319 - DNA, 201 bp, Homo sapiens
cttcctgtagcaccattatattttggaagcacatagcttgtctggtttcatagtttcacagctgaaaataaattttgcctcaagatgaataatactgctaktctcacccacatctaattttatttagatgagactttggactttagattttaagttgatgctagaatgagttaatttcttttgaggccgttgggatggtat

SEQ ID NO: 106320 - DNA, 201 bp, Homo sapiens
atatatacatgatcatgagatattttccctaaatggttattccaatttacatgctcacctgtaatgcatcagtgtccatttcaccacaccctcactagaartgggtattgtagttaagaaaattttcccttgacatttggcctgttattctttattttatatttacactctatctctttattttccacattttatattcct

SEQ ID NO: 106321 - DNA, 201 bp, Homo sapiens; identical to SEQ ID NO: 17163

SEQ ID NO: 106322 - DNA, 201 bp, Homo sapiens
gagtatgaggactgaactagccgtgcactgtgtgcatcataacagccaatttttaatttcctgtgtagcattttatattgtgggatgatggcagggaggaygggttgttggtttttcttttgttgttgttcctcaggctttttattaatgacctgtaggatctgtttttttgtttttgtttttgttttttcctgtttaact

SEQ ID NO: 106323 - DNA, 201 bp, Homo sapiens
caccaggccatggacgcagtggctgtgtatcatggcaaaatcagcagggaaaccggcgagaagctcctgcttgccactgggctggatggcagctatttgcygagggacagcgagagcgtgccaggcgtgtactgcctatgtgtgctgtgagtatgatacggtggacatgggcctgctgagggtgtgggcggtgggcaacag

SEQ ID NO: 106324 - DNA, 201 bp, Homo sapiens
tcctcttttctctacgcttcaagctcagtgtgaagttttgaatttgctaaagtcaggtttagtactggtgtaggattagagtgaagatgtcagtatttttyatcaacactgcactagtgggctggctcggctggctcagctgtcagcttgcttgtaagatgacaatgaggtactggatgtgaaagttgtactattacctta

SEQ ID NO: 106325 - DNA, 201 bp, Homo sapiens
gataggtctatgatcttgggcaggttacttgacttttctgtgagccagtttcttcatttgtaaacggagcctaagaatcctcccttatgcacaaggctcawtttgaaaagtaaataagataacacacataaagaagctgtttgccacaaggcctggcacacagtgagccctcaaaaaagtgaactcctgaaaattgccaca

SEQ ID NO: 106326 - DNA, 201 bp, Homo sapiens
ggccatggacgcagtggctgtgtatcatggcaaaatcagcagggaaaccggcgagaagctcctgcttgccactgggctggatggcagctatttgctgaggkacagcgagagcgtgccaggcgtgtactgcctatgtgtgctgtgagtatgatacggtggacatgggcctgctgagggtgtgggcggtgggcaacagcagct

SEQ ID NO: 106327 - DNA, 201 bp, Homo sapiens
cacaaatgttacttctcttagcatccctagcacattttgtaggtctttttgtatcattatgagataggtaaataatttgcttggccttttattttccagayagcacctggggtacataaaagatatttccggaaaataaaaaatctcatttcagcatttcagaagccagatcaaggcattgtaatacctctgcagtatcca

SEQ ID NO: 106328 - DNA, 201 bp, Homo sapiens
actattacttcatttataatatattatagggtaatatagtaatacagtcatgtgcaatatagcaacattttccttaacgacgaacagcatatacaatggtsgtcccataagattataatggagctgaaaaattcctaccacctactgatgttgtagccattgtaatgccacagcacaatgaattacttatgtatttgtgat

SEQ ID NO: 106329 - DNA, 201 bp, Homo sapiens; identical to SEQ ID NO: 17161

SEQ ID NO: 106330 - DNA, 201 bp, Homo sapiens; identical to SEQ ID NO: 17162

SEQ ID NO: 106331 - DNA, 201 bp, Homo sapiens
agacagcacctggggtacataaaagatatttccggaaaataaaaaatctcatttcagcatttcagaagccagatcaaggcattgtaatacctctgcagtawccagttgagaagaagtcctcagctagaagtacacaaggtactacaggtatgatttcctcttaatttttgacagggtttggaagctcagagttatgagtca

SEQ ID NO: 106332 - DNA, 201 bp, Homo sapiens
aggtagcatgtgaattccaaattatacattgtcaagttttcatacatttggctatgttgtatatattatatatatgtagtctatatattatagatcttctmgataaattgacagtaaaggacacacttattttatacattttttgggttaaaaataaatcatatacttatttatatggtaaaagtgttttgttgcaagtta

SEQ ID NO: 106333 - DNA, 201 bp, Homo sapiens
attgttcttttggaatctttcagtaatggaagtttattctttcacaggtatcacggttacatttatacataccgagtgtcccagacagaaacaggttcttrgagtgctgaggtatagttgtatttatttttgcttctgggggtgtcaaggaggtatttgaaatttaggctggttttataaaagagcaaattatacattatt

SEQ ID NO: 106334 - DNA, 201 bp, Homo sapiens
agggaaattcagccaaccaaagtaagctcttctggaatgttgtttttccttcttccttatgttttcaaatatttcaacaagttacacaaatgttacttctmttagcatccctagcacattttgtaggtctttttgtatcattatgagataggtaaataatttgcttggccttttattttccagacagcacctggggtacat

SEQ ID NO: 106335 - DNA, 201 bp, Homo sapiens
caagagtccaccaggccatggacgcagtggctgtgtatcatggcaaaatcagcagggaaaccggcgagaagctcctgcttgccactgggctggatggcagstatttgctgagggacagcgagagcgtgccaggcgtgtactgcctatgtgtgctgtgagtatgatacggtggacatgggcctgctgagggtgtgggcggtg

SEQ ID NO: 106336 - DNA, 201 bp, Homo sapiens
cttgagcatttcaaggttataggatgcctggtcttcctgttaggatgctatacattcaactttgacacctatgttttctcttgcagtaaatgggataccaytattttgtagtttgcaactaggggggaagttaaactacccagtttggacattttcctaatttggggtgattggccaaacttgtagtaaaaggctgaattc

SEQ ID NO: 106337 - DNA, 201 bp, Homo sapiens
aacgaattgttctttcaataatttaaactgcagaactgcaagtcaatgaaggcattctttctattcagctgaataggaagtgatatactcaatatctccaycttcttcttaagaaatgccaaaatgtttctcttcgatttactactgattagtagttttgttttttttttctttcctccctcaagctttaggagttgtaaa

SEQ ID NO: 106338 - DNA, 201 bp, Homo sapiens
gtaaaataattaaatgaacaattatgtaccaaatgataccaatatgagtattggtatcgtgggagattaaaaaacatgatgcttattttctaagagactamaatatacttgggaagttataacttgaaattaaacagttatgagtggaagaaactaggctttgtcaacaggtgaatctgggttccaggtctggtctcccct

SEQ ID NO: 106339 - DNA, 201 bp, Homo sapiens
tatgagataggtaaataatttgcttggccttttattttccagacagcacctggggtacataaaagatatttccggaaaataaaaaatctcatttcagcatytcagaagccagatcaaggcattgtaatacctctgcagtatccagttgagaagaagtcctcagctagaagtacacaaggtactacaggtatgatttcctct

SEQ ID NO: 106340 - DNA, 201 bp, Homo sapiens
ctgcccaagagtccaccaggccatggacgcagtggctgtgtatcatggcaaaatcagcagggaaaccggcgagaagctcctgcttgccactgggctggatrgcagctatttgctgagggacagcgagagcgtgccaggcgtgtactgcctatgtgtgctgtgagtatgatacggtggacatgggcctgctgagggtgtggg

SEQ ID NO: 106341 - DNA, 201 bp, Homo sapiens
acagcacctggggtacataaaagatatttccggaaaataaaaaatctcatttcagcatttcagaagccagatcaaggcattgtaatacctctgcagtatcyagttgagaagaagtcctcagctagaagtacacaaggtactacaggtatgatttcctcttaatttttgacagggtttggaagctcagagttatgagtcaac

SEQ ID NO: 106342 - DNA, 201 bp, Homo sapiens
agtttcagtttccatcttgggtctctgagctgagcagagtggcaccaggctgagttaagtgggactgccctgggcagacctacctactagagcaggtgagwcctgggctgggcagggggcaggtgtagcctgtgttactcccgcctcccccttttgggcagagcagggtcctgatgggttctgagggagtcctgccccacc

SEQ ID NO: 106343 - DNA, 201 bp, Homo sapiens
gcgggtcatcggtggcatctgcttccgcatgtttcccacccagggcttcacggagattgtcttctgtgctgtcacctcgaatgagcaggtcaaggtgagcrcggctccccggccccagccccagtccacggcccactcctgagtttgggccagttcggagcagcaggatgtgtggcatgcagcagcccgttgctcttctct

SEQ ID NO: 106344 - DNA, 201 bp, Homo sapiens
agttgcagggtagtgggggcacgatgcttggggtgtggactggcattcttagagacattctcccacttcccactttgcaggagagacaggctggaagccaytggggaaggagaaggggtgagtgtcaaaggagccgggttgggggtggggcagagggacttggagcctcagacttggtgtctctcgccccaggaaggagct

SEQ ID NO: 106345 - DNA, 201 bp, Homo sapiens; identical to SEQ ID NO: 17222

SEQ ID NO: 106346 - DNA, 201 bp, Homo sapiens
ctctctctctcagcttcagtcagtgcagcggttgttcccagcacccccatcttcagccccagcatgggtgggggcagcaacagctccctgagtctggattstgcaggggccgagcctatgccaggtggatacttgacccctgacctctgaccctcattcactccttcccaaaccttttttactgatcctgagcaaccttgc

SEQ ID NO: 106347 - DNA, 201 bp, Homo sapiens
tgactggactggacaaggactaggtgtcaggtccataactataccaaatgttacacttggggtcaggtttgagcccatgctgtggtctggagggagggagkgagtgagcagatagctgaaagaacccttggggggccataggcaggtgaaatgtagttttattcagcagcggctctctcacactgtccacctttatctggg

SEQ ID NO: 106348 - DNA, 201 bp, Homo sapiens
caccatgcctggccggttctattattcttttactggtttattatctgcctctccaactccaatctgagttcctttgtatccccagtgcctagaacaagacrggcacagagagggcgagcaatatttgagtagacgaatgcccacattctcctgtcctcagctgggatccatcctgccccaaatctttgaccattgtcccca

SEQ ID NO: 106349 - DNA, 201 bp, Homo sapiens
tctgagttcctttgtatccccagtgcctagaacaagacgggcacagagagggcgagcaatatttgagtagacgaatgcccacattctcctgtcctcagctsggatccatcctgccccaaatctttgaccattgtccccacagaccctccctttccagtaaagtcctctgttgcccccagctctgtgccaacttggacacgt

SEQ ID NO: 106350 - DNA, 201 bp, Homo sapiens
accacctggagatgcctgagttgagccggaaatttgggacgcaaatgtatgagcagcaggtggtgaagctgagtgaggctggtgagaggggcagcccttcwggcggaggcgaggatgtgggagtggtcaggggcggggcctgccggggcggaggcctttggggcggggcctatccaccccaggggtggagtcgagtgggac

SEQ ID NO: 106351 - DNA, 201 bp, Homo sapiens
agtaattctcacccttcagcttcccaagtagctaggcgtacaggtgggcaccaccactcccagctaattaaaaaaaattttttttgaagaggcggagtctygctttgttgcccaggctgatctctaactcctgggctcaagtgatcctcctgcctctgcctcccaaagtgctgggattacaggtgtgagccactgtgcccg

SEQ ID NO: 106352 - DNA, 201 bp, Homo sapiens
agaaggccttgggaacaggccttgtccaaggctctttatttatctttgccatgagatactttatgtatctggaagagctgcattacagcctttctggaacsaggcagaggggacaagataagtccacgtgcagaagataagcccagaactaggacttatatcatcagttcccctgaggcagggccaccaccatcctgcctt

SEQ ID NO: 106353 - DNA, 201 bp, Homo sapiens
cagcatggtgaagagttcaggcgcatgctggatggacgctggaccgtgacaaccctgagtggggacatgggaccacgtgctggctttggccacctggcccrgtgccatgacctgctcatctgcacagcagagcttctgcagatggcactgaccagccccgaggaggaggagcacgtggagctcactggtgagggccatggc

SEQ ID NO: 106354 - DNA, 201 bp, Homo sapiens
ttcaggcatctcccagtccccaccagaactccaaagctgctgtggccatcgctaagctcacctgtctttccaccctggctcagtacccagccatgtcctgygggtcaccttaccgcctccctacccctggccccagattcagctctcttttcccagctcattctccacccccaggtgcacctggtgacccagcatggtgaa

SEQ ID NO: 106355 - DNA, 201 bp, Homo sapiens; identical to SEQ ID NO: 17220

SEQ ID NO: 106356 - DNA, 201 bp, Homo sapiens
cctcactaggacacgggagacagtcccaccccatggcctccagtctgaagagggaggtccagcccctccctaagggagcccacagtctgtgacatctcagrtgggaggaaaaggccctgtattcagggaattccaacttgaggagagaagcccagtctgaggccagagacccagaccctaccctctctgtctcacctccag

SEQ ID NO: 106357 - DNA, 201 bp, Homo sapiens
ctctgggcacaagcgggttcctggctccccactgcccaccttcaaggcgaccggctgtcccttgcaggggttagtagcattattctctctctgggcgagcmagcgtgccctgccgtgccgagctgaaccaagctccgtgaacagcgtcagcagggcagttttaccttctactgacagtagagtccagtatgaacttacaca

SEQ ID NO: 106358 - DNA, 201 bp, Homo sapiens
ccaggtacaaatgatcttagttctttgggaaccttttgtcccccaaggaacgttctcttaggccccagccatgcctggtgtctcctcccaccccagatccrggatctgcagcaggcagccttgaccaagcgggcggcccaggcagcccagcgggagaaccagcggcagcagttcccagtggagcacgtgcagctactctgc

SEQ ID NO: 106359 - DNA, 201 bp, Homo sapiens
atccgctccccactttgccttcagttagtatactgcctgccagcaacgtgccttttacaggtcaataaaattagcgactgggggcagagggagggggcagkggctcaggggtgctaagctcaaaggccttgaatgtggctagactcacggagtcaggacgcctgtcattccagggctaaacagtgacagctgggggacctg

SEQ ID NO: 106360 - DNA, 201 bp, Homo sapiens
acatctcaggtgggaggaaaaggccctgtattcagggaattccaacttgaggagagaagcccagtctgaggccagagacccagaccctaccctctctgtcycacctccaggtctggggtctgcagatgatctacaagtcagtgaagctgccagtgctcaaagtccgcagcatgctgctggagacccctcaggggcggatcc

SEQ ID NO: 106361 - DNA, 201 bp, Homo sapiens
aatccaaggccatgggtaggactgatttatttcctcatttgtgaaggtttttgcttagttgttaaaattaattaacattgttgactttttttttttttttwatagtcggggtcttgctctgtcacccaggctggaggacagttgtgcaatcatagctcactgcaacctcgacctaatgggctcaagtaattctcacccttc

SEQ ID NO: 106362 - DNA, 201 bp, Homo sapiens
gggctcagaaagtaccagtgtcccctcatgtgtgggacagcaaagccgatctgcagggagtgagagcgagcaggggaggggggagtggaagggtttttttktttttttttttagctaagcttggctagaaagagtgcccttcactgcatgcccccctaccagggggaacctgccccctgctggttcctggatctctggacc

SEQ ID NO: 106363 - DNA, 201 bp, Homo sapiens
tggagcctgtgaagaagtcggaggcccctgactactacgaggtcatccgcttccccattggtgaggaccttccattccatccccttccctcctcttctgtycccacacctgctcctgccctcactgcgccctgcagccccagggggcccaccctggtggacagccctgccgtggtcttcagcctcttaaagctgtgctccg

SEQ ID NO: 106364 - DNA, 201 bp, Homo sapiens
catcaaggtgcccaagagccgctacctgggctacatcaaggactacgagggagcgacgctgatggagtgtgagctgaatccccgcatcccctacacggagytgtcccacatcatcaagaagcagaaagaggtggtgtgcacacatgcgcatctgtgggatttttcatgaatgggcatgcagagggcgagcacacgtgtgta

SEQ ID NO: 106365 - DNA, 201 bp, Homo sapiens
tcctcccctcagtttcagtttccatttctgatttctgctctctgcgctgagcacagcggcaccaggctgagctaagcagggccgccttgggcaggcctacstggtggtgcaggcgagacccaggctgggcaaggcgcaggtgtagcctgtgttactcccaccccccccccacccccaccttttggccacagcaggcttctg

SEQ ID NO: 106366 - DNA, 201 bp, Homo sapiens
tccctctgggcacaagcgggttcctggctccccactgcccaccttcaaggcgaccggctgtcccttgcaggggttagtagcattattctctctctgggcgmgcaagcgtgccctgccgtgccgagctgaaccaagctccgtgaacagcgtcagcagggcagttttaccttctactgacagtagagtccagtatgaacttac

SEQ ID NO: 106367 - DNA, 201 bp, Homo sapiens
gtttcacccaggctggtctctaactcctgaccttaagtgattcacccacctcggcctcccaaagtgctgggattacaggcatgagccaccgcgcccagccraactaatcattattacagtagccctatgctgatagttttggcttctgtcctttgttacaacagacccactcgtagggtctctggctctgtgtgtcgcata

SEQ ID NO: 106368 - DNA, 201 bp, Homo sapiens
ataggcaggtgaaatgtagttttattcagcagcggctctctcacactgtccacctttatctgggctgtctgctccggccctgtggctcctgctgcccccaygcctgcagctgctctccctggccggcaaggccagctctgtcagggtcagcagcttaactctttccctctgggcacaagcgggttcctggctccccactgc

SEQ ID NO: 106369 - DNA, 201 bp, Homo sapiens
tggctcctcccctcagtttcagtttccatttctgatttctgctctctgcgctgagcacagcggcaccaggctgagctaagcagggccgccttgggcaggcmtacgtggtggtgcaggcgagacccaggctgggcaaggcgcaggtgtagcctgtgttactcccaccccccccccacccccaccttttggccacagcaggct

SEQ ID NO: 106370 - DNA, 201 bp, Homo sapiens
gggcagggagaccctggggaaagagaaagttgactatccccaggcagaggggcaaggagctaggggagaggggcggacactgacctccccagtgctggagyctctcccagtctggaggtccttgggggcagaaggttgggcatgggggtccgtagggaaagaggtgggtgatgcagttcctcagggcacaggatcaggtct

SEQ ID NO: 106371 - DNA, 201 bp, Homo sapiens
ggccagtcccttccccagctgagcctcggtttactaatctgtgaaatggaaagaagtcttccctgcctggctcctcatcctgggaccagctgcaggttgtraagggaagaaggaattcttacatcattgtggggactacttgaaagctgatgggaggaagggctttgcaaacataggtcacagccttcccccctgtgccct

SEQ ID NO: 106372 - DNA, 201 bp, Homo sapiens
gtggtgcatcatgtcaccccagaactgctgcccccagctgcaggagcacagccaacagccttgcaaacagtacaacctctgccacaggcgcagccaggtaygcgggggcagggacacggcgagagcgggagccggtgtgaagttaggacacctaggcttgggccctgactctgccctcactagctctgtgacttcaggtca

SEQ ID NO: 106373 - DNA, 201 bp, Homo sapiens
ccgcctccctacccctggccccagattcagctctcttttcccagctcattctccacccccaggtgcacctggtgacccagcatggtgaagagttcaggcgyatgctggatggacgctggaccgtgacaaccctgagtggggacatgggaccacgtgctggctttggccacctggcccggtgccatgacctgctcatctgca

SEQ ID NO: 106374 - DNA, 201 bp, Homo sapiens
cccagattcagctctcttttcccagctcattctccacccccaggtgcacctggtgacccagcatggtgaagagttcaggcgcatgctggatggacgctggrccgtgacaaccctgagtggggacatgggaccacgtgctggctttggccacctggcccggtgccatgacctgctcatctgcacagcagagcttctgcagat

SEQ ID NO: 106375 - DNA, 201 bp, Homo sapiens
tgtctggcctgcctggctgagctaagcctcctgggtggaagagagctcacctgggccggaggccctggatcccactgagggacctgccaccggcttcagcycccccagtccctgccttctctctctctctcctcagcttcagcacccccgtccctgactctctctcctcagcttcagcccccgtccctgacttctctctct

SEQ ID NO: 106376 - DNA, 201 bp, Homo sapiens
aggctactctggcaggtggagtcagtctgagcctcctcatgtaccagcctctttctcctccctgccctccgcctgcagagggaccagcaagaagtgatccrgaagttccaagatggaaccctgaaccttctggtggccacgagtgtggcggaggaggggctggacatcccacattgcaatgtggtggtgcgttatgggctc

SEQ ID NO: 106377 - DNA, 201 bp, Homo sapiens
ggcaaggagctaggggagaggggcggacactgacctccccagtgctggagcctctcccagtctggaggtccttgggggcagaaggttgggcatgggggtcygtagggaaagaggtgggtgatgcagttcctcagggcacaggatcaggtctggggtcccttgcagaagactatggcttgagagtttttcctagactagagg

SEQ ID NO: 106378 - DNA, 201 bp, Homo sapiens
ttagcacaaacggttcttttctcttggttctttttcctggggcggggatgggagattcctaagtcggctcagctggctccttccctcagtttcagtttccrtcttgggtctctgagctgagcagagtggcaccaggctgagttaagtgggactgccctgggcagacctacctactagagcaggtgagtcctgggctgggca

SEQ ID NO: 106379 - DNA, 201 bp, Homo sapiens
catgcctggtgtctcctcccaccccagatccgggatctgcagcaggcagccttgaccaagcgggcggcccaggcagcccagcgggagaaccagcggcagcrgttcccagtggagcacgtgcagctactctgcatcaactgcatggtggctgtgggccatggcagcgacctgcggaaggtggagggcacccaccatgtcaat

SEQ ID NO: 106380 - DNA, 201 bp, Homo sapiens
caagatggaaccctgaaccttctggtggccacgagtgtggcggaggaggggctggacatcccacattgcaatgtggtggtgcgttatgggctcttgaccartgaaatctccatggtccaggtactcacatcctcctccactcagccgcccttataggatcctgtgtggggccccagcccaactcaggacaccccttgtctc

SEQ ID NO: 106381 - DNA, 201 bp, Homo sapiens
gagatggaccaagattgggagtgagggctgaaccagaagaggctactctggcaggtggagtcagtctgagcctcctcatgtaccagcctctttctcctccytgccctccgcctgcagagggaccagcaagaagtgatccagaagttccaagatggaaccctgaaccttctggtggccacgagtgtggcggaggaggggctg

SEQ ID NO: 106382 - DNA, 201 bp, Homo sapiens; identical to SEQ ID NO: 17233

SEQ ID NO: 106383 - DNA, 201 bp, Homo sapiens; identical to SEQ ID NO: 17234

SEQ ID NO: 106384 - DNA, 201 bp, Homo sapiens; identical to SEQ ID NO: 17235

SEQ ID NO: 106385 - DNA, 201 bp, Homo sapiens; identical to SEQ ID NO: 17236

SEQ ID NO: 106386 - DNA, 201 bp, Homo sapiens; identical to SEQ ID NO: 17237

SEQ ID NO: 106387 - DNA, 201 bp, Homo sapiens
ttatgcttttgaagaaatcagaattctcaattttttggtgattatttaaattttcctcatttttatatggtttcttttaaaatgtttcacttttttccctratttatattagaatggcaatgtatgcttaacacttgtatttttataagtttatgagtttttaatgttctgaaatgttattttttacttcaaatgtgttga

SEQ ID NO: 106388 - DNA, 201 bp, Homo sapiens
cattgatctgagccttcctactgtctcctgtttccactctatttctgccctaccatcctttcttctcctcccgggcacatacacgcgcgcacgcgcgcacrcacacacacacacacacacacacacacacaccaccattcaccaaaaggcagaccatgccaaaaataaggtttcagataggtatagaaggtataaacaagg

SEQ ID NO: 106389 - DNA, 201 bp, Homo sapiens
gagtgggcgagaccatgtgccgggttacgcggggagacagcgggctacgtgctctgaaaagagccagccaggggccccggctacccttctccggctcgctmttcctctgaagtcctgtggacttggagtctgaaaattcctcgagtggtagagatgcctcagctaggatgacagcgtggggacggccggcggcgtcccctg

SEQ ID NO: 106390 - DNA, 201 bp, Homo sapiens
cctttgactttctccataggattttataatagtcaggatgcttttgactgcaagtgatagaaaacgcatttcaaaatggcttaaacactaaggaaattcgytattttcttacgtaacaagacgttctgagatagggtggttggcagactggcttattcagcggctcagtgacctgtgaagacccagcttctttaccccttt

SEQ ID NO: 106391 - DNA, 201 bp, Homo sapiens
gcttgatgtgaatgggtttctagagtgaggaatttggaaggagctggcagttgccttgttttgttctggttgctttgcttgcagtggggaaggtgtggccggggagattcatggccctgctctaccgctcaccctccctccctcctgcctttggtatgcagtccaggcagctggagacttttcctaagctttgattttttg

SEQ ID NO: 106392 - DNA, 201 bp, Homo sapiens
ccgtgggccctcaggtgccgctgtgacctcttccccctagaagctgacacactgagtcctcttagcgctctcctgtgatggggaagccgggagagaatggrccctgaaaatcagaactagaacatagaatcctctctatcttcttcaacagaacccgcaaagctatcaagaaaatgcatcccaccatattgcacatctgaa

SEQ ID NO: 106393 - DNA, 201 bp, Homo sapiens
gattgccatgtcagaggtgttttgtcagcacaggtcataatgaaaagccacatgatgtttctgtttcctctgttatttttcagtctctctctctctctctcacacacacacacacacacccacacatgtgcacacacgtacacacacgcatgcacccacatgcaaacgcacacacatgatgatgactgtgctgtccagagc

SEQ ID NO: 106394 - DNA, 201 bp, Homo sapiens
tccaggctttcaccactttcctctgtctgtacggcatgatttggtatgcagaacactatggtcaccgagaaaaggtatggaaggagaggcaggcatggccrttgtttaaaataatcaccccgggctcggcaaattcgctcagagcacgtgcctgtaaggatatggcgaggtaaacactgaggttggggcctccagtcctgc

SEQ ID NO: 106395 - DNA, 201 bp, Homo sapiens
attgccatgtcagaggtgttttgtcagcacaggtcataatgaaaagccacatgatgtttctgtttcctctgttatttttcagtctctctctctctctctcacacacacacacacacacccacacatgtgcacacacgtacacacacgcatgcacccacatgcaaacgcacacacatgatgatgactgtgctgtccagagcc

SEQ ID NO: 106396 - DNA, 201 bp, Homo sapiens
taattatgttaatatgtgataaatactgtaaaagattgtgtgcataaggctaaaggatacttagagcaacagacatgctgggggttggtgaaggctccttrgtgatatgtgagcaggatttttaagggttgcagtgaaccgctggctttcccccagccccccaggccccagctaaaaacctggaggctgcttcctgtcctc

SEQ ID NO: 106397 - DNA, 201 bp, Homo sapiens
aaatccttcttagagtggtatttaaagattgttatctataaattttttaagggatatgcttaaagcaaaaataagaatgccagaaattatttatcagtctygggggagaaagtctgttttggaatttttttactctaagggagagaatgacggaggttgacttcttagcctatgatgatgatgataatgcagatgacggtt

SEQ ID NO: 106398 - DNA, 201 bp, Homo sapiens
gtctcgctttttataatgttaagattggtcatggctttgtgaggtcaacatcagttttaagatgcaccatcaattataggtatgactttttggaggagaaraaaagaaacctggggctgagcatggtggctcatgcctgtaatcacagcattttgggaggccatggtgggcagatcataaggtcaggagtttgagaccagc

SEQ ID NO: 106399 - DNA, 201 bp, Homo sapiens
tggagggaagcagtgaagcttcctccacacaagaagaaacttcaagaaggaagaaggctccccaccacgaaacctcccagatgaattatgaaatctgcttktgtgttcaggaccttcatagtgggagcattccatcacatctgcccacgtgtactctattctcaggctgcacttgtctgctggtagttacctaaacaagtc

SEQ ID NO: 106400 - DNA, 201 bp, Homo sapiens
ttgtcaagttcatatctattctttttatttaccggcagaatcctggaagcaagttgatttctagagtttcactaattattctcttttttattttaaatagsagtatgctgtgaactgccatgtgatcacctgggagaggattatcagccactttgatatttttgcatttggacatttctggggctgggccatgaaggcctt

SEQ ID NO: 106401 - DNA, 201 bp, Homo sapiens
taagttgacatagtaatacttacttgggggttattgtgaagtgaacaaagtagcattatctgtggggcctactgcgaggtctgccatggtgcccccaacaccccatgttgttgggccatgccctgggtcacggtggctgcccctgcacctgtcaatgtcactctcagcacctgcactctctggccttgatgccttgatcct

SEQ ID NO: 106402 - DNA, 201 bp, Homo sapiens
cacgatagttaaaaatggtacagtctgtgtagaggtcctgattgggggtgtggggagctgggaccagtctgagctgggaccagatcatgaggcagagggcmctgcctgaggctaggaggctgccagggctgagccagctgggatgaggagtttaggtgttattctaagtgtatgaaaaggccatggaaggtttataagcag

SEQ ID NO: 106403 - DNA, 201 bp, Homo sapiens
gagttcaagagacaaaaacttgcgacatgcaggtggctggggggcaaacatacaaagacaggaagctgtgagagtgcccagtggctcaggaaggtggtgayctgtttgaggagtgacagtgaagagttggatgaagagtaggacagggtcccctgcttaggaagggctttgtgcggctgtagttgcagccccagcaatttt

SEQ ID NO: 106404 - DNA, 201 bp, Homo sapiens
gtgacctgtttgaggagtgacagtgaagagttggatgaagagtaggacagggtcccctgcttaggaagggctttgtgcggctgtagttgcagccccagcarttttcaagcggggaaacaatgtggtctgatctgtgtctcatggggaaacaccatggaggctgggagagtctagagggaagatgggttggggggaagaagt

SEQ ID NO: 106405 - DNA, 201 bp, Homo sapiens
gtcaggctggtttctaactctgacctcatgatctgacccccttggcctcccaaagtgctgggattacaggcatgagccaccgcacccggccttggctctctttttttttttttaaataaattaggaaatcagatggtatttcccacaaacaactctgagactttgttttatgaaatacattagagagaaaatggattggtt

SEQ ID NO: 106406 - DNA, 201 bp, Homo sapiens
acccttatggcagtggaggtgctgagttaggtgatgccagtgcccctagctattaaaatttatgagtcacgatttcggtctgggaagaaggaagaggtgamaaatactttattatttccgaagtaaatgcagttggcttgaacagtgttattttgtggggtacctgctaccagtgtttgaggcagaaatcgcatgatgagt

SEQ ID NO: 106407 - DNA, 201 bp, Homo sapiens
tcactacctgccatccaaaacgcaggaaccaaacgcaaatgcatttggataaagcagagtctctcatgaaccaaactcaccatccgaactgccacctaggmactgatagatttgaatggtggggggtacttgtaactgattttcataataagaacttgacttatcaaaagaaagtagttaaaatatatttcaatgtggtct

SEQ ID NO: 106408 - DNA, 201 bp, Homo sapiens
ttttatgaaatacattagagagaaaatggattggttgcattccttctggatgtatcttgagtttggaatgccatcctgtcatgggctgacccacaccccayattattgtcacatcaaaagggccccttggaacagctgcttgctatatactgaagtataattttattgttccaaagagtactaacatacagcagcatggtc

SEQ ID NO: 106409 - DNA, 201 bp, Homo sapiens
cttaatttcccttattggctttggaactccagttcaccgtcatatcattggggcatacttgtggccacctgtattatattgcttatggatacttgctagcmttccctgttctttccctcttgaccacataaattcccattagaaaatgtcccctgatactgctgattcagttgtctttatcctgtttcctttatatacatc

SEQ ID NO: 106410 - DNA, 201 bp, Homo sapiens
aacactcctagcttgtttctttcccctcactctcctggttctgaaaccagtccgcgctcaaccctcagataccgtctctaaccctttcctcttcctgagcygacccagttctgtgaaagttcataggaaagtccccaggtgctcctcatgactcagcctggtgacacaggaggctctgatggaactaaggaggactccatg

SEQ ID NO: 106411 - DNA, 201 bp, Homo sapiens
gccatccagcaagggaatgggatccctaacagagagaaagcagccgtgtggaaaggtcggctgtttctctatttagatgtcacatgatgttccttcagctyggtgggagttttggggccagactgatgtgaacaaattctccaggtgtggggtttatgtcatctttgtcttttccccattccaccctgattagaattgagc

SEQ ID NO: 106412 - DNA, 201 bp, Homo sapiens
caaagaagcccacctctccttaagaggcacctgccattaaacagtagaatcagcctttgttagcacttgtccaacaaaaattgttacttacctagaagacrttgcctttctgcggatttgtgtacttaagtgatcatcaatttgtctatgcttcatttctcctcgatttagaactaaggagacaggcaaggacagggaaat

SEQ ID NO: 106413 - DNA, 201 bp, Homo sapiens
tgacatagttttaaaggctaaaaatgttgatactcaggttagatttaggcaggttcctcccgacccttagaagactaagggccattgtcatttgtttctcwtaggttctatggtgtaagctgattttcttacccaaagtggtttgttgtaaaaggtgataagatggatttggtttcctttgttcatgatatagcaggaggg

SEQ ID NO: 106414 - DNA, 201 bp, Homo sapiens
tgagaggaaagaaccttgtttttatagcagagaaatataagcacagggaggttctgtcacttgccagtgatgatcccagcctgggagaggcagggatgcakcatgctcgcctttttgccctgccacttctcccagggagttcctaaaattcctgcactaagcctgtctctctccctagacctactcggagtgtgaagatgg

SEQ ID NO: 106415 - DNA, 201 bp, Homo sapiens
cttgaatatctcaagtaagttgtttttctacttaacatcagcaacaatttaccatcccatttagtgactgaaattccagagacatccagcaaatctatacrtgaagttcaatccccaaggtggcttagcttcaagacctaatcgaggttctaaatggagtatgagagtataaagaaaaattgaggaaaacccattatagag

SEQ ID NO: 106416 - DNA, 201 bp, Homo sapiens
caggctctggaggcagactgcccattctgccacttcctagccccagagaagcctcctaagagtgctgagaatacttcagtttccttctataaaatggagasagcagacaggtacggttgtgagggttaactaaatgggtgcacgttaaacactatgaacatgactgacaaattataagctctcaataaatgtggttgtttt

SEQ ID NO: 106417 - DNA, 201 bp, Homo sapiens
tgtgatttacaatctgatgaggccataaacctctacttttcacgtctgaaaaacagcaaagtatgggaaagaatgtaaattataaatactgaattcctatsgtcagcaataatggaatggcctgggtgggttattttttttaatatggtatgcatatggctttaatttcgaaggggttgggtcctcccccaccactgtatt

SEQ ID NO: 106418 - DNA, 201 bp, Homo sapiens
aaaaaaaaaaaaagaaaagaaaccttatatttaaagtgctatacattgtaatatattgaaatagtcaccctaattctcaaaacaatacagtgtgaaaaagrcgtgtcatagattcaaggaagcacgatagttaaaaatggtacagtctgtgtagaggtcctgattgggggtgtggggagctgggaccagtctgagctggga

SEQ ID NO: 106419 - DNA, 201 bp, Homo sapiens
ccctgcccataatgtactggctgttaactagtttgaatagcaatccttggaagaccacatctattctctgaaaatgctttgaacataccaattatttctarttgtagaatgtctatttaaggaatagaggattttgaattagcatgaggtaccaggttgactaatttctccgtctttttcagctgactgagttgaatacct

SEQ ID NO: 106420 - DNA, 201 bp, Homo sapiens
tggagatttctttcaacggtcgaccttctggtgtacatttcctgcttctgagaactccctttaactgttgttcatcccctttccaccttaccacgcccccmaaaccagcccagccttatctgtacttcaagtgcctggcccattattaacttctcatgaatatatgctgaattaaataataaatccacctggaaaaaagtt

SEQ ID NO: 106421 - DNA, 201 bp, Homo sapiens
gcaaggacagggaaatggacagactgattgattgactgattgatttgttaataatggtttttacttaatttcccttattggctttggaactccagttcacygtcatatcattggggcatacttgtggccacctgtattatattgcttatggatacttgctagcattccctgttctttccctcttgaccacataaattccca

SEQ ID NO: 106422 - DNA, 201 bp, Homo sapiens
agctaacatgcaaagccactagaatatagtggctgtccatggatactagatcttgtccctcatttggggtccactcatgtggactctgcagccaagttctrtttcatgattaactatggaaacttcagcatgtggttaaatctctggattattcggggttcagagaggagggactcacaccagaccttatagaatggccct

SEQ ID NO: 106423 - DNA, 201 bp, Homo sapiens
agactaatttactgatttgccatggccatttatttgtggttaataacccattaattaaaattttagttaatgtttttaaagagaatgatgtattcacgtcrcttgaagtccaagatacatcaaagggtatgtggtgaatacctctctccatacttctccccagcccctcatttttcctctttggagaaaaccagtgtcacc

SEQ ID NO: 106424 - DNA, 201 bp, Homo sapiens
tcttctcagtctttctatgcactttgctatttttacagtacaagtcttttgtagttcttgtttatttttggatagtctctattttttgctgccagtgtgcygcagatcttcttgctgtgatgttttctcaatacgagtttgttggtggataggtgggtggatgaaggaacagccctggtttcctatcactctccctgctcc

SEQ ID NO: 106425 - DNA, 201 bp, Homo sapiens
cctggtttcctatcactctccctgctcccacccactagaacggaaggcctgactggttggtgcttgtgcctccaaccacttagcacaatgttggagacgtmaaagttcatgatataaatatttgtggaattaaagactctttaccagttattaaatagtatttattataccttgggttttggctctcctggactagtacag

SEQ ID NO: 106426 - DNA, 201 bp, Homo sapiens
gatcattttcaagaccaaaggaacaaatgagaaggcttttcttacattcctaattcagtgtttattggttaaaattgttcctcagctgttaccactttggktaatctgtagggtgctaaatgagtgctggggaattggagccttttgctgagtcctccagagtgttgtcctccgtggagagaagctgtatttccaagtggc

SEQ ID NO: 106427 - DNA, 201 bp, Homo sapiens
taatgtgtccatcacaataagttcccacctctgctgctctccaaggtcagctccaaaccagccagtcctttcctcatcctcttcttggatcttctgcacaktatctgccttcttgaaactgtcctctttcctctgcaatatctgtcctgtatttcctctcacttttctgttttcagttccctttgctggcttcccattcta

SEQ ID NO: 106428 - DNA, 201 bp, Homo sapiens
agactcaagcaatcctcccacatcagcctcctaagtagctgggactataggcacacaccacaatgtccagctaattatattttagtttttgtagagacagkgtttcaccatgttgcccaggctggtcttgaactcctggactcaagcagtcctcccaccttgacctctcaaagtgatgggattacaggcattggccacggc

SEQ ID NO: 106429 - DNA, 201 bp, Homo sapiens
tctgttattgtggagatttaaaaaccacttaagccctaaatttatttgggtatttcttgaccctgtgttaagagcctttcagtataatttttctatgaagrcaggtggactagattttatatatctatatctatatctatatatacatagatatatcttttcatctttaatattcccttttctgatttaagttaagaatag

SEQ ID NO: 106430 - DNA, 201 bp, Homo sapiens
gcctagactgtctgtcttaagggtagatgcaactatgagcatgagcttccttctagggagagggtgcaaacacaggggaacagatgttgggagggggggtmccttcccagcacaggggagtcaccgccgtcctgctggtatagctttatagccagttccccttctcctcgtgactgtgtctgttcatcctccctttatctt

SEQ ID NO: 106431 - DNA, 201 bp, Homo sapiens; identical to SEQ ID NO: 17244

SEQ ID NO: 106432 - DNA, 201 bp, Homo sapiens
agcttttttttagcagccgatcccctttcttcaaatggcatcttgccccaaatcctactaagtatctaaacgagtaagcagaacagttctgagtttgccayccaagacccgcttctccccttccctccttgtgccggggattctttggaagttagaaagttgacaggagcacaataggaattgtatctattgtttatgcca

SEQ ID NO: 106433 - DNA, 201 bp, Homo sapiens
ctaaacgagtaagcagaacagttctgagtttgccatccaagacccgcttctccccttccctccttgtgccggggattctttggaagttagaaagttgacakgagcacaataggaattgtatctattgtttatgccacacttagctcttgcttcctccaaaaaggtgtctttgcccaccctaatcagaactagaagctcact

SEQ ID NO: 106434 - DNA, 201 bp, Homo sapiens
ctaactctgacctcatgatctgacccccttggcctcccaaagtgctgggattacaggcatgagccaccgcacccggccttggctctctttttttttttttwaataaattaggaaatcagatggtatttcccacaaacaactctgagactttgttttatgaaatacattagagagaaaatggattggttgcattccttctgg

SEQ ID NO: 106435 - DNA, 201 bp, Homo sapiens
taaacgagtaagcagaacagttctgagtttgccatccaagacccgcttctccccttccctccttgtgccggggattctttggaagttagaaagttgacagkagcacaataggaattgtatctattgtttatgccacacttagctcttgcttcctccaaaaaggtgtctttgcccaccctaatcagaactagaagctcactc

SEQ ID NO: 106436 - DNA, 201 bp, Homo sapiens
tcttttttatcccgactgcctcagccttcattcagactcccatccctggatcaattcatctctgtttccaggttaagtcctccagtccttcccacaccatkgcttgagtgatctttttaagaacatcagattcatcatgtcattcccctgtgatggcttctcatggtctttggtcatggtcaatacatccattaccccagt

SEQ ID NO: 106437 - DNA, 201 bp, Homo sapiens
gggtttcaccatgttagccaggatggtctcgatctcctgacctcgtgatccgcccacctcagcctcccaaagtgctgggattacaggcgtgagccaccacrcctggcctacaaagcttttttttagcagccgatcccctttcttcaaatggcatcttgccccaaatcctactaagtatctaaacgagtaagcagaacagtt

SEQ ID NO: 106438 - DNA, 201 bp, Homo sapiens
gtgacagagtgagactccgtctaaatatatatatatatatgtatgtgtatatatatatgtgtctatatatatgtgtgtatatatatatgtgtgtgtgtgtrtatatatatatggagagagagagagacagagagagagaagactgtattaaaccctctgctctagaccctctaggatcccctcagactaaaagccaagcct

SEQ ID NO: 106439 - DNA, 201 bp, Homo sapiens
tcatcttaacaaagtacctctccaatgactatctccaaataagctcaaattctgagatattggaggttagggcttcaacataggagttttgagaggacacaattcaaccgatccataatagtgcccaacactttacatatgccttctaagtcctcacaacaaaccgggaaaggcggtgcatataggttctcactgtacagg

SEQ ID NO: 106440 - DNA, 201 bp, Homo sapiens
gtgattgggttctggccagtattttcttaaaatgaaacagaatagaaaaatatcagaataaagatgcaaattgtcttatgaagcttttgtttcagtgtgtrtgtgtgtgtgtacacgcatgcgtatactggatcacagtgaaaattgtgtttcttgctatggttcttaatgggtcttagatcacaaaagtttgagaaacac

SEQ ID NO: 106441 - DNA, 201 bp, Homo sapiens
ctgccagtaagcaggggtaccaagggccttcttggccccttcttgcctttttttttttttttttttttttttttgaggcagagcctcactctgtcgcccargctggagtgcagtggtgccatcttggcttaccacaacctcctccacttctcaggctcaagtgattctcctgcctcagcctcccgagtagctgggactaca

SEQ ID NO: 106442 - DNA, 201 bp, Homo sapiens
ttttatttttagtagagatggggtttcgccatgttggccaggctggtctctaactcctgacctcaggtgatccacctgcctcagcctcccaaagtgctgakattacaggtgtgaaccaccgtaccaggcctccattactcttaaaatagaatccaaacttccaaccctgcctacgaggctccaggttcaccggcccctgcc

SEQ ID NO: 106443 - DNA, 201 bp, Homo sapiens
tttagaaaggcctgatttttatagtcataaatgaagatacagaacacaagagtgactttttttaatgttttaaaggggaaataagtgtgtggcgtttcttaaaaaaaaacaaaaaatttgtatttagcacaatcttttacagatcaagagaaggtaaagggtttatattttcaccaaaaacgggggctatttcatctggaa

SEQ ID NO: 106444 - DNA, 201 bp, Homo sapiens; identical to SEQ ID NO: 17245

SEQ ID NO: 106445 - DNA, 201 bp, Homo sapiens
cctggatcaattcatctctgtttccaggttaagtcctccagtccttcccacaccattgcttgagtgatctttttaagaacatcagattcatcatgtcattsccctgtgatggcttctcatggtctttggtcatggtcaatacatccattaccccagtagggagatcctttctctacaccctcccaggcaaccgagagtctg

SEQ ID NO: 106446 - DNA, 201 bp, Homo sapiens
taaaatgatcaagacgtgttaggtcatgacaatatgaagttagaggaaaagctacattctttataattagaattcttcactctggtctttggggtgagacracagtagtttatggatgagcttcaggtattcgtgaatcctctgaactttaatgcaaagtgttatgcctttctttcatcaaatcctcaaagagtcagtgac

SEQ ID NO: 106447 - DNA, 201 bp, Homo sapiens
gaagttcactaacttgcccaaggtcacataggtagttaagtggcagaaccaggactcaaacccagacattctctctagggaactgctcttcatcactgccytccaaggatctctgagttcagatggcaattagacatgcaaactaattatgttaatatgtgataaatactgtaaaagattgtgtgcataaggctaaaggat

SEQ ID NO: 106448 - DNA, 201 bp, Homo sapiens
caaaatgatcttccaaaattcagaactcaatctctttcccctgctaagaatcattctctctggctgggggcttgagagggcacaataacacaatctttttycccacctgagttaaaaaataagtaagagataagcaagatagaggaaagttatggggatcagagtagcatcttcattagtgagaattcacctttttcagga

SEQ ID NO: 106449 - DNA, 201 bp, Homo sapiens
tgagggccctgtgtactggaagaagggatgtgggcccctccttctaaaggattgtccaaggaggaaatggtctttccttttcctgcatttgagctcttctstcccactcacacattctttccacgtgcattttgctttcatatttaaaagtccttagcaaggtcctattattctgctgtggagtggattttttttccacag

SEQ ID NO: 106450 - DNA, 201 bp, Homo sapiens
gctaagctccccaccctctaccctgggagtgtttgtccgtgggccctcaggtgccgctgtgacctcttccccctagaagctgacacactgagtcctcttakcgctctcctgtgatggggaagccgggagagaatggaccctgaaaatcagaactagaacatagaatcctctctatcttcttcaacagaacccgcaaagcta

SEQ ID NO: 106451 - DNA, 201 bp, Homo sapiens
agcaaatcgtatatgatttatcatgaaatttcagtactaaacattccaaaataaaaactagacactaaaaatccaacgttttgaacttttgagagatcctyaaaattttacaatgccctatggatttctccacaactctctttgtttaaaaaatcagacacttcctgtgcccttacactgtttgaggcagttcccatgtaa

SEQ ID NO: 106452 - DNA, 201 bp, Homo sapiens
caaggaaaaacttcctaactgctgaagagtttgaccagaaaaataagccaccttgcaaaggtagtagtttccctgtgcctgagagggttccagcagaggcrgcgtgatcacccacccttatggcagtggaggtgctgagttaggtgatgccagtgcccctagctattaaaatttatgagtcacgatttcggtctgggaaga

SEQ ID NO: 106453 - DNA, 201 bp, Homo sapiens
gagctcatctagttcagccagctcagtttaccagtgagaaggctgaaacgtgccaccatgtcccccagcctttgatgtcagcctgttcgcagggccacagytgtgcatttcccttccgcggtgctgctctggtcatatctcatattaggtccattgcaaggtgctttatctctggctttctccataatatgttttctgtct

SEQ ID NO: 106454 - DNA, 201 bp, Homo sapiens
ggtgggatcttagttggcctggacctagcgtgctttgcatcccacaaaggaggtgggtggtgactgagttgatgctcctctgttgctcatgtgttgtctgygactggcaggaactgacacattgatctgagccttcctactgtctcctgtttccactctatttctgccctaccatcctttcttctcctcccgggcacatac

SEQ ID NO: 106455 - DNA, 201 bp, Homo sapiens
ctgcaataatagcatcagtccatttatggggtgcactcctcatgacctaatcatgtcttaaaggccccacctcccaatatcattacattgacagctaagtwtcaacatgagttttggcagggacattcaagccatagcattccacccctgacccccgcttctcacatacgaaatacattcatttcatgccagtagtcccaa

SEQ ID NO: 106456 - DNA, 201 bp, Homo sapiens
tgagttttgtgtagtggttaggggcacaggctctggaggcagactgcccattctgccacttcctagccccagagaagcctcctaagagtgctgagaatacktcagtttccttctataaaatggagagagcagacaggtacggttgtgagggttaactaaatgggtgcacgttaaacactatgaacatgactgacaaattat

SEQ ID NO: 106457 - DNA, 201 bp, Homo sapiens
cagcatcaactccaaagttcagagtctcatctaaatcagatatgagtgacagtcaaggcacaattcgtcctgaggtgaattaaccccacttggacaccacygcagtttctggcctataccttccagagtggtagctcaagccacaccaaggtccacttgagccacagccaagaagaactatgccagctgtgagcctgtgaa

SEQ ID NO: 106458 - DNA, 201 bp, Homo sapiens
ctattttcagggatgactctgttccagaagacaacatctggagaggcatcctctctgttattttcttctttcttatcatcagtgtgttagctttccccaayggtaagtaatgtcatgcattaccacatttctcctatattgtgcctttctggtttttttgagatgtgagtcatctagaagatgaagtaaagaaataatctg

SEQ ID NO: 106459 - DNA, 201 bp, Homo sapiens
ttctttccacgtgcattttgctttcatatttaaaagtccttagcaaggtcctattattctgctgtggagtggattttttttccacagaattgtatcgattyacgtgttgagggaaataagtgggtcagagagagaggtcgcatcatgacaaagtttctttctaattggacagccatgaaacaccatccccacggtgggaga

SEQ ID NO: 106460 - DNA, 201 bp, Homo sapiens
acacatctcccagatttctgacagcgcagaggtggcgctcccgcttcatgtgtgagggccctgtgtactggaagaagggatgtgggcccctccttctaaargattgtccaaggaggaaatggtctttccttttcctgcatttgagctcttctctcccactcacacattctttccacgtgcattttgctttcatatttaaaa

SEQ ID NO: 106461 - DNA, 201 bp, Homo sapiens
ctgccagtctatgtactgtgttctcctagcacagtgaccgttccataatctccaccccttgtttgctacctggagctgggctctaggcagagagcagccaygtcccagccacaagatattttgtgctactcatcatgatgaactgcatgaggatgctaacctcagggaaaagtactactgctcccagctgaaacttggacc

SEQ ID NO: 106462 - DNA, 201 bp, Homo sapiens
taggacagatgatcttccttgttcacacagagacaatgcccatcgcaataaatgaagtttatgcatacagaagtgtacgtgaatagttaagtaagtaatcwctgtggtttggagaggtcagtatctttaaaaacaggactgtagatggattgggattaagctttgccttatcaggcccaatgtcacggaaagcagaagctt

SEQ ID NO: 106463 - DNA, 201 bp, Homo sapiens
gaggatctttcagagtcatcagaaattatgttttggacacataaacacaaaatactcccaacataaggaaaaaattagcagatgtcacttttaggacagaygatcttccttgttcacacagagacaatgcccatcgcaataaatgaagtttatgcatacagaagtgtacgtgaatagttaagtaagtaatcactgtggttt

SEQ ID NO: 106464 - DNA, 201 bp, Homo sapiens
gcgcctgtagtcccagctactcgggaggttgaggcagtagaattgcttgaaccgggaggcggaggttgcagtgagccgcgattgcaccactgcactccagyctgggtgacagagctagactctatttaaaaaaaaaaagatagagggcctcaagtctagttgaatattcagaaatctttcataataaactcagggtgttct

SEQ ID NO: 106465 - DNA, 201 bp, Homo sapiens
ttgctccattcccctctctgccagtgctctagccacatacggggtcctagatatttctcttttcggaaaccgacctgcatgctgttctctacctgaatgtygcgtgcaatcctcacacccaccccgcacaccctttgcctcatgatccttcaagtctcagtctaagttagcatcagtttctcagagatggttttcttgacc

SEQ ID NO: 106466 - DNA, 201 bp, Homo sapiens
gttgaggcagtagaattgcttgaaccgggaggcggaggttgcagtgagccgcgattgcaccactgcactccagcctgggtgacagagctagactctatttaaaaaaaaaaagatagagggcctcaagtctagttgaatattcagaaatctttcataataaactcagggtgttctgtccggcttatgggtagataatcacac

SEQ ID NO: 106467 - DNA, 201 bp, Homo sapiens
tgtgcttttcatttggagtgtgctttcagtatatagttataaaaataagtgctttgatgctcacaggagccttaggaaatagaaattgggagaaagatacyccaagtgtaatattttcccaaacatctttcttgcatttttgaacaaaagtggtcacattgcaaagtaaactgacttgcaggtggatgtgcttgtgtgcct

SEQ ID NO: 106468 - DNA, 201 bp, Homo sapiens
ctgaagcctccagcctcagccctaaactagccactctttgagtcttggtagaaaagtaatgtcagccttctggaagggtgctgttgattggaactccctcyagtgggccagaggtaatggtgggggcgatggctggtggttaaaggagcccatgtgatcgttgggttcctaccacttctcaccatctccacagccctgacc

SEQ ID NO: 106469 - DNA, 201 bp, Homo sapiens
tcagaaatctttcataataaactcagggtgttctgtccggcttatgggtagataatcacacttatgtcctgggctcaacactcccatcataggagttattmacgaagtccgagccaaagatgaaatcatcctttttatgtctcctcactgcacaggctggaataccaaacatgtaactgccacctagcgtcttaatcacag

SEQ ID NO: 106470 - DNA, 201 bp, Homo sapiens
tacctcaccgacacacagtgcaagcgcgtaggaacacaatgctgggtgtttgggtgagtaatctgttattgtggagatttaaaaaccacttaagccctaawtttatttgggtatttcttgaccctgtgttaagagcctttcagtataatttttctatgaagacaggtggactagattttatatatctatatctatatctat

SEQ ID NO: 106471 - DNA, 201 bp, Homo sapiens; identical to SEQ ID NO: 17238

SEQ ID NO: 106472 - DNA, 201 bp, Homo sapiens
cttatgtcctgggctcaacactcccatcataggagttattcacgaagtccgagccaaagatgaaatcatcctttttatgtctcctcactgcacaggctggmataccaaacatgtaactgccacctagcgtcttaatcacagtctagactttagaagtacagtgagaaaaccttctgggttcctccactgaaatgatacttt

SEQ ID NO: 106473 - DNA, 201 bp, Homo sapiens
tgtgttgctgacattgtcactgagtcccatgtgaggtgctggtgagtattacctttcatctgtgccatgctctagaaccttgaccttgatagttcaccacstctgatggatccctgttttaaataaaaacgattcactttaaagcctatcaaaggtctgtctgtaaaatgctcattttcttgcatcttactggtatcttct

SEQ ID NO: 106474 - DNA, 201 bp, Homo sapiens
acacattgatctgagccttcctactgtctcctgtttccactctatttctgccctaccatcctttcttctcctcccgggcacatacacgcgcgcacgcgcgmacacacacacacacacacacacacacacacacaccaccattcaccaaaaggcagaccatgccaaaaataaggtttcagataggtatagaaggtataaaca

SEQ ID NO: 106475 - DNA, 201 bp, Homo sapiens
aaacgggggctatttcatctggaaattcttagaaggctgggaaggaatgtgattaatgccttcaaattattgaaagactctcttggaagggtcaaactcaccctgtgtggcagccacctagcctcttaatcacagtctagacttcagaactacagtgaaaaagccttctaggttcctccactgaaatgatgctttctcacc

SEQ ID NO: 106476 - DNA, 201 bp, Homo sapiens
atgctgaattaaataataaatccacctggaaaaaagttcacagaacaagacctcttttttcccttttgttgtctgcaagagaaacaccattcagccccccyttttttttttttttttttgagacagagtctcactctgcccaggctggagtgcagtagcacaatcttggctcactgcaccctccacctcccgggctcaagc

SEQ ID NO: 106477 - DNA, 201 bp, Homo sapiens
agggttccagcagaggcggcgtgatcacccacccttatggcagtggaggtgctgagttaggtgatgccagtgcccctagctattaaaatttatgagtcacratttcggtctgggaagaaggaagaggtgaaaaatactttattatttccgaagtaaatgcagttggcttgaacagtgttattttgtggggtacctgctacc

SEQ ID NO: 106478 - DNA, 201 bp, Homo sapiens
actgtagatggattgggattaagctttgccttatcaggcccaatgtcacggaaagcagaagctttcttttattacaaggaggaatgattggatgtgtcaargagagtagtatagtgccgttaggatggaaccacctggtggtatgcgatggagcacactgttcccatgagtgtgagcactgcgctgggatcagctttccat

SEQ ID NO: 106479 - DNA, 201 bp, Homo sapiens
gtttgttagtgccgtttggacacataatgatctaagaattattgtatgatctgtataaatctcttatttcagaacctatgttcaatcctgtcatacatctrgcagtcccccagtttttagaacatggaaatcttccttcctctaggttttctatttggatctgaaagtaaatgctcaatgttgtttttctattttcaggga

SEQ ID NO: 106480 - DNA, 201 bp, Homo sapiens
tgggtatctgttgggctgacaaagccatttttcttagtctacaaaggaaagatataaccgtcaaaagaagagaaatttaatttacttaaatgtttaaaacrgtattcaaacaacaaaaagataaactggaaattatttttttctaattgaaaggtgtttaaatatatatttagtctaaaatagtgagatgtttcttatgta

SEQ ID NO: 106481 - DNA, 201 bp, Homo sapiens
cttagcaatgtcttacctacacaacctcagacaagttacttaatctttctgaacttttgcaacctcattttgtaaaatgtggttgataatacttccatttygcaaacttgtgatcattagggataatgtttataaactgcctggtcagtgcctggcacacagtagatagataaatgggagctattaatgttgtcatcatca

SEQ ID NO: 106482 - DNA, 201 bp, Homo sapiens
cattcctttccatttttctgtgtatgtgtgtgtgtgtttccagctgtcatctagattctgaagggtgacatagttttaaaggctaaaaatgttgatactcmggttagatttaggcaggttcctcccgacccttagaagactaagggccattgtcatttgtttctcataggttctatggtgtaagctgattttcttacccaa

SEQ ID NO: 106483 - DNA, 201 bp, Homo sapiens
tgtgtgtcctgtcaatgtcttttataccaaccctgtgcctctaacataagtcaggctgatttaggatgacagatcattttttcatgagatagcttggcttsggggaacaatcattgtcttcagtgtctagcagacctggttttgaatgccagcttagcaatgtcttacctacacaacctcagacaagttacttaatctttc

SEQ ID NO: 106484 - DNA, 201 bp, Homo sapiens
tctctcaatacttcccaggccattttagcccacttcagttccccaaacttgcgcaggaaggcagagccccctcctgaggcttctcacactgcgctaattarccagcatggttgagttttcactacatcagccagggaaaaacacaaaacaaaaccaatcaccctctactgggccgcgaaaacctaaaggcccttgaggccc

SEQ ID NO: 106485 - DNA, 201 bp, Homo sapiens
aagatcaaagcgtcggcaggactggttccccctggggccttttggagcatttttttcaggctccttctctatctttgtggtttgctggcagtcgtggtccytgggcttgttgatgcatgaccccttcctggtcatgtggcattctccctgtgcgtgtctgagccttcatggtgttcttttttttttttttttttttttttt

SEQ ID NO: 106486 - DNA, 201 bp, Homo sapiens
tttggacacatctgaattcttcctatttcaaatgatctatggtaggtagtaagcagttttatttccttcttgagagcctttgggagcatggagccctttgrtaatccgatgagacctatagatagacccattccctatgtgtgcatccatggacattgaccatgcacagctctgcatatagtgtccagggcttcacagacc

SEQ ID NO: 106487 - DNA, 201 bp, Homo sapiens
ggaaataagatctgtggggaaggcattgagatgacatgaatgttcacaggatgctacagatggggctcatgccgggcaggtgatgctgtggaatgcggggmtcctcctcagttgcatccccacccctggcacatacacccttaggctctgcaaaggtgacttgactggagtagccaggtgcaagtaacctagtgagcgtaa

SEQ ID NO: 106488 - DNA, 201 bp, Homo sapiens
gttaataagcttttccaggagcgtggttgtctgctcggccgtcattaatttgaatgctcattaccataatgtagaagccaagctggggtcctgcgccctcsttgccgccagccccgtggtcctggacagcctggctctcatcccacgtagtttcttctcgcccccccgccctttctttaaacgaagtgtgcaattgctatt

SEQ ID NO: 106489 - DNA, 201 bp, Homo sapiens
tctgttcattactaactatactgcaaatagacggattggtctttatgatttttaaaatgccttcccgcatgtcaaagcatagagctacttaatagagtgtraagtcctccagagttatctgcaagctgtgattactttaagagcagccttctaaaaacagatcttaccccttccttatctaaccctacacagtgtattcca

SEQ ID NO: 106490 - DNA, 201 bp, Homo sapiens
taggaggagattgaatcgaatgataatgctcttgacacctggctttcttaagaatttgacatcacagggacatccagatgtcaaagttacagccccaagtagctgaacctggcttttaaactctagttttcaagtattggctaaatctttcttgccaaagtaaagcacgaggctgtgttcagcctgtagagttctaactgg

SEQ ID NO: 106491 - DNA, 201 bp, Homo sapiens
tgagctgtgtgacagatgctgctctgtgccctgaggccaccagggaaggccagacagacaggagcctgccctcaaggagctgcccttccacttggagacaraggacagctagtaaacaaactattacacaaatcagtaatcaaaaaaatatcagctatctggagttagtaggaagctagttaagaccaagggaggtgacag

SEQ ID NO: 106492 - DNA, 201 bp, Homo sapiens
cccgtggtcctggacagcctggctctcatcccacgtagtttcttctcgcccccccgccctttctttaaacgaagtgtgcaattgctattttaaatctgagscttgacattttcagtgggtacgtgcctagatttccacaggtgtgattgcaaacctgtaaattaccggcttccgtttgctgggacaagtgtaaaatgggcc

SEQ ID NO: 106493 - DNA, 201 bp, Homo sapiens
gcatgttccctgtcctcttagagcttagagtctactagaaggcaaattaaacaaataattgttggctattgaaccctaagacaatttcaacagctttttasaattttattatgaaaaattttaaacctatgcaagagtagagagaatctataacttcatgtacccatcacccagtgtcagtattattgacacaggcccaaa

SEQ ID NO: 106494 - DNA, 201 bp, Homo sapiens
gtgagctgtgtgacagatgctgctctgtgccctgaggccaccagggaaggccagacagacaggagcctgccctcaaggagctgcccttccacttggagacraaggacagctagtaaacaaactattacacaaatcagtaatcaaaaaaatatcagctatctggagttagtaggaagctagttaagaccaagggaggtgaca

SEQ ID NO: 106495 - DNA, 201 bp, Homo sapiens
gaggtgaccttttggatctaaagttatgattcttagaactaaaattatttccttgagaaggtccctccatgctctcacagctgtccccacagttggtgcamgatgagaggggtccaagaaaatgacaggtgcccaggtgtccacaggaaatgcagggggagagatggaggctcaacagccaggatggcttgatgtgaatgg

SEQ ID NO: 106496 - DNA, 201 bp, Homo sapiens
caaggacctcaggtcttatgaggggataattggcaaatctgttcattactaactatactgcaaatagacggattggtctttatgatttttaaaatgccttyccgcatgtcaaagcatagagctacttaatagagtgtaaagtcctccagagttatctgcaagctgtgattactttaagagcagccttctaaaaacagatct

SEQ ID NO: 106497 - DNA, 201 bp, Homo sapiens
tctaaagttatgattcttagaactaaaattatttccttgagaaggtccctccatgctctcacagctgtccccacagttggtgcacgatgagaggggtccargaaaatgacaggtgcccaggtgtccacaggaaatgcagggggagagatggaggctcaacagccaggatggcttgatgtgaatgggtttctagagtgagga

SEQ ID NO: 106498 - DNA, 201 bp, Homo sapiens
ctccataggattttataatagtcaggatgcttttgactgcaagtgatagaaaacgcatttcaaaatggcttaaacactaaggaaattcgttattttcttaygtaacaagacgttctgagatagggtggttggcagactggcttattcagcggctcagtgacctgtgaagacccagcttctttacccctttctgttctgccg

SEQ ID NO: 106499 - DNA, 201 bp, Homo sapiens
gcttctttgcgtggtaagtcactgcattttacccaaaggcattagctaaactctcatagtatcactttaaacggaggggggcaaagaaaccctcttgtgtrtcaaagttccttagaaattcataaaaagatgttctacttgtaattgtctgagactggccaccagcctaatttcaagagtaagacacagctacacagtatc

SEQ ID NO: 106500 - DNA, 201 bp, Homo sapiens
acacagtatctgaaataggtcacctcagcagattccagtcaaacgccttcgacaggtacaccccacgtgcatttccttgactcacgagaatttgtctgcaygtgctatgcatttagggaccaccatgaaaggacaagaaagatcacagtgcactttgctttctcatcatcatgccgcatacatcttaacctacatatcatt

SEQ ID NO: 106501 - DNA, 201 bp, Homo sapiens
gagcctgtagggacaccagcctaagccttggttcttttgccctggggctcttccctcacctttcaaatgaagtaagatagtacccacttacacattttgtractgccattcttcatttaaatatttgaagttattattttgaagaaaagttcttattttatatttaagcttaagatttttcacttagtctagaaaatgtat

SEQ ID NO: 106502 - DNA, 201 bp, Homo sapiens
accagtggttcccacctccctggattagggtggtccctggcttttatctctagagctatcagttccctgccctttccctggtcttgcttttcctgagcctrcttatcagttccacattatggtaaagcctgcgccatgcctttccccctgttgcatcggctctaaacactcctagcttgtttctttcccctcactctcctg

SEQ ID NO: 106503 - DNA, 201 bp, Homo sapiens
gtggagggaagcagtgaagcttcctccacacaagaagaaacttcaagaaggaagaaggctccccaccacgaaacctcccagatgaattatgaaatctgctygtgtgttcaggaccttcatagtgggagcattccatcacatctgcccacgtgtactctattctcaggctgcacttgtctgctggtagttacctaaacaagt

SEQ ID NO: 106504 - DNA, 201 bp, Homo sapiens
cgcgccaccgcgtgtgctccttcagtactagttctgtgtttgagagcctcgccttcatttatgaatgaggccactagggggagtgcacgtatcagggaagracctgttccccggcaagcctagggcggtctggaaagggacagtcaccaatctccagagcccagggtgacggtgtgctctgattcctttggccaggttctg

SEQ ID NO: 106505 - DNA, 201 bp, Homo sapiens; identical to SEQ ID NO: 17242

SEQ ID NO: 106506 - DNA, 201 bp, Homo sapiens
cagtgtttgaggcagaaatcgcatgatgagttgaactttttcattcaatcatgcatattttggataaagtgtatgctctggtaagatggattaatacttamcctctgttctctgtctaattagggtcattggtttcctggaggccattgtttgcataaaatttggacaagatctcttctctaagacccaaatactctatgt

SEQ ID NO: 106507 - DNA, 201 bp, Homo sapiens
ttccagtcaaacgccttcgacaggtacaccccacgtgcatttccttgactcacgagaatttgtctgcacgtgctatgcatttagggaccaccatgaaaggrcaagaaagatcacagtgcactttgctttctcatcatcatgccgcatacatcttaacctacatatcattgcacatggatttatatataaaaggacatatgg

SEQ ID NO: 106508 - DNA, 201 bp, Homo sapiens
tgcagaacactatggtcaccgagaaaaggtatggaaggagaggcaggcatggccgttgtttaaaataatcaccccgggctcggcaaattcgctcagagcaygtgcctgtaaggatatggcgaggtaaacactgaggttggggcctccagtcctgccactgcagaaaccgcatgtcacaactcattccctagccattgctgg

SEQ ID NO: 106509 - DNA, 201 bp, Homo sapiens
gtcccggctactcgggaggctgaggtagaagaattgcttgagcctgggaagtggaggttgccatgagccaagattgtgccactgcattccagcctgggcartggagtcagggccggtctcaaaaaattaaaacaaaaaaacagaaaaaactttaggtcattatgaagccagtgattgggttctggccagtattttcttaaa

SEQ ID NO: 106510 - DNA, 201 bp, Homo sapiens
ataaaaatgataactggaatccttactttgtagggtacctgtgaggattcagtaagattatgtatataaagttcttagcacaaatattatttttccttccytagatggtaggaggacatagaatggaatatgaaattgtctttactctaaaagagtttgcagtctaagtggagagtcttgtgaaccgttgcaaggtagagt

SEQ ID NO: 106511 - DNA, 201 bp, Homo sapiens
ttctataataatttcaccaatatttctttagtaagagtcttacctgtatgaggtacttcctatgcaaaaaaggtcactcgccataatgtattcaacagagygcaaagatagacattgatgttaattatacctgtgcacaaatcagagccctgccatttactaagattgtcaccgtgacaaataacttaaatctctctgagc

SEQ ID NO: 106512 - DNA, 201 bp, Homo sapiens
tgtgtagagcctaggcatgacaaattagagaaggttcttgataagggtgtaaaaaaccactgcatcttttagggacatttaaggtgtgttttagggaaatsaagctcatgataatctgtaggtggattagaggaagatggggttgaagtcagggagatccactaggaagaagttagataatcaatgcattatgtgatgatg

SEQ ID NO: 106513 - DNA, 201 bp, Homo sapiens
actccagcctgggcaacagagtgggactctgtctaaaaaaaaaaaaaaaaaaaaaaaaaaaaaagagagagagagagaaaatgcactaacattagtcactrtgtttttaaggtatgattgacataacacttacctttgctatgtggtcttgaccattcaaatgacactgtctaaaattattcattaaatttgacatgattc

SEQ ID NO: 106514 - DNA, 201 bp, Homo sapiens
tgtatattggtccctttgcatgaccccagcagttgggtcttgcagaattccctttcagttttagctgttactagattatcctgtcacacttttcagtgagyagctattggtgatgttggagtttctctcatctcaggatcttcagaagcctgttttccttttgcttccttttgcacaaatgctaataccacttgggtctta

SEQ ID NO: 106515 - DNA, 201 bp, Homo sapiens
aattccttgtcagttatttttcacttaaatacacatatttatcttaatccaaaaacggtttaaggcattttgatcttagagaagggaaggaaaaacaggayagattagtctctttttgagcccaaaagaatctctgtattgttttcagattattaaattttgcatgcatttttctgttttactttaaacggataaatgcaa

SEQ ID NO: 106516 - DNA, 201 bp, Homo sapiens
aattagtatgccactgatcaagtagttgcacaagttggtaattttccaagggtaaagttgagcaggggggtgacctgtatttacccagctcctacttgtgycaggccccttatttatacacacacagagtcataggtaatcttctcagcacccttcttttacacatgagacttacagagatgaggtagtttgcacaggtca

SEQ ID NO: 106517 - DNA, 201 bp, Homo sapiens
cttgggaggctgaggcaggagaatcgcttgaaccagggagtcagaggttgcagtgagctgagatagtgccactgcactccagtgtctcaaaaaaaaaaaaagggacattcaccatacagaggggttggattagagtgaaaagtgttcccaaaccaacgaaaagagtatgtgaagatctagaagtagaagtctttgaatgga

SEQ ID NO: 106518 - DNA, 201 bp, Homo sapiens
acgtgattaaattctgagctcttaacttgacccactgtagcaaaaagctagccgcaaaggtgctccataaatgcttcttaacagtgtggatgatgtcgccrggagctggatgttaacttgcggggtgggaaagatgaaagtatgctagaattacagaagaggagaaagttggaaggtattataaaaattaagtttttttaa

SEQ ID NO: 106519 - DNA, 201 bp, Homo sapiens
tgatttataatgttaacatcttttgtgacttgcttgggttgttgtctttcaggttacttaattaataattatgttatacctaataagtatttaataaatatgttatacttattcataagtattctatggggaggcactttgagattgttaataacctattgctcattaagattttagcagatagttttagcatccatttgc

SEQ ID NO: 106520 - DNA, 201 bp, Homo sapiens
aatccagaatgtgaccattgccatgtgacttggacagtgattgctgtaaaagttcagctgcttaagcagggggaaagtcagcttcttagagaaaagatagkatttgaagaatgatttgaatggtagaaatgacatgaggatgatgacctttcaagtggactagagaggcaaggacaaagtataagatatcttcaaaagaaa

SEQ ID NO: 106521 - DNA, 201 bp, Homo sapiens
cttgcagaattccctttcagttttagctgttactagattatcctgtcacacttttcagtgagtagctattggtgatgttggagtttctctcatctcaggawcttcagaagcctgttttccttttgcttccttttgcacaaatgctaataccacttgggtcttataacagtttgtagtttatgggggaataatacctttgtt

SEQ ID NO: 106522 - DNA, 201 bp, Homo sapiens
tggattcacagagggagaagactagaaaacgtaagacgtgaccccacctgtgtgtctagtgcagcttacactgtagttataaacacaccttaaatgatcamaatatttcgtatagcttggtaacaaataaatgacaaaatccagaatgtgaccattgccatgtgacttggacagtgattgctgtaaaagttcagctgctta

SEQ ID NO: 106523 - DNA, 201 bp, Homo sapiens
ttgatttataatgttaacatcttttgtgacttgcttgggttgttgtctttcaggttacttaattaataattatgttatacctaataagtatttaataaatatgttatacttattcataagtattctatggggaggcactttgagattgttaataacctattgctcattaagattttagcagatagttttagcatccatttg

SEQ ID NO: 106524 - DNA, 201 bp, Homo sapiens
ttatcatataaatgcccccgaatttatgtcttcattcttgatcccactcctgaatgctttatttctagatccaccttcctgcagtatctccactggacatrtaatagacatctctaactgaacatgttcaaaactgactacttgatagattatgcctcccttcttctcccctaagttgctgttggcacagactaaatcagg

SEQ ID NO: 106525 - DNA, 201 bp, Homo sapiens
ccagcagtttgggaggccgaggcgggcggatcacctgaggttgggagttcgagaccagcctgaccaacatggagaaaccccgtctctactaaacatacgawattaactgggcatggtggcgcatgtctgtaatcccagctactcgggaggctgaggcaggagaatcgcttgaacccgggaggcggaggttgtggtgagccg

SEQ ID NO: 106526 - DNA, 201 bp, Homo sapiens; identical to SEQ ID NO: 17260

SEQ ID NO: 106527 - DNA, 201 bp, Homo sapiens
caacaaggaatattggttagaaatgtctctgtgaggaaggatgtttgagcagccgtgcttggagagagaatatctgagggaagaacattccaggcaatgasaacagcaaagactaggagggaatgttcttagtgagtgcagctgggttagaataagccagtagaaaactagaggaaaattaagaggtttgtaggaggcata

SEQ ID NO: 106528 - DNA, 201 bp, Homo sapiens
ctccagcctgggcgataaagcgagattccatctcaaaaaaaaaaaagagccgggtgtggtggcacgtgcctgtagatctcaaaaaaaaaaaaaataaaaawaaaaaaaaaaaaaattgagccaggtatggtggcacgtgcctgtagtcccagctacttgggtggctgaagcaggagaatggcttgtgaacctgggaggcag

SEQ ID NO: 106529 - DNA, 201 bp, Homo sapiens
ttgagagacagagtctcgctccattgcccaggctggagtgcagtgctacgatctcagctcactgtaacctctgtctctcaggttcaagtgatcctgctgcytcagccccccagtagctgggattacaggcacgtgccaccatgcccggctaatttttgtaattttagtagagatggggttttaccgtgttggccaggctgg

SEQ ID NO: 106530 - DNA, 201 bp, Homo sapiens
cagagaggcttttaaaagatgatatctgtgtcccatccctagggattctgatttaattggtctgattattcttacgcgctagggctgagaaaccactgttytgtaggatgtaggggaggaaatttcttgggcttttgttgttgctcccgtaaattaggataatactaaaaaaaatacttgaggtaggagttactagactat

SEQ ID NO: 106531 - DNA, 201 bp, Homo sapiens
ttttcttttttttttttttttttttgagagacagagtctcgctccattgcccaggctggagtgcagtgctacgatctcagctcactgtaacctctgtctcycaggttcaagtgatcctgctgcttcagccccccagtagctgggattacaggcacgtgccaccatgcccggctaatttttgtaattttagtagagatgggg

SEQ ID NO: 106532 - DNA, 201 bp, Homo sapiens
cctccaatgagggcctaggaggactttcttagccaatcagtagccaagcccctgcaattccgggtgggaccaggcgtccacacctatagctggactgctcrttggtcccttatggcgcttcttttacgcgaggcttagaggtcaaatacaagggggcacggtcctcacagaacggaaaggatccgtacagactctccgggt

SEQ ID NO: 106533 - DNA, 201 bp, Homo sapiens
caattttctgtcattttaattatttttattttatgttatgttatgttatgttatggtattgtattgtattgtattgtattgtattgtattgtattgtattdagatggagtttcgctctgtcgcccaggctggagtgcagtggcacgatctcggctcactgcaacctccatctcctggattcaagcgattttcctgtctcag

SEQ ID NO: 106534 - DNA, 201 bp, Homo sapiens
ttaataaaactaaagcatgttttttttttttaggcgtaatgttattgaagctgtttatagtagactgaatccacatagagaaagtgatggggtaagttttrttttatttcataagcatttgaagtaatttcacaatataaatactaaatatgaatacattcacattaacgaagtctataataaattatagtctgtagtaaa

SEQ ID NO: 106535 - DNA, 201 bp, Homo sapiens
tgttttttcttttttccccctgcatagcaatgtttcagtcaataagtagctttttgtattacttcttaaaaattttttgtgtgttgatggtaatttttttwaatatattttaaaataggtactaccaaatagtatctcttgtttcacttcttggtgagtactggcttatcacattaatttaggaactttttttaaaaaacc

SEQ ID NO: 106536 - DNA, 201 bp, Homo sapiens
aatgaattagtttaagcagttttttcactacgtattttgcagttgaaaatttcattacaatcacaagtatcccatatatggctactaggaagaaatggtcmtggccgggcgtggtggctcatgcctgtgatcctagcactttgggaggccgaggtgggcagatcacaaggtcaggagttcaagaccaatctggccaacata

SEQ ID NO: 106537 - DNA, 201 bp, Homo sapiens
tttctcattagattatgccaagaatataaaccgttgatgtcaagtttgattacctggctgaggtagtgtttgtcagatttctccactgtagagttattctmtccctcgttttcattttgtactttttgaaaagaaaataactgcccaatccacccttatggggtgggaagttgtgcttgacctatttgaaggtggaagatc

SEQ ID NO: 106538 - DNA, 201 bp, Homo sapiens
ggggaggtgccaatttgggttttttgttgttgttgtttttcccccaagcacttcagccttgatcttctgggctaaggtaatcttcccacttcagtctcccrggtagctgggactacaggcatgccgccaccacacctggctaatctttttgtattttttatggagatgaggtttcaccatattgcccaggctggtcttgaa

SEQ ID NO: 106539 - DNA, 201 bp, Homo sapiens
tactaatacaaataggtgggtaggcatatgaaggtggcttgggtgcagagatgaagtttttgattatgttatatttgaagagagatgtagcataaccaagstttgtgtttaaaatctagactaaaattcatctgaagtcagtgtagacatagcttaagccatgagattgcatcagagggcagatactgtgttttgggttga

SEQ ID NO: 106540 - DNA, 201 bp, Homo sapiens
agtgtgtcgtctgtccacagtaagtaggtgtaattggctaggtgatttaaatgaatcagcagaaataaaattgctggaaatcaaggactgcttgtacttartaaatgttgcagtggataatagaggttaatcagcattccaatagatttttaggtctctgccaatttaatatttctgggaatgttgaaaaatttaactagg

SEQ ID NO: 106541 - DNA, 201 bp, Homo sapiens
tttgtcagtcaacactgggtagctacttcatggattttaagttcagcaaagtgaagtccattttttagcaccatgttaaaggtatgtttttaacagaatcraagtaatgataaggttttcagttttatagatatatagtaaaagtgataaaaccaaatgtgtgtagaatggagatttttatgttttaattgaattttgggg

SEQ ID NO: 106542 - DNA, 201 bp, Homo sapiens
gctctgtgttcttgtctgtgtttgatattgagagtctctctctctctcttttttttaatctaaggagagagaaatggtgttttattttgactttaattttscatcttcctattagttttcctaatgacaaaatcttacaggcataaatatggaattactttgccgttggaatgcaggtgtttattttgttaattgtgttta

SEQ ID NO: 106543 - DNA, 201 bp, Homo sapiens
tgaggtaggagttactagactatagagggaatattgtacatacattttctgtcaaatttaaacatttaacacctgcattttttatttcagatttattgctraacatgggtgcatttttggataaacccaaaactgaaaaacataatgctcatggtgctgggaatggtttacgttatggcctgagcagcatgcaaggatgga

SEQ ID NO: 106544 - DNA, 201 bp, Homo sapiens
tggggtgcagtggtgcaatctcggctcattgcagccgccacctcccagttcaagcgattctcctgcctcagcctcccaagtagctgggattacaggcctgsggcaccacgcccagctaattttgtatttttcgtagagacggggtttcaccatgttggccaagctggtctcaaactcctgacctcaggtgatctgcccgcc

SEQ ID NO: 106545 - DNA, 201 bp, Homo sapiens
ggctgagaaaccactgttctgtaggatgtaggggaggaaatttcttgggcttttgttgttgctcccgtaaattaggataatactaaaaaaaatacttgagstaggagttactagactatagagggaatattgtacatacattttctgtcaaatttaaacatttaacacctgcattttttatttcagatttattgctaaaca

SEQ ID NO: 106546 - DNA, 201 bp, Homo sapiens
gtgagccgagatcctaccattgcaccacagcctgggcaacaagagcgaaacttcgttccaaaaaaaaaaaaaaaaaaagactttaacctcaagtcaactctaaaatattccccaaaatgtgtatttggattgaaatgaatgcttggaaggacagtacttgaatggcaataataggggtaggaacaaggcaattgcttaata

SEQ ID NO: 106547 - DNA, 201 bp, Homo sapiens
tcccgagtagctgagattactgatgcacacacaccatacctggctaatttttgtatttttagtagagatggggtttcaccatgttggtcaggctgatctcraactgctgacctcaggtgatccacccatctcagcctcccaaagtgctgcgattacaggcatgagctactgtgcccggcccagtatcatccattttttgcc

SEQ ID NO: 106548 - DNA, 201 bp, Homo sapiens
attcagtaagattatgtatataaagttcttagcacaaatattatttttccttccttagatggtaggaggacatagaatggaatatgaaattgtctttactytaaaagagtttgcagtctaagtggagagtcttgtgaaccgttgcaaggtagagttaattgctataatagatgtgtaaaaataggtgtgctatatcaactg

SEQ ID NO: 106549 - DNA, 201 bp, Homo sapiens; identical to SEQ ID NO: 17256

SEQ ID NO: 106550 - DNA, 201 bp, Homo sapiens
ctagctatgcaccctaaacaatgtgcttaaagttttttttgcacctacaatttcctcagccctaaattaatcttgtttttaggtctcaatgcttttgagtytcaatgagtcctgctttgagggtgatgaaaacgtgagaaacatgtaagaacacattgaagattatgtcagatgcggtcatattcctattgataatatcat

SEQ ID NO: 106551 - DNA, 201 bp, Homo sapiens
acctgtattttctcctaacacttttatgttttgattcttttttttttttttggagaaaatacatttgaatgatataacttacgatgatggtataatagttygttgaatttggccattttgtatatagtataatagctttgttgaatttggtcattttgtatatagtaggccacagtaattggtgagagttttgaagtgtga

SEQ ID NO: 106552 - DNA, 201 bp, Homo sapiens
aggtctggagattgagaccatcctggctaacacggtgaaaacctgtaactactaaaaatacaaaaagaaattagctgggcgtggtggtgggcgcctgtagwcccagctactcaggaggctgaggcaggagaatggtgtgaacctgggaggtggagcttgcagtgagccaagatcctgccactgcactccaggctgggcgac

SEQ ID NO: 106553 - DNA, 201 bp, Homo sapiens
tgagaaaccactgttctgtaggatgtaggggaggaaatttcttgggcttttgttgttgctcccgtaaattaggataatactaaaaaaaatacttgaggtargagttactagactatagagggaatattgtacatacattttctgtcaaatttaaacatttaacacctgcattttttatttcagatttattgctaaacatgg

SEQ ID NO: 106554 - DNA, 201 bp, Homo sapiens
aatgtgttaaacataaacgttctggatgattaaataaactataattgcttaaagtattttgaagtaaataatagttgattgtagaaatacaattttttttsttttttttctttaatacacagggaagtcgagataacatgagtattgtactagtttgcttttcaaatgctcccaaggtctcagatgaagcggtgaaaaaag

SEQ ID NO: 106555 - DNA, 201 bp, Homo sapiens
ttcatctatttttttttatcctccattcttgccttcttttagatgtattccagttcatcctaggatttgcttattagttacacattctttaaaaaattccrtttagtaggccagtcatggtggctcacgcctgtaatcccagcactttgggagaccgaggcgggcagatcacgaggtctggagattgagaccatcctggct

SEQ ID NO: 106556 - DNA, 201 bp, Homo sapiens; identical to SEQ ID NO: 17254

SEQ ID NO: 106557 - DNA, 201 bp, Homo sapiens
gatggggtttcactatgttggtcatgctggtctggaactcctgacctcatgatccacctgcctcggcctccccaagtgctgggattacaggcgtgagtcascatgccctgcctggtttaagattaaaagatgacccaaagagagaaaaagagatccctgcattagacagacatgagggaaatttggggccttcaggtgttt

SEQ ID NO: 106558 - DNA, 201 bp, Homo sapiens
tgggcaaaagtgagactccgtctcaaaaaaaacaaaagtgggggtgggggaacataattaattcaaagcactccaaatgttaagattatataggagatttygttgagctttgggaggctttctgcttttatttactctgagctaccaacccactgagaagtaaagaattcagaacagtctaatagtatttagtctgtaacc

SEQ ID NO: 106559 - DNA, 201 bp, Homo sapiens
tgataggtcggcgatgatttcattgttagggaacatccgggcctttcccctccccgcaacacctccccagagcccggccttcccagtttcccactctcgcstgcgccccacccgcggctgaagcaaaacaaccgcctctcccctgcccacttcttgtcctcgtctgagtcgtcccttcccgtctccacgccgaagagaggc

SEQ ID NO: 106560 - DNA, 201 bp, Homo sapiens
acattagtgtttcaaaagattattttacatatttttttaaacttcatttggcaataaatttttttttttttttttttgagatagggtcttgctctgttgcmtaggctggagtacagtggcatgatctcggctcactacagcctcaactccctgggctcaagtgatcctctcacctcagcctctcccaagtagctggaacta

SEQ ID NO: 106561 - DNA, 201 bp, Homo sapiens; identical to SEQ ID NO: 17255

SEQ ID NO: 106562 - DNA, 201 bp, Homo sapiens
acaaatgaataagtgttgtttgccagagaagaagcagttctgatcaataatatgtagagtaatttgtaagagtttgaaggcttgcgaagcgcttttaagcytgagagtaatgtcaactcatttttaaatctaatcgcattttattttcttgattgtaggtatcaagagcactcctcgcattgaaaagggctggttactgga

SEQ ID NO: 106563 - DNA, 201 bp, Homo sapiens
tttctcttttcttcgtaccccggcatctcttgcctgtcttccctagcaccatccttttcggatgtcattcctaacagtgaagttcttaattgaaactgccrcttattgtcagtaccccaaatctaccggagccccattaagagtatagactgactagccatatgtggtaaatcagtttttcatagtttaagcctaacaacc

SEQ ID NO: 106564 - DNA, 201 bp, Homo sapiens
agacagacaaactttggaagccatgtattgactattaaggaacttgtctttctcttagagatggtaccaattactggtagtgatatagggaggataagacytgtctctaggattgctgtgattattgtctacgtagaatggccttcacttcagaatcagttgtgaatgaaaagtacatttgtgtgctagaaataggaaaaa

SEQ ID NO: 106565 - DNA, 201 bp, Homo sapiens
tgcctgtagtcccagctaccccggaggctgtggtggagaattgcttgtacccgagaggtgaaggttgtagtaagccaagatcacgccactgcactccagaytgggcgaaagagtgagaccctgtctcgaaacaaaaataataatactctttgtaataacttgtttaacctcaagaaccttgtagcttaatcaattgtagta

SEQ ID NO: 106566 - DNA, 201 bp, Homo sapiens
tacagtatcacatataacccaggaaaattataaaactggtatgtaacttataaatatttacatatatatatcgagtggttcatcagatttttttaaatggsgatatgtaattttattgtaaagttcaataatgatcatacctggaaaaaatctcacaaagatacgtagacccaaatggaggtaaattgatctagaccagtg

SEQ ID NO: 106567 - DNA, 201 bp, Homo sapiens
tggcaaatttcttaagatgaatatacaatttgcaaagaggtttgcttcctgaaacatacctaaaagtggtactaggtaaaattttttttggtcagtattggagagagggatgtaactgtgtcttgtttttgttttttaaactaccaaagaaactccttgctcccaaagtactacatagtaattatttgtttaacattcatt

SEQ ID NO: 106568 - DNA, 201 bp, Homo sapiens
aaggaaactttgtggcaaatttcttaagatgaatatacaatttgcaaagaggtttgcttcctgaaacatacctaaaagtggtactaggtaaaattttttttggtcagtattggagagagggatgtaactgtgtcttgtttttgttttttaaactaccaaagaaactccttgctcccaaagtactacatagtaattatttgt

SEQ ID NO: 106569 - DNA, 201 bp, Homo sapiens
tatactgttaagggttgtggatactgtttttaatgtagaagtatgaactttttattcctttatcttttagggaggaagctcatcttttctgtaatcccaggtagtgctaggagcaagtaatttatgcttaattccaaatgccagtatatactggcaggttagcatttatttgttagagtagtagtataggatgtaatgtca

SEQ ID NO: 106570 - DNA, 201 bp, Homo sapiens
tagttcaaccattgtggaagtcagtgtggagattcctcagggatctagaactagaaataccatttgacccagccatcccattactgggtatatacccaaargactataaatcatgctgctataaagacacatttacatgtatgtttattggggcactattcacaatagcaaagacttggaaccaatccaaatgtccaacaa

SEQ ID NO: 106571 - DNA, 201 bp, Homo sapiens; identical to SEQ ID NO: 17290

SEQ ID NO: 106572 - DNA, 201 bp, Homo sapiens
ttcatgcagatttccaaggcgcattggagctcaaccttaaaataaaacttgttttgttaaaattccttaaattttctcctttaagtatttgattttgcttyaggttagaattaaatctagcatcttactgaaagtcagacctaatgcagctcatgtaaatatttggagaatgatttttgcaacagggcagtttaatttccg

SEQ ID NO: 106573 - DNA, 201 bp, Homo sapiens
tagccctttgtcagatgagtaggttgcaaaaattttctcccaatttttaggttgcctgtaaaccacaatgagataccatctcacaccagttagaatggcartcattaaaaagtcaggaaacaacaggtgctggagaggatgtggagaaataggaacacttttacactgttggtgggactgtaaactagttcaaccattgtg

SEQ ID NO: 106574 - DNA, 201 bp, Homo sapiens
acaaagcctgaaattaatcatatttaatgaatgtgactaatgtgatgaaagaatgagcgattaaaatattagcacatctgaacttctcctccctggctaayctcctccctagggttatcatctttcaaagaagtaggggcacagaattacagaaacgggttttatggaacacaaatgccttttaaatggcttagattaagg

SEQ ID NO: 106575 - DNA, 201 bp, Homo sapiens
gagcattttttcatgtgttttttggctgcataaatgtcttcttttgagaagtgtctgttcatgtccttcgcccactttttgatggggttgtttgtttttttcttgtaaatttgtttgagttcattgtagattctggatattagccctttgtcagatgagtaggttgcaaaaattttctcccaatttttaggttgcctgtaa

SEQ ID NO: 106576 - DNA, 201 bp, Homo sapiens
ggacttttggtgctactgcaccagcctgcttggcaagagatggatgtgtggctgatagggaaactgatagggttttcaacaaagcctgaaattaatcatayttaatgaatgtgactaatgtgatgaaagaatgagcgattaaaatattagcacatctgaacttctcctccctggctaatctcctccctagggttatcatct

SEQ ID NO: 106577 - DNA, 201 bp, Homo sapiens
ttaagaaatggaaacttactaatatttgggaagttggtcttctcaccactaccgatcccttcatgtccttccccttcatcacccccccaccaaaaaaaaaacaaaaaaaacatacacaaggtcagttacagtgtagtgtcacaacataatcagtcgtcaaggacgggcagagattgacgacatttacattttacagatgag

SEQ ID NO: 106578 - DNA, 201 bp, Homo sapiens
caacaaagcctgaaattaatcatatttaatgaatgtgactaatgtgatgaaagaatgagcgattaaaatattagcacatctgaacttctcctccctggctratctcctccctagggttatcatctttcaaagaagtaggggcacagaattacagaaacgggttttatggaacacaaatgccttttaaatggcttagattaa

SEQ ID NO: 106579 - DNA, 201 bp, Homo sapiens
aacagacgaggtagaatgactcgcaccaggatccgtggtgtggacatgtggtagcagggatttgacaagacgaattgtcgtagccactgagctcttcgcargggctattccacaccctctgtccttagatccccgtttatcttctttgcctcgccttccatctttacttggccctgtatcggagatagagaaatggcagcc

SEQ ID NO: 106580 - DNA, 201 bp, Homo sapiens
cttaaagaagacctaaatacaccacaaaaggaagactattcaattgcttgcttctgtgagtgcttatgaaatagattattatagatcggaaatctctggtytgtggcacaagattaaagttaactttgtggagggcttcagcaatatctctgtaataactcttccataatgatcaacctaagactggtctatcagtgaagt

SEQ ID NO: 106581 - DNA, 201 bp, Homo sapiens
gtgaaataaattgaatttaatgttgaatactttcaggcattcacttaataaagacactgttaagcactgttatgctcagtcatacacgcgaaaggtacaaygtcttttagctaattctaattaaaaattacagactggtgtacaagatacttgtgaaatctgtaactgactttattttcttgcccaaatatttgcttcctg

SEQ ID NO: 106582 - DNA, 201 bp, Homo sapiens; identical to SEQ ID NO: 17271

SEQ ID NO: 106583 - DNA, 201 bp, Homo sapiens
aactgtcaagatggctgcaactggaaatgggaagccaggcatttcccggggtaattgtgtggaaacaggagacaggcgtggggtcccttcagcagggaggyggttgcctttctgtgtaggcactaggtgagatgaaagtggctgggaggcatgttccctggggatgaggcaaaggcatcttactggctttgcacattatgc

SEQ ID NO: 106584 - DNA, 201 bp, Homo sapiens
aacatttcaatagcaaaagaaaagcatctttggaattcgtcgtgttgctaaagtttcttcaaaaaattggaggcttacatttctctgatggccagtgatgstgagcattttttcatgtgttttttggctgcataaatgtcttcttttgagaagtgtctgttcatgtccttcgcccactttttgatggggttgtttgttttt

SEQ ID NO: 106585 - DNA, 201 bp, Homo sapiens; identical to SEQ ID NO: 17286

SEQ ID NO: 106586 - DNA, 201 bp, Homo sapiens
agtctgtgcagttctcaagcggctgtctgtcttcacatctcgctgctcaagtgagggacgtgggctgtggggagaggctgaaactgtcaagatggctgcarctggaaatgggaagccaggcatttcccggggtaattgtgtggaaacaggagacaggcgtggggtcccttcagcagggaggcggttgcctttctgtgtagg

SEQ ID NO: 106587 - DNA, 201 bp, Homo sapiens
gtccatggcaggtgtagagtaccctagcccatccttgggacctggaggtgagaaggaaggaaggagaacatttcaatagcaaaagaaaagcatctttggarttcgtcgtgttgctaaagtttcttcaaaaaattggaggcttacatttctctgatggccagtgatgctgagcattttttcatgtgttttttggctgcataa

SEQ ID NO: 106588 - DNA, 201 bp, Homo sapiens; identical to SEQ ID NO: 17287

SEQ ID NO: 106589 - DNA, 201 bp, Homo sapiens
cagtgtgtctgcaggctgtgtagttttcaaaaaaactgggaagactaatggcatctcttaaaatgctggaagccggtaatactgggatctagtttctactkgggaaaattccatagtgtgctgtgtagtggccgcccccgcagttggagcaagtggtcttctccagtttgtcacagtctttaccaggtctgcgtgtttcat

SEQ ID NO: 106590 - DNA, 201 bp, Homo sapiens; identical to SEQ ID NO: 17288

SEQ ID NO: 106591 - DNA, 201 bp, Homo sapiens; identical to SEQ ID NO: 17275

SEQ ID NO: 106592 - DNA, 201 bp, Homo sapiens; identical to SEQ ID NO: 17277

SEQ ID NO: 106593 - DNA, 201 bp, Homo sapiens; identical to SEQ ID NO: 17278

SEQ ID NO: 106594 - DNA, 201 bp, Homo sapiens
gtggttttaagttaaagtaatactaatttatacactagagtataaaatagaaacgctaatttttctgcagcagagttatacagttcacagaatgtttattrtatcattattattttatgaattaacagttttttccgagaacatagattggactataaggggcagacatttgccttaataaggtgatcacacgtcaactta

SEQ ID NO: 106595 - DNA, 201 bp, Homo sapiens; identical to SEQ ID NO: 17281

SEQ ID NO: 106596 - DNA, 201 bp, Homo sapiens; identical to SEQ ID NO: 17280

SEQ ID NO: 106597 - DNA, 201 bp, Homo sapiens; identical to SEQ ID NO: 17279

SEQ ID NO: 106598 - DNA, 201 bp, Homo sapiens
ggggtgtcaccgtgttgcccaggctggtctcaaactcctgagctcagggaatccacctgcctcggcctcccaaaatgctgggattacaggcctgagtcacygcgtccggcctgctaatttactcttaacaagaccattactgtatctgtcatctgtagcattctaataatggccaactttttgagcacccattactgacca

SEQ ID NO: 106599 - DNA, 201 bp, Homo sapiens
atatacaatttgcaaagaggtttgcttcctgaaacatacctaaaagtggtactaggtaaaattttttttggtcagtattggagagagggatgtaactgtgtcttgtttttgttttttaaactaccaaagaaactccttgctcccaaagtactacatagtaattatttgtttaacattcatttgagctcttttatggcctag

SEQ ID NO: 106600 - DNA, 201 bp, Homo sapiens; identical to SEQ ID NO: 17282

SEQ ID NO: 106601 - DNA, 201 bp, Homo sapiens; identical to SEQ ID NO: 17283

SEQ ID NO: 106602 - DNA, 201 bp, Homo sapiens
aatatacaatttgcaaagaggtttgcttcctgaaacatacctaaaagtggtactaggtaaaattttttttggtcagtattggagagagggatgtaactgtgtcttgtttttgttttttaaactaccaaagaaactccttgctcccaaagtactacatagtaattatttgtttaacattcatttgagctcttttatggccta

SEQ ID NO: 106603 - DNA, 201 bp, Homo sapiens
tctatactggtgtgtcagtaatggacttcaactgatttttctttagaattagcagcagcctctgtcaccatccaaagattacaacccatgaaaccattgartttgtgccttgtatcagaaagcaaaggagaatgaaaaagcacagctaacattgcttgaggatctaggtaagaatttatgatgttgatatctatgttctat

SEQ ID NO: 106604 - DNA, 201 bp, Homo sapiens; identical to SEQ ID NO: 17303

SEQ ID NO: 106605 - DNA, 201 bp, Homo sapiens
gttctcccagcactgttatcagtctacaccaaagctttatcaccattggtgattttgtcccccagaggacatctggcaatgcctggagacatttttgttgyccctacctagggagtagaaggggtagtggttgctatcggtatctagtggggagaggccaaagatgctgctaaattttacaacctgtaagtcttacagtgc

SEQ ID NO: 106606 - DNA, 201 bp, Homo sapiens
tattaaaagcagtatttagaaataatcgtactatttaaagttttcatgcattaatgataaaactattttgtcatttatgatgtgttttgtttcaggttaayatctttagtctcagctgtcaaccactctttctactaactagatgttacatgctgagaaatgttattaccatctcaactttccagaaagcagaaaatcttt

SEQ ID NO: 106607 - DNA, 201 bp, Homo sapiens
tgggttccagtgattcttctgcctcagccttccgagtagctgggattacaggtgcctgtcaccgcgcccagctaatttttgtatttttagtagagacgggktttcaccatcttggccaggctggtcttgaactcctgaccttgtgatccacccgcctcagcctcccaaagtgctgggattacaagcatgagccaccgcgcc

SEQ ID NO: 106608 - DNA, 201 bp, Homo sapiens
ccgcgcccggccagtaatatctcttaaatacactgaggcaagttcatctgcatataataccaggtgaagtaaatgctgaaacactgggacactttaatacytcagtggaatatcctctttaaagattatgaatgctctaacactgtataaacatgcataataattatactctggaatagtactatctaatatggtggctac

SEQ ID NO: 106609 - DNA, 201 bp, Homo sapiens
gatgatgagtagatgcccaagtgaacttaacctaggatgtttgctttaccaggcaagaaggacaataagggagttgagcctatgtgccacagagtaattayaatgtttgtctgtggagtttaagctgggtatgataaaaagaagtgacagcagcagtagggtgtggagcagtgaaaaaagtgataggatcaatggattgga

SEQ ID NO: 106610 - DNA, 201 bp, Homo sapiens
ctttacccacaccaataaaattcaaactagctacattattaatgttttgctgaaattacatttctactcaagcataaatggtgctgttggggagttttttwaaaaaaatgtaatggctttactgagaaataagtagtgtacagtaaagtgcacataaagtgtgtactttgatgagttttgagatgtctacatctgtgaagt

SEQ ID NO: 106611 - DNA, 201 bp, Homo sapiens
catcttatacaagtcattataatgaccattttacagataagtcagacagactgtagaaaaggtcagaaacctttcgaccaaagccatagggttagtgcagrgcggaacatctctgaagtcaaagcccagactgctttgtttatgaaaagttgtaacttggctctataattcagtaatttaaatatatatcagaaaagagtt

SEQ ID NO: 106612 - DNA, 201 bp, Homo sapiens
ttataatgaccattttacagataagtcagacagactgtagaaaaggtcagaaacctttcgaccaaagccatagggttagtgcagggcggaacatctctgargtcaaagcccagactgctttgtttatgaaaagttgtaacttggctctataattcagtaatttaaatatatatcagaaaagagttggtgtattttcttagc

SEQ ID NO: 106613 - DNA, 201 bp, Homo sapiens
tataaagttctttgcatatttctaattttaaaatttgtatcacaatattattaaaagcagtatttagaaataatcgtactatttaaagttttcatgcattmatgataaaactattttgtcatttatgatgtgttttgtttcaggttaatatctttagtctcagctgtcaaccactctttctactaactagatgttacatgc

SEQ ID NO: 106614 - DNA, 201 bp, Homo sapiens
actagatgttacatgctgagaaatgttattaccatctcaactttccagaaagcagaaaatctttttctggctgtgtgcagacactaggaatacaacttttstttttcttaaagtttgattataaagtcccccagaagatgaccttttaatattcctgagtgcatgacctgtaaggtccccattctggttcttacaaggtct

SEQ ID NO: 106615 - DNA, 201 bp, Homo sapiens
attatagagcaataagagctctcattgtttagatgcatttgttgaagctatgtcaatggtagttatcctgttgcactgaattacttctttaacaacatacktttttcttgctttgaacagactgtacagtggaagcctggtgcacggactatgccagcaactgctagcatcgacctctgtagaaagtctcctgagcatatg

SEQ ID NO: 106616 - DNA, 201 bp, Homo sapiens
tgaaaagctgttacagtgcttttagaaatactgcccttgggctgtttctttatttaggtaaggaagagctgcaggaagatggtgctaagatgttgtatgcmgagttccaaagagtgaaggcgcagacacggctgggcacaagactggacttagacacagctcacatcttctgtcagtggcagtcctgtctccagatgggga

SEQ ID NO: 106617 - DNA, 201 bp, Homo sapiens
ttattaatgttctaaatgctgtgagtgtggctgattttttttcccacaagaagataagtttaacagctgacagaagtttcagtagcattaaatctcttcaygctatggtggaaaaaagaaataacagacatttcccaaagtaacttgcaggatacttggtgtgtattttcagctctccttgaggaggcggcagatgcttct

SEQ ID NO: 106618 - DNA, 201 bp, Homo sapiens
aggagtaggcagtacacccattcaaccaaccatatttataaagcatcttattaatgttctaaatgctgtgagtgtggctgattttttttcccacaagaagrtaagtttaacagctgacagaagtttcagtagcattaaatctcttcatgctatggtggaaaaaagaaataacagacatttcccaaagtaacttgcaggata

SEQ ID NO: 106619 - DNA, 201 bp, Homo sapiens
caccacatctggacaagacatcctggaatgcattgcctcctcagcctctagctttcagtgaagtggaaaggattaataaaaatatcagaacctcaatcatkgatgcagtagaactggccaaggatcattctgacttaagcagattgactgaggtaagtatttgtaatactaatgaaatttttgtaaagtactttacaggat

SEQ ID NO: 106620 - DNA, 201 bp, Homo sapiens
aaagatgagattaaggttccttttagagaaggacagaattagggacggacagaatgagaagttcacttctagcggctcttattttaaaggacagtctaaacccagcagtgcttaagtagtctggtccaggctgcagaagactctgggactaggttccctcccgcccaccctcacagactcagccctgccacccccatccca

SEQ ID NO: 106621 - DNA, 201 bp, Homo sapiens
tacaagtatagaaaccttgtgatagtacctattcattttgttttttagatcttgtaatacattatctgctttggccagctgttgttaataaaaactttatmgtctctcatttaattcccacaataaccacatgggatagggtttcattttggttatgttagttgcaatggacagagcaccattcaagttaaccaatgggag

SEQ ID NO: 106622 - DNA, 201 bp, Homo sapiens
gacctaactcggtaagcaccatgggaaactttagttcagatggaagcacacaaaagtaaatacagtattttcacttatatttaaagcaacaaagttacttaaaaaaaaaaaccaaaacaaaaaaaaactaatcttaatgtaattgattttgagtcactgttacagctgaagagctggaaacgggaaaaatattaaattatt

SEQ ID NO: 106623 - DNA, 201 bp, Homo sapiens
ttgacctggctttaaagaataggaattttaaaattgagatcagatatacattaggaacacctgtgtagaagcagaatattgtacatcccatattccctttscaaaatctagtttcctatgtttgcaatcaagtgattaggtcctgctctttctaattcagttctaacaaatgaaatctcatcttaggctttggaaactgtc

SEQ ID NO: 106624 - DNA, 201 bp, Homo sapiens
cctctcagtctttaaatgtcactttgtagagcctttttctgataacccaccctagtgagacacactgtctaccctcattcactctagtcctgttactctatttttttttaattgcatttcttaccacttggcatatggcttactcattcattcagatattaaatgcctaccctgtgctagggtgtagggacaaaaacagaa

SEQ ID NO: 106625 - DNA, 201 bp, Homo sapiens
cttctatattagttcacttactataacaaactgatgaggttgagtgctatcttgccctcatgtcgtagctaagaaatctagaacttgagtgaactaggtartgtcttagccagaaagtgtcagtgctaggactcaaacctagctcttttagctctaaatctaccatttccactgtacttcagtagtctgtgttatcgtcac

SEQ ID NO: 106626 - DNA, 201 bp, Homo sapiens
aaaaaaaaaacaattgcaatgcccattaggggatcttcttagatccaatgaaatattcagtctcacaaaactcacagaccacacgtggcaccagtctactyaaggatgtaggacggcaaccacagcttcccagtggatttaagtcaggtcttccttttctgtcagagttctcccagcactgttatcagtctacaccaaagc

SEQ ID NO: 106627 - DNA, 201 bp, Homo sapiens
ttacaacctgtaagtcttacagtgcacaggaaagtgtcccataacaaagaatctctagcccaaaatatcagtagtgccattccctgggctatacagctgaycaggaactagcctcttagcctcctcttcagtcacatctcagacaggaggagatgaatgtcatagtgaatgagtgcaagagccttcttggcattgggcagt

SEQ ID NO: 106628 - DNA, 201 bp, Homo sapiens
agcccaggaggtcaagcctgtagtgagctatgattgtgctccctgttgagcaaaaccctgtctctaaaaatatatatacactaaacccactgaattgtatrctttaaaaggatgacttttatgacatatgaattatacctcagttagataaaggagaagaaaaggtttcagtagcttaaaagccccgttccctataggatc

SEQ ID NO: 106629 - DNA, 201 bp, Homo sapiens
aacatttgctttaaaaagatgcatttctatactctctacataaagttgtggatttcatactgataaattttcaaatgcaaaacaaatactccttctttatrtgtagacacagggaatatggaggttctgcacctgtatggaagtgaggaacagaagaaacagtggcttgagcctcttcttcaagggaacattacctcttgc

SEQ ID NO: 106630 - DNA, 201 bp, Homo sapiens
cagtggctcatgcctgtaatcccagcactttgggaggctgaagcaggtggatcaccagaggtcgagttcgagaccagcctggccaacatggtgaaaccccrtctctactaaaaatacgaaattagctgggtgtggtggtgggtacctgtaaatcccagctactcgggaggctgaggcaggagaattgcttgaacctgggag

SEQ ID NO: 106631 - DNA, 201 bp, Homo sapiens
tggtttttgcttccaataaacagcatctatgcctctttttttggtaaactgccctcaggctattggagcaccctttgctcttactgttgtagtacctgagrtggaccttaaccaatagtgattcagaagtatgaaattttcattatccttgcttcagagacatgttttgaactttgacacggcagagttcccccattacct

SEQ ID NO: 106632 - DNA, 201 bp, Homo sapiens
cctccacacctgtgggtatttctagtcagtctggacaagagactgagaaaagaaataagacacagagacaaagtatatagaaagaaaagtgggcccagggsaccggcgctcagcatacggaggaccttcaccagcaccagtctctgagttccctcagtatttattaattactgttttcactgtctcagcaagagcaatgtg

SEQ ID NO: 106633 - DNA, 201 bp, Homo sapiens
tatatttattttttattgtactttaagttctagggtacatgtgcacagcgtgcaggtttgttacgtatgtatacatgtgccatgttggtgtgctgcacccmttaactcgtcatttagcattaggtatctctcctaatgctatccctccccacccccccaccccacaacaggccccagtgtgtgatgttccccttcctgtgt

SEQ ID NO: 106634 - DNA, 201 bp, Homo sapiens
ccaattatgtggtcaattttagaataagtgcaatgtggtgctgagaaggatgtatattctgtcagtttggggtggagagtctgtagatgactactaggtcygcttggtccagagctgagttcaagtcctgaatatccttgttaattttctgtctcgtcgacctgtctgatattgacaatggggtgttaaagtctcccacta

SEQ ID NO: 106635 - DNA, 201 bp, Homo sapiens
ttatgcttttctccacccaaacatctcagtagagtaaagagtaacagagcagcattgctgccaacatgtctcacctcccaccacagggtggcttttctccyatcccagaattaaacaaatgtacaattgggttttataccgagacattcagttcccaggggcaggcaggagacagtggccttcctgtatctccactgcaag

SEQ ID NO: 106636 - DNA, 201 bp, Homo sapiens
gtcattattacccagttagaagtagtaacaaaggaaaaaatatctgagagcattgtttcccatgtctccacatccaaacatcatgccctacagaaaactcttttttttttttaacagtttctgtttgtagttctctggtttccattataattgtagataaaatattttttctctttcttaatttattcattttagacagta

SEQ ID NO: 106637 - DNA, 201 bp, Homo sapiens
tttagaccaatatccctgatgaacatcgatgtaatgcatgttgttaaaaaattttctgtcccagttagttaagagtcctctctcttcctttttagtcgtakataaaatcatttatatgcatatatgattgcatgttcttacaactctgaggctgtgactatggagaaagcaggcttacaattcaagttctaagtcggttta

SEQ ID NO: 106638 - DNA, 201 bp, Homo sapiens
ccctgctataggtaaggtgtcatttttctctggtgctttcaagatttttttatgtctattttttcagaaacttaatcatgatgtgtgttggtatggatttstaggatttatcctgcttgggattcacccagcttcttgaatcttcaggtttaggtctcttgccaaatttgggatgttttcaaccattgtttcttcaaactt

SEQ ID NO: 106639 - DNA, 201 bp, Homo sapiens
acgagagataaggggggacatcccagactcttttaaacaatcagatctcatgtgaactcattactgaagagaaggcataaaaccatttatgagggatattyccccatgaccctcccactaggttccaccttcatgtttcaatatgcgatttggaggagacaagcatccaaactatatcacggtgtctctttattttttaaa

SEQ ID NO: 106640 - DNA, 201 bp, Homo sapiens
ctctggacctttttaaaccttcttggctttctttgacaccattctgtcagagaaaggagtggcatcacctcattactgctaggcagagagagaagtccagrttcccctcccagcttccatcagtacctgaagaggatgatgccctcatactgccaggtgggatgaaagtccaggcatcccatttggactgcactaacaacc

SEQ ID NO: 106641 - DNA, 201 bp, Homo sapiens
cagcttccatcagtacctgaagaggatgatgccctcatactgccaggtgggatgaaagtccaggcatcccatttggactgcactaacaacccataagatgkgttggggggacttattactggccagtggggaggaaagcctcaggtttttacttggcactgtctgataccttcctggcaggggagctggggcacctcatta

SEQ ID NO: 106642 - DNA, 201 bp, Homo sapiens
atattttaagatggctggaatagcacaggtaattaattgttttaaacgtgtgtttcgccattatttaccagtgtactgttgacaatgttttccagtcttcygggttttatattctttatccttagatcatttggcttatcataatgacaggtatcagacataggtaaaatataaatccagaatttacagaataggaatttg

SEQ ID NO: 106643 - DNA, 201 bp, Homo sapiens
tagacagttctgaagtgccatgcaataaagcagttgtctaagggtgtcccatggagaactttctgaagaccttaagtgttgaacaggctttaaagaatgcraagtatataaatcagtgaaggcattcctgatggaatttgcaaggcacattagaaattgcttaagacagtaaactatatggggggaatctgtcttgccaat

SEQ ID NO: 106644 - DNA, 201 bp, Homo sapiens
tcattcactcattctttcagtgcacgtttattgaatactgtgtgtaggttatgggaaaagcagggtggaatggggagtgaaaggacattgaaaaagataamgatgtctttgtttttaaagttttcatatccttatctaagtctactgatgatatctgcctgcctgtaaattcagcttttgtttatttatagaacctgatgt

SEQ ID NO: 106645 - DNA, 201 bp, Homo sapiens
ccctgtctctactaaaaatacaaaaattagccaggtgtggtgacaggcacctgtaatcccaactactcaggaggctgaggcaggagatttgcttgaccccrggtggcggaagttgacatgcgctgagatggcaccactgtacttcaccctgggcaacaagagcgaaactctgtctcaaaaaaatgaaaaaataattaatta

SEQ ID NO: 106646 - DNA, 201 bp, Homo sapiens
tggtgaaaatgaaaataataataaatgagatggatcagggaacattttagggtgtagaatttaaaggtcccatgtcccaatagatattggaagatgaaggraaaggtggaataaagaatagctgagatttctaggctagaagccttgtgttgtaacaaactgaaacagatcaaagttcaaatttcaactatttcaattgct

SEQ ID NO: 106647 - DNA, 201 bp, Homo sapiens
gttctttcatgctgctttgacttctggttatttttgtgtagcagctttcattgatggggtccattcttggccttgcctaatcatttttcttggatgatatrgagtgttacaaaagaattattatcttaatgaatcaggaatgttctctctatttgttttctgacataggtaaagtgggaaggattagaaccttcaaggtga

SEQ ID NO: 106648 - DNA, 201 bp, Homo sapiens
ttttatacaaagttattgacttatgaatttagctataattttacttttcagttactttgatttaaatataagaaatggatttgaaattttcattggactaytcttttgttaaatatcattacaattaagagtattggtgaaaaaaattagccaccaaagggattggtcgtgtaaggatcatggatcatggatccatgggaa

SEQ ID NO: 106649 - DNA, 201 bp, Homo sapiens
attaaggtgaagcatttcatgaaacaacacattcttccagctgaaaaggtgagtattatataagcagaatgtatttctgctaaaggactatcaatgaatamttttgttatttctgcttataggagaagcatggtgtcattttctttagtcaatccttacctagattcttcttctcaccttagaactaagccacgatagaac

SEQ ID NO: 106650 - DNA, 201 bp, Homo sapiens
gaggaaacttcacattatattagaaatatgtaataatgatctttggacatctttgtaacctttttttccttttttcttttggcaaagaactttcagtactktactaccacagattgatactactggacagttgtttgtacagactcggaaaggtcaggaagttcttattaaggtgaagcatttcatgaaacaacacattct

SEQ ID NO: 106651 - DNA, 201 bp, Homo sapiens
gaaaagataatatgaaaattatataattcagagcaatacactttctcctagaacatgatctgtaggcctctatttgttttaagaaaacctcagtactttaygaattcaagtattagatataagttagaagcataaataactttgaacactgtatgccatcctcttgcttattagaatactatatccctttcaaagaacatc

SEQ ID NO: 106652 - DNA, 201 bp, Homo sapiens
cgtgtgcagaacgtgaaggtttgttacgtaggtatacacatgccatggtggtttgctgtcatctacattaggtatttctcttaatgctatctctcccctarcccctcaccttgcgacaggcgctgatatgtgatgttcccctccctgtgtccatgtgttttcattgttcagctcctacttatgagtgagaatatgcagtgt

SEQ ID NO: 106653 - DNA, 201 bp, Homo sapiens
tagagtaaagagtaacagagcagcattgctgccaacatgtctcacctcccaccacagggtggcttttctcctatcccagaattaaacaaatgtacaattgkgttttataccgagacattcagttcccaggggcaggcaggagacagtggccttcctgtatctccactgcaagaggctttcctcttttactaatcctcctca

SEQ ID NO: 106654 - DNA, 201 bp, Homo sapiens
ttctatttcattttttagagaatgctagctatattccattaagttgatttcatgatgcactaatggatcataatatgaaaaataatcctaccaaagacttctcttgcagattcagctctgccactattttatcatttgacctgtgaactcacttttcactagatggtcatggatttttctctagcattaaaatttcatgag

SEQ ID NO: 106655 - DNA, 201 bp, Homo sapiens
caggcaggagacagtggccttcctgtatctccactgcaagaggctttcctcttttactaatcctcctcagcacagaccccctacgggtgtcgggctggggsacggtcaggtctttcccatctcacggggccatatttcagactatcacatggggagaaaccttggacaatacctggctttccagggcagaggtccctgcgg

SEQ ID NO: 106656 - DNA, 201 bp, Homo sapiens
aggagacagtggccttcctgtatctccactgcaagaggctttcctcttttactaatcctcctcagcacagaccccctacgggtgtcgggctgggggacggycaggtctttcccatctcacggggccatatttcagactatcacatggggagaaaccttggacaatacctggctttccagggcagaggtccctgcggctttc

SEQ ID NO: 106657 - DNA, 201 bp, Homo sapiens
caagtgttttttgagatcctagaccttagttttgttgttgctattgttatatatgtagaagaaaattatatcaataataacctttaaaaaaagaaagttartaaatagaatctataacatacaaattaggctaggtagtgttctatatatggtagtaatgaagacaacctcttacaactgttcaaaggaaaaaatatgatt

SEQ ID NO: 106658 - DNA, 201 bp, Homo sapiens
atggggagaaaccttggacaatacctggctttccagggcagaggtccctgcggctttccgcagtgcattgtgcccctggtttatcgagactggagaatggygatgacttttaccaagcatactgcctgcctgtaaacattttgttaacaaggcacatcttgcacagccctagatcccttaaaccttgattccatacaacac

SEQ ID NO: 106659 - DNA, 201 bp, Homo sapiens
tcattattggatatttgggttggttccgagtctttgctattgtgagtagtgccgcaataaacatacgtgtgcatgtgtctttatagcagcatgatttatastcctttgggtatatacccagtaatgggatggctgggtcaaatggtatttctagttctagatccctgaggaatcgccacactgacttccacaatggttgaa

SEQ ID NO: 106660 - DNA, 201 bp, Homo sapiens
tggggttgtttgtttttttcttgtaaatttgtttgagttcattgtagattctggatattagccctttgtcagataggtagattgcacatgttctcccattytgtaggttgcctgttcactctgatggtagtttcttttgctgtgcagaagctctttagtttaattagatcctatttgtcaattttggcttttgttgccatt

SEQ ID NO: 106661 - DNA, 201 bp, Homo sapiens
gataggtagattgcacatgttctcccattttgtaggttgcctgttcactctgatggtagtttcttttgctgtgcagaagctctttagtttaattagatccyatttgtcaattttggcttttgttgccattgcttttggtgttttagacatgaagtccttgcccatgcctatgtcctgaatggtattgcctaggttttcttc

SEQ ID NO: 106662 - DNA, 201 bp, Homo sapiens
ttctctgtttcttgtaataggcataaattgccactaccatggaattgcctgcaagtccaatgacgaaaactattgtgaggaatacagggaggaaaactttkgcaaattctctgacatcttctttgatacagatcagttcatattgactgtagtcataagtgccattcatttcattttcctcataataataatctgttgact

SEQ ID NO: 106663 - DNA, 201 bp, Homo sapiens
gtgaccagaaaagccacaatcatttgtctttgaagatcctttaaatctgagacataaccatatctgataatgtgagctttttcttcttttaaaaaaattgaaaaaaaaaatcgtactgtaccaacatctataaaaacgttttatcctgtagaatgatagtgaacaatacaaatctctgtgtaacatgttagaggatgttat

SEQ ID NO: 106664 - DNA, 201 bp, Homo sapiens
ggccaaggcgggcggatcatgaggtcaggaggtcgagaccatcctggcgaacatggtgaaaccctgtctctagtaaaaatacaaaaaaaattagccgggcrtggtggcgagcacctgtagtcccagctattcgggaggctgaggcaggagaatggtgtgaacccgggaggcggagcttgcagtgagcagagatcgcgccac

SEQ ID NO: 106665 - DNA, 201 bp, Homo sapiens
ccatagggtcgaatcttccgtgatttaacaattcctggacttagcccagcagaacgttcagccatatatgtggccacggtagaaacattggctcagttacrttccttgaatatacagtcactgcagctggaaggatatggtataggtgctgggtactgcaaaagacaggtaatgcatccacattaatagctatttttttca

SEQ ID NO: 106666 - DNA, 201 bp, Homo sapiens; identical to SEQ ID NO: 17305

SEQ ID NO: 106667 - DNA, 201 bp, Homo sapiens
tctattttgttctatttcattttttagagaatgctagctatattccattaagttgatttcatgatgcactaatggatcataatatgaaaaataatcctacyaaagacttctcttgcagattcagctctgccactattttatcatttgacctgtgaactcacttttcactagatggtcatggatttttctctagcattaaaa

SEQ ID NO: 106668 - DNA, 201 bp, Homo sapiens
ttccaatttaacggacttcctgacagaaatgagaagggctgttcatcctggtgcctttgaaagagcagacctttgccttcttgaggttttcattaaatacwgcaatactctagactagccatgcttcaatgaaaggaacattttagtacattgttatatgagtgtaaattgatagaatgatttggaaaataatttgataat

SEQ ID NO: 106669 - DNA, 201 bp, Homo sapiens
cagtccataatatggaagacttttttaaaatataaaatacagctactccttctgggggatgttttttgggtagctgaggaaacttcacattatattagaartatgtaataatgatctttggacatctttgtaacctttttttccttttttcttttggcaaagaactttcagtactgtactaccacagattgatactactgg

SEQ ID NO: 106670 - DNA, 201 bp, Homo sapiens
ttaaagttaaatgtttaaaatggaagtgattctgcattcagtccataatatggaagacttttttaaaatataaaatacagctactccttctgggggatgtkttttgggtagctgaggaaacttcacattatattagaaatatgtaataatgatctttggacatctttgtaacctttttttccttttttcttttggcaaaga

SEQ ID NO: 106671 - DNA, 201 bp, Homo sapiens
taaggctgtgtaaagtaaaatgagaaggactgatggccagcgatggaaccagaggacttagctctatataatcaaggctaattggctattttataaatgaratatgccactgtgggtaaagacctgaaattgacttttgatggaaaacatgattttgaatgtgttcaatgttatttatttctttattatacttgttttaag

SEQ ID NO: 106672 - DNA, 201 bp, Homo sapiens
tttattttatttttttgttgaagataattcttttttttaatttatttttattatactttaagttttagggtacatgtgcacaacgtgcacgttttttacayatgtatacatgggccatgttggtgttttttagatgcaaggtcttgctctgtcacccgggctggagtacagtgccacaatcatagctcactgaaaccttga

SEQ ID NO: 106673 - DNA, 201 bp, Homo sapiens
attgcatacaccaggattgctgctgccaatcacaatagatttttggtaaatctcttctatgcctaaaaacaaattgacctaaaatataaagaaaatctccrtatttaggtttaaaagtatttttgtgccacttgattgtgtaaatgtttaaggatatagataaaactctcaagtgtttctttctaatatttaagtcactta

SEQ ID NO: 106674 - DNA, 201 bp, Homo sapiens
tcccacagtggagtccactgtgattggcttatatagaaagcaaaaatgagaagaggaaaagaaatcaagatgtttgatttaagaattacctgcaggtggaygactgcttcggttggtctcttataacctgttatagcaatggtgtttgcccccaggcagaaggctgcaacagcactccaaaaaatgcaaatggaccagtgt

SEQ ID NO: 106675 - DNA, 201 bp, Homo sapiens
acattatttgtgtgggtttatatatgggttgtctcttctgtcttaattatctatgcgtcagtctctgccaacactgcacagtcttgattactgtggttacmtagtcagtcttcaaataagctaggctgattcctctcagtttagacttctctttcaaaagtgtttcagctattctggttcctttgcctttgcatataattt

SEQ ID NO: 106676 - DNA, 201 bp, Homo sapiens
ggcctctcttttttgatctttacaacaactctaagatataggtattattactcccattttgcagatgaagaaagggaggcttgcatcaatcaagtaatacrcaagtaagtggcttagatataatttaaacccaggttgatatgactagataagaccaagtaaaggtctttgctctattgcactaagttgagcaaagatacc

SEQ ID NO: 106677 - DNA, 201 bp, Homo sapiens
tcgtaagttttggaatgtataaaataatgactttcagtgtttttattatagtgctgaattttgttttcctttttcttatcctttctattttccttgggttstttttgtcctctgaagtatctcaaatattcttatagaatcaataatgaaaatattatttttaaaacagtgtgccaacttatagtacattttcaaaagaaa

SEQ ID NO: 106678 - DNA, 201 bp, Homo sapiens
gaacttaaaggtaaaatatctgaaaagaaattcactgactgggcttaataacataatggagataacagaggaaagaatgaacgaacttgaagatagacaayagaaattacccaatatgaagaaaagatgtaaagaaatgaacaatcctagggactctaaaatatgtgtgattagagttccagaagaggcaagagggagaga

SEQ ID NO: 106679 - DNA, 201 bp, Homo sapiens
taactccctgtgttccctgattcttttgctttttcaggtatgctataacccgagttttgcgtttagcagatggacctgacgaagttcatctttcagcaatygcaacaatggagctgcgggaccaagccaaaagactgacagccaagatataaggagggtggcactgccacatcccactggcagaaactctcctttatacaa

SEQ ID NO: 106680 - DNA, 201 bp, Homo sapiens
tatgtgtctaggaatttatccatttcttctagattttctagtttatttgcatagaggtgttcatagtattctctgatggtagtttgtatttctgtgggatmggtggtgatatcccctttgtcattttttattgcttctatttgattcttctctcttttcttctttattaatcttgctagcggtctatcaattttgttgatc

SEQ ID NO: 106681 - DNA, 201 bp, Homo sapiens
ttcttcccaggtgaaggtaggggatttgaaatttcccaaggccgccttggacctggcagaatccaccactgtatgagaacagtaggtttggcggaacgcgmtttgcagatcatgtgtgagcgggcaacacaaaggatagctttcaagaagaagttgtatgcacatgtgaggacgattacttatttgaatttattgtagccc

SEQ ID NO: 106682 - DNA, 201 bp, Homo sapiens
tctctgatggtagtttgtatttctgtgggatcggtggtgatatcccctttgtcattttttattgcttctatttgattcttctctcttttcttctttattartcttgctagcggtctatcaattttgttgatcttttcaaaaaaccagctcctggattcgttggttttttgaagggttttttgtgtctgtatttccttcagt

SEQ ID NO: 106683 - DNA, 201 bp, Homo sapiens
gtgaggacgattacttatttgaatttattgtagcccggtgcactacactaacattgaacaaaaacattacttgtgagagacagactttctctacatgaacygggtgattcttttcaataaggcatatttatgtctgtatttaaatatagtctaatgagaggtatttatctttatgaaaaattaaatagttcctaaaatgct

SEQ ID NO: 106684 - DNA, 201 bp, Homo sapiens
ccatgcattagcaagcaggaaggctagaatatgcagtaacattgaaggcaatagcattttaatgcataagatagattcttagatattcctttgtctgtgayaactgtcttaatataaatgctggtggagttcagagtagagccaataaaaagaaatagtatagcatttatgtaatttataattatataaattatagaattt

SEQ ID NO: 106685 - DNA, 201 bp, Homo sapiens
ttgtgttccccttggttttaggagctgggaatcccaagtgcaaaattgcaattgttttgggaagaactcaaaatacttctctctccaggtaattaaacaawtctgattgagaaacctgtgtaggaatgagccagtcttcctcctatctaggtaatttacttaaaattcactgtttggactcacaaatcataatgtaagata

SEQ ID NO: 106686 - DNA, 201 bp, Homo sapiens
gtaagaactctgggggagttctacgctagtctggtggagtaagtgcttaagatgaaccttcccacagataacagctaaaaagctacaaaatacctacatghatacatacatacatacatacatacatacatacctgcctgcctgaaattctcagggaagtgaacaaaggcaagctgattttgtaggggagtcaaaatttgg

SEQ ID NO: 106687 - DNA, 201 bp, Homo sapiens
tcatattgctaataaagacatacccgagactgggtaatttataaaggaaagaggtttaatggactcacagttccacatggctggggagtcctcacaatcayggcagaagacaaaggaaaagcaaagggatgtcttacatgaagtcaggcaagagagaatgtgtacaggggaactctccattataaaaccatcagatctcat

SEQ ID NO: 106688 - DNA, 201 bp, Homo sapiens
gttgcagtgatctgagatggcgccactgcactccagcctgggcgacagagccagtctgtctcaaaaaataaataaataaaatttaaaaactggcaacaacygaaatgtccttcaacaggcaaatggataaaccaactgatacatacttacaatggaatactactcagcaataaaaaggaatgaacagtcaatacacagaac

SEQ ID NO: 106689 - DNA, 201 bp, Homo sapiens
cagcttcttcaggaggacttgaattctgtcactggagaaacacaagtagaaatgggaccaacattttgtgagatattcatgactttttgaattatcatctrtaaattatatactactgagtctgttgttacaaatcactgtaaacatagttacatgtggcccatataataaaaattaggaaatatggccaggcgcagtggc

SEQ ID NO: 106690 - DNA, 201 bp, Homo sapiens
attttgagagttctttatatattctagatactatcctgtcagatatgtagtttgtaaatattttctcctactctgtatcttgtcttttcatcctcttaacagggtcgttcacagaacaaaagtgtttaattttaatgaactctaatttgtcaatttttgcttatgtgggtcatgcttttggtgtcaagtctaataactctg

SEQ ID NO: 106691 - DNA, 201 bp, Homo sapiens
gaatagactaccagcctaaatagactaagacttctaaatcaaggtggtacccatactcacccatttcctgatctcattccctctcacctgagctgtcaccragggggaatgggggcatggagtaaaccctggactgctgcaaggggtctgctgaagaaactcatctgatgctgccatgccagcatcctgtttttcctgtct

SEQ ID NO: 106692 - DNA, 201 bp, Homo sapiens
acccattttaggcacactgccttcctctccttccctccctttctcagataatatctattttaggtgttttttttttaaatcagttttagcattttgtcagagagtgtgcatgtaggatttctggagttatgtattacatagaagtggggaaatgactcctccacagccctcagattagatattcagattaaaagcaaattc

SEQ ID NO: 106693 - DNA, 201 bp, Homo sapiens
aatgtaatgataaattctttggtgacaaataaatgcttttaatacacacaaagccaatttacttttaaaaggcatcttatgattgccaaataatataaaawatattttatttctaatgaaaatttcccttgaattatatctttttttgttttaaaaaattatttgaggttgaaatgtaagtctatctttaggctattaatc

SEQ ID NO: 106694 - DNA, 201 bp, Homo sapiens
atgtaatgataaattctttggtgacaaataaatgcttttaatacacacaaagccaatttacttttaaaaggcatcttatgattgccaaataatataaaatrtattttatttctaatgaaaatttcccttgaattatatctttttttgttttaaaaaattatttgaggttgaaatgtaagtctatctttaggctattaatct

SEQ ID NO: 106695 - DNA, 201 bp, Homo sapiens
aagtaagtggcttagatataatttaaacccaggttgatatgactagataagaccaagtaaaggtctttgctctattgcactaagttgagcaaagatacctygggaaatggagataaaaaagcaaataaacaatatggtcccacctgttggaggactttacgagtaagttgatttgtttgcattcaattctaagaacaatag

SEQ ID NO: 106696 - DNA, 201 bp, Homo sapiens
actctcacatttcttgtcccatctcggttcccactctcagcatgtggtcttgtcttctacctaactcatctttgtcctttcagtcattttccagcatagcstgctttctaggaattacaccatgcccctcaaagttctctttatattgttgaagacattttcgtccgctacacaatatcacctgtatgcagattgatgggt

SEQ ID NO: 106697 - DNA, 201 bp, Homo sapiens
ccagggaggctgaggcagggggattgcttgagcccaggattctgaggcagcagtagtgagctatgatcacacctgggaatagccactccactctattctgsgtgacagagtgagagcctgtctcaaataacaaaacaaaaaatgcacagcatgatactgctacatagtaaatgtttcatgaaagagacctctcatcctttg

SEQ ID NO: 106698 - DNA, 201 bp, Homo sapiens
caggacaataaacataatgccctggagaattttcttaatcattaaatcctaaataaaagtgaagacttttatgtaaaaatgatttttaaaatatgaaaatytaattagattttaactaaaaagaataaatagtgttataatctttacatacataattttgtgaatcgtaaaagtatatctacaacaaattgaataaaaacg

SEQ ID NO: 106699 - DNA, 201 bp, Homo sapiens
acttataatattataaatttatagtataatataaccacaataaaagctcttataaagtcatagagaaaggagtgatcaatttttttccacagtaacaatgrcaaagttttgattgccttgctatatatgccaagctctgaacatattcatcaaataaatacatattggccatctgttgtgtgccaggttctttgctagaaa

SEQ ID NO: 106700 - DNA, 201 bp, Homo sapiens
acatcgctccccctcatcaaaaacctggctctttcggcttccttcctcgctgggccggctaaacccggccgcagcagcaccggggtgataagtgtccaggrcaggaggccagcgatgttgccttgctaaccgggtatctaagagaaacagggtctttttattcttaggctcgacagtctgacggccctttttctgaacggg

SEQ ID NO: 106701 - DNA, 201 bp, Homo sapiens
aaatagttgctcttattattacaataatcatttcattccattatgttaatttttacactgaggggtcccactgaggattcctgggctgtagatacagcatrgggtttcgctgaatttgtagcaggacatgtcagtgactatctaatatatagatcctgatgactgggaggcagaaaggaacattctccattccccatctgt

SEQ ID NO: 106702 - DNA, 201 bp, Homo sapiens
tgctatatatgccaagctctgaacatattcatcaaataaatacatattggccatctgttgtgtgccaggttctttgctagaaactcatacatgaactataygtgctacccgcccatttaatcttcaaactaaccctgtgtaagaggtgtatattatggctgagaaaattgaggattagagaggttaactaacttgtccaga

SEQ ID NO: 106703 - DNA, 201 bp, Homo sapiens
tggtgcaataccttttcaactttgagtattcatttataatctttttctttatttttttatttttttattatttttattttatatatatttattttttattrtactttaagttctagggtacatgtgcacagcgtgcaggtttgttacgtatgtatacatgtgccatgttggtgtgctgcacccattaactcgtcatttagc

SEQ ID NO: 106704 - DNA, 201 bp, Homo sapiens
tatatgtaccacattttctttgtccagtctatcattgatgggcaaatatttaggttgattccatgtctttgctattgtgcatagtgctgcaatggacatawgcatgcatgtgtctttataatagaataatttatattcctttgggtatatacccagtaatggaattgttggctcgaatgatatttctgtctttaggtcttt

SEQ ID NO: 106705 - DNA, 201 bp, Homo sapiens
attaaagttaaatgtttaaaatggaagtgattctgcattcagtccataatatggaagacttttttaaaatataaaatacagctactccttctgggggatgwtttttgggtagctgaggaaacttcacattatattagaaatatgtaataatgatctttggacatctttgtaacctttttttccttttttcttttggcaaag

SEQ ID NO: 106706 - DNA, 201 bp, Homo sapiens
tgtaatgaacttggacaaacatggatggaatctggggtcagtgaaaatgcagtttcagggcatatacagcttataattcctggagaatctgcttgttttgyggtatgcattattctttttggaatattcttcactgttagatacttgagttcttaggggcattgaaaatgtattacaattcaaagaaaaagcaaacttgga

SEQ ID NO: 106707 - DNA, 201 bp, Homo sapiens; identical to SEQ ID NO: 17327

SEQ ID NO: 106708 - DNA, 201 bp, Homo sapiens
caagtaatctgcccacctcagcctcccaaagtgttgggattacaggcgtgagccactgtgcccagcctagagttttctatagtacttttttttttttttttaaacagggtttcactctgtcacccaggctggagtgcagaggcacaaaggcacaatctcggctaactgcagtcttccaggttcaagtgatcctcctacctc

SEQ ID NO: 106709 - DNA, 201 bp, Homo sapiens
tgtatgctttcagtaaacataaatatatttcacaaagcatttcagaaactgaaattacaagctaagtatataatttagttactttaaacttaaatgtagtwttaaatgttttatatatgtatatgtgcaaattctattttatatatgtatgtctacttttcatatatattgctatattaaatattacatataatacatgtg

SEQ ID NO: 106710 - DNA, 201 bp, Homo sapiens
aagaattctaactgctgctattacctttgtccttgctgaaggaaaacattaggagaatgagctgtttttaagctaaacgtgtctccacttgatgaatggcrtgaaggagcttttccacccaagagtgatgtttctgcttcttttatttccattgcccttttgtataattcagcagctttttcaaaatctcctccttcatag

SEQ ID NO: 106711 - DNA, 201 bp, Homo sapiens; identical to SEQ ID NO: 17330

SEQ ID NO: 106712 - DNA, 201 bp, Homo sapiens
tcagaagaggaactgaaaaatttttcaggtccagttccagacttacctgaaggaattacagtggcatacacaattccaaaaaaggtacttcaaaaatatgwtttacccatatgtaaatatcatataaaatatttatcatcttcattctaatttgtaatgccaatgaagtatttcctgttttagatattttatgctataggc

SEQ ID NO: 106713 - DNA, 201 bp, Homo sapiens
acttcgaataaaagaggctgtataaggaaagtgaaaaaaattcttacctaagcacagctaaatttttcagtgtttctccaactcgaggatgcatccgaccyaggctatcttcataaatctttaatgctctttcatataatggcaaagcttcaacgtgttttttcttattaaaaaaaatgataatgctcatgcacactgggt

SEQ ID NO: 106714 - DNA, 201 bp, Homo sapiens
tagcagcactgcctaaacaagaggttatacaagaagaggaagagataatccatgaagataatgaatggggtaggtattcttttataaattgaaatggcagyataaaacaaaaccttttatggtagcaaatctaataagattatacaaattgaataattattgcttattaaattccttaaaaactgacataggatcaaattt

SEQ ID NO: 106715 - DNA, 201 bp, Homo sapiens
taaattgcctgaaaacctggtttctcaaaaaaaaattattttccttttgaatattgtttttaacttttcagatgatattttggcattttttttgttcctgmaatgattttagaaaagtgaaatttcacattaatttgacaagaaatccaataaactttgattcaatttaataatatttactgactgcgtcttgaatactgt

SEQ ID NO: 106716 - DNA, 201 bp, Homo sapiens
tgttaaatgccctttagctctttcatctcttttcctcacagttttttcttactacagctactagtagtagtctttttaaaaacatttttttagagacaggrtctcactctgtcccccaggttggggtgcagtgggtgcgatgatagctcgctgtagccttgaactcctggactcaagtaatcctcccaccacagcctcttg

SEQ ID NO: 106717 - DNA, 201 bp, Homo sapiens; identical to SEQ ID NO: 17328

SEQ ID NO: 106718 - DNA, 201 bp, Homo sapiens
attagacaaagattgtctaattgtgtttagaaacgtttttgtttgaagtaatatgcaaacaatttggacttaggtgttttagatatagaaacttaggaaasaaggctgttaatttgataaagtgtgtgaaacactgaaacatctaacaaatattttattaaacatataccaggcagaatagaaaacatgtacctttcctac

SEQ ID NO: 106719 - DNA, 201 bp, Homo sapiens; identical to SEQ ID NO: 17329

SEQ ID NO: 106720 - DNA, 201 bp, Homo sapiens
tgtattctagactaagctaacctactttgattagtactttaaaatgttaatatcctcctaaaagatgggaataaacagattaacttatgaataatcatagsagaagcagtataatagaaagtcagatacttaagatttagacctggcttggtaaccatttgaccataatccaatactgtaagcacaaacctgttcctttat

SEQ ID NO: 106721 - DNA, 201 bp, Homo sapiens
atataatttagttactttaaacttaaatgtagttttaaatgttttatatatgtatatgtgcaaattctattttatatatgtatgtctacttttcatatatwttgctatattaaatattacatataatacatgtgtgcatattcatacgtgaatatatgtgaatgtcagttactccctgcatttggaatagcttttattaaa

SEQ ID NO: 106722 - DNA, 201 bp, Homo sapiens
aagctcgcaacccagtttattgcaagaatcccccaaaaggctcaggaataggcacaggtacttgcagaacttcaggtagggctaaaaaaaactttcagttraaaatctgttgaagaaacaaaagccccagatcccctactccactgtgggtaactgggcaaacactccttccctaccagaagaggagagtagagatttctt

SEQ ID NO: 106723 - DNA, 201 bp, Homo sapiens
cttaagcaccctgactgcttgaccagggataatagagattattgagattagtggctctcaagtttgagtatgttatcacaattagttggaagccttattaragcacagattaacagatcctactctggtggttttgatttttataggtgtcaggtggacttcataattgacattgctaacaagctcccaggtgatcctgat

SEQ ID NO: 106724 - DNA, 201 bp, Homo sapiens
tttaacacaatccccaaatgattcatttgcatattaaagttggagaagtgctcttgcatctctaacaagcttcaggtgatgctaatgcagctagaccacgmcattttgagtagcaaagaggtagaacagtagttatatattgctgtagttagaatcacctgggaagttttaaaaaattctggtgtccagactgcaccccat

SEQ ID NO: 106725 - DNA, 201 bp, Homo sapiens
ctgaaataatgagttgcattcaattagcttttattacatttgtaatgaagcatgaataaaaatgtgaaagctggtagtgaaaaaataactgttgtgaacayactttatacttccttcacccttgtagttcttgtaaaataagtaatactacaatgatactgtagtatcattgatgttatattcataagttactcaatactt

SEQ ID NO: 106726 - DNA, 201 bp, Homo sapiens
agcaattgaaatagttgaaatttgaactttgatctgtttcagtttgttacaacacaaggcttctagcctagaaatctcagctattctttattccacctttyccttcatcttccaatatctattgggacatgggacctttaaattctacaccctaaaatgttccctgatccatctcatttattattattttcattttcacca

SEQ ID NO: 106727 - DNA, 201 bp, Homo sapiens
gtcaatagcaagaagattctgtcactgagttaacagtggaagattctggtgaaagcttggaagacctcatggccaaaatgaagaatatgtagataatggastgggatatattgtatttctcatgttaaagcctcttcccttgaaattaaaaaaaaattttaactgataaaacttagggcaacattaattaatgtatattct

SEQ ID NO: 106728 - DNA, 201 bp, Homo sapiens
aggaactatggactggaatagacgaagattgctgcacgtataacattttgcagggatctataattgacatagaaatttagaaaaacgtatctgggacccartgaactcacaaattggcaagagacatttaagaaatgatagcaaagaggcaatttacatgaaagtgatttacacatcaggccacaggaaacactcttctat

SEQ ID NO: 106729 - DNA, 201 bp, Homo sapiens
cttgtttgcagtctccactttgctgatctgggagagggtgtgcaggtgaggtcttggttcaaataccgcagactctcactgttcttactgaattttagcaratattcttgaatagatgttgctgaattttccgtatgcccttaggaccatttccagagacctgaagtgttttcccatccctcaacccccctaaattttacc

SEQ ID NO: 106730 - DNA, 201 bp, Homo sapiens
tttcatgactctattttagagagtcattgcctcatcgccttgccgtaacccatgacaatgctcctcatttgcggtgattaagttgaaatttgcaggtaaarctttagcatgttcctcaaacatcagagctgaccctgggtctggtctcagccacagcagaaaatgtatttaagagctcccttgagcaggcagtgggagggg

SEQ ID NO: 106731 - DNA, 201 bp, Homo sapiens
gcaagagtcgtggagctgtgacctccaccagggctgagaacggccccttataccgccagctcttggctgcctggaatctctcgggaacctccacggggccytgcacagcacaggccactgtggatacttctgggatttgtggctgaggagagaaacttaggaaagacaaatgtcacggccctttcacagcagacactggtt

SEQ ID NO: 106732 - DNA, 201 bp, Homo sapiens
caaatgcgggcagaaaatcacgctgtgttttgctccaacaggcaatgctcctgacagctgtaaagtggatgggtgcatcctgacaactcaggaagaagaagccgtgatcaggcaaaagtggattctcccggcccacaagtggaaaccactgcttccagtgaccaaggttcgtgtggcatgttattcggatccagcactcag

SEQ ID NO: 106733 - DNA, 201 bp, Homo sapiens
agggctgagaacggccccttataccgccagctcttggctgcctggaatctctcgggaacctccacggggccctgcacagcacaggccactgtggatacttytgggatttgtggctgaggagagaaacttaggaaagacaaatgtcacggccctttcacagcagacactggttgggcctgtgctgtggcctggaggcccagc

SEQ ID NO: 106734 - DNA, 201 bp, Homo sapiens
gcaaatgcgggcagaaaatcacgctgtgttttgctccaacaggcaatgctcctgacagctgtaaagtggatgggtgcatcctgacaactcaggaagaagaagccgtgatcaggcaaaagtggattctcccggcccacaagtggaaaccactgcttccagtgaccaaggttcgtgtggcatgttattcggatccagcactca

SEQ ID NO: 106735 - DNA, 201 bp, Homo sapiens
ggttagaccgcacaggctaaactaattctgattggctgatttaaagagagtgatggggtgagtggtttggtgggaaaaatggttatggcagagcaggaaawcggaatgagtcagggtggggcaggaaatcggaatgagtcagggtggagcaggtgatcggaatgagtcagggtggagcaggtgatcggaatgagtcagggt

SEQ ID NO: 106736 - DNA, 201 bp, Homo sapiens
tcttattaaaaaagcatgatatcctatacgccaaactgagtgcaaatgcgggcagaaaatcacgctgtgttttgctccaacaggcaatgctcctgacagcygtaaagtggatgggtgcatcctgacaactcaggaagaagaagccgtgatcaggcaaaagtggattctcccggcccacaagtggaaaccactgcttccagt

SEQ ID NO: 106737 - DNA, 201 bp, Homo sapiens
tttcactttggtggtgactgataactcttcttggttgttgagaagtttggatgaaaagctctaggtgtgtattatagtttcatgttgctgttattacaggyccttagtgtcttacagaatgcagatttctgatctcatggtctgtttggcagacctccaggtaggctcattggatccctctgctctgggtttcatgaggct

SEQ ID NO: 106738 - DNA, 201 bp, Homo sapiens
tgcaaatgcgggcagaaaatcacgctgtgttttgctccaacaggcaatgctcctgacagctgtaaagtggatgggtgcatcctgacaactcaggaagaagaagccgtgatcaggcaaaagtggattctcccggcccacaagtggaaaccactgcttccagtgaccaaggttcgtgtggcatgttattcggatccagcactc

SEQ ID NO: 106739 - DNA, 201 bp, Homo sapiens
gactgtaatggaaatgagggagcatggcagtatccacttatagcaataatatagtaggttatatcaaatacacaaagcttaatatacacatacatatgtaygtatatcagacaaatagaaatagcagctctaatgttctctacttgcatcctttgtgtccgtatgcaccccaggggcatgttcgcccaccctggagactac

SEQ ID NO: 106740 - DNA, 201 bp, Homo sapiens
gtccagaattacccaggcccgtcttagggtctgtggcttcgttatgtctgcaaattctgctttgcatatatggtgagaaatacataggtctcaggattagrgagcatgcattctggagcacaccctgctcacccagggtggaagtgtgtactccaaggccccgcaggcagttctttgtaattagcacatcctgctcaccac

SEQ ID NO: 106741 - DNA, 201 bp, Homo sapiens
atgaaatccaaatttcagtgtccataaataaagttttgctggaacacaggtgccttcattcacttatgtaacgtctgaagctgctttgtgttgcagtggcraggggatatagacctgcaaagtgtttattactggggggcctggcaatgctgcgacccccagtgtgatggaagagcactagcttcggagtcagaggaagac

SEQ ID NO: 106742 - DNA, 201 bp, Homo sapiens
ccttcattcacttatgtaacgtctgaagctgctttgtgttgcagtggcgaggggatatagacctgcaaagtgtttattactggggggcctggcaatgctgygacccccagtgtgatggaagagcactagcttcggagtcagaggaagacatgagttcactttccatggggagtatggaaacatagtgcctgcactgtaagg

SEQ ID NO: 106743 - DNA, 201 bp, Homo sapiens
agaaatatttgatatttctagttttctaactttctacagtacttgaagcagtattagtttctaacaaatctggacattttaaggtgagttaatatctggcrgtaaataaccaagaactcaatagtggcagacttgacttcaagactctgaaggctttggtagatgcaggcaggtgtctgaccagtggtggggctggaggct

SEQ ID NO: 106744 - DNA, 201 bp, Homo sapiens
catgcatgcacctgttcactgcagtactatccatgatagcaaagacatagaaccaacctaaatgctcatcaatgatagactggataaagaaaacatggtgygtatataccatggaatactatgcagccataaaagatgagatcatgtcctttgtaggaacatgaatggagctggaagccatcatcctcagcaaactaacat

SEQ ID NO: 106745 - DNA, 201 bp, Homo sapiens
ctctgaaggctttggtagatgcaggcaggtgtctgaccagtggtggggctggaggctggagggtgctgtgtcagttcctgagcttgagaggacaatgaacrcagtgtctgcaggagaaccagctctgcttactacctgctgagcttggtgaggtgctttctacatcgcacactcagtctaagctttatggaagctaacggc

SEQ ID NO: 106746 - DNA, 201 bp, Homo sapiens
ctatggtggctcctctgtaggattttacaagggtctgtttgttttgcgtttatctcaaggtaacacattttaaacacatttgagtagcagggtcttaactrcaaatggagcttggccaagagaataataaaaacagtttaaggaaatatttcttggaagctgctgaaaaggtatctttacaactcctgttctctagagaag

SEQ ID NO: 106747 - DNA, 201 bp, Homo sapiens
ttgagaaaatgagattctctactgtaagaggtaaataatttgccaaggacagtcataggaaatgatccatttggaaccagaatcaggtcttcctggatccsagcctgtgcattttctcttctggctagaactgaggattttcgttggggaatggtggtcacatgtggccaggttatgagagatcctacagtcatattagct

SEQ ID NO: 106748 - DNA, 201 bp, Homo sapiens
tgtgaggtggtgtctcattgtggttttgatgtgcatttccctgatgactaatgaggaggaacatcttttcatatgtttattggccatttgtatgttttatktggaaaaatttctcttcagatctctattcacttgtcttaaatttcaacaggtttttgggggaacaggtggtgtttggttacatggataagttctttagtg

SEQ ID NO: 106749 - DNA, 201 bp, Homo sapiens
agaatatcattggtattttaatagggattgaattgaatctgtaaattgctttggatagtactgtcattttaacaatattaattctttcaatctaggagcayggaacatctttccattttttctgtgtcctcttcaatatatttcaccagtgttttatagttttccttgtatagctctttcacttcgtaggataaatggatt

SEQ ID NO: 106750 - DNA, 201 bp, Homo sapiens
agtcccctactattattgtattgcagtctatttatccctttagatctattaatgtttgctttatataagacttgaaagctctggtgttggacacatagatrttcataattgacccatttatcattatacagtgtcttgtctttttttttttttaacagtctttgatttgtagtctattttatctgatataagtgtagctac

SEQ ID NO: 106751 - DNA, 201 bp, Homo sapiens
gactaatttcaaggcgccacctgcagcagaacctatgttacagcatgaagaacccctgatattctttttttatatataatttttattttacaaatgtattrggtatatgtgaaagtgtgttatgtgtatatgatggatggtgatcagcccagggcatttagggtgtccattacctgagtacaatccattcttctagcctgc

SEQ ID NO: 106752 - DNA, 201 bp, Homo sapiens
gtcatcgtggtccattttatggccccctttccttgttgatgcacatttaggttgatgacattttgcacgtattgaaaacatccttgtacaagtgtgtgcaygtgtgtcggtttatccctgggaccagtccttggtttctctctctctctctctttttttttgagacagagtctcactctgttgcccaggctggagtgcagt

SEQ ID NO: 106753 - DNA, 201 bp, Homo sapiens
catttcaggattgtaatttctcctttttatgctctagaaaattcttgttttaatccacacatcaataggtggttattgaaaaattatcaagtaaattaggwtgtggtggaactaagttgtattaggttagatagatcctaactagatttcacaagtatgttatattagcagctgaagtggtatgtacaaatgactcatttt

SEQ ID NO: 106754 - DNA, 201 bp, Homo sapiens
taagaaatgatagcaaagaggcaatttacatgaaagtgatttacacatcaggccacaggaaacactcttctatagtaagaaataaaagaaacacgtcaacytttttcacctgttggttttcgggactggtttcttgaatgactccaagttcgtttaccattttcttctcttctgaattccagaatgatgagaatggcattc

SEQ ID NO: 106755 - DNA, 201 bp, Homo sapiens
aaattagccaggtgtggtggcgggtgcctgtaatcccggctagttgggaggctgaggcagcagaatcgcctgaacccgggaggcggaggttgcagtgagcygagatcgtgccactgcattccagcctgggcaaccagagtgagactctgtctcaaaaagaaaacaaaagaaaaaaaacaaaaaactgcaaaatagtgatac

SEQ ID NO: 106756 - DNA, 201 bp, Homo sapiens
gattccttggcagctgtgactaaaagcaagtttggatattaactctgtaaagaagaatcttattttttaaaatgtgaaatcgacttcactttcaacagacraatatcttctatgccattaaagccaattataatatttaatgaactagaatggcagtgatattactctcataacccggctcctgctgaatgactccctcta

SEQ ID NO: 106757 - DNA, 201 bp, Homo sapiens
gaagagcagggacttgttttttgctgggtttttgatcttattaaaaaagcatgatatcctatacgccaaactgagtgcaaatgcgggcagaaaatcacgcygtgttttgctccaacaggcaatgctcctgacagctgtaaagtggatgggtgcatcctgacaactcaggaagaagaagccgtgatcaggcaaaagtggatt

SEQ ID NO: 106758 - DNA, 201 bp, Homo sapiens
atcaggcaaaagtggattctcccggcccacaagtggaaaccactgcttccagtgaccaaggttcgtgtggcatgttattcggatccagcactcagactgtrctatttccctaagattctcttttgaaggattaggatacgctccaaagtttctgctcagtttaatggtaaaacgaatgaggtttaaaacccctatctgcaa

SEQ ID NO: 106759 - DNA, 201 bp, Homo sapiens
tgagaagccctgatgtcctgcctctcctgggaagacagccctgcaaccatgggctgcacttgtttgcagtctccactttgctgatctgggagagggtgtgmaggtgaggtcttggttcaaataccgcagactctcactgttcttactgaattttagcagatattcttgaatagatgttgctgaattttccgtatgccctta

SEQ ID NO: 106760 - DNA, 201 bp, Homo sapiens
acagtgttggagtattctgagttcgttaatgcacttaattttactagtgggttttataaattcaaatgttttctttttgcacattagtgttttttttttttcaaatggaagaactttagcatttcatttaagactggtggtggtgaattctctcagctcttgtttatccaggaaagattttctctctctttcatatttgaa

SEQ ID NO: 106761 - DNA, 201 bp, Homo sapiens
tgaatgactccaagttcgtttaccattttcttctcttctgaattccagaatgatgagaatggcattctcttggttccgggttgtgaatgggcagttttccrattggcacatcctggagtaataactcgaattgaaattgacacaaaatattttgaaggtaaatgcaaagccataaagaagtaccctataattggtttgttt

SEQ ID NO: 106762 - DNA, 201 bp, Homo sapiens
tgcctgagccgctccctggaccctctctcagcctgcagtcgaggtgtccgtgggctactctcctccctctgcggacaggaactgcttcctcgtgcactccycaggtcactggtggggtcagctccgtgctggctgctggcctctctgcagggcaggttgcaccatgacagctgctccttcagggcaataaaggagaaaagg

SEQ ID NO: 106763 - DNA, 201 bp, Homo sapiens
agtgggactgaggacactggactttcggtgtggattccccgtttaagctgtgtaattttgagcatgctactttaacccttagaactctgtctgtctgtctrtctatctatctatctatctatctatctatctatctatctatcttttatttatttttttgagatggagtcttgctgtgtcgcccagcctggagtgcagtgg

SEQ ID NO: 106764 - DNA, 201 bp, Homo sapiens
acctcctttggctcagatgattctcccacatcagcatcccaagtagctgggaccactggtgcacaccaccatgcctggctaatttttgtatttgttttttwttttgtagaaatggggttttaccatgttgcccaggctggtctcaaaatcctgggctcaagcaatccacccaccttgacctcccaaagtgctggaattata

SEQ ID NO: 106765 - DNA, 201 bp, Homo sapiens
tgtttgctttatataagacttgaaagctctggtgttggacacatagatattcataattgacccatttatcattatacagtgtcttgtctttttttttttttaacagtctttgatttgtagtctattttatctgatataagtgtagctactcctgctcttttttggcctctggttgcatgagatatctttttccatcctttc

SEQ ID NO: 106766 - DNA, 201 bp, Homo sapiens
gatgtttcgggccaggtgttgtgactcatgcctgtaatcccagcattttgggaggctcaggtgggagaatcacttgaaaataggagttcaagacctgcccrggcaacatagtgagaccctgtctctacaaaaaaagtaaaaatatggtttggtgtggtggtgcgcacctgtaatcccagctactcagaggctgaggtggga

SEQ ID NO: 106767 - DNA, 201 bp, Homo sapiens
ctggaattttctttaatgggagactgtttaaatttcagcttttatctcatcattcattattggtttattaaggttttctatttcttcatggttcaatcttsgtagattgtatgtgtccagaaatgtatccatttcttctaggttttccaatttgttggtatgtagttgttcataatagtctctaattgatctttgtaattc

SEQ ID NO: 106768 - DNA, 201 bp, Homo sapiens
gaccctgtctctacaaaaaaagtaaaaatatggtttggtgtggtggtgcgcacctgtaatcccagctactcagaggctgaggtgggaagatcacttgagcycaagagtttgaggctgcagtgagctatgatcgtgccactgcattccaacctgggcaacaaagaaagactctgtctccaaaaaaaaaaacaaaaccaaaac

SEQ ID NO: 106769 - DNA, 201 bp, Homo sapiens
actggtggggtcagctccgtgctggctgctggcctctctgcagggcaggttgcaccatgacagctgctccttcagggcaataaaggagaaaaggcaggggmaggggtcaagacgtaagtcacaggcttccggaacttcacctggaaagtgacacccatcacctttgctgtgtcctgttcaccagaagtgagccactgggct

SEQ ID NO: 106770 - DNA, 201 bp, Homo sapiens
tgagttggctgtaaatgtgttgatttatatctgggttctctattgtgttgtctgtttttatgccataaccattctgatttgcttatatagcttcatagtayattttgaagtcaggtagtgtgatgccttcagctttgtttttttgctttggttattcagggtctttcatttaaattttactttttaaaaatatttctgaga

SEQ ID NO: 106771 - DNA, 201 bp, Homo sapiens
tcaggagaggcagataataaatatatatgcccagccaggcttgtgctgtggcacagcaaacagggcagcgcgcagtcagcatcacccagccttgatgagcmcgccgcgatgctgctacgagctctgtgaagacgcgattttaattccagccagtcggtaggttgtgtgtctgtgtggcggtttagcaccgtttcaaattct

SEQ ID NO: 106772 - DNA, 201 bp, Homo sapiens
gtgattatctgtgaagagagaggtgggcttggaaatggggtgggagagagggtagggcactatttcttagattttatacttgagcatatatatatatatayacacacacacacatataaacacttacacactacatatgtgtatatatagtcacgctataacatcacacgagacacatatatttctcctttttgaaaaaaa

SEQ ID NO: 106773 - DNA, 201 bp, Homo sapiens
gagccatcatcatgccactgcactccagcctgggtgacagagtaagaccctgtcaaaaaaaaaaaaaaaagcaagctctccattcactggcaacaagagaratccatgtatattttatgagtgtaaaacagagtttgaaggcgcacacatcaaacagtgagatgtgattatctgtgaagagagaggtgggcttggaaatgg

SEQ ID NO: 106774 - DNA, 201 bp, Homo sapiens
acctcgtctgtcccctccactgcaccacgagccgctgaagagcaagtgcatgctcagccccgggcatggcgtctgtgcatctgggagctctgcacacggtkctgaatgaatgagcacagaaccaggtggagtttgtttaaccaacactcccgtgacactcatcgagctccagcgctcttccaggggctttccgctatcagt

SEQ ID NO: 106775 - DNA, 201 bp, Homo sapiens
ttgcttgagcccaagacgttgaggttgcagtgagccatcatcatgccactgcactccagcctgggtgacagagtaagaccctgtcaaaaaaaaaaaaaaaagcaagctctccattcactggcaacaagagagatccatgtatattttatgagtgtaaaacagagtttgaaggcgcacacatcaaacagtgagatgtgatta

SEQ ID NO: 106776 - DNA, 201 bp, Homo sapiens
catgctcagccccgggcatggcgtctgtgcatctgggagctctgcacacggtgctgaatgaatgagcacagaaccaggtggagtttgtttaaccaacactyccgtgacactcatcgagctccagcgctcttccaggggctttccgctatcagtcacgtttggatacatcgcggttggccatatggttcactttgcagctgc

SEQ ID NO: 106777 - DNA, 201 bp, Homo sapiens
aatgaatgagcacagaaccaggtggagtttgtttaaccaacactcccgtgacactcatcgagctccagcgctcttccaggggctttccgctatcagtcacrtttggatacatcgcggttggccatatggttcactttgcagctgcgggctgtgacaacttacttgatctgtcaaagacgcgttccttttcacttgtagcat

SEQ ID NO: 106778 - DNA, 201 bp, Homo sapiens
caagtaactgaaaagtttaaatgtgttaaatacctaggtgtggccactggcttccagattggacaatatgggtcccagcaaaggcaccatcagctcctgtrgttccctggatcattggcctccctgcctgcacccatggtctcccctgcctggttgtctgtccttccctataccacccagcctggcatccacccctaaagg

SEQ ID NO: 106779 - DNA, 201 bp, Homo sapiens
ctgtctgtctgtctatctatctatctatctatctatctatctatctatctatctatcttttatttatttttttgagatggagtcttgctgtgtcgcccagsctggagtgcagtggcgcaatctcagctcactgcaacctccacctccagggtccaagcgattctcctgcctcagcctcccgagtagctgggattacaggca

SEQ ID NO: 106780 - DNA, 201 bp, Homo sapiens
gttgggatgcctgggggccgtgggggctgacctgtaaataggagatcagggcagtgttgctgaggaggtgattgtcaggcaaaagcttggagggaggcaargagcaaacacacagctgtgtggggaagagcattcctggcaaagggaaccacctttgccaagttgcagaggcaggacagaagggaaagggccctaagtgag

SEQ ID NO: 106781 - DNA, 201 bp, Homo sapiens
agtcttggtaattttaacttattttggaaagacggcattttatctgttttttcttttaactattattttaggttcaagggtaaatgtgcaggtttgttatrtaggtaaacttgtgtcatggggttttggtgtacagattattttatcacgtaggtatcaagtatggtacccgataagtatttttgcctgatctccctcctc

SEQ ID NO: 106782 - DNA, 201 bp, Homo sapiens
gggaggtgcttgtggccaaggtgaggagagcagctttcattctgagtgaacagggaatgacttttgtttctgaaagcttgctctggggctgggctaaggayggcttgtagacaggcagggacacatgtgttggggatatttcattacccaggagggagacggtgctggtgtctctcctctccctctctgcctctgtgagtg

SEQ ID NO: 106783 - DNA, 201 bp, Homo sapiens
gacatttaagaaatgatagcaaagaggcaatttacatgaaagtgatttacacatcaggccacaggaaacactcttctatagtaagaaataaaagaaacacrtcaacctttttcacctgttggttttcgggactggtttcttgaatgactccaagttcgtttaccattttcttctcttctgaattccagaatgatgagaatg

SEQ ID NO: 106784 - DNA, 201 bp, Homo sapiens
catacatacttgcattttttatggtatctttaatccacagttctctgcatgaatggtttaaaataacttacttatttttgtgagggatgctttagttaaamctagataacaaacagtaaatccacttaagcagacacccaaaactgcaacaggtcatgaatctaccactgtcaaacactcaggatacctctggtacataca

SEQ ID NO: 106785 - DNA, 201 bp, Homo sapiens
tgtgacaggatgtggctccctaggcccctctcttttcagggggcctggcatggaaactgtgtcagggggagattctcagtatggtgggagagtgagtgtgrcagggactccctagcagctgagaacctctctaatcttcttgtgctcttgctggggctggtggtccaggggctcttactctttggaggccatgtggaccat

SEQ ID NO: 106786 - DNA, 201 bp, Homo sapiens
acgaatgaggtttaaaacccctatctgcaaactttaagaagaaaggctctatttctctccacttttgtatttccaaattttattagaacaaaattgttaartgttcagaatacatacgtggaaacatgtctctgcatcatgtttaactttgtagaaggggcgactagcacatttaaagctctaatggcgtgtccacctgca

SEQ ID NO: 106787 - DNA, 201 bp, Homo sapiens
aatacatacgtggaaacatgtctctgcatcatgtttaactttgtagaaggggcgactagcacatttaaagctctaatggcgtgtccacctgcaggatggaygctctgagatattccacaagtgtcttctttgatttagaaagagggtcaggctagaggtgagagctgctcccatgtaaagataggaaataatctccgggag

SEQ ID NO: 106788 - DNA, 201 bp, Homo sapiens
gtcagaggagacaacctggcactcactatagcccaagatgcccttgagggggccctccaatgcctgcttcaccgcctttttgatggtgtcatatttgtcargtttctccagatggcaagtcaggtccaaaatgacacagaggtggggatatggaacaccatgctagtgagcttccattcagcttggggatgacctttccaa

SEQ ID NO: 106789 - DNA, 201 bp, Homo sapiens
ctgctgcctgggctggatctgctgtgaaacaagaggagcttgatgttctaggagaaatgcttggggcccaggaccatctgctggagggaaaagaatgagtrttcccagagaaacagaccagtgctggggctgttccctggaattcaggttaagtgtcctgggcttgtgaactgggcacaaaagatgctgcaagtctttgct

SEQ ID NO: 106790 - DNA, 201 bp, Homo sapiens
ccaccagccacagcccccaccagtccctgagaccacccttggcgagtgccatcatttacttgaccagtttctgtggggatctgcatccgtgactctttatygaacacttagttatttcttccccttctatttaccagtctaagttgacccttctctgaatattgctgaaactatcaaaaacaataacaatctcaaatacat

SEQ ID NO: 106791 - DNA, 201 bp, Homo sapiens
ctgtgaaacaagaggagcttgatgttctaggagaaatgcttggggcccaggaccatctgctggagggaaaagaatgagtattcccagagaaacagaccagygctggggctgttccctggaattcaggttaagtgtcctgggcttgtgaactgggcacaaaagatgctgcaagtctttgctttgggaagctgtcaagggtca

SEQ ID NO: 106792 - DNA, 201 bp, Homo sapiens
ccagaccagccctgtgactggcacaatgccagggtgctgggggagcacatggactccagccatgggtagcctgggggaattggggtgggaggggtggggaygggccagctgagtgctgctggaggcagcttgctggagagcagctggcgggcagggatgaggtgcagggtggttctggcagaggtgtctgcgaggagagca

SEQ ID NO: 106793 - DNA, 201 bp, Homo sapiens
actttgggaggccaaggagggtggatcacctaaggtcaggagtttgagaccagcttggccaacatggtgaaacctcatctctactaaaaatacagtaattmcggccaggtgtggtggctcacgcctgtaatcccagcactttgggaggccgaggtgggtggatcacgaagtcaggagatggagaccatcctggccagcatg

SEQ ID NO: 106794 - DNA, 201 bp, Homo sapiens
tggaacaaaacttactgccagtgtggagtgcgcatctaatccggaaaggcagataataaataaatacatttttttgagactgagtttcacttttgttgcccaggctggagtgcaatggcacaatctcggctcaccgcaacctccgccttccgggttcaagtgattctcctgcctcagcctcccgagtagctgggattacag

SEQ ID NO: 106795 - DNA, 201 bp, Homo sapiens
cacctcgtctgtcccctccactgcaccacgagccgctgaagagcaagtgcatgctcagccccgggcatggcgtctgtgcatctgggagctctgcacacggkgctgaatgaatgagcacagaaccaggtggagtttgtttaaccaacactcccgtgacactcatcgagctccagcgctcttccaggggctttccgctatcag

SEQ ID NO: 106796 - DNA, 201 bp, Homo sapiens
acttttgtttctgaaagcttgctctggggctgggctaaggacggcttgtagacaggcagggacacatgtgttggggatatttcattacccaggagggagayggtgctggtgtctctcctctccctctctgcctctgtgagtgtgtaatatgcataatgtgtatgactttttttttttttttttttttttttttgagatgga

SEQ ID NO: 106797 - DNA, 201 bp, Homo sapiens
aagccgatcaatacagatggagtgggtcatgccccacgttaccaggacccctggcttctcccaccacaggggggtggctgggagggaacattacattaatkacttaggcaaaatgcctgagcgctctgtaccggggcatagtgagcttgctggagctgatggggaaaaagttaagctgtttccagagaaccgctggtgtat

SEQ ID NO: 106798 - DNA, 201 bp, Homo sapiens
agatggagtcttgctctgtcacccagactggagtgcagtggtgcaatctcggctcaccgcaaactccgcctcctgggttcaagtgattctcctgcctcagygtcccaagtagctgggattacagacacctgccaccacgcctggctgatttttttatttttagtagagacggggtttctctatattagccagggtggtctc

SEQ ID NO: 106799 - DNA, 201 bp, Homo sapiens
ggaagccgatcaatacagatggagtgggtcatgccccacgttaccaggacccctggcttctcccaccacaggggggtggctgggagggaacattacattawttacttaggcaaaatgcctgagcgctctgtaccggggcatagtgagcttgctggagctgatggggaaaaagttaagctgtttccagagaaccgctggtgt

SEQ ID NO: 106800 - DNA, 201 bp, Homo sapiens
cttccctcacatacttcatacctttgcttttgctcaggaagagcagggacttgttttttgctgggtttttgatcttattaaaaaagcatgatatcctataygccaaactgagtgcaaatgcgggcagaaaatcacgctgtgttttgctccaacaggcaatgctcctgacagctgtaaagtggatgggtgcatcctgacaac

SEQ ID NO: 106801 - DNA, 201 bp, Homo sapiens
gtcccaagtagctgggattacagacacctgccaccacgcctggctgatttttttatttttagtagagacggggtttctctatattagccagggtggtctcraactcctgacctcaggtgatctgcccacctcagcctcccaaagtgttgggattacaggagtgagccaccgcgcctggccatgtgtatgactttgattgtg

SEQ ID NO: 106802 - DNA, 201 bp, Homo sapiens
gggtttctctatattagccagggtggtctcgaactcctgacctcaggtgatctgcccacctcagcctcccaaagtgttgggattacaggagtgagccaccrcgcctggccatgtgtatgactttgattgtgaaaagtttcaaacataccccaggtgggtaaaaatatcagatggtccctgaatattcccactgtccagcag

SEQ ID NO: 106803 - DNA, 201 bp, Homo sapiens
agcacatggactccagccatgggtagcctgggggaattggggtgggaggggtggggatgggccagctgagtgctgctggaggcagcttgctggagagcagstggcgggcagggatgaggtgcagggtggttctggcagaggtgtctgcgaggagagcaagggagcccacatgctccaggtggctcagtgtttcaagaacac

SEQ ID NO: 106804 - DNA, 201 bp, Homo sapiens
ctaaaaatacaaaaaaattagccaggcgtggtggcaggttcttgtaatctcagctactcgggagtctgaggcaggagaattgcttgaacccaggaggcggyggttgcagtgagctgagatcatgccgctgcactccagcctgggtaacagagcaagactccgtctcaaaaaaaaccctcccaaaacaaaaattagccgggc

SEQ ID NO: 106805 - DNA, 201 bp, Homo sapiens
ttggtgcctttattgagaatgagttggctgtaaatgtgttgatttatatctgggttctctattgtgttgtctgtttttatgccataaccattctgatttgsttatatagcttcatagtacattttgaagtcaggtagtgtgatgccttcagctttgtttttttgctttggttattcagggtctttcatttaaattttactt

SEQ ID NO: 106806 - DNA, 201 bp, Homo sapiens
gaggctgcgatggggcaggctgaggaagagccagagctgaggcttggacctgtcggctttgagatttgattcaacgtccaaggggagatgttttgagttgkcagatggaaattcatgtcgggaaggtgctatgcatttggggataattggagtgtggatgatcttaggagcaatgactctggttgacatcaccaggggatg

SEQ ID NO: 106807 - DNA, 201 bp, Homo sapiens
gctgaggaagagccagagctgaggcttggacctgtcggctttgagatttgattcaacgtccaaggggagatgttttgagttgtcagatggaaattcatgtygggaaggtgctatgcatttggggataattggagtgtggatgatcttaggagcaatgactctggttgacatcaccaggggatgagggcgcaggaggaggag

SEQ ID NO: 106808 - DNA, 201 bp, Homo sapiens
tgaagagtttgagtaaaattggtattagttattccttttatgtttggtagaattcagcagggaagccattaggtcctggaattttctttaatgggagactktttaaatttcagcttttatctcatcattcattattggtttattaaggttttctatttcttcatggttcaatcttggtagattgtatgtgtccagaaatgt

SEQ ID NO: 106809 - DNA, 201 bp, Homo sapiens
caacgtccaaggggagatgttttgagttgtcagatggaaattcatgtcgggaaggtgctatgcatttggggataattggagtgtggatgatcttaggagcmatgactctggttgacatcaccaggggatgagggcgcaggaggaggagactccagtgagcccagaggcttcagcacaaaagaaccagcgaatcaggatgtc

SEQ ID NO: 106810 - DNA, 201 bp, Homo sapiens
cccggtttgcaccgttcctctggcactgtgggacagaagtggacttgctggaagccaggagatcacatgaatgttaatgatcaccttgttgtggtctttgmcctagagtgacagcccgtgcttcaaagagcatgaatatacggagtttgggaaatggatggatggctgggagaccaggaggaaaaggattccaggtaataa

SEQ ID NO: 106811 - DNA, 201 bp, Homo sapiens
gtggacttgctggaagccaggagatcacatgaatgttaatgatcaccttgttgtggtctttgccctagagtgacagcccgtgcttcaaagagcatgaatayacggagtttgggaaatggatggatggctgggagaccaggaggaaaaggattccaggtaataacaacggttcgttcatcgaagtgcagctgacactgcaaa

SEQ ID NO: 106812 - DNA, 201 bp, Homo sapiens
cagcccgtgcttcaaagagcatgaatatacggagtttgggaaatggatggatggctgggagaccaggaggaaaaggattccaggtaataacaacggttcgytcatcgaagtgcagctgacactgcaaagttaaaaacgcaggctgtggcaaagccagtgtccgttttgggtcagctttaacatggggccctggaatgctct

SEQ ID NO: 106813 - DNA, 201 bp, Homo sapiens
gtttaaccgccatggaaacagattcctggactcagcccagggcacactgctagcaagataagctggggactgggccagggtctgtcctcaacactgtaccygctgtcttttacgattttatgcaatttttattcattgctattactcagtctcaatcaaaatataccttctgaagttgaagaaaagcaaacaaatccaggc

SEQ ID NO: 106814 - DNA, 201 bp, Homo sapiens
cggactgcttctgagtcctctgaaaaagaaatgtctatttcatgagacaatctgagcctcacaaaccggtttgttccttccctcacatacttcataccttygcttttgctcaggaagagcagggacttgttttttgctgggtttttgatcttattaaaaaagcatgatatcctatacgccaaactgagtgcaaatgcgggc

SEQ ID NO: 106815 - DNA, 201 bp, Homo sapiens
cacaaattggcaagagacatttaagaaatgatagcaaagaggcaatttacatgaaagtgatttacacatcaggccacaggaaacactcttctatagtaagwaataaaagaaacacgtcaacctttttcacctgttggttttcgggactggtttcttgaatgactccaagttcgtttaccattttcttctcttctgaattcc

SEQ ID NO: 106816 - DNA, 201 bp, Homo sapiens
gcttgtgaactgggcacaaaagatgctgcaagtctttgctttgggaagctgtcaagggtcattgcccctctcagcctaaacctcttagcacctctccgacsatgcttttcactttggtggtgactgataactcttcttggttgttgagaagtttggatgaaaagctctaggtgtgtattatagtttcatgttgctgttatt

SEQ ID NO: 106817 - DNA, 201 bp, Homo sapiens
gaaatgttgatccataacagacaggaaagtaaataacaggaacagtaaacagggccgttagtttgagaagtgctaacctagagaaaatggttgcaaggctyaggccagcagatttccccagaggtcatggagcatggcagtagccttggtttttatttgaatgttcacctcaccacacctcaaggtgaagacatttggagg

SEQ ID NO: 106818 - DNA, 201 bp, Homo sapiens
cagctcgtccttcctgcctttcgaactcctgggctggagtcagagcctggggcagggtgccctccaggctgcagtgaccacagagtcctggcttgggtggrgtgaccacagcctgttttgctcaggaaaatctgatttaccttgtattctggatgtacaattagtatcattgacctcactctcaaaatgatcctgctttgg

SEQ ID NO: 106819 - DNA, 201 bp, Homo sapiens
tggtttttatttgaatgttcacctcaccacacctcaaggtgaagacatttggaggggtctgagatcttgtccttcatttgcaagcatctgccaccatcacscactggctgttttgatcagtgaaaacaaaacaggcctttattctgttttttattaaacatggggcttgatatgtactatttttattaaagtgtttcatta

SEQ ID NO: 106820 - DNA, 201 bp, Homo sapiens
ctgcagggtgacctatggcggcccttgtgggtgaacacagaggccccaaccgcatacgtaacccagagcttttttggtcattgctcggtttgtaaaagtascacgaaacctctggttcatgaaaaaaagaaagttggtttatttgcttcttgagtgtaagatgttagtgctcttacctccagatggtaaaggagaatcgga

SEQ ID NO: 106821 - DNA, 201 bp, Homo sapiens
gtaaattgacattctgcaatgtaaagggttgatgtagagaaatctatgccgccttgttattaaaatctccctgtatatttgggatggagtcatgtgatgtrcactggcaaattagcatattagaatgttagaaagacatgcaaatcagcatgaactcatgccaaaacatagcagagacagggatctgagcaagtaatttgg

SEQ ID NO: 106822 - DNA, 201 bp, Homo sapiens
catattagaatgttagaaagacatgcaaatcagcatgaactcatgccaaaacatagcagagacagggatctgagcaagtaatttgggactgcattgtttcmtggggaaaattctgaggtcctcaaatactgctcttctgggtaaggtgaatttcatcatttgtgttgggaagaaaatggatctatgtcttgaattttctgg

SEQ ID NO: 106823 - DNA, 201 bp, Homo sapiens
gaagaaaatggatctatgtcttgaattttctgggaaatgttttacctgcctaattataaaagtgcaggacagcttattaaaaaaatagagaaaatgctgamgaacatagggaagaaatggcggccctgctggcgtcctgctcctccgtcatacccagtgtggagatgcgaactcttgtgcgtggagagacaaacacaggtg

SEQ ID NO: 106824 - DNA, 201 bp, Homo sapiens
gtcatacccagtgtggagatgcgaactcttgtgcgtggagagacaaacacaggtgcacattgagctaatgcccacgtacagcattcatgactggcctccaytgtgggcagcggccatctggttaccctggtgaaatggttgctctctgtctgggcaggacctggctgggtccagagcaagctgaagtatggccctgagaag

SEQ ID NO: 106825 - DNA, 201 bp, Homo sapiens
ggtccggtctttgaaacactgaaatgcatgtctaccttgacctagttgttccacagatttacatcgtttgcacaagtgggcaaaaaaataggtagaaaacrttcattctggtattgtttggagaggagataaccaacctaagtgttcattgattgatagggaactaaagaaattatagctcttccagatatggactattat

SEQ ID NO: 106826 - DNA, 201 bp, Homo sapiens
tgatttcttgaagttctgggggctggaagtctgagaccgagcctgagacagtagcagctccagcatctggtgagggccctcttgggatggccacctgccgstgattccctcaggtgacagagaagagaggggaagcaggccatctcctgcctcctcccacatgggcactcatcccatcatgggggctccacccttgtgacc

SEQ ID NO: 106827 - DNA, 201 bp, Homo sapiens
caaattgaaatgcgccagccccttcacatatggcggactgcttctgagtcctctgaaaaagaaatgtctatttcatgagacaatctgagcctcacaaaccrgtttgttccttccctcacatacttcatacctttgcttttgctcaggaagagcagggacttgttttttgctgggtttttgatcttattaaaaaagcatgat

SEQ ID NO: 106828 - DNA, 201 bp, Homo sapiens
tcttgaagttctgggggctggaagtctgagaccgagcctgagacagtagcagctccagcatctggtgagggccctcttgggatggccacctgccgctgatwccctcaggtgacagagaagagaggggaagcaggccatctcctgcctcctcccacatgggcactcatcccatcatgggggctccacccttgtgacctaatc

SEQ ID NO: 106829 - DNA, 201 bp, Homo sapiens
acatcttccagtttgcaaagtatgctttgaatagtaccaataaggttaaataaatgtcttaaaatgctgcttttcactctcttaggcatgaaactgttttyaggaaacatttgatagcacatatctcacatggcattttgattgtgagtatgtagtctagattcattatagttctctggaataaaaccaggagtgtgatct

SEQ ID NO: 106830 - DNA, 201 bp, Homo sapiens
gttggatttttgtgacaacagaaagtataattatacttttatgatttttaaatggagggttagcagagcccagactgcatttcagatttcaataaaaagawccccaagagatcattaaactgtattgcagttacccttttcttcctgtttattcagaataggcatttcaaatttaaaatacactttcacagagttctaaaa

SEQ ID NO: 106831 - DNA, 201 bp, Homo sapiens
ggaggatggttgaaactttggtgtgggtgcactgcttacttggtggcaggtatctctctggatgacactaactcagaatcttgttgcatgctggaaatggrgagcatgctttactaaagaatctgaccacaggtgttagagctggaactgacagattttcagatgataggtaagatccagagcaggttacaggtcagggag

SEQ ID NO: 106832 - DNA, 201 bp, Homo sapiens
tcaaactcctgacctcaggtgatccacctgccgcggcctcccaaagtgctggagtgagccactgtccagccaattttatgttttaacaaatgtatactcaygtaactaccatcccaatcaacataagcacatttccatcaccatacaaagacttctgatgccctttgcaggtgataccccaagcgcattctgttgagttgg

SEQ ID NO: 106833 - DNA, 201 bp, Homo sapiens
actcctgacctcaggtgatccacctgccgcggcctcccaaagtgctggagtgagccactgtccagccaattttatgttttaacaaatgtatactcatgtarctaccatcccaatcaacataagcacatttccatcaccatacaaagacttctgatgccctttgcaggtgataccccaagcgcattctgttgagttgggttt

SEQ ID NO: 106834 - DNA, 201 bp, Homo sapiens
gggccagtgtctgagtccgagggggtcgtgtaggcgtgtggggttgggagtggggcctctcccgggtgggcagtagagacctcgaggctctcaggctaggrccttgtggacagttataccaagtgtgggggcctgtagtgggacaggagatcgttggcactgtcaggtggaagcgagttggtgtgtcttgaatatatgagg

SEQ ID NO: 106835 - DNA, 201 bp, Homo sapiens
ctatattatcacagaatatagctctttagaaaacatttgtcttattcactgattgttatatgtgtattgcttgtctctttaaggaggatccaagtttttartgagtagagaaaatagatgtgttattgcttctttgcagaagttgctaatgaaatgaaatgtatttttccttattataggttgttctgtcttcctgaatat

SEQ ID NO: 106836 - DNA, 201 bp, Homo sapiens
tggaaaagcagaagttaatttttttaacatcgttttgaaatattcttatttttagaggggaaaaaagccctcaattttggaggttggattttgacatgccrttaattacttttctcttttaggtttacaggtacatacattacacccctatttctacaaagcttggctattagagcattatgaacattaatgacctcaaac

SEQ ID NO: 106837 - DNA, 201 bp, Homo sapiens
agcttagtggtcagaggactaatacagagacaactaagtgtggtagagagtgtgaaccatgtcatcaggctgcctgggttcctgtcccagctccactcacyggttaggttacttagcctctctgcctgtcttctcagctgtaaaagagtggtaataatagtgcctatgccatagtgttgttgaaaattaaacaagaccatg

SEQ ID NO: 106838 - DNA, 201 bp, Homo sapiens
ggctggagtgcagtggtgtgatcctcactcactgcaacttcgcctcttaggcttaagcaatactcctgcctcagcttcccgagtagctgggattacaggtkcgtaccaccatgcccggctaagtttttggtatttttagtagagatggggtttcaccatgttggccagactggtctcgaactcctgacctcaagtgatccg

SEQ ID NO: 106839 - DNA, 201 bp, Homo sapiens
gaaattggaaaatactaaaaattacaaaggaaaaaatactaatctctctgattccaccatacagagatactcactagtaatattttacagtcttttctttmacacacacacatatgcatatattgggattgtgtatagttttgtagcctgcacaagaatttatcatgaaaaatgtcaaggatattttgaaacaaatattta

SEQ ID NO: 106840 - DNA, 201 bp, Homo sapiens
tattccatggtaagatacgtctcattattggagtgtgtctgaacatatattgttttataatattcaaaatgcatatatactttatgcactcacagacatayttcttgttactgttgattttcttgggaggtataatttactatatatgttaaaagtgctatatattattgcttgatagatgaccactattgacttaataag

SEQ ID NO: 106841 - DNA, 201 bp, Homo sapiens
gagattataggcgcctgccaccacacccagccaatttttgtatttttagtagagacgggggtttcaacatgttggcccggctggtcttgaactcctgacckcaagtgatttgcctgccttggcctcccaagtgctggaattacaggtgtgagccactgcacctggccgctttttaaaatttcaatttcagttttgcctgtg

SEQ ID NO: 106842 - DNA, 201 bp, Homo sapiens
ttagagatacaaggaaaacatttaaatattaagcagtcaggtgttctttcagtggtagcttagtggtcagaggactaatacagagacaactaagtgtggtrgagagtgtgaaccatgtcatcaggctgcctgggttcctgtcccagctccactcaccggttaggttacttagcctctctgcctgtcttctcagctgtaaaa

SEQ ID NO: 106843 - DNA, 201 bp, Homo sapiens
cagcacaacctctggtggcagggtggtgtggtggtgaagaggccctggagtcaggtcctaatcctgattcacatttactagctatgtgaccctgggcgagrctcttaacttctctgagttcattatctctaaagtggtgaaaattacacagtaactgcctcttagattatagttactattttgggttctattttggtacac

SEQ ID NO: 106844 - DNA, 201 bp, Homo sapiens
ttgttttttttttttgagtctcgctctgtcacccaggctggagtgcagtggcgcgatctcggctcactgcaacctccgccttctgggttcaagcaattctyctgtttcagcctacaggtgtgtgccaccatgcctggctaatttttatatttttagtagagacaggtttcgctatgttggccagactgctctcaaactcct

SEQ ID NO: 106845 - DNA, 201 bp, Homo sapiens
atttgtgctttaaatcatcattatagcaagtccagcactgcatgacaagtgcaaattttctaattgtgtttcatttcaatcctctttttagggattagaargttatgtggcagataaagaattccatgcacctctaatcatcgatgagaatggagttcatgagctggtgaaaaatggtatttgaaccagataccaagtttt

SEQ ID NO: 106846 - DNA, 201 bp, Homo sapiens
gtcagagaccatcacagctgatgtcaatcacaagtaaatataccagcctgcctacagtgcatggtgatggggctgtgcttccctccatactaactggcatygtagtttagtgctctgccttttgggggtctggagggaggatggttgaaactttggtgtgggtgcactgcttacttggtggcaggtatctctctggatgac

SEQ ID NO: 106847 - DNA, 201 bp, Homo sapiens
ggagtttaccaggtggtagaatatagtgagatttccctggcaacagctcaaaaacgaagctcagacggacgactgctgttcaatgcggggaacattgccarccatttcttcactgtaccatttctgagagatgttgtcaagtatgggcaagatgggggccttttaaaattatatttattgttaatcagaaactaagacact

SEQ ID NO: 106848 - DNA, 201 bp, Homo sapiens
ctaggaagtttgtggtatatgaagtattgcgagaagatgagttttccccactaaagaatgctgatagtcagaatgggaaagacaaccctactactgcaagrcatgctttgatgtcccttcatcattgctgggtcctcaatgcagggggccatttcatagatgaaaatggctctcgccttccagcaattccccggtaagtca

SEQ ID NO: 106849 - DNA, 201 bp, Homo sapiens
ggattataggtgtaagctactgtgcctggccctggactcagtttttctggattaaacttatgaaatattgagtacaccttttaagtttatactgtatatctttttttttttttctgagataagagtctttctcttgttgccccagctggagcgcaatggcgcaatcttggctcactgcaatctctgcctcccaggttcaag

SEQ ID NO: 106850 - DNA, 201 bp, Homo sapiens
taattattcccactccaatgtgatttactctgtgctagatatatgtatatgatggaatttctagcccaaggtttagttaggtgataaataggaaggaaatratatacctcatttccagttggaaagtgcctgtcaaggtatataaagatggatagttgattgtctaaagttaaagattcttcttggctttataccttttag

SEQ ID NO: 106851 - DNA, 201 bp, Homo sapiens
ttaaatagattttgacttttatattctgcatctcaaccttttttggcatttgtgctttaaatcatcattatagcaagtccagcactgcatgacaagtgcamattttctaattgtgtttcatttcaatcctctttttagggattagaaagttatgtggcagataaagaattccatgcacctctaatcatcgatgagaatgga

SEQ ID NO: 106852 - DNA, 201 bp, Homo sapiens
catcccgaaactttggtattttctttactctgtcttttttttgacttgccacatcaattagtcatcaaatttttgcgaaacatttattatatctctcggtycttacctcctgacattatcagcaaaaaatatttagttcactaaaatgcatcgttcattgtttggtgttcggttgggttatataaatttaattgttttaat

SEQ ID NO: 106853 - DNA, 201 bp, Homo sapiens
atatggtttcgctctaggaagtttgtggtatatgaagtattgcgagaagatgagttttccccactaaagaatgctgatagtcagaatgggaaagacaaccmtactactgcaaggcatgctttgatgtcccttcatcattgctgggtcctcaatgcagggggccatttcatagatgaaaatggctctcgccttccagcaatt

SEQ ID NO: 106854 - DNA, 201 bp, Homo sapiens
attgttattgtttgatttgcttccattcccattaatccttatttattcccacatagcagtgctacaaatgggaagtcagagaccatcacagctgatgtcartcacaagtaaatataccagcctgcctacagtgcatggtgatggggctgtgcttccctccatactaactggcatcgtagtttagtgctctgccttttgggg

SEQ ID NO: 106855 - DNA, 201 bp, Homo sapiens
tagacctgggttggattcattaatatcaaattgtgttcaatcagattaacccaacttttttcctgtgacaaagttattggagtaggtaaggaaaatgtggwagaaataacagatttagacttcctaagtcaggtgacaaggtatcttacgatgttctttcgaataagatagaaatatgcaagttgggcataaggacaatta

SEQ ID NO: 106856 - DNA, 201 bp, Homo sapiens
gcctacagtgcatggtgatggggctgtgcttccctccatactaactggcatcgtagtttagtgctctgccttttgggggtctggagggaggatggttgaarctttggtgtgggtgcactgcttacttggtggcaggtatctctctggatgacactaactcagaatcttgttgcatgctggaaatggggagcatgctttact

SEQ ID NO: 106857 - DNA, 201 bp, Homo sapiens
aaatatgcaagttgggcataaggacaattaaagaggtgaataactgcttgaatgaccacacacagactgatactaagttggagggaggtttgtaatgataygtaatgagtctgttcttggcattgtacttttcaacacgtttttagttgtataggtgatggcatgtctttatggtagcaaaaaatatatatattatagcta

SEQ ID NO: 106858 - DNA, 201 bp, Homo sapiens
gatgcttgtctcagaatttgacgagtgcaaaaatgagaaagacaaataagctgtataaagttaatgcgtggtggctcatgcctgtaattccagcagtttgrgaggctgaggcgggtggatgacttgaggccaaggagttggataccagcctggccaacatggtgaaaccctgtctctactaacagtacaaaaattaggtgg

SEQ ID NO: 106859 - DNA, 201 bp, Homo sapiens; identical to SEQ ID NO: 17344

SEQ ID NO: 106860 - DNA, 201 bp, Homo sapiens
tttgccgagtggatggagtttaccaggtggtagaatatagtgagatttccctggcaacagctcaaaaacgaagctcagacggacgactgctgttcaatgcrgggaacattgccaaccatttcttcactgtaccatttctgagagatgttgtcaagtatgggcaagatgggggccttttaaaattatatttattgttaatca

SEQ ID NO: 106861 - DNA, 201 bp, Homo sapiens; identical to SEQ ID NO: 17345

SEQ ID NO: 106862 - DNA, 201 bp, Homo sapiens
aaagcctattgttgagaccaaagccttagctatgttaaagggttagaagctgtgtatgcagtttcataataaagaggtctttatatggtttcgctctaggmagtttgtggtatatgaagtattgcgagaagatgagttttccccactaaagaatgctgatagtcagaatgggaaagacaaccctactactgcaaggcatgc

SEQ ID NO: 106863 - DNA, 201 bp, Homo sapiens
gttgataagcccctatcttgttatttcagtcccatgtgatcaataaaagcagcaagcaggctttggtccaagccagattctccaccactagcctgtacccmaaatcagcaaatggcctcaggacaagacagctgtatagccttacttcctttttgatgagtctttgctgctacctatgtatatttaatactaaagtgttga

SEQ ID NO: 106864 - DNA, 201 bp, Homo sapiens
tagtgacctgcctgctctaaacccctttacctcctactcaggtccctgaaacacaaggaaaatgccaaaattaaagaaatgcttttttcaaatgaaatatygggcaatagaaaatgagagacaaaatgcctaacttaggtcttttgtcttgtgaatcccagagaaatttcattttatttattatgaaagtaattgaggtgg

SEQ ID NO: 106865 - DNA, 201 bp, Homo sapiens
cgtaagacactttttcagattcaagcagagcgtatcctgaagctacagcaggttgctgaaaaatattatggcaacaaatgcattattccatggtaagataygtctcattattggagtgtgtctgaacatatattgttttataatattcaaaatgcatatatactttatgcactcacagacatatttcttgttactgttgat

SEQ ID NO: 106866 - DNA, 201 bp, Homo sapiens
gttacattatgaacattatacaacatgtagatgaacacatgttaccagtggtttacgcccagatatcaaagtttaacctatgaggtacccttttttttttwatttttattttttgagacggagagtctcactctgtcgccaggctggagttcagtggcgtgatgtcggcttactacaacctccgcctccccggttcaggcg

SEQ ID NO: 106867 - DNA, 201 bp, Homo sapiens
tgggccatacttgtgtcctcagcctctactagtatgctgtattctcaggttctcaggggctccaccttggtcagtgttagttccttccctttttttttttttttttttttttttttttttgagacagggtctgtctcggtcacccaggctggagtgcagtagtgcagtcttagctgaccgtcacctttgccttctggtctc

SEQ ID NO: 106868 - DNA, 201 bp, Homo sapiens
gccctgtttctactaaaaaatacaaaaacttagacgggtgtgatggcaggcgcctgtagttccacctacttaggaggctgaggcacgagaattgcttgaarctgggaggtgggggttgcagtgagcataggggtgagactactccgtctcaaaaaaaaaaagttaactctgtgagagatgattataggaaaaatgtttatc

SEQ ID NO: 106869 - DNA, 201 bp, Homo sapiens
agtcttgctctgttgcccaggctggagtgcagtggtgtgatcttggctcactgcaacctccgccttctgggttcaaatattctcctgcttcagcctcccargtagctgtgattacaggcatccgccaccatgcccaactaatttttgtgtttttagtagagacggggtttcaccatgttgaccaggctggtctcaaactcc

SEQ ID NO: 106870 - DNA, 201 bp, Homo sapiens
gataaaatcacttgatgtaacctggaaactatgctttacatggcaatcaaagccttttgatcatgtacattttatttgatattaaaatcttttataaccasatactgtctgtgtttcatatatttttaaaagttttgattgttggaatgttatatgatcttaaggtctgtatagacaaaattatgtacaaaaatttgaaac

SEQ ID NO: 106871 - DNA, 201 bp, Homo sapiens; identical to SEQ ID NO: 17360

SEQ ID NO: 106872 - DNA, 201 bp, Homo sapiens
taggtaatagattcacgtggttcagaattcaaaaggaaaaaggaataattattttgtaccttgataatatttcagaggcaatgggcttatttgagaagcaraaatgaagtgggcctaaactttactattaatagggggctgggctttgtgtgtttttttttttaattgttgctatttgctgttttattttaaaggtctctt

SEQ ID NO: 106873 - DNA, 201 bp, Homo sapiens; identical to SEQ ID NO: 17362

SEQ ID NO: 106874 - DNA, 201 bp, Homo sapiens
tggacctatagcctttgcccacaagagaatgacaccatcttccatgcttaccacagggaggcaagctcaatgtacatcttatttcattgaacctgtacagwggatggaatctgctttgttgggagtgatggatggacaggtgagaacacattttattttctacaattttattttatgatctatattttattccttcttgca

SEQ ID NO: 106875 - DNA, 201 bp, Homo sapiens; identical to SEQ ID NO: 17366

SEQ ID NO: 106876 - DNA, 201 bp, Homo sapiens
ctcttgcctcattagctcatgcctgtaatctgagcactttgggaggctgaggcgggaggatcacttgagcccagggtttcgagaccagcttgggcaatatrgtgagacctcatctctataaaagaaagtaaaaaatttttaataagaaaaaaagaaaagaaaaaatgtattaaacaaaatttgaactttgtaacaagatag

SEQ ID NO: 106877 - DNA, 201 bp, Homo sapiens
agtagagacggggtttttccatgttggtcaggctggtctcgaactcctgacctcaggtaatccacctgcctcagcctcccaaagtgctgggattacaggcrtgagccaccatgcccagctgcaattcccattcttgatggtattatttgtagcagttagagattttaattttgatggtatctaatttatcagtttttcttt

SEQ ID NO: 106878 - DNA, 201 bp, Homo sapiens
gctataactaactacattagaagaaaatgcagttgccttattaggcttttttgatttacctattttcctggaatatcagtttgtctttaaatagctaagawtctgacttatatgctgtcaatacacacagttagtaatacagcatgaaaatcctaacatgcttttctatactttagccgtgatcattttcatttgaagtcc

SEQ ID NO: 106879 - DNA, 201 bp, Homo sapiens
cacagttagtaatacagcatgaaaatcctaacatgcttttctatactttagccgtgatcattttcatttgaagtcctaaattacaaactgatttaaaagctatatatatatatatatatatatgccacatccatgaaaccttccttaatcaaatctcaagcttcacttttctcccttcaagctccctgaatacaacattct

SEQ ID NO: 106880 - DNA, 201 bp, Homo sapiens
actcactgtactgagtatcttcctgcagcattcagtctggagcaaagcctgcttccttcaaccctttccaaaatccccaaataaaagcccaaaatctgtakaggatcttcctaacatcctcgtgctgagatgccctgaaattctccataactcatgactgagtaataaaaccaacttgcttaattaaagttggtttcttgt

SEQ ID NO: 106881 - DNA, 201 bp, Homo sapiens
acagttagtaatacagcatgaaaatcctaacatgcttttctatactttagccgtgatcattttcatttgaagtcctaaattacaaactgatttaaaagctatatatatatatatatatatatgccacatccatgaaaccttccttaatcaaatctcaagcttcacttttctcccttcaagctccctgaatacaacattctt

SEQ ID NO: 106882 - DNA, 201 bp, Homo sapiens
gtgatataattttaagaaaatgaaactttatatttctttatcattacaggatgaatgaggggtttgagtggcaactgaaattataccaggcaatgggataygaagtggatacctctagtgcaatttataagcaatatcgtttacaaaaggttacagagaagtatccaggtaagtaataattgctagtgtgtaatgggcttt

SEQ ID NO: 106883 - DNA, 201 bp, Homo sapiens
tgaaaatgcagagttgattttgacaaataaatacattttaattatgtcatatagaattgcagaatttacctcaagaactctttgctgttgacccaactacygtttcacaaggattgaaagatgaggttctctacaagtgtagaaagtgcaggtaaactattttatatcctttggatattttatcttgtctcagtagctgaa

SEQ ID NO: 106884 - DNA, 201 bp, Homo sapiens
cctcaagaactctttgctgttgacccaactaccgtttcacaaggattgaaagatgaggttctctacaagtgtagaaagtgcaggtaaactattttatatcmtttggatattttatcttgtctcagtagctgaaaagtacttaatgttttattttcttaaatttctgtaggaagattttgtttaattgaaatttttagttca

SEQ ID NO: 106885 - DNA, 201 bp, Homo sapiens
gttattgaaaatttaagtagtgtaatcaatgttacattattttgttctctaagcaatattgcacattttgctgggcgcagtggctcacgcctgtaaccccrgcactttgggaggccgaggcaggcagatcacctgagattgggaatttgagaccagcctggccaacatggtgaaaccccgtctctattaaaaatacaaaaa

SEQ ID NO: 106886 - DNA, 201 bp, Homo sapiens
ggaactgtcaaacacttataaaaccatcagatcttatgagtgctcattcactatcacgagaacagcatgggggtatctgcctccatgatccaatcacctcycttcttccacacttggggattacaatttgagatgagatttggatggggacacagaaccaaaccgtatcacatcacaattcacattcccactcttcccatt

SEQ ID NO: 106887 - DNA, 201 bp, Homo sapiens; identical to SEQ ID NO: 17367

SEQ ID NO: 106888 - DNA, 201 bp, Homo sapiens
ggcccgagtgatggctgcgagctcagcaaccccagcgccagcagagtcagctgtgccgggcagatgctggaagtgcagccaggattgtatttcggtggggccgcggccgtcgcggagccagatcacctgagggaagcgggcatcacggccgtgctaacagtggactcggaggagcccagcttcaaggcggggcctggggtc

SEQ ID NO: 106889 - DNA, 201 bp, Homo sapiens; identical to SEQ ID NO: 17371

SEQ ID NO: 106890 - DNA, 201 bp, Homo sapiens
ctctatagtgatttccctttttttcccatgcaactttcccttaagattgtattacttctcatcttccataaaaatatcactcagttttatttctcagtagrcatttattgagcacctaagatttgcacaaacacaaaacccattcttaaacttcctttcacagtaaattatctaaattatctttcttgggctctttctcca

SEQ ID NO: 106891 - DNA, 201 bp, Homo sapiens
caatgtctcttctctaactcagtactcacccacagtgattttcaaaagtgtggtctttctttttttctttttttttttttgaaacggagttttgctcttgytgcccaggccagagtgcaatgacatgatcttggctcgcggcaacctccgactcccaggttcaagcgattctcctgcctcagcctcccgagtacatcctcc

SEQ ID NO: 106892 - DNA, 201 bp, Homo sapiens
aagagccattttaccaactattttgtaaaggcaagtttttaatagttctagaaacacacttgtaagaagcaggaaacctaccccttcccttaaaaaaaaaaattgtttttgataagggtaaatacttttttaaagaagtaagctcatggcctggggttaggtttcttttccttttatttagtgccctttccccaccctggt

SEQ ID NO: 106893 - DNA, 201 bp, Homo sapiens
ttagccccgagttcagttccacgtttatagattattccctctccattgcccattctaatactcaccgctgttgatcttcccaagtctctaaaaaaaaaaamaaaaaaaaaaaacaaaaaaaagcctacccctcaaatcacctttccttgactcagttcatgcagcaggctccacacttctcgtcaacccattcctccaatg

SEQ ID NO: 106894 - DNA, 201 bp, Homo sapiens
acatttgttttgttttgttttgagatagggtctcactctgtcgcccaatggagtgcagtggcactatcagagctcactgcagcctcaacctctctgggctmaggtgatccctcctatctcagcctcccaaggagctgggactacaggtgcctgccaccacatctggctaatttttgtattttttgtagagataggttttgc

SEQ ID NO: 106895 - DNA, 201 bp, Homo sapiens
gccaggcacaatggctcacgcctgtaatactagcactttgggaggctgaggcaggcggattacttgaggccaggagtttgagaccagcctgcccaacatgrtgaaaccctgtctctacaaaaaatacaaaaattagccaggtgtggtggtatgcacctgtaattccagctactcaagagactgaagcacaagaatcacttg

SEQ ID NO: 106896 - DNA, 201 bp, Homo sapiens
gtagtcccagctacttgggaggctgagggaggagaatcgctggaacacgggaggcggaggttgcagtgagccgaggtcatgccattgcactccagcctggygacagagcgagactccgtctcaaaaaaaaaagatttgtaaatgccatgagacaaagggagttaggaaaggatgaaatcaagaatatcatgccttgtgcag

SEQ ID NO: 106897 - DNA, 201 bp, Homo sapiens
catttaacttataaacattttatactgcttagctttattcccttgtcttttactaaaattatttataaaactactccttgatctgggttccctgatggaasagggtgtcctccatgacacttttgttcctggtaatccaatttttcctaataattttatcaatgtgttgtgaaagattggacagttttgagcatgtagtat

SEQ ID NO: 106898 - DNA, 201 bp, Homo sapiens
tatactgcttagctttattcccttgtcttttactaaaattatttataaaactactccttgatctgggttccctgatggaagagggtgtcctccatgacacytttgttcctggtaatccaatttttcctaataattttatcaatgtgttgtgaaagattggacagttttgagcatgtagtatctatatgaaatcgtgaatta

SEQ ID NO: 106899 - DNA, 201 bp, Homo sapiens; identical to SEQ ID NO: 17373

SEQ ID NO: 106900 - DNA, 201 bp, Homo sapiens
ccgttgtgaatatgggaagggactttaaattttattttctggtagcagcctaggaattcggttagtactcatttgtattcactgtcactgtttctcatgtyctaatataaatgaccaaaatcaagagtgctcaaagggtaagtgatagccacagtattgttccctaaaatatgcataaagtagaaattcactcccttcttc

SEQ ID NO: 106901 - DNA, 201 bp, Homo sapiens
tggagcccaaactgatgggccagataaaagtctaggctctctgcaggtcatacagtcatttagcctgtactttcctaattgttttcttctctggtattacyaaagggcttattaacctgctggtaaacaatgaacacagattagtggtcattaattaaggtcatgggtcacctaatagggatggctcagtgagtagtttct

SEQ ID NO: 106902 - DNA, 201 bp, Homo sapiens
aatggaataaatattatgtattagcattatttttaaaacagtcatgaatttagtgatgcctttgagcaaatttgtgttttattaattgcaattacacatcyccatgtttttgaatagtatgagtaggtgtaaaatattatgcatgcagtctatagataatgcttgcagccccacaattttaaatgcctcatcaggcatcca

SEQ ID NO: 106903 - DNA, 201 bp, Homo sapiens; identical to SEQ ID NO: 17368

SEQ ID NO: 106904 - DNA, 201 bp, Homo sapiens
tttaagatgatggcatttgaaaacctgtttctaaaaaaaataatttgtctccaaatcgtaagctaaaaagtcaatagaataactgtttggaaaagaattayagttgcatagctttttatattttcagtactcactgttaagaactatatacagggtttctgcagaggctgtgtcagaagccaaggcagcgggagtccggtt

SEQ ID NO: 106905 - DNA, 201 bp, Homo sapiens
taaactacgttcagttaagtctgaaagactggaaggaattggggtgataagaaattgatgcactgttggcggggcacggtggctcacgcctgtaatcccakcactttgggaggctgaggcgggcagatctcctgaggtcaggagttcgagagcagcctgaccaacatggtgaaactccatctctactaaaaatacaaaatt

SEQ ID NO: 106906 - DNA, 201 bp, Homo sapiens
tttaaattacaagggccatcttgttattagaaactcctaatttgcttctaagcaaagaaatcttctgacaataaccaatggaataaatattatgtattagyattatttttaaaacagtcatgaatttagtgatgcctttgagcaaatttgtgttttattaattgcaattacacatccccatgtttttgaatagtatgagta

SEQ ID NO: 106907 - DNA, 201 bp, Homo sapiens
ggtgtaaaatattatgcatgcagtctatagataatgcttgcagccccacaattttaaatgcctcatcaggcatccatgtcctatagactaggaatcactgrtttatgagttcgctacccctgagctgagagtggacaaggtgagctcaccttgtaaaggatcatgcttcccttctgagtccagaattcttttgtgggaagg

SEQ ID NO: 106908 - DNA, 201 bp, Homo sapiens
gtcaacccattcctccaatgtctcttctctaactcagtactcacccacagtgattttcaaaagtgtggtctttctttttttctttttttttttttgaaacrgagttttgctcttgctgcccaggccagagtgcaatgacatgatcttggctcgcggcaacctccgactcccaggttcaagcgattctcctgcctcagcctc

SEQ ID NO: 106909 - DNA, 201 bp, Homo sapiens
tgaactaacaggggtgagttcagtcaaagctggctgtgtgcaaactatcaactggtaacagaatgctggccatgggaagaggaggagtttctcccctgtgycctttgttaaaacttttttggtaactcatctttggttttcgttttttttttttttttttttttttgaggcagggtctcactttgtcacccaggcaccacc

SEQ ID NO: 106910 - DNA, 201 bp, Homo sapiens
agagccattttaccaactattttgtaaaggcaagtttttaatagttctagaaacacacttgtaagaagcaggaaacctaccccttcccttaaaaaaaaaawttgtttttgataagggtaaatacttttttaaagaagtaagctcatggcctggggttaggtttcttttccttttatttagtgccctttccccaccctggtt

SEQ ID NO: 106911 - DNA, 201 bp, Homo sapiens
agttgtcactctggtcaggaacttgaccacttctcgcttagtatggattgcccccttcctttccacaccagcaccaggctaaccctctgaaaagttccctyctcatgccattctcctcctcatgaatcttctttggctcccactatccacaggtaagatacacactccacagcctggcaggccactccctccacagccgaa

SEQ ID NO: 106912 - DNA, 201 bp, Homo sapiens
tagctaggattacaggcatgtgccaccacacccagctaatttttgtatttttagtagagacagggtttcaccacgttggccaggcagggctcgaactcctstcctcaggtgattctcccacttcggcctctcaaagtgctgggattacagacgtgagccaccacacctggcctcatctttgttttttattgaaagtcaagg

SEQ ID NO: 106913 - DNA, 201 bp, Homo sapiens
cccttaaaaaaaaaaattgtttttgataagggtaaatacttttttaaagaagtaagctcatggcctggggttaggtttcttttccttttatttagtgcccyttccccaccctggttgtatatttttccatatacatcatacatttttcaatttagctattcatagaataagtggaaatcgaattaagggagacattgactg

SEQ ID NO: 106914 - DNA, 201 bp, Homo sapiens
tctcgcttagtatggattgcccccttcctttccacaccagcaccaggctaaccctctgaaaagttcccttctcatgccattctcctcctcatgaatcttcwttggctcccactatccacaggtaagatacacactccacagcctggcaggccactccctccacagccgaatcccaatactcaatcccaggtgccttcctgc

SEQ ID NO: 106915 - DNA, 201 bp, Homo sapiens
catcctcattcaggaaaaactcagaatggaacttcaggcagatggtgaaaagccacacattctaccagttgctttaactgcactgtttccccttccaaacytggatttcttatggtctttacatcaaaagtagaagtgaaagcggattctccatggttgtgtgcaccttttgaatgataaatagtcaatcattttaaggca

SEQ ID NO: 106916 - DNA, 201 bp, Homo sapiens
cagcaccaggctaaccctctgaaaagttcccttctcatgccattctcctcctcatgaatcttctttggctcccactatccacaggtaagatacacactccrcagcctggcaggccactccctccacagccgaatcccaatactcaatcccaggtgccttcctgcctctgtgctttggttcctgccctctcccactgcagtg

SEQ ID NO: 106917 - DNA, 201 bp, Homo sapiens
tcattttaaggcagtgtgtacaggggtggctgagtctggagagtgggatttgttgaggaaggtctgtacgaggagcccaaggcaaggatagcgtggggtasagaaggatgtctactgaggatagaaataggaaaggagaaatcaatgcaggaaaaacaggaagctctgtgtgtgtgtatgtgcacatttcacacgtgcata

SEQ ID NO: 106918 - DNA, 201 bp, Homo sapiens
gtgatttgtgtgacattgcagagcaaatgttatatggcaaagccaagacttgacccatgccttcaggttctcagccctgctgttcattacccaacatggcygctcagaggtgactcttcatcctacagttatgcgtggcttgcaaagccaaagagccagaaatgggttcaactctagatgttctcattcactagattgcct

SEQ ID NO: 106919 - DNA, 201 bp, Homo sapiens
ctcaaagggtaagtgatagccacagtattgttccctaaaatatgcataaagtagaaattcactcccttcttctcctgtgcatgaccttgggcacgggaagkttttgttgttaaagatgtcccattacgtgatgtagagttgtacgttaaactcgcacgtgactggggcaaactatgagtgcaactcaaacgcgttgaagac

SEQ ID NO: 106920 - DNA, 201 bp, Homo sapiens
cccttctcatgccattctcctcctcatgaatcttctttggctcccactatccacaggtaagatacacactccacagcctggcaggccactccctccacagmcgaatcccaatactcaatcccaggtgccttcctgcctctgtgctttggttcctgccctctcccactgcagtgccctcctctcttctccatgcacggttag

SEQ ID NO: 106921 - DNA, 201 bp, Homo sapiens
ggtattccaccagggatcccctccctcattgacatgagcagacaggaccatgagggctatttgttcccaaactcctcaccatcaatatcaccttttttccrttttctccaacttcgagaattgggagcccaggcatggtggctcatttctataatcccagcactttgggaggtcaaggtgggaggattccttgagctcagg

SEQ ID NO: 106922 - DNA, 201 bp, Homo sapiens
atctcctgaggtcaggagttcgagagcagcctgaccaacatggtgaaactccatctctactaaaaatacaaaattagccgggcatggtggcgcatgcctgyaatcccagctactcgggaggctgaggcaggagaatcacttgaacccctggagatggaggttgcagtgagccaagatcatgccattgcactccagcctggg

SEQ ID NO: 106923 - DNA, 201 bp, Homo sapiens
ctgtagtcccagctacttgggaggctgagggaggagaatcgctggaacacgggaggcggaggttgcagtgagccgaggtcatgccattgcactccagcctrgtgacagagcgagactccgtctcaaaaaaaaaagatttgtaaatgccatgagacaaagggagttaggaaaggatgaaatcaagaatatcatgccttgtgc

SEQ ID NO: 106924 - DNA, 201 bp, Homo sapiens
atcagactcacctgcagaaaatgaagatgctaaaaccagaagaggccagactctggggaagcaggagagaaagcagccaaatctggtgagtatcctcaacygagtaccctcgattatctcagcattgccttcttgcagaagccagaagagccattttaccaactattttgtaaaggcaagtttttaatagttctagaaaca

SEQ ID NO: 106925 - DNA, 201 bp, Homo sapiens
aaacagtgacccccaaacttttaaattacaagggccatcttgttattagaaactcctaatttgcttctaagcaaagaaatcttctgacaataaccaatggrataaatattatgtattagcattatttttaaaacagtcatgaatttagtgatgcctttgagcaaatttgtgttttattaattgcaattacacatccccatg

SEQ ID NO: 106926 - DNA, 201 bp, Homo sapiens; identical to SEQ ID NO: 17369

SEQ ID NO: 106927 - DNA, 201 bp, Homo sapiens
gggaggccaaggcaggcggatcacaaggtcaagagatcaagactatcctggccaacatggtgaaaccccatctctactaaaaatacaaaaaaattagctgsgcgtggtggtgtgcacctgtagtcccagctacttgggaggctgagggaggagaatcgctggaacacgggaggcggaggttgcagtgagccgaggtcatgc

SEQ ID NO: 106928 - DNA, 201 bp, Homo sapiens
atttaacttataaacattttatactgcttagctttattcccttgtcttttactaaaattatttataaaactactccttgatctgggttccctgatggaagrgggtgtcctccatgacacttttgttcctggtaatccaatttttcctaataattttatcaatgtgttgtgaaagattggacagttttgagcatgtagtatc

SEQ ID NO: 106929 - DNA, 201 bp, Homo sapiens
ggagagaaagcagccaaatctggtgagtatcctcaaccgagtaccctcgattatctcagcattgccttcttgcagaagccagaagagccattttaccaackattttgtaaaggcaagtttttaatagttctagaaacacacttgtaagaagcaggaaacctaccccttcccttaaaaaaaaaaattgtttttgataagggt

SEQ ID NO: 106930 - DNA, 201 bp, Homo sapiens; identical to SEQ ID NO: 17370

SEQ ID NO: 106931 - DNA, 201 bp, Homo sapiens
tcaagcgattctcctgcctcagcctcccgagtacatcctcctgggattacaggagtgtgccactaagcccagctaatttttgtatttttagtacagacaarctttcaccatgttggccaggctggtctcaaactcctgacctcaggtgatccgcccaccttgaccttccaaagtgctgggattacaagcatgagccactgt

SEQ ID NO: 106932 - DNA, 201 bp, Homo sapiens
gtaagtgatagccacagtattgttccctaaaatatgcataaagtagaaattcactcccttcttctcctgtgcatgaccttgggcacgggaaggttttgttkttaaagatgtcccattacgtgatgtagagttgtacgttaaactcgcacgtgactggggcaaactatgagtgcaactcaaacgcgttgaagacactgcagt

SEQ ID NO: 106933 - DNA, 201 bp, Homo sapiens
gaggaggaggggaggcttcagggaaacaaaatttaacaacaaaggccccagaagaaataccagataacggataaaaacgttcaagaaggccgggtgcaatrgctcaagcctgtactttgggaggccaaggcaggtggatcacctgaggcccagagtttgagaccagcctggccaatatggagaaaccctatctctactgtt

SEQ ID NO: 106934 - DNA, 201 bp, Homo sapiens
gctgttgggagcgtggggcccgttgacccagcaggccggccaggccaggatccacgctgtgccctgagacagaaaggagagaggggtcactcacgggcagyggccctgcagcagacacagcagcggtctctctgccggggcctgggcaggtccaggagcgtggaggctgaggacccaaggggtcctgctgagcctcagttt

SEQ ID NO: 106935 - DNA, 201 bp, Homo sapiens
agcatgctaactgggctgcaaggacttctgcaagagtatggagatcagtggctcagaaggcccttggcttatttgcaggtggactggcagaggaagtggaygacaaagttcttcatgctgcgttcattccttttggagacatcacagatattcagattcctctggattatgaaacaggtgagttagtgtctctcacgttca

SEQ ID NO: 106936 - DNA, 201 bp, Homo sapiens
aaccatgcagccttgctagggtggagttggcttgttgacattcaggtactgttcatcccccaaccgtgtccacaattcctattagccccgcttggattctrtggtctgctgttgcaggctcttatgctctcaaccccactgctctccctgccctcaccatcagatttactcagtaaaatctcggtggttagtcccccagca

SEQ ID NO: 106937 - DNA, 201 bp, Homo sapiens
gggagccccagagctgggcagtggcatgccccacagcctggccacctgcttcggctacgcaccatgcagcagctgcacctggctgcctcgggaaaactctsacctctctgggaagtggagccagtggctctgtgggcgtcctttcctgcagcctggagagcaaagcggctttccctgggactgtgtggctcctgtcccaac

SEQ ID NO: 106938 - DNA, 201 bp, Homo sapiens
catatcttcactttgcgtcccctccccagccggccctcccctgcccacgcctcccagagctgcagtcgtagccaatgcagggaggtctcagttaccctgcrgcaatgctgacagcttagttggttgattcagtcttcattttcatggttttaaaaaaaacaaaaaactgaacaaaaaaaaaaccctttctcaccatattct

SEQ ID NO: 106939 - DNA, 201 bp, Homo sapiens
tcccaggatctggcctttcctgcagggtgaggctccaatgggcccctggaaagtctgtccttgaccagtgagaacttactactctgaccacatgcccccartggcctgggaacccccagagctacacttatgcagtgcatgcaccaggccaggcttggctgtcaacagcacgtgtgcacgcgtgcatgcgcacacacacac

SEQ ID NO: 106940 - DNA, 201 bp, Homo sapiens
aagtgcaaagataccatactgttgatagaattttgttggaaaaataatacttcagtgcctgttacttttctttctttctttttttttttttttttttttttaacaatcttgaactcatgagttcaagacttctcagcttctcaagtagctggaattacaggctcaagccaacagggctacctgggctacctgttacatttc

SEQ ID NO: 106941 - DNA, 201 bp, Homo sapiens
tttctaccaagttacatttctttctaccgattagtgcatagttagtcctgaatattaatggtaagaaacttgtttttattatttttagtttcatcacagtmatttcccagtcagccttttaaaatttttcaattttaccacgaaatcttcatcaccacttcaagtggagtcaccttaaatgacctttcctggtaccgatta

SEQ ID NO: 106942 - DNA, 201 bp, Homo sapiens
ggcctggctgcgggacaaatgacccatccatctggagaagcgagggcaaattctggatgcggcgatgccagagctgatgagcaggagttagctacgtaacmgaagcagaggcaaggccgttcactgcaagggagtcgcaaaggtgtgaaatagcctgacacttgggggcaagtgggtcattattcgggagacccaggaaat

SEQ ID NO: 106943 - DNA, 201 bp, Homo sapiens
ggaagaagcagaaccaggattcaaatctatttggcaccaaaaatctgcctcttgctacactgcctctattcctgtttctttggaccttttccagaacatgktacttccctgcctcagttagaagttagtgactacgaatcccctgctgacttggcctcaaggccagtattgcaccgcaaggaccaagactgctgggcattc

SEQ ID NO: 106944 - DNA, 201 bp, Homo sapiens
ctcacgagcatggacaagagctgctgagacagggaggctgtgagctgcagatgctaacatgggaaggaggcccagagagaatccactgggcagggcttgaktcacggtgagtcaaggttatggggaagcagcagaaatacaaggaacagagctggggcacagaggaaaagacaagtgaggtcacaacggagagagaacaga

SEQ ID NO: 106945 - DNA, 201 bp, Homo sapiens
aaagactgagcatctttatcaggttttaggattcatgctttatgcacagttgatgcgcaaaatatatatttagatagataattgataggtcaaatgacttyatttttctaattgctttgcatgcaatggttaaggttttaagtttggctttcgtagaataattgaatacttatcaattaaaaatacagtttactattcagc

SEQ ID NO: 106946 - DNA, 201 bp, Homo sapiens
caggcctccgcccctctcctgtgctgctccttcccccagaggactgcatccgccctcagcacttcaaggccctgcacgtgcccgcacctctccactccccwggctcagcttggacctctcttctgaactccagacttgtggatcctgctcccctcgccacttctgcacttggggtctaatggggcctcagcggaacatgga

SEQ ID NO: 106947 - DNA, 201 bp, Homo sapiens
tctcacgagcatggacaagagctgctgagacagggaggctgtgagctgcagatgctaacatgggaaggaggcccagagagaatccactgggcagggcttgrgtcacggtgagtcaaggttatggggaagcagcagaaatacaaggaacagagctggggcacagaggaaaagacaagtgaggtcacaacggagagagaacag

SEQ ID NO: 106948 - DNA, 201 bp, Homo sapiens
ccccgtccagctgccatcacctgtcaggtgaccacagcagccttcactcatcccctgctcctccaccttccaccaccacccccacccccaatcccagcctyccccagcagccagagagaggtccttctggagggtgacatggaccagaacactgctttgctaaagagctccgacagcctcttgggttacttggaataaaac

SEQ ID NO: 106949 - DNA, 201 bp, Homo sapiens
tgagttggcagaggtgagagtctgtgttactagtgtctagtccttggtttgtgatgttgttactgattacaaaggaagcttttcaccatttggttaggttkttgggccttaggctgatgcttccagagagatcagaagtaagtgctgttctaaggaaagcgtctctcacataatcagactggactgtgaataacatgtcag

SEQ ID NO: 106950 - DNA, 201 bp, Homo sapiens
gtactttggtaaagtcaatattgagttcttagtactttggtaaagtcaatatcgagtgaattcaagggcgaaactttgggtctcttgtccatgttgtgttytatgtgatgagtgtctcagctctgctcaggtatggatttgtgattatcaactgacagggaggaagctgaggtgcccctcttcacccctcctgatcagtcc

SEQ ID NO: 106951 - DNA, 201 bp, Homo sapiens
ttcaacctgtacatgggttcagggttctccagtcctacgagaacctgctggggcacttccccctgattctcagcatagtctctgacagttgcttcctgggygtcccctcctctgagtactttgtgaatgttgtcattcttctgtatttctttcttggctcatggtttctctctcttctctcagctgaaacagtagcagtct

SEQ ID NO: 106952 - DNA, 201 bp, Homo sapiens
aggttcatccttgtaccatgtatcagtgcctcattcctttttgtggctgaataatattccgttgtatttggataaatatcttgttcattcatttgttgatrggcacttgcacattgttttcaccttttgactattgtaaatgcctgtgtgaatatccacatgtaagtatatgtttaaattcctgttttcaattcttttgga

SEQ ID NO: 106953 - DNA, 201 bp, Homo sapiens
aaaccctttctcaccatattctcactttagaaaacttggaaaacacagaagaaaaaaatacataagaaaattgaagtcaccatgattctatgtcctccctrcagattcacttctgatctacaggtggtgattgtcatttcagaaacaaggagagtcagcaattaccagccagccgaggtcctggaagctgacgtagagctc

SEQ ID NO: 106954 - DNA, 201 bp, Homo sapiens
gaattagttttttaaaatccccttccctgccccctcatcttccctgtataggtaccataattttggttaggtcctaagttattttaacaatgtaagcatcrtgtgataacctcctttcatgcacagcattttgttttgcctggaattgataattgccttgtttttgcatagttttctgtgtaatcattcctgattttctcc

SEQ ID NO: 106955 - DNA, 201 bp, Homo sapiens
ctggctggcggacactaagagtctggaggagacccagccaccagacataggagaaccatgcagccttgctagggtggagttggcttgttgacattcaggtrctgttcatcccccaaccgtgtccacaattcctattagccccgcttggattctgtggtctgctgttgcaggctcttatgctctcaaccccactgctctccc

SEQ ID NO: 106956 - DNA, 201 bp, Homo sapiens
ggtagtgcacacctatagtcccagctactcagaaggctgaggtgggaggatcgcttgaacctgggaggttgaggctgcagtcagccatggtcatgccactktactccagcctgggtgacaagagggagaccctgtcttgaaaaaaagaaaccatcatcacagcaacatctagactagtgtttgactaaaaactggatacca

SEQ ID NO: 106957 - DNA, 201 bp, Homo sapiens
tcggtggttagtcccccagcaactagagaaaaaacacagaattgtactgaacaatcccacttgaaatttataactatagttcttaaggggacccttgccarcctgaccagatttccctacttgatgctcagtcccaaccggagatgatgtgtccatgcccgtcttcacttctgaagccctcatatcatcaccttcccacct

SEQ ID NO: 106958 - DNA, 201 bp, Homo sapiens
agctgacgtagagctcgtgccgacggcagacctgccggccgtgggagccgtggacgtcatctgcagggacagaaggggcaaggtcttttctggggttcctrctgtgtgcagctactatggggtaccagggtgggggatgccctgatgagcacatttgtcaaataaatgaatgacaggaaaccatttggtctcataaagccc

SEQ ID NO: 106959 - DNA, 201 bp, Homo sapiens
acatgcccccaatggcctgggaacccccagagctacacttatgcagtgcatgcaccaggccaggcttggctgtcaacagcacgtgtgcacgcgtgcatgcrcacacacacacacacacaatcttaattttagtttttgagactatagattcaggaggaaatgcctcgcagcctcttgggttacaacggaccatcacacaag

SEQ ID NO: 106960 - DNA, 201 bp, Homo sapiens
gcatatgtttgcataaacacacagatgcacatacgctcagacagacatcacacacacagatgtatttattcctacgtagttctccagtacaccctacaggycaaggacactgcctgccccaccctcagtcccactcaaaggtcagcccttaagcagctgtgcctcagccctggtgtcccttggccacttgactgaacaacc

SEQ ID NO: 106961 - DNA, 201 bp, Homo sapiens
atactctacaaaggaagaagcagaaccaggattcaaatctatttggcaccaaaaatctgcctcttgctacactgcctctattcctgtttctttggaccttytccagaacatgttacttccctgcctcagttagaagttagtgactacgaatcccctgctgacttggcctcaaggccagtattgcaccgcaaggaccaagac

SEQ ID NO: 106962 - DNA, 201 bp, Homo sapiens
atttcagaaacaaggagagtcagcaattaccagccagccgaggtcctggaagctgacgtagagctcgtgccgacggcagacctgccggccgtgggagccgyggacgtcatctgcagggacagaaggggcaaggtcttttctggggttcctactgtgtgcagctactatggggtaccagggtgggggatgccctgatgagca

SEQ ID NO: 106963 - DNA, 201 bp, Homo sapiens
agaaaaaaatacataagaaaattgaagtcaccatgattctatgtcctccctgcagattcacttctgatctacaggtggtgattgtcatttcagaaacaagragagtcagcaattaccagccagccgaggtcctggaagctgacgtagagctcgtgccgacggcagacctgccggccgtgggagccgtggacgtcatctgca

SEQ ID NO: 106964 - DNA, 201 bp, Homo sapiens
gtagccaatgcagggaggtctcagttaccctgcagcaatgctgacagcttagttggttgattcagtcttcattttcatggttttaaaaaaaacaaaaaacwgaacaaaaaaaaaaccctttctcaccatattctcactttagaaaacttggaaaacacagaagaaaaaaatacataagaaaattgaagtcaccatgattct

SEQ ID NO: 106965 - DNA, 201 bp, Homo sapiens
ggtttgaactacattgagatttgaatgttgttttaatctacctgatgggtaccccatcccacctgcaccttcttgcagctgtgctattaaatgaggcagcrggaaagcctagccccataatgggggtgggtgagggcgggggttcttggcctctgcacccctgggtgggtttcccatcgattggtatcacaaccacagttc

SEQ ID NO: 106966 - DNA, 201 bp, Homo sapiens
ctgctggaccagctttccccaggcccctccctgggggtgcagcacgtgaactccagagaggcgcatccttgggcccatggggaggtggaaccactctgccrggctgtgcctgtggatggggcgggcgcaggatctgcttttaatgacacggtttgggcagctggactctgtctattccagcaggtaaattacaggcttagc

SEQ ID NO: 106967 - DNA, 201 bp, Homo sapiens
ttctcaatcttggctaatttgccaccattcatccacacattgacccacgccagaaatttgaatgcaaatcagaactcataaagtggccatcacagtcagtsgagtccccctggatcatcctgtatcctctgcttagtcttacctacttggagcacaatgcaaggcccaacatcttccactgtcttctgagcacttaggcct

SEQ ID NO: 106968 - DNA, 201 bp, Homo sapiens
ccaggaacccccggcagaaaaggctgggcaggagctcaggcccaacatcccccatatcttcactttgcgtcccctccccagccggccctcccctgcccacrcctcccagagctgcagtcgtagccaatgcagggaggtctcagttaccctgcagcaatgctgacagcttagttggttgattcagtcttcattttcatggtt

SEQ ID NO: 106969 - DNA, 201 bp, Homo sapiens
gaaaaaacagtcgtcccctggtgctgtccctgtgccctgctgccaacaccatttgctgctcctcagaggagcggatttcaactcttaggtgttttggtttytatttccatgttgataacagttttatatttctacttcctgttttccattttaaacattatcttctgattttctacttcagagaacaaagaattagttttt

SEQ ID NO: 106970 - DNA, 201 bp, Homo sapiens
agtcaccatgattctatgtcctccctgcagattcacttctgatctacaggtggtgattgtcatttcagaaacaaggagagtcagcaattaccagccagccraggtcctggaagctgacgtagagctcgtgccgacggcagacctgccggccgtgggagccgtggacgtcatctgcagggacagaaggggcaaggtcttttc

SEQ ID NO: 106971 - DNA, 201 bp, Homo sapiens
gatgttatcccacctcccaggagcatttcatactacaggttgagtgtccctttcctgaaatgcttgggaccagaagtattttgtattttggaatatttgcrttatacttaccagttgagcatcccaaatctgaatatctcaaatctgaaatgctcgagtgagcagttcctttgagtatcatatcagtgctcgtgaagtttc

SEQ ID NO: 106972 - DNA, 201 bp, Homo sapiens
tgtattttggaatatttgcattatacttaccagttgagcatcccaaatctgaatatctcaaatctgaaatgctcgagtgagcagttcctttgagtatcatrtcagtgctcgtgaagtttcagattttggggcattttggattttggattttcacatttgggatgctcagcctgtactaactctgttctccttgactccttc

SEQ ID NO: 106973 - DNA, 201 bp, Homo sapiens
aagattccatggaaaatcaaaagcactccaaaactttgggcttatatgtataatggaattatgttttaggtgcagataactgtaaacacattttttacctrtaccaatatctggcaggatatttgttgttttgttgttgtttggtttttgtttttttgagacagggtctctttctgttgctcaggctggagtgcagtggtg

SEQ ID NO: 106974 - DNA, 201 bp, Homo sapiens
gctgggattataggtgcacgccatccataatgccaggctaatttttaagttttttgtagagacagggtttcattatattgctcaggctagtctggaactcytagcttcaagtgatcctcccacttcagcctcccagagtgctgggattacaagcattagccactgcgcccagcctctagcaggatgtttgtaagggccaag

SEQ ID NO: 106975 - DNA, 201 bp, Homo sapiens; identical to SEQ ID NO: 17382

SEQ ID NO: 106976 - DNA, 201 bp, Homo sapiens; identical to SEQ ID NO: 17383

SEQ ID NO: 106977 - DNA, 201 bp, Homo sapiens
acccacattatggagggtaatctgctttactctctactgacttaaatattaatccatctaaaaaataggccaggcatggtggctcatgcctataattccascactattgggaggctgaggcaggaggatcacttgagcccaggagttcaagaccagcctgggcaatgtagagacccccatctctagggggagaaaaaaaag

SEQ ID NO: 106978 - DNA, 201 bp, Homo sapiens
gcaatgtagagacccccatctctagggggagaaaaaaaagccaggtatggtagtgcacacctatagtcccagctactcagaaggctgaggtgggaggatcrcttgaacctgggaggttgaggctgcagtcagccatggtcatgccactgtactccagcctgggtgacaagagggagaccctgtcttgaaaaaaagaaacca

SEQ ID NO: 106979 - DNA, 201 bp, Homo sapiens
tcccaccccctgctgagctcacagtctggctctcctgtgtgcagccacttcttggagctggcttctctccactccccctccagatgctggtcagccaggcrgttataaagaatctcatctgctgaaggcttttagcagggactgagtcctgtagctgttggacacctcctgtgggttgggtcactcagaccattcagaatc

SEQ ID NO: 106980 - DNA, 201 bp, Homo sapiens
atgagccaggaggcaggagaggctaggtggtcctcatgaccctaggatagctcttgctgagggatggtggcattctgccctacctctggctcccatgtgcygactggactttgtgagctccagctgctacagttgactgagttcaggctccatgtagctgggatatactacatggttacccctcacccctatggagcttcc

SEQ ID NO: 106981 - DNA, 201 bp, Homo sapiens
aaagaggaagaagggtcagagcctcccaaagcagagacccaggaggtgagaatgaagctcctgcttccagagcacaggccggcgctgtccacaggagactwttttttttaagttttaatggaaatttgccaatatgtatatcaaagtggagggaatgaataatgaattcttagtactttggtaaagtcaatattgagttct

SEQ ID NO: 106982 - DNA, 201 bp, Homo sapiens
gccctactgagagctggacttcagggcctacattctggatgggaactttccttacccctgggagttctcagtggggaattgtctggcatacaggccacatrgcatcttccactttgctgaccaaagcagctacttttcagttcaagctgacagcttgaatgaacatttgtttgattctttcctttcagtttggtcagatga

SEQ ID NO: 106983 - DNA, 201 bp, Homo sapiens
ctccacatgtctacctgtgaccagtggatcagtgcttcagatccatgaatatacaatacttcaggggttatccagttttataccccaccttgcacctcggscaggcaatggggagccaaccagaccctgactacacacaccacaccctgtgatggatggtgaagagctcaaggtggccaacagtgggctccaggtgcctct

SEQ ID NO: 106984 - DNA, 201 bp, Homo sapiens
cttcctctgcgcttgcacatggaggccctccctggtccaggtggaggggctgctgtcccgcagtgtggccccagcctccacccctgctgctggaccagctytccccaggcccctccctgggggtgcagcacgtgaactccagagaggcgcatccttgggcccatggggaggtggaaccactctgccgggctgtgcctgtgg

SEQ ID NO: 106985 - DNA, 201 bp, Homo sapiens
tgtctgataagaagtgcaaagataccatactgttgatagaattttgttggaaaaataatacttcagtgcctgttacttttctttctttctttttttttttytttttttttttaacaatcttgaactcatgagttcaagacttctcagcttctcaagtagctggaattacaggctcaagccaacagggctacctgggctacc

SEQ ID NO: 106986 - DNA, 201 bp, Homo sapiens
aaacccatcctccagccctgcagggccgtctcccccaagaggcttgaatccacccaggaacccccggcagaaaaggctgggcaggagctcaggcccaacawcccccatatcttcactttgcgtcccctccccagccggccctcccctgcccacgcctcccagagctgcagtcgtagccaatgcagggaggtctcagttacc

SEQ ID NO: 106987 - DNA, 201 bp, Homo sapiens
ctaggtggtcctcatgaccctaggatagctcttgctgagggatggtggcattctgccctacctctggctcccatgtgccgactggactttgtgagctccarctgctacagttgactgagttcaggctccatgtagctgggatatactacatggttacccctcacccctatggagcttccaaaagagaccctccctcaaagc

SEQ ID NO: 106988 - DNA, 201 bp, Homo sapiens
tgatactctggggaggtggaggccagtgggcagttctgaaagctcagcaggtttggagccattgggtgtggactcctctcccagtgttcctcctgggtgtycacagatgttattgaatgcacactggaaccctgcacaggtaaactgaggctttattggcgtgactgccaaaggtcacacagggtggtttggcagagctgg

SEQ ID NO: 106989 - DNA, 201 bp, Homo sapiens
gtcgtggtcttcctattcctgtgctaatggaggggagacagaatagggtagtgtcccttccttcaacctgtacatgggttcagggttctccagtcctacgrgaacctgctggggcacttccccctgattctcagcatagtctctgacagttgcttcctgggcgtcccctcctctgagtactttgtgaatgttgtcattctt

SEQ ID NO: 106990 - DNA, 201 bp, Homo sapiens
cttgttcattcatttgttgatgggcacttgcacattgttttcaccttttgactattgtaaatgcctgtgtgaatatccacatgtaagtatatgtttaaatycctgttttcaattcttttggatatatatgcctaggaatggaaatgcttagtcatatggtaactctgtatttaactttttgaggaaatgccaaactatttt

SEQ ID NO: 106991 - DNA, 201 bp, Homo sapiens
agagatgtgggaggaggaggggaggcttcagggaaacaaaatttaacaacaaaggccccagaagaaataccagataacggataaaaacgttcaagaaggcygggtgcaatggctcaagcctgtactttgggaggccaaggcaggtggatcacctgaggcccagagtttgagaccagcctggccaatatggagaaaccctat

SEQ ID NO: 106992 - DNA, 201 bp, Homo sapiens
ccctgcctctctcagccagaagcccacagggcctcggccccagcctgcccgaccctcaccaaagatccctgggagtcggttggcctgcggcagctcgttgsttttcttcggctgcctcctcctcagtggcctcactgcccgaggggtgcggatgggactcggactggccctgaagaaagtgaccacgaaaggctgttggga

SEQ ID NO: 106993 - DNA, 201 bp, Homo sapiens
tcacctgaggtcaggagttggaggccagcctaactaacatggagaaaccccatctctactaaaaatataaaattagccgggcgtggtggcgcgtgcctgtwatcctagctgctcggaaggctgaggcaggagaatcacttgaacctgggaggcggaggttgtgatgagccaagatcgcaccattgcactccagcctgggca

SEQ ID NO: 106994 - DNA, 201 bp, Homo sapiens
gaggcagaggcaggcggatcacctgaggtcaggagttggaggccagcctaactaacatggagaaaccccatctctactaaaaatataaaattagccgggcktggtggcgcgtgcctgtaatcctagctgctcggaaggctgaggcaggagaatcacttgaacctgggaggcggaggttgtgatgagccaagatcgcaccat

SEQ ID NO: 106995 - DNA, 201 bp, Homo sapiens
tatagtccttacaaggttagtatcacaaaggtttataatgagtatctcttattttaaaacaaaaatatgaacactaaaccaaagttttttcgaggtttttwattttgtcctattttttaaccccagcgctttttcctttctcaattccagagaatttccgctgcctgtgcactcatgaaaagggctttggctttaagggaa

SEQ ID NO: 106996 - DNA, 201 bp, Homo sapiens
tggcggtagtgctggcgatagctctggctgtgcttaaactccttccaaggtttcccactgtcctcaggaaaaagtgcagacttcttagcagtacgcacttytccagcttctttgctttgcttcccgattcgctgggtctcccgaaaaatgacccacttgcccccaaggttcaggttatttcacacctttgggcctctgctt

SEQ ID NO: 106997 - DNA, 201 bp, Homo sapiens
tacatgcctgtagtcccagctactcaagaggctgaggcaggggaatgacttgaacccaagaggtggaagttgcagtgaactgagattgtgccattgcactscagcatgggcaacaagagtgaaactccgtctcaaggaaaaagaatcccttatagtccttacaaggttagtatcacaaaggtttataatgagtatctctta

SEQ ID NO: 106998 - DNA, 201 bp, Homo sapiens
cacagtggctggaccattttacatttctaccagcaatgtatgagtgtttcagtttttccacatcttctctttttttttttttttttttttttttgagacaragtctcgcactgttgcccgggctggagtacagtggcgtgatattggctcactgcaacctccgcctcccaggttcaagtgattcttgtgcctcagcctccc

SEQ ID NO: 106999 - DNA, 201 bp, Homo sapiens
aaggagaaagggtcatgtacgtggttgtgagggtcctccctggcaatgccccggcctggggtctggctgggtttgagggtttcctgcttctgaggggcccratccagatgagaagggtggctgcagctgggccgggcgggtggactcagtggcagccgcaggccttgaccaccatgttgcggtgcttgcgcaggatgacat

SEQ ID NO: 107000 - DNA, 201 bp, Homo sapiens
gaggctctgcctcccacaccctggcctccctccccagtctctgggaggccaggcctccgcccctctcctgtgctgctccttcccccagaggactgcatccrccctcagcacttcaaggccctgcacgtgcccgcacctctccactccccaggctcagcttggacctctcttctgaactccagacttgtggatcctgctccc

SEQ ID NO: 107001 - DNA, 201 bp, Homo sapiens
gatctggcctttcctgcagggtgaggctccaatgggcccctggaaagtctgtccttgaccagtgagaacttactactctgaccacatgcccccaatggcckgggaacccccagagctacacttatgcagtgcatgcaccaggccaggcttggctgtcaacagcacgtgtgcacgcgtgcatgcgcacacacacacacacac

SEQ ID NO: 107002 - DNA, 201 bp, Homo sapiens
tacctttgttgtcatttttaagattatagttttaggcctagttttatcatcaaccttgcatatgattgttagcaaagtctttaaactctctgggcctgggraatctttatttgcaaaatgataaggttatgttggctttctaagggccttctagtctctgagttctatgataaacattattgtgcttggtctttctagtta

SEQ ID NO: 107003 - DNA, 201 bp, Homo sapiens
ccacctcccaggttcaagcaattctgcctcagcctcctgagtagctgggattataggcatgcaccaccatgcccaggtaatcttgtatttttagtacagayggggtttcactgtgttggccaggatggtcttgaactcctgacttcaggtgatctgcctgccttggcctcccaaagtgctggggttataggtgtgagccac

SEQ ID NO: 107004 - DNA, 201 bp, Homo sapiens
taactgcatattttgcaaaatagcaggatttcatgaagtgttagaccaatttacaattgagaagagaaatttaattatggcaggtgcaaatcactgatacmaatgatttggatattctggaaaggtccttgggaaaaatgatgatgctctttagtatttgtgccttccttgagatccttttagttttcatgtctgataaga

SEQ ID NO: 107005 - DNA, 201 bp, Homo sapiens
ctctcccatgtttaggataatttgcagacacagtgcaaattgattgcacggtgtaactgcatattttgcaaaatagcaggatttcatgaagtgttagaccmatttacaattgagaagagaaatttaattatggcaggtgcaaatcactgatacaaatgatttggatattctggaaaggtccttgggaaaaatgatgatgct

SEQ ID NO: 107006 - DNA, 201 bp, Homo sapiens
tcccactcaaaggtcagcccttaagcagctgtgcctcagccctggtgtcccttggccacttgactgaacaaccagtgaatccagagaccaacctttgaccygtgacatcatccgccacaaacaaatgcactggcaggagaggctccctccctctcacgagcatggacaagagctgctgagacagggaggctgtgagctgca

SEQ ID NO: 107007 - DNA, 201 bp, Homo sapiens
taaaaaaaaaaaaaaaaaagggccaggtgcggtggctcacacctgtaatcccagcactttgagagtctgaggcaggtgtatcacttgaggtcaggagttcragaccagcccggtcaacatgacaaaaccctgtctctagtaaaaataaaaaaattatctgggcatggtggcaggtgcctgtgatcccagctactctggagg

SEQ ID NO: 107008 - DNA, 201 bp, Homo sapiens
caagcaatcctcctgcctcagcctcctgagtagctgagaccacagggacacatcactatgcctggctaattttttacatttatttatttatttatttattttattattttggtagagatggggtctctgcatgtttcccaggatctgggctcccatctccttaacaaattaaaatgaaggcggagagagtagaaccagtga

SEQ ID NO: 107009 - DNA, 201 bp, Homo sapiens
tcaagcaatcctcctgcctcagcctcctgagtagctgagaccacagggacacatcactatgcctggctaattttttacatttatttatttatttatttattttattattttggtagagatggggtctctgcatgtttcccaggatctgggctcccatctccttaacaaattaaaatgaaggcggagagagtagaaccagtg

SEQ ID NO: 107010 - DNA, 201 bp, Homo sapiens
ctcaagcaatcctcctgcctcagcctcctgagtagctgagaccacagggacacatcactatgcctggctaattttttacatttatttatttatttatttattttattattttggtagagatggggtctctgcatgtttcccaggatctgggctcccatctccttaacaaattaaaatgaaggcggagagagtagaaccagt

SEQ ID NO: 107011 - DNA, 201 bp, Homo sapiens
tacctgagcctggcaggtcgaggctgcattgagctgtgatcatgccactgcactacagcctgggtaacagaacgagaccctcgctcttaaacacacacatwcacacacacacacacgtatatatataattgggcatacacctgtagtcctagctactcaggaggctgaggcaggaggatcacttgagcatagcaggaccct

SEQ ID NO: 107012 - DNA, 201 bp, Homo sapiens
cattgcactccagcatgggcaacagagtgagaaactgtatcaaaattaaaataaaataaaataaaataaaataaaataaaataaaaaagcctggcatggtrgcttgcacctgtagtaccagttgcttgggagaccgaggcaagagtatctcttgagcccagagagctaggggctacagtgagctgtgatcacgccactgca

SEQ ID NO: 107013 - DNA, 201 bp, Homo sapiens
aagaaaaaaaaaaaaaaaaaagaaagtgctgtcaacaagctgtgacaaagagaaggctcctctgtgaggcagggaagtggggtcaaataacagttttttttgtttgtttgtttgttttttgaaggagaggagctgatttaggacaagtaaaatggttgtcagagagcagaggaatccagggaaggcttgagaccgtgaatc

SEQ ID NO: 107014 - DNA, 201 bp, Homo sapiens
gagggacagtggagaagttccagctgcagtcagacctcttgagagtggacatcatctcctggggctgcacgatcacagccctagaggtcaaagacaggcargggagagcctcggacgtggtgcttggcttcgccgagttggaaggtgggttgaactgtgccctgggctgcgagcaggccccaggcccacgctacatacctc

SEQ ID NO: 107015 - DNA, 201 bp, Homo sapiens
gtcatgattgtctttctgggccatgccgatgagctgggattttttttattttttatttttgacggagtcttgtgctgtcgcccaggctggagtgcagtggygcaacctccccctccgggttcagtggtccaacttcccgctctgggttcaagctattctcccacctcagcctcccgagtagcagggattacaggcgtgcac

SEQ ID NO: 107016 - DNA, 201 bp, Homo sapiens
cttataaaatttacccaattcactctgtcccccagcccatctgtgttcacttgctgttcttgctgctctcagtttttaaaagcttattctaaaattacatsaaagcaaccccattttgacaaaattagaattctggtaggaaacgcttgccatgaggctgtggagagaggcccagcaagacttttgtattttatttcaacc

SEQ ID NO: 107017 - DNA, 201 bp, Homo sapiens
ggcaccaacagaaggtttctgcaaggctgagagctccttttacccatggaccaggagcaaagtttgcaggtacactgtcaggctgtgtttggatgttagcrgttaatttagctctgcgtcttcagagcaattattcttagctacttaaaaaaaaaaaaaggaaaaaaatgacacccataaagcatttgctgctccatagga

SEQ ID NO: 107018 - DNA, 201 bp, Homo sapiens
gaaacaaatggattgtgatgatttaatgagccatgggctgtgatatgtgtctaaccatatctgaccacatatttgatacgtctctgatcagagggagcaaytaatcatttttatcccctttctttcctttgcccccaaataccatctctgactctactagaactttttatttcacttaattaacactgcaaaaaatggcat

SEQ ID NO: 107019 - DNA, 201 bp, Homo sapiens
tcctgccttcttcctgttggcaattttgggttttggggttttttttttttagacagagtctcactccatcaccaggctggaagtacagtggtgcagtctcsgcccactgcagcctccgccttccgggttcaaatgatcctcttgcttcagcctcccaattagctgggactacaggtgcgcaccaccacggccagctaattt

SEQ ID NO: 107020 - DNA, 201 bp, Homo sapiens
tattttctcacgtgaaacaaatggattgtgatgatttaatgagccatgggctgtgatatgtgtctaaccatatctgaccacatatttgatacgtctctgaycagagggagcaactaatcatttttatcccctttctttcctttgcccccaaataccatctctgactctactagaactttttatttcacttaattaacactg

SEQ ID NO: 107021 - DNA, 201 bp, Homo sapiens
gcacccggcccccaagaactcttcaaatgcacctagtgtcacaagaaaagatagttaaactgtgtctgaaaaagtggcttatgtggggaaatttgtgatgkatttagggaaacttagggtaaattttaaacataaggccttttgtcagatcacctacattcctcggattgtgcgtgggtttgtcgcaggtgcttgatgtga

SEQ ID NO: 107022 - DNA, 201 bp, Homo sapiens
ccgggcaatttacttaaactctccagacctattttctcacgtgaaacaaatggattgtgatgatttaatgagccatgggctgtgatatgtgtctaaccatrtctgaccacatatttgatacgtctctgatcagagggagcaactaatcatttttatcccctttctttcctttgcccccaaataccatctctgactctacta

SEQ ID NO: 107023 - DNA, 201 bp, Homo sapiens
tgcttccttccttaaagctgtgcgaccccgggcaatttacttaaactctccagacctattttctcacgtgaaacaaatggattgtgatgatttaatgagcyatgggctgtgatatgtgtctaaccatatctgaccacatatttgatacgtctctgatcagagggagcaactaatcatttttatcccctttctttcctttgc

SEQ ID NO: 107024 - DNA, 201 bp, Homo sapiens
tgggcaccaccacacccggctaatttttgtatttttagtagagacggggtttcaccatattggtcagggctggtctcaaactcctgacctcaagtgatccrcctacctcagcctcctaaagtgctgggattacaggtgtgagccaccacgcccagcctaaaaatatttttcatcggcatgtcccacctacagtcattatga

SEQ ID NO: 107025 - DNA, 201 bp, Homo sapiens
tcctgggttcaagcgattctcctgcctcagcctcccaagtagctgggactacaggcacaggccacgacacccagctaatttttgtatttttagtggagacrgggtttcaccgtgttggccaggatggtctcaatctcttgacctcgtgatccacccttctcagcctgccaaagtgctgggattacaggcgtgagccaccgc

SEQ ID NO: 107026 - DNA, 201 bp, Homo sapiens
ggtgggcggatcacttgaggacagtaattcaagaccagcctggtcaacctggtgaaaccccatctctactaatactacaaaaattagccaggcatcaccaygtgcctgtgcctgtaatactgggaggctgaggcacgagaatcacttgaacccgggaggcagaggttgcagtgagccaacatcacgccactgcactccagc

SEQ ID NO: 107027 - DNA, 201 bp, Homo sapiens
gttactattttgatggtgctctgatactacatttctagtgcattaaaacctatgttaacaataaactggtaacagtggttgttaagaaaggatcctgggtrcccagggtgcagaggatgggaaggagacttaattttcactgcatattcttttaaaccatcagagtatgtaagtatatataaacaaacagaggtaaataat

SEQ ID NO: 107028 - DNA, 201 bp, Homo sapiens
taccctgtgtttgttgtagaggtgtgggctgtgactcttacaggggagatatacaacactctgttactattttgatggtgctctgatactacatttctagygcattaaaacctatgttaacaataaactggtaacagtggttgttaagaaaggatcctgggtgcccagggtgcagaggatgggaaggagacttaattttca

SEQ ID NO: 107029 - DNA, 201 bp, Homo sapiens
caggcatggtggcaggtgcctgtaatcccagctactcaggaggctgaggcagataactgcttgaacctgcgaagcggaggttgcagtgagcctagattgcrccactgcactccagcctgggttacagagcaagactgtctcaaaaataaaaaattgtacaaggtgagatgtcatattaaaataattacacaaacactgctg

SEQ ID NO: 107030 - DNA, 201 bp, Homo sapiens
gctggagtgcaatggcatgatcttggctcactgcaacctctgcctcctgggttcaagcgattctcctgcctcagcctcccaagtagctgggactacaggcrcaggccacgacacccagctaatttttgtatttttagtggagacggggtttcaccgtgttggccaggatggtctcaatctcttgacctcgtgatccaccct

SEQ ID NO: 107031 - DNA, 201 bp, Homo sapiens
tgaacgatcaattggactttgccagactgtggtgggcataggggacccagaaggaacattcattctagttatgagaaagggcccagagacatggcgaatcygggggacaaattccacattttccatatacttgatcattaagcacatgaccaagtgtgtcagtgcatgaggatggacaagatagattggagccttcactgt

SEQ ID NO: 107032 - DNA, 201 bp, Homo sapiens
ctgctcggtaggctaaggcaggagaatcacctgaagctgggagacggaggttgcagtgagccgaggtcatgccattgcactccagcatgggcaacagagtragaaactgtatcaaaattaaaataaaataaaataaaataaaataaaataaaataaaaaagcctggcatggtggcttgcacctgtagtaccagttgcttgg

SEQ ID NO: 107033 - DNA, 201 bp, Homo sapiens
gaggccgaggtgggtggatcacttgaggtcaggagttcaagaccagcctggccaaaatggtgaaaccctgtctctactaaaaataaaaaattagcgaggcrtggtagcacacacctgtaatccaagctgctcggtaggctaaggcaggagaatcacctgaagctgggagacggaggttgcagtgagccgaggtcatgccat

SEQ ID NO: 107034 - DNA, 201 bp, Homo sapiens
acttttcacttcctgagtctgtaaggaagaaatgacaccaagtcctattttcctttggagcttttcctctggccatatcaatagcatttactatgctacargtgacccaataccacatcccatattttctcaaagctcccatggcacaggtgagctctgtagaatttatcccagtcccccacctgccattacccctattcc

SEQ ID NO: 107035 - DNA, 201 bp, Homo sapiens
ggtctccctatgttgcctaggctggtcttgaatccctaggctcaagcaatcctcccacctgggcctcccaaagtgctgggattacaggtgtgagccaccaygctggtcctcatctgactcttaacactgatcaaaagcccatgagcttaattttgaaagaaatccaaaaggcttgcccatcatttgatcactcagaagtgc

SEQ ID NO: 107036 - DNA, 201 bp, Homo sapiens
gagccgaggtcatgccattgcactccagcatgggcaacagagtgagaaactgtatcaaaattaaaataaaataaaataaaataaaataaaataaaataaaaaagcctggcatggtggcttgcacctgtagtaccagttgcttgggagaccgaggcaagagtatctcttgagcccagagagctaggggctacagtgagctgt

SEQ ID NO: 107037 - DNA, 201 bp, Homo sapiens
acacgcacctggggtcccagctactcaagaggctgaagcaggaggatctctcgagcccaggagttggaggctgcagtgagccgtgatctctgctgcactcyaccctgggcaacagagcaagaccctatctcaaaaaaaaacctaattgggaatatatgtgttatatttcagtagtttttttttttttttaaaaaagaccaa

SEQ ID NO: 107038 - DNA, 201 bp, Homo sapiens
tgagccgaggtcatgccattgcactccagcatgggcaacagagtgagaaactgtatcaaaattaaaataaaataaaataaaataaaataaaataaaataaaaaagcctggcatggtggcttgcacctgtagtaccagttgcttgggagaccgaggcaagagtatctcttgagcccagagagctaggggctacagtgagctg

SEQ ID NO: 107039 - DNA, 201 bp, Homo sapiens
atggtggctcacacctgtaatcccagcactttgggaggctgaggcagaggaggatcacttgagcccaggagttcgagaccagactgtgcaacacagtgagrtcccatctcaacaaaaaattgaaaaaaaaaatagccaggtgtggtaacacgcacctggggtcccagctactcaagaggctgaagcaggaggatctctcga

SEQ ID NO: 107040 - DNA, 201 bp, Homo sapiens
gtgagccgaggtcatgccattgcactccagcatgggcaacagagtgagaaactgtatcaaaattaaaataaaataaaataaaataaaataaaataaaataaaaaagcctggcatggtggcttgcacctgtagtaccagttgcttgggagaccgaggcaagagtatctcttgagcccagagagctaggggctacagtgagct

SEQ ID NO: 107041 - DNA, 201 bp, Homo sapiens
gtcggtcttcattctgaaagctcccgtgtcacataaaactataatcaaataaatttgtttggcttttttatgtattttttattttttagaggtggagtctygctctgtcacccaggctagagtggagtagtgcaattatagctgacttgcagcctcgaactactggcctcaagcaatcctcccacttcagcctcccaaagt

SEQ ID NO: 107042 - DNA, 201 bp, Homo sapiens
aaactaaagttaaaaaaaattttaaataactttactggatactcatcttacactaggtaacagcttttgttttagctggcttttttgggaggggggcggtrcgggaggggatagggtctcattctgttgcccaggctggagtacagtggcacaatctcagctcactgctgcctagacctcctccccaggctcagatgattc

SEQ ID NO: 107043 - DNA, 201 bp, Homo sapiens
agtgagccgaggtcatgccattgcactccagcatgggcaacagagtgagaaactgtatcaaaattaaaataaaataaaataaaataaaataaaataaaataaaaaagcctggcatggtggcttgcacctgtagtaccagttgcttgggagaccgaggcaagagtatctcttgagcccagagagctaggggctacagtgagc

SEQ ID NO: 107044 - DNA, 201 bp, Homo sapiens
cagtgagccgaggtcatgccattgcactccagcatgggcaacagagtgagaaactgtatcaaaattaaaataaaataaaataaaataaaataaaataaaataaaaaagcctggcatggtggcttgcacctgtagtaccagttgcttgggagaccgaggcaagagtatctcttgagcccagagagctaggggctacagtgag

SEQ ID NO: 107045 - DNA, 201 bp, Homo sapiens
gaaaacatttttgcaagataagttaaaaaacaaatatatgaaataagactaagcagaaaacctttcccctaccttttcctcccaggcttccccaaatatawatgaccatgaagtcaccatagaagcggatacttatttgcctgtggatgaaaccctgattcctacaggttggtgaatttaacctttttgtgttatgtggga

SEQ ID NO: 107046 - DNA, 201 bp, Homo sapiens
ggcaggagaatcacctgaagctgggagacggaggttgcagtgagccgaggtcatgccattgcactccagcatgggcaacagagtgagaaactgtatcaaaattaaaataaaataaaataaaataaaataaaataaaataaaaaagcctggcatggtggcttgcacctgtagtaccagttgcttgggagaccgaggcaagag

SEQ ID NO: 107047 - DNA, 201 bp, Homo sapiens
tcttcccttctgaagaaggaaattcaaatacttgcctcttctacttccttcttccttgatcagattctctttgaggcctggttgtctcagaaatgctccastaagctcagtggttgcctagtacaccagctacccaataaccatttaggaacaaaatagagaagaccaactcagtgtcttctcagagatcaggtctcctac

SEQ ID NO: 107048 - DNA, 201 bp, Homo sapiens
cctcccaaagtgctgggattataggcgtgagccaccgtgtccggcctgcaatcgagttttcctaactccagagttacgctgttatttccctctgctactgwccatagtaacagccatattactgagtacttaccacttgctgagtagggtgctgggcactttacatgccttatttcatttagtgttcgcaataatgctatg

SEQ ID NO: 107049 - DNA, 201 bp, Homo sapiens
caagagggggtgtggctcccacttcttcccttctgaagaaggaaattcaaatacttgcctcttctacttccttcttccttgatcagattctctttgaggcytggttgtctcagaaatgctccactaagctcagtggttgcctagtacaccagctacccaataaccatttaggaacaaaatagagaagaccaactcagtgtc

SEQ ID NO: 107050 - DNA, 201 bp, Homo sapiens
tactgtccatagtaacagccatattactgagtacttaccacttgctgagtagggtgctgggcactttacatgccttatttcatttagtgttcgcaataatsctatgaggtagagtctcgttatccccattttacagatgaggtaaccaagcttcagagaagctaagcagcctccacaaatttatacagcaaagaaagccag

SEQ ID NO: 107051 - DNA, 201 bp, Homo sapiens
catggtggggtgtgcctgtgatcctagctactcaggaggctgggaggctgaggtgggatgatatgtgggattttatatatatatatatatatatatatatatatttttttttttttttttttttttttttttgagacagagttttgctcttgttgcccaggctggattgcaatggtgcgatctcagctcaccgcaacctct

SEQ ID NO: 107052 - DNA, 201 bp, Homo sapiens
cctggagaaggctggagaggaaagagcaggcaagagggggtgtggctcccacttcttcccttctgaagaaggaaattcaaatacttgcctcttctacttcyttcttccttgatcagattctctttgaggcctggttgtctcagaaatgctccactaagctcagtggttgcctagtacaccagctacccaataaccatttag

SEQ ID NO: 107053 - DNA, 201 bp, Homo sapiens
ctgccttggagaaatagcaaagtccaaagtagtctcctcattcaaagatgttgcaaacgaaggctgttttgatctttatgtattagcatttgggtgttaayctttctggagctcctgacagaaaattcctttaaatttattatataattctaaaatattggacatatttgtttcaagcatctgtcagtatccttactcttt

SEQ ID NO: 107054 - DNA, 201 bp, Homo sapiens
cgagggaccaagggggaaagtcgcctagcttgggaccgtctgacttgcaagcgcatgcatcatagagggccgtgtggccatccagcatttgggaaaaactrtaataaataaactatggcagttggcctctggttatccgttcaggctttgccccagttaacgtaaaaggtcagctgatggtatgatacacttcagcgatcc

SEQ ID NO: 107055 - DNA, 201 bp, Homo sapiens
tcactgcaacctccgcctcctggattcaagcaattctcttgcttgagcctcccaagtagctgggttacaggtgcacaccaccatgcctggctaattttttrtatttttagcagaaacagggttttgccgtgttggccaggctggtctcgaactcccggcctcaagtgatccccgctgcctcagcctcccaaagtgctggaa

SEQ ID NO: 107056 - DNA, 201 bp, Homo sapiens
gcgggccacttgcaatgcgagggaccaagggggaaagtcgcctagcttgggaccgtctgacttgcaagcgcatgcatcatagagggccgtgtggccatccrgcatttgggaaaaactgtaataaataaactatggcagttggcctctggttatccgttcaggctttgccccagttaacgtaaaaggtcagctgatggtatg

SEQ ID NO: 107057 - DNA, 201 bp, Homo sapiens
ctgtgttgcttgagcaaacacttgaggttatgtgactgtgagattccaaatgtgcatttcaacatcaggtcatgacggtgcaacttgttttgtgatgaatrgcactataagtagaacatattctatagaccaaggattcttagccagggatgcatggcggggcttcagaggctctgggaacattctgtatgtgtgtgtgca

SEQ ID NO: 107058 - DNA, 201 bp, Homo sapiens
tgaaacagtgacacaatcatagctcactgtaacatcaaacttctggggctcaagcaatcctcctggctccgccttccaaatagctaggattacaggtgcayatcaccatacccaggtaattttttctttttttacacgaaaatgtctcaacatggatttttttttcttttttggcagagatgatgtctcactatgttgccc

SEQ ID NO: 107059 - DNA, 201 bp, Homo sapiens
ggttgtgctgaaaccctcagaaatcaacagtagaaaacttctctaaaacagctttggcctttttgcatatgaatgacttttactgcgtaaatcagttattktgcttaccatcctagtcctctgctttccaccccaaatccttgtttatgtgtgtgtggttttgtttgtttgcttgtttgtttgcttgtttgttttttgaga

SEQ ID NO: 107060 - DNA, 201 bp, Homo sapiens
tgtttccccttcacagccccgcttccctcctgtgctgctgaggcctggtgaggagtatgaccacaccacctggttcaagttttctgtggcttaaggaagtrtgaagatatgatccagtccagggctaggctcagccacctgtctcctgtccagaaaaaaggtgaagattaagaagctttcagaatgattctatggattaaa

SEQ ID NO: 107061 - DNA, 201 bp, Homo sapiens
tagttgattatatttaatcatgaccatcagccaaacaagattttaaaagtttttgtcaatgcctgaaaacatttttgcaagataagttaaaaaacaaatayatgaaataagactaagcagaaaacctttcccctaccttttcctcccaggcttccccaaatataaatgaccatgaagtcaccatagaagcggatacttatt

SEQ ID NO: 107062 - DNA, 201 bp, Homo sapiens
atggataaacaaattgtgatacagtcatacaacggaatactactcaacaatacaaaggaatataacatggatgatcccagtagcattatgttgtgtggaartaacaaggcaccaaagaatatgtactgcatacttctgtttctaaggaggcaggcacctaggaaacagagtgaagacctgaattaatgctaggccaggagt

SEQ ID NO: 107063 - DNA, 201 bp, Homo sapiens
acacagtgagactgtgtttttataaacaataaaaacaaacaaacaaaaaaacaacagaaactttaccgaaagagttatgaaagcaggtctgggggaattcragatgaaaagcaatagcatgtggtacatgacaggtagacatgtcattaaggacccaggttcttccagttttccatctgcttcctcagtattttggctttt

SEQ ID NO: 107064 - DNA, 201 bp, Homo sapiens
caccgcgcccggcctcattagcccaattttaaaccaaaggaaatgagagtctatgaggttaaatgaattccctgggaccactcaggaagagctggaactasaccccaggccttctgacactgaccagtacaccagcctttgactcccctgcaaaggccaggctgcatcttcatggaggaggtgggcaaattctcaaaagca

SEQ ID NO: 107065 - DNA, 201 bp, Homo sapiens
ttttgccagtcttagaatcatattttctggaacaagaagaaacttcgagataatttcttcaacccctttattttatgaaagagattaatgcctagagtcayacaatgagctagggacaaatgaggcccctcaaatcaggactcttgacttgtaggctacaactcttcttaatggcacaaatgccttatttgttttgaactc

SEQ ID NO: 107066 - DNA, 201 bp, Homo sapiens
cacagattgaatatcccttatccaaaatacttgaggccagaaatgttttggattttggagattttcagattttggaatatttgcgttatatatacttattygttcagcattcctaatctgaaaactcgaaatctggaatgctccagtgactacttctgagcgtcatgttggcactcaaaaagctcagattttggagcattt

SEQ ID NO: 107067 - DNA, 201 bp, Homo sapiens
gtgggtataagttaactccactgaactcaatttgctcatctgtaaaatggaggtaaataatatttgttgaagccacatgaaattgccagtgttcaactgtyttgacctacaatgatggtcatttcatttgggcaaccaaatctttaccttgcaagatgatttatgtaaagcaccaggtcattgactattgagcactcaaca

SEQ ID NO: 107068 - DNA, 201 bp, Homo sapiens
cactgcagcctcaacctcctgggctcaagcgatcctcccttctcagcctcccgagtagctaggactacaggtatgcaccaccatacctcgctaatttttttaaactttttcatagagatgacatctcactatgttgcccaggctggtcttgaattcctgagctcaagcgatcctcctgcctcagcctcccaaagtgttggg

SEQ ID NO: 107069 - DNA, 201 bp, Homo sapiens
agaacagcccacacacagcctctccacgtgacttgagcttccttacagtatggtggcagggctccaagggcaaatgtcttgagagagagagagagggcgargctggagccttttacataacctggctgcagaaatcacacagcattacttggccacattcttttggttaaggtggttaaaaaggtccatccaagttcaaaa

SEQ ID NO: 107070 - DNA, 201 bp, Homo sapiens
caacctccacctcccgggttcaagcgattctcctgccttggcctcccaagtagctgggattacaggcatgtgccaccacacctggctaattttgtattttyagtagagatggggtttcaccatgttggtcaggctggtcttgaactcctgacctcaggtgatccacctgccttagcctcccaaagtgctgggatcacaggc

SEQ ID NO: 107071 - DNA, 201 bp, Homo sapiens
gtttatcctcactgagcctccattctttcattattcaatgaggatgatgttacctactttaagtctgctttgagacagatagacagtgtctgtgaagtttstagcaaagagtcttgactcataatgggcacccgataagtgttcgttttcccttccctataagtgtaatcttggagcctctaggacaaagttgagaacagc

SEQ ID NO: 107072 - DNA, 201 bp, Homo sapiens
atcttcccacctcagcctccctagtagctgggatcacaggtgtgcaccataccacacctggctaattttttaattttttgtagagacgggatctcaccagkttgcccaggttggtcttgaactcctgggctcaagggatctgccctccttggcctcccaaagtgctgggattacaggcgtgagccaccgcgcctggtccac

SEQ ID NO: 107073 - DNA, 201 bp, Homo sapiens
cgtgaacccgggaggtggaggttgcagtgagccaagatcgggccactacactccagcctgggcaacagagcaagactccgtctcaaaaaaaaaaaaaaaamaaaaaaagaaagggaaagtcaagggaaagtcacctcaggtgtcattgttctgttgcagcatatggtgttcctgacagatcccttgtctttctggttcttg

SEQ ID NO: 107074 - DNA, 201 bp, Homo sapiens
aataccacatcccatattttctcaaagctcccatggcacaggtgagctctgtagaatttatcccagtcccccacctgccattacccctattccccctgctyggcacccgctctctccctctctgcctgttctttaaggcccattttctgttagaagccttaactcttcctagtgaagtcacctcggctgtcactgaacttc

SEQ ID NO: 107075 - DNA, 201 bp, Homo sapiens
cccaaagtgctgtgattacaagtgtgagccactgcacccggccacatgtgtgactttaaacaagatttttttttccttctaaacaatggacaggtagtatraaactccccaccgcccccgacacacactaggaatgtagaaggtagatgtgggtataagttaactccactgaactcaatttgctcatctgtaaaatggagg

SEQ ID NO: 107076 - DNA, 201 bp, Homo sapiens
agaagtttgagaccagcctggccaacatgttgaaaccccgtctctacaaaaaatacaaaaattggctgggcatggtggtgtgcccctgtaatcccatctgwttgggaggctgaggcgggagaatcacttgaacccaggaggcagagattgcagtgagccaaggttgagccactgcactccagcttgggcgacagagtgaga

SEQ ID NO: 107077 - DNA, 201 bp, Homo sapiens
cgagaccatcatggctaacatggtaaaaccccgtctctactaaaaatacaaaaaaattagccaggcgtggtggcaggcgcctatagtcccagctactcggsaggctgaggcaggagaatggcgtgaacccgggaggtggaggttgcagtgagccaagatcgggccactacactccagcctgggcaacagagcaagactccg

SEQ ID NO: 107078 - DNA, 201 bp, Homo sapiens
aacatgtataactttatttatttatttattttttgacacggagtctcactctgttgcccaggctggagtgcagtggcgcaatcttggctcactacaacctscacttcccaggttcaagtggttctcctgcctcaacctcccgagtagctgggattacaggcatgagccaccatacgtggctaatttttgtatttttagtag

SEQ ID NO: 107079 - DNA, 201 bp, Homo sapiens
ttttatgtatatgttactatatatttatgagtatatattttccattgtcccttggaatccatggaggattggttccaggaccccctactgatacttaaatyattagatactctagttccttctataaaatggtgcagtatttgcatataacctgagcccatactcccatatactctatttatttgagggttttttttttct

SEQ ID NO: 107080 - DNA, 201 bp, Homo sapiens
aggctgaggcaggagaatcgcttgaacccagaaggcagaggttgcagtgagcccagatcacgccactttactccagcctgggaaacagagcgagactctgyttccaaaaaaaaaaaaaaagagagagagaaaataacctgttagaccagccatactccattaagacttctcaaaataaatatgcactatctaccgactgtg

SEQ ID NO: 107081 - DNA, 201 bp, Homo sapiens
tatttgagggttttttttttctcttccccaccctctccatatttgttttttaagacagtctcattctgttacctatgctggagtgcagtggtgcaatcatkgttcactgtagcctcgacctcctgggctcaagcaatcctcctgcctcagcctcctgagtagctgagaccacagggacacatcactatgcctggctaattt

SEQ ID NO: 107082 - DNA, 201 bp, Homo sapiens
tctgttacctatgctggagtgcagtggtgcaatcatggttcactgtagcctcgacctcctgggctcaagcaatcctcctgcctcagcctcctgagtagctragaccacagggacacatcactatgcctggctaattttttacatttatttatttatttatttattttattattttggtagagatggggtctctgcatgttt

SEQ ID NO: 107083 - DNA, 201 bp, Homo sapiens
aatatcccctgagagacaaaattatccccaattgagaaccactagtttagctcatctttgagcattcactgagcaaaagccctcacttggtttcccttccrcatcttctggtgtgaagctttaaaatatgttgctattgataatataaaataatatttgtactagaaacatgcatgtataaagttatttgccgatttgcaa

SEQ ID NO: 107084 - DNA, 201 bp, Homo sapiens
ttccatctgccagtgtgttccaatgaaggagacaatatgggaatgttaggtttactaaggctttttacgactcttccaatcctgcagggacttggagtgamgggtatttctgaatctcttttcagaggctgaatagtttcctagatcatagaccccacccaaaagcgcggtcaatgaacttccttccgtataccacagatt

SEQ ID NO: 107085 - DNA, 201 bp, Homo sapiens
atatactctaacctttccctctgcctttctgtgtaacagctgaccataaagaaattaagaccctcattccagaggggtcctgccccatacccggaggaagraatgctgcatggggaggccaagaaaaatctgaacacaggccttgccgagtttccccactcactctattagcaacagatcttacccttttggtccaatcat

SEQ ID NO: 107086 - DNA, 201 bp, Homo sapiens; identical to SEQ ID NO: 17385

SEQ ID NO: 107087 - DNA, 201 bp, Homo sapiens
acttcactgagactaagatgtggaatagaggagacagccagtcctgagtttgaaccccagctctgtcacaaataacatgtataactttatttatttatttwttttttgacacggagtctcactctgttgcccaggctggagtgcagtggcgcaatcttggctcactacaacctccacttcccaggttcaagtggttctcct

SEQ ID NO: 107088 - DNA, 201 bp, Homo sapiens; identical to SEQ ID NO: 17389

SEQ ID NO: 107089 - DNA, 201 bp, Homo sapiens
tgaatgtgggaggtggaagttacagtgagctgagatcacgccactgcactccagcctgggcaacagagccagagtccgtctcaaaaaaataaaaaataaawaataaataaagggccacatgactcctaagtgggacaaccagggctgcctggcccaaaacactcattcttacaccatagctgctggtgtccacccaggctg

SEQ ID NO: 107090 - DNA, 201 bp, Homo sapiens
tcccagctacttgggaggctgaggcaggagaatcacttgaatctgggaggcggaagttgcagtgagccgagattgcgccactgcactccagcctgggcgayagagtgagaccccatctcaaaaaaataaaaatatactctaacctttccctctgcctttctgtgtaacagctgaccataaagaaattaagaccctcattcc

SEQ ID NO: 107091 - DNA, 201 bp, Homo sapiens
tgaacaccaccatgcccggctaatttttttgtgtttttggtagagatggggtttcaccatgttggccaggctgctggcgggcacctgtaatcccagctacytgggaggctgaggcaggagaatcacttgaatctgggaggcggaagttgcagtgagccgagattgcgccactgcactccagcctgggcgacagagtgagac

SEQ ID NO: 107092 - DNA, 201 bp, Homo sapiens
gggcagatcacttgaggtcaggagttcaagaccaacctgcccaacatggtaaaaacccgtctccactaaaaatacaaaaaattagctgggcgttgtggtasatgcctgcaatcccagctaatcaggaggccgaggcatgagaattgcttgaacccaggagacggaggttgcagtgagccaagattgcgccactggactcca

SEQ ID NO: 107093 - DNA, 201 bp, Homo sapiens
gctcaagcaatcctcctgcctcagcctcctgagtagctgagaccacagggacacatcactatgcctggctaattttttacatttatttatttatttatttattttattattttggtagagatggggtctctgcatgtttcccaggatctgggctcccatctccttaacaaattaaaatgaaggcggagagagtagaaccag

SEQ ID NO: 107094 - DNA, 201 bp, Homo sapiens
ggccaggtgctgtggctcatgcctgtaatcccggcactttgggaggccgagatgagtgaatcacctgaggttaggagtttgagaccagcctgaccaacatrgtgaaaccccgtctctactaaaaatacaacataagctgggcatggtagcgtgggcctgtaatcccagctattcgggaggctgagacaggagaatcacttg

SEQ ID NO: 107095 - DNA, 201 bp, Homo sapiens
gagctgtgagaagcctctcagtgtctgtgaggatctagccacaaggagagtgagagtaccaaagcacagaatgcaggagtggtgatgactgttaagccaakaagccaaagagacagttgggcagagcaagggctagggtgcaaaatttaaggcagcatccactcccagggtcgtgcatgtgcagggtcagcacctgagagt

SEQ ID NO: 107096 - DNA, 201 bp, Homo sapiens
gcctggccaacatggtgaaaccccgtctcaactaaaaaaaaaaaaaaaaatacaaaaaaattagctgggcatggtggcgggtgcctgtaatctcagttagtcgggaagctgaagcaggagaattgcttaagcccaggaggcggaggttgcagtgagccaaaatcatgccattgcactccagcctgggtcacagcaagactc

SEQ ID NO: 107097 - DNA, 201 bp, Homo sapiens
agcctggccaacatggtgaaaccccgtctcaactaaaaaaaaaaaaaaaaatacaaaaaaattagctgggcatggtggcgggtgcctgtaatctcagttagtcgggaagctgaagcaggagaattgcttaagcccaggaggcggaggttgcagtgagccaaaatcatgccattgcactccagcctgggtcacagcaagact

SEQ ID NO: 107098 - DNA, 201 bp, Homo sapiens
aaagtgctggaattacaagcgtgagccactgctcccggcccaagtatttcttttttaggggagaaaaaattattggagaaaatttctttcctactcatttmccaaatttttctaggaagtctatgtcagatttcctttcttttttcttttctcccttaaaataatttttaattgttattataaacaggatggacctgtgct

SEQ ID NO: 107099 - DNA, 201 bp, Homo sapiens
agcaattatttgttgtttatttgaaactcacatttaaccaagcattctatatttcctctggcaaacctactctatatccttgtgtattacctaactctctytaaaggatattttaatgtactaattatgtgatttaaaaaaataagaagagaaagaataagatcgcttcccctcaagaccacacgaaagtataactttggc

SEQ ID NO: 107100 - DNA, 201 bp, Homo sapiens
cgtctgttcctcttctcagagagtcaggcatgagggccaccaggcaggggaaaaaatgacttcagatcatgagaaattaaaagcttttaattaaaattcayccgggtgagagagtgttcatggccaaatattacaaaaaaagctattttcctgtaatcagtgcttggtcagaagttcatagacccagttcactttctaccc

SEQ ID NO: 107101 - DNA, 201 bp, Homo sapiens
gtcccatgtataataataacatgaacaaacttatactaagcaattatttgttgtttatttgaaactcacatttaaccaagcattctatatttcctctggcraacctactctatatccttgtgtattacctaactctctctaaaggatattttaatgtactaattatgtgatttaaaaaaataagaagagaaagaataagat

SEQ ID NO: 107102 - DNA, 201 bp, Homo sapiens
tgcgatcttggctcactgcaacctccgcctcctgggttcaagcgattctcctgcctcagcctcccgagtagctgggattacaggtgcctgccaccacaccmagcaaatttttgtatttttagtagagacggggattcaccatcttgaccaggctggtcttgaacttctgactttaggcgatccacccacctcagcctccca

SEQ ID NO: 107103 - DNA, 201 bp, Homo sapiens
acaacttttaaagtataagtatgtcccatgtataataataacatgaacaaacttatactaagcaattatttgttgtttatttgaaactcacatttaaccargcattctatatttcctctggcaaacctactctatatccttgtgtattacctaactctctctaaaggatattttaatgtactaattatgtgatttaaaaaa

SEQ ID NO: 107104 - DNA, 201 bp, Homo sapiens
taattatcatcctctttatgttgtttcctaaaataacaacaggcattctagagatgatttacgaagatggcttaatgaggtgtcagatgagtacctgtgcmcatgagcccctttaccgcaggcctccttatgcaaatttgactgactcttctgagcccgactagataaagaaacagacataattggagcagctgggctgga

SEQ ID NO: 107105 - DNA, 201 bp, Homo sapiens
agtgggtaactgaaaggtgaactttctactagacagcaaatccctggatgtcatcctgatggatctaagatgaaaaataccccaccatgaaaatgccttaygtggtcccaaccatgaagcgtaaaattgccttttcacctgaaaacgacctgcagcttggtttagcattttatgcttcggatgtcatgtaacatccagaag

SEQ ID NO: 107106 - DNA, 201 bp, Homo sapiens
ggaggctgaggcaagagaatcgcttgaatgtgggaggtggaagttacagtgagctgagatcacgccactgcactccagcctgggcaacagagccagagtcygtctcaaaaaaataaaaaataaataataaataaagggccacatgactcctaagtgggacaaccagggctgcctggcccaaaacactcattcttacaccat

SEQ ID NO: 107107 - DNA, 201 bp, Homo sapiens
tgtggtggcggccacctgtaatcccagctactctggaggctgaggcaagagaatcgcttgaatgtgggaggtggaagttacagtgagctgagatcacgccrctgcactccagcctgggcaacagagccagagtccgtctcaaaaaaataaaaaataaataataaataaagggccacatgactcctaagtgggacaaccagg

SEQ ID NO: 107108 - DNA, 201 bp, Homo sapiens
gattacaagtgtgagccactgcacccggccacatgtgtgactttaaacaagatttttttttccttctaaacaatggacaggtagtatgaaactccccaccscccccgacacacactaggaatgtagaaggtagatgtgggtataagttaactccactgaactcaatttgctcatctgtaaaatggaggtaaataatatttg

SEQ ID NO: 107109 - DNA, 201 bp, Homo sapiens
acatggtaaaaccccgtctctacgaaaaatacaaaacttagctgggtgtggtggcggccacctgtaatcccagctactctggaggctgaggcaagagaatygcttgaatgtgggaggtggaagttacagtgagctgagatcacgccactgcactccagcctgggcaacagagccagagtccgtctcaaaaaaataaaaaat

SEQ ID NO: 107110 - DNA, 201 bp, Homo sapiens; identical to SEQ ID NO: 17386

SEQ ID NO: 107111 - DNA, 201 bp, Homo sapiens
ggtgggcaggtcacctgaggtcaggagtttaagaccagcctggccaacatggtaaaaccccgtctctacgaaaaatacaaaacttagctgggtgtggtggyggccacctgtaatcccagctactctggaggctgaggcaagagaatcgcttgaatgtgggaggtggaagttacagtgagctgagatcacgccactgcactc

SEQ ID NO: 107112 - DNA, 201 bp, Homo sapiens
tgcaaagtttgcccctcttgttaccctcaggcaaatgattgatttagaaaggccccaggggctattttttgcaggaacggtcactccctaaatccaggcarggaaagggaggagtctgagccgagtcacgccccttctcctgtaaacttgggtcgcctctagcttagcgagcgctggagtttgaagagcgggcagtggctg

SEQ ID NO: 107113 - DNA, 201 bp, Homo sapiens
aggatggtctcgatctcctgaccttgtgatccgcctgcctcggcctcccatagtgctgggattacaggtgtgagccaccgtgcccagcctgaattgaagtwttaaaagtgctgtcatcccttgtccttgcaggatacctccaaaagcagccatactttggagcagttattgggagggtggccaaccgaatcgccaaaggaa

SEQ ID NO: 107114 - DNA, 201 bp, Homo sapiens; identical to SEQ ID NO: 17391

SEQ ID NO: 107115 - DNA, 201 bp, Homo sapiens
aaaaaaacaaaaacaaaaacaaaaaaaaccctgataattatggggaaaaaaaaaaacaacaaaaaaaccctattcctccaaaccaaggaactggcctggcwagtgcttcttatcttcatgacgtgattggttttgggtagtggtcacttgtaagggaattcttgcaagcccatgtggtaggagccctgctgttggctttgt

SEQ ID NO: 107116 - DNA, 201 bp, Homo sapiens
gaggtcaaggctgcaatgagccgtgatggcaccactgcactccagcctaggtgacagagaaagaccctgtctcaaaaaaacaaaaacaaaaacaaaaaaamccctgataattatggggaaaaaaaaaaacaacaaaaaaaccctattcctccaaaccaaggaactggcctggcaagtgcttcttatcttcatgacgtgatt

SEQ ID NO: 107117 - DNA, 201 bp, Homo sapiens
gagtttgagaccagcctgagcaacatagtgagaccctgtctctaaaataaataaaaataaataaataaataaataaatttaaatttaaaaaaaattttttwaaatacttgacagaataaggggttatcttgacattaccatatcccaaaaatggttttgagccatgcggaagatctgagcgtggataattccatgagacat

SEQ ID NO: 107118 - DNA, 201 bp, Homo sapiens
aaaaagtatccaggtgtggtggcgcatgcctgtagtcccagctatttgggaggctgaggtggggacctgagcctggaggtcaaggctgcaatgagccgtgrtggcaccactgcactccagcctaggtgacagagaaagaccctgtctcaaaaaaacaaaaacaaaaacaaaaaaaaccctgataattatggggaaaaaaaa

SEQ ID NO: 107119 - DNA, 201 bp, Homo sapiens
tgtaatcctaggagtccaaagtgggaggatcgcttgaggccaggagtttgagaccagcctgagcaacatagtgagaccctgtctctaaaataaataaaaawaaataaataaataaataaatttaaatttaaaaaaaatttttttaaatacttgacagaataaggggttatcttgacattaccatatcccaaaaatggtttt

SEQ ID NO: 107120 - DNA, 201 bp, Homo sapiens
aggagagagacagaaaggaggggaaattgccacttttaaatcatcagctctcgtgagaactcactgactatcacaagaacagcatgggggaaccgcccccmtgatccaattacctccaccaggtgggattacaattcgagatgagatttgggtgggagcacaaagccaaagcgtatcagtaacatttgaaggtagtataaa

SEQ ID NO: 107121 - DNA, 201 bp, Homo sapiens
cctgtaatcctaggagtccaaagtgggaggatcgcttgaggccaggagtttgagaccagcctgagcaacatagtgagaccctgtctctaaaataaataaawataaataaataaataaataaatttaaatttaaaaaaaatttttttaaatacttgacagaataaggggttatcttgacattaccatatcccaaaaatggtt

SEQ ID NO: 107122 - DNA, 201 bp, Homo sapiens
ggagcaactaatcatttttatcccctttctttcctttgcccccaaataccatctctgactctactagaactttttatttcacttaattaacactgcaaaawatggcatggagattcaactaggacagcaagcagccactaaaaagtatataaattatctgagattactaaagtgcttattaattaaattgttttcttcata

SEQ ID NO: 107123 - DNA, 201 bp, Homo sapiens
taaaaaatcagccaggagtggtggcacgtgcctgtaatcccagctactcgggaggctgaggcaggagaatcacttgaacccaggaggcggaggttgcagtragtggagatcgcaccatcgcactccagtctgggtgacagatcaagactccgtctccaaaaaataattaattaattaaaaatatgtaagtctggccaagca

SEQ ID NO: 107124 - DNA, 201 bp, Homo sapiens
aacccgggtaggcggagctggcagtgagcaagatcatgccattgcactccagcctgggtgatagagcgagactctgtctcaagaaaaaaaaaaaaaaaaaagaaagtgctgtcaacaagctgtgacaaagagaaggctcctctgtgaggcagggaagtggggtcaaataacagttttttttgtttgtttgtttgttttttg

SEQ ID NO: 107125 - DNA, 201 bp, Homo sapiens
aaaggaaccttcaaggtggatgggaaggagtatcacctggccattaacaaggaacccaacagtctgcatggaggagtcagagggtttgataaagtaagtayggcacatgtgactgagttccctttaggctcactttacgcataccttctgcttgccaggcacagtcataggccctagagcacatgagtggtgagatgcagg

SEQ ID NO: 107126 - DNA, 201 bp, Homo sapiens
cagcctggccaacatggtgaaaccccgtctcaactaaaaaaaaaaaaaaaaatacaaaaaaattagctgggcatggtggcgggtgcctgtaatctcagttagtcgggaagctgaagcaggagaattgcttaagcccaggaggcggaggttgcagtgagccaaaatcatgccattgcactccagcctgggtcacagcaagac

SEQ ID NO: 107127 - DNA, 201 bp, Homo sapiens
ggacaaagcagagagggatgcagtatcactggtgtccctagtctcacacacgctctgtggcctaagcactgtttagttttttgcaggattcagaaacttarggaatagttttcctgtgggtttatgaaatggacatactatgtgaataaaattacttcttttagaggtcttttaattttatattttctcttaccagaaaag

SEQ ID NO: 107128 - DNA, 201 bp, Homo sapiens
tttatacaacaaggaggaggtaattttttctcacttgaaataaattgtgtttatatcctcttgtaatagattattaatctcatgttgatgcaatctagaayacatgcacagaatttaaagcagttgatggcatattttaagtatctatgcttattcagtacttttccatatgataagccctaggaaaaacaagagagaatt

SEQ ID NO: 107129 - DNA, 201 bp, Homo sapiens
gccctgagatggaagcgtgcttgaggtgtctgagtcacagcgaggaagccactagatctggagtgctctggggataaaggacggtggtagaatgttagatsagtgaggtggtgaggccaggccatggagagccatatgggccatgatctaaactttggtttttattttgagtgaaatggaaagccatgagggttttgagca

SEQ ID NO: 107130 - DNA, 201 bp, Homo sapiens
ttagtcacacatctttttttaacacagcagtaaaattcatttttaaaacctaattcataaactcttaagtatttggtttcagtgtaggcattttgggatckcaatcataacggtaatgatatctaatatttatagaatgtgtgcttattcagtgccagggcaccacattaagtgctttacatggtttagtcttcacaacaa

SEQ ID NO: 107131 - DNA, 201 bp, Homo sapiens
cctttccttccatcggaaccgttctcccggggctgagtccctgcccggactccgaacgccgaagaccaggggccggaagcgcgcgccgccactgccacgcygtgtcagtcgggagggagggagcgagcaggcgaagccgcggaggacggggtgaagatggcggccttctccggtgcgtttgtggaaactctgggggtggtg

SEQ ID NO: 107132 - DNA, 201 bp, Homo sapiens
atacaaaaattagctgggcttcgtggcagagacctgtaatcccagctactcgggaggccaaggcatgagaattgcttgaacccaggaggtggaggttgcaytgaggccaagattgcgccattgcactccagcctgggcaacagagtaagactccgtctcaaaaaaaaaaaaaaaagcaagtgtttcttggttcattggttt

SEQ ID NO: 107133 - DNA, 201 bp, Homo sapiens
  misc_feature (1)...(201): n = A,T,C or G
ctgtaagtacataaagcctaaatgtacctgggagaggatgttttataatttaaacagttgttagtgattttatcaaatatttttgtgtctagttgggtaantgaaaatcaggttttttttgtgattttctaaattatggaaagtttcctttttttaaccttgacatatttctagtggaataagatggatcgtatttaccac

SEQ ID NO: 107134 - DNA, 201 bp, Homo sapiens
gcagagacctgtaatcccagctactcgggaggccaaggcatgagaattgcttgaacccaggaggtggaggttgcattgaggccaagattgcgccattgcaytccagcctgggcaacagagtaagactccgtctcaaaaaaaaaaaaaaaagcaagtgtttcttggttcattggtttttagtatattcacaaggtgtgtaac

SEQ ID NO: 107135 - DNA, 201 bp, Homo sapiens
ctctttagtgtaggttcattctaccagtctccattgttctatctttttgtgatgttagctgcgtcctatttccttcattcagtccactctgtgttgtctgrtgggtatttttggtttgggtaaatgaaattgtagtagcaatctggaatatgtatgattagttgatgtgtgtgcataacttttgtcatttatattggttat

SEQ ID NO: 107136 - DNA, 201 bp, Homo sapiens
gcaatctggaatatgtatgattagttgatgtgtgtgcataacttttgtcatttatattggttattaaattgtcgttaatatgtgaatactaatatagatamcttttgtttctttgataggcttttagtattccagttatccagatagtttatgaaactctgaaagaccaacaggaaggcaaaaaaggaaaaacaacaatta

SEQ ID NO: 107137 - DNA, 201 bp, Homo sapiens
aatttttgtaaattgatatttccttttatataaatcattggttctcatcactgacagttaggaaagtgagatttgggtatgcatttttaaaatcttgtcartatctggggggtggtattgggatctggaaccctggaaaccagggatgctaaatgttgttgagagcctaaacactgcaaggttgtccctcctaaaatacta

SEQ ID NO: 107138 - DNA, 201 bp, Homo sapiens
gggaagatgacttcatggtaaatgaatcgtgtgtgtgatttatataaatctcaatgtattttacccttgtagggaaacactactatgaagtatcctgtcaygaccaagggttatgcagggtcgggtggtctaccatgcaggcctctttggacctaggtaagtgtttctaaaataactgaattgattgatttacatttgggg

SEQ ID NO: 107139 - DNA, 201 bp, Homo sapiens
cagcgtgtaacctttgtaacttcccccagacttgttttattgtaggcttttttcctcaattactttctcaaccttaatttccacctaaaataaatggatgsagatcaaacaatgtaaagcagactttaatttttttttttttatattatcatcttgatatttatttcagggagcttctgataattggaggtgttgcagccc

SEQ ID NO: 107140 - DNA, 201 bp, Homo sapiens
tctgcttccttctctgtagctgtgaccctgataccgcgtggtgtgctccgaacacatggtgcccagaacgaaggcggcgtccagaagccctaggtcccagmggtccgctcagcggcaggcgcataaggcggggccggcgcgggcctttccttccatcggaaccgttctcccggggctgagtccctgcccggactccgaacg

SEQ ID NO: 107141 - DNA, 201 bp, Homo sapiens
taagttttgcttagtttagactaacaattagagatgatcagagagaccttagaaatatgttgggtcacagaattaaagtcttacattcagtggttgaggartaacaattatagcacagcttcacactgaaaaatagagagttggaggatggtgactaaaaaattactagagttttgtgttaaggtttttactgcgtagagt

SEQ ID NO: 107142 - DNA, 201 bp, Homo sapiens
  misc_feature (1)...(201): n = A,T,C or G
ttatgttatgacttcaacatagcataagtaagttttcttgcatacttaatcactcatgacagaatgagggtatacaaatgattctcaaaatgagcagattntctgtatattttccacagaaagtttggatttggactttagtgaagaaatattgtcaagctagataaatatgtagtagttataatttttcttttatgccat

SEQ ID NO: 107143 - DNA, 201 bp, Homo sapiens
ttaaaagctgcttttagaaatagaaggaaatttgaggaaattacttgggtgttgcagaaaactacaagtaaaaattcttagttactttgtcctgtagaccrtttagggtgtgtattccagattattagtactgttgcctgttcgaaggaaaaataacttcagctattgaaaaattgttgtcttctctgtagttatatcctt

SEQ ID NO: 107144 - DNA, 201 bp, Homo sapiens
tataataatctagattagaatgatgagagcttccgtttgaatggtagcaatgggaaagggaagagaagattcttaagggtatgggaaaggtaacaagatgrgctgtagttggagttgacagaggaaccctggatatctggaggcactgtgaaaataaaggtagccagtcaaatgttaaagatttctacatactatggtgtt

SEQ ID NO: 107145 - DNA, 201 bp, Homo sapiens
gcttgtactattgtatatgtcatatgctctaataggcatttttgatttaaataattattttgaaacacatacttttgatgcagctatattttaactttatktaagaatttactttctattaatagcatttgactttctggtgttctaggaattcactatgcatgataccattggatgttacctggatatagataagggaca

SEQ ID NO: 107146 - DNA, 201 bp, Homo sapiens
ctgttcttatgctgctatgaagaactgcctgaggctgggtaatttataaaggaaagaggtttaattgactcacagttcttcagagctggggaagcaaacaygtccttctttacatggcagcaggaaggagaagtgccaagcaaagtaggaaaagccccttataaaaccatcagatctcatgaggactccgtcactatcacg

SEQ ID NO: 107147 - DNA, 201 bp, Homo sapiens
tggaaaaattctcaatcagttgttatggaaatgcaaaataaaatgacagtataataccgttgtacatgctaaactaaaaatacaacaccgaattttggctrtggagcaactgcatacagttgttgagaatagattgttggtgagaatataaaatggtatgagcactttagcaaagggtcttgcagtcttttataaagctaa

SEQ ID NO: 107148 - DNA, 201 bp, Homo sapiens
tagtcactcaagctctaatttaagtataaaatcaggacgaatattgatgagcgagttgtgcatcatccttgagtacgtttctttaaagggctccagagaakagttatctaaacacatttgtattgatggtgcaactactattagtgcaagtcaggttaagagctgtgttgaatcctttctagacttgttgctgtaaaatct

SEQ ID NO: 107149 - DNA, 201 bp, Homo sapiens
caaagtagaactaatctgctgtccctacaggtcttaaaatcaaacttaaactcagggttttttttgttggttatttttttgtttgtttgtttgtttgtttktttttgtttttgagacagggtcttgctttgtcacccagcctggagtccagtggcgtgaacacagctcactgcaacctcaacctcctaggctcaagcaatc

SEQ ID NO: 107150 - DNA, 201 bp, Homo sapiens
tccttgctgagtaaacacagcaatgatggatgaatctcagaaaccttatgccaaatgaaagaattcttactcaagaatatacactgtatcaatctatttatatgacatttttaaaaagtcagaactaatctgtgatggaaaaaatgtcagaacagtagtagtccccacaagggtggcagtagggataggctgggaaaggat

SEQ ID NO: 107151 - DNA, 201 bp, Homo sapiens
ttcttcatgagagataacagttttgctgtatgtatttctgttaatttgtacgtgtgtatgtgtgtgttccctcataaggggtacggttatgggtgtttatrtaccccataaagtagcataaaaaatattaacagaaacaaaaataaatgaatgaatggtttaactcactgttttactctatctttacttcttgtccttatc

SEQ ID NO: 107152 - DNA, 201 bp, Homo sapiens
ttccttgctgagtaaacacagcaatgatggatgaatctcagaaaccttatgccaaatgaaagaattcttactcaagaatatacactgtatcaatctatttatatgacatttttaaaaagtcagaactaatctgtgatggaaaaaatgtcagaacagtagtagtccccacaagggtggcagtagggataggctgggaaagga

SEQ ID NO: 107153 - DNA, 201 bp, Homo sapiens
tagtttccttatattttgtttgatttagaaaaaagatttttgatactgattaaaacttacgtttttttccatactgattaaaaacttaatttattctttgyttctcatgcaggatgggcttctttctcaaggttattctgattttataaataggatgcacaatcagattcctcaggttacctctgatggaaaaagacttca

SEQ ID NO: 107154 - DNA, 201 bp, Homo sapiens
tttccttgctgagtaaacacagcaatgatggatgaatctcagaaaccttatgccaaatgaaagaattcttactcaagaatatacactgtatcaatctatttatatgacatttttaaaaagtcagaactaatctgtgatggaaaaaatgtcagaacagtagtagtccccacaagggtggcagtagggataggctgggaaagg

SEQ ID NO: 107155 - DNA, 201 bp, Homo sapiens
gggagcttctgataattggaggtgttgcagcccgggatcagctctctgttttggaaaatggagtaagttgtagttttaatttttaaaacataatgtcatgsgctgtcgttttagcaatacagctctgttttgtttcaagaaaatttaagtgaggctgaaattagagcaaggtcagaggagtatgtttgttcaaagacatct

SEQ ID NO: 107156 - DNA, 201 bp, Homo sapiens
ttttccttgctgagtaaacacagcaatgatggatgaatctcagaaaccttatgccaaatgaaagaattcttactcaagaatatacactgtatcaatctatttatatgacatttttaaaaagtcagaactaatctgtgatggaaaaaatgtcagaacagtagtagtccccacaagggtggcagtagggataggctgggaaag

SEQ ID NO: 107157 - DNA, 201 bp, Homo sapiens
ttaaggatgtcaaaatcaattttggtcaaaatcttcacattaatttcaaaccaagtatcagttgaacatatggcattatctgtaactccttttttttttttataaatttagagttgactgactacttcaatatgcatgtttttattaaaaagacagttattggttgctattttaacgtaattatactgtttctttagtttt

SEQ ID NO: 107158 - DNA, 201 bp, Homo sapiens
ggttcaagcagttctcctccctcagcctcctgagtagctgggactagatgtgcacgccgccatgcccggctaattttgtgtgtgtgtgtgtgtgtgtgtgtattttagtagagacggggtttcaccattttgcccaggctggtcttgaactcctgagctcaggcaatctgcctgcctcggcctcccaaagtgctaggatta

SEQ ID NO: 107159 - DNA, 201 bp, Homo sapiens
aggttcaagcagttctcctccctcagcctcctgagtagctgggactagatgtgcacgccgccatgcccggctaattttgtgtgtgtgtgtgtgtgtgtgtgtattttagtagagacggggtttcaccattttgcccaggctggtcttgaactcctgagctcaggcaatctgcctgcctcggcctcccaaagtgctaggatt

SEQ ID NO: 107160 - DNA, 201 bp, Homo sapiens
caggttcaagcagttctcctccctcagcctcctgagtagctgggactagatgtgcacgccgccatgcccggctaattttgtgtgtgtgtgtgtgtgtgtgtgtattttagtagagacggggtttcaccattttgcccaggctggtcttgaactcctgagctcaggcaatctgcctgcctcggcctcccaaagtgctaggat

SEQ ID NO: 107161 - DNA, 201 bp, Homo sapiens
cctaaggtaatgcacaggtgacacaaacaaagtttctccccaatgctccgaaagctctcattgttgaaccttcccgggagttagctgaacaaactttgaayaacatcaagcagtttaagaaatacattgataatcctaaattaaggtaaatcttccttttgtgctgaaatgcttattgtcttttggtttgaagttttttgg

SEQ ID NO: 107162 - DNA, 201 bp, Homo sapiens
atagtaactattactgttttcctggacagtctgatcaccattactattaactataaccaaatttattgagcacctgggacactctgcgtctagtgctttaygcatcttatctcttaattatcacaaccatcttgaaaaagagaaggtattcccccaattcaaaaatgggaaaattggtactagaggagattaaataaatta

SEQ ID NO: 107163 - DNA, 201 bp, Homo sapiens
ccaggttcaagcagttctcctccctcagcctcctgagtagctgggactagatgtgcacgccgccatgcccggctaattttgtgtgtgtgtgtgtgtgtgtgtgtattttagtagagacggggtttcaccattttgcccaggctggtcttgaactcctgagctcaggcaatctgcctgcctcggcctcccaaagtgctagga

SEQ ID NO: 107164 - DNA, 201 bp, Homo sapiens
atacaaaatgtagaccatctggaaggacataaatgtgtttgagtctcttagacatacttccaaatcattttcaggttgggttacctagttcctcagcactsagggtttttaattttttatatgaaaagtctgttgaaggatatatgttagaagctgttgactgaaattttcattctagattattagattatggttttggat

SEQ ID NO: 107165 - DNA, 201 bp, Homo sapiens
agtctaaatatagttcgtctggtgagctgaaatctacagtagtgtgaatgagcctaaatatgttgattctaacaagcctgtcaaatgcttgtactattgtrtatgtcatatgctctaataggcatttttgatttaaataattattttgaaacacatacttttgatgcagctatattttaactttatttaagaatttacttt

SEQ ID NO: 107166 - DNA, 201 bp, Homo sapiens
aaattagagcaaggtcagaggagtatgtttgttcaaagacatcttgcaagtgcgccttttcttctcctggaagtatacaaagtctctcccagacctctcargcaaaattccagcatacatgattttttgttgtttaccctctgaacatttgagaatttccttctggccttcatgggtaaagagtcattctttttggggaga

SEQ ID NO: 107167 - DNA, 201 bp, Homo sapiens
taatcattccctccttattaccctcatagtactttgtccatacctgccttgtagcatttttaaattgtgtcatctttatgtgaatgaaagacttcagcttmgctctttctcttgaagtgttaatgtcataagagtagttgaacattttgtggaattagtaggaaacaagagcataataggtgattttgaacaaggaatcag

SEQ ID NO: 107168 - DNA, 201 bp, Homo sapiens
aggagtaaagtaaaaaaatgaagaagctggccttaggcagcacagtttatccatagtgacaggagagaggcatgaatgcaggtaagctggtagatttgacwttgtcagcatgaggaaggtcttttctgattgttttaatctctctctctctcttgttttttaaggaaaagatcttggtctggcatttgaaataccaccaca

SEQ ID NO: 107169 - DNA, 201 bp, Homo sapiens
aggaataaagtctaatagaaggcttttaaccatctttcaggatgggtctggcaatttccctggtggcaacagaaaaagaaaaggtaatctttgtagggctstattatattcattgtgtgtgttgtgattttagatgttggaaataaaagcagtttgattttcccatttaaatttaattcagctgcgtatggaatacaaatg

SEQ ID NO: 107170 - DNA, 201 bp, Homo sapiens
gatcagctctctgttttggaaaatggagtaagttgtagttttaatttttaaaacataatgtcatgggctgtcgttttagcaatacagctctgttttgtttsaagaaaatttaagtgaggctgaaattagagcaaggtcagaggagtatgtttgttcaaagacatcttgcaagtgcgccttttcttctcctggaagtataca

SEQ ID NO: 107171 - DNA, 201 bp, Homo sapiens
ctgcccgatgaaaagcaaaactacgtacatcgaattggcagagtaggaagagctgaaaggtacttctgcaattttttttcccccatttttaagcttgtatrctttaggaataaagtctaatagaaggcttttaaccatctttcaggatgggtctggcaatttccctggtggcaacagaaaaagaaaaggtaatctttgtag

SEQ ID NO: 107172 - DNA, 201 bp, Homo sapiens
tatatagtaaggttatatttattataaatatacaatattttagaaaccacattttcattattattattacctttaaaagtggtcttagacctatagttaaygaaaggtttttctgaatctgaagaatgattttgcctacagattatattatgaagacatatatctgaaatacagtctaaagacaaatataaatctcccttt

SEQ ID NO: 107173 - DNA, 201 bp, Homo sapiens
ataaaccaacatggaaaaattctcaatcagttgttatggaaatgcaaaataaaatgacagtataataccgttgtacatgctaaactaaaaatacaacaccraattttggctgtggagcaactgcatacagttgttgagaatagattgttggtgagaatataaaatggtatgagcactttagcaaagggtcttgcagtcttt

SEQ ID NO: 107174 - DNA, 201 bp, Homo sapiens
ttttcagtagagatgaggtttcaccatgtgggccaggctggtcttgaactcctgacctcaaatgatccacccgccttggcttcacaaagtgctgggattayaggcgtgagccactgcacccagccacaaatatttttgattatctaattctcatcataggaaaacagcgaatttttctagagagattattttatattgacc

SEQ ID NO: 107175 - DNA, 201 bp, Homo sapiens
  misc_feature (1)...(201): n = A,T,C or G
ctttgctaattgtaagttgtgaatttctctcttcagaaatctgacttccatttataccaagcattctggcctttccagctttatttaatgatgataaaatncaactctttctaaatgaaatttttatttggaaattttctctccattacttagttactatctgagatagaagaacacctgaactgtaccatttctcaggtt

SEQ ID NO: 107176 - DNA, 201 bp, Homo sapiens
gtggcccagtcagctgccttggggatgcggggcacagggaacccaccaccaccactgcagctcctgcagcctctcttgctgccgctgctcatgtctccccrctgcagccagcttgatggcagcagctgctcctgacggcctgttgctgccatcattaatgcttatgagcagggtcaaagggtttttgtttggtcccctctc

SEQ ID NO: 107177 - DNA, 201 bp, Homo sapiens
  misc_feature (1)...(201): n = A,T,C or G
tctgttgaaggatatatgttagaagctgttgactgaaattttcattctagattattagattatggttttggattgcttattgtcactttttcatattttantcacaagaaacttaaaattgaatttataaattatctttatccaacaaaataattttgaaaatataggactatgtatatgcatgaattagtttccttatat

SEQ ID NO: 107178 - DNA, 201 bp, Homo sapiens
atttatagttataaatgtcactctgcccgatgaaaagcaaaactacgtacatcgaattggcagagtaggaagagctgaaaggtacttctgcaatttttttycccccatttttaagcttgtatgctttaggaataaagtctaatagaaggcttttaaccatctttcaggatgggtctggcaatttccctggtggcaacagaa

SEQ ID NO: 107179 - DNA, 201 bp, Homo sapiens
tgggcaccggctctctgtgaggctggtggccaggccccgaggcttcaggtcttccccagttgaaggtggggcttcaccggggactagcccccttccgcccaggagcctgtctgcctcctgctgctgttcatggtgcccagactgttcatgccaagggacacgtgcaggccagcactgggccgtcctcagcctgccttggcc

SEQ ID NO: 107180 - DNA, 201 bp, Homo sapiens
gctatgaagaactgcctgaggctgggtaatttataaaggaaagaggtttaattgactcacagttcttcagagctggggaagcaaacacgtccttctttacrtggcagcaggaaggagaagtgccaagcaaagtaggaaaagccccttataaaaccatcagatctcatgaggactccgtcactatcacgagaacagcatgag

SEQ ID NO: 107181 - DNA, 201 bp, Homo sapiens
ctgcatctggcctttactctcctgatactgtcctttggaagtcttaattttgatgaaatccaatttatctgtttttctcttttgtcatggtgttttgatgytgtagttaagatagactatgcctaacccaaggtcatgaaaattttatttgtgttgtcttctgagttttatgtttaggttctacatttaggtctgtgatac

SEQ ID NO: 107182 - DNA, 201 bp, Homo sapiens
ggtttcaccattttgcccaggctggtcttgaactcctgagctcaggcaatctgcctgcctcggcctcccaaagtgctaggattacaggcgtgagccaccgygccggcccatatacacactttaaaaatacctcatctttattgactgctttctagaaatgggtcaggcactgtactaaaaacataacatgttcttactcag

SEQ ID NO: 107183 - DNA, 201 bp, Homo sapiens
acaaaaggatggtttattaagtaaagggtgctgacacgatccatctggagcaatataaaattgacttctatctcatatcataattagaaataaattccatrtgtatttaggacttaaatatatatgtatgaatttgaatacagaaaactacatgtataatttagcagtggcaaaactttcctaacccaaatagaaaatgca

SEQ ID NO: 107184 - DNA, 201 bp, Homo sapiens
tataaattttaaagttgtttcttatgtgcagtcctatctacatggaaattggtctttttattaggtttctgatactgtctctaccgtaatcaatcttaccrcagtttcttcatctttaaattgtgttgcttctgttgaatgttttctaaatttcattctatcttaattaatcttttgttttgttatattttaataatattt

SEQ ID NO: 107185 - DNA, 201 bp, Homo sapiens
atatgagaagttatatgcaggaaaaataattatatttcatttcagtgagacaaaaggatggtttattaagtaaagggtgctgacacgatccatctggagcmatataaaattgacttctatctcatatcataattagaaataaattccatgtgtatttaggacttaaatatatatgtatgaatttgaatacagaaaactaca

SEQ ID NO: 107186 - DNA, 201 bp, Homo sapiens
gttttgctgtatgtatttctgttaatttgtacgtgtgtatgtgtgtgttccctcataaggggtacggttatgggtgtttatataccccataaagtagcatwaaaaatattaacagaaacaaaaataaatgaatgaatggtttaactcactgttttactctatctttacttcttgtccttatctatatataatacttttatt

SEQ ID NO: 107187 - DNA, 201 bp, Homo sapiens
atgtacctgggagaggatgttttataatttaaacagttgttagtgattttatcaaatatttttgtgtctagttgggtaagtgaaaatcaggttttttttgygattttctaaattatggaaagtttcctttttttaaccttgacatatttctagtggaataagatggatcgtatttaccacgtaaaattttcttttaggcaa

SEQ ID NO: 107188 - DNA, 201 bp, Homo sapiens
aaatgccttgagcataccatgtaaccagggcatctgcttagtgtaagaaactcagggacgtctttataaaaggatttgggaagaatgtaaaatgctagtgkgaattgatttttgtgctgtgattatgtataaaaatgaacatgattatagacaaaagttagaggggaagatgaataataaaatcaatttattggttaagat

SEQ ID NO: 107189 - DNA, 201 bp, Homo sapiens
tacttccctaaaccacttgaatgcaggatgcaataaaatctcagctgtatacctctagaagttctggttagctgttatttcacctctgcataattaatttytgtgttattcattttgaatagatatctgtcaaaatgtattgtttccttgaattttcaagtatacttactgaacttaatttaccttggagaatagttaagt

SEQ ID NO: 107190 - DNA, 201 bp, Homo sapiens
  misc_feature (1)...(201): n = A,T,C or G
aagcactgtttagttttttgcaggattcagaaacttagggaatagttttcctgtgggtttatgaaatggacatactatgtgaataaaattacttcttttanaggtcttttaattttatattttctcttaccagaaaagtaaaatattttttaaatctaggtactgacaagtttggatttggctttggtggaacaggaaaga

SEQ ID NO: 107191 - DNA, 201 bp, Homo sapiens
tgaacctcagagaggttaacctgcccaaagtcataactctagttgtcgctacatagagtaaggtgttgaacttatctttggagtctaggctagcacacttwgtgtttcatatcagtgtttgtgtgatttattaattattattataaaagttcatctcaatttggggtttcctcttcttaggtgattgtttgctctgccact

SEQ ID NO: 107192 - DNA, 201 bp, Homo sapiens
ccggacggggcggctggccgggcagggggctgacccccccacctccctcccggacggggcggctggccgggcggggggctgaccccccgacctccctcccrgacggggcggctggccgggcagaggggctcctcacttcccagtaggggtggccgggcagaggcaccccccacctcccggacggggcggctggccgggcgg

SEQ ID NO: 107193 - DNA, 201 bp, Homo sapiens
cccactcttttccccacctctccccactttctactccacaaaaccgccattgtcatcatggcccgttctcaatgagctgccgggcacacctcccagacggrgtggtggccgggcagaggggctcctcacctcccagtagggacggccgggcagaggctccccccacctcccggacggggcggctggccgggcagggggctg

SEQ ID NO: 107194 - DNA, 201 bp, Homo sapiens
tgtctctttttctgccctgccacctcaggtcctcctagggacggcttctcagagcagtccttacgcttcccaaactctcagatcaaaagttctcagagtakttccctgaaatgcattcttttcacagaaatcttttctcttaatttgcatctttaattttttcatactttatctcttccttgagacagggtcttgctctgc

SEQ ID NO: 107195 - DNA, 201 bp, Homo sapiens
gttgattctaacaagcctgtcaaatgcttgtactattgtatatgtcatatgctctaataggcatttttgatttaaataattattttgaaacacatacttttgatgcagctatattttaactttatttaagaatttactttctattaatagcatttgactttctggtgttctaggaattcactatgcatgataccattggat

SEQ ID NO: 107196 - DNA, 201 bp, Homo sapiens
tatatttcatttcagtgagacaaaaggatggtttattaagtaaagggtgctgacacgatccatctggagcaatataaaattgacttctatctcatatcataattagaaataaattccatgtgtatttaggacttaaatatatatgtatgaatttgaatacagaaaactacatgtataatttagcagtggcaaaactttcct

SEQ ID NO: 107197 - DNA, 201 bp, Homo sapiens
ggatgcacaatcagattcctcaggttacctctgatggaaaaagacttcaggtataaaatttatcaatgcatcttaaaatgcatgtaaacaattgttatgtmtaatgttacgggatcccagggggtgttgcttttctggctggaaacctctgcggctagtgatgcccttgcccgggttttgctcagttccacccacttggcc

SEQ ID NO: 107198 - DNA, 201 bp, Homo sapiens
ttatatttcatttcagtgagacaaaaggatggtttattaagtaaagggtgctgacacgatccatctggagcaatataaaattgacttctatctcatatcataattagaaataaattccatgtgtatttaggacttaaatatatatgtatgaatttgaatacagaaaactacatgtataatttagcagtggcaaaactttcc

SEQ ID NO: 107199 - DNA, 201 bp, Homo sapiens
attatatttcatttcagtgagacaaaaggatggtttattaagtaaagggtgctgacacgatccatctggagcaatataaaattgacttctatctcatatcataattagaaataaattccatgtgtatttaggacttaaatatatatgtatgaatttgaatacagaaaactacatgtataatttagcagtggcaaaactttc

SEQ ID NO: 107200 - DNA, 201 bp, Homo sapiens
aattatatttcatttcagtgagacaaaaggatggtttattaagtaaagggtgctgacacgatccatctggagcaatataaaattgacttctatctcatatcataattagaaataaattccatgtgtatttaggacttaaatatatatgtatgaatttgaatacagaaaactacatgtataatttagcagtggcaaaacttt

SEQ ID NO: 107201 - DNA, 201 bp, Homo sapiens
taattatatttcatttcagtgagacaaaaggatggtttattaagtaaagggtgctgacacgatccatctggagcaatataaaattgacttctatctcatatcataattagaaataaattccatgtgtatttaggacttaaatatatatgtatgaatttgaatacagaaaactacatgtataatttagcagtggcaaaactt

SEQ ID NO: 107202 - DNA, 201 bp, Homo sapiens
tcaagaaacattagtcttaggaattcttcaaaaaatggcatcccaatgaaaataaatttgatgactatattttcatgaaggtttgtgtcttattttaaagktatattgatatattttttctatttcttttttaagaacagtatgggcttatgaagtagaatttatgggtatgtgaatctggcagaggacttacgtggaacc

SEQ ID NO: 107203 - DNA, 201 bp, Homo sapiens
tataaaaccatattgaatctagaggaattaaggtacataaaatacttgtttttttttttaatagagcgttttattttatttatttatttatttatttatttttgagatggagtctcgctctgtcgcccaggctggagtgcagtggctcgatctctgctcactgcagtctccacctcctgggctcaagcgattctcctgcct

SEQ ID NO: 107204 - DNA, 201 bp, Homo sapiens
atataaaaccatattgaatctagaggaattaaggtacataaaatacttgtttttttttttaatagagcgttttattttatttatttatttatttatttatttttgagatggagtctcgctctgtcgcccaggctggagtgcagtggctcgatctctgctcactgcagtctccacctcctgggctcaagcgattctcctgcc

SEQ ID NO: 107205 - DNA, 201 bp, Homo sapiens
tgtaagctgcttactcttcattattttgtatacgatggttttcaattagggtaggaattttaattttctgttttattcaatgctagaatgctgaactgaartttaacttcggtgaagaggaatttaagtttccaccaaaagatggctttgttgctctttccaaggcaccggatggttacattgtcaaatcacagcactcag

SEQ ID NO: 107206 - DNA, 201 bp, Homo sapiens
ataaaagcgacatcaaacatgggtgaagggagggagacctaaatcattacttagtttaaaaaaaaaatgtaacaaatacctactggctgccaggcactcaytggcattggtgctcagggcaatgaatccagtccatctctccgggtcattcacacaccaaggccctgctcacctttggaaagctgggggactgagtgggga

SEQ ID NO: 107207 - DNA, 201 bp, Homo sapiens
ccagaagcctgcagtgggatggaggatggggtcagtctcttttctgtactcgcctctcccattagctgttgtttctgactcctgggaaggataaagtctakgggatggggtggcgggtgggtacacacctttatctggctgggtttatggtgatctgattctggtgctttctggcttagacatgctcaaggctgattgttt

SEQ ID NO: 107208 - DNA, 201 bp, Homo sapiens
gtcagcttggcaatgagagtagaagaattttagttttctaatcttttagtcttacggtattatgcaacatgtgccactgaggtcatataaataaagatgtctcacaggcttttctgatctaactgacttaaaaaaacaaaacaaaaccctgagaggccttgtgtctgtcttcatgcccactttacctgctgaaattcggaa

SEQ ID NO: 107209 - DNA, 201 bp, Homo sapiens
tacagcacctgtctcagtgtttggcacatagtagattcttaatacattggacagattttatcttcacattttcagacaatattttctaggttgaacttgctgtaattatcagtgcagatgaaacaatagcttcagaaatgtctgctttatttttcatgggataataagtgcctcatattggatcaagttaaaagttctgtt

SEQ ID NO: 107210 - DNA, 201 bp, Homo sapiens
aggatatatgttagaagctgttgactgaaattttcattctagattattagattatggttttggattgcttattgtcactttttcatattttagtcacaagraacttaaaattgaatttataaattatctttatccaacaaaataattttgaaaatataggactatgtatatgcatgaattagtttccttatattttgtttg

SEQ ID NO: 107211 - DNA, 201 bp, Homo sapiens
catgaattagtttccttatattttgtttgatttagaaaaaagatttttgatactgattaaaacttacgtttttttccatactgattaaaaacttaatttaytctttgtttctcatgcaggatgggcttctttctcaaggttattctgattttataaataggatgcacaatcagattcctcaggttacctctgatggaaaaa

SEQ ID NO: 107212 - DNA, 201 bp, Homo sapiens
aaaaaggttacatacagaagttgatctcctactggcctggactagagaaataatttgtcggactggatggtatttttcctctttagtgtaggttcattctrccagtctccattgttctatctttttgtgatgttagctgcgtcctatttccttcattcagtccactctgtgttgtctgatgggtatttttggtttgggtaa

SEQ ID NO: 107213 - DNA, 201 bp, Homo sapiens
gaatggagtcagggtaaagttagtgtgtgtgaatctgtaccacacagtaccatatagatgcttcatgttattgtaaacttgcatctgaatttcttagtggmcaaagcagagagggatgcagtatcactggtgtccctagtctcacacacgctctgtggcctaagcactgtttagttttttgcaggattcagaaacttaggg

SEQ ID NO: 107214 - DNA, 201 bp, Homo sapiens
ccaagccctctttcctgcctgtgttttgaaggtaattaggaatctagttagaaaaaatttgctgtggttgtaagctgcttactcttcattattttgtataygatggttttcaattagggtaggaattttaattttctgttttattcaatgctagaatgctgaactgaaatttaacttcggtgaagaggaatttaagtttcc

SEQ ID NO: 107215 - DNA, 201 bp, Homo sapiens
tatataaaaccatattgaatctagaggaattaaggtacataaaatacttgtttttttttttaatagagcgttttattttatttatttatttatttatttatttttgagatggagtctcgctctgtcgcccaggctggagtgcagtggctcgatctctgctcactgcagtctccacctcctgggctcaagcgattctcctgc

SEQ ID NO: 107216 - DNA, 201 bp, Homo sapiens
aagtatcattttctaagaaaaaagatgggaagtattgggttgaagaactttggcttacgtttccatgctgggcataattgatgcagatgtgaaaacacatygcatggcctcgtttgaatgtgtgctacccttctcaaccgtaggcatttttctggaccataagtcagtatacccttcttccctcccccagatctctaattt

SEQ ID NO: 107217 - DNA, 201 bp, Homo sapiens
taggaaaacttttggattattctcaaaaagaactttttcagaagacctatttattcaatgagctactgaatagtagtggtaattggatgatatatcatacytataatctatttttctagtgccttgaggacagaaaacaattaaaaacaaatttagaataagatatttagcatgtctctatctccatgcatgttaatattt

SEQ ID NO: 107218 - DNA, 201 bp, Homo sapiens
atatataaaaccatattgaatctagaggaattaaggtacataaaatacttgtttttttttttaatagagcgttttattttatttatttatttatttatttatttttgagatggagtctcgctctgtcgcccaggctggagtgcagtggctcgatctctgctcactgcagtctccacctcctgggctcaagcgattctcctg

SEQ ID NO: 107219 - DNA, 201 bp, Homo sapiens
cttttaataaaaacaagttttacttgtgtattctaaataatatataaaaccatattgaatctagaggaattaaggtacataaaatacttgtttttttttttaatagagcgttttattttatttatttatttatttatttatttttgagatggagtctcgctctgtcgcccaggctggagtgcagtggctcgatctctgctc

SEQ ID NO: 107220 - DNA, 201 bp, Homo sapiens
cattgttctatctttttgtgatgttagctgcgtcctatttccttcattcagtccactctgtgttgtctgatgggtatttttggtttgggtaaatgaaattrtagtagcaatctggaatatgtatgattagttgatgtgtgtgcataacttttgtcatttatattggttattaaattgtcgttaatatgtgaatactaatat

SEQ ID NO: 107221 - DNA, 201 bp, Homo sapiens
cgggcctttccttccatcggaaccgttctcccggggctgagtccctgcccggactccgaacgccgaagaccaggggccggaagcgcgcgccgccactgccrcgccgtgtcagtcgggagggagggagcgagcaggcgaagccgcggaggacggggtgaagatggcggccttctccggtgcgtttgtggaaactctgggggt

SEQ ID NO: 107222 - DNA, 201 bp, Homo sapiens
ttcaaagaaaacttgcagggaacatgaccagaatggtacaagagattgtctggaatttactgaaaatgatatgttgtttcttgtataacaattttgcaaasagcttcagcttgcagtattccgtatgcagtaagaacacaccactcctttgtttcaagcagtttgcattttaggagagagaacatagactgtaatacaggt

SEQ ID NO: 107223 - DNA, 201 bp, Homo sapiens
catggaagtcaaacccgaaattataaaagcgacatcaaacatgggtgaagggagggagacctaaatcattacttagtttaaaaaaaaaatgtaacaaatayctactggctgccaggcactcactggcattggtgctcagggcaatgaatccagtccatctctccgggtcattcacacaccaaggccctgctcacctttgga

SEQ ID NO: 107224 - DNA, 201 bp, Homo sapiens
caataaatgtgggtgctcgccacttgtctattcatttttttccaattgctgagggtattcacatggtcctagaatagccaaggcacataactgccacattrtctctaaatgcaacaaccctgtctattcttggcagacttttcacgagtcatgagaggtaaacaggcactgtagtggctacagtttattaggtgacaacca

SEQ ID NO: 107225 - DNA, 201 bp, Homo sapiens
tgacttaatttgcttaggcgatttttttccccagtaactaaaattcttcaaatatgattcttttagcctcccaactgatatccaggctgaatctatcccaytgatcttaggaggaggtgatgtacttatggtaagtttaaatttggtgaggtgattggtagctggggacacactctaagaattgcataggcttacaaatgc

SEQ ID NO: 107226 - DNA, 201 bp, Homo sapiens
aaagctcagatggactgaaatctgaatgtagtctcacatcaagggctgacccagcactcttttacttcattttagctattacagataatagtaaccaaagractgtatactttttttcttatttgcattttcttttttttttttttttttttttttttgagacagagtctcgctctgttgcccaggctggagtgcagtggc

SEQ ID NO: 107227 - DNA, 201 bp, Homo sapiens
gaatgagggtatacaaatgattctcaaaatgagcagattttctgtatattttccacagaaagtttggatttggactttagtgaagaaatattgtcaagctrgataaatatgtagtagttataatttttcttttatgccatttgtcatcccctccaaaatacattacgttgtcttctcttttcacctcattttgattttggc

SEQ ID NO: 107228 - DNA, 201 bp, Homo sapiens
ggctgtggagcaactgcatacagttgttgagaatagattgttggtgagaatataaaatggtatgagcactttagcaaagggtcttgcagtcttttataaarctaaaaatgctgtcttatggcctagcaattaaactgctagatgtttacccaggataaatgaaaacacatattgacaaaaagatgctagaatggccatagc

SEQ ID NO: 107229 - DNA, 201 bp, Homo sapiens
ttttaaattgtgtcatctttatgtgaatgaaagacttcagcttagctctttctcttgaagtgttaatgtcataagagtagttgaacattttgtggaattaktaggaaacaagagcataataggtgattttgaacaaggaatcagaagcctttgacttaactcaggtggtaattcagcatattatttcctctgcctgggatg

SEQ ID NO: 107230 - DNA, 201 bp, Homo sapiens
tcccaaatgcattttataaaattccagtttttattgcttcttatatttttcttgcataagttttgcttagtttagactaacaattagagatgatcagagaraccttagaaatatgttgggtcacagaattaaagtcttacattcagtggttgaggaataacaattatagcacagcttcacactgaaaaatagagagttgga

SEQ ID NO: 107231 - DNA, 201 bp, Homo sapiens
gtgggtagaggtgttgggacagctgttagtgaggcctaattatttatttatattgaaataattgatttaacattttttaaagtcaaagttctggagataayttgcccagtagtacattttattgctgcaagcaaagtttaaagtgatataattgagccaaagtattgctgacaagttatttcaagcatgtcatttacatta

SEQ ID NO: 107232 - DNA, 201 bp, Homo sapiens
actgctttgccaacttccatcggacccattagtgggtggtcaagttaaaacttttataggaggtgaccaaaatgtgttgaaaagaaaataaaaatagactraagtagaaagtatatattagtatatattagttcatgaaatatttttaatagactttattttttagggcagttttagcttcagaacaaaactgaggggaag

SEQ ID NO: 107233 - DNA, 201 bp, Homo sapiens
tgcgttgcagaatgcagaagcctgcggtattcaagaaagctattttagacgaataatttcgaagtgagacaaacctaaagttattaattgagctaattcaratctcctgttgaccagatttttaagaagcttgatttcacagaggtcctgcagaggttttttaatgtcttaggatttggttctgtttagttttgaaagacc

SEQ ID NO: 107234 - DNA, 201 bp, Homo sapiens
tttaatttgttaattgacagataataattgtgcatattcatgggatacatagtgatgtttttaatacatataatgtatggtgatcagatcaaggaaattascatatccatcatctcaaacatgtagcatgtttttgtgttgggaacattcagtatcctcctcctggttatttgaaactctgtatatattatgggtccctag

SEQ ID NO: 107235 - DNA, 201 bp, Homo sapiens
ctcaagaagtggacgggatggatcgctgctgagtggctcttgaggagctcagagtatcttggggctgatgttgcctgttgggactttccccagcacagacrgcgtgcgggatttcagatgctcttctccttgccttcagaagcccagggagtgttggcagcttgtttgcacctgatcagataaaagaggtcatgatctctg

SEQ ID NO: 107236 - DNA, 201 bp, Homo sapiens
tgacagtgtgtcctggagtcttaatattacagctgaaaggagagatcctgcccatcttaacactgcgcagaagggactcgtacaggctctggctccagacscgggctgggttccttactttgtttttaatccttaaaagttggtaaaatacatacatcataaaatttgctgtcttaaccatccttaaatttacagctcagt

SEQ ID NO: 107237 - DNA, 201 bp, Homo sapiens
tggccaacatggtgaaaccctgtctctacaaaaaatacaaaaattagccaggtgtggtggtgcgtgcctgtaattccagccacctgggaggctgaggcagragaatcgctggaacctgggaggcggaggctgcagtgagccgagatcgtaccactattctgagcctgggtgacagagcaagactacaactcaaaaaaaaaa

SEQ ID NO: 107238 - DNA, 201 bp, Homo sapiens
ttcctggacagtcactgcgagtgtaatgagcactggctggagcccctcctggaaagggtggcggaggtgagatgacgggggctgggaggggtgtcaggtcrtgggtggttggtagaggggacagaagggagcatggtccaggggaggtgtaacgcagggagtagggcgtcagggctggtaggggctgagctcgccgtctgc

SEQ ID NO: 107239 - DNA, 201 bp, Homo sapiens
gacagggtttcaccatgttggccaggctggtctcaaactcctgacctcaggtgatctgcccacctcggcctcccaaagtgctgggattacaggcgtgagcyaccgtgcccagccatttttaaactttttggttttttttcttttttgagacggagtttcgatctcgttgcccacactggagtgcaatggcgtgatctcagc

SEQ ID NO: 107240 - DNA, 201 bp, Homo sapiens
cctcccggattcaagcgactcccctgcctcagcctcctgagtagcagggattacaggcatgcgccaccacacccagctgattttgtatttttagtagtacrtttctccatgttggccaaactggtcttgaactcctgacctcaagtgatccacccgcctcagcctcccaaagtgctgggattatagacgtgagccaccgtg

SEQ ID NO: 107241 - DNA, 201 bp, Homo sapiens
tgacctcaagtgatccacccgcctcagcctcccaaagtgctgggattatagacgtgagccaccgtgcctggccatttttaaacttcttaaaagtacagatyatacaatacacctattatacagaagtcagatttttcacatagggaatctgatttctgagaaaactttaatagaaggcaaaataacaagtaatgcttctga

SEQ ID NO: 107242 - DNA, 201 bp, Homo sapiens
cttggcctcccaaagtgctgggatcataggcgtgagccaccgtgcccattcaggaagcagcgtttgtttttatctgaggaagcccccaccaacagttctcrctgtccagtgaaacagctgccttttgaaacggggggctccccatgctcagcacctcttcagctgtggctggacattagggactgtaatggaaagattttc

SEQ ID NO: 107243 - DNA, 201 bp, Homo sapiens
tggggctgggacctaagtcaaagtacaaaatttgtttgttttatatagaccttatacacatagcctgaagttaatttaatacaatacttttcataattttstgcatgaaacaaagtttgtgtacattaaaccatcagaaagcaaaggcgtcactgtgaccgcccactggattcaccttgcccgctgcccagatggagctga

SEQ ID NO: 107244 - DNA, 201 bp, Homo sapiens
tcagctgtggctggacattagggactgtaatggaaagattttcacacctggagagatgatgtccacagttccttctgagtccaacaacaggtgatgccagygtttcagagacaggaacacctgctctcaaagtcagagactcagtcactccagggtggagacaggactggcactgccacctgaaagggggctgggcagctg

SEQ ID NO: 107245 - DNA, 201 bp, Homo sapiens
ggtatgtgcatggggaagccaggtcacctgcaggcccagagagagcaggagttgggggggtcctgatgttagaagtcccagctgccacctttctcctgggrtgggtgatgtctatgaggaagcacctggctcctgctggccacagcctctttggcagccagcaccagggccagatagaatgtcacacactttggtgcatca

SEQ ID NO: 107246 - DNA, 201 bp, Homo sapiens
tcgcaactgagagtcctctaaagaccgcatttgtgcatgtgcctgtgcgtgagcctctgtgtgctggggtttgcatgcgcctctctgtgctggggtgtgcrtgcgcctctgtgtgctggggtcttcatgtgctttgtgatgttaattctttgaagggtcagttttataggtttctgtcatcttttttttttcaaatataag

SEQ ID NO: 107247 - DNA, 201 bp, Homo sapiens
attctttgaagggtcagttttataggtttctgtcatcttttttttttcaaatataaggtttagtaaaaacaaaaattttaagaaagaagtggcattgtttrgaaaggtagcattattttaaaccaacatttatttgaacaagtcatccaaatgcaagtagtcccctgatgacaaaagcgtctttttcaaaaagttcacttg

SEQ ID NO: 107248 - DNA, 201 bp, Homo sapiens
gcaggagaattgcctgaacccgggaggcagaggttgctgtgagctgagatcacaccattgcattccagcccaggctacaagagcaaagctctgtctcaaaaaacaaacaaacaaacaaacagaaaaacccactaccttctcttctcccatcattgcaaaggagagacaaaatgaaggcttgatgggcccagctgagacttc

SEQ ID NO: 107249 - DNA, 201 bp, Homo sapiens
aaaacacacaaacctggccaagtctatgctccctgttggtttttgtgcttttgtccttgtgaagcctcttctggaagctctgcatgggtgatgctgagccrtacaagtcagtggatatccagatggaaacacactggcttagccatgccactcacatgtaacagtggggcacttccatgctggttgttaaatatgctctgc

SEQ ID NO: 107250 - DNA, 201 bp, Homo sapiens
tgatgacaaaagcgtctttttcaaaaagttcacttgaagattggttattaggatcccagaatgaactgtcccatggaaatggtgtcctgagtggcacttakgagcgctgtctggctgtgtctctggctgcagccaggtcctagagtgtcagccacagagctgatgctggcggggccccgagcagccttcccggggcctcag

SEQ ID NO: 107251 - DNA, 201 bp, Homo sapiens
caggagaattgcctgaacccgggaggcagaggttgctgtgagctgagatcacaccattgcattccagcccaggctacaagagcaaagctctgtctcaaaaaacaaacaaacaaacaaacagaaaaacccactaccttctcttctcccatcattgcaaaggagagacaaaatgaaggcttgatgggcccagctgagacttcg

SEQ ID NO: 107252 - DNA, 201 bp, Homo sapiens
tgtcccgttggcagttcatctcagaacaggccaggaacttctgcagataacaagttaatcatagcatgtccatcccagttggtcagtctgcctgttctctsaagggctaaacaagctgtggctgctctgggggtcattgttcagaggaccatctttctcttcctgcaggtgtcagcggaagcagtggcgggtggatctgcc

SEQ ID NO: 107253 - DNA, 201 bp, Homo sapiens
ttgagctctagccttggtggaatttcaagttattagacagaagagtggaagcacttataaggccccctggcaagagggttttagaaaagctgtggttgggrtagagctctgcgtgagggggcaggaagaggcttgcagagagaggagaaagaaaagagagagggtgcagagaggcagcagctagggaccccagggagggct

SEQ ID NO: 107254 - DNA, 201 bp, Homo sapiens
aggagaattgcctgaacccgggaggcagaggttgctgtgagctgagatcacaccattgcattccagcccaggctacaagagcaaagctctgtctcaaaaaacaaacaaacaaacaaacagaaaaacccactaccttctcttctcccatcattgcaaaggagagacaaaatgaaggcttgatgggcccagctgagacttcgg

SEQ ID NO: 107255 - DNA, 201 bp, Homo sapiens
gcgctatggggagggcgggaggtactcgtgggtaacagcagggcatgaattcagtgcatccgcaggtctgtacccctgctcgcctgggcagtgcccacagsaaccccataaagaaagcagggattccctctatgcttcctgctcgcccccccggggtcagttgcagagtgggacacccctcatgggtgtcacagagggcct

SEQ ID NO: 107256 - DNA, 201 bp, Homo sapiens
gtaggggccgaggagaaagaggtcgtctgtcggcctgaacacttccttggttttttcttggctttacgcagcatgttgcttttcacatgggaaagtgtcarccccacgctcttattaaagcattgagttcttccaggcctctgttgctgctctgataactgaaagggtattgtgcttgtctttatctgccacacgcacgtg

SEQ ID NO: 107257 - DNA, 201 bp, Homo sapiens
tctcatatgcggctgtatcggcacgcagcgatgagatgtgtaagaactaacacgaagctgcgttcctcccagtcacgcgcaggattggattccttttcacrgtcagcctccggtaccttcgacccaggacgagaccctcagtagtaaagcccttaacaggtgcttgtggactgcgcatgtgggatgctgaggtgctgcggg

SEQ ID NO: 107258 - DNA, 201 bp, Homo sapiens
ggaactttactgtcactggaagcaggaaaaacacctgagtgttttatttggaattcaaatccactctgaatttggcagtttataaattttgccctgagcartaatgtctatctcgaaggagagtaaatggaaatacaggcttgaagttgggatgtgttgcttttattaatagctcaaccagctgttagctcccagactgag

SEQ ID NO: 107259 - DNA, 201 bp, Homo sapiens
agtggttccatctggacttggaaataccatgtttgaaacaaggtccctgtaattacttaattgtaaagaaatgagaggtagcatttcggcttgcttgcctrcctgcccagcccctctgggaagtgtgcctttcaaagatgctcgccgcttgcatttttattatcctgtgattaagagagaggacgttggtccactccttgt

SEQ ID NO: 107260 - DNA, 201 bp, Homo sapiens
taagattgctccattagatgcttcatttttcaccctcagagcacttagctcagtttttattgatacatttattagtatggtcatttaattcttttttttcttttttttttttttttttgagatggagtcttgcactgttgcccaggctggagtgcagtggtgcaatctcggctcactgcaacctccgcctcccaggttcaa

SEQ ID NO: 107261 - DNA, 201 bp, Homo sapiens
caggactctcccaggacagtcccatgggcagagctaggttttgtgaggactggagcttttgtcatttgaagaccatttctaagagaaagagtgattataamcccaaaactgggctcccaagtgcatagcacaaaggaccccacagaagatcacaaatggcccatcctgactggaagagagagattagattgagggccaggt

SEQ ID NO: 107262 - DNA, 201 bp, Homo sapiens
ttgctcatcagagagcatgggatgaggtcactccggcgatctctcatgctttagcgtttccagctgtatgagggaggtgtggtgtaacttctcaggcggtygtgtggctctgggctcagtttttgttgagagccttctgtgtgtcagacactgctagcatcatcatgtatgtccttttatttaattcctccacatcacagt

SEQ ID NO: 107263 - DNA, 201 bp, Homo sapiens
aataaggtagtgagacatctgcagcctggttgtgatgccaagtattgagatagtatggagaatgtcccagctgttgaaggcagagaatggacttacaaatragtggcgccagaggtaggggatctcacagcttgtccctgggtggcactggtcaacctgtcccagggcagcactcgagagggagggaggccctcggagtag

SEQ ID NO: 107264 - DNA, 201 bp, Homo sapiens
ccctctgtttttgttgttatcacatactgtagggatggttgtaataaatacagacttttagagaatgcagccaacttggtggttctctggggattcctccrctgaggtcggggcttagacatttacacggttttcttttgccttttgagattcttatccacagctagttggttgaaagccacccaccttggcatagtgcca

SEQ ID NO: 107265 - DNA, 201 bp, Homo sapiens
gatgagccactgtagacaggggcatgtattgagtgcaacaagcggttgagggaccttagattttgagggtttttaaaaaccgcctgattggtttgtgtgcrtcctgccacagtgttacctaggtgggcttaatgaggtgggagtgggctttttgttttgttgttttatgcctcagccatgtaaatataaacagatacattg

SEQ ID NO: 107266 - DNA, 201 bp, Homo sapiens
aggtcgtgaatagctggcaacaaagaggattgagccttggacctagtgtgtctgagcagtgccccagcccccatgccgctttggatttcagtggcctctgmagcaatttattattcttacatcagatgtttgaagtaggtgaaggggcaggtggcatgtgtctggtgaggttgctgacactgcttttggatgagagagaga

SEQ ID NO: 107267 - DNA, 201 bp, Homo sapiens
gtaagtatttttaggatggtctttgcacggaaaacatgtttccagtaacatgttttggaaacattttatttgcggcataagaagatgctgacaccttggcyggctcccacaggcagctgtttattggggccgtggtatcatcgctgtagccaggctcgtgggttttggaactgattttcgatttgagaggccagacttctg

SEQ ID NO: 107268 - DNA, 201 bp, Homo sapiens
aagaggcacgatgcctagtcactgggtctttctctcgttcctgtcacctgtcatgaggccactgagcaaaggggctggtggacgggagctggtggtcatgkgcagtgaagcaggtgattctcacgttgtttttcagggttccagaccatcaggatatagcttttggggccttgcagcagggaactaactgcctcgacactt

SEQ ID NO: 107269 - DNA, 201 bp, Homo sapiens
tgttctatatcttgattgtggtggtggttgcatgactatatgcagatgtcaaagctcccagatctggatactaagaagagtgaattttactgtatgtaaawtatacttttaatttaaaagcagagaaaaaaaatcataagccaagtcagggaagtgagaaggatcttgttgtatgtggagaaccgtcatggaacaggccag

SEQ ID NO: 107270 - DNA, 201 bp, Homo sapiens
ctgaaataatttaacagtgacaacatatatttcagcaagcagagattaaaaacagcccatttattttctgttttctcccgcagtaatatttttatgtctcygttaacaaatatgatgttcgccatttaaattatatggaagcagctttggatgatttagcaatatacataacatttattctttgttattatctagttttat

SEQ ID NO: 107271 - DNA, 201 bp, Homo sapiens
ggagaattgcctgaacccgggaggcagaggttgctgtgagctgagatcacaccattgcattccagcccaggctacaagagcaaagctctgtctcaaaaaacaaacaaacaaacaaacagaaaaacccactaccttctcttctcccatcattgcaaaggagagacaaaatgaaggcttgatgggcccagctgagacttcgga

SEQ ID NO: 107272 - DNA, 201 bp, Homo sapiens
atggggctcagtctgtgggtgggtgatagaagagtaaagcttttgtgtttttagggtggggaagagaagagagagtcattgattttagatacaagtggaayaccacgtagacctggcctctgggtggtgatgaccttctggggttgatgtctggagacggtgcggttttgggatgggggagcagaggagggagagagagag

SEQ ID NO: 107273 - DNA, 201 bp, Homo sapiens
acaaacagaaaaacccactaccttctcttctcccatcattgcaaaggagagacaaaatgaaggcttgatgggcccagctgagacttcggattctaaaaacdgttttcccatgagataataataggaattgggtgaaatgtgagcttcatgcaccaaagggtaatcctgtgtgctcttacccccttcctgaaaacttgcctg

SEQ ID NO: 107274 - DNA, 201 bp, Homo sapiens
ttcagaatagctaaatgtgatgctatgtttgggtaagagccaatgggtcaggtttgccgacagatatgagtgtgcttccagtgcctgtgcacgtgtgtgacacacacacacacacacacacacacacacacaatagcacatatgctcatcacgttctcacacaacagctctcttctcctgattcccgggctcagtccccct

SEQ ID NO: 107275 - DNA, 201 bp, Homo sapiens
ttggtagaggtgaagtctctccatttgctcaggctggttttgaactcctggccttaagtgatcctcccgccttagcctcccaaagtgctggaatcacaaayatgaaccactgctctcctgacctccttctttttctttttctttttctttttttttttggagactgagtcttgctctgttgcctaggctggaatatagtga

SEQ ID NO: 107276 - DNA, 201 bp, Homo sapiens
tcagaatagctaaatgtgatgctatgtttgggtaagagccaatgggtcaggtttgccgacagatatgagtgtgcttccagtgcctgtgcacgtgtgtgacacacacacacacacacacacacacacacacaatagcacatatgctcatcacgttctcacacaacagctctcttctcctgattcccgggctcagtccccctc

SEQ ID NO: 107277 - DNA, 201 bp, Homo sapiens
gaatgtcacacactttggtgcatcagctctgtcatcagcttcggaccaggctctgctgcagcggcaagggtgcactggtcacagttgctggttgcagggcyctggtcttcctgccagctctgtcctctcggccatgtgcactcaaccgcaaagcacccattctgcctctgcgtctggccccagaatatgatgtctacacct

SEQ ID NO: 107278 - DNA, 201 bp, Homo sapiens
acatgggctggttgcccctcccctgagccacctcagtgaggtatcccttgaccatcttccctaggagttcaaccccctgacccccactccaaaacttcccrtccccctttcctgcttgatttttctccacagttcctctcaccacccacacactgtgtattttacttatttttttcttccgaatagtgagttattgtatcc

SEQ ID NO: 107279 - DNA, 201 bp, Homo sapiens
cagaatagctaaatgtgatgctatgtttgggtaagagccaatgggtcaggtttgccgacagatatgagtgtgcttccagtgcctgtgcacgtgtgtgacacacacacacacacacacacacacacacacaatagcacatatgctcatcacgttctcacacaacagctctcttctcctgattcccgggctcagtccccctct

SEQ ID NO: 107280 - DNA, 201 bp, Homo sapiens
gagcacccagatgccttcctgcagcagccccccttttctccccagccaacatctgcaactgtgaacagatttccatcttcagccttggtggttggaaagaratgtaagtcacctttttttctggttggttctggggcagatgccaccaggctgcagaggcagtctgtgtctgtggggctcaccagggcatgagttctgctc

SEQ ID NO: 107281 - DNA, 201 bp, Homo sapiens
tcaagcaattctcccgccttggcctcccaaaatgctgagatagtaagtgtgagccacggcattcagccccatcctagttttgaaagcaccatttcttttctttttatttttaaattgatatatcatagttgttatctatcttggcggtacatgtgagattttgatacctgtctacaatgtgtaatgatcaagtcagggtaa

SEQ ID NO: 107282 - DNA, 201 bp, Homo sapiens
agaatagctaaatgtgatgctatgtttgggtaagagccaatgggtcaggtttgccgacagatatgagtgtgcttccagtgcctgtgcacgtgtgtgacacacacacacacacacacacacacacacacaatagcacatatgctcatcacgttctcacacaacagctctcttctcctgattcccgggctcagtccccctctc

SEQ ID NO: 107283 - DNA, 201 bp, Homo sapiens
ttgggaaagcctctcctttcccccaacttccttgctttcttcccttttcccaaaatccagatctaattctaatggtacccaaagagaagtcaactgaagtktgaggtttctccctttgaagataaggggtaattgctgtacagagaacctcagaatgggggagaattgctgtagtgggggagtcatgaggagtaaaagaga

SEQ ID NO: 107284 - DNA, 201 bp, Homo sapiens
caagcaattctcccgccttggcctcccaaaatgctgagatagtaagtgtgagccacggcattcagccccatcctagttttgaaagcaccatttcttttctttttatttttaaattgatatatcatagttgttatctatcttggcggtacatgtgagattttgatacctgtctacaatgtgtaatgatcaagtcagggtaat

SEQ ID NO: 107285 - DNA, 201 bp, Homo sapiens
tctgttactcagatgcagagcttgttttgctctctgtttcatgtacatgacttcatatcattgatctctgtccttttgataaatattgttggagggttttytacttggcagtactattttgctagagaaagggattagaaggcaaacaaagcaatcccttgccttccagaactcacagttgagcagaggagccactgtggg

SEQ ID NO: 107286 - DNA, 201 bp, Homo sapiens
cagaagtggtgggaagttcacctcccacaccagccttagggcccccttctcctgcaggggtccagagccaggacttgtcaggccaccgtaggtctgctctktctctccaggtcctggcccttctctcccagaggcagaagaattaacctgggcccatcccctctctgactgtacacattgtttttcatggctacagggata

SEQ ID NO: 107287 - DNA, 201 bp, Homo sapiens
aagcaattctcccgccttggcctcccaaaatgctgagatagtaagtgtgagccacggcattcagccccatcctagttttgaaagcaccatttcttttctttttatttttaaattgatatatcatagttgttatctatcttggcggtacatgtgagattttgatacctgtctacaatgtgtaatgatcaagtcagggtaatt

SEQ ID NO: 107288 - DNA, 201 bp, Homo sapiens
cagatgcagagcttgttttgctctctgtttcatgtacatgacttcatatcattgatctctgtccttttgataaatattgttggagggttttttacttggcrgtactattttgctagagaaagggattagaaggcaaacaaagcaatcccttgccttccagaactcacagttgagcagaggagccactgtgggttatgaaac

SEQ ID NO: 107289 - DNA, 201 bp, Homo sapiens
agcaattctcccgccttggcctcccaaaatgctgagatagtaagtgtgagccacggcattcagccccatcctagttttgaaagcaccatttcttttctttttatttttaaattgatatatcatagttgttatctatcttggcggtacatgtgagattttgatacctgtctacaatgtgtaatgatcaagtcagggtaattg

SEQ ID NO: 107290 - DNA, 201 bp, Homo sapiens
tgcccagagaacttttacaaaatgctgatgccaggtgctatgcccagagagcctgatctaatttgtctagggtcagagggcaccaccagatctctaagagmtaacaagtgattctaaatgaggatttggcctgctgtagtggtacacacctgtaatttcagcactttaggaagccaaggcaggaggattgcttgaggccag

SEQ ID NO: 107291 - DNA, 201 bp, Homo sapiens
gtgtgcttattctccctgcaggatctagcatgacacctcatgtggagtcacctagtatgcaccgcaggccagggtctgagctgccctgtgaatgactggcrttagacatcttgcaaaccctgtgctgtgatggtcttattccagaagggctgtgggggtgtgagagcacaaagagatgtatgggtggaaatgggattgaag

SEQ ID NO: 107292 - DNA, 201 bp, Homo sapiens
aagtgtgagccacggcattcagccccatcctagttttgaaagcaccatttcttttctttttatttttaaattgatatatcatagttgttatctatcttggsggtacatgtgagattttgatacctgtctacaatgtgtaatgatcaagtcagggtaattgggatatccctcacctctaacagtgatctctgcatggtttct

SEQ ID NO: 107293 - DNA, 201 bp, Homo sapiens
gctgagatgggaggattgctaaagcccaagaggtcgaggctgtagtgagctgtgattgcaccactacactccagcctgaacaacagagtgagaccatgttyctaaaataatgtaaaataaattagggccgggcacggtggctcacgcctgtaatcccagcactttgggaggctgaggtgggtgaatcacgaggtctggagt

SEQ ID NO: 107294 - DNA, 201 bp, Homo sapiens
acagggccacctgcaagccaggaagaggcctcaccaggaaccagatctgctggtaccttgagctgagcttccagcctccagagctgtgagaaatacaaatstattgttgggccaggtgcagtggctcatgcctgtaatcccagcactttgggaggccaaggcgggtgaatcgcttgagtccaggagtttgagaccagcctg

SEQ ID NO: 107295 - DNA, 201 bp, Homo sapiens
tgagcatcttggtggatgcggaggggaacacacataccactccttgccacctatcatccgtttggagtttaaagaaagtccacttcaaatgagagtttgargttgacacagggaggacagtagcagggaaaaccactgtatagccagataatccgacagtggcactgtaacataaacttctctctttaaagaaaataaagt

SEQ ID NO: 107296 - DNA, 201 bp, Homo sapiens
cctcaccaggaaccagatctgctggtaccttgagctgagcttccagcctccagagctgtgagaaatacaaatctattgttgggccaggtgcagtggctcaygcctgtaatcccagcactttgggaggccaaggcgggtgaatcgcttgagtccaggagtttgagaccagcctgggcaacatagcgaaaccccatctctaca

SEQ ID NO: 107297 - DNA, 201 bp, Homo sapiens
gaaacacactggcttagccatgccactcacatgtaacagtggggcacttccatgctggttgttaaatatgctctgccttgagaccccctgagtgccctccrgttcctagctgccctggtctttccttgggatctctttcccatgttcagcaatcaaagggttgaatcctgacacttgaggggcctcttggacccacttctg

SEQ ID NO: 107298 - DNA, 201 bp, Homo sapiens
gagtttgagaccagcctgggcaacatagcgaaaccccatctctacaagaaaatacaaaaattagctgggcatagtggctcacacttgtggtcccagctacwagggaggctgaagtgggaggatggcttgagcctaggaggctgagcctgcactgcacttcagcctgggtggcagagcaagaccttgtctcaaaaaaaaaaa

SEQ ID NO: 107299 - DNA, 201 bp, Homo sapiens
ctgtgggaagttgtggctggtcctggttctcaaggtgagggcatgcaggtgcttttcatagaggccattctcatttatgaagggtcattagatattttatyggattggtaggtaccaatcccataaaaccattgggatggttaggcaccgtgcgtccagtgtacttctggataaaacaactggagcatttacatggcggga

SEQ ID NO: 107300 - DNA, 201 bp, Homo sapiens
acttccagaaagtagaagagttgcacacaggagtcaggttcggcaggatgtgagctcagtttgcagagcagaggttgtttttctcatttttcacattgtcrgttggaacatgtttggggagaggcaggcagctaggatatcccggggcctcataaggcaccaccttgtatctagagagccttagtccccagggattttaca

SEQ ID NO: 107301 - DNA, 201 bp, Homo sapiens
ggaaaatctaagagaacctgcaaactgactatcagaacaaataagagagcacagtgaggtgttgaatacagagtccacatacaaaaaccggtatcagtaayggccaattcaaaaatgtaataggaaaagagactcctttcactgtagcaagcagaactgtcagatatggaggaataaatgcaaccaaagatgtgcaagact

SEQ ID NO: 107302 - DNA, 201 bp, Homo sapiens
ggaagccaggtcacctgcaggcccagagagagcaggagttgggggggtcctgatgttagaagtcccagctgccacctttctcctgggatgggtgatgtctrtgaggaagcacctggctcctgctggccacagcctctttggcagccagcaccagggccagatagaatgtcacacactttggtgcatcagctctgtcatcag

SEQ ID NO: 107303 - DNA, 201 bp, Homo sapiens
tgcaggcccagagagagcaggagttgggggggtcctgatgttagaagtcccagctgccacctttctcctgggatgggtgatgtctatgaggaagcacctgkctcctgctggccacagcctctttggcagccagcaccagggccagatagaatgtcacacactttggtgcatcagctctgtcatcagcttcggaccaggctc

SEQ ID NO: 107304 - DNA, 201 bp, Homo sapiens
aacatatgagaattttctaccccaggctaaaagtttatacccctaaaagacctataaactttatcttcttgtcttttcttagcgtgcttaagaaaagcccrccccatctcataaaagaaatcatcttggtggatgactacagcaatgatcgtgagtactgacactgattttatccctgtgtctggctcttctctgggcacc

SEQ ID NO: 107305 - DNA, 201 bp, Homo sapiens
  misc_feature (1)...(201): n = A,T,C or G
cctgactgctcagcacagggtgcagtgtgtagctcctccaaccaagggttaggaccaacatatgagaattttctaccccaggctaaaagtttatacccctnaaagacctataaactttatcttcttgtcttttcttagcgtgcttaagaaaagcccgccccatctcataaaagaaatcatcttggtggatgactacagcaa

SEQ ID NO: 107306 - DNA, 201 bp, Homo sapiens
cctctctgaaccgatagaaagtgatgcttttttgcatagcgtgtgacacggatgagaaacgagagggtaagtaatatttcccaactgaaaatagggcctgktgctttggaagagtgaggtttgttatctggtttccggctgagccttggcagacacacaggaaatgagaaaattaatggccatgccttttaagagtggcag

SEQ ID NO: 107307 - DNA, 201 bp, Homo sapiens
gagctggctggaactcacccatgttgaatgacagcatcatagaatgttgggattcgactcagggtcgggtggccttccccagagaaggtggccggcagggstgggtgggtcagggctgcctccatgccgtgtttggaatgctacagtgcacaggccaagcaggtgcttctactctaggactcttcagagcctttaatagac

SEQ ID NO: 107308 - DNA, 201 bp, Homo sapiens
gcattcagtcggacccctgactcagactccagtcactcacctagtcagtggtgataagggcaggtacctggttggaaggtacctgtgtgtcacaaaaggcrcaccagtcagtctaagcttcgactgagttccaatgctcagggcagtctgtgtgtttaagtaggtgtgggtagtgcctagacctacacatctcattcctcc

SEQ ID NO: 107309 - DNA, 201 bp, Homo sapiens
aggactcttcagagcctttaatagactgaatttccgagagataaacacagcacaaagtctgtttcccaaattcatttgacctagaatccgtctttcctagrattcctcacagagtagaatgtgaggaacactaattaaaaggtgagaaaatggaagacccgggaagtgagcaggcttgcccaagcctccctccctgttagg

SEQ ID NO: 107310 - DNA, 201 bp, Homo sapiens
ttctcccgccttggcccccaaagtgctgggattatagataggcctgagccaccacaccgggctgcatcttcaccttttaatgtttttctaatgacggactrtttgttccaacatgatacagatactagacagtgaggcttctttaaacactatttgttcctttccttacctctgtttccaagaaccaagaaaaaaacagtg

SEQ ID NO: 107311 - DNA, 201 bp, Homo sapiens
gtcttcatagcacataatagtgcctgaagttgcagaatacatttatttgtgtgtctttcatgttccccactagaaagggagcctggctctgtgacagcgcyggtgtcatacaggtgtgcagcaggtggtcatgggacagaccgatagaaagacagacagacagacggaggggagggccactgcagcgtgctggggcttaga

SEQ ID NO: 107312 - DNA, 201 bp, Homo sapiens
tagaaagacagacagacagacggaggggagggccactgcagcgtgctggggcttagagaggaaggggatggaagtggatagtgagtccctgtggggttttaaactggaaagggccttgctgcccctcgatattaaggggtgttcatccctttgagtgggacaaatggagagtgatggtcagaagcctcaccttccagtccc

SEQ ID NO: 107313 - DNA, 201 bp, Homo sapiens
attatttgaaacgagctttggggaagaaaaaaatgttactttttttttttaagaacaaacattagagatttttaaagggggatttttctgtttttctttctttttttttttttttttaagagacaggatctcactctgttgcttaagactggagtgcaggggtgggtatgaccatagctcactgcagcctcgaactcctgt

SEQ ID NO: 107314 - DNA, 201 bp, Homo sapiens
cataatttttttgttgttagaaattattttcttgtgattgaaaaatacattttccctaagcatgaggaacacagctaaagttttatggtttgcaagaaacygctggccatggcacttcccagtgtgtcagtggtgtgttcaggaagctcagtggcttcctgtgttctgtgtgttgggcatgtagcagttgtagacagatgg

SEQ ID NO: 107315 - DNA, 201 bp, Homo sapiens
ttttactcatgattcaaatctcagttcagatattctttctgcagggaagccgcccctggtttcccagtctagataagattgctccattagatgcttcattyttcaccctcagagcacttagctcagtttttattgatacatttattagtatggtcatttaattcttttttttcttttttttttttttttttgagatggagt

SEQ ID NO: 107316 - DNA, 201 bp, Homo sapiens
ctttccaacagccaggggaggatctggccctgcattgtgtggatcccttcttggggtgaaccatcactggatcaagctttcatacgaaggcatgcaaattyccctacatcaaatcctgtgttaatgacgaaggggtgggtgcccagagctctggggctcagaggaggggacacccacagaaagtttggggcaggagacgtt

SEQ ID NO: 107317 - DNA, 201 bp, Homo sapiens
tttatgttgaaaccatttttcttactaaaccaacatacacataatttttttgttgttagaaattattttcttgtgattgaaaaatacattttccctaagcrtgaggaacacagctaaagttttatggtttgcaagaaaccgctggccatggcacttcccagtgtgtcagtggtgtgttcaggaagctcagtggcttcctgt

SEQ ID NO: 107318 - DNA, 201 bp, Homo sapiens
gtgaaaagcgcatctctagaggtgtatctgcttgagagtagaaatgggatttcactgttttaaaacacttttttttaacgtgttagaaagatgttctcaawatgttactttttgccgaaatcgttcatctctcagaacgtaactccggttgtgtttttctgtttccttatgtcccgttggcagttcatctcagaacaggcc

SEQ ID NO: 107319 - DNA, 201 bp, Homo sapiens
gggtttgtgatcgtattagtccagaggtgcttctgcctcacagctcttctgtagtttgggatattccacagtgattcttttcatagggagcatcagagatyacgttagatcctgacttagtacctgtatcaccagggaagcattcttacattggttgctgtttcttctgtgaggagtatctacattctttggaaattgcta

SEQ ID NO: 107320 - DNA, 201 bp, Homo sapiens; identical to SEQ ID NO: 17418

SEQ ID NO: 107321 - DNA, 201 bp, Homo sapiens
accactcttggggctgccgtggtcacaaaaacccagattattgttttaactctatttcttgccttggttcatcgtactttggggaagaatctggaatttgkataaagtataccacccaagtggcagtcccagctggaagtcatggaatgggggcaagaacaataacctgggagcacgggatctgggttcggaacaaggatg

SEQ ID NO: 107322 - DNA, 201 bp, Homo sapiens; identical to SEQ ID NO: 17420

SEQ ID NO: 107323 - DNA, 201 bp, Homo sapiens
tgcttgtctttatctgccacacgcacgtgggtgacattgatgcgccaaccagatgcccccagctgtgacaggcagaatttaactgtcgccctgctcagcgrtcaccagctcatcttgtttgtcctgatgatggtccctcctgttatttggctgtttgtcagatatcaagaattttctttgtaattaggctttaattgctaa

SEQ ID NO: 107324 - DNA, 201 bp, Homo sapiens
ctgaagtcgaaaatgcatttgatatacctaagctatcaagcatcatagcttagcctcacctgccttcattgtgctcagagcacttaaacgttagcctgcarttgggcaagtcatatccaaacaatgctgacagcaccgcacactgtagggtatcagttgtttaacttcgtgaccgtgtggctgactgagagctgtgaatca

SEQ ID NO: 107325 - DNA, 201 bp, Homo sapiens
tggaagtgccagcttggctggcctttggctggatccctgtttgctagagctttgttcctactctggaggagtcagctgctgtgccttctgggactgccaaragttgccaaggggagtggggagtcctctctgtggggtgtcgtctgaatccagcagccgcaccacccaggtgcttccctcctccccactcctaggccaatg

SEQ ID NO: 107326 - DNA, 201 bp, Homo sapiens
gcctcctgggctctcttgtgccctctagtctgcccccaccttatagccatagtgatatttctagaatacaggtctcagactatcctgccgcttccgtgccytcctgtttttgatctttcccttgttccatctgtctggtacacccaccaccgctagtccccattgttccttcttgcctcccttaggtctccaccgaggtac

SEQ ID NO: 107327 - DNA, 201 bp, Homo sapiens
ccctttgaccatctgtgtgacaagaaagccattccgatggttcagtaagcacccgctgaggctggctccccacaggtccagctcgaggtgctggtggggayagcccaccctctgctgtgtgccgtgatcccagctggagctgctgcacacccagagggagccgcctcagtcacacgccagcagacaggtgcaaatggagtg

SEQ ID NO: 107328 - DNA, 201 bp, Homo sapiens
cacacgattacgtctgtatgttggaaagatatttctaagttgtagtgaggtaggagggattctcagcgagaggaggggcttgggctgaacccggcactgcygggacatgaacaggggaaacagcgttggcggtggagcaggtagacattcccttgacctcgtaagtcctggatgccacccggcgaactggcctgcgggctg

SEQ ID NO: 107329 - DNA, 201 bp, Homo sapiens
ttgaaataaccttttaagaaaagagcttgcaactgtggaaagaccactgttttggatcaggttgacatggagtctgggctttgatgggactgtatgaaccrccttaacccctgtgtttacctgtctttaaagtgggctaataagccatgacagtgtcctctgcacaaatcctttgtgaaagaacaatttgtaattaataaa

SEQ ID NO: 107330 - DNA, 201 bp, Homo sapiens
tatggaggaataaatgcaaccaaagatgtgcaagactttcatggagaaaattgtaaaacataactgaaggatattttaaaatatccagtattgtagaaatrttaatttccttcaaattaactcataaattcagtgcagtgtcatgcagggttttttcatggaacttgaagagctgattcttaaattcatcaggaaaagcaa

SEQ ID NO: 107331 - DNA, 201 bp, Homo sapiens
  misc_feature (1)...(201): n = A,T,C or G
gaccagggctgtcagtgggggctgcagacagggtctcctgactgctcagcacagggtgcagtgtgtagctcctccaaccaagggttaggaccaacatatgngaattttctaccccaggctaaaagtttatacccctaaaagacctataaactttatcttcttgtcttttcttagcgtgcttaagaaaagcccgccccatct

SEQ ID NO: 107332 - DNA, 201 bp, Homo sapiens
  misc_feature (1)...(201): n = A,T,C or G
tggatctgccggccaccagcgtggtgatcacgtttcacaatgaagccaggtcggccctactcaggaccgtggtcaggtgaggccaggagatgcattacctntcaggggtgttaagacattagctgtgtcccaggcacagtcagaccagggctgtcagtgggggctgcagacagggtctcctgactgctcagcacagggtgc

SEQ ID NO: 107333 - DNA, 201 bp, Homo sapiens
cctcatcgatgccccttctttcctttcacagcccggtgcatagcacgcctctgacttctggttttgtgttccaggaatgggccttgacgaaggagaagtcrgtgaagcacatggatttgtgccttactgtggtggaccgggcaccgggctctcttataaagctgcagggctgccgagaaaatgacagcagacaggtacggc

SEQ ID NO: 107334 - DNA, 201 bp, Homo sapiens
tggctcaggggttctgaatctaagctccaccccgtgacccatttcctttttgagccctcatcgatgccccttctttcctttcacagcccggtgcatagcaygcctctgacttctggttttgtgttccaggaatgggccttgacgaaggagaagtcggtgaagcacatggatttgtgccttactgtggtggaccgggcaccg

SEQ ID NO: 107335 - DNA, 201 bp, Homo sapiens
ttcgttctcagttggctcaggggttctgaatctaagctccaccccgtgacccatttcctttttgagccctcatcgatgccccttctttcctttcacagccyggtgcatagcacgcctctgacttctggttttgtgttccaggaatgggccttgacgaaggagaagtcggtgaagcacatggatttgtgccttactgtggtg

SEQ ID NO: 107336 - DNA, 201 bp, Homo sapiens
actgtggtggaccgggcaccgggctctcttataaagctgcagggctgccgagaaaatgacagcagacaggtacggcttgcaggcacccgtgggtgcccgtrattaacccagaccagggtagccacggcctgcgccctcttgctctgtgctgcctctcaaagcatccatctctgcgtgtacttatgtgttcttttgcatcac

SEQ ID NO: 107337 - DNA, 201 bp, Homo sapiens
ggctgcaggcatgagattgggcacctgggccccagtgagagcctgtggtctcactccatggtgtggagctgagaatctgctcccaagttggcctgctgctstctctgtcctgcagagctgccctcccatgcttcggagtcccagaggcagtcccccgggcctcaccttgtttttggcttgttctccattggcaaggtgatg

SEQ ID NO: 107338 - DNA, 201 bp, Homo sapiens
acccaggtgccaaggcgggaaggggttgtgggcacaggagcatgggcagtccacaccacaccacctgccccaaccctgttctcctcagcagattttcaagkttgatgtagaaagcccatctattcttaaaatttataaaggaatcttatttccctcttctccagtattcagagcagattggagcttaggaagaaactcagc

SEQ ID NO: 107339 - DNA, 201 bp, Homo sapiens
ccccatgatgggatggtcagggggcctctgtacctgcttggtgtgtctgctgttgcagaggtgcgtcccaggctctgtcagtcacctgtgtcttgttcatygtctcagagatctcgttccgcgtgtggcagtgtggtggcagcctggagatcatcccgtgcagccgtgtgggacacgtgttccggaagcagcacccctaca

SEQ ID NO: 107340 - DNA, 201 bp, Homo sapiens; identical to SEQ ID NO: 17433

SEQ ID NO: 107341 - DNA, 201 bp, Homo sapiens; identical to SEQ ID NO: 17458

SEQ ID NO: 107342 - DNA, 201 bp, Homo sapiens; identical to SEQ ID NO: 17459

SEQ ID NO: 107343 - DNA, 201 bp, Homo sapiens
gtctgtcctggtgtgtgagggctgggtggggtgggtgtggggactgggattggggtcagccttctgcagctcctgctcagtggctgtttcttatcaccttytgcagatgcgcttttattgctgtgccctttggttggttattcttacttgtaataataatcattatcatttgtggagtgtttatgatgtgccaggcaccca

SEQ ID NO: 107344 - DNA, 201 bp, Homo sapiens
ggtgtgtgagggctgggtggggtgggtgtggggactgggattggggtcagccttctgcagctcctgctcagtggctgtttcttatcaccttttgcagatgygcttttattgctgtgccctttggttggttattcttacttgtaataataatcattatcatttgtggagtgtttatgatgtgccaggcacccagccaagccc

SEQ ID NO: 107345 - DNA, 201 bp, Homo sapiens
gaggtctcaccatgttgcccaggctggtctcaaactcctgacctgaagtgatccacccgcctcggcctcccaaagtactgggattacaggcatgagccacygcacctggcccaaattatttagcaattttgattgacattggggtgaagtaggaggttggccactggcaggactggcccaaatgagtgtctgaaaccttct

SEQ ID NO: 107346 - DNA, 201 bp, Homo sapiens
atgttacatgatggaataccttatgtgcagtttatacatgatcttcttcaccctacctgagataatgtcaacattataatccctggaaaggtgggacaagmtgagaacatctccttttatagaaaacatgaatgatgccacagttacaggtactttgatcttactttgttcactggacagatgcctgtacaccaggccttt

SEQ ID NO: 107347 - DNA, 201 bp, Homo sapiens
tgtgcagaaattcttcatttttctaaagtaaaagaacctgcttcagctgtggttgggaaacccagaacaagaagtgagctgcagttgagagagggctttgkgtgccaccccctgactggggaggcggtggactcggagcaagtgttagaaaatggagccataaaagactccttaaagtgtcgggcgctcagctaacttagg

SEQ ID NO: 107348 - DNA, 201 bp, Homo sapiens; identical to SEQ ID NO: 17438

SEQ ID NO: 107349 - DNA, 201 bp, Homo sapiens
gttttgctgtcagacccttggaattggaaatgcagcaccatgagccatgtgtttgccaagaagtggcctcctgatgcaccaggacagcttccgcaggtggrgcctgctggcctccaagaggcactatgtgtgtgaccctgggagcaagagcgagacctgaggccctgcagatgcccacaaccaagtccgggtacagggtct

SEQ ID NO: 107350 - DNA, 201 bp, Homo sapiens
tcagatgccttaaactgtcaattttgtcattgttaaattttttgcaaaggcagtttcgtcactatctcatgttggtgctcaaaaagttttggatgttaggrcattttggattagggatgcccaacttgtaatagatgacatttaatatttatttaatacttatttaatactacctaaatacttgcaaatacctgcaaaaac

SEQ ID NO: 107351 - DNA, 201 bp, Homo sapiens; identical to SEQ ID NO: 17421

SEQ ID NO: 107352 - DNA, 201 bp, Homo sapiens; identical to SEQ ID NO: 17447

SEQ ID NO: 107353 - DNA, 201 bp, Homo sapiens; identical to SEQ ID NO: 17448

SEQ ID NO: 107354 - DNA, 201 bp, Homo sapiens
aatacggataaagtctttgaagggaaatgcaaactctttcaaggcgtctgaacccaagtgtttggaatgttgcaggcttgcaaaaacagagggaaacagtscaggagctcagattcatgctgagtggtggagagtggaaaatgaaccccggcgaggctggtgggattgattgaattgaaatcatgaaaatccgatggggca

SEQ ID NO: 107355 - DNA, 201 bp, Homo sapiens
cgtgttgctcttgtgtaagctcctgtgggaacatagagtctctgtgtcccaccttcttcctcgcagtggtcagcacggatgaggtgggagttgcataaatrtcagcattcgaaagtgagggcgtctgtcggtgctgtctcactgtggggcttcagagaacgtgagcacctgtgtttgcattctccatcaaggttcatgtcc

SEQ ID NO: 107356 - DNA, 201 bp, Homo sapiens
ttaaccctctaaagagagttctgtcaccctgttccatgggtatcccctaatggtttagtggaaatccagcaggccagggtcgcccagtagggcagcgtatygtgtaggtggccatttctcaaaaacagtgtggttttcagaagtttgcatactattagctgaaatgagacatcagccagcattttgtgtcatcgtgtagga

SEQ ID NO: 107357 - DNA, 201 bp, Homo sapiens
taacccttaactctaacaatgggggtaaggctccttgggggcatcatctgtgtttctctacatccctgtcatgcaaggatgatgctaagtacttccagggratcatctgtttgtgctttcttaacggagtgtggtctgcagaggtcatgacaccttgcccagggtctcagaaccaagatgtaaacactaactgcctaatta

SEQ ID NO: 107358 - DNA, 201 bp, Homo sapiens
cctggtgaagactgagccctggaagaagagaacaaatctcatcctttgtcacttgggaatttcactggcgaaattcagtgaggcacttgaggtttgtaaaygggcagacgtttcccacacgattacgtctgtatgttggaaagatatttctaagttgtagtgaggtaggagggattctcagcgagaggaggggcttgggct

SEQ ID NO: 107359 - DNA, 201 bp, Homo sapiens
cacagtcggtcacctgatttgcatttatattgagaaatcacagctggagggtaccctggcagatgggtgaggctgagccactcaggctctagggaagccaygctgtcctcacagtgcccacccattgatctgtgacacgtgggccaaggggcgtgggattttgctggtcagcttctctccctattgaagccgcatgggaag

SEQ ID NO: 107360 - DNA, 201 bp, Homo sapiens
cacagtgcccacccattgatctgtgacacgtgggccaaggggcgtgggattttgctggtcagcttctctccctattgaagccgcatgggaaggaagtgggmagaagactgctcggcaagcaaggagccagagtactgaatgcaaggaccttcacaaagtgcctcttgaggtggaaagacggaggcgtttctgcgccgctgc

SEQ ID NO: 107361 - DNA, 201 bp, Homo sapiens
ggttgagaattaataattatgcgattgtagttcacgacttcagcacaagtcattgttacagttctcaaatgttgagcagccccacgttattccccaccagygtgtttttctctgaggttacacagtaaaataagtgaagtgctgacctttatcataacatattttttatttgtgagcaagtggagtatgtataaagcagtt

SEQ ID NO: 107362 - DNA, 201 bp, Homo sapiens
gttctagactcaactggctgggtcaccgatggccatttcatctgtgcgtagctatagggatttaaataggaggatttttgttaaatgaagacaattgaccractgtgcgtggaatcaatgtgcaggatgattcaccaggctttctgcctgttagagaagttaaatggttgagaattaataattatgcgattgtagttcacg

SEQ ID NO: 107363 - DNA, 201 bp, Homo sapiens
acatcgcagtggccctgccttatctgtaagtatgcacagcatcagcggtgcgggcatggctaggaagaccagctttagtaagagttcccaggtacaccttytggggttgccgatgggactgacaaaacagtaatgaagtattagccaggttagtggaagcatggcagccttcctgagaggtgctgtgcccgcaccgccaca

SEQ ID NO: 107364 - DNA, 201 bp, Homo sapiens
aacatcgaatatttttaagctgtgaggaatgggggtgtcgggaggaagtggccagtctcttgtcaacaccctgtttcttttcctggctggcaggttttgaytggaacttggtattcaagtgggattacatgacgcctgagcagagaaggtcccggcaggggaacccagtcgcccctataaagtaagtgccagcatccttca

SEQ ID NO: 107365 - DNA, 201 bp, Homo sapiens
tatttcccccatattttcagtgataaggcagaggcccatgggctccttgtagcaatggaggcattccttgaggatccaggcaatctgactcccgagtcccrgggctggacagaaggaagctggctccgagagctagactgcagtgcagaggaattccacgctccgcaggtgctgtcttcagaagttgcatctcgtcagcag

SEQ ID NO: 107366 - DNA, 201 bp, Homo sapiens
actgcagctcacaaatcactaatggtatttgggcaaacagaaaaggacccttgggacacagcaacacagtttttgcctttagctgggtgaactgatggctrcctgtcccataaccatgggtgtctccactcctagagtgactcctgctacgcacccactcctgacctccctccctgcctcccagcaggccacagcacatct

SEQ ID NO: 107367 - DNA, 201 bp, Homo sapiens; identical to SEQ ID NO: 17451

SEQ ID NO: 107368 - DNA, 201 bp, Homo sapiens
cctttctgagcattatttccacacccagcctcttgttttaagcgaatacgagctccccatctggagggacctgctgataacctcgtgagaagacctatagrtccgctggggtggaggagccatctgcacttcatcttcttaaagggactgtcaggcaggtcgtgccttaatgcggcacattccttattctaaatattccca

SEQ ID NO: 107369 - DNA, 201 bp, Homo sapiens
ggcttttgtgcgtgaacagacaactctgttggctttcctgccctcccctgtttgccttcttgatttttcccttctctttttgtttctgtctccatcctggwtgcattccctcactcccctcttctttgtccctgccaggtttctgatgggttacttctttgaggaggagaaccctaccaccattccagaatactcaaggca

SEQ ID NO: 107370 - DNA, 201 bp, Homo sapiens
taaataagaggtaggctttttatgagtttcgtgggaaaggggcagggattttcctggaactgaaggttcctccctcttttagaccatctacggtaacttcytgacgttgccatggcatttgtaaactgtcatggcactgatgggagcgtcttttagctattgtgttataattagcatataatgagcagtgaggatgaccag

SEQ ID NO: 107371 - DNA, 201 bp, Homo sapiens
ggtccagctcgaggtgctggtggggacagcccaccctctgctgtgtgccgtgatcccagctggagctgctgcacacccagagggagccgcctcagtcacaygccagcagacaggtgcaaatggagtgatgcagacagaaagaaaggaaatcacacctcaagatttattttctttctagaaacacccgccgggcagcagagg

SEQ ID NO: 107372 - DNA, 201 bp, Homo sapiens
cccagccgtgggaaaggacgctgtacctctgccctattggctgcaccctttgctgttgatgtgaggctttatttacctgggaattgacagggttttggtcmatgattgctcctttctccgcaatcacatttaatgcccatgatatctcatctttgcacacgaaggcaaagccttctactgctttttctctgagtttattag

SEQ ID NO: 107373 - DNA, 201 bp, Homo sapiens
agagactggagcttagacctgattacattatatatgcactgtcttttctcagagatggggaaactaaggcatgaaaacattaacttttattttggaaaaawgctaaacatagaagtaagagggaggcctcctgaggcactttgccaaactttatgcacagcaactatgacctgcaaaatctttttagcctgggctccctct

SEQ ID NO: 107374 - DNA, 201 bp, Homo sapiens; identical to SEQ ID NO: 17416

SEQ ID NO: 107375 - DNA, 201 bp, Homo sapiens; identical to SEQ ID NO: 17440

SEQ ID NO: 107376 - DNA, 201 bp, Homo sapiens
tgcaggggcagaatgtaacctgcaggttgtggctttagaaagcaatgtggaactcggggccatggtaagcaagttggtggtggttttttttaatagcacayctcatcctttgatgtcagaacactgtctacacactctgattcatttcagtcagtccctaaaatgtgaagatgaaatgttggggagacagatcctctggcc

SEQ ID NO: 107377 - DNA, 201 bp, Homo sapiens
gctgtcctcacagtgcccacccattgatctgtgacacgtgggccaaggggcgtgggattttgctggtcagcttctctccctattgaagccgcatgggaagraagtgggcagaagactgctcggcaagcaaggagccagagtactgaatgcaaggaccttcacaaagtgcctcttgaggtggaaagacggaggcgtttctgc

SEQ ID NO: 107378 - DNA, 201 bp, Homo sapiens
agatatagaccccagtccctcctttaaaatattggctcgtgctgtaatttccactttgccttttgccctttgaccatctgtgtgacaagaaagccattccratggttcagtaagcacccgctgaggctggctccccacaggtccagctcgaggtgctggtggggacagcccaccctctgctgtgtgccgtgatcccagctg

SEQ ID NO: 107379 - DNA, 201 bp, Homo sapiens
ggtgtcgggaggaagtggccagtctcttgtcaacaccctgtttcttttcctggctggcaggttttgattggaacttggtattcaagtgggattacatgacrcctgagcagagaaggtcccggcaggggaacccagtcgcccctataaagtaagtgccagcatccttcagggtgcccctcccagatgagaccccaggttcca

SEQ ID NO: 107380 - DNA, 201 bp, Homo sapiens
cggccattgctgtgaaattgctggtcattgtttggcagctgctagaccatccactttagttcttaactccttaaatgtttttagcgatggctgagttccawatatatatatttttaatctatctccttcgtccactgatttcccatctgagatattatctctaattttgggggcagataattcatggctctggcaaacaat

SEQ ID NO: 107381 - DNA, 201 bp, Homo sapiens
agttctattttgaagaactggggaagtacgacatgatgatggatgtgtggggaggagagaacctaggtatgtacaagcctcaaatctcaggacagagaagwgcctcagctctgcaaaaggcagggtgccaattggaaaaaaaatttaaaaggcttcagagtgaccattcactgggcttaatcgatccttgcaaacacatat

SEQ ID NO: 107382 - DNA, 201 bp, Homo sapiens
  misc_feature (1)...(201): n = A,T,C or G
gcagtgtggctgttctgaagatcagcttattgttagggaatcaaggcttggccttggcgcaagggtgctggcaatctaaccttgactttgccctctcctcnctcccccctcttctttctgcctctttagaacccccatgattgctggtgggctgtttgtgatggataagttctattttgaagaactggggaagtacgacat

SEQ ID NO: 107383 - DNA, 201 bp, Homo sapiens
tctgcgagaactccaggtggctcttagagtggcactgaccaagtagtctgtgtagggggactcactgtgccccccatgctcagaggctgtatggtgaagtygttaagggcccgggcttatatccagccccgccagctgatcactcttgatctggggcaagtaacttaacctctgtgtgcctctgtttcctcctttgtaaaa

SEQ ID NO: 107384 - DNA, 201 bp, Homo sapiens
ttgttttccttttttttttttttttttttttgagacagggtctcgctctattgtccaggctgaagtgcgtgccacaatcatatctcactgcagcatcaaaygcctgggcttattttcccgcctctgcctcccaagtagctaggatgacaagtgcttaccaccatgccaggcaaattttttgtttgtttttttgttagagac

SEQ ID NO: 107385 - DNA, 201 bp, Homo sapiens
actccagtcactcacctagtcagtggtgataagggcaggtacctggttggaaggtacctgtgtgtcacaaaaggcgcaccagtcagtctaagcttcgactragttccaatgctcagggcagtctgtgtgtttaagtaggtgtgggtagtgcctagacctacacatctcattcctcctgccggtcagttctgtgttgaagca

SEQ ID NO: 107386 - DNA, 201 bp, Homo sapiens
gtctttggaggaattggtccatttaatccagcttattgaatttatgggaatagagttgttcatactattccgtattgtccttttcatatccatgggatctrtagttatatccccactttcatttctgatattggtaaaatgtgccttttttccttttcacttagtctggttagagattcattgattttattgatattttga

SEQ ID NO: 107387 - DNA, 201 bp, Homo sapiens
gaattcatcagtgaacacacctaggccaggtgctttctgtttgggaagattattaattattgattcaatttctttaatagatatgaccagttcaaattgtytatttcttcttatgtgaattttggcagagtatgtctttggaggaattggtccatttaatccagcttattgaatttatgggaatagagttgttcatactat

SEQ ID NO: 107388 - DNA, 201 bp, Homo sapiens
tcattcacagtaactgttgatttttgtcctgcctccctaacatgttcttagggatcttagataatacagaggaaaattcccttttgtattatacaaacctkgtaaagaaaaactgttttttgcctttcagaaaattcttagtttttttgttgaatctgtttcttgcattcagtcggacccctgactcagactccagtcact

SEQ ID NO: 107389 - DNA, 201 bp, Homo sapiens
aaccctgcacccataccacgctgctttaatcactgtgactctgcagtaacgcttcatggctcctcgggcatgttgccctactatgtgttgttcttcaagaytccagtggatatttgtgaccatttgattttcctgatgaatttaagaataagctcttcaagttccatgaaaaaaccctgcgtgacacttcactgaatttat

SEQ ID NO: 107390 - DNA, 201 bp, Homo sapiens
aacctaaagttattaattgagctaattcaaatctcctgttgaccagatttttaagaagcttgatttcacagaggtcctgcagaggttttttaatgtcttargatttggttctgtttagttttgaaagacctctatagaaataaactctgtagctattaggactaatcagaaattagtggatttggtggaatattatgccat

SEQ ID NO: 107391 - DNA, 201 bp, Homo sapiens
agcaggaagccagagtcgctaggcaggtggccatgaggaagagtagaaagaggtgaggtctgagaggagtcaaggcaccaagccctaggagcctggaggckcatggtaagggcattggctttgtctctgtcatagtccgttttgtgctgctataacaaaatacctgagactgggtaacttacaaagaacagaagtttactt

SEQ ID NO: 107392 - DNA, 201 bp, Homo sapiens
gagctgttgtataaagggcttaaaataatgcttggcacatagcaccccattaaatttagctgtaatgtattcaaagaaattcatagatctattcctccagktttcagagggcttcatgagcacccatagatcaattagcattcacttaggaggctatacacgatatattttgcttacatatgcaatgtgttatttactaca

SEQ ID NO: 107393 - DNA, 201 bp, Homo sapiens
tccttagtaaccttgtgtaaagggctgaggcttaggagagacgagggtagggagagagttcagaaaggagagtcctaaggccgtctggattctccttgagscccctccccatcctggtcctgggctgtgtcttcatcacagccacccctccccgatgtgctgttggttcagttaccccagacagtggatttctcagaacag

SEQ ID NO: 107394 - DNA, 201 bp, Homo sapiens
agaaggactggcaaaggagcgggggccggaagaggagcaggggccagtagaggagtggggccggaagaggagcaggggcagctgtaggggctagaaggccraggtctgcctctgaggacagctgttgatgaggttcttgttggagatctctcaccctttggtcaacgtggccttttggagcagattttctctttgccttta

SEQ ID NO: 107395 - DNA, 201 bp, Homo sapiens
agatacattcttgctctaaaactctttgattctgttaactgtgtcttaccatttccctttaatctctattctcagattggaatcaccaattttattttctyttacatgctgtaaaaatatatctctgtagttccccccaccctcataccacatttcaggtctactgtggatgagtttttgcccataaactctgtgaccctt

SEQ ID NO: 107396 - DNA, 201 bp, Homo sapiens
gtataccacccaagtggcagtcccagctggaagtcatggaatgggggcaagaacaataacctgggagcacgggatctgggttcggaacaaggatgatggcygggagctctaggctcagctgtgccaccagtcctgtggccttagacaagttaaggagtatttgggttttgttttccttgtctgtaaaatttagatacattc

SEQ ID NO: 107397 - DNA, 201 bp, Homo sapiens
ttggggaagaatctggaatttgtataaagtataccacccaagtggcagtcccagctggaagtcatggaatgggggcaagaacaataacctgggagcacggkatctgggttcggaacaaggatgatggccgggagctctaggctcagctgtgccaccagtcctgtggccttagacaagttaaggagtatttgggttttgttt

SEQ ID NO: 107398 - DNA, 201 bp, Homo sapiens
ttcctcgcagtggtcagcacggatgaggtgggagttgcataaatgtcagcattcgaaagtgagggcgtctgtcggtgctgtctcactgtggggcttcagaraacgtgagcacctgtgtttgcattctccatcaaggttcatgtcctgttggctcataagcatgattatatccattatacaaactggggcacaggcacccag

SEQ ID NO: 107399 - DNA, 201 bp, Homo sapiens
agcgaacagattaaatcactctctgttttttcatagccattgatggaaacagattctgtggggtaaataacagagtcttgggtggtggaaaggttgaagaygtccagtagttgtggcagggcaaggatggaggactttttctttgcaggggcagtggagaggcggggccatgggtgaagactggagaatactcagaaggta

SEQ ID NO: 107400 - DNA, 201 bp, Homo sapiens
tccaattagaatgacagacacttagtgtgatgactcaggacagttgatggccttaaaaaaaaagcgaacagattaaatcactctctgttttttcatagccrttgatggaaacagattctgtggggtaaataacagagtcttgggtggtggaaaggttgaagatgtccagtagttgtggcagggcaaggatggaggactttt

SEQ ID NO: 107401 - DNA, 201 bp, Homo sapiens
gatttcaacattcaccctcactgccggtctctctcttcagctacacccacgcccccagtccccttctctctcctccacaccttcttttttggctttgtttwggttttcattgagttctgtccaaacatcgaatatttttaagctgtgaggaatgggggtgtcgggaggaagtggccagtctcttgtcaacaccctgtttct

SEQ ID NO: 107402 - DNA, 201 bp, Homo sapiens
gtgaaggcttcccaagcctggttatgcattgttggctgccaaagagggccaagtgtttgaaagtgaataccagattagagaattcataaatgaagatgcartaacccatcacacaattagagtgcaggatccctttcccacaatcagagtaacagagatgggactaaggaagttgtacaggccagagaagggagggggctg

SEQ ID NO: 107403 - DNA, 201 bp, Homo sapiens
ggccctgccttatctgtaagtatgcacagcatcagcggtgcgggcatggctaggaagaccagctttagtaagagttcccaggtacaccttctggggttgcsgatgggactgacaaaacagtaatgaagtattagccaggttagtggaagcatggcagccttcctgagaggtgctgtgcccgcaccgccacagattccaccg

SEQ ID NO: 107404 - DNA, 201 bp, Homo sapiens
ggctgttttcaagagtgttgttctcttccaccaaacagcctacactcagccctgcactcagattttgctttatttgttgatgaagctggaaagagtccatktgacgtgtaacctggtctccgctaagcggttgttctctattcttgtcaaatgtgaaggcttcccaagcctggttatgcattgttggctgccaaagagggc

SEQ ID NO: 107405 - DNA, 201 bp, Homo sapiens
ctgatcttagtgggaaagtttccagtttttcaccattaagtatgatgttagctgcaggatttttgtaggtattctatatcaagttgaggaagttctcatayattcctagtttgagaatttgtaacatgaatgggtgttggattttgtcaagtggtttttttgcatctattgatatgatcatgtgatttttcttgcttagct

SEQ ID NO: 107406 - DNA, 201 bp, Homo sapiens
tggtgtctgcaccgctggctgttttcaagagtgttgttctcttccaccaaacagcctacactcagccctgcactcagattttgctttatttgttgatgaarctggaaagagtccatttgacgtgtaacctggtctccgctaagcggttgttctctattcttgtcaaatgtgaaggcttcccaagcctggttatgcattgtt

SEQ ID NO: 107407 - DNA, 201 bp, Homo sapiens
ttttttgtaaagatggggtcttgctgtattgcccaggctggtcttgagcttctgacctcaagtgatcttcccctctcggcctaccaaagtcctggtgttayagaagtgaaccactgcacctggctcacaaatttaactctttcaagaggaaacaatacacccaagggtccttactttttttccccccaaaattctgtcact

SEQ ID NO: 107408 - DNA, 201 bp, Homo sapiens
tgaaagctgagtgggcgggtgggggcttaaatgggaaagcactgggagggctggcccacacccgtgactgccctgcgtctcatgggagcagaaaggtggaggctgagcctgagacagggtaggaacccctcttaggagcctgtcaggcaccctccaacataaaaattttaaaaatttaagtattaaaaaaactaggcatct

SEQ ID NO: 107409 - DNA, 201 bp, Homo sapiens
tttgcttccttaaccaatagcaaatcaaaaaacctttgaatccacctttgacctgtgggccctgctttgagacatcccacctttctaggtcaatcccatgyagagctttcatgtattgatttatgactttgcctgtaacctctgcctccccgcctttaaaaacccttacctgtaagccatctgggagttaggtcttaagca

SEQ ID NO: 107410 - DNA, 201 bp, Homo sapiens
cctctatgattttggttactgtaggaaactcatataagtgaaatcatttggtatttgtctttttgtgtctcgctcatttcatctagcatattgtcctcaasgttcatccatgttctggtatgtgttagaattttcttcttttttagggctgaataatattccattgcatggatataccacattctgcttgtccatttatct

SEQ ID NO: 107411 - DNA, 201 bp, Homo sapiens
ctgaccaatcgttacctccttcctgctcttgttacccaataaataggaagggctgtagaagcttaggggggctgcctttgctcactagaagcagggtgcctttttcctcttcttcttctctcttcttccccatgctagccttcccttaaaatagttacttttgttttttgttatttctacattcatcccttcaatcagtct

SEQ ID NO: 107412 - DNA, 201 bp, Homo sapiens
agactcttttgtacctttgccacatcgttaatatttgcaaataaaatctttgtttattgcctaggtggtagttgacgtttctgtttcgatttcttttttctttttttttttttttgagacagagtctcactctgtcgaccaggctggaggctggagtgcagtggcatgatctcagctcactgcatcctccacctcccgggt

SEQ ID NO: 107413 - DNA, 201 bp, Homo sapiens
ttcgatttcttttttctttttttttttttttgagacagagtctcactctgtcgaccaggctggaggctggagtgcagtggcatgatctcagctcactgcawcctccacctcccgggttcaagcaattctcctgcctcagcctccagattagctgggattataggcgcccgccaccgcgcccagctaattttttgtgttttt

SEQ ID NO: 107414 - DNA, 201 bp, Homo sapiens
tagaagatacttggctttgatgagttagaaaatgagagagagcctcattttctcgtgtggttttggtagagttgatcctggattctccgtatcagcgtcarcagtctcgatggttcagaatagctaaatgtgatgctatgtttgggtaagagccaatgggtcaggtttgccgacagatatgagtgtgcttccagtgcctgt

SEQ ID NO: 107415 - DNA, 201 bp, Homo sapiens
tccagattagctgggattataggcgcccgccaccgcgcccagctaattttttgtgtttttggtagagatgaggtttctccatgttggccaggctggtctcraactcctgacctcaggtgatccgcctgtcttggcctcctaaagtgctgggattacaggcattagcgccacacctggccttaattttgatttctttagttc

SEQ ID NO: 107416 - DNA, 201 bp, Homo sapiens
tgactgggccagtccccatccagcatgggcatggggcaggtagccagggcctggccctggttcccctaaatctccagcccttaaatagaagatacttggckttgatgagttagaaaatgagagagagcctcattttctcgtgtggttttggtagagttgatcctggattctccgtatcagcgtcagcagtctcgatggttc

SEQ ID NO: 107417 - DNA, 201 bp, Homo sapiens
cctctcaaacctcccctcattctgggttgggcccaggaggagggtatccaacccagacctggtggagaggagcagctttttttaaggccagtagtgctcartatttataaactccttctgtatcagctcatgagacatttcacagttgtactcttcgcctgcttggctgtgtgactgagaggagctgggcgtggggtgata

SEQ ID NO: 107418 - DNA, 201 bp, Homo sapiens
atacccataacactatgaaaaaaataaagggctttaaaattctttccagttctaggctgagagcacatagctggcatactttgtttaaagttatgaatatwtttttaagctttatattattcatttataatataattggattcagatatttctgtttggattcagtttttattcctctcccctcagctttcttgattttat

SEQ ID NO: 107419 - DNA, 201 bp, Homo sapiens
gctgggcgtggggtgatacagcagcgagcaggtgaggtatcggggcaagcccaccagcatctctcccgtgtcatctgcacttcagtattggattcctcccygtggacccagtgctcagaaaatccaaggccagtcttggtgctaccacttgcttagacaaatcactgagttgtctgtgtcagccagtttctccgctgtatt

SEQ ID NO: 107420 - DNA, 201 bp, Homo sapiens
ccaccagctactaaatcccccatcccctcaccaccaccacccccacccagcagtgaataatatgtctattatccaactaagaaatgtctgttgaaagacayttgaagaccttgtaaatctcctccttttcatcaaactcttcctcccctaaccacttcagcatccattcaggtgtcttctccaaacaaacctttactgcga

SEQ ID NO: 107421 - DNA, 201 bp, Homo sapiens
tatttcttgccttggttcatcgtactttggggaagaatctggaatttgtataaagtataccacccaagtggcagtcccagctggaagtcatggaatggggrcaagaacaataacctgggagcacgggatctgggttcggaacaaggatgatggccgggagctctaggctcagctgtgccaccagtcctgtggccttagaca

SEQ ID NO: 107422 - DNA, 201 bp, Homo sapiens
tgcgttgtcccacctacaccagatgcaggtatgtcactgtctcctccaggaactctgactggacgcatgcatgcagtcaatttgtgtgttaagtcggcctscctgtcatctttccagctcctggatgagtcatgaagccctgagccacagttctttcatatgtaaagtaaacattacccacacaatggggagcatctgaat

SEQ ID NO: 107423 - DNA, 201 bp, Homo sapiens
gtcatgtctgctaatgagcccattaaagacattcctcattctctacagtgtttttgatctctagcatttccttttgattctttctcataatttccatttckctgcttacattatctgtctgttcttgtgtgttacctactttttccattagagtccctagcatattaattatagttgttttaaattcctgatctgatcatt

SEQ ID NO: 107424 - DNA, 201 bp, Homo sapiens
ttattttcaatttccttcttgaatttgctcaacccttgtttatatacatccttggccagaatacaaaaaccatgatgctgtcaccttctcagagtctctcygcagactcaggatatccatctgaccctcataagtgatgctagttttggtcacctggccaaggtgctgcctatttctccaccagctactaaatcccccatc

SEQ ID NO: 107425 - DNA, 201 bp, Homo sapiens
cttaatttgcgttttggtgttcaacattaatttggggaaattcttagtcattattgcttccagtatttctcctgttcctttctctctttcttctccttccratattcccatcatgcatatttacaccactgtaattgttccacagttcttggatattatttcaatttttttcatcttttttgtctttgcatttgagtttta

SEQ ID NO: 107426 - DNA, 201 bp, Homo sapiens
gtggcctcctgcgcttgcattttccatccccactccccgcttcagggagaatccctcttctgtggctgtgtttttaacatgctccaggggccgagtgatcyggctgtggggaccgtgtgagccgctctgcggttccgcgtcctcgtgccgccgctccggacggccgggccctgggcattcgggaggatggtgagcgccgag

SEQ ID NO: 107427 - DNA, 201 bp, Homo sapiens
catggtttctgagaagacattagttataatccttctctttgctcctctattgataggtaaggtgtttctttcaattttttttctttatctttgattttctrcaatttgaatatgatatgcctcagtgtagtttttggagcctttatactattctgtgtgttctctaagtttccttaatttgcgttttggtgttcaacatta

SEQ ID NO: 107428 - DNA, 201 bp, Homo sapiens
gtcttatgaggtcacccatacattcctcaggacggcaagtgcgagacgtccctttagtattcttccaaccctaggattgagagagggtgggtgtgggtctygacaggagatgggaaggtacagctccacctggggacacaggcttctgcattcttgccccgtccagcacacaagctgctgtcagcaggcaggccccgcttc

SEQ ID NO: 107429 - DNA, 201 bp, Homo sapiens
gcctgatgtataggaaaatcgtgtagtcttctttcttccccaattgtttccatggatttagacactagaagtgtctctaaatttatttcattctcataccaaaaaaaaaaatgtggtttgtttggcttgtaaagtatggacataaaaaaagatagcgggccatgcacagaaaggcagaatttaaaagctagctatagtttt

SEQ ID NO: 107430 - DNA, 201 bp, Homo sapiens
tgttccatataaatttgtaaattttagaatcagtttgttaatatccacaaaacaacttgctgggattttggctctaattgcattgaatctatagatcaagwtgagattaactgacattttgaccatattgtcttactccccatgaatgtcaaatattttttcatttaattcttttgataccttttatcagaattttgtagt

SEQ ID NO: 107431 - DNA, 201 bp, Homo sapiens
acgaagccccaggagggcaggtatgtcttgttcactgcagtctccagtgccttgcgagggcccggcatgctgagcgctcagtaacccttggcctaatgtasagtttttcattctgtgaatcaggaatagagcaacataaggggagcttctgcttgagacagcaatggcagcatcaaaataaacgtggcaattttggtcttc

SEQ ID NO: 107432 - DNA, 201 bp, Homo sapiens
atatccccttgaaagtgtagtgaaccaggaatcttaagttcacggtattcctgatacaattcttgatttctggaaaatagtcgtctttcttttttttatcygttacccccacctctgagattgatctgactggttcatttggggtttgggctatgaatcttaaatgctgttagagacggactttttgggaagttgtccaga

SEQ ID NO: 107433 - DNA, 201 bp, Homo sapiens
ttccagaaacatttgctgaagagactctcttctctccgctttattgcctttgctcctttgtcagagatcagttggcaatattcgtatggttctatattggrgctctttatttgcttccattggtctatttttctgttattttgccactaccacactgccttgattaccatgacttcatgtaaagtcttgaagccgagtagt

SEQ ID NO: 107434 - DNA, 201 bp, Homo sapiens
gcggtttgctcaggagatagaatatttatcatactgaggttcccagtttttaatgagccaaatatatttccttatttttttcatgatctttaatttatcawcttaaccatttttaagtgtacaggtaagtggtattaagtacattcatattattgtgcagccatgtccaccgtacatccacggagctctttcaacttgcag

SEQ ID NO: 107435 - DNA, 201 bp, Homo sapiens
ctcttgcctcctgcagcacagggtgaaacactggcatttttgcacttagtcatgtctactagtatgggccccagaagcatggggtgttttatatggattargtttcttagcatgctgaaatgtagatgacagtgattcatcagggccggatttggagataaacaaaaactgtcacatagagtctcactcataggcttacat

SEQ ID NO: 107436 - DNA, 201 bp, Homo sapiens
gcaaacacaatgattccctctccttattaaatttgttgggagaacatcaggatcatactaagttactgtccaaagctacaactgtgaagagggggtgcacrgtgacaaaaaagagaaatgtcgcttgacatttcagaattcaggcccagtatcatcggtgccctcataacattacacgccaaaccctttaataaaactgtc

SEQ ID NO: 107437 - DNA, 201 bp, Homo sapiens
gggaagaggaatggccaggagggttgggggtagagttactgaatttccagagttcaggtcaggacatgcatttgggcagggacaagggtactttcgggacygtggttgctctggttcagtttcttaactctggcaccattgacatttttggctggcttttttttttttttaagacagttgtactctgccacccaggttaga

SEQ ID NO: 107438 - DNA, 201 bp, Homo sapiens
ggtcaggacatgcatttgggcagggacaagggtactttcgggactgtggttgctctggttcagtttcttaactctggcaccattgacatttttggctggcttttttttttttttaagacagttgtactctgccacccaggttagagctcagtggtacaaccagagctaactgtagcctcaaactcctgggctcaggtgatc

SEQ ID NO: 107439 - DNA, 201 bp, Homo sapiens
ccaagtgtcctggcgagggtgggaggtgggcagaattgcccttggtagagaaccactgccttagtccgttaattttgatttcattccttctgtctgagccwttatggttagaccttcttgtaatgagactgcctttctgtgtggtctggggtgaaccactgtggggagggctaatatattaatacgttttaattttcaaaa

SEQ ID NO: 107440 - DNA, 201 bp, Homo sapiens
aagttcctggaaggcatcttggagcagatgcacacttgataatgctttgatagtagtgctggtctgttttgcttttttttttttttttttttttgagacaragtctcactctgtcgcccaggctggagtgcagtggcacaatctcggctcactgcaacctccgcctcccgggttcaagcgattcttgtgcctcagcctcct

SEQ ID NO: 107441 - DNA, 201 bp, Homo sapiens
ccaactgccatgctagaagacgtccaggctgctctgctggagaaagaaaccgtgtggggttgcctggagggtgagacatgttggaggggagggagggagargccaaggcctcagacaggtgagagagccccagccgcgaggcacctgtggtctcaccatgggacataagaacttgtttaagccatgacgttttgggagggc

SEQ ID NO: 107442 - DNA, 201 bp, Homo sapiens
gaaccagtagactgctgtggatgtgacactgggcgtggtgcaggctctgtccttgaggggcctggtagccccacctgggtcccctggggcccaactgccaygctagaagacgtccaggctgctctgctggagaaagaaaccgtgtggggttgcctggagggtgagacatgttggaggggagggagggagaggccaaggcct

SEQ ID NO: 107443 - DNA, 201 bp, Homo sapiens; identical to SEQ ID NO: 17460

SEQ ID NO: 107444 - DNA, 201 bp, Homo sapiens; identical to SEQ ID NO: 17436

SEQ ID NO: 107445 - DNA, 201 bp, Homo sapiens
tgtgcatgcatatttgtgtgtgtgtacatacatatgtacacactgcatgtgtctgcatttatgtacatatgggcatgtggcatgggcatatggcacatgcrtatctgtgcatgcacacatgtacacagcacacatgcacacatgcagtgcatagtatgcctgcatgtacatgtgcgtaccatgcatgcatgtacctacacg

SEQ ID NO: 107446 - DNA, 201 bp, Homo sapiens
taacaggagtaggccactcatgtgggacgtcaggactagtgccacaaaggcagccctgtcacacgaacaggttcttgggggacagaggtctgtctgggacyggctaatgacctggaaagactggagaggcaccattgtccaccaccagatgtatggctgcagggtaggagtagacttaagaaggaacactgttggctgggc

SEQ ID NO: 107447 - DNA, 201 bp, Homo sapiens
gcagccaaactgaacacccactgctctgtggactcaagctggttttagacattgtttggtcaggaccagagccgagctctggggcccactgggggctcttstcgcaccatctcattgattctacaatgcacatttcccccgcctctcatgttttaacatgtctgaaatcaggatgcatcttccatggatggtgtttcaggg

SEQ ID NO: 107448 - DNA, 201 bp, Homo sapiens
taaagcattgccctcacataatttcaaagcaatattaatgtattaatttgagcctttaggtgctaagggttgtaagatgcaccatcattttgtcaattttaagatgcattccccatttcagagatgtcggaacaggaaaagccatgcatcctggaattggtgtttggtcctgactctcatggggggtgagaaatggtagag

SEQ ID NO: 107449 - DNA, 201 bp, Homo sapiens
aaagtttcgcgaacagtgcaaacgttttctagatggactatcctactcttctctatctcattaaacactttgctggcagcaactcactgagttgaattccygctccaccagtagcctcccctgggcgttggaaggctctgccctctgatgggggtctccctgggagctgcggctgcggacccccgtagatgggatgcagct

SEQ ID NO: 107450 - DNA, 201 bp, Homo sapiens
tcgacctcctgggttcaagcaatcctcttgcttcaccctcctaagtagctgggactacaggtgtgcaccaccacgcctggctaactttttcattttttttytttttatagatgggggtctcactgtgttgcccaggctggtcctgaactcctggtctcaggcgagctccccatctccgcctcccaaagtgttaggattaca

SEQ ID NO: 107451 - DNA, 201 bp, Homo sapiens
cacacattcattcgtgaggcctgtctgccgcgctttctctcccggatgtgagttccagcacatgcatgcaccccctcactgccccccatccagagccacarcctgccctgtcggaatatgtccagccctaatgagggaggcgttgtcttcagatcacacactccgcagcggctctgctctgccgcgccccttcaggagcgc

SEQ ID NO: 107452 - DNA, 201 bp, Homo sapiens
cctatgtccttttaacattgtgctctctctctcctctgcttctctctttctctctctctcgctctttctgcccttccttactttctagtacaacaagatgytccaggctcatttaataccctctcaaccccagtcctggaatcaataatttctccagtgaactcttacagtggagaatggtatttagaaaccaagatctgg

SEQ ID NO: 107453 - DNA, 201 bp, Homo sapiens
ccatccagagccacagcctgccctgtcggaatatgtccagccctaatgagggaggcgttgtcttcagatcacacactccgcagcggctctgctctgccgcrccccttcaggagcgctgggtctgagagaggacttcagaaataacgggggcaacgttccgctttgatgctattattagaattttccaaacaccgcttgttt

SEQ ID NO: 107454 - DNA, 201 bp, Homo sapiens
gctgctagtgccattgtacgggaagctcaatggcatttatctggtccaaggtcattcaacaagaacaggttgaaatcaccctcagaccgaagagccggccrtctgtgcattttgcttttcccgcagttcagccgggactctgcttcacggatgctttcacctcaaggacagcgaagccagacacacaggccctgcgtggtt

SEQ ID NO: 107455 - DNA, 201 bp, Homo sapiens
aagtaattagaattgttgttcatacctgacttgcaggaatgtgtgtgcgtgtgtctgcatgcgtgtgtacgtatatatactgtgcatgcatatttgtgtgygtgtacatacatatgtacacactgcatgtgtctgcatttatgtacatatgggcatgtggcatgggcatatggcacatgcgtatctgtgcatgcacacatg

SEQ ID NO: 107456 - DNA, 201 bp, Homo sapiens
acaggttgaaatcaccctcagaccgaagagccggccgtctgtgcattttgcttttcccgcagttcagccgggactctgcttcacggatgctttcacctcamggacagcgaagccagacacacaggccctgcgtggttgggggcgagagcatttttccatagtcagtgggctattccgaagctaagagaccgtttccttgaa

SEQ ID NO: 107457 - DNA, 201 bp, Homo sapiens
aggttgaaatcaccctcagaccgaagagccggccgtctgtgcattttgcttttcccgcagttcagccgggactctgcttcacggatgctttcacctcaagsacagcgaagccagacacacaggccctgcgtggttgggggcgagagcatttttccatagtcagtgggctattccgaagctaagagaccgtttccttgaacc

SEQ ID NO: 107458 - DNA, 201 bp, Homo sapiens
ctccaccagctactaaatcccccatcccctcaccaccaccacccccacccagcagtgaataatatgtctattatccaactaagaaatgtctgttgaaagamatttgaagaccttgtaaatctcctccttttcatcaaactcttcctcccctaaccacttcagcatccattcaggtgtcttctccaaacaaacctttactgc

SEQ ID NO: 107459 - DNA, 201 bp, Homo sapiens
gaaatcaccctcagaccgaagagccggccgtctgtgcattttgcttttcccgcagttcagccgggactctgcttcacggatgctttcacctcaaggacagygaagccagacacacaggccctgcgtggttgggggcgagagcatttttccatagtcagtgggctattccgaagctaagagaccgtttccttgaaccaaaag

SEQ ID NO: 107460 - DNA, 201 bp, Homo sapiens
attattttcaatttccttcttgaatttgctcaacccttgtttatatacatccttggccagaatacaaaaaccatgatgctgtcaccttctcagagtctctycgcagactcaggatatccatctgaccctcataagtgatgctagttttggtcacctggccaaggtgctgcctatttctccaccagctactaaatcccccat

SEQ ID NO: 107461 - DNA, 201 bp, Homo sapiens
aagctaagagaccgtttccttgaaccaaaaggctgattctttcctgctggagctcctgttttcatactcatttccctggggagtggagctgaggcgtgtgsactgttcccacccccgcctgcacccaataagctttgggggagccaaatagtgcttttcactggagcctgagtggatgcagggaggcacacatgcttcata

SEQ ID NO: 107462 - DNA, 201 bp, Homo sapiens
aaaaccacttttaaagaaaacgatttcaaacttaccaaaaaagttgcaaaaatagtgcagagaattcacctatgtcctttacccagactcgccattttaaratattttgccacttttttttatcattctctctctatatttttcttgaatcttttgaaagcagctcgtgtatgtcatgcccccttaacccttgatacttta

SEQ ID NO: 107463 - DNA, 201 bp, Homo sapiens
accgtttccttgaaccaaaaggctgattctttcctgctggagctcctgttttcatactcatttccctggggagtggagctgaggcgtgtggactgttcccwcccccgcctgcacccaataagctttgggggagccaaatagtgcttttcactggagcctgagtggatgcagggaggcacacatgcttcatagaagggaatc

SEQ ID NO: 107464 - DNA, 201 bp, Homo sapiens
tgttccattttccattcccaccacagtgagtgagggttcctgtttctctacatcctcaccagcatttggtgttgccagtgttctggatttaggccactctrataggtgtggagtagtatttcacttttgtttttatttccaattctctaatgacatatgatgttgagcatcttttcataggcttatttgccatctgtatat

SEQ ID NO: 107465 - DNA, 201 bp, Homo sapiens
  misc_feature (1)...(201): n = A,T,C or G
gtgtggggtctttaagatgtgccctccctcctgctcatcagtgcatccccagggccaagtgttaactctcctaagactcggtatgtattgaactgatgaangaaggtgtgcttgaagaacaagtcaactcattcagtgtctttgttcccctaggaggactggaatgaaattgaccccattaaaaagaaagaccttcatcac

SEQ ID NO: 107466 - DNA, 201 bp, Homo sapiens
tgcttttcatagaggccattctcatttatgaagggtcattagatattttatcggattggtaggtaccaatcccataaaaccattgggatggttaggcaccrtgcgtccagtgtacttctggataaaacaactggagcatttacatggcgggaaaaagaacaggtaatttgagaggccttcacattcaagagtggccatcaa

SEQ ID NO: 107467 - DNA, 201 bp, Homo sapiens
gatgtctggagagctaccttcattttaatggctttaatttaaccactctagaattatttcatttaatccactttccctatctcgcttccccaccctcacaratccccaaagccctgggagtttttggagtatttccttcccacagataagcaatacaaatataaaatgaagagagaaatgcaaacccttgggaaaggtcat

SEQ ID NO: 107468 - DNA, 201 bp, Homo sapiens
gatgatgctgacgagcttagtgaggacgtttatttgtgcttgctctcccttcctgcaggtacttctggggctggtctggcttgacttctctgacccaggamgggtcttgcttggagcagacctgcaggtcagtggtgacatcaggtgtgaatttttggactaggagtgtcagtcggggtgcagaggcacctggtgaggcag

SEQ ID NO: 107469 - DNA, 201 bp, Homo sapiens
aaaccacctaagatgtctggagagctaccttcattttaatggctttaatttaaccactctagaattatttcatttaatccactttccctatctcgcttccscaccctcacaaatccccaaagccctgggagtttttggagtatttccttcccacagataagcaatacaaatataaaatgaagagagaaatgcaaacccttg

SEQ ID NO: 107470 - DNA, 201 bp, Homo sapiens
aacatctgagcccctatcctgtcccgtggaacactgggcatacagatgagcgaggccctttgttttgggttaaatgaaggttgccccgtggaggctgttaraggatgctaggtggaaactctatttataaaccacaggcttcaagcagttgcagttttcctgcccagtccactgccactgggccatccctgtgtacaggtt

SEQ ID NO: 107471 - DNA, 201 bp, Homo sapiens
ggggcacttaaaggccaggaaggtgttctgctgggtgggtggggcttggacccccggctgcagaatggtttctctcaccagcccgccaaggctacagttcytcccttcctgccattttcacggcagccctgatgtgataaacccagctgtatcgcctcattagagaagcaacggaagcaaaagctagccaagagatggggg

SEQ ID NO: 107472 - DNA, 201 bp, Homo sapiens
tttttagtagagacagggtttctccatgttggtcaggctggtctcaaactcccaacctcaggtgatccgcctgcctcggcctcccaaagtgttgggattayaggcatgagccactgcgcccagccgacaacttcttaggttgtgttgggaactgtaaaaagtaaagtcggaaactttcactgcttatgcttatgtgattgt

SEQ ID NO: 107473 - DNA, 201 bp, Homo sapiens
cttggtaccttgtcatgccctaattatatgggcatgaactcaccctgcactagttttatagtaggcatcgttgattggaaggaagaagggaggttgaggartgctcaccctgcactagttttatagtaggcatcattgattggaaggaagaagggagggtgaggagtgttacctgtgggcaaatcaatcttatttgtgggc

SEQ ID NO: 107474 - DNA, 201 bp, Homo sapiens
ttccatcccagggagggaggtatttcacctgggaaggtcctggctgggagctgtcttctaccccttctttatgcagcgggctctaagccagcatctggcamcgccctttccaaaccagtgcacactctccccatagggaaggggcctggcctgctggggcatgcttagtttctgtattttaagagctccctcatctgatga

SEQ ID NO: 107475 - DNA, 201 bp, Homo sapiens
ttgagaatcaggctcttataatttagtttaaatcgagccctagcctgtcattcccactctgacttacataaagggccagatttagctttttaccagctgcrtaacctggacaaattgcttagcctatcttatgtgtcctcattgtaagacaggaattataaaatgcaggaatgagagagggtcaatgcacaatgcttggcg

SEQ ID NO: 107476 - DNA, 201 bp, Homo sapiens
ttgcctcccttaggtctccaccgaggtaccacttccgtgtacagccttcctgggggccctgttctacgcggggcctgtgcctctgggccgttgttccccaygcttgtctgtgggtgtctttgcacagcacaggccaagatgcctggcccctgctgtgtctctaggagctgactttcttaataccaggccaaggccttcggt

SEQ ID NO: 107477 - DNA, 201 bp, Homo sapiens
gggcagactcattcatagggctcactggcttgcatgagaagggatgctgggcacggtaaacacagaaggagaaggcaggctctgctgccaggagcttgcascctgagccacgtggaactggtttgcctgtgaagcaataggcacagtcctgaaagagcacagtcctgaaagagcacttctaattgggcatacaagcaagct

SEQ ID NO: 107478 - DNA, 201 bp, Homo sapiens
gcatcataaaatgctgtgaaaggggtcacaggtattgcccaggcttgggcagactcattcatagggctcactggcttgcatgagaagggatgctgggcacsgtaaacacagaaggagaaggcaggctctgctgccaggagcttgcaccctgagccacgtggaactggtttgcctgtgaagcaataggcacagtcctgaaag

SEQ ID NO: 107479 - DNA, 201 bp, Homo sapiens
tgaacacccactgctctgtggactcaagctggttttagacattgtttggtcaggaccagagccgagctctggggcccactgggggctcttgtcgcaccatmtcattgattctacaatgcacatttcccccgcctctcatgttttaacatgtctgaaatcaggatgcatcttccatggatggtgtttcagggtttcattgat

SEQ ID NO: 107480 - DNA, 201 bp, Homo sapiens
  misc_feature (1)...(201): n = A,T,C or G
ggatggatgaatacaaaaatttctattatgcagcagtgccttctgctagaaacgttccttatggaaagtaagtggcagttctgccttctcacaattactgnggattcttggggtgtgggggtgggaggtaaggggctgcccccagcgttgaattcagctacccaggtgccaaggcgggaaggggttgtgggcacaggagca

SEQ ID NO: 107481 - DNA, 201 bp, Homo sapiens
tgaaccaaaaggctgattctttcctgctggagctcctgttttcatactcatttccctggggagtggagctgaggcgtgtggactgttcccacccccgcctscacccaataagctttgggggagccaaatagtgcttttcactggagcctgagtggatgcagggaggcacacatgcttcatagaagggaatcagtgatctgt

SEQ ID NO: 107482 - DNA, 201 bp, Homo sapiens
ttcatactcatttccctggggagtggagctgaggcgtgtggactgttcccacccccgcctgcacccaataagctttgggggagccaaatagtgcttttcaytggagcctgagtggatgcagggaggcacacatgcttcatagaagggaatcagtgatctgtcccgctgctctggggctccagcatggagcttcacgtaggc

SEQ ID NO: 107483 - DNA, 201 bp, Homo sapiens
atggagtaaagtgaaagcgagtttattaagaaaataaacagggccaggcatggtggctcagagcgcctgtattcccagcaccttgggaggccaagatgggyggatcacctgaggtcaggagtaagagaccagcctggtcaacatggtgaaaccccatctctactaaaaacacaaaaattagccaggcatggtggtgcgtgc

SEQ ID NO: 107484 - DNA, 201 bp, Homo sapiens
agagaccagcctggtcaacatggtgaaaccccatctctactaaaaacacaaaaattagccaggcatggtggtgcgtgcctgtaatcccagctacttgggargctgaggcaggagaatcgcttgaacccaggaggtggaggttgcagtgagctgagatcacgcctctgcaccccagcctgggcgatgcagcgagactctgtc

SEQ ID NO: 107485 - DNA, 201 bp, Homo sapiens
tctgaccgagaagctcctgaaaacatttaatatatcaagttctaagtaaaatttctgtctttcttaggaacactggaagctttgcgtgttgcaagggcatyaccaaggttacatagattatgttacaagacagatcgttttcttgtatcgttaaagatgcttaatgtgctttttaaagaacgcaacgaatgagaaagaaaa

SEQ ID NO: 107486 - DNA, 201 bp, Homo sapiens
gtgttcacgccgtagtgtgtgttctgagtaaaaaccacctgtgtgcttaacgagtaggacttcataaagagaaaaaaaaataggcttgctcccttaaagarcttcctgggtttccctttctcctcttccttgaccttctgtcacttttgcgagccatgtggttccatgaacagatatggcgtcctttatgaccagagatga

SEQ ID NO: 107487 - DNA, 201 bp, Homo sapiens
tgaggcaggagaatcgcttgaacccaggaggtggaggttgcagtgagctgagatcacgcctctgcaccccagcctgggcgatgcagcgagactctgtctcaaaaaaaaaaaaaaaaaaaatgaaacagaagaaagaatggccactccataggcagagcagtggcatgggcagcttgactgagtatacttatggttatttct

SEQ ID NO: 107488 - DNA, 201 bp, Homo sapiens
actccataggcagagcagtggcatgggcagcttgactgagtatacttatggttatttcttgatcatatgctaaataagaggtaggctttttatgagtttcstgggaaaggggcagggattttcctggaactgaaggttcctccctcttttagaccatctacggtaacttcctgacgttgccatggcatttgtaaactgtca

SEQ ID NO: 107489 - DNA, 201 bp, Homo sapiens
gaccataaactccagccctgagctccccagggtgtggatccagcctcatacgaacactaaatgttcagtgccttggcttcctcacctgtaaaattggaatrgtaatagcattgcaggaagatgagcatatgtgcagtgtccagagtggggcttggcacctcgtaaatactgtgttaggcagcagtcaccatggtggttcct

SEQ ID NO: 107490 - DNA, 201 bp, Homo sapiens
caagtgggattacatgacgcctgagcagagaaggtcccggcaggggaacccagtcgcccctataaagtaagtgccagcatccttcagggtgcccctcccakatgagaccccaggttccagcttctttgctgggcccgcaccgcctggagacccagtgggggctgttcaccttctgccctccggtttcccctcgtctcagct

SEQ ID NO: 107491 - DNA, 201 bp, Homo sapiens
gctccagacccgggctgggttccttactttgtttttaatccttaaaagttggtaaaatacatacatcataaaatttgctgtcttaaccatccttaaatttrcagctcagtatcctcacgcatccacagaactctttcatcttgcaaaactgaaactctgtctcattaaacactgactcccttctcccctcccctccccctg

SEQ ID NO: 107492 - DNA, 201 bp, Homo sapiens
tggggcaagtaacttaacctctgtgtgcctctgtttcctcctttgtaaaatggggaaaaaagtagtacctacctgctagggctcttctgagggtgacctgsgttaatataattaaatatacctagtacgtgcatagtaagcaccatttaagtgtctagaacattatgggtaaaaatacgcctgtgctttggtgagtctgga

SEQ ID NO: 107493 - DNA, 201 bp, Homo sapiens
gtggattctgggaattggggtactgggcactgtcagccccattccctgtgagcatctgggctttgggcaaggtcctcactctctctggctttcagtttctstgtgtgaaaaatcaggggaatccgcagcctgagagcttctctggaagatgtagttattttttggtaagagatgtccagtcgtttgcagcagctgctagga

SEQ ID NO: 107494 - DNA, 201 bp, Homo sapiens
taggggccgaggagaaagaggtcgtctgtcggcctgaacacttccttggttttttcttggctttacgcagcatgttgcttttcacatgggaaagtgtcaaycccacgctcttattaaagcattgagttcttccaggcctctgttgctgctctgataactgaaagggtattgtgcttgtctttatctgccacacgcacgtgg

SEQ ID NO: 107495 - DNA, 201 bp, Homo sapiens
cttcttgcctcccttaggtctccaccgaggtaccacttccgtgtacagccttcctgggggccctgttctacgcggggcctgtgcctctgggccgttgttcmccacgcttgtctgtgggtgtctttgcacagcacaggccaagatgcctggcccctgctgtgtctctaggagctgactttcttaataccaggccaaggcctt

SEQ ID NO: 107496 - DNA, 201 bp, Homo sapiens
cattgttccttcttgcctcccttaggtctccaccgaggtaccacttccgtgtacagccttcctgggggccctgttctacgcggggcctgtgcctctgggcygttgttccccacgcttgtctgtgggtgtctttgcacagcacaggccaagatgcctggcccctgctgtgtctctaggagctgactttcttaataccaggcc

SEQ ID NO: 107497 - DNA, 201 bp, Homo sapiens
tcagaaacctggggccgtctttgattcttcttccccttcgcactcctcctgctgcattgccagcccctcctagctgcacctgtctccgctctgtccctccrggacctggactgggtccagcatgccatcttcccattgctgcattactgaaatggcctcctgggctctcttgtgccctctagtctgcccccaccttatagc

SEQ ID NO: 107498 - DNA, 201 bp, Homo sapiens
gctctggctccgaggccagtgctgctccccacgtgtcatgcggggtctcctcctttcctacttgtccctgcagcattggcctctcctctcccctgcactgrcacctcaccttccctgagtggtctccctcctgctcaccagtagctttaattacccggggccttttcacaaccccagatttgtgcctccatctgtttgcag

SEQ ID NO: 107499 - DNA, 201 bp, Homo sapiens
ttattattgagcaactattgtaaggccaccagcgcacttggtaccataaggatacagaaggaatatgacagctttccttaccctcaaagaacctgaaatcyttttggatatcaaacatgggcgaagcaggtagcaaatgtaaaagacccccaagtgctaactgaatgtatcacctacacaagaacactgggcaggcaggga

SEQ ID NO: 107500 - DNA, 201 bp, Homo sapiens
tgagcggcactgatgctagtgtaaataagtcttataatgtatgtaaatgtatgggagggggattgtaacgaaaaacttccactgcagagtaggcgaagccrgtacaatcaatctgagtaagtagggcgaggatttttttttttcagctgcatttattattgagcaactattgtaaggccaccagcgcacttggtaccataa

SEQ ID NO: 107501 - DNA, 201 bp, Homo sapiens
ggccgcgatgatgtcgtagttcacggtcacaggactgtcactgctgttacaaactggcccttctgctccgagtctgctggtcctcatacggttcctttctrtctctggttgtgttggttaagacagagtagctgcaatcagggagagtgtcgaccctgaccccaacaagcagggagagctagtgcagaatgtgggcagtgg

SEQ ID NO: 107502 - DNA, 201 bp, Homo sapiens
ggacctgtctgtcactgcatcagtttccccttaaaagggagaaaacacacagatctgttggtagcacagccaggataccagtggctactgggcgcaagagmcttcttcatacatttgcattcagtacatttccatttttgagcggcactgatgctagtgtaaataagtcttataatgtatgtaaatgtatgggagggggat

SEQ ID NO: 107503 - DNA, 201 bp, Homo sapiens
ctccgagtctgctggtcctcatacggttcctttctgtctctggttgtgttggttaagacagagtagctgcaatcagggagagtgtcgaccctgaccccaasaagcagggagagctagtgcagaatgtgggcagtggcagcagacccgcggggctgtgacactgtcctttctgtggcttgggtggacttcagggtgacccat

SEQ ID NO: 107504 - DNA, 201 bp, Homo sapiens
gttttaggatacataattttgaaccagattaaaatgtctaataacaataatcactaccatctggggtaagttagtaagtaggagaagacttagagttctcwttctctggcccagatgccatttacaaagggagcgaagaccacagcgctgtactttagggcatctaggtctttccagaggctgcgtgtggatgcatccaat

SEQ ID NO: 107505 - DNA, 201 bp, Homo sapiens
catctagcagagtaaaaatagtaaccccacatgctgaccatgtaccccctgctttcacgcacttttatgggtgaattcacctatccgttatagaaactccrtgaggcgtttttattatccccattttacagatgaagctgtcagggagagaggttgagttgccggcagtctcacatgtagaagtggtgaagtgggaattca

SEQ ID NO: 107506 - DNA, 201 bp, Homo sapiens
gcagtctcacatgtagaagtggtgaagtgggaattcagacccacccctgcgggctcctcagccaggcctgctcttagcatcccagtgtgctgctctgtgaygagccccagtattgggatccactctccagatgaggtttgaagagttccgaagtggaacgtctttctgggttggctggctgtagaggggttggtgactcca

SEQ ID NO: 107507 - DNA, 201 bp, Homo sapiens
ttgtgtttctatttagatcttttgttttaagctacccaatcctttttggaataatatggggtattattaaagtaagactaaccagcaaaattctgtaaaawttaaaaaaaaaatcttggcgcttccagttcattggttttgctggtaagattcaggattatagtactgttgaacaagcttgtatagacgtgaatgagtttc

SEQ ID NO: 107508 - DNA, 201 bp, Homo sapiens
ttccttttaagacgattctagttactgaaccaaagatattaattatgtgcttatctgtggtaattacaactaaagcattctttatcactgcagcttagtcrtttgcttacgtgatttaaatgtgatatatgttaatatgcatatctcgtcaaagggagtcatgggggtggcatggttagagcatgctggctgagggcagga

SEQ ID NO: 107509 - DNA, 201 bp, Homo sapiens
cagcaggacgtgagcagtggatgagcaaacattaccgcctgagctccgcctcctgtcagatcagcatgggcattagattctcataggagcacgaaccctaytgtgaactgcacatgcaagggatctgggttgtgtgctccttattagaatctaatgcctgatgatctgaggtggaacagtttcatcccaaaccatctcccc

SEQ ID NO: 107510 - DNA, 201 bp, Homo sapiens
gtgtcacttgctctgaccaccgttgacatcgcagcacagcgctgcacacccgtgacagggtgatggtagaagatgagggtcggattgtccacgtagtgcckccaggaagctcaggatgatggccaagccagatatgtaaggtggctttggggcacaggatgatgccctcgaagtaatgcatggtctagttgttttgtaaac

SEQ ID NO: 107511 - DNA, 201 bp, Homo sapiens
tagcatcccagtgtgctgctctgtgatgagccccagtattgggatccactctccagatgaggtttgaagagttccgaagtggaacgtctttctgggttggytggctgtagaggggttggtgactccagtgtcctgtggtggtagacagtctccagccaagggcatgtacttctcacctccctgcctcgtgaatctggtcag

SEQ ID NO: 107512 - DNA, 201 bp, Homo sapiens; identical to SEQ ID NO: 17437

SEQ ID NO: 107513 - DNA, 201 bp, Homo sapiens; identical to SEQ ID NO: 17414

SEQ ID NO: 107514 - DNA, 201 bp, Homo sapiens
ctttcttgcttgtattctgggtaggtagacatttaaagtagagatttggcataacttagttcttccagaaacttcaagcactttacactcactctttttascccaggtttgaattatgtggggtcattcatggggtttatgaggtttgaagacatacttaaataacatgtgggttctctagaatgaatgtggaaggaaaca

SEQ ID NO: 107515 - DNA, 201 bp, Homo sapiens
gattctactgagggaaaaaatgaattcgcagccagggacagtggctcatgcctgtaattccagcactttaggaggctgaggaggcaggaggatcacttgakcccaggagttcgagaccagcctgggcaacagagcaagatcctgtctctacaaaaacagaacaaaccaacaattagccaagtgtggtggcacacacctgta

SEQ ID NO: 107516 - DNA, 201 bp, Homo sapiens
gaatgggggctttgactgcttggccctgactgtgcagttttctggatggaagcctgctgtcttctgagcacaaaggaatccatcgttttctttgcttccckaaggaatctattttcccagtggcagagcaacttagagaattcccagccagggccaccattctcaactcctcaggacgaggctggtgcacccggcatgcag

SEQ ID NO: 107517 - DNA, 201 bp, Homo sapiens
atgctcctagcacacgtccacaccttcagggcaaacgctctgtccccagacactgtccctgtttagttagtttcctaaactatgatcactcagcaacctcraggatagtcactgtattattacatacaggtgcagccctcttacatacctgtgtgtgtgtccagccccactggacacatgcctcccacttgcccacactct

SEQ ID NO: 107518 - DNA, 201 bp, Homo sapiens
acagtggctcacacctgtaatttcagctctttgagaggctgaagcaggaggatagcttgagaccaacctgggcaatatagtgagaccccatcttaaaaaamaattactctagtgtggtggtgtgcacctgtactcccagccgcttgggaggctgaaaggggagggtcactcgagcccagaagtttgtggttgcagtgagct

SEQ ID NO: 107519 - DNA, 201 bp, Homo sapiens
agaagtttgtggttgcagtgagctatgatcatgctattgcactctagcctgggcaacagagtgagactctatctctaaaaataaaaaattttatttactcygcatcacactcctgtaaagtgggtagggatgctatacttctgatgatgtcgtataccagttcccagaaggctcggaactcagaccccacttccagaaagt

SEQ ID NO: 107520 - DNA, 201 bp, Homo sapiens
ctgcctgttctctgaagggctaaacaagctgtggctgctctgggggtcattgttcagaggaccatctttctcttcctgcaggtgtcagcggaagcagtggygggtggatctgccggccaccagcgtggtgatcacgtttcacaatgaagccaggtcggccctactcaggaccgtggtcaggtgaggccaggagatgcatta

SEQ ID NO: 107521 - DNA, 201 bp, Homo sapiens
ccttgtatctagagagccttagtccccagggattttacagttactaagccatgaagttttatcacttgtctatgaggcagacgagaaaggtgagccacttrcctgagttctaacagggctcactggtggaggaattggagcactctgtatcctgggctcagggttctgtctaacagttgtggctcccttactgtccgctct

SEQ ID NO: 107522 - DNA, 201 bp, Homo sapiens
tcacaccaaagccatgtcattattcatcagcgtgcttgtttatgttttgtttttattttttgtgtctttataaaaccaacttctggtttcaaccacagacygttctttttcttcccttgatatgtttcctctttttttttggtctatttcaggccttctctctgtctgaattaaagaatgcattgagactggtataagtag

SEQ ID NO: 107523 - DNA, 201 bp, Homo sapiens
gcaccaaatgataaaagctcagagtagccggtgcctgcacgtgaagggcggtttgtgttcctcgctactggaagtaggattatggttgtaataattatgtsgacttcagtattttttccttaagaaagttttattgtgccaacatctgcaacaatagacgctgtatactcttaggtaccaagcacccaccaggatttcgcc

SEQ ID NO: 107524 - DNA, 201 bp, Homo sapiens
gacaatctttatcttttatatggtgtatttagttcttttacatttaatgtaagtactagtttattggggtttaacaccaacatctcactggttgtgttctmttagttccacctgctttgtgtttctttttcccttgcatcctcctacgttttttcttctctgttggtttgctaaattcttgactagtaagtccacatgtag

SEQ ID NO: 107525 - DNA, 201 bp, Homo sapiens
ccttgaggtgagatgtgtagtgatgtcaggctcctctcttgcttggtaacctacaaaccaagcaaggtgagaggcccggcggagcatcccaagggtctccygatggccactccagagctgcgtcatctgttttctgctgcagcatctgcaggctctcactcatcccgttacacttagagcgacccatgtgcctgtgggccc

SEQ ID NO: 107526 - DNA, 201 bp, Homo sapiens
ccatcactttgccccccgtcgtggaaccatgaaactgaaagaacaactttctttttcagtggaagggttttgtatattttaggaaacagtcaaaatactgkaaaatttattttaactttttttgtcatttaggctacgtatttcacttgaatatggtttcggagattacttgtgatgtttctaatgaacttaaaagaagca

SEQ ID NO: 107527 - DNA, 201 bp, Homo sapiens
gcttgttagcaggcaggttccagtgcagactggccgaatctgaatttctcagtgagcgtctcagaaatctgcactgtcagctcccctgacccctaagtttrtggggtttcctggccaggcctcagactctggcagtcgggcctgggccttctgagggggtttgtcctggaaatcctgtcttcccccaagggaagctccccc

SEQ ID NO: 107528 - DNA, 201 bp, Homo sapiens
aactatattgaataagccatgattttcttcatctgacaataatgtgagaaaatccacacctctttggaaattcaagttatttaaaaaaggaaatatcccartaggaatattgtacttggatttaaagttttatattcactgaagatttatttttattcttggatttatgcatttatttagcaaagatttgagtgctaacta

SEQ ID NO: 107529 - DNA, 201 bp, Homo sapiens
acccctaagtttgtggggtttcctggccaggcctcagactctggcagtcgggcctgggccttctgagggggtttgtcctggaaatcctgtcttcccccaarggaagctcccccaaaggaacccttttaggtgtctggtgtttgaagccagtcccccatttccctctgtttttgttgttatcacatactgtagggatggttg

SEQ ID NO: 107530 - DNA, 201 bp, Homo sapiens
ccttggcatagtgccaatgggggccttgccccgtgtggtgcctgatgcagcacagcaggacgtcaggcaagcccagacgtcaggcaggcccagaacgtcayctgtcttcttggtggcagtggttccatctggacttggaaataccatgtttgaaacaaggtccctgtaattacttaattgtaaagaaatgagaggtagcat

SEQ ID NO: 107531 - DNA, 201 bp, Homo sapiens
tgtacttggatttaaagttttatattcactgaagatttatttttattcttggatttatgcatttatttagcaaagatttgagtgctaactacatgacaggwgtttttctggtcactggggaaacagctgtgaacaaaacattaaaaaaaaactctgccgtcatagagctcacattaagaggatgggggagaaaacaataaa

SEQ ID NO: 107532 - DNA, 201 bp, Homo sapiens
tcctgggctcaaatgattctcctgcctcagccatctgactagctgggaccacaggcacgtaccaccacgcccagctaatttttgcattttttgtagagacrgcgtttctccatattgcccaggctggtctcgaactcctgggctcaggcagtccacctgcctcagcctcccaaagtgctgagattacaggcgtgagccact

SEQ ID NO: 107533 - DNA, 201 bp, Homo sapiens
atgagctgcccaagtggccttggtggctttctgttctggcatccctctcaaattaaccccttcctctcattgccactcttggtccagtcccttgtcctccsttctgagtcactggacctgcctactcagatctctcagtacctctcccaggcttgtattctgcatgcccctcccacacaagaactaacctatggtgaggac

SEQ ID NO: 107534 - DNA, 201 bp, Homo sapiens
ctccatattgcccaggctggtctcgaactcctgggctcaggcagtccacctgcctcagcctcccaaagtgctgagattacaggcgtgagccactgagcctrgcctacttgtttaattcttgattgcttgatttcagaaggtgctgcttctgcttttatggctcctgaagtcattttatggtcttgaccttgtctctcctgg

SEQ ID NO: 107535 - DNA, 201 bp, Homo sapiens
tcagaaggtgctgcttctgcttttatggctcctgaagtcattttatggtcttgaccttgtctctcctggagcgggtgggaggacattgcgaggccacctarattggacttgtgtggttgagcactgggttcaggaacatccctggagggtgggtgatggttgctgcctgcttgctgttttatagggtgtttctcttacagg

SEQ ID NO: 107536 - DNA, 201 bp, Homo sapiens
gctccgccctggggccaggagagccatcgcctgcttggtgactgcaaagctgcctacctccgtgtgctgccgtttttctgtaccgaagcttccctctttayctcaccataggaagcctgagatgtaacactcagaagaggcttgacaggcttggaatcaaaggcatgacttcatacatcacccaaggtgtcatatttcttc

SEQ ID NO: 107537 - DNA, 201 bp, Homo sapiens
ggggcacaggatgatgccctcgaagtaatgcatggtctagttgttttgtaaacagtgctgtttcctgaagaagcaatgattttctgactacccggcctccscaagatagccctgggaggagaatttctgattctctctacagcagtgccttcttctgtaggatctccccacatgtccctgtgcccaccacgtaagctaagg

SEQ ID NO: 107538 - DNA, 201 bp, Homo sapiens
gacgtctctccacacacgcccatctctctttcagagccccctctgggctctgactccctgatcgggggccaccctcctctctcttctctcctgaaacgggrcctttttctatgggcagttccctaccatctgcttacagctagatttttacaaatacagcactgtggtgtaccatctctgcttgggcgatatatcgggaac

SEQ ID NO: 107539 - DNA, 201 bp, Homo sapiens
atgggggagccccacgccattaccccccagacccagggcttctatgccatagcggggagggaggagtggttccaaagggatacgtaggacaattgaagtawgataacatcaaggttgtttgatctgagggcaggatttactgtaagcacctgctcttacacaggaatagtagataaatgggaagtcttagaggccttcttg

SEQ ID NO: 107540 - DNA, 201 bp, Homo sapiens
ggggtggtagtggtgtgttttaaagcaaatctcggatgttatttttcttcttgtgatgcttacttcaaagtaagtaccactaaccttgtgccagtgttctyatgtggggcgaggattaattaaagactaagggatttgaagagcaactataaagtattaaaaagcctgggagtaggtggttgatttggggcagaggttatg

SEQ ID NO: 107541 - DNA, 201 bp, Homo sapiens
taattcttgtttctattacttattttacttctgtctctgggaagttcagagtttaaaaattcaacttgaccacagcatctttacttggtcatttctgcaaycaccatgttccatttcttttgtgtttctatttagatcttttgttttaagctacccaatcctttttggaataatatggggtattattaaagtaagactaac

SEQ ID NO: 107542 - DNA, 201 bp, Homo sapiens
ctgttggcctgaagcattgtcatggccttgcccaggtttgctttccttaagggcaccatttggtcccttttgtcaaacccatttgcttacacaggctgctrcactatttctatgattgcaattccagagtttccgagtcccgggatgggggtgtctgatgttagtagcatgccatggtcagatgtcttggggaatctgggg

SEQ ID NO: 107543 - DNA, 201 bp, Homo sapiens
atgactttatttggatggtgagcatatggttggttggagcacaggcttcaaagtccagcctgaattgagattctgacttgctctctgaccattgtgccttkggcgggtgactcacatccatttcttcatctgtgaaatggatatgatgatacttgccttcctgagattgttgtgaagttaattgagactatacatgaagtc

SEQ ID NO: 107544 - DNA, 201 bp, Homo sapiens
gatgcccagggtatctttttattccttttttttttttttttttttttgagatggagtctcgctctgttgcccaggctcccaggctggagtgcaatggcgcracctcggctcactgcaaactccgcctccgggttcaagtgattctcctgcctcagcttcccgagtagctgggattacaggcacctgccaccacacccggct

SEQ ID NO: 107545 - DNA, 201 bp, Homo sapiens
cagtagcatagaccagcttccttacaccatggtggtctcagggcagcattctaagagggcatgtccaatgtgcaggtgtgtattaagcccctccttgcctygtggttgctggcatccaattggccaaagcaaatcacatggcctagtccagaggccgactccagctgtctgtgcagacgtggcaaagaaatatggccactt

SEQ ID NO: 107546 - DNA, 201 bp, Homo sapiens
aggctgggaaaaacgtgtctatctgtgagtttttaatgcagccacaaggtcctgaattcacacgaatctgtttgtactcctttgcttgtgcccacactctraggcactctcctgtgtcttgcagaaatgggaacagatcgagggcaactccaagctgaggcacgtgggcagcaacctgtgcctggacagtcgcacggccaa

SEQ ID NO: 107547 - DNA, 201 bp, Homo sapiens
cacctcaggcgatctgcccgcctcggcctcccaaagtgctgggattacaggcgtgagccacagcacccggcgtttttattcttaaaataatcctgtgaggygtatgtagtgttcacctgattttgtaaatgtgtaggcacagggaaccgaataacttgctcaagatcacaaaggctttaagtttgagaagtgcagtgaaaa

SEQ ID NO: 107548 - DNA, 201 bp, Homo sapiens
tgtagtgttcacctgattttgtaaatgtgtaggcacagggaaccgaataacttgctcaagatcacaaaggctttaagtttgagaagtgcagtgaaaatgcrgggctgcttcactccaaagtcgatgtgtgtatatgtacatataagtgtatatgcatgtgtacatgtacatataaacaaaagtacacatttaggaagtgta

SEQ ID NO: 107549 - DNA, 201 bp, Homo sapiens
ctaaatgtgtcatatggcaagggtgcctcattgtaattctggctttttccataaatgttaaacaagcatcttctcccaccgccagtccttttcttccttcraggggacagggcctctggagcttatgcccagctcctgtcggatgcccccgtgttctggtcactcgtgtgcccatctcttcacactcagttttcccacccc

SEQ ID NO: 107550 - DNA, 201 bp, Homo sapiens
gggtcaggtaactacgatcgaacctgcacgcattgttttagtgccacgttgattgggtcgcgcctgatcatttgcttctggtctgactgtcccagatcccygtcagcacatgtctggcaccagccatcctctgataaccctgccatagagctccaggagagagtggggcctgttcctggtggcctgagttgttgaattgta

SEQ ID NO: 107551 - DNA, 201 bp, Homo sapiens
atggtgaggacacctggatccccctcctgggccctgcatagatggcctgcagtagccggtcctgcctccgccacccacttacctttcttgagacttctgaygtggatgcattccagatgtgggggcattctttgcaaagtgcttgtggctgtcttcattcatggtattctccactgcccttctaaacctttctaaatgggt

SEQ ID NO: 107552 - DNA, 201 bp, Homo sapiens
aggagaacagtcatcaggtcaggttttactgccacataattcagatcatggcaggctttgccaccaaatatgatacagatttttttccaaggtgtttttgtttttttttttaatgttggaatcaaagattaggaattatggaccctcgctaggtaaataaagaagaataccattgattctgctgccacatgataaacagcc

SEQ ID NO: 107553 - DNA, 201 bp, Homo sapiens
aataaagaagaataccattgattctgctgccacatgataaacagcccactccggaggcaccagagcctacttttgggttgctatgctgtagatgaggggarcagggcataaagggagttgaaactcccgggatggtcttcagcttgatatcctgcagggcctctggtgcacaggttgcccttgagattggttagcacccag

SEQ ID NO: 107554 - DNA, 201 bp, Homo sapiens
agtattttttccttaagaaagttttattgtgccaacatctgcaacaatagacgctgtatactcttaggtaccaagcacccaccaggatttcgccatgcttrttttgtcttttcctgtttatgcctgtgtgtgtgtggtggggagttaggggtggtagtggtgtgttttaaagcaaatctcggatgttatttttcttcttgt

SEQ ID NO: 107555 - DNA, 201 bp, Homo sapiens
tgtctgcaaagaggcatcccctggaggccagcgcatggtggtgccatcaaacgaaggtacttttgttagggttggtccattcttgggcttaatcagacccrccctaaggaaatcatggtatgatgtgacggtgatgctaatgatctgccttctattgttggcaaaccttatcttggccaaatattagctaaaatctctgaa

SEQ ID NO: 107556 - DNA, 201 bp, Homo sapiens
gaaagactactacactcggcttctctataaccagaggatcacagagccagcgtcacccgcagcaccaaatgataaaagctcagagtagccggtgcctgcaygtgaagggcggtttgtgttcctcgctactggaagtaggattatggttgtaataattatgtcgacttcagtattttttccttaagaaagttttattgtgcc

SEQ ID NO: 107557 - DNA, 201 bp, Homo sapiens
acagatgaaccagtgttacaggaaaggggtcccgatccagaccccaagagagggttcttggatctcgctcaagaaagaattcagagcaagtccgtagtgcmaagtgaaaagaagtttattacaaaagtaaaggaataaaagaatggctgttccatagacagagcagcctcgagagctgctggtcgcccatttctatggcta

SEQ ID NO: 107558 - DNA, 201 bp, Homo sapiens
aactggttttttctttaaagaaaaagctttttaaaagtagatacgtgtttgttgcacacaggaagaaaagtctgaaagcttcacattgtctctggtgaacrtccttcctaatttgtctcataccctctgatgttcgatgtatgtcattttctataaatacaatgacagtaaaatgacactgtatttgctgtttgcctgcct

SEQ ID NO: 107559 - DNA, 201 bp, Homo sapiens
accagtgttacaggaaaggggtcccgatccagaccccaagagagggttcttggatctcgctcaagaaagaattcagagcaagtccgtagtgccaagtgaaaagaagtttattacaaaagtaaaggaataaaagaatggctgttccatagacagagcagcctcgagagctgctggtcgcccatttctatggctatttcttga

SEQ ID NO: 107560 - DNA, 201 bp, Homo sapiens
ccagtgttacaggaaaggggtcccgatccagaccccaagagagggttcttggatctcgctcaagaaagaattcagagcaagtccgtagtgccaagtgaaaagaagtttattacaaaagtaaaggaataaaagaatggctgttccatagacagagcagcctcgagagctgctggtcgcccatttctatggctatttcttgat

SEQ ID NO: 107561 - DNA, 201 bp, Homo sapiens
cagtgttacaggaaaggggtcccgatccagaccccaagagagggttcttggatctcgctcaagaaagaattcagagcaagtccgtagtgccaagtgaaaagaagtttattacaaaagtaaaggaataaaagaatggctgttccatagacagagcagcctcgagagctgctggtcgcccatttctatggctatttcttgatg

SEQ ID NO: 107562 - DNA, 201 bp, Homo sapiens
tttcaccatgttagccagaatggtctcgatctcctgacctcgtgatccgcccgcctcggcctccctgcttttctctttaatgcattcatgtctgcctgttscctctgctttcctctgcactccccctgccccatgagagttgaatgttgaatgtttactttatgtctacttaattggtttctgagtgcagctttggctgag

SEQ ID NO: 107563 - DNA, 201 bp, Homo sapiens
tttctgcttatttctaagcatgaggggcttagaagatatatattcatggattatacccttattgacataaaattaccccactttatttgtttttcttttctttttttttttttttaatagagatgggctctcactgtgttgcccaggctgtccttgaacaagttttccttttttgccatacattttgctttgcataaatgt

SEQ ID NO: 107564 - DNA, 201 bp, Homo sapiens
tcaaagatgagggcaaggtttttcaaattgtaagttgtgactcagtagatcatgaaactaatagaggagaataacatcagtattcatgatgaataattaamtagaaaatactggagcacatcatacatgtaagagtaggtacccttttatgacaccgtatgtggatggatgggcgtgcatgtatttatataacgtatatat

SEQ ID NO: 107565 - DNA, 201 bp, Homo sapiens
ttgaacaagttttccttttttgccatacattttgctttgcataaatgttaatctcctactttatttcacttactcttgatacatttttgtatcttactgatttttttttcttttttggatgccattttgtcttaggtttatcttttgtaacacatatattttgatttttaagccaacctgatggtctaaagtttaatagac

SEQ ID NO: 107566 - DNA, 201 bp, Homo sapiens
gcattgtaagtcgaggagcatccatccctgatgggatatataaggatgagatttatgcacagatgttcctcagcttatgatgggatcatgtcccagtaaasacactgtaagttggaaacatctgaagtcgaaaatgcatttgatatacctaagctatcaagcatcatagcttagcctcacctgccttcattgtgctcagag

SEQ ID NO: 107567 - DNA, 201 bp, Homo sapiens
ttgcagtggagacataggcccttcgtccacagtggataagtttttctccacgtgggccacattcttactagaaaagaaaccccggccctttagctcatcaycctctgctctggctttccccgagttggtacagagctgatgccgttggtgtttttaagaaataatcttgagtcagaaggaatgtgccaaaccggcacaggt

SEQ ID NO: 107568 - DNA, 201 bp, Homo sapiens
agaggacttcaaagggagtacagtaaatacgataggcttgagtttcctgtgtcacagggaggataaacattttgttttagaacatgcttccgactcctatrcgttgcagaatgcagaagcctgcggtattcaagaaagctattttagacgaataatttcgaagtgagacaaacctaaagttattaattgagctaattcaaa

SEQ ID NO: 107569 - DNA, 201 bp, Homo sapiens
tgggggtggcatggttagagcatgctggctgagggcaggaggccagaggtgtctgcgtctccctcgtccatctcgttctcccctcccgccttccttccccwttcccctctctcccttctttctgtcccaccaggatttctttaaggtttgtgtttcatcaccatcatcctgtttgaaagtttttttttgttgttaatccat

SEQ ID NO: 107570 - DNA, 201 bp, Homo sapiens
accgcatatcgctagcccaggataagagcagaattccagatttgaagtacagtttctactgaaggcatattgctttcgcaccatcgtgaagtcagaattgttaagtcgagccatggtaagttggagaccatctgaataacaggatgagatgtagagcaggatatatatgttagaaacaaagtttcgcgaacagtgcaaacg

SEQ ID NO: 107571 - DNA, 201 bp, Homo sapiens
ccaaaccggcacaggtgagagatctctggacccccttatatttgcctattctgccccttctgagaaatttctgggagagaaggtagtattatgggacaatraagccctaacccccaggacctcagaatgtcactttatttggagataagatctttatagatataatcaaattaaaatgtggtcgtcagcatgggctctagt

SEQ ID NO: 107572 - DNA, 201 bp, Homo sapiens
tcccgctccaccagtagcctcccctgggcgttggaaggctctgccctctgatgggggtctccctgggagctgcggctgcggacccccgtagatgggatgcrgctgcccagtgtggtccttgcctttgcaggtgagcgggtgcagggaggtgcggggtggggtggcggctgcagcagtggtggttgggggccctgcaggctc

SEQ ID NO: 107573 - DNA, 201 bp, Homo sapiens
tttaaaaactgccttattcagagagggtcaagataaagaaattttagcttctttcaggatcttccaaaacagatcaggaatgactgaatcaggacagggtstcctcctttggggctgggagggacagggcaggactctcccaggacagtcccatgggcagagctaggttttgtgaggactggagcttttgtcatttgaaga

SEQ ID NO: 107574 - DNA, 201 bp, Homo sapiens
agagcaggtgtgcctcccacaggctgatgcagccgttctctgtgcagaggctgagccatcctaggagcagctgtggggtgaaagtgtccttccttaaactyagtgctcctgctcattctctcagtatggctaatagctcatttaaatatactatggtggtttttaatttttgtgactcattccctcccctcctcacctgtg

SEQ ID NO: 107575 - DNA, 201 bp, Homo sapiens
ttccaaaacagatcaggaatgactgaatcaggacagggtctcctcctttggggctgggagggacagggcaggactctcccaggacagtcccatgggcagarctaggttttgtgaggactggagcttttgtcatttgaagaccatttctaagagaaagagtgattataaacccaaaactgggctcccaagtgcatagcacaa

SEQ ID NO: 107576 - DNA, 201 bp, Homo sapiens
atgcagaactactcactgctgctggagtgcgctgttatattctttattaggtcctcagactttttctatgcctaagccttgagggtctctctcagctgtgyttttctgttttttttttttttgtcttcaatagatttttctagggtcttttctggtaaaaagagactgggaatgcaaatacattgagcatgagttgagagg

SEQ ID NO: 107577 - DNA, 201 bp, Homo sapiens
ttaaaatgaacactggttcactcgggaaatttttgcaagatcaaaaatggaagactgtgtcactgatgaaagggagagatagccagaatacaaaatctagrgctttggacctgaaatctggctgcaagatggttttttcctgtcttacctaagaagtggcccccaggattcacataccagtagcctctttttgttattctt

SEQ ID NO: 107578 - DNA, 201 bp, Homo sapiens
tcctcttgattgcaagcaaaagcagcctactgtgcaggctggcttaagcagaaaagggaatttattgtggggacatggtggggaggtgtctcattactgaraggaagaaggctggctggcctcagaaggcatgagaactgggacctgggtccagcccagtccatggtggccacagctggatctcagctctgctcctccagg

SEQ ID NO: 107579 - DNA, 201 bp, Homo sapiens
tggctttttccataaatgttaaacaagcatcttctcccaccgccagtccttttcttccttcaaggggacagggcctctggagcttatgcccagctcctgtyggatgcccccgtgttctggtcactcgtgtgcccatctcttcacactcagttttcccacccctgagcacctcaggtgccaaggtgtgtttgttgaactgaa

SEQ ID NO: 107580 - DNA, 201 bp, Homo sapiens
agcatcttctcccaccgccagtccttttcttccttcaaggggacagggcctctggagcttatgcccagctcctgtcggatgcccccgtgttctggtcactygtgtgcccatctcttcacactcagttttcccacccctgagcacctcaggtgccaaggtgtgtttgttgaactgaaattcttaagcctgctgagtacattc

SEQ ID NO: 107581 - DNA, 201 bp, Homo sapiens
tcccaccgccagtccttttcttccttcaaggggacagggcctctggagcttatgcccagctcctgtcggatgcccccgtgttctggtcactcgtgtgcccrtctcttcacactcagttttcccacccctgagcacctcaggtgccaaggtgtgtttgttgaactgaaattcttaagcctgctgagtacattctcagtttgt

SEQ ID NO: 107582 - DNA, 201 bp, Homo sapiens
tcacactcagttttcccacccctgagcacctcaggtgccaaggtgtgtttgttgaactgaaattcttaagcctgctgagtacattctcagtttgtcaagayagataaacaaataccttttttagatgatttaaaagattcttgacacagtcccagtggtgttttaacaacttttcaggtcctgatcagccaaactctgggc

SEQ ID NO: 107583 - DNA, 201 bp, Homo sapiens
ggcctaatgtacagtttttcattctgtgaatcaggaatagagcaacataaggggagcttctgcttgagacagcaatggcagcatcaaaataaacgtggcarttttggtcttcaagagtgaagttgtgtctctgaaattgtaagcccaaatggatcatttccttttttaggttttagaattccaggtttattttctggaaga

SEQ ID NO: 107584 - DNA, 201 bp, Homo sapiens
ttaagcaattaaaatggaggaccaagaacctaacccttaactctaacaatgggggtaaggctccttgggggcatcatctgtgtttctctacatccctgtcrtgcaaggatgatgctaagtacttccagggaatcatctgtttgtgctttcttaacggagtgtggtctgcagaggtcatgacaccttgcccagggtctcaga

SEQ ID NO: 107585 - DNA, 201 bp, Homo sapiens
tttactcactgaggctcatattgaggttaagcccgaggtccattggccttgctgagatcgtgtttagaacacagcactgtgcagtaagagactcctataaytctatcaaatttgcatttggaggaattgtaaagagcctctgttacctcctaggtgaggcagtccaggaaaacagttgctagaaggagctatctgcagaaa

SEQ ID NO: 107586 - DNA, 201 bp, Homo sapiens
gcacccagatgccttcctgcagcagccccccttttctccccagccaacatctgcaactgtgaacagatttccatcttcagccttggtggttggaaagaaaygtaagtcacctttttttctggttggttctggggcagatgccaccaggctgcagaggcagtctgtgtctgtggggctcaccagggcatgagttctgctccc

SEQ ID NO: 107587 - DNA, 201 bp, Homo sapiens
atagcagcgttggctggctggtccaaggtggcctcacgtgtcctatagtatttgctagctattgtctggggctcctcaactctccacatgccccagtagcrtagaccagcttccttacaccatggtggtctcagggcagcattctaagagggcatgtccaatgtgcaggtgtgtattaagcccctccttgccttgtggttg

SEQ ID NO: 107588 - DNA, 201 bp, Homo sapiens
aggattttgtctgtggttctaaggagacaagtaggtggcacacaaaaacagaaaatgaaagaacccatccctccaaaaccacacacacaaagccaaaaggaaaaaaaaaaagcacataattatcatgtaggcactgttgcagctaaccctgattttggcctcaattctgaaacaagttagctggtttagacaaacccctta

SEQ ID NO: 107589 - DNA, 201 bp, Homo sapiens
aatatcccaaaatgaaggcctcagaagcaaaagtttttcactttctcctgccctccagctgccagtctccttctccccaaggctgcccttagaagctagawtccctccatagaagctagaatccctcttccctaaaacaggtcctaggaaccagaacttgctttccccaaagccagccatcaaccctgaaaatgcagctct

SEQ ID NO: 107590 - DNA, 201 bp, Homo sapiens; identical to SEQ ID NO: 17441

SEQ ID NO: 107591 - DNA, 201 bp, Homo sapiens
ctgagagtgtttcaaatcatctaaagcattgccctcacataatttcaaagcaatattaatgtattaatttgagcctttaggtgctaagggttgtaagatgyaccatcattttgtcaattttaagatgcattccccatttcagagatgtcggaacaggaaaagccatgcatcctggaattggtgtttggtcctgactctcat

SEQ ID NO: 107592 - DNA, 201 bp, Homo sapiens
attttggcctcaattctgaaacaagttagctggtttagacaaaccccttattaggtaatggattgttattcattcctccccttctcctagtcatttactcygtgagagctgctcctacctgaccttccactgattttggtagcagcatctcccagagcgactgtttccttcttcagcagtgttccttactcagggtgtaag

SEQ ID NO: 107593 - DNA, 201 bp, Homo sapiens; identical to SEQ ID NO: 17419

SEQ ID NO: 107594 - DNA, 201 bp, Homo sapiens
tttcttaataggcttcagaaatcctggaatgcgtaattcaccagctcacagagttccacccatgtccccagtggcttcaaaatgtaaatgacatttgcagwgctgggaggtaggagggcgatcccgttccttccctggatctcagtcgcagaggtgctggctcatgtgcctgagtgcagcggctggcccgtcattactggt

SEQ ID NO: 107595 - DNA, 201 bp, Homo sapiens
gcgtgggctgggccacttcatgtatggtgaccacagggggtcagattgtggtagagaggaggaatgggaaatcaaaatctggaggaggcagagtttttttktttttttttttttaacctctgtgctatatggtccataccagagttccaggtctaaattcaagttatccagatgagtctaattatggctccacattagaga

SEQ ID NO: 107596 - DNA, 201 bp, Homo sapiens
gggatgcaggcacagactgggatgatttgtcccaaatgcagcttttctttccttctctagagtttctcatcaccagctgggtggctgcagggagggtgtcygaatccttaccaatacccatgaggccagggatggtcaggcccccagaaggcctcttagtactcttctggccatctggggccatctgtcctatagcatagc

SEQ ID NO: 107597 - DNA, 201 bp, Homo sapiens
accctccccctgccaccgaatatctgtatatgaatggagaaatgggctagcaagcaacagactgtattttaatatgttcctttgatttttcaaacttctgkccctgctggctaatttaacgcccccacaggctctctcggctcatctcacctggctgatgggtgcacatggagactcgcagactttcaggtgctgtgttgg

SEQ ID NO: 107598 - DNA, 201 bp, Homo sapiens
gctgtgtgggggatgcaggcacagactgggatgatttgtcccaaatgcagcttttctttccttctctagagtttctcatcaccagctgggtggctgcaggragggtgtccgaatccttaccaatacccatgaggccagggatggtcaggcccccagaaggcctcttagtactcttctggccatctggggccatctgtccta

SEQ ID NO: 107599 - DNA, 201 bp, Homo sapiens
caagtggaacaccacgtagacctggcctctgggtggtgatgaccttctggggttgatgtctggagacggtgcggttttgggatgggggagcagaggagggagagagagagagagagagagaaagagagagagagtgtgtgtgtgtgtgtgtgtgtgttttacagcaaagacctggatcctgaatcttggggagaaaactcc

SEQ ID NO: 107600 - DNA, 201 bp, Homo sapiens
tctaaaaatgctgattaacaaaaatagagaagaaacattaatattaggtgtaaaaaagcagatataactaagatcataagaaaattaaaagtatacttttrtgtaaataaatttgaaacttacatgaaattgataattttctagggatatttaagttaccaaagtctcttaagaaataaaaaaatgaataagtgcaaacca

SEQ ID NO: 107601 - DNA, 201 bp, Homo sapiens; identical to SEQ ID NO: 17428

SEQ ID NO: 107602 - DNA, 201 bp, Homo sapiens
cctggcctctgggtggtgatgaccttctggggttgatgtctggagacggtgcggttttgggatgggggagcagaggagggagagagagagagagagagagaaagagagagagagtgtgtgtgtgtgtgtgtgtgtgttttacagcaaagacctggatcctgaatcttggggagaaaactccttgcattgtacatattgggc

SEQ ID NO: 107603 - DNA, 201 bp, Homo sapiens
tatatatgctatataatacagctatatatgctatataatacagctatatatatatatgctatataatacagccatatatatatatatacaagaagagtttrttttaggaatgtaaaaatgattgaatatcagaaaataatgtaatatatcttctcagtgaattaaaggagaatagctgtaggtcatattaatggatgcagg

SEQ ID NO: 107604 - DNA, 201 bp, Homo sapiens; identical to SEQ ID NO: 17429

SEQ ID NO: 107605 - DNA, 201 bp, Homo sapiens
ggtgatgaccttctggggttgatgtctggagacggtgcggttttgggatgggggagcagaggagggagagagagagagagagagagaaagagagagagagwgtgtgtgtgtgtgtgtgtgtgttttacagcaaagacctggatcctgaatcttggggagaaaactccttgcattgtacatattgggctggttacatggctg

SEQ ID NO: 107606 - DNA, 201 bp, Homo sapiens
cactcacctttactcaacatttctgggcctccatagtgattgtagtaattcggtaaagatgattcatttctttagtccggtcttcggacttgacttcttaraagcaggtcttgtgcaatagttgcatattaaccacttggtgacacagtgcatgagggtatgccaactctttttgctcatggccgtgcagtgcagaatttc

SEQ ID NO: 107607 - DNA, 201 bp, Homo sapiens; identical to SEQ ID NO: 17430

SEQ ID NO: 107608 - DNA, 201 bp, Homo sapiens
caggctggcttaagcagaaaagggaatttattgtggggacatggtggggaggtgtctcattactgagaggaagaaggctggctggcctcagaaggcatgaraactgggacctgggtccagcccagtccatggtggccacagctggatctcagctctgctcctccaggccaggtggctgctttctcctctctctgcagtggg

SEQ ID NO: 107609 - DNA, 201 bp, Homo sapiens
agataggatcaaggcaaggttgttttttaccacttttaaaaattgtatattgtgttgcaggccataatcactgccatcttaagaattgcaagatgtgtaasgaatggaaagacagggacagaatgtagatgtattgatttgtggaaaatctaagagaacctgcaaactgactatcagaacaaataagagagcacagtgagg

SEQ ID NO: 107610 - DNA, 201 bp, Homo sapiens
tgatgaccttctggggttgatgtctggagacggtgcggttttgggatgggggagcagaggagggagagagagagagagagagagaaagagagagagagtgwgtgtgtgtgtgtgtgtgtgttttacagcaaagacctggatcctgaatcttggggagaaaactccttgcattgtacatattgggctggttacatggctgaa

SEQ ID NO: 107611 - DNA, 201 bp, Homo sapiens
gcagaactgtcagatatggaggaataaatgcaaccaaagatgtgcaagactttcatggagaaaattgtaaaacataactgaaggatattttaaaatatccrgtattgtagaaatattaatttccttcaaattaactcataaattcagtgcagtgtcatgcagggttttttcatggaacttgaagagctgattcttaaattc

SEQ ID NO: 107612 - DNA, 201 bp, Homo sapiens
aatgtggatggatctctgtacattatgtgcattaagaagccaggtccaaaggctacatactgtatacttctattcatatgacattctggaaaaggcaaaaytacagagaaagcagatcaaggattgccaggggctggagaagagagttaactacaaatgtactcaggggagttttggaggatggtggcactgttctatatc

SEQ ID NO: 107613 - DNA, 201 bp, Homo sapiens
tagagcagttttgggttcacagcaaaattgagcagaaggtacagagagtgcctgtatacctgctaccccaacatccagcttcccctattagtttcccttcrcaagagttatagtccacaaacctacactgacacatccttaagtctcccaagtccacagcttacattagggttcactctttttttttttttttttttaaga

SEQ ID NO: 107614 - DNA, 201 bp, Homo sapiens
tttgaaataaaattcacaatatattaatgaccttcggttaagaaagcttttcctgaacattgttaccccagggtcacagtttgaaaactcaaaattaaaamgtaggtttgacaaaaagcatcataaacaaaattaaagcatctgccacagagatttttgcaatgcttctggctgacaaaggataatgtccagagcatataa

SEQ ID NO: 107615 - DNA, 201 bp, Homo sapiens
cagcattttgtgtcatcgtgtaggaagagtgttgatttacatatctaaggaggcattcacccagagactggggggtagatttgttgtaaggagctgctttmttgtggtttggtgtttgtatttattatgtagctgtgcctagaaggttctagggtctgagcggttcaggttggggtgaagatgaaccctgcaagcaggagc

SEQ ID NO: 107616 - DNA, 201 bp, Homo sapiens
agtactgttgaacaagcttgtatagacgtgaatgagtttccacattcttatagatttgactcaagtgatctttgcagattttcacaagcactgaagactarccagccttcctttaagtctcccagcacttaattcatctggtccaacacatgccgggttcttcagggtgttaggatgaagctcctgtatctgatcacctac

SEQ ID NO: 107617 - DNA, 201 bp, Homo sapiens
ttcccctattagtttcccttcgcaagagttatagtccacaaacctacactgacacatccttaagtctcccaagtccacagcttacattagggttcactctttttttttttttttttttaagatggagtctcactctgtcacccaggctggagtgcagtggcatgatctcggctcattgcaacctctgccacccgggttcaa

SEQ ID NO: 107618 - DNA, 201 bp, Homo sapiens
gtgaatgagtttccacattcttatagatttgactcaagtgatctttgcagattttcacaagcactgaagactagccagccttcctttaagtctcccagcayttaattcatctggtccaacacatgccgggttcttcagggtgttaggatgaagctcctgtatctgatcacctaccatattccacacattttccatacactc

SEQ ID NO: 107619 - DNA, 201 bp, Homo sapiens
aatagggcagtagccttatgcctaaacaatgtacggatcttaattttaaaatattttattactgaaaaatgctaaggatcatctgagtttttagcaagtcragtcatagtctttttgcccagatgttgatggctgctgactgatgacggtggtggtggttgaaggttgaggtggtggctgcgacagtttcttaaaagaaga

SEQ ID NO: 107620 - DNA, 201 bp, Homo sapiens
tgggaggccaaggcaggcagatcacgaggtcaggagttcgagaccagcctggccaacatggtgaaaccacgtctctactaaaaatacaaaaattagccagrcatggtgatgggcacctgtagtcccagctactcgggaggctgaggcaggagaatcgcttgaacccgggaggcggaggttgcaatgatccgagattgtgcc

SEQ ID NO: 107621 - DNA, 201 bp, Homo sapiens
tccttgacccctgcatttctaagtcagtggacacgtgaatctttggcttacagaaagataagaatcagctaaacatgttctttgaaactccgcattaaaamaacaacaacaacaacaacaaacttttgtcaaaggaattgttaaatcccccaaccttcatgtgcagtgaggtgagatccaggccccacttggaacaagttc

SEQ ID NO: 107622 - DNA, 201 bp, Homo sapiens
aaagaagacaacaatgaaatttgccacattgatggactcttcctttcacaaaagatttctttgtagcatgcgttgctgtttagcattttgcccacagtagracttctttcagaataggagtcagttccctcaaaccctgccacgtctttgtcaattaagtttattctgaatcctttgttgtaattttgacatgctcacagc

SEQ ID NO: 107623 - DNA, 201 bp, Homo sapiens
cacatacgtaactgcaatcgcacacgtgtagctcctctacaatgcctggcacttggaaaatccctggtaaatgccagttctgtgagggtggcatcactgtygctgttatttccatgttctgggttgggggcagaagggccgtcgggcccatggggaagtacccagtagaggccggtgctttgctttctctccttgtgtgtg

SEQ ID NO: 107624 - DNA, 201 bp, Homo sapiens
ctagttctcttggtgtttccaccacaactgcagttccttctccactctagtcttgaacccctcaaagtcatccatgaaggttggaatcagcttcttccacrctctggttagtgttgatattttgatcttttctgtgaatcacgaatgttcttaatggcaactgtaagggtgaattctttccagaaggatttcacttgactt

SEQ ID NO: 107625 - DNA, 201 bp, Homo sapiens
gcgattcttctccctcagcctcctgagtagctgggactacaggcgcccgccaccacgcctggctaattttttgtagttttagtagagaggtttcaccatgytagccaggatggtctcgatctcctgaccttgtgatccacctgcctaggcctaccaaagtgctgggattacaggtgtgagccagcacgcctggcctctcag

SEQ ID NO: 107626 - DNA, 201 bp, Homo sapiens
aggcacacaccaccacgcccaactaatttttgtatttttagtagagacggggtttcaccatgttgggcaggatggtctcgatctcctgatctcgtgatctrcctgcctcggcctcccaaagtgctgagattacaggcgtgagccactgtgcctggccacaaaatgtatttcttaaacaagacttaaaggttgaaattactg

SEQ ID NO: 107627 - DNA, 201 bp, Homo sapiens
actaagcttaatcattatcagcttttgatttaaggtgagagatgtgccgctcctcctttcacttgaacactcagaggccattgtaaggttaccaattggcytaatttcagtatcgtggtatcgcagggaatagggaggcttgaggagagggagggagatggcagaacagccagtgagtgggggagtcagaacacacaccat

SEQ ID NO: 107628 - DNA, 201 bp, Homo sapiens
tttagaagaattactaaagaactctattttgaccacttttgaaatgtctgcctttaacacagccaaaacataggtcaaagctcttaagggtgtattctttwatttattttttaggggcatttaaagagggcagacattgaaggcctgggttgtgctgtttactctcactggaatgtcagtattgatatcagttgttttaag

SEQ ID NO: 107629 - DNA, 201 bp, Homo sapiens
taatgaactctgcctgcccctcaccctgcctttatccgatcagcctatggtcagccctgtcctgtccatgaccaccctggaaatgggccccagaaatcatyttattttacctataaatattttagtgtgtgtctctaaaagatagtttgaactcacagtaccataaatcatacttaaaaacaattaacaagttccttaagg

SEQ ID NO: 107630 - DNA, 201 bp, Homo sapiens
catttcttgggtgtatctttttgacaaaattttccccccagggataaggaaaccagaaaaccacagtggatcagcgtgcaggaatgcataagggtggctctgtgtgtgtgtgtgtgtgcatgtacatacgtgtgtgtgtgtgttcatccgtgtgtgtgtgttttccttcagagcattttaaaggtctcagctattattaac

SEQ ID NO: 107631 - DNA, 201 bp, Homo sapiens
aatcctggaatgcgtaattcaccagctcacagagttccacccatgtccccagtggcttcaaaatgtaaatgacatttgcagtgctgggaggtaggagggcratcccgttccttccctggatctcagtcgcagaggtgctggctcatgtgcctgagtgcagcggctggcccgtcattactggtctttgcaggaagccactct

SEQ ID NO: 107632 - DNA, 201 bp, Homo sapiens
cccagatgagaccccaggttccagcttctttgctgggcccgcaccgcctggagacccagtgggggctgttcaccttctgccctccggtttcccctcgtctyagctcaaagatgagcaccttccaccaggtcatagaataaaatccttggagatttcttttccacagttgaagtctcacataggtttataaggcctatctgc

SEQ ID NO: 107633 - DNA, 201 bp, Homo sapiens
tgactgagaacgcctaacctcctgggaatgcagccagtaggtctcagcctcattttaccctattcaagatggagtcactctggttcaaacacatctgacaygagcactcagtgtctaccctcacgggggttatggtgtgaggagaccaacaagagcttctggctttttctagctgctacttcctgttgaccattgacagcc

SEQ ID NO: 107634 - DNA, 201 bp, Homo sapiens
ggttttagacattgtttggtcaggaccagagccgagctctggggcccactgggggctcttgtcgcaccatctcattgattctacaatgcacatttcccccscctctcatgttttaacatgtctgaaatcaggatgcatcttccatggatggtgtttcagggtttcattgatcgtgtttttcttcctgagtggcacacaaaa

SEQ ID NO: 107635 - DNA, 201 bp, Homo sapiens
ggtcctgaagtcccatgcagaactgcggggtggtcctgctgaagttcttgtggatgctgctgctgacctgtaaagaggcatggcaggtgcagtaggggccraggagaaagaggtcgtctgtcggcctgaacacttccttggttttttcttggctttacgcagcatgttgcttttcacatgggaaagtgtcaaccccacgct

SEQ ID NO: 107636 - DNA, 201 bp, Homo sapiens
gtaaagatgattcatttctttagtccggtcttcggacttgacttcttagaagcaggtcttgtgcaatagttgcatattaaccacttggtgacacagtgcaygagggtatgccaactctttttgctcatggccgtgcagtgcagaatttccaggcattgtccgctctgtttcctggacttcggagtgatagcaaagttttgt

SEQ ID NO: 107637 - DNA, 201 bp, Homo sapiens
caggatggtctcgatctcctgaccttgtgatccacctgcctaggcctaccaaagtgctgggattacaggtgtgagccagcacgcctggcctctcagccctytttctaattccaagggagaagggaggctacctgagattctacagtagtgcctggaccccaaaccttaaaagcagaggtcagctcacacctgtttctagaa

SEQ ID NO: 107638 - DNA, 201 bp, Homo sapiens
ctcacagcttgtccctgggtggcactggtcaacctgtcccagggcagcactcgagagggagggaggccctcggagtagccagagcccctggagagggctgrtagatgccccacagggctggaggtttctgtatggagtcctgctgtaggtcactcatattaggcatgatgtgaatgtgctccactcagctactgtgatctg

SEQ ID NO: 107639 - DNA, 201 bp, Homo sapiens
tgcttttggaatagacaatcttaaatgtcatagtgaggtgacttgcagagataaggaaggacgccagcctcaggcactgactgatgaatccagatggtgayttcctccttgcaggagaatcagccacttacacagactgggagggattctactgagggaaaaaatgaattcgcagccagggacagtggctcatgcctgtaa

SEQ ID NO: 107640 - DNA, 201 bp, Homo sapiens
aggctgagacgggagcattgcttaagcctaggagtttgaggctgcagtgagctatgattgtgccactgtactccaacctgggtgacagagcaagaatgttaaaaaaaaaaaattctcatttcttctcatggactttgtgtgtgtgtgtgtgtgtgtgtgtgtgtgtgtggttggttggttggtttaagccatggattaaag

SEQ ID NO: 107641 - DNA, 201 bp, Homo sapiens
aggccgaggcaggtggatcacctgaggtcagaagttcaagaacagcctggtcaacatggtgaaaccccatctctactaaatatacaaaaattagctgggcrtggtggcaggtgcctgtaatcccagctactctggaggctgaggcagaagaatcacttgaacctgggaggcggaggtcgcagtgagttgagagatcacgcc

SEQ ID NO: 107642 - DNA, 201 bp, Homo sapiens; identical to SEQ ID NO: 17425

SEQ ID NO: 107643 - DNA, 201 bp, Homo sapiens
agagagaccttggttctgaggcttatttctgaggtctgtgaatctccttctttcaaagcactcagcatgccaaagcaatataatttggggtatcattttckgagccgcagcaaagattttctgctgcttcaattccggtgccagtgtgtttaactgctagagttgcaggaacattgtgcagataataaatgccagcatgga

SEQ ID NO: 107644 - DNA, 201 bp, Homo sapiens
accttggttctgaggcttatttctgaggtctgtgaatctccttctttcaaagcactcagcatgccaaagcaatataatttggggtatcattttcggagccscagcaaagattttctgctgcttcaattccggtgccagtgtgtttaactgctagagttgcaggaacattgtgcagataataaatgccagcatggaggaaac

SEQ ID NO: 107645 - DNA, 201 bp, Homo sapiens
atattaggcatgatgtgaatgtgctccactcagctactgtgatctgattgaaataaccttttaagaaaagagcttgcaactgtggaaagaccactgttttrgatcaggttgacatggagtctgggctttgatgggactgtatgaaccaccttaacccctgtgtttacctgtctttaaagtgggctaataagccatgacagt

SEQ ID NO: 107646 - DNA, 201 bp, Homo sapiens
tttaaaagctgctaaaatgatgccgatgtacagtggaagttgagagcctagtactttcattttacagatggaaatactaaatctaaagaggctaggtggcyttctcaaggcccttacagctatttaatgacaatagtaggaccaaaaccatgttaataatgagataaatctttttctctgcatttgtggagatagtcaagt

SEQ ID NO: 107647 - DNA, 201 bp, Homo sapiens
tagaattatatatcatctcttaaaggacctgctgttcttgccttcaggaatgggaagttatcaccaggagctaagagctgacctgcttcataaactcttayttagacctaggaatgaggaaaagctgcatgcgagtggcatcccttgtgctcgctttctctgggctaaaacgtttaggatggtctggcagctcttgaagag

SEQ ID NO: 107648 - DNA, 201 bp, Homo sapiens; identical to SEQ ID NO: 17454

SEQ ID NO: 107649 - DNA, 201 bp, Homo sapiens
tcacacaatcacaaggtgaagccccacaataggccatctgcagccgaggagcagggaagccagtccaagtcccaaaacctcaaaagtggggaagctgacasttcagccttcagtcagtggttgaatgtccaatagtcccaaagctgaagaacttggagtccaatgttcaagggcaggaagcatccagcgtggaagaaagat

SEQ ID NO: 107650 - DNA, 201 bp, Homo sapiens
acctgtttttttccccaaaacttgagggttgctgtgtggattggctgtagtggtaattaccgaaaagtcatcaaataacagtgaaaactagacaactgatkagaagggaatcaagtagtcattcagatggtattttcggtaatttaatctgcctctgaccatatgttctagtcagctgaaataatttaacagtgacaacat

SEQ ID NO: 107651 - DNA, 201 bp, Homo sapiens
aggtttgggtctgctcttcggctgtttcttctctatttgtaccatgtgcattttgctttttgtaactgtgttcctgctttcttgccttcttttggattcartgatttttttagtattccatttgaattattcttgtagcttttcagcaatacttttcatgtatgcacagttgccctgagaattacaacatacagctctaac

SEQ ID NO: 107652 - DNA, 201 bp, Homo sapiens
agatgaagccacatttttgctgcttttgtgactcaattcttgggcttccaacacctcacagcccctgccccccacccctgtcccacacaaatgactggctrggtgcagcagtctctgccactagcaagccttatggcattgataaatgtagtggttttagaatattctaaatattaaccaattttttttattatcctcctc

SEQ ID NO: 107653 - DNA, 201 bp, Homo sapiens
atttcttgggtgtatctttttgacaaaattttccccccagggataaggaaaccagaaaaccacagtggatcagcgtgcaggaatgcataagggtggctctgtgtgtgtgtgtgtgtgcatgtacatacgtgtgtgtgtgtgttcatccgtgtgtgtgtgttttccttcagagcattttaaaggtctcagctattattaaca

SEQ ID NO: 107654 - DNA, 201 bp, Homo sapiens
tgttatttagctcctgataagtcttagaagacagagatagtcacaacactgttgcaaatattatcaccactaaaatcaacaccattagcactggaagtctytgggtgacaccttccttagcccagttagttagaaaactgctgctgtgtcagaggaatgtagttataaaagttccacattttggttagttgataaaggaga

SEQ ID NO: 107655 - DNA, 201 bp, Homo sapiens
agaataaaatccttggagatttcttttccacagttgaagtctcacataggtttataaggcctatctgctaggtctgtgcattcctgtatgttgataatgtrgagcgtttctgtagcagagcaggatctccgagctgaccccaggcccaggaaaaggggcttggtgggcagcaggaggcttactgctgctactgcccagcag

SEQ ID NO: 107656 - DNA, 201 bp, Homo sapiens
aagacattgtcattagatctatacaatgtcaagaatattacccggcctggatttaggtggaaatgaattaagtgcaagtactgataggtactttctggggrttaattttattattttcttctctttaattttgatgtagacatggagacagcagagggagagacaccaattcttaagcatgttgtgtgctggtgtgttgca

SEQ ID NO: 107657 - DNA, 201 bp, Homo sapiens
agcactttggggaggctaaggtgggaggattgcttgagcccaggagttcaagaccagcctgggcaacataacaagactcttgtctctattaaaaaaaaaaraaaaaattagctgcgtgtgatggcatgccagctactcggggctaaggtgggaggatcacttgagcctgggaggtcaaggctgcagtgagccacgatcaac

SEQ ID NO: 107658 - DNA, 201 bp, Homo sapiens
agcatctacagaccagtggtgggttgagtgtgggtgctccatcagccagtgaacctagtcagccatctttgtaggaatttatttctagtgaccagacataytctgagatgaatggttagtacaatgtcttaattgaactttggctatttagttgagggagggaggaagctatcttatctagaggcagtacagctaaatgac

SEQ ID NO: 107659 - DNA, 201 bp, Homo sapiens
gggatagtgggagtttctcatcagaggtcatagattttggtgggtaagagtgctgcttgcttagaggggttttggcagctgccttcaggcagtgagaaackgttaaggtaggaaggagaacagacaacttcggcttagatgagaaattgtgagcactttccaacagtgacatcccagtactctgtttaagtgaaaagctga

SEQ ID NO: 107660 - DNA, 201 bp, Homo sapiens
tgataattgtgctggccacacagggcataatggaattagacatcagcgggagggcgggcatgcttggaggactgtacctagggtgggaaacataacattcrggaacgattcccagcaaatggtgagaagtaaaatgtttggggacattaaagaggagggatccttagatagctagaaagcctggctttcagaatgttgtat

SEQ ID NO: 107661 - DNA, 201 bp, Homo sapiens
gagatgggggagtcttaggcacagtttctgtctaattaccgcacctcttgagtaaaaatgcagattattggcaaagcaagttgcatttggaaaaaatgtgycatttggcccaggccctgaggtttacccttctgcagatctcactttacgttttaagtaaagaaccaaaacgtctccagtggtgaacgtgcgtgcagcaca

SEQ ID NO: 107662 - DNA, 201 bp, Homo sapiens
gaggacggtgtgtgggctacagccaaagaggagcgaggagcagggaggccttttggaacagaaaccctgagccacacttgaagaatgatgaggttccctakatgagtgtgtgggggcaggggtgtgggggcaaccccagcagagctgtggagatggtgatgggaacttcccagagcaggagtgtggggttgctgtgctagg

SEQ ID NO: 107663 - DNA, 201 bp, Homo sapiens
ctaagagcattttatgaaattcctttagaaaaaaaatcaaggatgccattcttaacagatctttaatctgctatagcctctctctttggaccaaattaataaaataaataataagataatagtaaacatcaaaaaaacaaaggaaaggttatgtcagctaatccttaaccttctctgttagtgaaacagccaggacattgt

SEQ ID NO: 107664 - DNA, 201 bp, Homo sapiens
cccccaacacacatacaacctcctccattgtcagtatcccccaacagagtggtacatttgttacaatccatgaacctgcattgacacgtcatcatcacccraagtctgtagttgacattagggttcactctcgatgttacacattctgtgggtttggacaaatgcataatggcgtttagccgccattgtagtatcatacag

SEQ ID NO: 107665 - DNA, 201 bp, Homo sapiens
cggtgtgtgggctacagccaaagaggagcgaggagcagggaggccttttggaacagaaaccctgagccacacttgaagaatgatgaggttccctagatgaktgtgtgggggcaggggtgtgggggcaaccccagcagagctgtggagatggtgatgggaacttcccagagcaggagtgtggggttgctgtgctaggagagg

SEQ ID NO: 107666 - DNA, 201 bp, Homo sapiens
agcatggggccctcacgtggtttaatgggtgccaaaaatctgtgagcatcttggtggatgcggaggggaacacacataccactccttgccacctatcatcmgtttggagtttaaagaaagtccacttcaaatgagagtttgaagttgacacagggaggacagtagcagggaaaaccactgtatagccagataatccgacag

SEQ ID NO: 107667 - DNA, 201 bp, Homo sapiens
taaggttcctccatgtcttttcatggctggatagctcatttcttaatgaattaacattccattgtctgggtgtattagtttgtttattcacctagtgaagracatcttggttgcttccaagttttggcaattatgattaaagctactataaatatctatgtaccagttttcgtgtagacataagttttcagctcatttggg

SEQ ID NO: 107668 - DNA, 201 bp, Homo sapiens
tttctcatcaccagctgggtggctgcagggagggtgtccgaatccttaccaatacccatgaggccagggatggtcaggcccccagaaggcctcttagtacycttctggccatctggggccatctgtcctatagcatagcctctctgtcacatcgcactcaccatgtgcaggtacttctaaatgcaagtgcgctggagaatg

SEQ ID NO: 107669 - DNA, 201 bp, Homo sapiens
cctggaagcatgcatgacttgaggtggagcatggggccctcacgtggtttaatgggtgccaaaaatctgtgagcatcttggtggatgcggaggggaacacmcataccactccttgccacctatcatccgtttggagtttaaagaaagtccacttcaaatgagagtttgaagttgacacagggaggacagtagcagggaaaa

SEQ ID NO: 107670 - DNA, 201 bp, Homo sapiens
catatggtaagagtatgctgagttttgtaagaaactgctaagttgttttccaaagtggctgttccattttccattcccaccacagtgagtgagggttcctrtttctctacatcctcaccagcatttggtgttgccagtgttctggatttaggccactctaataggtgtggagtagtatttcacttttgtttttatttccaa

SEQ ID NO: 107671 - DNA, 201 bp, Homo sapiens
acccatgaggccagggatggtcaggcccccagaaggcctcttagtactcttctggccatctggggccatctgtcctatagcatagcctctctgtcacatcrcactcaccatgtgcaggtacttctaaatgcaagtgcgctggagaatgtgtgtgtgtgtgtgtgtggttatgaaggaaaacaggaccttcgcttgtcgtgg

SEQ ID NO: 107672 - DNA, 201 bp, Homo sapiens
ggggggaaaccattttctttgttttcttctttcccctgtcaactagacaccgttccttttgacttgtttcattaaatcctttaaaaacaagaactgcttgktaaagaaacaggtttcctttgggtttcaaacgtttagttattagaaagcttttctctgccttgccaccactacatttaaaatgtggggttttgaaacatt

SEQ ID NO: 107673 - DNA, 201 bp, Homo sapiens
acaggaccttcgcttgtcgtggtgtgtacaagggcaggcgtgtgttctccgatgttatatggattttgtggccctgaagccgtcagccacttggagttttggggggctctgcctcttccccgaagctctgttctgtggaggccacagagcccagcgtctgcatggctgcttattaaattcagtgggccacttgggtcttgt

SEQ ID NO: 107674 - DNA, 201 bp, Homo sapiens
ttggctaaggcaactattaggggactcagagttttctttttaggggggcagaagatctagggaaatccacacagctccccagtgggagtgtgattggagayccaggcagggctggagctttgtccttatgttgtacttctcggcagctcgcggcgtctcataaacatgcgccgctggcctcctgagattcttgtgacggaa

SEQ ID NO: 107675 - DNA, 201 bp, Homo sapiens
ggaagttcctctttctgccagagcatcagctcaggacagccttcctaagcccccatcttcctatatgtggggtgccccgagccccatccagggcacctgcrctttctggttcagggacatctcatgcctcagcactgttgagagcagctcagcctggcactttgtggatgtttgagtcagtggagaggattttctggatta

SEQ ID NO: 107676 - DNA, 201 bp, Homo sapiens
ttatcacttgtctatgaggcagacgagaaaggtgagccacttgcctgagttctaacagggctcactggtggaggaattggagcactctgtatcctgggctyagggttctgtctaacagttgtggctcccttactgtccgctcttcagagggtctttcatactcccggcttttaggcatgagtcttggcatgaggcctgaat

SEQ ID NO: 107677 - DNA, 201 bp, Homo sapiens
gagcagctcagcctggcactttgtggatgtttgagtcagtggagaggattttctggattatcagcaatacttccaccagctccttcttcctgaagcccccrcgacacttgtgaagcacacaccctgcttttactcagtggccaaatgccgccgctagcgacgcatcagtcattcggtgtatttcgggctctctcataattt

SEQ ID NO: 107678 - DNA, 201 bp, Homo sapiens
tccaacattgttctatatctgagtctggttctgatacttgctgtgtctctttaaactgtgcgtgcgtgcgtgtgtgtgtgtgtgtgtgtgtgtgtgtgcgygcgtgtgtgtgtgtgtttaacctcttagtgtgccttgtaattttatgttgaaagctggatgtgatggacttggtgcacggaaccctggtaaacaggcctt

SEQ ID NO: 107679 - DNA, 201 bp, Homo sapiens
attccaacattgttctatatctgagtctggttctgatacttgctgtgtctctttaaactgtgcgtgcgtgcgtgtgtgtgtgtgtgtgtgtgtgtgtgtgygcgcgtgtgtgtgtgtgtttaacctcttagtgtgccttgtaattttatgttgaaagctggatgtgatggacttggtgcacggaaccctggtaaacaggcc

SEQ ID NO: 107680 - DNA, 201 bp, Homo sapiens
tcccatatcatttctcttcctggttcagaagtttctaacaaagataatctgcctggtaaagaaacctgcttgctaacggagctataatttggggtgctttaaaaaaacctcctagtgaattatatccaggacaaaaaatcttcatggagctaaatttaatcattagcagctcaaggacaggaacccatagtgtacattttc

SEQ ID NO: 107681 - DNA, 201 bp, Homo sapiens
tttttctcactgtttgtagaagtcctaggcccagcacagacctgtaataaacacctgttgaataattgttgaataactgattgattgacagcctgctgagyatgccagatgtttctgtctggctacaatgtctgggtttttcttttcttctataaaaattgttatgattttcaatgcaattattcaccagattttcctcat

SEQ ID NO: 107682 - DNA, 201 bp, Homo sapiens; identical to SEQ ID NO: 17452

SEQ ID NO: 107683 - DNA, 201 bp, Homo sapiens
taatgtttatatgttcagggcaatcgattcctttaacctaaatcacatttgataaactatttctcagtcacaattcaagccaagcaatttctgggaagacmgcagcaggtggttaacactgtccccggggtgtggggattttgagcttagtgtcactaagagctgctcactgaggatagaactgtagtacttcaaagtgtc

SEQ ID NO: 107684 - DNA, 201 bp, Homo sapiens
ttagtttatatttcctaacaaatatcatatttcctaacattcttctaagcaactatagtacagttagcaaaatcagaaaattggacattatactatttacyatagtgtaccatggtatatcagactatgctatagtccgtagtcctgttttattcattgtcctactcatgttctccatagtatttttactttccactacag

SEQ ID NO: 107685 - DNA, 201 bp, Homo sapiens
taacgtgttagaaagatgttctcaatatgttactttttgccgaaatcgttcatctctcagaacgtaactccggttgtgtttttctgtttccttatgtccckttggcagttcatctcagaacaggccaggaacttctgcagataacaagttaatcatagcatgtccatcccagttggtcagtctgcctgttctctgaagggc

SEQ ID NO: 107686 - DNA, 201 bp, Homo sapiens
ctgcttcccctgtctgtggggggtgagggagacatcagcctcgtgttttgtgtctgtaatatcaccgccgtttactgagtgcctcctacgagccaggcacygggccgtgtgctttacacgaaatgttctatgtaacacttgcagcagatctgggtagcccatagcctaccaaagggcaaatcgagcttcagagaaagtgag

SEQ ID NO: 107687 - DNA, 201 bp, Homo sapiens
cttccgcaggtggggcctgctggcctccaagaggcactatgtgtgtgaccctgggagcaagagcgagacctgaggccctgcagatgcccacaaccaagtcygggtacagggtctaggctcttctatcctcaggggtctgtggattccaaaaatgaaatgcaacaggtgccaaatatatctgaaattgaagcttatttgccc

SEQ ID NO: 107688 - DNA, 201 bp, Homo sapiens
tgttttatgatgttgaagtcagtgataccatctcatctttgaggatttctctgccttggtttgatgttgaaagcttctttaggctcgattactatactgcrcgggtggagagaccgtgagtcaaactccttttgggttgttttaaaaaaatgatacattaacctctagggaaagcttggattgaagtcacttgagtacaaa

SEQ ID NO: 107689 - DNA, 201 bp, Homo sapiens
tgtatggtgcagagaggcccgagtaagatccaaaaccacctcctcaacgtgtgccccgctggaatgaccagagcttcccattttcctaatcatgtaagtcyttatgtcatttaagcaattaaaatggaggaccaagaacctaacccttaactctaacaatgggggtaaggctccttgggggcatcatctgtgtttctctac

SEQ ID NO: 107690 - DNA, 201 bp, Homo sapiens
atttacttatttatttgagacagagtctcactctgttgcccaagctggagtgcagtggtgaaatctcagctcattgcaacctccacctcccaggttcaagygattctcctgtttaagcctcccagtagctgggattacaggcatctgccaccaagcccagctaatttttgtatttttagtagagacagcgttttgccatgt

SEQ ID NO: 107691 - DNA, 201 bp, Homo sapiens
gaaatagagacaacttcttttttttttttttttttttttgagatggagtctcgctctgtcaccaggctggagtccagtggcacattcttggctcaccgcarcgttcgcctcccgggttcaagtgattctcctgcctcagcctcccaagtaactgggattacaggcatgtgccaccgtgcccggctaattttttgtattttt

SEQ ID NO: 107692 - DNA, 201 bp, Homo sapiens
gttattgaatctagtttaattgtattgtgttctgagagcacacagtctgatttctgttcttttcaatttgttaaggtatgctttgtggcccagaatgtggyctcttttggtgaatgttccatgtgagtttgagaagaatgtgtactctgctgtttttgactgaattagtctatagatatcaattatatctagttgattgat

SEQ ID NO: 107693 - DNA, 201 bp, Homo sapiens
cagccgacaacttcttaggttgtgttgggaactgtaaaaagtaaagtcggaaactttcactgcttatgcttatgtgattgtaaccatacattttctattastacaagagagttgcttattaaagccccgtaacagctgcatggatcacccattcctagtgagtgaggcattagtttgctggacccaagtagaaactcatgg

SEQ ID NO: 107694 - DNA, 201 bp, Homo sapiens
tttaccttcacttattccttctttgatgcatcctttcttcatgtagatccaggtttctgatcgatgttattttcttatgttaaaagagctgcttttaacattttttgcaaggcaggtctactggcaacaaattccctcaacttgtgtttgaggaagtctctatcccttcttcatctttgaagatcaatctttttttttttt

SEQ ID NO: 107695 - DNA, 201 bp, Homo sapiens
tataatgtatggtgatcagatcaaggaaattagcatatccatcatctcaaacatgtagcatgtttttgtgttgggaacattcagtatcctcctcctggttrtttgaaactctgtatatattatgggtccctagagtcaccctaccgggctgtagaacacaagcaagatccctcttctctagctataattttgtatccttga

SEQ ID NO: 107696 - DNA, 201 bp, Homo sapiens
aagatcaatctttttttttttttttgcgacagagtctcgctctattacccaggctagagtgcagtggtgctatctcagctcactgcaagctctgccttctrggttcatgccattctcctgcctcagcctcccgagtagctgggactacaggcgcccaaccacacccagctaatttttttgtatttttttagtagagatggg

SEQ ID NO: 107697 - DNA, 201 bp, Homo sapiens
actggtccaagcctgtgagcagcgtgcagatatcaatcagttacttgactgtccttggtcactaccatagtccataaggcagtccctaagtccatagtccrtaagtccaaactctgcctggagacttgagcctgctaatacacagggacttgtatttaataaacttttccatttgagggaagggattatttttccctggat

SEQ ID NO: 107698 - DNA, 201 bp, Homo sapiens
ttatagttgttttaaattcctgatctgatcattccaacattgttctatatctgagtctggttctgatacttgctgtgtctctttaaactgtgcgtgcgtgygtgtgtgtgtgtgtgtgtgtgtgtgtgtgcgcgcgtgtgtgtgtgtgtttaacctcttagtgtgccttgtaattttatgttgaaagctggatgtgatgga

SEQ ID NO: 107699 - DNA, 201 bp, Homo sapiens
agtctgttaaaaataagttttagagaaagatggcatatatggttgtctagaatatgtaacaataaagcttaattgtacatatttatataccttcagtgttsccttttcccacggtgttgatacgaagcaagtgcaaatgatcgtgagccagctagtgaagaattcagcacaagtgttttgtcactcagtagttacgatgat

SEQ ID NO: 107700 - DNA, 201 bp, Homo sapiens
agttgttttaaattcctgatctgatcattccaacattgttctatatctgagtctggttctgatacttgctgtgtctctttaaactgtgcgtgcgtgcgtgygtgtgtgtgtgtgtgtgtgtgtgtgcgcgcgtgtgtgtgtgtgtttaacctcttagtgtgccttgtaattttatgttgaaagctggatgtgatggacttg

SEQ ID NO: 107701 - DNA, 201 bp, Homo sapiens
ccatgagagtggagccctcatggcatagtcacttcttaaaggtcacctcttaaaggcctcacctcggctgggcatggtggctcatgtctgtaatcccagcrttgcgggaggccgagatgggcagatcacctgagtttgggcagatcaggagtttgagaccagcctggccaacatggaaaccgcatctctactaaaaataca

SEQ ID NO: 107702 - DNA, 201 bp, Homo sapiens
aaagtcctgctgtcaagctgtccctctgaaatcaagctgattctctccaacatccggctgtttcttctctccttctctattgctttgctggtagggcctgkggtttttatgggtacaagatggagggtggggcgggccggggtggttttggaaaaggcaacattcgggcaggaaaacagaaatgcatgttctcactttggg

SEQ ID NO: 107703 - DNA, 201 bp, Homo sapiens
tgcattttttaatattagttgccattttatcttccacagggggcctattttcttactctagccaacattaaaaaatcttcattgtccttctcctgttccarcaagcaagaaagtggagaccaagggctgagatcagtagccagaaatgtaatggagctgtttaaaaatagttatcttaagctttattagtcgaaatacagt

SEQ ID NO: 107704 - DNA, 201 bp, Homo sapiens
ttttatttgagacttctgtttcttttatttgagcagaaattagagggaagcatttttttgtttctgttgttgttttgagacagggtctcaccaacccaggytggagtgcagtagtgcaatcatagctcactgcagcctcaaagtcctgggcttaagcagtcctcctgcttcagcctcccacacagctaggactacgggtat

SEQ ID NO: 107705 - DNA, 201 bp, Homo sapiens
aggcttcttatctaataattctttaaagtcaattctcttgacttttttagtccttaagagaataaaagcaatttgcagctgtgttgttggattaaaaaagmgtttcgattagagcatcattagaaggaatagataacttttagcaggctcagagcttcttctgcctctagggacaagctgggacagtttcatttcttccaa

SEQ ID NO: 107706 - DNA, 201 bp, Homo sapiens
gctgaatctcctcatggctagttatttttattaaataacaaaaacagcctcttaaaggaggagaaatgctagcactcaccattctggacatcttgagagcycagtaaaatgatgagttggactgaagtgttcaataaacatgagattgtggaaataatctcatttcttaagacaaaccagtagttgagaataatgattgca

SEQ ID NO: 107707 - DNA, 201 bp, Homo sapiens
gtcctatcccactcactagcagcttacccttgcctgtgaacagccagaagaagatgacagggacatgcttgggtcctgggcagtggccctactgtatagarattcttctaattgagaaatcactttgttgtatttagccccacatctccaatgtctgtgttatctctaggaaaacagttccaccaggaattcttcgtctcg

SEQ ID NO: 107708 - DNA, 201 bp, Homo sapiens
ttaaatggctcttttttttcattaaactactctgtattgttattccaggtttattttctggaattgcacaattatgttaggagataggattcagctacttyatatgagctggtgcctgctggtcttggaacagcccttccttctgaagttgggattgggttggagacaaaatctgaggggcaacaaaggtggagaagtcag

SEQ ID NO: 107709 - DNA, 201 bp, Homo sapiens
cgccaactgagcatggtggctcacgcttgtaatcccaggactttgggaggccgaggagggccaatcacttgagtccaggagttcgagaccagcctgggctrctgaaacccatctctaccaaaggaaaaagaaaagaaaagaaagaaagaaaaattagttgagtgtgattgtgtgcacctgtaatcccagctactcggaagg

SEQ ID NO: 107710 - DNA, 201 bp, Homo sapiens
aacctccaggtccaccgtcttacctgacagctaaggaaattaagctcagactagagaaatgatttactcaagaccacatgggaagtaaattagtggattgrcactcctggctccagtgtcactccttgaagttttaaagcctacctgatctgaaaatcactccctttccctgccctccttgtcctttggtgaaaatgtaaa

SEQ ID NO: 107711 - DNA, 201 bp, Homo sapiens
tgagtccaggagttcgagaccagcctgggctactgaaacccatctctaccaaaggaaaaagaaaagaaaagaaagaaagaaaaattagttgagtgtgattrtgtgcacctgtaatcccagctactcggaaggctgaggtgggaggatctcttgagcccaggaagtcaaggctgcagtgagcggtgatcgctccactgcact

SEQ ID NO: 107712 - DNA, 201 bp, Homo sapiens
actaactggcattaatgaagtagtcattcgcatttttggcatcaactgtcacatctttacctcccaccacttcaacgtcaaaatacaaaaaatcctttaasccctcccacccccttttatttttaaagagcaatatttactaagggaaaaaggtggtccttagacttacacttattatactaattatatggagagaaacca

SEQ ID NO: 107713 - DNA, 201 bp, Homo sapiens
ttgtaatgtggttctttcaataagaaaccacagaagagaactgttgtactgagggtatgaaagagagcgaggaagggcaactgggatgttcttagatccarccgatcctgtgtttacctgccttctcttcccagtcccagcaagtgtatgagcagcttgagggttcttaagagacagctctcgtccatctttatttcccca

SEQ ID NO: 107714 - DNA, 201 bp, Homo sapiens
tggtgtcaggacctgcttctgtaacttttccatcctttgcattaggcagcgcggaaccccctaggcgaccccgcgctggccgggagcactctttcttcagmcaaaggtacgttccattaccgcccctcgggggcgcgctaggcagcgggccggccaagctgccgccgcccagggcgccctgtcccgttcgcttttgtgccg

SEQ ID NO: 107715 - DNA, 201 bp, Homo sapiens
attcttatcttttggtatctacacccattaagcaaggtatgaaattgagaaatgcatatatgtataactgtatatttacacacatttagctaaaggcaaawacaaataaacttacaaataggcgtccatctcaacacattttttttcaaacatgctgttttttttcctttatccttttattcagttataccatatgatatt

SEQ ID NO: 107716 - DNA, 201 bp, Homo sapiens
agaaattattgtagttcatgaactcggcaaaaaacaatctggccaaaaacttgaggttgatgaaaataatattaaatggctcttttttttcattaaactaytctgtattgttattccaggtttattttctggaattgcacaattatgttaggagataggattcagctactttatatgagctggtgcctgctggtcttggaa

SEQ ID NO: 107717 - DNA, 201 bp, Homo sapiens
tttcaagaaagactattttaggcttcttatctaataattctttaaagtcaattctcttgacttttttagtccttaagagaataaaagcaatttgcagctgygttgttggattaaaaaagcgtttcgattagagcatcattagaaggaatagataacttttagcaggctcagagcttcttctgcctctagggacaagctggg

SEQ ID NO: 107718 - DNA, 201 bp, Homo sapiens
ttcaacggctcagcccccggaagtcggcccccgagagcggcggtgggctcctcaggccgcggacggttgcggcaggaagcgaagctgcttacatggttgaygcggcttctcgcttccccccccaagactccgccctctgttttcctgtcccccagtccgaaatctttcccgggggccggctcctcccagcccggccgacgc

SEQ ID NO: 107719 - DNA, 201 bp, Homo sapiens
tggggtggcatgtgcctatagtcccagctacttggaaggctgaggcctgaggatcccttaagcctaggagttcaaggttacagctatgagctatgatcacrccactgcctacgcaacagagcaagaccctgtctcgaaaaagaaaaagaaaaaaaaaactgactcggtagttgaaagcagccttactaaagcattccttcc

SEQ ID NO: 107720 - DNA, 201 bp, Homo sapiens
ggttgaatgagccaagatcgtgccactgcactccagcctgggcaacaaaacgagactcatctaaaaaaaaaaaaaaaagggaaaggctcattttatgactractggcattaatgaagtagtcattcgcatttttggcatcaactgtcacatctttacctcccaccacttcaacgtcaaaatacaaaaaatcctttaagccc

SEQ ID NO: 107721 - DNA, 201 bp, Homo sapiens
aaagcagacgaaacctaaagggaaatgcagttttaaattctgtgagtccttttcctcaagagttttgtcaaatcccagcccagttttcctggagttggaargcaccatcgaaacctgcaggttgagtccagtgcaaatcccagtcaccatcctcagctgggcccttcagcaatctttctgggagtctgtagtcagcttctc

SEQ ID NO: 107722 - DNA, 201 bp, Homo sapiens
cagaaggaattagctgggcatggtggtgcatgcctgtagtccccgctactggggaggctgaggcgggggaatcacttgaacccaggaaggcagaggttgartgagccaagatcgtgccactgcactccagcctgggcaacaaaacgagactcatctaaaaaaaaaaaaaaaagggaaaggctcattttatgactaactggc

SEQ ID NO: 107723 - DNA, 201 bp, Homo sapiens
tactacaattagtattgttatcatcaccctctagggagacttccctgacttccttccatggtcacctcttttcctctgtcatcctatagtttttttttttgggggggggggtctaataccctcttttggcatttgaaagctcttatattgcttttcacttatatatgtctttatagggttgtaaacttcctaaaggaaagt

SEQ ID NO: 107724 - DNA, 201 bp, Homo sapiens
cactcataatatgttattgctttgttgtagacagttcactcgtgtagcactgaaccggagttagcgatgactctgtttccagacttgcatgactccaccaataaccagccatatgatcttaagcaaattgctcatttatttaggccttagacctctggtgtgtaaagtcggattaataaaaggactcacttcttaatactt

SEQ ID NO: 107725 - DNA, 201 bp, Homo sapiens
tttactttgcttaccaagacctatcaagattgagtcatttatgctctcatctctgagagactcagtgctcttcatgcagttggacccaacgcttcatgctscactacttacagggtatggctctctcggcatgatgaccagcgtgctggtttgtccagatggcaagacagtagaagcagaggctgcccacgggactgtaac

SEQ ID NO: 107726 - DNA, 201 bp, Homo sapiens; identical to SEQ ID NO: 17523

SEQ ID NO: 107727 - DNA, 201 bp, Homo sapiens
tcagatcagtgctcagaaaactttcctatacctcgtataggcacctaataaatatttactgatttaggggaatgtctggacctcttcatccccatctcctaaaaaaaaaaaaaaaaaaagaagtttgacatactgccctatttgtctaggtgtcttctaggtctatattatatgaatattctccttacaattcctgctagg

SEQ ID NO: 107728 - DNA, 201 bp, Homo sapiens
actcataatatgttattgctttgttgtagacagttcactcgtgtagcactgaaccggagttagcgatgactctgtttccagacttgcatgactccaccaataaccagccatatgatcttaagcaaattgctcatttatttaggccttagacctctggtgtgtaaagtcggattaataaaaggactcacttcttaatacttt

SEQ ID NO: 107729 - DNA, 201 bp, Homo sapiens; identical to SEQ ID NO: 17524

SEQ ID NO: 107730 - DNA, 201 bp, Homo sapiens
aataggtacagagatcatatgaaaagaataaattgcccagccacgacgactgcagtgtatgtagaaactccatctatggtttaaaaaaaaaaaaaaaaaagtgcactccgcaaatatttttgagtccctaatttaacctgcagtgtgttagttatagaagcactacactaaggatagaattatgaacgtatcccactgctt

SEQ ID NO: 107731 - DNA, 201 bp, Homo sapiens
tgggaagctgaaagaggagaatcacttgaacccaggaggcggaagttgcagtgagccgagactgcaccagcctgtcagggcaagactctgtctcataaatmaataaataaataaataaatattggagcattaaattctgggcagcaatatacaagcatgctattgtcctacaaatcacaatataaaatactctttattttc

SEQ ID NO: 107732 - DNA, 201 bp, Homo sapiens
ttcccgttagtgtgcaacgttctgactacttgaatacatttgagttcatggataaacttggagaaaacttgaagatcaaactagctcaggccaaactttamgttcatacctgagctaagaaggataattgtcttttggtaactaggtctacaggtttacatttttctgtgttacactcaaggataaaggcaaaatcaattt

SEQ ID NO: 107733 - DNA, 201 bp, Homo sapiens; identical to SEQ ID NO: 17530

SEQ ID NO: 107734 - DNA, 201 bp, Homo sapiens; identical to SEQ ID NO: 17525

SEQ ID NO: 107735 - DNA, 201 bp, Homo sapiens; identical to SEQ ID NO: 17526

SEQ ID NO: 107736 - DNA, 201 bp, Homo sapiens
ttggttgtggtgggtgattttagccttattacaactacattacatttattcttctcccttttttcctctcactggcttctcctctacagaaggtggtggtrttgccatggggatgtataatcaagataagtcaattgaagattttgcacacagttccttccaaatggctctgtctaagggttggcctttgtatctgagcac

SEQ ID NO: 107737 - DNA, 201 bp, Homo sapiens
gtttctgctacttctactaaaatatgctgcttcttgtgtgtccggtcttctgtttgggacaagcagatgatatccctaacaaaatcaattttctttattaytattctcttttaccttttgtttcccaggcagtacaagtcccagtttgaagctcaaaagatctggtatgagcataggctcatcgacgacatggtggcccaa

SEQ ID NO: 107738 - DNA, 201 bp, Homo sapiens
accaagtgacggaacccaaaaggtgacatacctggtacataactttgaaggtatgtatgactgtagcataagcttcttttttttttaaacaaatgatttarataatatttttattgctttttttgttagttatgtgactgcctaaaaatataatctgaatctacagtgtttttgcaaaacccgaaacttgacataaagaag

SEQ ID NO: 107739 - DNA, 201 bp, Homo sapiens
attttagccttattacaactacattacatttattcttctcccttttttcctctcactggcttctcctctacagaaggtggtggtgttgccatggggatgtrtaatcaagataagtcaattgaagattttgcacacagttccttccaaatggctctgtctaagggttggcctttgtatctgagcaccaaaaacactattctg

SEQ ID NO: 107740 - DNA, 201 bp, Homo sapiens; identical to SEQ ID NO: 17555

SEQ ID NO: 107741 - DNA, 201 bp, Homo sapiens; identical to SEQ ID NO: 17556

SEQ ID NO: 107742 - DNA, 201 bp, Homo sapiens; identical to SEQ ID NO: 17557

SEQ ID NO: 107743 - DNA, 201 bp, Homo sapiens; identical to SEQ ID NO: 17558

SEQ ID NO: 107744 - DNA, 201 bp, Homo sapiens
aataaggaaagaaatgtagtaattcttcagagtcactgacacaacaccttgcacatactcgtcaacaaaagataaatttcaggccaggcgtggtggctcaygcctgtaatcccagcactttgggaggccgaggcggttggatcactggaccagctggaccaggctggtcagaagttcaagaccagcctggccaacatggca

SEQ ID NO: 107745 - DNA, 201 bp, Homo sapiens
tatagagctgcattcagacttgcccggctggctcctacacccactagtcctgtgcccagagccaccgcgcccgctgccagggcagcctggggcaggacagkgaactgacaggagggagccaggaaggtgccaaggtgccttagctggaccaggaggtgcccactacagaggaggatgacgccaccagccagcgccagcagc

SEQ ID NO: 107746 - DNA, 201 bp, Homo sapiens
tcagatgctttgctgactcacctgcagtaggaaggtgacagccagcatgctacccagtgtgcctgccaagtcctgcaagtgctccagcagcacctcatggyacccttgggcccagaggttttggttgggttgtcggggatcgaacagggggtgggcgtaggagtctgaaagacggttttgcaggcaaggccggggtgagtg

SEQ ID NO: 107747 - DNA, 201 bp, Homo sapiens
gattgagcgggtggtgataataggggctggaaagccagcagctgtggtactccagacaaaaggtgagtgaccaatctggcccctaggatgggggaaggagrggaagccggggcaggtttagggatgcccttgcctgtaggaacgttgttgttatgctatagcccattggtatgactatggcactcttttattcctcctcca

SEQ ID NO: 107748 - DNA, 201 bp, Homo sapiens
acttctggggcgcctgctgtgtaccgggcactgtgctaaaccctcgacctcctccatctcagtcagtccccacaacatccttgggggttaggtggtctcaygctgctcattgcacaggtgaggaagcaggctcagagagggtaagtcatttgcctggggtcacacagctagagtcaggatttgaacctaactcttcctgac

SEQ ID NO: 107749 - DNA, 201 bp, Homo sapiens; identical to SEQ ID NO: 17559

SEQ ID NO: 107750 - DNA, 201 bp, Homo sapiens
caaggcagtcaccaggccctcctccagcgcctcatccagactcccaggcaaagccagggctagcccgaggccgacgaccaggagcccccccccaccagccrtgccagccaccagcagcgggcccaggacccctcgccagggagggtatagagctgcattcagacttgcccggctggctcctacacccactagtcctgtgcc

SEQ ID NO: 107751 - DNA, 201 bp, Homo sapiens
gccatgttgggcaggctggtctcgaactcctaacctcaggtgatccgcccacctcggcctcctaaagtgctgggattataggcgtgagccaacatgcccgrccttttttttttttttttgagatggagttttgctgttatcactgaggctggagtgaaatggtgcgatctcagctcactccaacctcctccttccaggttc

SEQ ID NO: 107752 - DNA, 201 bp, Homo sapiens
gtccttgtagtgagccaaggcagtcaccaggccctcctccagcgcctcatccagactcccaggcaaagccagggctagcccgaggccgacgaccaggagcycccccccaccagccgtgccagccaccagcagcgggcccaggacccctcgccagggagggtatagagctgcattcagacttgcccggctggctcctacacc

SEQ ID NO: 107753 - DNA, 201 bp, Homo sapiens
gccaggagaggagccagagcccttgtgccaggcggatgcggggctgcaggggcagcaccaggggcaacaccggcgccatctcccatctctgcccaagggartgcagaggtgtcagggatggaagctggctggggcaggatgctgagtcagcccggcccggcttgagctgggctaatgccaccctgaccccaataccctgag

SEQ ID NO: 107754 - DNA, 201 bp, Homo sapiens
cgtgccagccaccagcagcgggcccaggacccctcgccagggagggtatagagctgcattcagacttgcccggctggctcctacacccactagtcctgtgyccagagccaccgcgcccgctgccagggcagcctggggcaggacagggaactgacaggagggagccaggaaggtgccaaggtgccttagctggaccaggag

SEQ ID NO: 107755 - DNA, 201 bp, Homo sapiens
tgatcttggctcactgcaagctctgcctcccgggttcacgccattctcctgcctcagcctcccaagtagctgggactacaggtgcccgccaccacacccarctaattttttatatttttagtagagatggggtttcaccgtgttagccaggatggtctcgatctcctgacctcatgatccacctgcctcagcttcccaaag

SEQ ID NO: 107756 - DNA, 201 bp, Homo sapiens
ggtgacagccagcatgctacccagtgtgcctgccaagtcctgcaagtgctccagcagcacctcatggcacccttgggcccagaggttttggttgggttgtyggggatcgaacagggggtgggcgtaggagtctgaaagacggttttgcaggcaaggccggggtgagtgggggttgcaacaggagaaagggaccccatcagt

SEQ ID NO: 107757 - DNA, 201 bp, Homo sapiens
gcacccagacggagacagaggtggagctcaagtcatcccctggaccccctggcctgagcaatggacccccagcccctcagggggccagcgaagagcctagygggacccaatctgaaggagggggcagcagcagcagtggtgctggctcccctggccccccggggatcctcaggcccttgcagcccccacagcgtgctgaca

SEQ ID NO: 107758 - DNA, 201 bp, Homo sapiens
tggctcactgcaacctccacctcccgggttcaagcgattctcctgcctcagcctcccgagtagctgggattacaggcgtgcaccaccacaccaggctaatwttttttttttttttcccgagatggagtctcactctgtcgcccaggctggagtgcaatggcacgatctcggctcactgcaacctccacctcccggattgaa

SEQ ID NO: 107759 - DNA, 201 bp, Homo sapiens
gacaggtatgcatgtcatcacaccccatttttcctcctccttggggcctctggggcttcaggttaattcaacatctctccagcagtcttgcagcccccccrggactgccacccacgtgcaccccttccttggtgagccgaggcacccagacggagacagaggtggagctcaagtcatcccctggaccccctggcctgagca

SEQ ID NO: 107760 - DNA, 201 bp, Homo sapiens
caaccagccctgggacaggcaggtagatctgaaggataaagaagtacagaagaggccaagccccacgttccacattcctggtttgttccttttttttttttcttccccccgcctccccgcaacaccgagatggagtcttgctctgttgcccaggctggagtgcagtggtgtgatcttggctcactgcaacctccacctccc

SEQ ID NO: 107761 - DNA, 201 bp, Homo sapiens
ctccatatttcccccccggtactccatggtactcccagtctttgcggaggctgagacggcagcaggaagggagctttgccaggtttctcgcctgccctgccagaaggaggcccttgatcctttaccaccgtctcctcccctctggacgagcattcaagcctggggctgcctgaaaggggcagtcctaccggacacatgtaa

SEQ ID NO: 107762 - DNA, 201 bp, Homo sapiens
cccaggcacctctgtgtccttgtagtgagccaaggcagtcaccaggccctcctccagcgcctcatccagactcccaggcaaagccagggctagcccgaggscgacgaccaggagcccccccccaccagccgtgccagccaccagcagcgggcccaggacccctcgccagggagggtatagagctgcattcagacttgcccg

SEQ ID NO: 107763 - DNA, 201 bp, Homo sapiens; identical to SEQ ID NO: 54219

SEQ ID NO: 107764 - DNA, 201 bp, Homo sapiens
aagttgacaggcaagaaagagggagtttaggcattggttgggaagggccacaggagacgcaggcagtggcccaggagaagctgtctgccctggctggagcrggcaaatggtgcctgccccttttccttgtgctgcatctctcccctgcaggctggtacagaaggcagagctggtacgactgtcccagacactgagcctggt

SEQ ID NO: 107765 - DNA, 201 bp, Homo sapiens
caccatgcccagctaatttttgtatttttattagagatggggtttcaccatgttggccaggctggtctggaactcctgacctcaggtgatccgcctgcctyggcctcccaaagtgctggaattaaaggagtgagccactgcgccctgcgtcttttttttttttttttttttttgagacagagtgtcgccaggctggagtac

SEQ ID NO: 107766 - DNA, 201 bp, Homo sapiens
gcacctcatggcacccttgggcccagaggttttggttgggttgtcggggatcgaacagggggtgggcgtaggagtctgaaagacggttttgcaggcaaggscggggtgagtgggggttgcaacaggagaaagggaccccatcagtcaggtataggccttctacattgctctggatccggctgcaaagggagggacagaggg

SEQ ID NO: 107767 - DNA, 201 bp, Homo sapiens; identical to SEQ ID NO: 54215

SEQ ID NO: 107768 - DNA, 201 bp, Homo sapiens
tttctaggtggcattggtgaggctgtgtccagtgcagtagtgggcgagcctggcatcactgtcacccacctggcagttaaccgggtaccaagaagtgggargccggctgagctgctgaagatgtttggtatcgacagggatgccattgcacaagctgtgaggggcctcatcaccaaggcctagggcgggtatgaagtgtgg

SEQ ID NO: 107769 - DNA, 201 bp, Homo sapiens
tggcttgtggtaggctgcaggaacctggtgacactgttgcccctcgagtgtaaatgccatctgttctgcatatccatgcgtggctgctcctttacccagartgcaggctccttggatgggtgggggggtgggagccagctgggtccaggtgagagggactggcctgattcactctctgtccacagctaccgagtctattgc

SEQ ID NO: 107770 - DNA, 201 bp, Homo sapiens
gtctgtttccacactgctgataaaggcatacccaagtctggggaagaaaaagaggtctaatggacttacagttccacatggctagggaggcctcacagtcrtgctggaaggtaaggaggaacaagtcacatcttatgtggaaggcgcaggcaaagagagagtttgtgcagggaaactcccgtttttaaaaccatcagatct

SEQ ID NO: 107771 - DNA, 201 bp, Homo sapiens
gagccactgcaccctagcctgggctacagagcgagactctgcctctttaaaaaaaaaattattcttttttttaaagaataatcactgtattagtctgtttycacactgctgataaaggcatacccaagtctggggaagaaaaagaggtctaatggacttacagttccacatggctagggaggcctcacagtcatgctggaa

SEQ ID NO: 107772 - DNA, 201 bp, Homo sapiens
tagtgctgggggaggagggctgggtgccccggccactggtggagtccccaggaaatcctcagagctgttgcgaggatgagacacatttgtggacacgtccmcctgtcctcctgaccgtctggagagaataaacctgtcaaagccaaggtcaggcaattgccccccacttagctacccagccaggtctagcagtgccagagg

SEQ ID NO: 107773 - DNA, 201 bp, Homo sapiens
tgagggaaggattgcttgaggccaggagttccagaccagcctaggcaacagagcaagactctctctacaaaaaatacaaaacttagccaggcatggtggtrcacacctgtagtcccagctacataggaggctgaggtgggaggatcacttgagcctagggcttcaagattatagctatacatgattgagccactgcaccct

SEQ ID NO: 107774 - DNA, 201 bp, Homo sapiens
ggtccccacgaggggcaaatgttctgtcaattttttcatgattctctctcccagcactttgtgaagtgggtgatgtgggaactgaggctcacagaggttcrgtcccttgcctgaggcctgaggccacatagctggctagtgggcagggctgggatttgaacctataattataattagttcattaggagaagaagtcacatg

SEQ ID NO: 107775 - DNA, 201 bp, Homo sapiens
gagcctgtcccaggaagcgcctggtcctcaagtgccctctgctctatcctccccagagccctcttgctccagggtgttgcctagagtgcctcaggcctccytggcccacctccctcctccgggcagaagcagagcttggttcccaaggttcccctttcccactggcccacccagccagtcccaaggcctcctccaacctct

SEQ ID NO: 107776 - DNA, 201 bp, Homo sapiens
aactttgggctgaaaaccaagaggctgaagagggctgaaaggggagaagtggccttcacttgcttcctcccctgaaatggatgctgcagttggccggctcrgccgggccccaggggtcagtgtgaagtaggcacagcccgaagtagaaccgctccccacctgacctcaccccaccatccatctcccggcagggccatgcag

SEQ ID NO: 107777 - DNA, 201 bp, Homo sapiens
caagaccttcaagggccgagggatcacgggtcagtatgcacaagccgccctccccaccttcacccctggcccagacactgtggctacgtagctctgaccckcacatccagggaaacagcccttgctgctcactgagctcaccaggctccagggaaggggagcgggagatgctgtgactcagtgacccctgtggctgagcca

SEQ ID NO: 107778 - DNA, 201 bp, Homo sapiens
ctcggggtggtggtgtgctgtagcagggttttggatggggaccccctgaccccccccttctgggtggaatcacagccacagatccctgaaatccacctgtrctcaggcctgcctccgtggcgtttggtctctcgggcaggctttagagcttagaagtctgtccaagttgttcccatgccacaaaccagggattagggcagc

SEQ ID NO: 107779 - DNA, 201 bp, Homo sapiens
gctagatctctcctgggcccctccttccttcttactcaagtccaaccccagatattttcagttgccgtgattctgaggatctgatgcccctggaaaggtasaacagtccccagcacccactagctggcccaggccccaaactgccaggagtggccttcttgagaccatgtgtcaccctcccagggaacaagagctcgtggc

SEQ ID NO: 107780 - DNA, 201 bp, Homo sapiens
ggtgttatccaaacagtgcaagtgtcatctgaggactccatcacagtcaggcctgattcaaaagggaaggtggtctgtgctttcaacaagtccccccaggktttctgacccacagctttggggaggttaatgcctggccagtcctggctggtggacacaggagatgagtccaaccctggctctgttcctagtggctgtgcc

SEQ ID NO: 107781 - DNA, 201 bp, Homo sapiens
agagatcccaccttctgtaccctactgcccctagggccctcaaaagaggaatcatgcagtaggctcccaggagggccctggtcccataggatgatgggaayagcctggggctcaggtcctgtgcgtctccagagcccacaggcccctgcagagaatctagaggcaaatactgggacaaggacacctgagccataggcacag

SEQ ID NO: 107782 - DNA, 201 bp, Homo sapiens
gatgtactgagaggaggggtaaatatatgttttgagaaaaatgaattggccctgaaatgttttcttttttgatgtgtttgcagccagtgcaggttctgggraagaagcgtggagggtgcgctagggaggctggtgtccttggtcctgggccaggacctgggtgtcccaagtccccttggaatcacctgcaactgccctcaa

SEQ ID NO: 107783 - DNA, 201 bp, Homo sapiens
ctgagctcttagctacacgcagccctcaggatgtcccaccaggcccccaccagggcagatagtggtgcccagccctcccctcagccacgccgtgtgctctscctcacagaaaagatcaacatccgcgtgctggaccccttcaccatcaagcccctggacagaaaactcattctcgacagcgctcgtgccaccaagggcagg

SEQ ID NO: 107784 - DNA, 201 bp, Homo sapiens
cccagcacccctgggtgctgagagggcagggtgcccttcacaagtgggcagtgtccgggcagtcctgtcaggatgtggggtcagtcgtaggaatgccggcrccccttggctgctgagtccttagactcctgggggccactaggtgggaactgggttctacctgacagcagctgcccccagccgcagtgctagccttgggct

SEQ ID NO: 107785 - DNA, 201 bp, Homo sapiens
gaagggacagacctcacagaaggctctttgttgaggcagcgcccacagtggctagagcttctctggggtcatctccttccatgggctgaaggaattatggsaagggtccagctcatcctggctttaaaaaaacaaaaccccagtggccttgtcagaagtggcctggatgctgaggctggtggcaaagatttctcagttctc

SEQ ID NO: 107786 - DNA, 201 bp, Homo sapiens
gagcgttggacgtgcctcttctatctgagccccaggagggcagctgtggcccagaacacccagagctgtccctcagagcagctgggacgtggtctcttaamaggcctcaggcttggcctggggacctagctaactcacagctgctgatgagctctgtggagctcctgctgcccaggaagctggtgaggattccaacctcgc

SEQ ID NO: 107787 - DNA, 201 bp, Homo sapiens
ggatgcagagatgagggaactctgggcccctgacatgtacccatttggggaagcagacccttgtcaggaactgaggttgtgaagtaaggaacaatgttttrtccatgttttcaaaatatcccctcctggtggtccaggagcccagcctggcttgcaggcccctagggacagggagcttcctctctctggagggcactcaga

SEQ ID NO: 107788 - DNA, 201 bp, Homo sapiens
ctcctcaagcaatggcagatgctgagcaaggcctgtgtgggccaagagccttggggggtttggaacctgggttctgccccaggccggagaatgaggcaggcgtaagtcactccctggcacccaggtgtgggcttcagattcctaggcctgggatggcctcacccattttaaagatgggaaaatgagactacaagtggtcag

SEQ ID NO: 107789 - DNA, 201 bp, Homo sapiens
tgacgttggccaggatggtcagtctcaaactcctgacctcaggtcatctccctacttcagcctcccagagtgctgggattacaggcgtgagccactgcacmcatcctgagagctggttttaatgatcacataatattctgttttatggagatgctataatccatctagccagtcctttgttgttggacacgtaaggtagtt

SEQ ID NO: 107790 - DNA, 201 bp, Homo sapiens
ctctaagcttgccacaccaccgtcacaggttgaactaattggggttgtaagtggactgttttggtcaaggcagggtgtgttagttttttttttttttttttgaacagtcaagtgtgcttgttagccctgtttatcacagagtcagggtatacagtaagtaccctgtagcccctccaccgtgctcctcaccccatctctcgc

SEQ ID NO: 107791 - DNA, 201 bp, Homo sapiens
gggcacaggaagagcaagaactgcttctgatgttcatttccaccctgacatcctgggattctctcctgagtattttttttttttttttttttttttgaggkggagtctgttgcctaggctggagtgcagtggtgcgatctcggctcactgcagcctctgcctcccaggttcaagcaattctcctgccttagcctcccatgt

SEQ ID NO: 107792 - DNA, 201 bp, Homo sapiens
gcaattatacagaatgagttcttttgggtctggcctcttagcataatttttagagggtcatccatgttgtaacatgaatcagtactttgttccttttttttggggggtggggggcagggtctccactgtgtcccgaagctggagtgcaatggcacagtcatggcacactgcagcctcaacctcccgggatcaagcagtctt

SEQ ID NO: 107793 - DNA, 201 bp, Homo sapiens
tggatgggtgggggggtgggagccagctgggtccaggtgagagggactggcctgattcactctctgtccacagctaccgagtctattgcttgctgggagayggggagctgtcagagggctctgtatgggaggccatggccttcgccagcatctataagctggacaaccttgtggccattctagacatcaatcgcctgggcc

SEQ ID NO: 107794 - DNA, 201 bp, Homo sapiens
gattctggcttctggccaatttcattcaggatatattattaagaagtaaatctgttcacctttctgggtggatacgcattcaccctttgtgcctctaagayaccctgttctcagaagggattagatgtctttcaaagcccttcccccacccactgccttgcacactttggacctgttagctctcctgggtttgtgtcagtc

SEQ ID NO: 107795 - DNA, 201 bp, Homo sapiens
tcagctcccctttcaccagcctggcacacggtagctctgcaggccttgtattgcttatttggtactgttggacctgctacctttggccgtttcagggggtytgaggtctagctggagagaggcagcaattacccaactaagtagtattgcacatctgagcatctttcagggctagataaaacatgcagatgtttacagggt

SEQ ID NO: 107796 - DNA, 201 bp, Homo sapiens
agggtggcttggggccagggttgcctggagcctaggcccctgactgtacctgggggaaggggccagggcatccagggattatcatgtcaggccaggcaccyggaggtagcgtcttgatagagcaaactggtctccactcactgtttctccctgccctcctgtttaaaaagtacagaatgatattaagaaatgaacgttttc

SEQ ID NO: 107797 - DNA, 201 bp, Homo sapiens
gctggagtagccaggatgcagtaactaacgctcccatgggaagggatggcctctctagaaagacctcgtctctgaggttgggtgtgccacatcctgtatcstcagtttatctgtttcggtctcagggtatctgcttcatccggaccagccgcccagaaaatgccatcatctataacaacaatgaggacttccaggtcggac

SEQ ID NO: 107798 - DNA, 201 bp, Homo sapiens
ggtcaactgtgcaaaaccttatactggccaagaacaaactagtgctgggggaggagggctgggtgccccggccactggtggagtccccaggaaatcctcaragctgttgcgaggatgagacacatttgtggacacgtccacctgtcctcctgaccgtctggagagaataaacctgtcaaagccaaggtcaggcaattgccc

SEQ ID NO: 107799 - DNA, 201 bp, Homo sapiens; identical to SEQ ID NO: 17582

SEQ ID NO: 107800 - DNA, 201 bp, Homo sapiens
gttccctgatgactgacctcagaaagggagaggaggaagggaggaaataatctctgttggacaggcgaggaaactgagccacagggtcctcaccccacagrcctccccaaggccacatctatctggggactcagagtacaaccccagcagcacccccaggacctgtgtccataacctcgtgactcaagccagattcctgaa

SEQ ID NO: 107801 - DNA, 201 bp, Homo sapiens
catacgcaggcctgtgttccctgatgactgacctcagaaagggagaggaggaagggaggaaataatctctgttggacaggcgaggaaactgagccacaggktcctcaccccacaggcctccccaaggccacatctatctggggactcagagtacaaccccagcagcacccccaggacctgtgtccataacctcgtgactca

SEQ ID NO: 107802 - DNA, 201 bp, Homo sapiens
ctttgagactcaggtcaggcctccaggactgcgttttgcagatgaacccatgcctgtgactacactaagtaacaggatgcttggggttaccttgcagtagyacagcatacgcaggcctgtgttccctgatgactgacctcagaaagggagaggaggaagggaggaaataatctctgttggacaggcgaggaaactgagcca

SEQ ID NO: 107803 - DNA, 201 bp, Homo sapiens
tgaagagggctgaaaggggagaagtggccttcacttgcttcctcccctgaaatggatgctgcagttggccggctcggccgggccccaggggtcagtgtgargtaggcacagcccgaagtagaaccgctccccacctgacctcaccccaccatccatctcccggcagggccatgcagctcccatcctctacgcggtctgggc

SEQ ID NO: 107804 - DNA, 201 bp, Homo sapiens
atgttgcaagctttctactactccagctgaggccgcagttgtggggtggagcctgggcagaccccagctgccaaggcagacctttccctggaaggctcctyggtgttgtggcccctgggaattgccccttactctctgccccctgtccccagttggcatgccatcatcgtggatggacacagcgtggaggagctgtgcaag

SEQ ID NO: 107805 - DNA, 201 bp, Homo sapiens
tggagcctgggcagaccccagctgccaaggcagacctttccctggaaggctcctcggtgttgtggcccctgggaattgccccttactctctgccccctgtycccagttggcatgccatcatcgtggatggacacagcgtggaggagctgtgcaaggcctttggccaggccaagcaccagccaacagccatcattgccaaga

SEQ ID NO: 107806 - DNA, 201 bp, Homo sapiens
gtgtgcagccccccacccctaactctaacagctcaggcaataccaagcctcagggttagcccaggctcctgtaggccccttccctgttcacaaccccttcsttggcatctcctcgggacctcagcacgccctctgacctgagcctgatggccctgtagggcttagccttgtccctagtctcgaagccaaagctgtgctggg

SEQ ID NO: 107807 - DNA, 201 bp, Homo sapiens
cttagccttgtccctagtctcgaagccaaagctgtgctgggcctccagtgctagcctcggttcgacttccctggaagtgggtgtgggcttggggtggcagycagttgccttccctggaatccctttctgggaagtcgagttggcttctctggctcagccccatcatgtggcccctttctggagctgctgtgccagaccaga

SEQ ID NO: 107808 - DNA, 201 bp, Homo sapiens
tgcacgggtcctgggggacagctcagattccagaatgtggctctgctctcaggtcactgtggcctctgctggcacctgatgccggcagtaggacatttctrccacttcctaccctccaacagagcacctttgtgtctcggtttctggaaaggccggaatgaaggacaccagtctgaatggccagattccctcccctgaggc

SEQ ID NO: 107809 - DNA, 201 bp, Homo sapiens; identical to SEQ ID NO: 17563

SEQ ID NO: 107810 - DNA, 201 bp, Homo sapiens
gtgccacccgcaacaggacggtgcccttctgcagcacttttgcagccttcttcacgcgggcctttgaccagattcgcatggccgccatctccgagagcaayatcaacctctgcggctcccactgcggcgtttccatcggtgagtttagccagggtgtttacacctggagctcccttgacttttgcaccaggaggtatggga

SEQ ID NO: 107811 - DNA, 201 bp, Homo sapiens
gagctcctgacgtcttccttcatgccattttctcttggggtgtggcttgtggtaggctgcaggaacctggtgacactgttgcccctcgagtgtaaatgccrtctgttctgcatatccatgcgtggctgctcctttacccagaatgcaggctccttggatgggtgggggggtgggagccagctgggtccaggtgagagggac

SEQ ID NO: 107812 - DNA, 201 bp, Homo sapiens
ctcctgcctcagtctcccaagtagctgggattacaggcacccaccaccatgcccaactaattattgtatttttagtagagacggggtttcaccttgttggmcaagctggtctcagactcctgacctcaggtgatccacctgtctctgtctcccaaagtgctgggattataggcgtgagccacctgaatatttaaaaaaaaa

SEQ ID NO: 107813 - DNA, 201 bp, Homo sapiens
catcggtgagtttagccagggtgtttacacctggagctcccttgacttttgcaccaggaggtatgggagggggatgggccaggattccagcccatggatgsgggggtaggggtcttatttctgcatatcctttcccccacaccccaggggaagacgggccctcccagatggccctagaagatctggctatgtttcggtcag

SEQ ID NO: 107814 - DNA, 201 bp, Homo sapiens
ggttctcctgcctcagcttcccaagtagctgggattacgggtgcctgccaccatgcccagctaatttttgtatttgtagtagatacagggtttcaccatgytggccaggttggtctcgaactcctgacctcagttgatccacccacctcagcctcccagagtgctgggattacaggtgtgagccactgtgcccggcctgtt

SEQ ID NO: 107815 - DNA, 201 bp, Homo sapiens
cctctgctgctcacagatgcattgggtgaccctggaagccctgttctgggccttgggttccccttctgatggccagggtcccttccaacccagtcgacaarctgagtatttctgcagcagacacctctacctgtgtgtgaccctgcaggcggggttgtggggaggaagagaatggacacattggtgaagggatggggcagt

SEQ ID NO: 107816 - DNA, 201 bp, Homo sapiens
cggctgagctgctgaagatgtttggtatcgacagggatgccattgcacaagctgtgaggggcctcatcaccaaggcctagggcgggtatgaagtgtggggygggggtctatacattcctgagattctgggaaaggtgctcaaagatgtactgagaggaggggtaaatatatgttttgagaaaaatgaattggccctgaaat

SEQ ID NO: 107817 - DNA, 201 bp, Homo sapiens
tcgtgccaccaagggcaggatcctcaccgtggaggaccattattatgaaggtaaggaggcctggggcaggcaggctgggcaagggacagggccagagagcygagcgttggacgtgcctcttctatctgagccccaggagggcagctgtggcccagaacacccagagctgtccctcagagcagctgggacgtggtctcttaa

SEQ ID NO: 107818 - DNA, 201 bp, Homo sapiens
ggtggggggcagggtctccactgtgtcccgaagctggagtgcaatggcacagtcatggcacactgcagcctcaacctcccgggatcaagcagtcttcccasctcagcctcctaagtagctgggaggcactcaccaccatacacagctaattttaaaaattatttgtagagacagggtatgttgctgagcctggtctcaaat

SEQ ID NO: 107819 - DNA, 201 bp, Homo sapiens
aaggtggtgggcagttctcagagtgttcaagtggggtgcgggcggcagagggcaagcaaggcccttttccctgctggagtagccaggatgcagtaactaaygctcccatgggaagggatggcctctctagaaagacctcgtctctgaggttgggtgtgccacatcctgtatcctcagtttatctgtttcggtctcagggta

SEQ ID NO: 107820 - DNA, 201 bp, Homo sapiens
aattaacaggcatgagccaccacgcccagcccttcatttctttttacggctgaatattccgttgtgtggacatagtgcattttgtttatccattcaccagyttttcttagcattttgctcttatcctagctctgctgctggcaggccgtgtgactttaggcaagtcactttctgtgaaccttagtggccccatcctccgaa

SEQ ID NO: 107821 - DNA, 201 bp, Homo sapiens
taggtggcattggtgaggctgtgtccagtgcagtagtgggcgagcctggcatcactgtcacccacctggcagttaaccgggtaccaagaagtgggaagccrgctgagctgctgaagatgtttggtatcgacagggatgccattgcacaagctgtgaggggcctcatcaccaaggcctagggcgggtatgaagtgtggggcg

SEQ ID NO: 107822 - DNA, 201 bp, Homo sapiens
ctcaggagccgctcagtgattaaaacaagtctaaaaagccaaggggactccgtggccccaccactcccaggctggaaggcaggttcttgctttgtcagccyttcctcagcccttgtccataggcagaaggggtttttattaatacatgattgtagccttgtaggagatgagattatgtgtcttgctttgaaaattctacac

SEQ ID NO: 107823 - DNA, 201 bp, Homo sapiens
tgccattcctcccttgccctcggcaggtagagggccagtctcctggagcagcctcctggccctctgggagcttctgtcttacccattcctctgtcctcccrtgttgggtctgcaggggtagaagataaggagtcttggcatgggaagcccctccccaaaaacatggctgagcagatcatccaggagatctacagccagatc

SEQ ID NO: 107824 - DNA, 201 bp, Homo sapiens
ttgtccctagtctcgaagccaaagctgtgctgggcctccagtgctagcctcggttcgacttccctggaagtgggtgtgggcttggggtggcagccagttgscttccctggaatccctttctgggaagtcgagttggcttctctggctcagccccatcatgtggcccctttctggagctgctgtgccagaccagagtccctg

SEQ ID NO: 107825 - DNA, 201 bp, Homo sapiens
ccaggccaagcaccagccaacagccatcattgccaagaccttcaagggccgagggatcacgggtcagtatgcacaagccgccctccccaccttcacccctsgcccagacactgtggctacgtagctctgacccgcacatccagggaaacagcccttgctgctcactgagctcaccaggctccagggaaggggagcgggaga

SEQ ID NO: 107826 - DNA, 201 bp, Homo sapiens
gttgctgccgtccctctgctacccccatcccctcacatctcccaggccgggaacgttctgtttgctgggtaatttatcccaagttcagtgttctttttaaygtctcactgtcttgaaaagatcacagttgcctgtgttgaggggaggagagggcccctgtggtagagaaagagccaggtgcagcttcagtcttggggtcaa

SEQ ID NO: 107827 - DNA, 201 bp, Homo sapiens
cagagatctgaagaaacaacctgaggtctggagccagaggttctttccgggcagaagccagctcgggtagttcagggcacaggaagagcaagaactgcttytgatgttcatttccaccctgacatcctgggattctctcctgagtattttttttttttttttttttttttgaggtggagtctgttgcctaggctggagtgc

SEQ ID NO: 107828 - DNA, 201 bp, Homo sapiens
aggatcccttctcctctcagattaacggtggccttctgttatgacagaaacaagctttcaccgacgtggccactggctccctgggccagggcctcggggcygcttgtgggatggcctacaccggcaaatacttcgacaaggccaggtaacacacctactccccacccccaacctgggtagttttggggagtggtccttggg

SEQ ID NO: 107829 - DNA, 201 bp, Homo sapiens; identical to SEQ ID NO: 17569

SEQ ID NO: 107830 - DNA, 201 bp, Homo sapiens
ccctggcacccaggtgtgggcttcagattcctaggcctgggatggcctcacccattttaaagatgggaaaatgagactacaagtggtcagggacttgcccrgggacagaggaagtctatggcacgaggggggctgatcccagggcctgggtcggcttccctgccaaatgcccctggctgcccacctgcctgctctcagggg

SEQ ID NO: 107831 - DNA, 201 bp, Homo sapiens
ttcaccatgttggccaggttggtctcgaactcctgacctcagttgatccacccacctcagcctcccagagtgctgggattacaggtgtgagccactgtgcscggcctgtttgtgtttcctgtagaatgtgtggaacatgtgagtacatttcactgtatgttcctactggtgaagttgctgggagttaagggatgtgcatct

SEQ ID NO: 107832 - DNA, 201 bp, Homo sapiens
tttcaccatgttggccaggctggtctttgagccgctgacctcaggtgatctgcctgccttggcctcccaaagtgctggaattacgggtgtgagctaccgcrcccaacctgacatccattatctcttgaaggagcccatctggagggtgagggagcctctctggccttttcttgcatagaaacctgtgagcaggtggagtga

SEQ ID NO: 107833 - DNA, 201 bp, Homo sapiens
aggctggtctttgagccgctgacctcaggtgatctgcctgccttggcctcccaaagtgctggaattacgggtgtgagctaccgcgcccaacctgacatccmttatctcttgaaggagcccatctggagggtgagggagcctctctggccttttcttgcatagaaacctgtgagcaggtggagtgagcactaaagcgatgac

SEQ ID NO: 107834 - DNA, 201 bp, Homo sapiens
ttgttgttggacacgtaaggtagtttccaaatcgttctacaacaaatgtcgaccttctgtttagggttccctctcttcaaattagttcatgaatggatgtktgcagccccccacccctaactctaacagctcaggcaataccaagcctcagggttagcccaggctcctgtaggccccttccctgttcacaaccccttcctt

SEQ ID NO: 107835 - DNA, 201 bp, Homo sapiens
gtagtttccaaatcgttctacaacaaatgtcgaccttctgtttagggttccctctcttcaaattagttcatgaatggatgtgtgcagccccccacccctarctctaacagctcaggcaataccaagcctcagggttagcccaggctcctgtaggccccttccctgttcacaaccccttccttggcatctcctcgggacctc

SEQ ID NO: 107836 - DNA, 201 bp, Homo sapiens
ggatagggcctctgaagtgtgggcctgaggctttgtccttctggccatggtaccccacaggggcaccacctcctgtggtggaggccacagaagagcagtaygaggcaggagaggctgcagggagtgctcctggcctgctggcatgtggaagtgctgagtcatgctgacagctccgtggctagctgtcccagcctcttcctg

SEQ ID NO: 107837 - DNA, 201 bp, Homo sapiens
gccatgggaacgaggtggcaagtggttctccctgggacagggacaggcccgcaggctgagctcttagctacacgcagccctcaggatgtcccaccaggccsccaccagggcagatagtggtgcccagccctcccctcagccacgccgtgtgctctccctcacagaaaagatcaacatccgcgtgctggaccccttcaccat

SEQ ID NO: 107838 - DNA, 201 bp, Homo sapiens
gtgctctccaaggtaagagcccagctgcccactgccagccacaccttgcctgggactagggtcacacgggccctggaatggtgagtggtctttgaggagayctggctgggcccacctctcccaggtgccttctccctgctcgtcctggcctctccctcagtgtcctgctctgtgctgacccagctggctaaggaatacagg

SEQ ID NO: 107839 - DNA, 201 bp, Homo sapiens
acatgggggagccgaatgggactgcaggtgctctcaggaggagctgcgtacaggccaggcctggtggtgaatggggtctcttccaggtggaggacaggccyggccagtaggtggggccgtgatgggtttagcagcccgagtctgttgagcacctgtaatgcacacggctctgggccctgccaccctgagggatgcagagat

SEQ ID NO: 107840 - DNA, 201 bp, Homo sapiens
acagccacagtttgggaggttctgcccaggtgcaaatgtcctggacaggtgtgcacatgggggagccgaatgggactgcaggtgctctcaggaggagctgygtacaggccaggcctggtggtgaatggggtctcttccaggtggaggacaggcctggccagtaggtggggccgtgatgggtttagcagcccgagtctgttg

SEQ ID NO: 107841 - DNA, 201 bp, Homo sapiens
cgcgggcctttgaccagattcgcatggccgccatctccgagagcaacatcaacctctgcggctcccactgcggcgtttccatcggtgagtttagccagggygtttacacctggagctcccttgacttttgcaccaggaggtatgggagggggatgggccaggattccagcccatggatgggggggtaggggtcttatttct

SEQ ID NO: 107842 - DNA, 201 bp, Homo sapiens
ggcctgggtcggcttccctgccaaatgcccctggctgcccacctgcctgctctcaggggttgtggcttgttctgcccatgtagactcaggtatatgaggaygttctgagtgggggtttggcagtgctgggaggtgtctgggagggggtggatgtcgaggaaagggctctgggatattgtcatggctttggtgctgctgcct

SEQ ID NO: 107843 - DNA, 201 bp, Homo sapiens
gctctgtatgggaggccatggccttcgccagcatctataagctggacaaccttgtggccattctagacatcaatcgcctgggccagagtgacccggccccrctgcagcaccagatggacatctaccagaagcggtgcgaggccttcgggtatgtacgaggctgtggcctgagtgtggtcacagcacgggagagtggtctgt

SEQ ID NO: 107844 - DNA, 201 bp, Homo sapiens
ggagtagggctggggatggagtgagtgggctccggggtcccaccgcccgctgttgctgattttacatcctggtgctctttgtgcccttaaagtggctgggrttgtatcccagtttacccagctctgacatccaggtgctttggctgaaggcttgagggcctcctggggtctctggccccatgtggctccgcctctctgggc

SEQ ID NO: 107845 - DNA, 201 bp, Homo sapiens
tgtttccacactgctgataaaggcatacccaagtctggggaagaaaaagaggtctaatggacttacagttccacatggctagggaggcctcacagtcatgstggaaggtaaggaggaacaagtcacatcttatgtggaaggcgcaggcaaagagagagtttgtgcagggaaactcccgtttttaaaaccatcagatcttgt

SEQ ID NO: 107846 - DNA, 201 bp, Homo sapiens
tgctcttatcctagctctgctgctggcaggccgtgtgactttaggcaagtcactttctgtgaaccttagtggccccatcctccgaatgaagcatagtctartatttactgagcaattgctaatttctatgcatggtgccacgttctgtacatacacactacatcatttagtcagattcttcttttacctccgttttatagt

SEQ ID NO: 107847 - DNA, 201 bp, Homo sapiens
ctccagttgaagctggccctgggagcgtgggattagggtggcctccagttgaagctggcactgggagcgtgggattagggtccctgccaggcagaaaaggktttctcgtttaccatgtcctcccctccctctttcaggtgtagtgtcttttcccatgaccgggagttcatagaaatagttaagtataagatgatcgtgtgc

SEQ ID NO: 107848 - DNA, 201 bp, Homo sapiens; identical to SEQ ID NO: 17578

SEQ ID NO: 107849 - DNA, 201 bp, Homo sapiens
gagcgtgggattagggtggcctccagttgaagctggcactgggagcgtgggattagggtccctgccaggcagaaaagggtttctcgtttaccatgtcctcmcctccctctttcaggtgtagtgtcttttcccatgaccgggagttcatagaaatagttaagtataagatgatcgtgtgcgagaatgttggtactaaaccag

SEQ ID NO: 107850 - DNA, 201 bp, Homo sapiens
gaggccacagaagagcagtatgaggcaggagaggctgcagggagtgctcctggcctgctggcatgtggaagtgctgagtcatgctgacagctccgtggctrgctgtcccagcctcttcctgctgcccctgccttggccctgcggcagggaggcctggaggcttggactgctgagcatgcagccgggttgagggccttttcc

SEQ ID NO: 107851 - DNA, 201 bp, Homo sapiens
ttgattggttacaaattcagggtcaaagggcacaaagcagggaggtcaatctgcatgggtgtcagccagaggggctccacctcaaagcctccaccggtgtygccaaacacaagctgctctgcacaggggcccagcattggctgaggaggctgtggaggggagggagcagggcaggtgccgtgcaaggctttgagactcagg

SEQ ID NO: 107852 - DNA, 201 bp, Homo sapiens
gcgagaatgttggtactaaaccagcatggacagttttctggatttctctactactaacttgtctgcactgagcgtgactcacccctaacctggtgggagcrctgattggaggggcgggaggctggcggcgtgagctccagatggtgcatgtgcccttgggcttggcatgcggcgtgtcttcgtgtgaaggacctctgggag

SEQ ID NO: 107853 - DNA, 201 bp, Homo sapiens
tgcccctgccttggccctgcggcagggaggcctggaggcttggactgctgagcatgcagccgggttgagggccttttcctgcaggagcaggagggcagccrtgtcccctctgagcccaaccaggcaccagcctcatttcctagggctacacagctagacactgggcagggtaaggggaggtccccaagtcctaccactcct

SEQ ID NO: 107854 - DNA, 201 bp, Homo sapiens
aggtttgaacctcagtttggtggccacgtcctgtgcccagccccgcccagcctggggaggaggaacaggctcctggtgaaatgggagatagggtttccagrtgccccccttcggccttgattggttacaaattcagggtcaaagggcacaaagcagggaggtcaatctgcatgggtgtcagccagaggggctccacctcaa

SEQ ID NO: 107855 - DNA, 201 bp, Homo sapiens
atgcagccgggttgagggccttttcctgcaggagcaggagggcagccatgtcccctctgagcccaaccaggcaccagcctcatttcctagggctacacagmtagacactgggcagggtaaggggaggtccccaagtcctaccactcctcaccctacttgcatgcctgcacggcaaggagcggacagtctaggctacagtca

SEQ ID NO: 107856 - DNA, 201 bp, Homo sapiens
ccaccaagggcaggatcctcaccgtggaggaccattattatgaaggtaaggaggcctggggcaggcaggctgggcaagggacagggccagagagccgagcrttggacgtgcctcttctatctgagccccaggagggcagctgtggcccagaacacccagagctgtccctcagagcagctgggacgtggtctcttaaaaggc

SEQ ID NO: 107857 - DNA, 201 bp, Homo sapiens
ctgagcccaaccaggcaccagcctcatttcctagggctacacagctagacactgggcagggtaaggggaggtccccaagtcctaccactcctcaccctacwtgcatgcctgcacggcaaggagcggacagtctaggctacagtcagacctgcgtttgaatcctggctcagcaacttcctgacagcgcgaccttcagacaag

SEQ ID NO: 107858 - DNA, 201 bp, Homo sapiens
agggcaggatcctcaccgtggaggaccattattatgaaggtaaggaggcctggggcaggcaggctgggcaagggacagggccagagagccgagcgttggaygtgcctcttctatctgagccccaggagggcagctgtggcccagaacacccagagctgtccctcagagcagctgggacgtggtctcttaaaaggcctcagg

SEQ ID NO: 107859 - DNA, 201 bp, Homo sapiens
ctgggcagggtaaggggaggtccccaagtcctaccactcctcaccctacttgcatgcctgcacggcaaggagcggacagtctaggctacagtcagacctgsgtttgaatcctggctcagcaacttcctgacagcgcgaccttcagacaagtcctgtctgttgctgccgtccctctgctacccccatcccctcacatctccc

SEQ ID NO: 107860 - DNA, 201 bp, Homo sapiens
tccttcacacagcaggctccctaagtacacaccagcctctctaagtaggaggccccagtgggagagatgggctttgactctggggtcaaatgtagataatyggactatggacagtggctggctggtcaccaacaatggtgtttgaaacaaacatttagaggccatatttgggcttataaaaatagttctgggccgtgcatg

SEQ ID NO: 107861 - DNA, 201 bp, Homo sapiens
ccttggtgagccttggggcaggcttggctacacccagaagtgattcaccatgaagtaaagagagagagacacacaaagaatgagatgcatgtttaagagcrttttatttggcagagaaccagagatgtgagttaattattccctacagttgctggaaataattccctgtgaaggggcatttcctgaccctaacataatgga

SEQ ID NO: 107862 - DNA, 201 bp, Homo sapiens
atgagttatgtgatgggctcatggctacaggtggagaaaggcagtgcatatgcagcctcctccatccttgactaaggctgacagagggctgggcccaccaytgctcaccctgaggcctcgtcttctgactcccctcctttcatttctaggtggcattggtgaggctgtgtccagtgcagtagtgggcgagcctggcatcac

SEQ ID NO: 107863 - DNA, 201 bp, Homo sapiens
ttaacccctgaccttgaacagccacagtttgggaggttctgcccaggtgcaaatgtcctggacaggtgtgcacatgggggagccgaatgggactgcaggtrctctcaggaggagctgcgtacaggccaggcctggtggtgaatggggtctcttccaggtggaggacaggcctggccagtaggtggggccgtgatgggttta

SEQ ID NO: 107864 - DNA, 201 bp, Homo sapiens
aggagctgtgcaaggcctttggccaggccaagcaccagccaacagccatcattgccaagaccttcaagggccgagggatcacgggtcagtatgcacaagcygccctccccaccttcacccctggcccagacactgtggctacgtagctctgacccgcacatccagggaaacagcccttgctgctcactgagctcaccaggc

SEQ ID NO: 107865 - DNA, 201 bp, Homo sapiens
gattacaggcgtgagccactgcacccatcctgagagctggttttaatgatcacataatattctgttttatggagatgctataatccatctagccagtcctytgttgttggacacgtaaggtagtttccaaatcgttctacaacaaatgtcgaccttctgtttagggttccctctcttcaaattagttcatgaatggatgtg

SEQ ID NO: 107866 - DNA, 201 bp, Homo sapiens
ggcgtgagccactgcacccatcctgagagctggttttaatgatcacataatattctgttttatggagatgctataatccatctagccagtcctttgttgtkggacacgtaaggtagtttccaaatcgttctacaacaaatgtcgaccttctgtttagggttccctctcttcaaattagttcatgaatggatgtgtgcagcc

SEQ ID NO: 107867 - DNA, 201 bp, Homo sapiens
tcctctacgcggtctgggctgaagctggtttcctggccgaggcggagctgctgaacctgaggaagatcagctccgacttggacgggcacccggtcccggtmagtgctcctgccagagcctcccatgcctctgcctccacttcctatttcccagacatgtgggacgggggtagggggtgcccactgagaagccaaaggtgtt

SEQ ID NO: 107868 - DNA, 201 bp, Homo sapiens
gggagggcttcttggaagaggtgacatggggcagagatctgaagaaacaacctgaggtctggagccagaggttctttccgggcagaagccagctcgggtasttcagggcacaggaagagcaagaactgcttctgatgttcatttccaccctgacatcctgggattctctcctgagtatttttttttttttttttttttttt

SEQ ID NO: 107869 - DNA, 201 bp, Homo sapiens; identical to SEQ ID NO: 17583

SEQ ID NO: 107870 - DNA, 201 bp, Homo sapiens
aagaggacaaatattgctgggttgaaaatttccttcttgcaataaatctgagttcaaagaagctatagaattaagcattgtgcttttcatgtgaaattcarttcgacaaacatttattgttaaaaaaattattttaacttccccttcttaatacagtgggtcctgtagaaggaggaagtttagtgccaaacactgaactat

SEQ ID NO: 107871 - DNA, 201 bp, Homo sapiens
tggaaaatctctatcgcaagcactgtcccaggacttacagggacctgattaaaggcccagaggggtcagtgactggggagctgggtccaggtaacaaataragctaacactcgtttgctgctgctgcagtgtggaaatggacatttcctggagtgccacattttcacttgatctccactgtctcttggcggggtgggcaga

SEQ ID NO: 107872 - DNA, 201 bp, Homo sapiens
aaataaataaataagtaaataaatgtacacacacacacacacacgcacacacacatacacaaattcattttgacattaatgataatttgatgtttataggkagctttacctggcagtaaattatgtttttgattaataaaaaatgtagcaaataaaataataatgtattacttaatgaatccagtttgcttagtgaaaagg

SEQ ID NO: 107873 - DNA, 201 bp, Homo sapiens
aggtaacaaataaagctaacactcgtttgctgctgctgcagtgtggaaatggacatttcctggagtgccacattttcacttgatctccactgtctcttggsggggtgggcagagggttgcctctcaaatgtcagttaggattagctttctctgtctgtaatagaaaaatcccaaatgatactggctataaaacatacaccc

SEQ ID NO: 107874 - DNA, 201 bp, Homo sapiens
aagtaatctaaacattgacataaaaataatactattcacactgggtgtgctggcatgcacctgtagtctcagctactccagagaccaaggcaggaggatcrctggagcccaggagttcaaaggccagcctgggcaacatagcgagactctgtctcaaacaaacacacaagcaaaaataatactatttgcttgccacataaa

SEQ ID NO: 107875 - DNA, 201 bp, Homo sapiens
ctcagatatttccttataggaatgcaagaacagcctaacacactgcctaaattgtattttgctccttgaaaaaaatctgtaattaaattattttgggagargctgcataccacatccttttcttacagatgaatcacacacatgaggatattaaagcctctttatctttctgaactgaagaaatctaactggattcaaccc

SEQ ID NO: 107876 - DNA, 201 bp, Homo sapiens
ctgtccagccatctcctctccattcatgtaaacccagcattccagtctttgttccaacttcagaacagtggtgaagggaattggcattgttgataagataycactttgtgtattggtttttccctgttaataactgaatgctttaacaagtttatcagccccgcttgcttaacaaatatgttaaaacaggaactgtggttc

SEQ ID NO: 107877 - DNA, 201 bp, Homo sapiens; identical to SEQ ID NO: 17585

SEQ ID NO: 107878 - DNA, 201 bp, Homo sapiens; identical to SEQ ID NO: 17584

SEQ ID NO: 107879 - DNA, 201 bp, Homo sapiens
agtttgaatatatatcctcaccaaatctcatgtggaattgtaattccattgttggaggtggggcctggtaggaggtaattgggtcatgggggtggatcacwcacgacttggtgctgtcctcaggatagtgagtgggttctcgtgagatctggttgtttaaaagtgtgtggcacctacccccccacccccactctctctctt

SEQ ID NO: 107880 - DNA, 201 bp, Homo sapiens
cactgcctaaattgtattttgctccttgaaaaaaatctgtaattaaattattttgggagaagctgcataccacatccttttcttacagatgaatcacacamatgaggatattaaagcctctttatctttctgaactgaagaaatctaactggattcaacccatcacttcctaaacttatttgagcatggaaccctctttca

SEQ ID NO: 107881 - DNA, 201 bp, Homo sapiens
aatccacttatgttaaactttattttttttttcacctaaagtggaaaccaggcaatatttaacatgaaaatgatgtaagtagaaaattcatgaaggatggrtgaaatgctgcgatatgagattgggttgtattaagatatgattgagaaactcctggagcttagaggaattttgtaatccccaagtttgtagtgaaccaga

SEQ ID NO: 107882 - DNA, 201 bp, Homo sapiens
gggtggggatgggcaactgttctctgagcagctagaaccttaaacctctttccgctggtcatccttattggagcgcttatgttttttgttttttttttttktgagacggagtcttgctctgtcgcacaggctggagtgcagtggcgtgatctcggctcactacaacctccgcttcccgggttcaagcgattctcctgcctc

SEQ ID NO: 107883 - DNA, 201 bp, Homo sapiens
ctcccttctcagctctgcttcagctcactgcctcctccttgttcccagacatggcatgtgtgcttttgcctcagggcccttgtattcactgggatacagayctgagcttcagtgacttttatgccctgcatttgtggaactatatgaaccaggaagggaggtctgtggttagaggaagcaacacactggtggacaatctct

SEQ ID NO: 107884 - DNA, 201 bp, Homo sapiens
aaccaccttatgtcataatgtaattataatagttataacgatttaagttatgcaaaaacccacacacatctattgaaaaaaaaaaagacctgaaagaactmtacaacacacaataatagtaggtgttttcgtataattggattaggagtgaatttagtgatgagaatgtgttgattttataaataacattattttagaaaa

SEQ ID NO: 107885 - DNA, 201 bp, Homo sapiens
agttatgcaaaaacccacacacatctattgaaaaaaaaaaagacctgaaagaactctacaacacacaataatagtaggtgttttcgtataattggattagragtgaatttagtgatgagaatgtgttgattttataaataacattattttagaaaacaaaaagtaatctaaacattgacataaaaataatactattcacac

SEQ ID NO: 107886 - DNA, 201 bp, Homo sapiens
tacccctgtgttgttgagttggaagattgggtggtgatttatcagaaagtgtagcaggaagaacttgtcatttctaagacctcaaatactggttaactgcrtttgcagctagaagttaggctctgattcactgttttgtattttctaaaagggttatatgtaatttgaaagatagacctgccaagacgtgagatctgtgtt

SEQ ID NO: 107887 - DNA, 201 bp, Homo sapiens
ctgaccttatcccccacctactcttttatctgcaagtaaatttaacaaagaggggaaactacatgtgtgaacacaataatttccagaacaaacccggaaakcaattattgatagctatgtaaagtgttgcaaacaggggcatgtttgactgctgtggctgagtggagaacaaagagcattatcaccagatacacaaggcta

SEQ ID NO: 107888 - DNA, 201 bp, Homo sapiens
tgtaagacattaaagagactttcagttgaggtcaatttagaagaaagaacatatacaacaatacacttcaaacagatataactaataataagaatttaggkcagtcatcttacttttttgtgccttattttctttataaatgtagctaggaatagcacctactatagggtgatgtggcgaaaatcggataagttactgcgt

SEQ ID NO: 107889 - DNA, 201 bp, Homo sapiens
aatcacctccttttgttccttcagaaacgtgactcacttatcttttttatcaaaaatgtcatagaatacctcatagaactaagaaaaaatgtgaatgggtsaaggaaagaattcaattaatagtatatttgaatcactgattacttcctttcctccccatttccctgggcagccaatgctgatgctgacatactgacactt

SEQ ID NO: 107890 - DNA, 201 bp, Homo sapiens
caaaaaaataataatgaggattaaggatcatcatggtggacgggacacagactagattgcagctctgacttggatggacagagcagcatgcagaggctcaygtcgtgaattttagctccagaatgactactggaataaatcaggaatcccaagaggacccacagaccctctgaaggaagcagactgctcctgcaggacaca

SEQ ID NO: 107891 - DNA, 201 bp, Homo sapiens
aatccaggtgtcagctggtgcactcttttctggaggctctaggggagaaactgtttcctgcttatttgggttgttggcagaactcagtactttgcattgtrggatcagagtccccatgttcttgcttgcaaacttgcgaccttgtaaaccttaaaggtcaatcccagcttctagagaacactgcattctttagttcttggt

SEQ ID NO: 107892 - DNA, 201 bp, Homo sapiens
gttagggacagcacagctctgtttatgctgttaattaaagaaaaggatgtgcactaatttgccctgtagaaatcttgctgaattcagtgacaccatgcttytgagaatacaggaaatccagggaaacgcttgccttaactctgaacataccatctcatgctaatggcctttatgccttcaatctttgataggctcaagttg

SEQ ID NO: 107893 - DNA, 201 bp, Homo sapiens
ccttacatgataaattatgtacaagtattggataactccttgtacagtatatagaagacatgtaataatatttttaaattggttggtgtcaattttaagcrgtcaaagtgaaagcacagtgcaggaaaattacatttttaaaaagtggattaatttaatctggtcagtgcttaattaatcataggcatatatattatttgt

SEQ ID NO: 107894 - DNA, 201 bp, Homo sapiens
aaattataatcatgaaaactatatagaaaaatgtaaaattgtgatataaaaatgtgtagaatataaatgtacatgtatttgcaattatacagtatataatygtgtatagagtaatgatcattatctggagtatgtatgaatacagatacaaatggaaaggaaataagcaaaaatgaaaatgttagtttttctccaaaattt

SEQ ID NO: 107895 - DNA, 201 bp, Homo sapiens
gaatccaagtgtcctaggtcctctggctttcagatttcaaacaaagctacaatcaaggtgttgtctgtggctgtagtcatctcaggttgattaggggtcasggggagaatctgctttcaaactcactcaagcggttgttggtaggattcagttccgtatgggctgttgtactgagggcctcagttcctcactgactgtggg

SEQ ID NO: 107896 - DNA, 201 bp, Homo sapiens
tgtgcagtatccctatgaagtgggcatcaagaaggaggaggagctgtttctatatcttttgcaatcagggcaggctagagccctgcaatatgctttcttcrctgaaaggaaagcaaataagtggtcaactccctccggagcatcgtggaaaacagcatcagcgcggcctgtctcctcagttggtgttgttggtaagaccat

SEQ ID NO: 107897 - DNA, 201 bp, Homo sapiens
aatttaggattttatttcagttcaagtgactattcatcaacactggtgttcacatagactgcattatattcagaactaatttagaaattgtaatataggcygcgcgcagtggctcatgcctgtaatcccagcactttgggaggccgagatgggcagatcacttgaggtcaggagttggaaaccagcatggtgaaaccccat

SEQ ID NO: 107898 - DNA, 201 bp, Homo sapiens
ttaggattttatttcagttcaagtgactattcatcaacactggtgttcacatagactgcattatattcagaactaatttagaaattgtaatataggccgcrcgcagtggctcatgcctgtaatcccagcactttgggaggccgagatgggcagatcacttgaggtcaggagttggaaaccagcatggtgaaaccccatctc

SEQ ID NO: 107899 - DNA, 201 bp, Homo sapiens
ttttctttgtttttggagatggagtctatctcttttgcccaggctggagtgcagtggtgtgatctcagcccactgtaatctccacctcctgggttcaagcrattctcctgcctcagcctcctgagtagctgggattacaggtgcccactaccatgcccagttaatttttgtatttgtagtagagacagggtttcaccatgt

SEQ ID NO: 107900 - DNA, 201 bp, Homo sapiens
tggtaatttgttacagcagtaatacactactaatacaaaagctattagtaatcacgatattcagaatcctgctttggtttggaaaatatttttttctttcyttttttttttttttttttttttggggacagggtctcattctgtctcccagactggagtacagtggcacgatctcagctcaccacaacctccacctcccgg

SEQ ID NO: 107901 - DNA, 201 bp, Homo sapiens
tttgtggtaatttgttacagcagtaatacactactaatacaaaagctattagtaatcacgatattcagaatcctgctttggtttggaaaatatttttttcyttctttttttttttttttttttttttggggacagggtctcattctgtctcccagactggagtacagtggcacgatctcagctcaccacaacctccacctc

SEQ ID NO: 107902 - DNA, 201 bp, Homo sapiens
tttttattttttccagctgtattgaggtgtaatttctacagataaaattcatgcattttaagggggagtttggtgaattttggtagttgtttacagttgtrtaaccatggccacaatcaaaatatagttctatcaccctaaaaagtattctcatacccctttcccataaatccttttttcttccccttggccgcaggcaac

SEQ ID NO: 107903 - DNA, 201 bp, Homo sapiens
atatatatatatatatatatttttttttttttttttttttttttgagacggagtctcactctatcgccaggctggaatgcagtggagtgatctctgctcartgcaacctccgcctcctgggttcaagtgattctcctgcctcaggtttaccatatatttgtttgtaagacattaaagagactttcagttgaggtcaattta

SEQ ID NO: 107904 - DNA, 201 bp, Homo sapiens
cccaggaatgctgggaacagaggtagtatcacaagacagagatccaactctaagatatcccagcgctgtctatgccctgttacatggcatagattgcaccrgcagcccagcctgccttcctcctccgcttgtgcctccatgctcttgttctctccttcctctccccattgtccattcttgtcttccttttaggtcaccggc

SEQ ID NO: 107905 - DNA, 201 bp, Homo sapiens
tgaaccatggtgccatgaaaatctgtatacaggatttttgtgggcatatgttttcatttctcttgggtatatacccaggaatggatttgatgggtcatatrgtaactctatgtttaacatttaagaagctgccagattgttttccaaagtgtctactctgttttatattcccactagcaatgtatgaggattctgtattct

SEQ ID NO: 107906 - DNA, 201 bp, Homo sapiens
tcatataaacagaatcatacaatatgtggtctcctgtgactggctttttttgtttatcatgttttgcctattctggatatttcatataaacagaatcataygatatgtggtctcctgtgactggctttttttgtttatcatgttttgcctattctggatatttcatataaacagaatcatatgatatgtggtctcctgtga

SEQ ID NO: 107907 - DNA, 201 bp, Homo sapiens
attctatttcattctagtctttttttgtatgtaattttttcttacagattctttttcctttgaaaaatgtcctttaaaaaaaagtacattggctgggcatkgtggctcatgcctgtaatcccagcactttgggaggccgaggcaggcagatcacaaagtcaggagatcgagaccatcctggccaacatgatgaaaccccgt

SEQ ID NO: 107908 - DNA, 201 bp, Homo sapiens
atattatattataaggctatggtaaccaaaccagcatggtactgatacaaaaatagacacatagaccagtggaacagaatagagaacccagaaataaaacygcatacctacaccaactgatcttcaataaagtcaacaaaaatatgcaatgggaaaggatatgctgttcaataaatggtgctgggaaaattggagagccat

SEQ ID NO: 107909 - DNA, 201 bp, Homo sapiens
ttaaccaatgaggtgaaagatctctacaaggggtactacaaaacactgatgaaataaatgatagatgacacagacaaatggaaaaacatccatgctcatgsattgaaagaatcaatattgttaaaatggacatactgcccaaaacaatatacagattcaatgcaattcctatcaaattaccaatgtcatttttcatggaat

SEQ ID NO: 107910 - DNA, 201 bp, Homo sapiens
ttcagttgaggtcaatttagaagaaagaacatatacaacaatacacttcaaacagatataactaataataagaatttaggtcagtcatcttacttttttgkgccttattttctttataaatgtagctaggaatagcacctactatagggtgatgtggcgaaaatcggataagttactgcgtacaatgtccttaggacagcc

SEQ ID NO: 107911 - DNA, 201 bp, Homo sapiens
aaacagatataactaataataagaatttaggtcagtcatcttacttttttgtgccttattttctttataaatgtagctaggaatagcacctactatagggkgatgtggcgaaaatcggataagttactgcgtacaatgtccttaggacagccccacacatggtgatcactccataattgttagatatatattattattatt

SEQ ID NO: 107912 - DNA, 201 bp, Homo sapiens
gtaatatttatgaagaatgatgatctaaatctcagggttcttaaagtgtggtccagggactctcgggtgtggcctaagacctttacagagtccttgagatyagatctattttcgtaataataagacattacttgcctttctcacaaatgtgtagtggaattttccagagactgtaatatgccttgtgatatcacaacagat

SEQ ID NO: 107913 - DNA, 201 bp, Homo sapiens
agaatgatgatctaaatctcagggttcttaaagtgtggtccagggactctcgggtgtggcctaagacctttacagagtccttgagatcagatctattttcrtaataataagacattacttgcctttctcacaaatgtgtagtggaattttccagagactgtaatatgccttgtgatatcacaacagattgaatgcagaagc

SEQ ID NO: 107914 - DNA, 201 bp, Homo sapiens
gaagcagaggttgcagtgagccgagattgcgccactgcactccagcctgggtgacagtgagactccatctcaaaaaaaaaaaaaaagaaaaaaaaatatcrtgaggctatatgcattaaaaatggatttttcctttaaatggggggatgattttataaatctgtagtgtataaaaggagagttagaccagaaatatgacat

SEQ ID NO: 107915 - DNA, 201 bp, Homo sapiens
tgaccacccaccttggcttcccaaagtgctgggattacaggcatgagccactgcacccggcccagaggtgataattttgaatggttagcttactggttaaygacttcagctgttacgtgccagtacagtggtactaattgttaaaatgttcaaatacttcacttccattctggtaagtaaacacctgctactctgagccct

SEQ ID NO: 107916 - DNA, 201 bp, Homo sapiens
cccggatccaaaattttccagtgggtatgcttagtttggccctaggactggtctagacaagtgccttggatagctcccaaaatgcccatatgcagtctgcraggttttcagtgtccccgggataataggattatgctgatcagaactaattactgcacaccattaagcaggctttcttttcatttcagttttgttctctcc

SEQ ID NO: 107917 - DNA, 201 bp, Homo sapiens
aattctcaacatcactaatcatcagagaaatgtaaatcaaaactgcaatgagatatctcacaccacttagagtgactattattaaaaagtaaaacaacaayatgttggcaaggatgcagagaaaagggaatgcttatacactgttatttggaatggaaattagtacaacctttatggaaaaacagtatggagatttctcaa

SEQ ID NO: 107918 - DNA, 201 bp, Homo sapiens
tcttcatgcctgacagtattaacaggagaaaataatttcataacttctgcggcctttacattgctatgactctctctgtcagcttgaatctagtaaagtgygtatctgttatagctattttcatttttttcctgtttttgatatttgcaaaattatgaacataaaaaaggaagataggttgaaatgggaaaagctggtttc

SEQ ID NO: 107919 - DNA, 201 bp, Homo sapiens
aacatataactcataaatatgtatacatgttaccctgatattttatattgtgatgactcatgcccttaacaaagatatggagctaagttgctgtgaatagrcttgattaacagtatcacacatacaaaaatgagaggggctgactcaatctcagaataatgatctttggaggagagtccctattccccttttctgagattt

SEQ ID NO: 107920 - DNA, 201 bp, Homo sapiens
ttttctcatctcttctttttctttgaaaaaatcctggtcacaagccacaaacttgatttgatgacttttggtttaaaaaaaaaaactgtctaaaaaaaaaaggaaagaccttctatagtcaaagaagctgaagagttttggtcagtagtcatgaaatgctgtctctactccagactctatttcttcatgcctgacagtatt

SEQ ID NO: 107921 - DNA, 201 bp, Homo sapiens
tctgaaaaatcaaggaggaaagattcctccctaaatcattctatgaaagcagtaccaccttgataccaaaatcaggcaaggacacaagaaaaaaaaaaaacaaaaactaaaggccaatataactgatgaacataaatgctaaaatcatcagcaaaatactgtcaaactaaatccaatagcacttcaaaaagatattacatc

SEQ ID NO: 107922 - DNA, 201 bp, Homo sapiens
tgtaaaaacgataatctcaatgaactgactccattcagctattacaacttccatttttaaagaaagttgaagaacttggaaaattgcttacatatagtatkaagaagaaaacagccaggtagaaaattttacaagtgtgtgcgtgtgttcttatatgtacctgcataaggaaaaaactataaggcgatgtaacaaattttc

SEQ ID NO: 107923 - DNA, 201 bp, Homo sapiens
cttcttggtgcttgcacatctcagaccctttagccagaccctttagccaaacccttgccaataacagtatttttgttctcagttctgttccctctggttgyggagactttgaataaaaatgcacacacctattcagtgggatttagctggaaaaggtgaccttccaacctcacgtcaacttctggctcctcaaacagtagg

SEQ ID NO: 107924 - DNA, 201 bp, Homo sapiens
aacctcccaagactgaatcaggaagaaatagaaatcctgaacagaccaatactgagttatgagattgaatcagtaataaaaaattttttgaccaaaaaaaacccaagaccagatagattcacagccaaattttaccagatgtgcaaagaagagctggtaccaatcttcctgaaactattctgaaaaatcaaggaggaaaga

SEQ ID NO: 107925 - DNA, 201 bp, Homo sapiens
ctttcctaagcttcacttgctcttagtctcggctcaagaacggtctttggtggattttaaatcccttgagatggtaagtgaagcattctttgcaccagctkaggtacaatcttctggggagagggtccatagtttactaaaagcatcaactttctttcttttctttttttcttatatttaagtttttttaatcataattaa

SEQ ID NO: 107926 - DNA, 201 bp, Homo sapiens
attctgaccttacctggagatgagtcaatttagagagccatgtgaaatacatgggtggaggaagcagcaggaaaggccctgggagcttgctgggtccccargcaggccattcctgcctagcatcacagagatccttcgagagggtggccagaggcatggggaaaacaccacagggagacgaaagtctgcagctgaactttg

SEQ ID NO: 107927 - DNA, 201 bp, Homo sapiens
caaacacaaaacaaaaatgagcagtagtagctatatttacatcagataaagcagattttaaatcaacaacagtaaaaagacaaagaatgtattatataatrataaagggttcaatacaaggagaagatatagctgtcttaaatatatatgcatcccaaaatggacaactcagatttataaaacaaatactactcaacctaa

SEQ ID NO: 107928 - DNA, 201 bp, Homo sapiens
attggataactccttgtacagtatatagaagacatgtaataatatttttaaattggttggtgtcaattttaagcggtcaaagtgaaagcacagtgcaggamaattacatttttaaaaagtggattaatttaatctggtcagtgcttaattaatcataggcatatatattatttgtagaagaaatttaatagtcatagtaga

SEQ ID NO: 107929 - DNA, 201 bp, Homo sapiens
cttcctatttctaattttatatgggaagtcgtctcctcctagctgattgagagattcttacttgagtgtaatacacacacacacacacacacacacacacmtataaattttttccccaaaacaaatagtttaaatccttcattgctagtttagccagccatgtttgcttccattcagataaacaccagccctctttataag

SEQ ID NO: 107930 - DNA, 201 bp, Homo sapiens
ccttcctatttctaattttatatgggaagtcgtctcctcctagctgattgagagattcttacttgagtgtaatacacacacacacacacacacacacacacatataaattttttccccaaaacaaatagtttaaatccttcattgctagtttagccagccatgtttgcttccattcagataaacaccagccctctttataa

SEQ ID NO: 107931 - DNA, 201 bp, Homo sapiens
ggtactggcaagaaagcaagcgatgtgtcactgtcttcttccttctgaccctggggtaggggatgctgatgtcccctacctcttacctcagaatatgcagwtcaaattgcatatttacaactggtgaagaactgtcaaggcaaatttaggaacggtgcaaaccctcatcaaacttctatatctcctattgctgacattctg

SEQ ID NO: 107932 - DNA, 201 bp, Homo sapiens
tatctgaaagcctctactacagtacctacacaaagaagatggtcaataaatgttattgtttaattcacacagagtcttataatagaattcatttttcttcygatagtcacccatctcagtgaccatggcactgctttattgggttattgtgtgaagatgcaaaattattgacaaaatatggcaaaagtatgctgaaatggt

SEQ ID NO: 107933 - DNA, 201 bp, Homo sapiens
tgtgatctcagcccactgtaatctccacctcctgggttcaagcgattctcctgcctcagcctcctgagtagctgggattacaggtgcccactaccatgccyagttaatttttgtatttgtagtagagacagggtttcaccatgttggccaggctggtctcgaactcctgacctcaggtgatccacccgccttggcctccca

SEQ ID NO: 107934 - DNA, 201 bp, Homo sapiens
gcccactaccatgcccagttaatttttgtatttgtagtagagacagggtttcaccatgttggccaggctggtctcgaactcctgacctcaggtgatccacycgccttggcctcccaaagtgctgggattacaggcgtgagccaccgtgcccggtccttttttttttttaaccatccacagccaatggggtgtgctagggat

SEQ ID NO: 107935 - DNA, 201 bp, Homo sapiens
ttttaaccatccacagccaatggggtgtgctagggataaggtagatactatatattactctgctgctgctacttctattattattataaaaaactaaacayctcacatttctatagagatctgtagttcataaagtacttctatagagatttatagaatataaagagaatctgttattctcacttaatactcagaattact

SEQ ID NO: 107936 - DNA, 201 bp, Homo sapiens
tataccttaaaatcagcttctgaacttttcaagaatagtcttactaggccccacctttaaatattccctttttttttttttttttgagacagagtctcacyctgtcgcccaggctggagtgcagtggcacaatctcggctcactgcaacctctgccgcccagattcaaagcgattctccttcctcagcctcccgagtagta

SEQ ID NO: 107937 - DNA, 201 bp, Homo sapiens
gattctcccacttcagcctccagagtagctgggaccacaggggtgcgccaccatgcccggctaattttttgtatttttggtagagacagagtttcaccacsttgcccaggttggtctcaacctcctgagctcaaagcaatctgcccacctcggcctcccagagtactggaattacaggcgtgggctactgtgcccagccaa

SEQ ID NO: 107938 - DNA, 201 bp, Homo sapiens
ccattcacttcacctgttcaaaaccactatcctcaaatccatcttaaccctgaaaccatggcttccttactttttttccctctggaattttcccaaacaawatatcttccttcctcagatgctagctccctgattggcttctctgggccactttcctaagcttcacttgctcttagtctcggctcaagaacggtctttggt

SEQ ID NO: 107939 - DNA, 201 bp, Homo sapiens
cataagacaggtaattctggaaagtagagtgattacaacagcaaccttctccacaatttccttagaatgccgtctgaaaatgaacgaatctttagcagtarccacaaaggatatgcctgatcatattgcagttcgttcgctgatgttctctgtccaatcaactgacaggactacagtgtcctgctcctctttctgttttat

SEQ ID NO: 107940 - DNA, 201 bp, Homo sapiens
tcaacatcactttttctttgtacctttattacagcactcagatatcttagtgtgccttacatgataaattatgtacaagtattggataactccttgtacartatatagaagacatgtaataatatttttaaattggttggtgtcaattttaagcggtcaaagtgaaagcacagtgcaggaaaattacatttttaaaaagtg

SEQ ID NO: 107941 - DNA, 201 bp, Homo sapiens
gaatggtaggaatttaattctgactgatttacttcatgtattttgttttcttttagtacgactttactccgtgacataaaagaaggactacagaaagctgkaatagaccatacaataaaagccattgtgatttgtggagcagagggcaaattttctgcaggtaactcaagtctaaccctctcccaccatctctggaatcca

SEQ ID NO: 107942 - DNA, 201 bp, Homo sapiens
gggaaacgcttgccttaactctgaacataccatctcatgctaatggcctttatgccttcaatctttgataggctcaagttggcttaccagaagttacactkggacttctccctggtgcaagaggaacccagcttctccccagactcactggagttcctgctgcacttgacttaattacctcaggtcagtatagaccttggc

SEQ ID NO: 107943 - DNA, 201 bp, Homo sapiens
tgaatcattctttttctcctttgatttttatctgcaggcttgggaacaatgggccgaggcattgtcatttcttttgcaagggccaggattcctgtgattgstgtagactcggacaaaaaccagctagcaactgcaaacaagatgataacctctgtcttggaaaaagaagcctccaaaatgcaacagagcggccacccttgg

SEQ ID NO: 107944 - DNA, 201 bp, Homo sapiens
catgatgctgaatgtgtgtgctgttattcaaagaccaagagactaaaggctctctctctctctaccttccccagctggaatgggcacagggaattatccarctgggagtgtcaactctggaacctaatgctccgttttcctttctgtaatgaaccctggtcctgttcctgtggctgtgctgggctgtgttagccactttta

SEQ ID NO: 107945 - DNA, 201 bp, Homo sapiens
gaagaacatttatttagtttctacttcttataggaaaggagggagaaaagggaatttccaatggtcaaggttccaatcagcacttttggaaccaattacgrgtgggaagggagtgtagaaggttaacatacctaaaacgcaatttgggacttagcggcacatttctctacaaacttaacactgtatcctggtgagttgact

SEQ ID NO: 107946 - DNA, 201 bp, Homo sapiens; identical to SEQ ID NO: 17588

SEQ ID NO: 107947 - DNA, 201 bp, Homo sapiens; identical to SEQ ID NO: 17589

SEQ ID NO: 107948 - DNA, 201 bp, Homo sapiens
ccgtatgggctgttgtactgagggcctcagttcctcactgactgtgggctgaaagcctccctcagttctttgccacgagggcttcaccatagggtggctcwcaacagggcagctggcttccatcagagtgaccaatttgagagggcaagaaagtatgagcaagactgaagccagagtctttttgtaacctaatctagaaat

SEQ ID NO: 107949 - DNA, 201 bp, Homo sapiens; identical to SEQ ID NO: 17590

SEQ ID NO: 107950 - DNA, 201 bp, Homo sapiens
gttgaacaatcagtttatgtttatctttttaagaaacaactaaactgttttccaaagcaatgtgctgttttacactctcagaagcaacgtatgaggcttcyggtttctctacatcatcaccaacattcagtagtgatggctttttattatagtcattctagtaagtctaactgcataacaaatgaccccaaaacttagtgg

SEQ ID NO: 107951 - DNA, 201 bp, Homo sapiens; identical to SEQ ID NO: 17592

SEQ ID NO: 107952 - DNA, 201 bp, Homo sapiens; identical to SEQ ID NO: 17591

SEQ ID NO: 107953 - DNA, 201 bp, Homo sapiens
atctgcaggcttgggaacaatgggccgaggcattgtcatttcttttgcaagggccaggattcctgtgattgctgtagactcggacaaaaaccagctagcarctgcaaacaagatgataacctctgtcttggaaaaagaagcctccaaaatgcaacagagcggccacccttggtcaggaccaaaacccaggttaacttcatc

SEQ ID NO: 107954 - DNA, 201 bp, Homo sapiens; identical to SEQ ID NO: 17594

SEQ ID NO: 107955 - DNA, 201 bp, Homo sapiens
caagaaggaggaggagctgtttctatatcttttgcaatcagggcaggctagagccctgcaatatgctttcttcgctgaaaggaaagcaaataagtggtcarctccctccggagcatcgtggaaaacagcatcagcgcggcctgtctcctcagttggtgttgttggtaagaccatggggtaatgaatggaatcctccaaatc

SEQ ID NO: 107956 - DNA, 201 bp, Homo sapiens
caatcagggcaggctagagccctgcaatatgctttcttcgctgaaaggaaagcaaataagtggtcaactccctccggagcatcgtggaaaacagcatcagygcggcctgtctcctcagttggtgttgttggtaagaccatggggtaatgaatggaatcctccaaatctgctcatgtaatgtgctaccatttgcttagggct

SEQ ID NO: 107957 - DNA, 201 bp, Homo sapiens
ctcctgcttcagcttcccaaatagctgtgactataggcatgcaccatcatgcctggctaatttttgttgttgttgttgttgttgttgttgttgttgttgtkacagagtttcaatcttgttgcccaggctggagtgcaatggtgcgatcttggctcactgcaacctctgccacctgggttcaagtgattctcctgcctcagc

SEQ ID NO: 107958 - DNA, 201 bp, Homo sapiens
tgttgcagcttctatggacaacagcatgacagtttgtcaaaaaggtaaaaattgccatataatccagcaattccacttctggatatttaccccaaagaatkgaaagcaggggccaggcacagtggctcacgcctgtaatcccagcactttgggaggccaaggcaggtggattacttgaggtcaggaattcgagaccagcct

SEQ ID NO: 107959 - DNA, 201 bp, Homo sapiens
tgtatttttagtagagacagggtttcactatgttgtccaggctggtcttgaacctctgacctcaggtgatccgcccaccttggcctcccaaagtgctggarttacaggcgtgagcctttgtgcccagcctcacttgtgattttttaagaagatggataagtagagtgacaaagaactatgattgttcctctttttgtacta

SEQ ID NO: 107960 - DNA, 201 bp, Homo sapiens
tcaaagaatctgtctctaatataaatacattgtgctcctttcagctctgactctgttgaggtctacccttgattcgcttgggattttttttttttttttttgatatggagtttcgctctgtcacccaggctggagtgcagtggcgcaatctcagctcaccacaacctccgcctcccaggttccagcaattctcgtgcttca

SEQ ID NO: 107961 - DNA, 201 bp, Homo sapiens
gaaagattctctgcttttaaggactcatatgattagattgcactcaatcagataacacagggtaatatccccatctcaatgtctaatttttttttttttttgaaatggggtctcactctgtcacccaggctgcagtgcagtggcacgaccttggctcactcactgcaacctctcaggctcaaacgattctcccacttcagc

SEQ ID NO: 107962 - DNA, 201 bp, Homo sapiens; identical to SEQ ID NO: 17597
  misc_feature (1)...(201): n = A,T,C or G

SEQ ID NO: 107963 - DNA, 201 bp, Homo sapiens; identical to SEQ ID NO: 17598
  misc_feature (1)...(201): n = A,T,C or G

SEQ ID NO: 107964 - DNA, 201 bp, Homo sapiens
gcggttgttggtaggattcagttccgtatgggctgttgtactgagggcctcagttcctcactgactgtgggctgaaagcctccctcagttctttgccacgwgggcttcaccatagggtggctcacaacagggcagctggcttccatcagagtgaccaatttgagagggcaagaaagtatgagcaagactgaagccagagtc

SEQ ID NO: 107965 - DNA, 201 bp, Homo sapiens
tggagctcccagaggctataccttaaaatcagcttctgaacttttcaagaatagtcttactaggccccacctttaaatattccctttttttttttttttttgagacagagtctcaccctgtcgcccaggctggagtgcagtggcacaatctcggctcactgcaacctctgccgcccagattcaaagcgattctccttcctc

SEQ ID NO: 107966 - DNA, 201 bp, Homo sapiens
tggtaggaatttaattctgactgatttacttcatgtattttgttttcttttagtacgactttactccgtgacataaaagaaggactacagaaagctgtaakagaccatacaataaaagccattgtgatttgtggagcagagggcaaattttctgcaggtaactcaagtctaaccctctcccaccatctctggaatccagcc

SEQ ID NO: 107967 - DNA, 201 bp, Homo sapiens
taacaatgcccatgtatttctcaactctgttttctccttgtctttgtgcccttaggtgctgatattcgtggcttcagtgctcctaggacatttggccttayactgggacatgtagtagatgaaatacagagaaatgagaagcccgtggtggcagcaatccaaggcatggctttcggagggggactagagctggccctgggc

SEQ ID NO: 107968 - DNA, 201 bp, Homo sapiens
taatcagaaatctcaccaagtaaatacttgaccctgaagactccactggcaaggtctactgtaaagtcaaggaaaatattccaattttacataaacatttyagagaatcaaaaaagtggggccactttctctattagtttcttagagcaccataacaaattgccacaaaccaagtggcttaaaacaacagaaatctattct

SEQ ID NO: 107969 - DNA, 201 bp, Homo sapiens; identical to SEQ ID NO: 17639

SEQ ID NO: 107970 - DNA, 201 bp, Homo sapiens
tgaaattctttgtattacgaattacccagagtattagagtagatccttttgacccagctgaaagataactggtgacaactagacagtagactggggaagagtgtgtgtgtgtgtgtgtgtgtgtgtgtgtgtgtgtacatgctcgtgtggatatgcatatgtgcctgtgtattatagatacatatatcttgataaaataca

SEQ ID NO: 107971 - DNA, 201 bp, Homo sapiens
gaaattctttgtattacgaattacccagagtattagagtagatccttttgacccagctgaaagataactggtgacaactagacagtagactggggaagagtgtgtgtgtgtgtgtgtgtgtgtgtgtgtgtgtgtacatgctcgtgtggatatgcatatgtgcctgtgtattatagatacatatatcttgataaaatacat

SEQ ID NO: 107972 - DNA, 201 bp, Homo sapiens
agagggggatttggcagggtcataggacaatagtggagggaaggtcagcagataaacaagtgaacaaaggtctctggttttcctaggcagaggaccctgcrgccttccgcagtgtttgtgtccctgggtacttaagattagggagtggtgatgactcttaacgagcatgctgccttcaagcatctgtttaacaaagcacat

SEQ ID NO: 107973 - DNA, 201 bp, Homo sapiens
tttggcagggtcataggacaatagtggagggaaggtcagcagataaacaagtgaacaaaggtctctggttttcctaggcagaggaccctgcggccttccgmagtgtttgtgtccctgggtacttaagattagggagtggtgatgactcttaacgagcatgctgccttcaagcatctgtttaacaaagcacatcttgcaccg

SEQ ID NO: 107974 - DNA, 201 bp, Homo sapiens
gtttacaaatagttcacatattataatagtttgattttttagaagaaaattcaaaaagttttgtttaggaaaatacattttttaaaattattttttgacarttttgtgaatgtacatcaaagatagccagagagaattgcagagaaagctgattgattcagcatatggagtcttaacttgaagaaacaatttccttttaaa

SEQ ID NO: 107975 - DNA, 201 bp, Homo sapiens
ataggacaatagtggagggaaggtcagcagataaacaagtgaacaaaggtctctggttttcctaggcagaggaccctgcggccttccgcagtgtttgtgtmcctgggtacttaagattagggagtggtgatgactcttaacgagcatgctgccttcaagcatctgtttaacaaagcacatcttgcaccgcccttaatccat

SEQ ID NO: 107976 - DNA, 201 bp, Homo sapiens
gcaccgcccttaatccatttaaccctgagtggacacagcacatgtttcagagagcacagggttggggataaggtcacagatcaacaggatcccaaggcagragaatttttcttagtacagaacaaaatgaaaagtctcccatgtctacttctatccacacagacccggcaaccatccgatttctcaattttttccccaccc

SEQ ID NO: 107977 - DNA, 201 bp, Homo sapiens
agagagcacagggttggggataaggtcacagatcaacaggatcccaaggcagaagaatttttcttagtacagaacaaaatgaaaagtctcccatgtctacytctatccacacagacccggcaaccatccgatttctcaattttttccccacccttcccgcctttctattccacaaaaccgccattgtcatcatggcccatc

SEQ ID NO: 107978 - DNA, 201 bp, Homo sapiens
tccacacagacccggcaaccatccgatttctcaattttttccccacccttcccgcctttctattccacaaaaccgccattgtcatcatggcccatccccartgagccgctgggcacacctcccagacggggtcgtggccgggcagaggggctcctcacttcccagtaggggcggccgggcagaagcgcccctcacctcccg

SEQ ID NO: 107979 - DNA, 201 bp, Homo sapiens
ttttatagcttttacaaatcaggtcccaactcaggtctgtgactaacatttgtttgaaatgtctcttatgttaatattctatatatttcccttcccttttstgtcttttgccatcgattacataaatcatttgtcctatagaatttctcatgttctgaattttattgctgacatctctttcctgtcaccatatctttgtct

SEQ ID NO: 107980 - DNA, 201 bp, Homo sapiens
catctctttcctgtcaccatatctttgtctctttatttctggtaaatttgtagcataaatggtagtgaaatctgaaaagtacgtatccagtttaggttacrttttctaacagtaatacttcataaatggtgagatggttgaattcttgaattggttaaaaaaaagcatgtgggtgatacatgtcaacactatttttttttc

SEQ ID NO: 107981 - DNA, 201 bp, Homo sapiens
tgaccctgtatggatttatactgctgagaaaatttaaattgcgttcaaaagagagctattttatgaacatctaccttaaatatgcatcttgcttatgactrattaatgccttgctatgtttttgtggagcagtcttgaagaaccaggtggcgaaccattcatttctaatgtgttgtagctaggaattagttgaatttgact

SEQ ID NO: 107982 - DNA, 201 bp, Homo sapiens
gaacttaagtcagcgggtgatgaaataatgaaaagcaatcattcaaaaacttttgagtgttacaaatagaagtgaggaagggcggggaaagcttgtttttrgtgtttggtaatacagacagcagatatgccaagtgtatgctcatcaagcagctgagactgcctaaagggtcactgtaaaaaaagactcatttttaagaaa

SEQ ID NO: 107983 - DNA, 201 bp, Homo sapiens
tctcttcgtcctcatcatgatgcttctacatttaccataaacattgcacttaataacgtgggagaagactttcaggtaattatgactcttgtgtttttagrtttttcaaaagaaatatatcattatgaaaaggactttgccttaggccttagtttcttttttaaattttgctcaaatgacataatttgaattttgccactg

SEQ ID NO: 107984 - DNA, 201 bp, Homo sapiens
atctcactgtatcattcatttggcttgtggagggtggattggaaaaggtattaattatagttatttaaattataatactgtttggttaaagaactctgtayattttatctttccttatccttagatgtgtcagtctgctaaaagatttacattgcataattttctatctttcttttgattggaagtttagagattttacat

SEQ ID NO: 107985 - DNA, 201 bp, Homo sapiens
tggattggaaaaggtattaattatagttatttaaattataatactgtttggttaaagaactctgtatattttatctttccttatccttagatgtgtcagtytgctaaaagatttacattgcataattttctatctttcttttgattggaagtttagagattttacataaagttgtactctgtctttataggaattctatat

SEQ ID NO: 107986 - DNA, 201 bp, Homo sapiens
tcagccaaatatttcaattatactgtgaaggtatggtatatcctttaacctatgaagatcctataatgtgtgcctaaagtatgtttttcataacagcagtrcaatctgtaatcctcacaaggaagatagcatttggttacataattactgttagttcatgtagtttttggctttattaatatttcctaacacaaagaaatg

SEQ ID NO: 107987 - DNA, 201 bp, Homo sapiens
tacaatgtaaataagatttggcagggatttttttcactgactgcataattttttctgtaatgggttttgctatcgtaggatgattctttgtttgcagggarttagaaacaaatgtgaagagggtgccttttctgtctattattgagaattgcttttgtttttgctttttttgtttgtttgtttgtttgttttcatttagag

SEQ ID NO: 107988 - DNA, 201 bp, Homo sapiens
gtaaggaactttatatatgatatgctgttaagtcactatatgaaccatgtaaggtagatactactttatttctggatgaggaaaacttgtcccaaggcaartaactatataaagtataatatcagatcttggaccccatccccacttaacttactggagtttatgatccttttgctctctcctcatgtaatgcagtggttc

SEQ ID NO: 107989 - DNA, 201 bp, Homo sapiens
ttaatagtattggagggggccagaaagtgagattaatgaaagaagtcatggaacactatgctgatcaagatgatctggttgtcatgtttactgaatggtargagaaacaccctgtggattttaaaatctatattcaattactttttaaagagctgagatttatatttgtagatgatgtattaaaatatggttgggcacggt

SEQ ID NO: 107990 - DNA, 201 bp, Homo sapiens; identical to SEQ ID NO: 17644

SEQ ID NO: 107991 - DNA, 201 bp, Homo sapiens
ctgttgtgctttgaattattggagagttgtgttatttcctcttttattatgattaagtgtattacaaagaatttgaggatgatgtttttaaaatactaggstaaatgcagaaacagtacagaggagtgtttgctttcttgatatagccagagggcgctcactatacaaggagactagagacctctaactttgaacttcaaa

SEQ ID NO: 107992 - DNA, 201 bp, Homo sapiens
tcattgttcagctcccacttatgagtgagaacatgcagtgtttgtttcccgtttctgtgttagtttggtgaggatgatggtttccagcttcatccttgtcyctgcaaaggacatgaactcattctttttcatggctgcatagtatttcatggtgtatatatgccacattttctttttttattattattattattattattt

SEQ ID NO: 107993 - DNA, 201 bp, Homo sapiens
tactgtaggtgtctgtgctcagcctttaaacaggtttatcttattactaaattactattcatgtgactcttatttgtatttttcctaataagtctcactakcccatttaaaactctatttcattgtttgctttttcttttttgatcatcctttccggtattatatctaatataatatgaaataaaatgacctttatgattt

SEQ ID NO: 107994 - DNA, 201 bp, Homo sapiens
aaaactctatttcattgtttgctttttcttttttgatcatcctttccggtattatatctaatataatatgaaataaaatgacctttatgatttataagactttttttttgacatttctagacatactttgtcctgctttacaattcatattctggagaagactattcagtgtgcacctacagatgatatattagtagaatt

SEQ ID NO: 107995 - DNA, 201 bp, Homo sapiens
cagtcgaatcacactaaaattggtaacttttatgttgatggttttcccattaatctgtccatagaattgtgttaaatttttcctttttttgttaagtaaawtttttttatatatgaccatttattttactctctggtttcaaagggtattttgtaaaatgtgattatttaagtttataactcagattgatggctattatgc

SEQ ID NO: 107996 - DNA, 201 bp, Homo sapiens
tggttataattaagggttgttttgataggttttaaaatttataattaagccaacagtaacactaacagccagaacattccagtattcctgattgcatgagtttttttgtgtgaaatagctattattctgctttaaatacaagttttttttaccaatattagattttcacttctagagattgaaaagaatatatttgctgaa

SEQ ID NO: 107997 - DNA, 201 bp, Homo sapiens
tagttttgctaaggtaatattggagaagaatgtcattctttttttcatacatatgatggaccagagtgactaagacattacatgctttgccttagttctcaaacatgtcagcctgattaaaaaggggcagtacactctcaggactaaaaggatgtgcccttacatttagaaaaaaaaaggcacacgtttctgttcaaacag

SEQ ID NO: 107998 - DNA, 201 bp, Homo sapiens
atatgatggaccagagtgactaagacattacatgctttgccttagttctcaaacatgtcagcctgattaaaaaggggcagtacactctcaggactaaaagkatgtgcccttacatttagaaaaaaaaaggcacacgtttctgttcaaacagttgagtggtaaaaagatgtgttgcttgtggaaatagtaattggtgtggaa

SEQ ID NO: 107999 - DNA, 201 bp, Homo sapiens
aacctcctgtcattcttgtctaaagtataaggaaaaaaatatggcagaagcttttgatctggaatacacttcatgtccaaaagctacacgaaggagcaactgtgtgtgtgtgtgtgtgtgtgtgtgtataagttgaaacactgaataattccccagagattaatttctgaatttagctgacacgttgtatacagtaattcc

SEQ ID NO: 108000 - DNA, 201 bp, Homo sapiens
aagttcagtttcaaaagtacaagtatttggctaaaaataaaattttttaacatacacatttgtaaaaactttgaagtgagttttcctctgtctctcccttyactgtagtccctttcatgttaatttttaactttgttcagtgtttacagtgtgccaggagttatttttaatttttttaaattataacttgaggatatagat

SEQ ID NO: 108001 - DNA, 201 bp, Homo sapiens
acctcctgtcattcttgtctaaagtataaggaaaaaaatatggcagaagcttttgatctggaatacacttcatgtccaaaagctacacgaaggagcaactgtgtgtgtgtgtgtgtgtgtgtgtgtataagttgaaacactgaataattccccagagattaatttctgaatttagctgacacgttgtatacagtaattccc

SEQ ID NO: 108002 - DNA, 201 bp, Homo sapiens
ccaagctgtcacttaccttagtctacactgcaggactctggtagcttcagggtcaaatctagcctaaatattgtttttcaaaagcctcaaattaagttctrtgtttcaggaaattttacttaaaaatcagaatctttcttgttttggaggagaaaaaaggaaaagaaggcctggaaaccctgggttttccttcccgtatgg

SEQ ID NO: 108003 - DNA, 201 bp, Homo sapiens
aggtttgtcgaagatcagatggttgtagatgtgtggtgttatttctgaggcctctgttctgttccattggtctatatatctgttttgttaccagtaccttsctgttttggttactctagccttgtagtatagtttgaagtcaggtagcatgatgcctccagctttgttctttttacttaggattgtcttggctatacgggc

SEQ ID NO: 108004 - DNA, 201 bp, Homo sapiens
cttttattacagcatattgttatagttgttctattattgttgttagtcttactgtactttatgtataaattaaactttattataagtatatatgtgtaggaaaaaacgtagtgtatgtgtagcgtttgttactatctgctttcaagcatccactggggtcatggaatgtatcaccctcacataaggcggggactgctgtac

SEQ ID NO: 108005 - DNA, 201 bp, Homo sapiens
ggaacagtagaccctggggatcactagaggagtgagggagtagggagggggacaagggttgaaaaaccaactaatgggtactgtgctcactaccttggtgwtgggatcagtcataccctaaaccttagcatcatgcattatacacttgtaacaaacctgcacatatactccctgaatccaaaagctgaaattgtttttaaa

SEQ ID NO: 108006 - DNA, 201 bp, Homo sapiens
catcatgcattatacacttgtaacaaacctgcacatatactccctgaatccaaaagctgaaattgtttttaaaaagtaaataaaaagaaaaaaattaaaaygacataattaattgtatttcatgatctatagagtagatctaaacttgaccaataacttgtttttattaagacacttattagctttggggaagggaattat

SEQ ID NO: 108007 - DNA, 201 bp, Homo sapiens
atttctaagaaattaataaagtcacagtttgctcaatgatttgaaaggtgatctaaaatgaaatgtgaatactaatgccctaaaataaaatcttaggggattttttttttactttaacttgaagaaaaatcagtattgatgcacaggaaaaatgctataggtaaaagttcttaaatcttatggatgattattcaatttctt

SEQ ID NO: 108008 - DNA, 201 bp, Homo sapiens
ccttgtaagagttactacatgtgagtcagaaatgattttacatcctcaagcttccttttgggttttaggaagaacttttctctaccatcactctcgcatcrccatcccccacctccggccccctatctaatatttgtccttgtggacaactggtatagtgagggacctatttttttctcatgagaagaaggacactgtgat

SEQ ID NO: 108009 - DNA, 201 bp, Homo sapiens
gacatctcctgtgagaacagccagctaactgaaaacatgggtgcccactcagccaagttgttgtctaagaagagtcattaacattttctgcatcattaccyaccatgactatcctgtggaaaaaacctaggggtcatgagaaagtaaccaggaggttaaagagggatgagcaattgaagccacataagaaattttttttac

SEQ ID NO: 108010 - DNA, 201 bp, Homo sapiens
gtgcactgatgtaaaaaaatgtaaaataatttgtgattgtaatgaataaagaacttattgcagagtagaaaaattttagatagtggctgttatacttcacrttttgttaagtcattgtgattctgtgaatgaaccatgaggaagaaagtcatcagaaaaatcaatgaaattatattatattaattaaattatagtgtcagt

SEQ ID NO: 108011 - DNA, 201 bp, Homo sapiens
cctaggggtcatgagaaagtaaccaggaggttaaagagggatgagcaattgaagccacataagaaattttttttacccttcttattttttaaaaacaacamcctttttaaaaagtttatacagagtaatgaatctagttgaaaattgtaatctagggcctgggagaatgaattaaactgtttgtaaatggtttgaaatatg

SEQ ID NO: 108012 - DNA, 201 bp, Homo sapiens
ttctgttccagaggagtgagtgatctgaattccaggaaaagctatgtgaatggaaagaaatgcaaggaaaacgcatgctggcaacttctgctccatcaaamtgaaagaagtagattcccgtctcttctagttaatctttcccctttggttttcatcccattccagccttcctacaaagcaatctctatcttgtgccctcct

SEQ ID NO: 108013 - DNA, 201 bp, Homo sapiens
actgtttgtaaatggtttgaaatatgatgcccattctgtaacacaattcctaaactcttaattaaggttagctctggtaaaggtccagaattcaggatatrttcattttaataaagcaaaacattcttattttttatgtggtatttttaaggacaactcaactgttttatggaagcataggtcactatcatatgaaaatat

SEQ ID NO: 108014 - DNA, 201 bp, Homo sapiens
ttgttagggcataatttatataacatgccataaacatttgtaagtgtaaaattcaatgaatttaattaaatttacagagtcgtgcagtcatccccattatkcaattttagaatgtttccaataccccataattatcccgtattccatttagacatgctaaaaagcctgaattaatttagaaacaattttgtcgcattcctt

SEQ ID NO: 108015 - DNA, 201 bp, Homo sapiens
tcaataggattaaggaaaagattccatgagataggccatggaaagagaggagtgaagggtgaatgaaagattttcaacctaggtgactatgtggttgatgktgtcacagaagtagggaacacagaaggacaaaaaggaaaaacacttagaaaatctcaatcatctattgagatagaacactgacatgtctggcaggggact

SEQ ID NO: 108016 - DNA, 201 bp, Homo sapiens
ttaggtatagtgctttgctcattattttgtctctgtctttttttgtttgtttcatctgtagtgaaaagtgtgtgtgtgtgtgtgtgtgtgtgtgtgtgtgygcgtgcctgcctgcctgcctgcctgtataaataattagatatctattagatatttgaaacgggtaaagattatttttaacatgatcttaatattgttatt

SEQ ID NO: 108017 - DNA, 201 bp, Homo sapiens
cctaagtgttggccggtctgagaaataaagggaaagagtacaaaagagagaaattttaaagctgggtgtccgggggagacatcacatgttggcaggttccrtgctgccccccaagccgcaaaaccagcaagtttttttgttttgttttgttttctatattcattttattaattcatcccccccaagttttctacagaatcc

SEQ ID NO: 108018 - DNA, 201 bp, Homo sapiens
tcttgtctcatctttcttaagtccagtgactcttcgcatgctatgactttcagcctatggtccagtggttttgtcccccctggaatatttggtaacgtctrgagacattttgttttgagcagtgggtgctacttgcatcctgtcggttgagtccagggaccctgctaaagtgtcctgcattacacagcatgaccccatcac

SEQ ID NO: 108019 - DNA, 201 bp, Homo sapiens
ggaaagcctggaagaatgggctttagcaaaactttcagcagtgacttctagaatagcagaaatagctgaccaaactaggaggctactacctctgtcccagyggggaatcaggagcccaccattggaagtattgaattcagaaataggcttccataaatgtaacccagggatggagaagctgtctctgttgattccttatgc

SEQ ID NO: 108020 - DNA, 201 bp, Homo sapiens
agtggggaatcaggagcccaccattggaagtattgaattcagaaataggcttccataaatgtaacccagggatggagaagctgtctctgttgattccttaygcccatgaggcagtgactataccaacaatgcagaattcagccacagcctttgctgctgtccatatgtctgtctgtctctctgcctctctctctctttctc

SEQ ID NO: 108021 - DNA, 201 bp, Homo sapiens
aaaaatggatttctgaacccgtgtgattcctctaaatttgaactaaacttttgcataatttaaaaatatttcttctaacataatatctggaaagtagaaartaaatactttcagcaaatttggaagtagagaaatttaaaaaggaaaaacagaacaaaaagccttccccagaaaaatgtctttctttgttgaaacacccaa

SEQ ID NO: 108022 - DNA, 201 bp, Homo sapiens; identical to SEQ ID NO: 17641

SEQ ID NO: 108023 - DNA, 201 bp, Homo sapiens
cattatttatgtaccatgagaaaaaaaatactgtcaataaaccatgacagaaaactatgtttcctagtcatacaggattttttattttacacatattaaawtaactattttagactattaagacacagaagttattatgtcttctaacgatgatgcatattttatagccctgtccagatgtcttttggttccccatatttt

SEQ ID NO: 108024 - DNA, 201 bp, Homo sapiens
cccacaaagtgtgagattgaccctagaacactggtgtagggtaaaccgtatccttctgaccatgcttaccaatggaaatggccaaaagtgatagggatagraccatctgtttttcaaatctcacaggaatacatcttagaggaggggtataatttacatccaaatgtttagctccaaagaacttggagaaatgcaccttta

SEQ ID NO: 108025 - DNA, 201 bp, Homo sapiens
gacaataaaatatgaagttttattatagatattatatttggtataatacaaaaactcgagaaaatttgaatatgtaaacatttaacactaatactttatartattaggttaaagttaaataaattcaaatgagtatgtcacgtattcttcttatccaggctgatggggaaagaaggctgattattacaaacattttttaac

SEQ ID NO: 108026 - DNA, 201 bp, Homo sapiens
ttttaactactttacatataataactcatttaaacttcacaaaactcctaaaataggtagtacaattgactcagttttacagacgagaaaactgaggtgcmtaaatgtaagtaacgtgtttaagggcacacaattttaagtgttggagttgggatttgaatatagggagtctggctccagactactgtatgttcttgacac

SEQ ID NO: 108027 - DNA, 201 bp, Homo sapiens
aattttgtggccagataaaagactagcagacaagtatcctgttgtgcacattgggaaacgctatctgaattcaggaggtgagttagatactggaagaaaartttaatgcaagttataaagactaatgaaacaaccatttttgtagatgtagtaactttagatatgaagttttaaataacccttattttattattagtatat

SEQ ID NO: 108028 - DNA, 201 bp, Homo sapiens
ccgtaaatgattctatctgtattataaagttatacaacaagtaactgtatttctaacattttaatgctgttttagaatttcaatttgggaataagtgattmctgaaaaaaaaattaaggctaacactaaaaaagctgacttttatttggacttcatttgctaatgtaaactaataattcaatacaattcatataatttaag

SEQ ID NO: 108029 - DNA, 201 bp, Homo sapiens
cttgtgtttattctgttagcttagtcaaagcattgagaaaaaatcattacaaggcttcagcatttttattgactaattttatctgtgctggattttcaaarttgatatgtaaaaattaatactacctgattatataacaaacgactgttttaactactttacatataataactcatttaaacttcacaaaactcctaaaat

SEQ ID NO: 108030 - DNA, 201 bp, Homo sapiens
ggcttcattttatccgggagttcattgcaccagttacactgaaggtctttgcaggctattatacgaaggtagttatcctctcacccctccagcctatttcktacccatttttacacaggtgttctttttaatgtttttattaataagcaaatccactggcttactttgctttttcagggatttgcactactgaattttgta

SEQ ID NO: 108031 - DNA, 201 bp, Homo sapiens
agatttgtgtttcagaactgttttttgacagaaaaaccagctaataattgaacctaatgaaagagtcctgtggttaatatttaatagcttactacgattgrgtgctcttgtgtttattctgttagcttagtcaaagcattgagaaaaaatcattacaaggcttcagcatttttattgactaattttatctgtgctggattt

SEQ ID NO: 108032 - DNA, 201 bp, Homo sapiens
aagttataaagactaatgaaacaaccatttttgtagatgtagtaactttagatatgaagttttaaataacccttattttattattagtatattgacaaagsattttcccatgtattatgtgagttggtgttcctaaaaacactaggtaatataaatgttataattaccaaattataagtgaggaaactcatgtttttcaaa

SEQ ID NO: 108033 - DNA, 201 bp, Homo sapiens
atattgcattagctgtgctaccacggattaaaggaatgaattaccacattcctcagtccagcctttagaaaattaaataaaatttgaccttggaaattatratggctacaaatttatttttactagtttgagattaatgtaaacatagggacaaaagacataaccaaataggatgaaggacatgttagagaaacaaattgg

SEQ ID NO: 108034 - DNA, 201 bp, Homo sapiens
ttattttatcaacatattcccacagttgtaccttggaactttgatagctcatatagattttgtacttttgaaaccttaaattccagtttgcactgcctggyttgaaatctcttttcctcttcgtctcaatatttctacagataatgctttctgggatctcttgaccattttcttttctccaaatctatctaccacctttgg

SEQ ID NO: 108035 - DNA, 201 bp, Homo sapiens
accagtctgaccaacatggcgaaaccccatctctactaaaaatacaaaaattagtcgggcatggtgatgggtgcctgtaatcccaactacttgagaggctraggcaggaggtggaaggcggaggggaactcgggaggcataggttgcagtgagccaagattgtgcctttgcactccagcctgggtgacagagcgagactct

SEQ ID NO: 108036 - DNA, 201 bp, Homo sapiens
ggacatttggggtctgtaaaataaggaaacaatttttgaagaacagtaatataaaccattggaaaatgttgagtgtctctgtgtggtacatttttcatcayagaaaattggccatgggatttaaaaaatgtattgtcttctccccagaatttttttatttgatgccaggcatggtggctcacgcctctaatctcagcactt

SEQ ID NO: 108037 - DNA, 201 bp, Homo sapiens
atttgttgtagaatgcttgcctccccaaactgaactgaacagaactaattttctttcttttttcttttttttttttttttttgagacagagtctcgttctstcgcccaggctggagtgcagtggcgtgatctcggctcactgcaacctctgcctcccgggttcaagcaattgtctgcctcagcctcctgagaagctgggat

SEQ ID NO: 108038 - DNA, 201 bp, Homo sapiens
ttcgagaccagtctgaccaacatggcgaaaccccatctctactaaaaatacaaaaattagtcgggcatggtgatgggtgcctgtaatcccaactacttgaraggctgaggcaggaggtggaaggcggaggggaactcgggaggcataggttgcagtgagccaagattgtgcctttgcactccagcctgggtgacagagcga

SEQ ID NO: 108039 - DNA, 201 bp, Homo sapiens
tttctttcatggtgagctgtgaaattccagcctaagaattaggcttcatgacttcacaactctgttcaactggttagtgaaattaacatgacaccagtttyggtctttgaatcctaaattatctactttctctctgctgtgttgcaggatttattggctatgctccatatgtcaaccgtatagttcaacaatggaatctcc

SEQ ID NO: 108040 - DNA, 201 bp, Homo sapiens
atttaaacacagaaatagcagtgctactcgaatgagataggaaaggtttcagcaacgtgaaatttttcttcaaaggcaattatgtgataacttttgtcttractttttgctttaaaataattgtgttttgttataaagataatacaggcttataaaacgctaaattataaaagttgccataactctttttcaaacaactga

SEQ ID NO: 108041 - DNA, 201 bp, Homo sapiens
atcagcactagcttagtatgtctttatggcttctcttttgtggccaagttggcaaacttgccgaacttggttggatcaggcagaaggaaagaagaactatrtaatgcagtgctatatgtattgaaacacatattgaaatgacttgatactaaaatgaaatggcagccctcacaccactgtcatggccctacctccactgca

SEQ ID NO: 108042 - DNA, 201 bp, Homo sapiens
tagtatgtctttatggcttctcttttgtggccaagttggcaaacttgccgaacttggttggatcaggcagaaggaaagaagaactatataatgcagtgctrtatgtattgaaacacatattgaaatgacttgatactaaaatgaaatggcagccctcacaccactgtcatggccctacctccactgcatactcacttaggc

SEQ ID NO: 108043 - DNA, 201 bp, Homo sapiens
tgacttgatactaaaatgaaatggcagccctcacaccactgtcatggccctacctccactgcatactcacttaggctgccttaaaataacagaataggttrcattatcaaaacttctgagcttggagatttaaagagacaataatgaaatcctaaagattctagacaatgtcttcttttatattcttgaataaataactgt

SEQ ID NO: 108044 - DNA, 201 bp, Homo sapiens
ttgtctaaagtataaggaaaaaaatatggcagaagcttttgatctggaatacacttcatgtccaaaagctacacgaaggagcaactgtgtgtgtgtgtgtrtgtgtgtgtgtataagttgaaacactgaataattccccagagattaatttctgaatttagctgacacgttgtatacagtaattcccctttatctatggtt

SEQ ID NO: 108045 - DNA, 201 bp, Homo sapiens
atcatacttggaaacattttgatattgtgaaagaagaatcaggaaaatactatcacctagtagcccaggagtgcccagagcagcctaactgcataaacagscttctgcaccgtctagagctgccagcaaaaatgtctctagttttcatgaggaaaacagatgtaaatggggggtggtgatggtggataacctctgcctgtg

SEQ ID NO: 108046 - DNA, 201 bp, Homo sapiens
tcattccggccagtagaaagaagggattgacaatggccagggtagatacagggaaattctttaagagatgatttcagtagtctagggagaagaggatggtkcctaggtttagactactcacagaaaagatggttaggagaggctggatcctgtaatgctgatagaatttgtggtcaacttagatggggaatgtgagagaaa

SEQ ID NO: 108047 - DNA, 201 bp, Homo sapiens
ttctaactctctgggaacagaagtggagaatgttgaatcccattcccctgttacacacatttcttcacctggtgaactcatttgtcctcagttttagggcraattcctcacaatttttttcataaacttccaatttaaaataactttctctgttaaaacctttcatcctcttcgtgttgttgaacttattcttagttttac

SEQ ID NO: 108048 - DNA, 201 bp, Homo sapiens
gttattatgagcatggaatgtttttccattcgtttgtgttctctcttatttccttgagcagtggtttgtaattctccttgaagagatccttcacgtccctygtacgttgtattcctaggtattttattttctttgtagcagttgtgaatggaagttcactcataatttggctctctgtctattattggtgtataggaatgc

SEQ ID NO: 108049 - DNA, 201 bp, Homo sapiens
ggagaagactattcagtgtgcacctacagatgatatattagtagaattactaaaggaatatacctgctgcagaaaacatgcttttaaattagatgattatrgaatgaaaccacaccgatgagaggcctgctttcattaataaccttttccttcatttacaagattctcctgaattattttggaaactatgtacccaattca

SEQ ID NO: 108050 - DNA, 201 bp, Homo sapiens
tctgtcgtccagactggagtggagtggtgcaatctcggctcactgcaacctctgcctcccgggttcaagcgatgctcctgcctcagcctcctgagtagctrgcattacaggtgcgtgccaccacggccaggtaatttttgtatatttagtagaaacgggggtttcaccatattggtcaggctggtcttaaactcctgacct

SEQ ID NO: 108051 - DNA, 201 bp, Homo sapiens
tgttctggggaagtaccctatcattggaaaatatggtaagtgatcatgagtcctcaagaagaggttatatttgtttggtattctttgcttaattatcacayttgacagaatgatttgcattattaacattattaatagaaagtgtttagagaaagttgaaaggcaccatggtttaattgactggaatgctttatgactaaa

SEQ ID NO: 108052 - DNA, 201 bp, Homo sapiens
aggtgggagtatcacacttaaacagtgggagctaattgaatcagaggtcattacgtcttaggagagtttttgtgaatgtggcagatagagcttcttactgmatcaaaatggtgctataaagccaattatttagaagcaacattatggagctgtattcctgttattttcagaatttttatgctttgatatatggaaaatacc

SEQ ID NO: 108053 - DNA, 201 bp, Homo sapiens
gatcgtatctcttgaattgctgtgccttagaactcccaacctcggaagcttctctgcctataggccttacagagggatagtccattaacccatggcttgcsctagtcacaactaacaagataagcaggaaccctatgttggtcagggttctattcaaacgaagaacccattttagatatcttgagcaaaaacagatttaac

SEQ ID NO: 108054 - DNA, 201 bp, Homo sapiens
gccataggcaagtttctttatatgtaaagtcatagtgattatctcagagtgttggtaggaatgttaaatgaaattttacccacatatatatatgaatatayataacaaatatataaatgatattctatttgtataaatttaatatacatacacaaagtggtcagtattcaataaatgttaactgttataatgttgttgtta

SEQ ID NO: 108055 - DNA, 201 bp, Homo sapiens
aaattgaccattttgaaatttaagacaatatatatatcgtttcagatattgttccactattttgatcagaaaagtatgctagagaaccatattttacatawaaggatatatatattaacatttttcagtcagcagatatttattttatgtcatgcccatttcattttctttttcactgttagggacttttgccgtcaggat

SEQ ID NO: 108056 - DNA, 201 bp, Homo sapiens
tgaccattttgaaatttaagacaatatatatatcgtttcagatattgttccactattttgatcagaaaagtatgctagagaaccatattttacatataagratatatatattaacatttttcagtcagcagatatttattttatgtcatgcccatttcattttctttttcactgttagggacttttgccgtcaggatgaaa

SEQ ID NO: 108057 - DNA, 201 bp, Homo sapiens
tttatttttaatttcattctccattaatttcccagatctcttagtagatcattataatggcaacttcagactttgttttgatgaaatgaagagaaaaggtktgtgttgtgtgggggaagggacgtgtattgcactttctgttcccttagagtcagtgtgtcatcatgcatttccaattcagggagcagctgctgaggctca

SEQ ID NO: 108058 - DNA, 201 bp, Homo sapiens
aatctgtttttttattttaagcagatatatgctcctgaaatctgagttcccttattggggagttgagggaatgttgggtacaataagcagtcttccatagrccctagagagaatattcctgaaattgatgtgagtgaaactctggagtacagtaaagcaagattttctaatttgagaatacttttatcatatttaccaata

SEQ ID NO: 108059 - DNA, 201 bp, Homo sapiens
aaaaaaaaattcccacaatgcaaaatgtttagtttggagtgctcaggaaattttaagacgatggctctgctcctctctgacttgagttttatcttgcttartgtgctaagtctgatttttaagaactggaaatattatcattggtagccaattgtagaacccttgcttatgccagacaatattctactcaccatgcatata

SEQ ID NO: 108060 - DNA, 201 bp, Homo sapiens
tggagtagatgaagttactagaagtgttgtagcacttggaatattacatccatgagaaattttgtaatgatgatacacacacatacacacacagacacacraatacagacacacacacacgtattttaaattactaaagcctattttctctttttaacccagatgaagttgttttaaaatttgaaaatggcaaagccagag

SEQ ID NO: 108061 - DNA, 201 bp, Homo sapiens
ctagaagtgttgtagcacttggaatattacatccatgagaaattttgtaatgatgatacacacacatacacacacagacacacgaatacagacacacacayacgtattttaaattactaaagcctattttctctttttaacccagatgaagttgttttaaaatttgaaaatggcaaagccagagctaagaatacattttat

SEQ ID NO: 108062 - DNA, 201 bp, Homo sapiens
gaatgacataagcatattcagaaccaggcaaagattaagctatatactgtgatttctgaaaattactattttgtccactatacataatcatttataagttraataatttctaaaatgcatatgctttatacttttcagtgaagtatttataaagatatttgttttaatatgtacttctttttataggactggaaggaaaag

SEQ ID NO: 108063 - DNA, 201 bp, Homo sapiens
tcttcaaaatatttattttaaaaattttacagctcagtttgtgtgcatgtagtgaccctcatccttactgttttagtaaatgttcacaggggcctgtctgrggcctcttccttttcttttccatatacattgttgggtaatttgagtcatttcctcatcagtgaattctctcaatgctggtggttttcaaatccttcctct

SEQ ID NO: 108064 - DNA, 201 bp, Homo sapiens
aaacaccgtctatacaatagattataatagtctaattgtaacaactgattgagatatgatagctataatacaaatgccaaacagataccaacccaaaattkaaatgtatccaaaggggcagtggtttatctcctaaatctcattaaatatagtgtatacaatgtaatcttatatatatatcattgaatatatttgtatgtt

SEQ ID NO: 108065 - DNA, 201 bp, Homo sapiens
tagtcaagagctggtagaaccccacttttcccataactacatagtgttctgttcctccttggtaatataatattttaatcaaatttaggctggtgcggtgkttcacacctcatgtcacgttaggaggctgaggcaggcagatcacttgaggccaggagttcgagactggccagcatggtgaaaccctgtctctactaaaaa

SEQ ID NO: 108066 - DNA, 201 bp, Homo sapiens
gaccattttgaaatttaagacaatatatatatcgtttcagatattgttccactattttgatcagaaaagtatgctagagaaccatattttacatataaggwtatatatattaacatttttcagtcagcagatatttattttatgtcatgcccatttcattttctttttcactgttagggacttttgccgtcaggatgaaaa

SEQ ID NO: 108067 - DNA, 201 bp, Homo sapiens
tgtctcctcagtatatatctatgaacatttatattttcctttgttttcatagtagtatataaacaattttgtgtttcttaattaacattttatttaaaacmtatttaggtattttaaataattattttcatacttggtctgtataaatctaatatgaatcaatttttagatagaaactggtttctaatttgaaggtttact

SEQ ID NO: 108068 - DNA, 201 bp, Homo sapiens
cttcttccttcacaccacccctccccaaaacacacagaagagcacagaattttttttttacagttaaaatgaataccaatagctgtttaagaacagatacytcacaaaggggatactcagagagatctgaaagaaaatgggtagagaaataatattgtactttagcttactgtcactaggatttgtcagatgactgttatt

SEQ ID NO: 108069 - DNA, 201 bp, Homo sapiens
gccagtctctcagatagcaaactgtttcctatctgcaaagaatgccagaatatttctgaatgaagctgcatcatgaagatgtttaaaaatttatcctgatmtttttttgccgaaagtagtgttgtcttctggagggcgagttaatactttttatctgtttcgtttccttttgtataaactttctggtgcaaagatagaaaa

SEQ ID NO: 108070 - DNA, 201 bp, Homo sapiens
tgaaatactttattgatggcatgatttttcttaatcatcaatatacttttttgcgttgaaataattgtcatttgaaggttcatcatttggcagtaatacarccaatttgagtcatctattttttcgacagctctttgtttagtcttgtgtagataagtaaaccagaatattcccacgggtttagtgaggtctcaattactg

SEQ ID NO: 108071 - DNA, 201 bp, Homo sapiens
tgaaaaaaggaaccagctaacagtttgctggtagactaaaatgatctccataatgtgatcacctggggaagtcttagagcgctgttgttatgaagagggcrgatgggttctttgatgggattttccggtcttgtccaagccagctctgaggcaccttgtcttcagaggcctcttctcctgctctggctatgctggttcttt

SEQ ID NO: 108072 - DNA, 201 bp, Homo sapiens
attctttatggaacaaaggaattttcaagtacacataatttttattgttcttgacagtactcctggtcagtctcggacactcaagtgcagtaaggagataytgaatatgcatcatgctccacagcttgaccctcccacaggcacagcaacaagcgaaatagatatgtggattttggcaaccttggctttgtgatgctaggg

SEQ ID NO: 108073 - DNA, 201 bp, Homo sapiens
ttcctctaaatttgaactaaacttttgcataatttaaaaatatttcttctaacataatatctggaaagtagaaagtaaatactttcagcaaatttggaagyagagaaatttaaaaaggaaaaacagaacaaaaagccttccccagaaaaatgtctttctttgttgaaacacccaaggagactttaactgggaaataaaata

SEQ ID NO: 108074 - DNA, 201 bp, Homo sapiens
actgcaacctctgcctcccgggttcaagcaattgtctgcctcagcctcctgagaagctgggattacaggtgcccgccaccatgcccagctaatttttgtattttttttttagtagagatggggtttcaccatcttggctaggctggtcttgaactcctgacctcgtgatccaaccccctcggcttcccaaactgctgggat

SEQ ID NO: 108075 - DNA, 201 bp, Homo sapiens
ttcatacaacagaatattatatgtctgtactctatttggaaatatctcgaagaaatacaaaaattttaaaaagatgccgagtggaatagagagtatgcacrtgtatgagaagtatccacttgtgcatgcattaaaatatctcttaaagcatacatcagaaccagttttattgatattttctgaagggaagtcagttaaata

SEQ ID NO: 108076 - DNA, 201 bp, Homo sapiens
tgagccaccgcgcctggccaatgaaactaattttcaaagctattgagattgcagttaaaaatagttatctagaatagtagaattatagagactgttatttwattaattaattaattaatttatttatagacagggtctcactctgtaggtcaggctagaatgcagtgacgctatcatagctcactacagcctgaaactgct

SEQ ID NO: 108077 - DNA, 201 bp, Homo sapiens
tcatttgctttctagttactgctaacctattttagggttccttccaaacggtaggtgagagataggactttcctctgatttaaatgctgtttttcttatctttttttttttttttgtgctgtggacaggtaaaaattctttatggaacaaaggaattttcaagtacacataatttttattgttcttgacagtactcctggt

SEQ ID NO: 108078 - DNA, 201 bp, Homo sapiens
tcatccttccactcaccaaccttgagccgattcttgagcctcgtcagattttacttgtaatttgtgatccttacagtgctgtgatttgatgtctcttgactttttttttttttgaaacggagtttcgttcttcttgtccaggctggagtgcaatggcgcgatcttggctcactgcaacctccgcctctcgggttcaagcga

SEQ ID NO: 108079 - DNA, 201 bp, Homo sapiens
acatttaaatattgtatgctgttaaaaaaataaacttatattcatctgtttcagtcctgacctttaagtcaaataaattaataacaattatgctggtaacttttttttttaacttttatttagggttcaggggtacatgtgaaggtttgttacacaggtgaactcatgtaatgggagtttgttgtacagactatttcatca

SEQ ID NO: 108080 - DNA, 201 bp, Homo sapiens
aagtgagaatattcggtatttggatttctgttcctgtgttagtttgctaaggataatagcctccagctccatccatgttctcgcaaaaaacatgatctcattttttttttaatggctacgtagaagttaaaacgaagttttatggtatgtgctacttaaaaattggggacccttttctaacttgttacataaatagtcatc

SEQ ID NO: 108081 - DNA, 201 bp, Homo sapiens
gttccctgaaaaccaaaatctggactttttttctgtttcatatgatgataacatagactttatgtgtttaattggctacaattttaaaagaacacattttctggtattttgaaatgacatgtgaataaagccactcaaaagacagtttttaatttgaaaattacctgtgatacccttgaggacagagaccttcctctgaga

SEQ ID NO: 108082 - DNA, 201 bp, Homo sapiens
aacaaggagatacctaggtaggaacacaaaaagcaaaaaactttttttttaaaaaagaagaaagattactttttggagaaaaactgatccatttgagtatstagtatattaaaaaggtagtttttattaaataaccactggaatactaagtatagatgtaaatatagaacagctaagtgttaatatagaacagctaataaa

SEQ ID NO: 108083 - DNA, 201 bp, Homo sapiens
aaacaaggggcactcaataattcatatttctttcatggtgagctgtgaaattccagcctaagaattaggcttcatgacttcacaactctgttcaactggtyagtgaaattaacatgacaccagtttcggtctttgaatcctaaattatctactttctctctgctgtgttgcaggatttattggctatgctccatatgtcaa

SEQ ID NO: 108084 - DNA, 201 bp, Homo sapiens
ttatgagcatggaatgtttttccattcgtttgtgttctctcttatttccttgagcagtggtttgtaattctccttgaagagatccttcacgtcccttgtaygttgtattcctaggtattttattttctttgtagcagttgtgaatggaagttcactcataatttggctctctgtctattattggtgtataggaatgcttgc

SEQ ID NO: 108085 - DNA, 201 bp, Homo sapiens
ggaaagaaaatttaaaaagcctattaatatgaatgctcataccactactgggtattaaaattgcagaagatgtagtaatttcacttgctgtttactcagcmggatcttccctaacatgttcaaattctagggatattaaaaattttgtttgagggttcagagcaaatctaagtgtgtctacctctgtcacctatccttctt

SEQ ID NO: 108086 - DNA, 201 bp, Homo sapiens
atgatacctggtactcggaatttattccccaggagctccccatacaaactgaatcagaaactcttggggtgtgacccaacaatctcttgtttatacaagtmtttgggtagttgttctagtccatgctaatgcttgaaaagcactgagcaaggacattggcatgatggtccagtttccagactgggaatatctgagattaag

SEQ ID NO: 108087 - DNA, 201 bp, Homo sapiens
cagaatatttctgaatgaagctgcatcatgaagatgtttaaaaatttatcctgatctttttttgccgaaagtagtgttgtcttctggagggcgagttaatrctttttatctgtttcgtttccttttgtataaactttctggtgcaaagatagaaaaatatttatattaacattttttctttttgcatgtaggagtatgtaa

SEQ ID NO: 108088 - DNA, 201 bp, Homo sapiens
tttatattaacattttttctttttgcatgtaggagtatgtaatttaatacttaagctgttttgtcttacagcttgttaaaatgtgatagaaaggaaaactrttcattccattatgcataataaaattacgtgctatatacagctgtttttcaatagggatataaaaattaaaattgtgtaggtagttaaatcccaagccta

SEQ ID NO: 108089 - DNA, 201 bp, Homo sapiens
tctttttgcatgtaggagtatgtaatttaatacttaagctgttttgtcttacagcttgttaaaatgtgatagaaaggaaaactattcattccattatgcayaataaaattacgtgctatatacagctgtttttcaatagggatataaaaattaaaattgtgtaggtagttaaatcccaagcctatcataatgttagatgtg

SEQ ID NO: 108090 - DNA, 201 bp, Homo sapiens
tagagacttgacaaataaaaatctctgaaatgctctaatgatggagacagataatcttacctgaattttagcacagtcgaatcacactaaaattggtaacytttatgttgatggttttcccattaatctgtccatagaattgtgttaaatttttcctttttttgttaagtaaaatttttttatatatgaccatttatttta

SEQ ID NO: 108091 - DNA, 201 bp, Homo sapiens
tggagacagataatcttacctgaattttagcacagtcgaatcacactaaaattggtaacttttatgttgatggttttcccattaatctgtccatagaattktgttaaatttttcctttttttgttaagtaaaatttttttatatatgaccatttattttactctctggtttcaaagggtattttgtaaaatgtgattattt

SEQ ID NO: 108092 - DNA, 201 bp, Homo sapiens
ttacctagtggtgtttgccacatttgtctggtttggggcaagaatatgagactggttttctttatctgcctttataatgtatgactcatttgcgtgttagyctttaaacattagaaaaagaaaggaatgaaacagactggtgaaatataactggcagtgaattcttgattaaaaatgtgatgctttctttgaaagagaaag

SEQ ID NO: 108093 - DNA, 201 bp, Homo sapiens
agtaggaccagaagaaaatctaagtcaagcggaagccagaaacatgggaatgtatgttttaataaattaaaattaaattaaattattttactaaggaaackttaagaaaaaataaacttttaaattaaaattgttatgccaaatttgggtgtctcaaactatttgtttgcgtatgcagtagccaacttagactgtgtctat

SEQ ID NO: 108094 - DNA, 201 bp, Homo sapiens
ttttgaaatttaagacaatatatatatcgtttcagatattgttccactattttgatcagaaaagtatgctagagaaccatattttacatataaggatatayatattaacatttttcagtcagcagatatttattttatgtcatgcccatttcattttctttttcactgttagggacttttgccgtcaggatgaaaagtgtg

SEQ ID NO: 108095 - DNA, 201 bp, Homo sapiens
aaataaacttttaaattaaaattgttatgccaaatttgggtgtctcaaactatttgtttgcgtatgcagtagccaacttagactgtgtctatgtttgtacrtatttatacataaagggctgtagaagttacttatgtttttcttttaatggctacgagtccacatatttaatcaaatgatgaatcaaggtaagatcaattt

SEQ ID NO: 108096 - DNA, 201 bp, Homo sapiens
gaggttttgatcatttggcaaggaaaagcagttgtgacaccctagagatatgaaatagtgtatgatttgtaactcttaaaacctagtttaattcagtactrttttcttgaatttgcattgttttctcttaatttgattgaaatgctatagtgtgtaatgcccatatgctttttaataattagatattttcattttatgact

SEQ ID NO: 108097 - DNA, 201 bp, Homo sapiens
tccgtctcaaaaaaaaaaaaaaaaaaaaaagaaagaaaaaagacttacctgccatctggggcccttgccccttaaagagtaaaactcaggctgtgtctccrtggaattctgttagttaatcaaaggtttaggtttatgtaatacctatggttcttgcttctgtatctagacatgtggtttctatagtctattgacatatgc

SEQ ID NO: 108098 - DNA, 201 bp, Homo sapiens
ttttacatattttttctcaatttgaaaatataaagacacaaattatttgcagatgaaaataagagtaatatttttatgcattagtataaataagaaagttrtaaattatgaaatgaaaatagatgttaatataatgaagtcccagtgccgtacacacttaaaaattttcaaaagatacataacacttgcatctgtaaaatt

SEQ ID NO: 108099 - DNA, 201 bp, Homo sapiens
atttaatataggttccgaaatactttagttaaacttaaatataattaaataactaaagtagtttccctctgttggatgtaagcaaggcatttttaaaagtyatttttatgtattcattagcattttcaattactttttccttctttgttactctttttaagaaatatgattgaaaattagcaatatacttacttaagaaaa

SEQ ID NO: 108100 - DNA, 201 bp, Homo sapiens
ctagaatagtagaattatagagactgttatttaattaattaattaattaatttatttatagacagggtctcactctgtaggtcaggctagaatgcagtgaygctatcatagctcactacagcctgaaactgctgggctcagatgatcctgcttatcacctcagcctcccaagtagctgggactgcaactctgttgttgtta

SEQ ID NO: 108101 - DNA, 201 bp, Homo sapiens
tatttcatgatctatagagtagatctaaacttgaccaataacttgtttttattaagacacttattagctttggggaagggaattatcaatttgttctcttycaatattctattatttttgttttgtgtattcaaaagcaccatccagttttaatcacaattttagaaacatgtttacaaatagttcacatattataatagt

SEQ ID NO: 108102 - DNA, 201 bp, Homo sapiens
ttgaactcctacagtattctctgcaaatatataatctgtgatttaaattagtatttagtatgttattctcagtcttttcatatgaactaactttacattcttagttggattttaacctgcaagaggatagagatcgtatctcttgaattgctgtgccttagaactcccaacctcggaagcttctctgcctataggccttac

SEQ ID NO: 108103 - DNA, 201 bp, Homo sapiens
tgtagaacatagaaattaacattttaaaagcatgcctttttaaaaagcatgctcctatgtgtcatagctttctgaaaccactaaaaatagaaactgttgamagatctctgatgtagaactcttgcagtgaaagcttatctttggaagaaactgggctgtctttctggaagagtcttttctcagagacatctttgaaacatg

SEQ ID NO: 108104 - DNA, 201 bp, Homo sapiens
attgtaagggtattattgaaaataagttttggtttccatttttacctatttttataggaaaagttcatgaaacaaaatatttaaataaaaagatatgtacyctgtctcttgttacatattgtggagttgatttccagaaggttttatggattttcacttccacgagcagtgtacaaaagggtatggaaatcttggcaagca

SEQ ID NO: 108105 - DNA, 201 bp, Homo sapiens
tgtcatccaagatagcaacccattcaagactccctgcgacactctatgacacttcgttctttatctttagccctgaaagttaaatgcaaatttttgtttgttttttttttttggttccctgtattggaatataaactccatgatggcagaggcttatttttggtctcttgtcctgtcttgaatgctgagtctctagaacag

SEQ ID NO: 108106 - DNA, 201 bp, Homo sapiens
tttcttgatcagttgttgctataacatggttatagagtagcccacaatattttatattaaaaattacacctcatactaggaaaatggagccttttattttyatttttttgagacggaatcttgctctgtcgcccaggccggaatgcagtggcgtgatctccgctcactgcaagctccgcctcctgggttcacgccattctc

SEQ ID NO: 108107 - DNA, 201 bp, Homo sapiens
taaaattcaaatctttgtctaatatttattcaagttttattgaccataaatatacaaattttgattttttttgcagtataatctgtatgttttaaaaaatrtcttgaagctttcatagcattttgaaagttactagctactagaaattcttgatcataatattcctttgagttctgtcttgaaatttgtcaaacattcact

SEQ ID NO: 108108 - DNA, 201 bp, Homo sapiens
aggttggaagtgacttttttctttaagcataccattgcccctctttttctacaaaaatggtaggaaatcattggatgtctcttgacacatcctttttaggtttttttttcttgttgaaattgtgacgtgaattactcttgaggaatttttgtcttgaatttttttcaacagttctgcaaaataaaattaattctcttcaac

SEQ ID NO: 108109 - DNA, 201 bp, Homo sapiens
ttaggttacattttctaacagtaatacttcataaatggtgagatggttgaattcttgaattggttaaaaaaaagcatgtgggtgatacatgtcaacactatttttttttctccaactaagatttttttcttatcatagtcatgatactgaatagcaacttagaggaaacagctgttcatgtgtaatattactaaccagacc

SEQ ID NO: 108110 - DNA, 201 bp, Homo sapiens
ctatccccatagtacctctttcagataagactttctgactgtagctaggataatatgtcggacatccccaagaccacctgcgggttcagtgattcaccagsaggacctacaggattcagcatatggttgtactcatgtctatgacttattattgtgaaaggatacaaagcaaaatcagcaatgagaaaaaacacatgggtg

SEQ ID NO: 108111 - DNA, 201 bp, Homo sapiens
gctatcgtaggatgattctttgtttgcagggaattagaaacaaatgtgaagagggtgccttttctgtctattattgagaattgcttttgtttttgctttttttgtttgtttgtttgtttgttttcatttagaggtatttgggaggattgttaatgtatttttaaccaaagcattttagaaaacttatctccaggtgaacat

SEQ ID NO: 108112 - DNA, 201 bp, Homo sapiens
tatcttgcacatgcatcctttgaatatatgtgtgagatgctgcctaacacatatgtaggagtttgtgtcgactgctttatatatactaactcattttactstcatggaaatactgtcaggtagatgctattacagacatattacagttgagacgcagagtttaagtaactgaccaagtcaaaaccaagaagaaataataga

SEQ ID NO: 108113 - DNA, 201 bp, Homo sapiens
ctatcgtaggatgattctttgtttgcagggaattagaaacaaatgtgaagagggtgccttttctgtctattattgagaattgcttttgtttttgctttttttgtttgtttgtttgtttgttttcatttagaggtatttgggaggattgttaatgtatttttaaccaaagcattttagaaaacttatctccaggtgaacatc

SEQ ID NO: 108114 - DNA, 201 bp, Homo sapiens
tatcgtaggatgattctttgtttgcagggaattagaaacaaatgtgaagagggtgccttttctgtctattattgagaattgcttttgtttttgctttttttgtttgtttgtttgtttgttttcatttagaggtatttgggaggattgttaatgtatttttaaccaaagcattttagaaaacttatctccaggtgaacatct

SEQ ID NO: 108115 - DNA, 201 bp, Homo sapiens
atcgtaggatgattctttgtttgcagggaattagaaacaaatgtgaagagggtgccttttctgtctattattgagaattgcttttgtttttgctttttttgtttgtttgtttgtttgttttcatttagaggtatttgggaggattgttaatgtatttttaaccaaagcattttagaaaacttatctccaggtgaacatctc

SEQ ID NO: 108116 - DNA, 201 bp, Homo sapiens
ctttagaatggagcatatctagtgagtggtacactctgagacttaatccttggagaagatggtggtgtgcactgcttttttttctggctatttttcctacygtttccaggtggattttatgtaaattgaaggaagcagttcaagcagaacaactggaagggaaagagtgtgacttaattttaaaaacatatatagttactt

SEQ ID NO: 108117 - DNA, 201 bp, Homo sapiens
agcagcatttgttctacatgtgtttgcatctttagaatggagcatatctagtgagtggtacactctgagacttaatccttggagaagatggtggtgtgcastgcttttttttctggctatttttcctactgtttccaggtggattttatgtaaattgaaggaagcagttcaagcagaacaactggaagggaaagagtgtga

SEQ ID NO: 108118 - DNA, 201 bp, Homo sapiens
tgctaaggataatagcctccagctccatccatgttctcgcaaaaaacatgatctcattttttttttaatggctacgtagaagttaaaacgaagttttatgrtatgtgctacttaaaaattggggacccttttctaacttgttacataaatagtcatcagaatacctagattcaacttttggattcattaattatctttaaa

SEQ ID NO: 108119 - DNA, 201 bp, Homo sapiens
agggatctgagtgccttaggtgtaattcagttttgcatttgcattcagtgtcaaagacttggcaggaaatactactgccagtggttagatgtgtttctttycctctgagaacagacatgccattttagcagaatactctggaatattactgcctctgcacggttatgtcccccaggtaatgagctgataagggagagggaa

SEQ ID NO: 108120 - DNA, 201 bp, Homo sapiens
  misc_feature (1)...(201): n = A,T,C or G
gtaatacctatggttcttgcttctgtatctagacatgtggtttctatagtctattgacatatgccaggaatgttgcaagatttagtagattggactgaagngtagagaaagagatttgacacatcttgggcatgtggctttctagcttctcatcagctctcttttttcctcttctctccctatctctatttgctcccttgc

SEQ ID NO: 108121 - DNA, 201 bp, Homo sapiens
tatagtctattgacatatgccaggaatgttgcaagatttagtagattggactgaagggtagagaaagagatttgacacatcttgggcatgtggctttctascttctcatcagctctcttttttcctcttctctccctatctctatttgctcccttgctctaaattttactccttaaattgtataataatatgaatcattcc

SEQ ID NO: 108122 - DNA, 201 bp, Homo sapiens
cctcggcttcccaaagtgctgggattacaggcatgagccactgcgccgggcccgatgtgtgtttatttatttcacttttgtgcatgtaatagaaagggccyggctggtcttcacaagatagaggtgaaataggttttcttttttcatataaagaatagttgttccataaatttgctttctaaaatagttaaaggaaagttc

SEQ ID NO: 108123 - DNA, 201 bp, Homo sapiens
ttatgcttatgtaaaatgtgacactgaattcttccctgaacagaaatttggtttgggtagtttcatccttgggatttatttctgtggattatgcttattgyggttgtagcatttcatattaaccgtaacaaatggaatatcccagccattctttgcatgctatgactttcagcctatggtccagtgtgcatggaccctctt

SEQ ID NO: 108124 - DNA, 201 bp, Homo sapiens
tcattctttttttcatacatatgatggaccagagtgactaagacattacatgctttgccttagttctcaaacatgtcagcctgattaaaaaggggcagtayactctcaggactaaaaggatgtgcccttacatttagaaaaaaaaaggcacacgtttctgttcaaacagttgagtggtaaaaagatgtgttgcttgtggaa

SEQ ID NO: 108125 - DNA, 201 bp, Homo sapiens
tgttttttatttggtttcaggaagtcagctggttacttcagtaatcagcagagattcagaaatatagatgttgtaatattatgcaaccatggatgtgtttyatatcacttggtatttctgataaattgaggtacaagtctgttgtgctttgaattattggagagttgtgttatttcctcttttattatgattaagtgtatt

SEQ ID NO: 108126 - DNA, 201 bp, Homo sapiens
ctactccggaaacattccaaatgctcagccccccaaaggtgttatttttacttattttatttatttttgtttatttaatatttgatatagtatattgcctmgtagtaaagtttctttaagggccttatttgcatttagcttggtaaaatgttgattttcatcagtcatctgtgtgtttgcgtgttttgtgtgacttgggca

SEQ ID NO: 108127 - DNA, 201 bp, Homo sapiens
aggtctcacatgattggagcaggaggaagtgaggggatgtgctacatgcttttaaacaatcagatctcatgagaactctataatgagaacatcactagggkgatggtgctaaaccattagaaactgccctcatgatccaatcacctcccacccaaccccacctccagcactgagggttacgtttcaacatgagatgtgggt

SEQ ID NO: 108128 - DNA, 201 bp, Homo sapiens
aagaccaatttctaataaagtcatgggaaaaaaagaaacttatgaaatagaggcaactaagtaatagaaatttatgtcccctcaccatccttattgttttraggccagtggattgtaacttttatggaagagacggcatggtacaacttaatcctaattacaattttatgatatttgtttgacttattcattcatttctta

SEQ ID NO: 108129 - DNA, 201 bp, Homo sapiens
gccccccaaaggtgttatttttacttattttatttatttttgtttatttaatatttgatatagtatattgcctagtagtaaagtttctttaagggccttayttgcatttagcttggtaaaatgttgattttcatcagtcatctgtgtgtttgcgtgttttgtgtgacttgggcatgggtcttgtgtgatagtcaactcttg

SEQ ID NO: 108130 - DNA, 201 bp, Homo sapiens
tctgtgtgtttgcgtgttttgtgtgacttgggcatgggtcttgtgtgatagtcaactcttggttctttgagctgatttatattttatggctgacaggtgasaaagttaaacctaagtccctttcattctttttttaggtttttatttctttttaaagggagagaagagggtagaagtaggtataaaatagaatttgattac

SEQ ID NO: 108131 - DNA, 201 bp, Homo sapiens
catgaaacaaaatatttaaataaaaagatatgtactctgtctcttgttacatattgtggagttgatttccagaaggttttatggattttcacttccacgarcagtgtacaaaagggtatggaaatcttggcaagcattacttttcaaaatactttcttcaaggttttaggggaaaatagtgtctgattctctttatcctcc

SEQ ID NO: 108132 - DNA, 201 bp, Homo sapiens
taccattataagtactgttttcaggagatgctttttatctttggttacatttgagcatagaagggtggaggctttctgagagaggaggattacaggcagcrgggaccacagtataaacgctcttagctgaggatgtgtttgatgtgtctgcagagcagccaggagaacagtgtgcctgcattagggacaaggaggggatag

SEQ ID NO: 108133 - DNA, 201 bp, Homo sapiens
ttttctagtaatatcttatatagcaacttcaactcgtagaacaatgtggagaacttcagcaacttgttaggggaggattctgagctgccaaaactgatgcyataaaactttcaagacagtatgaggatgggctgctcctcaatttaaatgtattcattttatgcaaggtagatgcaatggaagatataaaatcaactataa

SEQ ID NO: 108134 - DNA, 201 bp, Homo sapiens
gcaatgtggagtaaagtaagcaaatatttcactataattgaagatggtaaatgaaagttatgacttctgtccatttttgttcctgtttcagtcacaccacrctttatcaggtctgcttttaattttgtgtaactgatccatttattttcattgctttaatttcggcagacttgtacataaaggctgtttattttccgttat

SEQ ID NO: 108135 - DNA, 201 bp, Homo sapiens
cagaatactctggaatattactgcctctgcacggttatgtcccccaggtaatgagctgataagggagagggaagcttaaagtataaggaagaacttaagtyagcgggtgatgaaataatgaaaagcaatcattcaaaaacttttgagtgttacaaatagaagtgaggaagggcggggaaagcttgtttttggtgtttggta

SEQ ID NO: 108136 - DNA, 201 bp, Homo sapiens
cactccgatcagagatgaatgaaaggaactattttgttcgtgataaactggatcctgatatggctctttgccgaaatgctagagaaatggtaagatatgcrgtgatggcttgcttgaatgttcttataagatggcttgctttaccagttggtgtgtcactgtgttttgatgccctttgtcttgctaatttgtaagtactag

SEQ ID NO: 108137 - DNA, 201 bp, Homo sapiens
aaaagcaatcattcaaaaacttttgagtgttacaaatagaagtgaggaagggcggggaaagcttgtttttggtgtttggtaatacagacagcagatatgcyaagtgtatgctcatcaagcagctgagactgcctaaagggtcactgtaaaaaaagactcatttttaagaaaggatgtgagggcttaggaagtcaattttat

SEQ ID NO: 108138 - DNA, 201 bp, Homo sapiens
aatgtggcacatacacaccatggaatactatgcagccataaaaaatgatgagttcatgtcctttgtagggacatggatgaagctggaaaccatcattctcrgcaaactatcgcaaggacaaaaaaccaaacactgcatattctcactcataggtgggaattgaacaatgagatcacatggacacaggaaggggaacatcac

SEQ ID NO: 108139 - DNA, 201 bp, Homo sapiens
ttaatgttgtttctaggatagccgtatatctggtggttatgaaaatgtcccaactgatgatatccacatgaagcaagttgatctggagaatgtatggcttsattttatccgggagttcattgcaccagttacactgaaggtctttgcaggctattatacgaaggtagttatcctctcacccctccagcctatttcttaccc

SEQ ID NO: 108140 - DNA, 201 bp, Homo sapiens
aagtccccatgaattttcccctctaacttaggaaggtctttttacatattttttctcaatttgaaaatataaagacacaaattatttgcagatgaaaataagagtaatatttttatgcattagtataaataagaaagttgtaaattatgaaatgaaaatagatgttaatataatgaagtcccagtgccgtacacacttaaa

SEQ ID NO: 108141 - DNA, 201 bp, Homo sapiens
agtccccatgaattttcccctctaacttaggaaggtctttttacatattttttctcaatttgaaaatataaagacacaaattatttgcagatgaaaataagagtaatatttttatgcattagtataaataagaaagttgtaaattatgaaatgaaaatagatgttaatataatgaagtcccagtgccgtacacacttaaaa

SEQ ID NO: 108142 - DNA, 201 bp, Homo sapiens
aaccgtgtaagacagacattcctagagcggccattttagagacctacccctaggaaagcattttctttctcagggctgttccttactgagaaaaagaattmagcgatatttctcctattcgcttttgtaagaagagaaatatggctctgttccgcccggctctcaggcagtcagacctgatggttacctcccttgttccct

SEQ ID NO: 108143 - DNA, 201 bp, Homo sapiens
ctgttcttttttcaaggtgcccagatttcatattgtttaaacacacatgatttactaacgatttgcacagttaatgcaatcatcacagggtcctaaggctrcgcacatcctcagcttacgaagatgacgggattaagagattaaagtaaagacaggcataggaaatcacaagagtattgattagggaagtgataaatgtcc

SEQ ID NO: 108144 - DNA, 201 bp, Homo sapiens
tggggaactaataaatgtccatgaaatcttcacaatttatgttcttctgccatggcttcagccggtccctccatttggggtccctgacttcccgcaacacytgtgtgcatttttttaaatttgacaatttgactttttacagccaaaataaatttaagtaggaaaccttccttgccctttgagaagttttaagtaagttca

SEQ ID NO: 108145 - DNA, 201 bp, Homo sapiens
gcacagccagccagacaactacaaatgttttttacatttttaaaaggttgtaaaaaaataaggaaaaaatcaaattgtattagacagtgtatgtggcccakaaggcctgaaatatttactatttgaccttttgcagaagaagtttctcaacatctctattatgcttttactacgaaaacatttttctttagtagaaagttg

SEQ ID NO: 108146 - DNA, 201 bp, Homo sapiens
ttatgggattccaccttcatccatgtccctgcaaaggacatgaactcattctttttatggctgaatagtattccatgttgtatatgtgtcacattttcttyttccagtttatcattaatgggcatttgggttggttccaagtctttgctattgtaaataatgctgcagtagacatatgtgtgcatgtaactttatagaaga

SEQ ID NO: 108147 - DNA, 201 bp, Homo sapiens
tttgaggacatagcatgttttggcctttctaaacaaattgacttcttgatttttggggaaattatgaaattcatctgaattttcagacagagcaaaatatwcagccatttaacaaatatttattaaatcttactgttgtgataggcattttggaggattatgtaaagatgattacatagtctgccactgattttcatttgg

SEQ ID NO: 108148 - DNA, 201 bp, Homo sapiens
tatgtgtgcatgtaactttatagaagaatgatttgtaattgtttgggtttatacccagcaatgggattgctgggtcaaatggcatttctgattctagatcyttgaggaattgccacactgtatgcatgctgctacctgcaaaatttcagactcagtttagtcagagtctccaatcgtaagatgctctgacatcacaagcta

SEQ ID NO: 108149 - DNA, 201 bp, Homo sapiens
tttctcaacatcaccaaatacctaattagtgttcaaatttctctaattttctcacaaatgcttttttatagcttttacaaatcaggtcccaactcaggtcygtgactaacatttgtttgaaatgtctcttatgttaatattctatatatttcccttcccttttgtgtcttttgccatcgattacataaatcatttgtccta

SEQ ID NO: 108150 - DNA, 201 bp, Homo sapiens
tgcctgtaatcccaactacttgagaggctgaggcaggaggtggaaggcggaggggaactcgggaggcataggttgcagtgagccaagattgtgcctttgcrctccagcctgggtgacagagcgagactctgtctccaaaaaaaaaaaaaaaaaaaaaaaaaaaaaaatttatatggcaagaaccaaaaaatgagcaaccat

SEQ ID NO: 108151 - DNA, 201 bp, Homo sapiens
catctgtttcagtcctgacctttaagtcaaataaattaataacaattatgctggtaacttttttttttaacttttatttagggttcaggggtacatgtgamggtttgttacacaggtgaactcatgtaatgggagtttgttgtacagactatttcatcacccaggtattaagcccagtactcagtagttatcttctttgct

SEQ ID NO: 108152 - DNA, 201 bp, Homo sapiens
aaatggtaaactgaatttcaaaatgttgaaaacatattttaataggtgagattggtttatgtcacctggctggatatcagcactagcttagtatgtctttrtggcttctcttttgtggccaagttggcaaacttgccgaacttggttggatcaggcagaaggaaagaagaactatataatgcagtgctatatgtattgaaa

SEQ ID NO: 108153 - DNA, 201 bp, Homo sapiens
ggtgttctcataggttatgtgataaactaataaatgtagaggtaaactgcttgataaagtgggcagaatcatggactgtggtctattttattctttacaartttcaactgaaaattactaaatagaagcttattcgttgacataaatatcaagatcttctataggaccctaaattgtctagcttaatagttctttaagaag

SEQ ID NO: 108154 - DNA, 201 bp, Homo sapiens
gattttccccttgccaatagtaaaagttttaaattgcagactcaatccacctgatgagaattgtcctttattttgtaggaatagttgagatatggggatastaaatgtagtagtctttgaatattctgaataggaaaatattatcttttgacattttgttattttaaaagtacttttgttccattttaaccacataccttc

SEQ ID NO: 108155 - DNA, 201 bp, Homo sapiens
aggtgttctcataggttatgtgataaactaataaatgtagaggtaaactgcttgataaagtgggcagaatcatggactgtggtctattttattctttacawgtttcaactgaaaattactaaatagaagcttattcgttgacataaatatcaagatcttctataggaccctaaattgtctagcttaatagttctttaagaa

SEQ ID NO: 108156 - DNA, 201 bp, Homo sapiens
atagtaaaagttttaaattgcagactcaatccacctgatgagaattgtcctttattttgtaggaatagttgagatatggggatactaaatgtagtagtctytgaatattctgaataggaaaatattatcttttgacattttgttattttaaaagtacttttgttccattttaaccacataccttcctctttcacagaaata

SEQ ID NO: 108157 - DNA, 201 bp, Homo sapiens
taattgaagatggtaaatgaaagttatgacttctgtccatttttgttcctgtttcagtcacaccacactttatcaggtctgcttttaattttgtgtaactsatccatttattttcattgctttaatttcggcagacttgtacataaaggctgtttattttccgttatgaagaataaaatgttatcttgattcaggcacctc

SEQ ID NO: 108158 - DNA, 201 bp, Homo sapiens
taatgccctaaaataaaatcttaggggattttttttttactttaacttgaagaaaaatcagtattgatgcacaggaaaaatgctataggtaaaagttcttwaatcttatggatgattattcaatttcttgccacattttagaatcagaaagctaattaatattagagggaataatgagataatatagaaatctgatccata

SEQ ID NO: 108159 - DNA, 201 bp, Homo sapiens
ggctcatttttgagtttgtattcaagtaaggcccataacacacttttttcccccaactttttaaagtcaagttttactctgattgaacctcctccccgccmtgtgtgatcattctttgctgtttgaattttacttttcccttctgaactctggaaagaatttgctgaaactcagtgtatagtccttggctgcaatccagcc

SEQ ID NO: 108160 - DNA, 201 bp, Homo sapiens
tcaaaagatgtatttaaggcaaatatcttttaaaacatcttttgattggaattattttgagtctgtgtctcacttcctccctgctggctctctgtatttgyactttgtaaagagaaaattaataatttctagaaatattctaaatttcagaagatatctttttggatatttatattactccatgtattaataatattttag

SEQ ID NO: 108161 - DNA, 201 bp, Homo sapiens
ttttgagtctgtgtctcacttcctccctgctggctctctgtatttgcactttgtaaagagaaaattaataatttctagaaatattctaaatttcagaagakatctttttggatatttatattactccatgtattaataatattttagtaaatatccatatttgaataaagaacttgtcccaataaaataattctttagctt

SEQ ID NO: 108162 - DNA, 201 bp, Homo sapiens
ctgtaaataactggcgatacttgccctctccatcccactgcacatactgctatggtgaccaactcattccagtttgcctaggacttttccagttttaaaaytgaaagccctgtatttctggaatctcctcagccctgggcatactgggatggtgagtcattctgcatactaccctccacttttcagcacttctcttaattt

SEQ ID NO: 108163 - DNA, 201 bp, Homo sapiens
gattacttaagttttaaaatcctgaggtacaatatttcataaataaaaattttgtatttcatagaatgacataagcatattcagaaccaggcaaagattargctatatactgtgatttctgaaaattactattttgtccactatacataatcatttataagttgaataatttctaaaatgcatatgctttatacttttcag

SEQ ID NO: 108164 - DNA, 201 bp, Homo sapiens
ggaatgcagtggcgtgatctccgctcactgcaagctccgcctcctgggttcacgccattctcctgcctcagcttcccaagtagctgggactacaggtgccmgccaccacacccggctaatttttttgtatttttagtagagaccgggtttcaccatagccaggatggtctcgatctcctgacctcatgatccgcccacctt

SEQ ID NO: 108165 - DNA, 201 bp, Homo sapiens
tctggaatctcctcagccctgggcatactgggatggtgagtcattctgcatactaccctccacttttcagcacttctcttaatttgtggtttgtctgttcrttgtccagagtgggctgtggaagcccaggcatccatgtgaaagatagtgtgtgtgaagatgccctctatgtagcattagaggttggaagtgacttttttc

SEQ ID NO: 108166 - DNA, 201 bp, Homo sapiens
tctgcatactaccctccacttttcagcacttctcttaatttgtggtttgtctgttcattgtccagagtgggctgtggaagcccaggcatccatgtgaaagmtagtgtgtgtgaagatgccctctatgtagcattagaggttggaagtgacttttttctttaagcataccattgcccctctttttctacaaaaatggtagga

SEQ ID NO: 108167 - DNA, 201 bp, Homo sapiens
aatactctggaatattactgcctctgcacggttatgtcccccaggtaatgagctgataagggagagggaagcttaaagtataaggaagaacttaagtcagygggtgatgaaataatgaaaagcaatcattcaaaaacttttgagtgttacaaatagaagtgaggaagggcggggaaagcttgtttttggtgtttggtaata

SEQ ID NO: 108168 - DNA, 201 bp, Homo sapiens
cttctactttgagaaattctggaattaagaatgagtgaggattgttggggagaggtcgttgaagctgacaaaacactgaatgcttaccctcgtttctaggkcacagtgaaatcagacttcactggggagcagttttctgatgaggaatgtcatgaatcctttcagaaatgggaatgtctctgtgtttgtctctgtaatgta

SEQ ID NO: 108169 - DNA, 201 bp, Homo sapiens
agagggaagcttaaagtataaggaagaacttaagtcagcgggtgatgaaataatgaaaagcaatcattcaaaaacttttgagtgttacaaatagaagtgargaagggcggggaaagcttgtttttggtgtttggtaatacagacagcagatatgccaagtgtatgctcatcaagcagctgagactgcctaaagggtcactg

SEQ ID NO: 108170 - DNA, 201 bp, Homo sapiens
atgttctctgcctttctgtaacttacagtctcattggagagagagactttaatctcacataatttgagattattcataatttgagattatgcaaattaatwtgtaattacaatttgtggtgagtgccctgaaagaaaggtagaaagtgcagtgaaaacatgggtactggcctactctagtaggtcagagagggtctctcta

SEQ ID NO: 108171 - DNA, 201 bp, Homo sapiens
cataatttttaaaaacaatctggatagcatctctggtagagaaagggatgggagttataactcgctgagttttgcacatcacctacagtctatcttgcacwtgcatcctttgaatatatgtgtgagatgctgcctaacacatatgtaggagtttgtgtcgactgctttatatatactaactcattttactctcatggaaat

SEQ ID NO: 108172 - DNA, 201 bp, Homo sapiens
attgacttcttgatttttggggaaattatgaaattcatctgaattttcagacagagcaaaatattcagccatttaacaaatatttattaaatcttactgtwgtgataggcattttggaggattatgtaaagatgattacatagtctgccactgattttcatttggtaagttgttgttcaaatctaccacactgtatagatg

SEQ ID NO: 108173 - DNA, 201 bp, Homo sapiens; identical to SEQ ID NO: 17640

SEQ ID NO: 108174 - DNA, 201 bp, Homo sapiens; identical to SEQ ID NO: 17643

SEQ ID NO: 108175 - DNA, 201 bp, Homo sapiens
atgaaaggtttcaggtttgtagtgtttttattgaccaacctttacatgaaagtacatctaccatgtagctggaaaaagatccctgataacttttctatgtrccacccttagtttttggaaataggtaaaggaagaaaaagtgacagactgagaatgaataggcagagagatggaaaaaacagtagagagaagcaccaggag

SEQ ID NO: 108176 - DNA, 201 bp, Homo sapiens
tagcctatgctgttataatttttatagtgataatgtgttattagggcaagtatatattcaggaccagcaatttccttatccttctgtaataaacctaaacytaactcatatttgaaaaaaatatcaaagcattcagccttccttgaataagactttctaatctctactgttcagcactgataaaggcacttgcaagatgaa

SEQ ID NO: 108177 - DNA, 201 bp, Homo sapiens
actattgatgtccataggtgagtattaatttctgttcaggtataaagcataatgaaatatatttattttcatggccataagattatcatatttctaaggasactaataggagaagttaatcttcttaatgttatattaagaaaacataactgttggataaaagtttaaataatagatgtttttacattctagcctatgctg

SEQ ID NO: 108178 - DNA, 201 bp, Homo sapiens; identical to SEQ ID NO: 17655

SEQ ID NO: 108179 - DNA, 201 bp, Homo sapiens
aaactattgatgtccataggtgagtattaatttctgttcaggtataaagcataatgaaatatatttattttcatggccataagattatcatatttctaagkagactaataggagaagttaatcttcttaatgttatattaagaaaacataactgttggataaaagtttaaataatagatgtttttacattctagcctatgc

SEQ ID NO: 108180 - DNA, 201 bp, Homo sapiens
atacttgtcagagtgaatgcatttaagttccaagaaccaaggaaaggcggtatttcaagaagagaagtatcaaatcttccagattagtcaaataaactccaaaaaaaaaaaaaaaggtttattggatttggcagctggagatccatagcgatttttttttttttttttttttttttttgagacggagtctcactctgtcgc

SEQ ID NO: 108181 - DNA, 201 bp, Homo sapiens
aggctggaatgcagtgtcgtgatctctgctcgctgcaacctcagcctcccgggttcaagcaattctcctgcctcagcctccccagtaggtggaattacagrcatacgccaccacacccggctaatttttttgtatttttttggtggagatgtttcaccatattggccagactggtctggaactcctgaccttgtgatccgc

SEQ ID NO: 108182 - DNA, 201 bp, Homo sapiens
gtacccgagacggggcggaaggagactggagtgaaggtgggcctaggctaaggtacgtgctagaaaggatgaaaacggagtgaaattcttaagtgatggamctaggctagggcatgtttcttgccctttaaaatgtgttgtcttcgggagacaggacgtagaagatagttgcagcacagggtgataggctggcgaaagtta

SEQ ID NO: 108183 - DNA, 201 bp, Homo sapiens
tgtgccaaatcaagcctctctttattagaagaacaaatataaatacttaagtcaaaattagagttcaagtcaattatttaatgcctttatcttaaaccatyaaagacagcaagattttatatccctagacttttgatgtggagtaaggtatttttattgagaattgctagtattatttataagtgtatgactagataaatc

SEQ ID NO: 108184 - DNA, 201 bp, Homo sapiens
atctttctatgtagagcgtatagatcttccctgttcttttaaatggctgtataattgtctatggaaggacttaatttatttaacccataccttgttgatgrcttatttgtgttttgcttttattttttcctctttgtttttgctgctacaagcaatgcttccttccatcttagcggatctgtctttgtacccttgaatgag

SEQ ID NO: 108185 - DNA, 201 bp, Homo sapiens
attagaattgctttgatgtagctttgtcaactggttatgtgagtatgttttgcattgaccgtgattacatggtgtgccaaatcaagcctctctttattagragaacaaatataaatacttaagtcaaaattagagttcaagtcaattatttaatgcctttatcttaaaccatcaaagacagcaagattttatatccctaga

SEQ ID NO: 108186 - DNA, 201 bp, Homo sapiens
aaaagtgtctctttgttttagggtgcatttcctcatttaatgaagtgaagattcttccttgtttagtgaccatttgcctttatttttctgtgaactgcttstgaatggcatttgtcgttcttctgttgtctttttagtcttttttctaaagcacactttgtagccctttgttgtaaaatgttggaaatatttttcccagtt

SEQ ID NO: 108187 - DNA, 201 bp, Homo sapiens
tgaatggcatttgtcgttcttctgttgtctttttagtcttttttctaaagcacactttgtagccctttgttgtaaaatgttggaaatatttttcccagttkgtcatttaatctttgactttgtctttctattccccagtaggaggtacttaatttttatatactcatatttggcaggctttttctttataggttcttttgg

SEQ ID NO: 108188 - DNA, 201 bp, Homo sapiens
ccgccttggactcgcaaagtgctgggattacaggcgtgagccaccatgcccggccaattagaattgctttgatgtagctttgtcaactggttatgtgagtrtgttttgcattgaccgtgattacatggtgtgccaaatcaagcctctctttattagaagaacaaatataaatacttaagtcaaaattagagttcaagtcaa

SEQ ID NO: 108189 - DNA, 201 bp, Homo sapiens
taaaaaatgtgattttaaaccaggactagttttcacaagttaaaggagttttaaaagaaaccaaaatattggtacaaattaattacaggtttatgcatttygaaggcagataccctgattaacattgagggtatcaattgtttaagataaaatatttgagaattatatttaacatatgcaataaatgtttttattcttaaa

SEQ ID NO: 108190 - DNA, 201 bp, Homo sapiens
tattcattgtaattcattgtatggctggccaggcaaaagcatcctttttctccttcactgcagtttgtaactgactcactggttagaagtagtaacctttscagagagacaaaggactttctcaggcaagggtatatgagcagctttaaaatataatgtggcaaaggaaagaataagctgtagtctagttggtcagagcta

SEQ ID NO: 108191 - DNA, 201 bp, Homo sapiens
gtctcaaaaaaaataagaaataaatgtaaattattatttcaatcagtaatcaaattctaaaaaatacttaatgagatatttaataagtctttgcaattccrtgtgtattttacattaattttagtctatctcaatttagactagccatgtttaaagtgtttggaagccacatgttactagttgctcctgaattgagcaaca

SEQ ID NO: 108192 - DNA, 201 bp, Homo sapiens; identical to SEQ ID NO: 17652

SEQ ID NO: 108193 - DNA, 201 bp, Homo sapiens; identical to SEQ ID NO: 17653

SEQ ID NO: 108194 - DNA, 201 bp, Homo sapiens
agaccctgtctctacaaaaaagatacaaaaatacccaggcatggtgatgtaagtcctagctacttatgaggctgaagcagaaagattgcagcactatactstagcataggcgacagagtgagaccttgtctcaaaaaaaataagaaataaatgtaaattattatttcaatcagtaatcaaattctaaaaaatacttaatga

SEQ ID NO: 108195 - DNA, 201 bp, Homo sapiens; identical to SEQ ID NO: 17654

SEQ ID NO: 108196 - DNA, 201 bp, Homo sapiens
aggagttttaaaagaaaccaaaatattggtacaaattaattacaggtttatgcattttgaaggcagataccctgattaacattgagggtatcaattgtttragataaaatatttgagaattatatttaacatatgcaataaatgtttttattcttaaaattgtcgaaaagaatagaagaagttggtggtggtgatgaaata

SEQ ID NO: 108197 - DNA, 201 bp, Homo sapiens
tacagttatgcataaagaaagtaaaatatggtaaactttcatattgcactaggtatgaatttgtattgctaactgtctttgtaactaatttatgtatactstaaatggtatagcatgtgattttattatagttgattaactttgtaatttctgtaactgcatcgatatcccagtctacctggaaaattaagtctattaacc

SEQ ID NO: 108198 - DNA, 201 bp, Homo sapiens
tatccaatagaaatatgaagccacgtatgtaattttaaattttctagtagaatacatagaaaaggtaaaaagaaataaggcaattaatttcataatgtgtrtcatttagctcaataaatgtaaactatcgctgggtgcagggtccatgcctgtaattccagcactttgggaggccaaggcaggaggattgcttgaggccag

SEQ ID NO: 108199 - DNA, 201 bp, Homo sapiens; identical to SEQ ID NO: 17656

SEQ ID NO: 108200 - DNA, 201 bp, Homo sapiens
ggtgaccattcgtttattagaaactattgatgtccataggtgagtattaatttctgttcaggtataaagcataatgaaatatatttattttcatggccatragattatcatatttctaaggagactaataggagaagttaatcttcttaatgttatattaagaaaacataactgttggataaaagtttaaataatagatgt

SEQ ID NO: 108201 - DNA, 201 bp, Homo sapiens; identical to SEQ ID NO: 17657

SEQ ID NO: 108202 - DNA, 201 bp, Homo sapiens
aacatgatttgtacagttcctcctgccttcgtattataatgaagaattgagtgttttctcagagatacagagtgctgcctgtgacttcttttttctctctycatttctttgctcaggggtcacagttattgataaaccattatgagcctgaaggacattttcagcatatttatacatgagaaacagccttcaacaagtatt

SEQ ID NO: 108203 - DNA, 201 bp, Homo sapiens
tgggaaaaccaatggaagtgtttcaaagttcttctctttaatcacttctgtatccagctgcctttgatttgtggaacctattattttacagagtatttcartattccttatgattgggaaagaatgccaagatggtacgtagataaaaatttggcttttacacccaattgtggcttattcagttaagttatacttaatgtt

SEQ ID NO: 108204 - DNA, 201 bp, Homo sapiens; identical to SEQ ID NO: 17660

SEQ ID NO: 108205 - DNA, 201 bp, Homo sapiens; identical to SEQ ID NO: 17651

SEQ ID NO: 108206 - DNA, 201 bp, Homo sapiens
tgttcttgaaaataatgtgttttttaaaggaatatctacaaatagaaatggtgatgatatccagcaaatgttttaaaatggtgtaaaaccatttgtactcstttagtaattttttggtaaaaaatttatactcctttagtaattatcatttttaaaatgatcagaggatgcattttttaactgttttattttttgaaagct

SEQ ID NO: 108207 - DNA, 201 bp, Homo sapiens
tgaacacttagaaataaagtggtctaggcaaagtggcatgttatctaaattggttaatgtgaacacatgattattaataaaaacaacaatcatttgagatrtatttattccttaataatctttatcatttttgtttcagtggttatgatattcctctcaaccctttaaatctgatccctttctatgctggttctcggcatc

SEQ ID NO: 108208 - DNA, 201 bp, Homo sapiens
tggagagctaatgcacatccttgctagttaggcgaaaatttcacaggaatgaaaaagtaaagcagactttgcaggatctatttctttaaaaaaaaaaaaaacatacatcttagtaattctccaaaaattttcctcaaagataaatgtactaaaaatattatttctgaagtttgtggcccttgtaaaggtattcctttatat

SEQ ID NO: 108209 - DNA, 201 bp, Homo sapiens
ttctgtaacttgttacttggattaacactgtatcttagacatctttctatgtagagcgtatagatcttccctgttcttttaaatggctgtataattgtctrtggaaggacttaatttatttaacccataccttgttgatgacttatttgtgttttgcttttattttttcctctttgtttttgctgctacaagcaatgcttc

SEQ ID NO: 108210 - DNA, 201 bp, Homo sapiens
tgcatagataaaatacatatccttttcaaaaaatcttaagtggggctcttgctatgcatactgttctgtaacttgttacttggattaacactgtatcttasacatctttctatgtagagcgtatagatcttccctgttcttttaaatggctgtataattgtctatggaaggacttaatttatttaacccataccttgttga

SEQ ID NO: 108211 - DNA, 201 bp, Homo sapiens
cactctcccctaccccgccacgctgtcttcattaacactatctcctgccctgccacacaactctgttttcctagaagtcaccagtgtgaatttttccctttgtatccatatgtacattttttgtttctgtgtgtctgtgtatatacatatgcataaaagtgcatagataaaatacatatccttttcaaaaaatcttaagtg

SEQ ID NO: 108212 - DNA, 201 bp, Homo sapiens
tttcaagaatactttgttaaattgggctttaagtagatgtgatggttatctaacttaagtttatgaattttaatgtttaagctagctggaaaggaaaggtrtggtgatttgcgcatattttgcagttcaccccaactctatgttccagtaaatctaagggactgttaatacactacgaccttgatcagggctattcaagtt

SEQ ID NO: 108213 - DNA, 201 bp, Homo sapiens
actctcccctaccccgccacgctgtcttcattaacactatctcctgccctgccacacaactctgttttcctagaagtcaccagtgtgaatttttccctttgtatccatatgtacattttttgtttctgtgtgtctgtgtatatacatatgcataaaagtgcatagataaaatacatatccttttcaaaaaatcttaagtgg

SEQ ID NO: 108214 - DNA, 201 bp, Homo sapiens
attgaagacattttggtgcaggtggggagccagattgcaagtagctcagtgagttgtgtgggtgagttaagcaaccttttttattctttttttttgagacsgagttttgctgttggtgcccaggctagagtgcagtcacagcttactgaaacctccacctcctcatttcaagcgattcacctgaactcctgaccttaggtg

SEQ ID NO: 108215 - DNA, 201 bp, Homo sapiens
ccttatgattgggaaagaatgccaagatggtacgtagataaaaatttggcttttacacccaattgtggcttattcagttaagttatacttaatgtttaccygttttcttaattttagttaatgtttgttctaaactttggaagtaaataaatagtagaaaagtaaaccacagtaaaatcttaaaatgtttccatttttaca

SEQ ID NO: 108216 - DNA, 201 bp, Homo sapiens
ttgtgaggctaaagcagtgatatccaatagaaatatgaagccacgtatgtaattttaaattttctagtagaatacatagaaaaggtaaaaagaaataaggmaattaatttcataatgtgtgtcatttagctcaataaatgtaaactatcgctgggtgcagggtccatgcctgtaattccagcactttgggaggccaaggca

SEQ ID NO: 108217 - DNA, 201 bp, Homo sapiens
gctaagcaaatgggtatcctgatgaggtcttaacgaacatcccatgttgatctaacttttctcattttgacttgaatctgtgaactccataatcaggacayatctgtgtacttctcaactcagagagtttataattctgtcattggatttgaacaaaagtgcatttatttgttggaatgaataccactgagtgcctggaag

SEQ ID NO: 108218 - DNA, 201 bp, Homo sapiens
agttcccgtactttggatatcgtggttcaattaaaagagttttgttggcggatacctgaatttttcagcagtgacatttaaaacaaagcaataactgatayttattgtcaccatcgttttgttaagcccaaagcacttttttaagtgcagtcctataaattgaatacatttagttagtgtttgttttgttttgctttgttt

SEQ ID NO: 108219 - DNA, 201 bp, Homo sapiens
aaaaaaaataagaaataaatgtaaattattatttcaatcagtaatcaaattctaaaaaatacttaatgagatatttaataagtctttgcaattccgtgtgyattttacattaattttagtctatctcaatttagactagccatgtttaaagtgtttggaagccacatgttactagttgctcctgaattgagcaacacagtc

SEQ ID NO: 108220 - DNA, 201 bp, Homo sapiens
cctattgagcttatttattaggtaagtagaacatgctcatttaaaaagtttaaattgtgcaaaagacatatgtcagatttttttttctgtcttccataacrctatttcctaccccgccgcgctctgtcttccgtaacactctcccctaccccgtcgccactctgtcttccataacactgtcccctactccaccacactgtc

SEQ ID NO: 108221 - DNA, 201 bp, Homo sapiens
ttaattttaaaatgaatgaaatatatgagaatcatttatgaggtttatagaaattgtgtttacatgaacaaaaatatgtatgtatatatatatatatatayacacacatatatatatacacacacatatatatactcatgcgtcacttaacggatatctcttgagaaaagtgtcatgaggcaagttgtgtgaacattgtaa

SEQ ID NO: 108222 - DNA, 201 bp, Homo sapiens
gattcctgagtcttagttatataaagttaacataactgacgtagaattaaggtccaacataaacagagaacaaattaggtcaagttaaactctgatagcaragactaatattagatattgtgatttttcttcgtaggataagccagagacatgggaaaaccaatggaagtgtttcaaagttcttctctttaatcacttctg

SEQ ID NO: 108223 - DNA, 201 bp, Homo sapiens
tgaggctttaaaatactcatttttaaaatggtccaaaaaattcataaattagaagcagcagtggtgaacatttttaggaaagtgacccttgagaagtttaytttttggttagtgacctattgagcttatttattaggtaagtagaacatgctcatttaaaaagtttaaattgtgcaaaagacatatgtcagattttttttt

SEQ ID NO: 108224 - DNA, 201 bp, Homo sapiens
tggttcaattaaaagagttttgttggcggatacctgaatttttcagcagtgacatttaaaacaaagcaataactgatatttattgtcaccatcgttttgtwaagcccaaagcacttttttaagtgcagtcctataaattgaatacatttagttagtgtttgttttgttttgctttgttttttataatgacttgctaagcaa

SEQ ID NO: 108225 - DNA, 201 bp, Homo sapiens
gagaatcatttatgaggtttatagaaattgtgtttacatgaacaaaaatatgtatgtatatatatatatatatatacacacatatatatatacacacacayatatatactcatgcgtcacttaacggatatctcttgagaaaagtgtcatgaggcaagttgtgtgaacattgtaatgaaatgaaattggtctaatgggcag

SEQ ID NO: 108226 - DNA, 201 bp, Homo sapiens
gcatgtgattttattatagttgattaactttgtaatttctgtaactgcatcgatatcccagtctacctggaaaattaagtctattaaccatagttgctgtrggagacagtactattgccaactgaagcctgaatccttcatttattttgtccccaattacagagtggaggtttagaggagtggggttagataatgctcaga

SEQ ID NO: 108227 - DNA, 201 bp, Homo sapiens
taagaattatttttaaagtgctaaagtagcaaaattaatgcttctagtcctaggcagagaatattcttctgtagaaaaattgtaattgacatttctttctyttttttttctatccattgtttctttctgccttccttcctctaagctcctcaaaggaagagagggttagagtgattcaaataagtataactggatgtctga

SEQ ID NO: 108228 - DNA, 201 bp, Homo sapiens
ttaatttttatatactcatatttggcaggctttttctttataggttcttttggctttaagtgatacttttaaacccagctattgctcatttaaattagaascttttccatgagaaccacactgacgatttctttaaatatagcttgaaaaaatttttcccctattgttcttttagctattgttcttgaaaataatgtgttt

SEQ ID NO: 108229 - DNA, 201 bp, Homo sapiens
gatcaaaggatgtattcattttgaattaggtgttgctaatttttcctccaatgatacactgatgtatcccccctgcccacagtgtgtggtcatgcctgttytctcaccctcttaccagtactggacattaataagcttttaaagatttgctactcaggctaaaagtgtctctttgttttagggtgcatttcctcatttaat

SEQ ID NO: 108230 - DNA, 201 bp, Homo sapiens
tacccttgaatgagaaagttgctggatcaaaggatgtattcattttgaattaggtgttgctaatttttcctccaatgatacactgatgtatcccccctgcycacagtgtgtggtcatgcctgttctctcaccctcttaccagtactggacattaataagcttttaaagatttgctactcaggctaaaagtgtctctttgtt

SEQ ID NO: 108231 - DNA, 201 bp, Homo sapiens; identical to SEQ ID NO: 17658

SEQ ID NO: 108232 - DNA, 201 bp, Homo sapiens
tggggagctctggagctgggatggccaagcaaagtagccctacattggtttaggggattttatacccgtttcaaccagttacttgactagctgttgcctaraaagggggtatacccgtggggagaggtgcttctctttggcagtactcagcagctggaggaatgcctgcttaggtcttgaagagggggatctgggtggtgt

SEQ ID NO: 108233 - DNA, 201 bp, Homo sapiens
tgtctcggagggtggctgcccacggcctgggtgtggctggaatggtggcaggagtgggcaccagtgcggccccggtggccatggggaataaaccagcattrctgcctccggcctccgccgtttttctgtttcgtaaaccagcatcccggggttcctgctctgagtgaccctggcacctgtcagggagtccaggtgtgcccc

SEQ ID NO: 108234 - DNA, 201 bp, Homo sapiens
cctggggaggtgaaagtccccactccttcagggagggaaagggggcggggcactgttccagcctggagtgtgggagggatctgtttctttttttcttttctttttttttttttttgagaaagggtctccctctgttgccaggctggagtaaggctggagtgcagtggtgccatctcggctcagtgcaacctccgcctccca

SEQ ID NO: 108235 - DNA, 201 bp, Homo sapiens; identical to SEQ ID NO: 17674

SEQ ID NO: 108236 - DNA, 201 bp, Homo sapiens
tacatcattgtcactcaggtgaggcctggggctcacccagtaccccggggtttcctttcctgccaggggggcccgcccagcccccagggcccttaaaggcwaagcgcggctccctgtccctaccgtgtctcaggcaggaagccagaacgcctttgtccattcatttgctctcaaagtggacattacaggccactggtgatg

SEQ ID NO: 108237 - DNA, 201 bp, Homo sapiens
ctcccccagcccgagaccctgtgtccctccctcgccccgtttctcccagcggtaacctccaaggagcggtaatggggggcccgcaggcccacatccgtgcsggggaggccggtccgcacctgtgcgttcacagccccgcccctcccctcgcgccggggttacctggccgccactgaccactcatttctgtaacgtcatttc

SEQ ID NO: 108238 - DNA, 201 bp, Homo sapiens
ctaaaagaaacctgtccccacagcagccacctgccgtctccccctccctgagccctgacggccaggaatgcacttcccatctctggacttgcctgttgtasactgttgtagacgcttagagaaacggatgcattcaccgtgcccctgccctgcttttccaggtttctgaaggggctgcaggtgaggccggcccctctctca

SEQ ID NO: 108239 - DNA, 201 bp, Homo sapiens; identical to SEQ ID NO: 17678

SEQ ID NO: 108240 - DNA, 201 bp, Homo sapiens
ttccctgagctgttaccccatggggcttggcagcacccttggccagatgtgggtccagcctgggcatagctgtttaccacataacctaaaatttcctgtcycagccattcgagagcatataatcctgcggtgttgaggacattcacagggtcatgtgagcaccacctcaagccacctccttaactttttcatcacccctaa

SEQ ID NO: 108241 - DNA, 201 bp, Homo sapiens; identical to SEQ ID NO: 17679

SEQ ID NO: 108242 - DNA, 201 bp, Homo sapiens
gcctgcgcagacaacaccacgccccaggcctggcgagcgcaccctgcgggtggggcggacctacgtcagcaacccatcgtccgatcccgtccattggctgrgaggtaatgcgtgcgcccgactcgccgctgattggtcggcgcgcgagcagccgggctcgcacgggccaatcctgtggtagcgcgtgaggaggcagaggcc

SEQ ID NO: 108243 - DNA, 201 bp, Homo sapiens
ccaggtggggccagggcctcaaatcctggatgacccctgcgcccacctcctgggtcctgacggcctgccgaagccagctgcctgactgcctcagcagggascgcatgccgcttggagaaggggtggcctcgccggagctagggagcggatgtggtgggctggccggactcctgggacatgtgggtggtggcttgaccccgg

SEQ ID NO: 108244 - DNA, 201 bp, Homo sapiens
ctggctggagtacagcagcaccatctcggctcactgcaacttccgcctcctgagttcaagcaattgtcctgcctcagcctccccagtagctgggattacasgcgtgcaccacacgcccacctaattattgtatttttagtagagacagggtttcaccatgttggccaggctggtctcaaactcctgacctcgtgatccgcc

SEQ ID NO: 108245 - DNA, 201 bp, Homo sapiens
agcacgcagtgtctgttccatctcccagtattaggagagctgagcacagcacacacgtgcccccaggtctcgtcacacatgcgcacaccgtgccccagggsctcccctgggagtccccgtctctttattcaggataaggcctggttgctccacaaggtgtggcccacgctttcatcccccacgggcttccccactgcccag

SEQ ID NO: 108246 - DNA, 201 bp, Homo sapiens
gaagcgatgaaggaatggggagcggggacggaggttggctggcctccagctctgctctgggagcctgagctcagtggggtgggagcagttcttgcaggcckgggtctggcaggaggaggggcacacaggttgtgcggtgagagacgggactgaggcggatgggggccgtgggtggggggtgggggcacctgtggggaacac

SEQ ID NO: 108247 - DNA, 201 bp, Homo sapiens
actcccagatgtgtgcgtaagtgtccgacattttgaaggaaaggagtcaaagcccctgatttccttcttactgaagcgagttagagccagtcaaggcggcygggtgttgaccccgccccggcagttgggtgtcttttcttgggtggggtccggcagctgcatcttggcgccacagagcccccatgtacgccctcctcggtg

SEQ ID NO: 108248 - DNA, 201 bp, Homo sapiens
ttcccacccactgtcagagcctgtccccccggtggtggtctcacaccatcttcacccctcaactccaggggtgacgcttcctggcccacctgggctcctgygccttccctgaaccaccctcggtgaccagggtgggtgaccagacctggaggtggggttgccctgctggagccctgtgggaggaggggagaaggtggctcc

SEQ ID NO: 108249 - DNA, 201 bp, Homo sapiens
ttactgaagcgagttagagccagtcaaggcggccgggtgttgaccccgccccggcagttgggtgtcttttcttgggtggggtccggcagctgcatcttggygccacagagcccccatgtacgccctcctcggtgcacagcttggccctgaaccgcctcttcccctgcgctgctctgtgggggtgccacagagcccccatgt

SEQ ID NO: 108250 - DNA, 201 bp, Homo sapiens
cttccatggggcttcctgctctgccgcaggtaccttttgttgcccttgtcgcaggccgcaagctctgcaggccgtgaacagagagtgtccgagagtggaastagcggaggtgggggacagacggctgggccggtgaatgctggcctcaaaggctgatggcccagaagccctgtcatctggaaatccccatttgccgtgggg

SEQ ID NO: 108251 - DNA, 201 bp, Homo sapiens
cctgcttcggcctcccaaagtgctgggatcgtaggtgtgagccactgaggctcaccaacagtgatatttatggaaacgtgtccattttcttgtaacgttcmaagactctggtcttctttaaaccttacgtttgagctggtttttgatagcgcgctggtggaggagggggtgctggctcaagataaggaggcagaagtccag

SEQ ID NO: 108252 - DNA, 201 bp, Homo sapiens; identical to SEQ ID NO: 17702

SEQ ID NO: 108253 - DNA, 201 bp, Homo sapiens
gactgctgtgggttccaggtggcgtacacctttgacgcgggccccaatgccgtgatcttcaccctggacgacactgtggctgagtttgtggctgctgtgtkgcacggctttcccccaggctcgaatggagacacgtgagtgtggaccccgcccctcctcctttttgggagatggtgccaggaactctggtcggaagagacg

SEQ ID NO: 108254 - DNA, 201 bp, Homo sapiens
accgctaccctcctgtgtccggccctacagatgctgggcacaggatgaggcgctgccattcctggtgacctgacatggatttctatccccaggtggggccrgggcctcaaatcctggatgacccctgcgcccacctcctgggtcctgacggcctgccgaagccagctgcctgactgcctcagcagggaccgcatgccgctt

SEQ ID NO: 108255 - DNA, 201 bp, Homo sapiens
cagccgaggctgcaggcctgcctgcgggagagtgagctggggtccccataagcccatccctccctgttgtcagcagggtccgagcatccagaaagtgcttytgcctctgtgcccctcctgaggcagcaggcggggtggctgggaaccagacatgcccgctgggccgccagctccagggcagtggcccacctcaatgaccag

SEQ ID NO: 108256 - DNA, 201 bp, Homo sapiens; identical to SEQ ID NO: 17707

SEQ ID NO: 108257 - DNA, 201 bp, Homo sapiens
cgcacagcgcctcaaggtctccgcacagcccccagcacagcgcctcacacagcccttcgcacagccccccgcacagctcctcacgggccccacacagctgycgcacagccccgcacaagcccgcacagcaccagcagacaggtagcccccacaggcaacagcgcccacctcgccgcgcccagaccccggatcgccgacgcg

SEQ ID NO: 108258 - DNA, 201 bp, Homo sapiens
cgaatggagacacgtgagtgtggaccccgcccctcctcctttttgggagatggtgccaggaactctggtcggaagagacggaggcacctgaaggctgtggygctgagacagggagtcccagggcaggcagcagtcccccgagtgtgggagccacgggcagggtgtccccatagagccatcccacagcccacgtccacaggg

SEQ ID NO: 108259 - DNA, 201 bp, Homo sapiens
cctgtggggtggactcagacccacaccccaggactgcccgcctgggaagcaccaggctcgtggctgctgctccgggtggggcttgcaggcttccgctgttytgcagaacacggtgacgaacgcaccagcttgaattgggcgcttccctgagctgttaccccatggggcttggcagcacccttggccagatgtgggtccagc

SEQ ID NO: 108260 - DNA, 201 bp, Homo sapiens
tggccgggaggaggatgtggggcagccgaggctgcaggcctgcctgcgggagagtgagctggggtccccataagcccatccctccctgttgtcagcagggwccgagcatccagaaagtgcttctgcctctgtgcccctcctgaggcagcaggcggggtggctgggaaccagacatgcccgctgggccgccagctccagggc

SEQ ID NO: 108261 - DNA, 201 bp, Homo sapiens
ggcctttccccccctgccctcagcagggctgaccttgctcgagtgggcagccatgaggctctctcagtagaaaggggtacctggctggcatcggtcctcartgctggcctctgaggtggccctgggtttccttttcagttaaaaaccaccacaacagccgtcatcagcaaggacttcaccgaggaccggatttggctgaat

SEQ ID NO: 108262 - DNA, 201 bp, Homo sapiens
cgggtaagaaactctccacgaggagtctggcaggcagaggcctggtgttcagctgtgaccccgggcaggtgggcaggagcagggcgggcagggtgctgacrgctgggccacacgctgtctcattgtctctgcagtccgctgcctggcccggaagcggaggaactcacgggatggggacccgctgccctccagcctcagctg

SEQ ID NO: 108263 - DNA, 201 bp, Homo sapiens
ccgggtaagaaactctccacgaggagtctggcaggcagaggcctggtgttcagctgtgaccccgggcaggtgggcaggagcagggcgggcagggtgctgayggctgggccacacgctgtctcattgtctctgcagtccgctgcctggcccggaagcggaggaactcacgggatggggacccgctgccctccagcctcagct

SEQ ID NO: 108264 - DNA, 201 bp, Homo sapiens
tccttttcagttaaaaaccaccacaacagccgtcatcagcaaggacttcaccgaggaccggatttggctgaatggccgggaggaggatgtggggcagccgmggctgcaggcctgcctgcgggagagtgagctggggtccccataagcccatccctccctgttgtcagcagggtccgagcatccagaaagtgcttctgcctc

SEQ ID NO: 108265 - DNA, 201 bp, Homo sapiens
cctgctctgccgcaggtaccttttgttgcccttgtcgcaggccgcaagctctgcaggccgtgaacagagagtgtccgagagtggaactagcggaggtgggrgacagacggctgggccggtgaatgctggcctcaaaggctgatggcccagaagccctgtcatctggaaatccccatttgccgtggggtgtgggacgttcct

SEQ ID NO: 108266 - DNA, 201 bp, Homo sapiens; identical to SEQ ID NO: 17673

SEQ ID NO: 108267 - DNA, 201 bp, Homo sapiens
ccgggagcgagacttccccagcttcgcccagctgaccatgaaggacagcaaccagttccacgccacctgcctcgacaccttcccgcccatctcttacctcmatgccatctcctggcgcatcatccacctggtgcaccgcttcaacgcccaccacggggacaccaaggtgacgcgggccgggagggcagaggctgcgctcgc

SEQ ID NO: 108268 - DNA, 201 bp, Homo sapiens
cgtacacctttgacgcgggccccaatgccgtgatcttcaccctggacgacactgtggctgagtttgtggctgctgtgtggcacggctttcccccaggctcraatggagacacgtgagtgtggaccccgcccctcctcctttttgggagatggtgccaggaactctggtcggaagagacggaggcacctgaaggctgtggcg

SEQ ID NO: 108269 - DNA, 201 bp, Homo sapiens
tgtctgctttcctccaagttgtacaggattgccttttatatttaagtctgtgatccaaggttgtccagttagcccagaaaggctatccttcctctattgarttgcttttgcacttttgtaaaaaaaaaaatcagctgggcatgtttgtgtgggtctatttctggattttctcttctgctattttttttttttttttttttt

SEQ ID NO: 108270 - DNA, 201 bp, Homo sapiens
accgcttcaacgcccaccacggggacaccaaggtgacgcgggccgggagggcagaggctgcgctcgcgctgtagcgcgtgtctaggcttgtgctgccgtgragacggccccggggctcgcgtgcagggcaatctgtgtctgaaagctccaccctgctgtgtgcgaagctcactgaccatctgggttcttctgtttcatttt

SEQ ID NO: 108271 - DNA, 201 bp, Homo sapiens
cctcaaggtctccgcacagcccccagcacagcgcctcacacagcccttcgcacagccccccgcacagctcctcacgggccccacacagctgtcgcacagcsccgcacaagcccgcacagcaccagcagacaggtagcccccacaggcaacagcgcccacctcgccgcgcccagaccccggatcgccgacgcggacgccagg

SEQ ID NO: 108272 - DNA, 201 bp, Homo sapiens
cctcgccgcgcccagaccccggatcgccgacgcggacgccaggcgcctgggcacacggcgcctgcgcagacaacaccacgccccaggcctggcgagcgcaycctgcgggtggggcggacctacgtcagcaacccatcgtccgatcccgtccattggctgagaggtaatgcgtgcgcccgactcgccgctgattggtcggcg

SEQ ID NO: 108273 - DNA, 201 bp, Homo sapiens
atggtgaaacccccgtctctactgaaaaaaaataaaatatgtattctagatattagtctcctgttggacatgtggtttgcaggtattgtctcccaaactarctaatctttttgtcctcttaacaaagagccagtttttcattttaaagaagttcagtgtatcaatgttgatgtcaagtctaagacctctttgcttagccct

SEQ ID NO: 108274 - DNA, 201 bp, Homo sapiens
catctaacgttttctttctttctttcttttctttccagaagccgccaccacgactggctaatttttttgtgtttcccttaccaataaagctgccataaaaygttgtatacaggtttttgtgtgaacatacatttccattcttctgggataaatgcccaggagtgcggttgctgggtcagatggtagatatatatatatgcc

SEQ ID NO: 108275 - DNA, 201 bp, Homo sapiens
cgtccgatcccgtccattggctgagaggtaatgcgtgcgcccgactcgccgctgattggtcggcgcgcgagcagccgggctcgcacgggccaatcctgtgrtagcgcgtgaggaggcagaggcctctggggtgggatcgcgggccgtaagtggctgtggagctggggtcactgcgcggtgggaccatggcctcggagaagc

SEQ ID NO: 108276 - DNA, 201 bp, Homo sapiens
cagtaccgtgggcatgcgggccagtgtggagaccagccccctgcttcgggtaaggccaggagcgggtggtcccggggccctgggagtcacgcttgtgcccrgctctgccctcagcctctgtctgggcccgagtgttctcacacctgcggcagccccgccaagaccacgtgcaggagccaaatgcagagatggggctcgagc

SEQ ID NO: 108277 - DNA, 201 bp, Homo sapiens
tgttcctggggcatatgagcagtgagatgtgaggagttctcagagctgggctccttttgtttgggaaggtggaggggaggcaggccgcggtgggagcgatscgcacctgggcactcacggatgctggagtagaagcgatgaaggaatggggagcggggacggaggttggctggcctccagctctgctctgggagcctgagc

SEQ ID NO: 108278 - DNA, 201 bp, Homo sapiens
ttacctaaaggctaggatgagatggcctagcgacgactcccagccagcacgcagtgtctgttccatctcccagtattaggagagctgagcacagcacacaygtgcccccaggtctcgtcacacatgcgcacaccgtgccccaggggctcccctgggagtccccgtctctttattcaggataaggcctggttgctccacaag

SEQ ID NO: 108279 - DNA, 201 bp, Homo sapiens
gttgaggacattcacagggtcatgtgagcaccacctcaagccacctccttaactttttcatcacccctaaaagaaacctgtccccacagcagccacctgcygtctccccctccctgagccctgacggccaggaatgcacttcccatctctggacttgcctgttgtagactgttgtagacgcttagagaaacggatgcattc

SEQ ID NO: 108280 - DNA, 201 bp, Homo sapiens
cctgacggccaggaatgcacttcccatctctggacttgcctgttgtagactgttgtagacgcttagagaaacggatgcattcaccgtgcccctgccctgcktttccaggtttctgaaggggctgcaggtgaggccggcccctctctcagctgagcttcaggctgcgctggccatggagccgacccccggtggggtcaaata

SEQ ID NO: 108281 - DNA, 201 bp, Homo sapiens
cctgtctcagccattcgagagcatataatcctgcggtgttgaggacattcacagggtcatgtgagcaccacctcaagccacctccttaactttttcatcamccctaaaagaaacctgtccccacagcagccacctgccgtctccccctccctgagccctgacggccaggaatgcacttcccatctctggacttgcctgttg

SEQ ID NO: 108282 - DNA, 201 bp, Homo sapiens
tacttgtgagtatcactgtcatccagatccacaagcaagaggtcctccctccaggactgaaggtaagtgtgaagggactggcaacaaagggaagaaatgakcataaaggggaagaaatcaattattccaaaaccatgagttagaagagcagaaaatcctttccccccatctctggctgaagccaggagaagttagtgtaag

SEQ ID NO: 108283 - DNA, 201 bp, Homo sapiens
ctgtgacaagattgtgagaatttgttcttttgactatttcttctgcagcgctggaggtgagatttccccaagcctttgtggctacagtgtggtgtcttaayttgggcaagtcctttgacctctttgggccacaatttcccatgggagctttgtgaggttgatagcagtatgactccggtatgtgattgcagccttgagcct

SEQ ID NO: 108284 - DNA, 201 bp, Homo sapiens
gcaggagagaagatggatctgaacaccagcgacatcatgcaggtgtccctgtatggctacgtatacacgctctacacacacagcttccagtgctatggccrgaatgaggctgagaagaagtttctggcaatgctcctgcaggtacttgagtcgggggtagggggtggcaggtgttctcttgagggtttgagctgaggggag

SEQ ID NO: 108285 - DNA, 201 bp, Homo sapiens
accacctctaaaagaaaaggaaagaattggcctcacatgctccctctgtcctacttcttagtaataggagacgaggcttgggtggagaactctgggcaaasagagatggtgcctttggctttctttctcacttccttttcccactgtgcagaagaacctgtggcacatgtgggtgcacccgcatggagtggaaaccacggg

SEQ ID NO: 108286 - DNA, 201 bp, Homo sapiens
tttccagccagcagctaaagactcccttcccggggctttagagaggctccaggctcgcgatccatgaacacacaaaaaccttccttgctcatgttctgaaraaaagccccgcctcagctttgtgaatgttaataatagggggaagatttgttctctcttgggtgtgtgtacaggtggaacaatctgcagaaaaagaccttt

SEQ ID NO: 108287 - DNA, 201 bp, Homo sapiens
gctttaaatctttcaggtagcttttccctggacaccttcaactccagcacctggaatttctgctcacagaattggagtcaggtcagtatttaaagagaagsgatcaatgtcagtacaaaaaaatatggtagaatctattctatgtgtgtgtattctgaatttagcctttatgctcttctatttccatcacatctgtaaaat

SEQ ID NO: 108288 - DNA, 201 bp, Homo sapiens; identical to SEQ ID NO: 17712

SEQ ID NO: 108289 - DNA, 201 bp, Homo sapiens
cacaagagaaatgtgtgctgaagggggagagggcagagcccttcccaggctcagcctccttttagatgggtctatattaggcagacttgatacccttatayggcagaactttagagcaaccacattccatcatgttgatcagtaattcatttgataagtgttccagggcccagaaggctaattcaggcatcagctagaaag

SEQ ID NO: 108290 - DNA, 201 bp, Homo sapiens
ctgtttttaatgtaatatatgttcagtgaaaaacatttaggagatgcacaccaaaaactataaaggatttatttaaaaacagaattaaccactattaacayactattgcattttcttccattttttaaatgtatgaatgtgtaaaaacttggcttcatatggtatatataattttatatttaccttttattttacctaacc

SEQ ID NO: 108291 - DNA, 201 bp, Homo sapiens
aaaatcggatttcctcagagggccagaggaagagactgaaacacggtagccccaaatccttgggcggctgggaggtggtccctgtcatgcccacgacgggkgggcgcgtctttaccgacagcctgcatggatccgcagatgtgctgggcgcttagatgcctgcggctatgcagagacgcagtccagagaggtgaccccaga

SEQ ID NO: 108292 - DNA, 201 bp, Homo sapiens
ttcatagggctatcataagagctggatcagataatgtgagagagagcctagcgctatgcctggtacgaggtaattgtcacacacacacacacacacacacacccttttcccacccctacttgaattatctagacaacctgtgatcaaagacatgctgacacagaatggtattttttgtttctctcttggcattggagggta

SEQ ID NO: 108293 - DNA, 201 bp, Homo sapiens
tcttgggtgtgtgtacaggtggaacaatctgcagaaaaagaccttttttcggaaaaccttttcagtttgaagtttcagcaaatccatttttcatttccttkcatttggggagatgacatgaaatttaagctccagctttggggctgtctctgaagttctggggttcggcttacctttcccgggatgaggttttgatttgga

SEQ ID NO: 108294 - DNA, 201 bp, Homo sapiens
ccttgcatttggggagatgacatgaaatttaagctccagctttggggctgtctctgaagttctggggttcggcttacctttcccgggatgaggttttgatytggaggaagtaaaatgggttttgtcttaacctgggctcgttctttaaacttgtgaggccggggcggtggacttactgacatcctgtattctctcacctgc

SEQ ID NO: 108295 - DNA, 201 bp, Homo sapiens
aactttctagtgcctgctcaagttggacaaattggtccaggactctcagcctactctcctgcacacagccagccccagcactgcccagcaacacctgcctsttcatttgttgacatacacattgccaaagtgtgatcaatatgtcaatattatttttttattttgctttttttctccttaattatgaatactttaattctg

SEQ ID NO: 108296 - DNA, 201 bp, Homo sapiens
agtaataaaataagaagagaaataaatccaggagatgttacaaaaacactggaagtaagaataaatgatgttgtggcttaaaatttacattaaaaaagccrggtgctgtggctcatgcctgtaattccagcactttgggaggccgaggcaggtgaatcatttgaggtcaggagttcgagaccagcctggccaacatggcaa

SEQ ID NO: 108297 - DNA, 201 bp, Homo sapiens
ctaatacatgctctttcctggtcaggtttggtccagagcctgggctgggccaaacctgcaggtgaaactttctagtgcctgctcaagttggacaaattggkccaggactctcagcctactctcctgcacacagccagccccagcactgcccagcaacacctgcctcttcatttgttgacatacacattgccaaagtgtgat

SEQ ID NO: 108298 - DNA, 201 bp, Homo sapiens
ctcctacctcagcctcccgagtagctgggactacaggtgcccgccaccatgcccagctaattttttctatttttttttagtagagatggggtttcactgtgttagccaggatggcctcgatctcctgacctcgtgatccgcccgccttggcctcccaaagtgctggaattacacgtgtgagccaccacgccccgcatattt

SEQ ID NO: 108299 - DNA, 201 bp, Homo sapiens
gggtttggaggaaccaggagacacaccctccaccaatcagcaggcagttcaaagaggggattttaaatctcttctgaatcttggtaacagaccctagccaycattgcaagggacaggaaattgtaaaacacaggaagatgagctcggaaggtccattctgcttaattgggtggattaaatgtgagaaaagacagatgttct

SEQ ID NO: 108300 - DNA, 201 bp, Homo sapiens
ggctgctccctggatgttaactctctagtccttctggcatattttgtgatcaggtagactcgggccactagttaagccttcaggcaggtggaagatggatrgttctacatcacagtagtaaggcctgaggggatgtgggcagagaattgtcagtgactactccatgtaaataatattgttattatccctgtattgcagatg

SEQ ID NO: 108301 - DNA, 201 bp, Homo sapiens
agatattagctgaggcctaaaagaaggtgttttcccaagctccaggcactgccttctacaaactactgtatataaaattgggactttgggaggccgaggcrggcggatcacgaggtcaggagattgagaccgtcctggctaacgtggtgaaaccccatctctactaaaaatacaaaaaattagctgggcgtggtggtgggc

SEQ ID NO: 108302 - DNA, 201 bp, Homo sapiens
ttcgaactcctgacctcaagtgatccacctgcctcggcctcccaaagtgctgggattacaggtgtgagccaccgtgctcggcctcatttttccttgttgaygggcatttgtattttcttggttattaataaaacttaatatctttccatatatttataggcatttctgttttctgtgaaatgcatgttcatgtcttttgtt

SEQ ID NO: 108303 - DNA, 201 bp, Homo sapiens
caactcaggcctgatgaagcttcagctgatccgttatgctgcactgggttgaaatggtgtaaagtggcttggctgtaataccccctgttgctgccactctkggatgtttgccaccctggaaagagcaagatcttgagcaaggcagctctctgcagctcaggcagaccctgaagaagctgacagctgggacaataagtctat

SEQ ID NO: 108304 - DNA, 201 bp, Homo sapiens
cctacaacacccccacccctcactgtgagtcagtgttgttatggttgatactgcaggcacaagtgcaggattttctcacactggaaggcacacacacacasacacacacacacacacacacacacacacacacacacacacttctaagcttgccccgcctgcctctagagcactttttggagttgctcatgtggaagccca

SEQ ID NO: 108305 - DNA, 201 bp, Homo sapiens
gcccgccaccatgcccagctaattttttctatttttttttagtagagatggggtttcactgtgttagccaggatggcctcgatctcctgacctcgtgatcygcccgccttggcctcccaaagtgctggaattacacgtgtgagccaccacgccccgcatattttttctttcaaccaatatttcagccatagggtgacccaa

SEQ ID NO: 108306 - DNA, 201 bp, Homo sapiens
ttcactgtgttagccaggatggcctcgatctcctgacctcgtgatccgcccgccttggcctcccaaagtgctggaattacacgtgtgagccaccacgcccsgcatattttttctttcaaccaatatttcagccatagggtgacccaagtatgatatgctatagattatatgtaacaatttttgaaaatcatagattttttt

SEQ ID NO: 108307 - DNA, 201 bp, Homo sapiens
tagattaaagattgaatagtcatatggaaaaagtaaagccaagtctctgagtctttaaatcaaataaatttcaatggataaaagatttatatgtgacaagkatatttgtttgtaatggcaaaatgattgggaaccacctcaatgttcatctagatgatattccttaaataaagtatggtttatttgtacagtggaatacta

SEQ ID NO: 108308 - DNA, 201 bp, Homo sapiens
ggaacaatctgcagaaaaagaccttttttcggaaaaccttttcagtttgaagtttcagcaaatccatttttcatttccttgcatttggggagatgacatgraatttaagctccagctttggggctgtctctgaagttctggggttcggcttacctttcccgggatgaggttttgatttggaggaagtaaaatgggttttgt

SEQ ID NO: 108309 - DNA, 201 bp, Homo sapiens
agttacatatgtatacatgtaccatgctggtgtgctgcacccattaactcgtcatttagcattaggtatatctcctaatgctatccttcccccctcccccmaccccacaacagtccccagagtgtgatgttccccttcctgtgtccatgtgttctcattgttcaattcccatctatgagtgagaacatgtggtgtttggtt

SEQ ID NO: 108310 - DNA, 201 bp, Homo sapiens
atagggctatcataagagctggatcagataatgtgagagagagcctagcgctatgcctggtacgaggtaattgtcacacacacacacacacacacacacccttttcccacccctacttgaattatctagacaacctgtgatcaaagacatgctgacacagaatggtattttttgtttctctcttggcattggagggtagtg

SEQ ID NO: 108311 - DNA, 201 bp, Homo sapiens
atgatatgctatagattatatgtaacaatttttgaaaatcatagatttttttcataccatagaggcagaaaggggcctgtttgcctccttctcagtcatatgaagatttttctggaaaacactcatttgggttatatttgatgaatattaagcttttataggatttttgcagaatcttgtcactgacctttgttaaataat

SEQ ID NO: 108312 - DNA, 201 bp, Homo sapiens
tatgatatgctatagattatatgtaacaatttttgaaaatcatagatttttttcataccatagaggcagaaaggggcctgtttgcctccttctcagtcatatgaagatttttctggaaaacactcatttgggttatatttgatgaatattaagcttttataggatttttgcagaatcttgtcactgacctttgttaaataa

SEQ ID NO: 108313 - DNA, 201 bp, Homo sapiens
ggatattttcctttaatttttttttttttttttgagatagggtctcattctgtctcccaggctggagtgcagtggcacaatcatggctcgctgcagcctaracttcctgggttcaagcagtcttcctatctcagcctcctgagtagctgggactacagacattgccaccacatctggctaattttattttttgtagagatg

SEQ ID NO: 108314 - DNA, 201 bp, Homo sapiens
ttggcctgtagcctcccaaccagggtgttctgaatgtgcccagtgtatccttgagcccacaggacaacaggttagagactccagacctgtcctcccagccygagcagcctcctttgtttccctccgtgagctgccaaaacattgtaagttcatggggatcatggcattgaaaaacttggaaagcagagttagtctttctca

SEQ ID NO: 108315 - DNA, 201 bp, Homo sapiens
tcttaggttgggctctccaagtcaaagacatacgtgcaagtagatcatctggggatgatcccaggaaacactggtgagggactagggaactgagatgggtsaggcagccaagagagggcctgctatgcagcaggtcggcactgtgggcaactgggactcagtcctgcttgagaccctgtgagctggtacagagaactcaaa

SEQ ID NO: 108316 - DNA, 201 bp, Homo sapiens
gaattcataaataaatatgttaaggatatgagacttttcatcctgaaaagaagctttaaatgtaacagttttttaaagaggatagtaactaattcttctcyattttattcagatatcagagtaagatacaggccttagggcctgatggatttgcattagcattaaataaatattttctctttgaatgaacctgaagtcatt

SEQ ID NO: 108317 - DNA, 201 bp, Homo sapiens
aaatacgaaattagctgggcatgttggtgcatgcctgtaatcccagctactcagaggctgaggcaggagaatcacttgcacctgggaggtgaaggttgccrtgagccgagatcacgccattgcactccagcctgggcaacaacagcaaaactccatctcaaaaaataaaaataaaaataaataaataaaaatgtgaaggtg

SEQ ID NO: 108318 - DNA, 201 bp, Homo sapiens
cctgggcaacaacagcaaaactccatctcaaaaaataaaaataaaaataaataaataaaaatgtgaaggtgtaaaaagacttgagaagatttgctgcacaraagacttacaatgaaaatatttttggtggaagtaataaaataagaagagaaataaatccaggagatgttacaaaaacactggaagtaagaataaatgatg

SEQ ID NO: 108319 - DNA, 201 bp, Homo sapiens
ccttttcccttgccattctacaatgttctaagcattgtacaatgcacagaacagcctccacaacaaagaattatctaccccaaaatgtcagtagcaccaargttaagaaaccttggtttacgatggttctggggaagggggtgagaagtgcttagatttgcgaggtattttgaaggtaggaccaacatgattttatgatgg

SEQ ID NO: 108320 - DNA, 201 bp, Homo sapiens
tttgggaggccaagtggatcagctgaagtcaggagtttgagaccagcctggccaacatggtgaaaccccatctctactaaaaatacaaaattagccgggtmtgttggtgcatacctgtagtcccagctactcgggaggctgaggcaggagaatcacttgaacctgggaggcggaggctgtagtgagccgagatcatgccat

SEQ ID NO: 108321 - DNA, 201 bp, Homo sapiens
atctccattagataatataatagcatttggttccttgataggatattttatttaagaatctcagccctcatgaataatgtgaattaaaaattaaaaaaaaaccttatgcaatcacccaataatgagaagaaagcaaattacccagttgtccaaagatattagctgaggcctaaaagaaggtgttttcccaagctccaggca

SEQ ID NO: 108322 - DNA, 201 bp, Homo sapiens
gcttgccccgcctgcctctagagcactttttggagttgctcatgtggaagcccagaaggctctggcttctccaagctcaggtaggtaccttgcaattaccwtgtttgtccagccctaatgacagcacagctctaggctgcatttcctaaatgagtaagacctggtctcatccattttgctttgtaataagcttttctgcaa

SEQ ID NO: 108323 - DNA, 201 bp, Homo sapiens
gaggccgaggcgggcggatcacgaggtcaggagattgagaccgtcctggctaacgtggtgaaaccccatctctactaaaaatacaaaaaattagctgggcktggtggtgggcgcctgtagtcccagctagctactcaggaggctgaggcaggagaatggcgtgaacccgggaggtggaggttgcagtgagctgagatagtg

SEQ ID NO: 108324 - DNA, 201 bp, Homo sapiens
aacctgccctacctttcctcattcccttccctcacaatccaaggagacaaaattggtttggagaaaataatttttcttattgattagcccttccctaagckaagcagtgtggattaaggtactcagggttctcagtggcccactgagaaagcagtcctcagaggagtcccgcccattctgactctccctttccctttttat

SEQ ID NO: 108325 - DNA, 201 bp, Homo sapiens
agcccttccctaagcgaagcagtgtggattaaggtactcagggttctcagtggcccactgagaaagcagtcctcagaggagtcccgcccattctgactctscctttccctttttattcagtatggtattgtgctggatgccgggtcttcaagaaccacagtctacgtgtatcaatggccagcagaaaaagagaataatacc

SEQ ID NO: 108326 - DNA, 201 bp, Homo sapiens; identical to SEQ ID NO: 17714

SEQ ID NO: 108327 - DNA, 201 bp, Homo sapiens
aatagacagaaagagacttaagattgcactgtaccgaatttattgggatcctgactcatacaaatgagaagagggtgatggatgaaggaagaaggagggaygaagaggaggagtaggaagagaaagagacacagaggatgagaatgagaacgaatatggaggcaatgggaaccatgactggatagttaatgatattaagaa

SEQ ID NO: 108328 - DNA, 201 bp, Homo sapiens
gcctgggcaacatagcaagaccccatctttatttaaaagtagaaaaggaagtaagatcatccataatccttcccaccagaggggaacatttttctttttttaggattaatatatttttatattaaaaattattcatacaggctgggtgcagtggctcactcctgtaatcccagcactttgggaggccaagtggatcagctg

SEQ ID NO: 108329 - DNA, 201 bp, Homo sapiens
agcctgggcaacatagcaagaccccatctttatttaaaagtagaaaaggaagtaagatcatccataatccttcccaccagaggggaacatttttctttttttaggattaatatatttttatattaaaaattattcatacaggctgggtgcagtggctcactcctgtaatcccagcactttgggaggccaagtggatcagct

SEQ ID NO: 108330 - DNA, 201 bp, Homo sapiens
gagaccagcctgggcaacatagcaagaccccatctttatttaaaagtagaaaaggaagtaagatcatccataatccttcccaccagaggggaacatttttctttttttaggattaatatatttttatattaaaaattattcatacaggctgggtgcagtggctcactcctgtaatcccagcactttgggaggccaagtgga

SEQ ID NO: 108331 - DNA, 201 bp, Homo sapiens
atagtgattgtttccagaaaaaggcctgatggctgcaagtggatgagaaggagacttcactttcatatgtttatttgtaccttttggattattttgctagrtggatgggtgatattctacttaaaatgatacattatatatatccattttctcaccaagtgaagttcataaaacctggttcatagggctatcataagagct

SEQ ID NO: 108332 - DNA, 201 bp, Homo sapiens
aaatagatccctgggcagtctagagggcactgttgaaggagaaaaccacacatgttgaatgctactgtcttaggttgggctctccaagtcaaagacatacrtgcaagtagatcatctggggatgatcccaggaaacactggtgagggactagggaactgagatgggtcaggcagccaagagagggcctgctatgcagcagg

SEQ ID NO: 108333 - DNA, 201 bp, Homo sapiens
tttaattactagacaagtaaaatagaaaagaaaacaattaatgagaattagctgggatgagaattgatgaaactgggaaaactctgaattattttccaagmagtgataattggccacggaattggaatggatcctgcttatagccttgctctttcttcttcctgagccaagagtcagccagtgcccctggctttctaccca

SEQ ID NO: 108334 - DNA, 201 bp, Homo sapiens
cccaagattattatttagtcagtattttcattgaatgtctttttatctttttaaaaaattaggtataacttctattcagtgaaatggatagatcttaagtygtgcccctaagttgggtgttcttgccttctaaaagtatgtttttagaatagtaagggcaatttataagtttataatgtttttttaaaaggaaattatacc

SEQ ID NO: 108335 - DNA, 201 bp, Homo sapiens
gggtgacccaagtatgatatgctatagattatatgtaacaatttttgaaaatcatagatttttttcataccatagaggcagaaaggggcctgtttgcctcyttctcagtcatatgaagatttttctggaaaacactcatttgggttatatttgatgaatattaagcttttataggatttttgcagaatcttgtcactgacc

SEQ ID NO: 108336 - DNA, 201 bp, Homo sapiens
tacagttgatttttttcattttttgtagagacggggtctcactatgtggctcaggctggcatctaacgcctggcctcaagcatcttcccatctcagcctcycaaagctgggattacaggcataagccactatacccagcccaagattattatttagtcagtattttcattgaatgtctttttatctttttaaaaaattagg

SEQ ID NO: 108337 - DNA, 201 bp, Homo sapiens
agatctcaaagatatataattttaagtgagaaaagcaacgggtagaatggggtatataaagtgctaccatttatggctttaaaaaaagaaaagcatgggasaaaatatatatatttgcatgtgcatgccagatctttggaaggatacacaaaaactggcaatagtgattgtttccagaaaaaggcctgatggctgcaagtg

SEQ ID NO: 108338 - DNA, 201 bp, Homo sapiens; identical to SEQ ID NO: 17711

SEQ ID NO: 108339 - DNA, 201 bp, Homo sapiens; identical to SEQ ID NO: 17713

SEQ ID NO: 108340 - DNA, 201 bp, Homo sapiens
aagggattgtggtgtacagcacacatctggaaaatcattcatccccaccagcagggagacggtgaagtttgcattttcacctgagtgagactatgtatttwaagactgtattgtctgggcactcagacttgtttgttctgtgccttgtacaggttgcaaaatgaaacagcagctaatgaagtccttgaaagcatccaaagc

SEQ ID NO: 108341 - DNA, 201 bp, Homo sapiens
cactgtactccaggctgggcgacagaacaagactctgtctcagaaaaaaaaaaaaagaaaaaaagaaaagaaaaagaaattatttttaatttgtacaggtrtaataattcaactgtagttagggctttttcaaagaatgtttactttttgtgacacatactgaaatatgggaattaaatgacacatctgcattttgctttg

SEQ ID NO: 108342 - DNA, 201 bp, Homo sapiens
tgaatcttgccaagaatgtaactctatttctgggaacaaccctcgccccccaaaaagaagcccacattctgccataaatttgggctttaaaggttgggaarcttttagtttttattttaatacccagaaagaaacagttctaaaattgtttccctctcccttggtgattttactgagaactttgaaaaagagagaggtcat

SEQ ID NO: 108343 - DNA, 201 bp, Homo sapiens
gaacactggaaatgtggctagtaagattgagagactgcatttttttattttaattaatttacatttagatagccaattgattagatatatattggaattcratgaatctagtgatctttctattagtgttcatcatatttcaaccatttggttgtcatttatgttgatgtcccaatagttttaccaagactattattatta

SEQ ID NO: 108344 - DNA, 201 bp, Homo sapiens
cactgctgctccccaaatttgatgaggtatatgcccgctcttactgcttctcagccaactacatctaccacttgtttgtgaacggttacaaattcacagakgagacttggccccaaatacactttgaaaaagaagtaagttaagcacaaatcattttctcttcttcttcccaacagagaggtttgtatgtgtgtgtggaac

SEQ ID NO: 108345 - DNA, 201 bp, Homo sapiens
atggaatgtgtgtgtttctgtctgtctgcgtgcctctgtgtgtttttgtactcatacaatgtttactaaagaatgattatctatgtatccagcagtccacrgagaagaagtaaatacttcacctttctgaggtctgatttaggcttgagaatgccagtctccaaatgtgagcccagcactggccatggagaagtgagcacc

SEQ ID NO: 108346 - DNA, 201 bp, Homo sapiens
ggaagaggcaggcttcagagcagagccctgcagagagacagagataagagaatggtattgtagggtggagagggggctgggcagccatgcccaatccccayccctggggcgcaaaccacatgcctgacctgtatctgcagaggaaacagaagcagcttcttcctcaagcactttggtataaaggtccctgaagtcagctgg

SEQ ID NO: 108347 - DNA, 201 bp, Homo sapiens
cctgaagtggccaaggtggtagaacatgggctgtttgtaaaacgtgtccttggtgatgtctacaatgatgggactgtcgacaaagttacgcacccaattgrgtcctccttcggggttcagggcaaggttccagtcggtccagccgaccacatggtacaggaggttctagggtaaggacaaaggcaaagagacaaaggctca

SEQ ID NO: 108348 - DNA, 201 bp, Homo sapiens
ctcaccactttcaatgccaaattgcacccggcgatctacatcatctgcccagatggcttctggaggttcacggtaaagcaaggggaagactcctcggcatmagtggacctggcgggcagcctgggcagagcgggtgacagcaatgactgctgcccgaggtcggtaccgagacagaagctgggctgagctggaggaggcaga

SEQ ID NO: 108349 - DNA, 201 bp, Homo sapiens
ctaggaggacccagcctggcccagggggtgaggggtgtaatggttacctgtgcccgtgtgattagcctggatgggccccatactcagctccatccgtcgcycactgcgtgtactctcatagcggctgaaggtaccaagggcaggaaaggtcggggggtcaaaggagtcacagtatgtggcattgcagacacacaccaccga

SEQ ID NO: 108350 - DNA, 201 bp, Homo sapiens
tcacctgaagtggccaaggtggtagaacatgggctgtttgtaaaacgtgtccttggtgatgtctacaatgatgggactgtcgacaaagttacgcacccaawtgggtcctccttcggggttcagggcaaggttccagtcggtccagccgaccacatggtacaggaggttctagggtaaggacaaaggcaaagagacaaaggc

SEQ ID NO: 108351 - DNA, 201 bp, Homo sapiens
atccttgctgatcccttacttcacaaagtatctggcccaggtctggtggtagatgtctccgggctgtcccttgagtgaccccttcccattcaccgctccaytggtcttgagccaagtgggtgatgtccaggggctggcaaggagtgaaacgggacgctgggccaactgcagggctcggtgaatcaggggtatctagagaca

SEQ ID NO: 108352 - DNA, 201 bp, Homo sapiens
actcacctgaagtggccaaggtggtagaacatgggctgtttgtaaaacgtgtccttggtgatgtctacaatgatgggactgtcgacaaagttacgcacccwattgggtcctccttcggggttcagggcaaggttccagtcggtccagccgaccacatggtacaggaggttctagggtaaggacaaaggcaaagagacaaag

SEQ ID NO: 108353 - DNA, 201 bp, Homo sapiens
catccttgctgatcccttacttcacaaagtatctggcccaggtctggtggtagatgtctccgggctgtcccttgagtgaccccttcccattcaccgctccmttggtcttgagccaagtgggtgatgtccaggggctggcaaggagtgaaacgggacgctgggccaactgcagggctcggtgaatcaggggtatctagagac

SEQ ID NO: 108354 - DNA, 201 bp, Homo sapiens
tccactcacctgaagtggccaaggtggtagaacatgggctgtttgtaaaacgtgtccttggtgatgtctacaatgatgggactgtcgacaaagttacgcamccaattgggtcctccttcggggttcagggcaaggttccagtcggtccagccgaccacatggtacaggaggttctagggtaaggacaaaggcaaagagaca

SEQ ID NO: 108355 - DNA, 201 bp, Homo sapiens
cacatccttgctgatcccttacttcacaaagtatctggcccaggtctggtggtagatgtctccgggctgtcccttgagtgaccccttcccattcaccgctmcattggtcttgagccaagtgggtgatgtccaggggctggcaaggagtgaaacgggacgctgggccaactgcagggctcggtgaatcaggggtatctagag

SEQ ID NO: 108356 - DNA, 201 bp, Homo sapiens
cccgccctccactcacctgaagtggccaaggtggtagaacatgggctgtttgtaaaacgtgtccttggtgatgtctacaatgatgggactgtcgacaaagktacgcacccaattgggtcctccttcggggttcagggcaaggttccagtcggtccagccgaccacatggtacaggaggttctagggtaaggacaaaggcaa

SEQ ID NO: 108357 - DNA, 201 bp, Homo sapiens
cccacatccttgctgatcccttacttcacaaagtatctggcccaggtctggtggtagatgtctccgggctgtcccttgagtgaccccttcccattcaccgytccattggtcttgagccaagtgggtgatgtccaggggctggcaaggagtgaaacgggacgctgggccaactgcagggctcggtgaatcaggggtatctag

SEQ ID NO: 108358 - DNA, 201 bp, Homo sapiens
gggtgcccgccctccactcacctgaagtggccaaggtggtagaacatgggctgtttgtaaaacgtgtccttggtgatgtctacaatgatgggactgtcgavaaagttacgcacccaattgggtcctccttcggggttcagggcaaggttccagtcggtccagccgaccacatggtacaggaggttctagggtaaggacaaa

SEQ ID NO: 108359 - DNA, 201 bp, Homo sapiens
tcccacatccttgctgatcccttacttcacaaagtatctggcccaggtctggtggtagatgtctccgggctgtcccttgagtgaccccttcccattcacckctccattggtcttgagccaagtgggtgatgtccaggggctggcaaggagtgaaacgggacgctgggccaactgcagggctcggtgaatcaggggtatcta

SEQ ID NO: 108360 - DNA, 201 bp, Homo sapiens
tgggggtgcccgccctccactcacctgaagtggccaaggtggtagaacatgggctgtttgtaaaacgtgtccttggtgatgtctacaatgatgggactgthgacaaagttacgcacccaattgggtcctccttcggggttcagggcaaggttccagtcggtccagccgaccacatggtacaggaggttctagggtaaggac

SEQ ID NO: 108361 - DNA, 201 bp, Homo sapiens
tgatcccacatccttgctgatcccttacttcacaaagtatctggcccaggtctggtggtagatgtctccgggctgtcccttgagtgaccccttcccattcmccgctccattggtcttgagccaagtgggtgatgtccaggggctggcaaggagtgaaacgggacgctgggccaactgcagggctcggtgaatcaggggtat

SEQ ID NO: 108362 - DNA, 201 bp, Homo sapiens
gcgagaactacgcatgcgtctcagcgctttcccgccagcacacccttagtgggtggggggggcgattgaattcccacagtgagtccagcccaccgaagctsagaggattcctaaccttcctcttcagagagcctcaggttagggaacgtccagtgcccaaaagctgccctgtgggaatcccattgtccaccgcctcttacc

SEQ ID NO: 108363 - DNA, 201 bp, Homo sapiens
ggaggccagtcctgatcccacatccttgctgatcccttacttcacaaagtatctggcccaggtctggtggtagatgtctccgggctgtcccttgagtgacyccttcccattcaccgctccattggtcttgagccaagtgggtgatgtccaggggctggcaaggagtgaaacgggacgctgggccaactgcagggctcggtg

SEQ ID NO: 108364 - DNA, 201 bp, Homo sapiens
tgggaggccagtcctgatcccacatccttgctgatcccttacttcacaaagtatctggcccaggtctggtggtagatgtctccgggctgtcccttgagtgrccccttcccattcaccgctccattggtcttgagccaagtgggtgatgtccaggggctggcaaggagtgaaacgggacgctgggccaactgcagggctcgg

SEQ ID NO: 108365 - DNA, 201 bp, Homo sapiens
gctaaatgggaggccagtcctgatcccacatccttgctgatcccttacttcacaaagtatctggcccaggtctggtggtagatgtctccgggctgtccctygagtgaccccttcccattcaccgctccattggtcttgagccaagtgggtgatgtccaggggctggcaaggagtgaaacgggacgctgggccaactgcagg

SEQ ID NO: 108366 - DNA, 201 bp, Homo sapiens
cagatcagcatggctaaatgggaggccagtcctgatcccacatccttgctgatcccttacttcacaaagtatctggcccaggtctggtggtagatgtctcygggctgtcccttgagtgaccccttcccattcaccgctccattggtcttgagccaagtgggtgatgtccaggggctggcaaggagtgaaacgggacgctgg

SEQ ID NO: 108367 - DNA, 201 bp, Homo sapiens
tggcgctgcccgacgtagctcctcaaacagctgccggtggtacactgcggcctctgcctcccgggcaatctgcaggtgccagaatgttagtctgggaaggkgcactggggtatggaagggatttggttccctggcccatttgcttttcattctgagctcctaccgcatgctgcatcttcaccgcttccacagggaagttgc

SEQ ID NO: 108368 - DNA, 201 bp, Homo sapiens
ctgtcagctccccaagggtagggatttttgtctgtttttttcactgatctactcccagggcccaaaatcttgtctactatatgctcaacaaatttttgttraatgaatgactgtgtcaaacatggagaagtctcaaaggagacaaaagatgaagaagcacctcaagaaataccaataggccctgtgtggctgcagggggat

SEQ ID NO: 108369 - DNA, 201 bp, Homo sapiens
cctcaaacagctgccggtggtacactgcggcctctgcctcccgggcaatctgcaggtgccagaatgttagtctgggaaggggcactggggtatggaagggrtttggttccctggcccatttgcttttcattctgagctcctaccgcatgctgcatcttcaccgcttccacagggaagttgcccttggcagtctcccctgac

SEQ ID NO: 108370 - DNA, 201 bp, Homo sapiens
cgcttgtctctgccctcgttggccggggcttggtaatcatgctctccagcatctgggggacagcgtggatgtcaaagttgtaggactcacactgtgactgrggaccctgcccaagctacttctctgacacccacactctcagagtgtcccaaaatccagggtcacagtcacaacccctgaaaataggagtcaaagtatatt

SEQ ID NO: 108371 - DNA, 201 bp, Homo sapiens
gagaagagaggacttaaaggtggggctttggaggggtgtgggctggagaacgtagactggggaggaagggatggggtacaagggtaggctgggccagaggrgggaggggcgtctcaggatatgcttagcacccgcatgatgttggtgtagccggagccaggtcgccagcctgtcaccacaatcaccaggtctccaacacgg

SEQ ID NO: 108372 - DNA, 201 bp, Homo sapiens
gactcagcatggtactgggggagggagcggagcgagggtttcaggggaaggtggccaggacctcgaggcatcctcctgccccacccactgcccggcggccmgtcccgcacctcgtgggagccgtgggagaagttgagtcgcgcaatgttcatcccggccttgatcatctccttgaggcgctccacggagcgagatgctggc

SEQ ID NO: 108373 - DNA, 201 bp, Homo sapiens
acttccctaaaagctcatggttagtaagcagtatctctaaaattcaaactcagcagtctgactccagagcccaggtttgtgtttttttttttttttgagayggagtctcactctgtcaccaggctggagtgcagtggcgctatctcggctcactgcaacctccacctcccgggttcaagcgattctcctgcctcagcctcc

SEQ ID NO: 108374 - DNA, 201 bp, Homo sapiens
acccaaagctccatctggacattcccaatatccccctcaccggccagttgtggtcagcacaatgatggcagcagcacagcacttgaaggcagcctccacarcaccaatggcggtgacctcagtgggatcacggcttagtggcgctgcccgacgtagctcctcaaacagctgccggtggtacactgcggcctctgcctcccg

SEQ ID NO: 108375 - DNA, 201 bp, Homo sapiens
caaagctccatctggacattcccaatatccccctcaccggccagttgtggtcagcacaatgatggcagcagcacagcacttgaaggcagcctccacagcaycaatggcggtgacctcagtgggatcacggcttagtggcgctgcccgacgtagctcctcaaacagctgccggtggtacactgcggcctctgcctcccgggc

SEQ ID NO: 108376 - DNA, 201 bp, Homo sapiens
ggttctcaagaatgtctcaaaatgaacagggctgtagggggactaagaaattctacctcaggttaattagcaaaaaagccccatataaccccaaccatctstttagccccacatagtagggagggactgacagttacctgcgatggtcaacacattgtacaactcggccgaaggtcccctctcctaaggtgctaacgattt

SEQ ID NO: 108377 - DNA, 201 bp, Homo sapiens
atggttttagcatataaccaataagtatttgttgaacaaaggaatgagcgagtgaccctgtgtttgagtatctcttcctgaggcctcaccttcgagaacgracatggtagctgtcctctcgccgacgccgtcgtgtccggtcactactacttgaccaggagcgacttcttcgtcgcttatgctttcggctccgatagtgtt

SEQ ID NO: 108378 - DNA, 201 bp, Homo sapiens
ggttcaagcgattctcctgcctcagcctcccgagtagctgggactacaggtgcgcgccaccatgcccagctaatttttttgtgtgtgtatttttagtagayacagggtttcaccatgttggctaggatggtctcgatctcttgacctcgtgatccgcccacctcagcctcccaaagtgctgggattataggtgtgagccac

SEQ ID NO: 108379 - DNA, 201 bp, Homo sapiens
ttgtgccctctttagtcacagacagcgtgtgagctgactctgtccctttaatgcccaggctgagcccagtgcctccttgagtatctgctccatcactggcracgccacaggtaggtgtgaatggagtagccaggtgagattgtctccaggaagcccacagcaggatccttgatggtaagaggcacatccttagaggagcta

SEQ ID NO: 108380 - DNA, 201 bp, Homo sapiens
tggttgtctcaaggttaggctgtctaacctccttccctccacaaaaccactccctcttatgtttcctctgttgaccaaagatgtcttctttcagctttccwcccctcctttcctaaccctctgcttgtgaagagcattccagggggcaaaccaccctaagaaggaagtgacttctggacggtgggcactatttatcccgag

SEQ ID NO: 108381 - DNA, 201 bp, Homo sapiens
gtatggaagggatttggttccctggcccatttgcttttcattctgagctcctaccgcatgctgcatcttcaccgcttccacagggaagttgcccttggcartctcccctgacagcatgatgcagtcagccccatccagcacagcattggcgacatcgcttgtctctgccctcgttggccggggcttggtaatcatgctctc

SEQ ID NO: 108382 - DNA, 201 bp, Homo sapiens
ctgagctcctaccgcatgctgcatcttcaccgcttccacagggaagttgcccttggcagtctcccctgacagcatgatgcagtcagccccatccagcacadcattggcgacatcgcttgtctctgccctcgttggccggggcttggtaatcatgctctccagcatctgggggacagcgtggatgtcaaagttgtaggactc

SEQ ID NO: 108383 - DNA, 201 bp, Homo sapiens
gagctcctaccgcatgctgcatcttcaccgcttccacagggaagttgcccttggcagtctcccctgacagcatgatgcagtcagccccatccagcacagcwttggcgacatcgcttgtctctgccctcgttggccggggcttggtaatcatgctctccagcatctgggggacagcgtggatgtcaaagttgtaggactcac

SEQ ID NO: 108384 - DNA, 201 bp, Homo sapiens
gtcacagacagcgtgtgagctgactctgtccctttaatgcccaggctgagcccagtgcctccttgagtatctgctccatcactggcgacgccacaggtagrtgtgaatggagtagccaggtgagattgtctccaggaagcccacagcaggatccttgatggtaagaggcacatccttagaggagctagggagcagggagga

SEQ ID NO: 108385 - DNA, 201 bp, Homo sapiens
agctcctaccgcatgctgcatcttcaccgcttccacagggaagttgcccttggcagtctcccctgacagcatgatgcagtcagccccatccagcacagcaytggcgacatcgcttgtctctgccctcgttggccggggcttggtaatcatgctctccagcatctgggggacagcgtggatgtcaaagttgtaggactcaca

SEQ ID NO: 108386 - DNA, 201 bp, Homo sapiens
cctaccgcatgctgcatcttcaccgcttccacagggaagttgcccttggcagtctcccctgacagcatgatgcagtcagccccatccagcacagcattggygacatcgcttgtctctgccctcgttggccggggcttggtaatcatgctctccagcatctgggggacagcgtggatgtcaaagttgtaggactcacactgt

SEQ ID NO: 108387 - DNA, 201 bp, Homo sapiens
catcttcaccgcttccacagggaagttgcccttggcagtctcccctgacagcatgatgcagtcagccccatccagcacagcattggcgacatcgcttgtcyctgccctcgttggccggggcttggtaatcatgctctccagcatctgggggacagcgtggatgtcaaagttgtaggactcacactgtgactggggaccctg

SEQ ID NO: 108388 - DNA, 201 bp, Homo sapiens; identical to SEQ ID NO: 17716

SEQ ID NO: 108389 - DNA, 201 bp, Homo sapiens
tgccgaacctcaaggcctcactccagacctgtgtggcacagacaacaggcttgcccgccaagttgcagcgcccaatcatcatcttctgagccaggaaaacmttctctgctgggatctcgatgcctaggtccccccgtgccaccatgatgccgtcgctcacctccaggatttcatcaaacctgagaggttgggagaatcaag

SEQ ID NO: 108390 - DNA, 201 bp, Homo sapiens
gaattacacatcctgccccactccaaccaaacgcactgggtacgtcctcagttcctcattatgtattctaacacttaacactgcagcccaaatggcttctktggttatctatcccgacattaccttcagccagctacttaaggcaatggttttagcatataaccaataagtatttgttgaacaaaggaatgagcgagtgac

SEQ ID NO: 108391 - DNA, 201 bp, Homo sapiens
aacccacagagtgccgaacctcaaggcctcactccagacctgtgtggcacagacaacaggcttgcccgccaagttgcagcgcccaatcatcatcttctgakccaggaaaaccttctctgctgggatctcgatgcctaggtccccccgtgccaccatgatgccgtcgctcacctccaggatttcatcaaacctgagaggttg

SEQ ID NO: 108392 - DNA, 201 bp, Homo sapiens
cagcaagtctggattctgggaatacagctcctcctgggcccccaaactcctctctcatctacattattttttctggccctatcccctgagagaagctcttrttctggcccctccctcacccaaaatcagctctccttaaccccacgctcaccctgtacctctagctctggccctgcccacccacaaattcctctttatggc

SEQ ID NO: 108393 - DNA, 201 bp, Homo sapiens
ctccagacctgtgtggcacagacaacaggcttgcccgccaagttgcagcgcccaatcatcatcttctgagccaggaaaaccttctctgctgggatctcgawgcctaggtccccccgtgccaccatgatgccgtcgctcacctccaggatttcatcaaacctgagaggttgggagaatcaaggcagaggcaggcaggagaag

SEQ ID NO: 108394 - DNA, 201 bp, Homo sapiens
ttctgaaaaaatgtaacatgtagcaaaggagtttctctaaaaatatgtaacatgtagcaaaggggtcaaaggagggagagcttctttaggtctgagatctycattatctccagttagtcaaaggagccgagctttcctacctcacagaaatacacatctcaaaaaagaagtccgggccaggcactgtggctcacacccgta

SEQ ID NO: 108395 - DNA, 201 bp, Homo sapiens
acccaagctaacttgtctcactggcaaacccttcccttccttgaactcctatgctctccagtagctcacctcccgggtctcaaaagggttgtagacgtcamgcgtggcatactgccggctgggtcggtgctggatcacagctgggtcctgagggcagagacccgggtctcagctggcacccagtgccacctaggggaattc

SEQ ID NO: 108396 - DNA, 201 bp, Homo sapiens
cgggtccgaccttcccacctcactccacactctcctttctctttcataaggcctaattcccaatgaagattcaggaaacggggatgtcagttccagttccwctttctttttatttaaataaccgaagcaacagccgtggcacagcagagggaagctgggttggggcgtgtgagaggtggcagcagtgtggcctgatggggg

SEQ ID NO: 108397 - DNA, 201 bp, Homo sapiens; identical to SEQ ID NO: 42028

SEQ ID NO: 108398 - DNA, 201 bp, Homo sapiens
ctggcccaggtctggtggtagatgtctccgggctgtcccttgagtgaccccttcccattcaccgctccattggtcttgagccaagtgggtgatgtccaggrgctggcaaggagtgaaacgggacgctgggccaactgcagggctcggtgaatcaggggtatctagagacaaaggtagtgaagagagaagcacccagagttg

SEQ ID NO: 108399 - DNA, 201 bp, Homo sapiens
gagggcaggggaactttttggaaggtgggcacagggcgccgtttctcggctgaccgggcacgtagcaacttgggggaagggcagcgggctaggcggaagargcaggcttcagagcagagccctgcagagagacagagataagagaatggtattgtagggtggagagggggctgggcagccatgcccaatccccatccctgg

SEQ ID NO: 108400 - DNA, 201 bp, Homo sapiens
gaaactagtaagaggtctgaggtctgctttgcaggaagggagactggggtggcttaccgtgatgatgctgtggctgtactgcatccctcgatcccaggagyctagccgcacactctgctcccagaacttggagcccacacaggcctctgaggcaaagagcatggtgttggggaacaggcggtgtgtctcccctagggtggc

SEQ ID NO: 108401 - DNA, 201 bp, Homo sapiens
ccagacctgtgtggcacagacaacaggcttgcccgccaagttgcagcgcccaatcatcatcttctgagccaggaaaaccttctctgctgggatctcgatgbctaggtccccccgtgccaccatgatgccgtcgctcacctccaggatttcatcaaacctgagaggttgggagaatcaaggcagaggcaggcaggagaagaa

SEQ ID NO: 108402 - DNA, 201 bp, Homo sapiens
ggggcatctcccccacagtctaaatacccatgcagcacaggacagaagctctcccagtccagagcagcagaggcaagcagcaagagaccccagaggtaggkgggaaagggacactttggggggtatacagcaggtttctttttgtgccagccagtgcaagaggatgctgggggctgctggtcccaaccagctggtgcctgt

SEQ ID NO: 108403 - DNA, 201 bp, Homo sapiens
tgtgtggcacagacaacaggcttgcccgccaagttgcagcgcccaatcatcatcttctgagccaggaaaaccttctctgctgggatctcgatgcctaggtscccccgtgccaccatgatgccgtcgctcacctccaggatttcatcaaacctgagaggttgggagaatcaaggcagaggcaggcaggagaagaaaggtgat

SEQ ID NO: 108404 - DNA, 201 bp, Homo sapiens
gcccaggcagttcctcttctcccaagcccagcctctaggggccactgtgcctccagctttatctcagaggagaaaaataagtccagggttccaagttgccrcagccctcctatgtccccaaaccaccaactccgccttgttttccccttctattgtctctacccaccccagctatccctggcagccccgcccttgtccacc

SEQ ID NO: 108405 - DNA, 201 bp, Homo sapiens
ggcacagacaacaggcttgcccgccaagttgcagcgcccaatcatcatcttctgagccaggaaaaccttctctgctgggatctcgatgcctaggtcccccbgtgccaccatgatgccgtcgctcacctccaggatttcatcaaacctgagaggttgggagaatcaaggcagaggcaggcaggagaagaaaggtgatgggga

SEQ ID NO: 108406 - DNA, 201 bp, Homo sapiens
tgcggttcgcaccgcagggttggagaagacaccagcagcaaattcttgctgggccttctgaaagctggcacctgtgcggcggtataaggagtggatctgcragtagaggacaaagacattaccgcccattccagccactggttccccaccccagcctaacagcatcactaccactcagcagcctgctgcccagcacacaca

SEQ ID NO: 108407 - DNA, 201 bp, Homo sapiens
cagacaacaggcttgcccgccaagttgcagcgcccaatcatcatcttctgagccaggaaaaccttctctgctgggatctcgatgcctaggtccccccgtgmcaccatgatgccgtcgctcacctccaggatttcatcaaacctgagaggttgggagaatcaaggcagaggcaggcaggagaagaaaggtgatggggaatag

SEQ ID NO: 108408 - DNA, 201 bp, Homo sapiens
aaatggtgagcccacagacgctgaagagcaggttctggggaagggaaaggaggagaggagtcaggagacggctaagttccacacattatgggcctgtgagwaccccagcaggggaggcaagagtgagaaccaggaggatgtttgcagggtgcaagctcaccttgagggcccctcgggcttcatcacaggtggagttagggg

SEQ ID NO: 108409 - DNA, 201 bp, Homo sapiens
taggtcacgggcaatgaagtctcgctgatgttcaggggtgaagcccaggcactggaaggggtatccactcaacagcccagcagaaggctcattttcagctstcactgcccagaactgtaacttgtgctcagcataggcatccaggaacctggcaagagaaaggtcatgaatgatccggccaagaaagtggaccagaccagc

SEQ ID NO: 108410 - DNA, 201 bp, Homo sapiens
taagtcagctccctcaagtagcagggccagggcatcccagtcaggggtcacggggcccggaaggcattttcagcagccccagcggctgcattggcagctgsggttcgcaccgcagggttggagaagacaccagcagcaaattcttgctgggccttctgaaagctggcacctgtgcggcggtataaggagtggatctgcaag

SEQ ID NO: 108411 - DNA, 201 bp, Homo sapiens
tatggaatgggggtgcccgccctccactcacctgaagtggccaaggtggtagaacatgggctgtttgtaaaacgtgtccttggtgatgtctacaatgatgrgactgtcgacaaagttacgcacccaattgggtcctccttcggggttcagggcaaggttccagtcggtccagccgaccacatggtacaggaggttctaggg

SEQ ID NO: 108412 - DNA, 201 bp, Homo sapiens
gttggagaagacaccagcagcaaattcttgctgggccttctgaaagctggcacctgtgcggcggtataaggagtggatctgcaagtagaggacaaagacaytaccgcccattccagccactggttccccaccccagcctaacagcatcactaccactcagcagcctgctgcccagcacacacactcacacacagaaacaca

SEQ ID NO: 108413 - DNA, 201 bp, Homo sapiens
cacacacactcacacacagaaacacacaccccagaggtccattagctgagaacaacccagcagcctgacctgtgccagttgctcctgaatgttccacccaygcccctggggacccatgatctcaccatcccggccccaccttcgacacagccctcacccgtttcagcatgacaattcctagcacagcaatgccagtgaaga

SEQ ID NO: 108414 - DNA, 201 bp, Homo sapiens
tgtcaaacatggagaagtctcaaaggagacaaaagatgaagaagcacctcaagaaataccaataggccctgtgtggctgcagggggatgggagtgcttacygatggtggcaatgatgctggtactgcgagcagccacgggctcggagtcaatgtccagtaggcagaggtgttccaggaaggtgtctgccatagcagctggc

SEQ ID NO: 108415 - DNA, 201 bp, Homo sapiens
tcagcagctcagctgtggctgctgcagctgaggcctgcccagtgtgagcagacggagatgtgagccctgggccccaggactggcccttctccccagccctyacctgcacacctcctgtacctgagtgctgtatgagccatagttcttaggttctgtggggctgagctttctcgagggctgcaaggagggagctgagggtgg

SEQ ID NO: 108416 - DNA, 201 bp, Homo sapiens
cagccagtgttcgggctgacacctactgccgcctttactcactcagcgtggaccatttcaatgctgtgcttgaggagttccccatgatgcgccgggccttygagactgtggccatggatcggctgctccgcatcggtgagacctgtccaccccatctgctctgggtccagactgtgctctcaccccacctccaaagcaagg

SEQ ID NO: 108417 - DNA, 201 bp, Homo sapiens
gtcacctcagtaccacacaagatcatcacccaccttcaaaaagaggtgggtgatttggatagagggggctgccagtgagagaagttcagtcaattctgtacaatacacatttattgagcactagatatatgccatgctagatgcaggtgacccagagcatcaaggagcaatagtctggtggcagagacacacacaatgtca

SEQ ID NO: 108418 - DNA, 201 bp, Homo sapiens
aattcttgggggatctccatggagatgtcctggaaaaagcagggctgaactggacaaaaagaaggtagagggggccaattgttctgtcgagctgtaaggcrcaaaaaaacaggtggaccccagaagtaaaacagagaccaacaaaggaatcactcccccttctctccatccctggatcctctctttttttttttttttttt

SEQ ID NO: 108419 - DNA, 201 bp, Homo sapiens
atgacctgtagcagccttatcatccctcatatccaattccttagtgaggactcaaatcactcatttaccatatctccccacttaactgtgttttttttttytcttttcttctggggatggagtgtggggttgtctctctgccacccaggctggagtgcagtggtgcaatcatcactcatcgaagcctcaaactcctgggcc

SEQ ID NO: 108420 - DNA, 201 bp, Homo sapiens
acctcaagaaataccaataggccctgtgtggctgcagggggatgggagtgcttaccgatggtggcaatgatgctggtactgcgagcagccacgggctcggrgtcaatgtccagtaggcagaggtgttccaggaaggtgtctgccatagcagctggcagctgctgctgctggaagaaggcagtgcccagctcctgggtcagt

SEQ ID NO: 108421 - DNA, 201 bp, Homo sapiens
agcctcaaactcctgggcccaagcagtctttccatcccagcctcccaagtagcaaggactacaggcatgtgccactacacctagccaatttttaaaacgtytcaagagatgggggtctcgctgttgcccaggatggtctccatcaaattcctgggctcaagcaatcctcccacctcagcctcccaagtgggattacaggca

SEQ ID NO: 108422 - DNA, 201 bp, Homo sapiens
ggatggggtacaagggtaggctgggccagaggagggaggggcgtctcaggatatgcttagcacccgcatgatgttggtgtagccggagccaggtcgccagsctgtcaccacaatcaccaggtctccaacacggaggaagccacggagctttcctgggggagggaaagaaaacaaatcattggacaggtgtggtggctcaca

SEQ ID NO: 108423 - DNA, 201 bp, Homo sapiens; identical to SEQ ID NO: 17742

SEQ ID NO: 108424 - DNA, 201 bp, Homo sapiens
aggcgccgcctttccggccctggcccagcgagtcccagccccactgctcaccccctgcaggatcccagtgcggatctccggtcccttggtgtccagggcgrtggccacgggccggtagctgagtggggaacctgcaaagctctccaccgcctcccggacgttggcgatggactcagcatggtactgggggagggagcggag

SEQ ID NO: 108425 - DNA, 201 bp, Homo sapiens
ccctacaggcgccgcctttccggccctggcccagcgagtcccagccccactgctcaccccctgcaggatcccagtgcggatctccggtcccttggtgtccrgggcgatggccacgggccggtagctgagtggggaacctgcaaagctctccaccgcctcccggacgttggcgatggactcagcatggtactgggggaggga

SEQ ID NO: 108426 - DNA, 201 bp, Homo sapiens
gaaaaagctagaatgcctaccttgagcttggtatcttcctctgggaggctgaagttgtgcaactggaaatcatcaggggtgtctgcataggtgtaggtgcrgatggagaagtcacagctggccatgggtacccggatgatgttatatccgattcctacagaaaaggatgatcaagatatggtagtccgagtcaataggaga

SEQ ID NO: 108427 - DNA, 201 bp, Homo sapiens
gtctcacaatacaggattcctcctcagcagccgaggagagaaaagaagaatggccgagggtttttgtttattgaaaacatacagtctaaggggcttcccasaggcccggacttgaggaagtttctttcagggctgaaaattgattttgcagtccgagtcagaaggggctagctcctgagttgacactgggattaggtgtgt

SEQ ID NO: 108428 - DNA, 201 bp, Homo sapiens
tgggtcctccttcggggttcagggcaaggttccagtcggtccagccgaccacatggtacaggaggttctagggtaaggacaaaggcaaagagacaaaggckcaacactgggggtccccagagagtgtaggtaagggtcacatgtgggagaggcagctgtgggtaggtcagccctgtgaggggcacattccttagtagctaa

SEQ ID NO: 108429 - DNA, 201 bp, Homo sapiens
gggtgtgggctggagaacgtagactggggaggaagggatggggtacaagggtaggctgggccagaggagggaggggcgtctcaggatatgcttagcaccckcatgatgttggtgtagccggagccaggtcgccagcctgtcaccacaatcaccaggtctccaacacggaggaagccacggagctttcctgggggagggaaa

SEQ ID NO: 108430 - DNA, 201 bp, Homo sapiens; identical to SEQ ID NO: 17717

SEQ ID NO: 108431 - DNA, 201 bp, Homo sapiens
acttccttccactaacgaactacacttcccagcaggcctcgcgtaggaatccggccttcctagtctcccgagatggacgacgggagccttctgaccggtcstggcaatcccccctaggagccaggttgagcacgttttcaacctgagtttctggctctatactgggccgcggcctaatgactctaggagtcagatctttcc

SEQ ID NO: 108432 - DNA, 201 bp, Homo sapiens
gagcctcgaaatacagttgtagacccagacattatcttgaatccacatatatacacactccctctatgtctctcttcctcccattgttcctttcactcctrtctttgctgcctcgttcccacccagccagtgcgccttttctagtctcctgtggatctcactctcttccctcagttcactcgcagacggatccccagaagc

SEQ ID NO: 108433 - DNA, 201 bp, Homo sapiens
ttggagaaccaaggctctgcttgcaaccaatttgaaggctacctaaccacgaccacaccaggaccaacgtttctgatattatagctcaacctaccttcccwctagcacaattactccataatctttgaaagttctttctacttgtatatccttgtcaacttcatgaatcttctttagttcctcattaaaatgtaagctctt

SEQ ID NO: 108434 - DNA, 201 bp, Homo sapiens
gcacaattactccataatctttgaaagttctttctacttgtatatccttgtcaacttcatgaatcttctttagttcctcattaaaatgtaagctcttcaarggtagtttattcttttctgtctgacctaaagaatccaggacattgctttgatctctggttgtctcaaggttaggctgtctaacctccttccctccacaaa

SEQ ID NO: 108435 - DNA, 201 bp, Homo sapiens
tggattaattcttacacatatgccctggagacattacactgtgaaatgccctctctcttttctaggctacacctgggcagcttgtgcaatagatttgtttrattctctgctgtgacacttactatgtggttctgggcacatgactgacctcagctttcctatctataagatgagagaaataagaaactactttgcattagc

SEQ ID NO: 108436 - DNA, 201 bp, Homo sapiens
tgcaggtggccagagctaactggtatcagctgaccccaggcctggttacctagggcaaagccagtgaggagacaggtccagaatcactagggctgctttcygctctacgtctaaatggaatgcctggtctaagaagctctgctctttctaatgtaagatacatatgtagctcaactgatgtaaaaaaaaaaaaagtttgct

SEQ ID NO: 108437 - DNA, 201 bp, Homo sapiens
tgaaaaagctagaatgcctaccttgagcttggtatcttcctctgggaggctgaagttgtgcaactggaaatcatcaggggtgtctgcataggtgtaggtgmggatggagaagtcacagctggccatgggtacccggatgatgttatatccgattcctacagaaaaggatgatcaagatatggtagtccgagtcaataggag

SEQ ID NO: 108438 - DNA, 201 bp, Homo sapiens
ctcagggcctgaaaaagctagaatgcctaccttgagcttggtatcttcctctgggaggctgaagttgtgcaactggaaatcatcaggggtgtctgcatagrtgtaggtgcggatggagaagtcacagctggccatgggtacccggatgatgttatatccgattcctacagaaaaggatgatcaagatatggtagtccgagt

SEQ ID NO: 108439 - DNA, 201 bp, Homo sapiens
ccccagacatcagggccctcagggcctgaaaaagctagaatgcctaccttgagcttggtatcttcctctgggaggctgaagttgtgcaactggaaatcatsaggggtgtctgcataggtgtaggtgcggatggagaagtcacagctggccatgggtacccggatgatgttatatccgattcctacagaaaaggatgatcaa

SEQ ID NO: 108440 - DNA, 201 bp, Homo sapiens
tggggcagcagcaagcgttggtcatccagcatgagtaggcggacattgtggtgagtactgttggcgagggtaggacctaggtcacgggcaatgaagtctcrctgatgttcaggggtgaagcccaggcactggaaggggtatccactcaacagcccagcagaaggctcattttcagctgtcactgcccagaactgtaacttg

SEQ ID NO: 108441 - DNA, 201 bp, Homo sapiens
tcccaggagcctagccgcacactctgctcccagaacttggagcccacacaggcctctgaggcaaagagcatggtgttggggaacaggcggtgtgtctcccmtagggtggctttggctggagccagaaagtccaggtaccaatgtacagcaatgccatgaacatatttagctgcttctgggtctgtcagtacctgcaaagga

SEQ ID NO: 108442 - DNA, 201 bp, Homo sapiens
agaggtctgaggtctgctttgcaggaagggagactggggtggcttaccgtgatgatgctgtggctgtactgcatccctcgatcccaggagcctagccgcasactctgctcccagaacttggagcccacacaggcctctgaggcaaagagcatggtgttggggaacaggcggtgtgtctcccctagggtggctttggctgga

SEQ ID NO: 108443 - DNA, 201 bp, Homo sapiens
gtaagaggtctgaggtctgctttgcaggaagggagactggggtggcttaccgtgatgatgctgtggctgtactgcatccctcgatcccaggagcctagccscacactctgctcccagaacttggagcccacacaggcctctgaggcaaagagcatggtgttggggaacaggcggtgtgtctcccctagggtggctttggct

SEQ ID NO: 108444 - DNA, 201 bp, Homo sapiens
gtgattatcctgcttcagcctcctgagtagctgggattacaggtgtgcaccaccacgcctggctaatttttttgtatttttagtagagaaggggtttcacyatgctggccaggttggtcttgaactcttgacctcaggtgatccatccacctcgccctcccaaaatgctgggattacaggtgtgagtcaccgtgcccagcc

SEQ ID NO: 108445 - DNA, 201 bp, Homo sapiens
tatatagatattaagtactatctagtacttaatatctcctgttaatcctgccaaccccatgaagaacaaatcattaccttgtcctgttcatgaggaaagasagcaggctaatagagctacatttctgagtaaagacttaaactcagacctactggacccttctgtaatacctcagtattggtaggctctgtgggccgaatg

SEQ ID NO: 108446 - DNA, 201 bp, Homo sapiens
tcaaaggtagtttattcttttctgtctgacctaaagaatccaggacattgctttgatctctggttgtctcaaggttaggctgtctaacctccttccctccrcaaaaccactccctcttatgtttcctctgttgaccaaagatgtcttctttcagctttcctcccctcctttcctaaccctctgcttgtgaagagcattcca

SEQ ID NO: 108447 - DNA, 201 bp, Homo sapiens
tttgggaggccgagatgggagaattgtttgagcccaggagctggagaccagcctaggcaacatagtgagaccccatctctgcattaagaaaaaaaaaaaaraaagaatgcctgccctccctaccacacaagaaagatatgagataatacagatatatcaaatgagataataaggagaaatctctttaagaaatataaaagc

SEQ ID NO: 108448 - DNA, 201 bp, Homo sapiens
ggcttttagagctaggaggcctcatggactgaggagagctgagttctatcccatgcctgcactgctatggggcagctgctagccgagagcaggttggctcmttcttcggtccctatctgtctttccacttgtgcactaggtctcctccttctcacctgctcaaggacataaattaagccattctgtggtcctctgtgacac

SEQ ID NO: 108449 - DNA, 201 bp, Homo sapiens
cacaggtgtccctaaaacccacagagtgccgaacctcaaggcctcactccagacctgtgtggcacagacaacaggcttgcccgccaagttgcagcgcccartcatcatcttctgagccaggaaaaccttctctgctgggatctcgatgcctaggtccccccgtgccaccatgatgccgtcgctcacctccaggatttcatc

SEQ ID NO: 108450 - DNA, 201 bp, Homo sapiens
cctagaaccagagattcacgttcagacaacgttcccccagaacatgagaggcaaccaaacccaacccattaccattctcagaacgcctcacgccacaggcstcctgttacctgatctttattccctgatgcaacccctgcccacagatcacagactccccttccctctcaagccaacatccatccccttggggaggcagca

SEQ ID NO: 108451 - DNA, 201 bp, Homo sapiens
tcacccacaggtgtccctaaaacccacagagtgccgaacctcaaggcctcactccagacctgtgtggcacagacaacaggcttgcccgccaagttgcagcrcccaatcatcatcttctgagccaggaaaaccttctctgctgggatctcgatgcctaggtccccccgtgccaccatgatgccgtcgctcacctccaggatt

SEQ ID NO: 108452 - DNA, 201 bp, Homo sapiens
tgcactccagcctggcgacagagcaagactctctctcaaaaaaaaaaaaaggtgcaggagtatctgtgggctagggcagagtgtgttgctaagtagcacgsccgtctgcctgtgtggctatgctgatggaagaggtatttgtgatatgccagactgatatctcagtcttagtgactctcacagggaaaacctgggaccaca

SEQ ID NO: 108453 - DNA, 201 bp, Homo sapiens
ggacgaggaagagctggagaaggaggtagctctgagaccgggggctattgtatgagatgagccccaaggatgctggccaggaatgggagtgcttaggtgcrgaggtggcactgttcccgcagctgcaagcctacctgtgtcgcccctacagctgtaccgagaggctcgggagtgtctgaccctgctctctcagcgcctggg

SEQ ID NO: 108454 - DNA, 201 bp, Homo sapiens
atagatttgtttgattctctgctgtgacacttactatgtggttctgggcacatgactgacctcagctttcctatctataagatgagagaaataagaaactrctttgcattagctatacatgtgtgccacaaaactccacacaaatgaataatagttgtattttttaattcatgggggctggggctagggagtagttcagaa

SEQ ID NO: 108455 - DNA, 201 bp, Homo sapiens
cctgtagtcccagctactcaggaggctgaggcaggagaatcgcttgaacccaagaggcggaggttgcaatgagccaagattgcactgttacactccaaccygggtgacagagcaagactccatttaaaaaaaaaaaaaattgatggccgggtgcagtggctcatgcctgtaatcccagcactttgggaggccgacgcaggc

SEQ ID NO: 108456 - DNA, 201 bp, Homo sapiens
aatcccagcactttgggaggccgagatgggagaattgtttgagcccaggagctggagaccagcctaggcaacatagtgagaccccatctctgcattaagaaaaaaaaaaaagaaagaatgcctgccctccctaccacacaagaaagatatgagataatacagatatatcaaatgagataataaggagaaatctctttaaga

SEQ ID NO: 108457 - DNA, 201 bp, Homo sapiens
taatcccagcactttgggaggccgagatgggagaattgtttgagcccaggagctggagaccagcctaggcaacatagtgagaccccatctctgcattaagaaaaaaaaaaaagaaagaatgcctgccctccctaccacacaagaaagatatgagataatacagatatatcaaatgagataataaggagaaatctctttaag

SEQ ID NO: 108458 - DNA, 201 bp, Homo sapiens
gctcctggtgaccttatagtgtggggaagatgggtggggcttccgtgcgtgagctctctccaaaactggtgggggagaagcaggaacagaatgagggttcrggggatggggcctggggtgaagatggtggcacaggagggtggagcacagctgccggacacactttagagttagctggatgctgggcggaggatgaggtgt

SEQ ID NO: 108459 - DNA, 201 bp, Homo sapiens
gcttcccagaggcccggacttgaggaagtttctttcagggctgaaaattgattttgcagtccgagtcagaaggggctagctcctgagttgacactgggattaggtgtgtcctagaattaaaaccaccataggtaactgagtccctgagattttcctgtgccattctctgaatgagggcttcacacagttccctcttgacct

SEQ ID NO: 108460 - DNA, 201 bp, Homo sapiens
tcagttagttcagttgtggccatgttgaatttgaaatactcattagacatccaaccagatatgctgagttggatggcgctcaagagaggtcaaggctggasttatgcattaacacatagaaagatggtacttaaagccatggacgttagtagtagggccacctacagaaagagtggaagtagaaaagagggcttacggtgg

SEQ ID NO: 108461 - DNA, 201 bp, Homo sapiens
gtagtaggccacaaaatacagtcagcatcccatctggcccctccactcttgtgcttaagacgtagataacaactgtttcttgtgtttttttttttttttttgaaacggagttttgctcttgttgcccaggctggagtgcaatggcgcaatctcggctcaccataacctccgcctgcagggttcaagcgattctcctgcctc

SEQ ID NO: 108462 - DNA, 201 bp, Homo sapiens
tggtagctgtcctctcgccgacgccgtcgtgtccggtcactactacttgaccaggagcgacttcttcgtcgcttatgctttcggctccgatagtgttcackgtaactcccccggctgcctcgctctgaggagtggtaccttcgaggatgcggcatctggaaggcaagggaaagcggaaataggaaagtttcgagttttcag

SEQ ID NO: 108463 - DNA, 201 bp, Homo sapiens
gtagccagtccccgacgtggtagatgaggtggccctcagcgtcgtcctctacactcttggctctccggctgctgtgctgctgtcggggggcagggggggtyggagcaagccaggtgtcggagcgggggccggagggaggcggggtgggtggtagaggggtcaccggtcacaggcgcccagccaggggggacagacgatgat

SEQ ID NO: 108464 - DNA, 201 bp, Homo sapiens
catacttgtgtaaaaccatgccagctagtactaacaccaaaattcagttcagctaaggagtagcctctaccagacccaagaagaatggtactatctgccakgtttttttcttttttgtttttgagatggcgtctcactctgtcacccaggctggagtgcagtggcgcgatcttggctcactgcaacctctgcctcctgttc

SEQ ID NO: 108465 - DNA, 201 bp, Homo sapiens
cgagattatgccactgcacatcagtctgggcaacagagtgagactctgtctcaaataaataaataaataaataaataaataaataaataaataaataaatatataaataaataaagtccaaaccaagaaccttaaaaactttcactctactggaaagttatctgaagtcccctgtacaagttatctcccaatttaagtctt

SEQ ID NO: 108466 - DNA, 201 bp, Homo sapiens
ccgagattatgccactgcacatcagtctgggcaacagagtgagactctgtctcaaataaataaataaataaataaataaataaataaataaataaataaatatataaataaataaagtccaaaccaagaaccttaaaaactttcactctactggaaagttatctgaagtcccctgtacaagttatctcccaatttaagtct

SEQ ID NO: 108467 - DNA, 201 bp, Homo sapiens
tatggaagggatttggttccctggcccatttgcttttcattctgagctcctaccgcatgctgcatcttcaccgcttccacagggaagttgcccttggcagyctcccctgacagcatgatgcagtcagccccatccagcacagcattggcgacatcgcttgtctctgccctcgttggccggggcttggtaatcatgctctcc

SEQ ID NO: 108468 - DNA, 201 bp, Homo sapiens
tctggaagtggaactaggttgagggttgggacacagatcagcatggctaaatgggaggccagtcctgatcccacatccttgctgatcccttacttcacaawgtatctggcccaggtctggtggtagatgtctccgggctgtcccttgagtgaccccttcccattcaccgctccattggtcttgagccaagtgggtgatgtc

SEQ ID NO: 108469 - DNA, 201 bp, Homo sapiens
gcagcagcaagcgttggtcatccagcatgagtaggcggacattgtggtgagtactgttggcgagggtaggacctaggtcacgggcaatgaagtctcgctgmtgttcaggggtgaagcccaggcactggaaggggtatccactcaacagcccagcagaaggctcattttcagctgtcactgcccagaactgtaacttgtgct

SEQ ID NO: 108470 - DNA, 201 bp, Homo sapiens
gtggggcagcagcaagcgttggtcatccagcatgagtaggcggacattgtggtgagtactgttggcgagggtaggacctaggtcacgggcaatgaagtctygctgatgttcaggggtgaagcccaggcactggaaggggtatccactcaacagcccagcagaaggctcattttcagctgtcactgcccagaactgtaactt

SEQ ID NO: 108471 - DNA, 201 bp, Homo sapiens
gccgagattatgccactgcacatcagtctgggcaacagagtgagactctgtctcaaataaataaataaataaataaataaataaataaataaataaataaatatataaataaataaagtccaaaccaagaaccttaaaaactttcactctactggaaagttatctgaagtcccctgtacaagttatctcccaatttaagtc

SEQ ID NO: 108472 - DNA, 201 bp, Homo sapiens
ttgcccagtggggcagcagcaagcgttggtcatccagcatgagtaggcggacattgtggtgagtactgttggcgagggtaggacctaggtcacgggcaatkaagtctcgctgatgttcaggggtgaagcccaggcactggaaggggtatccactcaacagcccagcagaaggctcattttcagctgtcactgcccagaact

SEQ ID NO: 108473 - DNA, 201 bp, Homo sapiens
agccgagattatgccactgcacatcagtctgggcaacagagtgagactctgtctcaaataaataaataaataaataaataaataaataaataaataaataaatatataaataaataaagtccaaaccaagaaccttaaaaactttcactctactggaaagttatctgaagtcccctgtacaagttatctcccaatttaagt

SEQ ID NO: 108474 - DNA, 201 bp, Homo sapiens
tccaggccttaccacctttgcccagtggggcagcagcaagcgttggtcatccagcatgagtaggcggacattgtggtgagtactgttggcgagggtaggayctaggtcacgggcaatgaagtctcgctgatgttcaggggtgaagcccaggcactggaaggggtatccactcaacagcccagcagaaggctcattttcagc

SEQ ID NO: 108475 - DNA, 201 bp, Homo sapiens
actgatatcccgactggagtcccacaacttgttgggcggctcagcccgaaggcgggcgaagaaaggatgctgaagggcttcacccaaggtcagccgcttarctggttcatactctagcatgctttcaatcagatcgaagagctggtggtgttcctctgcctctgaggtcagataccgctggtggaggagggcaggaaaaag

SEQ ID NO: 108476 - DNA, 201 bp, Homo sapiens
accatggaggtccaggccttaccacctttgcccagtggggcagcagcaagcgttggtcatccagcatgagtaggcggacattgtggtgagtactgttggcragggtaggacctaggtcacgggcaatgaagtctcgctgatgttcaggggtgaagcccaggcactggaaggggtatccactcaacagcccagcagaaggct

SEQ ID NO: 108477 - DNA, 201 bp, Homo sapiens
aatgaagcacgttattttatttcacaaagactgtacaaaattccttataaaacatggggtagatgccacctggttacctcactcggcccccatccaactcygtatgagggggcaggtgagggtggaaactgtgtggatggaatagtattatgtacaaggcaggggttgaagtgataggtacaagttctttcatatttacac

SEQ ID NO: 108478 - DNA, 201 bp, Homo sapiens
ctggagcaccatggaggtccaggccttaccacctttgcccagtggggcagcagcaagcgttggtcatccagcatgagtaggcggacattgtggtgagtacygttggcgagggtaggacctaggtcacgggcaatgaagtctcgctgatgttcaggggtgaagcccaggcactggaaggggtatccactcaacagcccagca

SEQ ID NO: 108479 - DNA, 201 bp, Homo sapiens
cctccacgcccctgccgcagcagtggcggtagcggtagccctcagagtccacttcactcgcctcagttcgccccgcttctctgtgcacggattggttccaycgaccggaagggccacaaggatccccgcagcagccgtgggttgcgcctgcgtcttgtccaaaagctaagacgaaagtgcccccacgtgatacctctaacc

SEQ ID NO: 108480 - DNA, 201 bp, Homo sapiens
actggagcaccatggaggtccaggccttaccacctttgcccagtggggcagcagcaagcgttggtcatccagcatgagtaggcggacattgtggtgagtaytgttggcgagggtaggacctaggtcacgggcaatgaagtctcgctgatgttcaggggtgaagcccaggcactggaaggggtatccactcaacagcccagc

SEQ ID NO: 108481 - DNA, 201 bp, Homo sapiens
ccctccacgcccctgccgcagcagtggcggtagcggtagccctcagagtccacttcactcgcctcagttcgccccgcttctctgtgcacggattggttccyccgaccggaagggccacaaggatccccgcagcagccgtgggttgcgcctgcgtcttgtccaaaagctaagacgaaagtgcccccacgtgatacctctaac

SEQ ID NO: 108482 - DNA, 201 bp, Homo sapiens
caaccaccatctcccgggttcaactgattctcccttctcagcctcctgagtagctgggattacagacacccaccatcatgcccagataattttttttttttgtattttagtagacacagggtttcaacacgttggccagggtggtcttaaactcctgacctcaggtgatcacccgcctcggcttcccaaagtgctgggttt

SEQ ID NO: 108483 - DNA, 201 bp, Homo sapiens
taggttctgtggggctgagctttctcgagggctgcaaggagggagctgagggtggaggcaatggggcaggggctggaggctcataggctggtggtggctgytgaggaaaagaccttagtgatcatctagtccctcataacacaggaatctagagtctgcttgaatacctttagacccagaactcatgatgtaaggaagcag

SEQ ID NO: 108484 - DNA, 201 bp, Homo sapiens
acaggcctctgaggcaaagagcatggtgttggggaacaggcggtgtgtctcccctagggtggctttggctggagccagaaagtccaggtaccaatgtacarcaatgccatgaacatatttagctgcttctgggtctgtcagtacctgcaaaggaagagcaactgatcctggaccttgcacacaggcttctggaacttctag

SEQ ID NO: 108485 - DNA, 201 bp, Homo sapiens
tcactgcaacctccacctcccgggttcaagcgattctcctgcctcagcctcccgagtagctgggactacaggtgcgcgccaccatgcccagctaatttttktgtgtgtgtatttttagtagatacagggtttcaccatgttggctaggatggtctcgatctcttgacctcgtgatccgcccacctcagcctcccaaagtgc

SEQ ID NO: 108486 - DNA, 201 bp, Homo sapiens
aggactacagacaggtaccatcatgccctgctaatttttttcattaatgttttggaggcaggatctcactatgttgtccaggttggtctctaactcctgarctcaagcaacctgcctgcctcggcctcccaaagtgttggaattacaggcgtgaggcaccatacccagccctggatcctctcttttatctccaatttgggg

SEQ ID NO: 108487 - DNA, 201 bp, Homo sapiens
aaagttatctgaagtcccctgtacaagttatctcccaatttaagtcttcttaagagatctctccctttcaacctatttagttttacccagttggagccagwcagggagaaaatgtgggaggacgaaataaaagggagaaaacaaagggctcggcagaaggcaaagtggtgcagctgcctgcccccagtaaccaagggcaga

SEQ ID NO: 108488 - DNA, 201 bp, Homo sapiens
cgcccagctaatttttgtatttttagtagagacagggtttcaccatgttggctggtcctgaactcctgacctcaggtgatccacccgccttggcctcccaragtgctgggattacaggcatgagccccggcgcctggccgtccacctcagcttcttgaggagctaggactacagacaggtaccatcatgccctgctaattt

SEQ ID NO: 108489 - DNA, 201 bp, Homo sapiens
tgacccaaagctccatctggacattcccaatatccccctcaccggccagttgtggtcagcacaatgatggcagcagcacagcacttgaaggcagcctccayagcaccaatggcggtgacctcagtgggatcacggcttagtggcgctgcccgacgtagctcctcaaacagctgccggtggtacactgcggcctctgcctcc

SEQ ID NO: 108490 - DNA, 201 bp, Homo sapiens
ctttcaatgccaaattgcacccggcgatctacatcatctgcccagatggcttctggaggttcacggtaaagcaaggggaagactcctcggcataagtggayctggcgggcagcctgggcagagcgggtgacagcaatgactgctgcccgaggtcggtaccgagacagaagctgggctgagctggaggaggcagagaaggtc

SEQ ID NO: 108491 - DNA, 201 bp, Homo sapiens
ggatgtgttcagtgtgacaagaagcctaggtcagagcccagtctcccggctgcccccgttgaggctgaggctgtgggggcgggtaccacgctccagcctgyggccagacaggagacgccgcagggaagagctagagctcagatctccgcagctgcgaaggtggaggctctctcggccaggccggccccacaggctccgggg

SEQ ID NO: 108492 - DNA, 201 bp, Homo sapiens
gaatacagctcctcctgggcccccaaactcctctctcatctacattattttttctggccctatcccctgagagaagctcttgttctggcccctccctcacmcaaaatcagctctccttaaccccacgctcaccctgtacctctagctctggccctgcccacccacaaattcctctttatggccccacctccatccagaagc

SEQ ID NO: 108493 - DNA, 201 bp, Homo sapiens
tggagcccacacaggcctctgaggcaaagagcatggtgttggggaacaggcggtgtgtctcccctagggtggctttggctggagccagaaagtccaggtamcaatgtacagcaatgccatgaacatatttagctgcttctgggtctgtcagtacctgcaaaggaagagcaactgatcctggaccttgcacacaggcttctg

SEQ ID NO: 108494 - DNA, 201 bp, Homo sapiens
ctcctctctcatctacattattttttctggccctatcccctgagagaagctcttgttctggcccctccctcacccaaaatcagctctccttaaccccacgstcaccctgtacctctagctctggccctgcccacccacaaattcctctttatggccccacctccatccagaagctccacacattctgtgtcttcacaggaa

SEQ ID NO: 108495 - DNA, 201 bp, Homo sapiens
ttggagcccacacaggcctctgaggcaaagagcatggtgttggggaacaggcggtgtgtctcccctagggtggctttggctggagccagaaagtccaggtrccaatgtacagcaatgccatgaacatatttagctgcttctgggtctgtcagtacctgcaaaggaagagcaactgatcctggaccttgcacacaggcttct

SEQ ID NO: 108496 - DNA, 201 bp, Homo sapiens
aatggtgagcccacagacgctgaagagcaggttctggggaagggaaaggaggagaggagtcaggagacggctaagttccacacattatgggcctgtgagtwccccagcaggggaggcaagagtgagaaccaggaggatgtttgcagggtgcaagctcaccttgagggcccctcgggcttcatcacaggtggagttaggggc

SEQ ID NO: 108497 - DNA, 201 bp, Homo sapiens
ggagcctagccgcacactctgctcccagaacttggagcccacacaggcctctgaggcaaagagcatggtgttggggaacaggcggtgtgtctcccctaggrtggctttggctggagccagaaagtccaggtaccaatgtacagcaatgccatgaacatatttagctgcttctgggtctgtcagtacctgcaaaggaagagc

SEQ ID NO: 108498 - DNA, 201 bp, Homo sapiens
gaaatgaaggcagctgctgccttcatggaatcctcaacaggggagatggagaaagcaaatgtcaataatgtgtgatccccttgcaaagacattttttttttgagacggagtctggctctgtcgcgcaggctggagtgcagtggcgcaatctcagcttactgcaagctccgcctccccggttcacgccattctcctgcctca

SEQ ID NO: 108499 - DNA, 201 bp, Homo sapiens
ccccgactctggacagggccggaggaggggaacagagggacagcacacacagacctttccttcctgagtggagcagggagggtgaggcagcctgagtcagsacaaactgaggtgtcctgcacacctcccccagccagttctttccagctctccctcctcaaatctcaccagagagcactgttggaagtctcgggccagttg

SEQ ID NO: 108500 - DNA, 201 bp, Homo sapiens
ccaggagcctagccgcacactctgctcccagaacttggagcccacacaggcctctgaggcaaagagcatggtgttggggaacaggcggtgtgtctcccctrgggtggctttggctggagccagaaagtccaggtaccaatgtacagcaatgccatgaacatatttagctgcttctgggtctgtcagtacctgcaaaggaag

SEQ ID NO: 108501 - DNA, 201 bp, Homo sapiens
ggggagcagggctccctggcgtctccgggtttcgcgtttccgtggacttcccacctccttcctgcgccagccactcgggctccaccgccccgcccctcatmtctcccagtttacactaaagccgggtccgaccttcccacctcactccacactctcctttctctttcataaggcctaattcccaatgaagattcaggaaac

SEQ ID NO: 108502 - DNA, 201 bp, Homo sapiens
tcatgagtactcctctgccacggacagagtccccctccttcacagacacttcgtgcccacccggctggcaccaactggggagccagttcccttcttgaggwcataaatgggcttccccttgcgtgctgggcacctgcctcccagtgggcactggaccctggcacctaccactagagtgaatggccgcttccaggacacaat

SEQ ID NO: 108503 - DNA, 201 bp, Homo sapiens
cgatcccaggagcctagccgcacactctgctcccagaacttggagcccacacaggcctctgaggcaaagagcatggtgttggggaacaggcggtgtgtctyccctagggtggctttggctggagccagaaagtccaggtaccaatgtacagcaatgccatgaacatatttagctgcttctgggtctgtcagtacctgcaaa

SEQ ID NO: 108504 - DNA, 201 bp, Homo sapiens
gacagcaatgactgctgcccgaggtcggtaccgagacagaagctgggctgagctggaggaggcagagaaggtcagcccagaacagcaagaaagtggtgaaygaggaaaggagaatctttgttccagttccaggtgtcactaacaagctgtgtgaccctgggtaagtcatcatacttctctgggccttggtgttctcacctg

SEQ ID NO: 108505 - DNA, 201 bp, Homo sapiens
ctaagtcagctccctcaagtagcagggccagggcatcccagtcaggggtcacggggcccggaaggcattttcagcagccccagcggctgcattggcagctscggttcgcaccgcagggttggagaagacaccagcagcaaattcttgctgggccttctgaaagctggcacctgtgcggcggtataaggagtggatctgcaa

SEQ ID NO: 108506 - DNA, 201 bp, Homo sapiens
actcctgatatctggtgatcctcctgccttggcctcccaaagtgctgggattacaggcatgagccacggagcccagcctaatttttgtaattttgtgtgtrtatatatatatatatatatatatatatatatattttttttttttttttttttttttgagacggagtcttgctcttgtcgcccaggctggaatgcagtggc

SEQ ID NO: 108507 - DNA, 201 bp, Homo sapiens
ctgcatccctcgatcccaggagcctagccgcacactctgctcccagaacttggagcccacacaggcctctgaggcaaagagcatggtgttggggaacaggyggtgtgtctcccctagggtggctttggctggagccagaaagtccaggtaccaatgtacagcaatgccatgaacatatttagctgcttctgggtctgtcag

SEQ ID NO: 108508 - DNA, 201 bp, Homo sapiens
ttcttgggggatctccatggagatgtcctggaaaaagcagggctgaactggacaaaaagaaggtagagggggccaattgttctgtcgagctgtaaggcacmaaaaaacaggtggaccccagaagtaaaacagagaccaacaaaggaatcactcccccttctctccatccctggatcctctctttttttttttttttttttt

SEQ ID NO: 108509 - DNA, 201 bp, Homo sapiens
taaggcccagaagctcaaaggagatacacatgtggccatggtagtcaaaccagtcaaacatctggacacagaggctgagaagagagatgggggaagggggrttgtctgatgagctcccatctgcccatcagccatccaacaaggaggtacttcatagctgttgattccacatacttgtgtaaaaccatgccagctagtact

SEQ ID NO: 108510 - DNA, 201 bp, Homo sapiens
gctggtgtcaaactcctgatatctggtgatcctcctgccttggcctcccaaagtgctgggattacaggcatgagccacggagcccagcctaatttttgtawttttgtgtgtatatatatatatatatatatatatatatatatattttttttttttttttttttttttgagacggagtcttgctcttgtcgcccaggctgg

SEQ ID NO: 108511 - DNA, 201 bp, Homo sapiens
ctggggtggcttaccgtgatgatgctgtggctgtactgcatccctcgatcccaggagcctagccgcacactctgctcccagaacttggagcccacacaggyctctgaggcaaagagcatggtgttggggaacaggcggtgtgtctcccctagggtggctttggctggagccagaaagtccaggtaccaatgtacagcaatg

SEQ ID NO: 108512 - DNA, 201 bp, Homo sapiens
actcctctctcatctacattattttttctggccctatcccctgagagaagctcttgttctggcccctccctcacccaaaatcagctctccttaaccccacsctcaccctgtacctctagctctggccctgcccacccacaaattcctctttatggccccacctccatccagaagctccacacattctgtgtcttcacagga

SEQ ID NO: 108513 - DNA, 201 bp, Homo sapiens
agactggggtggcttaccgtgatgatgctgtggctgtactgcatccctcgatcccaggagcctagccgcacactctgctcccagaacttggagcccacacmggcctctgaggcaaagagcatggtgttggggaacaggcggtgtgtctcccctagggtggctttggctggagccagaaagtccaggtaccaatgtacagca

SEQ ID NO: 108514 - DNA, 201 bp, Homo sapiens
aaaagatgaatggatgagaaggtctaggactcccctgtctgcctaaaccaggtctagaagtctctcccgtgtaggggttggggctctcagcctccctacayacttccttgcttgcttacttcttgttgtcagggtctttctcattgattttctctagcacgttgatctcaagtcgagctgcttccttgtacttctccacat

SEQ ID NO: 108515 - DNA, 201 bp, Homo sapiens
ttgaacccgggaaacgggttgcagtgagccaagatcatgccactgcactccagcctgggcgacagagccagagactccgtctcaaaaaaaaaaaaaaattmtccttttttagctgctaagctatggatgttctgtccctaggaggtgagtacctgagaagtgtctaccagaggagtgaactcaccctttcttcctcctcag

SEQ ID NO: 108516 - DNA, 201 bp, Homo sapiens
ggtatggaatgggggtgcccgccctccactcacctgaagtggccaaggtggtagaacatgggctgtttgtaaaacgtgtccttggtgatgtctacaatgawgggactgtcgacaaagttacgcacccaattgggtcctccttcggggttcagggcaaggttccagtcggtccagccgaccacatggtacaggaggttctag

SEQ ID NO: 108517 - DNA, 201 bp, Homo sapiens
agccagtccccgacgtggtagatgaggtggccctcagcgtcgtcctctacactcttggctctccggctgctgtgctgctgtcggggggcagggggggtcgragcaagccaggtgtcggagcgggggccggagggaggcggggtgggtggtagaggggtcaccggtcacaggcgcccagccaggggggacagacgatgatgg

SEQ ID NO: 108518 - DNA, 201 bp, Homo sapiens
ctgaggaaggagaatggcgtgaacccgggaggcggagcttgcagtgagcacagatcgcgcggctgcactccagcctgggtgacagagcgagacaccgtctcaaaaaaaaaaaaaaaaaaaaatattagccggtcatggtggcgcacacctgtagtcccagctactcggcaggctgaagcaggagagagtcacttgaacccg

SEQ ID NO: 108519 - DNA, 201 bp, Homo sapiens
tggtatggaatgggggtgcccgccctccactcacctgaagtggccaaggtggtagaacatgggctgtttgtaaaacgtgtccttggtgatgtctacaatgrtgggactgtcgacaaagttacgcacccaattgggtcctccttcggggttcagggcaaggttccagtcggtccagccgaccacatggtacaggaggttcta

SEQ ID NO: 108520 - DNA, 201 bp, Homo sapiens
ccagtccccgacgtggtagatgaggtggccctcagcgtcgtcctctacactcttggctctccggctgctgtgctgctgtcggggggcagggggggtcggascaagccaggtgtcggagcgggggccggagggaggcggggtgggtggtagaggggtcaccggtcacaggcgcccagccaggggggacagacgatgatgggg

SEQ ID NO: 108521 - DNA, 201 bp, Homo sapiens
ccgggcgtggtggcaggcatctgtagtcccagctactcactactcgggaggctgaggaaggagaatggcgtgaacccgggaggcggagcttgcagtgagcmcagatcgcgcggctgcactccagcctgggtgacagagcgagacaccgtctcaaaaaaaaaaaaaaaaaaaaatattagccggtcatggtggcgcacacct

SEQ ID NO: 108522 - DNA, 201 bp, Homo sapiens
ccgacgtggtagatgaggtggccctcagcgtcgtcctctacactcttggctctccggctgctgtgctgctgtcggggggcagggggggtcggagcaagccmggtgtcggagcgggggccggagggaggcggggtgggtggtagaggggtcaccggtcacaggcgcccagccaggggggacagacgatgatgggggacagtg

SEQ ID NO: 108523 - DNA, 201 bp, Homo sapiens
cgacgtggtagatgaggtggccctcagcgtcgtcctctacactcttggctctccggctgctgtgctgctgtcggggggcagggggggtcggagcaagccargtgtcggagcgggggccggagggaggcggggtgggtggtagaggggtcaccggtcacaggcgcccagccaggggggacagacgatgatgggggacagtgg

SEQ ID NO: 108524 - DNA, 201 bp, Homo sapiens
tcactgcaacctccgcctcccaggttcaagcgattctcctgcctcagcctccctagtagctgggattacaggcgtccaccaccaggcccagctaatttttsaatttttagtagagatgggggtttcaccatgttggctaggctggtcttgaactcctgacctcaggtgatccacctgccttggcctcccaaagtgctggga

SEQ ID NO: 108525 - DNA, 201 bp, Homo sapiens
tcatctgcccagatggcttctggaggttcacggtaaagcaaggggaagactcctcggcataagtggacctggcgggcagcctgggcagagcgggtgacagyaatgactgctgcccgaggtcggtaccgagacagaagctgggctgagctggaggaggcagagaaggtcagcccagaacagcaagaaagtggtgaacgagga

SEQ ID NO: 108526 - DNA, 201 bp, Homo sapiens
atcatctgcccagatggcttctggaggttcacggtaaagcaaggggaagactcctcggcataagtggacctggcgggcagcctgggcagagcgggtgacarcaatgactgctgcccgaggtcggtaccgagacagaagctgggctgagctggaggaggcagagaaggtcagcccagaacagcaagaaagtggtgaacgagg

SEQ ID NO: 108527 - DNA, 201 bp, Homo sapiens
cgatctacatcatctgcccagatggcttctggaggttcacggtaaagcaaggggaagactcctcggcataagtggacctggcgggcagcctgggcagagcrggtgacagcaatgactgctgcccgaggtcggtaccgagacagaagctgggctgagctggaggaggcagagaaggtcagcccagaacagcaagaaagtggt

SEQ ID NO: 108528 - DNA, 201 bp, Homo sapiens; identical to SEQ ID NO: 17715

SEQ ID NO: 108529 - DNA, 201 bp, Homo sapiens
ttctctttcataaggcctaattcccaatgaagattcaggaaacggggatgtcagttccagttccactttctttttatttaaataaccgaagcaacagccgkggcacagcagagggaagctgggttggggcgtgtgagaggtggcagcagtgtggcctgatggggggactaggtcacagtgaactccccacacgcctgtcag

SEQ ID NO: 108530 - DNA, 201 bp, Homo sapiens
gatgtaggagatgataggcctggtatggaatgggggtgcccgccctccactcacctgaagtggccaaggtggtagaacatgggctgtttgtaaaacgtgtscttggtgatgtctacaatgatgggactgtcgacaaagttacgcacccaattgggtcctccttcggggttcagggcaaggttccagtcggtccagccgacc

SEQ ID NO: 108531 - DNA, 201 bp, Homo sapiens
cacctcccgggtctcaaaagggttgtagacgtcaagcgtggcatactgccggctgggtcggtgctggatcacagctgggtcctgagggcagagacccgggkctcagctggcacccagtgccacctaggggaattcccagggaccattcccaaactgcctgtggctccaagtactgcaccttcggggccacgccgttgtccc

SEQ ID NO: 108532 - DNA, 201 bp, Homo sapiens
cgatgtaggagatgataggcctggtatggaatgggggtgcccgccctccactcacctgaagtggccaaggtggtagaacatgggctgtttgtaaaacgtgwccttggtgatgtctacaatgatgggactgtcgacaaagttacgcacccaattgggtcctccttcggggttcagggcaaggttccagtcggtccagccgac

SEQ ID NO: 108533 - DNA, 201 bp, Homo sapiens
taacgcaaactcatagccctcacaacttctttgtcactttttctccccctttttttgagacaggatctcgctctattccccaggctggtctcgaactcctrggctcaaaagatcctcccgcctcagccacccgaatagctcctttgtcgctcttatcactgttgtgattaattgtacaaatggcttaatggcagttatagc

SEQ ID NO: 108534 - DNA, 201 bp, Homo sapiens
cccactctctgggagccctcaggaatgaacttgctgaatgtgggaacagatggtcagagtccctcggggtacctcccatgaaaccctcatctaagaagtcrcccacccacggacccaccccataactcctgcagaggctctgccctggctctctaggcctggagccatgctgctgggcactgaccctgcttttctgcatcg

SEQ ID NO: 108535 - DNA, 201 bp, Homo sapiens
gagggggacaagaatttgttttcctcctccagtgctataagaaggggcatctcccccacagtctaaatacccatgcagcacaggacagaagctctcccagwccagagcagcagaggcaagcagcaagagaccccagaggtaggagggaaagggacactttggggggtatacagcaggtttctttttgtgccagccagtgca

SEQ ID NO: 108536 - DNA, 201 bp, Homo sapiens
cgctgtcttcagcccacttcccagacctcaccattgccctcaccggtttaggacgaccacaacaggagagccatcgggatgcatcagtgccactgcgtccvggtcgttcttctgactggcaaccagccccactctctgggagccctcaggaatgaacttgctgaatgtgggaacagatggtcagagtccctcggggtacct

SEQ ID NO: 108537 - DNA, 201 bp, Homo sapiens
caagagttcagttgtggccatgttgaatctgaaatgcccattagacatccaagcagacatgctgagttggatggcgctcatgggaggtcaaggctggagtyatggattaacacatagaaagatggtatttaaagccatggactttagtagtagggccacctatagaaagagtggaggtaggaaagagggcttaggtgaggg

SEQ ID NO: 108538 - DNA, 201 bp, Homo sapiens
cccaacgctgtcttcagcccacttcccagacctcaccattgccctcaccggtttaggacgaccacaacaggagagccatcgggatgcatcagtgccactgsgtccgggtcgttcttctgactggcaaccagccccactctctgggagccctcaggaatgaacttgctgaatgtgggaacagatggtcagagtccctcgggg

SEQ ID NO: 108539 - DNA, 201 bp, Homo sapiens
ttgagacccgcctggccaacatggtgaaaccctatctcttctaaaaatacaaaatttagctgggcgggcatggggacgggcgcctgtaatcccagctactygggaggctgaggcaggagaattgcttgaacccaggaggtggaaggttgcagtgagcccaaatcacaccactgcactccagcctgggtaacaaagcaagac

SEQ ID NO: 108540 - DNA, 201 bp, Homo sapiens
agaagctgagagtgtgatcctgccaaggcccccaacgctgtcttcagcccacttcccagacctcaccattgccctcaccggtttaggacgaccacaacagsagagccatcgggatgcatcagtgccactgcgtccgggtcgttcttctgactggcaaccagccccactctctgggagccctcaggaatgaacttgctgaat

SEQ ID NO: 108541 - DNA, 201 bp, Homo sapiens
ccccaccctgccactttagtatcttaacgaatgtttgttgaggacctactgagtgttagacccactgcaatgagcaagtttctgatcttgggaccttaacmttctatgggacgacacagatatataaacaaaaataataattttagatagtgatacatgctgaaaccatgggtatgtggccaggcgcggtgagtcacacct

SEQ ID NO: 108542 - DNA, 201 bp, Homo sapiens
cccctttcctaccctgatgttctactactctaagatgatgaacaaaagatgaatggatgagaaggtctaggactcccctgtctgcctaaaccaggtctagragtctctcccgtgtaggggttggggctctcagcctccctacatacttccttgcttgcttacttcttgttgtcagggtctttctcattgattttctctagc

SEQ ID NO: 108543 - DNA, 201 bp, Homo sapiens
tcgctggcgagccggagagagagagagagcgagagcgagagagcgagcgagagagagcgagagagcgagagagcgagcgagagagagagagagagagagaggagccggcgcgagaactacgcatgcgtgtcggcgttttcccgccagcacactgttggtggatgggggcgattgaattcccacagtgagtccagcccaccg

SEQ ID NO: 108544 - DNA, 201 bp, Homo sapiens
caaagcaagcagcacacagcgcatgttcacataagcatgggggctggggggacactggggcttactgatctttttctaggggcctccagcccctggcaccrcctagaggggaaagtgagtcacccaaaccattgcccctgggcttacgtcgctgtaagctcacactggccctgttgtgccctctttagtcacagacagcgt

SEQ ID NO: 108545 - DNA, 201 bp, Homo sapiens
cctttcctaccctgatgttctactactctaagatgatgaacaaaagatgaatggatgagaaggtctaggactcccctgtctgcctaaaccaggtctagaartctctcccgtgtaggggttggggctctcagcctccctacatacttccttgcttgcttacttcttgttgtcagggtctttctcattgattttctctagcac

SEQ ID NO: 108546 - DNA, 201 bp, Homo sapiens
gtcgctggcgagccggagagagagagagagcgagagcgagagagcgagcgagagagagcgagagagcgagagagcgagcgagagagagagagagagagagaggagccggcgcgagaactacgcatgcgtgtcggcgttttcccgccagcacactgttggtggatgggggcgattgaattcccacagtgagtccagcccacc

SEQ ID NO: 108547 - DNA, 201 bp, Homo sapiens
tggggctgtgcgtggggccagagccttctcagaggtacaaaagggtagggtgggagggcagccaggcacaggaggggcctgaagagctgtggggcactgartgtgccctttatgcagccctgggatagagccctattcagggccaggctggcgccacctggggatctctccccataccaggtctagaactgtgtgtcctgt

SEQ ID NO: 108548 - DNA, 201 bp, Homo sapiens
gcggagggtagggaccagtccatcctggcacccatctgcagctccagtgcgaatcccaaccccgacgctcgtcgccgggctccgtgaatgtttgtcacatstctgaagaacgtatgaattacataaccttcttcccactccacccctcaaaaagcaagtggatataaagacttgaagattttataatctcttcttcattag

SEQ ID NO: 108549 - DNA, 201 bp, Homo sapiens
tgcctcggcctcccaaagtgctgggattacaggcgtgagccaccgcacccagccagttcaagtgttctatccttattttcttcaaacacagctccatgaaraccttcaggtctaggacacagttcactacagagcaaagtgtatgacgaccgatggagactgccacagtgtatccccgttcaggatctaagatatagatct

SEQ ID NO: 108550 - DNA, 201 bp, Homo sapiens
ggaagaagatacaggttcagatggagcagctggagctggggctggggctggggctggctcaggctctggataggaggtccctgagacagatactggccctrgtgacagtggggctgtgcgtggggccagagccttctcagaggtacaaaagggtagggtgggagggcagccaggcacaggaggggcctgaagagctgtggg

SEQ ID NO: 108551 - DNA, 201 bp, Homo sapiens
gagacggtcactcatccagaggcgggactcagagcccctccacaagtctcattggtccatttgaagacggacaactctccctgaccatccgtagcacagayggggcgcaagcgtattggaaagggagcgggtgccagacgcgagaactacgcatgcgtctcagcgctttcccgccagcacacccttagtgggtgggggggg

SEQ ID NO: 108552 - DNA, 201 bp, Homo sapiens
gcgatctacatcatctgcccagatggcttctggaggttcacggtaaagcaaggggaagactcctcggcataagtggacctggcgggcagcctgggcagagygggtgacagcaatgactgctgcccgaggtcggtaccgagacagaagctgggctgagctggaggaggcagagaaggtcagcccagaacagcaagaaagtgg

SEQ ID NO: 108553 - DNA, 201 bp, Homo sapiens
gcaacctccgcctcctaggttcaagcggagggtagggaccagtccatcctggcacccatctgcagctccagtgcgaatcccaaccccgacgctcgtcgccsggctccgtgaatgtttgtcacatgtctgaagaacgtatgaattacataaccttcttcccactccacccctcaaaaagcaagtggatataaagacttgaag

SEQ ID NO: 108554 - DNA, 201 bp, Homo sapiens
acccctcagttcaagtgttcttattttattcttgagacagagtctcgctgtgtggccaggctggagtgcagtggcacaatctcggctcactgcaacctccrcttcccaggttcaagcaactctcctgcctcagcctcctgtgtagctgggattacaggcacgcaccaccactcctggctaatttttatatttttagtagag

SEQ ID NO: 108555 - DNA, 201 bp, Homo sapiens
tgcacccggcgatctacatcatctgcccagatggcttctggaggttcacggtaaagcaaggggaagactcctcggcataagtggacctggcgggcagcctrggcagagcgggtgacagcaatgactgctgcccgaggtcggtaccgagacagaagctgggctgagctggaggaggcagagaaggtcagcccagaacagcaa

SEQ ID NO: 108556 - DNA, 201 bp, Homo sapiens
ctgcaacctccgcctcctaggttcaagcggagggtagggaccagtccatcctggcacccatctgcagctccagtgcgaatcccaaccccgacgctcgtcgycgggctccgtgaatgtttgtcacatgtctgaagaacgtatgaattacataaccttcttcccactccacccctcaaaaagcaagtggatataaagacttga

SEQ ID NO: 108557 - DNA, 201 bp, Homo sapiens
aatgccaaattgcacccggcgatctacatcatctgcccagatggcttctggaggttcacggtaaagcaaggggaagactcctcggcataagtggacctggmgggcagcctgggcagagcgggtgacagcaatgactgctgcccgaggtcggtaccgagacagaagctgggctgagctggaggaggcagagaaggtcagccc

SEQ ID NO: 108558 - DNA, 201 bp, Homo sapiens
gtctctgaaggatagaggatccactaaacaaaaacaaggatgcaggtacctgccttagctataggcactaggttagccctgcaagtaattccggcttcccratgtggatgggtcatgtgatgactaggagcgtcacatgacacaggaagtgaggcaatcacagccatatttctaaagggcaattggcttcctctcatctgt

SEQ ID NO: 108559 - DNA, 201 bp, Homo sapiens
agggagcagggaggagaagctgagagtgtgatcctgccaaggcccccaacgctgtcttcagcccacttcccagacctcaccattgccctcaccggtttagsacgaccacaacaggagagccatcgggatgcatcagtgccactgcgtccgggtcgttcttctgactggcaaccagccccactctctgggagccctcaggaa

SEQ ID NO: 108560 - DNA, 201 bp, Homo sapiens
gtggaggcaatggggcaggggctggaggctcataggctggtggtggctgttgaggaaaagaccttagtgatcatctagtccctcataacacaggaatctakagtctgcttgaatacctttagacccagaactcatgatgtaaggaagcagcctttcccccatttgttaggaagctagttcttctgttgaatttctgtcaga

SEQ ID NO: 108561 - DNA, 201 bp, Homo sapiens
ggctggagaacgtagactggggaggaagggatggggtacaagggtaggctgggccagaggagggaggggcgtctcaggatatgcttagcacccgcatgatkttggtgtagccggagccaggtcgccagcctgtcaccacaatcaccaggtctccaacacggaggaagccacggagctttcctgggggagggaaagaaaaca

SEQ ID NO: 108562 - DNA, 201 bp, Homo sapiens
gagggtggataacagcctcacaaacctgaatccccaacctgggataccaatggcctggaggacaaagagcacatcctggacgaagaaaatgaagaagaaarcgaagaaattgaatgaactgtcactcctacaaagaggaaaaaaatggggagggtgggagaagaattagagctgaaggatgggcagacgtggggcccatcc

SEQ ID NO: 108563 - DNA, 201 bp, Homo sapiens
agagggaaaggtgagggtggataacagcctcacaaacctgaatccccaacctgggataccaatggcctggaggacaaagagcacatcctggacgaagaaawtgaagaagaaaacgaagaaattgaatgaactgtcactcctacaaagaggaaaaaaatggggagggtgggagaagaattagagctgaaggatgggcagacg

SEQ ID NO: 108564 - DNA, 201 bp, Homo sapiens
acacacagacccacacagagactcaggagagcatggaggtcagaagcccaccttgaatcagacaggtgcactggctcagacctgcctgtttcttcctgccyacccaatccaggtacatactttttggatagacaccaagaactacgtagaagtgacccggaagtggtatgcagaggctatgccctttcccctcaacttctt

SEQ ID NO: 108565 - DNA, 201 bp, Homo sapiens
gctggatctagagggaaaggtgagggtggataacagcctcacaaacctgaatccccaacctgggataccaatggcctggaggacaaagagcacatcctggwcgaagaaaatgaagaagaaaacgaagaaattgaatgaactgtcactcctacaaagaggaaaaaaatggggagggtgggagaagaattagagctgaaggat

SEQ ID NO: 108566 - DNA, 201 bp, Homo sapiens
acttccgactctggaccctaaggagggagccagaggagatgtgagttctgagccccggagtccgggacccgcccctgcccacgcctgggcccaaccctacrggcgccgcctttccggccctggcccagcgagtcccagccccactgctcaccccctgcaggatcccagtgcggatctccggtcccttggtgtccagggcga

SEQ ID NO: 108567 - DNA, 201 bp, Homo sapiens
tgggtggcttggaagaagatacaggttcagatggagcagctggagctggggctggggctggggctggctcaggctctggataggaggtccctgagacagawactggccctggtgacagtggggctgtgcgtggggccagagccttctcagaggtacaaaagggtagggtgggagggcagccaggcacaggaggggcctgaa

SEQ ID NO: 108568 - DNA, 201 bp, Homo sapiens
gtaatgggtggcttggaagaagatacaggttcagatggagcagctggagctggggctggggctggggctggctcaggctctggataggaggtccctgagayagatactggccctggtgacagtggggctgtgcgtggggccagagccttctcagaggtacaaaagggtagggtgggagggcagccaggcacaggaggggcc

SEQ ID NO: 108569 - DNA, 201 bp, Homo sapiens
agggtaatgggtggcttggaagaagatacaggttcagatggagcagctggagctggggctggggctggggctggctcaggctctggataggaggtccctgrgacagatactggccctggtgacagtggggctgtgcgtggggccagagccttctcagaggtacaaaagggtagggtgggagggcagccaggcacaggaggg

SEQ ID NO: 108570 - DNA, 201 bp, Homo sapiens
tcccctcagggtcattagatgaagagaagaccacaggggttccagagtctctgaaggatagaggatccactaaacaaaaacaaggatgcaggtacctgccwtagctataggcactaggttagccctgcaagtaattccggcttcccgatgtggatgggtcatgtgatgactaggagcgtcacatgacacaggaagtgaggc

SEQ ID NO: 108571 - DNA, 201 bp, Homo sapiens
gaaggaggtagctctgagaccgggggctattgtatgagatgagccccaaggatgctggccaggaatgggagtgcttaggtgcggaggtggcactgttcccrcagctgcaagcctacctgtgtcgcccctacagctgtaccgagaggctcgggagtgtctgaccctgctctctcagcgcctgggctctcaaaagttcttctt

SEQ ID NO: 108572 - DNA, 201 bp, Homo sapiens
gttatctggggacaaagcttactcaggatgtggtgggggatgctgaggaacagggactggagcctgggaaggtagggcaggctgagacctgggggtatggrtggaatgtgtatgtggtaatggtgtctgggcgatggaatgaagtgaaagaaatagccaagagctgggcactgagggaacaagctggggggccctgggcgt

SEQ ID NO: 108573 - DNA, 201 bp, Homo sapiens
ccagaagcactgtgacaatgctgattgggagctctctctcttacctctctggaaggacttgaaaactccatcccctcagggtcattagatgaagagaagascacaggggttccagagtctctgaaggatagaggatccactaaacaaaaacaaggatgcaggtacctgccttagctataggcactaggttagccctgcaag

SEQ ID NO: 108574 - DNA, 201 bp, Homo sapiens
tcccggtgctggtgagtgtgcccagacctcccagcatccatggccagccggggaggggacgggcacacacagacccacacagagactcaggagagcatggrggtcagaagcccaccttgaatcagacaggtgcactggctcagacctgcctgtttcttcctgcccacccaatccaggtacatactttttggatagacacca

SEQ ID NO: 108575 - DNA, 201 bp, Homo sapiens
ccaggattccagaagcactgtgacaatgctgattgggagctctctctcttacctctctggaaggacttgaaaactccatcccctcagggtcattagatgargagaagaccacaggggttccagagtctctgaaggatagaggatccactaaacaaaaacaaggatgcaggtacctgccttagctataggcactaggttagc

SEQ ID NO: 108576 - DNA, 201 bp, Homo sapiens
gaagttgatcccggtgctggtgagtgtgcccagacctcccagcatccatggccagccggggaggggacgggcacacacagacccacacagagactcaggaragcatggaggtcagaagcccaccttgaatcagacaggtgcactggctcagacctgcctgtttcttcctgcccacccaatccaggtacatactttttggat

SEQ ID NO: 108577 - DNA, 201 bp, Homo sapiens
aaagtctaccaccagcttactggaaggctaccaaaggactatgaggcagaagggaggctctgtgctacctccccactgccttgactcactcacctgatgcycacgacactgcctgaagtagaagcaatcctgtgaggctgccagccatgatgcttaccctactcaaaggcttgggacattcctgaggacagaatgaggaat

SEQ ID NO: 108578 - DNA, 201 bp, Homo sapiens
ttccagtgccaggattccagaagcactgtgacaatgctgattgggagctctctctcttacctctctggaaggacttgaaaactccatcccctcagggtcaytagatgaagagaagaccacaggggttccagagtctctgaaggatagaggatccactaaacaaaaacaaggatgcaggtacctgccttagctataggcact

SEQ ID NO: 108579 - DNA, 201 bp, Homo sapiens
accaatgaggtgtatctgttcagatcacattccctaccataccctgtgacaaggtcctgccttagtgaggacaaagagtaatgctagaaaactgttctcaracacttgttgagtcactgagaggaccaagggaccagagaagtgaggtaacaagcacatctgccatgtcaccaaaacctctgaaaaggcatctgcagaacc

SEQ ID NO: 108580 - DNA, 201 bp, Homo sapiens
ctggaggagaagttgatcccggtgctggtgagtgtgcccagacctcccagcatccatggccagccggggaggggacgggcacacacagacccacacagagrctcaggagagcatggaggtcagaagcccaccttgaatcagacaggtgcactggctcagacctgcctgtttcttcctgcccacccaatccaggtacatact

SEQ ID NO: 108581 - DNA, 201 bp, Homo sapiens
ctgcctcaaaaaaattttaaaaaaagaaaagaaaaatgaaaagtttcaatggctctatgtcatcttgtccccttcctcctcaccttcttcagagaagtacratttaagtagcaaattttgggcagggggtgacagggcaaggatgttgagagcagcagcatctgtcatggcccctccaaatcccttcactttctggaactt

SEQ ID NO: 108582 - DNA, 201 bp, Homo sapiens
tcattcattaaattccagtgccaggattccagaagcactgtgacaatgctgattgggagctctctctcttacctctctggaaggacttgaaaactccatcmcctcagggtcattagatgaagagaagaccacaggggttccagagtctctgaaggatagaggatccactaaacaaaaacaaggatgcaggtacctgcctta

SEQ ID NO: 108583 - DNA, 201 bp, Homo sapiens
tatatctctacagaagccattctaggctggggtcaaacgacagagcaatctaacttccctgaaaacaaggggagtggattaaggaatgtcatgggcccccyccctttcctaccctgatgttctactactctaagatgatgaacaaaagatgaatggatgagaaggtctaggactcccctgtctgcctaaaccaggtctaga

SEQ ID NO: 108584 - DNA, 201 bp, Homo sapiens
atgaagtgaaagaaatagccaagagctgggcactgagggaacaagctggggggccctgggcgtgggttccctggatccagggagtgtgaggatggctttcyctggttcctgaggcatggaccgagtcctagcctgcatctgagctccgttgtgctagctttgtggtgtctgggtcgggaaagttactgttagaaagttgct

SEQ ID NO: 108585 - DNA, 201 bp, Homo sapiens
gttgtgcaactggaaatcatcaggggtgtctgcataggtgtaggtgcggatggagaagtcacagctggccatgggtacccggatgatgttatatccgattyctacagaaaaggatgatcaagatatggtagtccgagtcaataggagagtatgggactctgcttatcacttgccagtcctaatagtgtctgagtcagggcc

SEQ ID NO: 108586 - DNA, 201 bp, Homo sapiens
agcccctctccacccctcaactactctcctgggcagggcttagctgcctttgggtgcccatggcccggtctcccacattcattaggacaaggcccacagamacctgggtgcagctctccctgcaacccttctgatgacaactctctgcccaccccaaatcaggatgctccccaccactcttcccacccatttcaacttcga

SEQ ID NO: 108587 - DNA, 201 bp, Homo sapiens
gtggtgggggatgctgaggaacagggactggagcctgggaaggtagggcaggctgagacctgggggtatggatggaatgtgtatgtggtaatggtgtctgrgcgatggaatgaagtgaaagaaatagccaagagctgggcactgagggaacaagctggggggccctgggcgtgggttccctggatccagggagtgtgagga

SEQ ID NO: 108588 - DNA, 201 bp, Homo sapiens
cccagcactttgggaagccgaggcaggtggatcacttgagttcaggagttcgagaacagcctggcgaaaccccgtctctactaaaaatagaaaaatcagcygggcctggtggcaggcgcctataatcccagctacttggaaggctgaggcaggagaattgcttgaactcaggaggcagaggttacagtgagtgaagatggc

SEQ ID NO: 108589 - DNA, 201 bp, Homo sapiens
gggaggctgaagttgtgcaactggaaatcatcaggggtgtctgcataggtgtaggtgcggatggagaagtcacagctggccatgggtacccggatgatgtyatatccgattcctacagaaaaggatgatcaagatatggtagtccgagtcaataggagagtatgggactctgcttatcacttgccagtcctaatagtgtct

SEQ ID NO: 108590 - DNA, 201 bp, Homo sapiens
ttcctgaggacagaatgaggaatgactgaaaagcaagcccctctccacccctcaactactctcctgggcagggcttagctgcctttgggtgcccatggccyggtctcccacattcattaggacaaggcccacagaaacctgggtgcagctctccctgcaacccttctgatgacaactctctgcccaccccaaatcaggatg

SEQ ID NO: 108591 - DNA, 201 bp, Homo sapiens
tgagaggcctggaaagaggatccagataaaagcctaagttcctggcaaggccagggccactgccctgattgcttaggtgtgaacagagctttttgtttccraagtattctaaattatttcctaacacaggggcattcagagaaagagattcttacccccattccacaggggagaaactgaggcttagggagatttaaggat

SEQ ID NO: 108592 - DNA, 201 bp, Homo sapiens
ttcctctgggaggctgaagttgtgcaactggaaatcatcaggggtgtctgcataggtgtaggtgcggatggagaagtcacagctggccatgggtacccggrtgatgttatatccgattcctacagaaaaggatgatcaagatatggtagtccgagtcaataggagagtatgggactctgcttatcacttgccagtcctaat

SEQ ID NO: 108593 - DNA, 201 bp, Homo sapiens
agccatgatgcttaccctactcaaaggcttgggacattcctgaggacagaatgaggaatgactgaaaagcaagcccctctccacccctcaactactctccygggcagggcttagctgcctttgggtgcccatggcccggtctcccacattcattaggacaaggcccacagaaacctgggtgcagctctccctgcaaccctt

SEQ ID NO: 108594 - DNA, 201 bp, Homo sapiens
ccagcataatacttttagaagtaggggagcaaaaggattaagaaatgattatagaacagcgtgcacatctgtaagcatctgaagactacactcaagtgccrgatatatagttattctgaaaacatgtaacatgtagcaaatgggtttttctgaaaaaatgtaacatgtagcaaatgggtttttctgaaaaaatgtaacatg

SEQ ID NO: 108595 - DNA, 201 bp, Homo sapiens
atcttcctctgggaggctgaagttgtgcaactggaaatcatcaggggtgtctgcataggtgtaggtgcggatggagaagtcacagctggccatgggtaccyggatgatgttatatccgattcctacagaaaaggatgatcaagatatggtagtccgagtcaataggagagtatgggactctgcttatcacttgccagtcct

SEQ ID NO: 108596 - DNA, 201 bp, Homo sapiens
aagtagaagcaatcctgtgaggctgccagccatgatgcttaccctactcaaaggcttgggacattcctgaggacagaatgaggaatgactgaaaagcaagyccctctccacccctcaactactctcctgggcagggcttagctgcctttgggtgcccatggcccggtctcccacattcattaggacaaggcccacagaaac

SEQ ID NO: 108597 - DNA, 201 bp, Homo sapiens
gagccaccgcacccagccgagcccaggcccttaagacctgtttttgctcctcccaaactctcagatgctcttccccactctattacttactagctgtgccycccagggcagcatgctgcagctctcgctcccttcggtccaactcctctgccttccggttgagctcctcctgtttcttcagcagctcagctgtggctgctg

SEQ ID NO: 108598 - DNA, 201 bp, Homo sapiens
cgtcgcccactgcgtgtactctcatagcggctgaaggtaccaagggcaggaaaggtcggggggtcaaaggagtcacagtatgtggcattgcagacacacascaccgagctgtagccgaagcttttagggatgcaggggcgggcacctgggagggagggagtacaagcagagtgaggtctgatgaagacatggagaatggac

SEQ ID NO: 108599 - DNA, 201 bp, Homo sapiens
aggtccaggccttaccacctttgcccagtggggcagcagcaagcgttggtcatccagcatgagtaggcggacattgtggtgagtactgttggcgagggtavgacctaggtcacgggcaatgaagtctcgctgatgttcaggggtgaagcccaggcactggaaggggtatccactcaacagcccagcagaaggctcattttc

SEQ ID NO: 108600 - DNA, 201 bp, Homo sapiens
cagaacttggagcccacacaggcctctgaggcaaagagcatggtgttggggaacaggcggtgtgtctcccctagggtggctttggctggagccagaaagtscaggtaccaatgtacagcaatgccatgaacatatttagctgcttctgggtctgtcagtacctgcaaaggaagagcaactgatcctggaccttgcacacag

SEQ ID NO: 108601 - DNA, 201 bp, Homo sapiens
aggtggcagcagtgtggcctgatggggggactaggtcacagtgaactccccacacgcctgtcaggttcagcagtcatggccataggattgggagcactackgaggagccatcagttagtgatgtctctccaagtcccagagaccttagggacgggagctaagtcagctccctcaagtagcagggccagggcatcccagtca

SEQ ID NO: 108602 - DNA, 201 bp, Homo sapiens
ggtaggagtggcagggaaggtctaggtagctcaccactttcaatgccaaattgcacccggcgatctacatcatctgcccagatggcttctggaggttcackgtaaagcaaggggaagactcctcggcataagtggacctggcgggcagcctgggcagagcgggtgacagcaatgactgctgcccgaggtcggtaccgagac

SEQ ID NO: 108603 - DNA, 201 bp, Homo sapiens
gacgcgggggcaccggctcatcgcatctccctagggaagaggggcaccgagaagggccggtccaggagtgaggagggggcggcggcctggagcccagggasgggtggggagggtaaaagcgggaaggatggaaataagtctagagaagaggggaggggtcggcgtggggtgactctagaggcgcggtcggtgtgccctcag

SEQ ID NO: 108604 - DNA, 201 bp, Homo sapiens
accctggccttcatgtctctcctggaggagaagttgatcccggtgctggtgagtgtgcccagacctcccagcatccatggccagccggggaggggacgggmacacacagacccacacagagactcaggagagcatggaggtcagaagcccaccttgaatcagacaggtgcactggctcagacctgcctgtttcttcctgcc

SEQ ID NO: 108605 - DNA, 201 bp, Homo sapiens
caatagtctggtggcagagacacacacaatgtcactgtgatgtattaaagcagtcagcaagagatgcagctcagggcactgtggggatatccagaggcacrgtaccttctgcctgtcagtcagggagggagaggagcacaggctgaaggagactggaagacagcagttggcctctgatagtgggactggagagagatttct

SEQ ID NO: 108606 - DNA, 201 bp, Homo sapiens
acgggcactggacgggcaccgtgcccggggcgacgatgaggacgcgggggcaccggctcatcgcatctccctagggaagaggggcaccgagaagggccggyccaggagtgaggagggggcggcggcctggagcccagggaggggtggggagggtaaaagcgggaaggatggaaataagtctagagaagaggggaggggtcg

SEQ ID NO: 108607 - DNA, 201 bp, Homo sapiens
cccgacctcaggtgatccacccacctcagcttcccacagtgctgggattacaggtgcaagccaccgtgcccggcctgaagtactattattatacatgtttwacaagtgacagctgaagcttggggaggacagataagtggaccaagctgagagctgtggaactggtttcaaaaaataaatccttttgggaggccgaggcgg

SEQ ID NO: 108608 - DNA, 201 bp, Homo sapiens
gaggccagtcctgatcccacatccttgctgatcccttacttcacaaagtatctggcccaggtctggtggtagatgtctccgggctgtcccttgagtgaccmcttcccattcaccgctccattggtcttgagccaagtgggtgatgtccaggggctggcaaggagtgaaacgggacgctgggccaactgcagggctcggtga

SEQ ID NO: 108609 - DNA, 201 bp, Homo sapiens
ggacctaggtcacgggcaatgaagtctcgctgatgttcaggggtgaagcccaggcactggaaggggtatccactcaacagcccagcagaaggctcattttmagctgtcactgcccagaactgtaacttgtgctcagcataggcatccaggaacctggcaagagaaaggtcatgaatgatccggccaagaaagtggaccaga

SEQ ID NO: 108610 - DNA, 201 bp, Homo sapiens
gggcttttagagctaggaggcctcatggactgaggagagctgagttctatcccatgcctgcactgctatggggcagctgctagccgagagcaggttggctmattcttcggtccctatctgtctttccacttgtgcactaggtctcctccttctcacctgctcaaggacataaattaagccattctgtggtcctctgtgaca

SEQ ID NO: 108611 - DNA, 201 bp, Homo sapiens
acagatcagcatggctaaatgggaggccagtcctgatcccacatccttgctgatcccttacttcacaaagtatctggcccaggtctggtggtagatgtctycgggctgtcccttgagtgaccccttcccattcaccgctccattggtcttgagccaagtgggtgatgtccaggggctggcaaggagtgaaacgggacgctg

SEQ ID NO: 108612 - DNA, 201 bp, Homo sapiens
ttctaggggcctccagcccctggcaccacctagaggggaaagtgagtcacccaaaccattgcccctgggcttacgtcgctgtaagctcacactggccctgytgtgccctctttagtcacagacagcgtgtgagctgactctgtccctttaatgcccaggctgagcccagtgcctccttgagtatctgctccatcactggcg

SEQ ID NO: 108613 - DNA, 201 bp, Homo sapiens
actctgctcccagaacttggagcccacacaggcctctgaggcaaagagcatggtgttggggaacaggcggtgtgtctcccctagggtggctttggctggakccagaaagtccaggtaccaatgtacagcaatgccatgaacatatttagctgcttctgggtctgtcagtacctgcaaaggaagagcaactgatcctggacc

SEQ ID NO: 108614 - DNA, 201 bp, Homo sapiens
aacagagcccaagcctcacctcttcacgccttcgtggttctcaattttgctgatgatcttgatgccgtgtccttccggacccagagcagccctgacggcarccacgtcgctggctttccgcacaaaggaggcaaagacgatgtccaccccatgctccaccccgaagcgcaggtctcggacgtcctgctcggacagcccggg

SEQ ID NO: 108615 - DNA, 201 bp, Homo sapiens
cccaagcctcacctcttcacgccttcgtggttctcaattttgctgatgatcttgatgccgtgtccttccggacccagagcagccctgacggcagccacgtygctggctttccgcacaaaggaggcaaagacgatgtccaccccatgctccaccccgaagcgcaggtctcggacgtcctgctcggacagcccgggcaagtcc

SEQ ID NO: 108616 - DNA, 201 bp, Homo sapiens
ttcacgccttcgtggttctcaattttgctgatgatcttgatgccgtgtccttccggacccagagcagccctgacggcagccacgtcgctggctttccgcamaaaggaggcaaagacgatgtccaccccatgctccaccccgaagcgcaggtctcggacgtcctgctcggacagcccgggcaagtccacctgggcccctggc

SEQ ID NO: 108617 - DNA, 201 bp, Homo sapiens
agaggtcacctcagtaccacacaagatcatcacccaccttcaaaaagaggtgggtgatttggatagagggggctgccagtgagagaagttcagtcaattcygtacaatacacatttattgagcactagatatatgccatgctagatgcaggtgacccagagcatcaaggagcaatagtctggtggcagagacacacacaat

SEQ ID NO: 108618 - DNA, 201 bp, Homo sapiens
acgccttcgtggttctcaattttgctgatgatcttgatgccgtgtccttccggacccagagcagccctgacggcagccacgtcgctggctttccgcacaamggaggcaaagacgatgtccaccccatgctccaccccgaagcgcaggtctcggacgtcctgctcggacagcccgggcaagtccacctgggcccctggcaag

SEQ ID NO: 108619 - DNA, 201 bp, Homo sapiens
ctgggaggcagagcttgcagtgagccgagatcgtgcaactgcactccagcccgggcaacagagcaagactccgtctcaaaaaaatatataaaaaataaaakaaaagaaaaaaaacaaaaacaaagaaggcttacgtgagacccttggggccctctactgttaaccagttcaggagaggtgtaaaagtttgtaaaggataac

SEQ ID NO: 108620 - DNA, 201 bp, Homo sapiens
attttgctgatgatcttgatgccgtgtccttccggacccagagcagccctgacggcagccacgtcgctggctttccgcacaaaggaggcaaagacgatgtycaccccatgctccaccccgaagcgcaggtctcggacgtcctgctcggacagcccgggcaagtccacctgggcccctggcaagttcacgcccttccggctg

SEQ ID NO: 108621 - DNA, 201 bp, Homo sapiens
atcgcttgaacccaagaggcggaggttgcaatgagccaagattgcactgttacactccaacctgggtgacagagcaagactccatttaaaaaaaaaaaaaattgatggccgggtgcagtggctcatgcctgtaatcccagcactttgggaggccgacgcaggcagatcacgaggtcagcagatcgagaccatcctggctaa

SEQ ID NO: 108622 - DNA, 201 bp, Homo sapiens
ggaagtggaactaggttgagggttgggacacagatcagcatggctaaatgggaggccagtcctgatcccacatccttgctgatcccttacttcacaaagtrtctggcccaggtctggtggtagatgtctccgggctgtcccttgagtgaccccttcccattcaccgctccattggtcttgagccaagtgggtgatgtccag

SEQ ID NO: 108623 - DNA, 201 bp, Homo sapiens
atgccgtgtccttccggacccagagcagccctgacggcagccacgtcgctggctttccgcacaaaggaggcaaagacgatgtccaccccatgctccacccbgaagcgcaggtctcggacgtcctgctcggacagcccgggcaagtccacctgggcccctggcaagttcacgcccttccggctgcccaggacgccgccgttc

SEQ ID NO: 108624 - DNA, 201 bp, Homo sapiens
catctcttcctgaggctgggttgttacgatggtgaattattcaagatgtcttgcagcctgacgccatctctgggcagtgctcctgcatcctccctgtcttycttgggagggcaccacgttgctcttacaagcacagggtcctgaaactgtttacaaggccccactctgccacgttagtatcttaacgagtgtttgttgagg

SEQ ID NO: 108625 - DNA, 201 bp, Homo sapiens
tgaggggtgtaatggttacctgtgcccgtgtgattagcctggatgggccccatactcagctccatccgtcgcccactgcgtgtactctcatagcggctgamggtaccaagggcaggaaaggtcggggggtcaaaggagtcacagtatgtggcattgcagacacacaccaccgagctgtagccgaagcttttagggatgcag

SEQ ID NO: 108626 - DNA, 201 bp, Homo sapiens
gagaaatcgctctaagtttgggagccagtcatttggatgctggatttgaaggtcactggagcaccatggaggtccaggccttaccacctttgcccagtggrgcagcagcaagcgttggtcatccagcatgagtaggcggacattgtggtgagtactgttggcgagggtaggacctaggtcacgggcaatgaagtctcgctg

SEQ ID NO: 108627 - DNA, 201 bp, Homo sapiens
ggacccagagcagccctgacggcagccacgtcgctggctttccgcacaaaggaggcaaagacgatgtccaccccatgctccaccccgaagcgcaggtctcrgacgtcctgctcggacagcccgggcaagtccacctgggcccctggcaagttcacgcccttccggctgcccaggacgccgccgttctccacttgggtcacc

SEQ ID NO: 108628 - DNA, 201 bp, Homo sapiens
cctaccgtcggcgaagagaaacagcagccccaaccgaaggcaaaaggaaatcccaccgcagcctccaaaggcgcgtgggcgggactggagaatggggcccygcgcactaggcgcggaagtcaagaagcagccccaccacccgtgccgcgagaaaagcagccctggggaggcggggcggggcctcacttggaaaagagacgg

SEQ ID NO: 108629 - DNA, 201 bp, Homo sapiens
ggcccagggggtgaggggtgtaatggttacctgtgcccgtgtgattagcctggatgggccccatactcagctccatccgtcgcccactgcgtgtactctcrtagcggctgaaggtaccaagggcaggaaaggtcggggggtcaaaggagtcacagtatgtggcattgcagacacacaccaccgagctgtagccgaagcttt

SEQ ID NO: 108630 - DNA, 201 bp, Homo sapiens
ttggtgatgtctacaatgatgggactgtcgacaaagttacgcacccaattgggtcctccttcggggttcagggcaaggttccagtcggtccagccgaccamatggtacaggaggttctagggtaaggacaaaggcaaagagacaaaggctcaacactgggggtccccagagagtgtaggtaagggtcacatgtgggagagg

SEQ ID NO: 108631 - DNA, 201 bp, Homo sapiens
ctcctggaggagaagttgatcccggtgctggtgagtgtgcccagacctcccagcatccatggccagccggggaggggacgggcacacacagacccacacasagactcaggagagcatggaggtcagaagcccaccttgaatcagacaggtgcactggctcagacctgcctgtttcttcctgcccacccaatccaggtacat

SEQ ID NO: 108632 - DNA, 201 bp, Homo sapiens
aatggccgcttccaggacacaatgccaaccaccccggagaacgccagctggggacagagtgggcacaggctcagcctggcaggggaggctcctgagtgagmccctcaccacaggatgcacccagccctgtaaggaggcagaggaccaggagagggaggagaggcaagcatgtggacttgcagctggtgtggagggtggggc

SEQ ID NO: 108633 - DNA, 201 bp, Homo sapiens
tggcccagggggtgaggggtgtaatggttacctgtgcccgtgtgattagcctggatgggccccatactcagctccatccgtcgcccactgcgtgtactctyatagcggctgaaggtaccaagggcaggaaaggtcggggggtcaaaggagtcacagtatgtggcattgcagacacacaccaccgagctgtagccgaagctt

SEQ ID NO: 108634 - DNA, 201 bp, Homo sapiens
ggagcagggaggagaagctgagagtgtgatcctgccaaggcccccaacgctgtcttcagcccacttcccagacctcaccattgccctcaccggtttaggaygaccacaacaggagagccatcgggatgcatcagtgccactgcgtccgggtcgttcttctgactggcaaccagccccactctctgggagccctcaggaatg

SEQ ID NO: 108635 - DNA, 201 bp, Homo sapiens
gaaaacagggtgcagactcagggctgggaccctcatgagtactcctctgccacggacagagtccccctccttcacagacacttcgtgcccacccggctggmaccaactggggagccagttcccttcttgaggacataaatgggcttccccttgcgtgctgggcacctgcctcccagtgggcactggaccctggcacctacc

SEQ ID NO: 108636 - DNA, 201 bp, Homo sapiens
cagcctggcccagggggtgaggggtgtaatggttacctgtgcccgtgtgattagcctggatgggccccatactcagctccatccgtcgcccactgcgtgtrctctcatagcggctgaaggtaccaagggcaggaaaggtcggggggtcaaaggagtcacagtatgtggcattgcagacacacaccaccgagctgtagccga

SEQ ID NO: 108637 - DNA, 201 bp, Homo sapiens
ggagctagggagcagggaggagaagctgagagtgtgatcctgccaaggcccccaacgctgtcttcagcccacttcccagacctcaccattgccctcaccgstttaggacgaccacaacaggagagccatcgggatgcatcagtgccactgcgtccgggtcgttcttctgactggcaaccagccccactctctgggagccct

SEQ ID NO: 108638 - DNA, 201 bp, Homo sapiens
ccaggatagtctcgatctcctgatctcaggtgatctgccctcctcagcctcccaaagtgctgggattataggcacgagccactgcgcccggcccgattttwgtatttttaatagagacagggtttcgccatgttggccaggtgggtcttgaactcctggcctcaggtgatccgcctgcctgggcctctcaaagtgctggga

SEQ ID NO: 108639 - DNA, 201 bp, Homo sapiens
cccagcctggcccagggggtgaggggtgtaatggttacctgtgcccgtgtgattagcctggatgggccccatactcagctccatccgtcgcccactgcgtvtactctcatagcggctgaaggtaccaagggcaggaaaggtcggggggtcaaaggagtcacagtatgtggcattgcagacacacaccaccgagctgtagcc

SEQ ID NO: 108640 - DNA, 201 bp, Homo sapiens
gggtgaaaccctgtctctactaaaaaatacaaaaattgcccgggcacggtgactcatgcctgtaatcccagcactttgggaggccgaggcgggcagatcaygaggtcaggagattgagaccatcctggataacacggtgaaaccccatctctactaaaaatacaaaaaaatagccgggcgtggtggcaggcatctgtagtc

SEQ ID NO: 108641 - DNA, 201 bp, Homo sapiens
gacccagcctggcccagggggtgaggggtgtaatggttacctgtgcccgtgtgattagcctggatgggccccatactcagctccatccgtcgcccactgcktgtactctcatagcggctgaaggtaccaagggcaggaaaggtcggggggtcaaaggagtcacagtatgtggcattgcagacacacaccaccgagctgtag

SEQ ID NO: 108642 - DNA, 201 bp, Homo sapiens
ccagaggagctttcacagctcccacgctccatccccaatcaaagggccagcatctctgtccatattagccagcaactagatggtacaatccaccacaacarggactgcagtggtgttgttcagcacctggcgcacagtgctgagcgttccccagtactatctcctttcttatttttttgagatggagtctcactgtgttgc

SEQ ID NO: 108643 - DNA, 201 bp, Homo sapiens
tacctctaggaggacccagcctggcccagggggtgaggggtgtaatggttacctgtgcccgtgtgattagcctggatgggccccatactcagctccatccrtcgcccactgcgtgtactctcatagcggctgaaggtaccaagggcaggaaaggtcggggggtcaaaggagtcacagtatgtggcattgcagacacacacc

SEQ ID NO: 108644 - DNA, 201 bp, Homo sapiens
ctggggagaagagagaaagggagacagggagtgagtggaagtgttctgtggacacgcccaccctcctgtgggaactcaagcccagaggagctttcacagcycccacgctccatccccaatcaaagggccagcatctctgtccatattagccagcaactagatggtacaatccaccacaacaaggactgcagtggtgttgtt

SEQ ID NO: 108645 - DNA, 201 bp, Homo sapiens
cttcttcagagaagtacgatttaagtagcaaattttgggcagggggtgacagggcaaggatgttgagagcagcagcatctgtcatggcccctccaaatccsttcactttctggaacttctgttctggctgcagggtcagtagcaggcctgaggacatccacagggaataagggtatcagtacccagcgggaaactccatgg

SEQ ID NO: 108646 - DNA, 201 bp, Homo sapiens
ctctatgtcatcttgtccccttcctcctcaccttcttcagagaagtacgatttaagtagcaaattttgggcagggggtgacagggcaaggatgttgagagyagcagcatctgtcatggcccctccaaatcccttcactttctggaacttctgttctggctgcagggtcagtagcaggcctgaggacatccacagggaataa

SEQ ID NO: 108647 - DNA, 201 bp, Homo sapiens
cgtagcagttagcagatgataggcggcgaaatcttatttcacagggcattaaaacaggaaccaaatgtcagggatgggcagaagtcagggtccaaagaaakggcaaagaaaagtgtcagtggctcacgcatgtaatcccagcactttgggaggccgatgtgggcagatcacgaggtcaggagttcgcaatcatcctggcca

SEQ ID NO: 108648 - DNA, 201 bp, Homo sapiens
gcggatctccggtcccttggtgtccagggcgatggccacgggccggtagctgagtggggaacctgcaaagctctccaccgcctcccggacgttggcgatgkactcagcatggtactgggggagggagcggagcgagggtttcaggggaaggtggccaggacctcgaggcatcctcctgccccacccactgcccggcggccc

SEQ ID NO: 108649 - DNA, 201 bp, Homo sapiens
catccgtcgcccactgcgtgtactctcatagcggctgaaggtaccaagggcaggaaaggtcggggggtcaaaggagtcacagtatgtggcattgcagacasacaccaccgagctgtagccgaagcttttagggatgcaggggcgggcacctgggagggagggagtacaagcagagtgaggtctgatgaagacatggagaat

SEQ ID NO: 108650 - DNA, 201 bp, Homo sapiens
ggtgaaactagtaagaggtctgaggtctgctttgcaggaagggagactggggtggcttaccgtgatgatgctgtggctgtactgcatccctcgatcccagragcctagccgcacactctgctcccagaacttggagcccacacaggcctctgaggcaaagagcatggtgttggggaacaggcggtgtgtctcccctagggt

SEQ ID NO: 108651 - DNA, 201 bp, Homo sapiens
gcatgctgcatcttcaccgcttccacagggaagttgcccttggcagtctcccctgacagcatgatgcagtcagccccatccagcacagcattggcgacatygcttgtctctgccctcgttggccggggcttggtaatcatgctctccagcatctgggggacagcgtggatgtcaaagttgtaggactcacactgtgactgg

SEQ ID NO: 108652 - DNA, 201 bp, Homo sapiens
ccctagaaccagagattcacgttcagacaacgttcccccagaacatgagaggcaaccaaacccaacccattaccattctcagaacgcctcacgccacaggsgtcctgttacctgatctttattccctgatgcaacccctgcccacagatcacagactccccttccctctcaagccaacatccatccccttggggaggcagc

SEQ ID NO: 108653 - DNA, 201 bp, Homo sapiens
gccgagatgggagaattgtttgagcccaggagctggagaccagcctaggcaacatagtgagaccccatctctgcattaagaaaaaaaaaaaagaaagaatscctgccctccctaccacacaagaaagatatgagataatacagatatatcaaatgagataataaggagaaatctctttaagaaatataaaagctggccagg

SEQ ID NO: 108654 - DNA, 201 bp, Homo sapiens; identical to SEQ ID NO: 17720

SEQ ID NO: 108655 - DNA, 201 bp, Homo sapiens; identical to SEQ ID NO: 17722

SEQ ID NO: 108656 - DNA, 201 bp, Homo sapiens
cgtccgcaccgattttctggaccactagggagatgagcccgtcgtcaatgtagatgcggccccccaccggcacgacccggacaatattggggtagtccacycacacggtgttcgcgttcccccgcgtccggaacgcggggtccacagtcaccagcacctgggagcccttcaccagctccacttccgactctggaccctaag

SEQ ID NO: 108657 - DNA, 201 bp, Homo sapiens
aggcgggcggatcacgtggtcaagacattgagaccatcctggccaacatggtgaaaccctgtctctactaaaaatacaaaaattatccaggcgtggtggcrcatgcctgtagtcccagctactcaggaggctgaggtgggagaatcacttgaacccaggaggcagagattgcagtgagccgagatcgtacccctgcactcc

SEQ ID NO: 108658 - DNA, 201 bp, Homo sapiens
ggaagggatggggtacaagggtaggctgggccagaggagggaggggcgtctcaggatatgcttagcacccgcatgatgttggtgtagccggagccaggtcvccagcctgtcaccacaatcaccaggtctccaacacggaggaagccacggagctttcctgggggagggaaagaaaacaaatcattggacaggtgtggtggc

SEQ ID NO: 108659 - DNA, 201 bp, Homo sapiens
ccgtagcagttagcagatgataggcggcgaaatcttatttcacagggcattaaaacaggaaccaaatgtcagggatgggcagaagtcagggtccaaagaawgggcaaagaaaagtgtcagtggctcacgcatgtaatcccagcactttgggaggccgatgtgggcagatcacgaggtcaggagttcgcaatcatcctggcc

SEQ ID NO: 108660 - DNA, 201 bp, Homo sapiens
ggactggagactggggccccgcgcagtaagactctgaaggcaggatgcagcccgaccacccgcagccgcgagaaaagcagccctggggagtcggggcgggrcctggattggaaaagagacggtcactcatgcagaggcgggactcagagcccttcctcaagtctcattggtcaagttgaacgaacaagtgtcgctggcgag

SEQ ID NO: 108661 - DNA, 201 bp, Homo sapiens
gtggaggctggcacctgggtgaagcgcaggcctttctgagcctgagtccgtagcagttagcagatgataggcggcgaaatcttatttcacagggcattaaracaggaaccaaatgtcagggatgggcagaagtcagggtccaaagaaagggcaaagaaaagtgtcagtggctcacgcatgtaatcccagcactttgggagg

SEQ ID NO: 108662 - DNA, 201 bp, Homo sapiens
agccaccccttccagacttctcacttttcaaggaaacattgcacaggatttgttctgggtagggcaggtaatatctagtaccttacttccctcaagttcawtcatctcacagatatttcctgagcacattctacatttgcctctcctgctctattgagtttagaagtccaaacatctccttccacttcccctctgcatagt

SEQ ID NO: 108663 - DNA, 201 bp, Homo sapiens
gaacttgggctcctgggttggaacctgtggaggctggcacctgggtgaagcgcaggcctttctgagcctgagtccgtagcagttagcagatgataggcggsgaaatcttatttcacagggcattaaaacaggaaccaaatgtcagggatgggcagaagtcagggtccaaagaaagggcaaagaaaagtgtcagtggctcac

SEQ ID NO: 108664 - DNA, 201 bp, Homo sapiens
atttttagtagagatggggtttcactatgttggccaggctggtctgaaactctggacctcaggtgatctgctgccttggtatccgaaagtgctgggattayaggcatgagccactgcgctggaccccagccatcctttttgttctttaaatgatctcagtgaagtctttctagatacactccaagcaaaattgatcatttc

SEQ ID NO: 108665 - DNA, 201 bp, Homo sapiens
tcttcctctgggaggctgaagttgtgcaactggaaatcatcaggggtgtctgcataggtgtaggtgcggatggagaagtcacagctggccatgggtacccrgatgatgttatatccgattcctacagaaaaggatgatcaagatatggtagtccgagtcaataggagagtatgggactctgcttatcacttgccagtccta

SEQ ID NO: 108666 - DNA, 201 bp, Homo sapiens
tcgagtgattctcctgcctcagcctcccaagtagctgggattacaggtgccctccaacatgctcagctaatttttttatttttagtagagatggggtttcrctatgttggccaggctggtctgaaactctggacctcaggtgatctgctgccttggtatccgaaagtgctgggattacaggcatgagccactgcgctggac

SEQ ID NO: 108667 - DNA, 201 bp, Homo sapiens
ggccctcagggcctgaaaaagctagaatgcctaccttgagcttggtatcttcctctgggaggctgaagttgtgcaactggaaatcatcaggggtgtctgcmtaggtgtaggtgcggatggagaagtcacagctggccatgggtacccggatgatgttatatccgattcctacagaaaaggatgatcaagatatggtagtcc

SEQ ID NO: 108668 - DNA, 201 bp, Homo sapiens
cttgtttgtattttttgttgttgttgttttttgagacagagtctcactctgttgcccaggctggagtgcagtggcgtgatcttggctcactgcaacctccrcctcctgggttcgagtgattctcctgcctcagcctcccaagtagctgggattacaggtgccctccaacatgctcagctaatttttttatttttagtagag

SEQ ID NO: 108669 - DNA, 201 bp, Homo sapiens
cagtgagtgaagatggcgccacagcactccagcctgggtgacagagagagagactccttctcaaaaaaaaaaaaaagaagaaaaataaaaagaaagtgggycagaccgagagaacaggaagcctgatggagtgggcaagattgacaggcccaaggctgaaaggcccagaaggtagaaaggtgagctgaggacaggcagatc

SEQ ID NO: 108670 - DNA, 201 bp, Homo sapiens
agggccctcagggcctgaaaaagctagaatgcctaccttgagcttggtatcttcctctgggaggctgaagttgtgcaactggaaatcatcaggggtgtctkcataggtgtaggtgcggatggagaagtcacagctggccatgggtacccggatgatgttatatccgattcctacagaaaaggatgatcaagatatggtagt

SEQ ID NO: 108671 - DNA, 201 bp, Homo sapiens
ctaggtagctcaccactttcaatgccaaattgcacccggcgatctacatcatctgcccagatggcttctggaggttcacggtaaagcaaggggaagactcytcggcataagtggacctggcgggcagcctgggcagagcgggtgacagcaatgactgctgcccgaggtcggtaccgagacagaagctgggctgagctggag

SEQ ID NO: 108672 - DNA, 201 bp, Homo sapiens
ccaggtctggtggtagatgtctccgggctgtcccttgagtgaccccttcccattcaccgctccattggtcttgagccaagtgggtgatgtccaggggctgkcaaggagtgaaacgggacgctgggccaactgcagggctcggtgaatcaggggtatctagagacaaaggtagtgaagagagaagcacccagagttggaaca

SEQ ID NO: 108673 - DNA, 201 bp, Homo sapiens
aggtagctcaccactttcaatgccaaattgcacccggcgatctacatcatctgcccagatggcttctggaggttcacggtaaagcaaggggaagactcctyggcataagtggacctggcgggcagcctgggcagagcgggtgacagcaatgactgctgcccgaggtcggtaccgagacagaagctgggctgagctggagga

SEQ ID NO: 108674 - DNA, 201 bp, Homo sapiens
gtatctggcccaggtctggtggtagatgtctccgggctgtcccttgagtgaccccttcccattcaccgctccattggtcttgagccaagtgggtgatgtcyaggggctggcaaggagtgaaacgggacgctgggccaactgcagggctcggtgaatcaggggtatctagagacaaaggtagtgaagagagaagcacccaga

SEQ ID NO: 108675 - DNA, 201 bp, Homo sapiens
agatatatgccatgctagatgcaggtgacccagagcatcaaggagcaatagtctggtggcagagacacacacaatgtcactgtgatgtattaaagcagtcrgcaagagatgcagctcagggcactgtggggatatccagaggcacagtaccttctgcctgtcagtcagggagggagaggagcacaggctgaaggagactgg

SEQ ID NO: 108676 - DNA, 201 bp, Homo sapiens
ttcacaaagtatctggcccaggtctggtggtagatgtctccgggctgtcccttgagtgaccccttcccattcaccgctccattggtcttgagccaagtggktgatgtccaggggctggcaaggagtgaaacgggacgctgggccaactgcagggctcggtgaatcaggggtatctagagacaaaggtagtgaagagagaag

SEQ ID NO: 108677 - DNA, 201 bp, Homo sapiens
ttcacgttcagacaacgttcccccagaacatgagaggcaaccaaacccaacccattaccattctcagaacgcctcacgccacaggcgtcctgttacctgayctttattccctgatgcaacccctgcccacagatcacagactccccttccctctcaagccaacatccatccccttggggaggcagcagtgtggaaatcgga

SEQ ID NO: 108678 - DNA, 201 bp, Homo sapiens
cacagagactcaggagagcatggaggtcagaagcccaccttgaatcagacaggtgcactggctcagacctgcctgtttcttcctgcccacccaatccaggkacatactttttggatagacaccaagaactacgtagaagtgacccggaagtggtatgcagaggctatgccctttcccctcaacttcttcctgcctggccgc

SEQ ID NO: 108679 - DNA, 201 bp, Homo sapiens
ccttacttcacaaagtatctggcccaggtctggtggtagatgtctccgggctgtcccttgagtgaccccttcccattcaccgctccattggtcttgagccragtgggtgatgtccaggggctggcaaggagtgaaacgggacgctgggccaactgcagggctcggtgaatcaggggtatctagagacaaaggtagtgaaga

SEQ ID NO: 108680 - DNA, 201 bp, Homo sapiens
gtggtagatgtctccgggctgtcccttgagtgaccccttcccattcaccgctccattggtcttgagccaagtgggtgatgtccaggggctggcaaggagtsaaacgggacgctgggccaactgcagggctcggtgaatcaggggtatctagagacaaaggtagtgaagagagaagcacccagagttggaacacatactagc

SEQ ID NO: 108681 - DNA, 201 bp, Homo sapiens
gcccacacaggcctctgaggcaaagagcatggtgttggggaacaggcggtgtgtctcccctagggtggctttggctggagccagaaagtccaggtaccaaygtacagcaatgccatgaacatatttagctgcttctgggtctgtcagtacctgcaaaggaagagcaactgatcctggaccttgcacacaggcttctggaac

SEQ ID NO: 108682 - DNA, 201 bp, Homo sapiens
gcagccacgtcgctggctttccgcacaaaggaggcaaagacgatgtccaccccatgctccaccccgaagcgcaggtctcggacgtcctgctcggacagcchgggcaagtccacctgggcccctggcaagttcacgcccttccggctgcccaggacgccgccgttctccacttgggtcaccagtccctctgggcctgcggac

SEQ ID NO: 108683 - DNA, 201 bp, Homo sapiens
gctcctcctgggcccccaaactcctctctcatctacattattttttctggccctatcccctgagagaagctcttgttctggcccctccctcacccaaaatsagctctccttaaccccacgctcaccctgtacctctagctctggccctgcccacccacaaattcctctttatggccccacctccatccagaagctccacac

SEQ ID NO: 108684 - DNA, 201 bp, Homo sapiens
aaggtggtagaacatgggctgtttgtaaaacgtgtccttggtgatgtctacaatgatgggactgtcgacaaagttacgcacccaattgggtcctccttcgrggttcagggcaaggttccagtcggtccagccgaccacatggtacaggaggttctagggtaaggacaaaggcaaagagacaaaggctcaacactgggggtc

SEQ ID NO: 108685 - DNA, 201 bp, Homo sapiens
tccaggagatcattaacttcacctgtcggggcctggtggcccacatgccgctgtttgcccatgccgaccccagcttcgtcactgcagttctcaccaagctkcgctttgaggtcttccagccgggggatctcgtggtgcgtgagggctccgtggggaggaagatgtacttcatccagcatgggctgctcagtgtgctggccc

SEQ ID NO: 108686 - DNA, 201 bp, Homo sapiens
tgctgtgaggggagatcacaccactgcactcctgtctcgccgacagaatgggcagagtgagattctgcctcaaaaaaattttaaaaaaagaaaagaaaaaygaaaagtttcaatggctctatgtcatcttgtccccttcctcctcaccttcttcagagaagtacgatttaagtagcaaattttgggcagggggtgacaggg

SEQ ID NO: 108687 - DNA, 201 bp, Homo sapiens
gtggccaaggtggtagaacatgggctgtttgtaaaacgtgtccttggtgatgtctacaatgatgggactgtcgacaaagttacgcacccaattgggtcctycttcggggttcagggcaaggttccagtcggtccagccgaccacatggtacaggaggttctagggtaaggacaaaggcaaagagacaaaggctcaacactg

SEQ ID NO: 108688 - DNA, 201 bp, Homo sapiens
ggtagctcaccactttcaatgccaaattgcacccggcgatctacatcatctgcccagatggcttctggaggttcacggtaaagcaaggggaagactcctcrgcataagtggacctggcgggcagcctgggcagagcgggtgacagcaatgactgctgcccgaggtcggtaccgagacagaagctgggctgagctggaggag

SEQ ID NO: 108689 - DNA, 201 bp, Homo sapiens
tctgcctcctccagctcagcccagcttctgtctcggtaccgacctcgggcagcagtcattgctgtcacccgctctgcccaggctgcccgccaggtccactkatgccgaggagtcttccccttgctttaccgtgaacctccagaagccatctgggcagatgatgtagatcgccgggtgcaatttggcattgaaagtggtgag

SEQ ID NO: 108690 - DNA, 201 bp, Homo sapiens
ccactttcttgctgttctgggctgaccttctctgcctcctccagctcagcccagcttctgtctcggtaccgacctcgggcagcagtcattgctgtcacccrctctgcccaggctgcccgccaggtccacttatgccgaggagtcttccccttgctttaccgtgaacctccagaagccatctgggcagatgatgtagatcgc

SEQ ID NO: 108691 - DNA, 201 bp, Homo sapiens
tgtggtcccaggttttccctgtgagagtcactaagactgagatatcagtctggcatatcacaaatacctcttccatcagcatagccacacaggcagacggscgtgctacttagcaacacactctgccctagcccacagatactcctgcacctttttttttttttgagagagagtcttgctctgtcgccaggctggagtgca

SEQ ID NO: 108692 - DNA, 201 bp, Homo sapiens
ttgctgttctgggctgaccttctctgcctcctccagctcagcccagcttctgtctcggtaccgacctcgggcagcagtcattgctgtcacccgctctgccyaggctgcccgccaggtccacttatgccgaggagtcttccccttgctttaccgtgaacctccagaagccatctgggcagatgatgtagatcgccgggtgca

SEQ ID NO: 108693 - DNA, 201 bp, Homo sapiens
gggctgaccttctctgcctcctccagctcagcccagcttctgtctcggtaccgacctcgggcagcagtcattgctgtcacccgctctgcccaggctgccckccaggtccacttatgccgaggagtcttccccttgctttaccgtgaacctccagaagccatctgggcagatgatgtagatcgccgggtgcaatttggcatt

SEQ ID NO: 108694 - DNA, 201 bp, Homo sapiens
ttcttctcctgcctgcctctgccttgattctcccaacctctcaggtttgatgaaatcctggaggtgagcgacggcatcatggtggcacggggggacctagvcatcgagatcccagcagagaaggttttcctggctcagaagatgatgattgggcgctgcaacttggcgggcaagcctgttgtctgtgccacacaggtctgg

SEQ ID NO: 108695 - DNA, 201 bp, Homo sapiens
atcacctttcttctcctgcctgcctctgccttgattctcccaacctctcaggtttgatgaaatcctggaggtgagcgacggcatcatggtggcacgggggsacctaggcatcgagatcccagcagagaaggttttcctggctcagaagatgatgattgggcgctgcaacttggcgggcaagcctgttgtctgtgccacaca

SEQ ID NO: 108696 - DNA, 201 bp, Homo sapiens
tgttttctttccctcccccaggaaagctccgtggcttcctccgtgttggagacctggtgattgtggtgacaggctggcgacctggctccggctacaccaamatcatgcgggtgctaagcatatcctgagacgcccctccctcctctggcccagcctacccttgtaccccatcccttcctccccagtctacgttctccagcc

SEQ ID NO: 108697 - DNA, 201 bp, Homo sapiens
tccccatcacctttcttctcctgcctgcctctgccttgattctcccaacctctcaggtttgatgaaatcctggaggtgagcgacggcatcatggtggcacvgggggacctaggcatcgagatcccagcagagaaggttttcctggctcagaagatgatgattgggcgctgcaacttggcgggcaagcctgttgtctgtgcc

SEQ ID NO: 108698 - DNA, 201 bp, Homo sapiens
ctattccccatcacctttcttctcctgcctgcctctgccttgattctcccaacctctcaggtttgatgaaatcctggaggtgagcgacggcatcatggtgkcacggggggacctaggcatcgagatcccagcagagaaggttttcctggctcagaagatgatgattgggcgctgcaacttggcgggcaagcctgttgtctg

SEQ ID NO: 108699 - DNA, 201 bp, Homo sapiens
tcttaaagagatttctccttattatctcatttgatatatctgtattatctcatatctttcttgtgtggtagggagggcaggcattctttcttttttttttttcttaatgcagagatggggtctcactatgttgcctaggctggtctccagctcctgggctcaaacaattctcccatctcggcctcccaaagtgctgggatt

SEQ ID NO: 108700 - DNA, 201 bp, Homo sapiens
cttaaagagatttctccttattatctcatttgatatatctgtattatctcatatctttcttgtgtggtagggagggcaggcattctttcttttttttttttcttaatgcagagatggggtctcactatgttgcctaggctggtctccagctcctgggctcaaacaattctcccatctcggcctcccaaagtgctgggatta

SEQ ID NO: 108701 - DNA, 201 bp, Homo sapiens
gcaacttccctgtggaagcggtgaagatgcagcatgcggtaggagctcagaatgaaaagcaaatgggccagggaaccaaatcccttccataccccagtgcmccttcccagactaacattctggcacctgcagattgcccgggaggcagaggccgcagtgtaccaccggcagctgtttgaggagctacgtcgggcagcgcca

SEQ ID NO: 108702 - DNA, 201 bp, Homo sapiens
tcgccctggacaccaagggaccggagatccgcactgggatcctgcagggggtgagcagtggggctgggactcgctgggccagggccggaaaggcggcgccygtagggttgggcccaggcgtgggcaggggcgggtcccggactccggggctcagaactcacatctcctctggctccctccttagggtccagagtcggaagt

SEQ ID NO: 108703 - DNA, 201 bp, Homo sapiens
gtcaggggagactgccaagggcaacttccctgtggaagcggtgaagatgcagcatgcggtaggagctcagaatgaaaagcaaatgggccagggaaccaaaycccttccataccccagtgccccttcccagactaacattctggcacctgcagattgcccgggaggcagaggccgcagtgtaccaccggcagctgtttgagg

SEQ ID NO: 108704 - DNA, 201 bp, Homo sapiens
atccccctgcagccacacagggcctattggtatttcttgaggtgcttcttcatcttttgtctcctttgagacttctccatgtttgacacagtcattcattyaacaaaaatttgttgagcatatagtagacaagattttgggccctgggagtagatcagtgaaaaaaacagacaaaaatccctacccttggggagctgacag

SEQ ID NO: 108705 - DNA, 201 bp, Homo sapiens
aatatactttgactcctattttcaggggttgtgactgtgaccctggattttgggacactctgagagtgtgggtgtcagagaagtagcttgggcagggtccycagtcacagtgtgagtcctacaactttgacatccacgctgtcccccagatgctggagagcatgattaccaagccccggccaacgagggcagagacaagcg

SEQ ID NO: 108706 - DNA, 201 bp, Homo sapiens
gccagcatctcgctccgtggagcgcctcaaggagatgatcaaggccgggatgaacattgcgcgactcaacttctcccacggctcccacgaggtgcgggackggccgccgggcagtgggtggggcaggaggatgcctcgaggtcctggccaccttcccctgaaaccctcgctccgctccctcccccagtaccatgctgagtc

SEQ ID NO: 108707 - DNA, 201 bp, Homo sapiens; identical to SEQ ID NO: 17767

SEQ ID NO: 108708 - DNA, 201 bp, Homo sapiens
ggagagcatgattaccaagccccggccaacgagggcagagacaagcgatgtcgccaatgctgtgctggatggggctgactgcatcatgctgtcaggggagrctgccaagggcaacttccctgtggaagcggtgaagatgcagcatgcggtaggagctcagaatgaaaagcaaatgggccagggaaccaaatcccttccata

SEQ ID NO: 108709 - DNA, 201 bp, Homo sapiens
gccagctgctatggcagacaccttcctggaacacctctgcctactggacattgactccgagcccgtggctgctcgcagtaccagcatcattgccaccatcrgtaagcactcccatccccctgcagccacacagggcctattggtatttcttgaggtgcttcttcatcttttgtctcctttgagacttctccatgtttgaca

SEQ ID NO: 108710 - DNA, 201 bp, Homo sapiens
cgggaggcagaggccgcagtgtaccaccggcagctgtttgaggagctacgtcgggcagcgccactaagccgtgatcccactgaggtcaccgccattggtgytgtggaggctgccttcaagtgctgtgctgctgccatcattgtgctgaccacaactggccggtgagggggatattgggaatgtccagatggagctttgggt

SEQ ID NO: 108711 - DNA, 201 bp, Homo sapiens
gcccgggaggcagaggccgcagtgtaccaccggcagctgtttgaggagctacgtcgggcagcgccactaagccgtgatcccactgaggtcaccgccattgrtgctgtggaggctgccttcaagtgctgtgctgctgccatcattgtgctgaccacaactggccggtgagggggatattgggaatgtccagatggagctttg

SEQ ID NO: 108712 - DNA, 201 bp, Homo sapiens
gtctcggtaccgacctcgggcagcagtcattgctgtcacccgctctgcccaggctgcccgccaggtccacttatgccgaggagtcttccccttgctttacmgtgaacctccagaagccatctgggcagatgatgtagatcgccgggtgcaatttggcattgaaagtggtgagctacctagaccttccctgccactcctacc

SEQ ID NO: 108713 - DNA, 201 bp, Homo sapiens
ccttgctttggaggtggggtgagagcacagtctggacccagagcagatggggtggacaggtctcaccgatgcggagcagccgatccatggccacagtctcraaggcccggcgcatcatggggaactcctcaagcacagcattgaaatggtccacgctgagtgagtaaaggcggcagtaggtgtcagcccgaacactggctg

SEQ ID NO: 108714 - DNA, 201 bp, Homo sapiens
cttagcaaagtccatcctgattggggctccaggaggtaagaaggggagacagaagccatggaacataggaggaaaatgagggtgaaaactaggagccaggstggagggcataaatgatccacatcagccactggctaggtgggttttggagaggaacgtacgttcttcagagcctcccgtgtgttaaattatggaccctgg

SEQ ID NO: 108715 - DNA, 201 bp, Homo sapiens
tgtcacagaggaccacagaatggcttaatttatgtccttgagcaggtgagaaggaggagacctagtgcacaagtggaaagacagatagggaccgaagaatkagccaacctgctctcggctagcagctgccccatagcagtgcaggcatgggatagaactcagctctcctcagtccatgaggcctcctagctctaaaagccc

SEQ ID NO: 108716 - DNA, 201 bp, Homo sapiens
actgacccaggagctgggcactgccttcttccagcagcagcagctgccagctgctatggcagacaccttcctggaacacctctgcctactggacattgacyccgagcccgtggctgctcgcagtaccagcatcattgccaccatcggtaagcactcccatccccctgcagccacacagggcctattggtatttcttgaggt

SEQ ID NO: 108717 - DNA, 201 bp, Homo sapiens
tccctgctgaccttctcctggtactgacgccgggaagagtccagggactggatgagtgccgtggcatggccgatgaacatggcgtagcatgtggcacctaygatcatgctgagcatggtgagccagacgtcgggcatgcctacaggtgcctgctgcccatagccaatgcacagcatgtggctcatggccttgaacagggca

SEQ ID NO: 108718 - DNA, 201 bp, Homo sapiens
tgtgagccaccacacctgtccaatgatttgttttctttccctcccccaggaaagctccgtggcttcctccgtgttggagacctggtgattgtggtgacagsctggcgacctggctccggctacaccaacatcatgcgggtgctaagcatatcctgagacgcccctccctcctctggcccagcctacccttgtaccccatcc

SEQ ID NO: 108719 - DNA, 201 bp, Homo sapiens
cccgggctgtccgagcaggacgtccgagacctgcgcttcggggtggagcatggggtggacatcgtctttgcctcctttgtgcggaaagccagcgacgtggytgccgtcagggctgctctgggtccggaaggacacggcatcaagatcatcagcaaaattgagaaccacgaaggcgtgaagaggtgaggcttgggctctgtt

SEQ ID NO: 108720 - DNA, 201 bp, Homo sapiens
ggacttgcccgggctgtccgagcaggacgtccgagacctgcgcttcggggtggagcatggggtggacatcgtctttgcctcctttgtgcggaaagccagcracgtggctgccgtcagggctgctctgggtccggaaggacacggcatcaagatcatcagcaaaattgagaaccacgaaggcgtgaagaggtgaggcttggg

SEQ ID NO: 108721 - DNA, 201 bp, Homo sapiens; identical to SEQ ID NO: 17785

SEQ ID NO: 108722 - DNA, 201 bp, Homo sapiens; identical to SEQ ID NO: 17787

SEQ ID NO: 108723 - DNA, 201 bp, Homo sapiens
ctccgctccctcccccagtaccatgctgagtccatcgccaacgtccgggaggcggtggagagctttgcaggttccccactcagctaccggcccgtggccaycgccctggacaccaagggaccggagatccgcactgggatcctgcagggggtgagcagtggggctgggactcgctgggccagggccggaaaggcggcgcct

SEQ ID NO: 108724 - DNA, 201 bp, Homo sapiens; identical to SEQ ID NO: 17789

SEQ ID NO: 108725 - DNA, 201 bp, Homo sapiens
tccctcccccagtaccatgctgagtccatcgccaacgtccgggaggcggtggagagctttgcaggttccccactcagctaccggcccgtggccatcgcccyggacaccaagggaccggagatccgcactgggatcctgcagggggtgagcagtggggctgggactcgctgggccagggccggaaaggcggcgcctgtaggg

SEQ ID NO: 108726 - DNA, 201 bp, Homo sapiens; identical to SEQ ID NO: 17791

SEQ ID NO: 108727 - DNA, 201 bp, Homo sapiens; identical to SEQ ID NO: 17793

SEQ ID NO: 108728 - DNA, 201 bp, Homo sapiens
ggaggcagaggccgcagtgtaccaccggcagctgtttgaggagctacgtcgggcagcgccactaagccgtgatcccactgaggtcaccgccattggtgctrtggaggctgccttcaagtgctgtgctgctgccatcattgtgctgaccacaactggccggtgagggggatattgggaatgtccagatggagctttgggtca

SEQ ID NO: 108729 - DNA, 201 bp, Homo sapiens
gagagcatgattaccaagccccggccaacgagggcagagacaagcgatgtcgccaatgctgtgctggatggggctgactgcatcatgctgtcaggggagaytgccaagggcaacttccctgtggaagcggtgaagatgcagcatgcggtaggagctcagaatgaaaagcaaatgggccagggaaccaaatcccttccatac

SEQ ID NO: 108730 - DNA, 201 bp, Homo sapiens
gagtcctacaactttgacatccacgctgtcccccagatgctggagagcatgattaccaagccccggccaacgagggcagagacaagcgatgtcgccaatghtgtgctggatggggctgactgcatcatgctgtcaggggagactgccaagggcaacttccctgtggaagcggtgaagatgcagcatgcggtaggagctcag

SEQ ID NO: 108731 - DNA, 201 bp, Homo sapiens
gtgagtcctacaactttgacatccacgctgtcccccagatgctggagagcatgattaccaagccccggccaacgagggcagagacaagcgatgtcgccaawgctgtgctggatggggctgactgcatcatgctgtcaggggagactgccaagggcaacttccctgtggaagcggtgaagatgcagcatgcggtaggagctc

SEQ ID NO: 108732 - DNA, 201 bp, Homo sapiens
tgtgagtcctacaactttgacatccacgctgtcccccagatgctggagagcatgattaccaagccccggccaacgagggcagagacaagcgatgtcgccartgctgtgctggatggggctgactgcatcatgctgtcaggggagactgccaagggcaacttccctgtggaagcggtgaagatgcagcatgcggtaggagct

SEQ ID NO: 108733 - DNA, 201 bp, Homo sapiens
acagtgtgagtcctacaactttgacatccacgctgtcccccagatgctggagagcatgattaccaagccccggccaacgagggcagagacaagcgatgtcrccaatgctgtgctggatggggctgactgcatcatgctgtcaggggagactgccaagggcaacttccctgtggaagcggtgaagatgcagcatgcggtagg

SEQ ID NO: 108734 - DNA, 201 bp, Homo sapiens
cagggtccccagtcacagtgtgagtcctacaactttgacatccacgctgtcccccagatgctggagagcatgattaccaagccccggccaacgagggcagrgacaagcgatgtcgccaatgctgtgctggatggggctgactgcatcatgctgtcaggggagactgccaagggcaacttccctgtggaagcggtgaagatg

SEQ ID NO: 108735 - DNA, 201 bp, Homo sapiens
gggccgccgggcagtgggtggggcaggaggatgcctcgaggtcctggccaccttcccctgaaaccctcgctccgctccctcccccagtaccatgctgagtmcatcgccaacgtccgggaggcggtggagagctttgcaggttccccactcagctaccggcccgtggccatcgccctggacaccaagggaccggagatccgc

SEQ ID NO: 108736 - DNA, 201 bp, Homo sapiens
gaccttctctgcctcctccagctcagcccagcttctgtctcggtaccgacctcgggcagcagtcattgctgtcacccgctctgcccaggctgcccgccagrtccacttatgccgaggagtcttccccttgctttaccgtgaacctccagaagccatctgggcagatgatgtagatcgccgggtgcaatttggcattgaaag

SEQ ID NO: 108737 - DNA, 201 bp, Homo sapiens
ccagtcacagtgtgagtcctacaactttgacatccacgctgtcccccagatgctggagagcatgattaccaagccccggccaacgagggcagagacaagcratgtcgccaatgctgtgctggatggggctgactgcatcatgctgtcaggggagactgccaagggcaacttccctgtggaagcggtgaagatgcagcatgc

SEQ ID NO: 108738 - DNA, 201 bp, Homo sapiens
tttccctcccccaggaaagctccgtggcttcctccgtgttggagacctggtgattgtggtgacaggctggcgacctggctccggctacaccaacatcatgmgggtgctaagcatatcctgagacgcccctccctcctctggcccagcctacccttgtaccccatcccttcctccccagtctacgttctccagcccacaccc

SEQ ID NO: 108739 - DNA, 201 bp, Homo sapiens; identical to SEQ ID NO: 17763

SEQ ID NO: 108740 - DNA, 201 bp, Homo sapiens; identical to SEQ ID NO: 17764

SEQ ID NO: 108741 - DNA, 201 bp, Homo sapiens
gctgcctccccaaggggatggatgttggcttgagagggaaggggagtctgtgatctgtgggcaggggttgcatcagggaataaagatcaggtaacaggacscctgtggcgtgaggcgttctgagaatggtaatgggttgggtttggttgcctctcatgttctgggggaacgttgtctgaacgtgaatctctggttctaggg

SEQ ID NO: 108742 - DNA, 201 bp, Homo sapiens
cctggccagcttttatatttcttaaagagatttctccttattatctcatttgatatatctgtattatctcatatctttcttgtgtggtagggagggcaggsattctttcttttttttttttcttaatgcagagatggggtctcactatgttgcctaggctggtctccagctcctgggctcaaacaattctcccatctcggc

SEQ ID NO: 108743 - DNA, 201 bp, Homo sapiens
ggtagacacagagtgtccacaggtggcagtgagcgggtaaaagtggatacccacactcaggacccaagacatctgctgacagcaatgggggcacaggtgaytggcagtgcctggctatgctacaggaacaggaagataaccagaccgggcagaacctgcaggatcattggcagggaaacagagacatctagttacttggca

SEQ ID NO: 108744 - DNA, 201 bp, Homo sapiens
agagggtagacacagagtgtccacaggtggcagtgagcgggtaaaagtggatacccacactcaggacccaagacatctgctgacagcaatgggggcacagrtgactggcagtgcctggctatgctacaggaacaggaagataaccagaccgggcagaacctgcaggatcattggcagggaaacagagacatctagttactt

SEQ ID NO: 108745 - DNA, 201 bp, Homo sapiens
caggtgagaacaccaaggcccagagaagtatgatgacttacccagggtcacacagcttgttagtgacacctggaactggaacaaagattctcctttcctcrttcaccactttcttgctgttctgggctgaccttctctgcctcctccagctcagcccagcttctgtctcggtaccgacctcgggcagcagtcattgctgtc

SEQ ID NO: 108746 - DNA, 201 bp, Homo sapiens
cttgattctcccaacctctcaggtttgatgaaatcctggaggtgagcgacggcatcatggtggcacggggggacctaggcatcgagatcccagcagagaakgttttcctggctcagaagatgatgattgggcgctgcaacttggcgggcaagcctgttgtctgtgccacacaggtctggagtgaggccttgaggttcggca

SEQ ID NO: 108747 - DNA, 201 bp, Homo sapiens
cttagggtccagagtcggaagtggagctggtgaagggctcccaggtgctggtgactgtggaccccgcgttccggacgcgggggaacgcgaacaccgtgtgrgtggactaccccaatattgtccgggtcgtgccggtggggggccgcatctacattgacgacgggctcatctccctagtggtccagaaaatcggtgcggacg

SEQ ID NO: 108748 - DNA, 201 bp, Homo sapiens
ggagtgcaggggtacgatctcggctcactgcaatctctgcctcctgggttcaagtgattctcccacctcagcctcctgagtagctgggactacaggcatgygccaccacgcctggataatttttgtatttttagtagagacagggtttcaccatgttggccaggatggtctcaatgtcttgaccacgtgatccgcccgcct

SEQ ID NO: 108749 - DNA, 201 bp, Homo sapiens
gccaccacacctgtccaatgatttgttttctttccctcccccaggaaagctccgtggcttcctccgtgttggagacctggtgattgtggtgacaggctggbgacctggctccggctacaccaacatcatgcgggtgctaagcatatcctgagacgcccctccctcctctggcccagcctacccttgtaccccatcccttcc

SEQ ID NO: 108750 - DNA, 201 bp, Homo sapiens
tcctcgttcaccactttcttgctgttctgggctgaccttctctgcctcctccagctcagcccagcttctgtctcggtaccgacctcgggcagcagtcattrctgtcacccgctctgcccaggctgcccgccaggtccacttatgccgaggagtcttccccttgctttaccgtgaacctccagaagccatctgggcagatga

SEQ ID NO: 108751 - DNA, 201 bp, Homo sapiens
cctcgttcaccactttcttgctgttctgggctgaccttctctgcctcctccagctcagcccagcttctgtctcggtaccgacctcgggcagcagtcattgytgtcacccgctctgcccaggctgcccgccaggtccacttatgccgaggagtcttccccttgctttaccgtgaacctccagaagccatctgggcagatgat

SEQ ID NO: 108752 - DNA, 201 bp, Homo sapiens
ctccagctcagcccagcttctgtctcggtaccgacctcgggcagcagtcattgctgtcacccgctctgcccaggctgcccgccaggtccacttatgccgargagtcttccccttgctttaccgtgaacctccagaagccatctgggcagatgatgtagatcgccgggtgcaatttggcattgaaagtggtgagctacctag

SEQ ID NO: 108753 - DNA, 201 bp, Homo sapiens
tcctccagctcagcccagcttctgtctcggtaccgacctcgggcagcagtcattgctgtcacccgctctgcccaggctgcccgccaggtccacttatgccraggagtcttccccttgctttaccgtgaacctccagaagccatctgggcagatgatgtagatcgccgggtgcaatttggcattgaaagtggtgagctacct

SEQ ID NO: 108754 - DNA, 201 bp, Homo sapiens
accactttcttgctgttctgggctgaccttctctgcctcctccagctcagcccagcttctgtctcggtaccgacctcgggcagcagtcattgctgtcaccygctctgcccaggctgcccgccaggtccacttatgccgaggagtcttccccttgctttaccgtgaacctccagaagccatctgggcagatgatgtagatcg

SEQ ID NO: 108755 - DNA, 201 bp, Homo sapiens
tccgatttccacactgctgcctccccaaggggatggatgttggcttgagagggaaggggagtctgtgatctgtgggcaggggttgcatcagggaataaagrtcaggtaacaggacgcctgtggcgtgaggcgttctgagaatggtaatgggttgggtttggttgcctctcatgttctgggggaacgttgtctgaacgtgaa

SEQ ID NO: 108756 - DNA, 201 bp, Homo sapiens
caacctctcaggtttgatgaaatcctggaggtgagcgacggcatcatggtggcacggggggacctaggcatcgagatcccagcagagaaggttttcctggmtcagaagatgatgattgggcgctgcaacttggcgggcaagcctgttgtctgtgccacacaggtctggagtgaggccttgaggttcggcactctgtgggtt

SEQ ID NO: 108757 - DNA, 201 bp, Homo sapiens
cttctcctgcctgcctctgccttgattctcccaacctctcaggtttgatgaaatcctggaggtgagcgacggcatcatggtggcacggggggacctaggcwtcgagatcccagcagagaaggttttcctggctcagaagatgatgattgggcgctgcaacttggcgggcaagcctgttgtctgtgccacacaggtctggag

SEQ ID NO: 108758 - DNA, 201 bp, Homo sapiens
gccagctcggacgggcaccagcggggaagctggagagcctgctgagcgccaagcagagcgagcaaggagggtggctggagagtcaggggagaggggcagarggccccgctgatgagtcagggcaatggccacattggaggtcacagcagctgcctgaaggggcgcatgtaccagtggctcccacagtactggctttccact

SEQ ID NO: 108759 - DNA, 201 bp, Homo sapiens
ggctgggcacggtgactcacacctgtaatcccagcattttgggagggcgaggtggatggatcacctgaggtcaagagttcaagaccaacctggccagcatrgtgaaaccccttctctactaaaaatacaaaaaaattagccaggcgtggtggtgcacacctgtaatcccagctactcaggaggctgaagcaggataatcac

SEQ ID NO: 108760 - DNA, 201 bp, Homo sapiens
cattcggcccacagagcctaccaatactgaggtattacagaagggtccagtaggtctgagtttaagtctttactcagaaatgtagctctattagcctgctstctttcctcatgaacaggacaaggtaatgatttgttcttcatggggttggcaggattaacaggagatattaagtactagatagtacttaatatctatata

SEQ ID NO: 108761 - DNA, 201 bp, Homo sapiens
gtccgcaggcccagagggactggtgacccaagtggagaacggcggcgtcctgggcagccggaagggcgtgaacttgccaggggcccaggtggacttgcccdggctgtccgagcaggacgtccgagacctgcgcttcggggtggagcatggggtggacatcgtctttgcctcctttgtgcggaaagccagcgacgtggctgc

SEQ ID NO: 108762 - DNA, 201 bp, Homo sapiens
gcttttatatttcttaaagagatttctccttattatctcatttgatatatctgtattatctcatatctttcttgtgtggtagggagggcaggcattctttyttttttttttttcttaatgcagagatggggtctcactatgttgcctaggctggtctccagctcctgggctcaaacaattctcccatctcggcctcccaaa

SEQ ID NO: 108763 - DNA, 201 bp, Homo sapiens
gtgtcacagaggaccacagaatggcttaatttatgtccttgagcaggtgagaaggaggagacctagtgcacaagtggaaagacagatagggaccgaagaakgagccaacctgctctcggctagcagctgccccatagcagtgcaggcatgggatagaactcagctctcctcagtccatgaggcctcctagctctaaaagcc

SEQ ID NO: 108764 - DNA, 201 bp, Homo sapiens
tgctgcctccccaaggggatggatgttggcttgagagggaaggggagtctgtgatctgtgggcaggggttgcatcagggaataaagatcaggtaacaggasgcctgtggcgtgaggcgttctgagaatggtaatgggttgggtttggttgcctctcatgttctgggggaacgttgtctgaacgtgaatctctggttctagg

SEQ ID NO: 108765 - DNA, 201 bp, Homo sapiens
gatgaaatcctggaggtgagcgacggcatcatggtggcacggggggacctaggcatcgagatcccagcagagaaggttttcctggctcagaagatgatgaytgggcgctgcaacttggcgggcaagcctgttgtctgtgccacacaggtctggagtgaggccttgaggttcggcactctgtgggttttagggacacctgtg

SEQ ID NO: 108766 - DNA, 201 bp, Homo sapiens
gggccagcacactgagcagcccatgctggatgaagtacatcttcctccccacggagccctcacgcaccacgagatcccccggctggaagacctcaaagcgmagcttggtgagaactgcagtgacgaagctggggtcggcatgggcaaacagcggcatgtgggccaccaggccccgacaggtgaagttaatgatctcctgga

SEQ ID NO: 108767 - DNA, 201 bp, Homo sapiens
ctcctccagctcagcccagcttctgtctcggtaccgacctcgggcagcagtcattgctgtcacccgctctgcccaggctgcccgccaggtccacttatgcygaggagtcttccccttgctttaccgtgaacctccagaagccatctgggcagatgatgtagatcgccgggtgcaatttggcattgaaagtggtgagctacc

SEQ ID NO: 108768 - DNA, 201 bp, Homo sapiens
aatcctggaggtgagcgacggcatcatggtggcacggggggacctaggcatcgagatcccagcagagaaggttttcctggctcagaagatgatgattgggygctgcaacttggcgggcaagcctgttgtctgtgccacacaggtctggagtgaggccttgaggttcggcactctgtgggttttagggacacctgtgggtga

SEQ ID NO: 108769 - DNA, 201 bp, Homo sapiens
cccccacctcctgctaatcccttgggactgggatatctgggattcctatcctcccaactggttctggagtcagttcaatattgccagaccacagctgggcrtggtggctcatgcctgtaattccagtactttgggaagtgaaggcgggtagatcacttgagcccaggagttctgcaccagcctggacaacgtggtgaaact

SEQ ID NO: 108770 - DNA, 201 bp, Homo sapiens
tttactaagcttgctagattctaaaaggtataccttatttggccccttttccccatttaggggaacaagggtgttggggctgggaagtagataagaggtgagtaagtcatccaaagcatatgtcttcattagcctccctgtatgaaaagctgatttctgtagagtgttggaggcctactttcagaatctgtcatatgttaa

SEQ ID NO: 108771 - DNA, 201 bp, Homo sapiens
aatgtctaaaatatggaaacttggtttatgagatctactctgccatttttatctgggctttctcttccttttgtctctgttgtacctgtcctgcttggttytgatttaaccccagtggtttctcctgaatgtggagccttctcctagaaggcagcctcggctagtcccagggttcagagtagccagctgctctcttcacct

SEQ ID NO: 108772 - DNA, 201 bp, Homo sapiens
agtcacatattcttgtatgtgtacaaaaaatacacactggatctctgcaagcatagccaagcaactggaaatatgtttttaaaaacttgcttttcattctrtctcttctagtactgttttgatgctctttgaaaacaatctaattgctgtaacaaatgaccatacgtaggccgggtgtggtggctcatgcctgtaatccca

SEQ ID NO: 108773 - DNA, 201 bp, Homo sapiens
gctatgacatcacttggtgataggaatttttcagctccattataatcttatgggaccactgttccacatgtgctctgtcattgacagaaatgccgttaagyaccacatgactattttttttggtggtctgttcctttttattattacagagtattccacagtatggttgtaccacagtttaactgatcacctgttgaagaa

SEQ ID NO: 108774 - DNA, 201 bp, Homo sapiens
aaagaagttaatatggagaagtggcaagtcttttcttctctcttctcttctcttctcttctctcttctttttcttttttctttttttctctgtcagatacygttgtaaagactttgcttttaccggaaactgatacgttgggtcatgtaccctggccagtcagttctctttattctaacacttagccgatcagttagattt

SEQ ID NO: 108775 - DNA, 201 bp, Homo sapiens
tataaagggaaagaatgtgatatgtcacccaggctctggagtacagtggcatgatcataggtcacagcagcctcaaagtttccagttcaagcgatcctacytccttggcttcctgagtatgtggcactacaggtgcatgccaccatgcccagctaacttttttgtagagacagggtctccctatgtttcccaggctggtct

SEQ ID NO: 108776 - DNA, 201 bp, Homo sapiens
atgaggggaagggacagttaatccctactgatcagataaaacctcattgtttcatactaataaatggtttttttatgcttatgaaaggaaaagccagaagkgtaatttttagtgtttagagagctagtgattctagttagggaacttaatacctttgaagttattagtttgcaagcaatagaatctactactaccaaggtg

SEQ ID NO: 108777 - DNA, 201 bp, Homo sapiens
gtgttttcaagaaccctctttattagctaagtggtgagacatgccacctggtggttatagtagtatcatttttctcactgttcttggtgcttttcttctcsttctgattccagttatactaggacaactgctataaacctggaatgtttcacactatattatttcagtaatttcaaaaacagcagaaatcactaagctgtt

SEQ ID NO: 108778 - DNA, 201 bp, Homo sapiens
agtgtctttaaataccccttacctttaaagtaagaaatattaaaatcaagcagaatataataatgaaaaattcttaagatatacttactaaaaacttatcsttcggttaatacactgtatgtaggttgtacatacaatatgaaaaagtatatttttgtagcctacttttaaatccagaatagaggaggttaagaaggttgt

SEQ ID NO: 108779 - DNA, 201 bp, Homo sapiens
ctattattgacattattcctttctgtggtctgaggtgcctcccatgaaacttgcttctaggacactaggattgagaaccatcagcgtaacatatctgttaygctacaatagtttattttcatattttagctactttacatactcgggtataatgaactttattcatagcttctgaagcagttggcacatttgagatatttt

SEQ ID NO: 108780 - DNA, 201 bp, Homo sapiens; identical to SEQ ID NO: 17861

SEQ ID NO: 108781 - DNA, 201 bp, Homo sapiens
tcctcctatgtcatttttttcttcttatttttcttgactgtataagagagaatgtatgacatttcctgcttgaccgctgagtttgattataaattaaaatacacaatattttatacaaattgttttgtagaagatttatttacagatgctcattcacaggtaaaattgacttatgaaaatagttttcatgacaaatgtatc

SEQ ID NO: 108782 - DNA, 201 bp, Homo sapiens
ctcctcctatgtcatttttttcttcttatttttcttgactgtataagagagaatgtatgacatttcctgcttgaccgctgagtttgattataaattaaaatacacaatattttatacaaattgttttgtagaagatttatttacagatgctcattcacaggtaaaattgacttatgaaaatagttttcatgacaaatgtat

SEQ ID NO: 108783 - DNA, 201 bp, Homo sapiens
taagcatcttcctcatgctttcagtaaattggaaaacccacggaggttaaatattaccttttttttttttaacttaaatcaattctgtttatttttttatyacattttcctatatgtgaagaatactattcattaaggctgactcatagaaatttgcttgaatacacacacacagactgatgcataaatttgagaaatatc

SEQ ID NO: 108784 - DNA, 201 bp, Homo sapiens
ctctcctcctatgtcatttttttcttcttatttttcttgactgtataagagagaatgtatgacatttcctgcttgaccgctgagtttgattataaattaaaatacacaatattttatacaaattgttttgtagaagatttatttacagatgctcattcacaggtaaaattgacttatgaaaatagttttcatgacaaatgt

SEQ ID NO: 108785 - DNA, 201 bp, Homo sapiens
cctctcctcctatgtcatttttttcttcttatttttcttgactgtataagagagaatgtatgacatttcctgcttgaccgctgagtttgattataaattaaaatacacaatattttatacaaattgttttgtagaagatttatttacagatgctcattcacaggtaaaattgacttatgaaaatagttttcatgacaaatg

SEQ ID NO: 108786 - DNA, 201 bp, Homo sapiens
ctgggtgctaaggctgtctgcaggctactaatatgcataataacaatcctgaaaaagaaggaaaagtatactgtgccttactgaagaaggcaggacagcckttggtatttgttagagtaaatattagttatcttacataaagcatgttatattccctgatgtcagggcctgataaatgagcccttacactcttgatagtca

SEQ ID NO: 108787 - DNA, 201 bp, Homo sapiens
cctactaaactatttgcatataattttaacatttgagtggctgtatataaagctaaaagttctttataagatttatagcatcttagaatgtttaaattagrtaacattagtgtgcttttagtttttgaatttaattttgctcttgattttgtttgtgttaatgtagactttgtctacgtaagcttgagcccaactttggag

SEQ ID NO: 108788 - DNA, 201 bp, Homo sapiens
cccgccccaaattttcttttaacttaaagtgttaatgtttgtttgttcccaatatttttatatatgtcaaggctttttcattatatacaggccagctcttkggagttctgcatagtgtttcttgtttaaaccacacctataatgtaccatctacaatttccaattctttaagacagagtgaaaaattaagacacctgaagc

SEQ ID NO: 108789 - DNA, 201 bp, Homo sapiens
gtgccttgatgctagagagtagcctgcaagctgtaattatatatgggcattagggaatgaagaacagccttaatactattgatcttttaagtgaaggtcascttagaaagcttttacttgttaaaaagcttcacagtttgtccttgtagttaatgcaattgaagttgaattaatctttcttaattttttttttagggtttc

SEQ ID NO: 108790 - DNA, 201 bp, Homo sapiens
ctgcacctggccttggatttcgtgatttgactgacatcttttacaccaattattgccatttttttattgggtactaattattagtattgctttctttattygttaaataagaagtaaaagaacttttaaaaaataaaataactttttttcctagtacaaagcttattttcaattttttttattgcttaaattttgcaggtt

SEQ ID NO: 108791 - DNA, 201 bp, Homo sapiens
ggcttcaggtgatacccgagtggagtttttactccatttccattccgtaaggctataggcatttgaaagaggaaacttttctttggcaaccttccaccttyctttctacagaatatttcagtatttctagctcataggttttctaaaatattctctgtaatttattttgaaatggagtttttttatcgtttacagatatga

SEQ ID NO: 108792 - DNA, 201 bp, Homo sapiens
ttgtacgttgcttaaatctgagaaatcctcagatcacctgtactggttttgatcgaccaaacctgtatttagaagttaggcgaaaaacagggaatatcctkcaggatctgcagccatttcttgtcaaaacaaggtaaggatttaatggttgatgaattttggtaatgatttcctttttttttttttaacaacttatgtatt

SEQ ID NO: 108793 - DNA, 201 bp, Homo sapiens
tcgaaaactgtatcttcgggcaccaaagagcattgttataatcaagtaccagttgaattaagtacagagaagaaggtttgttttaaagaaattgttctgayttatttcattctttattgattcaaattctgtttaaaattttatattttaattcctttccaattaaagagaaaatggcatatataacaaagcataaaattc

SEQ ID NO: 108794 - DNA, 201 bp, Homo sapiens
cttccttattaaatctctaaaagcaggaatgctctggaacaatgaacaattagaatgtggtaatgtaattttgggccaaaaaatactttgtagaaatgtgrttctcttacttggaatagaaagaattctgactcgaaaaagtgcagttaatgtatgcttttctgggtaagatttgtgatagattttgattgagatttaaaa

SEQ ID NO: 108795 - DNA, 201 bp, Homo sapiens
tacaatattaatttcataaaggtaaaggcatatctgttttgttcctatttgattccttgtgaaagcacaatgcctagcgcacaatagacacttaaacttayctgttgaatggacaggtgaatgcttttaaagtctttccatatagaaaattaagtttcattacatttgacttgatctaggttttcatttcatagaatggag

SEQ ID NO: 108796 - DNA, 201 bp, Homo sapiens
tcattgtatttttagtttgcttttccctaatgactaattatattgagcatttttcatacacttattggccatctgtatatcttctttgagggagtatctgytcaaatcttttgcctattttttcttagtgagttttgatagtcatttctatattctgaatataaattatttatttgatatatgctttgcaaacattttctc

SEQ ID NO: 108797 - DNA, 201 bp, Homo sapiens
agagggtcagtttactctttctgatgttgtcctgccggcctctccctatccagacttcggctatctttaggaagcggccccgggagctttgcttcacgtcyaggtaaaacctctttttctggatgtccactcgtttggaggccagctcctggatttcggctgcgcccccggcctgattaggggtggctgaggccgcgtagt

SEQ ID NO: 108798 - DNA, 201 bp, Homo sapiens
gaagttagaatgacccttgaattacaatcggccacattcatcacaaatacattaaataagagtaatttgccataaagctctatgtttgtatacttctttgktttttttttttttttttttttttttttttgagacagggtctcactctgttgctcagtctgtagtgcagtggtgtcatcatagctcactgcagtcttgatc

SEQ ID NO: 108799 - DNA, 201 bp, Homo sapiens
catttttgctttttccctatttcagtaacatttttcgctatttcagtaacattacatgtcaacaagagaatggtgggtattttggggggggttgggtgggragaaattttactaagcttgctagattctaaaaggtataccttatttggccccttttccccatttaggggaacaagggtgttggggctgggaagtagataa

SEQ ID NO: 108800 - DNA, 201 bp, Homo sapiens
taacagagttgggagtattaaaaagatgtaaagagccccttaaaattttgttgctgggaattttagtgttctactgatgaaggaaatagacactggaaggygttgtttctattaggtaacttagatatcatactgaagacttcaaatacttattgttgacactcaaaagacacacttagtgtaagtaagcatttccccgct

SEQ ID NO: 108801 - DNA, 201 bp, Homo sapiens; identical to SEQ ID NO: 17863

SEQ ID NO: 108802 - DNA, 201 bp, Homo sapiens
aaggcgatcctcctgccttggctttccaaagtgccgggattacaggcgtgaaccaccgcacctgatgcagttgttgttgttgttgttgttttaatatctgrttattattttattgtatttcattgaatatagcacagtttgtttttacattttcttattgatagacacctaggctatttttctggttttggactgttacta

SEQ ID NO: 108803 - DNA, 201 bp, Homo sapiens
gtttgtattggaattaaaaaatagaaaacattaacccatggtagctgtcactgtattctttcaaagaagccaatgaaataaactgttttctccctctatgkggtgtttttctacttgaacataaatgcacattttattttatttccagactttttgtggccagcacccaatgaagagcaagttacttgcctcaagatgtac

SEQ ID NO: 108804 - DNA, 201 bp, Homo sapiens
ttcccaccagcagtgtatgagaggtccagttcctccccatccttgctatcacttagtctggctgatctttaacttaagccattctaatagtatctcattgkatttttagtttgcttttccctaatgactaattatattgagcatttttcatacacttattggccatctgtatatcttctttgagggagtatctgttcaaat

SEQ ID NO: 108805 - DNA, 201 bp, Homo sapiens
atggtacctgttacagtgctagttatgaaagaaagaaagagagagagagagaaggaaggaagggagaaaggaaggaaggggctgggagtggtggctcacasctgtaatcccagcactttgggaggccgaggcgggtggatcatgaggtcaggagatcgagaccatcctggcgaacatggtgaaaccctgtctctactaaaa

SEQ ID NO: 108806 - DNA, 201 bp, Homo sapiens
gcatgaacccgggaggcagagcttgcagtgagccgagattgcgccactgcactttagcctaagaaaaggaaggaaggaaggaaggaaggaaggaaggaaawatcagtcactcactcaggtttagtttcaaaagccaaaacagtgataatattgaattttttccagccactcagtagtacccagagaattttgatacaaata

SEQ ID NO: 108807 - DNA, 201 bp, Homo sapiens
ttccttattaaatctctaaaagcaggaatgctctggaacaatgaacaattagaatgtggtaatgtaattttgggccaaaaaatactttgtagaaatgtgawtctcttacttggaatagaaagaattctgactcgaaaaagtgcagttaatgtatgcttttctgggtaagatttgtgatagattttgattgagatttaaaac

SEQ ID NO: 108808 - DNA, 201 bp, Homo sapiens
cctttaaaaatataaagagttacatttttcactggtgggccataacaaaacaggctgtgggccatatttgtccgaatgtcttctcagtgatctttcatccrtatgtccttttactctaggatgctgtgaaatcctggttaccccttcttgtatcacattgaaaacctaaagtttgaactattctatagaaattttattaaa

SEQ ID NO: 108809 - DNA, 201 bp, Homo sapiens; identical to SEQ ID NO: 17853

SEQ ID NO: 108810 - DNA, 201 bp, Homo sapiens
taggaatttttcagctccattataatcttatgggaccactgttccacatgtgctctgtcattgacagaaatgccgttaagtaccacatgactatttttttyggtggtctgttcctttttattattacagagtattccacagtatggttgtaccacagtttaactgatcacctgttgaagaacttttgggttgttttccagt

SEQ ID NO: 108811 - DNA, 201 bp, Homo sapiens
gttttgttttgttttttgctttttaactgcagtattttgaggagtcttggagtagcaagctaatctttggaagaaaggaaaatataaacctgaaaactaayaatttaaagaacgtcttttcaggttgtcatttgaaaaatacttgatttctgatcactgatttgaattgagtgtcaaatatttgatatgttttgtaaatta

SEQ ID NO: 108812 - DNA, 201 bp, Homo sapiens
aggaatttttcagctccattataatcttatgggaccactgttccacatgtgctctgtcattgacagaaatgccgttaagtaccacatgactattttttttrgtggtctgttcctttttattattacagagtattccacagtatggttgtaccacagtttaactgatcacctgttgaagaacttttgggttgttttccagtt

SEQ ID NO: 108813 - DNA, 201 bp, Homo sapiens
ttgtctataggatgttctcccatacttctctcagatctcttggatttaggcctcctgggccaccatatttgaaatatcagattagttccccctcccccatyattcagcattcctcgtaaatctttgctgttttaaaaatagcactatcactgtctaacttactgtgttatattttgttaattttctgtgagttcttcttca

SEQ ID NO: 108814 - DNA, 201 bp, Homo sapiens
ctgcagtattttgaggagtcttggagtagcaagctaatctttggaagaaaggaaaatataaacctgaaaactaacaatttaaagaacgtcttttcaggttrtcatttgaaaaatacttgatttctgatcactgatttgaattgagtgtcaaatatttgatatgttttgtaaattaggtgaagatgagtgagtaggttctaa

SEQ ID NO: 108815 - DNA, 201 bp, Homo sapiens
tctcctcctatgtcatttttttcttcttatttttcttgactgtataagagagaatgtatgacatttcctgcttgaccgctgagtttgattataaattaaawtacacaatattttatacaaattgttttgtagaagatttatttacagatgctcattcacaggtaaaattgacttatgaaaatagttttcatgacaaatgta

SEQ ID NO: 108816 - DNA, 201 bp, Homo sapiens
aggctgtaaacctgtacagatgttactgtaatgaatattgcaggcaattgtaatacaatggtaagtatttgtgtatctaaacttatctaatgtagaaaagrcacagtaaaaatacagtataaaagataaaagatggtatacctgtatagggtgcttcctgtgaatggagcttgtaggactggaagttgctctgagtgagtg

SEQ ID NO: 108817 - DNA, 201 bp, Homo sapiens
tgaattcactcttttgtgaggtttatctccaaaaaaggcaatattcacatatttgcaaagcatttagtactataacttcttgaatgtctgagcagtcctgrcattagggtgggatccatcagggcccaagatgagtgtttcatctttgttacttgtggcaaagcagcccttacttcttttactttgtagcattgctatgta

SEQ ID NO: 108818 - DNA, 201 bp, Homo sapiens
agcacagtcagaaaatgttctaacagatattaaattgtgagtaatttttttccctcaacttttattttggatttatgggggtgcatatgcaagtttgttaygtgggtgaattacatgttgctgaggaagttgtgagtaatttatgtcatttctaatcatgtggtcagatgtctgtggtatatgagagaattttgtatacaa

SEQ ID NO: 108819 - DNA, 201 bp, Homo sapiens
tgtatttctgagtgggggcatgattttagggattcattcaggaagttgggctccctaaagacagcactgccaatggtaagctttgccaagtctgatgtccygaaattacattcttaataaggagagcattcaggattggggagtggtaaagaagctgaagacttcactataaaagagcaaatggataatgtaaaaagagaa

SEQ ID NO: 108820 - DNA, 201 bp, Homo sapiens
ttcagtagaaatttgctgactctttttatctcttttaatagctaatgcatgagataaaattgaaggtattaccaaggagaaatgcaggtggatagttttgraggcaaagtcacagtaagcaattcatctctccaaggaatagtgatgaaagctgagatccaataaatgtcttgtttggattaatacataaatatttccttt

SEQ ID NO: 108821 - DNA, 201 bp, Homo sapiens
gtttgtactgatttggaaagacattctcatttaggggatgaaatagaaagtcaatgaggagaaagaaaagcttttattatttattttcttttaaatatttyagtatcatggtacagtcaccagaaaaagcttacagttcctcacagcctgttatttcggcacaagagcaggagactcaggtaaggcttttgtaaaaaggta

SEQ ID NO: 108822 - DNA, 201 bp, Homo sapiens
ccatttcttgtcaaaacaaggtaaggatttaatggttgatgaattttggtaatgatttcctttttttttttttaacaacttatgtattttatgttatttaygatttccttctaatgcatatttaacatatttcaaattccacctagttttggttcaagtcaagcatgatgttatataatcaattcagtgattgagactagt

SEQ ID NO: 108823 - DNA, 201 bp, Homo sapiens
tggtaagttgtacttaagcaaaacctaatcctttaaaaaaataaaacataaagagtttgaaatgcttaatctttcattaaactctcaaaatacaaatgcarctacaaatgatgtaaactatagaagagagtgaacaaagaacagatgctcagatttatgtatcaattagcttttaggaagatagcatactagtattgacca

SEQ ID NO: 108824 - DNA, 201 bp, Homo sapiens
gtgaaaaaaaattggaaacaactgcacagcagcggaaatgtcctgaatggatgaatgtgcagaataaaagatgtgctgtagaagaaagaaaggtatgttgytcattgactattctttcgggtgagaaatttaatttatatttgactgtgcaaagagtcagttgttacttgtaaacttcaagtcattgtttaggtcagagtt

SEQ ID NO: 108825 - DNA, 201 bp, Homo sapiens
ttagcacaaggaaagacattcatcataggtttgtaagagatgaaattcaggtatgaggatcaatcatcattgctctccgttgctcatagtggaagtggatrtttctcaaatgtttatttaccagatctttattgaatactttctttgtgttgaacataaagcagtccctctgataaatgtgggagaacaaacttgcagatt

SEQ ID NO: 108826 - DNA, 201 bp, Homo sapiens
ctttaaatatgtatgtttggttttcattcatattgacagtactacctctcagttttctttcagatattgttttgtatttacccatgaagacattgtttttyggactctgcaaataggacatttcaaagatgagtgaaaaaaaattggaaacaactgcacagcagcggaaatgtcctgaatggatgaatgtgcagaataaaa

SEQ ID NO: 108827 - DNA, 201 bp, Homo sapiens
aaactgaagcttagagagttaaataaagagctcaaaatctcacatctagtaagtggcaaaaacaggatttcagctcaagcaatctgattccaaaacagacytttttcactgtgctgccattcttttgcctggtttttctgttaacttcttaaatatatgtcatgtttcatgcttacttcctcattttcataaatatattac

SEQ ID NO: 108828 - DNA, 201 bp, Homo sapiens
tcaaagatgagtgaaaaaaaattggaaacaactgcacagcagcggaaatgtcctgaatggatgaatgtgcagaataaaagatgtgctgtagaagaaagaarggtatgttgttcattgactattctttcgggtgagaaatttaatttatatttgactgtgcaaagagtcagttgttacttgtaaacttcaagtcattgttta

SEQ ID NO: 108829 - DNA, 201 bp, Homo sapiens
aaagattcctttcaaaatgttattgctcattgacaacacttagtcaccaagagccgtaatggagacatacaaggagactaacgttgttttcatgcctgctygcttaacatccattctgtagctcatggatcaagaagtaaattaaccttttaagtattattatttaagaaatacagtttgtaatgctttagcttctgtaga

SEQ ID NO: 108830 - DNA, 201 bp, Homo sapiens
atgattggttgaaatcacattgaattccactttgtgccagggacttaagttaacgaacaaattattcttacaaaaaggtataaatgtaaggttttcattcygctaaatatgtttgtcaaactgtgttgtgatttgttctcagtgtgtcatagctaccatagcttttggaatgggcattaataaagctgacattcgccaagt

SEQ ID NO: 108831 - DNA, 201 bp, Homo sapiens
gtaatgagaagtttcgattatacaaattaaagatgatggcaaagatggaaaaatatcttcattctagcagatgtaggagacagtatgtattatttattttrtgccaatagtatggatttatggatgatgctcttttaagacaacaatttggctaaataattatcagtattttgaaaaaatattttgttgctgttacatgtg

SEQ ID NO: 108832 - DNA, 201 bp, Homo sapiens
acagctgataatttagaaacaactgtaagacagtccactttttctgattatgaaataataccatagttaagtgtaatttcctataatagaataaaaacacsagttctagttttaggggaggcatgttgttactgtaccttagaatttctggaagatgacatattcatgcttttcctgataactgctgagtctcctgctctg

SEQ ID NO: 108833 - DNA, 201 bp, Homo sapiens
tttttgttgctatttatgtgattcaaattataccagtttataggcctctcacaagtaaaatgaattacctgtttgtttttgtatgcctattttagtcagtytgggggaagggatctgtgaggaaaggataagtcatagagcacttttcttttttaagagacagagtctctctgtgttgctcaagctggagtgcagtggtgc

SEQ ID NO: 108834 - DNA, 201 bp, Homo sapiens
gctgataatttagaaacaactgtaagacagtccactttttctgattatgaaataataccatagttaagtgtaatttcctataatagaataaaaacacgagwtctagttttaggggaggcatgttgttactgtaccttagaatttctggaagatgacatattcatgcttttcctgataactgctgagtctcctgctctgtct

SEQ ID NO: 108835 - DNA, 201 bp, Homo sapiens
gtccactttttctgattatgaaataataccatagttaagtgtaatttcctataatagaataaaaacacgagttctagttttaggggaggcatgttgttacygtaccttagaatttctggaagatgacatattcatgcttttcctgataactgctgagtctcctgctctgtctgccaatccagtcaagaagcctttgctagc

SEQ ID NO: 108836 - DNA, 201 bp, Homo sapiens
atatagtatgttattgattatctcagtaccactgaagagaggttatctgggtcattggagctttgcttctagatttgtgaagccataaacctatatatttmaaataggaggccaaaaaaaaacgaccattgctttatatagttagattttcagtgaattgagagtttatcatttgtaattatacattaatcaaatataagg

SEQ ID NO: 108837 - DNA, 201 bp, Homo sapiens
ttttcatgcacttaaatatatcattatttttgataggctttcttcctttagtcttttctttagaaggtagaaaggaagaattaaataagataaaaccaaaygggtctgaagcatgtataaagtatatatgtttgctcttttgttcttctttttctttagttcccactgggaatttgaaggtccaacaatcatctactgtcc

SEQ ID NO: 108838 - DNA, 201 bp, Homo sapiens
atatgagacattctatcaattttaccctcttaaagatgcagagataatgcattatgtttcatcccaccatctttaatgagaagcttccatcttagattaayattagagaatgttaaaatactctgcaatcaggtaaggacgcttgaaacttcattataatgcaaaagttttctttaacacaataaatattttgaacccttt

SEQ ID NO: 108839 - DNA, 201 bp, Homo sapiens
tgtttcatcccaccatctttaatgagaagcttccatcttagattaatattagagaatgttaaaatactctgcaatcaggtaaggacgcttgaaacttcatyataatgcaaaagttttctttaacacaataaatattttgaaccctttttgtgtcttgtattcataggagttcagatagaccactttatttactatttttta

SEQ ID NO: 108840 - DNA, 201 bp, Homo sapiens
aatattagagaatgttaaaatactctgcaatcaggtaaggacgcttgaaacttcattataatgcaaaagttttctttaacacaataaatattttgaacccyttttgtgtcttgtattcataggagttcagatagaccactttatttactattttttatagagagtgaacagaaatcccatttctagtcaccagtccttaat

SEQ ID NO: 108841 - DNA, 201 bp, Homo sapiens
ctgaggtcaggagttcgagaccagcctggtcaacatggtgaaaccctgtctctactaaaaatacaacaattagctgggcgtggtggcaggtgcctgtaatsccagctacttgggaggctgaggcaggggaattgcttgaactcgggaggtggaggttgcagtgagccgagattgtgccattccactccagcctgggcaaca

SEQ ID NO: 108842 - DNA, 201 bp, Homo sapiens
atgatgaataaattctaagcaggggaagtgtttgggaaagcagggcaggctttgtgctgttgatggcaaatgatgtaccagacaggatgaagttgagaatytggaagttgatcactgattagaaaggcttacattttattttggccgggggtggcagctcatgcctgtaatcccagcactttgggaggccaaggtgggcgg

SEQ ID NO: 108843 - DNA, 201 bp, Homo sapiens
tttttcttgtcatttatcaatcaggactgtttgctttagttaagaaatactcaaggtcaatgtgtttctgaatttaaaattactgttaaatacaaatttayacataaacatggtatgtataagaagtaggacataaatccatcatacttgacagaacttatggaaataacaagaaaatgttacagtttttccccagggatt

SEQ ID NO: 108844 - DNA, 201 bp, Homo sapiens
ttctaagtatgtttgtggacttgaataaaataaaacaaacagaaacacttctttcttctgccttcaggcttgaaatgaacatacttttttttaaaaaaaaaccttcaaaatgaaaatattaaataaaagatttaataaaaagagaaagtaaaaactgtagtttaataaagtcttcctgtctcttcatagttaaaaaatgtt

SEQ ID NO: 108845 - DNA, 201 bp, Homo sapiens
agggaatacatttgttgcttacttttttgtacctttacatgtgattgatcacttgtgagttttttctttcaaacatcttaaagcttccagagctttttctrgaaaaaaaaaccagttttaagaatcaccagttctaaaagggtaatatcttattcatctttctgagaatggagtatcatgattcatgaattagatacttgc

SEQ ID NO: 108846 - DNA, 201 bp, Homo sapiens
aatatcttattcatctttctgagaatggagtatcatgattcatgaattagatacttgcatcttaacatttgaaataatttaattttattattttttagttygaaaactgtatcttcgggcaccaaagagcattgttataatcaagtaccagttgaattaagtacagagaagaaggtttgttttaaagaaattgttctgatt

SEQ ID NO: 108847 - DNA, 201 bp, Homo sapiens
ttgttgcttacttttttgtacctttacatgtgattgatcacttgtgagttttttctttcaaacatcttaaagcttccagagctttttctagaaaaaaaaaycagttttaagaatcaccagttctaaaagggtaatatcttattcatctttctgagaatggagtatcatgattcatgaattagatacttgcatcttaacatt

SEQ ID NO: 108848 - DNA, 201 bp, Homo sapiens
ttttgtttgccagccggtcttcagcattttaaggcaacattattattacagttgtaatacgaatataattaccagagaaaaaactcaggaaaataaatgcytttatgaaaatgggattagaggtttgaaaataaacttgttaggagaaataatttcacaatgggatggttttttctttgttaagttttctttatgacttca

SEQ ID NO: 108849 - DNA, 201 bp, Homo sapiens
cttgtgacctgggtacattttgcaaagccacaggtttgcagtgttacacaagggccaaaggaggccatgagttgtctttggttgtggggccggagggtaaytgttcatgaaaatagtgagtgtctgaagattaagaaaatcatgctgcagcagaggagaagggagaggaaggcaggaagggaaaggagatgcctgagggtc

SEQ ID NO: 108850 - DNA, 201 bp, Homo sapiens
attgaatgcttcagtgaactttattatttcagtgaacatttgttatttgatgtgaactttgtgcctgttttgaaatttactaaactcaaggcatgtgttcrgaagagtgtttttgaagatgacctccccttcttagaattcactggatccattgtgtatagttacgatgctagtgattgctctttcctgtcagaagatatt

SEQ ID NO: 108851 - DNA, 201 bp, Homo sapiens
caacattaactttgttgaattttttgtttgccagccggtcttcagcattttaaggcaacattattattacagttgtaatacgaatataattaccagagaaraaactcaggaaaataaatgcttttatgaaaatgggattagaggtttgaaaataaacttgttaggagaaataatttcacaatgggatggttttttctttgt

SEQ ID NO: 108852 - DNA, 201 bp, Homo sapiens
agatgttaacctgttcctttatgacaatgtcctgtttaccaattaacagtgtgtttttgtggtgatgggggcaagacaaatctttaaatggtggaaagcaragaaagaaattataaaacatgattagttgtattatacgttgtttttggttgttggaaaaactatacatttattgagagaatcattaggaagctgaacatc

SEQ ID NO: 108853 - DNA, 201 bp, Homo sapiens
tagccaccgcgcccagcctgaaagatgaactttaaaatggggaaggatactagtaaagccatttcttactcatgtatacatttttccctccatgaaattaragcagccaccttttacatgacttttacatgcatttcagatttttgtactagcaattaaaatatctactggatgtaaatcacatgtgcttaatgctttgct

SEQ ID NO: 108854 - DNA, 201 bp, Homo sapiens
gtgtgtttttgtggtgatgggggcaagacaaatctttaaatggtggaaagcaaagaaagaaattataaaacatgattagttgtattatacgttgtttttgkttgttggaaaaactatacatttattgagagaatcattaggaagctgaacatcagctatattgctggagtgatactgtttcagtggtttcttgaccttttt

SEQ ID NO: 108855 - DNA, 201 bp, Homo sapiens
cttcttggttccagtctagagcccatatagcaggtgggctttaagagataattatccagctcagaccgggagtgagacgggactgttttttcattctaatrcctctctgggcctgataatttaaaggggcttgcattcttcagctaaaattttattttcttttattttttttcccccacagtggtctccctttattaatcc

SEQ ID NO: 108856 - DNA, 201 bp, Homo sapiens
attctgaaaatgaaaaacttaagtaaaggtttagttcattgtttatttcacactgagcatttactacctgaatgttttggacattttatttccatgactgragtggacacttttacaactcactgggttctttgctgatctttctctagaagagcatagctgagagcaggattctgcctctcatgacaattggcatgcact

SEQ ID NO: 108857 - DNA, 201 bp, Homo sapiens
attgtttatttcacactgagcatttactacctgaatgttttggacattttatttccatgactggagtggacacttttacaactcactgggttctttgctgrtctttctctagaagagcatagctgagagcaggattctgcctctcatgacaattggcatgcacttatcccaagcggtgaaagctggctgcccccttgattt

SEQ ID NO: 108858 - DNA, 201 bp, Homo sapiens
gggacaccttccttaaagcgcattggacattggctttgtgggtaactgatctttacctgaatgaaatttatcagtactgtattaagggtctagggtggaayggatgctagcaaggcaaccgttaacatccacttactgatgaatcctataaaattttatttcaggccatacgaagtaacagtaataaatataaaaggaaaa

SEQ ID NO: 108859 - DNA, 201 bp, Homo sapiens
cattgaaatgacatactgccctctctttgtcttctaagttttggatacttttttttttttttttttgacacaaagctgcattagaacctaggtttcttgaytttcagtccagatttctttccactctacttcctgcttcttcatagtataattttcaacactagagcagtctgcataacttttgcaaaatcagctagtctt

SEQ ID NO: 108860 - DNA, 201 bp, Homo sapiens
gaaaggaatacaacagaactttctgagatgctagaaatgtttttttatcttgatggggtgtgggttttgtagataatgaaaaataaacagtaaaaaataaktaaaaaaaaaagtaagaaagttgccaatacagttttacatattcctgtgatgtttttaatcgacaggcaccttcttactgagatacgtaatgagaagttt

SEQ ID NO: 108861 - DNA, 201 bp, Homo sapiens
atacggttctcttgaggtgaatttctactctatcaagagtgaagtagagtatggcttaaaagttaagtgattaaaaagctaccctttcttagctaatttgkaatgtaattggtcttaatttttctaaattcgttctaaccaaaatcttattggcgtgatttctattgacatgaactagaagtgacttcagcagacaacttg

SEQ ID NO: 108862 - DNA, 201 bp, Homo sapiens
acaactgcacagcagcggaaatgtcctgaatggatgaatgtgcagaataaaagatgtgctgtagaagaaagaaaggtatgttgttcattgactattctttygggtgagaaatttaatttatatttgactgtgcaaagagtcagttgttacttgtaaacttcaagtcattgtttaggtcagagttgctgttgtctaaatgca

SEQ ID NO: 108863 - DNA, 201 bp, Homo sapiens
ggtgcgttggctcacgcctgtaatcccagcactttgggaggccgaggctgggggatcacgaggtcaagagattgaaaccatcctggccaacatggtgaaaycccgtctctactaaaaatacaaaaatcagctgggcgtggtggcacgcgcctgtagtcccagctacttgggaggctgaggcaggagaatcgcttgaacctg

SEQ ID NO: 108864 - DNA, 201 bp, Homo sapiens
ccactttgggactcattatactgaattagtttcacagaggaggtaaaatctgttgtttatgattacatattaactctaccattttaccttcagcattgctrtagtatgtcatatctgaaggcaattagcacaagtgacttgaagaattgtagttttgatgacttatatgtattttataaaaggcaggcagagtttttgtgt

SEQ ID NO: 108865 - DNA, 201 bp, Homo sapiens
agccgagattgggccactgcactccagcctggcgacagagcgacactcttgtctcaaaaaaaaaacaaaaaaaaaaacaaaaaaaaaaactagtaagaggkcccagtggctcacacctgtcattctagctctttgggagactgaggagagaggatcagttgaggccaggattcaagaccagtctgggcaacataacgagac

SEQ ID NO: 108866 - DNA, 201 bp, Homo sapiens
tctccgaggatctgtaagtatatatctgtgaattcccttcatagatcttcttttacttctattacacttttcttcagaggtttgcagtattatgattgtarctttgacttcagatgggtgactaggaactcatagagtcttactaagttccagttaaacactacattcattactttggataaaacccgtgtgtatggcatc

SEQ ID NO: 108867 - DNA, 201 bp, Homo sapiens
ttaatttttttgtaggtatggggtctccccatgttgccctgcctgtctcaaactccagggctctcaggtgatacccaccacccttggcctcccaaagcacygagagtcactgtgccaggctgagtttaaaatttcttgagttggagtttatggctattttttccactagttattaaacatgtatttttgtataaggcactg

SEQ ID NO: 108868 - DNA, 201 bp, Homo sapiens
gtagcagagaattagataagggacgtatgaatacatataaatgctgttgaagttctgaagagagagagtgtttagagaaattagaggagtctttgtgaagktatcactagaacttcctatttttgtggaatatatagtagattttggtgtgatactgtggatttggacattcactcagagaaggaatgagggaagaatggt

SEQ ID NO: 108869 - DNA, 201 bp, Homo sapiens
tatttcctacagacttcatctgcagagagaaagagacgattacctgtgtggtttgccaaaggaagtgataccagcaagaaattaatggacaaaacgaaaasgggaggtctttttagttaagctggcaattaccagaacaattatgtttcttgctgtattataagaggatagctatattttatttctgaagagtaaggagta

SEQ ID NO: 108870 - DNA, 201 bp, Homo sapiens
ttagagtagtcacatgttataatacttatagttgatcaaaaaattgattcctaagtgttcttattaaagacacacaccacacacacacacacacacacacmttctctctctctctctctctcacacacacacacatgcacacacacttatgtactttcttgctttttttgacctaagatcttagataactattacagatta

SEQ ID NO: 108871 - DNA, 201 bp, Homo sapiens
gatacaaataactgactttgaccccatgtttagtaggttttttttttgtttgtttgtttgttttttttttttgtctttcttctccacactctcttaggackgttgtagcttgtaatgttagtgaattgtaattgtttatttgcatgtctgtctcctcttttagaattgtgaactcctcaggtcatggattgtattttatta

SEQ ID NO: 108872 - DNA, 201 bp, Homo sapiens
cttttttttttttttattttgagacagggtctcactctgtcacccaggctggggtgtagtggtgccatcttggctcactgcaaccttcacctccagggctsaagtgattctcctgcatgagcctcctgagtagctgggattacaggcgtgtgccaccatacccggcttatttttgtattttttgtagagatggggtttcac

SEQ ID NO: 108873 - DNA, 201 bp, Homo sapiens
tttatctcccaatgataatgaaaacgatacgtcctatgtaattgagagtgatgaagatttagaaatggagatgcttaaggtatgtttacaattataaaaayattacttcaagttctttccaaaggacatttaattaagtaaaatattaactaattctaaaccaggttccaccacaatgaaattgctactaattatgtaaca

SEQ ID NO: 108874 - DNA, 201 bp, Homo sapiens; identical to SEQ ID NO: 17858

SEQ ID NO: 108875 - DNA, 201 bp, Homo sapiens
tttggttctttgtttctttgttcattcttctctctctcccttttttatctatcatataaatatgtaaatatatattatatatccattagggaagaggaagytgtctaaagatatctagtatataggagctttgttctgcagaaaagaggatatgaagtcaattatattggaaattaatgcttaatacttttttttaaagca

SEQ ID NO: 108876 - DNA, 201 bp, Homo sapiens
aaatcagtggatgtcaaggaacaactattgttctttgtacggcatttttcaacattgtgaagagttcttatactcaaaaagtttgggagacacagtgtgayattgtttaacctgagttgaacttgtcattttgtattcttgtttagagcagggattttattttgtctctttatctaactttgtattcctaactatttcttt

SEQ ID NO: 108877 - DNA, 201 bp, Homo sapiens
atttgacatggagtggccaccattatacaatagagggaaacttggcaaagttgcactaattcagttgtgtgtttctgagagcaaatgttacttgttccacrtttcttccatgtcaggttggtatctctacatttcatttttatatggctgataattgtaatatgtcaactttatccctataaaattaagttcttttattag

SEQ ID NO: 108878 - DNA, 201 bp, Homo sapiens
ttttaaatcagtggatgtcaaggaacaactattgttctttgtacggcatttttcaacattgtgaagagttcttatactcaaaaagtttgggagacacagtktgacattgtttaacctgagttgaacttgtcattttgtattcttgtttagagcagggattttattttgtctctttatctaactttgtattcctaactattt

SEQ ID NO: 108879 - DNA, 201 bp, Homo sapiens
agatctttaaattgaacatgttttatttgggaagcaagaattaaatttgaggcatatacacagactgggtgtccttggtatctctgaagaacaaagagaaktttggaggttatagaaaaaggaaaatgtgacattgtttttccagaaagttctttggcactagtaaattttggggagttggaagctctgatgggttagtga

SEQ ID NO: 108880 - DNA, 201 bp, Homo sapiens
acataccatgcgggcatgagttttagcacaaggaaagacattcatcataggtttgtaagagatgaaattcaggtatgaggatcaatcatcattgctctccrttgctcatagtggaagtggatatttctcaaatgtttatttaccagatctttattgaatactttctttgtgttgaacataaagcagtccctctgataaatg

SEQ ID NO: 108881 - DNA, 201 bp, Homo sapiens
agacagatctttaaattgaacatgttttatttgggaagcaagaattaaatttgaggcatatacacagactgggtgtccttggtatctctgaagaacaaagrgaagtttggaggttatagaaaaaggaaaatgtgacattgtttttccagaaagttctttggcactagtaaattttggggagttggaagctctgatgggtta

SEQ ID NO: 108882 - DNA, 201 bp, Homo sapiens
agaactttctgagatgctagaaatgtttttttatcttgatggggtgtgggttttgtagataatgaaaaataaacagtaaaaaataagtaaaaaaaaaagtragaaagttgccaatacagttttacatattcctgtgatgtttttaatcgacaggcaccttcttactgagatacgtaatgagaagtttcgattatacaaatt

SEQ ID NO: 108883 - DNA, 201 bp, Homo sapiens
tttcagatttttgtactagcaattaaaatatctactggatgtaaatcacatgtgcttaatgctttgcttcataatatctgttgaagtcaattaaaatataragacagatctttaaattgaacatgttttatttgggaagcaagaattaaatttgaggcatatacacagactgggtgtccttggtatctctgaagaacaaag

SEQ ID NO: 108884 - DNA, 201 bp, Homo sapiens
aatagagaggggcgaggattgaattcttcggtaaagctgggtgattttgttttattcaatacagtataataagtataaaaagtagaacctatagagagctrtaatgggggtagttttaaagaaattctgaaaatgaaaaacttaagtaaaggtttagttcattgtttatttcacactgagcatttactacctgaatgtttt

SEQ ID NO: 108885 - DNA, 201 bp, Homo sapiens
taaaatgtgaattcactcttttgtgaggtttatctccaaaaaaggcaatattcacatatttgcaaagcatttagtactataacttcttgaatgtctgagcrgtcctgacattagggtgggatccatcagggcccaagatgagtgtttcatctttgttacttgtggcaaagcagcccttacttcttttactttgtagcattg

SEQ ID NO: 108886 - DNA, 201 bp, Homo sapiens
cttttattagctggccgttctctcattatctcaaatttatttaagtatttatgttctacctgattcactcacattccttgttttatttaattttcacaacrtacctgtgaggcattgacattttttctgttttagagaagagaaaactgaaattttaagaggctaaatgaccaggatatgtactgctattgctagcaggag

SEQ ID NO: 108887 - DNA, 201 bp, Homo sapiens
tggatgaatgtgcagaataaaagatgtgctgtagaagaaagaaaggtatgttgttcattgactattctttcgggtgagaaatttaatttatatttgactgygcaaagagtcagttgttacttgtaaacttcaagtcattgtttaggtcagagttgctgttgtctaaatgcaccaggacctagttgttgaaagggtaaactg

SEQ ID NO: 108888 - DNA, 201 bp, Homo sapiens
taggttgaattccatgtttgggtgctttgtgaatcattctcttcgatttttctgaagatgggacttactgttttatttcggtgatctttagcatacttttwaaatttttctgtttttttataggctggttttattatttaccgaaatttagagattttggatgatactgtgcaaaggtttgctataaataaaggtatgtta

SEQ ID NO: 108889 - DNA, 201 bp, Homo sapiens
atacttacgaagctcatcattgtatgctgggttctttgctaatactttcttataaaaattaaatacctccacaatcatgcatgctagcagaaacagcagasgagtagccttagcctcacttcctgcttatacctgtcatgcaaatatacagaacccagaaccctagctgaaagggagtttgagaactagtatttgtattgt

SEQ ID NO: 108890 - DNA, 201 bp, Homo sapiens
tactttcttataaaaattaaatacctccacaatcatgcatgctagcagaaacagcagacgagtagccttagcctcacttcctgcttatacctgtcatgcaratatacagaacccagaaccctagctgaaagggagtttgagaactagtatttgtattgtcccagattctgcagtggaagaattcatagtggatggaagtta

SEQ ID NO: 108891 - DNA, 201 bp, Homo sapiens
ggaaggctttttcccgtcagctgatcactgagggattcttggtagaagtttctcggtataacaaatttatgaagatttgcgcccttacgaaaaaggtaaayggtgtaggagtctgcctgtttgacttaattttgtttcccactccacattaaaagatcctttttgcttttaatagggtagaaattggcttcataaagctaa

SEQ ID NO: 108892 - DNA, 201 bp, Homo sapiens
gaaggctttttcccgtcagctgatcactgagggattcttggtagaagtttctcggtataacaaatttatgaagatttgcgcccttacgaaaaaggtaaacrgtgtaggagtctgcctgtttgacttaattttgtttcccactccacattaaaagatcctttttgcttttaatagggtagaaattggcttcataaagctaat

SEQ ID NO: 108893 - DNA, 201 bp, Homo sapiens
ctttttgcttttaatagggtagaaattggcttcataaagctaatacagaatctcagagcctcatccttcaagctaatgaagaattgtgtccaaagaagttkcttctgcctaggttcatttttcagtttttttcttgtaacttctgcattttttgttgctatttatgtgattcaaattataccagtttataggcctctcaca

SEQ ID NO: 108894 - DNA, 201 bp, Homo sapiens
tcatttttcagtttttttcttgtaacttctgcattttttgttgctatttatgtgattcaaattataccagtttataggcctctcacaagtaaaatgaattrcctgtttgtttttgtatgcctattttagtcagtttgggggaagggatctgtgaggaaaggataagtcatagagcacttttcttttttaagagacagagtc

SEQ ID NO: 108895 - DNA, 201 bp, Homo sapiens
tacagaacatgccaccatgctcagctaatttttgtattttttgtagagacagggttttgccatattgcctaggctggtcttgaactcctaagctcaagcartcttcccgcctcagtctccaaagttctggcactacaggtgtgagccactgtgcctggcctctttttctcatttaaatacttttcataccttttgtaaaac

SEQ ID NO: 108896 - DNA, 201 bp, Homo sapiens
gcaagctccgcctcccgggttcacaccattatcctgcctcagcctcccgagtagctgggactaccggcgcccgccaccccacctggctaatttttttttttatttttagtagagacggggtttcaccgtgttagccaggatcgtctcgatctccggacctcgtgatctgcccgcctcagcctcccaaagtgctgggattac

SEQ ID NO: 108897 - DNA, 201 bp, Homo sapiens
agaatttgtgttggtaatttttaatgcaacttggacaatttctgaaagatgtaactttcttttttttgagacgagtctcgctttgttgcccaggctggagkgcagtgacatgatctcaggtcactgcaagctccgcctcccgggttcacaccattatcctgcctcagcctcccgagtagctgggactaccggcgcccgcca

SEQ ID NO: 108898 - DNA, 201 bp, Homo sapiens
tttcaccatgttagccaggttggtctcgatctcctgacctcgtgatccacccgcctcggcctcccaaagtgctgggattacaggtgtgagccaccgcgccyggcccaagagtaaccttttcaaaagcagctttgctctactgatttgggtaaaagcttagttgcagttggtttgggaggaaatgggagcagaaaatttgag

SEQ ID NO: 108899 - DNA, 201 bp, Homo sapiens
tttaatctgggaggtggaggttgtagtgagctgagattgcaccattgcactccagcctgcacaagagcgagactctgtctcagaaaaaaaaaaaaaaaaaagttagctagctgaagagtataggaaagaatgggtacaggaaattacaggtgccaagttacagaggtgagagaaattatggtatctataggtaattgaaag

SEQ ID NO: 108900 - DNA, 201 bp, Homo sapiens
ctttaatctgggaggtggaggttgtagtgagctgagattgcaccattgcactccagcctgcacaagagcgagactctgtctcagaaaaaaaaaaaaaaaaaagttagctagctgaagagtataggaaagaatgggtacaggaaattacaggtgccaagttacagaggtgagagaaattatggtatctataggtaattgaaa

SEQ ID NO: 108901 - DNA, 201 bp, Homo sapiens
ctgtgcaaaggtttgctataaataaaggtatgttaagatccataaataaaatgtgaattcactcttttgtgaggtttatctccaaaaaaggcaatattcayatatttgcaaagcatttagtactataacttcttgaatgtctgagcagtcctgacattagggtgggatccatcagggcccaagatgagtgtttcatctttg

SEQ ID NO: 108902 - DNA, 201 bp, Homo sapiens
ttctttttttctttttgagacagagtcttgctctgtcgcccaggctggagtgcagtggtgcaatcttggctcactgaaacctctgcctcctgggttcaagygattctcctgcctcagcctcccgagtagctggcactacaggcgtgccaccacacccagctaattttttgtattttttttagtagagacgaggtttcaccg

SEQ ID NO: 108903 - DNA, 201 bp, Homo sapiens
cctaatcagaatgttagttcctgaaaacattgacacgtaccttatccacatggcaattgagatccttaaacatggtcctgacagcggacttcaaccttcaygtgatgtcaacaaaaggagatgttttcccggttctgaagagatctgttcaagttctaagagaagcaaggaagaagtaggcatcaatactgaggtattaat

SEQ ID NO: 108904 - DNA, 201 bp, Homo sapiens
ctttgaggaattgctacacagttttccacaatggaaagcctttagttctaatccatgtcttggcatagagtttcttttctttttttttttttttttgaggkggagtttcgctcttgttgcccaggctggagtggaatggtgtgatctcagctcactgcaacctccacctcctgggtttaagtggttctcctgcctcaggct

SEQ ID NO: 108905 - DNA, 201 bp, Homo sapiens
ataattctcatggttctagtctcgagctgtaggattttgatcactgtttcaaacaataatgtgagtttgctaagaggtctaaataacaaaagctaagtgttccaaacacatatccaaacctatacactgggcaatgcatctgaattatatgtgaaatttcctgccattatttaagacacaaaaggaacattattttgataa

SEQ ID NO: 108906 - DNA, 201 bp, Homo sapiens
ttcattgtcagttgtatgtgctccagataacttgaacagtctgtggttgccttttaatttttgaattatgtctttagttatgcagaagtttaaaattttarcataaattaatttacactatttttctcactttagcatgagtctatcagatggggatgtggtgggatttgacatggagtggccaccattatacaatagagg

SEQ ID NO: 108907 - DNA, 201 bp, Homo sapiens
cgaatgagtgagcccctaaacaggaccaggagtggcagaagaaagaggcagcaactgagatgtgttttttctaagctgaaaggctttttttttttttttttgcaacacacctttaacactaaagtccaatatttatataattggtcaagtaagtggagctgttctagctataaatatggcaactctgcttgctcgtcctat

SEQ ID NO: 108908 - DNA, 201 bp, Homo sapiens
accttcaagagttcagtggaaagtgattcattcagtattagaagaaagaagagataatgttgctgtcatggcaactggtaagttgtacttaagcaaaaccwaatcctttaaaaaaataaaacataaagagtttgaaatgcttaatctttcattaaactctcaaaatacaaatgcaactacaaatgatgtaaactatagaag

SEQ ID NO: 108909 - DNA, 201 bp, Homo sapiens
ccgaatgagtgagcccctaaacaggaccaggagtggcagaagaaagaggcagcaactgagatgtgttttttctaagctgaaaggctttttttttttttttttgcaacacacctttaacactaaagtccaatatttatataattggtcaagtaagtggagctgttctagctataaatatggcaactctgcttgctcgtccta

SEQ ID NO: 108910 - DNA, 201 bp, Homo sapiens
gcaaaacctaatcctttaaaaaaataaaacataaagagtttgaaatgcttaatctttcattaaactctcaaaatacaaatgcaactacaaatgatgtaaamtatagaagagagtgaacaaagaacagatgctcagatttatgtatcaattagcttttaggaagatagcatactagtattgaccattcatctgtataagtac

SEQ ID NO: 108911 - DNA, 201 bp, Homo sapiens
ggaaacttggcaaagttgcactaattcagttgtgtgtttctgagagcaaatgttacttgttccacgtttcttccatgtcaggttggtatctctacatttcwtttttatatggctgataattgtaatatgtcaactttatccctataaaattaagttcttttattagctggccgttctctcattatctcaaatttatttaag

SEQ ID NO: 108912 - DNA, 201 bp, Homo sapiens
cccgaatgagtgagcccctaaacaggaccaggagtggcagaagaaagaggcagcaactgagatgtgttttttctaagctgaaaggctttttttttttttttttgcaacacacctttaacactaaagtccaatatttatataattggtcaagtaagtggagctgttctagctataaatatggcaactctgcttgctcgtcct

SEQ ID NO: 108913 - DNA, 201 bp, Homo sapiens
ctgtttatgtaggcaagattggccttgttatctctccccttatttctctgatggaagaccaagtgctacagcttaagtaagtcatgttatcattgccacamtatcaccctctttttttcttctgtgggtgaaacatctgatccatcatgcatgttaaaatctagttcacaataacacatttctgcaggtattgctttatct

SEQ ID NO: 108914 - DNA, 201 bp, Homo sapiens
ccccgaatgagtgagcccctaaacaggaccaggagtggcagaagaaagaggcagcaactgagatgtgttttttctaagctgaaaggctttttttttttttttttgcaacacacctttaacactaaagtccaatatttatataattggtcaagtaagtggagctgttctagctataaatatggcaactctgcttgctcgtcc

SEQ ID NO: 108915 - DNA, 201 bp, Homo sapiens
agggatatgttctgagaaatgtgttcttaggacattttgtggttgtctgaacatggacttacacaaacctacatgataaagcttactgcacacctaggctrtatgatagagcctattgctcctaggctgtaaacctgtacagatgttactgtaatgaatattgcaggcaattgtaatacaatggtaagtatttgtgtatct

SEQ ID NO: 108916 - DNA, 201 bp, Homo sapiens
gtaggcttaatttaataagacaaagtaaatggcatttggaaacctcatggatttaatgttttatttaaatgatttctgatttttaaaaagtaaatattgtwtccagaaggctgagaaacaagttagtagggagattttttctttgcaaaaaaattttacagttgtgtctttaacattgtaccacaaactgttgtcctacca

SEQ ID NO: 108917 - DNA, 201 bp, Homo sapiens
ggtatgactatggaattgagtggctaaggtctgttgaagaaaagattgtcggaaatgcaggggtcaaggaactggcctgtggatgttgaagtcactggcastgatcaaggaatagtagtggagtgaaagtagttaatgaatcaggcactaagatctccaagggatgaaaggatgcagtttggagatgacaagataactgta

SEQ ID NO: 108918 - DNA, 201 bp, Homo sapiens
taaacagtattattaagtagcagcatacatggtgttatactgacttctgattttgcaatagtacagacaggttcagattctcatttccaccttctccttcygcctaggtgaataactgctgggttatagtacagatgactgcagatcatttggaatttactttaaatgtaaacagtaaaaatttgaaagagagggaaagtg

SEQ ID NO: 108919 - DNA, 201 bp, Homo sapiens
ctgggattacaggcgttagccaccgcgcccagcctgaaagatgaactttaaaatggggaaggatactagtaaagccatttcttactcatgtatacattttyccctccatgaaattagagcagccaccttttacatgacttttacatgcatttcagatttttgtactagcaattaaaatatctactggatgtaaatcacatg

SEQ ID NO: 108920 - DNA, 201 bp, Homo sapiens
cccgacctctacaaaaacaatttcttaaaattagccaggcatggtggtgctagcctgtaatcccagctatttaggatgcttaggcaggaggattgcttgarcccggggatttgaggctgcagtgagccatcattgtgccacaatactccagcctgagtgatagaaaaaaaaaaaaaaagtgtctttgttatattccaaact

SEQ ID NO: 108921 - DNA, 201 bp, Homo sapiens
aattatcttttgtgttgatgtgagagtttagctctgagattcttccacatgtaaaatgtaatcccccaaagtatttggcaagcacattttattgccttggstcagataattgaaacattaggcatcatatatatagcatgtaaaaagtaaaacagaaacatttatgtttctcaccaagcagtaaattagtactcaactaat

SEQ ID NO: 108922 - DNA, 201 bp, Homo sapiens
actagtgcctgtgttacacacctcttgttcaggttttatcatttaaaataaataagaataaacagtccatagcttatcttacttactgaataaatgctctratttgacagtcatgtttcttaaagttccttacaaaggccattgcccaagaaaccaaataattccattatactatttttgaaatagaacacataataaatg

SEQ ID NO: 108923 - DNA, 201 bp, Homo sapiens
attatcagcatgctggatctcattgacctttttagaacattctacccaacaacagtagagtacacattcaagtgcagatgcagtattcatgaacatggatyatattcagagtcataaaacaaaccttaacaaatttaagaatcttgtatttgtatattttttgactagaatggaattaaactagaaaacaataacagaaag

SEQ ID NO: 108924 - DNA, 201 bp, Homo sapiens
ttatttggttgtattttattgtgtgatatggtggtataattatccttacctcccaggagtttgagagggtcttgccagttaaccgcagaattaaacatgcytaggactaattaatcaggagcaatactacaattaattggaggtaatttgaaacctggtttcaaataaccctgatattatgcacacatggtgcacactttt

SEQ ID NO: 108925 - DNA, 201 bp, Homo sapiens
tggtagagacagtctcagtatgttgcccaggctggttttcaaactccttgcctcaatcagtcctcctacttcagcctcctaaagtgctgggattataggcmtgagccatcacgcttgactaatgtttttgtaaataaagttttctcagaacacagccatgccttttgtttatgtgttatgtagggctgcctgagttaagta

SEQ ID NO: 108926 - DNA, 201 bp, Homo sapiens
aaagttataatttaaaaaaattataataaaatcagaaaataaaggtctgagatggaaaattaaaagaccaaagccacccataagcacaataaatccctccycccaaaaaattatatctattaaaaaaaggtgttgcgccaggcactgtggctcatgcctataatcctagcactttgggaggccaagacgggcagatgactt

SEQ ID NO: 108927 - DNA, 201 bp, Homo sapiens
ctctactaaaaataccaaaattagctgggcttggtggcacacacctgtaatcccagctacttgggaggctgaggcaggagaattgcttgaacccccatggraggtggaggttgtggtgagccaagattgtgtcattgtactacagtctggacaacagagtgagactctgtctcaaaaaaaaaaaaatagaatttgtgcagt

SEQ ID NO: 108928 - DNA, 201 bp, Homo sapiens
accacgtttgagagattcttattcactgtattttctttaattatacttgaattttggtttacattgaggagtgccctcaaagatattaacagatttttaaraaatcctctaaaaaactcattcttagggaaatttgttcacttactaggtgaggagcaaaataaaaatccttaatatagaagagctattatctgtcttcaa

SEQ ID NO: 108929 - DNA, 201 bp, Homo sapiens
acagtctctgttgcagtaactcagttctgttattgtagtgtgaaagcagccacagacaaatgtaaacaaatgtgcctgtctttcaataaaactttatctasaaatacagatagtgggccacatttggcttgcgagctgtagtttgctgttcctgacttagtatgatatgcagcattgtgtagtggaaagattttatagtat

SEQ ID NO: 108930 - DNA, 201 bp, Homo sapiens
cttttcctaaatctaaaatagtatagtcttttttatattgtcagcataaatgaatgcacttatgtaaatgaatatttttaggcgttaagtaaaatattctrtggaaattgaacatttaagttgtttatacttctatggaaatcgtttacgcttttaataaagaagcacaagtttctacaaaatacattctaacagatgttt

SEQ ID NO: 108931 - DNA, 201 bp, Homo sapiens
ctctgttttaattctgtttttttttttttttaatgttacttgttttagtttggattcctagttgaaaagggaatatgattcctttaaaacaaagatactcygctttaaagcaaaggtatatcatcctcttcatggtgattgccatggaaacaagacaatgtaaatttattcaaatagtacacagtttttatagttattgat

SEQ ID NO: 108932 - DNA, 201 bp, Homo sapiens
aaaatgtcaggaattcataatgattcatatacccaaggattttcattgatagtgaggtaaggttattcttgagaaagactcaaagtcataaaataatagamtttcgaaactaccagaattatacaagtcaattaaaatgactgatttgttttaagaggaagaaatactaaatgtataattattagatgcagcatattgtat

SEQ ID NO: 108933 - DNA, 201 bp, Homo sapiens
gccccgaatgagtgagcccctaaacaggaccaggagtggcagaagaaagaggcagcaactgagatgtgttttttctaagctgaaaggctttttttttttttttttgcaacacacctttaacactaaagtccaatatttatataattggtcaagtaagtggagctgttctagctataaatatggcaactctgcttgctcgtc

SEQ ID NO: 108934 - DNA, 201 bp, Homo sapiens
ttgataggctttcttcctttagtcttttctttagaaggtagaaaggaagaattaaataagataaaaccaaacgggtctgaagcatgtataaagtatatatrtttgctcttttgttcttctttttctttagttcccactgggaatttgaaggtccaacaatcatctactgtccttctagaaaaatgacacaacaagttacag

SEQ ID NO: 108935 - DNA, 201 bp, Homo sapiens
tgctggcctagaccatggtgttgccatagtggggtgaccagtctgaatagccaacaatgcttcctcagtaaatacccattttgtcttggtgggatttctayaaattgcaaaatgcagctattatgaagctgtaaaagagaaacagaaacatgtaacacctgggactgttttattaggcccaccgtatgctcagaacatgaa

SEQ ID NO: 108936 - DNA, 201 bp, Homo sapiens
tgtcactgtattctttcaaagaagccaatgaaataaactgttttctccctctatgtggtgtttttctacttgaacataaatgcacattttattttatttcmagactttttgtggccagcacccaatgaagagcaagttacttgcctcaagatgtactttggccattccagttttaaaccgtgagtataatctcatttaatc

SEQ ID NO: 108937 - DNA, 201 bp, Homo sapiens
ttctttttctgttaagcctccctgttaagtaatagcagcaagtttagtttggccatgaatatcttctagagattgtatcggggtactgataaacacatttrtagctcagggatactgcatcagccatattttaaaatgggactaacagtttaaaaactataaatattcacagtgttaagaaacaatctcaagatgcattaa

SEQ ID NO: 108938 - DNA, 201 bp, Homo sapiens
tgggaggcggagacatgggacttgcatgaacccaggaggcagaggttgcagtgagctgagattgcgacactgcattccaacctgggcgaccgagcaagackcggtctccaaaaaaaaaaaaaaaaaagaccatatgtaatgtttcttcattgttctaagataaatctttaaggctgttgaggttttttgtatacaaaatgg

SEQ ID NO: 108939 - DNA, 201 bp, Homo sapiens
agtaaagccatttcttactcatgtatacatttttccctccatgaaattagagcagccaccttttacatgacttttacatgcatttcagatttttgtactarcaattaaaatatctactggatgtaaatcacatgtgcttaatgctttgcttcataatatctgttgaagtcaattaaaatatagagacagatctttaaattg

SEQ ID NO: 108940 - DNA, 201 bp, Homo sapiens
catctctgacattatttttcaattatatagagaatgctttttgtaaaatactgatttatttaaagatattacaatcatagtagttttttgcaatctttttwaaatcagtggatgtcaaggaacaactattgttctttgtacggcatttttcaacattgtgaagagttcttatactcaaaaagtttgggagacacagtgtga

SEQ ID NO: 108941 - DNA, 201 bp, Homo sapiens
cagacacacgggatggggtgggggaggggtgttgagaacaatcgcagacgcccctcggcctgaccgccccgccgccgcccgcgacccccacgccgggcccrgctcccccggcgccgcagcgcggggctccagccactgccggccggttggcggccgccgctccggctctgcccgcgctccccgcatccctccgccgccccc

SEQ ID NO: 108942 - DNA, 201 bp, Homo sapiens
attttggtttacattgaggagtgccctcaaagatattaacagatttttaaaaaatcctctaaaaaactcattcttagggaaatttgttcacttactaggtraggagcaaaataaaaatccttaatatagaagagctattatctgtcttcaaaattaagtctttgagtagatttgtgaataaatctaatagttttgctgaat

SEQ ID NO: 108943 - DNA, 201 bp, Homo sapiens
aacattggcaatagactgaataaataacatctctgacattatttttcaattatatagagaatgctttttgtaaaatactgatttatttaaagatattacartcatagtagttttttgcaatcttttttaaatcagtggatgtcaaggaacaactattgttctttgtacggcatttttcaacattgtgaagagttcttatac

SEQ ID NO: 108944 - DNA, 201 bp, Homo sapiens
aaatgaaaggtttataatctttttgtcatattttacagtcgttagcgtttaacaatttatagcataggatttgggtttttttttttttcattttaaagaaraagtttatttaagcaagacacttgactaagggaagactatcttggagttattattactagagtaatttatttctacttaaagacagattgccccacaagt

SEQ ID NO: 108945 - DNA, 201 bp, Homo sapiens
aataattctcatttgaatttatgatagtttcagatctacccaaagggtgacttaggaatttaacttctaaatctatttaaatgaaaggtttataatctttktgtcatattttacagtcgttagcgtttaacaatttatagcataggatttgggtttttttttttttcattttaaagaagaagtttatttaagcaagacact

SEQ ID NO: 108946 - DNA, 201 bp, Homo sapiens
acctgggaggcggaggttgccgtgagccgagattgggccactgcactccagcctggcgacagagcgacactcttgtctcaaaaaaaaaacaaaaaaaaaaacaaaaaaaaaaactagtaagagggcccagtggctcacacctgtcattctagctctttgggagactgaggagagaggatcagttgaggccaggattcaaga

SEQ ID NO: 108947 - DNA, 201 bp, Homo sapiens
tcgcttgaacctgggaggcggaggttgccgtgagccgagattgggccactgcactccagcctggcgacagagcgacactcttgtctcaaaaaaaaaacaamaaaaaaaacaaaaaaaaaaactagtaagagggcccagtggctcacacctgtcattctagctctttgggagactgaggagagaggatcagttgaggccagg

SEQ ID NO: 108948 - DNA, 201 bp, Homo sapiens
gaatcgcttgaacctgggaggcggaggttgccgtgagccgagattgggccactgcactccagcctggcgacagagcgacactcttgtctcaaaaaaaaaamaaaaaaaaaaacaaaaaaaaaaactagtaagagggcccagtggctcacacctgtcattctagctctttgggagactgaggagagaggatcagttgaggcc

SEQ ID NO: 108949 - DNA, 201 bp, Homo sapiens
tgatggggtgtgggttttgtagataatgaaaaataaacagtaaaaaataagtaaaaaaaaaagtaagaaagttgccaatacagttttacatattcctgtgmtgtttttaatcgacaggcaccttcttactgagatacgtaatgagaagtttcgattatacaaattaaagatgatggcaaagatggaaaaatatcttcattc

SEQ ID NO: 108950 - DNA, 201 bp, Homo sapiens
gctgaatttacttagatcttaagacagaataatcatgtagaaaatttaaaatgtcaggaattcataatgattcatatacccaaggattttcattgatagtraggtaaggttattcttgagaaagactcaaagtcataaaataatagaatttcgaaactaccagaattatacaagtcaattaaaatgactgatttgttttaa

SEQ ID NO: 108951 - DNA, 201 bp, Homo sapiens
tattttcttcatgtacatatggatgatattttcgaatgaccacttttctcttttgctttttattattagactgtttttttcttcttgttaaaggataaaargattagaacataaaaggatatttacacattgtttccccattgacttattcccaagatggtagctaataaacaccaaatgatatagtagttaaagatacat

SEQ ID NO: 108952 - DNA, 201 bp, Homo sapiens
ttttgtagagatagtattcgccatgttgcctaggctggactcaagccagcctcctgccttagcctcccaaagtgctgggattgctggcacgtaccgctacrtccagccagggctgagtttctgaatcatcattgcagcaagagaaattggattacctttagaccactggctctactgtgggctgggagtgggacaccttcc

SEQ ID NO: 108953 - DNA, 201 bp, Homo sapiens
tccaggaattacacaatcacaaaattgctgatttttcttcttattcatgttacataaacttatcctgtccgaaaagactgtatttgaacttactatgtaaratttgctttaggtaaatttatggctgcttccagaattgtgtattaattttccagtttcttttttaccagtctccacttttacctttccctcttcccccta

SEQ ID NO: 108954 - DNA, 201 bp, Homo sapiens
taactatacctatcagaagcctatgttttaagtccaatgtataggcactgctctgtttgtctctggtgggaacttaccctgctttacctaatttcatcctrgcttcctttttgtgaaagatcacccttgcttagcctattttttggcaaatctacaccttggaaatagtagtaaatgacataagcatattaatatttatga

SEQ ID NO: 108955 - DNA, 201 bp, Homo sapiens
gtccattaacactcaactcaaataccatcaatttgatttatatctaacaccacaaagttaggtgttgagttacatgtggttatattgtaactaatagtcarcccttcatggacttctattctttgatgagactcttcttgtaggagtagtaggtgccttaaagcaccttttcatagttgtcagattgaaatccttcaccag

SEQ ID NO: 108956 - DNA, 201 bp, Homo sapiens
aaaaattgcgtatatgttgatgggtcttttctggcagaccagtagagaggaaaaagttgatgatgtaggagatgggaaaatgtctttgagtagatgtcttygagaaaatgtctttgagtagatgagaggtttgcacacatggagaggttggatgtaggagtactgatagttcatccatagttacataagaaaaggtagatg

SEQ ID NO: 108957 - DNA, 201 bp, Homo sapiens
caagtacaaaaagcctccttgggaattatgggaactgaaaaatgctgtgataattgcaggtccaggtaaagatttcttattatagatggacattctaaaastctttctttctcttccttttcatgtttaactgaatttttgttgaatgataagtatttcagttttttaaacaaaacaatgaatgtgtttagatatgagaaa

SEQ ID NO: 108958 - DNA, 201 bp, Homo sapiens
attatgcagaggtatttaatcagtcagaaggttgaatagtcaaattattagtgagtgaagtctattttgatgaggattttactaatgctgtcccttagatrttataagtaaatcgttgttttcttttgaaatatctgaaacctagttaacatggactttcatttgttcttgtaaagatatgcaaagctatttgggagattg

SEQ ID NO: 108959 - DNA, 201 bp, Homo sapiens
ttactttttctattggagttttaagtaaattcttgtatattagtgtgatacattttaagttatttttgtatatggtgtgaggtaggggtccaacttcactsttttccatatggagatccagttgtcccagcaccacatgtttaagagtctattctttccccactgaatggacttggcacccttgtcaaaaatcaattggtg

SEQ ID NO: 108960 - DNA, 201 bp, Homo sapiens
atgatgttgagcatcttttaatgtgcttattggccattatatgtcttctttgggaactgtctattaagtcctttgcccattttttaattgagtttttttttctgttgaattgtgggagatctttatatattctgaatattaaacccttattgggtgtatgatttgcaaataatttctcccattttgtgggttttcttcact

SEQ ID NO: 108961 - DNA, 201 bp, Homo sapiens
agaatgagcacgatgggtataacatttttgtaggtttttaaagttgaaatttagtgtaaatccaaagaatcaatagacaagtctgtgttttacttaacctrtatgtttaaattagcatttttagatactgattttattcctaatttcagaattctcagcgtcttgccgatcaatatcgcaggcacagtttatttggcactg

SEQ ID NO: 108962 - DNA, 201 bp, Homo sapiens
tgaacaagccaggcatactctgtttcctgaggggcctacagttttattggggatatagatgagtgaagaaagcaattgcagtgtagggagatgagtcttaygtcatgggaaaacaaggtgctgtagttgacacaccgagaggcatctgacacattgggggaaatattctagaatatttcctggagaaagtgcaggtaaaag

SEQ ID NO: 108963 - DNA, 201 bp, Homo sapiens
tttacaatacactcagcccttgtggcttaagatcaggggctcagaggctgtgacaactcatgatgctgaaaatgtatccaatgaaaacgaagtactagctygtttagtagtaacgaagtactattaatttttaatatagtctgatactttattttctaattgtagaagcaacattcttagctatatctttctagaatgttg

SEQ ID NO: 108964 - DNA, 201 bp, Homo sapiens
taaggtcaacggtatgactatggaattgagtggctaaggtctgttgaagaaaagattgtcggaaatgcaggggtcaaggaactggcctgtggatgttgaastcactggcagtgatcaaggaatagtagtggagtgaaagtagttaatgaatcaggcactaagatctccaagggatgaaaggatgcagtttggagatgacaa

SEQ ID NO: 108965 - DNA, 201 bp, Homo sapiens
tgcactgagtagtaagaatatataatggtgtgtggtatttcccaagttaaaaaggtcagataaggcttccttgtggaagtgatagttcaaatctgaaagartaggaattaattaggtaaaaatgtttgatgcaaattttaagattttccttctgagtagtcagtagcttttccttcttaacatagaagatgacaaaaccat

SEQ ID NO: 108966 - DNA, 201 bp, Homo sapiens
caattaacagaggaggccttgttcagagtgagaaatcattaagcatttgttgttgaaatttcttactgtactctgttttaattctgtttttttttttttttaatgttacttgttttagtttggattcctagttgaaaagggaatatgattcctttaaaacaaagatactctgctttaaagcaaaggtatatcatcctcttc

SEQ ID NO: 108967 - DNA, 201 bp, Homo sapiens
tgcccaaatccgtaagctatgttctgtatagcagctttttcatcataggcagtttttactcttatcagtggacaacctacaaaattaactaaacacttaarcaattaacagaggaggccttgttcagagtgagaaatcattaagcatttgttgttgaaatttcttactgtactctgttttaattctgtttttttttttttt

SEQ ID NO: 108968 - DNA, 201 bp, Homo sapiens
tacaatatgaaaaagtatatttttgtagcctacttttaaatccagaatagaggaggttaagaaggttgtgataaccatgagctctttttttttttttttgrgacaaggtcttactctgtttcccaggctggagtgccgtggcacaatcatagcttactgcagccttgaactcttgggctcaagcaagccttccacttcagc

SEQ ID NO: 108969 - DNA, 201 bp, Homo sapiens
tcagataccgttgtaaagactttgcttttaccggaaactgatacgttgggtcatgtaccctggccagtcagttctctttattctaacacttagccgatcarttagatttccacattccatgatatgtcagttttggtgacccttatttttccacctggtttataaagggaaagaatgtgatatgtcacccaggctctggag

SEQ ID NO: 108970 - DNA, 201 bp, Homo sapiens
acataaacatagtaacatagtcatttattatcattttcaagtattatatactgtacataattgtacatgctagacttttacacagctggcagcaaggtgartttgtttacaccattaccaccacaaacacatgggtgatgctttgcattgtgatgttacgatggcatgatgtcactaggtggtaggaacttttcagctcca

SEQ ID NO: 108971 - DNA, 201 bp, Homo sapiens
tataacgtacctgcatatgtacccttgaaactaaaataaaagttaaaaaatttatcttcttttgccaataataaattaaccttagcttactgtaatgattyttctttatgaattaaaatctttttactcttttgtaataacacttggcttaaaacacaaacatattgtacagctatacaaatatattttctttatatcctt

SEQ ID NO: 108972 - DNA, 201 bp, Homo sapiens
cttgaacccccatgggaggtggaggttgtggtgagccaagattgtgtcattgtactacagtctggacaacagagtgagactctgtctcaaaaaaaaaaaaatagaatttgtgcagttccccccacccccttttttttttctgttggcatttttgctatcatttagctgccttctttatatcctgaaacttacaggtggtgt

SEQ ID NO: 108973 - DNA, 201 bp, Homo sapiens
ataagctgtgatcatgccactgtgctccagcctgagtgacacccagagtgagaacctgtctcaaaaggagaaaaaaaaaaaagtaacagtagacgctgggractactgaggggagggaaggaacaatggttgaaaaggtgggaagggacagtggttgaaaaactacgtgttgggtactatgctcactatctgggtgatggg

SEQ ID NO: 108974 - DNA, 201 bp, Homo sapiens
aaggatttcctgtcactttgctgcagaacctcagctcgcggagagcaagcccctttgcttgccctgtagaaatattttaaattattatcctttttttttttaacagaagtaaataggagatacgttagaggattttctctcctagatgtgtaaatacaaacttggggtcttataactcaataaatctgataaatttctttt

SEQ ID NO: 108975 - DNA, 201 bp, Homo sapiens
tgtgttgtttttaagcttcactctagtttatatattttaaatgtcataaaataccacatacttataagagaaaaggttctattcattgctgaagtggaagyttatcattaatttttatttatttatttttttttccagttttggaattcttattactttgaacccaagaaccactgataactagcacaatccagtgaaaca

SEQ ID NO: 108976 - DNA, 201 bp, Homo sapiens
cttggctcgctgcaacctctatctcccaggttcaagtgattctcttgcctcagcttcctgagtagctgggactacaggcgtgtgccaccatgcccagctaytttttgtattttttgatagagacagggttttccatgttggctaggcaggtctcgaactcctgacctctgatgatccgcccacctcagcctcccaaagtgc

SEQ ID NO: 108977 - DNA, 201 bp, Homo sapiens
tagaattttctcccctcagaaaattaagaggaaataaaagtctgtagcaaatcacttggcaaaataatggctccttttgtaataggaatttttactctttygatttatctgttacataagttcaaatttttacatattttccaccttttttaaaaaagagtgatatgtagtcaatatcaatttgagcaacactgttgcata

SEQ ID NO: 108978 - DNA, 201 bp, Homo sapiens
ataattatccttacctcccaggagtttgagagggtcttgccagttaaccgcagaattaaacatgcttaggactaattaatcaggagcaatactacaattarttggaggtaatttgaaacctggtttcaaataaccctgatattatgcacacatggtgcacacttttctagtagacatttaatgaaagtaatttaaaaccta

SEQ ID NO: 108979 - DNA, 201 bp, Homo sapiens
tctttttctttagttcccactgggaatttgaaggtccaacaatcatctactgtccttctagaaaaatgacacaacaagttacaggtgaacttaggaaactkaatctatcctgtggaacataccatgcgggcatgagttttagcacaaggaaagacattcatcataggtttgtaagagatgaaattcaggtatgaggatcaa

SEQ ID NO: 108980 - DNA, 201 bp, Homo sapiens
gcaccatttcaaatgtaatgttaaaaaataataaatggagaagtagatagctaacaagtaggcttaatttaataagacaaagtaaatggcatttggaaacmtcatggatttaatgttttatttaaatgatttctgatttttaaaaagtaaatattgtatccagaaggctgagaaacaagttagtagggagattttttcttt

SEQ ID NO: 108981 - DNA, 201 bp, Homo sapiens
ggaaaaatacatttaagattataagtctggttataagcttaaaaagtgacccagaaagggatatcattgctaaaaaaaaaaatccccttgtgacctgggtrcattttgcaaagccacaggtttgcagtgttacacaagggccaaaggaggccatgagttgtctttggttgtggggccggagggtaactgttcatgaaaata

SEQ ID NO: 108982 - DNA, 201 bp, Homo sapiens
tcttcaaataatatttttctcagactggaaatttgtattctaaattatttttagaaaaaaaaaatccccaccccctccagaattaaaacacctgtaaaatwcaggattatattggaagtgttgacatggttttaagggtagcaattgcaaaagtgctactaaaatatattattacaggtatatttttatatcagttaattg

SEQ ID NO: 108983 - DNA, 201 bp, Homo sapiens
ggaatggggagcagctgtaaagaaaaatgaagcttcgcttgcttgcctgctgctcacctactgctttgtggcctggttcctaacaggccatggactggtamtaatctgtggccctggggttgggaacctctagccctgaccaatgttagggagcttttttcctgtgttttcttcaagtggtttcatggtttggggtcttac

SEQ ID NO: 108984 - DNA, 201 bp, Homo sapiens
ctggttataagcttaaaaagtgacccagaaagggatatcattgctaaaaaaaaaaatccccttgtgacctgggtacattttgcaaagccacaggtttgcartgttacacaagggccaaaggaggccatgagttgtctttggttgtggggccggagggtaactgttcatgaaaatagtgagtgtctgaagattaagaaaatc

SEQ ID NO: 108985 - DNA, 201 bp, Homo sapiens
gtgggttttcttcactttttgatattgttctttgattcacttttaaatttttatagagtccagtttatctgttttttcttttattacctatgcttttggcrtcatacctaattcccaaatccaatgccatgaagattttctgttatgttttcttttaatagttttatagttttactttttctattggagttttaagtaaat

SEQ ID NO: 108986 - DNA, 201 bp, Homo sapiens
ttgttctttgattcacttttaaatttttatagagtccagtttatctgttttttcttttattacctatgcttttggcatcatacctaattcccaaatccaakgccatgaagattttctgttatgttttcttttaatagttttatagttttactttttctattggagttttaagtaaattcttgtatattagtgtgatacatt

SEQ ID NO: 108987 - DNA, 201 bp, Homo sapiens
actaattcttccctaaaatttcccacaattgtgtaaacttacctcagtatattcatagatatgagacattctatcaattttaccctcttaaagatgcagarataatgcattatgtttcatcccaccatctttaatgagaagcttccatcttagattaatattagagaatgttaaaatactctgcaatcaggtaaggacgct

SEQ ID NO: 108988 - DNA, 201 bp, Homo sapiens
ctgagtgggggcatgattttagggattcattcaggaagttgggctccctaaagacagcactgccaatggtaagctttgccaagtctgatgtcccgaaattrcattcttaataaggagagcattcaggattggggagtggtaaagaagctgaagacttcactataaaagagcaaatggataatgtaaaaagagaactatttt

SEQ ID NO: 108989 - DNA, 201 bp, Homo sapiens
ataaggcattgtttttttttctccccatttcagtgatcttggtatcctgggatattgtttttaaaattatcgttataattcctttgagaatttagtgaaaygttccctttaaccaacttaggaaaaattaatatctttgtacatgattttgagctgtaaaataaacattttaaactgggaataattggagtttagttaaag

SEQ ID NO: 108990 - DNA, 201 bp, Homo sapiens
attctgcaaattgaaatgaattatttaaaaaaaaacaactttaatgtttattaagcaagttttgttattcatgagtttcattagccttttattttttttttaaattttgaagtaaaatttcttgctgtcacaatacacattaaaaattacaaatatgacacatattaaacacattaagatggccgaataggaaaaatatgc

SEQ ID NO: 108991 - DNA, 201 bp, Homo sapiens
atacttgggttattctgcaaattgaaatgaattatttaaaaaaaaacaactttaatgtttattaagcaagttttgttattcatgagtttcattagcctttwattttttttttaaattttgaagtaaaatttcttgctgtcacaatacacattaaaaattacaaatatgacacatattaaacacattaagatggccgaatag

SEQ ID NO: 108992 - DNA, 201 bp, Homo sapiens
tatgaaacctttatgaaccttctggatagagaagatgactgctgatttctgtgattagaaattatacttgggttattctgcaaattgaaatgaattatttwaaaaaaaacaactttaatgtttattaagcaagttttgttattcatgagtttcattagccttttattttttttttaaattttgaagtaaaatttcttgctg

SEQ ID NO: 108993 - DNA, 201 bp, Homo sapiens
gtaaaacatctcccagaacatgaaagaatacaaactttattcatgttacgttgtgacaggagactttgttggatgcgcctgattttcctgccaattcacarcttcattaaaacagtaatgctttgaaatatggcttaggaaacttcacaatgatcattaattacacctaatttctggaagagtatatgcatgtatgtgttg

SEQ ID NO: 108994 - DNA, 201 bp, Homo sapiens
tttaggcttatgaaacacttagctacttaaattatttaattttttttcatgtgcagatggtattgtacccaaacactacctttgtgtgtgtgtgtgtgtgygcctgtgtgtgtgtttttgagacagggtcttactctgctcaggctggagtgcagtggcgtgattatagctcactacagccttgacctcctgggctccagt

SEQ ID NO: 108995 - DNA, 201 bp, Homo sapiens
ttagagtaaaacatctcccagaacatgaaagaatacaaactttattcatgttacgttgtgacaggagactttgttggatgcgcctgattttcctgccaatwcacagcttcattaaaacagtaatgctttgaaatatggcttaggaaacttcacaatgatcattaattacacctaatttctggaagagtatatgcatgtatg

SEQ ID NO: 108996 - DNA, 201 bp, Homo sapiens
gattaatacataaatatttccttttaaaattcttaaggcttttattcatatatctcccctctccctatttccaataatgatttttggtgttaatatgatgrtatttatgcttctgtttttataggaaccaaatactttgatttggttatttattctcctttggagatgtagatgagtttattttttcctttcgagctttat

SEQ ID NO: 108997 - DNA, 201 bp, Homo sapiens
gaaatggagatgcttaaggtatgtttacaattataaaaacattacttcaagttctttccaaaggacatttaattaagtaaaatattaactaattctaaacyaggttccaccacaatgaaattgctactaattatgtaacattagatttcacattttccaattcatgtttcttttatgtagtctatgaataatgggttagag

SEQ ID NO: 108998 - DNA, 201 bp, Homo sapiens
aatcacatatttagtattctctttaaaacaagggaaaaggcaaataacctgtctgcttaacagcaacagcacaacttcactatagttatacatgccacackgtattttctgtgtgactacaaaattatttcaaagtgatatttatataaaattcatttctgcaaattgtttttataagtgaggaaaaatggttttccttta

SEQ ID NO: 108999 - DNA, 201 bp, Homo sapiens
ccttgtcaaaaatcaattggtggtaaatgtatggatttactcctggaatctcaattctattctattgtatttatatttctgtccttatgcctgtaccacamtgttttgattacagtagctttgtagtaagtttagaaattgggaaacatgagtcctccaactttgttcttcttttcaagattattttggctatttggggtc

SEQ ID NO: 109000 - DNA, 201 bp, Homo sapiens
gatcatcagctaagagtgacgatcggtggaggagatatgaagtttaagtggagaggagaaggtataaaatagtcttaggaggggaggatagtaaatagatkagggaaaagttgtaggattgccaggaagtagtaagggcccacttgaggctggtggtcacaaatttaaggtgagaccagtcaaaatggttgtgcttttcac

SEQ ID NO: 109001 - DNA, 201 bp, Homo sapiens
tgcagtgagccgagattgcgccactgcattccagcctgggtgacagagtgagactctgtctcaaaaaaaaaaaaaaggaagggcttacattttattttggwgctgactgggaatgaaggcaatgagggatgactgttggagaaggctgtgcttactaaacagtattattaagtagcagcatacatggtgttatactgactt

SEQ ID NO: 109002 - DNA, 201 bp, Homo sapiens
ttctatgaaaacaccttcagggtggtttcttgtatgcttgtaagatggctacttgcatcaaccatgaccacatctagcaggagcaaaagcatcctttcccrtaccagaggagagtcccgaaatttgttgcaattggactgccttggaagcaataattatggccaggagatggaggctagagaactgagacctgatcatagc

SEQ ID NO: 109003 - DNA, 201 bp, Homo sapiens
gcaattggactgccttggaagcaataattatggccaggagatggaggctagagaactgagacctgatcatagctcctatccttgaatcagttgtatagcarggggaattggattttccttaagacagttggatttcacctgtagtcttggtgatgaggtcagttccatccataaaactttgctgttacacattttgggatg

SEQ ID NO: 109004 - DNA, 201 bp, Homo sapiens
cagtgagctgtgactgagcaacagagctagactctgtctcaaaaaaaaaaaaaaaagagatgggttttgaaattcagtactttttttgagtgaggtccaatgggtcagaaagaagcattggataaatgaatccattttctcttctctgtttgaatttgtaatttgaaagaatattctacctataaagtacttcagtgctta

SEQ ID NO: 109005 - DNA, 201 bp, Homo sapiens
aataaagtgacttgtccagggtcacatggatactaagtgaccaagtgtcaaagcagaattttccaaataacttaaagataattcttgtacaaatatagaaygaacacatgtcatatgtgttgtgttaatgagggaaccagaaggatgacaacattggttcagagagatgcaaagataaatatagacattggaggaaaaagt

SEQ ID NO: 109006 - DNA, 201 bp, Homo sapiens
ctttttaaaaagagtgggatactttattcagtttagccctcaagcaattaggcaagtcagttaccatggtaacagtaggtattaatttccttacctagttrgaggttttatgaacaaagaaatctctgagttcatccaccaaaacccaactttctcttgagactggcctcttgagactggtgttaaatttgtctattttct

SEQ ID NO: 109007 - DNA, 201 bp, Homo sapiens
gaacaaagaaatctctgagttcatccaccaaaacccaactttctcttgagactggcctcttgagactggtgttaaatttgtctattttctagaagatgacrctattctaagtggaaaatacggttctcttgaggtgaatttctactctatcaagagtgaagtagagtatggcttaaaagttaagtgattaaaaagctaccc

SEQ ID NO: 109008 - DNA, 201 bp, Homo sapiens
tacatattttttcactacatatgacgcatgtggcaaccccaagagttgagttgtacccatcggcaaactttgatcatgattctgtgaatataggcaagcascaattgcaggtagaacattctttttttgagtcccaaaccgtgagaaacaaattacagaaatgtacctttcttttgcattaggacacgttgtagttttgta

SEQ ID NO: 109009 - DNA, 201 bp, Homo sapiens
tgtattagtaattattcatttagagtaaaacatctcccagaacatgaaagaatacaaactttattcatgttacgttgtgacaggagactttgttggatgcrcctgattttcctgccaattcacagcttcattaaaacagtaatgctttgaaatatggcttaggaaacttcacaatgatcattaattacacctaatttctgg

SEQ ID NO: 109010 - DNA, 201 bp, Homo sapiens
tttcttctatcttaatgtattagtaattattcatttagagtaaaacatctcccagaacatgaaagaatacaaactttattcatgttacgttgtgacaggaractttgttggatgcgcctgattttcctgccaattcacagcttcattaaaacagtaatgctttgaaatatggcttaggaaacttcacaatgatcattaatt

SEQ ID NO: 109011 - DNA, 201 bp, Homo sapiens
gtgaatccctagactagtcttgcttaggataattaggaaaagttaactttcattgtatcaagggacaggtagaacaaaattgtccttttgtccaggaaacyattaaattcttcaaggaaaactttagttatagggattattttttaaatgtctaatttcagtaacaatatttgggacatatttatttttccttctgtttcc

SEQ ID NO: 109012 - DNA, 201 bp, Homo sapiens
cattgtcacggatgattttacaataacatccttttctgacatgcattacaacacactattgattccgtttcaatgtttgtgtctggtatgggggcggagtrgagaggctactacaggaagaaagaacaaataacatttcttcttactactttgtgcatcatgtgatttagctcctcccataccattttacattagaaaatg

SEQ ID NO: 109013 - DNA, 201 bp, Homo sapiens
gacgtcattggatcattttcatttcttgggaggattaataaagcacattccttctgttgggcctccagtgcggggagggtgttggccgagcagtggctgaraaaacgtttttcccctggtgttttcaagaaccctctttattagctaagtggtgagacatgccacctggtggttatagtagtatcatttttctcactgttc

SEQ ID NO: 109014 - DNA, 201 bp, Homo sapiens
ttgcattttcttaaattagagccttaatatataggatattacaatatctaggttttgttgagtagttttttcttctttgaaaacatgtttttaaaataagrtttttttttttttttttttgacatggagtcttgctctgtcgcccaggctgtaatgcagtggcgggatcttggctcgttgcagcctctgcctcctgggttc

SEQ ID NO: 109015 - DNA, 201 bp, Homo sapiens
ggcccgagaggttgaggctgcagtgagccttgatcacaccattgcactccagcctgggcaacagggcaaaaccctgtctcaaacagacaaacaaacaaacraaaggcagaggtaggttaagctatttattaatggtcttctactggtatagatataagctagaaataacattcaagtgtttttacttttactacagttatc

SEQ ID NO: 109016 - DNA, 201 bp, Homo sapiens
tgtctgaaaatattatataatgttattttgcccatttaaaaactttaaaaaatgctaacaaactgtgtactctgtaacttgtcttttttactcaacactaygtttttgagaatttttcttgttgatctgtgtagttccattttaactgttatatcttactatgtttcattatgcaacagttggttcaatccattctcttgt

SEQ ID NO: 109017 - DNA, 201 bp, Homo sapiens
tcatggcttctattgcaaatgcccctatttcccaccttcagttggcctaaccaaatttaatttttcaatatcatatgatctttttgtataattatgtattmaaataattccagataggttaggttttcgaattgcaacgtctcatttaatggttactttcatataactgtaggaaagcatttgataatttttccaacaatg

SEQ ID NO: 109018 - DNA, 201 bp, Homo sapiens
gtagctggcactacaggcgtgccaccacacccagctaattttttgtattttttttagtagagacgaggtttcaccgtgttagccaggatggtcttgatctyctgacctcatgatccacctgcctcggtctcccaaagtgctgggattacatacagtttctttaagcaagccttctcttttccttcctcccagttcttggta

SEQ ID NO: 109019 - DNA, 201 bp, Homo sapiens
taattttatttgtggtatgttcatttgatatcatttggtaatacctgaaaacaggaactgattttactgtgttgctttttcatcatttctagctgaaatgyacagagacctggagccttaacagtctggttaaacacctcttaggtaaacagctcctgaaagacaagtctatccgctgtagcaattggagtaaatttcctc

SEQ ID NO: 109020 - DNA, 201 bp, Homo sapiens
ttcttttactttgtagcattgctatgtatttggcttctagagttggggctttgtggctttcttattgcagtgacacaaccagctttctcctagtctggagrttatacatccttgctataagtatttaaaatgctttctatataatgctttaaaacatgtaagatggcttatccccaagatggtagctaataaacactaagt

SEQ ID NO: 109021 - DNA, 201 bp, Homo sapiens
ttgagaccagcctggccaaaatggtgaaacaccatctctactaaaaatacaaaaaattagctgagtgtggtgacgggcacctgtaatcccagcttcttggraggctgaggcaggagaatcgctttaatctgggaggtggaggttgtagtgagctgagattgcaccattgcactccagcctgcacaagagcgagactctgtc

SEQ ID NO: 109022 - DNA, 201 bp, Homo sapiens
gctgaggcaggggaattgcttgaactcgggaggtggaggttgcagtgagccgagattgtgccattccactccagcctgggcaacaagagcgaaactctgtytcaaaaaaaaaaaaaaaaaaaaaaaaagtgaatttttacatgaatattctacatgattggcatatttacatgaatggtttaaaaacccacaataatagca

SEQ ID NO: 109023 - DNA, 201 bp, Homo sapiens
ggaggctgaggcaggggaattgcttgaactcgggaggtggaggttgcagtgagccgagattgtgccattccactccagcctgggcaacaagagcgaaactytgtctcaaaaaaaaaaaaaaaaaaaaaaaaagtgaatttttacatgaatattctacatgattggcatatttacatgaatggtttaaaaacccacaataat

SEQ ID NO: 109024 - DNA, 201 bp, Homo sapiens
agagaaattatggtatctataggtaattgaaagtaattcagtatagtgaacattgaatagggctgggcggatgaaggcaaagcagaaaaaggaaagcagawgggccatggtaaggagtttatatctcctcccaagagcaatcgaagtgactgagagttttaaacacagcagtgaagtgaattacattaaaaaaataagaac

SEQ ID NO: 109025 - DNA, 201 bp, Homo sapiens
ctcacgcctgtagtcccagcactttgggaggccgaggtgggtggatcacctgaggtcaggagttcgagaccagcctggtcaacatggtgaaaccctgtctytactaaaaatacaacaattagctgggcgtggtggcaggtgcctgtaatcccagctacttgggaggctgaggcaggggaattgcttgaactcgggaggtgg

SEQ ID NO: 109026 - DNA, 201 bp, Homo sapiens
ggctcacgcctgtagtcccagcactttgggaggccgaggtgggtggatcacctgaggtcaggagttcgagaccagcctggtcaacatggtgaaaccctgtytctactaaaaatacaacaattagctgggcgtggtggcaggtgcctgtaatcccagctacttgggaggctgaggcaggggaattgcttgaactcgggaggt

SEQ ID NO: 109027 - DNA, 201 bp, Homo sapiens
aaagaagcacaagtttctacaaaatacattctaacagatgttttctataacattcagtctcaagattactagtaaatacttctttgaactgtaaaagcaatctttcaatattataagaaagctcttgctttagtaaacatttagaaactcagctttattatcataagcaagaataagaacagtgtaacaagttttatgcac

SEQ ID NO: 109028 - DNA, 201 bp, Homo sapiens
tactggtactgctgaggcagagggcagtaattggttctttgggataggagaaggggcagttgctgaaatacaaaattaatagtcagcatcccaagttcctyaattgcagccaaaatacatgtgttcaggcctttcggcagtaccgcccccagaactaccagctgtagtgtggtctattcccagacagcaacatgcaagaat

SEQ ID NO: 109029 - DNA, 201 bp, Homo sapiens
ggggaaggatactagtaaagccatttcttactcatgtatacatttttccctccatgaaattagagcagccaccttttacatgacttttacatgcatttcaratttttgtactagcaattaaaatatctactggatgtaaatcacatgtgcttaatgctttgcttcataatatctgttgaagtcaattaaaatatagagaca

SEQ ID NO: 109030 - DNA, 201 bp, Homo sapiens
catcgaagtcaatctaaacatattattggccatttagttaaaaaaagaaagaaaagaaaagcaatatgcttgtggacatacaccagttactttatgtgcartaaaagagtaggaaggggaaggtgaaagaatagagaaaactatgtagtcaggatgtggtggaaccaaattgcaactttcttttttttttttttttttttg

SEQ ID NO: 109031 - DNA, 201 bp, Homo sapiens
attaaagagtttaaggatatccaaaatacttggcaaagtaatctgaaataatactcttaggaaggtagggcaagaatgtgattctagtaagcaaaaatgtratcaaatcgtattctagtcccagctactcgggaggctgaggcaggagaatggcgtgaacctgggaggcggagcttggagtaagccgagatcgtgccactg

SEQ ID NO: 109032 - DNA, 201 bp, Homo sapiens
gggaggcggagcttggagtaagccgagatcgtgccactgcactccagcctgggcgacagagcgagactccatctcaaaaaaaaaaaaagactatatgaacwtgtatggcataaatatgtacaaatattatttattttaaaaaaattcaggggtagggacagggtagttagaaaatatctaaggatgttcatgaaataatac

SEQ ID NO: 109033 - DNA, 201 bp, Homo sapiens
ccacgcccagctaatttttgtgtgtttagtggagatgtggtttcgccatgttggccaggctggtctcgaactcctggtctcaagtcttccgcccacctcakcctcccaaagtgctagaattataggcatgagctaccacacctgacctcaaaatacatttaatagagcaagcatgagccactatgcccagcctcaaaatac

SEQ ID NO: 109034 - DNA, 201 bp, Homo sapiens
gttgtctagtatctgaaacagttgttttatatgttttgtccaagtttagatttgtttgtggtgggagggtgagtctggcctcccttgttatatcatgttgkcctgaagcagaagctgagtttcttttattttttaaatatagtttcaatttttaacaactattaaataggcaagtatcaacaacaatagataacaatataa

SEQ ID NO: 109035 - DNA, 201 bp, Homo sapiens
catgaacccgggaggcagagcttgcagtgagccgagattgcgccactgcactttagcctaagaaaaggaaggaaggaaggaaggaaggaaggaaggaaaaatcagtcactcactcaggtttagtttcaaaagccaaaacagtgataatattgaattttttccagccactcagtagtacccagagaattttgatacaaataa

SEQ ID NO: 109036 - DNA, 201 bp, Homo sapiens
gctagttatgaaagaaagaaagagagagagagagaaggaaggaagggagaaaggaaggaaggggctgggagtggtggctcacacctgtaatcccagcactytgggaggccgaggcgggtggatcatgaggtcaggagatcgagaccatcctggcgaacatggtgaaaccctgtctctactaaaaatacaaaaagaaaaaat

SEQ ID NO: 109037 - DNA, 201 bp, Homo sapiens
tgtaaaatactgatttatttaaagatattacaatcatagtagttttttgcaatcttttttaaatcagtggatgtcaaggaacaactattgttctttgtacrgcatttttcaacattgtgaagagttcttatactcaaaaagtttgggagacacagtgtgacattgtttaacctgagttgaacttgtcattttgtattcttg

SEQ ID NO: 109038 - DNA, 201 bp, Homo sapiens
aaagcttctaccaatacaaacacaaaacaagcatagacaaatagagtttaaagaacatcattggtgttttcctctaaagggaatattgatgctaggccaaraaaatcctggagttattcttgaggaccttaaggaataattgaaatgtaggatttgctcctggctttcttgtcctatattcagaataaaacaagaatggat

SEQ ID NO: 109039 - DNA, 201 bp, Homo sapiens
aatcctatgcaaatgtttctttctgtttttcatgttgactctgctaattgaggtctttgttactttttagccgagactattataatttccccaacagatayccctctccccagtgccccttgttgctttctatgcagtttacaaattattgtctgcaaacacatccttaagtctggaatacctttctggaactccttacta

SEQ ID NO: 109040 - DNA, 201 bp, Homo sapiens
tttcctttcagattgttcatttctggtgtataacaacagctgatatttcaacgttgatgttgtactctgaaactttgttgaatttacttattagatctagwagctttctttgagatttttatatgggattatgtcatctgtatatagagatagttttacttcttcctttccattatggatgccttttatttcttttccatg

SEQ ID NO: 109041 - DNA, 201 bp, Homo sapiens
aataggcaagtatcaacaacaatagataacaatataatagatatgcatattcctcccactttatcaaatcttaattttcttcaatttttttttttttttttaatagggtctcactctgttgctcgtgctggagtgacagtggtgtgatcttggttcgctgcaacctccgcctcttgggctcaagtgatcctcctgcctcag

SEQ ID NO: 109042 - DNA, 201 bp, Homo sapiens
aaataggcaagtatcaacaacaatagataacaatataatagatatgcatattcctcccactttatcaaatcttaattttcttcaatttttttttttttttttaatagggtctcactctgttgctcgtgctggagtgacagtggtgtgatcttggttcgctgcaacctccgcctcttgggctcaagtgatcctcctgcctca

SEQ ID NO: 109043 - DNA, 201 bp, Homo sapiens
tgtatcatgtgcaaaagcacagtaaaaacaaaaatgcattggaagctgtgagttgttgcactgcactcatggatgaatagctgttggttcgcattgcgttkttttgttttgttttgttttgtttttttgagatggagtcttgctctgttgcccaggctggagtgcagtggcgtgatctcggctcactgcaagctctgcctc

SEQ ID NO: 109044 - DNA, 201 bp, Homo sapiens
tgagccttgatcacaccattgcactccagcctgggcaacagggcaaaaccctgtctcaaacagacaaacaaacaaacaaaaggcagaggtaggttaagctrtttattaatggtcttctactggtatagatataagctagaaataacattcaagtgtttttacttttactacagttatctggccactttgggactcattata

SEQ ID NO: 109045 - DNA, 201 bp, Homo sapiens
atttgctaagaactaagccttgaactaaggctattttatttgagtatgagtcatatcagggtacggatccattttactattaacaaaacaaatatgttctkttttttttttttaaatgcacacaccacgtttgagagattcttattcactgtattttctttaattatacttgaattttggtttacattgaggagtgccctc

SEQ ID NO: 109046 - DNA, 201 bp, Homo sapiens
caggatacatgtgcaggacgtgcaggtttgctacataggtaaatgtgtgccatggtggtttgctgcacctatcaatctgtcacctacatattaagccccgyatacattagctgtttttcctgatgctgtccctcctccaggacccagtgtgtgttgttccccatgtattctcatcgttcggctcccacttataagtgagaa

SEQ ID NO: 109047 - DNA, 201 bp, Homo sapiens
atgtatatgtatctagatacacaatctgtgtgtgtgtatatatatgcatgtgtgtgtataaatgtataaattagttactagtatatacgtaagtataaaamctcaatgtgcaaggttacattttcagaaaatatgtaatataataaaagaaatcaagcccagaatttttaaaaagtttattgcgctttctgttaaaaatga

SEQ ID NO: 109048 - DNA, 201 bp, Homo sapiens
caggagaataccttataaatgatatcttctgcaataaactatagattgtatatatgtatatgtatctagatacacaatctgtgtgtgtgtatatatatgcwtgtgtgtgtataaatgtataaattagttactagtatatacgtaagtataaaaactcaatgtgcaaggttacattttcagaaaatatgtaatataataaaa

SEQ ID NO: 109049 - DNA, 201 bp, Homo sapiens
catttgagcccaggatgttggggctgcagtgagctgagatcacaccactgtactccaggctggatgacagagcaaggccccgtttcaaaaaaaaaaaaaaagcttctaccaatacaaacacaaaacaagcatagacaaatagagtttaaagaacatcattggtgttttcctctaaagggaatattgatgctaggccaagaa

SEQ ID NO: 109050 - DNA, 201 bp, Homo sapiens
aaatgttaaatagaaaattccagaaataaacaatttataaattttaaatcagtggtggctttgagtactgtaatgaaattttgtgccatcccactcagtckgcctcgacttcccttagaatcatccctttgtccggtgcattcacgttgtatttactccctgtctgttagtcacttgttgcagtatcacagtgcttgtgtt

SEQ ID NO: 109051 - DNA, 201 bp, Homo sapiens
tcacgcttgactaatgtttttgtaaataaagttttctcagaacacagccatgccttttgtttatgtgttatgtagggctgcctgagttaagtagttggctrcaaagcctatcatggcctataaagcctgaaatacttactatctggtcctttatagaaagtgttttctgaccctgtactagactagcttgtctcaaaattc

SEQ ID NO: 109052 - DNA, 201 bp, Homo sapiens
atgaattgttagtacacagtgtttctcagtaaagtattattaagcaacagttatctagttttcaaatgtacatcttaagaagcttttaagatggaaggatmcactaaatcccccaataccctttttagttggggaaggttagtacttctgtgaattctgagatatcatatttgtgttagtgactgttcataggttccttgc

SEQ ID NO: 109053 - DNA, 201 bp, Homo sapiens
aatgtttctgagattctttcatgctgttgcatgtatcagtagttttttgttttgttttgttttgtttttgttttttcagagtcagggtctccttctgtcayccaggctagagtacagtggcgcaatcatagcttactgcagcctctaactactgggctcaagctatcctcctgcctctcaagtaggctaggctgcaggtat

SEQ ID NO: 109054 - DNA, 201 bp, Homo sapiens
ttctgaatagtataaacagttatgtagcctatctaggagtttgtgaatagagtttaaaattttgttttgaagctgcaaatttgattagaaattaaacagtraagttattacttaaggaacttcgttttagctgtctgaacaacttactgtataaaaatctttaaacattctgtataaatatgtgataagatatgcaatgac

SEQ ID NO: 109055 - DNA, 201 bp, Homo sapiens
tggagatgagattttgctatgttgcccaggttgctctcaaactcctgggctcaagtaattgtcccacctcagccttccaaaatgctgggattacaggcgtsagccactctgcccggcctattatctctgttctgcccacttccaaccactaatctactttctgtctctatgatttgcctattctggatgtttctataaatt

SEQ ID NO: 109056 - DNA, 201 bp, Homo sapiens
tccatatagaaaattaagtttcattacatttgacttgatctaggttttcatttcatagaatggagagcagactctgtaaatattttgccccagacctagcyttattacaaacattgtcttaattaggattctgtctacccagaatagaaattaactcaagctagcatgagtgtatattgaaatttatattaaggataaagg

SEQ ID NO: 109057 - DNA, 201 bp, Homo sapiens
aggagttcaagaccagcctggccaacatgatgaaactccgtttctactaaaagtacaaaaattagctgggcgtggtgttgggtgcctgtaatcccagctaytcaggaggctgaggcaggagaattgcttgaacccaggaggtggaggttgcagtgagtcaagattgtgccactgcacttcagcctgggagacagagcgaga

SEQ ID NO: 109058 - DNA, 201 bp, Homo sapiens
agttttaaagaacaagtttgattgaaatctaaactttgtacaatcctgaattgagaagtttcctgtattttattatgacacaatatttacctaaaaatagrgtaattatgaattgagaaaacatagctattaatttcatactcttatttgttaagtagattttgtctggaaaactgttcatatttaaaggagctttgtacc

SEQ ID NO: 109059 - DNA, 201 bp, Homo sapiens
tgaattgagtgtcaaatatttgatatgttttgtaaattaggtgaagatgagtgagtaggttctaaactgcttgggtttaccgcactctggagcattgcagragaatgtgatgttggaaggaagtgctgaaacataattattggcttgcctataggagggtgctacataattttagaaggtgtcaagaaagtgacacagtct

SEQ ID NO: 109060 - DNA, 201 bp, Homo sapiens
gagcattgcagaagaatgtgatgttggaaggaagtgctgaaacataattattggcttgcctataggagggtgctacataattttagaaggtgtcaagaaaktgacacagtctgaattagttctgttgagttgcaaaaaatgtaaagtttcttgattctgaaaataagaaatatgttcccagaaatctcatctagttaatgt

SEQ ID NO: 109061 - DNA, 201 bp, Homo sapiens; identical to SEQ ID NO: 17862

SEQ ID NO: 109062 - DNA, 201 bp, Homo sapiens
aaatttagtattatgttagatggtacgttttattaaaatcaaatgcttcaaaaataattgctctgtgtatggcatgagataaatagcaatcagatatattrtttaataatatgactctattaaatgatggcataaatttgaaaatttgaccttcggtatcttccgggtctaaaattatatgactccattataaatattttg

SEQ ID NO: 109063 - DNA, 201 bp, Homo sapiens
ttggagggtgagtaggagttagatgtatggaaaggtggaagaggaacctttaggcagagtaaggtataagcaatgatgtggatatgggaatgggaagcccycttgggacttatatttcacagggaacagttgaagagatctggggccaaactaagaaaggctttgcttgagagaagaggataatgtaggcagtgagaagca

SEQ ID NO: 109064 - DNA, 201 bp, Homo sapiens
ttttatcttgggttccttctttcatgtgtttctttccatttgtctcttatccctggaccttcattcacctgatatactttggtattctggctatgcccttsgatataaaatttgaattcattgcttaaaacatttttttttccttaattttggttctgtcctgtgagttctcacttttcagagaactatgaatgtgagtaa

SEQ ID NO: 109065 - DNA, 201 bp, Homo sapiens
tatgtatcttgaaaatatgtttattgtaaattctcttttatattgaggacttaggcaataattagaatagtagaatgttagagttggaatgaacttaagartccatcccatttcatctttggtttatagataagaaagttccaaagagagaggggagtgacttaagttagtgggagtgtagggagaagcacctaggtctct

SEQ ID NO: 109066 - DNA, 201 bp, Homo sapiens
tcagcctcctcagtagctgggactacagatgtgtgccaccacgcctggctagtttttgttatttttaataacaagggcaactggaagttgactttgaagtmcctactgaatatgctaatgtcttgctaaacactgtgagggcagtaatggagaaggcagctctatcttcaaagaacttaaaattgttagggatttaggaac

SEQ ID NO: 109067 - DNA, 201 bp, Homo sapiens
gaggtttaatgggattggggccagaagacttgtataataatataaccttgggcaagtctcagtaacctgagcctcaggttcttcatgtaaaataggtataktaataatcatctcacaaagtgattgtgaaatgtcagagattatcaaagttgataattacttatcaactttggttgagaatcatttgaacctcgggggcgg

SEQ ID NO: 109068 - DNA, 201 bp, Homo sapiens
gtgaacatttcaaagatggagacttgtttgagacagagtcttgctctgtcacccaggatggaatgcagtggtgtaatcatagcttactgtaaccttgaagycctgggctcaagcgatgctcttgcctcagcctctcaagtagctgggactataggcatgcaccaccatgagtggctaatttttaaaaatttctggtagtaa

SEQ ID NO: 109069 - DNA, 201 bp, Homo sapiens
tggaattgcaaatgaattggaaataatccagatgttcatcaacaggcacatgggacaaatgttttggtatatttatacaatagaataccttatagcaatgraaataaagtttgtttacatatatcaaaaggattaatttctgtaaagcaatattgaattaaaacaagttgcagaatgataaacagatatgcaaccagaaaa

SEQ ID NO: 109070 - DNA, 201 bp, Homo sapiens
aaccccatctccacaaaaaatacaaaaattaaccgggtgtggtggcgaacgcctgtagtttcagcttctctggaggctgaggtgggaggatggcttgagcycggtaggcaggaggttgcagtgagccgagattataccactgcactccagcctgggcggtagagctagaacttgtctcaaacaaaacagaacaaacaaaca

SEQ ID NO: 109071 - DNA, 201 bp, Homo sapiens
ctccctccctcccttccttcctccctttcttcctccctcccttccttccctccctccttgcttccttccttcctttctccctcccttctttcctgccctcmtccctccctcccctccctctccccctccctccgtcccttcctccttccttccttccttccttcctattccattcacagcctgctatattattttacaact

SEQ ID NO: 109072 - DNA, 201 bp, Homo sapiens
atagagtaaggttcctgaggtggggagcaggatgagatccaaagtgaggtaaaggggttgtctttaaaaagactgtaaaggagctatgattttggtagacrtatcaaagaattggttgacaattggagagattattttcataaatgtttgtttttcttggcttactaacaacctgaaaagacggtgatgtatgtttatgaa

SEQ ID NO: 109073 - DNA, 201 bp, Homo sapiens
atttgactagataatctctagaatcctttttagctcaggttttagaattctggcttattttagcagtaataagagcagttatcattgattgattgcttacygtatgttaagtttgttataaatgttttacatgaggtactcatttgacccttactacaacgctatgaggtaactatgattatagactcatgccaggaattt

SEQ ID NO: 109074 - DNA, 201 bp, Homo sapiens
cttcctgactcttcaccaaaattgagttgtgtcttcttctttcttaaaactttggaatgtataaataggttcttgggatttttaattgatccttttaaaawttaagatgactagtagggttattattttgctctgtcatatagtacttttgataagctatgctttatgttgcataaaggaatcatgagtgactaggacaca

SEQ ID NO: 109075 - DNA, 201 bp, Homo sapiens
aattcagggccaccttctacacaggacaatttctaggcatctagtgtgaggcatgtcgagataccctttctaaggttaaggataaattgttgcatctgackactcctacaagcaagaaagaggcatgatacttagtgtacctctttgagtcttggaggtaaaaaatcatggtaaccatttccagcttggttatggcaactg

SEQ ID NO: 109076 - DNA, 201 bp, Homo sapiens
agtatttatagatttacccatcttaggcgctattcttttcacttttgcaaacgccatatgtttcttttttaatgaaaatattttttcagctttattaaggyataattgacaataaaaattgtgtataaaaccaaggtatacagtgtaatgattagatatgtgtatatattatataacgattaccacaccacaatgtttttg

SEQ ID NO: 109077 - DNA, 201 bp, Homo sapiens
ggccaaagttaaggactagcaagtttagatgacttgacttgtccaagatcacacaggagtccagacctcttctgaaccactgctctttaaaggccaacatsctgtctttctatgcctccctacattctccgtcagcagagttctgaaagagaccccacccttcctgccgcaccacagactttggtttgaactctgcaatac

SEQ ID NO: 109078 - DNA, 201 bp, Homo sapiens
ctctagaagaatgaatgtttgggtcataaatcaattaaaaaattaaaaaattggtttatgaccaacaaaaaagggatgctgaaattactatcaccagattratatttggttggttagatgggggttttgttcaactttctaaatagtcttggtaaacttgataaggatcatatcatatgatactgaatggtaaggtcagat

SEQ ID NO: 109079 - DNA, 201 bp, Homo sapiens
tactgtccgtacaattaccaagttgtgttgattgttcctttgtattatttcttaaatatcttccttccttttctgctgctgttattctaaactgaccttaytgcttctaggatctctgctcccagccattttgtgtgcattaccaccattcctcagataaaactttgcacacgtcaacccgctattcaaaaacatccattg

SEQ ID NO: 109080 - DNA, 201 bp, Homo sapiens
gggagggaaggtgagcctgcctcactgggccttttccctcctatatctccctaggcttcctcccaggttcttatcttgctttggcagtcccaacttttagytgatgagagaggcatagaaggacaggaatcaggctgggtgcagtggctcacacctgtaatcctagcactttgggaggccgagagcggaggactgcttaag

SEQ ID NO: 109081 - DNA, 201 bp, Homo sapiens
cgatcccgccggcgctttagagccgcagtccagtcttggatccttcagagcctcagccactagctgcgatgcatgtgatcaagcgaggtgagggggggacraggtgggcgagaaggaaggtgaggggatgcgggctgccgccgccggagctgatgcccagcccgcccgcccgccttcgctgcttcccgcctttcccgcatt

SEQ ID NO: 109082 - DNA, 201 bp, Homo sapiens
tctgctgctgttattctaaactgaccttattgcttctaggatctctgctcccagccattttgtgtgcattaccaccattcctcagataaaactttgcacaygtcaacccgctattcaaaaacatccattgttttctcactttataaagtgaaagccagcttacttagctagtcgttgccagctgtaaagtctggtgatttt

SEQ ID NO: 109083 - DNA, 201 bp, Homo sapiens
aaaaaaccacaaagtgctagctataactagctctaaaaagcagagcttattttctcattccttcatagagcacaatttgatccagatggttcatgctgtarattctgccattgtagcattcagcaagacttaatatacaacatgtacttagatttgtttgtttctttttttttttatatttctatgtttctatattttaat

SEQ ID NO: 109084 - DNA, 201 bp, Homo sapiens
atattggtgtggaatgtctagtattctcacagagtttctcctaataattgtctttactttccttgtagggtttgaagactgggatgtattatttaaggacragaccagcagctaatccaatccagttcactctaaataaggagaagctaaaagataaagaaaaggtatcaaaagaggaagaagagaaggagaggaacacag

SEQ ID NO: 109085 - DNA, 201 bp, Homo sapiens
ctagatggggtggcttacacctcgaatcccagcaatttgggaggccaaggcaggcaaatcgcttgagtccaggagtttgagaccagcctgggcaatgtggsgaaaccccatctctacgttttaagaaaaatctaaaattataaaatagactaggtgcagtggctcacgcctgtaatcccagtgctttgggaggctgaggca

SEQ ID NO: 109086 - DNA, 201 bp, Homo sapiens
agagagaagaatgaaagacagtttatagccaagaggaaatcacactagtatgctagaggattttttaattttattttttattttttgagacggagtcttgytctgttgcccaggctggagtgcagtggtgtgatcttggcttactgcaacctctgcttcccaggttcaggcaattctgcctcagcctcccgagtagctggg

SEQ ID NO: 109087 - DNA, 201 bp, Homo sapiens; identical to SEQ ID NO: 17901

SEQ ID NO: 109088 - DNA, 201 bp, Homo sapiens; identical to SEQ ID NO: 17903

SEQ ID NO: 109089 - DNA, 201 bp, Homo sapiens
tgaaatatgactagtgcaactgagaaactcaaattttatttcattttaaatagatatatgtagccagtggctaccatattgcagggcactcatctactgamtaatgagataggtatatgtaaaaagctaattataacatagtgtgatatatgtctggtaatagagctgtgtactgtggaacatagggttctctctctctct

SEQ ID NO: 109090 - DNA, 201 bp, Homo sapiens
tgtgctaggattgtacacatctttacataacccttaccatcttgtttttatgcaataatataaaaaagtagttctcaatttttctgcatcttagaatcaaytggggagcttttaaaatcctgaagcttaggttgcattccttaccaattaaatgtctaggaacaggaaccagacatcaatttttttttttttttttttttt

SEQ ID NO: 109091 - DNA, 201 bp, Homo sapiens
gatccacccacctcagccccccaaagtgctggcattacaagtgtgaaccaccacgtccagcccaaactaatttttcagactattctttgtcacgtatgatygccaaagtctttgttcctttagtgcatgttcagttattgttttgacagagatatatgataccttcaaactttttgtcacactaataagattggctggttg

SEQ ID NO: 109092 - DNA, 201 bp, Homo sapiens
tgtcaccttctcgatcccgccggcgctttagagccgcagtccagtcttggatccttcagagcctcagccactagctgcgatgcatgtgatcaagcgaggtragggggggacgaggtgggcgagaaggaaggtgaggggatgcgggctgccgccgccggagctgatgcccagcccgcccgcccgccttcgctgcttcccgcc

SEQ ID NO: 109093 - DNA, 201 bp, Homo sapiens
gccgcagtccagtcttggatccttcagagcctcagccactagctgcgatgcatgtgatcaagcgaggtgagggggggacgaggtgggcgagaaggaaggtkaggggatgcgggctgccgccgccggagctgatgcccagcccgcccgcccgccttcgctgcttcccgcctttcccgcatttcccgccgcggccttccgccc

SEQ ID NO: 109094 - DNA, 201 bp, Homo sapiens
cgcagtccagtcttggatccttcagagcctcagccactagctgcgatgcatgtgatcaagcgaggtgagggggggacgaggtgggcgagaaggaaggtgargggatgcgggctgccgccgccggagctgatgcccagcccgcccgcccgccttcgctgcttcccgcctttcccgcatttcccgccgcggccttccgccctg

SEQ ID NO: 109095 - DNA, 201 bp, Homo sapiens
agtttgagaccagctgggccaacatggtggaaccccgtctctactaaaaacacaaaagttagccggacggtagtggtttgcacctgtaatcccagctactyaggaggctgaggcaggagaatcgcttgagcctgggaggcagaggttgctgaaatcgtgccattgcactccagtctaggcgacagagtgacactctgtctc

SEQ ID NO: 109096 - DNA, 201 bp, Homo sapiens
ctccctcccttccttcctccctttcttcctccctcccttccttccctccctccttgcttccttccttcctttctccctcccttctttcctgccctcctccmtccctcccctccctctccccctccctccgtcccttcctccttccttccttccttccttcctattccattcacagcctgctatattattttacaactctgt

SEQ ID NO: 109097 - DNA, 201 bp, Homo sapiens
aaaaaaaaaaaaaaaaaaaaaaccacaaagtgctagctataactagctctaaaaagcagagcttattttctcattccttcatagagcacaatttgatccaratggttcatgctgtagattctgccattgtagcattcagcaagacttaatatacaacatgtacttagatttgtttgtttctttttttttttatatttctat

SEQ ID NO: 109098 - DNA, 201 bp, Homo sapiens
cacagctcgatatgtggatcaaggtgggaacaaggtatgctccatgaattgaaagtactggaaatcagaactaaaggtgatttagtcatatacacttaagrtggttcatttatgtgtagtttctaattaccttttttttacttgtaaaatcaatttgaggaggtataattattttaatatgcatatactttaaatgtacag

SEQ ID NO: 109099 - DNA, 201 bp, Homo sapiens
gctacctagaaattaggcatcttttttgataaaagaatggggccatttttttcttttctttgctgagtgccctctgtcatttctatcatggtctctctttyagactaatggcaattccaatggccttgtaccgatgctgagagtatataacaacacagctcgatatgtggatcaaggtgggaacaaggtatgctccatgaa

SEQ ID NO: 109100 - DNA, 201 bp, Homo sapiens
tctgtatagaattcatactctttgaaggtgacatcagagaagacaatctcttcatgaatcttttgagggggcctcaatcttttctgtgaaatagcacttcwtgttggtcaatttacatgttaattacatttgattctttgacattgtagtcttaataattgctaacatgaatttaataattgctaacatgatttgattctt

SEQ ID NO: 109101 - DNA, 201 bp, Homo sapiens
tgcctgtgagtacctgtagtgggctgaatggtgaccccacaaaaggatatgtccacatcctaattcctggaacctgtgaatttaatttcatttggttcaaraaaaggtattttgcagatgtaattaagaaccttgagataaggagatttacctggattatccaggtgagccctaaatctaatgacagttgtcctgcaagag

SEQ ID NO: 109102 - DNA, 201 bp, Homo sapiens
tagctgcgatgcatgtgatcaagcgaggtgagggggggacgaggtgggcgagaaggaaggtgaggggatgcgggctgccgccgccggagctgatgcccagmccgcccgcccgccttcgctgcttcccgcctttcccgcatttcccgccgcggccttccgccctgtcagcccgctcggccttctgtcttcagtcagcctgcc

SEQ ID NO: 109103 - DNA, 201 bp, Homo sapiens
tccccacctttcccgcccttctattccacaaagccgccattgtcatcttggcccgttctcaatgagctgttgggcacacctcccagacggggtggtggccrggcagaggtgctcctcacatcccagacggggcggcggggcagaggcgcccctcacctcccagacggggcggctggccaggcggggggctgaccccccacc

SEQ ID NO: 109104 - DNA, 201 bp, Homo sapiens
agagaagaatgaaagacagtttatagccaagaggaaatcacactagtatgctagaggattttttaattttattttttattttttgagacggagtcttgctmtgttgcccaggctggagtgcagtggtgtgatcttggcttactgcaacctctgcttcccaggttcaggcaattctgcctcagcctcccgagtagctgggat

SEQ ID NO: 109105 - DNA, 201 bp, Homo sapiens
taacctgttcagttctttgttcatatgtaacattttcaatgaggtccttcttgacaattctgtttaaaaattatacccccttcatctttatccccagtacyctctgtcttcttttcctgcctatttttcttcctggcatttattagacttctgtgattcaagctatatttaaaaaaatgggtatttggcaacatgtgtaga

SEQ ID NO: 109106 - DNA, 201 bp, Homo sapiens
tagggtttttggttttctggactttttttgtacccccttatttttggcatgtcagtggaatagcagactaactcctacagtttttgttaattttctttgaratggggtcttgctctgtcatccaggctggagtgcagtggtgtgatctcagctcactgcagtgtctgcctcctgggttcaagagattctcctgcctcagcc

SEQ ID NO: 109107 - DNA, 201 bp, Homo sapiens
gcttactgcaacctctgcttcccaggttcaggcaattctgcctcagcctcccgagtagctgggattacagcatacccagctaatttttttttttttttttktgtatttttagtagagatggggtttcaccatattggctagactggtctcgaactcctgacctcaggtgatccgcctgctttggcctcccaaagtgctagg

SEQ ID NO: 109108 - DNA, 201 bp, Homo sapiens
cctgccaccatgcccagctaattttttgtatttttagtagagacggggtttcaccatattgatcaggctgatctcgaactcctgacctccagtgatccacmcccccaccccgctcccttggcctcccaaagtgctgggattacaggtgtgagccactaggcctggcctgtggattgttataacaattttgacttttattct

SEQ ID NO: 109109 - DNA, 201 bp, Homo sapiens
cagatatttccttgagtaaattgttttattcattagtggaaaagcctaggccaggcgccgtggctcacgcctgtaatcccagcactttgggaggctgaggygggcagatcacctgaggtcaggagttcaagaccagcctggccaacatggtgaaaccccgtctctactaaaaatgcaaaaattagccgggcctggtggtgg

SEQ ID NO: 109110 - DNA, 201 bp, Homo sapiens
atttccttgagtaaattgttttattcattagtggaaaagcctaggccaggcgccgtggctcacgcctgtaatcccagcactttgggaggctgaggtgggcwgatcacctgaggtcaggagttcaagaccagcctggccaacatggtgaaaccccgtctctactaaaaatgcaaaaattagccgggcctggtggtgggcgcc

SEQ ID NO: 109111 - DNA, 201 bp, Homo sapiens
atgcaaaaattagccgggcctggtggtgggcgcctgtaatcccagctacttgggaggcaggagaatcacttgaacctgggaggcagaggttgcagtgagcygagatcgtgccactgcactccagcctgggcgacagagcgagactccctctcaaaaaaaaaaaaaaaagggaagcctagagtaaagcttgttttggaattg

SEQ ID NO: 109112 - DNA, 201 bp, Homo sapiens
cagaccatcctggctaacacggtgaaaccccgtctctactaaaaatacaaaaaattagccaggtgtgggagctggtgcctgtagtcccagctactcaggargctgaggctagagaatggcgtgaacccgggaggcggagcttgcagtgagccgagattgggccactgcactccagcctgggcaacagagtgagactcagtc

SEQ ID NO: 109113 - DNA, 201 bp, Homo sapiens
cggtgaaaccccgtctctactaaaaatacaaaaaattagccaggtgtgggagctggtgcctgtagtcccagctactcaggaggctgaggctagagaatggygtgaacccgggaggcggagcttgcagtgagccgagattgggccactgcactccagcctgggcaacagagtgagactcagtctcaaaaaaaaaaaaaaaaa

SEQ ID NO: 109114 - DNA, 201 bp, Homo sapiens
tcccagctactcaggaggctgaggctagagaatggcgtgaacccgggaggcggagcttgcagtgagccgagattgggccactgcactccagcctgggcaayagagtgagactcagtctcaaaaaaaaaaaaaaaaaaaaagaatgattaattgactatctctctaaacatgtatctgatgttaaagagactaggagaaaac

SEQ ID NO: 109115 - DNA, 201 bp, Homo sapiens
atctctggagcttgtattcctcatagaggttgattagaagacagcatttgttgggatgtggggacatggcagctagtcatttgtgggttttttttttttttggtcatagttttaacttgctgtagaataaatttgagttgtgtattccttagattcttcagtatgatatgtggaatgttactcctacagacctatgggact

SEQ ID NO: 109116 - DNA, 201 bp, Homo sapiens
taatataaaaaagtagttctcaatttttctgcatcttagaatcaactggggagcttttaaaatcctgaagcttaggttgcattccttaccaattaaatgtytaggaacaggaaccagacatcaattttttttttttttttttttttttgagacgaagtctctgtcgcccaggctggagtgcagtggtggaatcatggctca

SEQ ID NO: 109117 - DNA, 201 bp, Homo sapiens
cgttgtccgaaacttgaataaaattattgatataaactactatcctgtaccagaggtatgaatagatttctctgcttattggtaattattgaaatccaaaytgaaaggaatcaatcatgatcttcaagtcatcatttaaatggttatcaataaaatggtttgagaaaaagaggtagtctgtctcatttggtacagaatgtt

SEQ ID NO: 109118 - DNA, 201 bp, Homo sapiens
aaatccaaattgaaaggaatcaatcatgatcttcaagtcatcatttaaatggttatcaataaaatggtttgagaaaaagaggtagtctgtctcatttggtrcagaatgttgcttttcctgttcagtaatgttttctccttttctttaaaatctgttgacacaaaggcatgcctatcaaataaacgccatcgccccattgga

SEQ ID NO: 109119 - DNA, 201 bp, Homo sapiens
agtcgttgtccgaaacttgaataaaattattgatataaactactatcctgtaccagaggtatgaatagatttctctgcttattggtaattattgaaatccwaattgaaaggaatcaatcatgatcttcaagtcatcatttaaatggttatcaataaaatggtttgagaaaaagaggtagtctgtctcatttggtacagaat

SEQ ID NO: 109120 - DNA, 201 bp, Homo sapiens
ctgcttattggtaattattgaaatccaaattgaaaggaatcaatcatgatcttcaagtcatcatttaaatggttatcaataaaatggtttgagaaaaagargtagtctgtctcatttggtacagaatgttgcttttcctgttcagtaatgttttctccttttctttaaaatctgttgacacaaaggcatgcctatcaaata

SEQ ID NO: 109121 - DNA, 201 bp, Homo sapiens
cacagaaggcattctgaacaagttaagagatgccgtgcttgtcttcttatatttctattctctaaagtagatgctttgtgacctaaatgcttaaaaggtcrtgtataaacaggcagacctagatgtttgggcctgaacctgaaaatgattatttctacagcaaatttccaagagagcttgtaaaagtcaccttatgcttgc

SEQ ID NO: 109122 - DNA, 201 bp, Homo sapiens; identical to SEQ ID NO: 17904

SEQ ID NO: 109123 - DNA, 201 bp, Homo sapiens
tcatcttaagtcatgcttaggaagagcccatatgtgtgtgatgccacagaaggcattctgaacaagttaagagatgccgtgcttgtcttcttatatttctrttctctaaagtagatgctttgtgacctaaatgcttaaaaggtcatgtataaacaggcagacctagatgtttgggcctgaacctgaaaatgattatttcta

SEQ ID NO: 109124 - DNA, 201 bp, Homo sapiens; identical to SEQ ID NO: 17905

SEQ ID NO: 109125 - DNA, 201 bp, Homo sapiens
gattacaggcatgagccacagcgcccagccaggaatgtatttttttgtttgtttgtttgttttttctttttatttatttatttatttatttttattgatcrttcttgggtgtttctcacagagggggatttggcagggtcataggacaatagtagagggagggtcagcagataaacaagtgaacaaaggtctctggttttc

SEQ ID NO: 109126 - DNA, 201 bp, Homo sapiens
ctcttttttagtcatcttaagtcatgcttaggaagagcccatatgtgtgtgatgccacagaaggcattctgaacaagttaagagatgccgtgcttgtcttsttatatttctattctctaaagtagatgctttgtgacctaaatgcttaaaaggtcatgtataaacaggcagacctagatgtttgggcctgaacctgaaaat

SEQ ID NO: 109127 - DNA, 201 bp, Homo sapiens
tctattccacaaagccgccattgtcatcttggcccgttctcaatgagctgttgggcacacctcccagacggggtggtggccaggcagaggtgctcctcacwtcccagacggggcggcggggcagaggcgcccctcacctcccagacggggcggctggccaggcggggggctgaccccccacctccctcccggacggggcgg

SEQ ID NO: 109128 - DNA, 201 bp, Homo sapiens
ctttcttcctctctgccccatgtcttgcagggatttgacccattccgattcggagtcctccctccacatgagtgaccgccagcgtgtggcccccaaacctyctcagatgagccgtgctgcagacgaggctctcaatgccatgacttccaatggcagccaccggctgatcgagggggtccacccagggtctctggtggagaa

SEQ ID NO: 109129 - DNA, 201 bp, Homo sapiens
gacactttcattttatatgtagtatacattttctgatagttctgctggattatgcattctcattactaagtttcccactgcccaccattctgaaagataarttttcagagaagtaagttgtcttgttctttgtttgagacagggtctcattgtgtcgcccaggctggagtgcagtgccatgatcatagatagctcagtgca

SEQ ID NO: 109130 - DNA, 201 bp, Homo sapiens
cacgttggttaggctggtctcgaactcctgacctcgtgatctgcccgccttggcctcccatagtgctgggattacaggagtgaagcaccgcgctggcctamtttttctattttttgtagaaatggggtctcactatgttgcccaggcttatctcaacacctggcctcacatgatgctcccgccttagcctcccaaaatgct

SEQ ID NO: 109131 - DNA, 201 bp, Homo sapiens
tgggattacaggtgtgagccacactgtgcctgccctcaaccctgtttctacaaaaaaaaaaaaaaaaaaaattggttgggtgtggtggcgcataccagtaktcccagctacttggtggtgggaggatcgcttgagccctggaggttgaggttgctgtgagctgagattgtgccactgtactccagcacaggccacagaatg

SEQ ID NO: 109132 - DNA, 201 bp, Homo sapiens
cacccagctcatattttttataatagccatcttaatgacttgacaatttcattataatgtgtcttggtgtgggtctctgagtttatcctacttgggacttmctgggcttattggatttgtagattcacatcttttgttaaatttgggttgtttttggccattatttagataatttttcttcccctttctctttccttatag

SEQ ID NO: 109133 - DNA, 201 bp, Homo sapiens
tgtcttcttctttcttaaaactttggaatgtataaataggttcttgggatttttaattgatccttttaaaaattaagatgactagtagggttattattttkctctgtcatatagtacttttgataagctatgctttatgttgcataaaggaatcatgagtgactaggacacatatgtcagtagtttattaaaattaaatag

SEQ ID NO: 109134 - DNA, 201 bp, Homo sapiens
ctcccggacggggcggctggccgggctgggggctgactccccaacctccctcccggacggggcggctggccgggcggggggctcacacccccacctccctsccggatggggcagctggccgggcggggggctgacccccccacctccttcccagatggggcggctggccgggcagaggacctcctcacttcccagtagggg

SEQ ID NO: 109135 - DNA, 201 bp, Homo sapiens
cggacggggcggctggccgggctgggggctgactccccccacctccctcccggacggggcggctggccgggcggggggctgacccccccacctccctcccrgacggggcggctggccgggcagaggggctcctcacttcccagtaggggcggccgggcagaggcgcccctcacctcccggacggggcggctggccgggctg

SEQ ID NO: 109136 - DNA, 201 bp, Homo sapiens
acccctcttgggggattacaggcatgagccacagcgcccagccaggaatgtatttttttgtttgtttgtttgttttttctttttatttatttatttatttwtttttattgatcattcttgggtgtttctcacagagggggatttggcagggtcataggacaatagtagagggagggtcagcagataaacaagtgaacaaag

SEQ ID NO: 109137 - DNA, 201 bp, Homo sapiens
tggaatgtctagtattctcacagagtttctcctaataattgtctttactttccttgtagggtttgaagactgggatgtattatttaaggacaagaccagcrgctaatccaatccagttcactctaaataaggagaagctaaaagataaagaaaaggtatcaaaagaggaagaagagaaggagaggaacacagcagccatgg

SEQ ID NO: 109138 - DNA, 201 bp, Homo sapiens
tttataggcatgtactacccctcttgggggattacaggcatgagccacagcgcccagccaggaatgtatttttttgtttgtttgtttgttttttctttttwtttatttatttatttatttttattgatcattcttgggtgtttctcacagagggggatttggcagggtcataggacaatagtagagggagggtcagcagat

SEQ ID NO: 109139 - DNA, 201 bp, Homo sapiens
tggtggagaaactgcctgacagccctgccctggccaagaaggcattactggcgctgaaccatgggctggacaaggcccacagcctgatggagctgagcccstcagccccacctggtggctctccacatttggattcttcccgttctcacagccccagctccccagacccagacacaccatctccagttggggacagccgag

SEQ ID NO: 109140 - DNA, 201 bp, Homo sapiens
attattatttgttattaatatttcagcacaataggcatttaataaataatctgttgaaagaatgagtgaatgagggtcgagtatgaaagtaagttgttgayagttaaacatgatgtttaaccattatgtaatcatagtgatatattctataacttctcccagatgcttaagttaggatactcaaaatgtataaagaagtat

SEQ ID NO: 109141 - DNA, 201 bp, Homo sapiens
aatttataggcatgtactacccctcttgggggattacaggcatgagccacagcgcccagccaggaatgtatttttttgtttgtttgtttgttttttctttytatttatttatttatttatttttattgatcattcttgggtgtttctcacagagggggatttggcagggtcataggacaatagtagagggagggtcagcag

SEQ ID NO: 109142 - DNA, 201 bp, Homo sapiens
ctgaaatttataggcatgtactacccctcttgggggattacaggcatgagccacagcgcccagccaggaatgtatttttttgtttgtttgtttgttttttytttttatttatttatttatttatttttattgatcattcttgggtgtttctcacagagggggatttggcagggtcataggacaatagtagagggagggtca

SEQ ID NO: 109143 - DNA, 201 bp, Homo sapiens
ttcccgcccttctattccacaaagccgccattgtcatcttggcccgttctcaatgagctgttgggcacacctcccagacggggtggtggccaggcagaggkgctcctcacatcccagacggggcggcggggcagaggcgcccctcacctcccagacggggcggctggccaggcggggggctgaccccccacctccctcccg

SEQ ID NO: 109144 - DNA, 201 bp, Homo sapiens
tagctgaaatttataggcatgtactacccctcttgggggattacaggcatgagccacagcgcccagccaggaatgtatttttttgtttgtttgtttgtttkttctttttatttatttatttatttatttttattgatcattcttgggtgtttctcacagagggggatttggcagggtcataggacaatagtagagggaggg

SEQ ID NO: 109145 - DNA, 201 bp, Homo sapiens
tgttttctgcaaaactcaagggtcatttattgctgcttagctctgacttttcctttctttaagtgcctctagaagaatgaatgtttgggtcataaatcaawtaaaaaattaaaaaattggtttatgaccaacaaaaaagggatgctgaaattactatcaccagattaatatttggttggttagatgggggttttgttcaac

SEQ ID NO: 109146 - DNA, 201 bp, Homo sapiens
taacctaatacaggtggggagcgcttcaacagtgatttgaatatttccctacgcaagatagtgtatcaagtgttatgattcctgagtgccacagtccaagyggcataaatcatggtatgataaggatagccaacaataaaaattgtactaattcagtttaggagtcaggcatttaagaggagagtgggctataatagcacc

SEQ ID NO: 109147 - DNA, 201 bp, Homo sapiens
ttctttctgagaggtggtttactcatgcttcgcccactctcttcaatgctggtaccaaccgcccacaactttctaggtaggtgttttgagtagggaaatamgccttgacctgaagaaactgggcagttagttcatcacataaaaaataatttaatgaccttttagtagctgcctgctctgattaaatgagatttagattct

SEQ ID NO: 109148 - DNA, 201 bp, Homo sapiens
ttttttcttttcttttcttttctttttagtatatctgcaagtctgtgcaaccattaccactatctaattgtagtatttatttattttatttttttttttttgagacagagtcttgctctgtcaccaggctggagtgtagtggctcgatctcggctcactgcaacctccgcctcctggattcaagcgattctcctgcctcag

SEQ ID NO: 109149 - DNA, 201 bp, Homo sapiens
ctgcctgatgaggaaagatgttttaaaattgctatcaattaggctgagctttgaaggtgagccaggggcagttgggagatttctcagtgtgtcagatagtrtattttctcttattagtcaaaagatgttaaccttcttgcaggaacttataattgaagaatatactttgagcataatttcttcctctttacaggataatgg

SEQ ID NO: 109150 - DNA, 201 bp, Homo sapiens; identical to SEQ ID NO: 17897

SEQ ID NO: 109151 - DNA, 201 bp, Homo sapiens
tgctgggattacaggtgtgagccacactgtgcctgccctcaaccctgtttctacaaaaaaaaaaaaaaaaaaaattggttgggtgtggtggcgcataccaktagtcccagctacttggtggtgggaggatcgcttgagccctggaggttgaggttgctgtgagctgagattgtgccactgtactccagcacaggccacaga

SEQ ID NO: 109152 - DNA, 201 bp, Homo sapiens
aatgattttatgtatcttgaaaatatgtttattgtaaattctcttttatattgaggacttaggcaataattagaatagtagaatgttagagttggaatgarcttaagagtccatcccatttcatctttggtttatagataagaaagttccaaagagagaggggagtgacttaagttagtgggagtgtagggagaagcacct

SEQ ID NO: 109153 - DNA, 201 bp, Homo sapiens
atggacaatatttaagtcaagaacaaactattcataaaccagttgctctgcttttctccttatcctttataacttctgtattctagactctcatcatcagytatctggactgttttctgtggtctctgcagtgtcctggacttcctctaatcttaccctcttcaaactcgtcttccacctgacttctaaaatgatcttcct

SEQ ID NO: 109154 - DNA, 201 bp, Homo sapiens
aacaggttaaaaggaaaaaaagtaatctgaatttcccaagtgcctacgctgcatattccccttgttagatcccattttcatgttactttgtagccttggcyagaggctcaaaaaggacacaaccagtttggggaaggggtggctaaggaagatggtataggtgaaggcggctgtgtgaccactttcccccacccttcccac

SEQ ID NO: 109155 - DNA, 201 bp, Homo sapiens
accatgcccagctaattttttgtatttttagtagagacggggtttcaccatattgatcaggctgatctcgaactcctgacctccagtgatccacccccccmccccgctcccttggcctcccaaagtgctgggattacaggtgtgagccactaggcctggcctgtggattgttataacaattttgacttttattctggagat

SEQ ID NO: 109156 - DNA, 201 bp, Homo sapiens
cttgggaacaggcttcatcgggttggaaaaacaagagcaacatacttttaacaaccgcatgagatacgtatgaacaagttttgagttgaacctacttgccyttgttaaagcaatacaatgatttcaaaattgtaggcacttagtaaatactggttaatcgactggttgtttctattttgtcctctaggctgtgaacatttc

SEQ ID NO: 109157 - DNA, 201 bp, Homo sapiens
cataaagcatttattcagcacctctttgtgctaggaaccgttgtaggcattagagattctgcagtgaacaaagctaaattacatttctcattgagttgacwtcttggtgtgggtgggagtggtaagtgtatataagaaataagaagtaaacataataatcagttaatttcagatactgattaatgagatgatagtaaaaca

SEQ ID NO: 109158 - DNA, 201 bp, Homo sapiens
aatagttgtatcaaaatgtaggacacgatgaatgctgtgaataagcaggtagttgatttggtttaactacagccaatgtccagattggtttaactacagasaagagttggaaaggtggacagtagtggcctttcttgtttttggtatcttgagaacatcattctgtgaattttcctagctcacattttagctgaccaaaga

SEQ ID NO: 109159 - DNA, 201 bp, Homo sapiens
gtgctgtctggctccaactccagttctttcccctgagcagcgcctggaacctaacccttcccactctgtcaccttctcgatcccgccggcgctttagagcsgcagtccagtcttggatccttcagagcctcagccactagctgcgatgcatgtgatcaagcgaggtgagggggggacgaggtgggcgagaaggaaggtgag

SEQ ID NO: 109160 - DNA, 201 bp, Homo sapiens; identical to SEQ ID NO: 17907

SEQ ID NO: 109161 - DNA, 201 bp, Homo sapiens
ctgacctccagtgatccacccccccaccccgctcccttggcctcccaaagtgctgggattacaggtgtgagccactaggcctggcctgtggattgttatamcaattttgacttttattctggagatcataagccactattaggagttttgaaggaggtaatgatatgattctgagtttaacttttaaagggtaattttggc

SEQ ID NO: 109162 - DNA, 201 bp, Homo sapiens
gtttgacaaaattacatctcgaatccagaagctttgttatggactcaatatggattttgttgatcctgtaagtaaatatggtttttatcttgggttccttstttcatgtgtttctttccatttgtctcttatccctggaccttcattcacctgatatactttggtattctggctatgcccttcgatataaaatttgaattc

SEQ ID NO: 109163 - DNA, 201 bp, Homo sapiens
ttcaagataactggccccaagagtggggcatgggaagggctggtccaggggtctgggcactgtacatacctgccccctcatccttgggtccttcattattrtttattaactgaccaccatggcctgcctgccctgcctccgtcccaaccatgggctgctgctgtcactccctctccacttcagtgcatgtcttagttgctg

SEQ ID NO: 109164 - DNA, 201 bp, Homo sapiens
agaactagttaggggactcttatagcagtttatataagaaattgtggtagtctagattagggaggtgaaagtagaaattgacagaagcagatagatcaaargatatttagggccaggcatggtggctcacatctgtaattccaacactttggaaggctgaggtgggaagatcacttgaggtcagaagttcaaggctgccgt

SEQ ID NO: 109165 - DNA, 201 bp, Homo sapiens
tgtctcagaaaacaaaccaaaaaagtaacttattctttttcccagagataagacttgttaatggtgtgtatttttctagatctttttcagtacatttgcarataggtacacatacacggttttgtcatataaatgtgatcaaacttgatgtattctgggctgggcaccatgactcacgtctgtaatcccagcactttgaga

SEQ ID NO: 109166 - DNA, 201 bp, Homo sapiens
cttcatacttctgccaaccatttgtctcagaaaacaaaccaaaaaagtaacttattctttttcccagagataagacttgttaatggtgtgtatttttctaratctttttcagtacatttgcagataggtacacatacacggttttgtcatataaatgtgatcaaacttgatgtattctgggctgggcaccatgactcacgt

SEQ ID NO: 109167 - DNA, 201 bp, Homo sapiens
gaaataaaatagaaagtaaaagcccttcttcatacttctgccaaccatttgtctcagaaaacaaaccaaaaaagtaacttattctttttcccagagataaracttgttaatggtgtgtatttttctagatctttttcagtacatttgcagataggtacacatacacggttttgtcatataaatgtgatcaaacttgatgta

SEQ ID NO: 109168 - DNA, 201 bp, Homo sapiens
tcaggtaatcaatggagttttacctccagtctgtctcacagtggctccagggatccctgaaaccatcctgtggttatttcactatgcagttcgggaatgcrtaattggaatagatacactcagcaactgacacagagaaccaaccatattggttctctgacttgagtgagggctattatagtgggaaagttcaagtggaag

SEQ ID NO: 109169 - DNA, 201 bp, Homo sapiens
aaatacagaaataaaatagaaagtaaaagcccttcttcatacttctgccaaccatttgtctcagaaaacaaaccaaaaaagtaacttattctttttcccaragataagacttgttaatggtgtgtatttttctagatctttttcagtacatttgcagataggtacacatacacggttttgtcatataaatgtgatcaaact

SEQ ID NO: 109170 - DNA, 201 bp, Homo sapiens
atatttcgatatgttttattgtgtcatgtacagtaaagtgggttttcttctttgaaaatcatttaggaactttctaaacttcaactcttttttttttttttgccttagtgtctttgtgttgagtaatcatttttgtgactctgcttcatttccttgctctaagttgagacattttttcccccgtagctgttttcttctgag

SEQ ID NO: 109171 - DNA, 201 bp, Homo sapiens
ttagtatatgaacacaaatttattattaataaagctcaaatacagaaataaaatagaaagtaaaagcccttcttcatacttctgccaaccatttgtctcaraaaacaaaccaaaaaagtaacttattctttttcccagagataagacttgttaatggtgtgtatttttctagatctttttcagtacatttgcagataggta

SEQ ID NO: 109172 - DNA, 201 bp, Homo sapiens
gacaaagagggcaaaaatcttctttattgagctctcgggcgaggttcactggtccgcagggggagggccagggaagtctcgctgtgccaaaggtgcagcgygcttttatggatgctgggtgaggagtggtcagggtaggggcagggtcggttgagtttcacgcttctgagtgtgacacgccctagtgggcatgtgcgttag

SEQ ID NO: 109173 - DNA, 201 bp, Homo sapiens
gtatttacatggaaattcaacttttaagaaaatggacctgtactgtatttatatatatatatatatatatatatatatatatattttttttttttttttttcccctcaaaatactatggcttagttttttatatacatgactttttttctaatttcaaaattagtatatgaacacaaatttattattaataaagctcaaat

SEQ ID NO: 109174 - DNA, 201 bp, Homo sapiens
tttcttgtttctgtctcttgctttcgggctcctccctcccaccactccccaacttcccctagcagttgcagggaagataggacgagtagcttctgacatgkgtgcctcagatctgttccaccccactcacagtggttctgtttgctccagactggggctagggcctaatctttgaagtttgttctttggtattgatgtggg

SEQ ID NO: 109175 - DNA, 201 bp, Homo sapiens
cctcccgggttcaagcaattctcctgcctcagcctcctgagtagctgggattacaggcacgcgccaccacacccagctaatttttgtatttttagtacagrtggggtttgtccatgttggccaggctggtctcgaactcctgacctcaggtgatccacctgcctgggcctcccaaagtgctgggattagaggtgtgagcca

SEQ ID NO: 109176 - DNA, 201 bp, Homo sapiens
gttggccaggatggtctcaatctcttgacctcgtgatccgcccacctcagcctcccaaagtgttgggattacaggcgtgagccaccgtgaccggcctgtartacatttttatcactgtagataatgaaaccctttatccattagcagtcactccctgttcccttcttccctcagcccttgacaaccactaatatattttct

SEQ ID NO: 109177 - DNA, 201 bp, Homo sapiens
ggagcactccaaaaaaaaaaaaaaaagtgagttgcagacattgtgactcttgatacctccacttacctttttttttgagatggagtttcgctcttgtcacygaggctggagtgcagtggcacgattttggcttactgcaacctctgcctcccgggttcaagcaattctcctgcctcagcctcctgagtagctgggattaca

SEQ ID NO: 109178 - DNA, 201 bp, Homo sapiens
cactatgttggccaggatggtctcaatctcttgacctcgtgatccgcccacctcagcctcccaaagtgttgggattacaggcgtgagccaccgtgaccggsctgtagtacatttttatcactgtagataatgaaaccctttatccattagcagtcactccctgttcccttcttccctcagcccttgacaaccactaatata

SEQ ID NO: 109179 - DNA, 201 bp, Homo sapiens
agcgactcaggaggctgagacaggagaattgcttgaacctgggaggcagaggttgcagtgagccaagatcgcgccactgcactccagcctgggcaacagarcgagactccgtctccaaaaaagaaagaaaagataaaaaaaaagatacaaaatgatacatctgtataggacagttatcatgaatagagcttgtaggactga

SEQ ID NO: 109180 - DNA, 201 bp, Homo sapiens
ctggattcaagcgattctcctgcctcagcctcccgagtagctgggactacaggcgcgtgccaccacacccagctaatttttgtatttttagtagggacgargtttcactatgttggccaggatggtctcaatctcttgacctcgtgatccgcccacctcagcctcccaaagtgttgggattacaggcgtgagccaccgtga

SEQ ID NO: 109181 - DNA, 201 bp, Homo sapiens
tacaattcagtgttttttttcttttcttttcttttctttttagtatatctgcaagtctgtgcaaccattaccactatctaattgtagtatttatttattttatttttttttttttgagacagagtcttgctctgtcaccaggctggagtgtagtggctcgatctcggctcactgcaacctccgcctcctggattcaagcga

SEQ ID NO: 109182 - DNA, 201 bp, Homo sapiens
aagaaggcattactggcgctgaaccatgggctggacaaggcccacagcctgatggagctgagcccctcagccccacctggtggctctccacatttggattmttcccgttctcacagccccagctccccagacccagacacaccatctccagttggggacagccgagccctgcaagccagccgaaacacacgcattccccac

SEQ ID NO: 109183 - DNA, 201 bp, Homo sapiens
tgagtatattaaaagccattgagtagtacactttaaatggggaattatattatttgtgaattatattcctttttttttttgttgttgagacaaagtctcastctgtcacccaggctggagcgcagtgttgcgatcttggctcactgcaacctgtgcctccttggtacaagcaattctcttgcctcagcctcctgagtagct

SEQ ID NO: 109184 - DNA, 201 bp, Homo sapiens
ggttcttgcatttatggatacagtaagtaacaggattaatgatgatgccatttgttgagaaaaggaacactaacggtctggtaatacattaaaaaaaaaaatatgccattatcaagttggtttgtttcaggaattcaagaacatggtaacatcaaaaaatacattaatgtaattcattgcattaacattttatgcagttta

SEQ ID NO: 109185 - DNA, 201 bp, Homo sapiens
taaaaatagaaaaaaaaaattagctgggcctggtggtgggcgcctgtagtcccagctactcggtagcctgaggcaggagaatggcatgaacccgggaggcrgagcttgcagtgagctgagattgcgccactgcaccccagcctgggcgacagagcgagactctgtctcaaaaaaaaaaaaaaaagtgccaatgataatgtt

SEQ ID NO: 109186 - DNA, 201 bp, Homo sapiens
aggagagtgggctataatagcacccatactgtggaattgcctccctgtaggagtttaatttgaaagtcaacgtgtgagttcaatgcatgtacgatgttacrtttacatttactacatttatctacatttactacagtgacttaaagtagctgctttcctggcagattgtagctttgggactagtacctgataatctccttt

SEQ ID NO: 109187 - DNA, 201 bp, Homo sapiens
agcctccacccctggggatcaaatgattcttgtgcctcagcctccctcagctgggattacaggcatgtgccaccacgctatttttttttttttttttttgkatttttagtagagacagggttttgctatgttggccaggctcgtcttgaactcctgacctcaagttatctgtccgccttggcctcccaaagtgctgggatt

SEQ ID NO: 109188 - DNA, 201 bp, Homo sapiens
ttccctgggtgttctgtctctccttccctcccttccttcaagataactggccccaagagtggggcatgggaagggctggtccaggggtctgggcactgtasatacctgccccctcatccttgggtccttcattattatttattaactgaccaccatggcctgcctgccctgcctccgtcccaaccatgggctgctgctgtc

SEQ ID NO: 109189 - DNA, 201 bp, Homo sapiens
attgttctggccaataaagatgtatgtataacacttatctggtggaaattttttgagagtcttttttaataatgcacacattttagaaaatttaaacactrcaaaagatacaggtaaatactaattctgtttcctaccctgattcctgattttcctctctagaaacaactttatcattttaaaatgtatttttccagagct

SEQ ID NO: 109190 - DNA, 201 bp, Homo sapiens
gaggagagtgggctataatagcacccatactgtggaattgcctccctgtaggagtttaatttgaaagtcaacgtgtgagttcaatgcatgtacgatgttayatttacatttactacatttatctacatttactacagtgacttaaagtagctgctttcctggcagattgtagctttgggactagtacctgataatctcctt

SEQ ID NO: 109191 - DNA, 201 bp, Homo sapiens
tgcatacagttttcattgatactttcttcacttgtaagtatatcttgtttgttctatatcagcctttatgaatttacccttttttataacagttgtataaygttccattttgtagatatattgtcattgtatgtatgtgtaagaattcctttagtgatcaatatttgtttttcatcttttcactgcagtgaatattcttgt

SEQ ID NO: 109192 - DNA, 201 bp, Homo sapiens
taaatatatatatatattagtaaatatgtggtaccaatacttttggattaatagccaatctaaaaacatgtttaaggatgataatatagtcccatttatgstcatgttttttccctctttcaaaacatactataaacataatagtaaaagtttggaaaatcacatttaatctcacaacatatatttatgtattatcttcta

SEQ ID NO: 109193 - DNA, 201 bp, Homo sapiens
atttttagtagagatggggtttcaccatgttggtcaggctggtcttaaactcctgacctcaggtgatccacccgccttggcctcccaaagtgctgggattrtaggcatgagccaccacgcttggtgtgaattatatttcaataaggttgttttaaaaagaaggtaagtgccaagaactagttaggggactcttatagcagt

SEQ ID NO: 109194 - DNA, 201 bp, Homo sapiens
tgtggtgatggttacacaagtctatgagtatattaaaagccattgagtagtacactttaaatggggaattatattatttgtgaattatattcctttttttytttgttgttgagacaaagtctcactctgtcacccaggctggagcgcagtgttgcgatcttggctcactgcaacctgtgcctccttggtacaagcaattct

SEQ ID NO: 109195 - DNA, 201 bp, Homo sapiens
tcagagcaaaacaccatagagcaaaacattggaaaaattgactacaattaaaaacttctgtgtgaaaggcaatggaagggcaccgtggatcaataaggccragaggcgagacaaagagggcaaaaatcttctttattgagctctcgggcgaggttcactggtccgcagggggagggccagggaagtctcgctgtgccaaag

SEQ ID NO: 109196 - DNA, 201 bp, Homo sapiens
actgcaacctcaacagagttctttctttttgcaaattgagctataattcactctttttaaaatgtacaattcagtgttttttttcttttcttttcttttctttttagtatatctgcaagtctgtgcaaccattaccactatctaattgtagtatttatttattttatttttttttttttgagacagagtcttgctctgtca

SEQ ID NO: 109197 - DNA, 201 bp, Homo sapiens
cactgcaacctcaacagagttctttctttttgcaaattgagctataattcactctttttaaaatgtacaattcagtgttttttttcttttcttttcttttytttttagtatatctgcaagtctgtgcaaccattaccactatctaattgtagtatttatttattttatttttttttttttgagacagagtcttgctctgtc

SEQ ID NO: 109198 - DNA, 201 bp, Homo sapiens
acctgtagtcccagctacttgggaggctgaggtaggagaattgcttgaacctgggaggtggaggttgcagtgagctgagattgtgccactgcactccagcytgggtgatagaacgaaactccgtctcaaaaaaaaaaaaaggaaaaaaatttagcacagtcttaagagatttggcttccttagtttttactcctttttatt

SEQ ID NO: 109199 - DNA, 201 bp, Homo sapiens
tggtggtttgcttgatacctcactacaaagtgacagagtaaggtggagaaccaccccccaaaaaaagtaaataaaaaaataataataactaaaaagtagasaacccagttgtattagtcgattctcacacagttataaagaactgcctgagactgggtaatttaaaaaggaaagaggtttaattgactcacagttccgcag

SEQ ID NO: 109200 - DNA, 201 bp, Homo sapiens
gttggtggtttgcttgatacctcactacaaagtgacagagtaaggtggagaaccaccccccaaaaaaagtaaataaaaaaataataataactaaaaagtaragaacccagttgtattagtcgattctcacacagttataaagaactgcctgagactgggtaatttaaaaaggaaagaggtttaattgactcacagttccgc

SEQ ID NO: 109201 - DNA, 201 bp, Homo sapiens
gatttagaaatggactgatgaatgatgaagagggagaagtcaaatataaaaatttaaaattttaatgtctgagtattagaggctcacatggtggtgtaatygacacaggaagtagaaataaaaattgtgtgattcttgacctgttttttgcattccaggttgctgtttgtaatttggcttccctggccctgaatatgtatg

SEQ ID NO: 109202 - DNA, 201 bp, Homo sapiens
tgggatttagaaatggactgatgaatgatgaagagggagaagtcaaatataaaaatttaaaattttaatgtctgagtattagaggctcacatggtggtgtmattgacacaggaagtagaaataaaaattgtgtgattcttgacctgttttttgcattccaggttgctgtttgtaatttggcttccctggccctgaatatgt

SEQ ID NO: 109203 - DNA, 201 bp, Homo sapiens
atagaatcagtgggatttagaaatggactgatgaatgatgaagagggagaagtcaaatataaaaatttaaaattttaatgtctgagtattagaggctcacmtggtggtgtaattgacacaggaagtagaaataaaaattgtgtgattcttgacctgttttttgcattccaggttgctgtttgtaatttggcttccctggcc

SEQ ID NO: 109204 - DNA, 201 bp, Homo sapiens
tctctagaagcaaaactgagtgataactcatgagaagtactgataggacctttatctggatatggtcctataggttattctgaaataaagataaacatttytaagtgattgtatgagattaattttgtcatttactttcatataaaagtcaaatttgaaaaacacattttctgttctttgagaattcagggaggaaattat

SEQ ID NO: 109205 - DNA, 201 bp, Homo sapiens
aggatcgctcgagcccaggaggtcaaagctgctgtgagctatgatcatgccactgcactccagcctgggtaacagagttaaaccctgtctcaaaaaaaaaraaaagaaaagaaaagaaaaacagaaagccaaatagaaacatgggcaagggctataaacaaataatgcatggaagaagaaacttgattggctaataaacgt

SEQ ID NO: 109206 - DNA, 201 bp, Homo sapiens
aaggggttgtctttaaaaagactgtaaaggagctatgattttggtagacatatcaaagaattggttgacaattggagagattattttcataaatgtttgtytttcttggcttactaacaacctgaaaagacggtgatgtatgtttatgaatatgcatgagaaaatgtgaaaatagcacgtttgcagtctggtgaaaatgta

SEQ ID NO: 109207 - DNA, 201 bp, Homo sapiens
aagaaaagaaaagaaaagaaaaacagaaagccaaatagaaacatgggcaagggctataaacaaataatgcatggaagaagaaacttgattggctaataaaygtctgagatgttaaactgtgcaataggaaaatgaaaattatgtatatatatatttgataaaaatgaaaaggctgacaattccaagcactgataagaatgt

SEQ ID NO: 109208 - DNA, 201 bp, Homo sapiens
agtgaggaaattgagacttagaaagttgttactttctgagatcaatcacttaatatgtggtagagccaggattcaagatttatgcattgacactttatgaygtaaactttagccctttgttagtttactgttcaatgggagtcaagataatagttttggatttaaatcctagctccactacttaactagtaatgtggccta

SEQ ID NO: 109209 - DNA, 201 bp, Homo sapiens
tgctgagtgccctctgtcatttctatcatggtctctcttttagactaatggcaattccaatggccttgtaccgatgctgagagtatataacaacacagctmgatatgtggatcaaggtgggaacaaggtatgctccatgaattgaaagtactggaaatcagaactaaaggtgatttagtcatatacacttaagatggttca

SEQ ID NO: 109210 - DNA, 201 bp, Homo sapiens
ctcctgccagtaatcccagcactttgggaggctgaggtgggctgatcgtgtaagctcacaagttcaagaccacgagttcaagctcacgagttcaacatgaygcaaccccatctccacaaaaaatacaaaaattaaccgggtgtggtggcgaacgcctgtagtttcagcttctctggaggctgaggtgggaggatggcttga

SEQ ID NO: 109211 - DNA, 201 bp, Homo sapiens
aaagcaacttcctttgggctttatgtacatgtcatgtggtgtaaagagagctgggctgttgctgaagaggaggctccatctgtagttcatcatgtcacttyagaaaagttaatcttgtttcacattttgtttatatcattcgttcgtttttactcatagaattgtaaaatattacttttacaattatatatggaaaactta

SEQ ID NO: 109212 - DNA, 201 bp, Homo sapiens
ggacacatatgtcagtagtttattaaaattaaataggtcaggtgcagtggctcacatctgtagtctcagcactttgggaagatgaggcaggtggatcattkgaggtcaggagttcaagaccagcctggccaacatggtgaaaccctgtctctagtaaaaatacaaaaattagctgggcgtggtggtgcacacctgtagtcc

SEQ ID NO: 109213 - DNA, 201 bp, Homo sapiens
gtcaggagttcaagaccagcctggccaacatggtgaaaccctgtctctagtaaaaatacaaaaattagctgggcgtggtggtgcacacctgtagtcccagmtacttgggaggctgaggtaggagaattgcttgaacctgggaggtggaggttgcagtgagctgagattgtgccactgcactccagcctgggtgatagaacg

SEQ ID NO: 109214 - DNA, 201 bp, Homo sapiens
ggcaagtaagtctgttttgatggtgcaagtagattaattattggaatatggagagatggctatggctgggggaagggagatagaaggtagaagctgacacktcacggataggtagcccttgtaggtttctgagaggaaaatagcatcaaaatgttaagatgaaaaggaaggttcttgcttctggttacagagtgtcttgct

SEQ ID NO: 109215 - DNA, 201 bp, Homo sapiens
agattaattattggaatatggagagatggctatggctgggggaagggagatagaaggtagaagctgacacgtcacggataggtagcccttgtaggtttctragaggaaaatagcatcaaaatgttaagatgaaaaggaaggttcttgcttctggttacagagtgtcttgctgtgagaagggattagaggttagcctaggga

SEQ ID NO: 109216 - DNA, 201 bp, Homo sapiens
tcctgggattacaggcgtgagccaccgcgcccggcccaggaatctattttaaactacaagaacttataatcactttaactctagaagattgtttccttaartgaggcattacatatttcttcaacatatatgtgtttattgagcactttatatgctaggcattgaggtgggttgagatgacaaaaagggttgagaaccact

SEQ ID NO: 109217 - DNA, 201 bp, Homo sapiens
aataaaccactcacaacttagaatttgtttttcttaaaaatgtatgctaataccctgtgcattacctgtcttaaaaactggaacttataatgtggccttgraaacagtgaaatgcagtgaggtttaatgggattggggccagaagacttgtataataatataaccttgggcaagtctcagtaacctgagcctcaggttctt

SEQ ID NO: 109218 - DNA, 201 bp, Homo sapiens
ctaaaattgattggattgtggtgatggttacacaagtctatgagtatattaaaagccattgagtagtacactttaaatggggaattatattatttgtgaaytatattcctttttttttttgttgttgagacaaagtctcactctgtcacccaggctggagcgcagtgttgcgatcttggctcactgcaacctgtgcctcct

SEQ ID NO: 109219 - DNA, 201 bp, Homo sapiens
gtgattgtgaaatgtcagagattatcaaagttgataattacttatcaactttggttgagaatcatttgaacctcgggggcggaggttgcactttgtaattkgtgaagtgctaaagaaagttgtcattaaattatcataattcagccccagacctaatttatacttctgtctcctttaattggcctgattaaagtttgattc

SEQ ID NO: 109220 - DNA, 201 bp, Homo sapiens
aaaatttaaaattttaatgtctgagtattagaggctcacatggtggtgtaattgacacaggaagtagaaataaaaattgtgtgattcttgacctgtttttygcattccaggttgctgtttgtaatttggcttccctggccctgaatatgtatgtcacatcagaacacacatacgactttaagaagttggctgaagtcacta

SEQ ID NO: 109221 - DNA, 201 bp, Homo sapiens
attcagggccaccttctacacaggacaatttctaggcatctagtgtgaggcatgtcgagataccctttctaaggttaaggataaattgttgcatctgacgmctcctacaagcaagaaagaggcatgatacttagtgtacctctttgagtcttggaggtaaaaaatcatggtaaccatttccagcttggttatggcaactga

SEQ ID NO: 109222 - DNA, 201 bp, Homo sapiens
gttaagataattaccaatgcacttttttttttttgtcagtttcctgattgacttcagaacttctggcagttgtagaattttctttttgctaagttgctttcccccccccactgcatgtataattgcagaacgctaatgttgctttgcagttacctgcctgcttagttatccaattgctagagcactgaggtttcagtccca

SEQ ID NO: 109223 - DNA, 201 bp, Homo sapiens
aaatataaaaatttaaaattttaatgtctgagtattagaggctcacatggtggtgtaattgacacaggaagtagaaataaaaattgtgtgattcttgaccygttttttgcattccaggttgctgtttgtaatttggcttccctggccctgaatatgtatgtcacatcagaacacacatacgactttaagaagttggctgaa

SEQ ID NO: 109224 - DNA, 201 bp, Homo sapiens
ggtaaaggggttgtctttaaaaagactgtaaaggagctatgattttggtagacatatcaaagaattggttgacaattggagagattattttcataaatgtktgtttttcttggcttactaacaacctgaaaagacggtgatgtatgtttatgaatatgcatgagaaaatgtgaaaatagcacgtttgcagtctggtgaaaa

SEQ ID NO: 109225 - DNA, 201 bp, Homo sapiens
gctcaatcttggcccactgcagcctccacccctggggatcaaatgattcttgtgcctcagcctccctcagctgggattacaggcatgtgccaccacgctatttttttttttttttttttgtatttttagtagagacagggttttgctatgttggccaggctcgtcttgaactcctgacctcaagttatctgtccgccttgg

SEQ ID NO: 109226 - DNA, 201 bp, Homo sapiens
attgaaagatcttaccgagcggggcctatggcatgaagagatgaaaaaccagattattgcatgcaatggctctattcaggtatagaatgaaaatgaagtgygctctgcaggggctgagttggacattgtggtacctcctcactcatgctagacaatggagagaatgacttcattgtgttcatctaggttttgcttgtgtag

SEQ ID NO: 109227 - DNA, 201 bp, Homo sapiens
tgtaaactatggaaacgaggaaggagtagatcctcaattctaggaccttaaaaaaaaagacaaatgaaaagtcaggaagtaaatggaaagtgagttaaatrtactgctaaggttacagtttaattcaaaatttattgtgcagtagctatatgtaaaacacaatgttaagtgctctgagaatataaataaatatgctgccct

SEQ ID NO: 109228 - DNA, 201 bp, Homo sapiens
ttgctgttccctcagctcccagctccacctctggggttcagcttctgtctctgctgtcccagttttgaggtttggtttcttgtttctgtctcttgctttcrggctcctccctcccaccactccccaacttcccctagcagttgcagggaagataggacgagtagcttctgacatgtgtgcctcagatctgttccaccccac

SEQ ID NO: 109229 - DNA, 201 bp, Homo sapiens
tggccctcccaacatgttgattttgggcttctggtcttcagaactatgagagaataaatttttgttaagttaccaagtttttagtaatttgttgcaccagycataggaaacttaaatacctttgtcctctggagtaaaaaggatactctgttttaatctcttatttagaactagtcattgctaaaataatgtaagagggat

SEQ ID NO: 109230 - DNA, 201 bp, Homo sapiens
aggagtccagacttagcttagctgggccttcttttctgggtctgtgttcaagatgttggtaagggctgtgatctcgtctgagacacagagttctcttccawgcttacctggttgttggcagaatatatttcaaggactcatggcatcttgcttctttaaggccagtgggagagaccatctctcgtttcaaaaggggcacag

SEQ ID NO: 109231 - DNA, 201 bp, Homo sapiens
cactctgtcaccttctcgatcccgccggcgctttagagccgcagtccagtcttggatccttcagagcctcagccactagctgcgatgcatgtgatcaagcraggtgagggggggacgaggtgggcgagaaggaaggtgaggggatgcgggctgccgccgccggagctgatgcccagcccgcccgcccgccttcgctgcttc

SEQ ID NO: 109232 - DNA, 201 bp, Homo sapiens
ttgtttgaattgattgtcataggaataatggattttggaagagtttttggagggtaatgtgtttagactatatgaaaaaaaatttttaaattgagtttttrtaggcctttcaaactaataagcataagggattcgaaggcagacagaatgttttgcagagtgaataacaaagcaaattgtttttgttttctatcgtgatga

SEQ ID NO: 109233 - DNA, 201 bp, Homo sapiens
agaggctcaaaaaggacacaaccagtttggggaaggggtggctaaggaagatggtataggtgaaggcggctgtgtgaccactttcccccacccttcccacyctctagacaactctctcccttacctgtttttgctatggctgtaaaggtatttttcctctgccccactccctgccatacctttatcctgggatcctatttt

SEQ ID NO: 109234 - DNA, 201 bp, Homo sapiens
tgtgaaatagcacttcatgttggtcaatttacatgttaattacatttgattctttgacattgtagtcttaataattgctaacatgaatttaataattgctracatgatttgattctttagatggccgccaagaacgagtcatgtttgacaaaattacatctcgaatccagaagctttgttatggactcaatatggattttg

SEQ ID NO: 109235 - DNA, 201 bp, Homo sapiens
aaaggtcagtgtgagttaaaagtggttgaggcaggttttatggaggtgtgagatttggagggtgagtaggagttagatgtatggaaaggtggaagaggaayctttaggcagagtaaggtataagcaatgatgtggatatgggaatgggaagccctcttgggacttatatttcacagggaacagttgaagagatctggggcc

SEQ ID NO: 109236 - DNA, 201 bp, Homo sapiens
tgccttggcctcccaaagtgttgggattatgggtgttagccactgcacctcgcctaggttgttcttaaaacaaaaacaaaaactacctggaataacaaaastctccctaattggctggatgcagtggctcctgccagtaatcccagcactttgggaggctgaggtgggctgatcgtgtaagctcacaagttcaagaccacg

SEQ ID NO: 109237 - DNA, 201 bp, Homo sapiens
cccagctactaagaagtggagtccagagagcctggctcaagagccaaactctgaaccaccacaccaggatagttcccacccctccccagacatcatctcayctcatcatctcatctcatctcatcatctcatctcatctcatctcatctcatctcatctcatctcatcatctcatctcatcatctcatctcatctcatctc

SEQ ID NO: 109238 - DNA, 201 bp, Homo sapiens
atcaagtcttgtaaattccacctcctacctctgtctgtcctcactgccattctcttactcaggtccactaattccatgtcctcagtctgccttcaagcctytcctcccctcaagcctctgatgtatcttgtttattgtagagcagatgcagacagaaacagagctgtggagacacaatgagagatacagctggcccagtgg

SEQ ID NO: 109239 - DNA, 201 bp, Homo sapiens
tatgtcctggaggaaagagacccttagacaggctcttgggggagccctgagagacttagagctaaaagtgtgccctagagaggcccttgtgattcagacawctgccctggaccacacagtaggttccgaggagacgttcagcctgggctggcctgggatagcctaaagtgggggtgccatggaggggctgagtgcttggca

SEQ ID NO: 109240 - DNA, 201 bp, Homo sapiens
gctatgtgctggctgggagacacggaactggtcaaggagacataaagcagtgttccagagggctatgtcctggaggaaagagacccttagacaggctcttsggggagccctgagagacttagagctaaaagtgtgccctagagaggcccttgtgattcagacatctgccctggaccacacagtaggttccgaggagacgtt

SEQ ID NO: 109241 - DNA, 201 bp, Homo sapiens
attagccaggcatgatggcacatgcctgtaatcgcaactactggggaggctgaggcggagaattgcttgaacccgggaggcagaggttgcagtgagtcgakattgcaccattgcactccagcctgggcaacgagcaaaactccgtctcaaaaaaaacaaaacaaaacaaaaaaaaaaacgaggctgggtgcggtggctcag

SEQ ID NO: 109242 - DNA, 201 bp, Homo sapiens
aaatatgcagagctatgtgctggctgggagacacggaactggtcaaggagacataaagcagtgttccagagggctatgtcctggaggaaagagacccttasacaggctcttgggggagccctgagagacttagagctaaaagtgtgccctagagaggcccttgtgattcagacatctgccctggaccacacagtaggttcc

SEQ ID NO: 109243 - DNA, 201 bp, Homo sapiens; identical to SEQ ID NO: 17914

SEQ ID NO: 109244 - DNA, 201 bp, Homo sapiens
gcgctagtcctccatcggcacctcggtcaaattccattctcttgtcagcacagatgtaacttctgctctaatccatgagtcctgaggctcctctcatcacrgctcactgtagcctcaaactcctggtttcaagagatcctcccacctcagcctcccaagtagctgggactacagatatgtgccaccacacctgactaattt

SEQ ID NO: 109245 - DNA, 201 bp, Homo sapiens
ggagagacgggagagagagcgctagtcctccatcggcacctcggtcaaattccattctcttgtcagcacagatgtaacttctgctctaatccatgagtccygaggctcctctcatcacggctcactgtagcctcaaactcctggtttcaagagatcctcccacctcagcctcccaagtagctgggactacagatatgtgcc

SEQ ID NO: 109246 - DNA, 201 bp, Homo sapiens; identical to SEQ ID NO: 17916

SEQ ID NO: 109247 - DNA, 201 bp, Homo sapiens
aagacggtgagcgccagcagcacggtgacgcccagcgacaccttctcgcctgagtcggcaggcaggtggaaggcgagcggcgcaagcagcgagatgagcamgcagggcagcagcaggttgcacacgtaggcggcggcgcggcggcgcagcagcagcgtgaaggtgacgtcggggtagggctcggagcagcagccgtaggtg

SEQ ID NO: 109248 - DNA, 201 bp, Homo sapiens; identical to SEQ ID NO: 17917

SEQ ID NO: 109249 - DNA, 201 bp, Homo sapiens
agaccggctggtggagaaacaggagacaatctggggactgaaccttacccagggctgtaggagtgagactctgaataaagggttgggccggcggtgtggcrggtacttcaagacaggcagcaactaacctggcgatagaagggcttcagctgatttgggggatgactggagaggaaagcgcttggccgtcatacctgctag

SEQ ID NO: 109250 - DNA, 201 bp, Homo sapiens
tgtgtctgccacaggtctcagggcacttgtgtagttggcaaagaggtcacggaacagcttgagagccagccggccctcagctcccaggcactctggagggwcagtaaggagggttgtccatcccaggccctagtcccagggcctctgctcacaccctccactcccagggctggggccctgtccttatgagtgtcctcctgg

SEQ ID NO: 109251 - DNA, 201 bp, Homo sapiens
tgcgaggtgaagcccaggtctctcactgtggctgtcaagtcctttcatgactggcccatcttcccaacgttcctaccccgcaagctctgccagcctagatracatgtctttctctctttacatcctcagttcccacctccaatacctttgctttttccattcctgctgcacaaaagtcctttcccacccaaacaccagtct

SEQ ID NO: 109252 - DNA, 201 bp, Homo sapiens
gctggggggccagcccctccttcaggcgactgggggctaggagataactcaggtggcctggactgcccacagggctcccctctttcccgcacgcacaggcyccgtgccaggtgtcccagcaggagggccctagcccaggctggcactgggcggacactgggaccacagtaatgcaggttcatgataaggatggtgagtgct

SEQ ID NO: 109253 - DNA, 201 bp, Homo sapiens
acatcgtggctcgtggcaagggcccgctggggggccagcccctccttcaggcgactgggggctaggagataactcaggtggcctggactgcccacagggckcccctctttcccgcacgcacaggccccgtgccaggtgtcccagcaggagggccctagcccaggctggcactgggcggacactgggaccacagtaatgcag

SEQ ID NO: 109254 - DNA, 201 bp, Homo sapiens
agactggcccagggccccgcccgcatctacctccgagccctgggcaagcacagcacctacaactgcgagtacatcaaaggtaggagggcaagcgctggtcrgcacctgtgcggaaggtggaccttccacatccaccagggactttggcaaaccgaagcccctatctcctgtgtcccagggatacataaatacaagtcatat

SEQ ID NO: 109255 - DNA, 201 bp, Homo sapiens
tgccttggggcccctatcaagggctactccttcttccctggagaggaagaggtgctgatccccccctttgagaccttccaagtgatcaatgccagcagacyggcccagggccccgcccgcatctacctccgagccctgggcaagcacagcacctacaactgcgagtacatcaaaggtaggagggcaagcgctggtcggcac

SEQ ID NO: 109256 - DNA, 201 bp, Homo sapiens
gtctcggaaaaaaaaaaaaaaagagagagaaagaaaaaaaaggaaactgcctgctccaatccagacccaatgcctggacaccctcttcctggaaccacttygggcactccgcctgtcccccagcaaagagggtgtggaaggcttgtggttcctgctgcttctcttagggaaactggtatcctctgtcttctcctgctcttc

SEQ ID NO: 109257 - DNA, 201 bp, Homo sapiens
cagctcactctgccaatctctccaccttgtatctgcatgtccccacttttgctcctgtgctcctaaatacctctttttttctctctctctcccccaacctytctgcctgttttccctgcagccatgggtcagagccccctctctgcagtctggtctttgctgctgctgctctggttcctcgtggtgagggcctttccagat

SEQ ID NO: 109258 - DNA, 201 bp, Homo sapiens
cacatctgaccaggctagtatgctgctgaaacctttcagtgctccccgtcatctgcaggagaaagacctggcctggccggcaggcccttcaacatctggcscctctgattttcccagccctgtctctggaagctccccgctcactgtttccaccctagccaggcaagtctcctctcacgcacttcagcacccctctcctcc

SEQ ID NO: 109259 - DNA, 201 bp, Homo sapiens; identical to SEQ ID NO: 17913

SEQ ID NO: 109260 - DNA, 201 bp, Homo sapiens
gctgcttctcttagggaaactggtatcctctgtcttctcctgctcttctgatcccctcttcccccagcacccggggtttatatctgtccctccctggaagyaccgaaggctcattccacaagaggactgcagggagtgggggcaactggtggaccaagccctgctctaagtctgtccctggagatcctgctaaggccccac

SEQ ID NO: 109261 - DNA, 201 bp, Homo sapiens
tagaaggcagttaagttagacccaatgacctctggaagagaaactgggactctaattggtctcatctctgtctaccttcctaaattctttattaaaaaaawttttttttgagacgtggtctcagtctgtcacccaggttggagtgcagtggcaccaccacagctcactgtagcctcaaactcttgggctcaagcgatcctc

SEQ ID NO: 109262 - DNA, 201 bp, Homo sapiens
catctcatctcatctcatctcatctcatcatctcatctcatcatctcatctcatctcatctcatctcatctcatctcatctcatctcatctcatctcatcatcatctcatctcatctttactgcacagtaatctatgggaaggaggcagaacaggaggcattaccccccttatatggtcaagtgagacccagagacaaatt

SEQ ID NO: 109263 - DNA, 201 bp, Homo sapiens
tcatctcatctcatctcatctcatctcatcatctcatctcatcatctcatctcatctcatctcatctcatctcatctcatctcatctcatctcatctcatcatcatctcatctcatctttactgcacagtaatctatgggaaggaggcagaacaggaggcattaccccccttatatggtcaagtgagacccagagacaaat

SEQ ID NO: 109264 - DNA, 201 bp, Homo sapiens
ctcatctcatctcatctcatctcatctcatcatctcatctcatcatctcatctcatctcatctcatctcatctcatctcatctcatctcatctcatctcatcatcatctcatctcatctttactgcacagtaatctatgggaaggaggcagaacaggaggcattaccccccttatatggtcaagtgagacccagagacaaa

SEQ ID NO: 109265 - DNA, 201 bp, Homo sapiens
tctcatctcatctcatctcatctcatctcatcatctcatctcatcatctcatctcatctcatctcatctcatctcatctcatctcatctcatctcatctcatcatcatctcatctcatctttactgcacagtaatctatgggaaggaggcagaacaggaggcattaccccccttatatggtcaagtgagacccagagacaa

SEQ ID NO: 109266 - DNA, 201 bp, Homo sapiens
atctcatctcatctcatctcatctcatctcatcatctcatctcatcatctcatctcatctcatctcatctcatctcatctcatctcatctcatctcatctcatcatcatctcatctcatctttactgcacagtaatctatgggaaggaggcagaacaggaggcattaccccccttatatggtcaagtgagacccagagaca

SEQ ID NO: 109267 - DNA, 201 bp, Homo sapiens
cgtgccaggtgtcccagcaggagggccctagcccaggctggcactgggcggacactgggaccacagtaatgcaggttcatgataaggatggtgagtgctgytgagaatgtgaccatggtcatagtggccatgtagtacttccctgcaagagagagagaaagccaattgactcaaaacaaaagcctgtggttcctgagcttc

SEQ ID NO: 109268 - DNA, 201 bp, Homo sapiens
tctctctctctcccccaacctctctgcctgttttccctgcagccatgggtcagagccccctctctgcagtctggtctttgctgctgctgctctggttcctygtggtgagggcctttccagatggtccaggcctcctttgatgcatgagacacgggacagcctcgcctgctgcctctgcccatcctgaggatgttggccatg

SEQ ID NO: 109269 - DNA, 201 bp, Homo sapiens
aaatatgaactcgcttcctccctccatgctctgaaacctgcttcctatcccatgttccctatctcagcaaatagcatgccctcagcttcaacagtgacctyagttggaaatctgggaattatccctcccttctccctctgctgcctcctcctcggggaatccagttaatctccagatcctgtcagatcattcaaatcctcc

SEQ ID NO: 109270 - DNA, 201 bp, Homo sapiens
agcagcagccgtaggtgagcacgcgccgccgcgccggcatgcccagcacgcgccactccacgttctccacgaagtccgccaggctggctgcagcgccgcgyggccgcacatccagttggtgcccgccgtgagtccaggagccgaacgtcaggccgcagtgctgggcgtcgaacgggaaggctgctacatccacgcggcacg

SEQ ID NO: 109271 - DNA, 201 bp, Homo sapiens
cccagccctcacagggcctgcaccagcaccaggaggctcatgaccagggccatggagaagaagatggccaggaagaagcggtccatcacacgggccaggcrcttccagtcctcatggcagcgctgggcagctcggtggctgcggaaggtattggcaatggtggctacgtggtgcagtagggcttcctggcggcacagacat

SEQ ID NO: 109272 - DNA, 201 bp, Homo sapiens
gggccccgcccgcatctacctccgagccctgggcaagcacagcacctacaactgcgagtacatcaaaggtaggagggcaagcgctggtcggcacctgtgcrgaaggtggaccttccacatccaccagggactttggcaaaccgaagcccctatctcctgtgtcccagggatacataaatacaagtcatatccaccagctcc

SEQ ID NO: 109273 - DNA, 201 bp, Homo sapiens
caggcatctttgagttctgattatgtaattccagatactggaaaagtttaggatttctccttctagtccactccacacctctcctaccagggtttgggtaraggagccaagttcagccacagcagatcccactctgatcttaaatccatgtttcatcccactctgcagcaccttatttgtggcaatagaaggcagttaagt

SEQ ID NO: 109274 - DNA, 201 bp, Homo sapiens
gtcaagtcctttcatgactggcccatcttcccaacgttcctaccccgcaagctctgccagcctagatgacatgtctttctctctttacatcctcagttccyacctccaatacctttgctttttccattcctgctgcacaaaagtcctttcccacccaaacaccagtcttttctctcccagtctccacttgctgacatctta

SEQ ID NO: 109275 - DNA, 201 bp, Homo sapiens; identical to SEQ ID NO: 17910

SEQ ID NO: 109276 - DNA, 201 bp, Homo sapiens; identical to SEQ ID NO: 17911

SEQ ID NO: 109277 - DNA, 201 bp, Homo sapiens
ttgggaggccaagatgggcagatcacctgaggtcaggagttcgagaccagcctgaccaacatggagaaaccccgtctctactaaaaatacaaaattagccrggcgtggtggcgcatgcctgtaatcccagctactcgggagactgaggcaggagaatctcttgaacctgggaggcggaggttgctgtgagccatgattgtg

SEQ ID NO: 109278 - DNA, 201 bp, Homo sapiens
cacctgaatcttttataaggaaacaactgcattaataataaaaaaaagtgcactagctgaagtggcaccttgggggttgccagccttagccaggagatgastgtgtgggagagcagatggttgagggagcagggacacctgctctccagcctggatctgcctatcccttgcaggaaaaggccactgatcaggcccctgaga

SEQ ID NO: 109279 - DNA, 201 bp, Homo sapiens
tagtagagatggggtttcaccatgttggccaggctggtcttgaactcctgacctcaggtgatccatccacctcggcctcccaaagtgctgggattacaggygtcagccaccgtgcccggcccacctgaatcttttataaggaaacaactgcattaataataaaaaaaagtgcactagctgaagtggcaccttgggggttgc

SEQ ID NO: 109280 - DNA, 201 bp, Homo sapiens
tatcctctcagtccctgctactcctgtcccctcaggcccagagccaccccatcacacgacgagacctcttctctcaagagattcagctggacatggccctrgcctcctttgatgaccagtacgctggctgtgctgctgccatgacagctgctctcccggatctcaaccacacggagttccaggccaaccaggtgtatgcag

SEQ ID NO: 109281 - DNA, 201 bp, Homo sapiens
gagagaggaggggcccagataggcagtacttgttatagagtacgatgtctggccgccacacaagactgctggggatgcggatggcatccaggccaccatargcattggggtcccatcgtaggtaggcatctgtccactcctgccgtatccacagatacagggtcagcacctggttccgttcatcctagtgggggcagggaa

SEQ ID NO: 109282 - DNA, 201 bp, Homo sapiens
acataaccttctgaggggtgcacttactgcccctgaagggatctaagccatagttcgccacttgcctgctgggaggctgaagaggtttcctggccaacgcrgcggtctctggccatttgagtgggcaagcagacccggtcgggcttttctcctggtcagaggctggaagggaattattttccagccagattattgacacct

SEQ ID NO: 109283 - DNA, 201 bp, Homo sapiens
catctcatctcatctcatctcatctcatctcatcatctcatctcatcatctcatctcatctcatctcatctcatctcatctcatctcatctcatctcatctcatcatcatctcatctcatctttactgcacagtaatctatgggaaggaggcagaacaggaggcattaccccccttatatggtcaagtgagacccagagac

SEQ ID NO: 109284 - DNA, 201 bp, Homo sapiens
agcgacgcttaacctaaatgagattgggggcagaggcataaccaccttgatatttatgtaacatttgtgtgaaggcgcatatattcattttctgaagggargtttcagcttttatcagattccaaaacataaagacccattgactatattaccatttgtgtacagaaagaaaacagaggctgggagctgtggctcacgcct

SEQ ID NO: 109285 - DNA, 201 bp, Homo sapiens
cattcctgctgcacaaaagtcctttcccacccaaacaccagtcttttctctcccagtctccacttgctgacatcttagtctcctgttcatcctacaagacctgttcacgtcactcctccaggaagtcactcatgttcctttcagcaagaagggtcctctctcttctgagcctccatgtctgtcttatgactctcagtgcca

SEQ ID NO: 109286 - DNA, 201 bp, Homo sapiens
tcatctcatctcatcatctcatctcatctcatctcatctcatctcatctcatctcatcatctcatctcatcatctcatctcatctcatctcatctcatctyatctcatctcatctcatctcatctcatcatcatctcatctcatctttactgcacagtaatctatgggaaggaggcagaacaggaggcattacccccctta

SEQ ID NO: 109287 - DNA, 201 bp, Homo sapiens
tctcatcatctcatctcatctcatcatctcatctcatctcatctcatctcatctcatctcatctcatcatctcatctcatcatctcatctcatctcatctyatctcatctcatctcatctcatctcatctcatctcatcatcatctcatctcatctttactgcacagtaatctatgggaaggaggcagaacaggaggcatt

SEQ ID NO: 109288 - DNA, 201 bp, Homo sapiens
cctccccagacatcatctcatctcatcatctcatctcatctcatcatctcatctcatctcatctcatctcatctcatctcatctcatcatctcatctcatyatctcatctcatctcatctcatctcatctcatctcatctcatctcatctcatctcatcatcatctcatctcatctttactgcacagtaatctatgggaag

SEQ ID NO: 109289 - DNA, 201 bp, Homo sapiens
gatagttcccacccctccccagacatcatctcatctcatcatctcatctcatctcatcatctcatctcatctcatctcatctcatctcatctcatctcatyatctcatctcatcatctcatctcatctcatctcatctcatctcatctcatctcatctcatctcatctcatcatcatctcatctcatctttactgcacagt

SEQ ID NO: 109290 - DNA, 201 bp, Homo sapiens
ccacagctgtaccaccaccacaacgcaccatgtcgatgatctgggacagtgtcacctccagggtcacattcagagtctggtctgtgtctgccacaggtctyagggcacttgtgtagttggcaaagaggtcacggaacagcttgagagccagccggccctcagctcccaggcactctggagggtcagtaaggagggttgtcc

SEQ ID NO: 109291 - DNA, 201 bp, Homo sapiens
aagactgctggggatgcggatggcatccaggccaccataggcattggggtcccatcgtaggtaggcatctgtccactcctgccgtatccacagatacaggktcagcacctggttccgttcatcctagtgggggcagggaatggcagagatgtggacatgtatatgcatatcctgccctgtctgtgcacactcccctgcagg

SEQ ID NO: 109292 - DNA, 201 bp, Homo sapiens
agtccagagagcctggctcaagagccaaactctgaaccaccacaccaggatagttcccacccctccccagacatcatctcatctcatcatctcatctcathtcatcatctcatctcatctcatctcatctcatctcatctcatctcatcatctcatctcatcatctcatctcatctcatctcatctcatctcatctcatct

SEQ ID NO: 109293 - DNA, 201 bp, Homo sapiens
tagacctgtgctggggaaggcaggtggcacctgggcttgctaccagcccttccttggagcaggaggcccccgtcctttgtggcagcctagtgtcaatgtgygacgggtcacacagcttcccaggcaggactcgggctggggaacagtggacagctcccagggtggactcggggtggggaggagtggacggctcccagggtg

SEQ ID NO: 109294 - DNA, 201 bp, Homo sapiens
tgccctttattctaagatgccagagcctggcagatgctctctgccccacgggggttttgtggataaaagaagatgggtgttatttttccacaggatagtcdgaaacgtgttttgccagtcaccctggctcagttagcaaattctgatccattaacctctgaaaagtgtattggcgaaacatcacgtttttcatacgtgttc

SEQ ID NO: 109295 - DNA, 201 bp, Homo sapiens; identical to SEQ ID NO: 17921

SEQ ID NO: 109296 - DNA, 201 bp, Homo sapiens
cgcacatttttctggagttggagagttagttgcaggtgtgatgtcacttcacccctaaatacttgagtttcctgaaaacaaagacgtgctcttacatagcrctaatagtcctaataaagtcctttgtaacaaaagcaagccctggaccccacgtggcatcgctggttgaaccctcaagagtcagctccttcgtctttcttt

SEQ ID NO: 109297 - DNA, 201 bp, Homo sapiens
attctcttgatttaaaaagcagtatagttttatagtataagactctatgcctgggcatgtggtggctgtggctcacgcctgtaatcctagcactttaggaygccgaggtgggcagatgacttgaggtcaggagttcaagaccaacctggccaacatggtgaaaccctgtctctactgaaaatacaaaaattagctgggcat

SEQ ID NO: 109298 - DNA, 201 bp, Homo sapiens
aggtgttcatgagcggccggaacgtgcatttgcagcaggtgaacacctgctttgtcagtggtgtcctggtgtgtaacagggctggggcctcttctcctgcrctggggctctgctgtccacacgtgtgtgacgtggccctgggtcggtggcctgtgtgtgtccttgaccagagaattgtgccgtcttgtgttaaaaccacgg

SEQ ID NO: 109299 - DNA, 201 bp, Homo sapiens
aattggtacaaaaacctagattttaaaattcttacttgggggctcttttgataaaccaagagattttaaagtgttgttccccttgtgtttttttgtagagyggttctggtgaggttggaaggatgcagccacccggttgtcatgaaaggcctgtgtgctgaatgtggccaagacctcacccagtaagtatccggaagagtg

SEQ ID NO: 109300 - DNA, 201 bp, Homo sapiens
atttttcatgagagacacctgtaggtggaaagtcctttcattttatagacaaagaaatgccctcaaggggtgatgtcacctgcctacaaagttatgcaagrgttagtgtagaattggtacaaaaacctagattttaaaattcttacttgggggctcttttgataaaccaagagattttaaagtgttgttccccttgtgttt

SEQ ID NO: 109301 - DNA, 201 bp, Homo sapiens
attcctttcagagcggttccgccaccccagccgcagatgtttggtgaagagctgcctgacgctcaggacggagagcagcctggcccttctagaagaaagcracagcccagtatgtctgagacaatgccgctgtacactctttgtaaggaggatttagagagtatggacaaagaggtgagccaaccccacgccccggtgccc

SEQ ID NO: 109302 - DNA, 201 bp, Homo sapiens
ctgcagatttctttgctttggctttttcccagtcactcacagggaggtatttaaatcgccacagaaaggggaaggtacctaaaatgatctgggagcctgcrgtgactggtgagaactaacaggcggaggccgtgtgcgagggttgatgacgtctgacagactgtacctgtgcctttagcgtgtccacaggaagggcatctg

SEQ ID NO: 109303 - DNA, 201 bp, Homo sapiens
gctgatgatggctccctaagtacttggagattttagtcctggtgcccccgtttcctgtcccatctggtgcagtgataaacaggaaaggaaaacagcaccaygttttaaaggcttagtttcctgacacgagtacccagatcccaacactcagctcttctccacaggggtgtgtggtcagcctgcgtgggagacacagggcgg

SEQ ID NO: 109304 - DNA, 201 bp, Homo sapiens
ttgcagagtaagaacgggaagcagcaggtgccgctgtccacggcgaccgtgtccatggtgcacagcgtgccggagttgatggtgagctccgaggtgagcckggcatcagtggcggcgtgttggggaagcgtggtgctctgaggagggcggctgcaggaggagggtggctgcagaagcacggacgtgtggttgtcatcgtcg

SEQ ID NO: 109305 - DNA, 201 bp, Homo sapiens
atgccggaactcgtagtctcgggatgctgggtctcagcgcgtgatggggtaatggcacgcaggcctgcgttgaacgctgggactcgtagtcccgccatgcyctgtccgcggtgcacgccgggatacgtagttccgagcgcgccaagaccgtcactgggactgggcgacagcggcccgcgttgcatgccgctgctccacggt

SEQ ID NO: 109306 - DNA, 201 bp, Homo sapiens
cttagcccatggttgggtgaggtccccgtgtggttgatctgtccctgagtccccgaggtccccttgcggttgatctgtccctgagcccgtggttgggtgargtccccgtgcggttgatctgtccctgagtccctgaggtcccccgtgtggttgatctgtccctgagcctgtggttgggtgaggtcccccgtgcggttgatc

SEQ ID NO: 109307 - DNA, 201 bp, Homo sapiens
gttgcagagtaagaacgggaagcagcaggtgccgctgtccacggcgaccgtgtccatggtgcacagcgtgccggagttgatggtgagctccgaggtgagcygggcatcagtggcggcgtgttggggaagcgtggtgctctgaggagggcggctgcaggaggagggtggctgcagaagcacggacgtgtggttgtcatcgtc

SEQ ID NO: 109308 - DNA, 201 bp, Homo sapiens
gagctccgaggtgagccgggcatcagtggcggcgtgttggggaagcgtggtgctctgaggagggcggctgcaggaggagggtggctgcagaagcacggacrtgtggttgtcatcgtcgttactgaaacaacccctcatcacacggatgacttatgggactgcggccttcctgaagcagggacggttgcccttggttctcca

SEQ ID NO: 109309 - DNA, 201 bp, Homo sapiens
tgttttagagatagggtcttgctacgttgcgcaggctggtctccaactcccaggctcaggtgatccgcccgccacagcctcccgaagtgctgagcctcccraagtgctgagactacaggcctggccgcccgcccgccagcttaattcacgtaaattccagacaaacgtagaaagtggctcctttagtaagccacttgcggc

SEQ ID NO: 109310 - DNA, 201 bp, Homo sapiens
taaagtccctgttcacataagggacagaaggaatttaaacccaatctttgcctgcgaaccgactgggtttgctctgtggatttccaagcgtcttttgcccrgggctttgttaaggattggttgagtttcaagccccagggctcaggtagaaagcagagtgctacctccagcccccaccctgctgcactcagagccctggac

SEQ ID NO: 109311 - DNA, 201 bp, Homo sapiens
aagcgaggttgccgtgaccaggttggtgacccagccctgcctctcggcctgtacggcgcagtccatggagcgtggggggctggaggggaacacattgatayagttttgtgtttctcgatgaaatggagttttaccttggatgcaaacatactgactttgtcatttcttgtttctttttaattgtagcaagctgaacagctg

SEQ ID NO: 109312 - DNA, 201 bp, Homo sapiens
tcgaagcggcttcacaccgagtctctgtgactctggactcggcctcgactgctccgaaccgcgcctgtctcgggagttgtgctccgtcctctgtggccgtktctcgtacctgctgcgggggtggggttaggtcggcgtcggtgagtgcccctcaaggccccagccaggtgtgcacccccagatccctcctgggaaacagcc

SEQ ID NO: 109313 - DNA, 201 bp, Homo sapiens
aaccggaagctggtgctcatggtggacttggaccagacgttgattcacacaaccgagcagcactgtcagcagatgtcgaataaagtgagtgcagtcagcayctacggacagtttcccaggaaccgcgggtcctagaattttgattcagaagtgtgttctcttgttttttagatgatttcccgtaggtcagcctgggtttgg

SEQ ID NO: 109314 - DNA, 201 bp, Homo sapiens
gtgaagtgtgaatattagtaaccttgtcgagtaaccagatgctcttattaaataccattccatgccagcgtccctgggaacatgttacttttagagatcaytataatgacctgatgataaagccgctgccttagctaattaaccattggttaaaatgtttctgccttttaatgattcaggccagggcacatgtgctgtgac

SEQ ID NO: 109315 - DNA, 201 bp, Homo sapiens
tgtccacaggaagggcatctgcattcaccagcgcagggtgtgagagtgccacagagaagcagaaaaacattgctgaataaaatgaagatcattccaacagcaacggtattgctgtctttattgctttgtagattttggaatgagaatctctgagaaatagtaatacagttagaataggctgcaacctaagattagtccccg

SEQ ID NO: 109316 - DNA, 201 bp, Homo sapiens
atggagctgggccaggccagggtcctccttggcccctcaggtgcccgcctgccctgtcctgtgagtgcccaagctcctggcccttctctcgcattccttcyttccccctgaattgtgctcacgtttcctttttgcttctgtgtacgtggcctcactgttgagaggctttgctgaacacatgctaagagaggtcctcctgct

SEQ ID NO: 109317 - DNA, 201 bp, Homo sapiens
aggagaaagccaagccctggcctcctgtgggcagtcagacccttctctcctgagcgtggagccgggccaggccggggtcctccttggcccctcaggtgccygtctgccctgccgcgtgtctgcccagctcctgacccttctctcctgagcatggagctgggccaggccagggtcctccttggcccctcaggtgcccgcctg

SEQ ID NO: 109318 - DNA, 201 bp, Homo sapiens
ggacggggcaggctgctctgacatgttgaaacttccgccgaataaaacaacctttcagcaataggtgattcttgaaggaagacttaacaccccggtgcttwaaaaacccaaatacctcgttattctagttattctgtgaaaatgctcccataagcacctggattttccgcgaatgaagattgcggtttttctcctccaatc

SEQ ID NO: 109319 - DNA, 201 bp, Homo sapiens; identical to SEQ ID NO: 17933

SEQ ID NO: 109320 - DNA, 201 bp, Homo sapiens
gtcccccgtgtggttgatctgtccctgagcctgtggttgggtgaggtcccccgtgcggttgatctctccctgagcctatccttttatgcttttggtggccrgaggtgaatcatcactcacaaaggcaactttaaaatataccatagcctctttcttcagatcattcctagagttcgcggagaagtgaaaacgacattgagt

SEQ ID NO: 109321 - DNA, 201 bp, Homo sapiens
atccttttatgcttttggtggccggaggtgaatcatcactcacaaaggcaactttaaaatataccatagcctctttcttcagatcattcctagagttcgcrgagaagtgaaaacgacattgagttaactgccaagaaacatagcacagcatggtgggagctgttatgttactggcaagaagatgagctggtcgttcccatg

SEQ ID NO: 109322 - DNA, 201 bp, Homo sapiens
gtggagactcaatggtttgcattattgatgatcgagaagatgtctggaagtttgcccccaatctgataactgtgaagaaatatgtatacttccagggcacrggtgatatgaatgcgccccctgggtcccgagaatctcagacgagaaagaaaggtgggtaacctccttcctgattctctagaagaattcacatttgcttat

SEQ ID NO: 109323 - DNA, 201 bp, Homo sapiens
acaggcatgagccactgcacccggcctagagcagtatttctgtattgatgttttttaggaatttaacatcccctttccagttttcattgttagcctcagartacttagaaagttcctttctaacctgtactcccactgtctcccaggtgcctgagccctggtgcttgtgcagggcccccaatccaggctctgccccatccc

SEQ ID NO: 109324 - DNA, 201 bp, Homo sapiens
ctcccgaagcctggacagctgctggactttttactgttgagtaatgggaaagttgttactagaacttctcactcctaaatatttgacagagtagcttcttsatgacggtcgtgactaacttagagctagaaaaatgtaactgggaaagttgttactagaacttctcactcctaaaccttgaacagagtagcttcttcatga

SEQ ID NO: 109325 - DNA, 201 bp, Homo sapiens
tgagcactttactgtaaattgaagactttgcaaacttaggaagataacacagtaggcttaaagttcagaagataaatttatagatcaagaaacccagagcrgaggtgatcccaagaaacctctgcctgatttgttgattttcacagtggtgcttcctgaagtgtagaagggatgtttgcagatagcttggttttactatct

SEQ ID NO: 109326 - DNA, 201 bp, Homo sapiens
tattctaagatgccagagcctggcagatgctctctgccccacgggggttttgtggataaaagaagatgggtgttatttttccacaggatagtcagaaacghgttttgccagtcaccctggctcagttagcaaattctgatccattaacctctgaaaagtgtattggcgaaacatcacgtttttcatacgtgttccctgttg

SEQ ID NO: 109327 - DNA, 201 bp, Homo sapiens
cccaaaatcacatgagacttgagaactcactaacatgagaagtgctcccaaaatcacagacatgagaactcgctaacatcaggagtgctcccaaaatcacktgagacatgagaactaacatcaggagtgctcccaaaatcacgtgagacatgagaactcacatcaggagtgctcccaaaatcacgcgagacatgagaactc

SEQ ID NO: 109328 - DNA, 201 bp, Homo sapiens
acttgagaactcactaacatgagaagtgctcccaaaatcacagacatgagaactcgctaacatcaggagtgctcccaaaatcacttgagacatgagaactmacatcaggagtgctcccaaaatcacgtgagacatgagaactcacatcaggagtgctcccaaaatcacgcgagacatgagaactcaggagtgctcccaaaa

SEQ ID NO: 109329 - DNA, 201 bp, Homo sapiens
gctcccaaaatcacagacatgagaactcgctaacatcaggagtgctcccaaaatcacttgagacatgagaactaacatcaggagtgctcccaaaatcacgygagacatgagaactcacatcaggagtgctcccaaaatcacgcgagacatgagaactcaggagtgctcccaaaatcacgtgagacatgagaactcacatca

SEQ ID NO: 109330 - DNA, 201 bp, Homo sapiens
aggagtgctcccaaaatcacgtgagacatgagaactcacatcaggagtgctcccaaaatcacgcgagacatgagaactcaggagtgctcccaaaatcacgygagacatgagaactcacatcaggagtgctcccaaaatcacgtgagacatgagaactcacatcaggagtgctcccaaaatcacgtgagacatgagaactca

SEQ ID NO: 109331 - DNA, 201 bp, Homo sapiens
gccctcccctgaagaccctctagcccggggctgagctgagccagctccaaggagtctgtctgccgtggccatgttagtatctgcggatttgcagcgtgctytttgtatgaacataggtggtttaacctgatagtttttttttctaattaaaagaagaaacccaaagtgcttttccactaagaccagtcagggtgttgctgg

SEQ ID NO: 109332 - DNA, 201 bp, Homo sapiens
ggggctgagctgagccagctccaaggagtctgtctgccgtggccatgttagtatctgcggatttgcagcgtgctctttgtatgaacataggtggtttaacstgatagtttttttttctaattaaaagaagaaacccaaagtgcttttccactaagaccagtcagggtgttgctggcggccagccacgtcatccaggatacg

SEQ ID NO: 109333 - DNA, 201 bp, Homo sapiens
ccgtgtctccccctgtgggcaactggatgtggcgctcagcgggtcgggacccagagctgctgaagacttgggggccaggactggagttagcacccctgggwttttgtggtttttttttttttgctaaatgacctgcgcacggcagaactgaccctcacgggtgaaaccacgcaagcacgattagagaaccacgcaagcacg

SEQ ID NO: 109334 - DNA, 201 bp, Homo sapiens
gggagtctgttcaggttctgctgcgcagccttcatacccgccgccaggacgggtgggactctcatacccacggccgggacgggtgggactctcatacccayggccgggacgggtgggactcggcgcttgctccctgcctgcaccacgcctgccgtttgcggatcgctgtggacgtgtggccgcgatagcagcctgactgct

SEQ ID NO: 109335 - DNA, 201 bp, Homo sapiens
cgaagacatcacaagaaaactgcagaccagtatccctttgaacatggatgcagaaattctcaacagaacatgggccctcgagcccagcaacgcaggaggargactgtgtccaggctgtggttcaggaaggccgagctttgcttcattgtggctggcgggatctgtagagatgacctgggtcagcttttctacaagtgagaa

SEQ ID NO: 109336 - DNA, 201 bp, Homo sapiens
ttcacttccagctgggccggggtgagcccatgctgcacacgcgcctgcgtccacactgcaaggacttcctggagaagatcgccaagctgtacgagctgcaygtcttcaccttcggcagccggctgtacgcacacaccatcgcaggtcagtcaagccgcagccgaagaggccgtgtgaacagtgggtttctttcctgttttc

SEQ ID NO: 109337 - DNA, 201 bp, Homo sapiens
gtgacgagaacgccatgtttctttatcagcctgaaagctggagggagcctgggagctgctcgcagattcagcagagcatccatgcagacatccgcaggcckctgagccgcttagacagcagagcagggagcctgctggtgggcgcttggctgcggagagcctcgagcgcgggtcctcctgcagtgagaccagctaggtttg

SEQ ID NO: 109338 - DNA, 201 bp, Homo sapiens
gacagataccttcttaaatcagttcacagggactttgggccgggctgcttgtgtgtgctcttgctgggtgctgtcactgcacacagcatgattgtcccctrcctacacatgggtacccttagggtttagcgtttgcttctgtctccctgggtgatagcgtgaatgccaggctacggtgccctctgggaggcagcaccagca

SEQ ID NO: 109339 - DNA, 201 bp, Homo sapiens
ggcaaagttgctgacccaagagtagcacctgccgtgggggatgctgctcccacccacactgacaagggcttccccgcccctcatgtgaggagcagctttgrgaactcgcgcctggtcagtgctgtgggaatgtgtgcccagttccttgagacccagtaggcatctggatttcttctcgggtttaaaccacggaggcttcta

SEQ ID NO: 109340 - DNA, 201 bp, Homo sapiens
cagccgaagaggccgtgtgaacagtgggtttctttcctgttttcggtgatggtttcttaaagatgaagaaagaaaagaagctctcctgcaactcagttgtrgtcttagggttggccgttgtgcagggggttgtgagaggtaagggaattctgccaccagggctgttgggtggggccgcggctgctctggccgggtgcggta

SEQ ID NO: 109341 - DNA, 201 bp, Homo sapiens
tatcctaggcgggtcgttgcaggcaggtagctattgtgagtagttagtgtagctgtcatcggtggttatcatgtagttaccgtaggctgttactgttaacrtggtacccagggtggttatcttgaacagttgttgcaggtaggtggttatcctagttaccacgggcagtcagtattcacactcactgagggcattcccgca

SEQ ID NO: 109342 - DNA, 201 bp, Homo sapiens
cttcaggacgcctgtcgggcacacgcgtgtcttcagaacgcttgtctggggcacacgtgtgttctcaggatgcctgtctcgggcacacaggttgcgggggyggccggggctcctcaggccttttctcccgactgttgctactattctttttagggcatctttcacttccagctgggccggggtgagcccatgctgcacacg

SEQ ID NO: 109343 - DNA, 201 bp, Homo sapiens
cctcaaaagggatgaagtgtttggtgccagttcatcatgttgtgtgtctgccactttaaaaaaaacattcaaggcttcaccatgtgccgtgtgaccgaaaygtgtctcaggtatgtaatctttgtcctgttttcttttccaaggctttttagaccccgagaagaagcttttttctcaccgaatattatcaagggatgaatg

SEQ ID NO: 109344 - DNA, 201 bp, Homo sapiens
gctgtgtcctcaggatggaaccagagaagctgaatttctagaccgaaggctttgaatgtctgtgcccagaggcttgcgcagaggcttgtgtcggcctagayggtggccatcagggaggccctcaccaacactgagttgttttttaagtgtttgctattgaacagtatgtggactctggcgttagatttgggatttcagagg

SEQ ID NO: 109345 - DNA, 201 bp, Homo sapiens
ccgatgccgcccagcccctccggctctcccggctcaccccaaggacatgggacggggtctggaggcactcatggtcatgacaaggggtgaccctggggccrgtcaacaccccctgcctgacgccgaccggcccccattgagaaacgctggagggctgtgtgttgcacgtgggccttaaacacacgcacacagagtgactgg

SEQ ID NO: 109346 - DNA, 201 bp, Homo sapiens
agttcaccataagagaaaagaagccccacacgagccacgtcttacctcaaaagggatgaagtgtttggtgccagttcatcatgttgtgtgtctgccacttkaaaaaaaacattcaaggcttcaccatgtgccgtgtgaccgaaacgtgtctcaggtatgtaatctttgtcctgttttcttttccaaggctttttagacccc

SEQ ID NO: 109347 - DNA, 201 bp, Homo sapiens
ttagaccccgagaagaagcttttttctcaccgaatattatcaagggatgaatgtattgacccattttctaaaacgggaaaccttaggtatgtacccagccrcgctcctcacaaagacctcgctgttcatttcccatttcaaaaatcgcatcttgaaatttagagcagtatttctttttttctttttttttgagacggagtc

SEQ ID NO: 109348 - DNA, 201 bp, Homo sapiens
ccgcagctgtgaacagccaggctcagcctgggttcccttgagccaagtcctaactggggagggatgtgacagctgctcatggagctcaggaggtggccgcrctgccgaggcatgtgctggatgacccgggagggcaaagcgcatattggggcagataatggcgaggagtcggtggccgggggtaggggcggggggacgcgg

SEQ ID NO: 109349 - DNA, 201 bp, Homo sapiens
ctgattaacctgctgtctgctggttacatgtggattagaatcttaaactgttacgcttggcaagatgaatgactacaacttttcattattattttttgtarattatgcattttcacttgtagaaatctctttccttgtggagactcaatggtttgcattattgatgatcgagaagatgtctggaagtttgcccccaatctg

SEQ ID NO: 109350 - DNA, 201 bp, Homo sapiens
tgagccgggcatcagtggcggcgtgttggggaagcgtggtgctctgaggagggcggctgcaggaggagggtggctgcagaagcacggacgtgtggttgtcrtcgtcgttactgaaacaacccctcatcacacggatgacttatgggactgcggccttcctgaagcagggacggttgcccttggttctccacagacaagtct

SEQ ID NO: 109351 - DNA, 201 bp, Homo sapiens
catgagtgtggccacgagctcagtgtttccaccagttttcctgtctgtggagaatgtttccacgtttgccgacagaatcaagtctgtgctaagatagcagygtgtgtccgttaaaacatcagctagaatcctgtcacttagagcccagtgtgcatctgtgcgcagagactcagctgaaagccctgaacctgtccttgcact

SEQ ID NO: 109352 - DNA, 201 bp, Homo sapiens
atctcagacgagaaagaaaggtgggtaacctccttcctgattctctagaagaattcacatttgcttattgtttagctcttcttatttcttatctctgtttygactgctataaattcaagatacactttttttatttgtgtttcagtagagattattggatttatttatagagtactgaaaaacaggatattaggttgtttc

SEQ ID NO: 109353 - DNA, 201 bp, Homo sapiens; identical to SEQ ID NO: 17931

SEQ ID NO: 109354 - DNA, 201 bp, Homo sapiens
agcctgtgatgggctcatctggacgtgaccccatcctgagtcaaggagcctctgtaatgaagaaaactgtttttcagaaagcgcagtcaccttttttgtamaaacaagcccaggaaaggtaggtgtcgttcccacatcagtgtgtttacacgagtcaggcagaaagagggagaggagatcggaggagcatgatgtaggcga

SEQ ID NO: 109355 - DNA, 201 bp, Homo sapiens
acagtgaagcacaaagtgaggaggggctgagctgtgcagcagccatgtctccgtatcgaattggaattaggccagcatgagtccaaaattgattctgatcragcgagatatacgtatgctaaacccaagagcagaagctaaggaagtaactcaaaatacatcgtgaaacagatcatacaagtgtgaaaggaggataaacct

SEQ ID NO: 109356 - DNA, 201 bp, Homo sapiens
actttgaattagaagtcttggctcagaattctgtagaacagcttgttccaagtcggccttgtgctggacgactttgccagcgatggggtaatgtctgagcrtggaaggcggctgggccgggtgtgctgacacgttttcagcctgtgatgggctcatctggacgtgaccccatcctgagtcaaggagcctctgtaatgaaga

SEQ ID NO: 109357 - DNA, 201 bp, Homo sapiens
cagtagtgtggtctcagctcaccacagtcttgacttcctgggctcaagctatcctcccacttcagccttctgagtagccgggactacgggcgcacaccccmacacctgtctaacttttgtatgttttgtagagacagggtcttcctatgttgcccaggctggtgtcagactcctaggctcaagagaccctcctgccaagac

SEQ ID NO: 109358 - DNA, 201 bp, Homo sapiens
ctaactttacaatgatgtgcaagtgacgtgtgtttcgtagaaaccacactttgaattagaagtcttggctcagaattctgtagaacagcttgttccaagtyggccttgtgctggacgactttgccagcgatggggtaatgtctgagcgtggaaggcggctgggccgggtgtgctgacacgttttcagcctgtgatgggctc

SEQ ID NO: 109359 - DNA, 201 bp, Homo sapiens
ccagacgttgattcacacaaccgagcagcactgtcagcagatgtcgaataaagtgagtgcagtcagcatctacggacagtttcccaggaaccgcgggtccyagaattttgattcagaagtgtgttctcttgttttttagatgatttcccgtaggtcagcctgggtttggaaagcagacttgctagttctgggcgtgggccg

SEQ ID NO: 109360 - DNA, 201 bp, Homo sapiens
agcatgttttaagtgaagtaaatacaaacgaccctcaactttacaatagttcgcttaacaattttctaactttacaatgatgtgcaagtgacgtgtgtttsgtagaaaccacactttgaattagaagtcttggctcagaattctgtagaacagcttgttccaagtcggccttgtgctggacgactttgccagcgatggggt

SEQ ID NO: 109361 - DNA, 201 bp, Homo sapiens
ggtgatgctgtcacctcccattgtgtcctggtgatgtcacctcccatcattaggagggcatcctggtgatgatgtcacctcctattgtgtcctggtgatgmtgtcacctcccgtcattaggagggcgtcctggtgatgatgtcacctcctattgtgtcctggtgatgctgtcacctcccgtcattaggaaggcgtcctggt

SEQ ID NO: 109362 - DNA, 201 bp, Homo sapiens
cacaacaaactccaaataggatgaacacaaagatctttacctaggcacatcccagtggaagaggaaatgccgggagcagggctgggggcccagaggaagcrtgaggcgtcgtgggagagaggcctgggggcagcagaggaggcatgaggtggaggcctgggggcagcagaggaagcatgaagcatgagagagagagagaga

SEQ ID NO: 109363 - DNA, 201 bp, Homo sapiens; identical to SEQ ID NO: 17935

SEQ ID NO: 109364 - DNA, 201 bp, Homo sapiens
gggcccagaggaagcatgaggcgtcgtgggagagaggcctgggggcagcagaggaggcatgaggtggaggcctgggggcagcagaggaagcatgaagcatgagagagagagagagagagagagagaggcctggcaccagaggaagcgtgaggggttggtggagagaggcctgagggcagcagaggaggtgtgaggtgtcca

SEQ ID NO: 109365 - DNA, 201 bp, Homo sapiens
ggcccagaggaagcatgaggcgtcgtgggagagaggcctgggggcagcagaggaggcatgaggtggaggcctgggggcagcagaggaagcatgaagcatgagagagagagagagagagagagagaggcctggcaccagaggaagcgtgaggggttggtggagagaggcctgagggcagcagaggaggtgtgaggtgtccac

SEQ ID NO: 109366 - DNA, 201 bp, Homo sapiens
gtgcctggagcagcccctccctctgggccgctgagcgccccatgctgggggctgctttacctctaatgccaagtgggaggtgcggcagctactttttctgygttttcatggttgagggcctgtttctgcttctgtgtgactttgcagtttgttttcatgaaggactatggctctgtgtgttcatgagtgtggccacgagct

SEQ ID NO: 109367 - DNA, 201 bp, Homo sapiens
gccaccccagatccttcttcatgttaacatgtttaggagagattggcaaaatcctcctagttcatatttgaggattcctttccctctcttccccttgcagrgggtagagcaaggaggagcccgcggtgagctggtgtcttgcatggggcagggggtagagcgaggagcccgccgtgagctggtgtcctgcgtggggcagag

SEQ ID NO: 109368 - DNA, 201 bp, Homo sapiens
aggtgctggcagacgtggccataattttcagtgggctacacccgacaaacttcccgatagagaagacgcgggagcattaccacgccacggcgctgggagcraagatcctcactcggctggtgctgagccccgacgcccctgacagggccacgcacctgatcgccgcgcgagctggtgagtgctgcctccctgtgccctggg

SEQ ID NO: 109369 - DNA, 201 bp, Homo sapiens
gcgtggaggctggaatgagagcgttcagggcttttcacccctgttttctgtcagcatctgcaaagacgaagtgtagaaatgtctcgtattaagaaaagacrttgctctctgctccctgtctgcacgcgggtttcccagcctttgcacacacagacattctgagccagatggcctggctgggagcatcctgcatgctgtggg

SEQ ID NO: 109370 - DNA, 201 bp, Homo sapiens
ctgtcccagagcctgcgtttagtgaaggtggtgtctgttgtaaaaagttacaacttttcctgttgtaattcagtatcttgaaagagatactttgttaccayataaatacatttgcaccaagctgacccacattttgggtatctgtcagtgattcctgcttgaatcgcttcatttctaggatgatagtccagtggtggtgtt

SEQ ID NO: 109371 - DNA, 201 bp, Homo sapiens
agtgtgttttgagacaactttatgttatccccaagtctcctctttggaccagacatccttagttttttcagctgttccacgggtggcacgggggtggtgasgtgtggtggcgtgtcatttttcatgagagacacctgtaggtggaaagtcctttcattttatagacaaagaaatgccctcaaggggtgatgtcacctgcct

SEQ ID NO: 109372 - DNA, 201 bp, Homo sapiens
aaatacaaaacggaaaacaagcgatgtaagttgtctcagaaaaaagtgctttttatattttcaggagaaagagaatgtagagagaatggaactgatgagtwtgaagagattcaggtgatatttcttaaaggataaatgcacattttaaaggttatgaagagatggtcttggtaggtttttaaatatacatctagcatcata

SEQ ID NO: 109373 - DNA, 201 bp, Homo sapiens
gacagtaacttgtttagctgagactgtgtttgagaaactgagaggtgtggatgttgcttgtacatgtgcagccagcatgctcacagtgccgaggagcagastacgcgctgctccagagcgtagattagaacgtcagtctaaacagttctttatagcatggaattttaacaaagaaagaagaatcccacgtgggtatgtgtg

SEQ ID NO: 109374 - DNA, 201 bp, Homo sapiens
acagcctgtctcttgaggcttggtcgctgtgttcaccctgcaggtgttatgaattagcttctggcccaggacggttttgggaccggggggtgcctacccaytgttgttcctttatcttgatcctttcacagggcttataaaaatacttatttttcaggaataacgggaagtatctttgaaaacatagcattaaatctgctg

SEQ ID NO: 109375 - DNA, 201 bp, Homo sapiens
ccctggtggctccttggtgaggggcctttggagaaagtcttgggaaatcagatttcccgagggtgttgttgaggacattgctgacgaggtgtgggatttayggggaggacagcctgtctcttgaggcttggtcgctgtgttcaccctgcaggtgttatgaattagcttctggcccaggacggttttgggaccggggggtgc

SEQ ID NO: 109376 - DNA, 201 bp, Homo sapiens
agatccaggaaggagcgactggaagggctttagtctaaagccctgtgtgcatgtgccctggcagttctggtcgtctgtttggaatcaggttcctgcctcgyagttgcattagccagctgaattcgggaggtgcatttgcagcaggagtccatgctgctgacggtcggctccgtgtggtccagatgacactgccctggctct

SEQ ID NO: 109377 - DNA, 201 bp, Homo sapiens; identical to SEQ ID NO: 17932

SEQ ID NO: 109378 - DNA, 201 bp, Homo sapiens
ctcaggtcatcacctttagacgccagtttatcttgtgaggatcagacccttttttgaggtgtgctgaatttctctgccatttttctgtctttttgaacatyagctgttttttgtttcacaaaaatgttttctctaaaaaaaatttttctcagccactacctgtaagcccagaccactttatttaagattccagaaggttct

SEQ ID NO: 109379 - DNA, 201 bp, Homo sapiens
gtctggaagtttgcccccaatctgataactgtgaagaaatatgtatacttccagggcacgggtgatatgaatgcgccccctgggtcccgagaatctcagaygagaaagaaaggtgggtaacctccttcctgattctctagaagaattcacatttgcttattgtttagctcttcttatttcttatctctgttttgactgcta

SEQ ID NO: 109380 - DNA, 201 bp, Homo sapiens
ctcgtctcacatgtgtccctcttccactccatgtgcttggggcagatgaggcagcttcaccccagataagcctgtctctcgggcccattgcctgcaccccyccgtgggcctgtgagacggactaggtacctgcccccgggtgctccctggaggctgccgtggcccctcttcatcctggggacacatggggtggggctgctg

SEQ ID NO: 109381 - DNA, 201 bp, Homo sapiens
acccaggtggcgtggccagtgctgtttattgcagccattctgataggtgtgtcctgagctggttgtggctgtaacctgcatttccgtggtgaataattacscatcactcctgtgtttgttccatctgctagtccttggttggatgtgtggcttacaaatcctttcctcccagtcagcaacttgagttttcatcctctagag

SEQ ID NO: 109382 - DNA, 201 bp, Homo sapiens
gcgctgccgaggcatgtgctggatgacccgggagggcaaagcgcatattggggcagataatggcgaggagtcggtggccgggggtaggggcggggggacgyggttggtagcaccttgttggctacaggagcggctgctgctggcaccattgggaagctggctcgggagagtgggcacatgcaggggcgggttgggggtccc

SEQ ID NO: 109383 - DNA, 201 bp, Homo sapiens
tatcatttctcctcagatggagcgtctgtgtggcaccaggtgtccctctggttccaggaggctcatctctctgcctccagtccatgggcggcaggtaaatscttgccttagagaaagccacagacggtgctgcctggaatttgaggtggcttcttccccgtttctgtgtactcctgtgggtttgtgtacatgggttttatg

SEQ ID NO: 109384 - DNA, 201 bp, Homo sapiens
ccagaaaatgccttcacggcttcctcagtgggcactggccgtacctgggaggattgtggaggcagatcccaatgctggtgtattccctggacagaaaaccmcaggatggaagatccctactgaggtttcattctgttcctctgattgtacagaaagggctgctttggcctagacaggtgagtaacttggttatgtggcaag

SEQ ID NO: 109385 - DNA, 201 bp, Homo sapiens
gcctgggtccttgaccctcggcacgggcactcactcctgccccctgcgtgctggtgggtggggctgggaggttcagggccttgcctcccagaaaatgcctkcacggcttcctcagtgggcactggccgtacctgggaggattgtggaggcagatcccaatgctggtgtattccctggacagaaaaccccaggatggaagat

SEQ ID NO: 109386 - DNA, 201 bp, Homo sapiens
aatgtagcctaagcggattcttcgctgtggaagcaccttctgcactagctggtcaaggtggtgtcccggatgtccttccttcccagtctcctctgtcaggsaggcttcctcgatgttgcctaaattaccattattaaaacgtgtataatagttagaaataaccggcctttctgtgtatttctacaacacagagtgtgagtt

SEQ ID NO: 109387 - DNA, 201 bp, Homo sapiens
ttcaggacgcctgtcgggcacacgcgtgtcttcagaacgcttgtctggggcacacgtgtgttctcaggatgcctgtctcgggcacacaggttgcgggggcrgccggggctcctcaggccttttctcccgactgttgctactattctttttagggcatctttcacttccagctgggccggggtgagcccatgctgcacacgc

SEQ ID NO: 109388 - DNA, 201 bp, Homo sapiens
atttatagagtactgaaaaacaggatattaggttgtttcaatttgggctttaaaaaaaatggccctcacttaagcgttttcccagttgaataaaaactagwggatgctgtttaacctaacacatccgaataactcccttcatcccagttttccttaaacacatccctgggtattgggccatagtgttctgtagagagagtg

SEQ ID NO: 109389 - DNA, 201 bp, Homo sapiens
gtagttgcatcagcctctgtctagactgggaatgatatgaaagttttagattttataaattctctaacggaaatgtcagaggatcacatataaatagtgtrttttgagacaactttatgttatccccaagtctcctctttggaccagacatccttagttttttcagctgttccacgggtggcacgggggtggtgaggtgtg

SEQ ID NO: 109390 - DNA, 201 bp, Homo sapiens
ttgacgtctttgggacatttccagccattgcttttcagggccatctctgccatgctgggacagcagggacacggatgctgaggctttttgtatctcgtgcrtctctaagctgtgttctttttcctgttcagctcgttttctctgttgtccaggttgggtgacttctgttagattttcgggttcacagccttcctctgtctc

SEQ ID NO: 109391 - DNA, 201 bp, Homo sapiens
tgctttttgagttggaaggtttatgtcttttgacgtctttgggacatttccagccattgcttttcagggccatctctgccatgctgggacagcagggacayggatgctgaggctttttgtatctcgtgcgtctctaagctgtgttctttttcctgttcagctcgttttctctgttgtccaggttgggtgacttctgttaga

SEQ ID NO: 109392 - DNA, 201 bp, Homo sapiens
atccggcttccttctgggctccgtggttctgatgagtgatcttctgtctttgaccgtttttcctgtaggtaagctgtgttttctctttcactgccttccasgtttttctctgtctttagctgaggtttgatgacgaggtgtcctggtgtagatttggagggtttaccttgtttatgtttgactctgctttttgagttggaa

SEQ ID NO: 109393 - DNA, 201 bp, Homo sapiens
ccctcccgacctgacctggagtgtccatcatgctctcggggcaggcctgggccctctccagtccctcccttgctgggggacgttttcacaggacaagactmtgggttgatcttcctttttctcggggcctgaaaaacatccggcttccttctgggctccgtggttctgatgagtgatcttctgtctttgaccgtttttcct

SEQ ID NO: 109394 - DNA, 201 bp, Homo sapiens
ttccctcccgacctgacctggagtgtccatcatgctctcggggcaggcctgggccctctccagtccctcccttgctgggggacgttttcacaggacaagastctgggttgatcttcctttttctcggggcctgaaaaacatccggcttccttctgggctccgtggttctgatgagtgatcttctgtctttgaccgtttttc

SEQ ID NO: 109395 - DNA, 201 bp, Homo sapiens
gggaagcagggccagcttacactcgctcttagacctgtgctggggaaggcaggtggcacctgggcttgctaccagcccttccttggagcaggaggcccccrtcctttgtggcagcctagtgtcaatgtgcgacgggtcacacagcttcccaggcaggactcgggctggggaacagtggacagctcccagggtggactcggg

SEQ ID NO: 109396 - DNA, 201 bp, Homo sapiens
tctccggtgcttgcccggattcctgcttccgtcctcacgggaggttccctcggggtcccttccctcccgacctgacctggagtgtccatcatgctctcggrgcaggcctgggccctctccagtccctcccttgctgggggacgttttcacaggacaagactctgggttgatcttcctttttctcggggcctgaaaaacatc

SEQ ID NO: 109397 - DNA, 201 bp, Homo sapiens
tttttcttcttttgcctgtcagtatgtggtggtcacattgactgatttttggacatgaaaacaaccttgcaccccagaaacaattcccgttggttgtggtrtatagtaaccttgatgcgcttctgtgaagtgtctttatgttgacgttgaggggcctgtggggctgcacttgtcacgttgtgtgccgtctgcccccaggtt

SEQ ID NO: 109398 - DNA, 201 bp, Homo sapiens; identical to SEQ ID NO: 17920

SEQ ID NO: 109399 - DNA, 201 bp, Homo sapiens
ccgcagcgtctcgagggcactcaggtgcacctgtgtggtctgtttctgggttttctgcccgtagatgcccttgatcaagttggatttcctgttttctgtgwgttgttatcaccagtgggtgttgaattttttaggagtttgttgattgatatgatggtgtgtgtggtttttcttcttttgcctgtcagtatgtggtggtca

SEQ ID NO: 109400 - DNA, 201 bp, Homo sapiens
gggccccagagccggcgtccgctgcctctgcagctgcgttacctcgttcctgcctgttctgctgggccccaaagccggcgtccgctgcctctccagctgcsttacctcgtttctgcgtgttctgctgggccccaaagctggcgtccgctgcctctccagctgcgttacctcgtttcagcctgttctgcttctcatgctcag

SEQ ID NO: 109401 - DNA, 201 bp, Homo sapiens
tgcccgcctgttagacaggatgtggccctccaggtcctgccgacatcctcagtacagacttgtgtcccgaggatttgccctgagaacttggtctccagagscttcttgcatctgctgcggggccgtgggccggtatttggacctctgcatcctggtttcctcacctgtgaaatgaggtaggagcagcgccagcctcggagg

SEQ ID NO: 109402 - DNA, 201 bp, Homo sapiens
tcctggagaggtgcagccgagtgagggccttggtggggtgcagccgggtgagggccctggtggggtacagctgggtgagggccctgagccctgcaggggtrcagtcaggtgaaggccctggtgggatgcagccgagtgagggccctgagccctggtggggtacagccaggtgagggccctggtgggtgcagccggatgtgg

SEQ ID NO: 109403 - DNA, 201 bp, Homo sapiens
tggtgatgctgtcacctcctgtcattaggagggcgtcctcgtgatgatgtcacctcccatcgtgtcctagtgatgatgtcaccacccgtcattagcgcatyctggtgatgatgtcacctcccatcgtgtcctggtgatgtcacttcccatcgtgttctggtgacgatgtcatctcctgttaaggcatcctcgtggtgatgt

SEQ ID NO: 109404 - DNA, 201 bp, Homo sapiens
ccctcccttttctccgtaggcctccatcttggaggaacagtagagtgttttcttctggtttaatccaagagtcccccctgcttgtctgagttcatgtggcrcctgcccagttccctgcactaaatagacctgtgtccgcaatgccactccacgtgtggacccctagtgcctgcaggaccactccacctgtataaacgggtc

SEQ ID NO: 109405 - DNA, 201 bp, Homo sapiens
cacctcccatcgtgtcctggtgatgctgtcacctcctgtcattaggagggcgtcctcgtgatgatgtcacctcccatcgtgtcctagtgatgatgtcaccrcccgtcattagcgcattctggtgatgatgtcacctcccatcgtgtcctggtgatgtcacttcccatcgtgttctggtgacgatgtcatctcctgttaagg

SEQ ID NO: 109406 - DNA, 201 bp, Homo sapiens
ttagatacaaaactggtgttttaataattcagccttgcttgaagtgagctaggaatttctaagatcaatgagaaaaaaataattgttatctgaaaacagayttgcagatggtaagctggatttgaatgaagtcaaacacttttacttgaatgacactaataacatggcagccgataactgtgtatgtgtgttctgaaatgt

SEQ ID NO: 109407 - DNA, 201 bp, Homo sapiens
aggcacccgcatgtgcccacctgtggccgccccgcagagcactcggtcctgggaacactcagcagagaacgagcagagccgggctggttctgagcccccckccccactcgcctcaccatctgctctccgccggctccacgtttgctgctctgccaaccccaggctgccctcttcgtttccacacagagcagatgcaggggt

SEQ ID NO: 109408 - DNA, 201 bp, Homo sapiens
acgtgcactgaagtgatactgctgagatttggtttcgaaattatgtgataatttaaagcagccacacgatcagtactgcgaacagcacctgttctttagaygctgcttttcatactgttgaataaaatatccaggggggtggctcgcactgtagtcccagtgctttgggaggtggacccgcaaggatctctcgagctcagg

SEQ ID NO: 109409 - DNA, 201 bp, Homo sapiens
cccccaccgccttgttccacccgatgccggttcttcccaaggcccagcctggccccgaggttcggatctacgactccaacacggggaagctcatcaggacsggcgcccgggggcccccagcaccctccagctccctacccatccgccaggagccctcttccttcaggtacgtggcggcccagccactgtccccagctaatg

SEQ ID NO: 109410 - DNA, 201 bp, Homo sapiens
gtccttacaggtggaggatccctcctcccccaaatccaaagctttttgagtgcccacatggtgcttaaaggaaatactcattagggtattttggatttttyggattggggatgttcagctggtaagtttaacgcaaatactccaaactcagaaaaaaattcaatatccaaaacgtccctggtcccacgcacttcaggtaag

SEQ ID NO: 109411 - DNA, 201 bp, Homo sapiens
ccccatttccacccggaagtccgtccttgctgatgtaacaccatgtcaggtgtggcttgttttcccgaggagcctggtggccacagcctcagcttcagccrcttcctggttctcggtggccagtccccacagactgtgagacctatgcttgctaatgttaactaagaagagaatctgaaagtatttacttcagaaacctcc

SEQ ID NO: 109412 - DNA, 201 bp, Homo sapiens
cggttaatggggagatggagaggtacggcttgatgtccttttcgagcctttgcaggatccagcactgtccctgcgtggggatgctgaggcctggagtgcayggccctcccaagtcaggagcaggggtggccagggcgtggccttcgcacagtgggtggcagctcccgaacctgggtggacaggtgagaaggccccgccagg

SEQ ID NO: 109413 - DNA, 201 bp, Homo sapiens
ccctgagtcctggagaggtgcagccgagtgagggccttggtggggtgcagccgggtgagggccctggtggggtacagctgggtgagggccctgagccctgsaggggtgcagtcaggtgaaggccctggtgggatgcagccgagtgagggccctgagccctggtggggtacagccaggtgagggccctggtgggtgcagccg

SEQ ID NO: 109414 - DNA, 201 bp, Homo sapiens
ctcacgtcacagaaaccaggtgcacctgcagcggctcctaaggaaaacctagtggcactggctggttatgcagaggctcctaaggaaagcctagtggcacyggctggttatgcagaggctcctaaggaaagcctagtggcaccggctggttatgcagaggctcctaaggaaagcctagtggcaccggctggttatgcagag

SEQ ID NO: 109415 - DNA, 201 bp, Homo sapiens
ttaagttaggtacattgttcttttagatataatgctattgaatgtttaataagctgcagtagagtgtcagcatggattatattcactgggaaaccaaaaawttcatgtgattctcagtatctccaggataggcctgctgaagacagtggagtctagttataatgtggctgtttctcagttgtgtggtctggaaggtgacag

SEQ ID NO: 109416 - DNA, 201 bp, Homo sapiens
aacttccgccgaataaaacaacctttcagcaataggtgattcttgaaggaagacttaacaccccggtgcttaaaaaacccaaatacctcgttattctagtwattctgtgaaaatgctcccataagcacctggattttccgcgaatgaagattgcggtttttctcctccaatctgcttcctgtcctggcggcgtttcctgag

SEQ ID NO: 109417 - DNA, 201 bp, Homo sapiens
cgatcaagtcggctcacgtcacagaaaccaggtgcacctgcagcggctcctaaggaaaacctagtggcactggctggttatgcagaggctcctaaggaaarcctagtggcaccggctggttatgcagaggctcctaaggaaagcctagtggcaccggctggttatgcagaggctcctaaggaaagcctagtggcaccggct

SEQ ID NO: 109418 - DNA, 201 bp, Homo sapiens
aggcagtccttcctgctctgtgaccccagcctcatgccattctcaggtgtggtgggggggcatgctggagggccgagacctgttttctcctgactgaagaygcagatcgctgagtgcctggagcagcccctccctctgggccgctgagcgccccatgctgggggctgctttacctctaatgccaagtgggaggtgcggcag

SEQ ID NO: 109419 - DNA, 201 bp, Homo sapiens
attgggaggactgggtttgggtgttggcggtggggccgcagagccctgtggatggacgaaaacagctcagccggggagttgggggctgccaggcatcggakaggagcctggatgtggaggccccgagtgcgatggcggtagggacacagactcctgggcggggatggcccctgtggcctcagcaagcagggagcaggtgtc

SEQ ID NO: 109420 - DNA, 201 bp, Homo sapiens; identical to SEQ ID NO: 17929

SEQ ID NO: 109421 - DNA, 201 bp, Homo sapiens
agcatctcacaccatgtttgcttctctgcagaggccacaagaggaagctgaatgaagaggacgccgccagcgagtccagcagggagtccagcaacgaggaygagggcagcagctccgaggccgacgagatggccaaggcgctggaggcggagctcaacgacctcatgtgagcgcgggcagcgggcagggactgaagcctga

SEQ ID NO: 109422 - DNA, 201 bp, Homo sapiens
tgcagcaggtgaacacctgctttgtcagtggtgtcctggtgtgtaacagggctggggcctcttctcctgcgctggggctctgctgtccacacgtgtgtgaygtggccctgggtcggtggcctgtgtgtgtccttgaccagagaattgtgccgtcttgtgttaaaaccacggaagccacttcccaaatgcagaccaggcggt

SEQ ID NO: 109423 - DNA, 201 bp, Homo sapiens
tttgtttcaagttctcaaaacggagtgaggtggaggaagcctaatgggaggatgggagccgggttttcccggaacagccgtcagcgtgtatgcggaggaaragagatgactgatgaatttgttaattgccaaaagcttgttgctgtagcaaccggaggccagactcgtggccctgacagcgtcgttagtgtcagcagagac

SEQ ID NO: 109424 - DNA, 201 bp, Homo sapiens
gcgccaggtctgcaggggcttacggccacggtggcgccaggtctgcaggggcttacggccacggtggcgccaggtctgcaggggcttacggccacggtggygccaggtctgcaggggcttacggccacggtggcgccaggtcgtcaggggcttacggccacggtggcgccaggtctgcaggggcttacggtcacggtggcg

SEQ ID NO: 109425 - DNA, 201 bp, Homo sapiens
cccgagctcgacctgagagggcacttcggctctcctgttcacagtcatgactgccccctccccgaggtcagcgccatgcactgctctgggggcctgaaacrccgcctctgttcgcaagggtctcctgtcccgtccacctgccagtgggttgagctcttccaggggttcgggacacccctcacggcagcaccttcacgttta

SEQ ID NO: 109426 - DNA, 201 bp, Homo sapiens
ttctcacagcatctcgttatcacagcgcgaaacaactttaggcagcatcggtggagctggggttttctcagccgggtcctgcttggcccctgtgtcctggrccccttggcccgtgtgcttctcctcttgggtcccaggccgccccctgatagaaggttccacaacagtccggatgttagggatgggcgatctgcgcagcac

SEQ ID NO: 109427 - DNA, 201 bp, Homo sapiens
cgtgcacacgagatccaggcccgccccctcctggacttggtgaccgtcccgagctcgacctgagagggcacttcggctctcctgttcacagtcatgactgycccctccccgaggtcagcgccatgcactgctctgggggcctgaaacgccgcctctgttcgcaagggtctcctgtcccgtccacctgccagtgggttgagc

SEQ ID NO: 109428 - DNA, 201 bp, Homo sapiens
ttgttggaactggttcttgcacctctcgccctccccctcctctccctgcttgccccagggtcccgcctggctctcgtctgccccgtcttcactttcggtcrgggcccctgcccctgcccctgctctgctcagtgcccctgatacgtccaacccagcgtcgctgtgagggagtcaaccacacctgccagcacccccgagtct

SEQ ID NO: 109429 - DNA, 201 bp, Homo sapiens
agtgattcctgcttgaatcgcttcatttctaggatgatagtccagtggtggtgttctcaattccagcatttcttctccactttttggttgactttctgccrtaagaacaaataaggccaggcgtagtggctcacgcctgtaatcccagcactttgggaggccaaggtgaacagatcacctgaggtcaggaattcgagacca

SEQ ID NO: 109430 - DNA, 201 bp, Homo sapiens
ctcctgggtgtgccccgatcaagtcggctcacgtcacagaaaccaggtgcacctgcagcggctcctaaggaaaacctagtggcactggctggttatgcagmggctcctaaggaaagcctagtggcaccggctggttatgcagaggctcctaaggaaagcctagtggcaccggctggttatgcagaggctcctaaggaaagc

SEQ ID NO: 109431 - DNA, 201 bp, Homo sapiens
ggtgtgccccgatcaagtcggctcacgtcacagaaaccaggtgcacctgcagcggctcctaaggaaaacctagtggcactggctggttatgcagaggctcstaaggaaagcctagtggcaccggctggttatgcagaggctcctaaggaaagcctagtggcaccggctggttatgcagaggctcctaaggaaagcctagtg

SEQ ID NO: 109432 - DNA, 201 bp, Homo sapiens
tttacagctaaccctcgaacaacttgctttggtctgcgagggccacctttatgtagatgtttttcagtaaatcgtctgctgttcgcatccatgggttccamgcccaacactgtttgctgggtgtggagcccagcctgtttatacagagcgctgactttctggatcagtgggttctccaggttgactgcgggacctgagtat

SEQ ID NO: 109433 - DNA, 201 bp, Homo sapiens
aggttccaagaagtttggacctgccctgccccttacagggtgtgaggtcctggtgaggaggacggtgcagggacctcgtggtctctactcccggtttctcygcggtgctccttacggggtgtgaggtcctggtgaggaggacggtgcagggacctcgtggtctctactcccagtttctctgcggtgctccttacggggtgt

SEQ ID NO: 109434 - DNA, 201 bp, Homo sapiens
acttgagtttcctgaaaacaaagacgtgctcttacatagcactaatagtcctaataaagtcctttgtaacaaaagcaagccctggaccccacgtggcatcrctggttgaaccctcaagagtcagctccttcgtctttctttctttctgtatcattgcctggtttagtaggacatccctcagttagatcgcagctgtgcact

SEQ ID NO: 109435 - DNA, 201 bp, Homo sapiens
ccagcatcatgttggcttctccagttcactggtgggcctgcaccacagcagttggcttctccagttcactggtgggcctgcaccgcagcagttggcttcgycagttcactggtgggcctgcaccgcagcagttggcttcgccagttcactggtgggcctgcaccgcagcagttggcttctccagttcactggtgggcctgc

SEQ ID NO: 109436 - DNA, 201 bp, Homo sapiens
tcccagttttccttaaacacatccctgggtattgggccatagtgttctgtagagagagtgaatgtgggggcggtggctctgcggggaataaccgttccccrtgcgcagtggtcaggctgggcgctggctggggccccagagagcagcgtggtttaacttgtcagtcaggcatgcagctgacgtccaccctacgaaagttaa

SEQ ID NO: 109437 - DNA, 201 bp, Homo sapiens
tgtatttttagtagagacgatttcaccacgttggccaggctggtctggaacttctgacctcaggtgatcctgcctcagcctcgctaagtgctgggattacrggcgtgagccaccacacccagccactctggctcttttgggacataatttttgaccttaaagttgcaagaacagtgcacagaattctcacaccagcttcac

SEQ ID NO: 109438 - DNA, 201 bp, Homo sapiens
ctcgctctagaccacagtggcagtgttgaagctttccagccacggctctgtggatgtgtgcagtgttgggaatcaggctgggctgcccttgttccttcttyacattcctcagacgttgtgctttacagccacagtttcagtaaccgctgccagagccccacctgtgcgtgttctccaggatggctgcgtctgggctctggg

SEQ ID NO: 109439 - DNA, 201 bp, Homo sapiens
cctgttttacttatgcaagtgccttccataattttcatatccatctggtttagataggcacttcagtaagatattacaaatttttcatgttagtagaattrtaaacacttatcaacatggtttgtgtttgagaaataagttcaccataagagaaaagaagccccacacgagccacgtcttacctcaaaagggatgaagtgt

SEQ ID NO: 109440 - DNA, 201 bp, Homo sapiens
  misc_feature (1)...(201): n = A,T,C or G
ctgtttttctttttttctctgattgctggtgtggtcatttccagcaacagctccgcggttctcttctgcggtgtcccaccacttggaggctggaaggtgangacatcagggaagaggaactgccttcaaccgtcattgactctgctcaccagcccaggtgtttgatttttactaagcaagttcccagaattgcacgtgggc

SEQ ID NO: 109441 - DNA, 201 bp, Homo sapiens
agcctcttgggagagtaataattatgttgtattcattcccgcaccttatattcctagcaaaattccaagtaatgttaaactcagtaaatgttaaatgatcraatacccttaaacacgttatgtgggtgccatggaatacctatctcttgaggtatgtgcagatttatggcttcagccacttgtatgatgagtagctgaaac

SEQ ID NO: 109442 - DNA, 201 bp, Homo sapiens
ccttcctctagagagcctgagtcactttcacttaaaaggtttttcctctgtttttctttttttctctgattgctggtgtggtcatttccagcaacagctcygcggttctcttctgcggtgtcccaccacttggaggctggaaggtgaagacatcagggaagaggaactgccttcaaccgtcattgactctgctcaccagcc

SEQ ID NO: 109443 - DNA, 201 bp, Homo sapiens
ctgtggttcaggaaggccgagctttgcttcattgtggctggcgggatctgtagagatgacctgggtcagcttttctacaagtgagaaagtgaggtccggamtgaagcctgaggtggtcgccgagcatctgcttttgatgcttttcattttgaaagtgaccgtgttgatagcatgcgtgctttcagtatgactaggacagag

SEQ ID NO: 109444 - DNA, 201 bp, Homo sapiens
aggacgttgagttccagctcagcagctctttatacacaatttacagctaaccctcgaacaacttgctttggtctgcgagggccacctttatgtagatgttkttcagtaaatcgtctgctgttcgcatccatgggttccacgcccaacactgtttgctgggtgtggagcccagcctgtttatacagagcgctgactttctgg

SEQ ID NO: 109445 - DNA, 201 bp, Homo sapiens
cacaagccccagtgaggaggagcatgtggaaggctcggatctgtttaaatgcttggctggaggggtttgggctaaaagcagagggtcccaggttttagccrggctacacccttgccacccgtcacaccagcaggcagggtatgggtcaccacagtctgattccacgttcatgaggcctcgtgtggtgagagatgaagcagg

SEQ ID NO: 109446 - DNA, 201 bp, Homo sapiens
tgcctgctatgatctgagggttttacagcccccaagtccatgtgttaaaacccagtcccagggcgagggtgttaggaggggcgtgggaggtggtgaggtcmtgtggactccatcctcgtgaatggaatcagggcccttacccaggtgggccctgggagctgcgggaaatgcagcaagccggcgcccactgacctgcagcca

SEQ ID NO: 109447 - DNA, 201 bp, Homo sapiens
aggccagactcgtggccctgacagcgtcgttagtgtcagcagagactggaaataaaggaaactcgtgtatgatacgcctggcgtcctcaaagcaaacagcrggcggtgcccagcccaacacaggcacgggcacaagatctgcagatgaggcatggaggggaagcgggcggtgcccagcccaacacaggcacgggcacaaga

SEQ ID NO: 109448 - DNA, 201 bp, Homo sapiens
cctgcttgccccagggtcccgcctggctctcgtctgccccgtcttcactttcggtcggggcccctgcccctgcccctgctctgctcagtgcccctgatacrtccaacccagcgtcgctgtgagggagtcaaccacacctgccagcacccccgagtctggccccactaggaggggccagggctcccttgagcaaggcatcag

SEQ ID NO: 109449 - DNA, 201 bp, Homo sapiens
gacactcagcctcatggaagccctgaccctgtctcccgagtcagctacgtttttccaaagtgcgtggaggacgtttctcagcattcttaccagcatcgtgrggtccaggcccctgctgtgagatggggatggtggcgcctgcccgcaggtttcttgtgaaaatctaaggaagaagcacttagcacagccccagaccacagc

SEQ ID NO: 109450 - DNA, 201 bp, Homo sapiens
aaatcccatgctccaaacatcgtttaactaagagcaaaggttttgtgccaccttagtgaggcgctccctgtacttcatcatggagcgagaccgagggtgcrgcattcgcagcaccaggagggaccgcgcagggcctggggggacccatggagggagggccgccccagcccgggctctgtgacccctcagggtggaagccgt

SEQ ID NO: 109451 - DNA, 201 bp, Homo sapiens
ccatacgttgatctggtgcccgtgcaagtgtttctcatttcggatttccttctccaggtctctctctgaagctgggcttctttaggttcgctgtttcacaygtcttgcttatcctttcctgaggtgcatcgatgtttgctggtcagagcacacaagccccagtgaggaggagcatgtggaaggctcggatctgtttaaatg

SEQ ID NO: 109452 - DNA, 201 bp, Homo sapiens
aaagcatttgaatcaagggtaaatggaaggttccatctcagtgtgaaatagccaggtgctagctgcagggcagaggcgggctttccgtggagcccagcgasacccttgatcccaggagaaagccaagccctggcctcctgtgggcagtcagacccttctctcctgagcgtggagccgggccaggccggggtcctccttggc

SEQ ID NO: 109453 - DNA, 201 bp, Homo sapiens
caaagagactcacacccatgtgtcggtccccctgcaggttcctgtgtgatcatggaactgcggggaagggaaggtgccggaaccagggctgggagatcacygagggttgaggtggggcccgtctcctgtacacccctgcggaaaagcctgctgggccccagagccggcgtccgctgcctctgcagctgcgttacctcgttc

SEQ ID NO: 109454 - DNA, 201 bp, Homo sapiens
tttctctgcggtgctccttacggggtgtgaggtcctggtgaggaggacggtgcagggacctcgtggtctctactcccagtttctctgcggtgctccttacrgggtgtgaggtcctggtgaggaggacggtgcagggagatgcctcgtggtgtgctcaggcccttgagagagcctctgtccttggttctctgcgtgctgctc

SEQ ID NO: 109455 - DNA, 201 bp, Homo sapiens
gaatgtgtgcccacgtttctggcttggctgtgcaaaacgtacctccagatcttccagatagcagcacgggggcacgtgccgggctgccctgcctcaccagygttggcacggacgtctgaggccctcccaggtggggcgccacactagcgagggtccctcgggtccgtgggctgccgtgctggccggcccgcctgcccttgg

SEQ ID NO: 109456 - DNA, 201 bp, Homo sapiens
ctcccggtttctctgcggtgctccttacggggtgtgaggtcctggtgaggaggacggtgcagggacctcgtggtctctactcccagtttctctgcggtgcyccttacggggtgtgaggtcctggtgaggaggacggtgcagggagatgcctcgtggtgtgctcaggcccttgagagagcctctgtccttggttctctgcgt

SEQ ID NO: 109457 - DNA, 201 bp, Homo sapiens
aatgcagattatgtaactctgtaaggtagcgtgttgcttctcctttattctcttgatttaaaaagcagtatagttttatagtataagactctatgcctggrcatgtggtggctgtggctcacgcctgtaatcctagcactttaggatgccgaggtgggcagatgacttgaggtcaggagttcaagaccaacctggccaaca

SEQ ID NO: 109458 - DNA, 201 bp, Homo sapiens
agcagcacgggggcacgtgccgggctgccctgcctcaccagcgttggcacggacgtctgaggccctcccaggtggggcgccacactagcgagggtccctcrggtccgtgggctgccgtgctggccggcccgcctgcccttggctgtcaagtgtaaaataacagattttaacagtgccttgtttttctctcttgacaaggta

SEQ ID NO: 109459 - DNA, 201 bp, Homo sapiens
ggaaggttgtgttttttacttgtctaccaagagtgattcattcttctctcaagtcaacaaacatcagatgcctgttctatatgcagccgcctgccgggcastttcactccttaaaataaatcctcaaaataaaaaaccaaacaagtcatcttcagaatgtttaaggatctcacagacacatcgtcccaacaccagttccag

SEQ ID NO: 109460 - DNA, 201 bp, Homo sapiens
tctgtacatctgcgcaggcgtgtgtggggtgtctacacgtgcacaggcgtgtggtgggggtatgcacgtgtgcgcaggcatgtgtgaggtgtctacaggcrtgtgtgaggtatctacacgtgcgcacaggcgtgtgtgggttctgcaggtgtgggggggtctgcacgtgtgcacgcaggcatgtacggggtctgtatgtgt

SEQ ID NO: 109461 - DNA, 201 bp, Homo sapiens
ccactgtttggacaaataaaacagtttgtgtttatataaaacgaacattacagtcattttgtcaggaaaatgtagttgcatcagcctctgtctagactggraatgatatgaaagttttagattttataaattctctaacggaaatgtcagaggatcacatataaatagtgtgttttgagacaactttatgttatccccaag

SEQ ID NO: 109462 - DNA, 201 bp, Homo sapiens
agacgatttcaccacgttggccaggctggtctggaacttctgacctcaggtgatcctgcctcagcctcgctaagtgctgggattacaggcgtgagccaccrcacccagccactctggctcttttgggacataatttttgaccttaaagttgcaagaacagtgcacagaattctcacaccagcttcaccccagattccgcaa

SEQ ID NO: 109463 - DNA, 201 bp, Homo sapiens
gtggagcagagcctgcactagaataagacagtcagaacctttcaaccgcagtacagaaaattacgtgactccgacgtggccagtatgcgagtgattttctrcgaaggcctgtgtttggtcacgttgctggaagcctgcggagtgctgcctgcgtgcactgggcgcaggtgcccttggcgtcaggagccggccttgtctctg

SEQ ID NO: 109464 - DNA, 201 bp, Homo sapiens
ggagtgcagtggcaggatcttggctcactgcaagctctacctcccgagttcacgccattctcctccctcagactcccaagtagctgggactacaggtgccygccaccacacctggctaattttttgtattttttttagtagagacggggtttcaccgtgttagccaggatggtctcaatctcctgactttgtgatccgcct

SEQ ID NO: 109465 - DNA, 201 bp, Homo sapiens
tggcaggatcttggctcactgcaagctctacctcccgagttcacgccattctcctccctcagactcccaagtagctgggactacaggtgcccgccaccacrcctggctaattttttgtattttttttagtagagacggggtttcaccgtgttagccaggatggtctcaatctcctgactttgtgatccgcctgcctcggcc

SEQ ID NO: 109466 - DNA, 201 bp, Homo sapiens
tcctgggctcaagctatcctcccacttcagccttctgagtagccgggactacgggcgcacacccccacacctgtctaacttttgtatgttttgtagagacrgggtcttcctatgttgcccaggctggtgtcagactcctaggctcaagagaccctcctgccaagacctcccgaagtgctggaattgcaggcattagccaca

SEQ ID NO: 109467 - DNA, 201 bp, Homo sapiens
cggctggtaaacagcactgtgaggaagggaaacttgattggactggaaggcgttggtagccgggatctgtgctgccctggagtggggagattgcaggcccygagggatgcttcctgagcatgtggcctctgtgcctgtttgcccgcgtggacccgagatcagccctcagcctaaggttgtggcccctggagaccccatgta

SEQ ID NO: 109468 - DNA, 201 bp, Homo sapiens
acggccacggtggcgccaggtctgcaggggcttacggccacggtggtgccaggtctgcaggggcttacggccacggtggcgccaggtcgtcaggggcttasggccacggtggcgccaggtctgcaggggcttacggtcacggtggcgccaggtctgcagcccggaaacctctagttgtccttacaggtggaggatccctcc

SEQ ID NO: 109469 - DNA, 201 bp, Homo sapiens
cgtacctccagatcttccagatagcagcacgggggcacgtgccgggctgccctgcctcaccagcgttggcacggacgtctgaggccctcccaggtggggcrccacactagcgagggtccctcgggtccgtgggctgccgtgctggccggcccgcctgcccttggctgtcaagtgtaaaataacagattttaacagtgcctt

SEQ ID NO: 109470 - DNA, 201 bp, Homo sapiens
ggtgatgctgtcacctcccgtcattaggaaggcgtcctggtgatgatgtcacctcccatcgtgtcctggtgatgctgtcacctcctgtcattaggagggcrtcctcgtgatgatgtcacctcccatcgtgtcctagtgatgatgtcaccacccgtcattagcgcattctggtgatgatgtcacctcccatcgtgtcctggt

SEQ ID NO: 109471 - DNA, 201 bp, Homo sapiens
gatcttccagatagcagcacgggggcacgtgccgggctgccctgcctcaccagcgttggcacggacgtctgaggccctcccaggtggggcgccacactagygagggtccctcgggtccgtgggctgccgtgctggccggcccgcctgcccttggctgtcaagtgtaaaataacagattttaacagtgccttgtttttctct

SEQ ID NO: 109472 - DNA, 201 bp, Homo sapiens
gtggtgcaatcttggctcactgcaacctccgcctcccaggttcaagcaattctcatgcctcagcctcttgagcagctggaattacaggcacgtgccaccasgcctggctaatctgtgtatttttagcagagatggggtttcatcatgttgctgaggttggtctcaagctcctgtcctcattgtcttaaactacataaagtg

SEQ ID NO: 109473 - DNA, 201 bp, Homo sapiens
agttccccacacggcctctttttgatgcctgagagtgggggatggaggtgacgaggccattgctggtggacggctgtgggggatgggggtgacaccattgytggtggacggctgtgggggaagggggtgacgctgttgctggtggacggctgtgggggatgggggtgacgccattgctggtggactgctgtgggggtgggg

SEQ ID NO: 109474 - DNA, 201 bp, Homo sapiens
tagcagcacgggggcacgtgccgggctgccctgcctcaccagcgttggcacggacgtctgaggccctcccaggtggggcgccacactagcgagggtccctygggtccgtgggctgccgtgctggccggcccgcctgcccttggctgtcaagtgtaaaataacagattttaacagtgccttgtttttctctcttgacaaggt

SEQ ID NO: 109475 - DNA, 201 bp, Homo sapiens
cctgtcccatgtggaggggcgggtgcaaacgcatcctctgtcccacgtggagtggtgtgtccacacgcatgtcctctgtcccatgcccacgtggaggggcrtgtacacacgcatgtcctctgtcccgtgtggaggggcgtgtacacgcacacgtgtcctctgtcccgtgtggaggggcgtgtacatgctcacatgtgtcct

SEQ ID NO: 109476 - DNA, 201 bp, Homo sapiens
ggcctcattgctgccggtggggttggatgtcaggctcctccatggccttctctgagaccccagaggtggggtgtttggcgggagtagagcagttatcatakgtttttaacatttagttgaaacatttaattcagtttaaaataacagtgcagttggccctttgaacaacactgctttggactgcgtgtgtccagttgtacg

SEQ ID NO: 109477 - DNA, 201 bp, Homo sapiens
ggtttcaccatgttggccaggctggtctcgaactcctgacctcaggtgatccacctgcctcggcctcctgaagtgttgggattacaggcgtgagccaccgygcccaactaatttttgtatttttagtagaggcagggttttaccatgttggccaggctcatctcgaactcctgacctcaggtgacccacctgccttggctt

SEQ ID NO: 109478 - DNA, 201 bp, Homo sapiens
taggtggttatcctagttaccacgggcagtcagtattcacactcactgagggcattcccgcagcagagaaggccgcactcactcactcgtaccgcgtgcayggaaactacttacacagtgggttttaaatgccacgggtagccccttgcaccagttagggtcacgtccttatttggagggtcaggcggacatgcgtcctct

SEQ ID NO: 109479 - DNA, 201 bp, Homo sapiens
ccatggggcatcccgcctggaaaggtcccattgacagatgcagcttgggtggctgtctcatgtccgcgggtcagggtggtcggagcagcccggctgggacrggagtgtgggggctgtgagcacctaggggcgggtgctgagtgctgggcggcctcatgtctgcagggcagggtggtcggagcagcccggctgggatgggag

SEQ ID NO: 109480 - DNA, 201 bp, Homo sapiens
tgttgatttcctttattcagtagctcaggaaaacactgtcagcacgtgatgttggtggaggtctgttccgagcagctgcggtggccttgctgtgtaacacrtatcagcgaggaaacaaaggcagaagtgacatcagtggttagctcatagttagtgtaggttgttactgttggcgtggttatcaggggtggttatgtccta

SEQ ID NO: 109481 - DNA, 201 bp, Homo sapiens
tgttagacaggatgtggccctccaggtcctgccgacatcctcagtacagacttgtgtcccgaggatttgccctgagaacttggtctccagagccttcttgsatctgctgcggggccgtgggccggtatttggacctctgcatcctggtttcctcacctgtgaaatgaggtaggagcagcgccagcctcggaggagctgctc

SEQ ID NO: 109482 - DNA, 201 bp, Homo sapiens
agcgggaccaggattttgttgtgaagagtgagggccagttacagtgagaaaggcagcgtggtgcgtcacatcccgtgtcccatgccgggctcctgatgccrgggtgaccgggcccttgttaggagctccactctgggccccgcgtggagggacaccccgatgcgctgttgccaggcccccgggtctcttcgaggcacaaga

SEQ ID NO: 109483 - DNA, 201 bp, Homo sapiens
catattggggcagataatggcgaggagtcggtggccgggggtaggggcggggggacgcggttggtagcaccttgttggctacaggagcggctgctgctggyaccattgggaagctggctcgggagagtgggcacatgcaggggcgggttgggggtcccaggagtgtttgccttgtagccgacaggagagcccatggggggt

SEQ ID NO: 109484 - DNA, 201 bp, Homo sapiens
atcacccggacgccccgctcatggccctcgttctcttcctccgacagggagaacagccctgcggcctttcccgaccgggagggtgtgccccccaccgcctygttccacccgatgccggttcttcccaaggcccagcctggccccgaggttcggatctacgactccaacacggggaagctcatcaggacgggcgcccggggg

SEQ ID NO: 109485 - DNA, 201 bp, Homo sapiens
tcgtatttttaaatcccatgctccaaacatcgtttaactaagagcaaaggttttgtgccaccttagtgaggcgctccctgtacttcatcatggagcgagaycgagggtgcggcattcgcagcaccaggagggaccgcgcagggcctggggggacccatggagggagggccgccccagcccgggctctgtgacccctcaggg

SEQ ID NO: 109486 - DNA, 201 bp, Homo sapiens
ctgcggcctttcccgaccgggagggtgtgccccccaccgccttgttccacccgatgccggttcttcccaaggcccagcctggccccgaggttcggatctaygactccaacacggggaagctcatcaggacgggcgcccgggggcccccagcaccctccagctccctacccatccgccaggagccctcttccttcaggtacg

SEQ ID NO: 109487 - DNA, 201 bp, Homo sapiens
gccaagtcctaactggggagggatgtgacagctgctcatggagctcaggaggtggccgcgctgccgaggcatgtgctggatgacccgggagggcaaagcgyatattggggcagataatggcgaggagtcggtggccgggggtaggggcggggggacgcggttggtagcaccttgttggctacaggagcggctgctgctggc

SEQ ID NO: 109488 - DNA, 201 bp, Homo sapiens
tccattcatctcgtatttttaaatcccatgctccaaacatcgtttaactaagagcaaaggttttgtgccaccttagtgaggcgctccctgtacttcatcayggagcgagaccgagggtgcggcattcgcagcaccaggagggaccgcgcagggcctggggggacccatggagggagggccgccccagcccgggctctgtga

SEQ ID NO: 109489 - DNA, 201 bp, Homo sapiens
ttcggatctacgactccaacacggggaagctcatcaggacgggcgcccgggggcccccagcaccctccagctccctacccatccgccaggagccctcttcyttcaggtacgtggcggcccagccactgtccccagctaatgagggctcttcaagcttgctgctccagtctgttggggggatggcgtcagttgcccgaagtg

SEQ ID NO: 109490 - DNA, 201 bp, Homo sapiens
ggtgtcactattttgttgtctggtttaagaaaaaaacctgatacaggttgagtctcccatatccaaactgcttggaaacagaagtgttttggatttctggrtttttttggattttggaatatttgcacgtatacatgacgagatgtcttggggatgggacgtgagtaaacgcggaatccatttgtgttgcacatgcactgt

SEQ ID NO: 109491 - DNA, 201 bp, Homo sapiens
tatggagctgtgcagctggttgtatgaacaaaatacaaatattgcatgttatgctgaggaagtgaagctagtatcagttgcggacatttactaaccatagyctgcagctgtgtctaatgttcgaggtaatttttaatgactaaagtccattcatctcgtatttttaaatcccatgctccaaacatcgtttaactaagagca

SEQ ID NO: 109492 - DNA, 201 bp, Homo sapiens
ggtttgtgcgttttttttgtttttgtttttgttttttttcagagattgggtttttaggttaagtctctgctcattggggcattttagggcagaactctaakcattcattgtaaagtattttgataaaattaaggaaatcatacttgtcaccttagaaagtttaacacactttttcaaacaaggtgtcactattttgttgtc

SEQ ID NO: 109493 - DNA, 201 bp, Homo sapiens
gagcagggctgggggcccagaggaagcatgaggcgtcgtgggagagaggcctgggggcagcagaggaggcatgaggtggaggcctgggggcagcagaggargcatgaagcatgagagagagagagagagagagagagaggcctggcaccagaggaagcgtgaggggttggtggagagaggcctgagggcagcagaggaggt

SEQ ID NO: 109494 - DNA, 201 bp, Homo sapiens
ctgcctggagcgctgggacaaggtggaggagcagctcttcccgctcagggacgatcacaccaaggcacagaggtgggtcctcgctgcacccagcaggtccrtgccaggcgttcccttgctggacagctgttggttcatgcacctgggcagtgcccctcatcacccggacgccccgctcatggccctcgttctcttcctccg

SEQ ID NO: 109495 - DNA, 201 bp, Homo sapiens
tgggcaccttggtgggtcgtctgtcggtcatacctttgagtctttctggactcctctgttccatgcgtttatgttgtatgcctgataagttctgaagtcasgtagtaaaagttctctgttatttttgaaaattgagattctaggttttctgaacttccatataaatttcagaagcaacttgtcaatttctacaaaaaaaca

SEQ ID NO: 109496 - DNA, 201 bp, Homo sapiens
ttcacatagcacgcggagttttggtttgtgaaagtttgctttttcgtgttttcatagctacacaaactgcatctcttggaaaagtgagagcgttttgacarctgctgtcactgtgaacaggtcaggaggccctgccttgcccaccccatacttaggggcttaagaaacaaggtctcactctgttgcctgggctggagtgca

SEQ ID NO: 109497 - DNA, 201 bp, Homo sapiens
cttgtgttaaaaccacggaagccacttcccaaatgcagaccaggcggtgacccggcgttgtgcgtttgccacaagcatctcacaccatgtttgcttctctkcagaggccacaagaggaagctgaatgaagaggacgccgccagcgagtccagcagggagtccagcaacgaggacgagggcagcagctccgaggccgacgag

SEQ ID NO: 109498 - DNA, 201 bp, Homo sapiens
ttccagctgtcccacctttccagagtgaaccagtgttcatcttacatatgttctttcatgtctcatgtctccctaaaatgtgtaaaacagagccgtgcccygaccacctcaggcacatgtcaggccctcctgaggccgtgtcacaggcaggtgaccccaaccttggcaaaataaactttttaagttaagtgagacctgaca

SEQ ID NO: 109499 - DNA, 201 bp, Homo sapiens
cttccctgtcctgttttcctgttctgatgtcttctggcatcacaggtgttcatgagcggccggaacgtgcatttgcagcaggtgaacacctgctttgtcartggtgtcctggtgtgtaacagggctggggcctcttctcctgcgctggggctctgctgtccacacgtgtgtgacgtggccctgggtcggtggcctgtgtgt

SEQ ID NO: 109500 - DNA, 201 bp, Homo sapiens
acagagcaagaccctgtcacaaaacgaaataaaacaactctttgtacctaattgtattgttgggcccataccatgtggagatgtaacatttgccagtagcygcgccgaggaggggcctaggattaaatgacagcagatggtgactggaatttacagcaagagctgaagagacccaggagtgctgaacaagaaggttggtct

SEQ ID NO: 109501 - DNA, 201 bp, Homo sapiens
tcagaggatcacatataaatagtgtgttttgagacaactttatgttatccccaagtctcctctttggaccagacatccttagttttttcagctgttccacrggtggcacgggggtggtgaggtgtggtggcgtgtcatttttcatgagagacacctgtaggtggaaagtcctttcattttatagacaaagaaatgccctca

SEQ ID NO: 109502 - DNA, 201 bp, Homo sapiens
gatgcgcttctgtgaagtgtctttatgttgacgttgaggggcctgtggggctgcacttgtcacgttgtgtgccgtctgcccccaggtttgctgtggctccygtgatgaggtgggaagcgccccaccctccagcatcactggtgagactgcggacttgccccttcctttcacatattcgggagaattctccagtgagaccgt

SEQ ID NO: 109503 - DNA, 201 bp, Homo sapiens
cggcgcgtcagtgtgttaggtgggcattggctgctccagtggtagaggaagggtctccacgtcgacagaggagaggcaaagttgctgacccaagagtagcrcctgccgtgggggatgctgctcccacccacactgacaagggcttccccgcccctcatgtgaggagcagctttgagaactcgcgcctggtcagtgctgtgg

SEQ ID NO: 109504 - DNA, 201 bp, Homo sapiens
gggcacagacgatggggagtcaagaggatctggaaccagggtcaagtgcagcccgtcagggggcctttgagtgaggggtgtcgagatctctggccatttcyggcgcgtcagtgtgttaggtgggcattggctgctccagtggtagaggaagggtctccacgtcgacagaggagaggcaaagttgctgacccaagagtagca

SEQ ID NO: 109505 - DNA, 201 bp, Homo sapiens
gtccctccctgcaccgcgccctctccggagtgctgtgtacggcaagtcggcaaccttctggagttggccctcctccctcagccagttcctggagcacctcygtgcccctcattcatgtccttctcttgcggagccgggtctcatggtgtgtggtggagccaactgtggtttcaccgttcaccctttgagggatatttgggt

SEQ ID NO: 109506 - DNA, 201 bp, Homo sapiens
gctgagatttggtttcgaaattatgtgataatttaaagcagccacacgatcagtactgcgaacagcacctgttctttagacgctgcttttcatactgttgrataaaatatccaggggggtggctcgcactgtagtcccagtgctttgggaggtggacccgcaaggatctctcgagctcaggagttcaaggctgcagtgagc

SEQ ID NO: 109507 - DNA, 201 bp, Homo sapiens
gcggaacctggcctatgggattgctgtgggccagtcagtgaacgggccagcaccacctagagcagaaggatgtggagaccccccgtctaggaagtcagggwctgttctgtactgtcattctaatcagtagaagcacgatggcaggacagatacgtgcactgaagtgatactgctgagatttggtttcgaaattatgtgata

SEQ ID NO: 109508 - DNA, 201 bp, Homo sapiens
tgggaagcgcagcgttcgtggggtgggaagcctggcattcacggtgttcgtgggatgggaagcgcggctttcgcggggtgggaagcgtggcgtttgcggcrttcgtgggatgggaagcgcgtgttcacagagggccgccgtgaagagtggactttgacaaggcttgggaagtcctgaattccaaacagcgcagatcagcac

SEQ ID NO: 109509 - DNA, 201 bp, Homo sapiens
tgcaccaccacaccgggctaatttttgtatttttagtagagatggggtttagccatgttggccaggctggtctcgaactcctcacctgaagtgatccaccygcctcggcctcccaaagtgctggctttacaagcatgagccaccgtgctgacctgtgaaatgattttaatttcagcccactgacgtctgttttgtcacttg

SEQ ID NO: 109510 - DNA, 201 bp, Homo sapiens
actcctcacctgaagtgatccacctgcctcggcctcccaaagtgctggctttacaagcatgagccaccgtgctgacctgtgaaatgattttaatttcagcycactgacgtctgttttgtcacttggccgttttttgtgtctgttttcgtagcctggagatgttgcattttcttgttttgtgttttgccgtgtagctctccg

SEQ ID NO: 109511 - DNA, 201 bp, Homo sapiens
ccacctgcctcggcctcccaaagtgctggctttacaagcatgagccaccgtgctgacctgtgaaatgattttaatttcagcccactgacgtctgttttgtyacttggccgttttttgtgtctgttttcgtagcctggagatgttgcattttcttgttttgtgttttgccgtgtagctctccggaccctattttgagggtga

SEQ ID NO: 109512 - DNA, 201 bp, Homo sapiens
tcccgtctctctttgccctttattctaagatgccagagcctggcagatgctctctgccccacgggggttttgtggataaaagaagatgggtgttatttttccacaggatagtcagaaacgtgttttgccagtcaccctggctcagttagcaaattctgatccattaacctctgaaaagtgtattggcgaaacatcacgttt

SEQ ID NO: 109513 - DNA, 201 bp, Homo sapiens
ccgtctctctttgccctttattctaagatgccagagcctggcagatgctctctgccccacgggggttttgtggataaaagaagatgggtgttatttttccdcaggatagtcagaaacgtgttttgccagtcaccctggctcagttagcaaattctgatccattaacctctgaaaagtgtattggcgaaacatcacgttttt

SEQ ID NO: 109514 - DNA, 201 bp, Homo sapiens
gtctctctttgccctttattctaagatgccagagcctggcagatgctctctgccccacgggggttttgtggataaaagaagatgggtgttatttttccacrggatagtcagaaacgtgttttgccagtcaccctggctcagttagcaaattctgatccattaacctctgaaaagtgtattggcgaaacatcacgtttttca

SEQ ID NO: 109515 - DNA, 201 bp, Homo sapiens
tctctctttgccctttattctaagatgccagagcctggcagatgctctctgccccacgggggttttgtggataaaagaagatgggtgttatttttccacabgatagtcagaaacgtgttttgccagtcaccctggctcagttagcaaattctgatccattaacctctgaaaagtgtattggcgaaacatcacgtttttcat

SEQ ID NO: 109516 - DNA, 201 bp, Homo sapiens
ctttgccctttattctaagatgccagagcctggcagatgctctctgccccacgggggttttgtggataaaagaagatgggtgttatttttccacaggatabtcagaaacgtgttttgccagtcaccctggctcagttagcaaattctgatccattaacctctgaaaagtgtattggcgaaacatcacgtttttcatacgtg

SEQ ID NO: 109517 - DNA, 201 bp, Homo sapiens
gtagaaaggtggggtcattctaagaaaatgttacgcctagaaattatatttacaaaacataaactcggagagaatgctgatgtaaaggaggtaacaatttmtgatggcttcctgggcgttaggtcctcctacctactgtgagggattcaaagagggaaaatgccgatccttcctgcagaaacagacaaagccgtgtggatg

SEQ ID NO: 109518 - DNA, 201 bp, Homo sapiens
cctggtcttgagaccaggccagtatggtctcaaactcctgggctcaaatgatccttctgcctcagcctccccaaggagctgggatgacaggtgcacaccaytgcacccggctgttaactaattagataattgacagggtcttactctgttgcccaggctagagtgcagtggtgggatcatagctcactgcagcctcaacct

SEQ ID NO: 109519 - DNA, 201 bp, Homo sapiens
ctggcagcagcctgaacaggaggcccctgacccgtcagctcctcacgtcttggggtagttccttctctcataagaggaggtgattctgacgtgctgcccgmcaggcctgccctgttcgctccctggtgcatggagccgggggagcctggacagaggtgtgtgagggcacagctgggagtcgctcccaaagcgcccctgagg

SEQ ID NO: 109520 - DNA, 201 bp, Homo sapiens
caatcacacccaaagcactcactgaggagccatggcagagcagtcggtggcgccaataccaaccagaagccgccagggcagaggggaaccgtgaagccagyggaatgcacagctccacctcaggggaccggggtaggcggggctgtgtctggtaacatgccctttgcctcacattagtgcctctgaaaatagtgtcctcag

SEQ ID NO: 109521 - DNA, 201 bp, Homo sapiens
gctggatcaggagatgcgcgtgcgcggcccggcccggctgatcgcttcgggtgctcgactcctgttgcgcatgctcagcgcgctgcccggctggggacccrcgcacctgcagcgcccgctgctcggccctgcatcctgcctgggcatcctgcgcccggccatgacggcgcactcattcgccctcccggtcatcatcttcac

SEQ ID NO: 109522 - DNA, 201 bp, Homo sapiens
acagattcttttgaaacaactggagtattttccagggttgccaaatttttcaaaatacataggacaaaacccactttcaaaaaatttacttcattgatttmagatttgatgttatcatagttaaaattgttttatctgattaggtcatggattctttattcctattaaccaattctcttaatttaccttatgttttattga

SEQ ID NO: 109523 - DNA, 201 bp, Homo sapiens
ctactctccccagctcaaagtcagccagttcctttgtcctccctcctttcctcctcaccctagcctgctcttccttctgtcctggtagtaaatgcctcttsaaaggctgaacctataaaacaacaggagtggaggtggtgtggaatgggaaagagagcagtgggccagaagtcatgaaccctgggctctggatctggctct

SEQ ID NO: 109524 - DNA, 201 bp, Homo sapiens
gtttacactgtggctgtgtttctcacaggttacccaaactcctatcataaaggcaggaaacagaagtaaaaaacctgaatccaaaccacaggaagtgctgyggagatactgattcgtgggttgatcagagcccaggaggcactaaaggctcaatgaacatggtgatctttgtgcaagagatgttccatcaaggcttacctg

SEQ ID NO: 109525 - DNA, 201 bp, Homo sapiens
tgctgcactcctgcctttctttttcccaagggtgctcttgacatctggagtgcagtcagcaggcctttccgagtgggctggctgcctcagatgcctcagtscctgttgctggggatgcttcggtggggcctcctcactgtgggccttctcttgggtcagtgtgatcctcgtgtcccttccctgtgccagcgacactcgtgg

SEQ ID NO: 109526 - DNA, 201 bp, Homo sapiens
tgtggaggatgccgggaggttgcaggtagccagaagacaaccaggtgagtgtcactcaggaggatgagaggttcaacaggagagagtggttgaggtaacayagacccccattgtcctctacccccaagaagtcaaggtcagctggcatctttggtgatgggcagtaaagtcagactgcagtgggctgggagcgagtgggca

SEQ ID NO: 109527 - DNA, 201 bp, Homo sapiens
gtggatcacgaggtcaggagttcgagaccagtctggccaacatagtgaaactctgtctcgactaaaaatacaaaaattagccaggcctggtggcgcgtgcytgtagtcccagctactcaggaggctgaggcaggagaatcgcttgaacccgggagacggaggttgcggtgagccaagatcttaccactgcactccagcctg

SEQ ID NO: 109528 - DNA, 201 bp, Homo sapiens
tcaggaggctgaggcaggagaatcgcttgaacccgggagacggaggttgcggtgagccaagatcttaccactgcactccagcctgggcaacagagtgagamtccgactctaaaaaaagaaccactaggtgagagtaagtcatcaaacttgggataggtaccctggggatatagaagaacattccaagggacttgaatccct

SEQ ID NO: 109529 - DNA, 201 bp, Homo sapiens
attctttattcctattaaccaattctcttaatttaccttatgttttattgattgattgattgaaatggggtcttgtcaagacccctggtcttgagaccaggccagtatggtctcaaactcctgggctcaaatgatccttctgcctcagcctccccaaggagctgggatgacaggtgcacaccactgcacccggctgttaac

SEQ ID NO: 109530 - DNA, 201 bp, Homo sapiens
agaatccgactctaaaaaaagaaccactaggtgagagtaagtcatcaaacttgggataggtaccctggggatatagaagaacattccaagggacttgaatmcctggagagtgtgaggaaatcagtttgcagatcctcagtgtctattgtttagtctcttgctaaaactgccattcacaatagccaatccctctttattaaa

SEQ ID NO: 109531 - DNA, 201 bp, Homo sapiens
attgttttatctgattaggtcatggattctttattcctattaaccaattctcttaatttaccttatgttttattgattgattgattgaaatggggtcttgtcaagacccctggtcttgagaccaggccagtatggtctcaaactcctgggctcaaatgatccttctgcctcagcctccccaaggagctgggatgacaggtg

SEQ ID NO: 109532 - DNA, 201 bp, Homo sapiens
ggattctttattcctattaaccaattctcttaatttaccttatgttttattgattgattgattgaaatggggtcttgtcaagacccctggtcttgagaccaggccagtatggtctcaaactcctgggctcaaatgatccttctgcctcagcctccccaaggagctgggatgacaggtgcacaccactgcacccggctgtta

SEQ ID NO: 109533 - DNA, 201 bp, Homo sapiens
tggattctttattcctattaaccaattctcttaatttaccttatgttttattgattgattgattgaaatggggtcttgtcaagacccctggtcttgagaccaggccagtatggtctcaaactcctgggctcaaatgatccttctgcctcagcctccccaaggagctgggatgacaggtgcacaccactgcacccggctgtt

SEQ ID NO: 109534 - DNA, 201 bp, Homo sapiens
atggattctttattcctattaaccaattctcttaatttaccttatgttttattgattgattgattgaaatggggtcttgtcaagacccctggtcttgagaccaggccagtatggtctcaaactcctgggctcaaatgatccttctgcctcagcctccccaaggagctgggatgacaggtgcacaccactgcacccggctgt

SEQ ID NO: 109535 - DNA, 201 bp, Homo sapiens
catggattctttattcctattaaccaattctcttaatttaccttatgttttattgattgattgattgaaatggggtcttgtcaagacccctggtcttgagaccaggccagtatggtctcaaactcctgggctcaaatgatccttctgcctcagcctccccaaggagctgggatgacaggtgcacaccactgcacccggctg

SEQ ID NO: 109536 - DNA, 201 bp, Homo sapiens
gttttatctgattaggtcatggattctttattcctattaaccaattctcttaatttaccttatgttttattgattgattgattgaaatggggtcttgtcaagacccctggtcttgagaccaggccagtatggtctcaaactcctgggctcaaatgatccttctgcctcagcctccccaaggagctgggatgacaggtgcac

SEQ ID NO: 109537 - DNA, 201 bp, Homo sapiens
cagggcttgagaaaagatcctcatctgcccatggcagggcctcagaggggcttgtgtttggtggctgggagggtgggggagacggggcctacacaagatgyggggtaatcccaaataccaactgaatcaacatacgggaaacagaaaacacactgcaaattggatgcatacaggtagaaaggtggggtcattctaagaaaa

SEQ ID NO: 109538 - DNA, 201 bp, Homo sapiens
ttgttttatctgattaggtcatggattctttattcctattaaccaattctcttaatttaccttatgttttattgattgattgattgaaatggggtcttgtcaagacccctggtcttgagaccaggccagtatggtctcaaactcctgggctcaaatgatccttctgcctcagcctccccaaggagctgggatgacaggtgc

SEQ ID NO: 109539 - DNA, 201 bp, Homo sapiens
taacaatttctgatggcttcctgggcgttaggtcctcctacctactgtgagggattcaaagagggaaaatgccgatccttcctgcagaaacagacaaagcmgtgtggatgtggtcgtggggggcccttccaggtcaggcactgacagagcgtggggacctactaactactgtggcaaatgaagttgggagctttgtcatga

SEQ ID NO: 109540 - DNA, 201 bp, Homo sapiens
aactcggagagaatgctgatgtaaaggaggtaacaatttctgatggcttcctgggcgttaggtcctcctacctactgtgagggattcaaagagggaaaatrccgatccttcctgcagaaacagacaaagccgtgtggatgtggtcgtggggggcccttccaggtcaggcactgacagagcgtggggacctactaactactg

SEQ ID NO: 109541 - DNA, 201 bp, Homo sapiens; identical to SEQ ID NO: 17975

SEQ ID NO: 109542 - DNA, 201 bp, Homo sapiens
gccctgctcagccaatcagcgagtgggctcctaggcaggtcctgagtgacagcgcggcgggctggatcaggagatgcgcgtgcgcggcccggcccggctgmtcgcttcgggtgctcgactcctgttgcgcatgctcagcgcgctgcccggctggggacccgcgcacctgcagcgcccgctgctcggccctgcatcctgcct

SEQ ID NO: 109543 - DNA, 201 bp, Homo sapiens; identical to SEQ ID NO: 17977

SEQ ID NO: 109544 - DNA, 201 bp, Homo sapiens
agaagctcagaaggtagatatcacctcagccccattttatagggcaggacagtgaggcccagtgacttgcccaggtcacaagtctagaaggtagcagggcygtaatttggtctctggatggctggacactggaagagacccccagggctgatggtgttttcacagaaactgcaggtcagggcctggggactgcccaggggc

SEQ ID NO: 109545 - DNA, 201 bp, Homo sapiens
ggaggcagctctgcttcccgaggaagcccagagactgtgttcttgctgcctttctgtcttgctgctcctttagcccccaaggctgcagtcttcaaactgcrtgccgaggcaccccagggtgctgcaggaaactcacaggagtgctgtgggatgttttctagtcttgagggaagcacagtgacatctgttagacataacata

SEQ ID NO: 109546 - DNA, 201 bp, Homo sapiens
gtccttgtcttcctggggctcaaccaaccagccattaggcagtgacaggcaagaggggtgggggtgactggtgcctgtcccatcgcctgcctgtgaggggwaggagtggaaaggaccatctcatgggagggacagaggaggggttggtgaaagctgggaccacactagtcctctgacacatcttcttgcacccccagacag

SEQ ID NO: 109547 - DNA, 201 bp, Homo sapiens
aaaggcgggtgggaggcagctctgcttcccgaggaagcccagagactgtgttcttgctgcctttctgtcttgctgctcctttagcccccaaggctgcagtyttcaaactgcatgccgaggcaccccagggtgctgcaggaaactcacaggagtgctgtgggatgttttctagtcttgagggaagcacagtgacatctgtta

SEQ ID NO: 109548 - DNA, 201 bp, Homo sapiens
cgggctccctctgttcctgagctccgagtgtggcccacctgctccacgctgtttcctgtaactccggcccgtggctgcctctgttctccacctgcaagtcygctccgtccccacccctgctggtgctgtgatgggtgtggccctgccctctcccctcctgtgttctctgcctctgttcctcctctttggggatgtttcagg

SEQ ID NO: 109549 - DNA, 201 bp, Homo sapiens
aatcttctccctggagatgagcaagaccgaggcgctgacgcaggccttccggcggtccatcggcgttcgcatcaagtaagcgggggacccgaggcgggtgycagaccccagagcctgggagcaaccccgcaccccgggcggctcgtcctttgtcccagagctcatggaaggttgtgattcccgagggtccaggtgtcaggc

SEQ ID NO: 109550 - DNA, 201 bp, Homo sapiens
cagcctccctcgggctccctctgttcctgagctccgagtgtggcccacctgctccacgctgtttcctgtaactccggcccgtggctgcctctgttctccamctgcaagtccgctccgtccccacccctgctggtgctgtgatgggtgtggccctgccctctcccctcctgtgttctctgcctctgttcctcctctttgggg

SEQ ID NO: 109551 - DNA, 201 bp, Homo sapiens
aggcctagcagcctccctcgggctccctctgttcctgagctccgagtgtggcccacctgctccacgctgtttcctgtaactccggcccgtggctgcctctsttctccacctgcaagtccgctccgtccccacccctgctggtgctgtgatgggtgtggccctgccctctcccctcctgtgttctctgcctctgttcctcct

SEQ ID NO: 109552 - DNA, 201 bp, Homo sapiens
aaggcgacgggcaagatctccaagctgggccgctccttcacacgcgcccgcgactacgacgctatgggctcccaggtgcggccgggactcccgggatcccstcgcccccagcactggggtgttttcatctcctccatcacccccttgacccatggggtctggatcttcctgttaccctgactgtttgtcctggtactcctg

SEQ ID NO: 109553 - DNA, 201 bp, Homo sapiens
aggcaagaggggtgggggtgactggtgcctgtcccatcgcctgcctgtgaggggaaggagtggaaaggaccatctcatgggagggacagaggaggggttgrtgaaagctgggaccacactagtcctctgacacatcttcttgcacccccagacagccacaaccaaagtcccggagatccgtgatgtaacaaggattgagcg

SEQ ID NO: 109554 - DNA, 201 bp, Homo sapiens
ctgtgggatgttttctagtcttgagggaagcacagtgacatctgttagacataacataaactacgattgttcagtcacttcgacccagcaactccattaayagaactcttagcgttgtgtttggcctaaggatgccagggacagattcccatgacacagagggtaccgtgctctgctgaagcctgggaacctcgtctccca

SEQ ID NO: 109555 - DNA, 201 bp, Homo sapiens
ggttcatgcctataatcccagcactttgggaggccgaggcgggtggatcacctgaagtcaggagttcaagaccagcctgaccaacatggtgaaaccctgtmtctactaaaaatacaaaaaattagctgggcgtggtggtgggtgcttgtaatcccagctacttgggaggctaaggcaggagaatcgcttgaatctgggagg

SEQ ID NO: 109556 - DNA, 201 bp, Homo sapiens; identical to SEQ ID NO: 17985

SEQ ID NO: 109557 - DNA, 201 bp, Homo sapiens
atgtctgcttccatctcactagcttcctgatgtggtagaaatgccatggtagccccacaggaaatcacctcatgtgcgcctcccacccacaggcttcgcarggcatggtgggtcagctggcggcacggcgggcggctggcgtggtgctggagatgatccgggaagggaagattgccggtcgggcagtccttattgctggcc

SEQ ID NO: 109558 - DNA, 201 bp, Homo sapiens
ttttgtttaactaggatgcatcctcagagcagctccagttcattgagcatttaccacattcagccatcttcctagggaggtgccaatttgggatatccttyccatgtgccccttcattcccccaacccctgctccctactcccacccacccctttgacaaagaaggaaaccagggctcagaggggtcaggccacatgtgca

SEQ ID NO: 109559 - DNA, 201 bp, Homo sapiens
tggcgaggttctagggtgtaccctctgggcaatgtgggattctaagccaggcctgccggagcaacctgccctgcctggcttctcactcactgtctgcctcrtggctgaaccccgctctccagttccccctccccagcgctctgctcagctcggagccaagtccttacatgtaggatggcactgaaccctctttcctggggt

SEQ ID NO: 109560 - DNA, 201 bp, Homo sapiens
cctgcctgcctgcctgcccatagtcactcctaagcagggtgtcatcccatgctggcacgtgttctgttatcatccccattagacagagggggagactgagkctcagggagcagttcagatcgctcaagatcccacggcgccacctgcacttaagtggtggatctgggatgggagccgaggcagtctgccttcatcacttgt

SEQ ID NO: 109561 - DNA, 201 bp, Homo sapiens
ccattaatagaactcttagcgttgtgtttggcctaaggatgccagggacagattcccatgacacagagggtaccgtgctctgctgaagcctgggaacctcrtctcccaggtgttgccagcaccctgtgtagctgggattacgggcacctgccaccatgcccgctggctgtcttctccacctcgccacattttggcccgcag

SEQ ID NO: 109562 - DNA, 201 bp, Homo sapiens
ttttcctagaagtcccagctagtaatgtctgcttccatctcactagcttcctgatgtggtagaaatgccatggtagccccacaggaaatcacctcatgtgygcctcccacccacaggcttcgcaaggcatggtgggtcagctggcggcacggcgggcggctggcgtggtgctggagatgatccgggaagggaagattgccg

SEQ ID NO: 109563 - DNA, 201 bp, Homo sapiens
tttccaccagagttctgacactgtgactctgtataaaatggttgggaagctgcacccaccctgtgtatgtgtggttgccctgagcccacagaaagacacckccagagtgcggattgagaagcctttattgtgggaggatcggggtgtcagggctccaggagtcgggatggacttggaaggctgcggggagggtctttagag

SEQ ID NO: 109564 - DNA, 201 bp, Homo sapiens
agttctgacactgtgactctgtataaaatggttgggaagctgcacccaccctgtgtatgtgtggttgccctgagcccacagaaagacaccgccagagtgcrgattgagaagcctttattgtgggaggatcggggtgtcagggctccaggagtcgggatggacttggaaggctgcggggagggtctttagaggaagaggagg

SEQ ID NO: 109565 - DNA, 201 bp, Homo sapiens
cgtctgcagcaccgtgtagatgccacccactgtgggcccaagcgtgtgagggcaggccccggccgaggtccatagttctggggcctggggtggggtgggcyggggatgtagggggcactcaggccccagacctctagctcagggggaagaggggactgggagcccatagtttggagtaggggttggaagcttggatgaggg

SEQ ID NO: 109566 - DNA, 201 bp, Homo sapiens
tgaccccatttagcctcccagctccatttcctggagctccagtctcccccagacagagggctttaggggcccccttcatgcccttccctgccctgtctccrccgttcttcccccacccccgccccatagaccaagttcgtgcagtgcccagatggggagctccagaaacgcaaggaggtggtgcacaccgtgtccctgcac

SEQ ID NO: 109567 - DNA, 201 bp, Homo sapiens
ctgcgttctccaggtcgaattcatcctcccagtcctccagtcctggcagtgaggacatggacaaagtgcggtttaaaggcatggctggcgcaggaaggggkgctccggggatctccaggtagggaccccggaggtgtctagggaatgcaccaggtagggtgcggggccgagtagctggtgcccgacgggaagcttgcaaga

SEQ ID NO: 109568 - DNA, 201 bp, Homo sapiens
ggggacccgaggcgggtgccagaccccagagcctgggagcaaccccgcaccccgggcggctcgtcctttgtcccagagctcatggaaggttgtgattcccragggtccaggtgtcaggctgtctcctcagatctgctctctggctagggaggagacggagatcatcgaaggggaggtggtggagatccagattgatcgacc

SEQ ID NO: 109569 - DNA, 201 bp, Homo sapiens
taaagtcccgccacgcccccacaatatttacatatttatgaggaaccatcgagatctttgaagaaccagctagcctagaggagccagaacatctcgctccycgcgcgtttccgtttccgctaggactctggcagttggtgagcatcatggcaaccgttgtaagtgtgggtgcatggagggtgaggagcgagctagcagtct

SEQ ID NO: 109570 - DNA, 201 bp, Homo sapiens
ggggatctccaggtagggaccccggaggtgtctagggaatgcaccaggtagggtgcggggccgagtagctggtgcccgacgggaagcttgcaagacgctcrgcttcctattgcaagaccgcacccctgccccgaagcgttgggacctaggcagaaggaggccgcagcgtcactgagcccactggcgcccctgcagtgaaac

SEQ ID NO: 109571 - DNA, 201 bp, Homo sapiens
cgttgtaagtgtgggtgcatggagggtgaggagcgagctagcagtctcgagtttgagagaggaggatgctggaggccctgactcctgggtctgagggaggrgggatctgggggttcagactcctgggtctgaaagaggaggaagctcggccacccagatctgggggagaaggggacatgggggctggacttctggatctga

SEQ ID NO: 109572 - DNA, 201 bp, Homo sapiens
atcattagcccttgtggttagatcttagtacaattatgtgcttaatcaggcctcagtgacttttgtttaactaggatgcatcctcagagcagctccagttmattgagcatttaccacattcagccatcttcctagggaggtgccaatttgggatatcctttccatgtgccccttcattcccccaacccctgctccctactc

SEQ ID NO: 109573 - DNA, 201 bp, Homo sapiens
cccgcacctgcactgccagagccaacctcagagggaggaagagggagctcggcgtagaaggctcaggccctgccacctgggcgacactgaccatgtggccytccttctccccacagaaggcgagaccatggacacctcctgagttggatgtcatcccccgaccccaccctgttttccaccagagttctgacactgtgactc

SEQ ID NO: 109574 - DNA, 201 bp, Homo sapiens
gggatgggcgagcttgggcccattcctttccttaccctaccccccatccccctgtagggacgtgatcaccatcgacaaggcgacgggcaagatctccaagytgggccgctccttcacacgcgcccgcgactacgacgctatgggctcccaggtgcggccgggactcccgggatcccctcgcccccagcactggggtgtttt

SEQ ID NO: 109575 - DNA, 201 bp, Homo sapiens
tatttatgaggaaccatcgagatctttgaagaaccagctagcctagaggagccagaacatctcgctcctcgcgcgtttccgtttccgctaggactctggcrgttggtgagcatcatggcaaccgttgtaagtgtgggtgcatggagggtgaggagcgagctagcagtctcgagtttgagagaggaggatgctggaggccct

SEQ ID NO: 109576 - DNA, 201 bp, Homo sapiens
ccagggttctgatttcatcctagaatgtacgttttcagacgcagggaattttcatccctcaggttggcttctgtatcatccagcctggcctatagtaggtrtcagtaaatctctcttgacttaagtagatgctgttaggtccaccttacagataaagaaactgaggaatgaagaggctgggcccacaacaaggagatggcc

SEQ ID NO: 109577 - DNA, 201 bp, Homo sapiens
agcttggtgtgccggaaacgcaaggtcagccggccgaattagccagcagggccagatggcggcagtgagtgacacagtacttcaggggcttccagggttcygatttcatcctagaatgtacgttttcagacgcagggaattttcatccctcaggttggcttctgtatcatccagcctggcctatagtaggtgtcagtaaat

SEQ ID NO: 109578 - DNA, 201 bp, Homo sapiens
tgccaccacacccaactgatttttgtatttttagtagaaatgggatttcaccatgttgaccaggctggtcccgaactcctgacctcaggtgatccaccccsctgcctcggcctcccaaagtgctgggattacaggcgggagcctgtagactttattttttaggcatgttgtgactgtgcccggcctcgcctttcctcttct

SEQ ID NO: 109579 - DNA, 201 bp, Homo sapiens
ggctggggtctaccctgtttgacaaatgctgacactgaggtccagcggagtggcatggtggctgggcctacaggagagagggctgagcgggcacccagacrgtggcctccgatccgggagcaggagccacggtgggaaagggaggcgaggtacccgtgactggtgttggggccagcgccctgggggtggtcaggaggcctc

SEQ ID NO: 109580 - DNA, 201 bp, Homo sapiens
cgcccggccccagccagggctctttttttgcaggatcatatggaataaactgagaacatgtgggtgctgtgtaaaccataaacatgaagtaattgtgatcmttagcccttgtggttagatcttagtacaattatgtgcttaatcaggcctcagtgacttttgtttaactaggatgcatcctcagagcagctccagttcatt

SEQ ID NO: 109581 - DNA, 201 bp, Homo sapiens
gggctgggccacgtcccaccttgcagcccttgctgttcatggaatccagtgtcctcttcagggccggggtgggggcctccagcagttccacctgggtcctsacgccctgctccgtgtacggccccaccaggaagtagttgtcgccccattcgtcccctgtcaccttcgccttcgtctgcagcaccgtgtagatgccaccca

SEQ ID NO: 109582 - DNA, 201 bp, Homo sapiens
tcccaagtacctgggattacaggcacctgccaccacgcctggctaattttttgtatttttagtgtagactgggtttcaccatgttggccaggctagtctcraactcctgacctcaagtgatccacctgccttgacctcccaaagtgctgggattacgggcgtgagccaccgtgcctgacctaatttttgtatttttagtag

SEQ ID NO: 109583 - DNA, 201 bp, Homo sapiens
agaaatgccatggtagccccacaggaaatcacctcatgtgcgcctcccacccacaggcttcgcaaggcatggtgggtcagctggcggcacggcgggcggcyggcgtggtgctggagatgatccgggaagggaagattgccggtcgggcagtccttattgctggccagccgggcacggggaagacggccatcgccatgggta

SEQ ID NO: 109584 - DNA, 201 bp, Homo sapiens
gggtctgtgtgccaacactgtttcatctattaaaagtgctggggcactgggtgcagtggctcatgcctgtaattccagcactttggaaggccaaggtgggyggatcacctgaggtcaggaatttgagaccagcctggccaacatggtgaaacctcgtctctactaaaaatacaaaaatttgctgggcgtggtggcgcgtgc

SEQ ID NO: 109585 - DNA, 201 bp, Homo sapiens
cgcccctgcagtgaaacctcgcagccgccaggaggcggtggccgccccccccagccagcgccattggcccacgcccgggggcggggatttccgcgtgtccycattggtggaacgggttggagtcgctgtgtcccggccccgcctcggccgtgagacctccagggggcggagcttgccgctgcgctttacggaaacgagtgg

SEQ ID NO: 109586 - DNA, 201 bp, Homo sapiens
ggtcctgaattgtcccgggtggtgtttactcacctccctcccccatgtgagaaggggtggtagctggctcctctctgtggagaactgtcaacatgggaagmctcggtatattcttgttgaatgagctcagcactttagagtatcacttagcaaaccacagacattgagtcccgaggtgaacaagagagaacaggccgtgcc

SEQ ID NO: 109587 - DNA, 201 bp, Homo sapiens
ctaaaaatacaaaaattagccgggcatggtggtgcatgcctgtaattccagctactcaagagcctaaggcaggagaattgcttgaacctgggaggtggagkttgcaatgagccgagattgtgccactgccctccagcctgggtgacatctcggaaaaaaaaaaaaagaattgggagtgggtagcaattgctttgccacctt

SEQ ID NO: 109588 - DNA, 201 bp, Homo sapiens
gaatgtggcacacacagtaacttccttccctccatcctttctgctttcctactcttcttcatttttttttttttttgagacagtttcactctgtcgctcaggctggagtgcagtggtgtgatcttcgctcactgcaacctctgcctcctgggttcaagtgatcctcctgcctcaacctcccaagtagctgggattacagat

SEQ ID NO: 109589 - DNA, 201 bp, Homo sapiens
ggaacgggttggagtcgctgtgtcccggccccgcctcggccgtgagacctccagggggcggagcttgccgctgcgctttacggaaacgagtggccttcagytctgtcaatctggagctggaggcctcaaagtggggaggaggaggagggtgggataaagaggaaaggagcgtggaggacgtgtggttactcaaagaacagc

SEQ ID NO: 109590 - DNA, 201 bp, Homo sapiens
agctgtggaagcagaggccagagcagagccagaagcttatcaacactgggggcactggggcaacatcagggccctctctgagccccatccctggcttgtcyccactctcagggctccaaggtgggcaaactgaccctcaagaccacagagatggagaccatctacgacctgggcaccaagatgattgagtccctgaccaag

SEQ ID NO: 109591 - DNA, 201 bp, Homo sapiens
atcctagcactttgagaggtggagtcaggaggattgcttgaatcaggagttcaagaccagcctgagtcacatagtgtgatcctgtctctaaaaaaaaaatmaaaaaattagccggcagtggtggtccatgcctgagtcccagctacttgggagaactgcttgaaccaaggaggttcaggatgtggtgagatgtgactgcac

SEQ ID NO: 109592 - DNA, 201 bp, Homo sapiens
tgaggcaggagaactacttgaacccgggagatggaggttggagtgagctgagatcacaccactgcactccagcctgggcgacagagcaagactctatctcaaaaaaaaaaaaaaaaaaaaaaaaaaaaaaaaaaaagagctttattcaccaggcgcagtagctcactcctgtaatcccagcactttgggaggccgaggtgg

SEQ ID NO: 109593 - DNA, 201 bp, Homo sapiens
gaggcaggagaactacttgaacccgggagatggaggttggagtgagctgagatcacaccactgcactccagcctgggcgacagagcaagactctatctcaaaaaaaaaaaaaaaaaaaaaaaaaaaaaaaaaaaagagctttattcaccaggcgcagtagctcactcctgtaatcccagcactttgggaggccgaggtggg

SEQ ID NO: 109594 - DNA, 201 bp, Homo sapiens
aggcaggagaactacttgaacccgggagatggaggttggagtgagctgagatcacaccactgcactccagcctgggcgacagagcaagactctatctcaaaaaaaaaaaaaaaaaaaaaaaaaaaaaaaaaaaagagctttattcaccaggcgcagtagctcactcctgtaatcccagcactttgggaggccgaggtgggc

SEQ ID NO: 109595 - DNA, 201 bp, Homo sapiens
ggcaggagaactacttgaacccgggagatggaggttggagtgagctgagatcacaccactgcactccagcctgggcgacagagcaagactctatctcaaaaaaaaaaaaaaaaaaaaaaaaaaaaaaaaaaaagagctttattcaccaggcgcagtagctcactcctgtaatcccagcactttgggaggccgaggtgggca

SEQ ID NO: 109596 - DNA, 201 bp, Homo sapiens
gcaggagaactacttgaacccgggagatggaggttggagtgagctgagatcacaccactgcactccagcctgggcgacagagcaagactctatctcaaaaaaaaaaaaaaaaaaaaaaaaaaaaaaaaaaaagagctttattcaccaggcgcagtagctcactcctgtaatcccagcactttgggaggccgaggtgggcag

SEQ ID NO: 109597 - DNA, 201 bp, Homo sapiens
cctcgctctctggctggggctgtccaccctgcaccctctccgtctgtggctcccaccccgatggcaggctgtccacccgcttctgccctgggctgggccaygtcccaccttgcagcccttgctgttcatggaatccagtgtcctcttcagggccggggtgggggcctccagcagttccacctgggtcctcacgccctgctc

SEQ ID NO: 109598 - DNA, 201 bp, Homo sapiens
gaggcgctgacgcaggccttccggcggtccatcggcgttcgcatcaagtaagcgggggacccgaggcgggtgccagaccccagagcctgggagcaaccccrcaccccgggcggctcgtcctttgtcccagagctcatggaaggttgtgattcccgagggtccaggtgtcaggctgtctcctcagatctgctctctggctag

SEQ ID NO: 109599 - DNA, 201 bp, Homo sapiens
ttgtcctggtactcctgggtcttccctgtaaccctaggacagcagggcccctcagcctggcactatagcttcgcatggccacatgtggcctgtggcttctraggtcctccgggagcccccgtgaccctcagcgctctggaatgtccctagtcctgactacctcctgggcctggggtttccagatgaccccatttagcctcc

SEQ ID NO: 109600 - DNA, 201 bp, Homo sapiens
ggcgtgttgggacaggaatgtggccccagctgggggtgcattcaggtcctttcagccacatcctgtgaggtctcctgagggccaggccctgtgctggcagragctggggacacagatgagtcagccccgagccctgctctcctgggtctcccaggctggtgggagccccagtattcggagctgcatgttctctggtgaggt

SEQ ID NO: 109601 - DNA, 201 bp, Homo sapiens
cagggcaaccctctggggacacgtgtctctgccaactgccctgcagggtgagttccgggtggtggagcgcacgatcaccatgaagcagttgctgcgggccytggaggagggccgcgtgcgggaagtctttggctcgggcaccgcttgccaggtctgcccagtgcaccgaatcctgtacaaagacagggtgaggcggggctg

SEQ ID NO: 109602 - DNA, 201 bp, Homo sapiens
gtgattctcctgcctcagcctccccagtagctgggattacaggcgcccgccaccacacccggctaatttttgtatttttagtaaagccagggtttcaccaygttggccaggctgttttcgaactcctggcctcaagtgatctgcccacctcagcctcccaaagtgctgggattgcaggcgtgagccaccatgcctggcctt

SEQ ID NO: 109603 - DNA, 201 bp, Homo sapiens
ccctgtgagagctgtgagcagggagacgggagagagtaggatgagcctcctctggggctgggctggggaaggatggggctcccttgccccacccaaccagrctgccctccaccaggaattatgggcccaccgtgttagtgcaacaggaggcactcaagcggggctgtgaacaggtcctctggctgtatgggcccgaccacc

SEQ ID NO: 109604 - DNA, 201 bp, Homo sapiens
ttggtgtcccatgagcccctggactaacagccagcctccttcagtagtaccaggaacagataatggcctttcttattgaggccctggagagtgggctttcygtgctgctctgtggcctggaaaaccccttggggctaaatcaccctttcctgggagctcccggagccctggatatgtcttcagctttggaaaccccttcct

SEQ ID NO: 109605 - DNA, 201 bp, Homo sapiens
agtagggggttgagacatctggatcagagggaggaggggctgaaactcctgggttttggtccgcagggcactgggggacgcagactccccagctggacccagggggggggcagggcccgggtgcgctggcgtcccccaggtgaggggtggagctgcagggctgctgcggattggctgtggccgggggggcgtgtgcaccaa

SEQ ID NO: 109606 - DNA, 201 bp, Homo sapiens; identical to SEQ ID NO: 18007

SEQ ID NO: 109607 - DNA, 201 bp, Homo sapiens
cccaggagacagagcttgcagtgagccgagatcgcgccactgcactccagcctgggcgacagagcgaaactccatctcaaaaaaaaaaaagaaaggtttcrcagaggaggcgacccttcaactaggtctgacgaggagggaggagggggtttcctgggtacaaaagtcagcaaactgtttccagtcctgggaaccatgtgt

SEQ ID NO: 109608 - DNA, 201 bp, Homo sapiens
ccctccctactccttcccatgggccttggctttgagtccagacaacttaggagccagacctagcaagatcttggccctagaaagtctcacacctaactccyagatgcagcacccaggcataactgcctgtgacagatttctgttttttcttttcttttctttttttttttttaaagatggagtctcgctctgtcaccaggc

SEQ ID NO: 109609 - DNA, 201 bp, Homo sapiens
tttttctcatccttcctcttccatctcttactctctttttttcatcttggctctgagggcagctctcctgcccacaggctggctgtcgcactgtgtttgtstctctcatactgtgggtgtcctatccctctgggcagaagcatggctgcaaggctgagcagtctagatgtcgccacccaaaggcaatctggggacccacgc

SEQ ID NO: 109610 - DNA, 201 bp, Homo sapiens
ctgtcggtccttggtcttctaaggcctgtcagcacttgggtacccggaggccttcacttacctgtgtgccttccctggttgttttcttgtctgagctgatytccaggctgcgaccaaaggtctctggggtgggaggcgcttgcgtttgactttgccgcagcatggaggagggggcgggagctgactcagctctttccagcg

SEQ ID NO: 109611 - DNA, 201 bp, Homo sapiens
tttgggttttgaaaaatgcttagcaagtattcattagacccaggcaggcctggaatgccggaaggaggctagggtcttgtcctggggcactggggagccaygggaggcttgttagcagctgaggggagaggctatctctgggagagagactcagaaagtcatccaggtagcccagttcactgggggagtccagggaaggtc

SEQ ID NO: 109612 - DNA, 201 bp, Homo sapiens
atgggtgagggctgggcgcggtggctcacgcctgtaatcccagcactttgggaggctgaggcgggcagatcaccaggtcaagagaggctgaggcaggagartctcttgaacctgggaggcggaggttgcagtgagccaagatcgcaccactgcactccagcctgggtgacagagcgagactccgtcttaaaaaaaaaagaa

SEQ ID NO: 109613 - DNA, 201 bp, Homo sapiens
tcctctggctgtatgggcccgaccaccagctcaccgaggtgggaaccatgaacatctttgtctactggacccacgaagatgggggtaagcccacccatgayccagcccgaaccctggtggaagtgggtggcaccatcattcctggcaggttacaggccccagggattctgggatgggggaagggggtggctcttaagacgg

SEQ ID NO: 109614 - DNA, 201 bp, Homo sapiens
gcccccaggaagctggttacttggagaccaccacacacttctcccttcagcccagcacagcagttgtcctctggctggggacccagtactttttcttcagytgagtgagagcagaggaagcctgtggccctggcagacagaacgcactgctgtgatcccgcgggtccagggggcggaagggggaggatgagggagtaggac

SEQ ID NO: 109615 - DNA, 201 bp, Homo sapiens
cgggccctggaggagggccgcgtgcgggaagtctttggctcgggcaccgcttgccaggtctgcccagtgcaccgaatcctgtacaaagacagggtgaggcrgggctgccattgtgggtgggagggaaggaggggaggggcttggtcctcaccgcaccttctgtcccagaacctccacattcccaccatggaaaatgggcct

SEQ ID NO: 109616 - DNA, 201 bp, Homo sapiens
ctttctttctttgttttttttctttttaattgagacagagagtcttgctctgtcgcccaggctggagtgcagtggcaccatctcggctcactgcaacctcygcctcctgggtttaagcaattctcctgcctcagcttcccaagttgctgggactacaggcgcccgccaccacacccagctaacttgtattttctgtagaga

SEQ ID NO: 109617 - DNA, 201 bp, Homo sapiens
gcattcaggtcctttcagccacatcctgtgaggtctcctgagggccaggccctgtgctggcagaagctggggacacagatgagtcagccccgagccctgcyctcctgggtctcccaggctggtgggagccccagtattcggagctgcatgttctctggtgaggtgacccagggcattgtgaaagccttcacagaggccaga

SEQ ID NO: 109618 - DNA, 201 bp, Homo sapiens
gaggcctggactccagggtctgagggaggaggggctgggggcccagacttcgggtctgagggaggaggcagctagagtctggactcttacttaggtctgarggaggcgggcctggggtctgcacccctgagctctgggggagcaggacctgtcggtccttggtcttctaaggcctgtcagcacttgggtacccggaggcct

SEQ ID NO: 109619 - DNA, 201 bp, Homo sapiens
cgagaacccaggagacagagcttgcagtgagccgagatcgcgccactgcactccagcctgggcgacagagcgaaactccatctcaaaaaaaaaaaagaaaggtttcacagaggaggcgacccttcaactaggtctgacgaggagggaggagggggtttcctgggtacaaaagtcagcaaactgtttccagtcctgggaacc

SEQ ID NO: 109620 - DNA, 201 bp, Homo sapiens
gcgagaacccaggagacagagcttgcagtgagccgagatcgcgccactgcactccagcctgggcgacagagcgaaactccatctcaaaaaaaaaaaagaaaggtttcacagaggaggcgacccttcaactaggtctgacgaggagggaggagggggtttcctgggtacaaaagtcagcaaactgtttccagtcctgggaac

SEQ ID NO: 109621 - DNA, 201 bp, Homo sapiens
ggcgagaacccaggagacagagcttgcagtgagccgagatcgcgccactgcactccagcctgggcgacagagcgaaactccatctcaaaaaaaaaaaagaaaggtttcacagaggaggcgacccttcaactaggtctgacgaggagggaggagggggtttcctgggtacaaaagtcagcaaactgtttccagtcctgggaa

SEQ ID NO: 109622 - DNA, 201 bp, Homo sapiens
ggaaaggggacagccggggggctggcgggagagggacagccaggatgatcgcgggagaggggacagccattggggggggagatggtgggggagggcacagycagggggatggctggagaggggacagccaggggagggatggtgggagaggggacagtcaggggagggatggcgggagaggggacagccaggggagggatg

SEQ ID NO: 109623 - DNA, 201 bp, Homo sapiens
gaccatggtagggacagtctggaaggtactggcctagacagcaacatagggatagtcctggggattgaaaaagacaacaatgggatttttttttttttttwaatttcagacctggtgaataggaaataagccctgatatttggcagagacaatgctggttataatggggaaaagtgctgggctttggataggggacattcc

SEQ ID NO: 109624 - DNA, 201 bp, Homo sapiens
tggcgagaacccaggagacagagcttgcagtgagccgagatcgcgccactgcactccagcctgggcgacagagcgaaactccatctcaaaaaaaaaaaagaaaggtttcacagaggaggcgacccttcaactaggtctgacgaggagggaggagggggtttcctgggtacaaaagtcagcaaactgtttccagtcctggga

SEQ ID NO: 109625 - DNA, 201 bp, Homo sapiens
gtactggcctagacagcaacatagggatagtcctggggattgaaaaagacaacaatgggatttttttttttttttaaatttcagacctggtgaataggaartaagccctgatatttggcagagacaatgctggttataatggggaaaagtgctgggctttggataggggacattcctgagctgtttgggacagtacttggc

SEQ ID NO: 109626 - DNA, 201 bp, Homo sapiens
aggctgaggcgggcagatcacgaggtcaggagatcgagaccatcctgattaacacagtgaaaccccatctctactaaaaatacaaaaaaaaaaaaaaaaaattagccgggcttggtggcgggcgcctgtagtcgcagctactcaggaggctgaggcaggacaatggcgagaacccaggagacagagcttgcagtgagccga

SEQ ID NO: 109627 - DNA, 201 bp, Homo sapiens
tttttagtaaagccagggtttcaccatgttggccaggctgttttcgaactcctggcctcaagtgatctgcccacctcagcctcccaaagtgctgggattgyaggcgtgagccaccatgcctggccttattttttattattgtggtactaatacgcatacataataacacacagcatcaaatgtgggattccaaccatttta

SEQ ID NO: 109628 - DNA, 201 bp, Homo sapiens
tcacgcactgcctccgttgttccgcagtacggaatcagagcccacgagtggatgttcccggtgtgaagctgcaggctgtgctccagatccaccgacccgtrgcatctcgtcacgccagcactcgcctccctaccaatgactcacctgaagtgcaatacgaaataaaaggccagcgggcggcgtctgggtctctggcgcccc

SEQ ID NO: 109629 - DNA, 201 bp, Homo sapiens
ggatgatcgcgggagaggggacagccattggggggggagatggtgggggagggcacagtcagggggatggctggagaggggacagccaggggagggatggygggagaggggacagtcaggggagggatggcgggagaggggacagccaggggagggatggcgggagaggggacagccaggggagggatggcgggagagggg

SEQ ID NO: 109630 - DNA, 201 bp, Homo sapiens
agcctcccgagtagatgggctcaagcgatccacctgcctcagattacaggcatgagccaccatgctggtctttttttttttttttttttttttttttttttgagagacactctatcactcatgctggagtgtagcagtgtgatcgtagctcaccacagccttgaccagtaggtcaaggtgatcctcccaccttagccttct

SEQ ID NO: 109631 - DNA, 201 bp, Homo sapiens; identical to SEQ ID NO: 18011

SEQ ID NO: 109632 - DNA, 201 bp, Homo sapiens; identical to SEQ ID NO: 18017

SEQ ID NO: 109633 - DNA, 201 bp, Homo sapiens
gtgacgcccccgctgaatggtgttatcctgcctggagtggtcagacagagtctactggacatggctcagacctgggtgaggacatggcatcttctggtgaygggcgccatgtgccaggggccagggcatcagagggctgggactggggcacactggcatgtctctgccccttctcctgggtctgtctctcccgttgggcct

SEQ ID NO: 109634 - DNA, 201 bp, Homo sapiens
cagttgtcctctggctggggacccagtactttttcttcagttgagtgagagcagaggaagcctgtggccctggcagacagaacgcactgctgtgatcccgygggtccagggggcggaagggggaggatgagggagtaggacaatgctgtccctatgtcacccacactccagggcatgtgtggattgcaggccgaccacgtg

SEQ ID NO: 109635 - DNA, 201 bp, Homo sapiens
gtggctaggactacaggcacacaccaccttgcccagttaatttttaaatcttgtgcaaagacaggatctcactttgttgcccaggctggtctcgaactccwggcttcaagcaattctcccaccttagcctcccagttctggggttacaggtatgagccatcatactgggcctggaaattcttctctataccttaaagctta

SEQ ID NO: 109636 - DNA, 201 bp, Homo sapiens
gggaggccgaggtgggcgcatcacctgaggtcaggagttcaagaccagcctggccaacgtggtgaaaccccgtctctaccaaaaacacaaaaattagccgrgcgtggttgtaggcacctgtaatcccagctacttgggaggttgaggcaaaagaattgcttgaacctgggaggtagaggttgcagtgagccaagatagagc

SEQ ID NO: 109637 - DNA, 201 bp, Homo sapiens
cgtctctactaaaaatataaaaagtaaggccgggcgctgtggctcactcttgtaatcccagcactttggggggctgaggcgggcatataaatataaatgtraatataaattagccggacatggtgctgcatgccccagttactccagttactcaggaggctgaggcacgagaatcgcttggacccgagaggcggaggttgc

SEQ ID NO: 109638 - DNA, 201 bp, Homo sapiens
atcagcagagatcacgccactgcactccagcctgggtgacagagtgagaccctgtctcaaaacaaaacaaaacaaaacaaaaaaacactctgtgccaagcrctgcctaccctggtgcatgggactgcaggagaggctgtctggtaaacgtgtcaagggtaatccctgccttccaggctcttccactctgcagtggagcaga

SEQ ID NO: 109639 - DNA, 201 bp, Homo sapiens
ggggctcctgggaagggtagagcggtttggcttcaccagcgcgctaactaaaggcccgcaggggagagtaaattaagcgctaattaggaggtaatggaggrggagacgcagaaggccctcttactcttggccctcagggaaaaggagttttcctctcactgcctgtagaataggaaggtggctggcaagaaaagtccaaag

SEQ ID NO: 109640 - DNA, 201 bp, Homo sapiens
tttgctggagggacaccctgtgggactattctggcaaacatgatctgtggcctatccagcagccatcggcgttgacactgaaagtccagttttttacggcrtcagcagacccattaccacatcctctcatttcccattgtcaatgatccctcaaggaaaggttagaggccaaggggatcctaagggaaacttgcctggagg

SEQ ID NO: 109641 - DNA, 201 bp, Homo sapiens
gtgtacagggacagaaggaataggatcacagaagatgttcaggttacaaaaataagtttgggttttgaaaaatgcttagcaagtattcattagacccaggsaggcctggaatgccggaaggaggctagggtcttgtcctggggcactggggagccatgggaggcttgttagcagctgaggggagaggctatctctgggaga

SEQ ID NO: 109642 - DNA, 201 bp, Homo sapiens
cagaaggaataggatcacagaagatgttcaggttacaaaaataagtttgggttttgaaaaatgcttagcaagtattcattagacccaggcaggcctggaaygccggaaggaggctagggtcttgtcctggggcactggggagccatgggaggcttgttagcagctgaggggagaggctatctctgggagagagactcagaa

SEQ ID NO: 109643 - DNA, 201 bp, Homo sapiens
cctggaggcctgggcctggggacgggaagggactgggggcctggactcctgacgctgtccctttgcccgtcgcagccctcgctgggtgtcagccagcccasgcgcgcgctcctgttcgtcattctctgcccagtgggtgcctacttccctggaggctccgtgaccccggtctccctcctggccgacccagccttcatccgg

SEQ ID NO: 109644 - DNA, 201 bp, Homo sapiens; identical to SEQ ID NO: 18023

SEQ ID NO: 109645 - DNA, 201 bp, Homo sapiens
tccctcctcagcctcccctcctcagcctcagtgcatttgctaattcgcctttcctcccctgcagccatgtggctccggagccatcgtcagctctgcctggycttcctgctagtctgtgtcctctctgtaatcttcttcctccatatccatcaagacagctttccacatggcctaggcctgtcgatcctgtgtccagaccgc

SEQ ID NO: 109646 - DNA, 201 bp, Homo sapiens; identical to SEQ ID NO: 18026

SEQ ID NO: 109647 - DNA, 201 bp, Homo sapiens; identical to SEQ ID NO: 18029

SEQ ID NO: 109648 - DNA, 201 bp, Homo sapiens; identical to SEQ ID NO: 18031

SEQ ID NO: 109649 - DNA, 201 bp, Homo sapiens; identical to SEQ ID NO: 18032

SEQ ID NO: 109650 - DNA, 201 bp, Homo sapiens
aggccttctgtgtctgagggaggagggctggggctctggactcctgggtctgagggaggaggggtggggggcctggactcctgggtctgagggaggagggkctgggcctgtactcctggatctgagggaggaggggctggggaacttgggctcctgggtctgagggaggagggagctttggtctggactcctgggtctgag

SEQ ID NO: 109651 - DNA, 201 bp, Homo sapiens; identical to SEQ ID NO: 18033

SEQ ID NO: 109652 - DNA, 201 bp, Homo sapiens; identical to SEQ ID NO: 18034

SEQ ID NO: 109653 - DNA, 201 bp, Homo sapiens
gggatgagcaagacaaggcaccccaggctgtgagggcgacatataggaggagcatggtgggtggtgaggagggtcctggaaactcaccgatccatacaggkccccatctggccgctggcacaggaacctggatgtcttgactcccaagatttgaataactcccggcttcaaggctttcagctgcaggagacctaaggggtg

SEQ ID NO: 109654 - DNA, 201 bp, Homo sapiens
ctcactttcggggctctggtcagcagcgccccccaccgtcccatcctccctgatctccaggtgggcttctgtctgctgggcatcatctgtgtagaggtacygctgccggacttggcccccgaattgcaggagaggactggagtcagggatggggtgtgcctggcaggctcccagcagaagaccagccagcacagaaaccca

SEQ ID NO: 109655 - DNA, 201 bp, Homo sapiens; identical to SEQ ID NO: 18037

SEQ ID NO: 109656 - DNA, 201 bp, Homo sapiens
ctaagggtgcaagggtaggccttctgtgtctgagggaggagggctggggctctggactcctgggtctgagggaggaggggtggggggcctggactcctggrtctgagggaggagggtctgggcctgtactcctggatctgagggaggaggggctggggaacttgggctcctgggtctgagggaggagggagctttggtctg

SEQ ID NO: 109657 - DNA, 201 bp, Homo sapiens
tagcgtaggtggtcatgaccccggcttcctctttaaaagccctcagaacctggaccgggctcctcaatgaaccctagtgttagaggccacaaatcgggaaycaaggtcggggagcggctgtttagggtgcatcactgttcaggatgcatcggggctcctttttctaagcggaagggtgcgccctgcaaattgggagcccgt

SEQ ID NO: 109658 - DNA, 201 bp, Homo sapiens
ctggagcccctaagggtgcaagggtaggccttctgtgtctgagggaggagggctggggctctggactcctgggtctgagggaggaggggtggggggcctgkactcctgggtctgagggaggagggtctgggcctgtactcctggatctgagggaggaggggctggggaacttgggctcctgggtctgagggaggagggagc

SEQ ID NO: 109659 - DNA, 201 bp, Homo sapiens; identical to SEQ ID NO: 18038

SEQ ID NO: 109660 - DNA, 201 bp, Homo sapiens
tagtgttagaggccacaaatcgggaaccaaggtcggggagcggctgtttagggtgcatcactgttcaggatgcatcggggctcctttttctaagcggaagkgtgcgccctgcaaattgggagcccgttagttttggggaagggtgaacaagggccccctaggtctagaggaccgcatggagtctcgcttaagtgttagtgg

SEQ ID NO: 109661 - DNA, 201 bp, Homo sapiens; identical to SEQ ID NO: 18039

SEQ ID NO: 109662 - DNA, 201 bp, Homo sapiens; identical to SEQ ID NO: 18040

SEQ ID NO: 109663 - DNA, 201 bp, Homo sapiens
agatgggagtcggtgtcccccagctcctctttccactatccaagagtccttgtctccagccccttacttctccaagcccagttcctcagcttccccaactrcctcctccttcagacccaagtcttttctccctcgaacccaaaagcccaaagcccagctcttcccccaaccccctcttccatcgtctttcatttagaaatc

SEQ ID NO: 109664 - DNA, 201 bp, Homo sapiens; identical to SEQ ID NO: 18041

SEQ ID NO: 109665 - DNA, 201 bp, Homo sapiens
ggatgagcaagacaaggcaccccaggctgtgagggcgacatataggaggagcatggtgggtggtgaggagggtcctggaaactcaccgatccatacagggycccatctggccgctggcacaggaacctggatgtcttgactcccaagatttgaataactcccggcttcaaggctttcagctgcaggagacctaaggggtga

SEQ ID NO: 109666 - DNA, 201 bp, Homo sapiens; identical to SEQ ID NO: 18043

SEQ ID NO: 109667 - DNA, 201 bp, Homo sapiens
tgtattttaagtagagacagggtttctccacgttggtcaggctggtctcgaactcccaacctcaggtgatccacccaccttggcctcccaaagtgctgggrttacaggtgtgagccaccgcgcctggcccatgccaagctaattttaaaatttttttgtaagagtgctctgttgcccaggctgatcttgaactcctgggct

SEQ ID NO: 109668 - DNA, 201 bp, Homo sapiens
tccaagcccacagcctacctcctccctcagacccaggagaagcccaagccaaagccccctcccaactcagacccaagagtccaggaccccagcccttcctycttcaaacccaagagtccagacccccagcccctcctccctcagacccaggggtccagacccagcccctcctccctcagacccaggggcccagatccccag

SEQ ID NO: 109669 - DNA, 201 bp, Homo sapiens; identical to SEQ ID NO: 18044

SEQ ID NO: 109670 - DNA, 201 bp, Homo sapiens; identical to SEQ ID NO: 18045

SEQ ID NO: 109671 - DNA, 201 bp, Homo sapiens; identical to SEQ ID NO: 18046

SEQ ID NO: 109672 - DNA, 201 bp, Homo sapiens
gagggccagactcctgggtctaggggatgagggaggggaggatcgggttagctgggacccaggtgaaaggggctgggggcccacattcctgagtctcagasagaaggatctggggtctcaagcacctgagtcggagggaggaggggtgctgggctcctggaaaaaccacctcttggaccatctatgcagatcacgcagaac

SEQ ID NO: 109673 - DNA, 201 bp, Homo sapiens
ctttcaatggagggccagactcctgggtctaggggatgagggaggggaggatcgggttagctgggacccaggtgaaaggggctgggggcccacattcctgrgtctcagagagaaggatctggggtctcaagcacctgagtcggagggaggaggggtgctgggctcctggaaaaaccacctcttggaccatctatgcagatc

SEQ ID NO: 109674 - DNA, 201 bp, Homo sapiens
ccagcccttcctccttcaaacccaagagtccagacccccagcccctcctccctcagacccaggggtccagacccagcccctcctccctcagacccaggggyccagatccccagcccctcctccctcagacccaggagtccagatccccagcccctcctccctcagacccaggggccaaggcccccagcccctcctccctca

SEQ ID NO: 109675 - DNA, 201 bp, Homo sapiens
tcagacccggggttccaggccccagcctctcctccctcagacccggggttccaggccccagcccctcctccctcagacccaggggtccaggcccccagccyctcctccctcagacccaggagtccaggcccccagcccctcctctaggaaacaaaacagcaaggcaggttttgttttttaccccagggctctcctgcaggg

SEQ ID NO: 109676 - DNA, 201 bp, Homo sapiens
tggggcttcggccctgggaaggtcccaccatgctcagagggtccgaggagcccacatcggggggctggggggccaggattccgggtggctccgggggtgcsgggggcaggcctggtagtggcaggaagcgagctggtcctcggggtgcagggtcccggtgtggggacttgttccctggcaggtgcagcgggaggccgtggg

SEQ ID NO: 109677 - DNA, 201 bp, Homo sapiens
taccccagggctctcctgcagggacctgcctcccagttcagacttcacagagaacattccagccctcggagccatcagtgctctctcaggccaggcggggkgtctccctagcactcaaggtcctggtcactttactggccatggcttccccgagtgtccctgtgcccagcatgagccgtgcacacaggggccgtgtgggca

SEQ ID NO: 109678 - DNA, 201 bp, Homo sapiens; identical to SEQ ID NO: 18024

SEQ ID NO: 109679 - DNA, 201 bp, Homo sapiens
gtagctggggcttcggccctgggaaggtcccaccatgctcagagggtccgaggagcccacatcggggggctggggggccaggattccgggtggctccgggrgtgcggggggcaggcctggtagtggcaggaagcgagctggtcctcggggtgcagggtcccggtgtggggacttgttccctggcaggtgcagcgggaggcc

SEQ ID NO: 109680 - DNA, 201 bp, Homo sapiens
tttattatctcaagtaagaaaaataaaaaaataaataagataaataacctaataaataaagaggagatgtcatagtaaacagcctctggcttcaggaagcrtagctggggcttcggccctgggaaggtcccaccatgctcagagggtccgaggagcccacatcggggggctggggggccaggattccgggtggctccgggg

SEQ ID NO: 109681 - DNA, 201 bp, Homo sapiens; identical to SEQ ID NO: 18028

SEQ ID NO: 109682 - DNA, 201 bp, Homo sapiens; identical to SEQ ID NO: 18027

SEQ ID NO: 109683 - DNA, 201 bp, Homo sapiens; identical to SEQ ID NO: 18030

SEQ ID NO: 109684 - DNA, 201 bp, Homo sapiens
cccacagcctacctcctccctcagacccaggagaagcccaagccaaagccccctcccaactcagacccaagagtccaggaccccagcccttcctccttcamacccaagagtccagacccccagcccctcctccctcagacccaggggtccagacccagcccctcctccctcagacccaggggcccagatccccagcccctc

SEQ ID NO: 109685 - DNA, 201 bp, Homo sapiens; identical to SEQ ID NO: 18035

SEQ ID NO: 109686 - DNA, 201 bp, Homo sapiens; identical to SEQ ID NO: 18036

SEQ ID NO: 109687 - DNA, 201 bp, Homo sapiens
taaacctttaacttcctctttccctgggactaaggagtgctgcaccccaggcgcctcccttaccccacatccctcctcagcctcccctcctcagcctcaghgcatttgctaattcgcctttcctcccctgcagccatgtggctccggagccatcgtcagctctgcctggccttcctgctagtctgtgtcctctctgtaatc

SEQ ID NO: 109688 - DNA, 201 bp, Homo sapiens; identical to SEQ ID NO: 18042

SEQ ID NO: 109689 - DNA, 201 bp, Homo sapiens
tgtaagacccaggatccaggccccagccctgcctccctcagacccaggggtccaggcccccagcgcctcctccctcagacccaggggtccagaccctagtytctcctccatccgacccaggagtccaggcccccagcgcctcctccctcagacccggggttccaggccccagcctctcctccctcagacccggggttccag

SEQ ID NO: 109690 - DNA, 201 bp, Homo sapiens
gtgaaaccttgtctctacaaaaaatagacatatgtatacatattagctgggcatggtggtgtgtgcctgtagtcctagctacttggggggttgaggcgggrggattgcttgagtccaggagtttgaggcttcagtgagccacgattacaccacacactccagcctgggtggcagggtaagaccctcccccatcccccaaaa

SEQ ID NO: 109691 - DNA, 201 bp, Homo sapiens; identical to SEQ ID NO: 18047

SEQ ID NO: 109692 - DNA, 201 bp, Homo sapiens; identical to SEQ ID NO: 18048

SEQ ID NO: 109693 - DNA, 201 bp, Homo sapiens
gtgcggggggcaggcctggtagtggcaggaagcgagctggtcctcggggtgcagggtcccggtgtggggacttgttccctggcaggtgcagcgggaggccrtgggcttcggactggtaaacattgtatccgtcctcaagaagcagctcccggaagctgcaggcctcagggtcaaagtggagctaggggacaaaaacaggat

SEQ ID NO: 109694 - DNA, 201 bp, Homo sapiens; identical to SEQ ID NO: 18049

SEQ ID NO: 109695 - DNA, 201 bp, Homo sapiens; identical to SEQ ID NO: 18050

SEQ ID NO: 109696 - DNA, 201 bp, Homo sapiens; identical to SEQ ID NO: 18051

SEQ ID NO: 109697 - DNA, 201 bp, Homo sapiens; identical to SEQ ID NO: 18053

SEQ ID NO: 109698 - DNA, 201 bp, Homo sapiens; identical to SEQ ID NO: 18052

SEQ ID NO: 109699 - DNA, 201 bp, Homo sapiens; identical to SEQ ID NO: 18054

SEQ ID NO: 109700 - DNA, 201 bp, Homo sapiens
ggaacttttcaagccaatcaaaggcaggcaggacagccaatgctagtgctgattacttcagcacgtgcatgcagggagggtcggggagccccggggatgtmtggaaatcgttaccctgaggtgggcaggcctggtagagggaggaagcagccaggagcatctgggccctggaagaaaggggggtgtttctcatggatgtcc

SEQ ID NO: 109701 - DNA, 201 bp, Homo sapiens; identical to SEQ ID NO: 18055

SEQ ID NO: 109702 - DNA, 201 bp, Homo sapiens
ctcagacctgggtgaagcagtgtccttgtcccaggggctgctgctgttgctgctgctgagcatgggcggggcatgggcatccagggagccgcttcggccayggtgccaccccatcaatgccatcctggctgtcgagaaggagggctgccccgtgtgcatcaccgtcaacaccaccatctgtgccggctactgccccaccat

SEQ ID NO: 109703 - DNA, 201 bp, Homo sapiens
gccatgtgcacctctcgcccccggggggattagtgtccaggttaccccagcatcctatcacctcctggtggccttgccgcccccacaaccccgaggtatawagccagatacacgaggcaggggatgcaccaaggatggagatgctccaggtaagactacagggcccctgggcaccttccacctccttccaggccatcactg

SEQ ID NO: 109704 - DNA, 201 bp, Homo sapiens
aggggctgctgctgttgctgctgctgagcatgggcggggcatgggcatccagggagccgcttcggccatggtgccaccccatcaatgccatcctggctgtsgagaaggagggctgccccgtgtgcatcaccgtcaacaccaccatctgtgccggctactgccccaccatggtgagctgcccggggccaggggcagatgctg

SEQ ID NO: 109705 - DNA, 201 bp, Homo sapiens
tgctgctgagcatgggcggggcatgggcatccagggagccgcttcggccatggtgccaccccatcaatgccatcctggctgtcgagaaggagggctgcccmgtgtgcatcaccgtcaacaccaccatctgtgccggctactgccccaccatggtgagctgcccggggccaggggcagatgctgccacctcagggccagacc

SEQ ID NO: 109706 - DNA, 201 bp, Homo sapiens
tcacctcctggtggccttgccgcccccacaaccccgaggtatatagccagatacacgaggcaggggatgcaccaaggatggagatgctccaggtaagactrcagggcccctgggcaccttccacctccttccaggccatcactggcatgagaaggggcagacccgtgtgagctgtggaaggaggcctctttctggaggggc

SEQ ID NO: 109707 - DNA, 201 bp, Homo sapiens
aaaacaccccagtgctgggggcgaggggatcccgggagtcccggccgcacctgggagcccatagcgtcgtagtcgcgggcgcgtgtgaaggagcggcccarcttggagatcttgcccgtcgccttgtcgatggtgatcacgtccctacagggggatggggggtagggtaaggaaaggaatgggcccaagctcgcccatccc

SEQ ID NO: 109708 - DNA, 201 bp, Homo sapiens
tctggctcggcctacgtgcccaagacccatggcgggccctgcgcccagcccagagccccagagcctgcagaccccacgcggactgtggggatcaaggattyaggagaaaaggtaaagtttggggagtgccggagtccgcaggggacagggcgggggactgcatttgagtcccctgctccttcacgtgagtctctgggtcgc

SEQ ID NO: 109709 - DNA, 201 bp, Homo sapiens
aggaggaacagaggcagagaacacaggaggggagagggcagggccacacccatcacagcaccagcaggggtggggacggagcggacttgcaggtggagaasagaggcagccacgggccggagttacaggaaacagcgtggagcaggtgggccacactcggagctcaggaacagagggagcccgagggaggctgctaggcct

SEQ ID NO: 109710 - DNA, 201 bp, Homo sapiens
gccgccgcagcaccactgactgcgggggtcccaaggaccaccccttgacctgtgatgacccccgcttccaggactcctcttcctcaaaggcccctcccccsagccttccaagtccatcccgactcccggggccctcggacaccccgatcctcccacaataaaggcttctcaatccgcactctggaggtgtctttctgtggg

SEQ ID NO: 109711 - DNA, 201 bp, Homo sapiens
gtcaacaccaccatctgtgccggctactgccccaccatggtgagctgcccggggccaggggcagatgctgccacctcagggccagacccacagaggcagcrggggaggaagggtggtctgcctctctggcctgcggttggggaatggggtgtgggaaggcaggaacagagggcttcctgggctcctgagtccaggacctgt

SEQ ID NO: 109712 - DNA, 201 bp, Homo sapiens
atcaatgccatcctggctgtcgagaaggagggctgccccgtgtgcatcaccgtcaacaccaccatctgtgccggctactgccccaccatggtgagctgccyggggccaggggcagatgctgccacctcagggccagacccacagaggcagcgggggaggaagggtggtctgcctctctggcctgcggttggggaatggggt

SEQ ID NO: 109713 - DNA, 201 bp, Homo sapiens
ctgggtgaagcagtgtccttgtcccaggggctgctgctgttgctgctgctgagcatgggcggggcatgggcatccagggagccgcttcggccatggtgccrccccatcaatgccatcctggctgtcgagaaggagggctgccccgtgtgcatcaccgtcaacaccaccatctgtgccggctactgccccaccatggtgagc

SEQ ID NO: 109714 - DNA, 201 bp, Homo sapiens
gggtcctgaataggagatgccaggaagggtctctgggtctttgtgggtggtgtaccacgcgggatgggaaggccaggactcggggctgcggtctcagaccygggtgaagcagtgtccttgtcccaggggctgctgctgttgctgctgctgagcatgggcggggcatgggcatccagggagccgcttcggccatggtgccac

SEQ ID NO: 109715 - DNA, 201 bp, Homo sapiens
gggagctcagctgaggcgctggcctcaggcacatgctcattcccccactcacacggcctccagatgcgcgtgctgcaggcggtcctgccgcccctgcctcrggtggtgtgcacctaccgtgatgtgcgcttcgagtccatccggctccctggctgcccgcgtggcgtggaccccgtggtctccttccctgtggctctcagc

SEQ ID NO: 109716 - DNA, 201 bp, Homo sapiens
cagggcccctgggcaccttccacctccttccaggccatcactggcatgagaaggggcagacccgtgtgagctgtggaaggaggcctctttctggaggggcrtgacccccagtaagcttcaggtggggcagttcctgagggtggggatctgaaatgttggggcatctcaggtcctctgggctgtggggtgggctctgaaagg

SEQ ID NO: 109717 - DNA, 201 bp, Homo sapiens
ctctgcctcacctctggcgctagaccactgaggggagagggctggggcactctgctgagccactcctgcgcctccctggccatgtgcacctctcgcccccsgggggattagtgtccaggttaccccagcatcctatcacctcctggtggccttgccgcccccacaaccccgaggtatatagccagatacacgaggcagggg

SEQ ID NO: 109718 - DNA, 201 bp, Homo sapiens
accctgcgggcgtattaaataatgagttaaatcacctgaaccacacccacttccggggacgctccgggcatcctggcttgagggtagggtgggcggaggtycctaagggagaggtggggctcgggcttaatccctccttgggggcatctgggtcaagtggcttccctggcagcacagtcacggggagaccctctctcactg

SEQ ID NO: 109719 - DNA, 201 bp, Homo sapiens; identical to SEQ ID NO: 18060

SEQ ID NO: 109720 - DNA, 201 bp, Homo sapiens
cctcctcttcctctaaagaccctccccgcagccttccaagtccatcccgactcctggagccctgacaccccgatcctcccacaataaaggcttctcaatcygcactctggcggtgtctttctgtgggctcagggcaaccacacatacacagggtgggtgcagcttcccaaccattttatacagagtcacagtgtcagaact

SEQ ID NO: 109721 - DNA, 201 bp, Homo sapiens
ccacttccggggacgctccgggcatcctggcttgagggtagggtgggcggaggtccctaagggagaggtggggctcgggcttaatccctccttgggggcayctgggtcaagtggcttccctggcagcacagtcacggggagaccctctctcactgggcagaagctaagtccgaagcagcgcccctcctgttaggttggact

SEQ ID NO: 109722 - DNA, 201 bp, Homo sapiens
ggtggggatctgaaatgttggggcatctcaggtcctctgggctgtggggtgggctctgaaaggcaggtgtccgggtggtgggtcctgaataggagatgccrggaagggtctctgggtctttgtgggtggtgtaccacgcgggatgggaaggccaggactcggggctgcggtctcagacctgggtgaagcagtgtccttgtc

SEQ ID NO: 109723 - DNA, 201 bp, Homo sapiens
ccatcctggctgtcgagaaggagggctgccccgtgtgcatcaccgtcaacaccaccatctgtgccggctactgccccaccatggtgagctgcccggggccaggggcagatgctgccacctcagggccagacccacagaggcagcgggggaggaagggtggtctgcctctctggcctgcggttggggaatggggtgtgggaa

SEQ ID NO: 109724 - DNA, 201 bp, Homo sapiens
tccttgtcccaggggctgctgctgttgctgctgctgagcatgggcggggcatgggcatccagggagccgcttcggccatggtgccaccccatcaatgccaycctggctgtcgagaaggagggctgccccgtgtgcatcaccgtcaacaccaccatctgtgccggctactgccccaccatggtgagctgcccggggccaggg

SEQ ID NO: 109725 - DNA, 201 bp, Homo sapiens
tgtaaaaactagatcaaaaaacattcgggtatgcatctggtaaataatggaaatcaactttatcttgatatcacaggacataattctaatcttgatattaygttttagttaaaagcctactttcctatgctaaaatactgtgataggctgcttctttagagcccaataaaagtaagtccttgccttttaaaatttataaat

SEQ ID NO: 109726 - DNA, 201 bp, Homo sapiens; identical to SEQ ID NO: 18076

SEQ ID NO: 109727 - DNA, 201 bp, Homo sapiens
attcaagggatttttagtagagaattaaatgactttttacctgacatttaacattatgttaacacgtaatgtaatagtgtattctttctgtttagatgttyggaaactggacatttggcactttggtcttcacagtcatggttattacagtcacagtaaaggtatggtactgaaattagaaatgtggacacattttgcaac

SEQ ID NO: 109728 - DNA, 201 bp, Homo sapiens
cccatcctcagattctggaaccactgctgccgccactactcagggaaaatatgtttcacatattccagattcaaactgaaaatataatttcaccaaagaargaaagtttgttgctattggactagtctttccatatccctgggtcagataggcttttgtgggcttttctgggaacctaactctgtttataaggttgttcat

SEQ ID NO: 109729 - DNA, 201 bp, Homo sapiens
cagcaaccattttatgatttctgttgtcttagatgattagttttgcctactcttgaattttatgtaaatgaaatacacagtgtgtcacctttgtgtctggygttgttgctcagcgtctctgtgggactcactcatctacgttgtgccaggacccatagttttctttttgctactcggtagtgtttcattgcatgaatgtac

SEQ ID NO: 109730 - DNA, 201 bp, Homo sapiens
ttgagtataaatcaagattttaaaatagtgatggccattttcctttaaagaagttattcttttccgataaaacttggcaatttcagtgtagcatcaaatayataaactctgaactcttctctcagtagaacctgggatttcaaatgaaaaattgaaacttgtcaaataatcattttaatgctttaggaaacatttactttt

SEQ ID NO: 109731 - DNA, 201 bp, Homo sapiens
aggtgggtagatcacttgagcccaggagttcaagaccagcctggagaacatggcaaaaccccatctctacaaaaaaatacaaaaacaaaaaatacaaataytagctggaatacaaaaattagctgggcgcagtggtgtgtgcctgtggtcccagctacctgggaggctaaggtaggagaatcacttgagcccaggagatgg

SEQ ID NO: 109732 - DNA, 201 bp, Homo sapiens
aaccttgtgatccgcccaccttggcctcccaaagtgctgggattacaggcttaagccatcgcacccagtcttcctatttctttatcaaatgaagaaatatrtttgaatgtagtatgtgaactataagctattaaacagatgtatgatattataagcagtggtttataaatttggatttatttattctttgtgctaatattt

SEQ ID NO: 109733 - DNA, 201 bp, Homo sapiens
tttaagtagagttcttagcctttttatgccatgaatgaccttttagtagtctagtgaaatgtgtgagctcctcaatatggagcttttatatgcataaaatraaatacatagggttacaaagaaacaaattatgttgaaatattgtcctatctttgggtcctttggtacaaggtgggagtttgcagaacccacattaagagc

SEQ ID NO: 109734 - DNA, 201 bp, Homo sapiens
atagtcttccaaccccacataatagccaacaaagtgaagttgtgaaatcgtgaactaaagtatactcactgtgtaatgtgaaattttagatgttaatagtrtgatgtgcacaatataaaaatataatattctgtattcttttttataaatctagcttatgattgatacacctaccagtccagttaccagtggacttccatt

SEQ ID NO: 109735 - DNA, 201 bp, Homo sapiens
taagcaaatgtgacattttactttttgaaggcagaaacaaccaactgttattcaggcaatcaaggttgtagcactcttgttctagatcttagaattttgcytctggtttcctaaatggtatgtggaaatgatatttttatcatgaatattaattacatttttacagattaaagaacatgatctcttctttaaagcagtcag

SEQ ID NO: 109736 - DNA, 201 bp, Homo sapiens
aaatggtttgtattcagatgtaatttgtacacagtaaaatgtatcgattttaggattatagttactcacttttgataactctctacacccatgtaaccctwacccaatccaggttaagaacccttccgtcattcctcaagggtcccttgtgccttttgcagtgaatttattcccctcttggtcctgtcccagcaaccattt

SEQ ID NO: 109737 - DNA, 201 bp, Homo sapiens
aatacacaccacactgctgcccacacatagccactctttctcctccttcagcctggaatatcttttcccccccatctcctgctattgaaatgcccccccccgctaagtcctttaagatgtattttaaatgccacctttttcatcaaatcttcatgccctcccaccagtaccactaacagcagctgggtttgagctttccct

SEQ ID NO: 109738 - DNA, 201 bp, Homo sapiens
ttgacatttcaagatgtttaccttctctgttgggatgtccatattttaataactgtccttcagttttaaagcaaaggatggccaggctcagtagctcacayctgtaatcccggcactttgagaggctgaggtgggaggaccactggaggccaggagtttgagaccagcctgggccgtatagtaagaccctgtctctactaa

SEQ ID NO: 109739 - DNA, 201 bp, Homo sapiens
cggaggttgcagtgaaccaagatcacaccactgcactccagcctccagcctgggcaacagagtgagactcggcctccagaaaaaaaaaaaaaaaaaaaaaagcagctgagttcttttttttctttagagaaaaaaggaaacatatacatacaaactatatattcacatatatatacacttagttcaaaaagtgatctgaag

SEQ ID NO: 109740 - DNA, 201 bp, Homo sapiens
ggtggaaggattgcttgagcccaggaggttgagactgcagtgagctaggatcgattgtgccactgcactccagcctggatgacagagcaagaccctgtctytaaaaataataaaaataaggtgaaaggtgatgaatgcaaagcaagatgattaccagggtcagatccagaccaaggcagtgtcttgcacatatatggatac

SEQ ID NO: 109741 - DNA, 201 bp, Homo sapiens
gcggaggttgcagtgaaccaagatcacaccactgcactccagcctccagcctgggcaacagagtgagactcggcctccagaaaaaaaaaaaaaaaaaaaaaagcagctgagttcttttttttctttagagaaaaaaggaaacatatacatacaaactatatattcacatatatatacacttagttcaaaaagtgatctgaa

SEQ ID NO: 109742 - DNA, 201 bp, Homo sapiens
ggcggaggttgcagtgaaccaagatcacaccactgcactccagcctccagcctgggcaacagagtgagactcggcctccagaaaaaaaaaaaaaaaaaaaaaagcagctgagttcttttttttctttagagaaaaaaggaaacatatacatacaaactatatattcacatatatatacacttagttcaaaaagtgatctga

SEQ ID NO: 109743 - DNA, 201 bp, Homo sapiens
ccccctaatactatcatatcacaatttgggatttaataaatatttttattaacattattatgattgttttaatattgttcactaattcccggttctatagrtgtgtcctgtaataccataattacatttcccttcttatatattttgttttcccaagagttatttgctctgttttttcatttcctcaatttccatgtgcca

SEQ ID NO: 109744 - DNA, 201 bp, Homo sapiens
aaaacgtaccagtctgatgggtgtgaaacagtgtctcattttgttctaatttgcattttcttgattgctggtgagatgcaggtatcctcaatttcattcayatgaatagattgcccgttttccattgggtagtttggcctttcctaattcttgctatagcctggatgccaattctttgttgtatatgttgtaaatatcttc

SEQ ID NO: 109745 - DNA, 201 bp, Homo sapiens
atgggtgtgaaacagtgtctcattttgttctaatttgcattttcttgattgctggtgagatgcaggtatcctcaatttcattcatatgaatagattgccckttttccattgggtagtttggcctttcctaattcttgctatagcctggatgccaattctttgttgtatatgttgtaaatatcttctagtctgttccgtgta

SEQ ID NO: 109746 - DNA, 201 bp, Homo sapiens
aaacgatctgcagtagaaaagtaagaaaactgttttcatttatttatatgtaattataactctacattttttattcgtttggtataaaatattatatatayaatatatattaagtaaacagaatgaaaaccttggggacagtgatagtttcttatatttttacatacaagtaacattttgcacagtattggacatgtagta

SEQ ID NO: 109747 - DNA, 201 bp, Homo sapiens
tgaaatgttctcccttatttgccctggattttcagcctgttgaatgttcttcttttaaagcacatgtcaaatatgactgtcttgttaaatttttttcatayactttacctttgaatacagctattaatgttttgttcttaatctcctctacttaatattaaacatcttatttctgtttctcttattgtggaagtgtcttgc

SEQ ID NO: 109748 - DNA, 201 bp, Homo sapiens
acaaagtaaagttttctttggcttttaattttttaatttaaatttaacttaaatttaagttatttaataagaattgtaatttttaagtatccctgtgggtraagttttttttttttccaggagactgttttctttgcttaagtctgtgtttattataggctgttagacagtttcttaattttcaccttgtgcttaaaaaaa

SEQ ID NO: 109749 - DNA, 201 bp, Homo sapiens
tcagatattctgcctcagaacataaatgtttaggcttttaatatatagttcatattttcggtacatttctgcctgtggaatcatctttgtacaaagtaaasttttctttggcttttaattttttaatttaaatttaacttaaatttaagttatttaataagaattgtaatttttaagtatccctgtgggtaaagttttttt

SEQ ID NO: 109750 - DNA, 201 bp, Homo sapiens
tcttcagcatttatcaggatgtgcaaagaaatgtgaaacgagatctgagtagctgtagttccactccttggcgaatattgaagaactttgtgtttaaacakagttgctgagtccagtctagccatgtatgtggataggcaatagatttaaatagtcttccaaccccacataatagccaacaaagtgaagttgtgaaatcgt

SEQ ID NO: 109751 - DNA, 201 bp, Homo sapiens
attgtgcttggattataagaatctcagcatccatatatcaatattaatagataaactggacttcaggagagcgaggacagagatttttttcttgtttaacrtaggaccatgaacacaaaggtttattttcttttgttttctatctctataggtagagtacgtgtttacagataaaactggtacactgacagaaaatgagat

SEQ ID NO: 109752 - DNA, 201 bp, Homo sapiens
aaataaagttataatgaacattctttgtggacttatgttttcacttgttttgtgaaataactaggagtagaattgcagggtcatagggtaggtttatgttygtttataagaaactatcaaaaagttttccacagtggctgtaggtactattttacactgccaccagcaactatgagagttccagttgccaacatttggtgg

SEQ ID NO: 109753 - DNA, 201 bp, Homo sapiens
tttctctttaatgacaatatacgtttttgttaatgatttttttaaaactagaattaattttaaatgagccccagattttttctgctatatacatatatccrttttcttgatatcgattatggtaatatgcccccattattctttacatagccattttgatgcagcattacctcttttgaacctgccccaggagttattgaa

SEQ ID NO: 109754 - DNA, 201 bp, Homo sapiens
tggctctgtcatgtacctaggccagcaaatttcccaaagagcttgatttataatactattttacctaataacatagcttcattgcacagaatcaagatagragttagactaagatacaatagaacctctacagaattttttcaacttctccttcaatggaaatttctctttaatgacaatatacgtttttgttaatgattt

SEQ ID NO: 109755 - DNA, 201 bp, Homo sapiens
acatcctctgttgcctgcacccagcacatggtgattcccaaccttcgtggaagtgcagccctgtatttattctccttctctatcctcaaaagatgtgttaygtaggatgttatatatgtaaaagaaggtgaattgaaataaggtgttttttttttaaaacaacagcccttgaaaaatttcggagcatctttgacaaacaaa

SEQ ID NO: 109756 - DNA, 201 bp, Homo sapiens
ttaagaaatccctaaaagacagtatggaagtattttataacaatctttctaagttgtttattttacttagagggaaggagagaggaaagggagtttagaaragtgaatatgagcttgaagaatgttttggagaaacaggccttgagtaagatataccagttacccagatttcatcactacctggctatctccattgcagtt

SEQ ID NO: 109757 - DNA, 201 bp, Homo sapiens
gaggtcaggagaccgagaccatcctggctgacacggtgaaaccccgtctctactaaaaatacaaaagcaaaaattaactaggtgtggtggcggatgcctgyagtcccagctactcgggaggctgaggcaggagaatggcataaacctgggaggcggagcttgcattgagctgagatggcaccactgcactccagcctgagc

SEQ ID NO: 109758 - DNA, 201 bp, Homo sapiens
aagtaatatcacagcattctatcatatatatataatgaagatctatagccatgtctttagaaacatcagaatttgagtaatttttttttttttttttttttccgagacggagtcttgctctgtcacccaggctggagtgtagtggcacgatcttggatcactgcaaactctgcctcctgggttcaagcaattctcctctct

SEQ ID NO: 109759 - DNA, 201 bp, Homo sapiens
aaagtaatatcacagcattctatcatatatatataatgaagatctatagccatgtctttagaaacatcagaatttgagtaatttttttttttttttttttttccgagacggagtcttgctctgtcacccaggctggagtgtagtggcacgatcttggatcactgcaaactctgcctcctgggttcaagcaattctcctctc

SEQ ID NO: 109760 - DNA, 201 bp, Homo sapiens
gacatttgttttttattatttttattttttatttttttgaggcagggtcttactctgttgcccaggctggagtgcagtggcattattgtggctcattgcarccttgacctcctggacccaagtgaccctcctgcgtcagcctcccgagtagctggaactatagacacatgctaccccatccggctaatttttctatttttg

SEQ ID NO: 109761 - DNA, 201 bp, Homo sapiens
aatcccagctactcaggaggctgaggcaggagaattgcttgaacccgggaggcagaggttgcagtgagccgaggctgaggcaggagaattgcttgaacccrggaggcagaggttgcagtgagccgaggctgaggcaggagaattgcttgaacccgggagacagaggttgcagtgagccacgatcgcgccactgcactccag

SEQ ID NO: 109762 - DNA, 201 bp, Homo sapiens
ttggttggctggagtggagactgcaccagagcattgggaagcagagcaggaaaggcagcctggggtcaggctgtaaagggccttcaaggcttcatgcggtrtggggctttatcctttgagcatgtaggagccctggagtctgggttgctacaaggggtaaatttgagattgggaaaactggagtccagggacccaaagaga

SEQ ID NO: 109763 - DNA, 201 bp, Homo sapiens
ggcataggtgattgattcttcctgaaaagtttttcctgaacttttaaagttggtggtattatttggtggtttttaattttctttttgtagattaaagtacrgtatcaaatttgtgaatgaaaattgcaacatggtaataatatagcacagtgtgccccatcagaaacttactataattaggccgggcgtggtggctcacgc

SEQ ID NO: 109764 - DNA, 201 bp, Homo sapiens
tactaaaatgcaaaaaattagctgggcgtggtggtgtgtgcctgtagtcccagctactcaggaggctgagtcatgagaattgcttgaacccaggaggcggrggttgcagtgaaccaagatcacaccactgcactccagcctccagcctgggcaacagagtgagactcggcctccagaaaaaaaaaaaaaaaaaaaaaagca

SEQ ID NO: 109765 - DNA, 201 bp, Homo sapiens
acttctccttttgaaaatgtcatgctatttctgttatctctgaaatcattttcccccttgaagttgtagttgtgtatcatttacccatcttaatatagttrgatactgaattacttatctaagtcacctcttaagttgaatgatcaaagagtagggtgcttagacttagtactgagaaattttctgctgactgctgctatt

SEQ ID NO: 109766 - DNA, 201 bp, Homo sapiens
gggcacctgtaatcccagctactcaggaggctgaagcagcagaatcacttgaacgtgggaggcaaaggttgcagtaagccaagatcatgccactggactcyagcctgggtgacagagggagactctgtctcaaaaaagaaaaaagaaaaaagaaaaaagaactctcatttttttgttagttacatgttgagatattataat

SEQ ID NO: 109767 - DNA, 201 bp, Homo sapiens
taacaaatagatcaggtgaagccctttgcacacatgctcaacatttctaaggccatgaagtccagttagagtagagaagtcttctgagaagggaagcaggmaaggtgagaaattggacataccttttcaataagaaccctaaatcttggtggcaaatgaatttaatagaagaaactgaattttattgaaagaaatttggtt

SEQ ID NO: 109768 - DNA, 201 bp, Homo sapiens
attcatttgctttgataaccgaatcctagccaatatacacattcacaccattgagacagcataggcctgtgaagcctgacaaacttgaattcagatattgkttcaacagttcatatctgtgtccttgatcacttcataagcctcagtttcctcctctataaaatcagaaaaataattgctactttacatggttgttagaga

SEQ ID NO: 109769 - DNA, 201 bp, Homo sapiens
gttgtatattcatcctacaaatagaaaaactacttcctaaacatttggtgatgtaagttaggcttcctgaccagtgcattagttttaatttcagtagttcrtgtccacaacatttctttagtattcatttgctttgataaccgaatcctagccaatatacacattcacaccattgagacagcataggcctgtgaagcctga

SEQ ID NO: 109770 - DNA, 201 bp, Homo sapiens
tttttggacttggatcaaccatctcgttacctggggatctattatattttattttgtattttccttgttttatggagggattctctggtgagtgaatataytgtattttaattggattgcttcaactataataaacatttattgtgataggttacattatgaacatattctgctcataacagatttcagactcctggtaag

SEQ ID NO: 109771 - DNA, 201 bp, Homo sapiens
tggaattttgttccaaaaaatttatttgaacagttcagaagagtggcaaacttttattttcttattatatttttggttcaggtaagctttattactcaatmttaagtttgtaaacatagtttctaaaaatatgtcttggaacaaagaaaaattacattgtgttgctaatcatttgaccatgtgaccattttttctgcagtg

SEQ ID NO: 109772 - DNA, 201 bp, Homo sapiens
caggatattgataagatgttcccatgatgaggcagttctgacccttgttctggcaggatgtcttcgtggtgttccttggacctttatccagcaagatacgrtagggctctttctttagtggtcaggtggttaggcaggatgtttctcatgtcccgaacccccgtgaaatgttgcactttgaccaaggtctgcaaaatagca

SEQ ID NO: 109773 - DNA, 201 bp, Homo sapiens
atataggaaatatttaaatttcagctacctatgtgattcaagtgaaagcctatataaacattttttataattctaaatttggaatttgagatcttagactrtttttcacaaatatcctttgcagtgcacatctaaatactgattatttcccatataggtctaataaattaaacgtctaagtttttgggcttcctggaattt

SEQ ID NO: 109774 - DNA, 201 bp, Homo sapiens
gggaacttttcctaggaaaactgatctgctctgtcccactcttgactgctagcatttctgaggcctgttcctcaggtagtgctttggacaggctgaagacrttggaggcagcacaagttgccaaataaagtttggccaatagggaagaaaaattgtctatataggtgttgatttcagatattggagagttagtagtaatga

SEQ ID NO: 109775 - DNA, 201 bp, Homo sapiens
gagcacatagtttcatcctatgaatagcaactttgaagatacattcttaaaatatgaaattgtagattttaattggttgattttgtgttaaccagacaatyaccaatctgtttattcgtgtttccttcctaatgagagaaaattccagttatattgctatattgtataataacattcctaggtcaagtcaaagagtttaga

SEQ ID NO: 109776 - DNA, 201 bp, Homo sapiens
ccctaaatcttggtggcaaatgaatttaatagaagaaactgaattttattgaaagaaatttggttttaacttagctgtaatatatgtttagttagagcttygtgcactgaaaaatcatggctttattttgtgtgcttgtgttccccttaagaagttcccattagccctcttttgtgacagtaaatgtactgttctttgaac

SEQ ID NO: 109777 - DNA, 201 bp, Homo sapiens
catgttcacaaaaaaaacttatacacgaaatgttcataagcagcattatttccaatagccacaaaaatggaaaaccccaaatgtccagctaacaagtggayaggcaaaatgtggtatatccatataatggaatatcagtcagctgttaagaggaatgaagtaccaatatatgctacaacatggacgaatcttgaaaagagt

SEQ ID NO: 109778 - DNA, 201 bp, Homo sapiens
gctaagttcctcaaaaggtaaacattgagttactatatgacacagcagttctactcctgggtggacacccaagacagctgaaaacatgttcacaaaaaaawcttatacacgaaatgttcataagcagcattatttccaatagccacaaaaatggaaaaccccaaatgtccagctaacaagtggacaggcaaaatgtggtat

SEQ ID NO: 109779 - DNA, 201 bp, Homo sapiens
tctttagagttccaaagataaatcagacttcacctcacattctaagctgtgaagatattctcacaacctattgtcttacattcaagaaaatactccttttyacttctccttttgaaaatgtcatgctatttctgttatctctgaaatcattttcccccttgaagttgtagttgtgtatcatttacccatcttaatatagtt

SEQ ID NO: 109780 - DNA, 201 bp, Homo sapiens
tagcctcaagagatccacccaccttggcctcccaaaatgcagggattacaggtgtgatccactgtgcctggcccacattacatttttaaagggttgttttwaaaagaggtaaaatatgcaacagagaccatgtatggcctgcaaagcctgaaatatttactctctggccctttacagaaaaagttactgaactctgctcta

SEQ ID NO: 109781 - DNA, 201 bp, Homo sapiens
tttatgataattttcttataaagtttgtattacagtagtcgtgtattgaacttttgttttgttgatgatccctgttttttaatagtagactagaaccttgmtcttatgttatctttacggatacttgtgaaactgagtgcagataatttatataacacttctagtaatggtgggtgagaaccaatataatatggtatcatg

SEQ ID NO: 109782 - DNA, 201 bp, Homo sapiens
gacttctttctcaagtcattattgcagtaatcagattttcatgatgatcctggttggatcaagacttgactattacatccttcttttttcatggacatacyttcttttaaagtactttttctggaattagtctccaaaagtaataaaataatttgtcttacttacttttaaaaatatgtttttttcttttaaacatcgatt

SEQ ID NO: 109783 - DNA, 201 bp, Homo sapiens
aacattggttggctggagtggagactgcaccagagcattgggaagcagagcaggaaaggcagcctggggtcaggctgtaaagggccttcaaggcttcatgsggtgtggggctttatcctttgagcatgtaggagccctggagtctgggttgctacaaggggtaaatttgagattgggaaaactggagtccagggacccaaa

SEQ ID NO: 109784 - DNA, 201 bp, Homo sapiens
tacatgtgtgggctttttttaattaacttgcatggggtctttaaattccagttcaacattgctataaatactgggcaacatttaatatcaaatagtaaagrtaaagtattctatctcttatttccagtttcaccatttatttgctttttgactttaggtaagttaagtaattttttgccaaatttaaccctacctttcttt

SEQ ID NO: 109785 - DNA, 201 bp, Homo sapiens
aaattgcaacatggtaataatatagcacagtgtgccccatcagaaacttactataattaggccgggcgtggtggctcacgcctgtaatcccagcactttgsggggttgaggcaggcagatcacgaggtcagaagttcgagaccaacctgaccaacgtggtgaaaccccgtctctactaaaaatacaaaaattagccaggcg

SEQ ID NO: 109786 - DNA, 201 bp, Homo sapiens
acgaatgatcataacccaacaaatggaagaaattgtaaggtaagaattaatttgtgttatctaattacctttaaatgggaactgtttgggggagggactaraagttccaaagggagattatgtaaataagcagcccatcatgggaaagggttaattttgttgggttttgtttgttttgttttgtttacatttagtggttta

SEQ ID NO: 109787 - DNA, 201 bp, Homo sapiens
tttttctaaagaatcctccatgactgatagtgcagtctgtattctagtaacctctgagtattatttctgtttgattgctaatgtatcttatatattttctktataactcatccctcattcttcctgatctacatgtgtgggctttttttaattaacttgcatggggtctttaaattccagttcaacattgctataaatact

SEQ ID NO: 109788 - DNA, 201 bp, Homo sapiens
aaaattgcgccatattgtttttttctgaatttttttattctcctaataaaatgtttaacttagtaattaatatcatattagactataaatgcccttccagktttctccaacatcacaggttatattattggttactattattttcttaccctttttctcatgtgaataatctagaaggtcttttcagacctgttcattctt

SEQ ID NO: 109789 - DNA, 201 bp, Homo sapiens
aaaaaattttaaaagttagctgggcatggtggtgtgcatctgtagtcccagctactcagaggctgaaatgagaggatcgcttgagcctgggaagtcaagastgcagtgagccgtgaatacaccactgcactcaagcctgggtgaccgagcaagacctgatctcaaaagaatcttatagtctggagggggagatagatacag

SEQ ID NO: 109790 - DNA, 201 bp, Homo sapiens
ggaaagactggaagaatgtgtatgacctgcctgagttcctgtcatgtgtgtctctaaaactgcttttccatgggtacatctttaccttcagagcactatamaaaagatattcctttactattactccttaatgagttgccagagagcaaaaataatgttaatgagaaggctgaactagtgactaatttttaactttgtttt

SEQ ID NO: 109791 - DNA, 201 bp, Homo sapiens
ttttagtagagacggagtttcaccatgttggccaggacagtctcgatctcctgacctcgtgatctgcctgcctcggcctcccgaagtgctgggattacagscatgagccaccgcccccagccagggggaacgttttaatatatccctttgaaataattatagaaccctcaggagttccaaaattttagtatgtggtcattg

SEQ ID NO: 109792 - DNA, 201 bp, Homo sapiens
ggctttttattaatttttttgaaccagtgttaagataatgattgttaggtttggaagggaaggtgagagttaaagaaagacacacacacagaaagagggcrgctcaacagcatgcaggctttttgtctagcataaaacctacagaagtcagggaccagcctaatgccagagcccactggctgcttacaggctagggtactt

SEQ ID NO: 109793 - DNA, 201 bp, Homo sapiens
gtttgttatgatgcatacaaatgcatttgtacagtcctgtactagctgtttctgagatcacagaataaaagtttaaaaccaagaataataacagttgaatmccgtacataacacttaatattccaatggactaagcaaaatatccctctaagttacatgggatctcacactatctgtgtatgtctgtgcttaatggaaatg

SEQ ID NO: 109794 - DNA, 201 bp, Homo sapiens
gttcagtatgacttttgattctcctcttgacaaatacattccccaaatgctctcaaataaaggaatattaattgatgtttcattgttgataatcataactrttatttactgattgcctattatataccaggtaccccattctttttgtataccccaattcttatagaaaactgcgatttatcctcattttacaaatgaaga

SEQ ID NO: 109795 - DNA, 201 bp, Homo sapiens
ttgacagatggtcttctcaatctgaggtcaggatatgagttcccaaaggccaggaattacagcatattcatatctctatttcagtaagtcaattgatactrtaatggctcaaataagtgattgtgtggaatgagtctgggcaagaccctacctaatgcactgtaagtcatctgggaacaaagctctttgcaaccaagtcag

SEQ ID NO: 109796 - DNA, 201 bp, Homo sapiens
ggccaccacgccaggctaattttgtatttttagtagagacagggtttctctatgttggtaaggctggtcacgaactcccaacctcaggtgatccgcctgcytcggcctcccaaagtgctggaattacaggtgtgagccaccgcacccagcctgtaagctcatcttcagccagatctccaaaatgcctttgccactcacatt

SEQ ID NO: 109797 - DNA, 201 bp, Homo sapiens
taagacaatacgacaaggaaaactgacctattttgattaggttttctggagagtttatagtgtaatttgggaggcagtattaataacaataaaaacaataygtaaagcataggcaaagtgctaagtgattagtaccaacagtggtacctgtgactgtttagaggagcaagatatcgttaaggacttaagccattgtgcaga

SEQ ID NO: 109798 - DNA, 201 bp, Homo sapiens
atgtttttgtagaaaggtagaattcatatctttgaccataatttcaagaatgtaaatatttatacagatactgtcacttttttcctgagcataaatgaagmctgcttctcattactttcattttactacctttcactcccctgttattctcttggtctccttccagactgcattgttttctatctcacaaagccatgatga

SEQ ID NO: 109799 - DNA, 201 bp, Homo sapiens
ttaactttttcatgagtttttcctattcttaattgctgttttatcctgtttacaacctgtaactctaaattccaaatatttgcttgggcattgattaccgrtaaaagtttgtttacctaaatgaactaaagaatatgctaagacaatacgacaaggaaaactgacctattttgattaggttttctggagagtttatagtgt

SEQ ID NO: 109800 - DNA, 201 bp, Homo sapiens
aagtagtcccagctactcaggagtctgagacatgagaatcgcttgaactcaggaggcggaggttgcagtgggccaagattgcgccactgcactccagcctrggcagacagagtgagactgtctcaaaaaaataaaataaaataaccttcttgcaaaatatttaattttatagccatgttttagttttcttaggagaaaata

SEQ ID NO: 109801 - DNA, 201 bp, Homo sapiens
gggcataggattttttatggaaggataaaatttgagagttaagctaattcctgttctggaatagtctctataatgtgctggatgggaagttatcaggtctsatattttctgtgtgcctcttagatcaactccttcctctttcagataattaattcttcattttgaaaacttaattctccttctagtttgtataccgttatt

SEQ ID NO: 109802 - DNA, 201 bp, Homo sapiens
attatttgctaaaggagctgagtcatcaattctccctaaatgtataggtggagaaatagaaaaaaccagaattcatgtagatgaatttgctttggtgagtrcaaatttctatgatttaaaaaactctaaaagatatatttatgaaatattttggactttatttcttataatttatcaaaaattgtggacattctgcagttg

SEQ ID NO: 109803 - DNA, 201 bp, Homo sapiens
ctggctaatttttgtatttttagtagagattgggtttcgccatgttagccagactggacttgaactcctaccctcaggtgatcaacccgctttggcctccygaagtgctgggatgacaggcatgagccaccactcctggcaccaaagttgtaatattaaaaggaaatatttttaaatgcattttgaactttgattttaaat

SEQ ID NO: 109804 - DNA, 201 bp, Homo sapiens
ctcatgtctgctttgtctttaagaaacttctggtgattatttctttaattactgattttctcagcctctctttttgcttttgaaactacaagtatttaatrtatgtttactgcctctattcctattttgtcttttaccaatgaaatctactttatttcatattcttctgtgctctttcatttccatattatccaaaaaaca

SEQ ID NO: 109805 - DNA, 201 bp, Homo sapiens
actattctacctcagaatatagttgatggtctatgtaggcatgaaactttctggtaattttcatcagtaatactgaagaaattctagtttattttttcttwtcaaacaattatttccttttttctagattctgagatttatttcagacttccttgcttttttggttctctacaatttcatcattccaatttcattatatgt

SEQ ID NO: 109806 - DNA, 201 bp, Homo sapiens
tatgaagtaatatgcaaattatgtcatatattttaaattgattaaacatggactaccaagagaatttaacctataattttggtaaataattgttctccaartttcactttagattaaaatctttgtattggaagacaaatttggatctcaagaaactacaaagcaaataatcacagggtcgtatttttaatatcattcaca

SEQ ID NO: 109807 - DNA, 201 bp, Homo sapiens
atatgaagtaatatgcaaattatgtcatatattttaaattgattaaacatggactaccaagagaatttaacctataattttggtaaataattgttctccaratttcactttagattaaaatctttgtattggaagacaaatttggatctcaagaaactacaaagcaaataatcacagggtcgtatttttaatatcattcac

SEQ ID NO: 109808 - DNA, 201 bp, Homo sapiens
ataccataattacatttcccttcttatatattttgttttcccaagagttatttgctctgttttttcatttcctcaatttccatgtgccacaaacaagtctstgataatatgtgcagcatctgtctatatattcaaacataccaggtaatctagaagttcctttcttcctccctgccttcctttttttttttttggtagcaa

SEQ ID NO: 109809 - DNA, 201 bp, Homo sapiens
caaagaaatagcagtaaggtattttatggtgttattgactgtgtcataaaggaaactattacttggcacgattagtgctttggtagtgacttctgattggwgagaccactgtaatcctaaaactgttggtactgaagggtgacagaaatggcattgcaaatgcagagaagccagcgtgtttgtactgatacgctttttgta

SEQ ID NO: 109810 - DNA, 201 bp, Homo sapiens
gccaccgcacccagcctattttgagcaacttcttaagaaaacatcagaagttgaaagaggtatatgtgtcccataactcagatcagtagagctttgtgacrttatttatttcctgtcactaggtgatagtactttttaaatgatttgtgattgacttttggtactaggtcttcagtgtattttgatagtgacttcttgatt

SEQ ID NO: 109811 - DNA, 201 bp, Homo sapiens
tactgttttttattagtatatggccatcatgtcaaaacaagaaaagaaaagtggacttttaacattacgattttttttgaagcactgtggataggggattwttttatttttgagttagatggcaaagcattgtttattatgcattgatatgttagctgtgctacctgtttgaaaagacattttcaaagatgaattataaat

SEQ ID NO: 109812 - DNA, 201 bp, Homo sapiens
gctgtgtattttaaaatagttacagtaataccctctatgttttaatatcttctctaatacaagtactaattttcaagcaaatgaatatagtaatacatgakttgtatgttttatattctctttttcttccttaaggtcaatgaatacatttttgataatttatctagtaattcttatatctgaagctgtcatcagcactat

SEQ ID NO: 109813 - DNA, 201 bp, Homo sapiens
tttactgtaaacatttttaatggtaacatggctatattaaataggcttgtaacctgtgtgcactggttcttttattgctaataaataaattctatttaacrgttatttcttgaaaacaaaagctgtgtattttaaaatagttacagtaataccctctatgttttaatatcttctctaatacaagtactaattttcaagcaa

SEQ ID NO: 109814 - DNA, 201 bp, Homo sapiens
tacagactggggaaaaatatttgcaaaccacaaatcttccagaggctttatgtttagaaacataaagaactctcaaactcaatagtaattcagtgatccarttagaaaatgagcaaaaggcatacttcatatttcaccacatgcataatacatatttcaccagagaaaagctgcagattacaaataagcacatgaaaagat

SEQ ID NO: 109815 - DNA, 201 bp, Homo sapiens
aatggaaatcaactttatcttgatatcacaggacataattctaatcttgatattacgttttagttaaaagcctactttcctatgctaaaatactgtgatakgctgcttctttagagcccaataaaagtaagtccttgccttttaaaatttataaattcactcttccccaaaattctttataggtgggtgatattgttcgaa

SEQ ID NO: 109816 - DNA, 201 bp, Homo sapiens
aaaaattaataagttgtagttaatcaaagttaaacactttggtgctgtgaaagaccctcttaaaaggatgaaaagacaagctacagactggggaaaaatayttgcaaaccacaaatcttccagaggctttatgtttagaaacataaagaactctcaaactcaatagtaattcagtgatccagttagaaaatgagcaaaagg

SEQ ID NO: 109817 - DNA, 201 bp, Homo sapiens
caatcatagtggctcatgcctatagtccaagataggaagctgaagcaagagaatcacttaagcccaggaggtcaaggctgcagtgagccactatactccarcctgggtgacagagcaagaccctgtttcacaaaaaagagaaagaaagaaaaattgaatattatctgttttactcatcagtgactcaattctgcttaattt

SEQ ID NO: 109818 - DNA, 201 bp, Homo sapiens
caacactaataggcccaattgatttttggcaacagcacaaaagcaatacaatagaggaagtgtaatctttttcaacaaatggtgctagaacaattggatayccatagcaaaacaaacaaacccaaacccccactgtatgtaaaaattaattcaattagagtatagatttaatgtaaaacaaacttttagaagaaaacagaa

SEQ ID NO: 109819 - DNA, 201 bp, Homo sapiens
aaagaactcaacagaattttactgctgcccattgcattggagacacagtttgttgaactaggtgaagttaacttcctactggaataaaaatagcactcttmtgaggaacataaaagaatacagactgtctacaatgtattattataaagtccagtctgcaataaaaaataagcagaatatgaagaaaatgtaattcatcca

SEQ ID NO: 109820 - DNA, 201 bp, Homo sapiens
cagtttgttgaactaggtgaagttaacttcctactggaataaaaatagcactcttctgaggaacataaaagaatacagactgtctacaatgtattattatraagtccagtctgcaataaaaaataagcagaatatgaagaaaatgtaattcatccataagataaaaagcactcaatagaaactgtctccaaaatgatccag

SEQ ID NO: 109821 - DNA, 201 bp, Homo sapiens
ctgctgagattgacagattaagcaaaagagaagtggtataagagaaaaaaactaaaaaattacgaatgtcagggatgaaagaggggatagctccatagatsctacacatatccaaggataataaggaactactgtgaacaactttttgtcactgacttttacaatttagatgaaatgggcagattctttgaaaacacaggt

SEQ ID NO: 109822 - DNA, 201 bp, Homo sapiens
tgaaggggttctgagcaggatagtgaatcaagacaatgctttgggaagattaatctggcagtaatgtgtaggatggattagaatttatgagcttgtattaraaaaagatgtttgaattatcgttgctctgctattaatgtcatctgactgtaaagaaaagtgtgcttttgacagtttcagaaaaaatattttgactttcaa

SEQ ID NO: 109823 - DNA, 201 bp, Homo sapiens
cttaaagtcagctagagaaaagaacatgtttttaagaggatcataaggaagacaatatatttactattcatgaagtggaaatggatcgtgtttagggtctkcatccttgtcttcacattgagcagactgaggaggaagaggagaggttggtcttgctgtctcaggggtggcagaggtacaagaggtagaggaggtgaatag

SEQ ID NO: 109824 - DNA, 201 bp, Homo sapiens
cttgctctgtcacccaggctggagtgcagtggcacaatcttggctcactgcagcctccacctcccaggttcaagtgatgcttgtgcctcagcctcccaggkagctgggattacaggcatgcgccactatgcctggctaatttttgtatttttagtggaaatgttgaccaggctggtctgaaactcctagcctcaagagatc

SEQ ID NO: 109825 - DNA, 201 bp, Homo sapiens
cacctgagtagctgggactgactacaggcacagggcaccacacctggctaatttttgtatttttagtagagattgggtttcgccatgttagccagactggwcttgaactcctaccctcaggtgatcaacccgctttggcctcccgaagtgctgggatgacaggcatgagccaccactcctggcaccaaagttgtaatatta

SEQ ID NO: 109826 - DNA, 201 bp, Homo sapiens
atctcacttactagactagactgtaaatatcttaggataagaaccatatcttacttgtatttatattccttacactcaagacagcagttggcccattgtargtattcacctgccaaatgttggttgaataaatgaatgagtatcagatctaattcagcatcagtttgaaaatacctgcattctctgcctcttttccaagga

SEQ ID NO: 109827 - DNA, 201 bp, Homo sapiens
tgtgagtatgtgctgctttatctctattttcagacatatattcttagatacgcagttttgcatttggttaggaagaggataaagcattagaggaaactcargtattcccagcaacactgaagtagggaccttgctccagatcctctaaagagccttatgattaccattattgtcattaaatgttttctagacctgtgctat

SEQ ID NO: 109828 - DNA, 201 bp, Homo sapiens
gagctttgtgacattatttatttcctgtcactaggtgatagtactttttaaatgatttgtgattgacttttggtactaggtcttcagtgtattttgatagygacttcttgattttctgtttgttgtttgtgttcaatttttgtctttaatttttatttgtttgttttagaaagggctaagaactctgtgtatagcatatag

SEQ ID NO: 109829 - DNA, 201 bp, Homo sapiens
ttgttaatattttatgggttttttatagcttttgtcataaagtaaaatttaatttaaattacagaacttcaagtattaaaatgcaaatataaaaaggtttwaattttgtggttaaataataaagtttcatacaagtgaaaattgacaggcaatacagtgtaatctcgaaatgaaactcaagttactagacagttttgctat

SEQ ID NO: 109830 - DNA, 201 bp, Homo sapiens
gataacagttctaaaactgaaaaaaaaatttaaataaacaactatttgaaaacattggagacaaaccagaatcgaatagaaatgggcaaggagtgtaatcytgaaagatgatagcagcaagggggaaaatttaagagtatagctttttgcctgagggcactccccagtttatgtgctgcttgggacatcaaaaagtctgaa

SEQ ID NO: 109831 - DNA, 201 bp, Homo sapiens
taatgtctagacccccgattccagcattcagggcttttcacactgtggccatagtccattgtcccaacctaacagaaagtgcttttccatatctgtctttsttaacactgctgtatttgtaatggccttccctgacacttttatctttccagattcttttcctctatcaattccaattcaagtaataaatttttcattcag

SEQ ID NO: 109832 - DNA, 201 bp, Homo sapiens
gaaattggcagctgttttccagttcatagagaaagacctgatattacttggagccacagcagtagaagacaggtaagtatcagataattaaaaaatattayttttctctcataggaatttttgtaaccaagtattctaatatgtgacataaattctctttactaacatcccatgatatatttaagatcaaagtagagaact

SEQ ID NO: 109833 - DNA, 201 bp, Homo sapiens
ttctgctgcttatggctgctagagctggccattggatacctgtttttagtgcactgcctcccttctgtgttcagctgtctgcggagaccagattctgtccrgttcagcctactaggggaatacaccttccagctgttgctccaataaatgaggggcgttctgaagtttgcaacttttaaagagatttcagaatttaaacta

SEQ ID NO: 109834 - DNA, 201 bp, Homo sapiens
ggattaataactgcagatttatccattcatacattcattcaacaaatttactgatatctgaatatatactaggtactattggaacatacactgattggatyaaaaggatgaataagtactgctcttgccttggagatggatcaaaaggatgaataagtactgctcttgtcttggagatctaaattaatacagtacactctg

SEQ ID NO: 109835 - DNA, 201 bp, Homo sapiens
ttgtgtttttgcatttctttttctgataatactaggtagtaatattaaaaggaaacatagctgcttttttgcactccttatacatttaaaccgacgatgcytagtaagtctagaatatgaaaaatgttttatatgatgtttaacaagtataagtgctatgctcttcttcacttcagaatcattcagtgcaagctggggtgt

SEQ ID NO: 109836 - DNA, 201 bp, Homo sapiens
aaaaaacagccattgatgtcataagtgatattatatgtttttgtaatgtgaattttttgatagattcatgggacgaatgatcataacccaacaaatggaaraaattgtaaggtaagaattaatttgtgttatctaattacctttaaatgggaactgtttgggggagggactagaagttccaaagggagattatgtaaataa

SEQ ID NO: 109837 - DNA, 201 bp, Homo sapiens
tgccagaaactaaaacaaaaaatttaaaaatacaagccatagaccagagaaaatgtctgcaaagcatatatcttgtaaaggacttgtacctagactatccrgtctcactactttttaacattattctagaagcctcattcagtgcaacaagttaaaggaattaaaagccataagtactagaaagcacgaagtaaaattgtc

SEQ ID NO: 109838 - DNA, 201 bp, Homo sapiens
ttgttacagtaactaacatcatgattagcctaggcagccttttttttttttttttttttttttttattttttatttttgagatggagtctcactcttgtcrcccaggctggagtgcagtggcgcaatctcggctcactgcaacctccgcctccagggttcaaaaaattctcctgccttagcctcctgagtagctgggacta

SEQ ID NO: 109839 - DNA, 201 bp, Homo sapiens
cactgcactccagcctaggcgacagagcaagactcgtctcaaaaaaaaaaaaaaaaaaaaccaaaggatggtgcaaaaaaacagccattgatgtcataagkgatattatatgtttttgtaatgtgaattttttgatagattcatgggacgaatgatcataacccaacaaatggaagaaattgtaaggtaagaattaatttg

SEQ ID NO: 109840 - DNA, 201 bp, Homo sapiens
aattaataatcaagctgaaaactaaactgctaatcttcctgaaagaaaccttttctaccagcagtctttctcatctcagttgatacagtccatccttccarttgctcaggccagaaaccttggaatcagccgtgactcctcacatctcctctcccttcgtctttcttcacctccttactcacatctcaccccaacccatca

SEQ ID NO: 109841 - DNA, 201 bp, Homo sapiens
tgctatttcggctcactgcaagctccacctcccgggttcacgccattctcctgcctcagcttcctgagtagctgggactacaggtgcccgccactatgccygcccaattttttgtatttttagtagagactgggtttcaccatgttagccaggatggtctcgatctcctgacctcatgatccgcctgccttggcctcccag

SEQ ID NO: 109842 - DNA, 201 bp, Homo sapiens
taataccataattacatttcccttcttatatattttgttttcccaagagttatttgctctgttttttcatttcctcaatttccatgtgccacaaacaagtytctgataatatgtgcagcatctgtctatatattcaaacataccaggtaatctagaagttcctttcttcctccctgccttcctttttttttttttggtagc

SEQ ID NO: 109843 - DNA, 201 bp, Homo sapiens
gcgatcttgcctagaaaaagcactaacataccttgtactttgtattttataattcagtataattgtgcagaattcatccatttatatgcaaatcatactayagtttatgtttacgttgtgttctaattctttattttccctttcaaagctgtttattaactttgctttaaaattttaaaatttcatcttctgccacacatt

SEQ ID NO: 109844 - DNA, 201 bp, Homo sapiens
tgttttttattagtatatggccatcatgtcaaaacaagaaaagaaaagtggacttttaacattacgattttttttgaagcactgtggataggggattattktatttttgagttagatggcaaagcattgtttattatgcattgatatgttagctgtgctacctgtttgaaaagacattttcaaagatgaattataaatctc

SEQ ID NO: 109845 - DNA, 201 bp, Homo sapiens
gaggcaggagaatcacttgaacataggaggcggagcttgcagtgagccaagatcgcaccactgcactccagcctgggcaacagagcaagtctccgtctgaraaaaaaaaaaaaaaagaaatctgctaaataatgttatatagtatttttaagtctacgctttccaagttgttattaggatatttattatggggctcagcac

SEQ ID NO: 109846 - DNA, 201 bp, Homo sapiens
attaattaaaagaagcacatttataggtatgggtcatttataagtcagggaatggcaatatttagaaatctgctaaatagggctgggcgcggtggctcacrcctgtaatcccagcactttgggaggccgaggctagcagatcacgaggtcaggagattgagaccatcctggctaacaggatgaaaccccaccagtagtccc

SEQ ID NO: 109847 - DNA, 201 bp, Homo sapiens
agtcctagcatgttgggaggccaaagcaggtggatcacttgagcccaggagttcaagatcagcctgggcaacatggtgaaagcccatctctgtaaaaaatmcaaaaaaaaaaaaattagctaagtgtggtggcgtgtgcctctagtcccagctacttgggaggattgcttgagcccgggaggtggagattgcagtgagccg

SEQ ID NO: 109848 - DNA, 201 bp, Homo sapiens
ctgcagattaagtttgttgttatgtttgcctccaccacctagacctaagggtgtttgcatatttttaaaatctatgttttcatttactttttggttgtccktacgagatttctgagactcacctaaagttagctagacctttattttctacagtctgattttttaactatatgagtggtttgagatatttttttaaatcaa

SEQ ID NO: 109849 - DNA, 201 bp, Homo sapiens
aaaatatgtaagtaataaataaaaaattatatataacatatataaataaaaatatatattaaaaagaatatataagaatatatataaaatatatatatatattttttttctttttttgagatggaatctcactctgtcacccaggctggagtgcagtggtgtgatctcagctcaatgcagcctctggggttcaagccattc

SEQ ID NO: 109850 - DNA, 201 bp, Homo sapiens
ttataaaaatatgtaagtaataaataaaaaattatatataacatatataaataaaaatatatattaaaaagaatatataagaatatatataaaatatatayatatattttttttctttttttgagatggaatctcactctgtcacccaggctggagtgcagtggtgtgatctcagctcaatgcagcctctggggttcaagc

SEQ ID NO: 109851 - DNA, 201 bp, Homo sapiens
cagtctaatttttcacagtaaactaggaagggcttcatttgaccatcagagctgcttgtatgtaagcatattaggtctcctgcaggtttctgttgtttgcygtcttgtgatactaatccagaaaaataaataccaagagacaaataccatagttgttaatatacattcagtgttttctatttatattttttatgcaggcat

SEQ ID NO: 109852 - DNA, 201 bp, Homo sapiens
tattcagatgcacagcaaaaacaatctcttaagaaagctaaaagatttaccttacctgatttaaatacttaatataaagctacagtaattacagtatggtwttaacaaagatgatagttcaatagaataaaatagagagttgagaagtagaccattcatgtgtgggtttgttgattttcaaccaagtaacaagtcaattca

SEQ ID NO: 109853 - DNA, 201 bp, Homo sapiens
ggtatgtaatacatacagaaatctccttctcttaagaaatccctaaaagacagtatggaagtattttataacaatctttctaagttgtttattttacttaragggaaggagagaggaaagggagtttagaagagtgaatatgagcttgaagaatgttttggagaaacaggccttgagtaagatataccagttacccagatt

SEQ ID NO: 109854 - DNA, 201 bp, Homo sapiens
tcctttcgttgttttgctgtttcaaatactgtatggtacctcattacaagtaaattcaccaattcaaaatctagtggttgaatagttcattgctttctccyctttgatacaatttgctaacttgtcttccaggacactcccctctcttggtttacctcctacctcactattccctctgtctcagtcccttttgctagtttt

SEQ ID NO: 109855 - DNA, 201 bp, Homo sapiens
aaacacagtgttgtataccttcagtgatcatcttcagtaatcctaccaattatatgtgggctgtggaatggaaacaactttttattattaaaaaattaaaygattaactaagttcatttttactcaataagtggtggtagactataaattacagcaaatttgtagaaatcaccctcagcttcttgtcatattatatatctc

SEQ ID NO: 109856 - DNA, 201 bp, Homo sapiens
tgaaaacatttattcattacctcattcatagctggagtagagatagcaagaattctaaattttttaaagcttaaggactgataagtgtttttaaaatgatwtatagcaagaatattggaccattcatatatacaaatggttgatttttgtttcatgtgtaagaatggtgcaggccgggtgcagtggctcacacctgtaatc

SEQ ID NO: 109857 - DNA, 201 bp, Homo sapiens
agtatttatataaaattatatctttcattttattatgtgcttgtaacacatatatgtgctatatattatatatatatatatacacacacatatattacatrtgaaatattgcaaacattttatatgtccaagtaggaaaatgcttagataggtatatatgtagatatttaaaatctttttaaagaattgaatgatataggt

SEQ ID NO: 109858 - DNA, 201 bp, Homo sapiens
ttctagtccttaaaagtatatatatatgtttgtgtatgtgtatatatatttatatatttttatatacattttataaaaatatgtaagtaataaataaaaaattatatataacatatataaataaaaatatatattaaaaagaatatataagaatatatataaaatatatatatatattttttttctttttttgagatggaa

SEQ ID NO: 109859 - DNA, 201 bp, Homo sapiens
gctgtttcccggaaggagaagcagcgtgtgcatctgttggaagaatgctggaacgagttataggaagatgtagtccaacccacatcagcaggtgtgaaatmtctctaagtagcctttgctgcagatgagtatcctatctggaacaggatgaacctgccgctctagatacctaataaatcagcagctggttttaccaactga

SEQ ID NO: 109860 - DNA, 201 bp, Homo sapiens
agtagatgtgacaaacattttataaaattttaatgctatacaaatgctatttttagctattacacttaaggtgggtgctgaaaatgtaaaaaaaaaaaaaacttagaataattacttatggcaaaaataactgactaaaaccgtcatttactgtaaacatttttaatggtaacatggctatattaaataggcttgtaacct

SEQ ID NO: 109861 - DNA, 201 bp, Homo sapiens
agacaatatttgcaaaacatgtatctgaccaaagacttgtatcctgagtatataatatatatgtgcatgtgtttacacacacacacacacacacacacacmcctgcctacaagtcaacaatgaaaagagaagctaattaaaaaaaatgggcaaaaggtggaaggtaaccaccttttgtcatcttttcagctgaaaattaca

SEQ ID NO: 109862 - DNA, 201 bp, Homo sapiens
ccctggaggcggaggttgtggtgagatgagatcgtgccattgcactccagcctgggcaacaagagcgaaactccatctaaaaaaacaaaacaaaacaaaamaaaaaatacttttagaagaaaacttagaaagatatctttatgacttagagtaggtaaagatttcttaggatacaacaaatataataattaaaaattgata

SEQ ID NO: 109863 - DNA, 201 bp, Homo sapiens
tttttctgagccactaatcttaaagcaggtatttgttgttacagtaactaacatcatgattagcctaggcagccttttttttttttttttttttttttttwttttttatttttgagatggagtctcactcttgtcgcccaggctggagtgcagtggcgcaatctcggctcactgcaacctccgcctccagggttcaaaaaa

SEQ ID NO: 109864 - DNA, 201 bp, Homo sapiens
ttacatgcataatcatttttctgagccactaatcttaaagcaggtatttgttgttacagtaactaacatcatgattagcctaggcagcctttttttttttwttttttttttttttattttttatttttgagatggagtctcactcttgtcgcccaggctggagtgcagtggcgcaatctcggctcactgcaacctccgcct

SEQ ID NO: 109865 - DNA, 201 bp, Homo sapiens
cagggatatgaagattggttacggcataactcagataatgaagtaaatggagctcctgtttatgttgttcgaagtggtggccttgtaaaaactagatcaaraaacattcgggtatgcatctggtaaataatggaaatcaactttatcttgatatcacaggacataattctaatcttgatattacgttttagttaaaagcct

SEQ ID NO: 109866 - DNA, 201 bp, Homo sapiens
atgtcattttgtaccttttaaagtactttcacatgttattttatcctttttaaattctaaatttgtgatttacatagttgcactgctggttcttgttttaraatcttaccgttactcagtgtatttgtgcatctaaagatcctacagcgcattttaaagatcattataaagacaggaaattgtactaaactgcgataaaca

SEQ ID NO: 109867 - DNA, 201 bp, Homo sapiens
atcaaaatttagtaatattctcgtggtaggatttctactgatttttaatcatctttttcttttccattttttaaatatttattttattttattttattttattttatttatttttgaaacagtgtctcgctctgttgcccaggctggagtgcagtgacgcgatcttagctcactgcaacccccggactcccgggttcaagc

SEQ ID NO: 109868 - DNA, 201 bp, Homo sapiens
ttgtagatcaaaatttagtaatattctcgtggtaggatttctactgatttttaatcatctttttcttttccattttttaaatatttattttattttattttattttattttatttatttttgaaacagtgtctcgctctgttgcccaggctggagtgcagtgacgcgatcttagctcactgcaacccccggactcccgggt

SEQ ID NO: 109869 - DNA, 201 bp, Homo sapiens
ggtagttaggtgacaagatggaatcattgatagctgcagaaagaaaaacctggaggaattgtagatcaaaatttagtaatattctcgtggtaggatttctrctgatttttaatcatctttttcttttccattttttaaatatttattttattttattttattttattttatttatttttgaaacagtgtctcgctctgttg

SEQ ID NO: 109870 - DNA, 201 bp, Homo sapiens
cttgagcccaggaggtagaggctgccctgagccgtgattatgtcactgcactcccacctggttgacagagtgagatcctgtctcaaaaaaaaaaaaaaaaatgtatagtccttttctgctgtttacaactttctcttatgagtttagtttttatgtattttccccctggggaaatattttcaatcagagcatgaattgaca

SEQ ID NO: 109871 - DNA, 201 bp, Homo sapiens
acagtcacagtaaaggtatggtactgaaattagaaatgtggacacattttgcaactgtttacatagttagttaactttcttcatttctttagccatagatrctttccctttttccattttcaataacgattaatttcactggttactattttaatagttaaatttttgtcaaaaaattatttttaaagtttattattttgg

SEQ ID NO: 109872 - DNA, 201 bp, Homo sapiens
ctcttaagaaatccctaaaagacagtatggaagtattttataacaatctttctaagttgtttattttacttagagggaaggagagaggaaagggagtttaraagagtgaatatgagcttgaagaatgttttggagaaacaggccttgagtaagatataccagttacccagatttcatcactacctggctatctccattgca

SEQ ID NO: 109873 - DNA, 201 bp, Homo sapiens
tttatttatatttatccttagaaattctactttaggcagagcatttgcaaacttacatgttttcatagatatttcttaataatataaaaggtgataatatyagttcttgttacctttcctatagcctctttttaaaggaatacataggaaatatttgggctaccttaaggtaggccattagacaagttaaaagtgctttta

SEQ ID NO: 109874 - DNA, 201 bp, Homo sapiens
ttggatgatggttctaaagcagaaagtaggaagaggagatgtcagaatccaggataatggatgagctttagattagtgacacagttcttttttttttttttaaattattattatactttaagttctagggtacatgtgcacagcgtgcaggtttgttacatatgtatacatgtgccatattggtgtgcttcacccattaac

SEQ ID NO: 109875 - DNA, 201 bp, Homo sapiens
tagaggatcgtttgtccttattaagtgaaaacgctagtgacctacaggtgtctttgatgccttttgaatacatcattcgctacattcaagctaattatgckgaagtctttagaataggatttatagctgaaatgaaatgatcaataataggaacatactactgtttcattccaaagcctttggtaagtgggatttgggttt

SEQ ID NO: 109876 - DNA, 201 bp, Homo sapiens
tctttcatttggatattgctttcagcccatcagtgggttcccaagatctgccaaaagagtctttttttcttttttctaatatttcttttttttttttttttgagacggagtctctccccgtgtcccaggctggagtgcagtggcgcgatttcggctcactgcaagctccgcctcccgggttcccgccattctcctgctcag

SEQ ID NO: 109877 - DNA, 201 bp, Homo sapiens
ggttgatggaaatcattttgaccataataaatgattaaaatgaaacattaaaagtagatttacataatatccagcttcttaatttatataattattttacyagacctctaatttaggatacaaggctttaaaataattttggatggttatactctagtaaattaaagcctttcatatgtttcccatattatagaaaaacat

SEQ ID NO: 109878 - DNA, 201 bp, Homo sapiens
caccctaattgtcatatgaaggaaaaataaatgaatacatttatattaaataaaatctatttcagtatgtaaacaatcatgactacactggacataataawcagatgctgaagtcattgtgaatgctctggctctaaaatatactgctaaaaatatattgttatggtgactcatagcattttcactggtgatgtgattttc

SEQ ID NO: 109879 - DNA, 201 bp, Homo sapiens
agccaccatgcccagcctatcatatttcttttttttttttttttttccttttgagagagagtctcagtctgtcgttaggctgagtgcagtggcgtgatctyagctcactgcaacctctgcctcctgggttaaagtgagtctcctgcctcagcctcccaagtagctgagactacaggcgcgtgccaacatgcccagctaatt

SEQ ID NO: 109880 - DNA, 201 bp, Homo sapiens
ctgcttatttccacactgagagtcccagaggctcagctcctgattacagaaatgattatcttatgttaagcttggctaagtattaatttaaaaaaaaaaaagactatctgtctttgcttttgtgaagtaaagggaacagttcaaaatgtagaccttcccaaagccaatagccaattagtgtcacagccaggacttgaacct

SEQ ID NO: 109881 - DNA, 201 bp, Homo sapiens
agtctcaggtgatcctcctgcattggcctcccaaagtgttgggattacaggcatgagccaccatgcccagcctatcatatttcttttttttttttttttttccttttgagagagagtctcagtctgtcgttaggctgagtgcagtggcgtgatctcagctcactgcaacctctgcctcctgggttaaagtgagtctcctgc

SEQ ID NO: 109882 - DNA, 201 bp, Homo sapiens
atcacttgagcccaggagtttgagatcaatctgggcaaacagcccagagacaaaacttcgtctctacaaataattttaaaaaaatttagccaggcctggtrggccacacctgtggtcccagctactcagcaggctgaggtaagaggattgcctgagcccaggcggcggaggatgcagtgtgctgtgatcacgccagtgcac

SEQ ID NO: 109883 - DNA, 201 bp, Homo sapiens
tattatgaataatgacagttcactgtatttctttctaaatagtgcagctgcgtcttgagaaagcaaattgtctaatctctctttttttaacttcattctgtttttttttttgagacaggatctcactttgtcacctaggctggaatgcagtggcatggttatagctcactgcagcctcgaccttccaggatcaagtgatcc

SEQ ID NO: 109884 - DNA, 201 bp, Homo sapiens
gtaagttctggagattattagaatattttttaaggaaaatttaaaactttttttttttttgaagtagatgcatccaaatggtctttgatatttttgtttctttttttttttttttttggtagggatggggtttcaccatgttgcccaggctgatctcgaactcttgggctcaagcagtccttctgcctcagcctcccaaag

SEQ ID NO: 109885 - DNA, 201 bp, Homo sapiens
gcttagtgtagatttgcctgtccctgagagttctttttaaaagcaaaccccacgaaaaaagtaaatttctcataactatgacttcgacaactattggtctmaagggctttagacaaggtgtctgtatagctaaaatttaattcagataactgaatacattttctctgcttccttctagaaaatgaaaggccacttagacct

SEQ ID NO: 109886 - DNA, 201 bp, Homo sapiens
atgttggatgaagcattctgatgtgattgtgctgtttgtttcctttaccaggggtcactcccattgatggagctccccaccgatcatacagtgagtgctaycctgtcctgctggacggtgtcatggttggctgggtggataaggatcttgctccaggcatcgcagattctcttcgtcattttaaggtgggcttgaggcttt

SEQ ID NO: 109887 - DNA, 201 bp, Homo sapiens
gttaagttgtgctgcttttggagattcagcagagattttctgtaagaattcttttttactcttctgtgcaggagttgggctgctttcttggctcctctgtrgaaggccgaatgcattctttgaaagtgaaaacaggagaaactaagtgttataggtactttgttttctttgggaaaaaaaaaaagataatggaagtgagga

SEQ ID NO: 109888 - DNA, 201 bp, Homo sapiens
atctgaactgatacagcagctgttgaccccatctggagggaatctggaatgttggatgaagcattctgatgtgattgtgctgtttgtttcctttaccaggsgtcactcccattgatggagctccccaccgatcatacagtgagtgctaccctgtcctgctggacggtgtcatggttggctgggtggataaggatcttgctc

SEQ ID NO: 109889 - DNA, 201 bp, Homo sapiens
ttaagttgtgctgcttttggagattcagcagagattttctgtaagaattcttttttactcttctgtgcaggagttgggctgctttcttggctcctctgtasaaggccgaatgcattctttgaaagtgaaaacaggagaaactaagtgttataggtactttgttttctttgggaaaaaaaaaaagataatggaagtgaggat

SEQ ID NO: 109890 - DNA, 201 bp, Homo sapiens
aaagatgtggactctgtcctggagggaaactttgaagtttgcttaaattcatagtttcggttattttacattagtgtttctcaatctgggtagattttgcrtgcaagaggacatttgctgaggtttagaaacatttttgattgccagtcttggctaaacttagtgatttggctttaattgtgtctaagaggttaagattgt

SEQ ID NO: 109891 - DNA, 201 bp, Homo sapiens
gtacacctgataaaaacatttatgacacaggaagatgtaggctcaagaaaggaatctaaacagcaaccagcagaggtggagcagtgatgccaggctcttcyactcaaacttgattctctagtttcacttgataaagtccaaacctacattaatacccttgttgggtgagctaacagcttccttcactccctggtaattccc

SEQ ID NO: 109892 - DNA, 201 bp, Homo sapiens
gcaacttgggtatgtagtgtacagtgataaacatcttgtttggttatgtgggtttttttgtgttctttttgtttgtttgttttgagatggagtgttgctakgtcgcccaggctggagtgcagtggcgcgatcttggctcactgcaagctctgcctcctaggttcacgccattctcctgcctcagcctcccgagtagctgga

SEQ ID NO: 109893 - DNA, 201 bp, Homo sapiens
ctgacgcgggcgcacgtggagtccttcaactacgctgtgcacgagggtctcggcctcgcggtgcaggtgagcgcggcgtccgccggcgcccttgccgcggsgaggccaatcccagggaggtggctgggaggtcacagtatgaccccaaatgcatgtgctccttgatcctgacaggcttggtgggtaagcgggagagcacaa

SEQ ID NO: 109894 - DNA, 201 bp, Homo sapiens
aaaaatgtctatttatctgggcatggtggtggcatggatctgtagtcccagctaactgggaggctgaggcgggagcatcagttgagcccaggaggcctcastacagtgagccatgattgtgccactgcactccagcccgggagacagagtgagaccccgtcactaaaaaagtgaaataaaaatgtctgctttgctaacagt

SEQ ID NO: 109895 - DNA, 201 bp, Homo sapiens
ggcctcattggttggggtcagtgacagatatttgacccatatacattctttggcagtttcattgaggcacctcagtctgcttatctaactaattttaactkttttcccccttcttaatactagtggcatagaagggatctcaaaatacagatatttcagtaatattcaaaatatgcaaggtagaagttataccccattgcc

SEQ ID NO: 109896 - DNA, 201 bp, Homo sapiens
tgatttttttgttgtttggttcaataggagtttcaatgcactgtgtgagggaagaacattccgctgtcaatatgaacctccactacttggaaaatggcacwgttatgttgaactttatttaccgaaaagaactgttctttcttcctttgggatttgcacttaaggtatgacttaatgaatgcattcttttgttatgaagaa

SEQ ID NO: 109897 - DNA, 201 bp, Homo sapiens
gttgaactttatttaccgaaaagaactgttctttcttcctttgggatttgcacttaaggtatgacttaatgaatgcattcttttgttatgaagaaattcaytgggggtagtatcctgtgcacattggatggattctccttgttaaaataatactgtactagttgtctactgctccaaaacaaattacgtcaaaattcaata

SEQ ID NO: 109898 - DNA, 201 bp, Homo sapiens
aaatagactagtcattaatattggaagtatagaagctattgagtagttttttgggtcatttctttttgcatctcttggcggatctttgcatttctaaataraaaacagtgttggtttgcaggaggacagtttaaaaggaggtttcccagtctaccctgatatcatcagatatataaccttttttcctgataaccttaaagc

SEQ ID NO: 109899 - DNA, 201 bp, Homo sapiens
ccatagtatatatgccatcctgcattgactaaaacattgttatgcagtgcatgcctgtatttttcaagtccagcacttctacttgtttcttttttttttctttttttttttttgagacagggtatcgctctgtcacccaggctggagtgcagtggcacgatcttggctcactgcaacctctgcctccccagttcaagcaat

SEQ ID NO: 109900 - DNA, 201 bp, Homo sapiens
ctgtacctgttttagagacaaggataatttgatatctgaactgatacagcagctgttgaccccatctggagggaatctggaatgttggatgaagcattctratgtgattgtgctgtttgtttcctttaccaggggtcactcccattgatggagctccccaccgatcatacagtgagtgctaccctgtcctgctggacggtg

SEQ ID NO: 109901 - DNA, 201 bp, Homo sapiens
agaaataatgcctgtacctgttttagagacaaggataatttgatatctgaactgatacagcagctgttgaccccatctggagggaatctggaatgttggaygaagcattctgatgtgattgtgctgtttgtttcctttaccaggggtcactcccattgatggagctccccaccgatcatacagtgagtgctaccctgtcct

SEQ ID NO: 109902 - DNA, 201 bp, Homo sapiens
agtggtccttatacccatgacaggaaaaccaagtctgtacccaggattgttcctttttaccactccttgtagactggtacggcctgtgcagaacttagcaytgggcaaagaagagctaattggaactatggaacaggtaaatacatatgtgtgatggatgagtgtatgtgcttgtttgtatagtatacaactttcagagac

SEQ ID NO: 109903 - DNA, 201 bp, Homo sapiens
gcagattccaatgtctgggtcatcttagtatcagtctctttgagtataagtcaagtttcaccatttctttgtatgcccagtaatatcggattgtattatgwacattgcgaggagtatgttttaaaccctggatcctgttagggtcctctgaagaggattggttttgtttgtttttagtgtggtgtttggccttcaattaca

SEQ ID NO: 109904 - DNA, 201 bp, Homo sapiens
gattggtttttagttttcactggtacttaacttggtgaacgtggcagttgaagtacattcttcagccttaggtgggctgctgtgatctgtcccatgcatgyatagttcaggagtccaccaaagattcggacccaatttatatgctgaatttaagggtctccctttgtggttctctcatttctgaaatgttcccccttccca

SEQ ID NO: 109905 - DNA, 201 bp, Homo sapiens
ccatgttgcccaggtaggtctcgaactcctgggctcaagtgatccacctgcttcagcctcccaaagtgctaggattacaggcctgagccaccatccctggsctatttgtgctttttttaaaaactgtattatccaaactttgtcatctttctcacatacaatgttagcaatgtttcctagccaaaatgttgagctcatacc

SEQ ID NO: 109906 - DNA, 201 bp, Homo sapiens
acaggcgtgaaccactgcgcccggccaactggaggtagccttaactgtcctttttaggtgtgtcatggtggcatcacaggcatcaatgtttgtagaacacrtaagatttggaagagtcttagagaaaaaatgccttggaaatgcaagcaatttaatagtgtgaattgcatttcaggctatacctccctttgaatttgcttt

SEQ ID NO: 109907 - DNA, 201 bp, Homo sapiens; identical to SEQ ID NO: 18104

SEQ ID NO: 109908 - DNA, 201 bp, Homo sapiens
gtggtgcacacctgtaatcccaggactttggcaggctgaggtgtgcagatcacttgaggtcaggagtttgagaccagcctggccatcatggggaaaccccrtctctattaaaaatacaaaaattagctgggtgtgatggcacacgcctgtaatcccagctactcaggaggctgagacaggagaatcacttgaacccaggag

SEQ ID NO: 109909 - DNA, 201 bp, Homo sapiens; identical to SEQ ID NO: 18105

SEQ ID NO: 109910 - DNA, 201 bp, Homo sapiens
catgcttcggggaccctacctgtggttttgttgggtaagatttgtgttgtgggagatagggatacagataatgtggagagctttgattgccagtctgattsttgaactctattcggcaaataatatgggagccattaagatttattgtttagaaagactagaggggtgggggttatttgtattgtgcctggattgttacag

SEQ ID NO: 109911 - DNA, 201 bp, Homo sapiens
caagtataatgggtgaaggagggcatcacattgaagagctatcctttctgcacctgaaaagccctctttcaggtttttggttttgatgtatgttagtagaygtttgttaaagatcgtacagattacatgggaataaatatgaagtttgtgataattgaaacacatactattttattttattgagaatagggtcttgccctg

SEQ ID NO: 109912 - DNA, 201 bp, Homo sapiens
ctgaatgcttaattttatttaattaaagttaagtaagcatgagttggggatcttggttaatagaatattaagtagtattaccaactgaattgttttaagcttttttttttttctgttttcacagccagtgcatctgtatccacttgaaatccaatactgaaaagttttatatgctttgtctcatgacgcgaaagctctttg

SEQ ID NO: 109913 - DNA, 201 bp, Homo sapiens
tgaggcagaagggtaacttgagcccaaggagtttgagaccagcctggacagcacagagagatcgctacagaaataataaaaactattagcagtggctgggygtggtggctcacgcctataatcccagcactttgagatgccaaggtgggtggatcttctgatctcaggagttcaagactagcctgggcaacattgcaaaac

SEQ ID NO: 109914 - DNA, 201 bp, Homo sapiens
ttatcctttggcaacaggctgtttgtggtttatattctgttctgtgtttttatttttaaaaaatgtttaaactaaattttagttttcgtttaagtgctgtwtcggacacttgggttgtttctaccttttggtcattgcaaataatgctgctatgaacatgagtgtacaaatatctatttaagtccttgtgcttttaattct

SEQ ID NO: 109915 - DNA, 201 bp, Homo sapiens
cccagttgatcccttcagcactcatgatgctgggtggggatggttttctcttgagtctttgagtactgaactctgagaaatggtaagagtaaatgtgtaascagttgcagttattttgtgccttggacatctgctcttccagatcttcatgaatgtcgctatctttgaggatgaagtttttgctggagttaccacacacca

SEQ ID NO: 109916 - DNA, 201 bp, Homo sapiens
ttcagtcccttgtgataattgttttggttgaagtagatgaagaaaatttggccctgcatagaaaatgatgccacaacttagctaggactataataatatastatttgaaaaagttctgtaaaacacagtaacataaataactaatacttataaagccaagggaaaaaatagttatcatattttttacttacaaaacataat

SEQ ID NO: 109917 - DNA, 201 bp, Homo sapiens
tgctgagtgtgattgccaacttcatccctttctctgatcacaaccagagtccacggaacatgtaccaatgccagatgggtaaggaagagggatgatgttayagtcacaatcaggaaagtaaacttgatactagcacactcttttattgtccttatttacatatgctgaccatttgttccaaaaatacagtttatggcaagt

SEQ ID NO: 109918 - DNA, 201 bp, Homo sapiens
tgatcaaatcagagtaattaacacattcatcacctcaaacatgtatcatttttttgtgttgtgaacattcgaaatcccctcttctagctttttgaaaatayacaataaggctgggtgtggtggctcacgcctgtaatcccagcactttggaagctgaggcaagaggattgcttgagcccaggagtttgagaccagcctagg

SEQ ID NO: 109919 - DNA, 201 bp, Homo sapiens
tctcggcctcgcggtgcaggtgagcgcggcgtccgccggcgcccttgccgcggcgaggccaatcccagggaggtggctgggaggtcacagtatgaccccaratgcatgtgctccttgatcctgacaggcttggtgggtaagcgggagagcacaacatgttaaaccggacgcggtactggccttcgtgagacttggagtcga

SEQ ID NO: 109920 - DNA, 201 bp, Homo sapiens
gtcccacctacttaggaggttaaggcaggagaatcccttgaacccaggaggttgaggctgcagtgaaaaaatatacaacaaatatagttaactgtattcarcctacattgctgcagaataccagaactcattcctccagtctagctgtaattttggaattgcaggctgctttaggcttttcacttagtgttggcagcatag

SEQ ID NO: 109921 - DNA, 201 bp, Homo sapiens
ccagggaggtggctgggaggtcacagtatgaccccaaatgcatgtgctccttgatcctgacaggcttggtgggtaagcgggagagcacaacatgttaaacmggacgcggtactggccttcgtgagacttggagtcgaggcgtcttaagagatgtattcgtgattctggagtgaaaagtgattgtgaaccgtagtttggaca

SEQ ID NO: 109922 - DNA, 201 bp, Homo sapiens
cctcccgagtagctggaactacaggcgcccgccaccacacccggctaattttttgtatttttagtagagacagggtttcaccgtgttagccaggatggtcycgatctcctgacctcgtgatgtgcctgcctcggcctcccaaagtgctgggattacagttgtgagccaccgcgcccggccaaggttacgtggtttttaacc

SEQ ID NO: 109923 - DNA, 201 bp, Homo sapiens
gctttatatcacttgaagacttacctctccaaaacgtacctcgaaagatcccgaacgtatttgtaggtacagtgtaatgttcaaggttatccttcagtttscttctcttagagctttaaagagagaaactactcgtcatttgttatgaattaagcaggtgccgaggaaggtataaatgagtcatgaaagcaagattgaatc

SEQ ID NO: 109924 - DNA, 201 bp, Homo sapiens
cactcatagcttcaggctctacttctaattctagttgtcttgctatttctaccacatctacaagtccagtagtaacatcagagatcactaatcacagatcaccataacagatataataataataatatttgaaatattgcaagaattaccaaaatgccagcacagagacacaaagggaacacttgtcgttggaaaaatggc

SEQ ID NO: 109925 - DNA, 201 bp, Homo sapiens; identical to SEQ ID NO: 18095

SEQ ID NO: 109926 - DNA, 201 bp, Homo sapiens; identical to SEQ ID NO: 18089

SEQ ID NO: 109927 - DNA, 201 bp, Homo sapiens
atttcacctctgtgttcctattctgtgtgttgtactacctttggctaggagtgaggttcatgtttacagttagtcatgtatctttgtttaacaagttgcarttcatctttttggcaggaaatggggggctattttataatcaatggcattgaaaaagtcatccgaatgttgattatgcctcggagaaattttcccattgca

SEQ ID NO: 109928 - DNA, 201 bp, Homo sapiens
agagccaggagagaaggaggggagcaaagattgaaaactacctattggatactgtgctcgctacctgggtgacaggttcaaccataccccagacctcagcrtcacccaatatacctttgtaacaaattcgcacatgtacccccctgattctaaaataaacgttgagaaggggaaaagaaagaatgcaaggtttttttaaca

SEQ ID NO: 109929 - DNA, 201 bp, Homo sapiens
agttcctaagcacaagaaggctgtgctgtgcctttaggggaaaatattaatacatgcatttaacataggctttgttcaggcatgcgttagggactcaatamtatatattaaataagctgtccttaaacagaaacccacataatgcaaggttgtgtattgatcagtggatgaaatcataggctttgttcaggcatgagttac

SEQ ID NO: 109930 - DNA, 201 bp, Homo sapiens
cacaagaaggctgtgctgtgcctttaggggaaaatattaatacatgcatttaacataggctttgttcaggcatgcgttagggactcaatactatatattarataagctgtccttaaacagaaacccacataatgcaaggttgtgtattgatcagtggatgaaatcataggctttgttcaggcatgagttacggactcaata

SEQ ID NO: 109931 - DNA, 201 bp, Homo sapiens
tgttttttgtttgtttgttttttgttttttatttttgagacggagtctcgctctgttgcccaggctggagtgcagtggcacgatcttggctcactgcaacytccaccttctgggttcaagcagttctcctgcctcagcctctcgaatagctgggactacaggcacccatcaccatgcctggctaattttcgtgtttttagt

SEQ ID NO: 109932 - DNA, 201 bp, Homo sapiens
acggactcaataatatgtattaaataagctgtccttaaacagaaacacacataatacaagattgtgtgttgatcagttgatgaaatgtgaccagaggctcrcaggaagctaaccatgtatttaccctaggagcagtggttcagtattggctaattcagtgtttatggcaactgtatagaacataactattatgaataatga

SEQ ID NO: 109933 - DNA, 201 bp, Homo sapiens
taagccactgcatctggcttttatttttaaataaaatatgaatttctaaaataataccagctttagataacattttaaaatttagaaaaggtaagttaacycacgtgaaggtggagaacctccttggtattctttcttggttccattttttcattttcattattctaagactaagtctaggaggttgcttgtaattaatat

SEQ ID NO: 109934 - DNA, 201 bp, Homo sapiens
ttcttggctatgttcccatcatggtgaaatccaagctttgcaacttacgtaaccttcccccacaagccctcattgagcaccatgaggaggcagaggtaatsacgggcgtccaggcatgagacagtagagaaggcctgggttgggagtaagaagacaagaagtgtgtcagtgttttctttctgtgctccaatttctggatag

SEQ ID NO: 109935 - DNA, 201 bp, Homo sapiens
gggtttgacacacagctcttccgcttatcagtcttgtggtttggggaagttaatctccctgagcctcagtttcctctgctgcaagtgggtataatagctaycccactcattgttatgagaattaaatgttatgataacatagagcacctactataatatgcctgtttcatagtaggcaattcgtaaatagtagctgtttat

SEQ ID NO: 109936 - DNA, 201 bp, Homo sapiens
tgcagttacaagatgaataagttctggggatctgatgtacagcctggtgatgatagtaatactgtactgcttaaaattgatgagtacattttaagtgtctyaaccacacacgcgtgcacacgtactacaaatgataactatggtgattgatgttttcatcagtttgattgtggaaatcattataatatatgtatatgtata

SEQ ID NO: 109937 - DNA, 201 bp, Homo sapiens
ccaaaacaaattacgtcaaaattcaatagcttaaaactcaataacatttctgtctcacagtttctgcgggtcgggagtttgggagtgctttggctgggcasttgtggcccagggtctcaggaggttgcatggagatgtcagacaggactgcagtcattttcaggacttccaaggtggctcactcacatggctggcaaatct

SEQ ID NO: 109938 - DNA, 201 bp, Homo sapiens
aaactcaatgttcctgactggtacccaaatgagcaagctgcggagttcctgtttaagtatgtgtgctttgtctaaactgtttttggaggggcggagggctrtcagtggttctttgtattggttgcagtttgggcgggcgagtcatttgggaatgagaatgaatcttggggtagaatcctggtccttgctagccgggggcta

SEQ ID NO: 109939 - DNA, 201 bp, Homo sapiens
caagctgcggagttcctgtttaagtatgtgtgctttgtctaaactgtttttggaggggcggagggctgtcagtggttctttgtattggttgcagtttgggmgggcgagtcatttgggaatgagaatgaatcttggggtagaatcctggtccttgctagccgggggctacctttgtttttgcggccctcctcacttgtattt

SEQ ID NO: 109940 - DNA, 201 bp, Homo sapiens
atccaatactgaaaagttttatatgctttgtctcatgacgcgaaagctctttgctttagccaaaggagagtgcatggaggacaatcctgatagtttggtgmaccaggaagtcctcacaccgggtcagctcttccttatgttcctgaaggtaaatgcatgctatgtccacccttggccagtggtaccacttgtggaatggcg

SEQ ID NO: 109941 - DNA, 201 bp, Homo sapiens
tcggttattttacattagtgtttctcaatctgggtagattttgcatgcaagaggacatttgctgaggtttagaaacatttttgattgccagtcttggctamacttagtgatttggctttaattgtgtctaagaggttaagattgttcagaaagaaaatggttgaagcaattaagatatcaatgagtttctgatttttttgt

SEQ ID NO: 109942 - DNA, 201 bp, Homo sapiens; identical to SEQ ID NO: 18091

SEQ ID NO: 109943 - DNA, 201 bp, Homo sapiens
aaaaagaaatgagtcttctgtagcaaggcgttactaaggtgacctgtgtcagcaacaagagaaaccaagggaaaattggggctttttcagagaattcattrccgagtatctgatttccttaccagctacgttaaagcttttaaacctttgagtttggagcataaaaacaatcttcagaagatacataaccatgacataaga

SEQ ID NO: 109944 - DNA, 201 bp, Homo sapiens
gctggagtgcagtggcgcgatcttggctcactgcaagctctgcctcctaggttcacgccattctcctgcctcagcctcccgagtagctggaactacaggcrcccgccaccacacccggctaattttttgtatttttagtagagacagggtttcaccgtgttagccaggatggtctcgatctcctgacctcgtgatgtgcct

SEQ ID NO: 109945 - DNA, 201 bp, Homo sapiens
tattggaagtatagaagctattgagtagttttttgggtcatttctttttgcatctcttggcggatctttgcatttctaaatagaaaacagtgttggtttgyaggaggacagtttaaaaggaggtttcccagtctaccctgatatcatcagatatataaccttttttcctgataaccttaaagctgctgtctctgtctctgc

SEQ ID NO: 109946 - DNA, 201 bp, Homo sapiens
gcccgcctctgcctcccaaagtgctgggattacaggcgtgagccaccacgcctggcctgtgacaatttcttaaaataaaacaagtttgcgacaccaattgmatcttcctttcacaaaagatttctctgtagcatgtgatgctgtttgatagcattttacccacagaggagattatttccaagttgcagtcagtcccctcaa

SEQ ID NO: 109947 - DNA, 201 bp, Homo sapiens
ttcctggaggttgagggtgggggtgaaagtcccaatcctctaatcctggcttggtctttctggtgaccagccccatcctgaagccacctagatgctgccarccaccagtcttttatttttatttttttgagtcagagtcttgtgcctcagcctcctgagtagctgagactacaggtgtgtaccaccacgcccggctaattt

SEQ ID NO: 109948 - DNA, 201 bp, Homo sapiens
gtagagatacggtttcaccatgttggcctggctggtctcaaactcctgacctgaagtgatctgcctgcctcagcctcccaaaatgctggggttacaggtgkgagccactgcacctggcccagattggattatttttattgacctattatcacagtcactttttattctgtcttctactgaatttttgcttacagtcatgtg

SEQ ID NO: 109949 - DNA, 201 bp, Homo sapiens
ttgacctattatcacagtcactttttattctgtcttctactgaatttttgcttacagtcatgtgcccttaacgacagggataccttcgaagaagtgagtcrtatgtgattttgtcgtagtgtgaacatcatagagtgaacttacacaaacctagatggcagagactactacacacctagtatatggtatagcctgttgctc

SEQ ID NO: 109950 - DNA, 201 bp, Homo sapiens
tggtgggcacctgtagtcccagctactcaggaggctgaggcaggagaatggcgtgaacctgggaggtggagcttgcagtgagccgagatcgcgccactgcmctccagcctgggcaacagagcgagactccatgtcaaaaaacaaacaaacaaacaaacaaacaaacaaacctggaatgagagaactggacttgggcatata

SEQ ID NO: 109951 - DNA, 201 bp, Homo sapiens
gtatcccagcggcctgaggacagactcttccaactacaacccccaggaactctggaatgcaggctgccagatgggtgaggaggcagcagggactgggaagmgggagtggaggagcagcaggtgggaaataagttctctagtgatggtagggttggggaatgctcaagaaaattgctaggctgagaaatgctatcagtggat

SEQ ID NO: 109952 - DNA, 201 bp, Homo sapiens; identical to SEQ ID NO: 18132

SEQ ID NO: 109953 - DNA, 201 bp, Homo sapiens
ttttgtggtaatggattatgactggaaatcccgaaatgactttattggtcagtacaccctgccttggacctgcatgcaacaaggtgagccagcccctttgrcccctggccaataccccagctctggctgccttcctaatgctgtcctcctgccccttccaggttaccgccacattcacctgctgtccaaagatggcatcag

SEQ ID NO: 109954 - DNA, 201 bp, Homo sapiens
tgcctgtgtgtcgggactggtgagcctctaaccggtaccgtctggtggtcgaaaagtcacagaaggggcactgatggggcttcaccccctcgtgcttgagycgccggtgctgctgcatgcaacggctctgtttacaggtgaagccacagtccccacactgtagatggggccggggcccacgggctggggctgcagtggggt

SEQ ID NO: 109955 - DNA, 201 bp, Homo sapiens
cagctgctgtagaagaggggaggaaacaagccagtgcaaggggagcaaaagagaaaaggagccaggctgggcttcctgatcccacagcatcgcagagctcrggaggcacagctcacagacacaggaaacacaggactgctattctgctctcctgcccacggtaaggatctggaagctctgactaccctctgctctaagctc

SEQ ID NO: 109956 - DNA, 201 bp, Homo sapiens
tccaagtttcctggattgtttaccatttcattcatttattcattcattcatgatctattaagcagaatgtatcaggcactatgccagactataggggtacatatatatatatatatatatatgttttgttttgttttgtttttgatacggagtcttgctctgtcacccaggctggagtgcagtagcacaatctcagctcac

SEQ ID NO: 109957 - DNA, 201 bp, Homo sapiens
ccaagtttcctggattgtttaccatttcattcatttattcattcattcatgatctattaagcagaatgtatcaggcactatgccagactataggggtacatatatatatatatatatatatgttttgttttgttttgtttttgatacggagtcttgctctgtcacccaggctggagtgcagtagcacaatctcagctcact

SEQ ID NO: 109958 - DNA, 201 bp, Homo sapiens
tctgtttaaatataataataaatttaaaacctgtcacccaggatataacatagagcaaacacaagcccagaggttgacactgatcccagcagtacatgcakaccgcctttattcccattcccacccccaggttgtgacgtgcccgctgttttgtccgtctatctgttgtcagattgtggcccaggctcctatttccaagcc

SEQ ID NO: 109959 - DNA, 201 bp, Homo sapiens
gaggcaggagaatctcttggacccaggagatggcagttgcagtgagccaagatttccctagtgcactccagcctgggtgacggagcgagactctgtctcaaaaaaaaaaaaaaaaaaaaaaaaagctaaaggaatatggacttgttttgttttgagacagaatctcactccatcacccaggctggaatgcagtggtgccat

SEQ ID NO: 109960 - DNA, 201 bp, Homo sapiens
tgtcctcgtaagctggcagggctggggcacagcaacccacagcgggaacagtgcagggggccctcagtggtctctgcaggagagccaggggcaggctgtgyaggctcggggtgtcggcgcagagcatgctgcttaagtgctgtctctgagctgaactgggcttcacactgggagcaggcaaaggctggggtgccttggtgg

SEQ ID NO: 109961 - DNA, 201 bp, Homo sapiens
gtggagatgggatttcaccatgttggccaggctggtctcgaaactcctgacctcatgtgatccacccaccttggccttccaaagtgttgggttacaggcaygagccatcgcgtctggccagaatatagatttctttctgcaggcaacagggaggtccctgcaggtgcctgggccatacagtgacaagatagattggtgctc

SEQ ID NO: 109962 - DNA, 201 bp, Homo sapiens
caagatcgcaccactgcactccagcctgggcgacagcgagactctgtctcaaaaaaaaaaaaaaaaagaaccttcaagctccaacattctgtgacctgtgwccagagccaatttgtcctctatatgaaccaggttaggcataatccttctcagaagcaagggagtagacaaaatgattctcttctttcttgcccctcagag

SEQ ID NO: 109963 - DNA, 201 bp, Homo sapiens
tataacagttaatataaagttcttacaattcctggcacacaggaagtgctataaaagaggctggctgggagcgatagcttacacctgtaatcccagcgctytggaggccaaggcaggaggactgcttgagcccaggagtttgagaccagtctgaaactggtctcaacaaaaaatttaaaaattttgtagagactcccgtct

SEQ ID NO: 109964 - DNA, 201 bp, Homo sapiens
gtgccctgcaggcaggattcagagatacaggagcaggccagtggaaacagacactatggaaaggagccagattaaataagggcaaaaacagccgtattacrtgcaggaaccagaatgaaaagcagtgattcacagagcactgcaactgaggacactcccttcactttgagagctactgcgggattggggtcaatgagggct

SEQ ID NO: 109965 - DNA, 201 bp, Homo sapiens
aggagaatggcgtgaacctgggaggtggagcttgcagtgagccgagatcgcgccactgcactccagcctgggcaacagagcgagactccatgtcaaaaaamaaacaaacaaacaaacaaacaaacaaacctggaatgagagaactggacttgggcatataatgctttagtataactgcttctgcctttcaaatgtatgtcc

SEQ ID NO: 109966 - DNA, 201 bp, Homo sapiens
gtttcaccatgttggtcaggctggtctcgaactcccgacctcaggtgatccacccgcctcaacctcccaaagtgctgggattacaggcatgagccactgtrcctggcatctacgtaccttttctaatacaatgacctgttgaaatgggtcctgttattaagtcagttgtataaaagaggaaaactgaggtttagaaagatt

SEQ ID NO: 109967 - DNA, 201 bp, Homo sapiens
ccatgatgtgcttatttcacattgcatgcctatatcaaaacatctaatttactgtataaatatatacacctactatgtacccagaaaaatttaaaaaaaawtttttttaattaaaaagataacatttcccattaaaagtttcattcactctcccctaaacctctcttgcaggcagcagacacgtcccagtctggaaccctg

SEQ ID NO: 109968 - DNA, 201 bp, Homo sapiens
tgagacaggagaattgcttgaacctgggaggcagaggttgcagtgagctgagattgcaccactgcactccagcctgggcgacagaccaagactctgtttcaaaaaaaaaaaaaaaaaaaaaagaaagaaagaaaaaagaaataggatcttttgttacctgtgcagaatccagtaaacatcagtccaagactctgtttcaaa

SEQ ID NO: 109969 - DNA, 201 bp, Homo sapiens
gcgcagtggctcatgcctgtaatcccagcactctgggaggctgaggcaggtggatcacgaagtcaggagatcgggtccatcctggttaacacagtgaaacmcccgtctctactaaaactacaaaaaattagccgggtgtggttgcgggtgcctgtagtcccagctactaggtaggctgaggcaggagaatggtgtgaaccc

SEQ ID NO: 109970 - DNA, 201 bp, Homo sapiens
tgaacctgggaggcagaggttgcagtgagctgagattgcaccactgcactccagcctgggcgacagaccaagactctgtttcaaaaaaaaaaaaaaaaaaraaagaaagaaagaaaaaagaaataggatcttttgttacctgtgcagaatccagtaaacatcagtccaagactctgtttcaaaaaaaaaaagcaagaaaga

SEQ ID NO: 109971 - DNA, 201 bp, Homo sapiens
aggagcaaacaagatgctgctcctaagagctgcacagaagatcccagtggcattaaccagcatgtaggtgggaagcaacctcttagaaggctcagtgatawaaactcactccaagtttcctggattgtttaccatttcattcatttattcattcattcatgatctattaagcagaatgtatcaggcactatgccagactat

SEQ ID NO: 109972 - DNA, 201 bp, Homo sapiens
gcagaggttgcagtgagctgagattgcaccactgcactccagcctgggcgacagaccaagactctgtttcaaaaaaaaaaaaaaaaaaaaaagaaagaaaraaaaaagaaataggatcttttgttacctgtgcagaatccagtaaacatcagtccaagactctgtttcaaaaaaaaaaagcaagaaagaaaagagaaatag

SEQ ID NO: 109973 - DNA, 201 bp, Homo sapiens
tatgaataagtgttggacatgttactaataattagtagttatggaggtaattacttatggttagaaactattacttcttcaggccaggtgtggtggctcaygcctgtaatcccagcactctgggaggccgaggcgggtggatcacctgaggttgggagtttgagactaacctgaccaacatggagaaaccccgtctctatt

SEQ ID NO: 109974 - DNA, 201 bp, Homo sapiens
aataagagcaaaagtctgtctccaaaaaaaaaaaaaaaaaaaaagcacataacatttttcaggtagagataccctttaaaaaaaagaaactcacaatatayttctattcaaatgtaggttctttgcttacacaaaagcatagagctttatgttttatgagatttgtctgtttcagcacgacctggtcaagaatgttttttt

SEQ ID NO: 109975 - DNA, 201 bp, Homo sapiens
acagtgagtgccctgcaggcaggattcagagatacaggagcaggccagtggaaacagacactatggaaaggagccagattaaataagggcaaaaacagccrtattacatgcaggaaccagaatgaaaagcagtgattcacagagcactgcaactgaggacactcccttcactttgagagctactgcgggattggggtcaat

SEQ ID NO: 109976 - DNA, 201 bp, Homo sapiens
cacagacacaggaaacacaggactgctattctgctctcctgcccacggtaaggatctggaagctctgactaccctctgctctaagctctgtcttccctgartccctacctctgccctctagatgcttatccaccctgattaaattgtaccctagactcctttcctcatcccaacagctctacagggctcccacctcctggt

SEQ ID NO: 109977 - DNA, 201 bp, Homo sapiens
aagaactcaatgttgtagtcccagcaatcaatgttgtgggtgcccaatggatgctgatgattaacgggacctctaaccaactagctacctgacagtaatgratactcaaatatggaagggtttccccatgggaaattataaccctcttttggtcacagagtactcatggaattcgacaattcatttaaacacaacggcttg

SEQ ID NO: 109978 - DNA, 201 bp, Homo sapiens
gcacatctcagaccataccctcttcctatacaggaggtggggcaggctttcagccctcaggtccagtgtggggagcggcaggagcaggagggctgggatcytccagctgcacatcatgcaggtgcactgtgggggtggtggggtctttgcccacaccctggtttgggtcggcttggtcagggtggtgcctgcgtacgtgct

SEQ ID NO: 109979 - DNA, 201 bp, Homo sapiens
tgtaagcacaatcggtgcacttgtagagacgagtgcccccatgccctttcacatggtgatctagtaccagctgatggcggcatgtgaagtcacaaaagggscagtgtagcgggggctggccagcatccccatccccatctgaggctgccacggctgctgaagtctcctcatgctgttccaggtagtgctttaccaggccca

SEQ ID NO: 109980 - DNA, 201 bp, Homo sapiens
tatgactcaacccctgaaccactacttcatctgctcttctcataacacctacctagtgggggaccagctttgcggccagagcagcgtcgagggatatatayggtgcagtggtggtagagaaggggtccaactcatgagagggaccatgtagaaaagtgaggggagctgtcagtgtctaacagattgggacagtgttgtggg

SEQ ID NO: 109981 - DNA, 201 bp, Homo sapiens
tacaaagaatcctggctcttcacttaaaagctccagtgacctgggcaaattacttgcttactctgagcctttttccttacctgtaaaatgctgattgccayctagattaaatgagaacacaagaaaagcaacccagtcaagaaaactgtcataatgtcttcttatttctttctgtccaccaactcaggttttaatccatac

SEQ ID NO: 109982 - DNA, 201 bp, Homo sapiens
taggggcaggaaagctggtctggatggacagagtagagaggcacagtgaaactttctggagccagcttcagatgctggagagaagggtgaagagtaggcakggtccttgggactagggaagtgggagattccaccccacttccatctccctctctatacccttttacaggcaatgagtttgtgcagcacaatacttggcag

SEQ ID NO: 109983 - DNA, 201 bp, Homo sapiens
tcccattctccatgatgtgcttatttcacattgcatgcctatatcaaaacatctaatttactgtataaatatatacacctactatgtacccagaaaaattwaaaaaaaaatttttttaattaaaaagataacatttcccattaaaagtttcattcactctcccctaaacctctcttgcaggcagcagacacgtcccagtct

SEQ ID NO: 109984 - DNA, 201 bp, Homo sapiens
gaaggagagagactgcacctctgagcttgctctggaactcattgaccgctatgaaccttcagacagtggtaagagaaatcaggtggagaggcaccagacayaggggttggagagagggacatgattacaaggtccagagacaagcagccatctgcctgagagaaggttgagtctatccctatcctgacccctgcccaatca

SEQ ID NO: 109985 - DNA, 201 bp, Homo sapiens
ggatcacgaggtcaggagattgagaccatcctggctaacatggtgaaaccccgtctctactgaaaatacaaaaaattagccgggcgaggtgggtggcgggygcctgtagtcccagctactcgggaggctgaggcaggagaatagcgtgaaccccggggggcggagcctgcagtgagccaagatcgcaccactgcactccag

SEQ ID NO: 109986 - DNA, 201 bp, Homo sapiens
gcactttgggaagcccaggcaggaggattgcttgaggccaggagtttaaaactagggctacacagggagaccccatctccatacaaaacaaataataattwaaaaaaaattttttttatagtgaactgggaagaaaggaaaaggaccaggtcaggcatgggatagggaaaggaaagaaaatgagatgaaagaggctgggca

SEQ ID NO: 109987 - DNA, 201 bp, Homo sapiens
gaagcccaggcaggaggattgcttgaggccaggagtttaaaactagggctacacagggagaccccatctccatacaaaacaaataataatttaaaaaaaawtttttttatagtgaactgggaagaaaggaaaaggaccaggtcaggcatgggatagggaaaggaaagaaaatgagatgaaagaggctgggcatggtggctc

SEQ ID NO: 109988 - DNA, 201 bp, Homo sapiens
gttggtcaggctggtctcaaactcctgacctcgtgatctgcccacctcggcctcctaaagttctgggattacaggcgtgagccaccgtgcccggccctgatttttttttttttaagagacagagtcttgctatgttgccctggctggtctgaaacttctgtactcaagcaatcctcctacctcggcctcccaaagtgctgg

SEQ ID NO: 109989 - DNA, 201 bp, Homo sapiens
caaagatattactctgggactctcacatccttccaggtgtgacttacatgaccatttgcataccttgacatatctgtctggattcatgtacattttgaccmaaggttattgttcctttgttttaaatgagagggagggaggataatgcctctctgtttaaatataataataaatttaaaacctgtcacccaggatataaca

SEQ ID NO: 109990 - DNA, 201 bp, Homo sapiens
tgaagtatgggtagagatcagcgtgagcttgcagcagtgtccccatggatggagaaggctctatgcagatgtagcttgaaggggtctggatgggtaagtgytggtgagcactgttctctccagagtggggagagtccctaggtagaagatcagatattgacctctcctatttctcggtggggatggggttctttcagggcc

SEQ ID NO: 109991 - DNA, 201 bp, Homo sapiens
acatggcatcaatatatattatatactgccatatgtaggtatgttgcagtggctttccaacttctttgggccacatctttttttttaaaatgaaatcttasgcaaaatagataaacgcagaaccatcctagttgaagcacccatttggctctctcctgggtgccctagtgactcctgagacatttttgtacttcttggtct

SEQ ID NO: 109992 - DNA, 201 bp, Homo sapiens
ttcactatgttggccaggctggtcttgaacttctgacttcatggtccgcccgccttggcctcccaaagtgctgggattacaggcttgagccaccgcgcccrgccttttgtatttttttagtagagacagggtttcactgtgttagccaggatggtctcaatctcctgacctcgtgatccacccacctcggcctcccaaagt

SEQ ID NO: 109993 - DNA, 201 bp, Homo sapiens
ggaagagtcagaattggcgctggagtcccagtttgagactgagcctgagccccaggagcagaaccttcagaataaggacaaaaagaaggtaagccaggagkggtctttctgctgtggtatttagtcaacttatgcaagctgaaggcctgttcatgaagactagagccgtgcaagatgcagggccaaggagcaatgaccctt

SEQ ID NO: 109994 - DNA, 201 bp, Homo sapiens
tcaaaaaaataaaagtaaatataaataaataagtaaaaccagaacaccagatgcatcatgaggcaatgtgtgatggattgctatggaaggactgtgagtcrggtgggctgaagtatgggtagagatcagcgtgagcttgcagcagtgtccccatggatggagaaggctctatgcagatgtagcttgaaggggtctggatgg

SEQ ID NO: 109995 - DNA, 201 bp, Homo sapiens
agggtttcactgtgttagccaggatggtctcaatctcctgacctcgtgatccacccacctcggcctcccaaagtgctgggattacaggtgtgagccaccgygcccagcctttttcctctttttattgagacagagtctcgctgtgtcgcccaggctggagtgcatggcacaatcttggctcactgccaacctctgccaccc

SEQ ID NO: 109996 - DNA, 201 bp, Homo sapiens
aggattccacctggaaatgagaaggctagggtgtgaagagattctagtttctgaaagggacatccagcaagatgttagttcctaataatgagagggtgggragtgagcaaaatgtggcactagtagactgtgggttattgggtaggaagggggtgctgggcggaatctttggtttacccttctctgaagatagccatggga

SEQ ID NO: 109997 - DNA, 201 bp, Homo sapiens
ttctgtctgggttgttgtgaagagataattcatatgtcaatagctaataagcagttctgattttattgtgactaatcatggattagattgaatagtcaagrtatctttctattaccagcaactgaactagtagcttcaagggatacaaagatgagtggaacatatagtttccaccttaggaagtctagctgaggaattaag

SEQ ID NO: 109998 - DNA, 201 bp, Homo sapiens
agaatcagtgtggccacatatcaaattttctagtccttttcaagggaagtttgttgtcagctactaggacaacttaaccaggtcctatatttcacagcatrtatcttttcttcttcttcttctttttttttttttgagatggagtcttgctctcgctctgttgcccaggctggagtgcaatggcgtaatctcggcccactg

SEQ ID NO: 109999 - DNA, 201 bp, Homo sapiens
agactctgtttcaaacaaaaaaaaaagaaagaaaaaagaaataggatcttttgttacctgtgcagaatccagtaaacatcagttacatttgtttcgacccmgacccctcttggtgtttccttcccttgaacttgacaatcagatactttatctggctacagagagtagtatcagtcaaaaaacctgggctcaggtctccac

SEQ ID NO: 110000 - DNA, 201 bp, Homo sapiens; identical to SEQ ID NO: 18135

SEQ ID NO: 110001 - DNA, 201 bp, Homo sapiens
aaaaatataaaaattagccaggcatggtggtgcacgcttgtaattccagctacttaaggaggctgaggcataagaatcgcttgaactcgggaggtggaggstgtagtaagccgagatcacaccactgcactccagcctgggtgacatggtgagactctgtctcaaaaaaaaaaaaaaagaaaagaaaagaaaaaaaagaat

SEQ ID NO: 110002 - DNA, 201 bp, Homo sapiens
acaggaggtggggcaggctttcagccctcaggtccagtgtggggagcggcaggagcaggagggctgggatcctccagctgcacatcatgcaggtgcactgkgggggtggtggggtctttgcccacaccctggtttgggtcggcttggtcagggtggtgcctgcgtacgtgcttgaccacctggaacttttgcttggccttg

SEQ ID NO: 110003 - DNA, 201 bp, Homo sapiens
aaattttctagtccttttcaagggaagtttgttgtcagctactaggacaacttaaccaggtcctatatttcacagcatatatcttttcttcttcttcttctttttttttttttgagatggagtcttgctctcgctctgttgcccaggctggagtgcaatggcgtaatctcggcccactgcaacctctgcctcccaggttca

SEQ ID NO: 110004 - DNA, 201 bp, Homo sapiens
ctaatttactgtataaatatatacacctactatgtacccagaaaaatttaaaaaaaaatttttttaattaaaaagataacatttcccattaaaagtttcaytcactctcccctaaacctctcttgcaggcagcagacacgtcccagtctggaaccctggaaggagaagaattcgtacagttctataaggcattgactaaac

SEQ ID NO: 110005 - DNA, 201 bp, Homo sapiens
tctctggttccctcgtagacatctggaaagaggaagccctcaaacctggaatgggggccaggcgtggtggctcacgcctgtaatcccagcactttgggagkcctaggcgggtggatcacgaggtcaggagattgagaccatctggctaacacagtgaaaccccatccctactaaaaaaatacagaaaattagccgggcatg

SEQ ID NO: 110006 - DNA, 201 bp, Homo sapiens
aagctaagatacttcagacttcagaatgacggcatgacagtctggcatgcacggcaggccaggggcagtgccaagcccagctgtgagtgacctggatagtsgggggtggatacatgggtggatagaggcctgaggagcccggcaggggagggaccaaagtcctacgatagtgtgtgtttgtgctgtcctaattgtggctat

SEQ ID NO: 110007 - DNA, 201 bp, Homo sapiens
acccagcctgcctccccatctatcaggatatgactcaacccctgaaccactacttcatctgctcttctcataacacctacctagtgggggaccagctttgyggccagagcagcgtcgagggatatatacggtgcagtggtggtagagaaggggtccaactcatgagagggaccatgtagaaaagtgaggggagctgtcagt

SEQ ID NO: 110008 - DNA, 201 bp, Homo sapiens
cctctcttgagaatgaggataagagatgggatgaatgagagctggacaagtgatcaaggtattctgggtctaaactcttactccctttcattcattcattyattcactacttcaatgaatgcttattgagttcctataatgtgtcaggacctatgctaggcaccagacatacattagtgcctagatcagacaaggacactg

SEQ ID NO: 110009 - DNA, 201 bp, Homo sapiens
tggtgaataatgctgggacagtatatccagccgatcttctcagcaccaaggatgaagagattaccaagacatttgaggtcaacatcctaggacatttttgrgtgagtgtgagtcagaaacatttctgatttgtgcaccttctcttaagatacatgaaacttataacggagttcacatacttctggacaggaaactggccag

SEQ ID NO: 110010 - DNA, 201 bp, Homo sapiens
ggttcaagcaattctcatgcctcagacccccaagtaactgggattataggtgtgtgctgccacactacacccagctaatttttgtattttttgatagagasaggtttccccatgttggccaggctggactcgaactcctgacctcaagttatcctcctgtctcggcctcccaaagtgctgggattacagtcatgagccacc

SEQ ID NO: 110011 - DNA, 201 bp, Homo sapiens
ctttatgacagtgttcccttggcctccacgatttgagctcaacagtctgtcttgcctgaactctgagagacctcatacaatagaagaaagactctcatctytggattatattggtcccaaaactttgagtttgaataatacacccagtgaaagtgttctttcaatttcaaaaggtgaagaaagaagtgggtgatgtaacaa

SEQ ID NO: 110012 - DNA, 201 bp, Homo sapiens
tgagccaccacacctgacccaggaggccaatttttaaaaggttaactaatcttcatgtccaaaatgaatgttaattgttcattttggacatgaatgttaattttttttttttttttttttgagacagagtctcactctgttgcccaggctggagtccagtggcactatctccactcactgcaacttcctcctcccaggttc

SEQ ID NO: 110013 - DNA, 201 bp, Homo sapiens
ttttgagacagagtctcactctgttgcccaggctggagtccagtggcactatctccactcactgcaacttcctcctcccaggttcaagcaattatcctgcytcagcctcccaagtagctgggattacaggcccacaccatcaggcctggctaatttttgtatttttagtagagacggggtttcaccatgttggccaggctg

SEQ ID NO: 110014 - DNA, 201 bp, Homo sapiens
gggtatgtggtatgataaattgatatgaaaactaatgagaaatgtttaggcaggccaactaatagaagaaaatgaaaaaggaaaaataatttttcttattmttattattatcttgaaattaaaggaataaagggggaaaacacattagggactagcaggaatgatcagccaccgatgaactgggatatttatttgtgtccg

SEQ ID NO: 110015 - DNA, 201 bp, Homo sapiens
aatgggtatgtggtatgataaattgatatgaaaactaatgagaaatgtttaggcaggccaactaatagaagaaaatgaaaaaggaaaaataatttttcttmttattattattatcttgaaattaaaggaataaagggggaaaacacattagggactagcaggaatgatcagccaccgatgaactgggatatttatttgtgt

SEQ ID NO: 110016 - DNA, 201 bp, Homo sapiens
agccactgcacctggcccctagaattgtttctagaggtgaaacttcaaggtgaaatatagtacataactgcttttcagataaacaagtccagagagcacaytctcttgtgctcttggcatcacttggcatcacttcatatttgaggtgtttcaaacccattagaacacgtgaacaaggcctgcttccaaagctggcttcca

SEQ ID NO: 110017 - DNA, 201 bp, Homo sapiens
tttcccattgtttgttgtcagtatatattggatttttgtaatttgatctcatattttgcagtcttgctaaattgctaaacctctttttgctaaactcgatmagcttttttttttttggtagattcctgggcctctaattttctttatgggaaagtttttaattacaaatttaatttctttaatagctacatggctattcaa

SEQ ID NO: 110018 - DNA, 201 bp, Homo sapiens
atgcttttgcatggactatcctcttgtttttattaaaaacaaatgatttttttaaaagtcactaacaaaaacaattcactaaaaataaatatgtcattgtrctttaaaaaaataacctcttgtagttataaaataaaacgtttgacttctaaactctgtctctatgagtgtccttcaagaaccaaggatgtggatggtaac

SEQ ID NO: 110019 - DNA, 201 bp, Homo sapiens
tgaatctcaaatacgaaattcttaccggaaaggggttccaatccagaccccaagagagggttcttagatttctcgcaagaaataattcggggcaaggccayagtgcaaagcaaaagcaagtttattaggaaagtaaaggagtagagaacagctactccatggagaagaatggcttgagctgctccaccaagggtatttaga

SEQ ID NO: 110020 - DNA, 201 bp, Homo sapiens
tctgacaaaatgacgacctcaaaacaatccagctttatggaatacctccacaagaaagaaagtatacttagctatagaattttctccttgcatccaacagrctttgagatgtcagatgtttccttcctgtcccatgattaatcctagccattcctctttcttgtctggctccactactccttaccatctaatgcctcgcca

SEQ ID NO: 110021 - DNA, 201 bp, Homo sapiens
agggtttcactatgttggccagactggtctcgaactcctggcctccagtgatcagcccgcctcagcctcccaaagtgctgagattatgggcgtgagtcacygcacccagccctggattttttgactttctgtttctcaacacctctttccttctgatggctctttactaattagttcagacttcgttcaattaatttgatg

SEQ ID NO: 110022 - DNA, 201 bp, Homo sapiens
tttttttttgcgcgctttttttttatttttagtagagacggggtttcaccctgttagccaggatggtctcgatctcctgacctggtgatccgcccgcctcrgcctcccaaagtgctgggattacaggcgtgagccaccaagcccagcctatttatttatttagtagagacagtctcactttgctgcccaggcaacaaaggt

SEQ ID NO: 110023 - DNA, 201 bp, Homo sapiens
cctaggactacacaaggactgaaccagaaggaagaggacagagcaaagccatgaacatcatcctagaaatccttctgcttctgatcaccatcatctactcytacttggagtcgttggtgaagtttttcattcctcagaggagaaaatctgtggctggggagattgttctcattactggagctgggcatggaataggcaggc

SEQ ID NO: 110024 - DNA, 201 bp, Homo sapiens
aatgaagtccactatgaagttatgtcaaaaaaaaaaaagaaaaagaaagatgcacacgtaaaagagaggtggttgcaagagaagaaaagaacggaggaaarttaaacgcaaaccagataactctcagcgtattctaaatgaccaaaaacagaactctgttgtcaaagattttaaatggaaaatttttcaattgttttttct

SEQ ID NO: 110025 - DNA, 201 bp, Homo sapiens
ggaggaaaattaaacgcaaaccagataactctcagcgtattctaaatgaccaaaaacagaactctgttgtcaaagattttaaatggaaaatttttcaattkttttttcttttttgtacaggtttcttcctgaacgcgcctcagcgattttaaatcgtatgcagaatattcaatttgaagcagtggttggccacaaaatcaa

SEQ ID NO: 110026 - DNA, 201 bp, Homo sapiens
ttgcaattgtctagctcagttataaaacagaagaataggccggacgcggtggctcacgcctgtaatcccagcactttgggaggccgagacgggcggatcaygaggtcaggagatcgagaccatcctggataacacagtgaaaccccgtctctactaaaaatacaaaaaaattagccaggcgtagtggcgggcgcctgtagt

SEQ ID NO: 110027 - DNA, 201 bp, Homo sapiens
gaagtagcagtctgctctccaggccaccctcctgaaacgaaagcctggaaacaagaccccaggatgatcctatagttacaagttgcagagctccccaggayatctggtcaaccttatacacagggagagaaagggagagtaccccagagagaaaaaacagagcaggcatccgaagaggacttggaaaatttcatagagggc

SEQ ID NO: 110028 - DNA, 201 bp, Homo sapiens
agtgctgggattacagatgtgagccactgcacctggcccctagaattgtttctagaggtgaaacttcaaggtgaaatatagtacataactgcttttcagayaaacaagtccagagagcacactctcttgtgctcttggcatcacttggcatcacttcatatttgaggtgtttcaaacccattagaacacgtgaacaaggcc

SEQ ID NO: 110029 - DNA, 201 bp, Homo sapiens
ataactggctccttttgccctgtgagatgagagacacagtagcagtttggctcttatgcaatctaaactgttgcgttgggaatacggttcaaaaaacacaytggagtttaagctaaagcaagtgttttgctaacaaaaagacaaggcatcacattttgcaattgtctagctcagttataaaacagaagaataggccggacg

SEQ ID NO: 110030 - DNA, 201 bp, Homo sapiens
tgagaaatgtttaggcaggccaactaatagaagaaaatgaaaaaggaaaaataatttttcttattattattattatcttgaaattaaaggaataaaggggraaaacacattagggactagcaggaatgatcagccaccgatgaactgggatatttatttgtgtccgggagaaagcacatacatttgatcaccgttaccacc

SEQ ID NO: 110031 - DNA, 201 bp, Homo sapiens
catgccattctcctgcctcagcctccctagttgctgggactacaggcgcctgcaaccatgcccagcttaattttttttttttttttttttttttttttttttttgcgcgctttttttttatttttagtagagacggggtttcaccctgttagccaggatggtctcgatctcctgacctggtgatccgcccgcctcagcctc

SEQ ID NO: 110032 - DNA, 201 bp, Homo sapiens
atgccattctcctgcctcagcctccctagttgctgggactacaggcgcctgcaaccatgcccagcttaattttttttttttttttttttttttttttttttttgcgcgctttttttttatttttagtagagacggggtttcaccctgttagccaggatggtctcgatctcctgacctggtgatccgcccgcctcagcctcc

SEQ ID NO: 110033 - DNA, 201 bp, Homo sapiens
gtaaggtcaaaatcaagttagaatgggtatgtggtatgataaattgatatgaaaactaatgagaaatgtttaggcaggccaactaatagaagaaaatgaaraaggaaaaataatttttcttattattattattatcttgaaattaaaggaataaagggggaaaacacattagggactagcaggaatgatcagccaccgatg

SEQ ID NO: 110034 - DNA, 201 bp, Homo sapiens
tggtatgatctcagctcactgcaagctccacctcccgggttcacgccattctcctgcctcagcctcctgagtagctgggactacaggcgcccgccaccacrccaggctaattttttgtattttttgtagagacggggtttcaccatgttagccaagatggtctcgatctcctgacctcgtgatccacccgcctcggcctcc

SEQ ID NO: 110035 - DNA, 201 bp, Homo sapiens
tgccattctcctgcctcagcctccctagttgctgggactacaggcgcctgcaaccatgcccagcttaattttttttttttttttttttttttttttttttttgcgcgctttttttttatttttagtagagacggggtttcaccctgttagccaggatggtctcgatctcctgacctggtgatccgcccgcctcagcctccc

SEQ ID NO: 110036 - DNA, 201 bp, Homo sapiens
gccattctcctgcctcagcctccctagttgctgggactacaggcgcctgcaaccatgcccagcttaattttttttttttttttttttttttttttttttttgcgcgctttttttttatttttagtagagacggggtttcaccctgttagccaggatggtctcgatctcctgacctggtgatccgcccgcctcagcctccca

SEQ ID NO: 110037 - DNA, 201 bp, Homo sapiens
tcagcctccctagttgctgggactacaggcgcctgcaaccatgcccagcttaattttttttttttttttttttttttttttttttttgcgcgctttttttktatttttagtagagacggggtttcaccctgttagccaggatggtctcgatctcctgacctggtgatccgcccgcctcagcctcccaaagtgctgggatta

SEQ ID NO: 110038 - DNA, 201 bp, Homo sapiens
agcctccctagttgctgggactacaggcgcctgcaaccatgcccagcttaattttttttttttttttttttttttttttttttttgcgcgctttttttttatttttagtagagacggggtttcaccctgttagccaggatggtctcgatctcctgacctggtgatccgcccgcctcagcctcccaaagtgctgggattaca

SEQ ID NO: 110039 - DNA, 201 bp, Homo sapiens
ttactagcatgaaggtttctttgtgagggtagttaaaaggcccacatgagctctcttcttatccttgtccttctttcagccagatcttccctgcccctttrctcattccatctttcacccacctacccccaaaacaaggaagtaaatcttgcattagtcaacaataccaaagtgattttcaatatgactttctctgcagaa

SEQ ID NO: 110040 - DNA, 201 bp, Homo sapiens
tatgatctcagctcactgcaagctccacctcccgggttcacgccattctcctgcctcagcctcctgagtagctgggactacaggcgcccgccaccacgccmggctaattttttgtattttttgtagagacggggtttcaccatgttagccaagatggtctcgatctcctgacctcgtgatccacccgcctcggcctcccaa

SEQ ID NO: 110041 - DNA, 201 bp, Homo sapiens
gtataagttctctcaaatgcctttctgtcttaacaaaaataaaactacctgatttggaaacctaacgtctatgtcattgtctttcttctttctgcaatgakccttaagatcacaaaagcacttcttccatcgatgatggagagaaatcatggccacatcgtcacagtggcttcagtgtgcggccacgaagggattccttac

SEQ ID NO: 110042 - DNA, 201 bp, Homo sapiens
aaagtgctgggattacaggcgtgagccaccgcgcctagccgaatgttaattgtctaaaaatttttcttctccaatgtcttctcctccacttttttcggaawttgtttcttcctaattacagcgcggtgtggaggaaactgcagctgagtgccgaaaactaggcgtcactgcgcatgcgtatgtggtagactgcagcaacag

SEQ ID NO: 110043 - DNA, 201 bp, Homo sapiens; identical to SEQ ID NO: 18140

SEQ ID NO: 110044 - DNA, 201 bp, Homo sapiens
atgggtgcttatagaacactcctcccaacaaaggcagaatatacattcttttcaagtgcacatggacctatataagccatatcctgagtcaataaacaacmctaaacaaatttaaaagaaattacattgtataaaatgtagtctctgaccataacggaattaaactagaaataagtaataaagacaacagaaaactctcca

SEQ ID NO: 110045 - DNA, 201 bp, Homo sapiens
aaggtgatggccggagtcaacggatttggtcgtattggatgcctggtcaccagggttgcttttaactctggaaaagtggatattgtcgccatcaatgaccrcttcattgacctcaactacatggtctacatgttccagtaggattttacctatggcaaattccatgcaccgtaaaggctgagaatgggaagcttgtcatca

SEQ ID NO: 110046 - DNA, 201 bp, Homo sapiens; identical to SEQ ID NO: 18142

SEQ ID NO: 110047 - DNA, 201 bp, Homo sapiens; identical to SEQ ID NO: 18143

SEQ ID NO: 110048 - DNA, 201 bp, Homo sapiens
ctctttctgaaatgaggaaacagactcagtgaactgaggtacttgatcaagttctcagagtagcagttaggccccatccctaacatttataggaccagagrcagaaggacaaatagaggcccatacaccatatgttcaaaatataaaatttcataaatgcatatataaatcaaggtaatgctgtatcaagtagactaaagt

SEQ ID NO: 110049 - DNA, 201 bp, Homo sapiens
cttttgcttctctcaactctgggttgcagattgccagtcaacagtacctctaagactggccatgtaggttgacttttatttttcttgctattaatgaatgytcttacctctctccttcaatttctgtaggcagttcaattaacctccagaagatggctgaacctgcaggaataccagagcaagaaactgatgtctgacaac

SEQ ID NO: 110050 - DNA, 201 bp, Homo sapiens
tgaatcatgaaatgagagaattaatgcattagctttggtaagcttgataatttcaggattccagttaggataggggtggggatcataactgaaaagctcarcggtacaatcatcgttcctaaatatgtttctaatacagtttcaactataacaatcttaactctgacttaggaattgaaaactgaaaaagtggaaactcca

SEQ ID NO: 110051 - DNA, 201 bp, Homo sapiens
aattaccttacccagccctgcctttccagggattattctctgtacccttatctgctttgttctttataacacttgactgtacctggtagtgttatttgttyattggccgtcttccccgctctcctacaagtttaagaacgtaagctccacaaaggcaaagtgatacagcttaatgtaacagcgtgagtgattccccagctg

SEQ ID NO: 110052 - DNA, 201 bp, Homo sapiens
acactgcaaatgaagctctcgaggctgctaagagactaagtaagctgattcataatgggtgaaatacacttgcccaaatcagtgaattcacaggtagtggyttcccactagttaattttttttgttgtggattaaactgacagggacagatacaggggagagcttagaactgcaaaagcaaaaaagtccagattgcctcat

SEQ ID NO: 110053 - DNA, 201 bp, Homo sapiens
gggagatgtcatagaaaaagcatgggctgtcttactgtctgttgaattctggtgtttttaacaattaattgatgacaataatttctaaattatgtgattaktgggtggattagaagtaatacacatacaaagcattcagtatatttcttatcacctaacaggtgttcagacaacagttgcattttttaaagaaagatgatg

SEQ ID NO: 110054 - DNA, 201 bp, Homo sapiens
gtgaattcacaggtagtggcttcccactagttaattttttttgttgtggattaaactgacagggacagatacaggggagagcttagaactgcaaaagcaaraaagtccagattgcctcatgtacatgtgtgtaagtgtgcaggaatcacatggtgactgcagcgtgaagggaggggtctgctttcagagctttgtccctgt

SEQ ID NO: 110055 - DNA, 201 bp, Homo sapiens
catggtgtccagtgaaaatttactacacctgttttagagttcaccaaacaggacaaataagagatataaagagatttattataaggtattggctcatacartcatgaaggccaaggaatcccacaatctgctgtctgtaaggcagagacccaggaaggctggtggtatagtttgaaggcctgagagccagagagccaatgg

SEQ ID NO: 110056 - DNA, 201 bp, Homo sapiens
agatttattataaggtattggctcatacagtcatgaaggccaaggaatcccacaatctgctgtctgtaaggcagagacccaggaaggctggtggtatagtytgaaggcctgagagccagagagccaatggcttagcatccagtctaagtctaaaggcctgggaaccagggatggcaatggcagaaggaagatgccccagct

SEQ ID NO: 110057 - DNA, 201 bp, Homo sapiens
ctgtaattagaaaaacaaagtaaattcataagtcagttaggaagccataaatcatagtaatcttatatgacattgaatttaaaactagaagagcgcttaattcaaatgcaaaatgattctctggctaaaggtgtgggggaaggggaggcgattgtgggtggaagatgttgagtaggctcaatgagcagccttgatagcaga

SEQ ID NO: 110058 - DNA, 201 bp, Homo sapiens
cgaaagggacactattttacttgtctcttatctcagtctctatcaccacagagcctctgggaccagaatacaaacacagggaaccaatagtgttacccagytgatccagaagttttactgtttcagagtaacttgtgatcttgggcaagttcagcccgtttcctaatttgtaacatggctttattggtcagtaaagccaat

SEQ ID NO: 110059 - DNA, 201 bp, Homo sapiens
ctgctgccacttctataatcatcgttgtcctgcagcagttcatttggggtcctccatcaagcagcagtagtgagaatggtggtggcagaagtgatgctggkggttttagtaacggccagcaattactgagctcttatgacgtgccagggtcttgtacttcatgtggattattgtattttaagacattattatctattttac

SEQ ID NO: 110060 - DNA, 201 bp, Homo sapiens
atacctaggattggaattattggatgatattagctctatggttaactttttgagaaactgccaaactttttccaaagtagctacaccattttacagtcccmttatcaatgcatgaaagtttctatttctttatatcctcactaacttttgttgttttctgtctctttaattttaactactgtagtaggtagagagtgatat

SEQ ID NO: 110061 - DNA, 201 bp, Homo sapiens
atattttagaggtcagtgtatagggaacagcttcattcttttcaaacgcttcatggtgttctagtttatggacgtatcatatttacttacacatcctcackgtctcatttttctcactattcctgttaaaggctaaatgtgttattctgagctagttgaggacttgaaacttagggaatgaggaacaatagagcattttac

SEQ ID NO: 110062 - DNA, 201 bp, Homo sapiens
aattttgatgtcagtttcacaaagtttcacctctgataattttatttttttctttacagtaaacatatagatggtagtctggctctgtcctcaccaatatytcatcttgcattgaaatccgaattggagtcccctccctgtatggagggaggaatttggtgggaggtgattggatcatggcggtggtttcccctatgctgt

SEQ ID NO: 110063 - DNA, 201 bp, Homo sapiens
tacccagccctgcctttccagggattattctctgtacccttatctgctttgttctttataacacttgactgtacctggtagtgttatttgtttattggccrtcttccccgctctcctacaagtttaagaacgtaagctccacaaaggcaaagtgatacagcttaatgtaacagcgtgagtgattccccagctggccggagt

SEQ ID NO: 110064 - DNA, 201 bp, Homo sapiens
ctttaatactgcaagcagccccctttagctgaacaaggaactggtctgttgtgtttcacattacacaggtattctcaatatagaaacacacctactttcaygattcactgccttttaacttcacagtgtttggagtttaaaggggtcttttgtgaacatcgaagtccctgaagaagtgaatagctaaaattttccacatga

SEQ ID NO: 110065 - DNA, 201 bp, Homo sapiens
gaaatgcaagaatggagatcatttgggcgactttggcatcgattcaatgctgtgagtcattatgccaggatactagacgtacaccgtgagtggaatcagaytgcccgggtttaactcttgccttcagcactccatagctttgtgatcttgtgacaattacttatatttctttgtaagataccttttttttttctttttcac

SEQ ID NO: 110066 - DNA, 201 bp, Homo sapiens
tgctgttacggtaaatagtgtgttccacatcacagcatacactgggtgatgcaggggttgtaatttaacctgttgcctctgtacccagaaagaggaaacayattccttacaacatagttgtgaggtgacctttcacacgatacttttcatatacaaaataaagtataggtgtttctgtaaatctggacaggtttcaagatt

SEQ ID NO: 110067 - DNA, 201 bp, Homo sapiens
tcacatttcagtgtctctgaaagctgaatttatttatttttatttatattttttcagacagagtctcactctcttgcccaggcttgagtgcagtggtgagwtcttggctcactgcaccctccatcttccaggttcaagtgattctcctgactcagcctcccaagtagctggaattacaggtgtacaccaccacacctagct

SEQ ID NO: 110068 - DNA, 201 bp, Homo sapiens
ctgaaagctgaatttatttatttttatttatattttttcagacagagtctcactctcttgcccaggcttgagtgcagtggtgagatcttggctcactgcamcctccatcttccaggttcaagtgattctcctgactcagcctcccaagtagctggaattacaggtgtacaccaccacacctagctaatttttgtattttta

SEQ ID NO: 110069 - DNA, 201 bp, Homo sapiens
ctcccaagtagctggaattacaggtgtacaccaccacacctagctaatttttgtatttttagtagagatggagtttcaccatgttggccaggcttgtcttsaactcctgacctcaggtggtccacccacctggcctcacaaagtgctgggattaaggcgtgagccaccgtgcccggccaaactttattgtttcgatattgt

SEQ ID NO: 110070 - DNA, 201 bp, Homo sapiens
gtcacaggtggcagatgcccatcccagtagctcagggagcaaggcaggaacctgtttgccaggaaccaggatgccattcccttgcagggtgccatctctcwcacacacacacacacacacacacacacacacagagtccttttctgttggacttgcctgtacaatggctattaatggtgtctggataacacacacacacac

SEQ ID NO: 110071 - DNA, 201 bp, Homo sapiens
gatcgagaccatcctggctaacacggtgaaaccccgtctctactaaaaacacaaaaaattagccgggtgcagtggcgggcgcctgtagtcccagctactcrggaggctgaggcaggagaatggaatgaacccgggaggcagagcttgcagtgagccgagatcctgccactgcactccagtctgggtgacagagcaagactc

SEQ ID NO: 110072 - DNA, 201 bp, Homo sapiens
ctcttgtaggaatttattttcgaatatagtgctcaatactttatacaacacaagcattatttttgaaatgactaccctgcatttctattcttgcaggtttkcttgaaaatatgtatttttttcatatagagtggaaaagattaaaattccaggcagccattctttctagtggtagtcgacctgatagtctagtctgtggag

SEQ ID NO: 110073 - DNA, 201 bp, Homo sapiens
aatagtagtcccttttcctaattattaaaataaggacaaacaaaagagaaaattataaaatagattacacagatatatttatatatacctttttaaaaaawatatatatatacacacactagttttgacaaaactagacttatatcatataattgacaatattatatagtctgctttctttcttttttttatgtgttttgc

SEQ ID NO: 110074 - DNA, 201 bp, Homo sapiens
ttcagcatttgtaatgcctctttatgacttgccttttctttttttttgtctagttttccattattacataattctcacagtgatttagaacacaggactckgtgtgtgtgtttgtgtgtgtgtgtgtgtgtatatgtgtgtttgagatcaagggaatgggcagttttatttatgtcatcagtcatgttttcccacatcttg

SEQ ID NO: 110075 - DNA, 201 bp, Homo sapiens
atgcttaactttgcaaaatggctgttgaaacagtgctgcccagagcacgggacacatccattggcagtacacgagatgagtttaggtaacgcagggatgcrgcatccaataccagtgagtcacatagtgctgaattcattgttactgtctttggaaccttaggattttgtcacggagaaattttcagttttgtgcttgtgt

SEQ ID NO: 110076 - DNA, 201 bp, Homo sapiens
ttgtaatgcctctttatgacttgccttttctttttttttgtctagttttccattattacataattctcacagtgatttagaacacaggactctgtgtgtgtgtttgtgtgtgtgtgtgtgtgtatatgtgtgtttgagatcaagggaatgggcagttttatttatgtcatcagtcatgttttcccacatcttgactcttgt

SEQ ID NO: 110077 - DNA, 201 bp, Homo sapiens
atttttagtagagacaaggtttcaccatgtgggccatgctggtcttgaactcctgacctcaggtgatccatctgccttggcttccgaaagtgctggggttacgggtgtgagccactgcacccggcctcatcatgtgtgtctttcttttccctcatagcatttgctgctctgtaattacactcttcattaatgtgttcatgt

SEQ ID NO: 110078 - DNA, 201 bp, Homo sapiens
gaggtagatctaattcatttttgtccccgttaagttaccatcaactgcttcttttcacaagagatttctttcctattactgctcttcgtgcatttaatcastcttagcgctttctttccgcctcttgatttataagtgttttgctgtgattcagtctcctgtctattcttgctacagagtacaaccttcatttgttatctg

SEQ ID NO: 110079 - DNA, 201 bp, Homo sapiens
cttggaagtgacttcctctcctaaggtgaagactctttgtcatttaataggatgaactttcaaagtattgtccctgttcatgagttagtgttccctggctrtgtggaatagaaaagaacatctccgcttgagcttgaatccctctggaatatgtgtcattgacagatcctatttcctgtgtgaccatgtaagctcttaaca

SEQ ID NO: 110080 - DNA, 201 bp, Homo sapiens
tattcttgctacagagtacaaccttcatttgttatctgtgttccttgtgctgtctggggaaaaggacagtggtcagatctttcagtatttgacaaacatcrtgataatagagtgtttcaagatggagatgttgaatcaactttgatgtttggtcaagaaaattgattcataatgatatgtgacataaggtctttgctgagt

SEQ ID NO: 110081 - DNA, 201 bp, Homo sapiens
ctatatataattcccaacttgctgtattagttcattttcacactgcaaataaagagatatccgagactgggtaatttataaaggaaagaggtttagtggaytcacagttccacatggctggggaggcctcacaatcatggtggaaggcaaaggagaagcaaagcacattttacagggtggcaggcaagacagcatgtgcag

SEQ ID NO: 110082 - DNA, 201 bp, Homo sapiens
atgtgacataaggtctttgctgagtttttcctcggtatgtatgaggaatgaaaaaaccactgctttttttaaaaatagaatttaatgttttcttttgttgttttttttttttactttgatggctctttgtacaagctccttttacagattactctgtggtcagagaatcagcatgtgactttttctagatattggataaat

SEQ ID NO: 110083 - DNA, 201 bp, Homo sapiens
ctgttttgcagtctatggcatttcccaaaggagtaactaattccatgggatttaaagcagatgccaagtaaaaattggttgggggataactaaatatagtyaagtagatttttttttttaatggtcaagctcctcagaacctcaaataaagcatatatcgagaacctctaagtgaagaaaataaaactgtatttcccagat

SEQ ID NO: 110084 - DNA, 201 bp, Homo sapiens
tatcatcattaactttgaaaattctttaagtgacccatacattttagtgcctttaagcacaagagtcccagtagtatggtgagacgctgacccgatgaggktatgtagagctcattctcttccttctgtctcaggaactcgtgtactttgaatggaatagcagttgcaacctcccactagattttattcgttaattttggt

SEQ ID NO: 110085 - DNA, 201 bp, Homo sapiens
actagatcttaccgtgtagtgtaggtgatacttggtgttcagcagattgcttttgggagggggcttgttctcaaggcctcagttcattttcccggccatcrgtatacttccttggggtgtttcttctgccctgagaaggtgagtagctttcatgtctagtgttttcagaggcagcaggagcttcagagatcaattttaatt

SEQ ID NO: 110086 - DNA, 201 bp, Homo sapiens
aatagatgtgttaatatttgtaaagctgttaaaacagtttctggcaaacagtgtctgtgtaagtgctagctgctgttatttttatttttattttttcactrtagatcagttaatttcttttattccacaaaataagtattcattctgtaccatatttctgctgctctttgaggaatggggatgtggtgaacaaaagagaga

SEQ ID NO: 110087 - DNA, 201 bp, Homo sapiens
aactaggtcatttataaagaaaaggaatttatttcttatagttatggagcctgaggagtccaaggtcaaagggctgtatctggtgagggccttcttgctgrtgagacctcttctgcatagtccccaagggatgcatggtgaaggggctgagagtactagctctcatctctcttctttttcttagaaagccaccgatttcac

SEQ ID NO: 110088 - DNA, 201 bp, Homo sapiens
ccaggttgttttacctgtgtttctcaccaaccggctataaattgggtttcccatgacctcttccttgggttcaattcatttgctggggtggcacacaaaamtcaggtaaatactaacttatgcttactggtttattataaaggatgttacagaagatacagataaagaaatgaatagggtgtggtatgggaaggggctcag

SEQ ID NO: 110089 - DNA, 201 bp, Homo sapiens
gctgagagtactagctctcatctctcttctttttcttagaaagccaccgatttcactcccatgataatccattaacccattaatccattcatccttgaatrgattggtccattcatgagggcaaagctctcagaacccaattacctgttatagatcccacctctcaatactgccacattggagattaagtgccatatgact

SEQ ID NO: 110090 - DNA, 201 bp, Homo sapiens
tggattggtccattcatgagggcaaagctctcagaacccaattacctgttatagatcccacctctcaatactgccacattggagattaagtgccatatgasttttggagggaagaaacattcaaactataaggccagtttgggcaaaagatttgaggttaagattgtttttaaagaagtgccttttttatgactagcaggt

SEQ ID NO: 110091 - DNA, 201 bp, Homo sapiens
attcggtacagctctgtaccttcctgcagtgaaatctataaaccagagcctcctgcttcttttgccccagttgacttcaaggctcagggcccatggttgtrcactgggagataatacaccagcactgcctagttaaagggcacaggctcctcagtcagacatacctgtatttgaaatatggctttgcctccaaccagctgt

SEQ ID NO: 110092 - DNA, 201 bp, Homo sapiens; identical to SEQ ID NO: 18154

SEQ ID NO: 110093 - DNA, 201 bp, Homo sapiens
tcaactcctgttgatggtatccatgtggaacactgtgtaatgaggattgtgaggctgaggtcattcttttgggaaaaggagacgattgactagtgatgtckgtcataggttcagcttgtgggagcactggttggtacaagtgctgggcatctttaatccttgcggctaggagtgccttgcgagcaaggattttgccatcta

SEQ ID NO: 110094 - DNA, 201 bp, Homo sapiens
cttctgtttgcagggtaaaattaaggtgattttcttctacaacatgattgagctagcatactctccaggagggaacagacaggcattctgaaaggatgttyggtatttttagagccttttatacatttgtttctgctgttgtgctaatatgctaatgtttatcaaggttgtatttttttccctcccttttctttcttgctg

SEQ ID NO: 110095 - DNA, 201 bp, Homo sapiens
taaaccgtatttttttttttttttttggtgtcaaagaatagaaaattagttttaattgtttcttatgaggcaccatatggctactctataattttggcttyccatggagctgcatgtgcatatggaaaatgaaattaattggaaatcacaccctgaaatctattattaagttaatatagctaacagcttgtggggtgtcct

SEQ ID NO: 110096 - DNA, 201 bp, Homo sapiens
gagggttgcacatggtctcttaaaagttttggcatactagctacaagagaactgagaaatgtaggggtacacatggttacttggtgatactgtgttgccayagataatgttaaatagttcacacagtcagaatatattatagtttgttttgccagtcttctatttgatgggcatttggatcatttccaatcgtatcctttt

SEQ ID NO: 110097 - DNA, 201 bp, Homo sapiens
ccagtgcttgaggacgaaggagagtatttcaggtaattctatagatgtattgtttacttctggatgtccatgttgctgaaaactaaagtagaaaatagagyaaaacactatgtgttcagggagtatcttagttcattctggctgccgtaaggaaatacccgagactgggtggcctataaacaacagaaatttgtttctcat

SEQ ID NO: 110098 - DNA, 201 bp, Homo sapiens
aatttaatttctgccatagtttgaaatgctcccatgatgcagttgaacatttcagcacttaggtttgtttgtagccaaatgccaagcctctaaggaagctrctgcttgttttacttaaaaacattcaggcttggtgtggtggctcatgcctgtaatcccagcactttgggaggacaaggcgggaggatcacttgaggccaa

SEQ ID NO: 110099 - DNA, 201 bp, Homo sapiens
aacgtttcagttcctcaccattcacaaacccagggtagagggaagcagtttaatcatattcaaatgaattaatcagcagtcttgtgaatttcacagccaasggactgattgttattttgcaaactagtgttctgcaagcctaaggtcactcttggtagaatcagtgacagtgatttttcagaggtgcccaaacttgcctgt

SEQ ID NO: 110100 - DNA, 201 bp, Homo sapiens
gtttcagagtaacttgtgatcttgggcaagttcagcccgtttcctaatttgtaacatggctttattggtcagtaaagccaattgggcaaaaaggttgtgcratagtaacaaataacccccagaatttcagtggctaagaatccacaaaggtgtattttttactacacatttacgtaaagtcacttggtatatgtccatcct

SEQ ID NO: 110101 - DNA, 201 bp, Homo sapiens
gctcccatgatgcagttgaacatttcagcacttaggtttgtttgtagccaaatgccaagcctctaaggaagctactgcttgttttacttaaaaacattcakgcttggtgtggtggctcatgcctgtaatcccagcactttgggaggacaaggcgggaggatcacttgaggccaagactttgagactagcctgggtaacata

SEQ ID NO: 110102 - DNA, 201 bp, Homo sapiens
tttctaccatccatttgcatagcagatttcttctcaccctttttttacaactgagaatgcagaagtaaacataaattatacttctgtagatgtatcacaattttttttttttttttgagactgagtctcactctggcacccaagctggagtgcagtggcacaatcatagctcactgcagcctcagccttccaggctcaagt

SEQ ID NO: 110103 - DNA, 201 bp, Homo sapiens
gggagattgttgtgtggtagaacatctagctcattttcctacttacagatccagatattagggatcaggtcctgctgtctgcctttcagtgagcatccccrcctgtggcatacagactttgtaggtgtcggtctggattgccactgtctagtaggagtataatgtgagccacgtcagtattttaaagttttctaacagtca

SEQ ID NO: 110104 - DNA, 201 bp, Homo sapiens
gcaaagcaaaatacccagacatttgaaaaacttgtgtatggactgcctgaccacctgcacagctgccagagcaaacttgccttgggatcagctgtctgggrtctggggacccgggccctgtatctggcacttcaactgcctcattagatgatctttacttttgtaaaacagtaaatagcaaccctcataattctcacccga

SEQ ID NO: 110105 - DNA, 201 bp, Homo sapiens
ttctcagctgggggccatgctacctcccaggggacatttggcaatgtctagagacatttattattgtcattttggagtgggtatgctactagcatctggcrggaagaggtcagggatgctgttcaacagcacacaaacagctcaccataacaaggcattttccagcctaaaatgacactagtttccaggttggggacccct

SEQ ID NO: 110106 - DNA, 201 bp, Homo sapiens
cagactttgtaggtgtcggtctggattgccactgtctagtaggagtataatgtgagccacgtcagtattttaaagttttctaacagtcacattaaaaaaaygaaaaaaagggtgaaattaatgttaataatatattctgtttactccaatatatctaaaacaacatcatttcaacatgtaattaatataaaaagttatcaa

SEQ ID NO: 110107 - DNA, 201 bp, Homo sapiens
ccctaatattcatcagatattcaaaaggatccatgttccaaagaagaggtttagtattgatttttgttggtttgtttatttgagcagtggggatgatgttraaagaagcttgataaatagcaagggctgtagctgttcttttttcaaagtttagtttttacttttaattgtgtactaaaatctgcagctagagtgtgtttt

SEQ ID NO: 110108 - DNA, 201 bp, Homo sapiens
tctcttctttactgtatagttttaatttttccttcccagtgggcctgtattgtttttactatcagatcaaaatcagtattaaagtatagagcgaggatgaraagctagatttcctaagtccttttctggccctgttaggatttttataataaaagtcctaccattgattcaatattacagtgaattaaagcactccgataa

SEQ ID NO: 110109 - DNA, 201 bp, Homo sapiens
aaagttatcaacaggatattttgtgttcatttttttgtcccaatcttcagaaacctggttggaatgctacacttccagcacatctcatttcagactagtcwcatttcaggtgctcaagagactgatgtggctagtggctaccatctaggacagtgcacatttggacactagaaggatttgtatgtgcatccttcagccttg

SEQ ID NO: 110110 - DNA, 201 bp, Homo sapiens
tgtagacaaaaatggttgagatatggtgaattttatgttttgtatattttatcacaattttttaaaaaggaagttttgaagtagctggattagattatacwtatatatatatatgtgtacccagaagttatttctattatgtagtccccacttagaactgaattaatctttaattcaaccgatatttatcgagtgttgact

SEQ ID NO: 110111 - DNA, 201 bp, Homo sapiens
tctgtaccttcctgcagtgaaatctataaaccagagcctcctgcttcttttgccccagttgacttcaaggctcagggcccatggttgtgcactgggagatratacaccagcactgcctagttaaagggcacaggctcctcagtcagacatacctgtatttgaaatatggctttgcctccaaccagctgtgtcaccctgagc

SEQ ID NO: 110112 - DNA, 201 bp, Homo sapiens
tgttcatttttttgtcccaatcttcagaaacctggttggaatgctacacttccagcacatctcatttcagactagtcacatttcaggtgctcaagagactsatgtggctagtggctaccatctaggacagtgcacatttggacactagaaggatttgtatgtgcatccttcagccttgggaatgcagttatttcccactaa

SEQ ID NO: 110113 - DNA, 201 bp, Homo sapiens
gttgagatatggtgaattttatgttttgtatattttatcacaattttttaaaaaggaagttttgaagtagctggattagattatacatatatatatatatrtgtacccagaagttatttctattatgtagtccccacttagaactgaattaatctttaattcaaccgatatttatcgagtgttgactctgcagaggttgta

SEQ ID NO: 110114 - DNA, 201 bp, Homo sapiens
gaagtacagatgattttattattattattttaaactgatgctgcttgctttactgctagaggccttagataagacatgtggcactatcagagatgcgttgycaatggaacaaaaatggtctcggacgctggtctgatcctagtctgatgtcctgtgaagaataactcaagtgttgtttctcttgatgcgggaactttaaag

SEQ ID NO: 110115 - DNA, 201 bp, Homo sapiens
catctcatttcagactagtcacatttcaggtgctcaagagactgatgtggctagtggctaccatctaggacagtgcacatttggacactagaaggatttgyatgtgcatccttcagccttgggaatgcagttatttcccactaaaaataaagagttgtgcgtctgctactcagtcttgtccaggtatcagtagcaaaggtt

SEQ ID NO: 110116 - DNA, 201 bp, Homo sapiens
cttcattccttctgccatgtgaggacacagcaagaaggtggcaccacctgtaatccaggaaacaggccctcaccagacatcaaatctgttggtgcctggaytgtgatctttcagactccagaactgtgagaaataaatttctgttgtttataaactatccagttaatggtgttttgttttagactatcaataagaattaaa

SEQ ID NO: 110117 - DNA, 201 bp, Homo sapiens
gattttattattattattttaaactgatgctgcttgctttactgctagaggccttagataagacatgtggcactatcagagatgcgttgtcaatggaacaraaatggtctcggacgctggtctgatcctagtctgatgtcctgtgaagaataactcaagtgttgtttctcttgatgcgggaactttaaagtacttttcttc

SEQ ID NO: 110118 - DNA, 201 bp, Homo sapiens
actccagaactgtgagaaataaatttctgttgtttataaactatccagttaatggtgttttgttttagactatcaataagaattaaaagaaaatactcataaaaaaaaaagaagtctgaatgtactgaggtaattttcttcatattattcctgtgaaaaggaaaatgctcatataactcaaaaatcataatatttgatatt

SEQ ID NO: 110119 - DNA, 201 bp, Homo sapiens
agtagctggattagattatacatatatatatatatgtgtacccagaagttatttctattatgtagtccccacttagaactgaattaatctttaattcaacygatatttatcgagtgttgactctgcagaggttgtatcactacagtggatgccaaggtgcccaggatacataagatgcctgccccatgcaactcacattgc

SEQ ID NO: 110120 - DNA, 201 bp, Homo sapiens
caagacactttccctcatcaggcctccaggttcctgactgtaaactgaggtgattggaccccagtggtccctttatatcttgaaaccccagtatttgaaasatgtgactaactgggaaacttctccagtatagggtcccaaagacctttttaaaagtggatcactgccattccccttcaccttcagcctgtgaagcactgt

SEQ ID NO: 110121 - DNA, 201 bp, Homo sapiens
gaaagctctttagtttgattagatcccatttgtcaattttggcttttgttgccattgcttttggtgttttagtcaggaagtctttgcccgtgcctatgtcrtgaatggtattgcctaggttttcttctaaggtttttatggttttaggtcttacatttaagactttaattcatcttgagttagtttttgcataaagtgtaa

SEQ ID NO: 110122 - DNA, 201 bp, Homo sapiens
acagcaggaatcttccgtgagccataggagaggaaggaaatggtgttggccgagtctagggctagctgttacaagcagaagtcacagcaggggagatagcrggagctggaatgtggaagagagggctgtctggagagacctggagcttcagaggagatgctgttacacccacaaagaggacaacaaagcctggtgtcttcc

SEQ ID NO: 110123 - DNA, 201 bp, Homo sapiens
atgtacttgctatgtaagtagttgttatactgtattgtttatggagtatgaccaaagaaagtctgtacatgttaagcacaggcaaaaccgtcctttttttygtttctgaatatttttataccatgattagttgaatccatggatgtagaacccatggatagggagagctgattgtattatttatgtgtgtgactcttacaa

SEQ ID NO: 110124 - DNA, 201 bp, Homo sapiens
ataaaatcttaagaggacaaggtttggagagtgtccagattgccaaatatgtggcggtatctgcaaggtggtacccccagagagggcatggaagctccatsggcataccttgttatgtacacctcttccatctggctgttcaccagtgtcttttgtcatatcctttataaataactggtaaatgtcagcagtggtttttgt

SEQ ID NO: 110125 - DNA, 201 bp, Homo sapiens
atgttcatttacagaattttgtgtttttcaaattactaatgtttcatcaagacttaaaaagtaagattaagaaataatgtgtagttaaaaaataatatacrgtaaatgatgtgagcattgcttgtctgacaatttatttttatcccagtattatttatttctaaagaagaagtataggcaacttcaatattaaaagcaaaa

SEQ ID NO: 110126 - DNA, 201 bp, Homo sapiens
ttttatttttagaggtggccagtttctgggaatgaaaaattgtccatatcaggagacaaaaggcagagttgattcatttggccatctaagtggcatttttygggtgtctttcatatgtcaagcactgtcaccttcttcacagagatacagagaagtttaaggcacactttctaccctttagtggaacacagtctagtagtg

SEQ ID NO: 110127 - DNA, 201 bp, Homo sapiens
ctctcaactctgggttgcagattgccagtcaacagtacctctaagactggccatgtaggttgacttttatttttcttgctattaatgaatgttcttacctytctccttcaatttctgtaggcagttcaattaacctccagaagatggctgaacctgcaggaataccagagcaagaaactgatgtctgacaacggagtgaga

SEQ ID NO: 110128 - DNA, 201 bp, Homo sapiens
attgatgagaaacatggggcccagggcagtgaaaactcatgaattgtacagagaaactgaaaatgcagagtgtttagctgaaatatgtgaagcctacttcyctaaccaagaaataagaggctgaacgcaacacaggagaaaatctggttggggagagatactcttggtttgtcaagaaaactgggtaaaaagatctgttag

SEQ ID NO: 110129 - DNA, 201 bp, Homo sapiens
caattgaatatgcaaatattctatagggtaggataacaacttttagttgttaggcattggggatgtgttagaccaattaaatatgctatttgctggatacrcaattgaatgtgctatatgtgttagaccaattgaatatgcaaatatcctatagggtagaataacaacttttagttattattgcgagaatataataacaag

SEQ ID NO: 110130 - DNA, 201 bp, Homo sapiens
cagaagaatggttgtcactaacaaaggtcattttcctaatagccttcattggctacctaggctcaccatagtggtttgcttctatagtaagcaaggaagcmatggacattgggaaatgagtgtattttcttcattttgatttgtcaaggcctaacccatcaggatttacagtttataattacattgtgggtttttctatac

SEQ ID NO: 110131 - DNA, 201 bp, Homo sapiens
ttcttggggaattcactttagatgtaggattgtaggagacacagacacaaagggaataaattaaacctttttagttctcagatataatatgcatagatagrcatttgacctgaataatgtctgatgtggggcaatttgtaatttcctggaagatgatcataaaggaaggagctgcctacctggcagttgcatttcacaggt

SEQ ID NO: 110132 - DNA, 201 bp, Homo sapiens
agaatgataagatttgcaagttgaactcaaaggctacaaaaaagatgaagttttaaacatttgtcactttattaaagcaaatatttaactgaagaccacamgtggaccctttgtggcaaagccaccatggacaaagggaacaattccctgctgcagtggccatgatggaagatctgtggtggacaagagtgctgtcttcac

SEQ ID NO: 110133 - DNA, 201 bp, Homo sapiens
gacagatacaggggagagcttagaactgcaaaagcaaaaaagtccagattgcctcatgtacatgtgtgtaagtgtgcaggaatcacatggtgactgcagcrtgaagggaggggtctgctttcagagctttgtccctgtgagtcttcagtcctgctgacctgggaggagatgtggaatcacaggacagccttcagtgtgatg

SEQ ID NO: 110134 - DNA, 201 bp, Homo sapiens
aagccagtatacaccaagtattgtgttaagtattttccatgcatttctgccgccgcccctgcccccaccccccgtttaatactcatagtaactcttaaacrtaagcacttttattatcagcttcattttgtagataagaaaatcaaggctctattcacttggccaaagccgctcagacccctagaaggggacaaagcgtga

SEQ ID NO: 110135 - DNA, 201 bp, Homo sapiens
gtggctaccatctaggacagtgcacatttggacactagaaggatttgtatgtgcatccttcagccttgggaatgcagttatttcccactaaaaataaagarttgtgcgtctgctactcagtcttgtccaggtatcagtagcaaaggttgagagtttaggatagaagcactctccatatttcaatattctaattttctatgc

SEQ ID NO: 110136 - DNA, 201 bp, Homo sapiens
atttgtatgtgcatccttcagccttgggaatgcagttatttcccactaaaaataaagagttgtgcgtctgctactcagtcttgtccaggtatcagtagcamaggttgagagtttaggatagaagcactctccatatttcaatattctaattttctatgctcttttaagaataagtcgcaggtacttcagctagtaattgtt

SEQ ID NO: 110137 - DNA, 201 bp, Homo sapiens
caatggagatctcttcacatttttataaggaactattttttatcctttgctttttgtccccagcttctgcttgtactctcttacctgttgttgagatgctrtgctataccatctggacttgaaggacttatttgagttagtaagtcctttcctacctttgaaagaaagggggaaaaccagttctcataggcattctcattc

SEQ ID NO: 110138 - DNA, 201 bp, Homo sapiens
ttgagatattcctggagatatgcacttagtgagctaattgacttcttagttatggttttatgaacatttatttagccgttgtattgtggttggggattgtrtaccatgctttttacttgtatttattttttacttcttttagagacagggtctcactctgtcacccagtctggagtgcagtggtgtaatcatagttcagtg

SEQ ID NO: 110139 - DNA, 201 bp, Homo sapiens
cttttagagacagggtctcactctgtcacccagtctggagtgcagtggtgtaatcatagttcagtgcaatctcgaactcctgggctcgagtgatcctcccwcctcagccttcagagtaggtaggactacaggcacacaccaccacacctggctaatttttgtgtctttattttttgtagagatggggtctctctgtgttgc

SEQ ID NO: 110140 - DNA, 201 bp, Homo sapiens
actctgtcacccagtctggagtgcagtggtgtaatcatagttcagtgcaatctcgaactcctgggctcgagtgatcctcccacctcagccttcagagtagstaggactacaggcacacaccaccacacctggctaatttttgtgtctttattttttgtagagatggggtctctctgtgttgcccagtttggcctcaagtga

SEQ ID NO: 110141 - DNA, 201 bp, Homo sapiens
tgacgtgttgggctgggacaagggagggaaaaaaagagacaataaagcaatttgaagtaaaagaaaattagttcttcaggtatgctctcaagaaatacaarctggataaagggttgagaatgataaaaggattgacaaaatcaagctggataaaggaatggagaatgatgcttggttgtgtgtgtgtgcttataggagtgt

SEQ ID NO: 110142 - DNA, 201 bp, Homo sapiens
ttcttcaggtatgctctcaagaaatacaagctggataaagggttgagaatgataaaaggattgacaaaatcaagctggataaaggaatggagaatgatgcwtggttgtgtgtgtgtgcttataggagtgtgtgagtgtgtgtgcacgcaggtttcaccagtgcatatctatgatgctccttaaggtggtatggccaacaga

SEQ ID NO: 110143 - DNA, 201 bp, Homo sapiens
ggagatttttatgtgtgggtcagcattttaaacatggaaaatgcatattaataaaattagaagattggattaaaactagatgtggcaggttttaaggtgcwatatatagaaactgcaatctgcagatattttcttaatgattcatttgcttttatctctgagcaaatagaaccttttgctgtgtagttatggaaagcttgt

SEQ ID NO: 110144 - DNA, 201 bp, Homo sapiens
tgattgatatgtactattaatcccatagtcaattaaatacattgcaagcctccttgattgttgtggctttgtcctatgacatgtggttaggatcttgcaaraagatcttaatatcctttttattgagatgacggtcatttttgtcttataatgacagacaaggataacattgatttttgtgaagtaagttttccttttacc

SEQ ID NO: 110145 - DNA, 201 bp, Homo sapiens
cccatagtcaattaaatacattgcaagcctccttgattgttgtggctttgtcctatgacatgtggttaggatcttgcaaaaagatcttaatatcctttttrttgagatgacggtcatttttgtcttataatgacagacaaggataacattgatttttgtgaagtaagttttccttttaccaacatatcagctgcccattat

SEQ ID NO: 110146 - DNA, 201 bp, Homo sapiens
attctgatattgcacataacatactgaaattcctaattcctttctttctgaggaaattttagggttgcaagatagaaattttagcctttggaaaacagtawaaaatcctagaaaatattctgtatgtgttccaattgatgccaggccaggtgttcctggatcttcttagagagcggcaacactggtgccaggtcaccccaa

SEQ ID NO: 110147 - DNA, 201 bp, Homo sapiens
tcagatttgacaccttctcttcttcctattgctcttaagatcttgagagggtatccttcctgatcttggcctttaggtctttgggcaaatggaactataaktccattgttcagtaaaattgaatgagaaagtgcatataaaatatgtagcatgatggctggtagtgtggatgcccctttacagtaggggtgtacctggctg

SEQ ID NO: 110148 - DNA, 201 bp, Homo sapiens
ccaggcaacccctcattcactttcagtctctaagtttgccttttctggacattgcatataaatggaatcatatgatatgtggctctttgtatctggcttcrtagcatactgtttttgaggttcttctatgacttggcatatatcaagagttatttcttttgtaatgctgaatagtattttattatgtggataatctgttca

SEQ ID NO: 110149 - DNA, 201 bp, Homo sapiens
gcggcgccggcctgcccgggcttccctcgccccctgctactcttggtctccgcctgaccccctgcgcggcccctcgggcgccccacttcgggaggtgacgyggcgccgggtccaggcgcagcagggaaccccgctccagtgtggggcaggggcggcgcggcggcagccccgggtgcctcggggtatgagcgacccaacgca

SEQ ID NO: 110150 - DNA, 201 bp, Homo sapiens
gacataatcctagtgaaatcaaggaacctgttttatttgcttccttatactcagcacctagtgcagtgaccagcacgtagcacatatttaatgtgtttccmtgtcaaaatactatttaagttaagacttgattgagtctgttaggtaccagagtcactcactcattactttaatttcaaatgctacagtttgaaaacttaa

SEQ ID NO: 110151 - DNA, 201 bp, Homo sapiens
gtatgcttggttgttaaaaaaaaaaaagcagtgggaagaatagaagttgtgttagaatacaaggtacattttattttcaccagaaaggaaaaatattgttstaagattataaatagcacgaaaggcttattttaattattttaaaaatatgatacctttccactgcagtacctggatttcaagctctgactcaggggtgtc

SEQ ID NO: 110152 - DNA, 201 bp, Homo sapiens
ggtaacctcagttaatagtttggttgttgctcatttatttatttgtttttgagacagggtctcactcttttgcccacactagagtgcagtgacataatcayggctcactgcagccgcaacctcctgggctcaagggatcctcccacctcagcttcctgagtagcttggactacaggtatgccactatgccaggctaatttt

SEQ ID NO: 110153 - DNA, 201 bp, Homo sapiens
aggcaggagaattgcttgaacgcaggaggcggaggttgcagtgagccgagattgtgccattgcactccagcctgggagacaagagcgagacttcgtctggaaaaaaaaaaaaaaaaaaagtaaaagaaaaagaaataaaacataacagggatcctggaagcctcctcctcatgcagtccccatcattttcctaccctgctt

SEQ ID NO: 110154 - DNA, 201 bp, Homo sapiens
ataatgccatatagtttggaaaaatatataattattagaagagttagggttgttgttttccttaatgttattgcatagagaaaatgaagcattgaatgcarcaattagaaaacagtgcatttctcagcaagacaatcaataatggtcgggaataatgtcaagaatctctgcatcttaagaataatcttatgtggcagggca

SEQ ID NO: 110155 - DNA, 201 bp, Homo sapiens
tagactttacccactaaaagaaaagaaaaaaaaaccttttttacacttgattcagaaatagtgttttttcatgcagtttaaacattgtaaaagtgtattgyttcctagtaccagctatatgtccttatgaactttcatatttctgataaattgttagaagtaaaactgctaaagcaacatattaatattttaattgttatc

SEQ ID NO: 110156 - DNA, 201 bp, Homo sapiens
gtttattataaattaatatttttaaactctaatatttttaaactctaataactgatatggatactgaagagtttaactgtactgatgcacggaacttactytgaattgcatgaaaaaataagatgggttgtgctggattgagagatgtgacaaagcacatgtacaaaatgtgaacagttgtagatctaggttatatgtgga

SEQ ID NO: 110157 - DNA, 201 bp, Homo sapiens
gtaaataattctgtggaatacatgctattttagtttcatttacaaatgagatagttgagggccaagggtttggatatttgcctgacattaaacagaagtgwtttatgtggaattggcatttggacactggcccttagaattcagggtgctattgtctcactactccaagagttgttgtctcagacctggggttcatccggt

SEQ ID NO: 110158 - DNA, 201 bp, Homo sapiens
gggaagcaggtgggaaaaggaagaatgaaaaggagagaggaaaggagggaggagggagaaaggaagaaagcatgaggcagggaaggagagaaggaggaaaycaaagaaagtggcataaagagaaaaggaaatagctatttctcaggccttcacaacccttgaaagccaaatataaactcttccaagttcattgatactgct

SEQ ID NO: 110159 - DNA, 201 bp, Homo sapiens
gacagggtctcactcttttgcccacactagagtgcagtgacataatcacggctcactgcagccgcaacctcctgggctcaagggatcctcccacctcagcytcctgagtagcttggactacaggtatgccactatgccaggctaatttttgtactttttgtagagacagggtttcaccatgttgcccaggcttgtctcgaa

SEQ ID NO: 110160 - DNA, 201 bp, Homo sapiens
ccatccacttctccatctggaggtgctgattcctctgcttggctggctggggactcctaggaccctccaacctcacttttagacgtgccttttctcagctyctcttgtaagtgtgcaagcttcgattcctataataaatcccttgtctataagtcatagtagttctgcctccttaattgaaccctggctgactcacatctt

SEQ ID NO: 110161 - DNA, 201 bp, Homo sapiens
tccagcacctcttgaaattacaagtgttacacaggtatttttactgtcaatgtatatcataataggattgctttgtcctgtaattaatcagtagagatttyttctggaagtttgttcttttgaagaaacttgtatttttctgaaaaactgtcatttcttcaagtggcttcatttgcaaaagatttgtttaatgtcctgtgg

SEQ ID NO: 110162 - DNA, 201 bp, Homo sapiens
agcacctcttgaaattacaagtgttacacaggtatttttactgtcaatgtatatcataataggattgctttgtcctgtaattaatcagtagagatttcttytggaagtttgttcttttgaagaaacttgtatttttctgaaaaactgtcatttcttcaagtggcttcatttgcaaaagatttgtttaatgtcctgtggttt

SEQ ID NO: 110163 - DNA, 201 bp, Homo sapiens
ctatctttgaaaaccacagttctgcatgtggtttatgaagggcctttaaaatgaccataacttctccatttgtctgtcacatctctccttggatggccccytgtattcatacatctttctccacatgcactctctccagtgttgcagcttcatctctgatcctctcccacgctctctattgagttccctttctgactttcc

SEQ ID NO: 110164 - DNA, 201 bp, Homo sapiens
tttactgtcaatgtatatcataataggattgctttgtcctgtaattaatcagtagagatttcttctggaagtttgttcttttgaagaaacttgtatttttytgaaaaactgtcatttcttcaagtggcttcatttgcaaaagatttgtttaatgtcctgtggtttcattcttacaatgttagaaattctttaattagttac

SEQ ID NO: 110165 - DNA, 201 bp, Homo sapiens
caggatggtctcgaactcctggcctcgagtgatcttcccactttgacctcccaaattgctggcctttgggaggccaagttgggaagattataggcctggcygacttgtttttttaaagctacctcattgagaatgggcaaagaagttatgttggcatgtggtctcattttccaggactttcccgtgaaatattttaccctg

SEQ ID NO: 110166 - DNA, 201 bp, Homo sapiens
actgttccttgtttagtggattcagttttaactcactgtggcatacacagtcagctgtgcatgacgcagtcacaatttacctttcgctcattgtcctctckttatgcctgttacccagtgtgtggccacatcagtttccttcctgccttcgtccaaattctttctttcatagtgcaccttctaatatggtgaggatgactc

SEQ ID NO: 110167 - DNA, 201 bp, Homo sapiens
atatacaaaataaagtataggtgtttctgtaaatctggacaggtttcaagattcatctggcatttaagcttagaatttctgtctcttcggtgtaggtgatmatccctattggtttgcctgggacagacttggatacatctgttattccagaactattattaactgcaaatcccttttactctcaaagttgtctccatttaa

SEQ ID NO: 110168 - DNA, 201 bp, Homo sapiens
aggttggagtgcagtggcaagatctcagctcactgcaacctccgcttccagggttcaagtgattcccctcctcagcctcccaggtagttgggactacaggygcgaaccaccacacctggctaattttttgtatttttgtagagatggggtttcaccatgttggccaggatggtcttgatctcctgacctcgtgatctgcct

SEQ ID NO: 110169 - DNA, 201 bp, Homo sapiens
aaggcttattttaattattttaaaaatatgatacctttccactgcagtacctggatttcaagctctgactcaggggtgtccagtcttttggcttccttggrccatagtggaagaagaattgtcttgggccacatataaaacacactaacaatagatagctcatgaactaaaaagaaaaaagtgcaaaaaaatctcataatg

SEQ ID NO: 110170 - DNA, 201 bp, Homo sapiens
cattttgaatagcaagtattttgttgaattatgtaagtcagtaaattgccctcacactttattgattaaaatgtcctagcttttgaaggactcacaagtayaattttcctgagacagactgtactttcgttttttaaaatccaccgttgaggactgtgcatgataaagtggaagcaagtggttattaattttttattgaaa

SEQ ID NO: 110171 - DNA, 201 bp, Homo sapiens
tttaagtgtgtctcagagattctggtatgttgtgtctttgttctcattggtttcaaagaacatctttatttctgccttcattttgttatgtacccagtagycactcaggagcaggttgttcagtttccatgtagttgagcggttttgagtgagtttcttaatcctgagttctagtttgattgcactgtggtctgagagaca

SEQ ID NO: 110172 - DNA, 201 bp, Homo sapiens
gtctttgttctcattggtttcaaagaacatctttatttctgccttcattttgttatgtacccagtagtcactcaggagcaggttgttcagtttccatgtasttgagcggttttgagtgagtttcttaatcctgagttctagtttgattgcactgtggtctgagagacagtttgttataatttcttttcttttcatttgctg

SEQ ID NO: 110173 - DNA, 201 bp, Homo sapiens
gatgttgatacatctacctagttgtgggagatacacagattaagcagtaaggacagatgctgctctcagatacattttgtctagtaagcctagtgtttttaaaaatccagaattttggcttttgaaaacaggaaagatctgggcataaaaggcctacattcgcatggcaacaattggatagattgtgtagcaactgcccca

SEQ ID NO: 110174 - DNA, 201 bp, Homo sapiens; identical to SEQ ID NO: 18146

SEQ ID NO: 110175 - DNA, 201 bp, Homo sapiens; identical to SEQ ID NO: 18158

SEQ ID NO: 110176 - DNA, 201 bp, Homo sapiens; identical to SEQ ID NO: 18148

SEQ ID NO: 110177 - DNA, 201 bp, Homo sapiens
tcataataggattgctttgtcctgtaattaatcagtagagatttcttctggaagtttgttcttttgaagaaacttgtatttttctgaaaaactgtcatttyttcaagtggcttcatttgcaaaagatttgtttaatgtcctgtggtttcattcttacaatgttagaaattctttaattagttacaggtgttgaatgatgtc

SEQ ID NO: 110178 - DNA, 201 bp, Homo sapiens
aacttgtatttttctgaaaaactgtcatttcttcaagtggcttcatttgcaaaagatttgtttaatgtcctgtggtttcattcttacaatgttagaaattytttaattagttacaggtgttgaatgatgtcacatgggcattttttttttttttttttttttttttttttgccatcagtgttagggagttctgtcctaagg

SEQ ID NO: 110179 - DNA, 201 bp, Homo sapiens
tggtgcgctgcacgcactgtcctgcgcccactgtctggcactccctagtgagatgaacccggtacctcagatggaaatgcagaaatcacccgtcttctgcrtcgctcacgctgggagctgtagaccggagctgttccatttcggccatcttggctgccttccccaattttttttttcttactgtgagtatgtggtagtaaa

SEQ ID NO: 110180 - DNA, 201 bp, Homo sapiens
tgcatggaggtacctatatttcacgtgacaagaatggcctgatgataagtgcctagtttctctgtttcagtcctttaggaatccagagaacagctgccccyagaatccactagaattccactagattcatgttatatcacccattttcttcaaatctgtctaaatgagatggactttttttattcttaggttcagtagcaa

SEQ ID NO: 110181 - DNA, 201 bp, Homo sapiens
tagttattattctcatggcaatagtcatgtccacagaaactctgctgtggaaatagcaaggagacccatcttttccaatatattcattcagctgcagttayatggaaattcaagataaaaaggactcagctgtcagtgaaagaggattcccagtcaaggcccctgcatggaggtacctatatttcacgtgacaagaatggc

SEQ ID NO: 110182 - DNA, 201 bp, Homo sapiens
tctctctcttcagagagtcgctaggttataaaggaacaatatccctgcaaactcaatgagcctgtctttcagacaagtcttgatctgggatttcttgagamctgtgttgacctgtgttatctgtttgctactctgttgattggagtatttcttagttattattctcatggcaatagtcatgtccacagaaactctgctgtg

SEQ ID NO: 110183 - DNA, 201 bp, Homo sapiens
ctgggaggagagaagggttgtggttttctgggaaactgctccgtcccctttcttccctggccctgtccaccagtgttagcctggagcaaggcctcacttgwctggggcacttgaagctgctacaggttgggagaagtggtaacagcttggagtcctcactcagggcagtgagcacagccagctcttcctgggcccttccca

SEQ ID NO: 110184 - DNA, 201 bp, Homo sapiens
ccccttccaattaaaattaacactctgcaagtcagttagtcaatataatctcccataagaagtacccccaacatcaatgtactcaatacatctataaaaasagtcatttggaactgtaacatgaaactgggatggaattcctgttctcaaatctgccaaggcagagattacagtcttctcaactaggtggcaagaacttcg

SEQ ID NO: 110185 - DNA, 201 bp, Homo sapiens
gacatcctgtttatagattaataaatggatccttcaccaagttgccaattttatgggtgttctctatattaactctccaacaaatgatgatggagtatacktatttacatgcatcaagatgacataagtctgagatgattgaacaaaatatggctcagaaagaatgtgccaataaatattctcaatctgcaccaatgtagc

SEQ ID NO: 110186 - DNA, 201 bp, Homo sapiens
acctagccagggggagtttttaatgctcttttcatatagttctgaatattctttggtactacactaaaagtctattggtaatagtttattgaaaattagtktccatgtggaatctggaactatctcgatgaacttttcatattccattaaaacccattggtctgtgttacacattaagggagttttatccatgcatggttc

SEQ ID NO: 110187 - DNA, 201 bp, Homo sapiens
acatgtgccatgttggcttgctgcacccattaactcatcatttacattaggtatatctcctaatggtatccctcccccctcccgccaccccacgacatgcyccggtgtgtgatgttccccaccgtgtgtccaagtgttctgattgttcagttcccacctatgagtgagaacatgcggtgtttggttttctgtccttgtgat

SEQ ID NO: 110188 - DNA, 201 bp, Homo sapiens
aacagccatttttctgtgggtgttatcaattaatctaggtaatgaattctcttcattatctcgttcttcatgttaattatacaggattttcttatgcctakttatcaagtcaggacaagtagagtttgtttttttttttttttggcccacatgcctttgaatatggaatatgtacaaacaagttaacatgatgggtgatgg

SEQ ID NO: 110189 - DNA, 201 bp, Homo sapiens
gaattcctcacctgaatcacttccttattgactgaatctatttagactcccctctaatttagcagagtattttttattaaatccaggcatacaaacatcarttatccaagctgcatctcatttccttcaccatttattttccttcgttggctgccagtggattagaagacatgattagaattcatcaggaaaataaaaaca

SEQ ID NO: 110190 - DNA, 201 bp, Homo sapiens
taccaagcctcaatgctaacagcatttaatagctgtcattagaaagcaagcttctgcttaccagttgtcctactgtgaatagtaatgggagatttcttttytgggagtagccccaatctctaattggtttgaaaaatattgttcatttctttgattcttaaggcattacctttttgttgaatttcaataagtttgtatttc

SEQ ID NO: 110191 - DNA, 201 bp, Homo sapiens
tagttgcacttactgtgcttcacgtatatgctacagtgtttttaaatacaatgcagtacttaactatttgcaataacctttgcaaagtagctggcttactstgaaagttttctattttttcacttccaaccaatgtcagggaggaaaaaagaacaaaacagagactttccttctatgaacttgttaaaggtaacaggtttt

SEQ ID NO: 110192 - DNA, 201 bp, Homo sapiens
aaataaagttttattggaatacaccatgcttatttacttatatattgtttgtctatgattgctttcatgctgcaacaagggtaagtagttgtgacagagaygggctcaaaaaacctaaaatatatactgatagagctcttaaaagcaagatgttgtcgatccctggtgaatgtcagtggctcctttatcattatccagcta

SEQ ID NO: 110193 - DNA, 201 bp, Homo sapiens
ctatttctttatatcctcactaacttttgttgttttctgtctctttaattttaactactgtagtaggtagagagtgatatttcactgtggttttaatttaycttttctaactgactaatgcagttgaatatcttttcatgaacttactgaccattcatctaaattctttggtaaattatctggccatatagtttgcccatt

SEQ ID NO: 110194 - DNA, 201 bp, Homo sapiens
tcgcctctctactaatactgcaaaaactagtcaggtgtggtggcagctgcctgtagtcccagctactcaggaggctgaggtatgagaaccacttgaacccrggaggcggaggttgcagtgagtcaagattgtgccactgcactccagcctgggtgaaacagtcaaaacgtgtctcaaaaaataaataaataaactaaaaag

SEQ ID NO: 110195 - DNA, 201 bp, Homo sapiens
tcgaagatttttctactgtatgttcttgtaaaagtttattattttagcttttacatttaagtctgtgaatctatttggagtcatttttgtgcatggtatgyggtgagagtctaagttaaaattgtgctattgtctctaccattttttgaacagaggatacattccccaataattgccttggcacctttgccaaaaatcaat

SEQ ID NO: 110196 - DNA, 201 bp, Homo sapiens
tctactaatactgcaaaaactagtcaggtgtggtggcagctgcctgtagtcccagctactcaggaggctgaggtatgagaaccacttgaacccaggaggcrgaggttgcagtgagtcaagattgtgccactgcactccagcctgggtgaaacagtcaaaacgtgtctcaaaaaataaataaataaactaaaaaggaagaaa

SEQ ID NO: 110197 - DNA, 201 bp, Homo sapiens
tcttaatgattcatttgcttttatctctgagcaaatagaaccttttgctgtgtagttatggaaagcttgttaatttgaacatttgtttaaaatgggtaatrcatacattttgtttctgaaacactgttcataatggtaagatattgagtgagatcctcattttcttgcatagaaaatggatttatgtctgagagagcaaat

SEQ ID NO: 110198 - DNA, 201 bp, Homo sapiens
catcaccgcctctcccctggtcttggctgtgtgagacatctgtagaccctgtatttgtaattgtcagtttattggtctggctctcaaactagtctttgaatcttccctgaggacagtgatgatacttcatccttctccatatcccaaaacttaattctgtacctggtacaagggagatgttgatcaagtgtctgttgaaat

SEQ ID NO: 110199 - DNA, 201 bp, Homo sapiens
aactttggtgaatctgataattatgtgtcttggagttgctcttctcgaggagtatctttgtggcattctctgtatttcctgaatctgaatgttggcctgcsttgctaggttggggaagttcttctgggtaatgtcctgaagagtgttttccaacttggttccattctccctgtcactttcaggtacaccaatcagacatag

SEQ ID NO: 110200 - DNA, 201 bp, Homo sapiens
gaataacttgctcggcatatttggtctctgtttctttctctatgaactgggaatagcaattcagggacattgtgaagagatatcatatgagagattgtatwtgaagttgctccataaggtcttatcaataagatcttcttccttctctgctaggatagtgagtttccaggcctggattcacattagctttatttgtgttgt

SEQ ID NO: 110201 - DNA, 201 bp, Homo sapiens
ttggtgttcaagactggatacattaataacagttttaattgttatctataacatggctgtctgatagtgatgatgatgatgaggaggagcaggaggaggayagtcgtggtggtgatgggtgaacagtaacagtaaatgggaggcagcttagggtactgactaagcccataggagtcagactatcttggttgagatcccttt

SEQ ID NO: 110202 - DNA, 201 bp, Homo sapiens
gagccaaggaaagaaatgtttgtgataatactcatttaatggcttgtgctgagaatgtgcagctttatttgacttttattttattgtgtaacccatgaccrtggttatcttgtggagagggggtaactgaacaaaatgttaaccttccagttctagaaggttgaatggattttcccaagagcaagctgggttggtcaaaat

SEQ ID NO: 110203 - DNA, 201 bp, Homo sapiens
gtttgcaagactttttagccttaataaggataatactaatagcagtaatagtagggactaccacctactgagcatttaactatgtgccagatgttgtattraggcaatttataaaaatcaagtcatttaaattcttcagtgtcattatgaggtgaccagagtggttgtcttcttacagacaaggaaattagtgttgaaaaa

SEQ ID NO: 110204 - DNA, 201 bp, Homo sapiens
agaaaattaagagttatttacagctcttaaatggcttattcttgttttcctggtacctgaaacactctaggttttaaatgagttacctatggaaggaagaygaatatgtgagaactgagggataagtaagtggccatattgtcagtatacctttgaattaatttatcgaggaaaggaaataaaatgttttaatttgttttt

SEQ ID NO: 110205 - DNA, 201 bp, Homo sapiens
attaatctaggtaatgaattctcttcattatctcgttcttcatgttaattatacaggattttcttatgcctatttatcaagtcaggacaagtagagtttgtttttttttttttttggcccacatgcctttgaatatggaatatgtacaaacaagttaacatgatgggtgatgggtttaaatttacatttctaagaagctcc

SEQ ID NO: 110206 - DNA, 201 bp, Homo sapiens
tctctgaggaggtgatttttaagctgacctgtgaggatgaacacgagccagtcatgagaactgggatgaaagtgtttcaagcacaggtgacaggagaggcygagatcctgaactagaaacagctttatcaatttgataaacagaaaggggatcggtgagaatgaagtttagaaaaggatagtatggtgaggtctggcaaat

SEQ ID NO: 110207 - DNA, 201 bp, Homo sapiens
ttcctagtgaaaagctgtagacaggtgagtcttgtgtgtccttgtgcaaacttcataaggcgccacctctagtttcattcagtgattgttccctgtccccyttctaggaaccaacgtccaagaggcccagaagatactcaacaacagcggactccccattacttcagccattgacctggaggatgcagccaagaaggctgt

SEQ ID NO: 110208 - DNA, 201 bp, Homo sapiens
ctgatggtagtttcttttgctgcgcagaagctctttagtttaattagatcccatttgtcaattttggcttttgttgccattgcttttggtgttttacacakgaagtccttgtccatgcctatgtcctgaatggtaatgccgaggttttcttctagggtttttatggttttagttctaacatttaagtctttaatccatctt

SEQ ID NO: 110209 - DNA, 201 bp, Homo sapiens
aaggtgacatgatattttaaaaggatcctttcgctgagccgaaattggcctgtagggagccaagagcagaagcaggagaccagtgaggaggcaggcaagcrgggaggatggtggctctccctagggtggctcttccaagttggaatttggacagggcaatggatgacagaggcatctgcagcaggtttggccctctgctgg

SEQ ID NO: 110210 - DNA, 201 bp, Homo sapiens
tataaggtgtaaggaagggatccagttttagctttctacatatggctagccagttttcccagcaccatttattaaatagggaatcctttccccattgcttstttttgtcaggttagtcaaagatcagatagttgtagatatgcggtgttatttctgagggctctgttctgttgcattgatctatatctctgttttggtacc

SEQ ID NO: 110211 - DNA, 201 bp, Homo sapiens
gtagttgagcggttttgagtgagtttcttaatcctgagttctagtttgattgcactgtggtctgagagacagtttgttataatttctgttcttttactttwgctgaggagagctttacttccaactatgtgttcaattttggaataggtgtggtgtggtgctgaaaaaaatgtatattctgttgatttggggtggagagtt

SEQ ID NO: 110212 - DNA, 201 bp, Homo sapiens
gttgaagggggacttgtttggcctaacatatttttctaaatatttatttttgctggaatatgaagatacacttaatcttccagctcattttttgttggaayggttatttagcaaagcaagtagggggctgctgttgctaagctttttgttattattttgccacacaagaggatattttttaaatagttgttgggaacttta

SEQ ID NO: 110213 - DNA, 201 bp, Homo sapiens
tggatttattggaaaggactgtggggagtaatttaaggagggctaacaaattgctaactgcagggtgtggagatggtagcagggccctgtgagacagtcamatctgatgcattgagatgacatgtttgacccctggtaatggtgatggtgaatgtgcacgtaggttctttagggtttacaaagcaccttcacgtacattat

SEQ ID NO: 110214 - DNA, 201 bp, Homo sapiens
gggtctgtctccttgggctcagtgagggcactggctgttttattcaccttggtggtcaggacgtggtaggaattcaataaatgtttatggaatataaattkgaatatgaaaaggagcaaaaaggttattctcttcattagaaacatcagaacgatctctgttcatctcaaattgatgctaagagccatgttacgtctatgt

SEQ ID NO: 110215 - DNA, 201 bp, Homo sapiens
ttgacaaacctgacaaatacaaacaatggggaaagaattccctcttcctaaagggtgttgggaaaattggtaagccatatgcagaaaactgaaactggacyccttccttacgccttacacaaaaattaactcaagatggagtaaagacttaaacataagacctaaaacgatcaaaaccctacaagaaagcctaggcaatac

SEQ ID NO: 110216 - DNA, 201 bp, Homo sapiens
ctctcagcatttgcttgtctgtaaagtatttcatttctccttcacttatgcagtttagtttgggtggatatgaaattctgggttgaaaattcttttctttragaatgttgaatattggcccccactctcttctggcttgtagagtttctgccgagagatccgctgttagtctgatgggcttccctttgtgggtaacccgac

SEQ ID NO: 110217 - DNA, 201 bp, Homo sapiens
atggcagaggcatgcaggtgccaatgtgtgttttactagaatgccaagttcctctgcacaaaccttactgagcctcagcaggtcctgagtttctatcatgkaccccatggagtcattcttgctcttgaatgtttttcttctattgttctggcaagttcctctccatcctacagttatttggaaactactgctgtaccaagc

SEQ ID NO: 110218 - DNA, 201 bp, Homo sapiens
tctgccatgattgtaagtttcctgagacctccccagccatgcggaacagtgagtcagttaaacctctttcctttataaattacccagtctcaggtagtatmtttatagcattgtgaaaacagactaatacaggtagttttcttactcgttcatactacaatcgaaaaagacctctgacctcttactctaccttctcatggt

SEQ ID NO: 110219 - DNA, 201 bp, Homo sapiens
ttttctttaagaatgttgaatattggcccccactctcttctggcttgtagagtttctgccgagagatccgctgttagtctgatgggcttccctttgtgggyaacccgacctttctctctggctgcccttaacattttttccttcatttcaactttggtgaatctgacaattatgtgtcttggagttgctcttctcgaggag

SEQ ID NO: 110220 - DNA, 201 bp, Homo sapiens
atttttcagaggtgcccaaacttgcctgtgcatcaaaaccctctgtggaactcttagaaacactgaactctgaatctaattcctgggattttgattcattygctttggatttctcaattattaagatgcactacaagtgattctgatgccgctcagccatggaccatggaaaccactgatttcagtgatatatcatacagc

SEQ ID NO: 110221 - DNA, 201 bp, Homo sapiens
ctttctctctggctgcccttaacattttttccttcatttcaactttggtgaatctgacaattatgtgtcttggagttgctcttctcgaggagtatctttgwggcattctctgtatttcctgaatctgaatgttgtcctgccttgctagattggggaagttctcttggataatatcctgcagagtgttttccaacttagttc

SEQ ID NO: 110222 - DNA, 201 bp, Homo sapiens
tttccaacttagttccattctccccgtcactttcaggtacaccaatgagacgtagatttgatcttttcacatagtcccatatttcttggaggctttgttcrtttctttttattcttttttctctaaacttcccttctcgcttcatttcattcatttcatcttccatcactgataccctttcttccagttgatcgcatcggc

SEQ ID NO: 110223 - DNA, 201 bp, Homo sapiens
gctgtctgatcgttcctctggaagttttgtctcagaggagtacccggccatgtgaggtgtcagtctgcccctgctggggtgcctcgcagttaggctgctcrggggtcaggggtcagggacccacttgaggaggcagtctgcccgttctcagatctccagctgcgtgccaggagaaccactgctctcttcaaagctgtcaga

SEQ ID NO: 110224 - DNA, 201 bp, Homo sapiens
gaaaatataatttgccaatatacagccaaatttgtttttggaacacattctagattattatctttctcacttaccaccagtgtggtatactgcattgttayaaaacaaaatcacaaacaattttcaggtcagtacattttagtaaagtcagtttattacgttgcctattttgtagatgagatacctgacttgtgacaaatg

SEQ ID NO: 110225 - DNA, 201 bp, Homo sapiens
agttatcatattaaagtgtctgttattcaggtggataatgaggtcggagatcgagaccatcctggctaacacggtgaaaccccgtctctactaaaaatacaaaaaaaaaaaaaaattagccgggcgtggtggcgggcgcctgtagtcccaactacttgggaggctgaggcaggagaatggcgtgaacctgggaggcggagc

SEQ ID NO: 110226 - DNA, 201 bp, Homo sapiens
gtgttcctaaccaccatactgtgctgctttaagccaaaagcaacgaactttggtctagagcatttcaaaaggtcatccaacagaacatataaaaatagaaraagccagcaacatccttaatcttctttatttagaatacttactttacttacttttaaaaaataccccataggatcatgaacatcagaccaattgggaagg

SEQ ID NO: 110227 - DNA, 201 bp, Homo sapiens
tacttcagctttctgagcctcagttttcctgtctctaaaaataatggtaataaaatcatagctcataggagtttggaaagggttgaattacttatatgccrggtaaatagtgagtagcaataattgctgactgctaataagtacttaccacttgccacgtactgggcttagtgccttattttaattatctcatttaatcct

SEQ ID NO: 110228 - DNA, 201 bp, Homo sapiens
gaactttggtctagagcatttcaaaaggtcatccaacagaacatataaaaatagaagaagccagcaacatccttaatcttctttatttagaatacttactytacttacttttaaaaaataccccataggatcatgaacatcagaccaattgggaagggtagattaattgactgcctaaggactgaaattggcacattagac

SEQ ID NO: 110229 - DNA, 201 bp, Homo sapiens
ctcccaagtagctggaattacaggcacccaccacatggatgcccggctaattttttgtacttttagtagagatggggttttgccatgtcagccaggctggwcttgaacttctgacctcaagtgatctgcccgcctcagcctcccaaagttctgggattacagatatgagccactgcgcccagcctaaagcagtactcttgg

SEQ ID NO: 110230 - DNA, 201 bp, Homo sapiens
cctcaagtgatctgcccgcctcagcctcccaaagttctgggattacagatatgagccactgcgcccagcctaaagcagtactcttggtggacaagggaacwtgagtggtagctgggagaagcatcagcatgatggtgatatgtacattcctggtgtagtcagctcttacattctagtggcttattggcatccagtggcagc

SEQ ID NO: 110231 - DNA, 201 bp, Homo sapiens
ccaatagtgttacccagttgatccagaagttttactgtttcagagtaacttgtgatcttgggcaagttcagcccgtttcctaatttgtaacatggctttaytggtcagtaaagccaattgggcaaaaaggttgtgcaatagtaacaaataacccccagaatttcagtggctaagaatccacaaaggtgtattttttactac

SEQ ID NO: 110232 - DNA, 201 bp, Homo sapiens
ttttgatgctactgtgaatggcattactttaataatttcatttttagattattcattgcttgtatgttgaaatacaattgatctttgtatcttttattttrtatcctgtgaccttccttttcttgtttattcatgcaaattgtgtttaaaattgattccttaacattttctctatacagaactatgtcttctgtgaatagg

SEQ ID NO: 110233 - DNA, 201 bp, Homo sapiens
tgaatgcctttttttttccttccttgcctgcttgcagtggctcaacctctagtaccatgttgagtagaatcggtaagaggcgacttccttaccttgccttytatcttaggggagtagcattaattctctcccagtaagtatgatatttgtcatattcctggctgttttaacctgtagtctgtggtgtggtgttgcaaaatg

SEQ ID NO: 110234 - DNA, 201 bp, Homo sapiens
ctcccctcccctctcctcccctcccctcccctgccctcccctccattcccctcccttccccgtgcccacagcattgattggcttgcccacagcattgaatrgaagtagggatcagcattatagctttaccagaaaatattaaggttttctccttatcaatggagatctcttcacatttttataaggaactattttttatcc

SEQ ID NO: 110235 - DNA, 201 bp, Homo sapiens
cttaggggagtagcattaattctctcccagtaagtatgatatttgtcatattcctggctgttttaacctgtagtctgtggtgtggtgttgcaaaatgcagagtagcttcctgctagtaagaatctaacctgttcttactgctctgggttaaatcattcattaacactgagagagtacatttttttactgtgcagggtatag

SEQ ID NO: 110236 - DNA, 201 bp, Homo sapiens
cccctcccccgacaactgcacagcctcccccaataccaacatcccccaccagcatggtacattcattacgattgatgaacctacattgacacatcatcagkccaagttcataatttacattagggtttactcttggtgttgtacattctatgggtttggacaaatgtctaattatatatatttgtccttatagcattatac

SEQ ID NO: 110237 - DNA, 201 bp, Homo sapiens
tctgcccccacctcccagtactatcacctgggggttaggatatcaacttatgaattttggggtacaagagacccaaacattcagaccatagcagagaatgkgggggtatagaaaaaacattagccatattagcaagctgtgtgtggataggaggaatagacttatatgctagctttccagctgtgatgatgcaatatgaat

SEQ ID NO: 110238 - DNA, 201 bp, Homo sapiens
acttggcagcaagtcccaagtccttttccccagctcctcctttgccatccacttctccatctggaggtgctgattcctctgcttggctggctggggactcytaggaccctccaacctcacttttagacgtgccttttctcagctcctcttgtaagtgtgcaagcttcgattcctataataaatcccttgtctataagtcat

SEQ ID NO: 110239 - DNA, 201 bp, Homo sapiens
ttctgcaagtccaatattattgactccaaatagatgatcattgtagtagtcatctcattgcagtatcagtgatacatttagcatttaggaaagtattatawtttagaaaagagcaatgctgaataaaaaccagctcagtaacacaaatagttgactcatcactgaactgtttttaaaaaatagttgaaaataacttacttt

SEQ ID NO: 110240 - DNA, 201 bp, Homo sapiens
ttggaacatgctggcctctcagcctgctgtgctttgcctcagttccttcacaggtatacctcttttctgtctccagatttctgcacagatgtcatttcttyaaaggtgaccactcagtctaaaattggcctgcacagctcatcatgtgtctttcttttctttttcttttttctttctttttttttttttttttttgagatg

SEQ ID NO: 110241 - DNA, 201 bp, Homo sapiens
gcaacctgaagactgggagaattaggcactgactgatggtttgaccttcattgttggtgagaacaaccaacttgaaatcagaatggttctgtgctaattcyaacaccatgtgctgagaaacagtttttatatacttatgaacttccatttctgataaatcaatatgaagacctatatattttatttttaactaatggtaaa

SEQ ID NO: 110242 - DNA, 201 bp, Homo sapiens
gtctaaaattggcctgcacagctcatcatgtgtctttcttttctttttcttttttctttctttttttttttttttttttgagatggagtctcactgtgtcrcccaggctggagtccaatggtgcattctcgtttcactgcaacctctgcctcctgcgttcaagctgttctcctgtctcagcctcctgagtacctgggatta

SEQ ID NO: 110243 - DNA, 201 bp, Homo sapiens
aattggcctgcacagctcatcatgtgtctttcttttctttttcttttttctttctttttttttttttttttttgagatggagtctcactgtgtcacccagsctggagtccaatggtgcattctcgtttcactgcaacctctgcctcctgcgttcaagctgttctcctgtctcagcctcctgagtacctgggattaaaggtg

SEQ ID NO: 110244 - DNA, 201 bp, Homo sapiens
aacaataaaatcaggtcttcagttgctgacctggtttctattgtttactttcttgtcaagggcttctcctcctcaaagttattttaaagcctgatcttacmacagtaaattcagtttcacctgtgaattggtaggctacttttaaaggaaaatgtttttctaaaaaaagaagagtgataacataaaatacatacctttggc

SEQ ID NO: 110245 - DNA, 201 bp, Homo sapiens
acagctcatcatgtgtctttcttttctttttcttttttctttctttttttttttttttttttgagatggagtctcactgtgtcacccaggctggagtccartggtgcattctcgtttcactgcaacctctgcctcctgcgttcaagctgttctcctgtctcagcctcctgagtacctgggattaaaggtgcgtgccaccac

SEQ ID NO: 110246 - DNA, 201 bp, Homo sapiens
ctctccctagggtggctcttccaagttggaatttggacagggcaatggatgacagaggcatctgcagcaggtttggccctctgctggaagtggcatggccrgagatggtgtggcaggaggtggtatcccagagccttggtgattgaacataccaaggccactggtgagtctcagtgggaggctgaggcatcagaggagagg

SEQ ID NO: 110247 - DNA, 201 bp, Homo sapiens
ataaaatcaggtcttcagttgctgacctggtttctattgtttactttcttgtcaagggcttctcctcctcaaagttattttaaagcctgatcttaccacartaaattcagtttcacctgtgaattggtaggctacttttaaaggaaaatgtttttctaaaaaaagaagagtgataacataaaatacatacctttggctatt

SEQ ID NO: 110248 - DNA, 201 bp, Homo sapiens
gtctttcttttctttttcttttttctttctttttttttttttttttttgagatggagtctcactgtgtcacccaggctggagtccaatggtgcattctcgwttcactgcaacctctgcctcctgcgttcaagctgttctcctgtctcagcctcctgagtacctgggattaaaggtgcgtgccaccacgcccagctaatttt

SEQ ID NO: 110249 - DNA, 201 bp, Homo sapiens
agagccagtgcttttgttgcagagatcagaatcagaacctactgcatgggtagaattttacagctcctcgaagtcaggatcatgtattatttatctttgtrtcttatgtcctctttttggcctcaggaaccagaacagtattttgttgtgtcagatgaggtcccccagtataaagattaaagaataactttcaaacagcta

SEQ ID NO: 110250 - DNA, 201 bp, Homo sapiens
tataaatttgaatatgaaaaggagcaaaaaggttattctcttcattagaaacatcagaacgatctctgttcatctcaaattgatgctaagagccatgttaygtctatgtaatatgtgatattagtatttcttaaaatgtcacctgagtattgtagaggtagagttgcatgcatttgatactaggaaggagattcttcctat

SEQ ID NO: 110251 - DNA, 201 bp, Homo sapiens
cagctaatttttgtatttttagtagagacaaggtttcaccatgtgggccatgctggtcttgaactcctgacctcaggtgatccatctgccttggcttccgmaagtgctggggttacgggtgtgagccactgcacccggcctcatcatgtgtgtctttcttttccctcatagcatttgctgctctgtaattacactcttcat

SEQ ID NO: 110252 - DNA, 201 bp, Homo sapiens
gtcttttttcttatgtctgttcctttttgagctattccccatgactctgtctcttgtctctctcttcatttgtctctctctctatctccctctctctctctctacccccctttccccttctgtaacaagtttctacctggtcatgatggctctgcatatgacccatttctcataacagatgagcttcatatttgaatatga

SEQ ID NO: 110253 - DNA, 201 bp, Homo sapiens
ttttagtagagacaaggtttcaccatgtgggccatgctggtcttgaactcctgacctcaggtgatccatctgccttggcttccgaaagtgctggggttackggtgtgagccactgcacccggcctcatcatgtgtgtctttcttttccctcatagcatttgctgctctgtaattacactcttcattaatgtgttcatgtct

SEQ ID NO: 110254 - DNA, 201 bp, Homo sapiens
tttcttatgtctgttcctttttgagctattccccatgactctgtctcttgtctctctcttcatttgtctctctctctatctccctctctctctctctaccyccctttccccttctgtaacaagtttctacctggtcatgatggctctgcatatgacccatttctcataacagatgagcttcatatttgaatatgagaatcc

SEQ ID NO: 110255 - DNA, 201 bp, Homo sapiens
atggaagtttgatggaagaaaacaaacatcaaaatgaatagactgagagttgccttatgggagaattatcgtgtgatgtaataaaaggtgttttttttggkgggggaggggaatgtcattccaccaaaatgaatggtttagatgtgtggtgtagtcagtcagaatggctactagtaaaaagtcaaaaatagcagatgctgg

SEQ ID NO: 110256 - DNA, 201 bp, Homo sapiens
actgagcctcagcaggtcctgagtttctatcatggaccccatggagtcattcttgctcttgaatgtttttcttctattgttctggcaagttcctctccatyctacagttatttggaaactactgctgtaccaagcctcaatgctaacagcatttaatagctgtcattagaaagcaagcttctgcttaccagttgtcctact

SEQ ID NO: 110257 - DNA, 201 bp, Homo sapiens
tccttatggcttggcagttggcttgcccagagtgagtgatccaagagagagaacaaataggaaggagccccaatacccttcataacctggtctcaaaagtygcacactgtcatgtgtaccatattctgctcattagaatgaatcactaagtacagcccatgctccagaggaggaagattaagctctacatcttgaagagag

SEQ ID NO: 110258 - DNA, 201 bp, Homo sapiens
gagtcctcactcagggcagtgagcacagccagctcttcctgggcccttcccagcaaaaggagccactcccaaaacccctaggtaaccgtgagaggactccaaaaaaaaaaaaaaatccctcctgattgcaccttgagcagtttgcggtatctatttcaaccctataggaaagggttgttaggacagcaaggagatctatca

SEQ ID NO: 110259 - DNA, 201 bp, Homo sapiens
atatgctttacaattagtgtggcataatttaattgtgactctactgttggaattttgatgcctccagcttcatgaacagccatttttctgtgggtgttatyaattaatctaggtaatgaattctcttcattatctcgttcttcatgttaattatacaggattttcttatgcctatttatcaagtcaggacaagtagagttt

SEQ ID NO: 110260 - DNA, 201 bp, Homo sapiens
aatccagtctatcattgatggacatttgggttggttccaagtctttgctattgtgaatagtgtcacagtaaacatcaatacctagttcactgagagttttwagcatgaaggggtgttgaattttatcaaaggccttttctgcatctattgagataatcatgtggtttttgtcatcagttttgtttatgtgatggattacat

SEQ ID NO: 110261 - DNA, 201 bp, Homo sapiens
actgagtttgaaaccaccccttccaattaaaattaacactctgcaagtcagttagtcaatataatctcccataagaagtacccccaacatcaatgtactcratacatctataaaaagagtcatttggaactgtaacatgaaactgggatggaattcctgttctcaaatctgccaaggcagagattacagtcttctcaacta

SEQ ID NO: 110262 - DNA, 201 bp, Homo sapiens
cgccagagtctccaaagcagtggatttgtggacatagctgggcagattctcggaacttcctttctcaaatcaggtcacagcccaaacccctgatgacgtcygagagggctttaagacagggtgacttctggtatgggccaaaaccgcattaaatccacatggctgtgattatcagcagacaactcagcttccatcagtaaa

SEQ ID NO: 110263 - DNA, 201 bp, Homo sapiens
ctcataaaaagaatagacaataatattttcagaaaaagaagacattatataatagacgaatgaatgatgattaaattcattttgagttgaaaagagtgatkgatgggaaaatttggtaatgttatattgtgatatttattaatttattactaatatgagctttcttaacatgttctgggccatttttgtattttatgctct

SEQ ID NO: 110264 - DNA, 201 bp, Homo sapiens
ccattgtcctaatccatagtttataaaataatcatctaagaggcccaggcacaatggagcttctcagagtgatagagaaacagtcagtggcctttgcttcyaagcccaaagtccagggaccagggcctccagcgtccagagccatgttcatgaggttgcttaccttcgcttaggacgcagagccatctcttcacaccctct

SEQ ID NO: 110265 - DNA, 201 bp, Homo sapiens
atttaattgataaattaatttgataactgaaattacttggaatttaaaaaataactcttaaaaaataatttgtatattttatggtatattttatatatcayatgtattatatattttatagcaataaatattttaaaaaatttttagtaagaataatgacattgttttacaggtttgtaaataacttttcacatttagcat

SEQ ID NO: 110266 - DNA, 201 bp, Homo sapiens
ttattccaaggatcctggcatttgaagtcacacaaaagaaaataatttcaaactccaagaatataccaaaggtagaaaagtgagcctgagcagcttgccakaatttcagcagaaggcaaatctggtcccaatcgaaccaatctgttggtttatttgtattattacaacaaagcccaagattgaattcctcacctgaatcac

SEQ ID NO: 110267 - DNA, 201 bp, Homo sapiens
agtggatttgtggacatagctgggcagattctcggaacttcctttctcaaatcaggtcacagcccaaacccctgatgacgtccgagagggctttaagacarggtgacttctggtatgggccaaaaccgcattaaatccacatggctgtgattatcagcagacaactcagcttccatcagtaaaatatgttcatttccctct

SEQ ID NO: 110268 - DNA, 201 bp, Homo sapiens
ctgggcagactcccaccctggcactcctttcctgcttgaggcctggctgacgttctgtgtcttcccttcttggggtgattttattagtcaaaactctcagragccctggtgcctcctcacctctgtctttaatactgcaagcagccccctttagctgaacaaggaactggtctgttgtgtttcacattacacaggtattct

SEQ ID NO: 110269 - DNA, 201 bp, Homo sapiens
tactcatgtgttaaatgcgttagtacatatacaataattagaatactgagtacaacctgctaaatgctttagtaacgttaattatggttgtatttgtgatwgctattcatatatcaactctagaggattatgtacactttgcccagaaaaatacacattcagacaaaaattctgtggacagctgcgaagaattcacttttc

SEQ ID NO: 110270 - DNA, 201 bp, Homo sapiens
catagctgggcagattctcggaacttcctttctcaaatcaggtcacagcccaaacccctgatgacgtccgagagggctttaagacagggtgacttctggtrtgggccaaaaccgcattaaatccacatggctgtgattatcagcagacaactcagcttccatcagtaaaatatgttcatttccctcttgcaagcccttgct

SEQ ID NO: 110271 - DNA, 201 bp, Homo sapiens
tactgagtacaacctgctaaatgctttagtaacgttaattatggttgtatttgtgattgctattcatatatcaactctagaggattatgtacactttgccsagaaaaatacacattcagacaaaaattctgtggacagctgcgaagaattcacttttcctctgaaactcatagccctctcctgaatacatatggtgtgcac

SEQ ID NO: 110272 - DNA, 201 bp, Homo sapiens
tctgtcagtgaccttgatgagaacctatatttaattcatttcctagtgaaaagctgtagacaggtgagtcttgtgtgtccttgtgcaaacttcataaggcrccacctctagtttcattcagtgattgttccctgtcccccttctaggaaccaacgtccaagaggcccagaagatactcaacaacagcggactccccattac

SEQ ID NO: 110273 - DNA, 201 bp, Homo sapiens
gattgctattcatatatcaactctagaggattatgtacactttgcccagaaaaatacacattcagacaaaaattctgtggacagctgcgaagaattcactwttcctctgaaactcatagccctctcctgaatacatatggtgtgcactaacacttgccattatctgaaactcatagccctatcctgaatgcatatgctgta

SEQ ID NO: 110274 - DNA, 201 bp, Homo sapiens
attgtacaaaccaaccttaatgacctcaggtgctaatatgacactgagttttataagtagtgaaataatcatgattatgggattttgttattgtttgcttkttattttttattcttttagctcaagaaaaagcaagcattttaaaatactaaagcttggcaatcttgtcttgtctaacctcctggaatagagacttagcat

SEQ ID NO: 110275 - DNA, 201 bp, Homo sapiens
agtgctgggattacaggtgtgagccaccctgcccggcctgaaatatgaatcattagtgcaaatttcttgtaatgattggaatttcaaagggtatcctcctrtaggactgcttggttcatatgaaacaggacttgatttctgtgccacactaataccattggagaactacttaaaagctgccaaattttatttcagttttac

SEQ ID NO: 110276 - DNA, 201 bp, Homo sapiens
attatcactcatacaattttaaccaggatgtgcatagtatagttttttagaaaatttaaaaaatagtgattaatgattttttgagttcctctaaactttgrttatgacatctgtgagctatttttacccctctcctttcatttcctgcctccccatttctctgttattgttaatgtaaatttaaaaggtgctaatacttac

SEQ ID NO: 110277 - DNA, 201 bp, Homo sapiens
gtacaaaccaaccttaatgacctcaggtgctaatatgacactgagttttataagtagtgaaataatcatgattatgggattttgttattgtttgctttttattttttattcttttagctcaagaaaaagcaagcattttaaaatactaaagcttggcaatcttgtcttgtctaacctcctggaatagagacttagcattct

SEQ ID NO: 110278 - DNA, 201 bp, Homo sapiens
ttttggtaatgacttgataagacattccctctcattgttggggttcaactttatagtcaattttgtatttaattatagtattttatggtacttctagtatkattacagttgagaaatgaggtagaaatcctagatgttagtaggtaaaatgattttttaaaattaactcagttttattgaccttgaattttagcatgtttt

SEQ ID NO: 110279 - DNA, 201 bp, Homo sapiens
gactattggggatctataaaaattgctataaaactgcattataattagaataacacttgtggtaaagaatgaaaagaaaatatttgtaaaagcattgttawaattcagctgatagactaaaaaaagaccacagagtaaggttttgcttagactttttaaatcgctctaaatattgttctcttaagtgatactgtgtttgag

SEQ ID NO: 110280 - DNA, 201 bp, Homo sapiens
acagaggtctgttcagttccttctcagccagtttctggctttttgaccttgggcaagttgatcagaatctcttcacctcgcttgtttggtctgtacgatgsagttaatccattattagaggaaataacacgtgaagtgctcagcagtgtctggtactttgttgtcattccataaaattgtggtcgtggtggccgtcttcag

SEQ ID NO: 110281 - DNA, 201 bp, Homo sapiens
ccactttcccccaggatattttgttaccttgccaatgattttaaaatattgcttgcttttagttttaatccatttcctcctccctttcccaaccctatcartatatagaacaactgctcagaaaactgttggtttccaataatgcagttattaactatgacctttgtgtcttgtctttaaaccttcccccgcataatccag

SEQ ID NO: 110282 - DNA, 201 bp, Homo sapiens
ttactttagagatgatgagacacagtcagtaataggaaatgccccaccctcagatgagaaatggaactgctgtgtgtttgataatatacagaattgttctyatgcagtaaagccctaccccctcgacttattataggaggcgttattcaaattggataaatgcttctgtagaaggatgatattattagtgcctatttctta

SEQ ID NO: 110283 - DNA, 201 bp, Homo sapiens
agagtcccagtagtatggtgagacgctgacccgatgagggtatgtagagctcattctcttccttctgtctcaggaactcgtgtactttgaatggaatagcwgttgcaacctcccactagattttattcgttaattttggttctttcccactcacttacttgttctgtctctgtgcctgaatagttggatttacataaatta

SEQ ID NO: 110284 - DNA, 201 bp, Homo sapiens
tctgatagtccaagccttcctttatttgagcctgtcttttcaacttcatctcctgcatctcctagcactgaacactttcctctcctccctgttcctgtcasacacctttttactatttactttgatctttaccctcttcctttccctctcattgttcaatatctccccagttttccactgtcggatcttcagtcaaccctt

SEQ ID NO: 110285 - DNA, 201 bp, Homo sapiens
tttaggttattttcactttatgtttttggaagtttttaaatattaaataatgatcgctgtttcacctttacgaatttacatttcctactaaaagtgtgatrttttaaaaaatttcctaattgtattcctgtaatacaaccactattatcattttaaaaaattttcttccagcattatgtgtcattgcctgatgaacatctt

SEQ ID NO: 110286 - DNA, 201 bp, Homo sapiens
ctcctccctgttcctgtcacacacctttttactatttactttgatctttaccctcttcctttccctctcattgttcaatatctccccagttttccactgtyggatcttcagtcaacccttatctgaatctggtgtgcatttcagcattctctctttactatgactgtaacttttttgggtgaagaggtcacaaagcatctt

SEQ ID NO: 110287 - DNA, 201 bp, Homo sapiens
attctcacagtgatttagaacacaggactctgtgtgtgtgtttgtgtgtgtgtgtgtgtgtatatgtgtgtttgagatcaagggaatgggcagttttattyatgtcatcagtcatgttttcccacatcttgactcttgtctttaaatttgtttatataaattttgatgtctcactataataaagtatgtacacttgaaata

SEQ ID NO: 110288 - DNA, 201 bp, Homo sapiens
tgtcagccctgaaaagcatccatggttagaagatcctgtcctaacagcgaattagggtcctgcattttggggtggcagctgtctgctctgttgacatagcrtcacagatcagtggtctctaccaatgcaccatgctgcaggacactgcagtggtgacatcctgtttttacttttcagggagagttttgtggaaaactctta

SEQ ID NO: 110289 - DNA, 201 bp, Homo sapiens
ggattggttacagttatactgttgccttatttggtctatcctcctggaaagttctagttatgtaaccataagttagataactagaactttctgcttccaaytggttagccttaagtttcatttttctgtaacataggcatttacaagaaatagctcaagttttgtttatgtctgcaaatcaagcagagttaagatcactta

SEQ ID NO: 110290 - DNA, 201 bp, Homo sapiens
atttaaagacatttaaaagaaaagcactatatagaatgttaaccttgggtttttgttttccaaattatactctggtttgtattttaattctgaacttagamttccaaaggtgtagcaaatgtaacatctggaatatgttgtgttcacttacacaaaacacctagtgttcacttacacgaaacatcttgtgaagtgaataca

SEQ ID NO: 110291 - DNA, 201 bp, Homo sapiens
taaacttttatttgagaatcattgtctcaatattgttagagtatctaatatattgagttggttactaaaatatctgaagatgtgggaaatctgaattgttrctaagagaatgataaatgaaaataataccagattttttaaaaaagaaatgtggtctgaactaaatatggaagcttcccattaataaatatactggcaata

SEQ ID NO: 110292 - DNA, 201 bp, Homo sapiens
tggcctgggcagttgggatgggatgttctcaaggtgcttttttcccctccgacctttgctagtgtgtgtgatgtgatgtgttgaaaaccactgtataaacrataagcaccggctactcatttagagtcatggaatttcagagctgaaaagaatcttagacgttcagtgagttattgactctctttactttagagatgatga

SEQ ID NO: 110293 - DNA, 201 bp, Homo sapiens
cctccatacagttttgcttattctaccaaggagtaaattatagaatataagtaaagtgaagaatttaggaagaagagaatagacagaataaggacagattrgagtctaattagacccatttccctaggttcgcctgactgctttcagaggtcaacctgaatggaaacttgactctccatcaagttactgtccccagaggat

SEQ ID NO: 110294 - DNA, 201 bp, Homo sapiens
agtcaacacagaagacttctgtgatcaaatgtgtggggggttttccccaccagtaagcaagcaatcaattctgcagcagacactagctgggcatcctctawctaaattcagttctgacactccacctggagataatctcagatcccacaggttgagggctcagtcccacaaaaccacgcctcacttccgatgctgattgca

SEQ ID NO: 110295 - DNA, 201 bp, Homo sapiens
taggcatggtcaatacaatgttgggataggtcttgtcttgctatgggtctgctccattcacagaaatcacacatatgaatattagtgagtatccctggtastttcatgttgagtgtgagaccctgtatctatccgaggacgtttatcacacaagatgccaattcccacaagaggaagaaaaggacaccagctaggactcca

SEQ ID NO: 110296 - DNA, 201 bp, Homo sapiens
ctgcagtaacttccccaggttgttcagctacttgggaacagaaccgggtttaaaatctcagcttcttcctctgcaaaatggaataaaaatagggcaactcyataaggttgctgtaaggagcagatgagtttttaaataatttgcaatagtccttggctcagtaaatgttagctatccttattattatctaaacccttgtca

SEQ ID NO: 110297 - DNA, 201 bp, Homo sapiens
tgctggaatttgaatttcatgtaactttcatgtatcataaaatgttcctgtgattttttcctcccagctatttgaaaatgtaaaccctattcttaacttgmaggtgatacaaaaagaggcagctggctcaattttgcccaaaaactagaacttgccagccctgactcagagcactagaccaagaatcagacctgtcagggt

SEQ ID NO: 110298 - DNA, 201 bp, Homo sapiens
gagctgcattgagattggaaggtgctcaaaagaagaaaggaagaggaagaagggcctagtctacgtctctgcaggaggagatagaaatttacacatggggyacggtggctcatgcttctaatcccagactttgggaggccgaggcaagtggatcacttgaggtcaggaggttaagatcagcctggccaacatggtgagacc

SEQ ID NO: 110299 - DNA, 201 bp, Homo sapiens
gtatagctagtatgttgagcccgggcaattttacactatattccgtatttctaaacacatccctgtattaccactggacagtaagtagctacagagagcarcagttccaatgcatcatcctacattttaggagggatgttggtgactagagtccgtccagagaaggataactgggaaaataaagagtccttgaatctctgt

SEQ ID NO: 110300 - DNA, 201 bp, Homo sapiens; identical to SEQ ID NO: 18149

SEQ ID NO: 110301 - DNA, 201 bp, Homo sapiens
taaaaaataactcttaaaaaataatttgtatattttatggtatattttatatatcatatgtattatatattttatagcaataaatattttaaaaaattttyagtaagaataatgacattgttttacaggtttgtaaataacttttcacatttagcatgtctgtttctgcataaaatgttataacatgttttagttgaagta

SEQ ID NO: 110302 - DNA, 201 bp, Homo sapiens
atatgtattatatattttatagcaataaatattttaaaaaatttttagtaagaataatgacattgttttacaggtttgtaaataacttttcacatttagcrtgtctgtttctgcataaaatgttataacatgttttagttgaagtatatgaagaaaatctggcctcacagacatatgtgtttttcaaaatgggagtagttt

SEQ ID NO: 110303 - DNA, 201 bp, Homo sapiens
atatattcgatctaagaaagctagcctaactaatactttgatcaggtcctgtgagcctttgtctaatgtttacgtgtggtaaagtttaagcattaagaagwgttttttagacaatggagcagatttgaggcttgacggcagcatgggattccctcaatgtcttactgggtttaagctgatgatgaagaattgaacaccagg

SEQ ID NO: 110304 - DNA, 201 bp, Homo sapiens
gaaagctagcctaactaatactttgatcaggtcctgtgagcctttgtctaatgtttacgtgtggtaaagtttaagcattaagaagtgttttttagacaatrgagcagatttgaggcttgacggcagcatgggattccctcaatgtcttactgggtttaagctgatgatgaagaattgaacaccaggaggaaggagcaaggg

SEQ ID NO: 110305 - DNA, 201 bp, Homo sapiens
gaagtgttttttagacaatggagcagatttgaggcttgacggcagcatgggattccctcaatgtcttactgggtttaagctgatgatgaagaattgaacaycaggaggaaggagcaagggggttctgcagggaaaaggtggagaggatgcgagtgataaggcaggagaggtgaaagatgtcactgtgaagtgaaactggtc

SEQ ID NO: 110306 - DNA, 201 bp, Homo sapiens
acggcagcatgggattccctcaatgtcttactgggtttaagctgatgatgaagaattgaacaccaggaggaaggagcaagggggttctgcagggaaaaggkggagaggatgcgagtgataaggcaggagaggtgaaagatgtcactgtgaagtgaaactggtcctagtaaggacatgtccacaggggtcagtgaaggagga

SEQ ID NO: 110307 - DNA, 201 bp, Homo sapiens
gccaattttaatattgatatgaataaagaaccttgagaaattcatccatcaaaacagagtatagtgtaatgtcaggtcaaatagaaactaccactaaaagygtccaaaatgtttccatctctttgtaccactttatctttctttgttcttgtagacaaatgaagacttgctctgtttagaaaaaaaaaacagaaggaacca

SEQ ID NO: 110308 - DNA, 201 bp, Homo sapiens
atttatttttatcccagtattatttatttctaaagaagaagtataggcaacttcaatattaaaagcaaaaccaaaccatcattaccagcagctacaaggayggaacagagagctatctttaggcttgatcatgttgaaatttgaattttttaccagcatgtatacattatattatgtttatttcacgtcttaaggactaac

SEQ ID NO: 110309 - DNA, 201 bp, Homo sapiens
tgctgttctcctgatagtgaataagcctcacaagatctggtagttttacaaaggggaattcccctacacatgccctttcttgcctgccaccatgtaagacrtcccttgctcttccaccacgattgtgaggcctcctcagccatgtggaactttgagtcaattaaacccctttcctttatcaattacccagtgttggatatg

SEQ ID NO: 110310 - DNA, 201 bp, Homo sapiens
gtggaactttgagtcaattaaacccctttcctttatcaattacccagtgttggatatgtctttattagcggcgtgagaacagactaatacagtagatgttsactcagtggggctgcttgagtatagtaatctgagtttgttgatgaagtgtacaagacttttggatagttatcatattaaagtgtctgttattcaggtgga

SEQ ID NO: 110311 - DNA, 201 bp, Homo sapiens
ctcattgtctctcatgcactcactctcctctctgtccttctgttcccctcctataacttctcttcggcgtttcagggagcctgctttcaagacttgcgtcyacccagttctgaagaaggaagaggccaggcacggtggctcacacctgtaatcccaacactttgggaggccaaggcaggaggatcagtagaggtcaggagt

SEQ ID NO: 110312 - DNA, 201 bp, Homo sapiens
ccaaggcaggaggatcagtagaggtcaggagttcgagacagctggccaacatggcaaaatcgcctctctactaatactgcaaaaactagtcaggtgtggtrgcagctgcctgtagtcccagctactcaggaggctgaggtatgagaaccacttgaacccaggaggcggaggttgcagtgagtcaagattgtgccactgcac

SEQ ID NO: 110313 - DNA, 201 bp, Homo sapiens
aaatcgcctctctactaatactgcaaaaactagtcaggtgtggtggcagctgcctgtagtcccagctactcaggaggctgaggtatgagaaccacttgaayccaggaggcggaggttgcagtgagtcaagattgtgccactgcactccagcctgggtgaaacagtcaaaacgtgtctcaaaaaataaataaataaactaaa

SEQ ID NO: 110314 - DNA, 201 bp, Homo sapiens
tatcaaaacatgatgttgtatgctttaaatacacagttgtccctcaatatatgcagggaatcggttccaggaatctcagatataccaaacttcgttcataytgcacaattcctgcagttggccttgcagaacccatgtatgtgaaaagtcgaccctctggggctttacatcttgagaataaaaatccagctataagtggac

SEQ ID NO: 110315 - DNA, 201 bp, Homo sapiens
tataaaacacacagtagtttacatttatcagtcacttgaaatgttgccagacattgtgcaaagtctttacatagattgcatccttgaattctcccaataamccatgagatatttattgttatactctgttttgcagatgaagaaactgaggtttatggaggttaagtgacttatccagttttacacagctaagtagaaaga

SEQ ID NO: 110316 - DNA, 201 bp, Homo sapiens
tttatctcagatcctgctctttttttcttcctgtctactagaacctcacctattccaaaaatcctctgtcatgtcagcagcctgcatcaccgcctctcccytggtcttggctgtgtgagacatctgtagaccctgtatttgtaattgtcagtttattggtctggctctcaaactagtctttgaatcttccctgaggacagt

SEQ ID NO: 110317 - DNA, 201 bp, Homo sapiens
tcatttagatggcacaacattgtagatagtaagataggaaagcactttgtttgtttggtactatgtataatagggaaaaacaaacatttttctcctaccaractctcaacacagaagaacacttcttggaccagatgtgtgagtttttccaacactgactaatctctgacactagctaggtatcctatgattcaattcaat

SEQ ID NO: 110318 - DNA, 201 bp, Homo sapiens
ggccttatgcacaggtgtgatgtgatttgagagtcaccaacagcctattttacccttatcttttagccaaaaatcttgttttctactatttatgatgcctraaatgccaactattaatattcttcctttgggaaaattcttattcattcagaagatggctttttattgaaaaccatgggtaacctgtacatatgtaaacta

SEQ ID NO: 110319 - DNA, 201 bp, Homo sapiens
tgccagtcatgttttctatcgagattgttgaattagcagctcacagaatctcacgccactaaacaaaacaacaaaacaccctatgcatataagtaccacarctttctttgatattcgttcagaaggaaaatacatttgtataatctatcaagcatgtaacaatgtgcttttgatggtgaaaattgttttataaatattaat

SEQ ID NO: 110320 - DNA, 201 bp, Homo sapiens
atggtccctgttcacagagaacgacctcacccaatctgtccatagtctagagattaagaattcttgctttggggcatcttcatcagttggaagctgaaatycattcactgggccaaaggaatgagatccaatttgaagcagtgactatctggctaagattccgtgagaattaaagctgggtgatccacagttaactggcac

SEQ ID NO: 110321 - DNA, 201 bp, Homo sapiens
ataatattgtatagctggaacgtttatagttgaccacagaaagtttccttcgcagctgtttgcccaaggtttcaccagtgcatgtgactttgtatttcaartcagaccttgttgatcataaattaatattatcacctctagtactgtcctagacctgcaggatacagcatttactaagaccaattgctgtctgtaaaaagc

SEQ ID NO: 110322 - DNA, 201 bp, Homo sapiens
cagtgtaaaagcattcctgtttctccacatcctctccagtatctgttgtttcctgactttttaatgatcgccattctgaatggcattagatggtatttcaytgtggttttgatttgcatttctctaatgactggtggtgatgagctttttttcatatgtttgttgctgcataaatgtcttcttttgagaagtgtctgttca

SEQ ID NO: 110323 - DNA, 201 bp, Homo sapiens
ctcttttcaaataatgtatttaagctttaaaatattcagcatggccgagtgcagtgtctcatgcctgtaatcccatcacttttggaggccatgcaggtggrtcacttgaggccaggagttcaagatcagcctggccaacatggcaaaaccacatctctactaaaaatacacaaattagctgggcatggtggcacacacctg

SEQ ID NO: 110324 - DNA, 201 bp, Homo sapiens
attttgtatttaattatagtattttatggtacttctagtattattacagttgagaaatgaggtagaaatcctagatgttagtaggtaaaatgattttttaraattaactcagttttattgaccttgaattttagcatgtttttcagtaggtgattcctgttaacatctgcattttgacaacacacttaaataaaactagtg

SEQ ID NO: 110325 - DNA, 201 bp, Homo sapiens
agcgtgaggattgcttgaacctgggaggtagaagctccagtgagcgaggtcacgccactgcaccccagcctgggcaacagagtgagactatgactcaaaawtaaaataaaataaaaataaaatattcagcaaatagcaaacagatagtgtgcactgttgtggtaaaaaaaaaaaaaaggcagaggtattatgtacatgtct

SEQ ID NO: 110326 - DNA, 201 bp, Homo sapiens
gtgacagagcgagactctatctcaaaaaaaaaaaaaaaaaaaaaaaaaactgtacatatgtacatatttagataccggagagatctaatttcattagttcytcaatatccttggggaattggttccagactcccttgcagataccaaaatcagcacatgctcaagtccctgatataacatgatacaatatatgcatataac

SEQ ID NO: 110327 - DNA, 201 bp, Homo sapiens
tttatttttatcccagtattatttatttctaaagaagaagtataggcaacttcaatattaaaagcaaaaccaaaccatcattaccagcagctacaaggatrgaacagagagctatctttaggcttgatcatgttgaaatttgaattttttaccagcatgtatacattatattatgtttatttcacgtcttaaggactaact

SEQ ID NO: 110328 - DNA, 201 bp, Homo sapiens
agcagctacaaggatggaacagagagctatctttaggcttgatcatgttgaaatttgaattttttaccagcatgtatacattatattatgtttatttcacrtcttaaggactaacttgtacttttttatttttagaggtggccagtttctgggaatgaaaaattgtccatatcaggagacaaaaggcagagttgattcatt

SEQ ID NO: 110329 - DNA, 201 bp, Homo sapiens
actaacttgtacttttttatttttagaggtggccagtttctgggaatgaaaaattgtccatatcaggagacaaaaggcagagttgattcatttggccatcyaagtggcattttttgggtgtctttcatatgtcaagcactgtcaccttcttcacagagatacagagaagtttaaggcacactttctaccctttagtggaac

SEQ ID NO: 110330 - DNA, 201 bp, Homo sapiens
gtcttcacctgaccctttagccacaaggccagaaatttggattgtatagagcaaaggtctacaaactttttctgtaaagggcaggattttaggctttgtgwctgtatattccctgttgtgattactcagctctgccattgtagtgttgaagcagcagtagacaataggtagaggaatggacatggctgtgtcacagtaatc

SEQ ID NO: 110331 - DNA, 201 bp, Homo sapiens
atttggcttgtttccactgaattcccctctcccagtggggagaaaaaaactcagttacttccagcagaggggctgaaatactttaggctttcgaggccatrctgtctgtgccacagcgactgactcctcccattgcaaagcgcaaacagccactgatgaagcaaatcagtttggctatgttccacgaaaaagttatttatg

SEQ ID NO: 110332 - DNA, 201 bp, Homo sapiens
atttatggatgctggaatttgaatttcatgtaactttcatgtatcataaaatgttcctgtgattttttcctcccagctatttgaaaatgtaaaccctattyttaacttgcaggtgatacaaaaagaggcagctggctcaattttgcccaaaaactagaacttgccagccctgactcagagcactagaccaagaatcagacc

SEQ ID NO: 110333 - DNA, 201 bp, Homo sapiens
tgctcttggtgttgggtatttcataactattcttaggtgccaaatgtcttcatcttcatgcaatttatagtaatgtaagtaatgtgttggagactaacaartcaaaatctcatttcggatgtgtgacactaatgttgtgttgacttattgtttcatgtgttagatttctgataaaattactaaaacaccttcttgaaagga

SEQ ID NO: 110334 - DNA, 201 bp, Homo sapiens
tttgaaaatagaagtgggtctcactctgttgcccaggctggagtgcagtggtgcaatcacagctcactgcagccttgaccttctgtgctcaagcggtcctytgacctcagcctcctgagtagctgggactacaggccaccatgcccagctggtttccttttaatccctcttctctgcgtgtccccacctccccttccagtt

SEQ ID NO: 110335 - DNA, 201 bp, Homo sapiens
tggtctctcaaagatacccatagaatgacattttgtctacctcctccctatggttaaatttaacatttgacacatattcctgatgcttagtgtcattgaagtttttttttttttttcacctttgctgttagctttactgttttgacttttgattgatagtacgtccttaaagggtccactttagtcatttcttatttttca

SEQ ID NO: 110336 - DNA, 201 bp, Homo sapiens
tcagctttcaggatttttaaaaaacctgcattcatttgtgtgtgtgtagttgtccttaacagtttttgttaaaaaataattaggcatgaatttaagtgggtttttttttcttttgcttctctcaactctgggttgcagattgccagtcaacagtacctctaagactggccatgtaggttgacttttatttttcttgctatt

SEQ ID NO: 110337 - DNA, 201 bp, Homo sapiens
acacaaaaaggaaattgtgatccatgttaactaataaaggaaatgataactgcaatttaaaaaagcaaaaaacatcaatttaggaaaactttattcttttrcctgagatagcagcacatgggatgttgcttcatggtaatttttcagagattttagtcactatttcacccacttctgtcagctgtgggttagtggctggga

SEQ ID NO: 110338 - DNA, 201 bp, Homo sapiens
tgaggagttccctgaacatgggactttcagtgctaaagctgagaaagcctaaggcaaaccaggatgagtcggtcaccctgtggactgtcctgtggtaaatrgattaatggggctgcaggagaagtgagaaagagatcagctgtcattatggtcttccaagtgagagaagatggtggtgtgaatgagaggtttacacgggag

SEQ ID NO: 110339 - DNA, 201 bp, Homo sapiens
actctgtctcttgtctctctcttcatttgtctctctctctatctccctctctctctctctacccccctttccccttctgtaacaagtttctacctggtcaygatggctctgcatatgacccatttctcataacagatgagcttcatatttgaatatgagaatcccttcaaaaactgcttagttctgagcatgcctagtata

SEQ ID NO: 110340 - DNA, 201 bp, Homo sapiens
ataggagtttactgattaattcttgattgcattaaatagcatattagagtacctcaatttaggagcatttagcaacttaaaattttttgatagcaaaggasttacaagtagcatgatacttgttaagagaaaacaaagaccaattttagttcttatttattataatgattttcattttactattaaagatgtttcttcaac

SEQ ID NO: 110341 - DNA, 201 bp, Homo sapiens
gaatccatctggagttaccccgtcggtcagcacgtactgctagctaacggatattgggaggtatccagtaagcaagtctgacaaaggaaagtggatgtttrgaggggacgagggaagcatcagtaagtcatcccaataaggcttcatccatggtaagattttagaaatacaaggtgctccagaagttcattgtaccagccc

SEQ ID NO: 110342 - DNA, 201 bp, Homo sapiens
tcaaaaaattaagaagatcaagagctcatttcatccatacacatgcaaaggaactcaggtaaaactgaataagaagttatctgaataagtgggaaccgtgrtaaaaaactagtctccagaaagagcaggatctgaaatggaggaagacatcaggagcgccactcctgcacctatctggaggtcttagagctgcattgagat

SEQ ID NO: 110343 - DNA, 201 bp, Homo sapiens
gaacagactttccaatcaggtagaaagagaagccaggacagagagacccctctgcaagtttcttggtttgtaatttagtggcagtaagcttattaacatcygttcgaattttacccctgattttatattgcacgtagtctgagtaataagatttttaaaaaatgatgggcaataaaacttgtagttctgaagggcagggtg

SEQ ID NO: 110344 - DNA, 201 bp, Homo sapiens
gccaggtgttcctggatcttcttagagagcggcaacactggtgccaggtcaccccaacctcccttggcctctccgtgttgctctcctgcctgggaaccctytttctcctctgaggcccaggttcagtcccatcagaccctctgggtctcaggctgttcccgctaatgtttgactgactttgaccagtgagagaagggagtc

SEQ ID NO: 110345 - DNA, 201 bp, Homo sapiens
ggagagggaggtatgtcatggactcagtggtaaaagaaagacagtgtaaggtattttcccttttgtcactgcatacaagtaactgccattcactaccctgrgacagttgagttactggagggaggtgatggaagtttgatggaagaaaacaaacatcaaaatgaatagactgagagttgccttatgggagaattatcgtgt

SEQ ID NO: 110346 - DNA, 201 bp, Homo sapiens
gtgctgggataacggacgtgagccactatgcctggccacaattttaaattgaacttattttagcagcatcaatttcttgattatgttaaacaacagaaatratcatatatatttgtgtgctcacttttctgcttttcaaagagatttctgacagatcatttcatttgctcctgtagcagttactcgtactttagtgatttg

SEQ ID NO: 110347 - DNA, 201 bp, Homo sapiens
cccagcctgggcaacagagtgagactatgactcaaaattaaaataaaataaaaataaaatattcagcaaatagcaaacagatagtgtgcactgttgtggtaaaaaaaaaaaaaaggcagaggtattatgtacatgtctgatgactgctataggaaaaggaggattattgaagaatttgaagtaaaggactggactaattgt

SEQ ID NO: 110348 - DNA, 201 bp, Homo sapiens
tctgtgatgctcaaaactaatgtttgcccttaatttttttagaattgctcaaaccaaataaaatagtttcccaagtaccaaatttactgctataacgtatrcatctcttcggatagcaaatacaatttcaggaccgcttttgggagacactattcctcacatacttatattacaaacagtattaatagaacttcagtctaa

SEQ ID NO: 110349 - DNA, 201 bp, Homo sapiens
tgttcgtgtttgttcctaagtgaagttatttaaggggaaaacagtcataattgagtgagcatataatgttgtcttgtctgtacttgattaaagcaaaacarattacatttagggcccatctttcttaatagaaaatcacatctaaaaaatattttctttactttcactagctttcctattcttgcaaccttagaggcacat

SEQ ID NO: 110350 - DNA, 201 bp, Homo sapiens
tataggctttggtgacacatttgacagtcgttctggttttggctaatttagaaatattaactgtacaattaaaaaacttattttttttctttcagtacaawctcatgttatttttgtggtcttaatataaaaattaaacacaaaaaataagtggtaagttgctttttaaactctgtcctcctccattccagctgtcactgc

SEQ ID NO: 110351 - DNA, 201 bp, Homo sapiens
atcacatctaaaaaatattttctttactttcactagctttcctattcttgcaaccttagaggcacatatgtgtggacataacattgggcttagataatgtrtattctttttaatccataagatgatgcatgtacattctccccactgagtcttaagggctgctgcaatttgaactgtgtagtaattttgcattttcatttt

SEQ ID NO: 110352 - DNA, 201 bp, Homo sapiens
gggtgaaataattttattttcagctttattttaattataaattctgatattgcacataacatactgaaattcctaattcctttctttctgaggaaattttrgggttgcaagatagaaattttagcctttggaaaacagtataaaatcctagaaaatattctgtatgtgttccaattgatgccaggccaggtgttcctggat

SEQ ID NO: 110353 - DNA, 201 bp, Homo sapiens
tacattctccccactgagtcttaagggctgctgcaatttgaactgtgtagtaattttgcattttcattttctctgacttaacgatgtctataaataaaggyggcatcttactttaataataaaaaacccattatcgccatgtggtggagataacatattatcattaccactattaacaactgctagtgttaataatacata

SEQ ID NO: 110354 - DNA, 201 bp, Homo sapiens
aaagtttgaggtattatagccttttaagtttattattcttcctatgttttgttcaaaaggaaaataattgttaaaggatcctgaaagcatattgtttgggyctaaatcaatattacaaggttgcaaactgcagtcatacaagtgtacttgtgatttgctgagaatgagaactgtggtcctcaaacctttgtcagctgtagc

SEQ ID NO: 110355 - DNA, 201 bp, Homo sapiens
ctgagattacctggagagagcaaagcaagaagaatctggcaaaacttcagagtatttacattcttgtcaccacaagattgacagaaccaagagcacgattraagttttagcaaatagatttgaggttaagattaaaactggattatgcacacatcttcctgattgtcctgaaaaaatgggatcttcaccttgtaattatga

SEQ ID NO: 110356 - DNA, 201 bp, Homo sapiens
tgcagtctcaacctcccaggcccaagaaatcctcccacctcagcctccccagtagctgggactacagatatgcactactatgcctgactaatgtttttcawtttttgtagagataggttcttgctgtgtttcccagcctggtctcaagctcctgagctcaagagatcctctcgccttggcctcacgaagtgctgggataac

SEQ ID NO: 110357 - DNA, 201 bp, Homo sapiens
tcctgattgtcctgaaaaaatgggatcttcaccttgtaattatgataccatcatgggagaaaattgcctagaatgataatgtgtctaacactgagaaagtkctatataagattttattgctatcagcatcatcattgttgtcagtggcagcaaattccaggaggttcactactgttgtgattctaactcacagagagacca

SEQ ID NO: 110358 - DNA, 201 bp, Homo sapiens
acacgtgtaactgtcatttaccttctggtccaaagactggtttgctcctgtgtccatcagggcttttgtttcacactctgtcattactccatgaaagccaygctttgattagtttctaaattccttagcctgctatctaacacctgccacagtcaaatgaatcaaagtgcacgcaggttgtgttaatgaaataatacattt

SEQ ID NO: 110359 - DNA, 201 bp, Homo sapiens
gataatgtgtctaacactgagaaagtgctatataagattttattgctatcagcatcatcattgttgtcagtggcagcaaattccaggaggttcactactgktgtgattctaactcacagagagaccagagacatcgtaataactatcctgttaatcatgtgttaggagagttcatattttaattagaaagatttgtaaata

SEQ ID NO: 110360 - DNA, 201 bp, Homo sapiens
gaggccacggcagatggagtccttgagtttaggagttcaggaccagcctgggcaatgtggaaaaaccccatctctacaaaaaatacaaaaaatagctgggygtggtgatgtgtgcctttagtctcagctacttgggaggctgaggtagaaggatcacttgggcaccggaggttgaggctgcagtgagctgagatcacacca

SEQ ID NO: 110361 - DNA, 201 bp, Homo sapiens
gctacttgggaggctgaggtagaaggatcacttgggcaccggaggttgaggctgcagtgagctgagatcacaccactgcactccatcttgggtgacacagygagagcctatctcaaaaacaaaaagcaagacaaaacacaaccagaaccaaaaaggtgacttccagggctgccccagctaggaacactccagaaagcagac

SEQ ID NO: 110362 - DNA, 201 bp, Homo sapiens
tacatacataaacatgcatctgcaaccatttatttgtctacctgtgttaccaaaaatattgggtttatattgatacttccaatttcattcctaaatctcarggttctttctagcctcctacctttccatatttggaagttcctccaacagcaagaaacttgctctcatcctctatatattatttccttaatttactgttat

SEQ ID NO: 110363 - DNA, 201 bp, Homo sapiens
tcatagtttttgtaaagatttcatatgctgtgtataagttacttagcactgtgcctggcatacataagcacttaatgatattagttcttgggaagattacraggatgatagtgctctgtatggaaacaaaagttaaggctcaaagaagttaaacgatttacccaaaactacataacaagtacatggcagagccagcatgga

SEQ ID NO: 110364 - DNA, 201 bp, Homo sapiens
gtaacttctcgaaggctccatttcctcatctgtaaaatgtgggatgtcagtagtgtctactcatgggtttggtgggaggaatgatctaggccttaacagtstctggctcataggaaacatcagtagatgatgtgctttttgctgttacggtaaatagtgtgttccacatcacagcatacactgggtgatgcaggggttgta

SEQ ID NO: 110365 - DNA, 201 bp, Homo sapiens
gggtcccaggggaatcagtgctgcatcatcttttcaatccacccatttctatttaatccagcatttgcctctttatatgaaatgtgctgacccagtgcctstttttatctgcactctttgtggtaaggcaagttctccaaggcctatatttcaaggtctttgtttataaataggctctgtcttgccaactagataaaagca

SEQ ID NO: 110366 - DNA, 201 bp, Homo sapiens
cacctcccactaggtccctcccttcacaacaggggattacaatttgagatgacatttgggtggggacacagagccaaaccatatcaatagttcttccgtcytttttccttctcagctttacttgacaccatttccccttcctaatttgcttcttaatgcttattataaattaaaaattttcagtaatttgtttgtgtctgt

SEQ ID NO: 110367 - DNA, 201 bp, Homo sapiens
gccaactagataaaagcacaggaaatgatgtaggatgagatatttcattagacacttaaattctattacatttctcctacaggagttgttcactctaaaakggcagaaaagcagttctcatgttaaatagtccccaagcacacctttgaatgaagtgacttggccagaagatactccagatccaccaggaacagtcaagag

SEQ ID NO: 110368 - DNA, 201 bp, Homo sapiens
cttttttccttctcagctttacttgacaccatttccccttcctaatttgcttcttaatgcttattataaattaaaaattttcagtaatttgtttgtgtctrtttcttccagtcaattttaagtttacaaaaggcaatgaccatgacatttaaaaaaattttttgaattcccatagaataagtaagtgctcactaatatttt

SEQ ID NO: 110369 - DNA, 201 bp, Homo sapiens
atctcagctgtgtaattttttttctttcattcaacatcgaacaagctaagagatttgggagtctatttctctcaaattaaatgtgagccaagtattagagttttttttttttttgtcttcaggcttttatttgagcaaatataccagtcacttcagcatggggcagaggaaacagatgggatgtggataacagggggaaaa

SEQ ID NO: 110370 - DNA, 201 bp, Homo sapiens
cattagacacttaaattctattacatttctcctacaggagttgttcactctaaaatggcagaaaagcagttctcatgttaaatagtccccaagcacacctwtgaatgaagtgacttggccagaagatactccagatccaccaggaacagtcaagagattgccatcagaggctgctttgcccgttttgaagggctcagccca

SEQ ID NO: 110371 - DNA, 201 bp, Homo sapiens
agtatagggtcccaaagacctttttaaaagtggatcactgccattccccttcaccttcagcctgtgaagcactgtgtcagtaagggccagtcaggaagacmgggattttgtgaggtcatttaatagaatttaacaaagggccggaaagattgtaaggcacacaggcttgggaggcaacacagagatggatggacaacagca

SEQ ID NO: 110372 - DNA, 201 bp, Homo sapiens
tgtgagccaagtattagagttttttttttttttgtcttcaggcttttatttgagcaaatataccagtcacttcagcatggggcagaggaaacagatgggaygtggataacagggggaaaataacagtgctaaaggtatttgatatgcaaaaatcaaattgttcccagaatcttcaggtgctagatgcagcactgaaaaaca

SEQ ID NO: 110373 - DNA, 201 bp, Homo sapiens
gacttggccagaagatactccagatccaccaggaacagtcaagagattgccatcagaggctgctttgcccgttttgaagggctcagcccatttcattttayagagtgaggagaaggcagaaatggacatgctggatgcgccagagtctccaaagcagtggatttgtggacatagctgggcagattctcggaacttcctttc

SEQ ID NO: 110374 - DNA, 201 bp, Homo sapiens
taagcagcgggaaactgggggtgggagggtgtctcagaaaggagagagtcagagaggaggagtcctggattctgtgtataaactgaccaaatcagaaggtrtttcatgaacaacacatgcataaggctgactgtaagtggcccagctaaagtaaaaaagaactaaagtaagacttgagctgctgcccaagagacagagttt

SEQ ID NO: 110375 - DNA, 201 bp, Homo sapiens
gaatgggaaggtctactttagaccttcatctatgattacattgaaaagaaaataataccagaggctcctttaaaacgtgcgagattatgcagtttcaaaakgcagtgcaatggctagaagattcttatatgtgttaccaagatctgcaaaattaaaatggtattcatgacttgtaaacaaagctactaattgaactataat

SEQ ID NO: 110376 - DNA, 201 bp, Homo sapiens
gtcttgggttggatttagtaatctacttgctagatgctcaataaatatttgagagggaagggcggaaaggaggaagagtgggaagggaggaagagctaaaytggatgtggattgtttagtaaatttgacaaggaatttgtggtaacttgagctactaactgaaacttacctgttttctacatattagaaagggtttaataa

SEQ ID NO: 110377 - DNA, 201 bp, Homo sapiens
tagaggaggaaccttttcaaatgatgtattgagcttttaaaaccctacagtgtaatagcaaactagcaatacacaagatttatttgtaagaactctgcatrtaagtgtgtgtcatgtgtgcatttgtctgccttttgaactggtatgtacaggaataaagaatcctaggatactcatgataatgacagctatttaatttcc

SEQ ID NO: 110378 - DNA, 201 bp, Homo sapiens
tgttcagttataagacactgctatcacttggtcacctataaattgggaataataggaaggaagaccttcctcatagaactgttttaagggttttatgagawaagcaagtgaaattcctaggacaaggcctagcacagagtaagccctcaataaacgctacctgatggacataccatgaggccaaagaagtgaattagggcc

SEQ ID NO: 110379 - DNA, 201 bp, Homo sapiens
ctaatataatactaaatgactgagaggattgtgttgttcttaccttaaggaagaaaatgttagccatcaaagaggatttttttgtgttcttttagcatctygtggagtcagaagcctagcattctagatgagcaaagtacacaattgcgttagtattaacttgctgagtttgtgtttgttatgctggttttatattcattt

SEQ ID NO: 110380 - DNA, 201 bp, Homo sapiens
gggaataataggaaggaagaccttcctcatagaactgttttaagggttttatgagaaaagcaagtgaaattcctaggacaaggcctagcacagagtaagcsctcaataaacgctacctgatggacataccatgaggccaaagaagtgaattagggccaggttgtgaatggcattttatggcaagcagagttagtttagttt

SEQ ID NO: 110381 - DNA, 201 bp, Homo sapiens
aaaagctgtagacaggtgagtcttgtgtgtccttgtgcaaacttcataaggcgccacctctagtttcattcagtgattgttccctgtcccccttctaggarccaacgtccaagaggcccagaagatactcaacaacagcggactccccattacttcagccattgacctggaggatgcagccaagaaggctgtggccagtgt

SEQ ID NO: 110382 - DNA, 201 bp, Homo sapiens
ggatgggccaaggcctgggaaatgatgttgttatcttttacaatagtctttccaaaattgtggattgggacctggtgattcttgagagaactccctctagrtagttaaataacaatattaaattaaatagccttgatttctccatagaggaatggatagaaagatgatgtctgaaaaaggaaatacagcaaatgccagatg

SEQ ID NO: 110383 - DNA, 201 bp, Homo sapiens
tgtgggtgaggagggaaggaaaaaaatggagttgggaggggagcttatctgttttaattgatcactgacacctaaggcatctcaaggctaggcagaaactyccacgtcttgctgtttcctaacctgaaggagggggagagtttgtggttccagggatatgaaaaggaagacctggtgtgatgttctgtgtgtgaaggagtt

SEQ ID NO: 110384 - DNA, 201 bp, Homo sapiens
ccgaactcagtgagtagttttggtagaaggaaggtctcctctgatttctgttgttgaatagttttgatctaaggggaaatttatagcattagaagaggatrtggaaccaattctagttggttaaaagtgaaattagttgatcataaatataaaaattgtgtgcacatcactgagattacctggagagagcaaagcaagaag

SEQ ID NO: 110385 - DNA, 201 bp, Homo sapiens
aaaactggattatgcacacatcttcctgattgtcctgaaaaaatgggatcttcaccttgtaattatgataccatcatgggagaaaattgcctagaatgatwatgtgtctaacactgagaaagtgctatataagattttattgctatcagcatcatcattgttgtcagtggcagcaaattccaggaggttcactactgttgt

SEQ ID NO: 110386 - DNA, 201 bp, Homo sapiens
ctgaccccttgaggaacttttataggagagttagcttacctggctgggggctgttttatctgagagttagcttacctggttgggagctgttttgagactgscatgataaaattattagagctcttaaaagtatttggggtaaaatatctaaatttaacaaagatgatcaatgtattttctatttatatgctgttcttgaac

SEQ ID NO: 110387 - DNA, 201 bp, Homo sapiens
cagtgagtgaggctccatggttgtgggaccctctgagccaggcatgggacataatctcctggtgtgccatttgctaagactgttggaaaagcgcattattygggtggaagtgtcctgattttccagatactgtttgtcagggcttctcttggctaggaaagggaattccctgaccctttgtgcttctcaggtgaggtgatg

SEQ ID NO: 110388 - DNA, 201 bp, Homo sapiens
tccctaatattcatcagatattcaaaaggatccatgttccaaagaagaggtttagtattgatttttgttggtttgtttatttgagcagtggggatgatgtygaaagaagcttgataaatagcaagggctgtagctgttcttttttcaaagtttagtttttacttttaattgtgtactaaaatctgcagctagagtgtgttt

SEQ ID NO: 110389 - DNA, 201 bp, Homo sapiens
ataaatagcaagggctgtagctgttcttttttcaaagtttagtttttacttttaattgtgtactaaaatctgcagctagagtgtgttttgcaaagcaaaayacccagacatttgaaaaacttgtgtatggactgcctgaccacctgcacagctgccagagcaaacttgccttgggatcagctgtctggggtctggggaccc

SEQ ID NO: 110390 - DNA, 201 bp, Homo sapiens
acaaagccatcagatctcgtgagactcactcagtgtcacacgaacagcatgggggaaccgcccccatgatccaattacatccacctggtcccaaccttgayacgtgggcattattacagtgcaaggtgagatttgggtggggacacagagccaaaccacatcactgcacctattaaccatccacaaacaagactaaatcaa

SEQ ID NO: 110391 - DNA, 201 bp, Homo sapiens
atgtcttctgtgaataggccatgttatgtctttttgtttttttccagtgtgaatgcctttttttttccttccttgcctgcttgcagtggctcaacctctastaccatgttgagtagaatcggtaagaggcgacttccttaccttgccttctatcttaggggagtagcattaattctctcccagtaagtatgatatttgtca

SEQ ID NO: 110392 - DNA, 201 bp, Homo sapiens
ttttatttgagcaaatataccagtcacttcagcatggggcagaggaaacagatgggatgtggataacagggggaaaataacagtgctaaaggtatttgatrtgcaaaaatcaaattgttcccagaatcttcaggtgctagatgcagcactgaaaaacaactttacataaatatatattttctttataaatgatctgtccat

SEQ ID NO: 110393 - DNA, 201 bp, Homo sapiens
ctgcttttgcagacttttaatgtgcctgagttggtcaaatccgtgggtcaaggagaaaaatgggaaacgatctttctcctctttccaatgaaaaatcaggsctgtcactaaaacgcattagaccattgaccctgtccatgtcctccttgttgatggagaatgaaatcaaagagggtcagtggtgggctggatagcgattgg

SEQ ID NO: 110394 - DNA, 201 bp, Homo sapiens
ggattataggcgtgagccaccgtgcccgggccataatcttttttaaaaaattattattattagtttgagacggagtctcattctgtcacccaggctggagkgcagtggtacagtctcgtctcactgcaacctccgcctcctgggttcaagtgattttcccacctcagcctcccgagtacctgggactacaggcacatgcca

SEQ ID NO: 110395 - DNA, 201 bp, Homo sapiens
caaggagaaaaatgggaaacgatctttctcctctttccaatgaaaaatcagggctgtcactaaaacgcattagaccattgaccctgtccatgtcctccttkttgatggagaatgaaatcaaagagggtcagtggtgggctggatagcgattggaacttggcctctagcagatttttaccttctgcagatggcaagcgttaa

SEQ ID NO: 110396 - DNA, 201 bp, Homo sapiens
ttctgtgagatggggataacctagttcaaatgagatgaaaagtaaatttacttatagtaagtagcacattttttctttttgagacagagttttgttctgtygccaggctggagtgcaatggcgagatctcggctcactgcaacctccgcctctggggttcaagcaattttcctgtccccgcctccctgtagctgggactac

SEQ ID NO: 110397 - DNA, 201 bp, Homo sapiens
gaggcagaggtgagagaacagggggagagtagttgtagtgagcagtttagtatggagaagggagaggtggatagcagaagttgagggacaatggcactttygggtatacaaagaagtctaaatggggcttcagaaagcccagaattcagcagggaataaaattaacccccacaactgaaaaatcaaacaaatatcatttat

SEQ ID NO: 110398 - DNA, 201 bp, Homo sapiens
gagtctttaggagtgtattagtctattctcatgctactaataaagacatacctgagactgggtgatttataaaggaaagagatttagtggactcacagttmcgcatggctggggagacctcacaatcatagtggaagacaaaggaagagcaaagggatgtcttacatggtggcagacgagaacttgtgcaggggaactccc

SEQ ID NO: 110399 - DNA, 201 bp, Homo sapiens
gaatatcccaaggaaaggggcacaggtttattgtcatttcccaaataggagctctagaaatattttaaacaatagcaagagattggaataaatgcagagcsttgttcagatgtatcaattttggtatttttttattttgattttaagtaaatccagcaaacctcattattatttttaatctcacttagtttttaaccattc

SEQ ID NO: 110400 - DNA, 201 bp, Homo sapiens
ttcttttgctttatgcttccagcacttgttttccaactaaaacattgtttcctacaccttatttgctggtgttggatttgagaagctctgaccatttctaygagtgaaatcaacttaaagacagacgagttgcaattgagaagaatatcccaaggaaaggggcacaggtttattgtcatttcccaaataggagctctagaa

SEQ ID NO: 110401 - DNA, 201 bp, Homo sapiens
tctgtacccttatctgctttgttctttataacacttgactgtacctggtagtgttatttgtttattggccgtcttccccgctctcctacaagtttaagaaygtaagctccacaaaggcaaagtgatacagcttaatgtaacagcgtgagtgattccccagctggccggagttggtattcagtaagcatttgtggtctcagt

SEQ ID NO: 110402 - DNA, 201 bp, Homo sapiens
gcaaatcaaaaccacaatgagatatcatctcacgccagttagaatggcaaccattaaaaagtcaggaaataatagatgctggagaggatgtggagaaatasgaacacttctacactgttgatgggagtgtaaattagttcaaccattgtagaagagagtgtggcgattcctcaaggatctagaactagaaattgccatttg

SEQ ID NO: 110403 - DNA, 201 bp, Homo sapiens
aggatctagaactagaaattgccatttgaccaagcaatcccattactgggcgtatacccaaaggattataaatcattctactatatagacacatgcacacrtatgtttatttcggcactgtgcacaatagcaaagacttggaaccaacccaaatgcccatcagtgataggctgaataaagaaaatgtggcacatataaatt

SEQ ID NO: 110404 - DNA, 201 bp, Homo sapiens
tacataaaatttattttcccaatagtgtccaaatgttggtggacatttggattatttctagttttttcactattataactacattgcaatgaaaatctttrgttctcttgtcaattttcatggaagtaggattgcgctatcaaaggattttctgtgagccctaagcagatggccctcctaattgccttcaaagattccagg

SEQ ID NO: 110405 - DNA, 201 bp, Homo sapiens
tccatttgcatagcagatttcttctcaccctttttttacaactgagaatgcagaagtaaacataaattatacttctgtagatgtatcacaatttttttttkttttttgagactgagtctcactctggcacccaagctggagtgcagtggcacaatcatagctcactgcagcctcagccttccaggctcaagttgtcctcca

SEQ ID NO: 110406 - DNA, 201 bp, Homo sapiens
cccgtttctacaaaaactaaaaaaattagcctagtatggtggtgtatgcctgtagtcctagctactctggaggctttggcaggaggatcacttgagcccasgagtttgagattgcagtgggctatgatcactctaacatactctagcctgggcgccagagtgagaccttctctctcttaaaaaaaaaaaaaaaattagaac

SEQ ID NO: 110407 - DNA, 201 bp, Homo sapiens
ttaaagctacctcattgagaatgggcaaagaagttatgttggcatgtggtctcattttccaggactttcccgtgaaatattttaccctgggggcctttgaytcaccccattgtaaagtttggcagttttgaaagttcagagggtactttatgggctataaatgcagaaaaacagaaaaactttacctagggtaaatgacat

SEQ ID NO: 110408 - DNA, 201 bp, Homo sapiens
atggctacttgtgatatcattttccttaatggtgggaagccagccaacttcttggatcttggaggtggtgtaaaggaagctcaagtatatcaagcattcarattgctcacagctgatcctaaggtaacctttctctttgtagggagattatatgccagttttaatttctcaccgtcaagagctcacttgttcttcctggtg

SEQ ID NO: 110409 - DNA, 201 bp, Homo sapiens
tgtggaatctcagacttacataggatcaaagaatcatattactttttagtcttttatttatttttatcccttccttactttgctactttaaaatctattcratgctttcccttcagtgttgtagccagctgggtgtctccacttggcccaaaaccatgcccctcagtctgtttcatttgatggatcattttggattctcct

SEQ ID NO: 110410 - DNA, 201 bp, Homo sapiens
aactttttatttttgatttcaggttgaagccatccttgtcaatatatttggtggtatcgtcaactgtgccatcattgccaatgggatcaccaaagcctgcygggagctagaactcaaggtgcccctggtggtccggcttgaaggtgagtcatggtagatttccgctgtgccagcaccccttctccaaggtcaggtgaccag

SEQ ID NO: 110411 - DNA, 201 bp, Homo sapiens
tccgctgtgccagcaccccttctccaaggtcaggtgaccagcatgttctggattcacaaacttcctgagataacagaacgaaacactagattgtgtaagaygaaacaaacacagtacggcaggacttccctgggcctctagcaaactaatgtggcttttagctctccaagtatggcaggtgttatgattctccagattttg

SEQ ID NO: 110412 - DNA, 201 bp, Homo sapiens
gaacaacaggtagaaattactatgttctttactagaacgtaagtcccttgacaacagggaccaaaccctaaaatttaaaggtcaagaaagccaaagcagcytctcctgcctgtaacatgtgaaaaaaaatgacagtacttaactttcccttcgcttgtgcctaccagcctgaagaacttaatttatagatcctcaagagat

SEQ ID NO: 110413 - DNA, 201 bp, Homo sapiens
caaaatccatgtgaaggaaggaaaaaagctgggaattagtccagctttcatcaggcctctggcttactatatgatccctaggcaagacactttccctcatyaggcctccaggttcctgactgtaaactgaggtgattggaccccagtggtccctttatatcttgaaaccccagtatttgaaacatgtgactaactgggaaa

SEQ ID NO: 110414 - DNA, 201 bp, Homo sapiens
ctggatgtccatgttgctgaaaactaaagtagaaaatagagtaaaacactatgtgttcagggagtatcttagttcattctggctgccgtaaggaaataccmgagactgggtggcctataaacaacagaaatttgtttctcatagctttaggggctgggaagtctaagaccaaggctgatgcagtgtctgaggcgagcctgc

SEQ ID NO: 110415 - DNA, 201 bp, Homo sapiens
gctgaattcattgttactgtctttggaaccttaggattttgtcacggagaaattttcagttttgtgcttgtgtgcttttaagatcttcagcttaggacttyatacctcaaataatcagaattgaatcccttttattttttaattatgctatctccttctacttaaacaaacagtataggtagtgctctaaagttttctcta

SEQ ID NO: 110416 - DNA, 201 bp, Homo sapiens
ggccagtcaggaagacagggattttgtgaggtcatttaatagaatttaacaaagggccggaaagattgtaaggcacacaggcttgggaggcaacacagagwtggatggacaacagcaggaatcttccgtgagccataggagaggaaggaaatggtgttggccgagtctagggctagctgttacaagcagaagtcacagcag

SEQ ID NO: 110417 - DNA, 201 bp, Homo sapiens
actaaaaatatataataaaaataatgaatcaaagctgtatctatgaagctgtgccagtctgtaacttttaatggttgatggcaacttttggggttattctrttgaaatgagaacaacaggtagaaattactatgttctttactagaacgtaagtcccttgacaacagggaccaaaccctaaaatttaaaggtcaagaaagc

SEQ ID NO: 110418 - DNA, 201 bp, Homo sapiens
acatcataaataaactgatactggtattagtgttctctagatgtagcaagaattgtgtatgagtgattcttgtttggggaaccttggaccatagtaacccyaagacttttcttattgttccctggtcacacatcctgagaaaaggattcatgtgaaagtggcttttcggggaggcattctcaggaaaaactcaaaggggtt

SEQ ID NO: 110419 - DNA, 201 bp, Homo sapiens
tgtatttaggctcatagatgtttttttgaagttcttcattgcatttattttcaaagttagtttgagagagcttttaccagttacttggaagttatgtgccrttattgctttccttattgcttaaaaaacaaaaaaagaatttaaaatcagctaccaactctggatttttctttttcagatgcaaaagaaattgttttaaaa

SEQ ID NO: 110420 - DNA, 201 bp, Homo sapiens
tgaggctctgtgtaaggactctcatttaaatgattttcaacaaacattcattttctgcttgttttctctttctcttagccctaatgttgtgggacagctgrctaaacagatgattgggtacaatctagcgacaaaacaaactccaaaagaaggtgtgaaagttaacaaggtaatatggatactttgggtcattttctatat

SEQ ID NO: 110421 - DNA, 201 bp, Homo sapiens
tgggaaacaaaaggcctgctttgagtttccagtttttacttccagcttttacttccagctttttggtcttgatgacagggtgcaatggtggctaaactccrgtagaaaacctgtagtctttttgcactggagaactgaaggacagagttcaggatccctaagcagcgggaaactgggggtgggagggtgtctcagaaagga

SEQ ID NO: 110422 - DNA, 201 bp, Homo sapiens
gaatgcacatttaagaactggtacaatgtatcagattggacttgacccagcccttttgggtgcagttctcttgcccatttatttggaatgaaaagagaaargaaatgaactcattgcatctcatgttgctatgtggtatacatagtcacatatatatgaaatctgataaagaaggaaatacatttttaaaataaagccttt

SEQ ID NO: 110423 - DNA, 201 bp, Homo sapiens
tgcagggaactctcctttataaaaccatcagatctcatgagacttactatcatgaaaacagcatgggaaaaacccacccccatgattcagttacctcccaytggtaattatggaggctacagttctaggtgagatttgagtggggacagagccaaaccatatcagttccatgtccactcaccaaaaagtcctgtggtcagc

SEQ ID NO: 110424 - DNA, 201 bp, Homo sapiens
tttggcagtgtgccattttattttttaaagctcatctaatctgtttagtaagtagtatgtcttggaggagaaataaaaagggctctatgatagtaatattrtttattatcattagcatttagcaaaaagtgggtgagggtgagtgaccgagcaatggctttccctctgagaacacagatgcattctatttagttgagaagc

SEQ ID NO: 110425 - DNA, 201 bp, Homo sapiens
aaatagccttttttcctcacacagcagctagcaaaaagaaaggtcactcagtcacttgaatctgggcccactcccccatcttctagaaaggattctccctycttccacacccaccgtgcgcaccttcctatctttatcctcagtgggcatcacggctcacatccgaaagtttccctgaataaaattggttcctttcagcca

SEQ ID NO: 110426 - DNA, 201 bp, Homo sapiens
gatttaccacatgcatatcaactaacattgtaaagtgtgtgtgtgtctaatactagatttcttttttttttccttaaacccacatctaatccacaagtaarctttacctcatcaccaaactttatccagaatcccctcatttctttctgtccccacctctactgcccttctctatagtctagttgagagatcagcacactg

SEQ ID NO: 110427 - DNA, 201 bp, Homo sapiens
tcaactaacattgtaaagtgtgtgtgtgtctaatactagatttcttttttttttccttaaacccacatctaatccacaagtaagctttacctcatcaccaractttatccagaatcccctcatttctttctgtccccacctctactgcccttctctatagtctagttgagagatcagcacactggcctgctagccaaataa

SEQ ID NO: 110428 - DNA, 201 bp, Homo sapiens
atttgccttaccagcacctgcattatctggtccctgctggcattttcatgctcctctgtcaccatactcccttgttcgtgcacgtgccaacccctttcctrccccagagccttggaacatgctggcctctcagcctgctgtgctttgcctcagttccttcacaggtatacctcttttctgtctccagatttctgcacagat

SEQ ID NO: 110429 - DNA, 201 bp, Homo sapiens
aaacagaaaatccagttacatcctgccagacttctgacctgcaaacactgtgagacaataaatgagcattgttttaagcctttacatttgtaataatctgycacgacagcaaaagtaaactaaaacaggtagatccccagcagtgaaattgctagatcttatggtaaattaagactttgagaaactgcagtggttttgagc

SEQ ID NO: 110430 - DNA, 201 bp, Homo sapiens
tttactatcagatcaaaatcagtattaaagtatagagcgaggatgagaagctagatttcctaagtccttttctggccctgttaggatttttataataaaartcctaccattgattcaatattacagtgaattaaagcactccgataatttggacctcagtttcctcagctgtaaaatgtgatattaatgacctcatcaggg

SEQ ID NO: 110431 - DNA, 201 bp, Homo sapiens
tttagctaacagaaaagttctccaagtccccacctgattagctagacacagagggctggctggtgtatttacaaacctttagctagacacagagcgctgaytggtgcatttacaatcatttagctagacagagaagttctccaagtccccaaccgacccacccggcttcatctctcagctttacattgattttaggttaag

SEQ ID NO: 110432 - DNA, 201 bp, Homo sapiens
tttcccaccaaaattgttttacatttccatgtatcactttagagcatgacatttttaggagaaggaaattgaaaatctgttcttttcttttgaactgattscttacctgtttccggatacatttaatgctgaagatctggagaaccatactagagtctacaaactcagaggcacaggtcttaaccattagcagcacccaaa

SEQ ID NO: 110433 - DNA, 201 bp, Homo sapiens
tatctttctcacttaccaccagtgtggtatactgcattgttataaaacaaaatcacaaacaattttcaggtcagtacattttagtaaagtcagtttattaygttgcctattttgtagatgagatacctgacttgtgacaaatggttggacttatatttgatagtaagtcacttcagactcaattcaatttcattttccttt

SEQ ID NO: 110434 - DNA, 201 bp, Homo sapiens
actgagtgaatgcagacaggaataagaaacacagctcctaccttcagagggcacagaggtacaactggcctataaacctgtagttatactaaaacatagtrggtactgcaattgagctgtgttcttagccttctaagatactgttggcctctgtcaaccacttaccctgtgtctgcagaactattccctctgatcattcat

SEQ ID NO: 110435 - DNA, 201 bp, Homo sapiens
taagttgcccagcctgaatccttgatttgtactgggctcaggagtctgtgagagggagtttgatttcagtctgcattggctgtctggagaatgagttcctmtaaagagcagaacaggttggagaggtgaagggttcctgatggatgatgtgtctaaatgagaagaagacgactgggcagcagggcttggtgatttgcaggc

SEQ ID NO: 110436 - DNA, 201 bp, Homo sapiens
aataactttcaaacagctatagcctcaacaatgcaatggagggatgcaatgggccaccttgcaaaggaggaaacttttgtctttgaaaaggttcaagctgyggtggctgaaccctcaggtcctgcctagctctaagattttctggttcattcatctccccggcatgcccacattacataaggtgcctttctctgctggagg

SEQ ID NO: 110437 - DNA, 201 bp, Homo sapiens
ctgttcattttcaacccgcaacacttgtgggctctgctgtcagatgttatagctatcaggtgtgatgacttgtactgtgtcaccttgtttagctggaactrcgttttccagaatccccttccctgtgtagttttgggtttgagttgactaaaagaggagtttgcacagaatttgtgattactccctgcagttcattgtgat

SEQ ID NO: 110438 - DNA, 201 bp, Homo sapiens
cagatactgcaccatttacaaaaatgcttttacactcatttcatttgcttctcatcacaatctataccatcagctatactgtcctcatttttcaagtaggkaagcagactagcatatctttagaacatgcagcgtttataattacagagaacagttcaagtcccatctctgacacttaccgcctctgtgaccatggaaaag

SEQ ID NO: 110439 - DNA, 201 bp, Homo sapiens
tgattactccctgcagttcattgtgattaggtagtgacagacagatgtggagatgttagcaagaggctccagccttttcttgctcttctctgcattgtgtscagctgtttgtcccaagtgctgatcctgctgagccatatggacccaggcccatcctgagatgcttggtgtcttagtctatttagtgttgctgtaaaagag

SEQ ID NO: 110440 - DNA, 201 bp, Homo sapiens
caaaaggaatggcagttttgtctaattaaaactcactaataactgttgtaatagagtaaggagaatagctctaggagatgaagtcctattcattatttaartgttagaaaaaacaagaactagggtgcttaccatgagtgtagacttgaattgatgagaaacatggggcccagggcagtgaaaactcatgaattgtacaga

SEQ ID NO: 110441 - DNA, 201 bp, Homo sapiens
cacagaaatctatagaatgagaccggcgaaaaagtagcaaataagcttcatttgggggcattattttgcggcattttatcacagtaatattcatctcttcaatatatagaaattaagctctagaaaatgttagtctgttagtgtattctttttctttctttctttcttttttttttgagatggagtctccctctgtcaccc

SEQ ID NO: 110442 - DNA, 201 bp, Homo sapiens
atgctttcctccctgcctgaagcagggctcagggctctgggtacagtgtctggggagtggcctgatccatttagggcaccatattctcccctcccctcccstctcctcccctcccctcccctgccctcccctccattcccctcccttccccgtgcccacagcattgattggcttgcccacagcattgaatagaagtaggga

SEQ ID NO: 110443 - DNA, 201 bp, Homo sapiens
atttttttttcagtgattttatccatttataatgtaacatcaaattatttttagtaattttatgaaaataattgtcttaaaacaaggtcattaaggactctaaacataggaaggtgtatgcatatatctaatatgttttctttaatcacattgtggcctctggaggaaacagttctttgtgtctacttgttttctcacctc

SEQ ID NO: 110444 - DNA, 201 bp, Homo sapiens
ggcttaagtccaggagtttgaggccagcctggaccacatggcaaaaccccatctctataaaaaacaaaaaaaatttccaggcatggtggtgtgcacttgtrttctcagctactcccagttacttgggaggctgagggaggatcacttgaacccgggagttcgaggctgcagtgagccatgatcatttcactgtaccccagc

SEQ ID NO: 110445 - DNA, 201 bp, Homo sapiens
aagatctgccccctccccacagtcaaatcatgtttatgcattatgacagactgttccacctcctgctgggaggcaatgagaaagggtcaggaacctggaasaggctgcagctggatttaagggcaccagtgcttgaggacgaaggagagtatttcaggtaattctatagatgtattgtttacttctggatgtccatgttgc

SEQ ID NO: 110446 - DNA, 201 bp, Homo sapiens
tctcaagccccttctctcctttttgctcctatccctcactcctgcctgtttaggtgaattcacataagattatgatgtaaactatactctgtaaaatgatygtaaagctttagatgggttaaacagagtcagtgattctaatttaatgagaattccctgagaagttgacatccgaacttgtccttaaggaatatgcagact

SEQ ID NO: 110447 - DNA, 201 bp, Homo sapiens
aaaatctggtgtaattctttctggttttaaaaaagttatgtccagctaactcttaaaaaatcaaaccccttttgaacttttaatttaaaacaatatcaatrattgctaaaagtcatctatagctttactatcttactgattttcactttctgttttcaataataaaaatcttttacccatcacaccagaaggtaccaggct

SEQ ID NO: 110448 - DNA, 201 bp, Homo sapiens
gagagagataccgtgatgtatttttgctaatatgttttaaaccttgcattatttatagtttctccttagaagcttgaaattaaaatttcttttctaactgwttttgattctttcctgtctggcttacaattgatttcacctcgctgtgtttctaatgaagcctgaaattaccatacccttgtttgagttgaatgtgttttt

SEQ ID NO: 110449 - DNA, 201 bp, Homo sapiens
ataggagatgagatattttttagttggcacctctctacaactgtaaataattagaaaaggtttttttttaatttttactttagaaatttttgttaaagaactctctctctcttaatgtccaaagtcttagacagttggacatcttttccttctggaaagatgtgaaactttgtagaatggagaagaaatgtaaagagtact

SEQ ID NO: 110450 - DNA, 201 bp, Homo sapiens
aaggtgttattaccactgttattattcttagctacacttctactactggaaataataagacttcaatcagtagtgatttactaccaagaaattaattggtrtaaggcagggcctactgagatatccaatatcaatttttttttcttccttaatagtagaatctcaacaaaatgtcaattctatgatattgttccacctccc

SEQ ID NO: 110451 - DNA, 201 bp, Homo sapiens
taggagatgagatattttttagttggcacctctctacaactgtaaataattagaaaaggtttttttttaatttttactttagaaatttttgttaaagaactctctctctcttaatgtccaaagtcttagacagttggacatcttttccttctggaaagatgtgaaactttgtagaatggagaagaaatgtaaagagtactt

SEQ ID NO: 110452 - DNA, 201 bp, Homo sapiens
acttttacatagaagtttttcagatttaaggtgttattaccactgttattattcttagctacacttctactactggaaataataagacttcaatcagtagygatttactaccaagaaattaattggtataaggcagggcctactgagatatccaatatcaatttttttttcttccttaatagtagaatctcaacaaaatgt

SEQ ID NO: 110453 - DNA, 201 bp, Homo sapiens
tctcggacgctggtctgatcctagtctgatgtcctgtgaagaataactcaagtgttgtttctcttgatgcgggaactttaaagtacttttcttctctagcyatccactctaattaagttttacatcccttcaacgctggcttttcaggtaccatatcgtcattattattattaccaatttgtcagctgctttatttgttca

SEQ ID NO: 110454 - DNA, 201 bp, Homo sapiens
taaacctctttcctttgtaaattactcagtctcaggcagttctttatagcagcagttaccagagagtattcaattatatggactaatacaccacacaatgraatactctttggcaacacaaagaacaaactattaatacattcaacaacatgaatgaacctcaaaaacatggtatcatgatattaagtgaaagaagtttag

SEQ ID NO: 110455 - DNA, 201 bp, Homo sapiens
gccttttcatagcatggtggtctcagagtgatcatatatagtgaatggctcccaagaggcaggaaatggaaacttccaggccaggactgacagtgtgccayttctgccatcttctgttagagcagttacaggtcctgcccaggttcaaggagctggatggattagagaaacagaccccatctcttaatgtgagaatggcaa

SEQ ID NO: 110456 - DNA, 201 bp, Homo sapiens
atgtgattattgtgtgaaccagattgtaacttttacatagaagtttttcagatttaaggtgttattaccactgttattattcttagctacacttctactaytggaaataataagacttcaatcagtagtgatttactaccaagaaattaattggtataaggcagggcctactgagatatccaatatcaatttttttttctt

SEQ ID NO: 110457 - DNA, 201 bp, Homo sapiens
ggaaaaagaacagtgtcagtacccacagtcctattcttccttctacatctgacattattatttttttcctttccataggcttaggcttctaatcccgatgrttacttttcttacctatttctgtagcatgttttcatgctgaaagagaagttgacgtgctgttgtcatcgtattaaggcctaagcagaacagcattattgg

SEQ ID NO: 110458 - DNA, 201 bp, Homo sapiens
ggtaccattttaccttgtaactcaatgtcatgtgttttcctataaacaaggtaagttaatttttttaaacatactaactttatttcaaaggataacatcgyagtatctttgatatctgacgtggactttattttccattaccctgttcaagtttaaaaaatttgattttttctaacaccaccctgatttgtttgaaagctt

SEQ ID NO: 110459 - DNA, 201 bp, Homo sapiens
cgattctcaattcttaattcaaaacaaattaaatattcctacttgtcagaatcctgacttgtatctaaatgttctattggactagatgtaatatacttttyccctccagggaaagatagtcaaggatttatgtgagaaagcaaacttcctaatggctgcctccctttgtaagcagtaaagcatgttatatctttgtatctt

SEQ ID NO: 110460 - DNA, 201 bp, Homo sapiens
agcctaaaatgacactagtttccaggttggggacccctagatactagatgaaaattctagtactagtactagtactagatggaaggtcctccttttctgaytgatctctgttttcccagtacctgatacataatatatgattccgaaaatattaaatgcacaaaccccttccccctcagaatgccatctttgtgcttcttc

SEQ ID NO: 110461 - DNA, 201 bp, Homo sapiens
gcctggcttttatttctttttctcaatgttgcttttaagtagattgatatttatggcacaaataataaatgaatttatttaaaaattcattattaaaaaawtttttttaaattatagattaggttgaaatttcttggtctgcccttcccaagtttactggcaatagcttggtgaacatcatctggaccttttcctatacat

SEQ ID NO: 110462 - DNA, 201 bp, Homo sapiens
taaatttatttctaagtattttatttttgatgctactgtgaatggcattactttaataatttcatttttagattattcattgcttgtatgttgaaatacarttgatctttgtatcttttattttgtatcctgtgaccttccttttcttgtttattcatgcaaattgtgtttaaaattgattccttaacattttctctatac

SEQ ID NO: 110463 - DNA, 201 bp, Homo sapiens
ctccagggaaagatagtcaaggatttatgtgagaaagcaaacttcctaatggctgcctccctttgtaagcagtaaagcatgttatatctttgtatcttggwtgttcagctggtaatatttcataccttactgtccatacgtttcctgatagtaatcaatccattttgtcgttatcacacttgcttgcactgtggctgggca

SEQ ID NO: 110464 - DNA, 201 bp, Homo sapiens
ttcttggtctgcccttcccaagtttactggcaatagcttggtgaacatcatctggaccttttcctatacatttacttatgcatgtatctgtccttagaagrtacacattattgcttcatgtgtgaacatgtgtgtctaatatatgttcttctgctgtatgtattgttctgcagcttgctggtttcttttagtcttgtgcct

SEQ ID NO: 110465 - DNA, 201 bp, Homo sapiens
tctctttttatccctctccctctattctttcacagatatcacttaattggcaaaagagagcttcagggacaactagtacttcttttctttttcttttttctttttttttttttttttttgagacagagtctcactctgttgtccaggctggagtgcagcagcgagatctccgctcactgcaagctcgcctctcgggttcac

SEQ ID NO: 110466 - DNA, 201 bp, Homo sapiens
cgatgatgtgagatgatgcaatgtctacatggtaagacgtggggtgagtgatgtgagcattgcgatgtagcattgggcttctcatgacctcctggcaatamttcgtgagggacatctactttggatgatcctggatcatcaaaccatgggtgtcaatggctggatgtcaggaacagatgatgtcaatggtcagggatcctg

SEQ ID NO: 110467 - DNA, 201 bp, Homo sapiens
tgattgtaagtttcctgagacctccccagccatgcggaacagtgagtcagttaaacctctttcctttataaattacccagtctcaggtagtatatttatarcattgtgaaaacagactaatacaggtagttttcttactcgttcatactacaatcgaaaaagacctctgacctcttactctaccttctcatggttccttct

SEQ ID NO: 110468 - DNA, 201 bp, Homo sapiens
tgtggaaagtggggcatcttctttctagagagctaccgaggctgttcaaatttcaattttctctgtggcatgtaaaccgtatttttttttttttttttggkgtcaaagaatagaaaattagttttaattgtttcttatgaggcaccatatggctactctataattttggctttccatggagctgcatgtgcatatggaaaa

SEQ ID NO: 110469 - DNA, 201 bp, Homo sapiens
gtggcacaatctcggctcgctgcaacctccacctccccggttccagctattcttctgcctcagtctcccgagtagctgggattataggcgtgtgctaccaygcccggctaatttttgtatttttagtagagacggggtttcaccatgttggccaggctggtctcgaactcctggcctcaagtgatccacctgccttggcct

SEQ ID NO: 110470 - DNA, 201 bp, Homo sapiens
acatgggaggcagaggttgcagggaggcagaggttgtagggagctgagatcgtgccactgcactacagcctcagtgacagagtgagactctgtcttttttwaaaaaaaaaaaagattaaaaaaaagaaaggcatcctgttgtatataatgtgcttccacatgtaggattattccattactgcaatgcttgcagatacatag

SEQ ID NO: 110471 - DNA, 201 bp, Homo sapiens
ggcaagcgttaaaatagtcagaaggacttcaggaaagttttgagttggtgatgactcttgtagaaatcactcaaccactgaactggttagtctccgtagaytatctctcttcccttttaaagaaagcacagtctgggattcagccacagcagagttaatgaccttgcctatttccccatttttaattgatgagaggcaaat

SEQ ID NO: 110472 - DNA, 201 bp, Homo sapiens
gcttcatgtgtgaacatgtgtgtctaatatatgttcttctgctgtatgtattgttctgcagcttgctggtttcttttagtcttgtgccttgtagaataatyagtgctaccatgttcagacttaataggctagattagtcaatgctgttatcatgagttattcctaagatctcagtggttaacacgtcaaacgtttatttct

SEQ ID NO: 110473 - DNA, 201 bp, Homo sapiens
gaaacagtcaatatatgttacatgtctgtgaagctggcctctggatcaattgcaattagtttccagcagattgcattaacatatctaaaattaatatggcsagtgttctgatgaaaaggaattgaccacaaccacattgtggctgtttttagtctccctcaaatgctcttttcaaactatattttttctttctttggttaa

SEQ ID NO: 110474 - DNA, 201 bp, Homo sapiens
ttcctttgcatatgactcatggatggaaaggagtttacattaagtgtattcatttttcctggttttttttttttttccttcttttaaaaatggggcttacrgatttggtagggaatactgttgatattattggataaaatgtaaggaatttatttgttcatgttattgtgtcctttgactgtgtccttttaacacagataa

SEQ ID NO: 110475 - DNA, 201 bp, Homo sapiens
aatgctgacacctcatgtagttgtggtacaatatcaaaagcaagacattgatatttgtgtattactgttaactagatcacagagctcactcagctttcagsatttttaaaaaacctgcattcatttgtgtgtgtgtagttgtccttaacagtttttgttaaaaaataattaggcatgaatttaagtgggtttttttttctt

SEQ ID NO: 110476 - DNA, 201 bp, Homo sapiens
ttgttgctactaaataatgcttagtatgaatctcactgaccccttgaggaacttttataggagagttagcttacctggctgggggctgttttatctgagarttagcttacctggttgggagctgttttgagactggcatgataaaattattagagctcttaaaagtatttggggtaaaatatctaaatttaacaaagatga

SEQ ID NO: 110477 - DNA, 201 bp, Homo sapiens
agaggcttcctcaaatataaacaccccgaccccatgtggtaaaatggtaaaggctgatacagaaatgagtatttaaatattcaagacaaactactatgaataactgcccacatttaattcacagcttttaaactctttttatttttctgacacataattgcaaaataattaagtcaacatagaaaagatataatgttgtac

SEQ ID NO: 110478 - DNA, 201 bp, Homo sapiens
ttaaacaaatttacaagaaagaagaaaacaaacccatcaaaaagtgggtgaaggatatgaacagacacttctcaaaagaagatgtttatgtggccaacaarcatgaaaaaaagcttatcatcactggtctttagagaaatgcaaatcaaaaccacaatgagatatcatctcacgccagttagaatggcaaccattaaaaag

SEQ ID NO: 110479 - DNA, 201 bp, Homo sapiens
aagaagaaaacaaacccatcaaaaagtgggtgaaggatatgaacagacacttctcaaaagaagatgtttatgtggccaacaaacatgaaaaaaagcttatyatcactggtctttagagaaatgcaaatcaaaaccacaatgagatatcatctcacgccagttagaatggcaaccattaaaaagtcaggaaataatagatgc

SEQ ID NO: 110480 - DNA, 201 bp, Homo sapiens
aatatacaatatttttaagcatatggcaaatatgaaaaaactgtgatttaataaactttaatttaggaatttttatagggactaaaattaaaattattccrtcgaaagcataaatacattttttgttaagatattatcatttttaaataatcaaactcttcaaaatggctttatcatgcccccacagtatccaaagaaagg

SEQ ID NO: 110481 - DNA, 201 bp, Homo sapiens
tatactccattccattccttgcattctagaattcatggattatctgagagattcttcatgtctcctgcagcaaagatgttatttttagggtcataacaggyagctcttcctaggagttgaaataaacttctaccattctagcatcttaggacaacacctattcacatctccacctccctccctcccaaagcctggagtagt

SEQ ID NO: 110482 - DNA, 201 bp, Homo sapiens
gagtaagtctggaggttgttattccttgtcttttggccaagcagttatggaagatcttgctcaagattgaaaggcacactgaggttggttgtggtggggtwggagcgggccaaagcaactagaagaaactgaaatcataggtagagggctctggcagtgccctagttttccttctgcccccacaaaatgatttttcttact

SEQ ID NO: 110483 - DNA, 201 bp, Homo sapiens
ctggagatttatttgtctgtgcctgttaatgtttttgggttgctggcttctctagcacccagcaccctgcctgagatttatgaggccaaagaaaacatagrgactcactaccatacgcttccttggacctcaagctccctagctagtctcccttcttctctataactttcagagtcaccttaagttttatgtatatatatg

SEQ ID NO: 110484 - DNA, 201 bp, Homo sapiens
gagtcaccttaagttttatgtatatatatgtccaaggcttttatttgtacttagcgggaagaatagggaaaaacatgtctactccatcttctcaaaagtakaagtccccagattatagaaccttttgattctaaatttatttcagaagctatttaaacacatacacacatttatacacatcagatatttgttttctaagtc

SEQ ID NO: 110485 - DNA, 201 bp, Homo sapiens
gtggtaacagcttggagtcctcactcagggcagtgagcacagccagctcttcctgggcccttcccagcaaaaggagccactcccaaaacccctaggtaacygtgagaggactccaaaaaaaaaaaaaaatccctcctgattgcaccttgagcagtttgcggtatctatttcaaccctataggaaagggttgttaggacagc

SEQ ID NO: 110486 - DNA, 201 bp, Homo sapiens
gctttctatactggtggactccacaaagacgatgtgtcaacatattctttgtgtaactcacaggtgaagctcttttgaaatgtttctaatggagttgctcmgggatgagtgtttgtggattccatttagatttctctgtaacacttcctaatatactctgtcatcctcggtcatttggaaggcatgacgatgtcaacaaac

SEQ ID NO: 110487 - DNA, 201 bp, Homo sapiens; identical to SEQ ID NO: 18156

SEQ ID NO: 110488 - DNA, 201 bp, Homo sapiens
gaggcaggagaattgcttgaacgcaggaggcggaggttgcagtgagccgagattgtgccattgcactccagcctgggagacaagagcgagacttcgtctgraaaaaaaaaaaaaaaaaaagtaaaagaaaaagaaataaaacataacagggatcctggaagcctcctcctcatgcagtccccatcattttcctaccctgct

SEQ ID NO: 110489 - DNA, 201 bp, Homo sapiens
tcccttcctaatggctttattttaaattaatctcctctttaaagaccctgtctctaaatatggttacactctgaggtactgggggttgagaattcaatacrtgaatttagggaggtttacaaacagcccatagcattctgccttctgcatgccccctcccatccctgatttgtttcctcttgcatgtaaaatacattcacc

SEQ ID NO: 110490 - DNA, 201 bp, Homo sapiens
gtcaacacagaagacttctgtgatcaaatgtgtggggggttttccccaccagtaagcaagcaatcaattctgcagcagacactagctgggcatcctctatytaaattcagttctgacactccacctggagataatctcagatcccacaggttgagggctcagtcccacaaaaccacgcctcacttccgatgctgattgcaa

SEQ ID NO: 110491 - DNA, 201 bp, Homo sapiens
agtcattgtggtagaatatccttccattgatgattgagctgaagaactcaagacaccagaaaagagataactgctaggacaacaaaatgtgaatttgcctrtacctagcctaaacatggtggtgtacctcccttgaggattatttaacatctggttgatttttgttttgtcactcttttctgacaactgtacgtgagaaat

SEQ ID NO: 110492 - DNA, 201 bp, Homo sapiens
tttagtagctgtgaaaatttaatgtttacatcagctctcctcctgtgtcatttccatgtatgtcttcttttacttagtgcaattcgttttttttctctctmgctcatgattctacttaaacttatgaaccaagctctgctctgagtcctaattattttgtagtagagaatattccttaaaagtccttttatcttatttgta

SEQ ID NO: 110493 - DNA, 201 bp, Homo sapiens
gaggtcaaggctgcagtgagccacgattgtgccattgcactccagcctgagagcaacacagcaagaccatctcaaaatgaataaacaaataaataaatagwtaaataaataaataaatgcaggaacatggttaaataaatattgtcatataaataccatgtaatcacaatgaagagagaagaccttagaaagatatttaag

SEQ ID NO: 110494 - DNA, 201 bp, Homo sapiens
tgcagcaaagatgttatttttagggtcataacaggtagctcttcctaggagttgaaataaacttctaccattctagcatcttaggacaacacctattcacrtctccacctccctccctcccaaagcctggagtagttacattttaccttacacgagctctgtcagcatttcgtgaaagtcctattcctggtagacttttga

SEQ ID NO: 110495 - DNA, 201 bp, Homo sapiens
taaattatacttctgtagatgtatcacaattttttttttttttttgagactgagtctcactctggcacccaagctggagtgcagtggcacaatcatagctsactgcagcctcagccttccaggctcaagttgtcctccagcctcagccacccaattagctggtactgtgggcatgcactaccacatccagctaatgttttc

SEQ ID NO: 110496 - DNA, 201 bp, Homo sapiens; identical to SEQ ID NO: 18153

SEQ ID NO: 110497 - DNA, 201 bp, Homo sapiens
ctggagcaaattattgaacctgactgagcctcaatttactgttacttgaaaaggggatcatttgcacagatagttacaaagattaaataagatgatatttragacatttggcatatgacccgatggtgggcccaggatgattatttctcttgcactgaatttgaagctaaattcgctggtctttttaaaaggctttattga

SEQ ID NO: 110498 - DNA, 201 bp, Homo sapiens
agtatccctttgctgggtttcatgatatgtctctctggtaaatctgcgcccctagagtaatcagtgcgaatatgaaaatgagcacattatttcactgttarcaggcactgctaagatgaaagcgaaggcatataggcctgctgatgtttttatttttctttttgcaacaattaactgaataagaaacagtatagccaaggt

SEQ ID NO: 110499 - DNA, 201 bp, Homo sapiens
ggtgatgaagaaggcagtccaggtgaattcatgcagaggcagaggtgagagaacagggggagagtagttgtagtgagcagtttagtatggagaagggagakgtggatagcagaagttgagggacaatggcacttttgggtatacaaagaagtctaaatggggcttcagaaagcccagaattcagcagggaataaaattaac

SEQ ID NO: 110500 - DNA, 201 bp, Homo sapiens
tgaagctaaattcgctggtctttttaaaaggctttattgagctagaataattttgctttcccagattcagtaagcatttatcatgtgctgccatctcaggrttagtcactggcttggtgcttccatacattttatttcacttcatccttgcagtagccatgtgaaataggagttattgttcccagcttacttctggggaat

SEQ ID NO: 110501 - DNA, 201 bp, Homo sapiens
ccatgtgaaataggagttattgttcccagcttacttctggggaatctgaggctcagaggggtgaagatctgcctcccgggctctgattatcttcaggattycacagttgggatgaatgtctggtgaggcctgaggtggcagtggggaggagctcatggggagcttaattgtaccatcctggttattactcatttcacaaac

SEQ ID NO: 110502 - DNA, 201 bp, Homo sapiens
tccataaaggtctgttcttaatggtattaatattaataatacatgttatttagctaattgctattctttcatagctaatgggcatttgaaatgaatattgrtggcataaacttgatattttattgagaacagcttaaaatatgccaattttgtaataatatcccttggcttcaaagaccaaaacattggcctcagagctgt

SEQ ID NO: 110503 - DNA, 201 bp, Homo sapiens
attatatatttattattgtagtaaaatatacatgacataaaattgaccattttaaccatttttgccatttttatcattttgccattttaaccatactcggrcattgttatatattcatattgttatgcagccatcaccatcatccatttcctgaacttattcatcctcccctactaaaactctgtacctattcaatgctaa

SEQ ID NO: 110504 - DNA, 201 bp, Homo sapiens
attagcagctcacagaatctcacgccactaaacaaaacaacaaaacaccctatgcatataagtaccacagctttctttgatattcgttcagaaggaaaatwcatttgtataatctatcaagcatgtaacaatgtgcttttgatggtgaaaattgttttataaatattaataggtatgtttctttcacccactttgtataaa

SEQ ID NO: 110505 - DNA, 201 bp, Homo sapiens
ctgttctacttttgatctctgtgaatttgcctactctaggaaccttatctaaaaagattcatactatagctattcttttatgactggcttatttcatttarcataatgtcttcaaagttcatctgtgttgcagcatgtgcaaaaatttccttccttattaggctgaataatattccatgatatgtgtatatatcttttttt

SEQ ID NO: 110506 - DNA, 201 bp, Homo sapiens
ggaagggaatgatggcaaggatattgtacaagtccaaagggaacaaaacctaggtgcccacctaccccagctagtttaagaatgtgatgctgttcctatcwcggtcactttgccaaaatccatgtgaaggaaggaaaaaagctgggaattagtccagctttcatcaggcctctggcttactatatgatccctaggcaagac

SEQ ID NO: 110507 - DNA, 201 bp, Homo sapiens
ttgtgaatttcacagccaacggactgattgttattttgcaaactagtgttctgcaagcctaaggtcactcttggtagaatcagtgacagtgatttttcagrggtgcccaaacttgcctgtgcatcaaaaccctctgtggaactcttagaaacactgaactctgaatctaattcctgggattttgattcatttgctttggat

SEQ ID NO: 110508 - DNA, 201 bp, Homo sapiens
tagccattcatttgatgtttattaaggggcttctcctgtagcagtggtggtcaccaagagcccgttttccatacagccactgtggtctagctgcactgtcyggcagtcagctccagagttgcacagtgaccctgtctgcctcctccatatcactttggacatctgtatatttctcttatttatttgcagtcacctttgcta

SEQ ID NO: 110509 - DNA, 201 bp, Homo sapiens
ctaaaaagattcatactatagctattcttttatgactggcttatttcatttagcataatgtcttcaaagttcatctgtgttgcagcatgtgcaaaaatttscttccttattaggctgaataatattccatgatatgtgtatatatcttttttttaatccattaatttgtcggtggacacttgggttgctttccctttttgg

SEQ ID NO: 110510 - DNA, 201 bp, Homo sapiens
cttccaattggttagccttaagtttcatttttctgtaacataggcatttacaagaaatagctcaagttttgtttatgtctgcaaatcaagcagagttaagrtcacttatgaggcctaactggctttgtctgctcagagattcttcaggtctggtgtccattttaatttattgtaacaaagcaaaacccatttcattacaca

SEQ ID NO: 110511 - DNA, 201 bp, Homo sapiens
tttaatccattaatttgtcggtggacacttgggttgctttccctttttggctatgtgaataatgctgctatgaacatgagtgttccgtggaggtatacctyatgttaacattcacctgagtagaaatgttgtatcatatgtagcttgggctacattttcagtttcccatgtccaactaaaatgtctattaagaaatatctt

SEQ ID NO: 110512 - DNA, 201 bp, Homo sapiens
ctttgtctgctcagagattcttcaggtctggtgtccattttaatttattgtaacaaagcaaaacccatttcattacacaccacatgtgtttgctgaaataycttatctgcaagcgactgttttctttgtagggaagtagaactcttgtaggaatttattttcgaatatagtgctcaatactttatacaacacaagcattat

SEQ ID NO: 110513 - DNA, 201 bp, Homo sapiens
tttgcaaagtgaaaatggtagggagcacctcctttcaccacaaagttcagaaacaaacacaaacactgagtacttttggaccacgttgtttagtgtgtttktatgattattgtagacttgatgaatgtttatttgacaatcatttacattcattcattttattccagttcggtgtcacaggtggcagatgcccatcccagt

SEQ ID NO: 110514 - DNA, 201 bp, Homo sapiens
tacttttggaccacgttgtttagtgtgtttgtatgattattgtagacttgatgaatgtttatttgacaatcatttacattcattcattttattccagttcsgtgtcacaggtggcagatgcccatcccagtagctcagggagcaaggcaggaacctgtttgccaggaaccaggatgccattcccttgcagggtgccatctc

SEQ ID NO: 110515 - DNA, 201 bp, Homo sapiens
ggacagtaggccctcaggccttgggaccgctcaaagtgaaccggggccgggtgggggacccagggctctgcagccttaagaacgcctgtgcccccgggacrcaggggtcaggcccggcccggcccagaccgcctctgcctcctcctccttttcctccccgcgcccgcttctcctctgacccctcctcccgctgctcctcct

SEQ ID NO: 110516 - DNA, 201 bp, Homo sapiens
agatagaaggtaagagatagatagaggaaatcaagttaaaatgaggtcgttagggagggccctaattcaatatgattggtgtctttataaaaagagaaaawttatactcgggcacacacgcccagggagaaagccatgtgaagatgaaagtagtgatgcttttgcaagccaagaacaccaaagattgcctgtgaaccactg

SEQ ID NO: 110517 - DNA, 201 bp, Homo sapiens
tcaaaagccacagttgccttggaattggtgatggaaattatcatcattctcacttgctggaatacacagggaggtatgtgggaaagaacataatagaaatwttttaaaattatgttttttatttgtatgtattgttcttcacataatataaggtgttgacaggacaggaattatttctctttctgaaatgaggaaacagac

SEQ ID NO: 110518 - DNA, 201 bp, Homo sapiens
aaggagacaaggacagcagtgccggcaagagaggagagtcgcatgggctggggaggcagtgcaaggctgagaaacggagggacctgcatgggatggcagcragggtgctggaatgaggggagggggaatcagggatgacccttgggttttcagccttagtaaccggaaaagtagtaacagctaccacttacaggggatggc

SEQ ID NO: 110519 - DNA, 201 bp, Homo sapiens
aagaaggctccaggaggaattgccatctagaaccaaactcatcaaactcaggtgctttcctttgtttttttctaatgagttttaagctgggctccccttgrgacaccgagcaaagcctgccgcttcctgaagttccttccttcccacttcctaccactcttcagccaggctctcaggaccctctcagtcaacccaccctct

SEQ ID NO: 110520 - DNA, 201 bp, Homo sapiens
tcttcataggcactagttttggtcatttcccatcaaacgacctttgtccccaaaccagcctctaattcccatcatcataggctccaggtgccatgttgccyctgggcacccagacactaaactccctaaacatcttgcctcattcaagggcaaacattttctttaaaactaagactttcacctgggtacagtggtgcatgc

SEQ ID NO: 110521 - DNA, 201 bp, Homo sapiens
caaaatacccttacctgctctcctagttctaactagaactaggagacagacagacagacacacacacacacacacacacacacacacacacacacacacasagagagagagagagatgtttgtcttctcctcttgtgggaccctttcaccaccagctcatttttccagtggagaatccgcaaactgatacaaactcaagac

SEQ ID NO: 110522 - DNA, 201 bp, Homo sapiens
accccaccgtgaaaagccggtcatgatgttcagggctaccttgagcaaagagatccgtccagtctgccacaagttcatgcaagatccagtggagatcttcrtggataatgagatgaagttgatgctgcatgggttgcagcagtactacatgaaactgaaggacaaccagaagaactggaagcgctatgaccttctgaatgt

SEQ ID NO: 110523 - DNA, 201 bp, Homo sapiens
ctgacacctacctgcattgggtggccagagccagccggtttggcaccaagagcttggctatcacatttgtgtctgacgagaatgatgccaagatcctcaawgacatgcaggatcgctttgaggtcaatcgtagtgatctgcctgatgagagagacatcttctcctgctttgaaaagacatggtaaaggacatggtagagga

SEQ ID NO: 110524 - DNA, 201 bp, Homo sapiens
ctgttttcttaattataaaagtagatgcttgttagacatttgagaaacactgaaatgtaggaaaaaattcaaataacccacagttcacccagagagttgcygctgacatttccgtgtttattttagatagaaaaacaccacttttttcaaccagcatcataatatacattgagttttgtgtcctgatttttttcacttaag

SEQ ID NO: 110525 - DNA, 201 bp, Homo sapiens; identical to SEQ ID NO: 18168

SEQ ID NO: 110526 - DNA, 201 bp, Homo sapiens
aatctattgactcatgaaattggaatccccaggggaaatgtcagcttcaggaggagtttcacccagaggttggtaatgtctcataatccttggctacattkctttgtgattctctccactctccttttctaatgtatcaggcccattctcagattgaattccctcacaatagcaaaatgtgtgctagcacctccggggtca

SEQ ID NO: 110527 - DNA, 201 bp, Homo sapiens
taaaaattaaaaaaaaaaaaatgaagactcttcattttctgatcaaatgccaattacagtgactcaagcctcttaggtgctcaaaaaatagatattgaatkgataagtaagtgaacaaatgaatcaatttgtaaattagtgaagtaaatgaatgaaagcttcacttctgttactctcccaaatcccatttctcctaggcta

SEQ ID NO: 110528 - DNA, 201 bp, Homo sapiens
gcctgcatgactctgtttctattgtctattgtttctactggtacttggtcaaagtgtcttgttcccttatgtgttggtcatcttagaatgtgtgtatgacrttcacctcaccccagctactatgtccctaatctcctcagagaactttgaggatggaggacataacttcaacgggctgctattcctgtcaggatgccattt

SEQ ID NO: 110529 - DNA, 201 bp, Homo sapiens
catccctgagaagcaagtgctcttcaggagctgcatttaccaccactcaggcaacaaacaaatttgcacttattctgcccacttcacttaattactgcctrgccctgtaagaatttaatttttcagtccttgacctagagaaaagacagtgtgtaattccgatccctaggagtttccaagactgagacagacagcacacag

SEQ ID NO: 110530 - DNA, 201 bp, Homo sapiens
tccagatccataggattgttgtgaagttcaatgaggtaatggatgaaaaagccctagcataacatcccatagataacagggatgtctgctgcttctccccrccctgcctactctcaccctccctgggtgccctcagtatcagagactgcaagggccagagtcaccatcatcctctttgatgtataaatgatgaaatcaagg

SEQ ID NO: 110531 - DNA, 201 bp, Homo sapiens
tatctgttttcctcatctcctatgtccttaagagtagataaaatgcttgtaaaatagggtcctattcagcatatactgattgcttccaaaacgcattttcytgagatctgtcatcaagtgagagtcattactgagcagctaggcccagcaccaccgttgacaaatatggggaagattctttgattatttggcccaacatgt

SEQ ID NO: 110532 - DNA, 201 bp, Homo sapiens
caagggcagcacagcggagcaaggagccgcaggaacccagagacactgcgggccctgctggtgagaacgggcctcccatgggcctgggccctccactcttycctacaggatcccctctccccagacctcctctgtctgtctgtctgtcttgcccaccagaggtctgggtggccctcatgaagcagtctcccctccgttgcc

SEQ ID NO: 110533 - DNA, 201 bp, Homo sapiens
gatcattgtttagtgtaaatatatctcacatattgtgtgggacatacctatattaatccatttatttgttgcttacctgaaattcaactttaacgaggcakccggtgacccgctccttggctgttctatgagggttgggaatcctggaaaaggatggggggaatcatggagaaattaattccccaatagccagggcccagc

SEQ ID NO: 110534 - DNA, 201 bp, Homo sapiens
tggggggaatcatggagaaattaattccccaatagccagggcccagcctacagctcctcacgtccacccggtgctctgcaaggtctatttagggggtcccygtgctccctggaaaccccaggctgtggcctcagctcccacccaccccatatgaagcaccactgccggagctcccccacgcccactgtccttggccagctc

SEQ ID NO: 110535 - DNA, 201 bp, Homo sapiens
ggtccctgtgctccctggaaaccccaggctgtggcctcagctcccacccaccccatatgaagcaccactgccggagctcccccacgcccactgtccttggycagctcactagcagcgctgctcctggagagttgcagccaatccaggcttcagccctgtctccacccccatccctgctcctccagtctgagaatccacttc

SEQ ID NO: 110536 - DNA, 201 bp, Homo sapiens
cccatgaacccctatacatatacatcttccagaatttgtcttaaacttctcctcctctgggcagacctctctgatgtcccaaacgaagtcagatgtcccartacatattctcacagcaccttgagcttccctttcttctcactcatcaaaattacaattactgcaataagggatggaatgtacacacaataactcagattg

SEQ ID NO: 110537 - DNA, 201 bp, Homo sapiens
gtgtccaacctgttgccctctggctgcagctgatcttttctgacatcggatagcactcccagatgaggtcccagcctctcccaccatctgccctcacgtgwcctcctcatcctaactccaggcctgtatgtccacaattctttcacacttctgcaatctcccctctgagacacacggaactcccagatcctctgctgtgtt

SEQ ID NO: 110538 - DNA, 201 bp, Homo sapiens
ctctgctgtgttggatacagggcattggcagccaggaacactgattaagaaccgccctgcacagctccctcaaccagggctgcaccacgtctgacccaggkccacgccaaacccggaccttctctgggaggtttgtcttcatctcaggccacacacagaaggcagtccacaagccccaatattctcaggtcccccacacct

SEQ ID NO: 110539 - DNA, 201 bp, Homo sapiens
agtttgacccagtgagggtgacatggaggaagaaggaggctcacagcctcccctacctcccaagaagccaggaagagctgtcccattcctgctgttggggkatccctttgggtttcccaaaatgcttcctgtacagcttgcagaaccctgagcccaaatatacctccttttttaaataaattacccagcctcaggtatcac

SEQ ID NO: 110540 - DNA, 201 bp, Homo sapiens
ctcagtttttaaaataaccttagcagctcactgcaaaggtgaaccattgctcacgtgcaactcgtgaagaagaggtggtggatccctgaatccggtgataycccaaggccctcccagttctgccagtcagtggtggttatgacctagcaaaggagcaagatcaatatacaaacaactgcagtgtaaggcagggcccatcga

SEQ ID NO: 110541 - DNA, 201 bp, Homo sapiens
aggggaaatgtcagcttcaggaggagtttcacccagaggttggtaatgtctcataatccttggctacatttctttgtgattctctccactctccttttctmatgtatcaggcccattctcagattgaattccctcacaatagcaaaatgtgtgctagcacctccggggtcacatgcttcctttttcataaccacggaggtt

SEQ ID NO: 110542 - DNA, 201 bp, Homo sapiens
agaatgatgccaagatcctcaatgacatgcaggatcgctttgaggtcaatcgtagtgatctgcctgatgagagagacatcttctcctgctttgaaaagacmtggtaaaggacatggtagaggacacattgcagaatatgaccgtctgtccttcaggagaggacacatcagggtgggggtgaaggagacaccagtgccccca

SEQ ID NO: 110543 - DNA, 201 bp, Homo sapiens
tattttttggtggtctatcaagaaggatgaagaggtgctgaagaagaactgcctgcatatcgtcgtggggactccaggccgtatcctagccctggctggarataagagcctcaacctcaaacacataaaacactttatttcaaatgaatgtgataagacgtttgaacagctcaacatgtgtcgggatgtccagggaatttt

SEQ ID NO: 110544 - DNA, 201 bp, Homo sapiens
agttcaaccaggtgatgatctttttgaagtctgtgcagcggcgcattgcctcagcccagctactgggtggagcagaacatcccagccattgccatccaccrcgggatgccccagggcagaggctgtctcagtatcagcagtttaaagattttcaatggtgaattattgtggctaccaacctatttggccaaggaatggaca

SEQ ID NO: 110545 - DNA, 201 bp, Homo sapiens
ccaaaccagcctctaattcccatcatcataggctccaggtgccatgttgcctctgggcacccagacactaaactccctaaacatcttgcctcattcaaggrcaaacattttctttaaaactaagactttcacctgggtacagtggtgcatgcctgtaatcccagctacttgggactatggggtggaaggatagcttgagcc

SEQ ID NO: 110546 - DNA, 201 bp, Homo sapiens
aaataagtatttttccccagcaatcaaatgttcctgtcctctgggtgacacacatttaggtaagtcatagctgtgtgacagactcgcgggcctggggcagsgggaggagagcccacaggagaaagtctcctgatctggggggaggacacaatgaggggaggatcaacacaggaaccttcagcccccagccagacccactga

SEQ ID NO: 110547 - DNA, 201 bp, Homo sapiens
gtcttaaacttctcctcctctgggcagacctctctgatgtcccaaacgaagtcagatgtcccagtacatattctcacagcaccttgagcttccctttcttmtcactcatcaaaattacaattactgcaataagggatggaatgtacacacaataactcagattggtaggacaaagttactttattttccatcgctgaccac

SEQ ID NO: 110548 - DNA, 201 bp, Homo sapiens
agagccatagagggtgctagtggccaagtttacatgtggctcaagtgttctaagccttcccaaatccccaggtgggatagctgctcagagtcctggctttrtaccctgaagatgtaccttggaatgccctccttaatgcccacgtgtcacctttacaggactgctgtgtcacctttctctgcagctgataccagcatactc

SEQ ID NO: 110549 - DNA, 201 bp, Homo sapiens
tcccagtacatattctcacagcaccttgagcttccctttcttctcactcatcaaaattacaattactgcaataagggatggaatgtacacacaataactcrgattggtaggacaaagttactttattttccatcgctgaccacttcttgatccaggttgtccatccctgctcacagtttggtgggtgtgggggtcttaagg

SEQ ID NO: 110550 - DNA, 201 bp, Homo sapiens
catgtggctcaagtgttctaagccttcccaaatccccaggtgggatagctgctcagagtcctggctttgtaccctgaagatgtaccttggaatgccctccytaatgcccacgtgtcacctttacaggactgctgtgtcacctttctctgcagctgataccagcatactcttccttttagtatagtttaggcaggctccttt

SEQ ID NO: 110551 - DNA, 201 bp, Homo sapiens
cagaaggaagggacatgattgcctcctttcccgaccattaagcggagcagccaacaccacacacagctcctggctgagcagcagggcatgtggaccagcargggacatgggggctgggagttctcctaccccaaccctgctcagttagcaaaggcatcaggggctgtggctggctgagaggtcagggacaaccaactgtca

SEQ ID NO: 110552 - DNA, 201 bp, Homo sapiens
gcttcctttttcataaccacggaggtttaaaaggcttttcttactcccaacttttaccacaaatcccaactttctctctgattggaccaacttacatcacraggtagctctcaagccaatcaccatggccaagagaatcctatgcattgattggcttggtgctgggttatatgccttttccttacccaatcactgaggcca

SEQ ID NO: 110553 - DNA, 201 bp, Homo sapiens
ctctgggcttccctaacctccactggcctggttctcccctctccaactccttctcagtcccgttgtcagacatctttccctgacctcaaaatgctggaacrggaggttctcaggctaactgcagttttaccacatcctcaccaacactgcatcttatttttatttttaaaaatctttgctaatctgaaggcaaaatactgt

SEQ ID NO: 110554 - DNA, 201 bp, Homo sapiens
ggtggtgcttgtgccctacctcctctttgtgctctccctgcaacagacagggaagacaagaggaaagagcaacacagaaaagagaggagagcaaatcagasgggaatttgtcctacaaaactggggtctccaagagccttccacctgcccccaaagctttggtatggtggatttcaggaaggatgaactgaggctaaggtc

SEQ ID NO: 110555 - DNA, 201 bp, Homo sapiens
cgtgcacacacacacgtgcacacacacatgtgcatgcacacacgtgcacacacgtgcgcacacacatgtgcacgcacacacgtgcacgcacacacgtgcasacacacaggcacacacatacgtgcatgcacacacactctgcgttcgccactcgtggggttctctctctgcctttgtggcaatatggcttccctcttccct

SEQ ID NO: 110556 - DNA, 201 bp, Homo sapiens
agaggagagcaaatcagaggggaatttgtcctacaaaactggggtctccaagagccttccacctgcccccaaagctttggtatggtggatttcaggaaggwtgaactgaggctaaggtcacactgggaatctgggctgtctcccaagcactgggtcgccctggagtcctgtttgctatgagagagggaagaacatgactat

SEQ ID NO: 110557 - DNA, 201 bp, Homo sapiens
tgtgcccttcccgcctctatatcatctcaaggggctttctgtctatactctctttactttggacatcctaaattcagcctggaacgagcccccacccagawgatgataaccccctcctccgtgggactctttcctctcatttataacactggtgcaatgttaccttctgattcattcacagcaaggaacttgggaaacaga

SEQ ID NO: 110558 - DNA, 201 bp, Homo sapiens
ctcctcgactgcttcagctgccaccaccaacatgcacacacacacacgtgcacacacacacgtgcacacacacatgtgcatgcacacacgtgcacacacgygcgcacacacatgtgcacgcacacacgtgcacgcacacacgtgcacacacacaggcacacacatacgtgcatgcacacacactctgcgttcgccactcgt

SEQ ID NO: 110559 - DNA, 201 bp, Homo sapiens
cttatgtgttggtcatcttagaatgtgtgtatgacgttcacctcaccccagctactatgtccctaatctcctcagagaactttgaggatggaggacataamttcaacgggctgctattcctgtcaggatgccatttcacattgttgttccaagtccagttggaaaactactcaaagaggtctgaaactgggacccactctt

SEQ ID NO: 110560 - DNA, 201 bp, Homo sapiens
actgttgtttgtaagtgtgcttttctggtaacaggcttcattgcaacctcaaaggggtctaagagcccaaaaagttgagagagagccatagagggtgctastggccaagtttacatgtggctcaagtgttctaagccttcccaaatccccaggtgggatagctgctcagagtcctggctttgtaccctgaagatgtacctt

SEQ ID NO: 110561 - DNA, 201 bp, Homo sapiens
tccttgggctgctgtctccttaccatctcctcgactgcttcagctgccaccaccaacatgcacacacacacacgtgcacacacacacgtgcacacacacaygtgcatgcacacacgtgcacacacgtgcgcacacacatgtgcacgcacacacgtgcacgcacacacgtgcacacacacaggcacacacatacgtgcatgc

SEQ ID NO: 110562 - DNA, 201 bp, Homo sapiens
tgataccaggaggtaacaattggctggagctgagaagcagccatccctgagaagcaagtgctcttcaggagctgcatttaccaccactcaggcaacaaacraatttgcacttattctgcccacttcacttaattactgcctagccctgtaagaatttaatttttcagtccttgacctagagaaaagacagtgtgtaattcc

SEQ ID NO: 110563 - DNA, 201 bp, Homo sapiens
ctccttgggctgctgtctccttaccatctcctcgactgcttcagctgccaccaccaacatgcacacacacacacgtgcacacacacacgtgcacacacacmtgtgcatgcacacacgtgcacacacgtgcgcacacacatgtgcacgcacacacgtgcacgcacacacgtgcacacacacaggcacacacatacgtgcatg

SEQ ID NO: 110564 - DNA, 201 bp, Homo sapiens
tggaaagtcatttagtgctgtggagtgtgtaacccagggagctgacttaacccggggctcaaggaggacttcctggaggaggtgacatttgagttgggatytgaaggatgaaggatgggtaatcaggtgacaagaccgagcctgcactttggaggtctgaaagatacaatctccctgtgaagggcatgcgtggttcaccca

SEQ ID NO: 110565 - DNA, 201 bp, Homo sapiens
tttttattttttactttatacttttaaatgttcttatactttgattatctggttggtcagcttttaaacatttgttgattcctgttattacatattaggcrgtcaacaaactttctcatctttgccctttctcattctaattttggtagttgcgttatttctgcatagtaaaagcaaagaccatttacatttgtctgcgtt

SEQ ID NO: 110566 - DNA, 201 bp, Homo sapiens
cctcccttctttaatttttgcctcctgatgaagccacatttcgtggctagcccagcagtaggctgggcttttggaagggagggcaccttttcttgcctttrggggaaggtcatttctgcctttgtgggaaaccacctgagcaagtaatgacagggcacatcatgtaaacaatatctaaggggtcaaatggattttattttt

SEQ ID NO: 110567 - DNA, 201 bp, Homo sapiens
atgggaaacaatagccaaatattggagtgtgagagaaggggaaacccagtgtatttttcttcttatctttctgctgtctcccttgtggacatagcttcctytgatcaatcattgcttagatagttccaggtcctgcaaggaagactttgccatgattccagctctcattagatagttttatcttctcaattctgatagtgc

SEQ ID NO: 110568 - DNA, 201 bp, Homo sapiens
cttacttagtcttttctgtatcccaaaaggctatatttcttaggcccctttgctttttggtttccaggtaggtttgaccaatgggaaacaatagccaaatwttggagtgtgagagaaggggaaacccagtgtatttttcttcttatctttctgctgtctcccttgtggacatagcttcctctgatcaatcattgcttagat

SEQ ID NO: 110569 - DNA, 201 bp, Homo sapiens
ctgccccatgcccttctcagatggagtaaataatgatgctcttgacaacactgtaacttctacctccttctaacatggaacctagcacactgtattgtgaktcttatttgtgtacctgctttccatatgagaatagagaattgtgtattctcattgcctagcatgattctggtatgttttctatacattttttttttagtc

SEQ ID NO: 110570 - DNA, 201 bp, Homo sapiens
acattttggaaaactggaaaatagtttggcagtatcttaaaacgttaaatacacacacacacacacacacacacacacacacacactggtccagccattcygtgcctgtgtatttacacacacacacacacacacacattggtccagccattccgtgcctgtgtatttccccaaaagaaaatgaaacataagtccatacaa

SEQ ID NO: 110571 - DNA, 201 bp, Homo sapiens
cacttctattgtacaaactcaagacatcgaagatatgccctaagatataaagcaattaaactgtatgttagggcctgggtagagcttggaattgttaatcwttctattaggatttttcgtctttttttgtttgtttgttttgttttttgtttgagacagagtcttgctctgtcacccaggctggagtgcaatagcacgatc

SEQ ID NO: 110572 - DNA, 201 bp, Homo sapiens
tcaagactaagtaatatgctctcctcatatttttttggaaagtggtttatcagtgggaaaggatacaaaaagcatatttaaaggggaattgaagcagaagygaaagaaatttgtactcacattaacaatctgtcttccctgacaccttcacctgccccatgcccttctcagatggagtaaataatgatgctcttgacaaca

SEQ ID NO: 110573 - DNA, 201 bp, Homo sapiens
gtacatgcatttggaatagcaggagaagagaaaacaggacagaaaaaacttttgaaataatcatcgctgaaactttctaaaaataatgacagagagaatarcaagagcaaaaatggtaaaagtatttgaacagacacttcaaagaagaaatacaaatggtaaataagcatatgaatagatgttcaacatcattagtcatta

SEQ ID NO: 110574 - DNA, 201 bp, Homo sapiens
caggtattcatttattttaataacacacttcaaaagactccctatactggtgattggttttattccctatggaattttgccctgtttttggggggtttcayttctattgtacaaactcaagacatcgaagatatgccctaagatataaagcaattaaactgtatgttagggcctgggtagagcttggaattgttaatcttt

SEQ ID NO: 110575 - DNA, 201 bp, Homo sapiens
atagaatgtcaaagaactgtgggatattttcaaaaggtacatgcatttggaatagcaggagaagagaaaacaggacagaaaaaacttttgaaataatcatygctgaaactttctaaaaataatgacagagagaatagcaagagcaaaaatggtaaaagtatttgaacagacacttcaaagaagaaatacaaatggtaaata

SEQ ID NO: 110576 - DNA, 201 bp, Homo sapiens
tactaacttctgataaattgagcatttttttttccattgttagtgttggcaacaaatacataatatcatcagtacatgtgacttgctaatataatttacaratatttcagtatcacaaagttgaggcagataccacaaaacatcatctgcacatcactattttgttatggtagttagacctaccactagatcctgttattt

SEQ ID NO: 110577 - DNA, 201 bp, Homo sapiens
tctgtaagagaaatgcaagtctgtggcatttgagccatgacccactacttttttccacctatcctctaccagcacagtatgacaaaaactttattccaggmagttgcagctaagaacacaaggctctctctcagatcccagtctggcatctctccagaaggagcaggctgccagaactttttatctccccaagcctatatt

SEQ ID NO: 110578 - DNA, 201 bp, Homo sapiens
tagctcttatcatgaaatttcttacagtcaagactaagtaatatgctctcctcatatttttttggaaagtggtttatcagtgggaaaggatacaaaaagcrtatttaaaggggaattgaagcagaagtgaaagaaatttgtactcacattaacaatctgtcttccctgacaccttcacctgccccatgcccttctcagatg

SEQ ID NO: 110579 - DNA, 201 bp, Homo sapiens
tttaaaccacaccgtgacatgaactaatatattgggaatgactcagattttccgtatcccgagaaagtgacaaagcaaaactctatatgtgaggttctagytcagattggtttgccattttgctttacctgctgattcaggatcaggcagatgtttgaagatttgcctcatgggaaaggaagttgagacttattttgtgtt

SEQ ID NO: 110580 - DNA, 201 bp, Homo sapiens
tgaaaatgagtaacatggaggattaacattgcctgatgtcaaaatgagttataaagctacagtaagcaaagcaatgtagtattggaatcaagatagaaaawcagatcaatgaaacaaaatagaaagtccagaaagagattcacacttatattgataactgatttctgacaaaagtggaaaggcaaataagtacagaaaaga

SEQ ID NO: 110581 - DNA, 201 bp, Homo sapiens
caactttagctgcccactagaatcatcaggaggctttaaaaatagagctacctatgcccaacacagataaaaattaaatcagaatcattagaagtagaacytgagtgtcagcaagtatattttagaaggctccatggaaaaatcccagtgtggtcagtgttgagaatgatttctcaaggaaacattggaatgataccagga

SEQ ID NO: 110582 - DNA, 201 bp, Homo sapiens
tagaagtgtcctagggtactggccctatatatgtgagattctaagatacatcagggaccagatccaagtaagccatttgagcctaaaagaaaaagaaaacygtaaggacacatatgtgcaacaatgcgttctagagacaaaatggtgtaaataagagcaaagtacagatgtaccgtaccaaagaaaacactgctgccctca

SEQ ID NO: 110583 - DNA, 201 bp, Homo sapiens
tccaatttctccacatcctcccaacacttgttattttgtttgtttgtttgtttgtttttgtagtagccatcctaacggacatgaggtggtataacattgcrctttggatttgcatttccttaataattagcgatgttgagcatcttttttttattggccatttggaaaaatgtcgatgtaagtcctttgcccaattttaat

SEQ ID NO: 110584 - DNA, 201 bp, Homo sapiens
aatcatgttacaaggtgacatttaagccacccgtaatgcttaaatggatagtacaggtgctagaatgtctctaacaatgcagtggataggcttttcctgcragagatctagaatacgaatgtgagaacatcacctaccgacaccatgtccactagaagcattgtgatagaataataaagatgatcacagagtctttgattc

SEQ ID NO: 110585 - DNA, 201 bp, Homo sapiens
ttgcagagttaaagtaattagagaagcacaagaaagtttcgaaaatgataattaaatttgaaataggaattagcatgagtgaagcaactccaggtacatgktgattaacccaagtaatatgactccaggtatcctgggaattcctttcactgtgaaagctgcaatcagtggcctttggaaaagtaagtggggttcctgcag

SEQ ID NO: 110586 - DNA, 201 bp, Homo sapiens
agagtttctttgaaaagtgggaaagaaccaatgatgagacagcagaagactctaagactgccaacaaaaagaaagctgcatttaaaagaaaatactggccrggcgcggtggctcatgcctgtaatcccaggactttgggaggccgaggcgggcggatcacgaggtcaggagattgagaccatcctggctaacaaggtgaaa

SEQ ID NO: 110587 - DNA, 201 bp, Homo sapiens
tccttgtacctctggtagaattcggctgtgaatccatctggtcctggactctttttggttggtaagctattgattattgccacaatttcagagcctgttaytggtctattcagagattcaacttcttcctggtttagtcttgggagagtgtatgtgtcaaggaatttatgcatttcttctagattttctagtttatttgca

SEQ ID NO: 110588 - DNA, 201 bp, Homo sapiens
gtctcttttgatctttgttggtttaaagtctgttttatcagagactaggattgcaacccctgcctttttttgttttccatttgcttggaagatcttcctcyatccttttattttgagcctatgtgtgtctctgcacatgaaatgggtttcctgaatacagcacactgatgggtcttgactctttatccagtttgccagtct

SEQ ID NO: 110589 - DNA, 201 bp, Homo sapiens
aacatgcaggtttgttacgtatgtatacatgtgccatgtgggtgtgctgcacccattaactcgtcatttaacattaggtatatctcataatgttttccctccccccttccctcaccccacaacaggccccggtgtgcgatgttccccttcctgtgtccaagtgttctcattgttcaattcccacctatgagtgagaacatg

SEQ ID NO: 110590 - DNA, 201 bp, Homo sapiens
gacggctgagtcaaatggtatttctagttctagatacctgaggaatagccacactgtcttccacagtggttgaactagtttacagtcccaccaacagtgtmaaagtgttcctatttctccacatcctctccagcacctgttgtttcctgactttttaatgattgccattctaactggtgtgagatggtatctcattgtggt

SEQ ID NO: 110591 - DNA, 201 bp, Homo sapiens
acagtgacagaatatttattgatagaaacaatgcaagcaagaagacaatagaacaatatctttaagtattaagaggaaaaaaaacacctgtaaacccaaawttctatacctagtgaaaataccttcaaaaacaaaggcaaaaagtcttttatgagacatgtgaggaagagagctcaaaactaaaaacaattatttactagc

SEQ ID NO: 110592 - DNA, 201 bp, Homo sapiens
tggttgtctacctcaatctcatctttccaatttctccacatcctcccaacacttgttattttgtttgtttgtttgtttgtttttgtagtagccatcctaayggacatgaggtggtataacattgcactttggatttgcatttccttaataattagcgatgttgagcatcttttttttattggccatttggaaaaatgtcga

SEQ ID NO: 110593 - DNA, 201 bp, Homo sapiens
agcacctgttgtttcctgactttttaatgattgccattctaactggtgtgagatggtatctcattgtggttttgatttgcatttctctgatggccagtgakgatgagcattttttcatgtgtctgttggctgcataaatgtcttcttttgagaagtgtctgttcatatccttcgcccacttgttgatggggttgtttgttt

SEQ ID NO: 110594 - DNA, 201 bp, Homo sapiens
cctgctgtatgtgttctactgaaatgagatataatagccatctggctacaattttgatttctaagaagttcttatgtcattttaaattcaaaaactaagtrtttcaacatttggtctctcatatcttaagttttattttctttgttccagctgttcagagatagtgtgttctaatatctccacaatcaagatttttgacta

SEQ ID NO: 110595 - DNA, 201 bp, Homo sapiens
tgcttttcattctattttctttttcctcctctgactgtgttttttccaatagtctgtctttgagctcatttattatttcttctgcttgacctattctgctrttgagaacttctaatgaattcttcagttcagcaagtggatctctcagttttaggatttttaaatttcaatctctttgttaattttctttaatacatttct

SEQ ID NO: 110596 - DNA, 201 bp, Homo sapiens
gtgtctgttggctgcataaatgtcttcttttgagaagtgtctgttcatatccttcgcccacttgttgatggggttgtttgtttttttcttgtaaatttgtytgagttatttgtagattctgaatattagccctttgtcagatgagtagactgcaaaaatattctcccattctgtaggttgcctgttcactctaattgtagt

SEQ ID NO: 110597 - DNA, 201 bp, Homo sapiens
cccgctttggcttattctacctgaactacttattttaattaactaaatggatatcccaagcattccatgtttatcctgttgctcagtgaatcctcaaatcrttaatttggtagattctcttttttgtcttcatactattatttcttttagcttttaaaaaaattgtgtactgcctacaggtctttatggaagtttcacctt

SEQ ID NO: 110598 - DNA, 201 bp, Homo sapiens
ctcaatgagttttcctttaaaatttgcagtgaatttgttttcctgtttatgcatgagaatttaggtcttattaattgggggaaattaatgttaaagtaatwaataagcccttgttgcagcttattgtttcttgaaatgaattaactatccaggcaaaaggttaaaaatgaaaaaaaaagtctttgtaactaaatttttccc

SEQ ID NO: 110599 - DNA, 201 bp, Homo sapiens
aaattccaccctcacgagcagatagcaatgtataaaacacaatgcaaatgagaatagtgaagaaaaaggggaggagagggctggaactaaaaatagagccmaagacttttactaaatataggcatattattaggtctgcatagatacattcctactgtcaagcatactgcattttatataatggtgctgaatgtacgtttg

SEQ ID NO: 110600 - DNA, 201 bp, Homo sapiens
aacacaaatacctatggaagggagattttatctgctcctatctcagactacagagattaaggccctgccaagagatttggagagtactccagaaagctttrtctagtttacagatttgccactctgatacaaatattcagtgacttcaggcaaaagggattgggtgggggagggaaaggattggagacaatgacaagagtg

SEQ ID NO: 110601 - DNA, 201 bp, Homo sapiens
aaatttttggagtatgtatctttgtatagagtaaagtaattagaaaaatagtcttttaaaactgggaaccagtggcatccttttcaaactagaataataaragggaaattataatattcacaaacttgaagcacactggaattctgctataaatgtttgttatagaatagaatttggtgcagggtgaatttgatttaagag

SEQ ID NO: 110602 - DNA, 201 bp, Homo sapiens
cgggatataagagtacacaggcttgctgtttgtccagtagctgaccctaaagctaaggagaaataaaaatgaccgaatgcagatgctttcctactcctgtsctgaccgtgcagagattcttatcaataagtggtcactttgtcgaggtaagaaaggggtctgttatttatgttatattctttttttcttctaagtaggcat

SEQ ID NO: 110603 - DNA, 201 bp, Homo sapiens
catgatttttagttctttattcttcaataaaatgaattattttccagagacaatagttagaatgcttgtgaaatctttctataagtaaaacagaagaatcwtgttttcagtgatggctgtagagttgcataggaaaacatcttactataggagtaaaagacacagaatccagagttgaaagctggcacatggacagtgcta

SEQ ID NO: 110604 - DNA, 201 bp, Homo sapiens
tactggggctgtcacaagctaagccttgtttatgttcagaagctgtgcaactttgttcaggatttgaaatgctcgggatataagagtacacaggcttgctstttgtccagtagctgaccctaaagctaaggagaaataaaaatgaccgaatgcagatgctttcctactcctgtcctgaccgtgcagagattcttatcaata

SEQ ID NO: 110605 - DNA, 201 bp, Homo sapiens
taatattcataaaatgcttgttaacaaaagggccacattttatagggcaatttcctttatcatttaagcacagattaaagctaccattggcaacattactyttccttccctaaacatttcttctcattctctgtttctgggacattcttttcctcccaacttttaaaccagcagttctcaactttagctgcccactagaat

SEQ ID NO: 110606 - DNA, 201 bp, Homo sapiens
cataagaattaaacagaatgtgcagggagtttccatgcctctcatttgagcaacaagcaaagaaatgagatagaattctgtcctgtttaatggtactgggrctgtcacaagctaagccttgtttatgttcagaagctgtgcaactttgttcaggatttgaaatgctcgggatataagagtacacaggcttgctgtttgtcc

SEQ ID NO: 110607 - DNA, 201 bp, Homo sapiens
aggctgggaaatacaaaaattgtctcttggttatgaaactcaactgatagggttaggaatagtttattaactattctctgatatgtccagcaagggctggrcatcagccttcatgttttacagaataaatggagctcattagttattttgatagattggctgtatagaagtagatgaatacagcctctcctatgtatatct

SEQ ID NO: 110608 - DNA, 201 bp, Homo sapiens
tttatacaccttggggtagtcttattttggtcaaattcgtttggtgttctctgatattcctatatctggatatttaatctttctcatatttgaaaagtttytgttatttcttttgataagctttctacccctttctcttgcgcaacttttgcttgaacagctgtaattccagattcggtcttttgaggtaattttttatat

SEQ ID NO: 110609 - DNA, 201 bp, Homo sapiens
cttgtcttgtgctggttttcaaagggaaggtttccagcttttgcccaatcactatgatattggctatgggtttgtcataaatagctcttattattttgagrtacgttccatcaatatctagtttattgagagtgtttagtatgaaggggtgttgaattttattgaaggccttttccgcatctattgagataatcatgtggt

SEQ ID NO: 110610 - DNA, 201 bp, Homo sapiens
gaggggatccttgtcttgtgctggttttcaaagggaaggtttccagcttttgcccaatcactatgatattggctatgggtttgtcataaatagctcttatkattttgagatacgttccatcaatatctagtttattgagagtgtttagtatgaaggggtgttgaattttattgaaggccttttccgcatctattgagataa

SEQ ID NO: 110611 - DNA, 201 bp, Homo sapiens
tggtgttattctggagattttcttttactacatagattttgcacattttttgttatgcttattttaagtattttatcttttgtactgctattataatgggrcctcttcttacaatgtattttctaagatgttatatatgaaagctatttacatctgtatattttatttttacttgattaatttattgaattatctcaatgt

SEQ ID NO: 110612 - DNA, 201 bp, Homo sapiens
ctctagtacaataaataaatgataaaatgtttttattttctcccctcattccttttgtctccgacctgctatttgccagtaaaaattatttgaaaaatatrtatttttttattttttactttatacttttaaatgttcttatactttgattatctggttggtcagcttttaaacatttgttgattcctgttattacatatt

SEQ ID NO: 110613 - DNA, 201 bp, Homo sapiens
gaccatttacatttgtctgcgttttagtctgttttgttctgctatagcagaatatcacagactgggtaatttataaagaatagaaatttatttctgaacarttacagaggttgaaagtccaagatcaaggtgccagcatctggtgagggccttcttactgcatcatctcatgatggaaggcagaatggaaagagagggcaa

SEQ ID NO: 110614 - DNA, 201 bp, Homo sapiens
agggaatcctttccccatttcttgtttttgtcacgtttgtcaaagatctgatggttgtagatgtgtggtattatttctgagggctctgttctgttccattsgtctatatctctattttggtaccagtaccatgctgttttggttactgtagccttgtagtatagtttgaagtcaggtagcatgatgcctccagcttgttct

SEQ ID NO: 110615 - DNA, 201 bp, Homo sapiens
tgcctgaccctctaatctgattttacttccgttatctttgtcatatatttacctgcattcagattttcagtgtgcctaggagtcttagatgtctatgaagkcatgaatatagtaaagttaagtggtgacatttttatgttagaaatattttttgtataagagtgattattctggccaaaaaatacagtgccacatcaagaa

SEQ ID NO: 110616 - DNA, 201 bp, Homo sapiens
gtggtattatttctgagggctctgttctgttccattggtctatatctctattttggtaccagtaccatgctgttttggttactgtagccttgtagtatagwttgaagtcaggtagcatgatgcctccagcttgttcttttggcttaggattgtcttggcagtgcgggctcttttttggttccatatgaactttaaagtagt

SEQ ID NO: 110617 - DNA, 201 bp, Homo sapiens
accatgaggacagcatggaggagcaaaatgggtcccagtacctctattgcttgcataagaatggtgagacagaacactcacacaaatcagccaaagcagatttttttttttttttcacagatatgcagcaagaataaacagaagcctagaatccttggtgagccagcttcccaaggctcaggaaactgctgagggcgaatg

SEQ ID NO: 110618 - DNA, 201 bp, Homo sapiens
aatcaaaagacataaggcggatgaaaaaataaaaaagtaagttcaactatattctgtctacaggtgactcgctttatctttaaggacacacagaggctgaraatgaagtgatgaagaaagatatttcatgaaaattgtacccaaaagggaacagaagggactatcttaataacagacaaaatagactttaagtcaaaaact

SEQ ID NO: 110619 - DNA, 201 bp, Homo sapiens
ctgagctgcatggagcttgaacctaggtgtcggtccattttggtctttctgtccaccttagatatcatccacagaagtattcgtctaagtgagtgtgagcgtgtgtgtgtgtgtgtgtgtgtgtgtctgtttattacagcctacttgattctaaaaatgatttgtatatataatgaagaatcactatattcagcatgttta

SEQ ID NO: 110620 - DNA, 201 bp, Homo sapiens
ttagtaattgcactttggtacatttttgctagcagaagatattattcaaatatgggtatatacagtctgaatttataatgtggctttgtgatttactgacygttacttaactttgatgagtcttactttcctcataaaaagagaattgaaaatcgatcttttatactacatattgggaacatatagtttgttagttaatag

SEQ ID NO: 110621 - DNA, 201 bp, Homo sapiens
tgagctgcatggagcttgaacctaggtgtcggtccattttggtctttctgtccaccttagatatcatccacagaagtattcgtctaagtgagtgtgagcgtgtgtgtgtgtgtgtgtgtgtgtgtctgtttattacagcctacttgattctaaaaatgatttgtatatataatgaagaatcactatattcagcatgtttaa

SEQ ID NO: 110622 - DNA, 201 bp, Homo sapiens
actaccttgtaaaattaaatcataccatatttgtctttttatacaccttggggtagtcttattttggtcaaattcgtttggtgttctctgatattcctatrtctggatatttaatctttctcatatttgaaaagtttttgttatttcttttgataagctttctacccctttctcttgcgcaacttttgcttgaacagctgt

SEQ ID NO: 110623 - DNA, 201 bp, Homo sapiens
tgcctttgagtttgataaactcttatcccagtgatattgactgttttaaattaacagatttatcaccatttctgagctgtgtagggccttaattgaaaaartatctttgattattttttcacattttggccacatgcctataataatggaatatttacagtactttttagtggagaacttttttaagtagaatttcaataa

SEQ ID NO: 110624 - DNA, 201 bp, Homo sapiens
taatctttatttctgtcatgtgaatctgcaagcacagtagcagatcaatacctatatagagacttcctataagaaagaagtagaattgtagataagaagamatgaatgaattaatagtaagtgctgtaagtggtataattttgattatccatagctaacagcaaagatatctgatcctcacctcacactgtgcattggaat

SEQ ID NO: 110625 - DNA, 201 bp, Homo sapiens
gctgtaaacaactccatctccccatcttctccatgacctgcatacattgaatggaagtcattacaaacaacagttacaaccccaaaatttggttgtagccmcttgctttgtacacacacaccaactcatgtagaattcaaaacttttaagttacacataatgacctctttataatttaaaatagttgagtgcaaaggtttt

SEQ ID NO: 110626 - DNA, 201 bp, Homo sapiens
ggatcctcacaataatcctgtgaagctggagctattatatattttttactgatgagaaatttgaggcgtgaagagggtaagtaacttcttccaagttcatrgagttgctaagtaactgagttgggatttgaatccgggcagactggcccccatgccaagaatactcttaccgattatgttagcaccctcactggcacatca

SEQ ID NO: 110627 - DNA, 201 bp, Homo sapiens
cctaaacctctgtcaggtgatgagacttagattcattacatgtcttggttgctggcaagaaccatgcaaatacaacagggtacgcactcttctatcttatrctttaccagtcttagttgcaaaatccgtcttaacaagatgaaaatatatcttcttgacccagagcttgtgagtccagaagagcctctgttttcagacttt

SEQ ID NO: 110628 - DNA, 201 bp, Homo sapiens
cacctcacacctgttaggatggctgttatcaagaaaatgaggtaagtgtcaaggatgtagagaaaaggaacccttgctcactgctgtttagaatgtaaatyggtacagtcattttagaaaacagcatgacagttcctcaaaaaattaaaaatagaataccgtatgatcaaaaaattccatttctgtatatatatccaaatg

SEQ ID NO: 110629 - DNA, 201 bp, Homo sapiens
aaaaaaacaaaacaaaacaagaaaaacgtttaagttctgggatacatgtgcagaacgtgcaggtttgttacataggtatacatgggccatggtggtttgcygcacccatcaacctgtcatctaccgtaggtatttctcctaatgttatccctccccttgctccccaccacccaacaggcccaggtgtgtgtgatgttcccc

SEQ ID NO: 110630 - DNA, 201 bp, Homo sapiens
gtttgactcactcacaatgaatctcctgttggtactgtatttatcaagcaatcttcttatagtttgcagtttttgaaattttctctacttggcatttctaygacatttcaataactgtataaacatgtcacaacattaattcttaaaatgtccattctacacaaaatgacctgaaaagacatttcttaagagaagacatac

SEQ ID NO: 110631 - DNA, 201 bp, Homo sapiens
atggcctgcaggtgagaagagacaaactggattattagaaaacatgtatcaaaacaaaacaagttggggcaaggacagctcaaaaatcctagaccttttaycagtttgcacagggagagtgaggccaaaagcctgactggttaaaaaacaaaaaaacaaaacaaaacaagaaaaacgtttaagttctgggatacatgtgca

SEQ ID NO: 110632 - DNA, 201 bp, Homo sapiens
tgcgcaaaatgaggactgcaggtatagtataggttacagtagctttgtagttttgagttctgtaagctttgattaacaatcgtgatgtgcaaaaagtaaasctatataatgctattatatgggatctttatgtggtattaatatttttctttatccagcaatataatgtaatatcttacttagcatatgttatagcttttg

SEQ ID NO: 110633 - DNA, 201 bp, Homo sapiens
tcacttttataggctaatcccctctgtctgttatccacttttgtaaaatatcatgtgggtttatctctgggaaacatggagaaaacaacactttgccatckatgtttgatgattgtaaatgtgcagtgaccaatcatttgaaagaagtgctatgactggtcactgatcatcatctcatctgttatttctgtagtgatctgt

SEQ ID NO: 110634 - DNA, 201 bp, Homo sapiens
taaagaggtagttaagattaaatgagatcatgtggattggtcttaatctaagatgactggtgtcattataagaagaggagaagacaccagagatgcaaccrcacagagaaaaggtcatgtgagcagggatccccaaaccctgagccaagaactgacagtggtccatggcttgttaggaaccatgccacacagcaggaggtg

SEQ ID NO: 110635 - DNA, 201 bp, Homo sapiens
gtaaatataagtgattaaattaaattacatttatcaataaaaatagctattatcgatagctgaatgcataaagtatgcagcatcacatacggatgaactcrccgtttgtcgtgctactacaggtacatgctctacaaacacagaaattctgatattctatgaaacattattaaattccaattgaacatgatcattccaatc

SEQ ID NO: 110636 - DNA, 201 bp, Homo sapiens
tctaaattctaaatttcattttcagtgtcttctaaattcagccatttagtatctgcacagcactgcacttggaaattatacattattatcagacaactggsactatcacactgttgaaaagaacagtaaagcttattttaaatggagagtgaagtccgaatctttttctttcaattcctctctttctccatgacctcatag

SEQ ID NO: 110637 - DNA, 201 bp, Homo sapiens
tcagcctggtggcaggttgagccaagctcttttaggtttcaaagagaggagccaaataggaacgcctaggaatgcaggagtcatgcaaagtgatcacaccrctgagactgacactcttagtcttattggcagtggagtggcttgggatgtttgctgcctctggggaaggaaccattgtctaactgggacaggggatggcag

SEQ ID NO: 110638 - DNA, 201 bp, Homo sapiens
ggtagtttttcttcaagaggcaccctatctaaatggaaaatgacaatgatttttgccagttgaatgccttccctttgtgagaattaaccccagttgtgaaraagaacttttttttttttttttgccagcctggaagttttatctcccacctacaggacataataacacagtagtggatgcttgaggcagtgcaacgtgatg

SEQ ID NO: 110639 - DNA, 201 bp, Homo sapiens
ggtgaagaaagagtaaggagactattacatctaaagaacagtaagagtattggatggttgaaaggggaggagcagtttagggaaaggctaaatcagctttkcacaagctactgataaagaagggaaagctagccagtatcaattctaagatcatgttggagatcattgggctttctcgtatctgctttaaggaaactgtag

SEQ ID NO: 110640 - DNA, 201 bp, Homo sapiens
cccaaagtgctgggattacaggcatgagccttcgtgcctggcccatttcttttatatctctgtcccacaccaaatttcagccttcttattcagaccactgkttatttgtatgaacattctctgtatttaaaaaccagtggtatcattcttacattacagaaatactcccctcaagttaacttaatgggaacaaaagctttc

SEQ ID NO: 110641 - DNA, 201 bp, Homo sapiens
gttccttccctccttcctaaaagttgtcattattttcatggtacagagtagtgaaaatgcacaggcctttctaaagtaagaattccaggatttaaattccrgctctgagacttgctgattgtgagcttggtctcatttctgaatctcaatctgttcattgatgtgatttaaatgataataataaaagtaacctttcatagc

SEQ ID NO: 110642 - DNA, 201 bp, Homo sapiens
acaatgattctagtaagcagtagtagaagagaagatgcaaaagtgagccactcccccaccaaaatatatatgttcatctgagtgctgacttgtaaaataamattaataattatatttggggtgacatctgcaagattgcaagataggagtttctagcacttgcttcctcacagaaacatgaatttgaacaaacatccattg

SEQ ID NO: 110643 - DNA, 201 bp, Homo sapiens
tatccctaaataaacattctatatgcttctcaaaactcatggctaattgaggtgacatgaagagaatgagctccactaattattagaatgtttgagtaccrttgtgaccacctgtagatcattgtatatttgtaaccaaacacgagtccagatgctctctgcttgtgtagttcaacaagagcaaggcctggtagaaagaca

SEQ ID NO: 110644 - DNA, 201 bp, Homo sapiens
ccagctctgagacttgctgattgtgagcttggtctcatttctgaatctcaatctgttcattgatgtgatttaaatgataataataaaagtaacctttcatrgcgatgtctactttatatttttgatcttaactatgctgatctaagtagaatttcccatatctaaaatgatgccttttacttattgaaaggcattttagtg

SEQ ID NO: 110645 - DNA, 201 bp, Homo sapiens
aaacccagtcttcactaaaaatacaaaaattagctgggcgtggtggtgcacacctgtaatctcagctactttagaggctgtggcagtgagctgagatcgcrtcactgcactcctgcctgggtgacagagacagactctgtctgaaaaaaaagaagaagtcaagtgcttatcttgatcttggtttaagcttttttcctagaa

SEQ ID NO: 110646 - DNA, 201 bp, Homo sapiens
agttcttgactattggacatttagatagttccctgagttttactgttatgaataatgcagcaaacagctgtaaacatcttagattatttgcatcgtaaccyataatatttatcatattggtcttaagtttattttcttagtaattattacttatattctaaaaacaaatgaacatttaagcttggtgtataataaaggctt

SEQ ID NO: 110647 - DNA, 201 bp, Homo sapiens
gtgatgggggaacaaggggatatgatatacaagtatgggtaatttaaattttaaatagtcagtggcacaaaataaaatttggtatccctaaataaacattytatatgcttctcaaaactcatggctaattgaggtgacatgaagagaatgagctccactaattattagaatgtttgagtaccattgtgaccacctgtagat

SEQ ID NO: 110648 - DNA, 201 bp, Homo sapiens
ctattcttattccagcatctacttcaattgatcgtataagaaaaaaactggtatttttatgaagctttgttgtttcatacctgttgttcttttgttacccygacctttatcggcttgaaagcattgtttgagtaacatgagagaatgtatttgataaaccaaaatgtgccatatagtggagacaaaattgtgtcctaaaaa

SEQ ID NO: 110649 - DNA, 201 bp, Homo sapiens
ctgaagttacactgaggaggaggtataaggcatttttccccactatactttcagtggatttatctctttttaggtttttttttaaataaaccttacttttrtgggattatatgaagttgtactttatagttgtaaaaaagtggtttaataacacccatatcaggcataaaatatgcctttacattttgtaaaatttaaata

SEQ ID NO: 110650 - DNA, 201 bp, Homo sapiens
actatactttcagtggatttatctctttttaggtttttttttaaataaaccttacttttatgggattatatgaagttgtactttatagttgtaaaaaagtsgtttaataacacccatatcaggcataaaatatgcctttacattttgtaaaatttaaatatgttgtggtaacatgggatgacaagggtgctttcgtataaa

SEQ ID NO: 110651 - DNA, 201 bp, Homo sapiens
tttatgggattatatgaagttgtactttatagttgtaaaaaagtggtttaataacacccatatcaggcataaaatatgcctttacattttgtaaaatttamatatgttgtggtaacatgggatgacaagggtgctttcgtataaaggataaaagtcctctctcaatcatattgtgaagtataacaaaataataaagaggag

SEQ ID NO: 110652 - DNA, 201 bp, Homo sapiens
ttcccttggaaacagaagacctcacctcagtataattttagtgggagataacccagcaagccatacatatgtcaggaataagataagagctgcctctgctrtaggtgggtgtgtgttttagttgtaattactactaaatatgttttctgtttttacttcaaattgtgataattatgaatgataattatcaaataagtgcca

SEQ ID NO: 110653 - DNA, 201 bp, Homo sapiens
gtgatttctgaatgatttgtgcttacatggacaaaatccttgaaagtgaaatataagcattggcaatacatacactccttgctttgcacagtagtatgggwctctaaaaatgacgatgtaagatgaaaccaggtaatgtgatcttaataatcaaaggtaaaaataacaatttttctgtggcctttaaaacttcttatccaa

SEQ ID NO: 110654 - DNA, 201 bp, Homo sapiens
aaaggataaaagtcctctctcaatcatattgtgaagtataacaaaataataaagaggagaaggagaaaggaaatacaaagaaaggatctacatgacatatrtgatgagtagggaatagtaagaattatagtgggacagcactggagtgaaatccactgttctgtgacctccagcagccaggaccatgtcttatttatattt

SEQ ID NO: 110655 - DNA, 201 bp, Homo sapiens
aattaactgagaaattactgtcttcaatgaaaaaactagaaaataccattgctttactttctactgtgggtaggaatataagcctttctgtaggtgaagtygtcattccaatggtgtattcagagcatggtgttactgaatgtctgttgcagacaatgtgttgactatcagaaagtgaaacaattttattagatctatagt

SEQ ID NO: 110656 - DNA, 201 bp, Homo sapiens
cagatttaattagaaatttttaaaagaatgtttcagttggctgtacaaatgtttaatttacttcttgttgtcaattctgcatttaaaccgaactctgtatyttaaggaattcaaacatttggaaaaaatgtggttgtggctggaagatccaagaacgtagggatgcctattgccatgcttttacacactgatggagagcat

SEQ ID NO: 110657 - DNA, 201 bp, Homo sapiens
ttctaatgggagtgtagtggtatctcactgttgttttaatttgtatttccttaatgataaatgatattgaatatttttccattttttttgacctctgtatrccttttttggtgggtgttttcagatcttttgctcacttttaactgagttgcttttcttttttctttaattgttgagtttcaagagttcttcgtatatttt

SEQ ID NO: 110658 - DNA, 201 bp, Homo sapiens
ccctagaagaatatcttaatattgttttgtgctcaataatatataacttatgagaagaaagagaaaagcattatgttcagataggataaggagaaacattyatatgaatatatttttaaacttctagtatgtaatttcagcaccaagttagaagctgtgcctagaattttgtttttgagtatgaaatgaaatgagaaggta

SEQ ID NO: 110659 - DNA, 201 bp, Homo sapiens
tggagaataaacagagtcttgattctgataacactgcagaaaacataattttccaatgtgaataatattttttaatatggtatactttgtttccctcttcstgttgtaaagttctgtaggttttgacaaatgcatagtgtcacgtgtctaacattacagtatcatacaaaatagtttcactgtcctaaaaaccctctgtgc

SEQ ID NO: 110660 - DNA, 201 bp, Homo sapiens
ggagatgatgtctttggtgtagatgtccacactgtctatatattaccagcattaaggacctcttcaaatacaaaacaaaaacaaacaaacaaaaaaaacargcatcaacagggggtatcacagtaagttgggaaagaatgtaggaaaaattataggagcttaatggtgaccaagaggagctggaaagctacgtgcactgat

SEQ ID NO: 110661 - DNA, 201 bp, Homo sapiens
caaaaggaaatatacaaatgactaacagctatattaaagtaatgctcaacagtactatatatcagagaaatgcaaattaaaaccacaatgagatatcatcycatcccagttaaaatggcttgtatcaaaaagatagataataacagatgccggcaaggatgtggagaaaggggaattctcatacacagttggtgggaatta

SEQ ID NO: 110662 - DNA, 201 bp, Homo sapiens
atatttctttttgaaatacttgtttaaacaaatgtccctccactttttagtactgaaaaagccattccatgtgatttaaaaaaaaaaaaaacacttttacmcatctagataaaatgtgtaaaatgtttgtatgtatttagaacatacaaacaaaatttaatatcttatttttctatgcaagtcttgtggagaataaacaga

SEQ ID NO: 110663 - DNA, 201 bp, Homo sapiens
ggttcttcaaaaaactgaaaatagaactaccatatgatctagctatttcactactgggtatatatatttaaaaaatcaatatatcaagaagatatctgcaytcccatgtttactgctgcattattcacaataggcaaaatatagaatcaatttaagtgcccataaatggaggaatggataaagaaaacgtggtacatatac

SEQ ID NO: 110664 - DNA, 201 bp, Homo sapiens
tgaaagttgtgaagaaatgtacactgtcgttagcatcttagtctatttgagctgctataacagaatactgtacactggttggcttatacaaaaacaaatgwatttcttatagttttgtagactgggaagtccaaggtcagtacaccagaaggttcagtgtctggtgtgggcctgctttttggttaatagatagctgtcttc

SEQ ID NO: 110665 - DNA, 201 bp, Homo sapiens
tggaatattattcaatcataagacgtatgaaagcctgtcatgttcagcaacatggatggaacttgagatcactatgttaagagaaataagccaagcacagrcaaacaaatatggcatgttcttgctcttgtgtgggagctaaaaaaagtggatatcatgaagatacagattgatggttaccagagaccaagaatggcagtg

SEQ ID NO: 110666 - DNA, 201 bp, Homo sapiens
tcacaagattgtggggctacgtgtatacatagtggagtccagtcttcaagatggttgccagttttaactaggctgtgctgattgatctgcctctttagaaraaatagcagaactttaaatttaggcaatattatagtccagatcttgagtatgtggtttgataatttatatgaatacataaatgtgtgtatatgtatatac

SEQ ID NO: 110667 - DNA, 201 bp, Homo sapiens
agtggaagtcaatggagggtctgggagggcagcaaacagcagtggtggatggtgagcaaaagctcagctcgagtgtaagaaacatggaccagaagagtgtkcagtagcaagatttaatggagtgaaaacagagctcccatacaatgggaggggacccaaagcgggttgccgctccctgctcaaatgcctgggtttatatcc

SEQ ID NO: 110668 - DNA, 201 bp, Homo sapiens
agcaatgtaattcaccactttcaagtttgaggtcatggagagcagaaaagcctttctagaaagtatttctttgtgcctttccagagatagtttatatcatmtatcaaattatggcacttcttaccttctgaaatacttataaactgccaggaagtaatcttctgtggaaacttactccattagaaatgatgccattgcatt

SEQ ID NO: 110669 - DNA, 201 bp, Homo sapiens
tcttagttattttgcttctgtacatgtagactgtttaggtgctgagagtacaatggtaaacagaacagcaaaaaaaaaaaattctgtctttacaaataacwtggtactgacatctggttagttttagctattgtgtctcccttgcttctgaattccagagcaatactttcattttttgatataagcaaattctaaaacaca

SEQ ID NO: 110670 - DNA, 201 bp, Homo sapiens
ttccacaaatatgcctgaaaaacatgccctcactgccacaagccaggctaagtatccccctccctaaaccccattgtgcttgatttcctccataccctggrcattcctatatcatagtgccatattctattatagctatctgactctcttttgtgacaatgagctcctaaacagaccatgtaattttctcaatttctgaat

SEQ ID NO: 110671 - DNA, 201 bp, Homo sapiens
ggcacgaatgtaatgaaaattatatatttggaatatctattggcttacaaatatattagtgaacttatagaatagtttcagaccattttcaaaattaacattttaaaagataatttatatccttatgtgttaaaataaaaatttatattacatgaacattcagcatgaacaattattcctggtgcatattcacatgcttga

SEQ ID NO: 110672 - DNA, 201 bp, Homo sapiens
ggtttatgcagttcaaagtctcctttattcctcatttagtgatgtgagagtcttgaaagtgactgtaggaattactgaaaatatgtggccattttctctatttttttttttttggctatatgcactttgtttaaataattaacaattagacattaagaaaggtgcaaagctactagatacaaaagattcacatgccctcag

SEQ ID NO: 110673 - DNA, 201 bp, Homo sapiens
ttatgttgcccaggctggtctcgaactcctgagctcaagcaatctgcctgcctccacctctcaaaatgttgagattacagacgtgagccactgcacccagyctcatattcttagagtaagtttctcttggcatacttttatttctaagtaggacatatcttctaattaggtgagatttccctaatcagccacaacatggag

SEQ ID NO: 110674 - DNA, 201 bp, Homo sapiens
gcatcttgttctaatctaggtaaaacaccaagttttcatgttcttaatagaagtagttattggtttatctatgtgttagagacgtgttgtactttgtttaycatttattacttctaatctttctccccctaatttttgatacagtacttcattggtttctctaattccaaagaagaggatgggctactttgctgcttgctt

SEQ ID NO: 110675 - DNA, 201 bp, Homo sapiens
gtagaacctgagtgtcagcaagtatattttagaaggctccatggaaaaatcccagtgtggtcagtgttgagaatgatttctcaaggaaacattggaatgayaccaggacttttttattcatagccagtccctcagtgggcctttgcagccctatagctttaaatatcatttctatctcctgtatactttagaccatataac

SEQ ID NO: 110676 - DNA, 201 bp, Homo sapiens
tttattcatgaaagagtagttcatgtcattaagtgtatgaatggagtgatttaggtgtaaatgttaagattaagaaatgatgggaaaggtggccgggtgcrgtggcttacatctgtaatcctagcactttgggaggctcaggtgggtggatcacctgtggtcaggagtttgagaccagcctgtccaacatggtgaaaccct

SEQ ID NO: 110677 - DNA, 201 bp, Homo sapiens
aacaattagacattaagaaaggtgcaaagctactagatacaaaagattcacatgccctcaggaaatacaaaacaagacatctcttggatgtagaattcctrtagtggcaaggtcttagcactttagaaatcagctagttagtttattttacagacaagaaagctgaggcttagagttgttatctgattatataggttaaac

SEQ ID NO: 110678 - DNA, 201 bp, Homo sapiens
agagtcttgaaagtgactgtaggaattactgaaaatatgtggccattttctctatttttttttttttggctatatgcactttgtttaaataattaacaatyagacattaagaaaggtgcaaagctactagatacaaaagattcacatgccctcaggaaatacaaaacaagacatctcttggatgtagaattcctatagtgg

SEQ ID NO: 110679 - DNA, 201 bp, Homo sapiens
ggtggctttgtttacactgtgaggggaaaactgcctactcaagcctcagtaaatggtggactgcccccctgccaccctgaacaagctcaagcatcccaggycgacttcagactgctatgctggcagtgagaatttcaagctagtgggtcttagcttgctgggctctgtagggtgggatccgctgaactagaccacttggct

SEQ ID NO: 110680 - DNA, 201 bp, Homo sapiens
agtagggaatagtaagaattatagtgggacagcactggagtgaaatccactgttctgtgacctccagcagccaggaccatgtcttatttatatttgtgttycttgtacctggtgaagaaccttgcttttaggactagaaaactccctgttcaatgaatgaattcctttctttagaagtcaagtgcttaaccggttaggcac

SEQ ID NO: 110681 - DNA, 201 bp, Homo sapiens
tacatctttctaagtctgtaagtttagtgcttctttcctatggagtaaaatgcatgagctttgtgaaaaatgcctcttttcttacttgttttgttccagcrttgctcaaaatttgattgccaattaagttcgacattgttgtactttgctttttttataagcagttaatatatgttaaaactctactcttctaactcttaa

SEQ ID NO: 110682 - DNA, 201 bp, Homo sapiens
ttacattttgtaaaatttaaatatgttgtggtaacatgggatgacaagggtgctttcgtataaaggataaaagtcctctctcaatcatattgtgaagtatracaaaataataaagaggagaaggagaaaggaaatacaaagaaaggatctacatgacatatgtgatgagtagggaatagtaagaattatagtgggacagca

SEQ ID NO: 110683 - DNA, 201 bp, Homo sapiens
tgagaaattactgtcttcaatgaaaaaactagaaaataccattgctttactttctactgtgggtaggaatataagcctttctgtaggtgaagtcgtcattycaatggtgtattcagagcatggtgttactgaatgtctgttgcagacaatgtgttgactatcagaaagtgaaacaattttattagatctatagtcattatt

SEQ ID NO: 110684 - DNA, 201 bp, Homo sapiens; identical to SEQ ID NO: 18171

SEQ ID NO: 110685 - DNA, 201 bp, Homo sapiens
cagcttgctagtgcaatattagatacatgtatgtatgtatatgtacatgtctatctgtttagaaaaggagacagtgtgtgtgtgtgtgtgtgtgtgtttaygtgtgtaagagacacagatagattgaaaaataaaaacagagagagagagcatcattggagaggaagtaatagctcttttcctctgactctgaaaagtaca

SEQ ID NO: 110686 - DNA, 201 bp, Homo sapiens
aaaaaactagaaaataccattgctttactttctactgtgggtaggaatataagcctttctgtaggtgaagtcgtcattccaatggtgtattcagagcatgktgttactgaatgtctgttgcagacaatgtgttgactatcagaaagtgaaacaattttattagatctatagtcattattaattgtgtcattttaatagcat

SEQ ID NO: 110687 - DNA, 201 bp, Homo sapiens
tcgattatattcattacagaaagagatatgaccacacacagtcatgcatacacactcacaaacagaaaacaaagatagaattaaaaaatacaacttgagaygttatctctggtagataaatatatattcctttttatcattttctgaattctctaaatgaattttctaaaatgtattgatttcatattataaagcaaaata

SEQ ID NO: 110688 - DNA, 201 bp, Homo sapiens
tatatattcctttttatcattttctgaattctctaaatgaattttctaaaatgtattgatttcatattataaagcaaaataaagaatatttagatgacccrtttccaatcactggcaagattctgcctgctgtcatgttgttttctgcagctgttactttttaatatagaggagcatggaaacaatgtattaaactgaaat

SEQ ID NO: 110689 - DNA, 201 bp, Homo sapiens
ttcatttccatatatgtagtataaagaagtcatctagttcttaattagcgccaagaggaaggagtggggcaagaatatgagggaaagagatagaaaagaarcccctctacctgctctcaattgagttccttacttttaccattatcaaatgatttcttctattctgtcttgaacattccttattgctgagctctttcctca

SEQ ID NO: 110690 - DNA, 201 bp, Homo sapiens
tgctggagtgcagtggcgcaatcatggctcactgtagccttgacctcctgggcccaagtgatcctcccacctcagcctcctaagtaggtgcacaccaccaygcgtagctaatttttgtattttttgtagagagatttcaccattttgcccaggacctctccaactcctgaactcaagcgatccacctgcctcagcttccca

SEQ ID NO: 110691 - DNA, 201 bp, Homo sapiens
tcatttaaaagttatcatactagaacattggtaagaaaatggatagagaagaaattttttgggttgtggaaaataagataagcaagaggagagtcaaaaattttgagccctagaagaatatcttaatattgttttgtgctcaataatatataacttatgagaagaaagagaaaagcattatgttcagataggataaggaga

SEQ ID NO: 110692 - DNA, 201 bp, Homo sapiens
ttttgcccaggacctctccaactcctgaactcaagcgatccacctgcctcagcttcccaaagtgctgagattacaggcatgagccaccacacccggcactrtataagtattttagaccttagaaaaacctatctagttttaaatttgtcttattaattttcttgacattgctaaaaaaagaagcatgtatatccattcatg

SEQ ID NO: 110693 - DNA, 201 bp, Homo sapiens
actatcaataaatctgctgtccttatctgtattcctcagtacataagattttttattctctctggttgcttttaagaattgttagatggctgggtgcagtrgctcacacctgtaatcccagcattttgggaggctgaggcaggtggataacctgaggtcaggagttcgagaccagcctgaccaatatggtgaaaccctgtc

SEQ ID NO: 110694 - DNA, 201 bp, Homo sapiens
actgtagactggaaatggccaggaaaagaatcagtaagcttgaagttatgccagtagaaatttctcaaaataaaacacaaagaggaaaaaaacccaaaccrctccagaatagaatgtcaaagaactgtgggatattttcaaaaggtacatgcatttggaatagcaggagaagagaaaacaggacagaaaaaacttttgaaa

SEQ ID NO: 110695 - DNA, 201 bp, Homo sapiens
gtcaatcatgggtttcattatgtaaaacaaactgagctgcatggagcttgaacctaggtgtcggtccattttggtctttctgtccaccttagatatcatcyacagaagtattcgtctaagtgagtgtgagcgtgtgtgtgtgtgtgtgtgtgtgtgtctgtttattacagcctacttgattctaaaaatgatttgtatata

SEQ ID NO: 110696 - DNA, 201 bp, Homo sapiens
gggacatgtgtcctgccagggaatccaagatggagaaaaatctggttgtctacctcaatctcatctttccaatttctccacatcctcccaacacttgttattttgtttgtttgtttgtttgtttttgtagtagccatcctaacggacatgaggtggtataacattgcactttggatttgcatttccttaataattagcgat

SEQ ID NO: 110697 - DNA, 201 bp, Homo sapiens
tcaaggtgacctttggtaaaaacttgggagaaactgaataaaattcatatggaactgcaaatgacctaaaatggtccaaacaattttgaaaatgagtaacrtggaggattaacattgcctgatgtcaaaatgagttataaagctacagtaagcaaagcaatgtagtattggaatcaagatagaaaaacagatcaatgaaac

SEQ ID NO: 110698 - DNA, 201 bp, Homo sapiens
ataccacaaagaattaaggtttataagggcttcctttcctcctcctctttctcttctgcttcttactctttcccttttcctccttttcataatatttattkacctacatttgatgttttttgtagtaatcatgtttttaccgggccattcaataatgaaaggacaggggcagaaggaagaagggaccaccttctgctttat

SEQ ID NO: 110699 - DNA, 201 bp, Homo sapiens
ggacatgtgtcctgccagggaatccaagatggagaaaaatctggttgtctacctcaatctcatctttccaatttctccacatcctcccaacacttgttattttgtttgtttgtttgtttgtttttgtagtagccatcctaacggacatgaggtggtataacattgcactttggatttgcatttccttaataattagcgatg

SEQ ID NO: 110700 - DNA, 201 bp, Homo sapiens
atttcctgagcctagaatcagcaatttttccaaggagtcctggttcctgttattgtagaatgacattagaaaccaatatctgggctgaaggtgtgcttatkgctttcgggtgttgttttaggcattctcagctggcaaagcaaataaatatatgtatgtaaactaactcctgaatattcatacatctataaatatttgtat

SEQ ID NO: 110701 - DNA, 201 bp, Homo sapiens
aaatagctggccaaaaaagagtatgtagtatttgattcaatttttataaaattattcataatacaaaccaatatatactgaacaaaagaggtcaatggttkcctggaatggtgaattgaggagtggaatctggcagagacaggtggaatggcaaaattttaaaggtgcacctggaaagttttgggaatgatagacatgttc

SEQ ID NO: 110702 - DNA, 201 bp, Homo sapiens
tgaaataattgacatgtattatgggaaactgatgtatcaagataacaacatacttattccatggctccaagtacctcctttcacatttctgcaacccctaygtgcactccagttttagaagcaatgacatggtcctgcagaatgggagagccaagaggcttcttcaaggtattattcaaggataatgggtcagtcttggac

SEQ ID NO: 110703 - DNA, 201 bp, Homo sapiens
gacatgtgtcctgccagggaatccaagatggagaaaaatctggttgtctacctcaatctcatctttccaatttctccacatcctcccaacacttgttattttgtttgtttgtttgtttgtttttgtagtagccatcctaacggacatgaggtggtataacattgcactttggatttgcatttccttaataattagcgatgt

SEQ ID NO: 110704 - DNA, 201 bp, Homo sapiens
aattaataactacaaatagagcaataaataaaacttggataaagtccacctttaaagattctcttctggtattgattctaatatatacctaccctggctaratagacattttaaaaaatagactttattttatagaacagttttaaatttacggaaaaattcagaaaatagtactgagtttcccatatgtcacacatctag

SEQ ID NO: 110705 - DNA, 201 bp, Homo sapiens
gaggctgaggcatcagaatcatttgaacccaggaggcggaggttgtagtgagccgagatcttgccactgaactgcagcctgggtgatggagaccctgtccsccacaaaaaaaatattttaaagcatatgtgtacaaaatatattaaagcatatgtgttataaaatgtttgtaacagctgtatttgtcatgatcaaaaactg

SEQ ID NO: 110706 - DNA, 201 bp, Homo sapiens
tagtttctaatttctcttttcatgtctttttcatttcctagattagtaaatgtttgttgtcatttttaggtacaaaattaaactgcctttctcagaatttkggctataccacttactagatttgtaacttgggtcaagctccttaatgtctttgaagttcagttttatcacaggtaaaatagtaataagggactctatctt

SEQ ID NO: 110707 - DNA, 201 bp, Homo sapiens
catgtgtcctgccagggaatccaagatggagaaaaatctggttgtctacctcaatctcatctttccaatttctccacatcctcccaacacttgttattttgtttgtttgtttgtttgtttttgtagtagccatcctaacggacatgaggtggtataacattgcactttggatttgcatttccttaataattagcgatgttg

SEQ ID NO: 110708 - DNA, 201 bp, Homo sapiens
aacttccaaaattttcattggaacacttaaaataatcatgggagaaagtttttattccacattagcaactagctttctttctctgtaatttttaatcatcsctgatttaactcaaaggaattcaatatttgttgagtaggtattagaagcacattgaggattaaaacagggaaaatatatcagctttacctttttcagttc

SEQ ID NO: 110709 - DNA, 201 bp, Homo sapiens
tgtataatttttgcagctagaccacattttaaaaaaatctacatttttggaactagtaaaagatacttatttgtgttatttaagtattcacgtcttttacygtgggtagttaagtttaataatttaaaaagacacattttatcagtaacaatgttcattttatttttcagactcttccctctactacttactctgtatttc

SEQ ID NO: 110710 - DNA, 201 bp, Homo sapiens
ctattatcatacaaaaatataaagggtaaatagaatctttgttgataaaatatgaggtagcatggattcacccctttattgtctgagaaatgcaacaggartaaagaatatttccttaccacaaataattttcaggatgatgtacatatttctttttgaaatacttgtttaaacaaatgtccctccactttttagtactga

SEQ ID NO: 110711 - DNA, 201 bp, Homo sapiens
tgtatagtttacaacagatgttctctccccacttttttttttttttttttttgctgtttgtgattaactggaactgcaatgaatgccatcatgcttttaargaattcagttgtattgttgaaaaatacaattttcttaatatctaaggagctcttagtcagtggtaagcactttgctgagattttgcatatacagtatgtc

SEQ ID NO: 110712 - DNA, 201 bp, Homo sapiens
gtgatgacaagtatatggagcaaccagaactcatatagtgtttgaaggaatgcaaagttgcaaagtggtacagtgtttttgtaacgtaacagtttttaacrtatttaaacatacacttacgatgtgacctagccattcccctttgagatatttgctcaaaagaaattaaagcggccaggagtggtggctcacacctgtagt

SEQ ID NO: 110713 - DNA, 201 bp, Homo sapiens
aacctactaaacaatgggcaaaagacttaattatttaattcactaaagaagatcacagatggcaaataagcatatgaaaagatgttcaacatcagtattcrttaagggaatgcaaatttaaagcacagtgacataccaccatatgtccactaaaatgtcaacagttttaaaacctgaccatctgaagtgatgacaagtata

SEQ ID NO: 110714 - DNA, 201 bp, Homo sapiens
tgctgagatagcagagttacataaaaatgataaatgaattggttttctggatttttatgatcttcacttttttcatctactcatatggagctcttttcctkttagattcaggttttatgaatctgctatacattttgtatgtccattcatctgtcttttaaactagtaatacttaaatatttaagacaaaccaaaatggtg

SEQ ID NO: 110715 - DNA, 201 bp, Homo sapiens
tcatctctaggttttttcaatctatggtattagtacatggttagctgaggttgattttttttcttttgaggctcttctctcaacacatatatatgtactayttctgatttttcatgagtaaaacaagcattgatagcaatatccaaaaaagcttcagtaaagaacaatttatatcaaagatctttcttcactgtggagaat

SEQ ID NO: 110716 - DNA, 201 bp, Homo sapiens
tggacatttagatagttccctgagttttactgttatgaataatgcagcaaacagctgtaaacatcttagattatttgcatcgtaacccataatatttatcrtattggtcttaagtttattttcttagtaattattacttatattctaaaaacaaatgaacatttaagcttggtgtataataaaggcttacacgtgtgttta

SEQ ID NO: 110717 - DNA, 201 bp, Homo sapiens
ggaaggtggcatttttaaacagtaatgttgtaaaaatctataggtggaaaataagccagtaatttgtttgttcctttttttttctgttcattgtccaaagrcaattaagcatattataaatacatcgcaaaaatatgtattcagtggccaggctcagtggctcatgcctgtaatcccagcactttgggaggccgaggtggt

SEQ ID NO: 110718 - DNA, 201 bp, Homo sapiens
ttgaatattggcccccactctcttctggctcgtagagtttctgctgagagatccactgttagtctgatgggcttccctttgtaggtaacccgacctttctytctggctgcccttaacatttttccttcatttcaactttggtgaatatgacaattatgtgtcttggagttgctcttctcgaggagtatctttgtggcgttc

SEQ ID NO: 110719 - DNA, 201 bp, Homo sapiens
tgacaattatgtgtcttggagttgctcttctcgaggagtatctttgtggcgttctgtgtatttcctgaatctgaatgttggcctgccttgctagattgggraagttctcctggataatatcctgcagagtgttttccaacttggttccattctccccgtcactttcaggtacaccaatcagacgcagatttggtcttttca

SEQ ID NO: 110720 - DNA, 201 bp, Homo sapiens
ttaaaatgaaaaatattttgaagttaaaaaataaaactttaacactaaatagcaatatgaacacaacagaaaataaatcttctggagtaataaactgaacwcatcccagaattcagcacagagaaataagtatctagaaaacatggcttgtgatatggaacataagaaattctgcttaagagtttcagaaggtgatactag

SEQ ID NO: 110721 - DNA, 201 bp, Homo sapiens
tatattaaaatttcagaacattaacaatcctagaatttataaggggtaaggagaatacctacaaataaactaagatctaagtgaaacctaattacttactkattggtggttttagatgttagaagatgatagagtaatagtttcaaaattttgaggaaaaaaattaatttagaattttacacccagctaaactgtcactca

SEQ ID NO: 110722 - DNA, 201 bp, Homo sapiens
ctgtctcagaaaaaaaaaaaaagaaaaaagaaaaaaagaaattatgggaaaggtgaagaaagagtaaggagactattacatctaaagaacagtaagagtaytggatggttgaaaggggaggagcagtttagggaaaggctaaatcagctttgcacaagctactgataaagaagggaaagctagccagtatcaattctaaga

SEQ ID NO: 110723 - DNA, 201 bp, Homo sapiens
ttcatctgagtgctgacttgtaaaataaaattaataattatatttggggtgacatctgcaagattgcaagataggagtttctagcacttgcttcctcacaraaacatgaatttgaacaaacatccattgcaagaaaatatctttataagagctaaggaatgtgggtaagatgttatagcacatcagtggaacatacaaata

SEQ ID NO: 110724 - DNA, 201 bp, Homo sapiens
aagggtatattgtatgctgctgaggtttggggtatgaaatgattccattggtcagctagtgagcatagtaccaatagttattttttcaggccttgtttccyccctctcttccacttctagtagtctccagtgtctactgttgccatctttatgttcatgattacctaatgtttagctcccccttttattaataaataagaa

SEQ ID NO: 110725 - DNA, 201 bp, Homo sapiens
atgatgtgattttcttagtgagcaaaagacttgactagacatttctctaaaaaaggcatacaaatggccattgggtatatgaaaaagctcgacatcagtartcaaggaaatgcagatcaaaactgtaatgagatattacctcacaactgttaggttggctatgctggaaaaaaaaaaggttacaaatgttagcaaggatgt

SEQ ID NO: 110726 - DNA, 201 bp, Homo sapiens
tgaccaacgaatttcctttcaccacttctccaatcatattatcaagtcttagaaacactcccatcaaacattatcctagggctcaatagggttttcccccrggtgtatttcctcctccttgaaacagggttcgtaattttcaggaaaccaggacatggagaagttccaaggggtggggcaaggaaatagctccaccatccc

SEQ ID NO: 110727 - DNA, 201 bp, Homo sapiens
cagtctcccaagtagctgggactacaggcgcccgccaccacgcccggctaattttttgtatttttagtagggacggggtttcaccgtgttagccaggatgygtcttgatctcctgacttcgtgatccgcccgcctcagcctcccaaagtgctgggattacaggcgtgagccaccatgcctggccaggttttttcaacatta

SEQ ID NO: 110728 - DNA, 201 bp, Homo sapiens
cttggctcactgcaacctccgcctcctgggttcaagtgattctcctgcctcaacctcccgagtagctgggactacaggtgcatgccaccacgcccagctamtttttctatttttagtagagacggggtttcaccatattggtcaggctggtcttgaactcctgacctcgtgatccacccgcctcggcccctcaaagtgctg

SEQ ID NO: 110729 - DNA, 201 bp, Homo sapiens
gcagaagtgtgtaacccataggggattgggattttagttaactttttcccccaatttctcaggtcagaaatgttagagtcatgtttgccttctgtttttcyttttttcatatcctacacccaatctcagtaactcccaagggttccactctcaaaatagattcagaatcagactacttagcacctccatggctaccccttt

SEQ ID NO: 110730 - DNA, 201 bp, Homo sapiens
tgcaaaaattttctcctattctgtatgttgcctgttcactctgatgatagtttcttttgctgtgcagaagcactttagtttatttacatcccatttgtcgwttttagcttttgttgcaattgcttttggtgatttcattgtaagtctttgtccatgcctatgtcctgagtggtattgcaaagcaagtcttttaacatgcct

SEQ ID NO: 110731 - DNA, 201 bp, Homo sapiens
tttaaaaaaacccaaatgtccaacaacgaaagactggattaagaaaatgtagcacatatacaccatgggctactatgcagccataaaaaatgatgagttcrtgtcctttgtagggacatggatgaaactggaaaccatcattctcagcaaactatcgcaaggacaaaaaaccaaacactgcatgttctcactcataggtgg

SEQ ID NO: 110732 - DNA, 201 bp, Homo sapiens
ttatcattctgaactctttcctattttattctgtttaattcaagatggtttctaaattttaattttactttgttttagaatttatatttcctttctctatrggagaaaccccagttctgtgtttgagtgtatagaataattccacatagggagaattgcagtaaacattataaccctgtaatctgccttgtatctgttaga

SEQ ID NO: 110733 - DNA, 201 bp, Homo sapiens
gtttgctcctaatcatcagttgtatgaccaaaagaaggcaagcaccattcaaactattctttgcaaaatgtttacagagaaataaaacacttcagttctcratgtttccaaaattttaaattgcattcgtttttttaaatattagtttaattttgctagtagttagtagtagttttactattaattttactactagtaaat

SEQ ID NO: 110734 - DNA, 201 bp, Homo sapiens
aaggcaaaaagtcttttatgagacatgtgaggaagagagctcaaaactaaaaacaattatttactagcagacctatgatctaagaaatactaaaaggcccrggtgtggtggctcatgcctgtaatccctgcccttgtgggtggatcacttgaggtcaggagttcaagaccagcctggccaacatcgggaaaccccatctct

SEQ ID NO: 110735 - DNA, 201 bp, Homo sapiens
aacacctgtactattggagaaatccttcctgatgatgcatggaacatcagaacctttcacggcagtaggaacagtcccacactgtgtcagacactattgakgaaaaaccatattcagttagtcaagtgaccttctctacctgtttttcttctaggtatttgtagtgagctcattctaaaacctaaggatgtttctcaggaa

SEQ ID NO: 110736 - DNA, 201 bp, Homo sapiens
tggagggatagtaaccatcatgttctcctgtagtggagatgcaaaatggtacattttggaaaactggaaaatagtttggcagtatcttaaaacgttaaatacacacacacacacacacacacacacacacacacactggtccagccattccgtgcctgtgtatttacacacacacacacacacacacattggtccagccat

SEQ ID NO: 110737 - DNA, 201 bp, Homo sapiens
tttattgacctacatttgatgttttttgtagtaatcatgtttttaccgggccattcaataatgaaaggacaggggcagaaggaagaagggaccaccttctrctttatcagatacctttaaaaaaataaacacacagtaagagcaatgtaattcaccactttcaagtttgaggtcatggagagcagaaaagcctttctagaa

SEQ ID NO: 110738 - DNA, 201 bp, Homo sapiens
tgatgtcaggtgagccatctctgaagtgagaggctagctcctgcaggatttcatcctcagaagtcctgatgtgctgccttaatcatctttgttattctctsggatcagaaatcatcaatggcctgttttttaaggaacaatgtattacacatacgtgtgtgtgtgtgtgtgtgtgtgtgtatttttaaagcctaccaaaac

SEQ ID NO: 110739 - DNA, 201 bp, Homo sapiens
ggagggatagtaaccatcatgttctcctgtagtggagatgcaaaatggtacattttggaaaactggaaaatagtttggcagtatcttaaaacgttaaatacacacacacacacacacacacacacacacacacactggtccagccattccgtgcctgtgtatttacacacacacacacacacacacattggtccagccatt

SEQ ID NO: 110740 - DNA, 201 bp, Homo sapiens
ctgaaatatttttatatctagtttattaaatgttattaggaaaggttattgaattttatcaaatactctttctcttattttccatatttatgtgacatatkaactgacacacttccaatattatcctaattaacccatctttgtattatcgtttagttgtggtaaagtttttccttttataataccatcaaattatatcaa

SEQ ID NO: 110741 - DNA, 201 bp, Homo sapiens
gtagccagctgctcgaaccatgttcaaataaggcaaacactgagctgtaaccaatccagttgtttctgtacctcacttctgatttctgtgtgttgtgtccytttttttgtctacaaatcttcttctaccacatggctgttctggagtctctctgaatctgctgtgattctggggggctgcccaattcgttaattgttcatt

SEQ ID NO: 110742 - DNA, 201 bp, Homo sapiens
ttgatctgaaatatttttatatctagtttattaaatgttattaggaaaggttattgaattttatcaaatactctttctcttattttccatatttatgtgayatattaactgacacacttccaatattatcctaattaacccatctttgtattatcgtttagttgtggtaaagtttttccttttataataccatcaaattat

SEQ ID NO: 110743 - DNA, 201 bp, Homo sapiens
tagccagctgctcgaaccatgttcaaataaggcaaacactgagctgtaaccaatccagttgtttctgtacctcacttctgatttctgtgtgttgtgtccctttttttgtctacaaatcttcttctaccacatggctgttctggagtctctctgaatctgctgtgattctggggggctgcccaattcgttaattgttcattg

SEQ ID NO: 110744 - DNA, 201 bp, Homo sapiens
gggaattagtacagccagtacagaagattgtacagaggttcttcaaaaaactgaaaatagaactaccatatgatctagctatttcactactgggtatatayatttaaaaaatcaatatatcaagaagatatctgcactcccatgtttactgctgcattattcacaataggcaaaatatagaatcaatttaagtgcccataa

SEQ ID NO: 110745 - DNA, 201 bp, Homo sapiens
tggtctttctattaattcaagtctttgcatacattactcatcacagtcttaatgtttccttcataggttttccaaatttttattggaatgtccctacaggytcattgttaggaatgctattagctgttgatctgaaatatttttatatctagtttattaaatgttattaggaaaggttattgaattttatcaaatactctt

SEQ ID NO: 110746 - DNA, 201 bp, Homo sapiens
ggcaaacactgagctgtaaccaatccagttgtttctgtacctcacttctgatttctgtgtgttgtgtccctttttttgtctacaaatcttcttctaccacrtggctgttctggagtctctctgaatctgctgtgattctggggggctgcccaattcgttaattgttcattgctcaattaaacatctttaaatttaatttgg

SEQ ID NO: 110747 - DNA, 201 bp, Homo sapiens
ctccacatcctcagagggcccgggacttgggtcctggccccgccccctgcggacccggcactctgtcagttccgtccccggtcctgggaaccgctctttaycccactctgcgtgtctgccggaacctggctgggaagcgctacttgctgccctgccagcccgggtgagggcggagccaggcctccagccgcgaggactgga

SEQ ID NO: 110748 - DNA, 201 bp, Homo sapiens
gttttgagaaaagcaatgtgatcaaatatgtacttcaaaggtataactctattgctgttttgtgaataaattgtatggttgcacatatagaagaaggaaamtaattaggaggctgtttcaagaattgacaggaagaataatgttcactcaaagtagagtagtatcatgaacatggtgagactgataaagtgctagatatat

SEQ ID NO: 110749 - DNA, 201 bp, Homo sapiens
acttgatttgcttataattacatacaaagtattggaaggtacaaagcacaagctacaaaaatcactcaagaaatattagataacctgaattgccctctatrttaaggaatttaagtttgtaggtttaaaccttcccagaaagaaaaccccagaatcagatagcttcatgggtgaatcctaccaaacatttaagcgagaaaa

SEQ ID NO: 110750 - DNA, 201 bp, Homo sapiens
agtttcttcatgccacttcccagacagtcgctatctctttcatcctcacactcaggtaaccactgttctgatttttttcgtatacatattccatttcaatrtcttactttgtaaagtggctgtttaaaatgtttaaaatgttattttaaaatgttatttattaaaaatattatttatcttttaatgatttaactttgagtg

SEQ ID NO: 110751 - DNA, 201 bp, Homo sapiens
cattatttgattatgttaatgctttctaaaacacaaataaattgttttctcaattccttatggcttgattttttgatttctaaactagattgcctaaattktgcttgaaacatctattgacttattcactgttattctttaaaaactaggacctgaaaacgaaagttctacatgcaatggatgtgctcgctagttttttct

SEQ ID NO: 110752 - DNA, 201 bp, Homo sapiens
agtaaaagaggaaatcctgtgtgaagatcctgagacatgaatattagcttatttaatattaatgtcatccctccagtttctcatagtactactcctactgrcttatatatcactcacctttttaaaattgcccccaaaattgagatttagactcagttagaagcttagatctgcagaatcagaccctgtcacactatgcaa

SEQ ID NO: 110753 - DNA, 201 bp, Homo sapiens
tagtttttttaacagatgaatctgcttctataatagtgttctaccccaagaaaatattgctgacacaaattgatttatggaaagttttatttgctactacytataaatgagttgtgctggaatttgttgctgtatctgcagttcttagtatttgctaatataaaagatccttgttatcttagtgccaaaaggctacttaaa

SEQ ID NO: 110754 - DNA, 201 bp, Homo sapiens
cttcacagtggcctgtgaacaaattattttgtttaatgtgagtgaatcaataatgtgtcagcagtaggatcactactcacatgctataaaatgcaagacaragttcagatgtttttatattttaaaatagaatgtatattccttactgtgttaggtgattactagtttttttaacagatgaatctgcttctataatagtgt

SEQ ID NO: 110755 - DNA, 201 bp, Homo sapiens
tagaaagaatgtgagtgaatataaaaaataaatcccatataaccagacaataggaataaagtattgccagaatgaccatatcatgcattgtgtgtgggaamtaaacaaatacaaatagcagtgggtatttaaaggaaatagtgatctaatggcagaggtagccagaacggggagggctagatcactgtcataatgagaatg

SEQ ID NO: 110756 - DNA, 201 bp, Homo sapiens
ctagattttgctctaatttgttttgtatttgaacacatagtttcaatcaaatttaataaaatatctgattcttctataggcccttttctggaacctagaayatatacatgactgcaggaacagtagttggctcctcatagagtaaaaatagaaatgttctttttcccagaaaaaaaatcagtaagctggtacagataacca

SEQ ID NO: 110757 - DNA, 201 bp, Homo sapiens
cgattttggacagtgggatgtgcttttaattttccttgtttatttgctttatatcaagtgtaagtgttaacatatttgaaagagtgggcatcagccttagrtagctgttgctcaggaatttatagttatgttggtcacatgtctcttttccttggcagtactttttgatagaactgaaagggcatatttaaagaaaacaaa

SEQ ID NO: 110758 - DNA, 201 bp, Homo sapiens
taaataaatgattgaattttcaagggcattgtatacacactcaggatgtggactttgatctattagcataaaactttacctggttgtttttttttttcatrtccagaaaggaagaagtaaatgaaaaacaagaaacatgaatctttcaccttaaatttatgttggaggatgtaatagtaccagatagtcaataaggtagat

SEQ ID NO: 110759 - DNA, 201 bp, Homo sapiens
gggcatcagccttagatagctgttgctcaggaatttatagttatgttggtcacatgtctcttttccttggcagtactttttgatagaactgaaagggcatrtttaaagaaaacaaaaaaccaacatgtgtttaaatttacaaaaagtttgccaagttctaactacaattctataactctctcctaatgtataacatttcac

SEQ ID NO: 110760 - DNA, 201 bp, Homo sapiens
gaaacagtaagtaaggaagtgagtgatagagaataaagtcaaagaggtagcagcaatcccatcttatagaccaaggaaggatatttggattatactctaasgcagtggaaatccattggaggatgtggggcaaagaaatcacatttgacttgtattttaacagtgtcactctggctactgaatgacacataggccgtatag

SEQ ID NO: 110761 - DNA, 201 bp, Homo sapiens
aagaatggctgacagcagatcaacatggtctgacttaggttttaaaggactgatcacacctttaaaaacatatcagacctcatgtctgcagttgtgtcaaraactgactttagaggtgtaaaagtagaaacagagaggagaggtattgcaatttcatttaatgggtctagattttgctctaatttgttttgtatttgaaca

SEQ ID NO: 110762 - DNA, 201 bp, Homo sapiens
gtaaatatttgttgagtaaataaatgattgaattttcaagggcattgtatacacactcaggatgtggactttgatctattagcataaaactttacctggtygtttttttttttcatgtccagaaaggaagaagtaaatgaaaaacaagaaacatgaatctttcaccttaaatttatgttggaggatgtaatagtaccagat

SEQ ID NO: 110763 - DNA, 201 bp, Homo sapiens
gaaagacttttgtagttttcttttacctgttttaactatgcataaatcggatatatttttatcacagcgcatttcagttatgccagtcatcttccaaatastatgtttcaagctccctgagtacaggaactctgcaggttatctttgtactcccaaatgtgaggatactgtctcatcacattcctatttggctaaatgggg

SEQ ID NO: 110764 - DNA, 201 bp, Homo sapiens
ccagtttttctaaaaatggtgatcatgtaacttttgttgttttggttaactgtgtaacatttgcacatcttccaggagaagacaagatgcagtcttagccrtattcttaccagaaatcctcttgactgcactttatcaccaactttccctcactctcctttcatggctcacactttaaatattggaatctcttgcctctct

SEQ ID NO: 110765 - DNA, 201 bp, Homo sapiens
cagagccacgcattaaatccctaggagtaaagagagcatttttattctctcaaagcaccggttctttcttgactttggcttgtacacagacctcacctatwatagtgggctctgtgaaatttggcccaaaacactgttgtttttatgctttgtggaggatcaaaattataaataacactgctcaatctgttggtaggtgtg

SEQ ID NO: 110766 - DNA, 201 bp, Homo sapiens
taaaaaaggctgctagttgcctctcattgttcttccttttcaaagttttcctaattatctttgatttttctatattaaccttagtatcaaattacatactyccaaaaagttcatttttattggactttgattatatttttaatgaatataggtggaattctaatctttatgatattaaacattcctatccaagggcatagt

SEQ ID NO: 110767 - DNA, 201 bp, Homo sapiens
gttcattgaagtggcttcaaattctacattgcaattaacgtttaagaaactatcacttgtcaagttttggtatagaatcaaagaaagatatccacaattakcataaaaggctagtaaaacactcctgccttttccaactacatatgcatatgaagctgaatacagaagaagatttaagaatctagttgttggccgggtgca

SEQ ID NO: 110768 - DNA, 201 bp, Homo sapiens
aggctcagtggctcatgcctgtaatcccagcactttgggaggccgaggtggtggatcacgaggtcaggagtttgagaccagcctggccaatatggtgaaaycccatctgtactaaaaatacaaaaattaaccaggcatggtggcacatgcctatagtcccagctactggggaggctgaggcagaagaatctactgaaccca

SEQ ID NO: 110769 - DNA, 201 bp, Homo sapiens
ccatttgggtgggaaggttatagaccttgcacattaatgccatgctcaaagcagatttgcaggtatcctgcaacacagggactttcacaaaacccgctttrgcttattctacctgaactacttattttaattaactaaatggatatcccaagcattccatgtttatcctgttgctcagtgaatcctcaaatcgttaatttg

SEQ ID NO: 110770 - DNA, 201 bp, Homo sapiens
agaaatttgcaggggtctgtcccacagaccctgacccaacgatggatgaataaagtacactgacacacagatattctgctttaccagtccagctgagcatytgggccgcttacagactccacgcacagtgctgtaaacagttgcgactatggtctcaatcagtcagcaagacttatgtttattcagtaaagattaattgac

SEQ ID NO: 110771 - DNA, 201 bp, Homo sapiens
tttctagcttcatccatgtccctgcaaagagcatgaactcattcttttttatgggggcatagtattccatggtgtatatgtgctacattttcttaatccaktatattattgatgggcatttgggttggttccaagtctttgctgttgtgaatagtgctgcaataaacatatgtgtgcatgtgtctttataatagaatgatt

SEQ ID NO: 110772 - DNA, 201 bp, Homo sapiens
ccatgctgtttttattactgtggccttgtagtatagtttgaagacaggtagcatgatgcctctagctttgttctttttgtttaggattgtcttggctataygggctttttgttggttccatatgaaatatatttttttctaattttgtgaaaaaagtcagtggtagcttgatggggatagcattgactctttaaattactt

SEQ ID NO: 110773 - DNA, 201 bp, Homo sapiens
ctattaggtccgcttgctccagagctgagttcaagtcctgaacatccttgttaattttttgtctcattgatctgtctaatattgacagtgtggtgttaaaktctcccactattattgtgtgggagtctaactctctctgtaggtctctaaaaacttgcttatgaatctgggtgctcctgtattgggtgcatatatatttag

SEQ ID NO: 110774 - DNA, 201 bp, Homo sapiens
ttaactagttaaaaaactggatacgaagaagagtcatatataatgaaaaggtattttactttttattgatttgcagatgtaatttctagtaaaattacttyaagatgtgaatagggtacttggggtatgaaacaaatttttttaaagaggtcataaacttaacacttgcaggtattcatttattttaataacacacttcaa

SEQ ID NO: 110775 - DNA, 201 bp, Homo sapiens
ctggttattttgccccattagttgatgcagtttcttcatagtttccatggtctttacaatttggtatgtttttgcagtgggtgatatcagtttttactttycatatttagtgctttcttcaggagctcttgtaaggcgggcctggtggtgacaaaatctctcagcatttgcttatctgtaaaggattttatttttccttct

SEQ ID NO: 110776 - DNA, 201 bp, Homo sapiens
cccaggttcaagcgattctcctgccttagcctcctgagtagctgggattacaggcatgcgccaccatgcccagctaattttgtattttttagtagagacgrtgtttctctatgttggtcaggctggtctcaaactgccgacctcgggtgatccgcccgcctaggcttcccaaagtcctgggattacaggcgtaagccaccg

SEQ ID NO: 110777 - DNA, 201 bp, Homo sapiens
tttatgtttgtctctaaactggttattctagttagcaattcctgtaacctcttttcaaggttcttatcttccttgcattgggtcagaacatgctcctttakctcagaagagtttgttattacccaccttctgaagcctacttctgtcaattcatcaaactcatccttcatctagttttgttcccttggtggtgaggaattg

SEQ ID NO: 110778 - DNA, 201 bp, Homo sapiens
acttttcatattaaaactaaacaaggataggagtagcaatgtctaacaattaccatggaaaacaagaaggcttaacaaaataaagaaggccattatataaygataatagataaactatatggaatctgtaataatcattatcccatattcactgatgaaataatgctataatatgtagtaaaaaataaagaaaaattgggt

SEQ ID NO: 110779 - DNA, 201 bp, Homo sapiens
tgcttgaaacccagggccctagtggcgtaggcacccgagggaatctcctggtctgcaggttgcgaagactgtgggaaaagcgtagtatctgggctggaatrcatcgtccctcacatcacagtttctcacagctttccttggctaggggagggaattcctctaccccttgttcttcctgggtgaggtgatgccccaccctgc

SEQ ID NO: 110780 - DNA, 201 bp, Homo sapiens
agtcctggccagagcaattaggtaagaaaaagaaatgaaggaaaaccaaattggaaaggtagaagtcaaattagctttgttcatcttatatgcagaaaaayctaaagactctaccaaaaaaaactgttataactcatacaggaatttagtaaagttgtaggatacaaaatcaatgtacaaaaattagtagtgtttctacac

SEQ ID NO: 110781 - DNA, 201 bp, Homo sapiens
agaacacgcaaaaaggaaggagatggattctccttagagcctccagaaggaatacaaccctaattgactatagccctgtgagactcacaccagacttctawcttaaagaaatgtaacaccataagtttttgttgttgttgtttgtttttgagacagagttttgctctttttgcccaggctggagtgcaatggtgcgatctc

SEQ ID NO: 110782 - DNA, 201 bp, Homo sapiens
catagaagaaacatacctgaaaataataaaagccatctatgacaaacccatagctaacaacacacttaacaaggaaaaattgaaggcctttcctctaaagkctagaccaagataagaatgcccactttcactattattttgctgttattcaatataatactggaagtcctggccagagcaattaggtaagaaaaagaaatg

SEQ ID NO: 110783 - DNA, 201 bp, Homo sapiens
atatcaccagtgaacacagatgtaaaaatcttcagcaaaatactcatttaccattgtcaagtagaattcattccagagatacaggatggttcaacatatgmaaatcaatacatgttatacacgacattaacagaatcgagaatgagaatcatataattatttcaatagatgccataaaggtaaaggcatttgataaaattc

SEQ ID NO: 110784 - DNA, 201 bp, Homo sapiens
aagataaaactgtaatggcagcaagagaaaagaagcaagcagcatataaaggagctccaaatcatctttagccagaataagaaaaaaagagagaagacccmaataaataaaagtaggaacaaaaatggacacatgacaactgagacctcagaaatactaagaatcattagaaacaattaggaaccattacatgccaacaaa

SEQ ID NO: 110785 - DNA, 201 bp, Homo sapiens
taattagcctagattatactcagtgattgccagcttcacagtggcctgtgaacaaattattttgtttaatgtgagtgaatcaataatgtgtcagcagtagsatcactactcacatgctataaaatgcaagacagagttcagatgtttttatattttaaaatagaatgtatattccttactgtgttaggtgattactagttt

SEQ ID NO: 110786 - DNA, 201 bp, Homo sapiens
tactgtgggagctcacagcagattcccagggtacagggttgggaaaacatcacaagagtgttttataagctgagacttgagcaatgtgtgggacagacttkgcaaagtggttggagaggtgagaaagggaaggaagagtgtttcaggcagagggaatattatatctgaagatctggagagaacatggtgcagttcatgaat

SEQ ID NO: 110787 - DNA, 201 bp, Homo sapiens
aaattaaagtttttctcaattgtattccaatgttttacaaaatggtaatttattccaggaaattttattcaacaaaaaatatgagttccatcagaagattmttctcagacattgaactatttaaaattgctattatagatgtatttatttactaattctgctgtatacaaagttccacaaactagctagcttgaaacagca

SEQ ID NO: 110788 - DNA, 201 bp, Homo sapiens
agattgaaatttatcctgatatacttttcttttgcctgcaactttacagattgttacttatatgtgtgtacaaatcactggatttcatgtctctgtcaaawtcttgatgaaataatcagtactgatggaaatgggaagtttcagtttcattttggttttgattttttttttttggtagggatttgggaggctctcatttgg

SEQ ID NO: 110789 - DNA, 201 bp, Homo sapiens
ggatagtttctacggacatcaacaaccaaactgactgaggaatatcaagttaacctgatagtattgaaaaaggagtgaaattacctacaagggttttccaygcagattgaaatttatcctgatatacttttcttttgcctgcaactttacagattgttacttatatgtgtgtacaaatcactggatttcatgtctctgtca

SEQ ID NO: 110790 - DNA, 201 bp, Homo sapiens
taagtgttttcttctatagaatacactatttcaaggacagtactgtatatttgacagaagttaccaagggctcaataaaccaaggtgtccttaacattgcytacaagaacaaggtaattttaggatctccatatactcttcaggtcacttaagataattatatagggtaaaggttagcaacctttgcgtgatgtgtaggtt

SEQ ID NO: 110791 - DNA, 201 bp, Homo sapiens
actctagaaggatacaactgtgagtgtgggaaaaagtcatctgaaggtcagagatatgcatcactcttgagtacctgctgcgacttgctagtactagctgycctttggaaaaagctgagaagacagaaaaaaattaggtgcagcaagccagaggattagttgaagacaattaatggacgataagaattgaatataggaatg

SEQ ID NO: 110792 - DNA, 201 bp, Homo sapiens
actagaaatagaaaaaatacaataaaactatatagtaaaggactcaaaagaatgacaggcacaggactcaggatgaaatttacatctgtttggagcaggayggagaatggactaattgggtagactataaggttaaatatagattaaggttaaatatagatcaaggcgataacttttgtttggggtagtagatttgcatat

SEQ ID NO: 110793 - DNA, 201 bp, Homo sapiens
catatcacaagggccctaccctcatgaactcatctaaatctaattggcctcagaagtcctatctctaaatacaatcacattaagtgttacagctttaatayatgaatttcggggggacataattcagtccataacaaatgtttatagatagttggagctgaggggataggaaagagaggaaaggattatgaagagagtagg

SEQ ID NO: 110794 - DNA, 201 bp, Homo sapiens
taatataaaaatagtataaaactatttacatagcatttacattgtattaggtattacttataatacctaagtaataagtaatctaaagatgatttaaagtrtgtaggagtatatgcataggttatatgcaaatactatattattttatatcagaaactcgagcatttgtggattttagtatctgccagtgcggcaggtgcc

SEQ ID NO: 110795 - DNA, 201 bp, Homo sapiens
taaaacccagtcttcactaaaaatacaaaaattagctgggcgtggtggtgcacacctgtaatctcagctactttagaggctgtggcagtgagctgagatcrcgtcactgcactcctgcctgggtgacagagacagactctgtctgaaaaaaaagaagaagtcaagtgcttatcttgatcttggtttaagcttttttcctag

SEQ ID NO: 110796 - DNA, 201 bp, Homo sapiens
atgtttatatcctaggtttcaaaacttgtgaatatatcaccttacatggcaaatggtactattacagatgtgattatggtttgtaactttgagatatggakattatcttgaattaacctagtgggctcaatcaaatcatgaggcctttagaatagagaccctcccctggctgtagtaagtaaaagagagagacagagaaag

SEQ ID NO: 110797 - DNA, 201 bp, Homo sapiens
aagaagacatttatgcagccaacaaacacaagaaaaaatgctcatcgttattggtcatcagagaagtgcaaatcaaaaccacaatgagataccatctcacrccagttagaatggcgatcgttaaaaagtcaggaaacaacagatgctggagaggatgtggagaaataggaacacgtttacattgttgggagtgtaaactag

SEQ ID NO: 110798 - DNA, 201 bp, Homo sapiens
tgacaagttaatgggtgcagcaaaccaaaatggcccatgtatacctatgtaacaaacctgcatattgtgcacatgtaccctagaagttaaagtataatttwaaaaaaaaaaaaggcttctggatctgtcttttactgaagcacatttcccccacatttatttttgtttaattcataattgctcattttaaaaatgacttac

SEQ ID NO: 110799 - DNA, 201 bp, Homo sapiens
tagcattcttgaaagtgacaaaattagcggtttccgggagtcaaggacaggttgatgtgggagggaactgggtgtggctgtaataaggcaacatgagggayccttttgatgatggaaatgttctatatcttaactgtatcaatgtcaatatcctgggtataatattatcctgtagtttggcaagatattatcattgtatag

SEQ ID NO: 110800 - DNA, 201 bp, Homo sapiens
aaacgtgaaattgagattgtcaaccagctttcccatcttcttcggtttcctgccaggagacctgcctttgccttaaaccacaggtagcactgtgactgccyggagggagaaatgtctgtgaaggctggcaaagacaaatagggaagccaggactaccatcctcagccgtaaaaactccttgtaacttgaccaaaggagatg

SEQ ID NO: 110801 - DNA, 201 bp, Homo sapiens
ataattaggaccaagataatcttcattcaactcaacaaatattttttgactaccagatatatttctatgtgcacttattttatactaggtactgttccagkagttgagactaccaagaagttctctactttttagagcattcttttgagaactaacattatttgtattagtatgacttaactctttgttccaggaaattct

SEQ ID NO: 110802 - DNA, 201 bp, Homo sapiens
agcattcttgaaagtgacaaaattagcggtttccgggagtcaaggacaggttgatgtgggagggaactgggtgtggctgtaataaggcaacatgagggacvcttttgatgatggaaatgttctatatcttaactgtatcaatgtcaatatcctgggtataatattatcctgtagtttggcaagatattatcattgtatagt

SEQ ID NO: 110803 - DNA, 201 bp, Homo sapiens
atgtcttgagtaaaataaattccaagttagaattataattctaatgtttgaagacaggtttgcataagaattaaacagaatgtgcagggagtttccatgcmtctcatttgagcaacaagcaaagaaatgagatagaattctgtcctgtttaatggtactggggctgtcacaagctaagccttgtttatgttcagaagctgt

SEQ ID NO: 110804 - DNA, 201 bp, Homo sapiens
tttggactgtattttcttaatagccagtctttgagctcactgattcttttctctaacccattctgttattgagatcctctaaagagtgtttcaattcagcraatgtggttctccgttccaagatttctgtttcatttttaaattattatttcaattttcttgttaaatttctctgataagtatctgaattgtttttctatg

SEQ ID NO: 110805 - DNA, 201 bp, Homo sapiens
gcattcttgaaagtgacaaaattagcggtttccgggagtcaaggacaggttgatgtgggagggaactgggtgtggctgtaataaggcaacatgagggaccyttttgatgatggaaatgttctatatcttaactgtatcaatgtcaatatcctgggtataatattatcctgtagtttggcaagatattatcattgtatagta

SEQ ID NO: 110806 - DNA, 201 bp, Homo sapiens
ggatgaataaagtacactgacacacagatattctgctttaccagtccagctgagcatctgggccgcttacagactccacgcacagtgctgtaaacagttgygactatggtctcaatcagtcagcaagacttatgtttattcagtaaagattaattgacaaaggcttgggtcaacaccactagagtgtaattgacattgtgg

SEQ ID NO: 110807 - DNA, 201 bp, Homo sapiens
cattcttgaaagtgacaaaattagcggtttccgggagtcaaggacaggttgatgtgggagggaactgggtgtggctgtaataaggcaacatgagggacccktttgatgatggaaatgttctatatcttaactgtatcaatgtcaatatcctgggtataatattatcctgtagtttggcaagatattatcattgtatagtat

SEQ ID NO: 110808 - DNA, 201 bp, Homo sapiens
ataatcagagggagattgggatctttgccattagcatagtagctggactgtaataactattttatgaatatttttatcttgaacttttttctgcagctatwctcaatgtatgtcttctttttctattggatgccaagaagaaacaggattttatgactatctggagcaatgcatagtacctatgtcagaaccaataaaaaa

SEQ ID NO: 110809 - DNA, 201 bp, Homo sapiens
ttacttgtatttagaaataaggaaaaatgaataagaaaaaattaaagagcattcttccatggtttccaagaatttcttattaaatatgttaacaaaactcraagtgaataaaagttagagctatagcctatgctattggatacccacccatatcatctgatctgcaccacttcaatgctcactgttttgtcttccaagggc

SEQ ID NO: 110810 - DNA, 201 bp, Homo sapiens
ataagtttttgttgttgttgtttgtttttgagacagagttttgctctttttgcccaggctggagtgcaatggtgcgatctcagctcactgcaacttccacytcccaggttcaagcgattctcctgccttagcctcctgagtagctgggattacaggcatgcgccaccatgcccagctaattttgtattttttagtagagac

SEQ ID NO: 110811 - DNA, 201 bp, Homo sapiens
tcttgaaagtgacaaaattagcggtttccgggagtcaaggacaggttgatgtgggagggaactgggtgtggctgtaataaggcaacatgagggaccctttkgatgatggaaatgttctatatcttaactgtatcaatgtcaatatcctgggtataatattatcctgtagtttggcaagatattatcattgtatagtatctt

SEQ ID NO: 110812 - DNA, 201 bp, Homo sapiens
aaaaattctgtctttacaaataacatggtactgacatctggttagttttagctattgtgtctcccttgcttctgaattccagagcaatactttcatttttkgatataagcaaattctaaaacacattgtggggaggtagataatctgacattttgcagagttaaagtaattagagaagcacaagaaagtttcgaaaatgat

SEQ ID NO: 110813 - DNA, 201 bp, Homo sapiens
actgggtgtggctgtaataaggcaacatgagggacccttttgatgatggaaatgttctatatcttaactgtatcaatgtcaatatcctgggtataatattrtcctgtagtttggcaagatattatcattgtatagtatcttgtattatttcttacaatggatgtgaatctataattatcaaaaaatgacaatttaattaaa

SEQ ID NO: 110814 - DNA, 201 bp, Homo sapiens
gccctagcaaactaatatattcagcaattcttttttttttctaggacataaacatattttaatgtcctacttcctggggagaaatccttttaattattttkgtgtatttggaaataggggttgtattccaaattgtagtctaccataaagaactacctgaggctgggtaatttataaggaaaagaggtttaattgactcac

SEQ ID NO: 110815 - DNA, 201 bp, Homo sapiens
atggtaggagaaccagattctacatccatgaggcctcttccctgcattacaccaggcatcagcagtatgaaaaatctgccctcaactcatggtttctgcaytgaaaaacgtgaaattgagattgtcaaccagctttcccatcttcttcggtttcctgccaggagacctgcctttgccttaaaccacaggtagcactgtgac

SEQ ID NO: 110816 - DNA, 201 bp, Homo sapiens
gaaaaggtgagaaagccattgtgcccttgtcgcctttgacatgtcccagagcaaacctgaaaacaatttgggatgtacctcaagtacaggtggggacaggsgaaggagcaaggacttggaatcctttccacagagtgggagtggagaccatggggctgccgagatttaaatggggaagacgaatattagtgactctggtcc

SEQ ID NO: 110817 - DNA, 201 bp, Homo sapiens
cagtatcatcgatatcatttggggcaggacaggtacacatgatccccacctggcagtgctgtttaaaatgggccatgtagaaggcagggactgtgtcttaygcatcgtgcttgcaaagattggctacaggaacggcttcttgagaaaggtctggggaaatgctttgtaatgcgaagcactacagactttcagagtaagagg

SEQ ID NO: 110818 - DNA, 201 bp, Homo sapiens
catttataaagggtttcatccttttttcctttttggactctaaaatgtatgcattgagctggactgaaatatgaaagtgcagttcccagagcggtttgctyagggaaagttgtgctgtagccctcaactccagtagaacttctaagactctctctcacttggttttttgtcccatttcccatccagatttggaacttggct

SEQ ID NO: 110819 - DNA, 201 bp, Homo sapiens
atggcattgtttgtgaatttttaaagtgcttggctaatagaaacagctggtttctcacacctgcttctactttaaatctgttggtgatgtgctgtttttaytgaaggagaggaagataatccagccttacacagataagcagtgggaaaagggaggaatattttaatagccttttcaaataattatggatattcttctttg

SEQ ID NO: 110820 - DNA, 201 bp, Homo sapiens
gggatccttttgctcctcaggaacaatttcttgtccttcaagtcacattcctacccagccttcctggcacagcacaaatctcatctccccttaccacccakttgtcatctttgagctttttttcagctattgctggggaacgttaagacacacataacatacgactttgtgctgataattctttctctaagtctattacta

SEQ ID NO: 110821 - DNA, 201 bp, Homo sapiens
caggagtgttgcagggcatagagagtgtggtggtgttctgaggtggctgagaacaagatcaaagccaggagcagaagatggtaaccaaggtccctctgccrtgagttgcagaacccggaatggcagggcaaggcaggggatgtagatcagccttccagcctccacaggaaaatggggagataacccagcatttccagtgcc

SEQ ID NO: 110822 - DNA, 201 bp, Homo sapiens
gacagagtaagactccatctcaaaaaaaaaaaaaaaaaaaagagaaaccattcttaacttccaggctgtacagaatcagatgatagtctccattggcctgtgggccacactttgcagacccctatcttagagcattcttaggaaaaagcttccaagtccccattatatatcctcttgcctttaaatgtgcaactctgagct

SEQ ID NO: 110823 - DNA, 201 bp, Homo sapiens
tagagagtgtggtggtgttctgaggtggctgagaacaagatcaaagccaggagcagaagatggtaaccaaggtccctctgccgtgagttgcagaacccggmatggcagggcaaggcaggggatgtagatcagccttccagcctccacaggaaaatggggagataacccagcatttccagtgcccggggaggcaggagggtg

SEQ ID NO: 110824 - DNA, 201 bp, Homo sapiens
taacttccaggctgtacagaatcagatgatagtctccattggcctgtgggccacactttgcagacccctatcttagagcattcttaggaaaaagcttccargtccccattatatatcctcttgcctttaaatgtgcaactctgagctaggtctgcatgcgaagctgtagtcagatcaccaccctctctgtgtgggcatgac

SEQ ID NO: 110825 - DNA, 201 bp, Homo sapiens
agagagtgtggtggtgttctgaggtggctgagaacaagatcaaagccaggagcagaagatggtaaccaaggtccctctgccgtgagttgcagaacccggamtggcagggcaaggcaggggatgtagatcagccttccagcctccacaggaaaatggggagataacccagcatttccagtgcccggggaggcaggagggtgg

SEQ ID NO: 110826 - DNA, 201 bp, Homo sapiens
ggggagaggggaagatggcattataggtagagggacagatgagcaaaggtccagaggtaaggaagtgtcagagggtggctgtaccagcagcacccagaagygcaggtgagccaaggcatgtgaggtggggaggcaagaggagagctgtgggctaagcttctgcgtgcctggtagaggaatttgaaacaaagtcaggaagca

SEQ ID NO: 110827 - DNA, 201 bp, Homo sapiens
tgtgatgggaataaaaaggaggatgggatgaactctgcctgagaggtataggggaaggattcacagagaaagtgacatttgggctgggtgctgaagtttgwgtgcagattagagttgatgggcttttcaagtcaaaggaatagcacctataaaggcgagggaatcgtctgtgtgcacacagcctgccatgtgtggaagtgt

SEQ ID NO: 110828 - DNA, 201 bp, Homo sapiens
gtgacacatagagccagagtcaagtaaaagttctgtctacaccttctacccagccccattttccatacagtcccccaaacgtctgcctctttctccatcartcatatccctggtggttaataattgcttctttaaaaggcacttggttgcctggggagtatgcatattacataagctatttagcgtcctaatcaagtttaa

SEQ ID NO: 110829 - DNA, 201 bp, Homo sapiens
ctactcaggaggctgaggtgggaggatcacttgagcccaggaggttgaggctgcagtgagctgagatggcaccactgcactccagcctgggtgacacagtragaccctgtccccaaacaaacaaacaaaaatttgaacaatcaaaaactgggcaaaataaatgattgtttcaaaagcaaagttatacagttcacttgaaat

SEQ ID NO: 110830 - DNA, 201 bp, Homo sapiens
ccccaaacgtctgcctctttctccatcagtcatatccctggtggttaataattgcttctttaaaaggcacttggttgcctggggagtatgcatattacatragctatttagcgtcctaatcaagtttaagttccctgctctgtattttcttgcagtgggaaacatttcccttttttctaaaaaagtgtggatttactttta

SEQ ID NO: 110831 - DNA, 201 bp, Homo sapiens
caaagaaagggctgtgtgtgtgtggccactttttactttacgagtgtcaccagtatttgctgtttgtagcaggtctacaactaacaactccatgtggcccrtttcctcactcatacattttgcatcaggtttactttggagcgcatatcaggaagttgccttactcaaagctagactttctcaagacttttttttttttta

SEQ ID NO: 110832 - DNA, 201 bp, Homo sapiens
ttactttggagcgcatatcaggaagttgccttactcaaagctagactttctcaagactttttttttttttaaatgggtgagataggtatttggttacacayactattttaaaagttcaggctgaaatgtctgtggctaggcaccatggtggtggttggagagaggagtagccaagagagtgggattccagggctcttactg

SEQ ID NO: 110833 - DNA, 201 bp, Homo sapiens
atgattaccctggaggtaagttctccactttgctggcctccccaggtaaggacagtcatgaagcctgtctccttgaaggccctgagagccacttgcagatwccgtacctgtttgcttgaaggcagggaggcaggcctgcatggtcgtctccttctcagggttacagccccaggaaaatcccagtgtgcggtttttagagcc

SEQ ID NO: 110834 - DNA, 201 bp, Homo sapiens
gccacttgcagattccgtacctgtttgcttgaaggcagggaggcaggcctgcatggtcgtctccttctcagggttacagccccaggaaaatcccagtgtgyggtttttagagccacacctgctgatctggagacagctgttttcctttctcagcatagccctcgggaagcttagcccactttgaggagttgattgcttttg

SEQ ID NO: 110835 - DNA, 201 bp, Homo sapiens
ttgttttggattttacagaatcgtgttacatgtagctccatagaagcagaaatgactcagtgcagaggatattaatacattaatagattcttaggaagggrcaagcccagcttgcagtcttatttacccagcaactcacaggttttatggtttgaatgaagctcattcatataacagaactgcagcctcaattcacagcac

SEQ ID NO: 110836 - DNA, 201 bp, Homo sapiens
attataattgtcttgattagcctgtcttcctactggactatgagctccttgaaagcaaagaacctgacttttatcttagcattcctggcactgagcataawgcctagaacagagaagccaggccaaggtgtgtgctgaagggatagaaacgaaactccagtactcagcattcgtgtgatcttcacagctcagctgtgttca

SEQ ID NO: 110837 - DNA, 201 bp, Homo sapiens
tagtagagaaggggtttcactatgttggccagactggtcttgaactcctgacctcaggcgatccaactgcctcggcctcccaaaatgctgggattacaggygtgagccaccatgcccagccaatttccatgcccatcttttcttcaccagccactgactttctctgagtccccagaatcctgcccatttcactccattgaa

SEQ ID NO: 110838 - DNA, 201 bp, Homo sapiens
ttgaacctggggttggggggtgggggtggcggaggttgcagtgagccaagatcgtgccattgcactctagcctgggcaacaagaatgaaacgcagtctccmaaaaaaaaaaaaaaaaagaaatttcttcccattgacatccattcttctgggtgaaaaggggacacagatttaaagacatacaatgggctacatgttttta

SEQ ID NO: 110839 - DNA, 201 bp, Homo sapiens
tttttaaatgggtgagataggtatttggttacacacactattttaaaagttcaggctgaaatgtctgtggctaggcaccatggtggtggttggagagaggrgtagccaagagagtgggattccagggctcttactgcttccaatttcacctgttatccctgataagatttcatgtgaaaaagaaaagaagtaggcagagag

SEQ ID NO: 110840 - DNA, 201 bp, Homo sapiens
ccaatttttgtggctcttgaatgtgtcatgcagttgtggggtcagtgctccgggtaagtccattagatcaagagtgctaattgtgtggttcagaacatccrtatttttcctgtcttttaaaatttggtctaattattctgttgaatacagagatgattgcgggtttctttcttccctgtagttttgtcaacttttgcattc

SEQ ID NO: 110841 - DNA, 201 bp, Homo sapiens
tggagtgcagaggcatgatctcggatcatagcagtctcaacctcctgggatcaagtgatcctctcacctcagctttcaagtagctggaagcacaggcatgyaccaccacgcccagctaatttttgtttatttttcatagagatgaggcctcactatgttgcccaggttggtctcaaactctctttccccagccatccctga

SEQ ID NO: 110842 - DNA, 201 bp, Homo sapiens
tgtttattgatttttgactgtattacaaattaaaatggaaaagtatgtaaaatatttatgtattaattcacttgaaaataacaataatgtctcattacatkgtaacattttttaagtgaaaaatgactgtcttttccaagacaaaaacactttcatgagaaggatggcattgtttgtgaatttttaaagtgcttggctaat

SEQ ID NO: 110843 - DNA, 201 bp, Homo sapiens
tcaagtacaggtggggacaggggaaggagcaaggacttggaatcctttccacagagtgggagtggagaccatggggctgccgagatttaaatggggaagaygaatattagtgactctggtccttagccagtgtgagaccctaactaacccctccacccaccagccccctgcacgaccacccagtgtgcttttcctcatgtc

SEQ ID NO: 110844 - DNA, 201 bp, Homo sapiens
ggtgcccgccaccacgcccagctaagtttttgtatttttagtagagatggggtttcaccgtgttagccaggatggtctcgatctcctgacctcgtgatctrcccacctcggcctcccaaagtgctgggattacaggcgtgagccaccacacctggcctatccactcctgatttttataccattgtagtcatgtatgttagt

SEQ ID NO: 110845 - DNA, 201 bp, Homo sapiens
tatatttttttttctgccaaactattcagtcctgtttttcatcttcataaacagaggggatataattcctttaaaatccgtgtctgataacctcagtcttygccattcttttcccattcgtttatttccattgtctattatttctgctgttttcattcatatgatcatgtttctttgcatacctggttattttttattgtg

SEQ ID NO: 110846 - DNA, 201 bp, Homo sapiens
ttcttcctgtagacatgatttttgttgttgttgctttaatcgagtgcttgggggcaacacaaatctgctatcatgtcattccggtctcaggaattgagacratgtgtgtcagtttattttggatacctttccttctatggtgtagccctttagaaatttcatccccaaggaaataaccaaagatgagcacaaaaatgcata

SEQ ID NO: 110847 - DNA, 201 bp, Homo sapiens
caaaaagaaaaaaagacaaaaacaacaacaacaacaaaaaaaaaaaccccaaaaaaaccttaacctttaagtttcacatggtgcagattactgcctatcayagcctcagctcttggagtgctcatggtcacaacggaatgtacagacatatccacggatggtcaggacacaaagaagactagaaagaagacacagatataa

SEQ ID NO: 110848 - DNA, 201 bp, Homo sapiens
acacagatataacatcggattacaattagaatctcagtgttggaaaaggacctcagagaccatccgggccaatctttaaccttggaagaatgccctctgarttaatctgttctcacgctgctaataaagacatatccaaggctgggtaatttgtaaagaaaagaggtttaatgaactcacagttccacatggctggggagg

SEQ ID NO: 110849 - DNA, 201 bp, Homo sapiens
accggaaagttggggttagtgtaattcttgtgtgtagatgggtccctggtcctggcgagtgatttctgagtgagtgaatgaacgggtgaacaaatagccaytggaatggggactgtttcccatggatgcaaagcctctgccaagcgatagacccatatgtaacttactaggttggtggagtcggaagtggtgtcagcttct

SEQ ID NO: 110850 - DNA, 201 bp, Homo sapiens
gacaagagagatctgtgtcatgctggttcctgggacatgagtttgctgcctctcccatctgcaggtgtagcatggatgctcaattccatttgggccaataytcactgagcacccactatgctgaagttgggagatacctgctgtcgaagtgcgttaattacaaacacgcatcattcaaccccagaaccgtgtttgaggaat

SEQ ID NO: 110851 - DNA, 201 bp, Homo sapiens
gccctgagtgggtaaggggccttctctgtgttcccacgataccactgcatgccctggtcattgcgcttcccagagtgtggcatgggaacccttctacataytctcctgactaggctgtgagcaacttgagggcatgtacagcaccagtcaattgtcccccatggccaggcacagtggctcacacctgtaatcccagcactt

SEQ ID NO: 110852 - DNA, 201 bp, Homo sapiens
tcatgggtgtctgtgctgcgggtacacgcagggctgagtgtgtgcatctgagtattcgtgtgcacgtgaaagtctgcgtatgtgagtttgtgcaaggaaaygaacatagcctgagctgtgaagatcacacgaatgctaagcactggagtttctactgtaaatctcaggtacgggtctaacccgacgggggtgaagctgctc

SEQ ID NO: 110853 - DNA, 201 bp, Homo sapiens
gtaaatctcaggtacgggtctaacccgacgggggtgaagctgctcccattgatgaaagactctgcatcactgtagcaggcagaaaaccagatcttgggggrcagcaagcaaataggggtcctcttccttgcgttccatgtctctgcgtttatcatgttctgatagccgcttgcaagtggcaggcctgtgtctctctgggct

SEQ ID NO: 110854 - DNA, 201 bp, Homo sapiens
actgtagcaggcagaaaaccagatcttggggggcagcaagcaaataggggtcctcttccttgcgttccatgtctctgcgtttatcatgttctgatagccgyttgcaagtggcaggcctgtgtctctctgggctacatcattgtgaccttttagcaggggccttcaaatctcaagccaaggatgtaatgatgctatttccct

SEQ ID NO: 110855 - DNA, 201 bp, Homo sapiens
aatggaaaatgacatgagagagtgctgcacagtgagggtgtcttggcttgtcatgggggtggggaagctccttccatgaaggaagagttgttatgctgtgrccatgagcccacaagcagagaggcctggaggaaatgaaggggaggggaaggggaaggtggtaagagacagatgagagaagggcttaaaaaatcctcagat

SEQ ID NO: 110856 - DNA, 201 bp, Homo sapiens
ctgagatgggtggattacttgagcctgggaggttgaggctgcagtaagccagaattgcaccactgcattcgagcccagggcaacagagtgagaccctgtcyaagaaaaaaaaaaaaaaaaagtctcctaaaatcagaagtgattcctaatggattttttttccctgttagattttaatttaacttaaaaatttcaccctaa

SEQ ID NO: 110857 - DNA, 201 bp, Homo sapiens
atttcctatcatgagaacagcacaggaaagacctgcccccatgattcaattacctcccactgagtccctcccacaacaagtgggaattatgggagctacarttcaagatgagatttgggtggggacacagccaaaccatatgactttcctataaggaaagtaggatattatagagtttggtatagctgcatttgacctgtc

SEQ ID NO: 110858 - DNA, 201 bp, Homo sapiens
acttctgcttaaatgcctcaagggattggtttcttactaatttttaagacagccagctcttctgtgggttagctcgggtagaaaagtttgtgagttactgkcatcaaacaagtaagggcattttaaggtgaagttaataaacagttggaaggagggcttttcagctctcaactctatgattggcaatttctggttccctac

SEQ ID NO: 110859 - DNA, 201 bp, Homo sapiens
tacaggcatgtaccaccacacccagctaatattttttatttttagtagagttgaggtcttgctctgttacccaggctagtctcaaactcctgggctcaagygatccttcctcctcagtctctggaaatgctgggattacaggtgtgagtcactgctcctggcctcttttttcttttttgaaaatgctttgtccatatgttt

SEQ ID NO: 110860 - DNA, 201 bp, Homo sapiens
ctaagtctcatttccagttcctccatgacgtggcaagtgaagacaggaatgaaaggaatgtaaagcagcttttctctgaagagaagaagagagagagacasagccaaggtacgctgaggtggagaagagggaagctggagggctctgtggtggaggaggttcttctcctaaggaatgaggtggtcgtgtgctgaggggtgt

SEQ ID NO: 110861 - DNA, 201 bp, Homo sapiens
ggaatgaaaggaatgtaaagcagcttttctctgaagagaagaagagagagagacacagccaaggtacgctgaggtggagaagagggaagctggagggctcygtggtggaggaggttcttctcctaaggaatgaggtggtcgtgtgctgaggggtgtggggaggagtggagagtagaggagagtggagctgtctgagagcca

SEQ ID NO: 110862 - DNA, 201 bp, Homo sapiens
ttgtttgaccccaggagagggaggttgcagggaaccgagatcgcactactgcactccagcgtgggtgacagagcaagactgtgtctcaaaaaaaaaaaaawaataataataacatgatattttaaggtgttaaagctctacattcatacatttgtaggaatagataaggggcaatcagatgtgtgcacaagtccttcctta

SEQ ID NO: 110863 - DNA, 201 bp, Homo sapiens
gtaaagcagcttttctctgaagagaagaagagagagagacacagccaaggtacgctgaggtggagaagagggaagctggagggctctgtggtggaggaggwtcttctcctaaggaatgaggtggtcgtgtgctgaggggtgtggggaggagtggagagtagaggagagtggagctgtctgagagccactgggagggctcag

SEQ ID NO: 110864 - DNA, 201 bp, Homo sapiens
tttggaaggccgaggcaggtggattgcttgaggtcaggggttcaagaccagcctggccaacatggtgaaaccctgtctccactaaaaatacaaaaaattamccgggcgtggtggtgcacacctgtagtcctagctactcaagaggctgaggcaggagaatcacttgaatccaggaggtggaggttgcagtgagctgagatc

SEQ ID NO: 110865 - DNA, 201 bp, Homo sapiens
tctcttcaccctcaagagccattctgtagaaagtcctcagggcatgaaagtgctttgccagggacctttgaggctaagtgtaaagcttttggaactggcartgtgccccagacttgtctaaagaatgggaacagtggcctgaaacaccaaatgtcaaaagcaatgtttgtttggataatatagaggattgattctgcccta

SEQ ID NO: 110866 - DNA, 201 bp, Homo sapiens
aaagtgatggaattcagacatgagccatgtgcctggcctcatttttaaaatttttaattaaaaaaattttttttaaatagagacagggtcttgctatgttrcccagactggtcttgatctcctggcctcaagcaatactcccacctcggtcccccatagtgctgaggttataggtgtgagccaccgtacgcagccatggtt

SEQ ID NO: 110867 - DNA, 201 bp, Homo sapiens
cacatgttcctgagtggtttctgagcacccagacgtttgaaaactatggccccacccgctgactgggagacaaagcaaacacctgccttggggaagagcargatgagaggtaggagggtgaagtggagagtggagggaggcacgaattgaggccagggctcctagtgcctctggagctcatatgaagggagaggtagaatc

SEQ ID NO: 110868 - DNA, 201 bp, Homo sapiens
tcccaggctgagggccagttctggggttagagcagttggcaggagaagcttactgaggcactgctccagggtcccagggtctgggtggtgagcggtcaagsttgagctgttgctgctgcttgcttctggaagaaaagataggagatagtctgaggcactggcaaaagctattcccaggcatagattttgaaatgttttttg

SEQ ID NO: 110869 - DNA, 201 bp, Homo sapiens
attatcctcctccctctgtttcttgtttgtctcctctgtgcagccttgaaatcctggaatttctctgtattcaggcttggacctccactgcctctccctcrttatgggttgaagtgtgctgccccattccattcatatgttgtagttctaatccggaggatctgagaatgtggctgtatttggaaacagggtctttgccga

SEQ ID NO: 110870 - DNA, 201 bp, Homo sapiens
tgaagtgtgctgccccattccattcatatgttgtagttctaatccggaggatctgagaatgtggctgtatttggaaacagggtctttgccgagataattarttaagatgagtttatagcagagtggggtgggcccctaatccaatatgattggtgtccttataaaaagggatttggacacagacacacacatgtgaatgtg

SEQ ID NO: 110871 - DNA, 201 bp, Homo sapiens
ttaattaagatgagtttatagcagagtggggtgggcccctaatccaatatgattggtgtccttataaaaagggatttggacacagacacacacatgtgaakgtgaaggcatagattggagtgatgcttctccaagccaaggaatgccaaagattgccagcaaccaccagcagccaagtaagagacctggaagattcttcct

SEQ ID NO: 110872 - DNA, 201 bp, Homo sapiens
gacccaaactctacaaaaaaaaaaaaaaagagagagagagacagagaaaaatttctttaaaaaaaattgctgagaagattaggaacaaggcaaggacattsttcctcaccactccatttcacatcatactggagtcctaactaatgccataagaaaaagaaatgaaaaccatactgattaggaaggaagacataaaatttt

SEQ ID NO: 110873 - DNA, 201 bp, Homo sapiens
aggccagggtgggtggatcacgaggttaggagttcaagaccagcctggccaagatggtgaaaccccgtgtctactaaaagtacaaaataattagccaggcrtggtggcaggtgcttgtaatcccagctacttgggaggctgaggcagagaattgtttgaacccaggaggtggaggctgcagcgagccaagattgcaccact

SEQ ID NO: 110874 - DNA, 201 bp, Homo sapiens
ctactaaaagtacaaaataattagccaggcatggtggcaggtgcttgtaatcccagctacttgggaggctgaggcagagaattgtttgaacccaggaggtrgaggctgcagcgagccaagattgcaccactgcactccagccttggtgataagagcaagactcgtctacaaaaaaagaaaaagaaaaaaaaaaagaaaatc

SEQ ID NO: 110875 - DNA, 201 bp, Homo sapiens
ccctgctctataattagggtcaatgggaaactgcaacaacacaacccaggcagaactacaaatggcccacactcttcaggaatgaaaatttgggtcactcyaccaggtaaagaaccacaaccagctgaggtgcttgctgaaggtaaagggaacatagaacaggtattctgtagtgtaggtagttataaatactggatacaa

SEQ ID NO: 110876 - DNA, 201 bp, Homo sapiens
tcgtccttcataactcagctggaaatcttctttcctagtcccccagtctggaagatgccttcctgtggttctggggcatgctcttaacctagcttcaattrtaattgtcttgattagcctgtcttcctactggactatgagctccttgaaagcaaagaacctgacttttatcttagcattcctggcactgagcataatgcc

SEQ ID NO: 110877 - DNA, 201 bp, Homo sapiens
aacacaggaagccctgtgttaaaggaatgcccgttttaaaggcacgtaagtggaatgctcatctcttcaccctcaagagccattctgtagaaagtcctcarggcatgaaagtgctttgccagggacctttgaggctaagtgtaaagcttttggaactggcagtgtgccccagacttgtctaaagaatgggaacagtggcct

SEQ ID NO: 110878 - DNA, 201 bp, Homo sapiens
cccaaagtgctgggattacaggcatgagccaccatacctgactgattctcagattctgaaatgacagttaagcccaggactcaagccagggacagaagcarataacctggttttggtgagaaggttatgcacttgcttctgaaaatgttgatgatgagactaagtcttatagtttcttgtgcacctcccttggtgcctaga

SEQ ID NO: 110879 - DNA, 201 bp, Homo sapiens
ggaggcaggcctgcatggtcgtctccttctcagggttacagccccaggaaaatcccagtgtgcggtttttagagccacacctgctgatctggagacagctsttttcctttctcagcatagccctcgggaagcttagcccactttgaggagttgattgcttttgtgggtgtttgattcttacaggcagtgtggtcttgtctg

SEQ ID NO: 110880 - DNA, 201 bp, Homo sapiens
taccacctgttacctcatggaggttatagtctagctagaaagatgaataaccaagcatctataataagagccaaaatatgtagatcgcttgcggtgtgtcygagatggctaagcactctgtcctcgttgagttctcaccgctccctccattcattccttagacattccctgtgtactaggaacggatctagggcttacaca

SEQ ID NO: 110881 - DNA, 201 bp, Homo sapiens
tgagaaagttctgtttcctccttcctttgcgcaggaccaaccctggccaaagaatcttccccctcctccttctttccctcccacctctcttccctccttcyctcccccttcccagcctggccatgaataaagctcataacgctacctgccgagcaagccgagtggagggaggcaaaggccaggctgaggatcagggtggcc

SEQ ID NO: 110882 - DNA, 201 bp, Homo sapiens
aaatgagaaaccccatcactctaatgtcttcatttgtattttgcctcttgtactatttctctctatagccgtagacaggtataattttatatgattgtagyatacatggaaataatttttttcttttctttgttttacctaatatgagatccctccccatattactgtgcatccttcgtaaagatcatttttaaatttgac

SEQ ID NO: 110883 - DNA, 201 bp, Homo sapiens
cctgtcctagcctcctatgtagttgggacaggtgctccctcagccaggctaaattttttttttttttttttttgagagatgggatctcactttgttgcccrggctgaccttgaactcctaggctcaaacatgaaacatattttatttaggaatttgttggcttgatgtataacttttaaatatttcaacctatggcatgtg

SEQ ID NO: 110884 - DNA, 201 bp, Homo sapiens
catgttggccacgctagtcttggactcctgacctcaagtgatctgccagcctccgcctcccgaaatgctgggattacaggcgtgagtcaccacacgcagcygggcacatttcttttctttttttatttttattttattttatttatttatttttttgagacggagtctctctctgtcgcccaggctagagtgtagtggcac

SEQ ID NO: 110885 - DNA, 201 bp, Homo sapiens
taatgtaacgcagcagctctgaaaatcctaaaacaccgccacttgctcccgtaaggaaatgccaaagacaggattcattttgatagtatttttaaggaatrtctattgtgtccactgagttgacgtgacgttgactatctattttggacactttatttctaatttttctccagaatgtagacaccatgatgagcatcttta

SEQ ID NO: 110886 - DNA, 201 bp, Homo sapiens
aaatcaagaagatctgtgatgggtaagagggagtgaatggctctttcttcagtgatttgggccaggattagataaagagatgtgcaatgccaaatgcacaygactgtggcttctagaggtcagtaaggctttagaataactttctcacataaaagtcagccccaactgatttttaatagttgtaagaatatgaatagggag

SEQ ID NO: 110887 - DNA, 201 bp, Homo sapiens
tctttcttcagtgatttgggccaggattagataaagagatgtgcaatgccaaatgcacacgactgtggcttctagaggtcagtaaggctttagaataactktctcacataaaagtcagccccaactgatttttaatagttgtaagaatatgaatagggagaacttgaatatgcaaaatgtgagggtaactaaaagtggaca

SEQ ID NO: 110888 - DNA, 201 bp, Homo sapiens
aatagggagaacttgaatatgcaaaatgtgagggtaactaaaagtggacatgttccccatttcagtctattccatctgagacttttcatcagctgctccasagtaatccaactgcatggctaacttgttttggattttacagaatcgtgttacatgtagctccatagaagcagaaatgactcagtgcagaggatattaata

SEQ ID NO: 110889 - DNA, 201 bp, Homo sapiens
aagtgacgtactgggaacccttatgactgggactccttttccagtggccaaagacgcagttattctaggataggctggccatctaactaaagtcagcaaaygatgtcttagcagaaaaggggatgcagaatgctttgcagcaagaactcacctgtttcctttggaatatattaaacacaggtttcgagccactgtctaccc

SEQ ID NO: 110890 - DNA, 201 bp, Homo sapiens
ttccttcaccaatacaatgagggccatatcttggcatcttcacagtcctgtggttattgtgtgggaaagacaccagtacacagaacttagaagactcgatkcttggtgtcctaagctgtggaatcttgctaccttggttaataaaataaaggtgtaggctgggtttggtggctcacgcctgtaatcccagcactttgggag

SEQ ID NO: 110891 - DNA, 201 bp, Homo sapiens
cctgattccatctgcaaagaccctctttccaaaaaggccatattcacaggtatcagagttcaggactcttttatgtggacaattcaacccataacaatagracaatgaggaatttagaagaaaaggaagatacaatctctgcctaagggttttagcctctagcgggggagataaactgctcaggagagttcaaggccaggt

SEQ ID NO: 110892 - DNA, 201 bp, Homo sapiens
ggacaatgaggaatttagaagaaaaggaagatacaatctctgcctaagggttttagcctctagcgggggagataaactgctcaggagagttcaaggccagrtgacagccacaggtcaaaggagcctgccagagcagaggaagctgctgtggcctgtgacactccatttttggcaccttgtcaaacagctctgtgaaggttc

SEQ ID NO: 110893 - DNA, 201 bp, Homo sapiens
tgaataatttcacggggtgggaggagtgaagccattaggttgaggagtgggtggcatgcagctggttcggccgatggggaactagctgggtggcatatctrgtgacggcagatctcgtggtatctgaagaaaccctctctgagcaggcggcattgatagcatgggaaggttgggggcgggaggaagggtttttcaggcgga

SEQ ID NO: 110894 - DNA, 201 bp, Homo sapiens
gggaactagctgggtggcatatctggtgacggcagatctcgtggtatctgaagaaaccctctctgagcaggcggcattgatagcatgggaaggttgggggmgggaggaagggtttttcaggcggaggaatctgaaggtaaaggccttgcagtaggaatgggttagaaggtgggagctttctttatccccttcgtacagata

SEQ ID NO: 110895 - DNA, 201 bp, Homo sapiens
gctactcaggaggcagaggcaggagaatcgcttgaatccaggaggcggagattgcagtgagctgagactgcaccactgcactccagccttggtgacagagygagatcctgtctcaaaaaatagataaaataaaataaaatgaaaggatagaccagataccctttatccaagcagtgcatggtgattgttcttctccagcct

SEQ ID NO: 110896 - DNA, 201 bp, Homo sapiens
gttcacatggtctcccttcctcttttggacatttaaaagtagagtgaggccaggcgcggcggctcatgcctgtaaccccagcactttgggaggccgaggcrggcggatcacgaggtcaggagatcgagaccatcctggctaacacggtgaaaccccgtccctactaaaaatacaaaaaaattagccgggtgtggtggcaca

SEQ ID NO: 110897 - DNA, 201 bp, Homo sapiens
ataacctcatttcggggttatgcagctggaagaggcaatacaagttaataaagtcccttcccaacattgtcctggctgtctttgaatatcaaaggatagcyacacacacacacacacacacacacacacacacacacacacacactcatcccgttgctttgtacgtcatcgggggaaaatcctgttgcataaaaatggaca

SEQ ID NO: 110898 - DNA, 201 bp, Homo sapiens
gaacctgagaggcagaggttgcagtgagccaagattgcgccactgcactccagcctggacaacaagagcaaaactctgtctcaaaaaaaaaaaaaaaaaaagaagaagaagaagaaaaaatgccttgtaatcaggttttcataaggagtgagtgtagataagaatcagaaacaggtgcattactgttgggcaccattttgt

SEQ ID NO: 110899 - DNA, 201 bp, Homo sapiens
attgcttgaacctgagaggcagaggttgcagtgagccaagattgcgccactgcactccagcctggacaacaagagcaaaactctgtctcaaaaaaaaaaawaaaaaaagaagaagaagaagaaaaaatgccttgtaatcaggttttcataaggagtgagtgtagataagaatcagaaacaggtgcattactgttgggcacc

SEQ ID NO: 110900 - DNA, 201 bp, Homo sapiens
ttattgccactctgatttcttccatttcttttagcctcattatcaacttaatattttatttatttatttatttatttatttatttatttatttatttatttttatttttggagatggagtcccactctgtcacccaggctggagtgcagtggcacgatcttggctcattgcgacctccgcctcctgggttcaagtgattct

SEQ ID NO: 110901 - DNA, 201 bp, Homo sapiens
tttattgccactctgatttcttccatttcttttagcctcattatcaacttaatattttatttatttatttatttatttatttatttatttatttatttatttttatttttggagatggagtcccactctgtcacccaggctggagtgcagtggcacgatcttggctcattgcgacctccgcctcctgggttcaagtgattc

SEQ ID NO: 110902 - DNA, 201 bp, Homo sapiens
ctttattgccactctgatttcttccatttcttttagcctcattatcaacttaatattttatttatttatttatttatttatttatttatttatttatttatttttatttttggagatggagtcccactctgtcacccaggctggagtgcagtggcacgatcttggctcattgcgacctccgcctcctgggttcaagtgatt

SEQ ID NO: 110903 - DNA, 201 bp, Homo sapiens
actttattgccactctgatttcttccatttcttttagcctcattatcaacttaatattttatttatttatttatttatttatttatttatttatttatttatttttatttttggagatggagtcccactctgtcacccaggctggagtgcagtggcacgatcttggctcattgcgacctccgcctcctgggttcaagtgat

SEQ ID NO: 110904 - DNA, 201 bp, Homo sapiens
atataattcgggctatgctctttgaggtttctgaaagtcacctctgtgctgaggtgctcttgtctcctggaaatccccaggccagggggcattatattgcwaagtgacaggtagtattgggcttgtgagatgcttcggtggcctcatggctctcgttaatcttagagccagcatgtctctcttacagtgtgtctcttacag

SEQ ID NO: 110905 - DNA, 201 bp, Homo sapiens
catcctcatccacttcatcaacatgtttctgtttaactacagtgactcttccaacgcacccctctacaaacatcaggtatttctgctatttttttttttttactcttcttttatttacttgattatgtcaaatttctctcctactctttttttttttttgagaaagagtcttgctctgtcacccaggctggagtgcagtgg

SEQ ID NO: 110906 - DNA, 201 bp, Homo sapiens
aggccagggggcattatattgctaagtgacaggtagtattgggcttgtgagatgcttcggtggcctcatggctctcgttaatcttagagccagcatgtctstcttacagtgtgtctcttacagaggccatgtgtgctgaaaaagattaccctgtttgttgtatcatcaaaacataaaaatgattccattaaataaattctg

SEQ ID NO: 110907 - DNA, 201 bp, Homo sapiens
ttggttcttgcagaaggatgtgattagcttgtttgaataatttcacggggtgggaggagtgaagccattaggttgaggagtgggtggcatgcagctggttyggccgatggggaactagctgggtggcatatctggtgacggcagatctcgtggtatctgaagaaaccctctctgagcaggcggcattgatagcatgggaag

SEQ ID NO: 110908 - DNA, 201 bp, Homo sapiens
ggaggagtgaagccattaggttgaggagtgggtggcatgcagctggttcggccgatggggaactagctgggtggcatatctggtgacggcagatctcgtgktatctgaagaaaccctctctgagcaggcggcattgatagcatgggaaggttgggggcgggaggaagggtttttcaggcggaggaatctgaaggtaaaggc

SEQ ID NO: 110909 - DNA, 201 bp, Homo sapiens
accactgcactccagccttggtgacagagcgagatcctgtctcaaaaaatagataaaataaaataaaatgaaaggatagaccagataccctttatccaagsagtgcatggtgattgttcttctccagcctgaggcccagtcgaatttgtggcctgtaatgcaggggcctcctgggttgagggtccctgcgagcaaactgct

SEQ ID NO: 110910 - DNA, 201 bp, Homo sapiens
ttgttcttctccagcctgaggcccagtcgaatttgtggcctgtaatgcaggggcctcctgggttgagggtccctgcgagcaaactgctggtggtgtgtggkgcatgtgaatggtggagaaacagacaaaagatgggtgtggagaagagtatagaaagcacctagagagagaaagctgatcttgtgttccatcaaactttgt

SEQ ID NO: 110911 - DNA, 201 bp, Homo sapiens
ccttaaggaatgtcttcccttctggctgcctaggttcatagccggtgtgatcaacagggagaggatggcttcctttgagcggttactgtggcgaatctgcygaggaaacgtgtacttgaagttcagtgagatggacgcccctctggaggatcctgtgacggtgggaaccttgggctgcaaaaactttctctgagacttccc

SEQ ID NO: 110912 - DNA, 201 bp, Homo sapiens
tgaggcccagtcgaatttgtggcctgtaatgcaggggcctcctgggttgagggtccctgcgagcaaactgctggtggtgtgtggtgcatgtgaatggtggrgaaacagacaaaagatgggtgtggagaagagtatagaaagcacctagagagagaaagctgatcttgtgttccatcaaactttgtgatttttttttttttg

SEQ ID NO: 110913 - DNA, 201 bp, Homo sapiens
tttttttttgactttgtgatttttgacaagtcacttagcttctctaagcctcagcacatctgtaaagtggggaataagaatgcctactcataggctgggcrcagtggctcatgcccataatcccaacactttgggaggccgaggtgggaggattgcttgaaaccaggagttcgagaccagcccgggcaatatagcgagacc

SEQ ID NO: 110914 - DNA, 201 bp, Homo sapiens
tatattttttctaactctgatgtttttgcctgattatgaaagcaatacataatcactgtaaaaattagaaaaatgcaaccatctaatgaccgagagaaaartcaccatgaatgcttttggatatctttccaatttgtttgtgcttatccaccaatttttcaaaaattggcatcaagtaatgcatactatttgtagtgtttt

SEQ ID NO: 110915 - DNA, 201 bp, Homo sapiens
tgagaaagcactttattcttctcagcagacatagtcagacagggaatcaactttacaatgacaagacgcaaaatgagtatatatctgacttgtcataaatrtagcagccatgggaggccagttcagtgcttatttcctggaagcacctgagacaacagccacctgctttcaagtcccttcctaagcagatgaggccttgct

SEQ ID NO: 110916 - DNA, 201 bp, Homo sapiens
ctacaatgactgcttctccaagtccttgaacatctttggctcttcttggagtgtccaacccatgttcagaaacggcacatggaagtgagttgacagacagrgatggtgtagtcgctggccatccaggtggcctcagtgactgttttcatggttgggggagtctacacctaggtctactcagaggtgcacttgaaaattcaa

SEQ ID NO: 110917 - DNA, 201 bp, Homo sapiens
ggtggttaataattgcttctttaaaaggcacttggttgcctggggagtatgcatattacataagctatttagcgtcctaatcaagtttaagttccctgctytgtattttcttgcagtgggaaacatttcccttttttctaaaaaagtgtggatttacttttatgtttgctttgttttactgcatagaattgacgcttttta

SEQ ID NO: 110918 - DNA, 201 bp, Homo sapiens
aaaaaggtatttgcttcattttatgtttgttatatctatctcagtcagctagatttgagctaagcaaaacgatacttcctcgcagcctgtagatataaagsggttttgaggagatacaacacatgcccgttcatgtaaagctgttcatttctattggcccagtgcatgctgccaccaggtggcggccttgtgctccaaatg

SEQ ID NO: 110919 - DNA, 201 bp, Homo sapiens
cacctccattcaagagatggtcctataatggcattatttgccccttctccacctctccttcatgaaatcctacagacctaatacataaacaatttgttctsacggacttcaggtgatatgaacaggggtcctgtctattagcctctcctacaacctgggtccctgcagaatgtggcctgggaacctctccactagagggcc

SEQ ID NO: 110920 - DNA, 201 bp, Homo sapiens
acatcattctgcaatttatccctgagatgatttttatcctgtgtctgtttggatacctggttttcatgatcattttcaaatggtgctgctttgacgtccaygtatctcagcacgcccccagcatcctcatccacttcatcaacatgtttctgtttaactacagtgactcttccaacgcacccctctacaaacatcaggtat

SEQ ID NO: 110921 - DNA, 201 bp, Homo sapiens
gggaggccgaggcaggcggatcacgaagtcaggaattcgagaccagcctggccaacatggtgaaaccctgtctctactaaatatacaaaaattagccgggkgtggtggtaggtgcctgtaatcccagctacttgggaggctgaggcacgagaatcgcttgaatccgggacgcagaggttgcattgagctgagattgtgcca

SEQ ID NO: 110922 - DNA, 201 bp, Homo sapiens
aaatgtgcaactctgagctaggtctgcatgcgaagctgtagtcagatcaccaccctctctgtgtgggcatgacctttgctttagacgttacttctagaccrtggttctctctgactcttttgtgcaaaagcactttccagtatttcctttcaattttcttttctatgcatccatacaggattgctgtttgctgggggggtg

SEQ ID NO: 110923 - DNA, 201 bp, Homo sapiens
gagtgtggcatgggaacccttctacatattctcctgactaggctgtgagcaacttgagggcatgtacagcaccagtcaattgtcccccatggccaggcacrgtggctcacacctgtaatcccagcactttgggaggctgaggcaggcagattgcttaaggccaggagttccagaccagcctgggcaacatggtgaaacccc

SEQ ID NO: 110924 - DNA, 201 bp, Homo sapiens
ctaacgttcccttgatgttctatcttgtgtatgtgtgtgtcttccacccccagatacttcagaagaactctcaacatcattctgcaatttatccctgagaygatttttatcctgtgtctgtttggatacctggttttcatgatcattttcaaatggtgctgctttgacgtccatgtatctcagcacgcccccagcatcctc

SEQ ID NO: 110925 - DNA, 201 bp, Homo sapiens
tcacacctgtaatcccagcgctttggaaggccgacaggtggatcacctgaggtcaggagttcaagaccagcctggccaacatggtgaaagcccatctctastaaaaatacaaaaattagccaggcatggtgtcgggcacctgtaatcccagctacttaggaggctggggcaggggaatcccttggacctggaggcagaggt

SEQ ID NO: 110926 - DNA, 201 bp, Homo sapiens
agcaaggacttggaatcctttccacagagtgggagtggagaccatggggctgccgagatttaaatggggaagacgaatattagtgactctggtccttagcyagtgtgagaccctaactaacccctccacccaccagccccctgcacgaccacccagtgtgcttttcctcatgtcagtatcatcgatatcatttggggcagg

SEQ ID NO: 110927 - DNA, 201 bp, Homo sapiens
gatcagtgcaaattagcacctgactgtgtgagcacgtgtgtgtgtgtgatggagggagcgagatgattgtgtctgaggttgtgtctggttggatgttggcsccttaacagaagcaaagaagtttggaggaggaagtcatttagcagaaaaggtgagaaagccattgtgcccttgtcgcctttgacatgtcccagagcaaac

SEQ ID NO: 110928 - DNA, 201 bp, Homo sapiens
tttaggcgataggcagcctttgaagattttaaagcaggagagtaacatgagtaaaatagtgctttttgtttgttttattaaaagagtgcttgagcaatctrggtgttagataaacggagaggggagaggctggcagagatgctgaggcttggagctagggtgatagctgtgggaatcggaggaaagattccgaaaggagaa

SEQ ID NO: 110929 - DNA, 201 bp, Homo sapiens
tcccatctgcaggtgtagcatggatgctcaattccatttgggccaatattcactgagcacccactatgctgaagttgggagatacctgctgtcgaagtgcsttaattacaaacacgcatcattcaaccccagaaccgtgtttgaggaatggcttgggaggataaagcactgtgggtttcaacagtggaggccacatctgct

SEQ ID NO: 110930 - DNA, 201 bp, Homo sapiens
gctaatttttgtttgtttgtttgtttgttttgagatggagtttcacttttgttgcccaggctggagtgcaattgtgcgatctcggctcgccacagcctccrcctcctgggttcaagtgattcttctgcctctgcctcctgagtagctgggattacaggcataagccaccatgccatgctgggctaattttttaaaaaagct

SEQ ID NO: 110931 - DNA, 201 bp, Homo sapiens
caagattctaggaatctgggagaatggaggctctgctgaaggggcagggagtttgtggaggggacctggctttgtggagagttgatgaattcaggattagrctcctggattttgtggggttggtgacacattggagtttgaaagtctaagcaggcaattaggaaaaaattggggaagggccagagccatttggaagagggg

SEQ ID NO: 110932 - DNA, 201 bp, Homo sapiens
gtcacaccttctctcacctctctagaagggaagccaaaccgttggctgaggaaggaagggaggggcaagctgtgcccttctcccctgagcgcaaatattgyccttattgagaaacaaggggaggacaagagagatctgtgtcatgctggttcctgggacatgagtttgctgcctctcccatctgcaggtgtagcatggatg

SEQ ID NO: 110933 - DNA, 201 bp, Homo sapiens
actacaggcacgtgccatgccatgctgggctaatttttgtttgtttgtttgtttgttttgagatggagtttcacttttgttgcccaggctggagtgcaatkgtgcgatctcggctcgccacagcctccacctcctgggttcaagtgattcttctgcctctgcctcctgagtagctgggattacaggcataagccaccatgc

SEQ ID NO: 110934 - DNA, 201 bp, Homo sapiens
gctctgctgaaggggcagggagtttgtggaggggacctggctttgtggagagttgatgaattcaggattaggctcctggattttgtggggttggtgacacrttggagtttgaaagtctaagcaggcaattaggaaaaaattggggaagggccagagccatttggaagagggggatgaattgagaaagtggagaggaggaaa

SEQ ID NO: 110935 - DNA, 201 bp, Homo sapiens
caatctccctgcttcagccttccaagcagctgggactacaggcacgtgccatgccatgctgggctaatttttgtttgtttgtttgtttgttttgagatggrgtttcacttttgttgcccaggctggagtgcaattgtgcgatctcggctcgccacagcctccacctcctgggttcaagtgattcttctgcctctgcctcct

SEQ ID NO: 110936 - DNA, 201 bp, Homo sapiens
ctaggtatgtaagtaacttaatcttcctgaggttatgataaattaccttatctgtaaaatgagaataactatatctcatagagttttcagtagaactaaaygagataaacacatctaaattgcttagtatgtacttggtacttaactattaacattttaaaattttctttttatttatttatttatttagagacagagtct

SEQ ID NO: 110937 - DNA, 201 bp, Homo sapiens
tagaaagcacctagagagagaaagctgatcttgtgttccatcaaactttgtgatttttttttttttgactttgtgatttttgacaagtcacttagcttctstaagcctcagcacatctgtaaagtggggaataagaatgcctactcataggctgggcacagtggctcatgcccataatcccaacactttgggaggccgagg

SEQ ID NO: 110938 - DNA, 201 bp, Homo sapiens
gcgagactctgtctcaaaaaaataaaaataaaaataaaaaaaacagcagccctaactcctaggattgcttggcaaatgaaattatgtttacatgtaaaacygccagaacagagtcttatgcacaaacgtggtaaatgctccttgaatattagttcctcttatgttatttcttcctaggtatgtaagtaacttaatcttcct

SEQ ID NO: 110939 - DNA, 201 bp, Homo sapiens
tatgggaatacaattcaagatgaaatttgggtgggacacaaccaaaccatatcaatgtctgtgcctatgttagtttgtatcatatatatatatatatatatatatatatatatatatatatatatatatatgggcttactttttacataacacaaatttctacagtgcatttactgactgcgtttggcatctatttgtgaa

SEQ ID NO: 110940 - DNA, 201 bp, Homo sapiens
ggtcctgattcctctggatgaagccctgtgactagttccacaaggccagctgcccttcagtgcagaggttgtctgttggggattgcacccatcagatgtcrtagttaatgtcatgcttctacggccatgccccttctcatgagttcagttcctagttgtgttctctttccctacccaagcatcaataagaaaaagaaaagg

SEQ ID NO: 110941 - DNA, 201 bp, Homo sapiens
gcccggccgagatgagttttgaaacttgttcaatctgcataatttcgccagcctaccaacatgaaattccatttcccatagagtatgattgtgaaaggccygaattaactgtcttgttaccactctgcagacatgggtatgaatgctgttctcttatgcacctgcaaatgtcttcttccccaattcaagactctttggtct

SEQ ID NO: 110942 - DNA, 201 bp, Homo sapiens
agccctgtgactagttccacaaggccagctgcccttcagtgcagaggttgtctgttggggattgcacccatcagatgtcgtagttaatgtcatgcttctayggccatgccccttctcatgagttcagttcctagttgtgttctctttccctacccaagcatcaataagaaaaagaaaaggctgggcgtagtggctcacgcc

SEQ ID NO: 110943 - DNA, 201 bp, Homo sapiens
ggattacaggtgtgagccaccgtgcccggccgagatgagttttgaaacttgttcaatctgcataatttcgccagcctaccaacatgaaattccatttcccrtagagtatgattgtgaaaggcccgaattaactgtcttgttaccactctgcagacatgggtatgaatgctgttctcttatgcacctgcaaatgtcttcttc

SEQ ID NO: 110944 - DNA, 201 bp, Homo sapiens
gtgactagttccacaaggccagctgcccttcagtgcagaggttgtctgttggggattgcacccatcagatgtcgtagttaatgtcatgcttctacggccaygccccttctcatgagttcagttcctagttgtgttctctttccctacccaagcatcaataagaaaaagaaaaggctgggcgtagtggctcacgcctgtaat

SEQ ID NO: 110945 - DNA, 201 bp, Homo sapiens
gaggttgcagtaagctgagatcacaccactgcactccagcttgggtgatacagagagactcttctcaaaaaaaaaaaaaaaaaaaaagaaaaagaaaagcrggagttgcctttcctacctctccagttcctgcagtcctgttcctcagagataaccactttaacagaacacgtctgtattagtcccttttcatgctggtga

SEQ ID NO: 110946 - DNA, 201 bp, Homo sapiens
cagggcattctgttgtctctcttttttttttttcctgagacaaggtctcactctgtcacccaggctggagtgcagtggtgcaatcttcgttcactgcagcrtcgacctccctggctcaagcgatcctcccacctcagcctcctgagtagctgggactagagatgcatgccacgaaggccagctaagtttattttgtgtaga

SEQ ID NO: 110947 - DNA, 201 bp, Homo sapiens
caagcggttctcctgcctcagcctcctgagtagttgggattacaggcacccgccaccatgcccagctaatttttgtattttggtgtagagacagggtttcrccaggttgaccagactggtctcgaactcctgagctcaagtgatacacctgcctcggcctcccagattatcttttcacgtaggatttttctcccctgtttc

SEQ ID NO: 110948 - DNA, 201 bp, Homo sapiens
aaattatgggaatacaattcaagatgaaatttgggtgggacacaaccaaaccatatcaatgtctgtgcctatgttagtttgtatcatatatatatatatatatatatatatatatatatatatatatatatatatgggcttactttttacataacacaaatttctacagtgcatttactgactgcgtttggcatctatttg

SEQ ID NO: 110949 - DNA, 201 bp, Homo sapiens
tggaaattatgggaatacaattcaagatgaaatttgggtgggacacaaccaaaccatatcaatgtctgtgcctatgttagtttgtatcatatatatatatatatatatatatatatatatatatatatatatatatatgggcttactttttacataacacaaatttctacagtgcatttactgactgcgtttggcatctat

SEQ ID NO: 110950 - DNA, 201 bp, Homo sapiens
gcagtcctgttcctcagagataaccactttaacagaacacgtctgtattagtcccttttcatgctggtgataaagacatccctgagactgggtaatttatraagaaaaagattgtgtggggaggccacacaatgatggtggaaagtgaaaggcacatcttacatggcggcaggcaagagagagaatgagagccaggtgaaa

SEQ ID NO: 110951 - DNA, 201 bp, Homo sapiens
gaatctgggaagcagaggttgcagtaagctgagatcacaccactgcactccagcttgggtgatacagagagactcttctcaaaaaaaaaaaaaaaaaaaaagaaaaagaaaagcgggagttgcctttcctacctctccagttcctgcagtcctgttcctcagagataaccactttaacagaacacgtctgtattagtccct

SEQ ID NO: 110952 - DNA, 201 bp, Homo sapiens
tacttgaatctgggaagcagaggttgcagtaagctgagatcacaccactgcactccagcttgggtgatacagagagactcttctcaaaaaaaaaaaaaaaraaaaagaaaaagaaaagcgggagttgcctttcctacctctccagttcctgcagtcctgttcctcagagataaccactttaacagaacacgtctgtattag

SEQ ID NO: 110953 - DNA, 201 bp, Homo sapiens
aaattgtctgtcacatcagagagcatgaggggagaatgagctatggctgtcttcttcgttctgttatttacttctttcctgtgttactgagctcataaccmaattgtccttttttttttttctttaaggctgtcccttctctaaactatgatgctaccagagtaacctgcctctatggctcctcactgaatccaggttgtt

SEQ ID NO: 110954 - DNA, 201 bp, Homo sapiens
gctttaacctgggaggtggaggttgcagtgagctgagatcatgccactgcactccagcctaggcaaccagagtgagagcccatctcaaaaaaaaaaaaaaagtaaaaataccaaaattagccaggcatggtagcatatgcttgtgatcccagctactcgggaggctgaggcaggagaagtacttgaatctgggaagcagag

SEQ ID NO: 110955 - DNA, 201 bp, Homo sapiens
aaccccatctctaataaaaatacaaaaattagccaggtgtggtggtgcatgcctgtagtcccagccacttgggaagctgaggcaggaaaatcgcttgaacycggaagacagaggttgcagtaagctgagatgctcctgaccctgcattccagcttggccgacagagggagactccatctccaaaaaaaaaaaaaaaaaaaa

SEQ ID NO: 110956 - DNA, 201 bp, Homo sapiens
gtcacatcagagagcatgaggggagaatgagctatggctgtcttcttcgttctgttatttacttctttcctgtgttactgagctcataaccaaattgtccytttttttttttctttaaggctgtcccttctctaaactatgatgctaccagagtaacctgcctctatggctcctcactgaatccaggttgtttcttcaact

SEQ ID NO: 110957 - DNA, 201 bp, Homo sapiens
ttctacctcatttctgatgtggtacaaatcctgatctcccttccttttccttccctttccccttctgtcccctctcccccttctcccttttttttttttttcctttcaacagagtctcactctgttgcccaggctggagtgcagtggtacaatcatggctcactgcagccttgacctcccaggctcaaggcagtcctcctg

SEQ ID NO: 110958 - DNA, 201 bp, Homo sapiens
aaaagaaaatggcatttggcctgggccttgaaggatggctagaattttgacagggggagaggggaagatggcattataggtagagggacagatgagcaaargtccagaggtaaggaagtgtcagagggtggctgtaccagcagcacccagaagtgcaggtgagccaaggcatgtgaggtggggaggcaagaggagagctgt

SEQ ID NO: 110959 - DNA, 201 bp, Homo sapiens
gaggccaaagtgggaggattgcttgagcccaggaattcaagaccagcctgggcaatatagggagaccctgtctctacataaaatgaaaaaaaaaaaaaaaattagctgggcagtggcacatgcctgtgcttccagctacttgggaggctgagacaggaagatcatttgagcctgggaggttgaggctgcaatgaaccgtga

SEQ ID NO: 110960 - DNA, 201 bp, Homo sapiens
cttgaatccaggaggtggaggttgcagcgagccgagatcacaccattgcactccagcctgggcaacagagcaagactccaactgaaaaaaaaaaaaaaaaagcagatgaggaaatggttggttttgtaatgctgtctccctgtatttgtcctgtggctgacagagttgggggcaggggacacctggtaaggatatgtgggt

SEQ ID NO: 110961 - DNA, 201 bp, Homo sapiens
ccatcatgaccacagtgcaatctaaaacagcccctcccacatttaacaggaccaataaattcacagctggcttccagaatattgttgatgcctatggtgtyggcagctaccgggagataaacccaggtaaagatctgatgaactgcacgactgggtagcttgaaagtgaaaactggtaagatggacccctgaggtgaccga

SEQ ID NO: 110962 - DNA, 201 bp, Homo sapiens
gggctgttcacaggcatgggcatactgccctacagcctcaaactcctgggctcaggtgatcctcccatctcagcctcccaagtggctaggactacaggcaygcgccaccatgcccagctccactctgctagactgtagataccacctgttacctcatggaggttatagtctagctagaaagatgaataaccaagcatctat

SEQ ID NO: 110963 - DNA, 201 bp, Homo sapiens
agcgcaaatattgtccttattgagaaacaaggggaggacaagagagatctgtgtcatgctggttcctgggacatgagtttgctgcctctcccatctgcagktgtagcatggatgctcaattccatttgggccaatattcactgagcacccactatgctgaagttgggagatacctgctgtcgaagtgcgttaattacaaac

SEQ ID NO: 110964 - DNA, 201 bp, Homo sapiens
aactgctcaggagagttcaaggccaggtgacagccacaggtcaaaggagcctgccagagcagaggaagctgctgtggcctgtgacactccatttttggcaycttgtcaaacagctctgtgaaggttctctgttttcctgtgtgttgttttttgtataggtcataacacaaacagagtctcaccgccagcgcctgctgcagg

SEQ ID NO: 110965 - DNA, 201 bp, Homo sapiens
ctcagcctcctgagtagttgggattacaggcacccgccaccatgcccagctaatttttgtattttggtgtagagacagggtttcgccaggttgaccagacyggtctcgaactcctgagctcaagtgatacacctgcctcggcctcccagattatcttttcacgtaggatttttctcccctgtttccttccagcaatttgat

SEQ ID NO: 110966 - DNA, 201 bp, Homo sapiens
tcagcctcctgagtagttgggattacaggcacccgccaccatgcccagctaatttttgtattttggtgtagagacagggtttcgccaggttgaccagactrgtctcgaactcctgagctcaagtgatacacctgcctcggcctcccagattatcttttcacgtaggatttttctcccctgtttccttccagcaatttgata

SEQ ID NO: 110967 - DNA, 201 bp, Homo sapiens
actccatctcaaaaaaaaaaaaaaaaaaaagagaaaccattcttaacttccaggctgtacagaatcagatgatagtctccattggcctgtgggccacactktgcagacccctatcttagagcattcttaggaaaaagcttccaagtccccattatatatcctcttgcctttaaatgtgcaactctgagctaggtctgcatg

SEQ ID NO: 110968 - DNA, 201 bp, Homo sapiens
cctcctgagtggctgggactacaggtgcacgccaccacgcctggctaatttttgtatttttagtagagacaggatttcaccatgttggccaggctgctctygaactcatgacctcaagcaatctacctgctttggcctcgcaaaatgctgggattacaggtgtgagccaccgcacctggcctctctcctactcttgagtgt

SEQ ID NO: 110969 - DNA, 201 bp, Homo sapiens
ggcgagggaatcgtctgtgtgcacacagcctgccatgtgtggaagtgttcctgcgcatgaatgggcctggtaagggtgaggggtggactccagctctgtgkaaagacatagaaggcgtgagtaagccccaaggaaagatttcctagtggagtgtaacagcccaggggaggcacttttttctaattggctctaagatataaa

SEQ ID NO: 110970 - DNA, 201 bp, Homo sapiens
gtgcgtcaggttggggaaaccaccgtctgccccagaccctgacccaggacccgcctggaggaagctggggtaagaagggtgttgatgctgtgcttttgatmtgcataaagtgaatgccttgggtctctggtctatgttcacttggctgtagttactagacagggcagtaggagagctttgaattcatcttggtgtcaaaag

SEQ ID NO: 110971 - DNA, 201 bp, Homo sapiens
taacgcagcagctctgaaaatcctaaaacaccgccacttgctcccgtaaggaaatgccaaagacaggattcattttgatagtatttttaaggaatgtctawtgtgtccactgagttgacgtgacgttgactatctattttggacactttatttctaatttttctccagaatgtagacaccatgatgagcatctttatgcat

SEQ ID NO: 110972 - DNA, 201 bp, Homo sapiens
ttgacatatgacagtcatagtgggagagaaagtaaaagcatctggaaaaagatgagcgtggacgccgaaggtcaccaaagggaagtcatgagattagagcrgattcctgattctggtggatcaggagaaaagaaaatttaagagactcagaaaaggaccagggtagactccacgggtagagaaaccttttggaaataatgt

SEQ ID NO: 110973 - DNA, 201 bp, Homo sapiens
cccagcactttgggaagctgaggcaggaggatcacttgaggccaggagtttgagatcagcctgagcaacatagcaagactctgtgtctacaaaaaaaaaawttttaataaaaaaaagaaatgggatagttatgcaatcaagttatttccaagaagcagtgatatgatgtgtcgtagccatgaaaataatgtggtgattcaa

SEQ ID NO: 110974 - DNA, 201 bp, Homo sapiens
gtgagggacggcaggagctgggactgtgacctttgtgctgacacccagcccaagactcttctccttacatctttgtcgcttttttttttttttccaggaamtaagtggctcctccatggcccccatcatgaccacagtgcaatctaaaacagcccctcccacatttaacaggaccaataaattcacagctggcttccagaa

SEQ ID NO: 110975 - DNA, 201 bp, Homo sapiens
ctcgatctcctgacctcgtgatccgcctgccttggcctcccaaagtgttgggattacaggtgtgatccaccgcacctggcctgaatttgtgtgttttttttgacacgggctctcactctgttgcccaggctggagtgcagaggtgcaatcatagctcactgcagccttgacctctcaggctcaagtgatcttcctacctct

SEQ ID NO: 110976 - DNA, 201 bp, Homo sapiens
ttaaggaaacccgcatgcaaatcgtggagctgtggcagggaatctgaggtgggggccccgaggctgtgctgaggcctcaggcgttgtgtgtctcccctccrcagccccctacaccatcatcactttccccttcctgttcgctgtgatgtttggagactgtggtcatggaaccgtgatgctcctggctgcactttggatgat

SEQ ID NO: 110977 - DNA, 201 bp, Homo sapiens
caccacacccggctaatttttttgtgtttttggtagagacggggtttcaccgtgttaggcaggatggtctcgatctcctgacctcgtgatccgcctgcctyggcctcccaaagtgttgggattacaggtgtgatccaccgcacctggcctgaatttgtgtgttttttttgacacgggctctcactctgttgcccaggctgg

SEQ ID NO: 110978 - DNA, 201 bp, Homo sapiens
ccgtgatgctcctggctgcactttggatgattctgaatgagagacgcttgctctcccagaagacagacaatgaggtgagtgtccattgaccgtcttgcccygattcattttcagaatatgaaaatctgtatgtggttttcaccatagaaataacacatttttatgaaaaataaaggagagaaggaaagtaaaaaagagcca

SEQ ID NO: 110979 - DNA, 201 bp, Homo sapiens
aacctgagaggcggaggttatagtgagccaagatcacgacactgcactccagcctgggtgatggagcaagactctgtctcaaaaaaaaaaaaaaaaaaaaatcctcaggattctcatggcagccatcagcctgggtgcccgccgtggccaacccttctgactttgtgcttgattttacgaacgctctgcttcctccttccc

SEQ ID NO: 110980 - DNA, 201 bp, Homo sapiens
tctgcaacttgctatttcatcaatttcatatatattatatacatatacatatatacatacgtgtgtgtgtgtatatatatacatatatatatatatatatwttttttttgagacagagtctgaaaaaaagctttgtctcccaggtgggagtgcagtggtgcgacctctgctcactgtaacctctgcctcccggattcaagc

SEQ ID NO: 110981 - DNA, 201 bp, Homo sapiens
atttataatataattattatatagaatatataatataatatatattctatataatataatatatattatataatatattctatataatataatatattatrtaatatatataatatattatataatatatataatatattatatattaatatattaatattgatgtatatataatattatatataataatatatatgatat

SEQ ID NO: 110982 - DNA, 201 bp, Homo sapiens
cttctgcaacttgctatttcatcaatttcatatatattatatacatatacatatatacatacgtgtgtgtgtgtatatatatacatatatatatatatatwttttttttttgagacagagtctgaaaaaaagctttgtctcccaggtgggagtgcagtggtgcgacctctgctcactgtaacctctgcctcccggattcaa

SEQ ID NO: 110983 - DNA, 201 bp, Homo sapiens
tatataatatatttatttttatatatatataaatatatatataatataatatatattataatatatatattataaatataaatataaatataaataaatawaaatatatttataatataattattatatagaatatataatataatatatattctatataatataatatatattatataatatattctatataatataata

SEQ ID NO: 110984 - DNA, 201 bp, Homo sapiens
ttcttctgcaacttgctatttcatcaatttcatatatattatatacatatacatatatacatacgtgtgtgtgtgtatatatatacatatatatatatatwtattttttttttgagacagagtctgaaaaaaagctttgtctcccaggtgggagtgcagtggtgcgacctctgctcactgtaacctctgcctcccggattc

SEQ ID NO: 110985 - DNA, 201 bp, Homo sapiens
atatataatatatttatttttatatatatataaatatatatataatataatatatattataatatatatattataaatataaatataaatataaataaatataaatatatttataatataattattatatagaatatataatataatatatattctatataatataatatatattatataatatattctatataatataat

SEQ ID NO: 110986 - DNA, 201 bp, Homo sapiens
tagtaattcaattttgtctaatactaagcatttcagggagagctaacatttacaggattatcattttttattgtttaaaaaaaatctctttgtgccaggcrcagtggctcacggctgtaatcccagcactttgggaggccgaggtgggtggatcacttgaggtcaggagtttgagactagcctggccaacatggtgaaacc

SEQ ID NO: 110987 - DNA, 201 bp, Homo sapiens
atatatataatatatttatttttatatatatataaatatatatataatataatatatattataatatatatattataaatataaatataaatataaataaatataaatatatttataatataattattatatagaatatataatataatatatattctatataatataatatatattatataatatattctatataatata

SEQ ID NO: 110988 - DNA, 201 bp, Homo sapiens
tcacttggttttttgtcccatttcccatccagatttggaacttggcttcaaacaaactcacatttctgaactcgtataaaatgaagatgtcggtgatcctrggaattgtccagatggtttttggtgtcatcctcagccttttcaatcacatgtaagtttcttgatgcactctctgcctgctctgtctgatcacactgatga

SEQ ID NO: 110989 - DNA, 201 bp, Homo sapiens
gtttgaccccaggagagggaggttgcagggaaccgagatcgcactactgcactccagcgtgggtgacagagcaagactgtgtctcaaaaaaaaaaaaataataataataacatgatattttaaggtgttaaagctctacattcatacatttgtaggaatagataaggggcaatcagatgtgtgcacaagtccttccttaga

SEQ ID NO: 110990 - DNA, 201 bp, Homo sapiens
gctgggggggtggggggtgccgttgtttgccagtagtgcaaaaaaaaaaaagatagaacattttgtgcttttgtgctttgagagaataattaagtcctaaygttcccttgatgttctatcttgtgtatgtgtgtgtcttccacccccagatacttcagaagaactctcaacatcattctgcaatttatccctgagatgatt

SEQ ID NO: 110991 - DNA, 201 bp, Homo sapiens
ttgagcctgggaggcagaggttgcagtgagctgagatcgcactattgcactccagcctggaccacaagagcaaaactctgtctcaaaaaatatatatatataatatatttatttttatatatatataaatatatatataatataatatatattataatatatatattataaatataaatataaatataaataaatataaat

SEQ ID NO: 110992 - DNA, 201 bp, Homo sapiens
atggagccactgcactccagcctgggcaacagagcgagactccgtctcaaaataaataaataaataaataaataaataaataaataaataaataaataaaataaaacataaatcatccgacatggtatcagttatgtgagttacaaaaatacaggtcaagggtctttgcgttctataatatgtgagtcccacattttagaa

SEQ ID NO: 110993 - DNA, 201 bp, Homo sapiens
ttgctctgtcacccaggctggagtgcagtggcgtgatcttgactcactgcaacctccacctcctgggttaaaacgattttcctgactcagcctcctgagtrgctgggactacaggtgcacgccaccacgcctggctaatttttgtatttttagtagagacaggatttcaccatgttggccaggctgctctcgaactcatga

SEQ ID NO: 110994 - DNA, 201 bp, Homo sapiens
tgagatggagccactgcactccagcctgggcaacagagcgagactccgtctcaaaataaataaataaataaataaataaataaataaataaataaataaataaaataaaacataaatcatccgacatggtatcagttatgtgagttacaaaaatacaggtcaagggtctttgcgttctataatatgtgagtcccacatttt

SEQ ID NO: 110995 - DNA, 201 bp, Homo sapiens
aaggggccttctctgtgttcccacgataccactgcatgccctggtcattgcgcttcccagagtgtggcatgggaacccttctacatattctcctgactagkctgtgagcaacttgagggcatgtacagcaccagtcaattgtcccccatggccaggcacagtggctcacacctgtaatcccagcactttgggaggctgagg

SEQ ID NO: 110996 - DNA, 201 bp, Homo sapiens
caactttttttccattcaaaagcattatttggagttggttggttttcacacaccctagtgtgaagattaattgtcttgatacagtttgaagttttcataayctcatttcggggttatgcagctggaagaggcaatacaagttaataaagtcccttcccaacattgtcctggctgtctttgaatatcaaaggatagccacac

SEQ ID NO: 110997 - DNA, 201 bp, Homo sapiens
gtcccttcccaacattgtcctggctgtctttgaatatcaaaggatagccacacacacacacacacacacacacacacacacacacacacacactcatcccrttgctttgtacgtcatcgggggaaaatcctgttgcataaaaatggacaaagggccatgagacagcattgtgtgcgggtactaggatggataagttcagct

SEQ ID NO: 110998 - DNA, 201 bp, Homo sapiens
gctcatgcctgtaaccccagcactttgggaggccgaggcgggcggatcacgaggtcaggagatcgagaccatcctggctaacacggtgaaaccccgtccckactaaaaatacaaaaaaattagccgggtgtggtggcacatgccggttgtcccagctacttgggaggctgaggcaagcaactcgcttgaacccaggaggca

SEQ ID NO: 110999 - DNA, 201 bp, Homo sapiens
gcaagcaactcgcttgaacccaggaggcagaggttgcagtgagccaagatggcgccactgcactccagcctaggcaacagagcgagactccatctcaaaaraaaaagttgagtgaggatggaagatggaaccgataaagtgttcactctattatcagggggaatcttgttacaattgggataataaattgtctcctggcat

SEQ ID NO: 111000 - DNA, 201 bp, Homo sapiens
tcagaataaggaatacagagagtttccagtgtctaccccgtgtcgaacatttggaaacactggacagatatttctctatctgcaaggggaatattccaggygtgaaggtgaatggattcattgaaatgctttagatctctcaaaataaagtgctagtgaagtggcccatagtggtcattttcatcacgtaaagtgtgctgt

SEQ ID NO: 111001 - DNA, 201 bp, Homo sapiens
ctctcaaactcatggcctcaagtgattgtaattttttttttctaggaactaaatctgtccataagccaagagccaggttactgcaggctctcctgagttcsaggactgtaaaataatagcttgtcttgctctttgtaccacacaagctctttaaatagttgctgatctcaaagtggtagatttctcctttgcgccaccaga

SEQ ID NO: 111002 - DNA, 201 bp, Homo sapiens
agggcatgtacagcaccagtcaattgtcccccatggccaggcacagtggctcacacctgtaatcccagcactttgggaggctgaggcaggcagattgcttraggccaggagttccagaccagcctgggcaacatggtgaaaccccatctctacaaaaaatacaaaaattagccaggtatggtgatgcatgcctgtagtccc

SEQ ID NO: 111003 - DNA, 201 bp, Homo sapiens
gcctcaagtgattgtaattttttttttctaggaactaaatctgtccataagccaagagccaggttactgcaggctctcctgagttccaggactgtaaaatratagcttgtcttgctctttgtaccacacaagctctttaaatagttgctgatctcaaagtggtagatttctcctttgcgccaccagatgacttaaatagag

SEQ ID NO: 111004 - DNA, 201 bp, Homo sapiens
tcagtagagacggggtttcaccatgatggccaggatggtctcgatctcttgacctcgtgatctgcccgcctcggcctcccaaaatgctggaattacaggcktgagccaccgcgcccggccgcatgtctttactcctgtgcactgctgtgcattcatgtgaagtggctgtcccaggactgtcacctacttgttccttagagt

SEQ ID NO: 111005 - DNA, 201 bp, Homo sapiens
gtaaaagttctgtctacaccttctacccagccccattttccatacagtcccccaaacgtctgcctctttctccatcagtcatatccctggtggttaataaytgcttctttaaaaggcacttggttgcctggggagtatgcatattacataagctatttagcgtcctaatcaagtttaagttccctgctctgtattttcttg

SEQ ID NO: 111006 - DNA, 201 bp, Homo sapiens
tgaggcaggagaattgtttgaccccaggagagggaggttgcagggaaccgagatcgcactactgcactccagcgtgggtgacagagcaagactgtgtctcaaaaaaaaaaaaataataataataacatgatattttaaggtgttaaagctctacattcatacatttgtaggaatagataaggggcaatcagatgtgtgcac

SEQ ID NO: 111007 - DNA, 201 bp, Homo sapiens
ctgaggcaggagaattgtttgaccccaggagagggaggttgcagggaaccgagatcgcactactgcactccagcgtgggtgacagagcaagactgtgtctcaaaaaaaaaaaaataataataataacatgatattttaaggtgttaaagctctacattcatacatttgtaggaatagataaggggcaatcagatgtgtgca

SEQ ID NO: 111008 - DNA, 201 bp, Homo sapiens
agctgaggcaggagaattgtttgaccccaggagagggaggttgcagggaaccgagatcgcactactgcactccagcgtgggtgacagagcaagactgtgtytcaaaaaaaaaaaaataataataataacatgatattttaaggtgttaaagctctacattcatacatttgtaggaatagataaggggcaatcagatgtgtg

SEQ ID NO: 111009 - DNA, 201 bp, Homo sapiens
tactcgggaggctgaggcaggagaattgcttaaactcgggaggtagaggttgcagtgagccaagatcacgccattgcactccagactgggcgacaagagcraaactctgtctcaaaaaaaaaaaaaaaaaaaattaacagacagtggcggcacacttctgtggtcccagctacttaggaggctgaggtgggaggatcactg

SEQ ID NO: 111010 - DNA, 201 bp, Homo sapiens
agtgcatgaaagggcctgttttctcataccctccacaacttgagtctttagtcatattttaaaatattttgccagctgagagcagtggctcatgcctgtaatcccagcactttgagagaccagagtgggaggatcacttcagtccaggagttcaataccagcctgggcaacacagcaagactctgtctcaacaaaaaaata

SEQ ID NO: 111011 - DNA, 201 bp, Homo sapiens
cacctgtagtcccagctactcgggaggctgaggcaggagaattgcttaaactcgggaggtagaggttgcagtgagccaagatcacgccattgcactccagmctgggcgacaagagcgaaactctgtctcaaaaaaaaaaaaaaaaaaaattaacagacagtggcggcacacttctgtggtcccagctacttaggaggctga

SEQ ID NO: 111012 - DNA, 201 bp, Homo sapiens
atataatatataatgtatataatatatataatgtatataatatattatatatatagatatatatatttatttatttatttttgagatggagtctggctctrttgcccaggctggagtgcagtggcgtgatctaggctcactgcaacctctgcttcctgggttcaagcgattctcctgcctcagcctcctgagtagctggga

SEQ ID NO: 111013 - DNA, 201 bp, Homo sapiens
caaataggggtcctcttccttgcgttccatgtctctgcgtttatcatgttctgatagccgcttgcaagtggcaggcctgtgtctctctgggctacatcattgtgaccttttagcaggggccttcaaatctcaagccaaggatgtaatgatgctatttccctgcaaggtgcatatcccaggctgttgggcatgataactagg

SEQ ID NO: 111014 - DNA, 201 bp, Homo sapiens
ataacaatctgcatttacaagataatcccagtggtttctcgtaccttgcagaactgtctgaagtgctctggactatggtgatgaacagcggccttcagacrcgaggctggggaggaatcgtcggggtttttattatttttgccgtatttgctgtcctgacagtagccatccttctgatcatggagggcctctctgctttcc

SEQ ID NO: 111015 - DNA, 201 bp, Homo sapiens
ttaattttttcatttatatatgtatatacacacatatatacacacgtatatacatatgtatatatactatatataatgtatataatatataatatataatrtatataatgtatataatatataatatataatgtatataatatatataatgtatataatatattatatatatagatatatatatttatttatttatttttg

SEQ ID NO: 111016 - DNA, 201 bp, Homo sapiens
gcaaataggggtcctcttccttgcgttccatgtctctgcgtttatcatgttctgatagccgcttgcaagtggcaggcctgtgtctctctgggctacatcattgtgaccttttagcaggggccttcaaatctcaagccaaggatgtaatgatgctatttccctgcaaggtgcatatcccaggctgttgggcatgataactag

SEQ ID NO: 111017 - DNA, 201 bp, Homo sapiens
aataacaatctgcatttacaagataatcccagtggtttctcgtaccttgcagaactgtctgaagtgctctggactatggtgatgaacagcggccttcagaygcgaggctggggaggaatcgtcggggtttttattatttttgccgtatttgctgtcctgacagtagccatccttctgatcatggagggcctctctgctttc

SEQ ID NO: 111018 - DNA, 201 bp, Homo sapiens
ttttaattttttcatttatatatgtatatacacacatatatacacacgtatatacatatgtatatatactatatataatgtatataatatataatatatamtgtatataatgtatataatatataatatataatgtatataatatatataatgtatataatatattatatatatagatatatatatttatttatttatttt

SEQ ID NO: 111019 - DNA, 201 bp, Homo sapiens
ccctgtctctatttaaaatatatatatatttttaattaaaaagatgagaaaatacaataaataacaatctgcatttacaagataatcccagtggtttctcrtaccttgcagaactgtctgaagtgctctggactatggtgatgaacagcggccttcagacgcgaggctggggaggaatcgtcggggtttttattatttttg

SEQ ID NO: 111020 - DNA, 201 bp, Homo sapiens
agcaaataggggtcctcttccttgcgttccatgtctctgcgtttatcatgttctgatagccgcttgcaagtggcaggcctgtgtctctctgggctacatcattgtgaccttttagcaggggccttcaaatctcaagccaaggatgtaatgatgctatttccctgcaaggtgcatatcccaggctgttgggcatgataacta

SEQ ID NO: 111021 - DNA, 201 bp, Homo sapiens
aacccaggaggcagagcttgcagtgagccgagatcgcgccactgcactccagcctgggcgacagagcgagagactgtctcaaaaaaaaaaaaaaaaaaaaatcagcccaatcatagtgatgcacacctgtagtcctagctactcaggaggctgaggtgggaggatcacttgagcccaggaggttgaggctgcagtgagctg

SEQ ID NO: 111022 - DNA, 201 bp, Homo sapiens
cccaagtccttcaaactactgctgaggttggagctgaagaccaacatcaggaccacggatgacttgaagcgctgagatccactttaaggaacaaagtggggccgggcgtggtggctcacacctataatcccagcactttgggaggccaaggtggtggggggattacctgaggtcaggagttcgagaccagcctggccaaca

SEQ ID NO: 111023 - DNA, 201 bp, Homo sapiens; identical to SEQ ID NO: 18188

SEQ ID NO: 111024 - DNA, 201 bp, Homo sapiens
tttttactggttgggaagaaaaagtatttctactccctttttccagatgcagaagccaaagtaatatatatgtgtgtgtgtgtgtgtgtgtgtgtgtgtgkattttttttttttttttgagacggagtttccctctctttgcccaggctggggtgcaatggcacgatcttggctctccacaacctcctccttccgggttca

SEQ ID NO: 111025 - DNA, 201 bp, Homo sapiens
acacactttcacatgcacatgaacgctgatgcacacactcagccctgcaagtggctgcagcacagacacccataagcatatctttttttttttttttttttcaggctggagtgccgtggcgtgatctcggctcactgcaacctccgcctcccaggttcaagcaattcttctgcctcagcctcctgagtagctgggactaca

SEQ ID NO: 111026 - DNA, 201 bp, Homo sapiens
cttgaatagattagcatttgaatgggtagactgagtaaagaagacagatattccatctatatgtctatccttccaccaatattacaatcttttattttttwttttttttttaagatagggtctcactttgtcacccaggctggagtgcagtggcatgatcatggctcactgcagcctcgacctccccaggctcaggtcatc

SEQ ID NO: 111027 - DNA, 201 bp, Homo sapiens
cctcaaactcttgggctcaagcagttctcctgtcttggcctcccaagtagcagggactataggcacacaccaacatacttggcgaacttttttttttttttggtagagacagggttttgccatgttgcccaggcttgtcttgaacttctgggctcaaacagtcctcctgccttggcctcccaaagtgctgggattacaggt

SEQ ID NO: 111028 - DNA, 201 bp, Homo sapiens
actcccaggctcatgtcattctaccgcctcagcttcccaagtagctgggaccacaggtgcatgccaccatgcctgggccaattttttttttttttttttttggtagaggtagggttttgcctttttgcctaggctagcctcaaactcttgggctcaagcagttctcctgtcttggcctcccaagtagcagggactataggc

SEQ ID NO: 111029 - DNA, 201 bp, Homo sapiens
tctgtgtgtatgtgtattagggtctgcaatcatgttatgtgctgattcctttgattttttttagtcatctgttgtgggtaatgtatttcaggaatgtcatrgcactttctgttggcttaccttctttttccttcctgcatagactgttctagaaaaactggaaggagagttacaggaagccaaccagaaccagcaggcctt

SEQ ID NO: 111030 - DNA, 201 bp, Homo sapiens
tctccagtcttgtttcttgtcagttttccttagtgccccagcgctccagacccatccgtttcatatgcagtggccctgaggagcgttttttttttttttttcctaagacagggtctccctctgttgcccaggatggagtgcagtggcgctatcacggcctcgaactcccaggctcatgtcattctaccgcctcagcttccc

SEQ ID NO: 111031 - DNA, 201 bp, Homo sapiens
gtggaggcctgttcccttggcccttgggatgcacggctgttggttgtttcctcaggcggctgcttagggtccttttcgtgtcggaaacattaccacctccrttcaagagatggtcctataatggcattatttgccccttctccacctctccttcatgaaatcctacagacctaatacataaacaatttgttctgacggact

SEQ ID NO: 111032 - DNA, 201 bp, Homo sapiens
ccttctgacttgctgctatgaacccaggtccccccatactcccacatctcaggtcacagtgaaataactgtgtgtttctatttaaaatcttcggccgggcrcggtggctcacgcctgtaatcccagcactttgggaggccgaggcgggcggatcacaaggtcaggagatcgagaccatcctggctaacacggtgaaacccc

SEQ ID NO: 111033 - DNA, 201 bp, Homo sapiens
tactaaaaatacaaaaattagccggcgtggtggtgagtgccttataatcccagctactcggaaggctgaagcaggagaattgcttgaacctgagaggtggrgatggcagtgagctgagatcgccgccattgcactccagcctgggcgacataagcgagactccgtctcaaaaaaaaaaaaagttttttttgccttcttcct

SEQ ID NO: 111034 - DNA, 201 bp, Homo sapiens
cctgagaggtggagatggcagtgagctgagatcgccgccattgcactccagcctgggcgacataagcgagactccgtctcaaaaaaaaaaaaagttttttktgccttcttcctgtcactcttaccccaagagcaaacattgtgctgacctccaggactgtcagttcgttttgcctgttcttgaactgtatttaaatgaaat

SEQ ID NO: 111035 - DNA, 201 bp, Homo sapiens
gcctttgcctcccaaagcactgggattgtaagtgtgagccactgtgcccagccacatgtgtttttagaaagttgccagtagctaatttacaatgattgctrtatgttttatttcatacgccacccagcttaagcattgtgcgattttagtaagaggactgcaagtaagtatctggaaggaagatagtcactaggattcaca

SEQ ID NO: 111036 - DNA, 201 bp, Homo sapiens
gagtttagggttggaaatggagaaaccgtaatatatctctcctttgatattttcttctataagttgaaggagagagaaaataggatttcgagatgacaaayataaagttaacttgagccacgtccctccccatgggataaagaaccacaaggtgttggggacagcctaacctagaagctggctcttggcacctggcaccct

SEQ ID NO: 111037 - DNA, 201 bp, Homo sapiens
agaggatcagaacagctatttagcaaccaatctgggcacattttaatatttctagtccaagtaccgctgcatctgtatgtgtcaggtgaatatcagcctcrgatctagtgacatagaaggtcctgcgtgtcactgaggactccttggctcagcaccacgcccctataagctctcttttttgtttgtttttgagatagagtc

SEQ ID NO: 111038 - DNA, 201 bp, Homo sapiens
tccttgcttgcttctctccacggtagggttagccaaactcaaggttaagggtgcagtccttgactgtcacatctgcccaagactgatcccagccgcaagtytgggggttcccagggccaccctcacttcaggcaagctgactatacattcgcaggacccttagggtcctttggggccaaaatgactcacagaactccggaa

SEQ ID NO: 111039 - DNA, 201 bp, Homo sapiens
tgtcttcttcgttctgttatttacttctttcctgtgttactgagctcataaccaaattgtccttttttttttttctttaaggctgtcccttctctaaactrtgatgctaccagagtaacctgcctctatggctcctcactgaatccaggttgtttcttcaactttacccatagcttgcctttctagaaacttccacacagg

SEQ ID NO: 111040 - DNA, 201 bp, Homo sapiens
actatcattgtcaatcagtatcttttcctttattttttatgaacacacttgtgcatatatatactcatattaagcaaatatctgttttctctcttttcctyttatcatgagacataaaatgtattgattttatatcagtatttaactattgttaattttacatcatagtaatgaagttatggggtatcaggagaagagtat

SEQ ID NO: 111041 - DNA, 201 bp, Homo sapiens
gccaaggtgggagaattgcttgaggccaggagtttgagacaagccttggcaacactgtgagacccaaactctacaaaaaaaaaaaaaaagagagagagagacagagaaaaatttctttaaaaaaaattgctgagaagattaggaacaaggcaaggacattgttcctcaccactccatttcacatcatactggagtcctaac

SEQ ID NO: 111042 - DNA, 201 bp, Homo sapiens
ggccaaggtgggagaattgcttgaggccaggagtttgagacaagccttggcaacactgtgagacccaaactctacaaaaaaaaaaaaaaagagagagagagacagagaaaaatttctttaaaaaaaattgctgagaagattaggaacaaggcaaggacattgttcctcaccactccatttcacatcatactggagtcctaa

SEQ ID NO: 111043 - DNA, 201 bp, Homo sapiens
aaccagaaccagcaggccttgaaacaaagcttcctagaactgacagaactgaaatacctcctgaagaaaacccaagacttctttgaggtggtcacgtgggsatgagttactaaagggcccgttcctcagaacctcaaatttccattttggaaactggctggcctgggatctgagtaaatcactctgtttctgttccatggc

SEQ ID NO: 111044 - DNA, 201 bp, Homo sapiens
ttctccagtcttgtttcttgtcagttttccttagtgccccagcgctccagacccatccgtttcatatgcagtggccctgaggagcgttttttttttttttttcctaagacagggtctccctctgttgcccaggatggagtgcagtggcgctatcacggcctcgaactcccaggctcatgtcattctaccgcctcagcttcc

SEQ ID NO: 111045 - DNA, 201 bp, Homo sapiens
aggccaaggtgggagaattgcttgaggccaggagtttgagacaagccttggcaacactgtgagacccaaactctacaaaaaaaaaaaaaaagagagagagagacagagaaaaatttctttaaaaaaaattgctgagaagattaggaacaaggcaaggacattgttcctcaccactccatttcacatcatactggagtccta

SEQ ID NO: 111046 - DNA, 201 bp, Homo sapiens
tgtgaattcacagcagtccaggatcagtcaggccaggcccagaaatacaattgtatctatctatctatcatctgcctgtctgtctgtctgtctgtctgtctatctatctatctatctaaaagagacaaggtctcactatgttgcccaggctgatctcacactcctggcctcaagggatcctcttgcctcagcctcccaaag

SEQ ID NO: 111047 - DNA, 201 bp, Homo sapiens
taaagcttcactaaaaccagagaaaatcttgaggtgtaggtgccttttgagtttccctaaatatatttaaatgaaaatcatagtgctttgactttcagacrgaaaccaatttagctgatgatttctttactgaggacacttctggcctcctggagttgaaagcagtgcctgcatatatgaccggaaagttggggttagtgt

SEQ ID NO: 111048 - DNA, 201 bp, Homo sapiens
gaggccaaggtgggagaattgcttgaggccaggagtttgagacaagccttggcaacactgtgagacccaaactctacaaaaaaaaaaaaaaagagagagagagacagagaaaaatttctttaaaaaaaattgctgagaagattaggaacaaggcaaggacattgttcctcaccactccatttcacatcatactggagtcct

SEQ ID NO: 111049 - DNA, 201 bp, Homo sapiens
ttgtgaattcacagcagtccaggatcagtcaggccaggcccagaaatacaattgtatctatctatctatcatctgcctgtctgtctgtctgtctgtctgtctatctatctatctatctaaaagagacaaggtctcactatgttgcccaggctgatctcacactcctggcctcaagggatcctcttgcctcagcctcccaaa

SEQ ID NO: 111050 - DNA, 201 bp, Homo sapiens
cactttgggaggccaaggtgggagaattgcttgaggccaggagtttgagacaagccttggcaacactgtgagacccaaactctacaaaaaaaaaaaaaaagagagagagagacagagaaaaatttctttaaaaaaaattgctgagaagattaggaacaaggcaaggacattgttcctcaccactccatttcacatcatact

SEQ ID NO: 111051 - DNA, 201 bp, Homo sapiens
tttgtgaattcacagcagtccaggatcagtcaggccaggcccagaaatacaattgtatctatctatctatcatctgcctgtctgtctgtctgtctgtctgtctatctatctatctatctaaaagagacaaggtctcactatgttgcccaggctgatctcacactcctggcctcaagggatcctcttgcctcagcctcccaa

SEQ ID NO: 111052 - DNA, 201 bp, Homo sapiens
ttgaactggggaggtggaggttatagtgaaccgtgattgtgccactgcactccagcctgggcaacagagtgagactctgtctcaaaaaaaaaaaaaaaaaatagggtgggctggactggccaatgataactattaaccccaaagaaagggctgtgtgtgtgtggccactttttactttacgagtgtcaccagtatttgctg

SEQ ID NO: 111053 - DNA, 201 bp, Homo sapiens
ctgggctcaagcgatcctcctgcttcagcctcctaaagtgatggaattcagacatgagccatgtgcctggcctcatttttaaaatttttaattaaaaaaawtttttttaaatagagacagggtcttgctatgttgcccagactggtcttgatctcctggcctcaagcaatactcccacctcggtcccccatagtgctgagg

SEQ ID NO: 111054 - DNA, 201 bp, Homo sapiens
ctttgtgaattcacagcagtccaggatcagtcaggccaggcccagaaatacaattgtatctatctatctatcatctgcctgtctgtctgtctgtctgtctgtctatctatctatctatctaaaagagacaaggtctcactatgttgcccaggctgatctcacactcctggcctcaagggatcctcttgcctcagcctccca

SEQ ID NO: 111055 - DNA, 201 bp, Homo sapiens
ctttgggaggccgaggtgggaagatcacttgagccagggagttcaagaccagcctgcacaacatagtaagaccctgcctccgcaaaacaaacaaaaaaaaacacaaaaaaattacttgggtatggtagtgtgcacctgtagtctcagctactcaggaggctgaggtgggaggatcacttgagcccaggaggttgaggctgc

SEQ ID NO: 111056 - DNA, 201 bp, Homo sapiens
gctatgaaatgttgcacataaaaaaattgagctcagacaggaaacttctagagaaatgtcaaagatgtcatggttcaaagagattgtctcagatatacatyatgggtaagaaaaagtaggagttcccattttaaaagttatttttttgagacagggtcttactcttgtcaccttggctggagtgcagtggtacaatcatgg

SEQ ID NO: 111057 - DNA, 201 bp, Homo sapiens
tattaggattagaattaggatgtagacatctttggggatgggggaacatattttttcaggctaccatgcccttctgcaaggtgctgacctttaagagaacrcctgccttggttatgagcattgcggggagtcagttggctgcctgctgagctgaccctcaggaagtgctcaccacctttgtgaattcacagcagtccagga

SEQ ID NO: 111058 - DNA, 201 bp, Homo sapiens
actttgggaggccgaggtgggaagatcacttgagccagggagttcaagaccagcctgcacaacatagtaagaccctgcctccgcaaaacaaacaaaaaaaaacacaaaaaaattacttgggtatggtagtgtgcacctgtagtctcagctactcaggaggctgaggtgggaggatcacttgagcccaggaggttgaggctg

SEQ ID NO: 111059 - DNA, 201 bp, Homo sapiens
ctgtattatctggctttgggcaagtcacttagcctcactgtgccttacttttctgcaagagtggattggactagatcatctatatcttacctgccaatggrcacccttttgggggctagagctgtgtttggttcttctctcctcctttccttcttcctttactcttgaggttcacagtagggaacttagaaaatttactct

SEQ ID NO: 111060 - DNA, 201 bp, Homo sapiens
agacggaaaccaatttagctgatgatttctttactgaggacacttctggcctcctggagttgaaagcagtgcctgcatatatgaccggaaagttggggttrgtgtaattcttgtgtgtagatgggtccctggtcctggcgagtgatttctgagtgagtgaatgaacgggtgaacaaatagccattggaatggggactgttt

SEQ ID NO: 111061 - DNA, 201 bp, Homo sapiens
tgggtctggctgcacgttgctggggtggtcaccctctatattaatagtctcctactgctgctgtaacaaattgtcacaaacactcgtggcttaaaacaacacaaatttggccgggcacggtggctcacacctgtaatcccagagctttgggaggcagagtttgggcgaattgtttgagcccaggagttcaagatcagcctg

SEQ ID NO: 111062 - DNA, 201 bp, Homo sapiens
gcgccactgcaccccagcctatgtgacagagtgagactccatctcaaaaaaaaaaaaaaatacatatatatatatgtgtgtgtgtgtgtgtgtgtgtgtgtatatatatgtatatatatatatatatataatgtttaaggattcataggtggattagtttctttttaaaaaattcaatggcacaaataattagagaaataa

SEQ ID NO: 111063 - DNA, 201 bp, Homo sapiens
gcagtgcctgcatatatgaccggaaagttggggttagtgtaattcttgtgtgtagatgggtccctggtcctggcgagtgatttctgagtgagtgaatgaaygggtgaacaaatagccattggaatggggactgtttcccatggatgcaaagcctctgccaagcgatagacccatatgtaacttactaggttggtggagtcg

SEQ ID NO: 111064 - DNA, 201 bp, Homo sapiens
gtgggtctggctgcacgttgctggggtggtcaccctctatattaatagtctcctactgctgctgtaacaaattgtcacaaacactcgtggcttaaaacaacacaaatttggccgggcacggtggctcacacctgtaatcccagagctttgggaggcagagtttgggcgaattgtttgagcccaggagttcaagatcagcct

SEQ ID NO: 111065 - DNA, 201 bp, Homo sapiens
gttcagtgagatggacgcccctctggaggatcctgtgacggtgggaaccttgggctgcaaaaactttctctgagacttcccatagccctcagcagaagcgyttcgttctcccaaaacatgggggatctttagtttgatgagactaatatctatttcctttttttctcctttttttccttcccttttactttgttccttttt

SEQ ID NO: 111066 - DNA, 201 bp, Homo sapiens
tgtgggtctggctgcacgttgctggggtggtcaccctctatattaatagtctcctactgctgctgtaacaaattgtcacaaacactcgtggcttaaaacaacacaaatttggccgggcacggtggctcacacctgtaatcccagagctttgggaggcagagtttgggcgaattgtttgagcccaggagttcaagatcagcc

SEQ ID NO: 111067 - DNA, 201 bp, Homo sapiens
ctgctctgcatgtgatcttcaccatcaatgatcgggggaggggagcttattaccaatggatgggggtaaaagttctgattaggtttcttctgacacccccracaggggcaaacaagggagccttgttaccacagagtggggctgaattcagactccccactcggcctggaagtctaggctccccacttgggctttgctggc

SEQ ID NO: 111068 - DNA, 201 bp, Homo sapiens
gagactgaagcaggagaattgcttgaacccggaaggcagaggtcgcagtgagccgagatcacatcactgcactccaccctgggctacagagtgagactccrtctcaaacaaacagacaaacaaaaaacccaacaacacaaatttggtgtcttccagtttttgaagccagagtcctaaaatcaaggcgtgggcagccgtgct

SEQ ID NO: 111069 - DNA, 201 bp, Homo sapiens
ccactcggcctggaagtctaggctccccacttgggctttgctggcaatggggtggggggcagggccatagttttttctgtggcgtttaactggattcgcgygattattgtctgaaagttttctttcttggcagactgcccctttcctggtccttttgctagagcgagcaggctttctttggaacttttctgctgcacatgt

SEQ ID NO: 111070 - DNA, 201 bp, Homo sapiens
actctagtgatgacattgggcatatccagataatccgggataatgcccctctgtcaggattcttggcttaatctcatctgcaaagccactgttgccatgtratatagtatgttgacaggttattaggattagaattaggatgtagacatctttggggatgggggaacatattttttcaggctaccatgcccttctgcaagg

SEQ ID NO: 111071 - DNA, 201 bp, Homo sapiens
ttggttatgagcattgcggggagtcagttggctgcctgctgagctgaccctcaggaagtgctcaccacctttgtgaattcacagcagtccaggatcagtcrggccaggcccagaaatacaattgtatctatctatctatcatctgcctgtctgtctgtctgtctgtctgtctatctatctatctatctaaaagagacaagg

SEQ ID NO: 111072 - DNA, 201 bp, Homo sapiens
cgtcaggaatcatgactcaccaactcacttgtaagccccatcttgatctctgggtccttctccagtcttgtttcttgtcagttttccttagtgccccagcrctccagacccatccgtttcatatgcagtggccctgaggagcgttttttttttttttttcctaagacagggtctccctctgttgcccaggatggagtgcag

SEQ ID NO: 111073 - DNA, 201 bp, Homo sapiens
cacatgaacgctgatgcacacactcagccctgcaagtggctgcagcacagacacccataagcatatctttttttttttttttttttcaggctggagtgccrtggcgtgatctcggctcactgcaacctccgcctcccaggttcaagcaattcttctgcctcagcctcctgagtagctgggactacaggtgcacaccaccat

SEQ ID NO: 111074 - DNA, 201 bp, Homo sapiens
ggctccgttccctggctacgtatgctgtgtgcgggctggtggcaatggcttcaagatcatcccccagtttcacagttaaactttggacatgcatctgttasagtatggtggatgttttaatctatttcagtctagatgtttgagattcccctttcaggagtgtgagtcttagtctttctttaatcagcagtgtcaatacac

SEQ ID NO: 111075 - DNA, 201 bp, Homo sapiens
tatatattttttttttttttttttttgagacagagtcttgctctgtcacccaggccggagggcagtggggcaatctcagctcactgcaacctccgcctccygggttcaagtgattctcctgcctcagcctcctgagtaactgcgactaacgtgcataccaccacatctggctaattttagtagagacggggtttcaccatg

SEQ ID NO: 111076 - DNA, 201 bp, Homo sapiens
caagtagctgggattacaggcatgcaccaccacgcccagctaatttttgcctatatggtttttgtttcatgataacaaataccagcctaggactttttggygcacctatatgttccaaaaaccatgatgtgtgtgctcttcctgtctggatgattgatgtctgctgtggtcatgtggctcccccaagggtgcctgcaccgg

SEQ ID NO: 111077 - DNA, 201 bp, Homo sapiens
cgcgccactgcaccccagcctatgtgacagagtgagactccatctcaaaaaaaaaaaaaaatacatatatatatatgtgtgtgtgtgtgtgtgtgtgtgtgtatatatatgtatatatatatatatatataatgtttaaggattcataggtggattagtttctttttaaaaaattcaatggcacaaataattagagaaata

SEQ ID NO: 111078 - DNA, 201 bp, Homo sapiens
cacttgaatccaggaggtggaggttgcagtgagctgagatcacgacactacactccagactgggcgacagagcaagactccactcaaaaaaaaaaaaaaaagaaaaaagaaagtgagaagtattcagtttgagtggatgataaaatcagttatttgaatgaaggctatctggagggaattcagttcagaaaaatcagatgc

SEQ ID NO: 111079 - DNA, 201 bp, Homo sapiens
tgactatacattcgcaggacccttagggtcctttggggccaaaatgactcacagaactccggaaagtgctatgctgacagttgtttttgttttttttttttgagacagagtcttgccctattgcccaggctggagtgcaatggtgcgatctcagctcactgcaacctttgcctcccaggttcaagcaattctcccgcctca

SEQ ID NO: 111080 - DNA, 201 bp, Homo sapiens
tgaactgggggacagaggttgcagtgaaccgagattgtaccacttcactccagcctgggcgaaggagcaaaattccttctcaaaaaaaaaaaaaaaaaaaagaaaagaaagaagggtccagatacgttgatgcctaatttgcaatacccctcccatgaaatcattctagaaaaactttggacatgggacattaagcttcat

SEQ ID NO: 111081 - DNA, 201 bp, Homo sapiens
tttttttctcctttttttccttcccttttactttgttcctttttaaaaatatatatttgaaaggtcagttcaaggactgattcttgtcaacacctcataaytggtttattcttcccagagacatagctatacttttctctagaacttagttatactagtactatcctaggcggcagctgtgtcttaaagaactgagaactg

SEQ ID NO: 111082 - DNA, 201 bp, Homo sapiens
cctcaacatcccaggctcaagagatcctcctgtcctagcctcctatgtagttgggacaggtgctccctcagccaggctaaattttttttttttttttttttgagagatgggatctcactttgttgcccaggctgaccttgaactcctaggctcaaacatgaaacatattttatttaggaatttgttggcttgatgtataac

SEQ ID NO: 111083 - DNA, 201 bp, Homo sapiens
gcctcaacatcccaggctcaagagatcctcctgtcctagcctcctatgtagttgggacaggtgctccctcagccaggctaaattttttttttttttttttttgagagatgggatctcactttgttgcccaggctgaccttgaactcctaggctcaaacatgaaacatattttatttaggaatttgttggcttgatgtataa

SEQ ID NO: 111084 - DNA, 201 bp, Homo sapiens
ctgccccccagggcccttgctgggaggctggctggaatgctggctatgcctttctggttgtggctgtggaagatttcacaattgggaaactgttcgataarctagagggaacgaagctgtgtcttaagaatgctttgcccagggtcagatttgaccacagccctagtcagccttcaggtggccaccccgatctgataaaag

SEQ ID NO: 111085 - DNA, 201 bp, Homo sapiens
tgcttgaacctgagaggtggagatggcagtgagctgagatcgccgccattgcactccagcctgggcgacataagcgagactccgtctcaaaaaaaaaaaaagttttttttgccttcttcctgtcactcttaccccaagagcaaacattgtgctgacctccaggactgtcagttcgttttgcctgttcttgaactgtattta

SEQ ID NO: 111086 - DNA, 201 bp, Homo sapiens
gggaggcggagcttgcagtgagccgaaattgcaccactgcactccagcccaggcgacagaacgagactctgtctcaaaaaataaataaataaataaataawcttcatttcaacatgtgcgttttttatggttaatgttattgaaacatataacatacagacaagtgcatgaataacgaggcaccaatccatgaagtatcgc

SEQ ID NO: 111087 - DNA, 201 bp, Homo sapiens
tccgactcccgggctcaagccatcctcttgcctcagcctcccaagtaacaggcatgcccccctgcctggctcagcatttttttttttttttttttttttttgagatgagctctcactatgctgcccaggctgctctcaaactcatggcctcaagtgattgtaattttttttttctaggaactaaatctgtccataagccaa

SEQ ID NO: 111088 - DNA, 201 bp, Homo sapiens
ctccgactcccgggctcaagccatcctcttgcctcagcctcccaagtaacaggcatgcccccctgcctggctcagcatttttttttttttttttttttttttgagatgagctctcactatgctgcccaggctgctctcaaactcatggcctcaagtgattgtaattttttttttctaggaactaaatctgtccataagcca

SEQ ID NO: 111089 - DNA, 201 bp, Homo sapiens
cctccgactcccgggctcaagccatcctcttgcctcagcctcccaagtaacaggcatgcccccctgcctggctcagcatttttttttttttttttttttttttgagatgagctctcactatgctgcccaggctgctctcaaactcatggcctcaagtgattgtaattttttttttctaggaactaaatctgtccataagcc

SEQ ID NO: 111090 - DNA, 201 bp, Homo sapiens
actgagggggtcatttgattcctaaaaacccatatggttcatggctgcctgccctgattcacccactgggtcattctagaagtccctgctagacgtggctyccagtccatactaacacagttgcttaaagaggtaatgtggaaaaatggggaaaaaattaaaacactgacttaaattctggttccttttctaccacttttg

SEQ ID NO: 111091 - DNA, 201 bp, Homo sapiens
tctagaagtccctgctagacgtggcttccagtccatactaacacagttgcttaaagaggtaatgtggaaaaatggggaaaaaattaaaacactgacttaarttctggttccttttctaccacttttggctgagtaacttatacaagaaatttaacctttgtgtgccggggctttcatcagtggtcctagtagttagcctcc

SEQ ID NO: 111092 - DNA, 201 bp, Homo sapiens
acttatacaagaaatttaacctttgtgtgccggggctttcatcagtggtcctagtagttagcctcctgcactggtcaggttaggctaaactctgttgcaayaacaacttaccctctaaatctcaggtccctaggccagagtttggcactatgtgttggggtgtcctctggccaaaattcctcctgtcttatttagacccat

SEQ ID NO: 111093 - DNA, 201 bp, Homo sapiens
ttaacttaaaaatttcaccctaaggttttcacacatttattaccttaaatattaatatctttttctttttctcctgtagaccgaggctgggccaagatggygtctgtgtttcgaagcgaggagatgtgtttgtcacaactgtttctccaggtggaagctgcatattgctgtgtggctgagctcggagagctcggattggtt

SEQ ID NO: 111094 - DNA, 201 bp, Homo sapiens
cgtttattgagctgagctgagagttgaagttttgttgatgactgtgatacgttacatggagctgtgcaatcttcaaggtctggtcatttttatgaccccaktgaggattttgaggctcatttggatagccaaggcagagaaataaggtaaacttagatgaggacagacttcctttccttccttccttcctttcttccttcc

SEQ ID NO: 111095 - DNA, 201 bp, Homo sapiens
gcaataacaacttaccctctaaatctcaggtccctaggccagagtttggcactatgtgttggggtgtcctctggccaaaattcctcctgtcttatttagayccatccctggtatgacccaagtccttcaaactactgctgaggttggagctgaagaccaacatcaggaccacggatgacttgaagcgctgagatccacttt

SEQ ID NO: 111096 - DNA, 201 bp, Homo sapiens
acagtcatgaagcctgtctccttgaaggccctgagagccacttgcagattccgtacctgtttgcttgaaggcagggaggcaggcctgcatggtcgtctccytctcagggttacagccccaggaaaatcccagtgtgcggtttttagagccacacctgctgatctggagacagctgttttcctttctcagcatagccctcgg

SEQ ID NO: 111097 - DNA, 201 bp, Homo sapiens
ccttcaaactactgctgaggttggagctgaagaccaacatcaggaccacggatgacttgaagcgctgagatccactttaaggaacaaagtggggccgggcrtggtggctcacacctataatcccagcactttgggaggccaaggtggtggggggattacctgaggtcaggagttcgagaccagcctggccaacatggtaaa

SEQ ID NO: 111098 - DNA, 201 bp, Homo sapiens
gagaccagcctgactaacatggtgaaaccccatctctactgaaaatacaaaaatattagccaggcgtgggtggcgcatgcctgtaatcccagctactctaraagctgaggcaggagaattgtttgaccccaggagagggaggttgcagggaaccgagatcgcactactgcactccagcgtgggtgacagagcaagactgtg

SEQ ID NO: 111099 - DNA, 201 bp, Homo sapiens
gaagaccaacatcaggaccacggatgacttgaagcgctgagatccactttaaggaacaaagtggggccgggcgtggtggctcacacctataatcccagcaytttgggaggccaaggtggtggggggattacctgaggtcaggagttcgagaccagcctggccaacatggtaaaaccccctctctactaaaaatataaaatt

SEQ ID NO: 111100 - DNA, 201 bp, Homo sapiens
ccgggcgtggtggctcacacctataatcccagcactttgggaggccaaggtggtggggggattacctgaggtcaggagttcgagaccagcctggccaacayggtaaaaccccctctctactaaaaatataaaattagctgggtgtggtggcacacgcctgtaatcccagctactcgggagggtgaggcaggagaatcactt

SEQ ID NO: 111101 - DNA, 201 bp, Homo sapiens
ctttattctcatgcagctatacttttacataattatatatccattgtgtatagtaatagcagcattatttttatggcatccttaagtggatagaggaaatrattgggaaatgaagatttacttttccccccaactttgtgtcattatattcagtgttcaaaattcagggtaatggctttctctgagacgggaggtaatgga

SEQ ID NO: 111102 - DNA, 201 bp, Homo sapiens
ggggggattacctgaggtcaggagttcgagaccagcctggccaacatggtaaaaccccctctctactaaaaatataaaattagctgggtgtggtggcacaygcctgtaatcccagctactcgggagggtgaggcaggagaatcacttgaacctgggagctggaagttacagtgagccgagatcacaccactgcactccagc

SEQ ID NO: 111103 - DNA, 201 bp, Homo sapiens
cattgatgaaagactctgcatcactgtagcaggcagaaaaccagatcttggggggcagcaagcaaataggggtcctcttccttgcgttccatgtctctgcktttatcatgttctgatagccgcttgcaagtggcaggcctgtgtctctctgggctacatcattgtgaccttttagcaggggccttcaaatctcaagccaag

SEQ ID NO: 111104 - DNA, 201 bp, Homo sapiens
ggaataattgtagtgctggttggattgaagggaaaaatattatggtgctcagtaaaatgtatgtgctgaaaatggctcaggcagaaagagaagtcagaacyaagcacagcagttggtttgagaagttttagggttttggtaggaaaagaccagggaagctttttgatctggccaggagcactctgttttctgacttctgtt

SEQ ID NO: 111105 - DNA, 201 bp, Homo sapiens
ttcccatccagatttggaacttggcttcaaacaaactcacatttctgaactcgtataaaatgaagatgtcggtgatcctgggaattgtccagatggttttyggtgtcatcctcagccttttcaatcacatgtaagtttcttgatgcactctctgcctgctctgtctgatcacactgatgatgaatggtgacagagccactg

SEQ ID NO: 111106 - DNA, 201 bp, Homo sapiens
gacgtcagcctgtggatttgatacgacttaaccacgtcagaggaaggactttggcaagtgatattgtcttcatgtggggtattaattctcaaataataaartaattgacaaatgaggggagaatgctaaacagatgtcttcttgcaatattttaaatattgtatttgagaaaataaacatctgagtcattcactttttcct

SEQ ID NO: 111107 - DNA, 201 bp, Homo sapiens
tgtctacccttgcccagagcctgcggtggagcgcagagagatgttggagagcgtcaatgtgaggctggaagatttaatcaccgtgagtgaggggtttgggygcatggtctgatggcagctgcaggagggctgcctctgctgttttcatacaagccctgccccccagggcccttgctgggaggctggctggaatgctggcta

SEQ ID NO: 111108 - DNA, 201 bp, Homo sapiens
agaaaaggggatgcagaatgctttgcagcaagaactcacctgtttcctttggaatatattaaacacaggtttcgagccactgtctacccttgcccagagcstgcggtggagcgcagagagatgttggagagcgtcaatgtgaggctggaagatttaatcaccgtgagtgaggggtttgggcgcatggtctgatggcagctg

SEQ ID NO: 111109 - DNA, 201 bp, Homo sapiens
ggttttgggagcaggagtgttgcagggcatagagagtgtggtggtgttctgaggtggctgagaacaagatcaaagccaggagcagaagatggtaaccaagrtccctctgccgtgagttgcagaacccggaatggcagggcaaggcaggggatgtagatcagccttccagcctccacaggaaaatggggagataacccagca

SEQ ID NO: 111110 - DNA, 201 bp, Homo sapiens
ataaagcactgtgggtttcaacagtggaggccacatctgctgatgggatgcttcaagaagaaaatggcatttgaggttgggcatgggggctcaccctgtartcccagcactctgggaggctgaggcaggtggatcacttgaagtcaggagttcaagaccagcctggccaaaatggtgaaaccccatctctaataaaaatac

SEQ ID NO: 111111 - DNA, 201 bp, Homo sapiens
tggtgaaaccccatctctaataaaaatacaaaaattagccaggtgtggtggtgcatgcctgtagtcccagccacttgggaagctgaggcaggaaaatcgcytgaacccggaagacagaggttgcagtaagctgagatgctcctgaccctgcattccagcttggccgacagagggagactccatctccaaaaaaaaaaaaaa

SEQ ID NO: 111112 - DNA, 201 bp, Homo sapiens
cactgtagcaggcagaaaaccagatcttggggggcagcaagcaaataggggtcctcttccttgcgttccatgtctctgcgtttatcatgttctgatagccrcttgcaagtggcaggcctgtgtctctctgggctacatcattgtgaccttttagcaggggccttcaaatctcaagccaaggatgtaatgatgctatttccc

SEQ ID NO: 111113 - DNA, 201 bp, Homo sapiens
aggcctgtgtctctctgggctacatcattgtgaccttttagcaggggccttcaaatctcaagccaaggatgtaatgatgctatttccctgcaaggtgcatrtcccaggctgttgggcatgataactagggaagaagcattcacatgtgctctgtgaccagggacacctaagcatggacccttacttgcataggttggacag

SEQ ID NO: 111114 - DNA, 201 bp, Homo sapiens
gggccttcaaatctcaagccaaggatgtaatgatgctatttccctgcaaggtgcatatcccaggctgttgggcatgataactagggaagaagcattcacaygtgctctgtgaccagggacacctaagcatggacccttacttgcataggttggacagtgagagcccttgtagggcagttagctggggacacgggctcagct

SEQ ID NO: 111115 - DNA, 201 bp, Homo sapiens
tgaaaataaaaatatttattggaaatatttgatcagaaagtaatacaggatcaatgaacatttaaagtaataagccagtgaaagtcactggctaacatgaraagtttgggtcagcagttatctacatgcttggataatggaaaaaacagatatatatagacatcaatgtatttttccctcttagtattaaaatatttttgg

SEQ ID NO: 111116 - DNA, 201 bp, Homo sapiens
attcacatgtgctctgtgaccagggacacctaagcatggacccttacttgcataggttggacagtgagagcccttgtagggcagttagctggggacacggrctcagctacgagtccgggttttttccgatccccatccatgacctccctcctcttggatttcactcccctcagggccttttaaaacattccccgactgtca

SEQ ID NO: 111117 - DNA, 201 bp, Homo sapiens
ggttgttgtgagggcttaatgagatagtgtagtgtttagaacagtgtctggtacataggtagtatttgaggagagcctttatttatatttatatgtgttasaattctcagggtgagttgagcgcattcctcatttccctgcttgttgtcagctgcaggcatccaggatccaagaagatgccactgagaacattgaaggtga

SEQ ID NO: 111118 - DNA, 201 bp, Homo sapiens
ttatctacatgcttggataatggaaaaaacagatatatatagacatcaatgtatttttccctcttagtattaaaatatttttggaaaaatgcatagagacyactgttgaatatttgctatcattagctacaatgcatgatgaatggtctatcatattcttttttttttttttttttttgagacagagtttcacccttctct

SEQ ID NO: 111119 - DNA, 201 bp, Homo sapiens
ctcaggaagtgctcaccacctttgtgaattcacagcagtccaggatcagtcaggccaggcccagaaatacaattgtatctatctatctatcatctgcctgkctgtctgtctgtctgtctgtctatctatctatctatctaaaagagacaaggtctcactatgttgcccaggctgatctcacactcctggcctcaagggatc

SEQ ID NO: 111120 - DNA, 201 bp, Homo sapiens
ccaaagaaaacagaaggtcaaagggacttggggcaagtcagggctggatgcggggtggccttgggactcatgtcggtagagctgtgtcggggtccctcctrctcacagagtgaatggcccttcctttcatggtgtgtcttcacgtcctacagggccttctctctgcatcccaatccctgtgccttaaggaatgtcttccct

SEQ ID NO: 111121 - DNA, 201 bp, Homo sapiens
cctggcacagcacaaatctcatctccccttaccacccatttgtcatctttgagctttttttcagctattgctggggaacgttaagacacacataacatacractttgtgctgataattctttctctaagtctattactatttcttttcccctagttagactgaaagtgtctgaacagcaaagcccatgtcttattcatctt

SEQ ID NO: 111122 - DNA, 201 bp, Homo sapiens
agtgagatggacgcccctctggaggatcctgtgacggtgggaaccttgggctgcaaaaactttctctgagacttcccatagccctcagcagaagcgcttcrttctcccaaaacatgggggatctttagtttgatgagactaatatctatttcctttttttctcctttttttccttcccttttactttgttcctttttaaaa

SEQ ID NO: 111123 - DNA, 201 bp, Homo sapiens
cactgcactccagcctgggtgatggagcaagactctgtctcaaaaaaaaaaaaaaaaaaaaatcctcaggattctcatggcagccatcagcctgggtgccygccgtggccaacccttctgactttgtgcttgattttacgaacgctctgcttcctccttccctccaccttccagcctctaactgatgtgtttcaatctccc

SEQ ID NO: 111124 - DNA, 201 bp, Homo sapiens
gtgctgggattacaggcgtgagccactgcgcctggcctgtgtttaattttttaatcctctccattacttctttgtcacttgtcaggaacactgtttccccraagccattgaagtcctttccccccaattctccatgcttgattttatgaaaacgtcatgaggagaatggaaaataaattctgctagatgtgtgcttacatt

SEQ ID NO: 111125 - DNA, 201 bp, Homo sapiens
tgtgcttacatttagtatgacgggttgctgctgtgtcgagggcttcagatgatcccagctgagcagcttctgcaggggcagctttctcctttggctcagtscctgccaaagatgaatcttagacactgtctgatgctgaggcatataattcgggctatgctctttgaggtttctgaaagtcacctctgtgctgaggtgctc

SEQ ID NO: 111126 - DNA, 201 bp, Homo sapiens
aggttgcagtgagccaagattgcgccactgcactccagcctggacaacaagagcaaaactctgtctcaaaaaaaaaaaaaaaaaaagaagaagaagaagaraaaatgccttgtaatcaggttttcataaggagtgagtgtagataagaatcagaaacaggtgcattactgttgggcaccattttgttatcacagatggtaa

SEQ ID NO: 111127 - DNA, 201 bp, Homo sapiens
cagctcactgcaacttctgccttctgggttcaagcaattctcctgcctcagcctcccaagtagctgggattacaggcacgcaccaccacacccagctaatkttttgtatttttagtagagactgggttttgccatgttggccaggctggtcttgaactcctggcctcaagtgatccacccacctgggcctcccaaagtgct

SEQ ID NO: 111128 - DNA, 201 bp, Homo sapiens
tacctaatatgagatccctccccatattactgtgcatccttcgtaaagatcatttttaaatttgacattaaatcatcactttttataatcctgttttgacrtatgacagtcatagtgggagagaaagtaaaagcatctggaaaaagatgagcgtggacgccgaaggtcaccaaagggaagtcatgagattagagcagattc

SEQ ID NO: 111129 - DNA, 201 bp, Homo sapiens
gaaggtctcagggaaggggacctactagctagtctaagaggatcagaacagctatttagcaaccaatctgggcacattttaatatttctagtccaagtacygctgcatctgtatgtgtcaggtgaatatcagcctcggatctagtgacatagaaggtcctgcgtgtcactgaggactccttggctcagcaccacgccccta

SEQ ID NO: 111130 - DNA, 201 bp, Homo sapiens
cattataggtagagggacagatgagcaaaggtccagaggtaaggaagtgtcagagggtggctgtaccagcagcacccagaagtgcaggtgagccaaggcakgtgaggtggggaggcaagaggagagctgtgggctaagcttctgcgtgcctggtagaggaatttgaaacaaagtcaggaagcaaaggggaaggttctgtag

SEQ ID NO: 111131 - DNA, 201 bp, Homo sapiens
catggggtggagcaaaggaaacttggcctgtcacaccttctctcacctctctagaagggaagccaaaccgttggctgaggaaggaagggaggggcaagctrtgcccttctcccctgagcgcaaatattgtccttattgagaaacaaggggaggacaagagagatctgtgtcatgctggttcctgggacatgagtttgctgc

SEQ ID NO: 111132 - DNA, 201 bp, Homo sapiens
caagggaggggaaggggttcttatccctggcacatgtggcccctgctgctgtgtcattcccctattggctggggttagactgcacaggctaaactaattcygattggctaatttaaagagtgtgatggggagagtggtttggcgggaaaaatggttatgacagagcagataatcagaatgagtcagggtagagtaggaaat

SEQ ID NO: 111133 - DNA, 201 bp, Homo sapiens
tctgcatcacccaggaagtgatggcctacagctggccccagggcactgctgtgtacaaggtggccgagtatgcccggcactttggtgtgcctacatagccratggcggcatccagaccatggggaacatggtcaaggccctggcccttggagcctccacagtgatgatgggctcccttctggccgccaccacggaggtccc

SEQ ID NO: 111134 - DNA, 201 bp, Homo sapiens; identical to SEQ ID NO: 18262

SEQ ID NO: 111135 - DNA, 201 bp, Homo sapiens; identical to SEQ ID NO: 18265

SEQ ID NO: 111136 - DNA, 201 bp, Homo sapiens
aagagaaagtgcggagggtccaagcctctctcctgtcccacaggtattttaccagctggagggagacatggttctccgagtcctggagcaagggaaacacygggatgtggtcattcggcagggagaggtgaggccggatcccagcagggtggggaagagaaaggcggccacagctggaatccgccctgtccactcatcctg

SEQ ID NO: 111137 - DNA, 201 bp, Homo sapiens
acacattctgctgcttattcaccccagtgtctgcaccctgaaaggggaccctgctgtggggatggggcaggctgttctcaggaggtgctgaggtatttttygcataaaaaggtaacaccacaccaacagcagaaagactgaggagtttgggaacccttttgttccaaacagctgactagatgccccacagacccaacgcca

SEQ ID NO: 111138 - DNA, 201 bp, Homo sapiens
tgtacaaatggtcccagacccagcgcctccccttcccagaggaaagcccttgcccctgccctctgtggcagggccacctgagaacaccctgaagccctacrcagacacattctgctgcttattcaccccagtgtctgcaccctgaaaggggaccctgctgtggggatggggcaggctgttctcaggaggtgctgaggtatt

SEQ ID NO: 111139 - DNA, 201 bp, Homo sapiens
aggtcttgtcctccctaccttttcctgctctcccacaccttcccctgccaacctgccccttccccatccttcctcttccaggctgccccatcctcagcacrgtccaacattccctctggttccctggtgtagaggctgggcagagaagagggcccagggtagacaagcagtacccctttgctgcccgggggtcagctgggg

SEQ ID NO: 111140 - DNA, 201 bp, Homo sapiens
ccacaccatcgtcatccatgcaggcagcctctaggctgctgtgccctgtgtgtacaaatggtcccagacccagcgcctccccttcccagaggaaagccctygcccctgccctctgtggcagggccacctgagaacaccctgaagccctacacagacacattctgctgcttattcaccccagtgtctgcaccctgaaagggg

SEQ ID NO: 111141 - DNA, 201 bp, Homo sapiens
gagcagacagcagggctctgcagggacttctacaagcagagccaggcctgagtggggctgccctgaagccacccagatggggacagcagggttgcctgtcytctgctctggcaggtactatgtgggcgacaccatggacgttctgtttgagaagtggttctactgcaaggacctcggcacgcagttggcccccatcatcca

SEQ ID NO: 111142 - DNA, 201 bp, Homo sapiens
gaagccacaggcaaagggggaggcagagaatccgctcctttgggaagatcttgatgtcttgcttttttcagggcccctctatgcaggtgtgcacgaacacmcacacacacacacacacacacaccagaccctccctaggccacctctgccagtagcctctgcctgcagcacccaacagggttggccatccagctgccatct

SEQ ID NO: 111143 - DNA, 201 bp, Homo sapiens
aactaaatttaccatacaagagtctttctcatatgaaattatgtctctttaagctttcttaccacaaaaaacctctttgtttttatgactttctttacatstcttttatttcctgcttccttttaccttgttttatacatgacctttaaataagccttaaattagataaaatggttcactttttttaaaaggacacacctt

SEQ ID NO: 111144 - DNA, 201 bp, Homo sapiens
tgcctcagcctcccaagtagctgggattacagacatgtgccaccatgcctggctaattttgtatttctagtagagacaaggtttcaccatgttagtcaagmtggtctcgaactcctgaccttacatgatccacccaccccagcctcccaaagtgctggaattagaggcgtgagccaccaccacacccagcgagaaactgaa

SEQ ID NO: 111145 - DNA, 201 bp, Homo sapiens
aggaaagcacaccattccagtcaaatccttgataaaataaccagtttctccaattgtgtcctgttgcaaaatgaaaacagattcttattgcacttatgcayataactgtattgccataagttaagaatactcacaaatagcttccaaattctggagaaatcaggtagagagaaaaaaatatgctccaaattttgttcatgg

SEQ ID NO: 111146 - DNA, 201 bp, Homo sapiens; identical to SEQ ID NO: 18277

SEQ ID NO: 111147 - DNA, 201 bp, Homo sapiens
gggggacacacaaacaatgacagacagacacacagacacgatcccagacacatagacacttagatgcacgcaggcatgaaccggggatgagagttggggarcagggacagtgaggccaaaacagccctgctcctctcccaggggccctcaggctccctcctggcccccacgggacccgtgctctcttcactcctaggagat

SEQ ID NO: 111148 - DNA, 201 bp, Homo sapiens
cacgatctcggctcactgcaacctccgccccctgggttcaagtgattctcctgccttaacttcttgagtagttgggattacaggcacccgccaccacaccyggctaattttttgaatttttagtagaaattgggtttcaccatgttggccaggctagtctcgaactcctgacctcaggtgacccatctgcctcggccttcc

SEQ ID NO: 111149 - DNA, 201 bp, Homo sapiens
gtccaggggaccggggagtctctttttgaatactctgcccagtcctcaaggtactaagaagatggcagccaatggtacctcccacatggctgcttgatcaytgagctggatacagagcctgttctggcaattgagacctggggcccctgggaactgggcccactggggctgggtgggctgggtcctgaggacaccgactat

SEQ ID NO: 111150 - DNA, 201 bp, Homo sapiens
acaaagtttcgctcttgttgcccaggctggagtgcaatggcacgatctcggctcactgcaacctccgccccctgggttcaagtgattctcctgccttaacytcttgagtagttgggattacaggcacccgccaccacacccggctaattttttgaatttttagtagaaattgggtttcaccatgttggccaggctagtctc

SEQ ID NO: 111151 - DNA, 201 bp, Homo sapiens
cccgccagccaggcaaccactgttgcatcctgggtactctggtcatcacttgcatgtccaagacatgatcccatgtgtccccggcactccatggcatgcamcggggagacaggcctcaggacagaagtgacggagctgcccatcaactccaaggccttcagaaagtttctcaggtttcccggtcagaattcagggcctggg

SEQ ID NO: 111152 - DNA, 201 bp, Homo sapiens
tttatagagaaactgaacttatttatttatttatttgagatggaattttgctcttgttgcgcaggctggagtgcaatggtgtgatctcagctcactgcaayctccacctcccgggtccaggtgattctcctgcctcagcctcccaagtagctgggattacagacatgtgccaccatgcctggctaattttgtatttctagt

SEQ ID NO: 111153 - DNA, 201 bp, Homo sapiens
cgaggcaggagaattgcttgaacccgggaggtggaggctgcactgagccgaagttgtgccactgcattccagcctgggtggcaagcaagactctatctgaraaaaaaaaaaaaaaaacaaactttccaggttccccagcaccccttaggccaagaccagactccatggctggtccaccctcctggaccagccttctcaatc

SEQ ID NO: 111154 - DNA, 201 bp, Homo sapiens
tgggaggtggagggttgcagtgagccaagatcatgccactgtgctccagcccaggcaacagtgcaagactccatgtcaaaaaaaaaaattagcaggacctrgtgtcctttttagacccaggagtcaaagccctgtaacttaatgtcacaaggacattaaaagcacatacagagagatacacagatgtaataaccttaactt

SEQ ID NO: 111155 - DNA, 201 bp, Homo sapiens
cagccaccacagggagctgcaggcaggcacaccactcagcctgtttggggacacctatgagacccaggtaatgtagtcctggggcatccggggcatcctcycacagcagccctggaaaatgggaaccagtctctctctcactgcctctctctctctttcacacacacactcacacacacacacacacacacacacatttca

SEQ ID NO: 111156 - DNA, 201 bp, Homo sapiens
aattgcttgaacccgggaggtggaggctgcactgagccgaagttgtgccactgcattccagcctgggtggcaagcaagactctatctgaaaaaaaaaaaawaaaaacaaactttccaggttccccagcaccccttaggccaagaccagactccatggctggtccaccctcctggaccagccttctcaatcgttccccaagc

SEQ ID NO: 111157 - DNA, 201 bp, Homo sapiens
gacgtgtggctgtggcagctggcaagtggggcccagggacagggttgcagaaccccctgccagagggcatcagcccgctcctcggccctgggctcccacayggggcccactcttggggccttggggcccaggcagactcagacattcacccaggtgatgaggcccaacagtctccatttgattctcctgctcctcttctcc

SEQ ID NO: 111158 - DNA, 201 bp, Homo sapiens
tgaacccgggaggtggaggctgcactgagccgaagttgtgccactgcattccagcctgggtggcaagcaagactctatctgaaaaaaaaaaaaaaaaaacaaactttccaggttccccagcaccccttaggccaagaccagactccatggctggtccaccctcctggaccagccttctcaatcgttccccaagctcacccc

SEQ ID NO: 111159 - DNA, 201 bp, Homo sapiens
cccctgttacccaggctggagtgcagtagcgcaatctcagctcactgcaacctcacctctcaggttcaagcgattctcgtgcttcagcctcccaggtagckgggattacaggtgcccaccaccaggcctggctaatttttgtatttttagtagagacagggtttcaccatgttggccaggctagtggcctcaagcaataca

SEQ ID NO: 111160 - DNA, 201 bp, Homo sapiens
ggtcctaggagaaaaacaaaaacaaaaacatgaaagttaaatacacacacacacacacaccccttggatgttagcttttaattaagctgacttttaaccaytgagctcctttaaaaaaatctttttaaatctcattaccgtatttcagctggaaaaaaatgctgctgtttcagaagtacagccattgctctttcagttttg

SEQ ID NO: 111161 - DNA, 201 bp, Homo sapiens; identical to SEQ ID NO: 18267

SEQ ID NO: 111162 - DNA, 201 bp, Homo sapiens
ccgggttcaagcaatcctcctgcctcagcctcctgagtagctgggattacagacatgcaccaccatgtctggctaatttttgtatttttagtagagacgargtttcaccatgttggccaggctggtctcgaactgccaacctcaggtgatccacccacctcggcctcccaaagtgctgggattacagttgtgagccaccac

SEQ ID NO: 111163 - DNA, 201 bp, Homo sapiens
cctcggcctcccaagtagctgggattacagtcccctgccagcatgcctggctattttttttctatcttttgttatgcctggctattttttgtatttatttwttattattattatttttagtagagacagggtttcaccatgttggccaggctggtcttgaactcctgacctcaagtaatctacccgtctcagcctcccaaa

SEQ ID NO: 111164 - DNA, 201 bp, Homo sapiens
tagcatcatctttgcctccttccaacacttcatccccatctgcagtcgctccttctcagtcctcccttcgctccccctgaggtctcgcgtccatctgcccrggcctctccctagcatttggtggtttgctggcatcattggtattcttgcttctgctgtaccacgcccacctccaccttcgtcttcacaaggcagtctcct

SEQ ID NO: 111165 - DNA, 201 bp, Homo sapiens
atgtagtcctggggcatccggggcatcctcccacagcagccctggaaaatgggaaccagtctctctctcactgcctctctctctctttcacacacacactmacacacacacacacacacacacacatttcagaggttgtagacatgagcataggcctttgtgctccctccctgacgcagaaggcgatggctctgctccgag

SEQ ID NO: 111166 - DNA, 201 bp, Homo sapiens
taccacatggccaacagtcaatatctccccaaagatctcttctatcactgttgttgcccacccccaattaaagatgtagcatcatctttgcctccttccamcacttcatccccatctgcagtcgctccttctcagtcctcccttcgctccccctgaggtctcgcgtccatctgcccgggcctctccctagcatttggtggt

SEQ ID NO: 111167 - DNA, 201 bp, Homo sapiens; identical to SEQ ID NO: 18272

SEQ ID NO: 111168 - DNA, 201 bp, Homo sapiens; identical to SEQ ID NO: 18273

SEQ ID NO: 111169 - DNA, 201 bp, Homo sapiens; identical to SEQ ID NO: 18274

SEQ ID NO: 111170 - DNA, 201 bp, Homo sapiens
ctccccacaaacttgacagattcaattggtctccaaaatgagatcctcccccgcagacgggggcaaagtgcaaaaacaccgtgggtgagggctgggctgastgggtggcagagggagctcgaggggctgagggaggaggagctagtggctgagggttaggcatggtagggaggtgcctggagctgaaggaggagttggggc

SEQ ID NO: 111171 - DNA, 201 bp, Homo sapiens
ggcaaggtgggaggacttgtcctaaagacaacagccctccaccaaagtattgaagcaggggagtgacaggccagagtggtgtttctgtaccatgtgtgggracaaggctgggagggcaagagtggtgcagggagacctgtgttcacttgtgctttacggcttgccactggcacatcccatgggctttgaatgagtcaatct

SEQ ID NO: 111172 - DNA, 201 bp, Homo sapiens
agcccgcggcggagtctgccggccgcacgcagcaggtctggggctcaccttgaatcgggacctgcggggaccgccgtgcggcttcccgctgggtgagcgcsgcagccctgagtggcggggcagtcattccccttttccagatgggaaagccaaatcttgagcccagcgccagcaccgtgttctcaggtgctgggacttcca

SEQ ID NO: 111173 - DNA, 201 bp, Homo sapiens
agcacccaacagggttggccatccagctgccatctttctcaggcagacctctcaggccctcccctgtggtatggtcacctccctcatccccccagttccayggcggggccccacatgccagctagatcaaggtttacattccccatttttgctgtgtccacaggacatggtcagtagggtggcacctcaaggcaaacagca

SEQ ID NO: 111174 - DNA, 201 bp, Homo sapiens
ctgggctaggcaaggtgggaggacttgtcctaaagacaacagccctccaccaaagtattgaagcaggggagtgacaggccagagtggtgtttctgtaccaygtgtggggacaaggctgggagggcaagagtggtgcagggagacctgtgttcacttgtgctttacggcttgccactggcacatcccatgggctttgaatga

SEQ ID NO: 111175 - DNA, 201 bp, Homo sapiens
tcaaggcagaaatgcactagaatgtaggcctgggggcagccaaatcatacaccccaaccctgtcccagaagccacaggcaaagggggaggcagagaatccrctcctttgggaagatcttgatgtcttgcttttttcagggcccctctatgcaggtgtgcacgaacacacacacacacacacacacacacaccagaccctcc

SEQ ID NO: 111176 - DNA, 201 bp, Homo sapiens
ggctgttccggttccaccacatcggtctgttcctctttcttgtgactgtggccttgacttctgaagaaggctgagctggttctgaggctgtaggagatgasatgacagggtgcacctctccttccagggctgagaaacaattctccaaccccaagtgacactgtgcattttgggaaaactcaaaagtgtggggagggtggt

SEQ ID NO: 111177 - DNA, 201 bp, Homo sapiens
cggcctcccaaagtgctgggattacaggtgtgagccactgtgcccggcccttttcgtgtgtgtgtgtgttggtggggagggacgggaaatttagccactcyagaggccttgtttcccataatttggaacttctttaggattttatcaagtcaggtagagctgatcaaacccaatgggaaaaagaatgaaacaacaacaaaa

SEQ ID NO: 111178 - DNA, 201 bp, Homo sapiens
gtgccttcttcattttctttaagaaaccccaggctactataaactattttaggtccctcatgcagcagagggtgcaggagaaaggagagacagcagaagtaaatgaagaaaacagaattcagtcaactgagaagaaaaaaacttttgctcaaaaaaaaaagacaaggtcctaggagaaaaacaaaaacaaaaacatgaaag

SEQ ID NO: 111179 - DNA, 201 bp, Homo sapiens
ttcataagtaacttttctagtgtcacggagcgcctgtgcgataggctccagactcaacccacggagcagttcgactccagagtccacgcacactcttggtyaccatgcaataccacatggccaacagtcaatatctccccaaagatctcttctatcactgttgttgcccacccccaattaaagatgtagcatcatctttgc

SEQ ID NO: 111180 - DNA, 201 bp, Homo sapiens
tggtccaccctcctggaccagccttctcaatcgttccccaagctcacccccagtgcttctaatctcagagcctctgcacccagctctcctgtgcacactcytccccagtcaagttccttgcggcttccctcccctccttgaagctctatgcagctttaagttctttaagcatggactgttcatgacagccttctcctgccc

SEQ ID NO: 111181 - DNA, 201 bp, Homo sapiens
cagccttctcaatcgttccccaagctcacccccagtgcttctaatctcagagcctctgcacccagctctcctgtgcacactcttccccagtcaagttcctygcggcttccctcccctccttgaagctctatgcagctttaagttctttaagcatggactgttcatgacagccttctcctgccctgcaacctcatccacctt

SEQ ID NO: 111182 - DNA, 201 bp, Homo sapiens
ccagtcaagttccttgcggcttccctcccctccttgaagctctatgcagctttaagttctttaagcatggactgttcatgacagccttctcctgccctgcracctcatccacctttccaaacatcaggtccacacgtgtgtttccggtttattgggcccagcctcccaaaagggaaggaaaaggaaagagactggctcttc

SEQ ID NO: 111183 - DNA, 201 bp, Homo sapiens
agggagctgcaggcaggcacaccactcagcctgtttggggacacctatgagacccaggtaatgtagtcctggggcatccggggcatcctcccacagcagcyctggaaaatgggaaccagtctctctctcactgcctctctctctctttcacacacacactcacacacacacacacacacacacacatttcagaggttgtag

SEQ ID NO: 111184 - DNA, 201 bp, Homo sapiens
atgagacccaggtaatgtagtcctggggcatccggggcatcctcccacagcagccctggaaaatgggaaccagtctctctctcactgcctctctctctctytcacacacacactcacacacacacacacacacacacacatttcagaggttgtagacatgagcataggcctttgtgctccctccctgacgcagaaggcgat

SEQ ID NO: 111185 - DNA, 201 bp, Homo sapiens
tcagacccccaaaattctacttgtggccttaattattcacattatttgatcacatcagttaaaatacagagtacctatcattctttcctttgcactatggkaacggaacatctgttgggctgaaatcaattttttctcctttttgtgtgaattcattgatgccttcatccacccactcacccatccctccatttaactaac

SEQ ID NO: 111186 - DNA, 201 bp, Homo sapiens
attcactttcagagttggaggttcccccactcactggcagcttcctgagggtctgcagttttcccctcgctaggaattcctgaaccttcagccagtcacasccttggaagccaaaagggagagagttgtttgggagtgagggttgggtggagagagggattcaaacaaggctgactttctttcattccacatttattaaat

SEQ ID NO: 111187 - DNA, 201 bp, Homo sapiens
tccggcctatgggtttttttttaataaggaaagtaaacattgttccttgtagaaaatatgagaaatatagaaagaaaaatccttacctcattcataatccyaccacgcagagggccgctgtgaacaggctgcctctgttatatttgtattgctacaaactaaagccctgctgggtatagttttgaatctttaacgtaactt

SEQ ID NO: 111188 - DNA, 201 bp, Homo sapiens
agacccaggtaatgtagtcctggggcatccggggcatcctcccacagcagccctggaaaatgggaaccagtctctctctcactgcctctctctctctttcwcacacacactcacacacacacacacacacacacacatttcagaggttgtagacatgagcataggcctttgtgctccctccctgacgcagaaggcgatggc

SEQ ID NO: 111189 - DNA, 201 bp, Homo sapiens
aatgtagtcctggggcatccggggcatcctcccacagcagccctggaaaatgggaaccagtctctctctcactgcctctctctctctttcacacacacacwcacacacacacacacacacacacacatttcagaggttgtagacatgagcataggcctttgtgctccctccctgacgcagaaggcgatggctctgctccga

SEQ ID NO: 111190 - DNA, 201 bp, Homo sapiens
ccagaatgcaggggagagcaggatgccgggtggaggagacaggcaaggtgccgttggcacaccagctcagacaggggcctgcgcagctgcaggggacagasgccaatcactgtcacagcagagtcaccttagaaattggacagctgcatgttctgtgctctccagtttgtcccttccaatattaataaacttcccttttaa

SEQ ID NO: 111191 - DNA, 201 bp, Homo sapiens
ccatggtttctccaagctcaggtgcctgagtgtcccctgaggggcctggccagcagctcacgtcctgactcagatggcagctgagggattgagtgataagragagctggccagcacaggtgtcctcactctggagggacgcccaggtgtctgggaggaatctggctggaggtgggcttgtgacagggcttggtcccaccct

SEQ ID NO: 111192 - DNA, 201 bp, Homo sapiens
gctccatgccccatcccatggtttctccaagctcaggtgcctgagtgtcccctgaggggcctggccagcagctcacgtcctgactcagatggcagctgagkgattgagtgataaggagagctggccagcacaggtgtcctcactctggagggacgcccaggtgtctgggaggaatctggctggaggtgggcttgtgacagg

SEQ ID NO: 111193 - DNA, 201 bp, Homo sapiens; identical to SEQ ID NO: 18270

SEQ ID NO: 111194 - DNA, 201 bp, Homo sapiens
ggggctgagggaggaggagctagtggctgagggttaggcatggtagggaggtgcctggagctgaaggaggagttggggcagggtggcccttccttaactaraggctgcaaaacccattcgtggcttgtggctggggcaggtgggagggggaatttgccttgaatcaccttttgcaccttgaagtttggactgtgcttctct

SEQ ID NO: 111195 - DNA, 201 bp, Homo sapiens
tgggcgacaccatggacgttctgtttgagaagtggttctactgcaaggacctcggcacgcagttggcccccatcatccaggagtgagcccccagcccagcycctgcctcttgctttcctggggctctgcatcagcacctgatgccctgggagaaagtctcccctcccagggtggagatcctggcccagagagcccactgcc

SEQ ID NO: 111196 - DNA, 201 bp, Homo sapiens; identical to SEQ ID NO: 18271

SEQ ID NO: 111197 - DNA, 201 bp, Homo sapiens
gacgggggcaaagtgcaaaaacaccgtgggtgagggctgggctgagtgggtggcagagggagctcgaggggctgagggaggaggagctagtggctgagggktaggcatggtagggaggtgcctggagctgaaggaggagttggggcagggtggcccttccttaactaaaggctgcaaaacccattcgtggcttgtggctgg

SEQ ID NO: 111198 - DNA, 201 bp, Homo sapiens
agattcaattggtctccaaaatgagatcctcccccgcagacgggggcaaagtgcaaaaacaccgtgggtgagggctgggctgagtgggtggcagagggagytcgaggggctgagggaggaggagctagtggctgagggttaggcatggtagggaggtgcctggagctgaaggaggagttggggcagggtggcccttcctta

SEQ ID NO: 111199 - DNA, 201 bp, Homo sapiens
gggggaagatggagacaggctgttccggttccaccacatcggtctgttcctctttcttgtgactgtggccttgacttctgaagaaggctgagctggttctsaggctgtaggagatgagatgacagggtgcacctctccttccagggctgagaaacaattctccaaccccaagtgacactgtgcattttgggaaaactcaaa

SEQ ID NO: 111200 - DNA, 201 bp, Homo sapiens
ctgtgggtgcagaccagctgctcaaggagccaccattccctctgagcacacgatccatcatggagcccatgtccctggatgcctggctggacagccaccayagggagctgcaggcaggcacaccactcagcctgtttggggacacctatgagacccaggtaatgtagtcctggggcatccggggcatcctcccacagcagc

SEQ ID NO: 111201 - DNA, 201 bp, Homo sapiens
cttgtttatgtaaatcaagccccttagcagtcaaaatacaaaatctttcatctttcttttctccttttactggccttttttctccccccaccagacaacctttttttttttttttttttttttccatgacagtcttactctgtcacccaggctgaagtgtagtggtgcaatctcggctcactgcaacctctgcctcctggg

SEQ ID NO: 111202 - DNA, 201 bp, Homo sapiens
gagccaccaccacacccagcgagaaactgaacttattttatctctcaaaattggtccttacagtctcccatgcccatctcttacatgatagtccctgggcsttgaggagctttaatttctgtccctgtgtttcaggaatgcagtttattttgattggcatcttctactgggcctgaagatggggctttaattgctgtcagt

SEQ ID NO: 111203 - DNA, 201 bp, Homo sapiens
tggttctgatcagtcacccaattcttttcctctgaaaggaggaagcaacctattgctcagggaaatagattttccaaaagctcaacagtgtttggttgggtttttttttttttttttttttgatatgggggctcactctatctatcacccacgctggaatgcagtggcgtgatcattatttgttgtattttttaactaaaa

SEQ ID NO: 111204 - DNA, 201 bp, Homo sapiens
gaaaagaggtccaaaactttgctccaactctcaaaggcaatcatgaccctgaaagaagaagaacccctaaactgggggacatcttctgcgtgttggcttctttttttttttttttttacttatttatttacttttgagacagagtcttgttctgtcacccaggctggaatgcggcggtgcaatcttggctcactgcaacct

SEQ ID NO: 111205 - DNA, 201 bp, Homo sapiens; identical to SEQ ID NO: 18276

SEQ ID NO: 111206 - DNA, 201 bp, Homo sapiens
gctacatggtcccaagcaattttatgatctgaattcactttcagagttggaggttcccccactcactggcagcttcctgagggtctgcagttttcccctcrctaggaattcctgaaccttcagccagtcacagccttggaagccaaaagggagagagttgtttgggagtgagggttgggtggagagagggattcaaacaag

SEQ ID NO: 111207 - DNA, 201 bp, Homo sapiens
ctccaagctggtggtcaggcagtgacgcctccacagctagcacctctgctgggggagccccaggaaacagcccatgccctgcgggtgagaggttttagccrtggggcatcctccccctggatataggggctggccttgtgaagggggacgtcctggtcccctccccacaaacttgacagattcaattggtctccaaaatga

SEQ ID NO: 111208 - DNA, 201 bp, Homo sapiens
atttacatttctcctataattatattagcattacttttgtcattcttaccatcatcaatactaatagctagaggcttactgagggcttactatgcgctgarcacatatgtgtaaagcatccctggcatcttcacagctacattttgagtagataactgtcattatgtagatgaggaaactgaggtacagaaaggctaactg

SEQ ID NO: 111209 - DNA, 201 bp, Homo sapiens
tagtcctggggcatccggggcatcctcccacagcagccctggaaaatgggaaccagtctctctctcactgcctctctctctctttcacacacacactcacwcacacacacacacacacacacatttcagaggttgtagacatgagcataggcctttgtgctccctccctgacgcagaaggcgatggctctgctccgagtga

SEQ ID NO: 111210 - DNA, 201 bp, Homo sapiens
tactccacctacctcactcctttcttggagcgtgcaggtgcaggggggccagaggcagatgaacttgcattgggggaattctctgccgcttactaaccccrggatcttggacagggcacatcatgtcacctctccaagcctgtttccataagcacatggggacaacagcccctgtctggtggaagaattcaatgtgcatag

SEQ ID NO: 111211 - DNA, 201 bp, Homo sapiens
tggaagaattcaatgtgcatagagtatgtgcacacagcctggtgcagagttggtgcttgatatgcattgttcctctacacctctcgccctttctgcctggmctgcctgaaaggcctttccaggtcagaaagccagattctattcattatctgcctgagccagtacagttaatcttctagccagccccaggctcccaaacat

SEQ ID NO: 111212 - DNA, 201 bp, Homo sapiens
gctagcacctctgctgggggagccccaggaaacagcccatgccctgcgggtgagaggttttagccgtggggcatcctccccctggatataggggctggccwtgtgaagggggacgtcctggtcccctccccacaaacttgacagattcaattggtctccaaaatgagatcctcccccgcagacgggggcaaagtgcaaaaa

SEQ ID NO: 111213 - DNA, 201 bp, Homo sapiens
ccactcttggggccttggggcccaggcagactcagacattcacccaggtgatgaggcccaacagtctccatttgattctcctgctcctcttctccaggagsgctcctcggtggtgacaatggggggacggcgcctgagcctggcccctgatgacagcctcctggtgctagctgggacctcgtgagtacgcagggagggctt

SEQ ID NO: 111214 - DNA, 201 bp, Homo sapiens
catcagcccgctcctcggccctgggctcccacacggggcccactcttggggccttggggcccaggcagactcagacattcacccaggtgatgaggcccaasagtctccatttgattctcctgctcctcttctccaggagggctcctcggtggtgacaatggggggacggcgcctgagcctggcccctgatgacagcctcct

SEQ ID NO: 111215 - DNA, 201 bp, Homo sapiens
  misc_feature (1)...(201): n = A,T,C or G
cacagctgaaatcacagggcacgactgctgcctccaagctggtggtcaggcagtgacgcctccacagctagcacctctgctgggggagccccaggaaacancccatgccctgcgggtgagaggttttagccgtggggcatcctccccctggatataggggctggccttgtgaagggggacgtcctggtcccctccccacaa

SEQ ID NO: 111216 - DNA, 201 bp, Homo sapiens; identical to SEQ ID NO: 18268

SEQ ID NO: 111217 - DNA, 201 bp, Homo sapiens
gccccaacaccaggaaggactatcacatcgaagagggtgaagaggtaggtttgactggtctccctggatctaggcctgcgggcaaggagcctggccctagmgggagggggcgcttcccactcgaggcccagagatgatggactggagaggggtggacatgtggctgatgagtggagggggcacagctgaaatcacagggca

SEQ ID NO: 111218 - DNA, 201 bp, Homo sapiens
ccccacgggacccgtgctctcttcactcctaggagatggtttagaacgtctcccccactttgcgcattgcaggcaccaggagcagctcaaagtcatgttcrtcggaggccccaacaccaggaaggactatcacatcgaagagggtgaagaggtaggtttgactggtctccctggatctaggcctgcgggcaaggagcctgg

SEQ ID NO: 111219 - DNA, 201 bp, Homo sapiens
tgttgggtcagacgatgtggggggacacacaaacaatgacagacagacacacagacacgatcccagacacatagacacttagatgcacgcaggcatgaacyggggatgagagttggggaacagggacagtgaggccaaaacagccctgctcctctcccaggggccctcaggctccctcctggcccccacgggacccgtgct

SEQ ID NO: 111220 - DNA, 201 bp, Homo sapiens
tatagtcagacagcatgggtgagtggcaggtcaaggtcgttttgcccctacactgccccatcctgggaaggggtcttcaatttgctactctcctgtaattygagatcttgatcctgtgatcctggttgatgaagccatagattcaccaccacatcatttcccttgttgggtcagacgatgtggggggacacacaaacaatg

SEQ ID NO: 111221 - DNA, 201 bp, Homo sapiens
agggtcctatagtcagacagcatgggtgagtggcaggtcaaggtcgttttgcccctacactgccccatcctgggaaggggtcttcaatttgctactctccygtaattcgagatcttgatcctgtgatcctggttgatgaagccatagattcaccaccacatcatttcccttgttgggtcagacgatgtggggggacacaca

SEQ ID NO: 111222 - DNA, 201 bp, Homo sapiens
gttcagtcattccctggctttgtgaccctctcttggctggctaaatcggctgtaaaatgagagggttgtattgagtttatttatttatttatttaagacasagtctccccctgttacccaggctggagtgcagtagcgcaatctcagctcactgcaacctcacctctcaggttcaagcgattctcgtgcttcagcctccca

SEQ ID NO: 111223 - DNA, 201 bp, Homo sapiens
ctgcgtgttggcttctttttttttttttttttacttatttatttacttttgagacagagtcttgttctgtcacccaggctggaatgcggcggtgcaatctyggctcactgcaacctccgcttcccggttcaagcaattctcctgcctcggcctcccaagtagctgggattacagtcccctgccagcatgcctggctatttt

SEQ ID NO: 111224 - DNA, 201 bp, Homo sapiens
gacctcccccatagcccctcccctgccatccacaccatcgtcatccatgcaggcagcctctaggctgctgtgccctgtgtgtacaaatggtcccagacccwgcgcctccccttcccagaggaaagcccttgcccctgccctctgtggcagggccacctgagaacaccctgaagccctacacagacacattctgctgcttat

SEQ ID NO: 111225 - DNA, 201 bp, Homo sapiens
ttttctgctgttcagtgatctgtacctctgccccaggccaggcctgcccctcatcacagggaagacctctgagcaggggacaagagcgagaaaatagagamaatatcgtatagcctgcccagtaaggcagtaagggtttaaatctggcccagagggtcactccggactcccctctcccaacttttcctttgtccctcctcc

SEQ ID NO: 111226 - DNA, 201 bp, Homo sapiens
gctctcttcactcctaggagatggtttagaacgtctcccccactttgcgcattgcaggcaccaggagcagctcaaagtcatgttcatcggaggccccaacwccaggaaggactatcacatcgaagagggtgaagaggtaggtttgactggtctccctggatctaggcctgcgggcaaggagcctggccctagcgggagggg

SEQ ID NO: 111227 - DNA, 201 bp, Homo sapiens
ctgctcctctcccaggggccctcaggctccctcctggcccccacgggacccgtgctctcttcactcctaggagatggtttagaacgtctcccccactttgygcattgcaggcaccaggagcagctcaaagtcatgttcatcggaggccccaacaccaggaaggactatcacatcgaagagggtgaagaggtaggtttgact

SEQ ID NO: 111228 - DNA, 201 bp, Homo sapiens
actattttagtaaaaaaaaaaaaaaaaaaggataacacaatataaaagtaagcagtttaacagctgagaccatttatctttttacattcttggggttccayaaggaaaaacagatttctcccccaaaaggagtctagtgccttcttcattttctttaagaaaccccaggctactataaactattttaggtccctcatgcag

SEQ ID NO: 111229 - DNA, 201 bp, Homo sapiens
gctggtcttgcatcagtgtacctttgacattaatgactaatttatagagaaactgaacttatttatttatttatttgagatggaattttgctcttgttgcscaggctggagtgcaatggtgtgatctcagctcactgcaatctccacctcccgggtccaggtgattctcctgcctcagcctcccaagtagctgggattaca

SEQ ID NO: 111230 - DNA, 201 bp, Homo sapiens
acctttgacattaatgactaatttatagagaaactgaacttatttatttatttatttgagatggaattttgctcttgttgcgcaggctggagtgcaatggygtgatctcagctcactgcaatctccacctcccgggtccaggtgattctcctgcctcagcctcccaagtagctgggattacagacatgtgccaccatgcct

SEQ ID NO: 111231 - DNA, 201 bp, Homo sapiens
gcaggcatgaaccggggatgagagttggggaacagggacagtgaggccaaaacagccctgctcctctcccaggggccctcaggctccctcctggcccccaygggacccgtgctctcttcactcctaggagatggtttagaacgtctcccccactttgcgcattgcaggcaccaggagcagctcaaagtcatgttcatcgga

SEQ ID NO: 111232 - DNA, 201 bp, Homo sapiens
ataaaaaggtaacaccacaccaacagcagaaagactgaggagtttgggaacccttttgttccaaacagctgactagatgccccacagacccaacgccagcrtgggagtcaaggagcctgagacctggctcaggttcagtcattccctggctttgtgaccctctcttggctggctaaatcggctgtaaaatgagagggttgt

SEQ ID NO: 111233 - DNA, 201 bp, Homo sapiens
gacaaaaataaaaaggaagaccttcagagggaaggcgttgagagtagacggaaggaagactcagatgctgggctgaagtgggaggaagctaggaaccctgmatggggctaccacacaccaggactcattcttagcacccagtgacttctggggaaggggtgagttgagcaagcaaggagcaacctgttctcaccatgggcc

SEQ ID NO: 111234 - DNA, 201 bp, Homo sapiens
tagagaaaaattaacaaaattaaaagttgattgtttaaaattatcaacaaaattcacaaaaatttagcctagtcaaaaaaataaatgaaagaaagaaacaraggaaagattcaatatcaacttgacaaaaataaaaaggaagaccttcagagggaaggcgttgagagtagacggaaggaagactcagatgctgggctgaag

SEQ ID NO: 111235 - DNA, 201 bp, Homo sapiens
tagatactgtcaagtttcagatgatcattcaacaaaggttccagccaggtacaggcgaagacatcatccctggccatcaagaagctaccctgcctccactrgatagagcagttcggtgatccccggtaggtagggactatgtcccgagccagcatgaagaagctacagaaaaaggacaataggtccatctgcctcccataa

SEQ ID NO: 111236 - DNA, 201 bp, Homo sapiens
agagctgacattgtctcctccacacgctgttacagcactttccagagccttctctctcctgtgcaaaatagcaactcttaaggaaaaactcattgtaccakttgcggaagaagaggcaacagtccaaaacaataagatcactgtagtgagtgttggacaagttggtatggcgtgtgctatcagcattctgggaaaatctct

SEQ ID NO: 111237 - DNA, 201 bp, Homo sapiens
tttttgtttctgagttattttacttaggacaatggcctccagctccatccatattctggcaaagaacaagattttattctttttatggctgcacagtattycattgtgtatgtataccacattatatttattcaattaaccagtgaagacaatgaggttaatctcatgactttgctactatgaatagagtaaacatatgag

SEQ ID NO: 111238 - DNA, 201 bp, Homo sapiens
acatgaactcatacattttatggctgcatagtattctatggtgtatatgtgccacatttttcttatcctgtctatcacagatgggcatttgggttggttasaagtctttcctattgtgaacagtgcagccataaacatacgcatgcatatgtctttatagtagaattatttataattccctgggtatatactcagtggtgg

SEQ ID NO: 111239 - DNA, 201 bp, Homo sapiens
gaattgctgagctagaccacttggctccctggcttcagtgtcctttccaagggagtaggcagttctgtctcactggcattctgggagccactggggtatgaaaaaaaactcctgcagctagcttgttgtctggccaaacggctgaacagttttgtgcttgaaacccagggccctggtggcatagacacctgagggaatctc

SEQ ID NO: 111240 - DNA, 201 bp, Homo sapiens
ggggggagatgaggcaggaaatagggtctggaggcataaaacataaggccaattcacacttcagctataacaggaaatatcctcttcataggatgtaaacygtaaatgagtttgtcactttacttcatcctctccatttacatagggcatacccaaagtaaccaattgaatcctctggggggctatttaaactcccccaaa

SEQ ID NO: 111241 - DNA, 201 bp, Homo sapiens
gaaattacttccagataagtaaagagggaaagaaaacataacacaatgtaggaaatgaagcgaaagcagtgcttagggggtaaatttatacctcaaaatasccataatgaaggagaagaaaaatattgtatcaatattttaaactttcaccttaataaattactaaaaaaacaggacactaaacctaaaacatgcagaaag

SEQ ID NO: 111242 - DNA, 201 bp, Homo sapiens
gatttaacgtctgtttagtctcagaatagttacttctctttgctttctgtttccatttgaattgaatattttttccccaatccttttccttgagtttataygaatccttatgtcaggtgagtctcttgaagacagaagatatttggtaggtggatttttatccattctcccattctgtatttttttaaatgtagcatttag

SEQ ID NO: 111243 - DNA, 201 bp, Homo sapiens
ctaacatgtaagtctttaatccgtctttttttaattttcttattatgctgaaatttattaaagactattgctttgactgcagaatatgtttaaatattttrtggaaggcaaagttttcattcaggaatgacaagtgcaaggaatgtcattcttttttcgtattttttattttattattattatactttaagttttagggta

SEQ ID NO: 111244 - DNA, 201 bp, Homo sapiens
cccttataaagctaaaaagcaagacctgaggggatcgaactgtttgaagcatggtaacttaatacaagaactaatctcaagagtacttatgggaataaaayatttccaacaccaggtgaatctctagatggaaatgagtcatttggtgggccctaagttatgctgattcagagatggctccaagggaaaaaaaaaaaacta

SEQ ID NO: 111245 - DNA, 201 bp, Homo sapiens
tgcggcattatttctgagggctctgttctgttccattgatctatatctctgttttgataccaggaccatgctgttttggttactggagccttgtagtataktttgaagtcaggtagtgtgatgcttccagctttgttcttttgacttaggattgacttggcaatgtgggctcttttttggttccatatgaactttaaagta

SEQ ID NO: 111246 - DNA, 201 bp, Homo sapiens
ggcaaagactttatgtctaaaacaccaaaagcaatggcaacaaaagccaaaattgacaaatggggtctaattaaactaaagagcttctgcacagcaaaagraactgtcatcagagtgaacagccaacctacagaatgggagaaaatttttgcaatctattcacctgacaaagggctaatatccagaatctacaaagaactt

SEQ ID NO: 111247 - DNA, 201 bp, Homo sapiens
aagaaaaacactaccccataaaaaagggggcaaaggatatgaaaagacacttctcaaaagaagacatttatgcagctgtcgaacacatgaaaaaatactcatcatccctggtcattagagaaatgcaaaccaaaaccacaatgagataccatctcatgccagttagaatggcaatcatttaaaagtcaggaaacaacagat

SEQ ID NO: 111248 - DNA, 201 bp, Homo sapiens
acggaaactaagtcaaaaaatcgaggaagggagactcctttccaactcattctatgaggccagcatcatcctgatatcaaaacctggcagacacaccacamacacacacacacacacacacacacacacacacaacacacaaattagaggccaatacccttgataaacatggatgctaaaatactcaacaaaatactagca

SEQ ID NO: 111249 - DNA, 201 bp, Homo sapiens
tatctatttaaatttttgtgagtacatagtaggtgtatatatttgtgaagtaaattagatgttttggtacaggcacataatgcataataatcacattataraaaatggagcatccattccctgaaatatatatcttttgtgttacaaacaatccaattataactctttttagttattctaaaatgtgcaattaaattattg

SEQ ID NO: 111250 - DNA, 201 bp, Homo sapiens
agaaaaaatgttaatgtcttcaaattcattattcctcaaattgtcaagcacacttctgattgcacataattgtggtttccaacctaggggacattcttacrtatgttacctggaaaataagtggattactcaaacaccatgtgattggaagtggatgtaatccggattctgctagatttcactgccttatggatgaaaaat

SEQ ID NO: 111251 - DNA, 201 bp, Homo sapiens
aattaaaataactagaaaagcaagagcaaacaaattcaaaagctagcagaaggcaagaaataactaagatcagagcataactgaagaagatagagacatgyaaaaaaaaaaaaagtcaaaaaaatcaataaatccaagagcaggttttttggaaaaatcaactaaatagatagaccattagccagaataataacgaagaaa

SEQ ID NO: 111252 - DNA, 201 bp, Homo sapiens; identical to SEQ ID NO: 18297

SEQ ID NO: 111253 - DNA, 201 bp, Homo sapiens
attaaaataactagaaaagcaagagcaaacaaattcaaaagctagcagaaggcaagaaataactaagatcagagcataactgaagaagatagagacatgtaaaaaaaaaaaaagtcaaaaaaatcaataaatccaagagcaggttttttggaaaaatcaactaaatagatagaccattagccagaataataacgaagaaaa

SEQ ID NO: 111254 - DNA, 201 bp, Homo sapiens
gttttgtcatattaacagaattacttttctgctttcttctcatttgagtacactacttctttaattttttttaattttattgttggtttgacttttaaaawagttgtttttcttcttaaggatatgactttaatgtttgtagtttattacagcttaatttggttcttgatgcttttaggggtaaatactctgtatgagttt

SEQ ID NO: 111255 - DNA, 201 bp, Homo sapiens
gagcttaaagaaatgtgtaaccatgaggacaccataacctataaatgacttgctgagaccagaaacccaaaatgatggcaactgagattggcgctagggcyctaacttagcgctagggcactaagtgagagtgtgaccaaaaaagggggaatttttcaaacaaaattctaggaggccattgctttgaactaaactcaagcg

SEQ ID NO: 111256 - DNA, 201 bp, Homo sapiens
tgcatctatgccaatatctattatttttttattttttcattatggccattcttgttggagtaaggtggtatcacattatggttttaatttgcatttccctsatcattagtgatgtttttaagccaatgtctagaagggtccttctgatgttgtcttctagaatttttatattttcaagtcatagatttaagtccttgatcc

SEQ ID NO: 111257 - DNA, 201 bp, Homo sapiens
tgttaaaccatccctgcatccctggtgtgaaactctcttgatcatggtggattatatttttgatatgctgttagattcgtttagctagtgttttgttaagsatttttgcatctgtgtttatcaggggtactggtttgtcatttttttttgttatgtccttcactgcttttggtattagggtgatgctggcttcatagaatg

SEQ ID NO: 111258 - DNA, 201 bp, Homo sapiens
atcacatttattgacttgcatatgttaaaccatccctgcatccctggtgtgaaactctcttgatcatggtggattatatttttgatatgctgttagattcrtttagctagtgttttgttaaggatttttgcatctgtgtttatcaggggtactggtttgtcatttttttttgttatgtccttcactgcttttggtattagg

SEQ ID NO: 111259 - DNA, 201 bp, Homo sapiens
tgttttatggccaaggataggaccaattttggaggatgttccatgtgcagatgagaaaaagtgtattctgcagttgctgggtagaatgttctgtaaatgaygtaaatgtctattagttccaattggtcaacagtctagtttaactataattttttgttaattttctgccttgatgctctgcctagtgttgtcagtgtggtg

SEQ ID NO: 111260 - DNA, 201 bp, Homo sapiens
aataggtccatctgcctcccataaagattcattgtaaataacatctctcaggggggagatgaggcaggaaatagggtctggaggcataaaacataaggccrattcacacttcagctataacaggaaatatcctcttcataggatgtaaaccgtaaatgagtttgtcactttacttcatcctctccatttacatagggcata

SEQ ID NO: 111261 - DNA, 201 bp, Homo sapiens
tcactttacttcatcctctccatttacatagggcatacccaaagtaaccaattgaatcctctggggggctatttaaactcccccaaattttgtaatgcagyctttgagcccttatgctcgggcccactcccacactgtggagtgtacttccattttgcaataaatctcttcattccttccttactttgtttgtgtgttttg

SEQ ID NO: 111262 - DNA, 201 bp, Homo sapiens
ctcatgctcctctgtaatccatccccactttctgtcccagacaatcactgaccttttcctgtcataatttttttaaattctaaataactagacttatatarcatgtaaccatttcacacctgaatttttaacttagtgtaactattttgagagtcatctgtgttgttgtgtgtatcaatacttggctcctttttattgctg

SEQ ID NO: 111263 - DNA, 201 bp, Homo sapiens
ggaaaatctctggctgatgaatttgcttttgtggatgttttggaagataagcttaaaggagaaatgatggatctgcagcatgggagcttatttctcaagamgcttaaaattgtggcagataaagattattctgtgactgccagttataagattgtagtggtaactgcaggagtccttcagcaagagggggagaggcgtctc

SEQ ID NO: 111264 - DNA, 201 bp, Homo sapiens
aaagtgctgggattacaggcatgagccaccacgccggtcttacaagtctatttattgacatttcatttctctcagtaaatactcaaaaataaagtgtctgrgttgtgtggtagttgtatattatttgttaataaataattttcaatttttatttttaattttaaattgacaaattatagttgtatatgtttatgtggtaca

SEQ ID NO: 111265 - DNA, 201 bp, Homo sapiens
ggtagttgtatattatttgttaataaataattttcaatttttatttttaattttaaattgacaaattatagttgtatatgtttatgtggtacaaaatgagkttataatctatgaatataatgtgtaataattgaataagtctaacatatctatcacctcaaatacttatttttgtggtgagaacatttgaagctttcttag

SEQ ID NO: 111266 - DNA, 201 bp, Homo sapiens
actcaatgggcaaaaactggaagcattccatttgaaaactggcacaagacaagaatgccctctcttaccactcttattcaacatagtcttggaaattctgrccagggtaatcaggcaagagaaataaataaagcgtattcaaataggaagagaggaagtcaaattgtccctgtttgcagatgacatgattgtatatttaga

SEQ ID NO: 111267 - DNA, 201 bp, Homo sapiens
tcttctacatgtagcttgccaattatctcagcaccattcactgaataaagtatcctttccccactttgtctttttgtttgctttgtcaaagatctgttggytgtaagcatttggctttatttctgggttctctattccattccattggtctatgtgcctattttaataccagtactactttgttttggtgactgtagactt

SEQ ID NO: 111268 - DNA, 201 bp, Homo sapiens
gaaagcctggtcatcaagctctgaaattctttcttctacttgttctagtctatttttgaagatttccaccatactttgtgtttttataagtgtgtctttcrtttccaaatgttctgaatggtttttgtttatgatatctatctctctggaaattttaaaatatttatactgatttttttttaattctatatgttgattttc

SEQ ID NO: 111269 - DNA, 201 bp, Homo sapiens
tcagctcactgcaaccttcacctcccaggttcaagtgattctcctgcatcagcctcccaagtagctgagattacaggcatccaccaccatgcctggctaakttttgtatttttaacagaaacggggtttcaccatgttggccaggttggtctcgaactcctgacctgaagtgatctgcccactcggcctcccaaagtgtta

SEQ ID NO: 111270 - DNA, 201 bp, Homo sapiens
ttccttgccactccctaaatcagttccagctctgggtagggttaagaccttttcctgtggcctcagttttcagttccccagtggagatgtgtattctggargcagtctctgtccctatcacactctggggacttacagtttttcacctgtctcacagagtaggctgcatcctgtcacttttttcaaagggcctgtggattt

SEQ ID NO: 111271 - DNA, 201 bp, Homo sapiens
agtactggtttggtagtgacaaatttcctccacattttttgtctgtaaaagactatctctccttcatttatgaagctcagttttaccagatataaaattaytggctgataattattctgtttaagtaggctcaagatagaaccccactctcttctagcttgtaaagctactgctggaaagtccactgttagttagttttat

SEQ ID NO: 111272 - DNA, 201 bp, Homo sapiens
ttcaccttttgataaaaattcgtgttgttccagctttttatttttatacataaggttacaatgaataatcatgtacaagcctttattttattttattttaktttagtttagtttaagatggagtttcactttttctcaccaaggctgtagtgcaatggcacaatcttggctcacttccacttccgcctcccaggtttaagc

SEQ ID NO: 111273 - DNA, 201 bp, Homo sapiens
tcctccacattttttgtctgtaaaagactatctctccttcatttatgaagctcagttttaccagatataaaattactggctgataattattctgtttaagkaggctcaagatagaaccccactctcttctagcttgtaaagctactgctggaaagtccactgttagttagttttatatatatattcaagttgcctgatgct

SEQ ID NO: 111274 - DNA, 201 bp, Homo sapiens
ctgataatcacaattttactatctgattctttgagttggattgttttagattccacattaagtattgtgatatttgtctctctgtgcttagcttatttcayatggcataatgttctccaatttcattcacatagtcaaaattgacaatttttttgtttgtttgttaaggctgaatagtatttcattgtgcatacaggcaga

SEQ ID NO: 111275 - DNA, 201 bp, Homo sapiens
ttgagtgctggtgacaattacttacaaaagacaaacatgaattttgctgcattgattgaccattcacaaaacatttctctgtaacatgccttggtatttgrtagcattttatttactgtagagcttctttcaaaattagttaatcttctcaacttctcacactttattatcaattaagtctatgtaatattccaaatcttt

SEQ ID NO: 111276 - DNA, 201 bp, Homo sapiens
gatggatctgcagcatgggagcttatttctcaagacgcttaaaattgtggcagataaagattattctgtgactgccagttataagattgtagtggtaactkcaggagtccttcagcaagagggggagaggcgtctcaatttggtgcagaaaaaatgttaatgtcttcaaattcattattcctcaaattgtcaagcacactt

SEQ ID NO: 111277 - DNA, 201 bp, Homo sapiens
accaaatttccttgtataaggctactaactgaagtaaaacaaaaattaattaagtaccaagaaaatgctttgtcaaagctggatggagaatgactttgacragctgagagaagaaggcttcagacgatcaaattactctgagctacgggaggacattcaaaccaaaggcaaagaagttgaaaacattgaaaaaaatttaga

SEQ ID NO: 111278 - DNA, 201 bp, Homo sapiens; identical to SEQ ID NO: 18299

SEQ ID NO: 111279 - DNA, 201 bp, Homo sapiens
gacaaacatgaattttgctgcattgattgaccattcacaaaacatttctctgtaacatgccttggtatttgatagcattttatttactgtagagcttcttwcaaaattagttaatcttctcaacttctcacactttattatcaattaagtctatgtaatattccaaatcttttatagtcatttcaaccatgttcacagtat

SEQ ID NO: 111280 - DNA, 201 bp, Homo sapiens
ctggcctttatttgttggcaatattttatttagtgattaaatctcagtgcttgttattgatccgttcagggcttctattttttcctgttttaattcgggargattatatgtttctaagaatttatccattttgtctagattttctagtttatgcatgtatagatattaataacattcttgaaagatcttttgcattttttg

SEQ ID NO: 111281 - DNA, 201 bp, Homo sapiens
ctttgaagccagatattaacttctctctgttatgaatattctattatatatgtcatcttcttccaatataaggctgtttaacctgcattaaaaataaaatrtttactgcagccacctttgtcaattatcttagttaaatcttctaaataatttgctgcaacttttgcatcaatatttgctggttcacatatccttctatgt

SEQ ID NO: 111282 - DNA, 201 bp, Homo sapiens
taaatagatgcagaaaagggcttcgacaaaattcaacagcctttcatggtaaaaactctgaataagctaggtatcgatggaacatatctcaacataataaragctatttatgacaaacctacagccaatatcatactcaatgggcaaaaactggaagcattccatttgaaaactggcacaagacaagaatgccctctctta

SEQ ID NO: 111283 - DNA, 201 bp, Homo sapiens
atactttaataaaagccatctatgacaaacccacagccaacatatactgaatggacaaaagttagtagcattccccttgcaaactgaaacaaggacaggayatcttctctcaccacatctattcaacatagtacaaaaaggcctagccagaacaggacatctaaataggaagagagaaagtcaaactctccttgtttgcag

SEQ ID NO: 111284 - DNA, 201 bp, Homo sapiens
ggtctcctcatttgttgtaaatttcagtgtagtgtagttaagccatataatcagggctacaggtactatttttgaccactggggggaccattgttctccasgttgtttcattttttttctttttattatactttaagttctaggtacatgtgcacaatgtgcaggttagttacatatgtatacatgtgccatgttggggtg

SEQ ID NO: 111285 - DNA, 201 bp, Homo sapiens
cactgataaatttggttgatgcaggattgccacaaaccttcaatttgcaaaaaaaaaaaaaaggcaataactgtgaagtggaattaaataaaacatgcctwtatataccactttatctttcttcattcatcttcatatctttctttattcccaccaacagtgcataagcatccctgtttctccacatccatgccaacattc

SEQ ID NO: 111286 - DNA, 201 bp, Homo sapiens
ccaccatgaaaaatataataaaatgaaaagacttaaaatattatgagaattaccaaaatatgacaaaaacattatgtgaacacatgttgttggaaaaatgrcactgataaatttggttgatgcaggattgccacaaaccttcaatttgcaaaaaaaaaaaaaaggcaataactgtgaagtggaattaaataaaacatgcct

SEQ ID NO: 111287 - DNA, 201 bp, Homo sapiens
gtgaagggtcggagctgcctcaactcacttgccgggtcagcagaaaagctatctacctcgcagcctcattcctgacccaatgtcctggctattcaggtcastcaggcatctctttttatctgtagaaatgttgatgttcccagtaaaaatgaatagtaactctgcctttgtgcaagcctgaacctggggagtgctccacca

SEQ ID NO: 111288 - DNA, 201 bp, Homo sapiens
gaaaaaaaatccaaggaatctaaagattacaataaaataatacaggatcttataggtgaaatggctcgttataagaaagaaccaaacaaatctgatagagmtgaaaaacattctaaaaaaatttcataatgcaatggcaagtattaacagcataatttaccaatctgaggaaagaatctaagagcttggaaactggttcta

SEQ ID NO: 111289 - DNA, 201 bp, Homo sapiens
atccaccatgcctggctccatataaactttagaattgtttattctaaagttgtgaaaaatgtcattagtaaattgatattaactgcattgaatccatagaytgctttgggcagtgtggtcattttaataatatttattcttctaattgatgagtatgggacatttttccatttgtatcatctacaatttccttcatcaatg

SEQ ID NO: 111290 - DNA, 201 bp, Homo sapiens
cctcccaggtttaagcaattctcctgcctctgcttcccgagtagttgggattacaggcacccgccacaatgcccagctaaattttgtatttttagtagagrcagtgtttcaccgtgttggccaggctggtctagaactcgtgaactcaggtgatccgcccacctcggcctcccaaagtgctgggattacaggcatgagcca

SEQ ID NO: 111291 - DNA, 201 bp, Homo sapiens
taattttatttttagttttttttttgaagaaactccataccatttttgacaatggctgtattaatttccattcccaccaaaaatgaacaagaattaccctygctttgaacccttgccaacacttattttctttcatgttttttataaaagacattctaacaggtgtgaaggtgatgcctcactgtggttttacttcttatt

SEQ ID NO: 111292 - DNA, 201 bp, Homo sapiens
ttttggaagataagcttaaaggagaaatgatggatctgcagcatgggagcttatttctcaagacgcttaaaattgtggcagataaagattattctgtgacygccagttataagattgtagtggtaactgcaggagtccttcagcaagagggggagaggcgtctcaatttggtgcagaaaaaatgttaatgtcttcaaattc

SEQ ID NO: 111293 - DNA, 201 bp, Homo sapiens; identical to SEQ ID NO: 18294

SEQ ID NO: 111294 - DNA, 201 bp, Homo sapiens
caagcattcttatacaccaataacagacagagagccaaatcatgagtgaactcccattcacaattgcttcaaagagaataaaatacctaagaatccaactwacaagggctgtgaaggacctcttcaaggagaactacgaaccactgctcaatgaaatcaaagaggatacaaacaaatggaagaccattccatgctcttggg

SEQ ID NO: 111295 - DNA, 201 bp, Homo sapiens
cagaacttccaagactatgttgaataagagtggtgagagagggcatccttgtcttgggccgattttcaaagagaatgcttccaggttttgcccattcagtrtaatattggccgtgggtttgtcataaacagctcttattattttgagatatgttccatcaatacctagtttattgagggtatttagcatgaaggggtgttg

SEQ ID NO: 111296 - DNA, 201 bp, Homo sapiens
tggcttctttccttcaaccttatgaaccaatctctgctagattcaaagttttcttcttcagcttcatcacctatctcagccttcatagaatttaagtgagwcagggcattgttcaggattaggttttagcttgaaagagtgtaagaactgatttgattttctatccagatcactaaaactttgtccatatcagcaataaag

SEQ ID NO: 111297 - DNA, 201 bp, Homo sapiens
ataaattccaccagatgtacaaaaaagagctggtactattcctacggaaactaagtcaaaaaatcgaggaagggagactcctttccaactcattctatgargccagcatcatcctgatatcaaaacctggcagacacaccacacacacacacacacacacacacacacacacacacaacacacaaattagaggccaatacc

SEQ ID NO: 111298 - DNA, 201 bp, Homo sapiens
tttattttattttattttagtttagtttaagatggagtttcactttttctcaccaaggctgtagtgcaatggcacaatcttggctcacttccacttccgcmtcccaggtttaagcaattctcctgcctctgcttcccgagtagttgggattacaggcacccgccacaatgcccagctaaattttgtatttttagtagaggc

SEQ ID NO: 111299 - DNA, 201 bp, Homo sapiens
actgcaaccttcacctcccaggttcaagtgattctcctgcatcagcctcccaagtagctgagattacaggcatccaccaccatgcctggctaagttttgtrtttttaacagaaacggggtttcaccatgttggccaggttggtctcgaactcctgacctgaagtgatctgcccactcggcctcccaaagtgttaacattac

SEQ ID NO: 111300 - DNA, 201 bp, Homo sapiens
atttataagcccctgactggggctgctgcctttcttccagagatgtcctgcccagagagaaagaatctagagaggcagtctggctacagtggctttgcagrgctgaggtgggctctgcccagttcaatcttattagagggtttgtttacaccgtgaggggaaaactgcctactgaagcctcagttatggcagacatccctc

SEQ ID NO: 111301 - DNA, 201 bp, Homo sapiens
gctcgttataagaaagaaccaaacaaatctgatagagctgaaaaacattctaaaaaaatttcataatgcaatggcaagtattaacagcataatttaccaakctgaggaaagaatctaagagcttggaaactggttctatgaaataactcactcagagaaaaataaagaaaaaacaataaagaagaataaacaaaaccttca

SEQ ID NO: 111302 - DNA, 201 bp, Homo sapiens
tcctgagttacttcacttagaataatagtctccaattccatccaggttgctgcaaatgccattaattcattcttttttatggctgtgtagtattcaattgwatatatatatatatatatatatatatatatatatatgacagtttctttatccactcattgattggtgggcatttgggctggttccatgttttttcaattg

SEQ ID NO: 111303 - DNA, 201 bp, Homo sapiens
taaaaatagaattcagaatatagatagaaatgaaggtcacaggcataaaggataaaatgaaaaaaaatccaaggaatctaaagattacaataaaataatayaggatcttataggtgaaatggctcgttataagaaagaaccaaacaaatctgatagagctgaaaaacattctaaaaaaatttcataatgcaatggcaagta

SEQ ID NO: 111304 - DNA, 201 bp, Homo sapiens
tttttgcagtggctgctaccggttgttctttccatgtttaattcttccttctggagctgttctaaggcaggcatggtggtgacaaatttttctgcatttgyttgtctgtaaaggatttttttttcttctttgcttatgaagcttatttggctggatttgaaattctgggttgcaaattcttttctttaagaatgttgaata

SEQ ID NO: 111305 - DNA, 201 bp, Homo sapiens
ttaggtttatttctgggttctctattctgtttcagtgatctatgtgcttatttttataccagtcccattttgtttcattggtctatgtgcttatttttatrccagtcccatgctgtttgggtgactatggactaatagtgtagtttgaagtcaggtagtgtgatgcctgcagatttgttctttttgcttagtcttcccttt

SEQ ID NO: 111306 - DNA, 201 bp, Homo sapiens
gatttttatattatctctaggacctctttttatattttctatctacttgtcaaaattctcattttgttcatatattgttttccaaatttatttaatgtttkaatctgtattttcttgaagttctctgaacttctttaagggattatcttgaactctttgtcagtcattcatagatcttcatttcttcaggattcactattg

SEQ ID NO: 111307 - DNA, 201 bp, Homo sapiens
gttacagatgtgagccaccatacccagcctgttggtaatttcttaattaccagttcaatctggctgcttgttattggtctgttcaggatttctaattcttyctgatttaagctagaaggattgtattttttcaggaatttattcatctcctctaggtattctagtttatgcacataaaggtgttcatagtagcctttagtg

SEQ ID NO: 111308 - DNA, 201 bp, Homo sapiens
aaatgtcagacctaaaaccataaaaaccctagaagaaaacctaagcaataccattcaggacataggcatgggaaaggacttcatgtctaaaacaccaaaarcaatggcaacaaaagccaaaattgataagtgggatctaatcaaactaaagagcttctgcacagcaaaagcaactaccatcagagtgaacaggcaacctac

SEQ ID NO: 111309 - DNA, 201 bp, Homo sapiens
agaaatagaaaaaatcacccaaagctactaggaacacatttatgcacacaaactagaaaacctaaaaaagatgaataaattcctggaaatatgcaaccctmcttgattaagtcaggcagaaataaaatctctgaacagaccaataacaagtagcaggactgaaacagtaataaaaaaaattgtaaacaacaaaatccaaga

SEQ ID NO: 111310 - DNA, 201 bp, Homo sapiens
cctagtgcaagaagactccaagccactgctgcccttcagagctctgtaacccagagatttcccatcacgtttctgagtaacatcacctagggacataagcrgccttttaaattcccatcttccccaggacttcccttgccctttccccttctagttggttcccttcctcttccttcactgacagcctctagaacaggcttg

SEQ ID NO: 111311 - DNA, 201 bp, Homo sapiens
tgaggaggcagtctgtaccttagcagagcttcagcactgtcctgggagatttactgctctcttcagagctggcaagaggaaagtttaagtctgctgaagcygcacctacatccagcccttgccccaggtgctctatactagggagatgacagttttatttataagcccctgactggggctgctgcctttcttccagagatg

SEQ ID NO: 111312 - DNA, 201 bp, Homo sapiens
ccttgagtccttatgcttgggcttgctcccacattgtggagtgtacttcaatttttcaataaatccctacgttccttccttgctttgtgtgttttgtccarttctttgttcgagatgccaagaacctggacaccctccaccataacatattttggcgagccagccaggaggaagaggaaatcccaaagttagggtttcact

SEQ ID NO: 111313 - DNA, 201 bp, Homo sapiens; identical to SEQ ID NO: 18295

SEQ ID NO: 111314 - DNA, 201 bp, Homo sapiens
caccagggcttgtcggggggtgggggctaggggagagatagcattataagaaataattaatgtcggtgacggattgatgggtgcagcaaaccgccatggcmtgtgtatacctatgtaacaaaactgcaagttctgcacatgtaactcagaacttaaagtataacaataataaaaatttaaaaaaatacaaaataaattgtt

SEQ ID NO: 111315 - DNA, 201 bp, Homo sapiens
acattgctgccttccccaagccactttgcctgcatccactcacccaaggccacacttcacatcactttgctggtgtgtgggcatgcgggcaaaccttgctyccacttctccaccagcacacatgtgcttgatcaccccagtgtgccaccgctaccggcatagtgcaccccgacccccaaaactcctgccatgccaccattg

SEQ ID NO: 111316 - DNA, 201 bp, Homo sapiens
gagtcatttatgctaagactttaaggaaacacatagattctagaacagaccacgttttgtttttttctcctgcaaattactatgacaaacatttctgagarcattggtatccaccctctgaagttcccattaaatcttttaaccaaatttatttcctctcactagatactgtcaagtttcagatgatcattcaacaaaggt

SEQ ID NO: 111317 - DNA, 201 bp, Homo sapiens
gaagccaacctcgtactgaagagcagctgtcattgcaggggaggagccccagccccgcgacgaggaggaagcggagctggagctgctgaggcagtttgacstggcctggcagtacgggccctgcaccggtgagaacccacccagccccacggaggcgcctctcccagccagtcacccacacgtctctgaagtcacccaagc

SEQ ID NO: 111318 - DNA, 201 bp, Homo sapiens
tctggggtatccctccctcccaccccatcttccacagtctctggcatctctatcccctatgaggcaccacgtaagacctcctgcccttagctctcttgctyaccacccaagaacctcaggacagaagcgagagcccattgctcctgctcagctcagcccggctgcggaggaacccttggcaggcagaacctggaggtgtca

SEQ ID NO: 111319 - DNA, 201 bp, Homo sapiens
caaagcggtggtgaggaaggctgggaggtgaggggcaggagactgaagccaacctcgtactgaagagcagctgtcattgcaggggaggagccccagccccscgacgaggaggaagcggagctggagctgctgaggcagtttgacctggcctggcagtacgggccctgcaccggtgagaacccacccagccccacggaggcg

SEQ ID NO: 111320 - DNA, 201 bp, Homo sapiens
aaagcggtggtgaggaaggctgggaggtgaggggcaggagactgaagccaacctcgtactgaagagcagctgtcattgcaggggaggagccccagccccgmgacgaggaggaagcggagctggagctgctgaggcagtttgacctggcctggcagtacgggccctgcaccggtgagaacccacccagccccacggaggcgc

SEQ ID NO: 111321 - DNA, 201 bp, Homo sapiens
ctgaagagcagctgtcattgcaggggaggagccccagccccgcgacgaggaggaagcggagctggagctgctgaggcagtttgacctggcctggcagtacrggccctgcaccggtgagaacccacccagccccacggaggcgcctctcccagccagtcacccacacgtctctgaagtcacccaagcgcttgcgtgactctg

SEQ ID NO: 111322 - DNA, 201 bp, Homo sapiens
ctgcctgtctccctgacccatgatctggcaagttaggcacagtcagacatggacagttgatccatgaggaaaagatgctctcccacctaaggccaggaatytgagagcaggactggctgagctcccagggcaaggggttcactaatgcttatcaataaagaatattgagcctggaatcctgaccttcagtcctttactgtg

SEQ ID NO: 111323 - DNA, 201 bp, Homo sapiens
cctctgcctcccctctggtggtctcctttccagagcagcttcctcccttgtgcccacgtgtaccagtggcttagccctcttccagtgcagaacacccagaycccagagcagggaaaggaggaggcagaggcctctgagcaggcagcagcccaggagtctgtgccccaccctcccagtatccctggaaggaagaaccggatg

SEQ ID NO: 111324 - DNA, 201 bp, Homo sapiens
caccttccaatacctgctgcctgtctccctgacccatgatctggcaagttaggcacagtcagacatggacagttgatccatgaggaaaagatgctctcccmcctaaggccaggaatctgagagcaggactggctgagctcccagggcaaggggttcactaatgcttatcaataaagaatattgagcctggaatcctgacct

SEQ ID NO: 111325 - DNA, 201 bp, Homo sapiens; identical to SEQ ID NO: 18316

SEQ ID NO: 111326 - DNA, 201 bp, Homo sapiens
gcccaggcggtggtaggagctactgtggctgcccagcggcacaccccatttcacgctccctgggcggtggcagggccccacggctatcagctttcaggggygggagggactgggaatgaggaggggtctgccccacccatggctccctactccctcagggcttggtggactcaggaggtgggtgccacacacctctggaaa

SEQ ID NO: 111327 - DNA, 201 bp, Homo sapiens
cgggccctgcaccggtgagaacccacccagccccacggaggcgcctctcccagccagtcacccacacgtctctgaagtcacccaagcgcttgcgtgactcygaccctcaggaactgtctccccccaacacacacattctccagctcagactctaccccaccccccacaagtctccagagtcttcttcccaccctggcaggg

SEQ ID NO: 111328 - DNA, 201 bp, Homo sapiens
cccagcttggcttcccaaagtgctgggattacaggcgtgagccactgtgcccagccacgaattgatttaactcttaagtcagttgagtcaagtgagttatygtttggattctagagtcaaatacctatgcaacaaatatttgagccttatgaggaatacagaaggtacatgagatatgatccctgtcttctaagaacttga

SEQ ID NO: 111329 - DNA, 201 bp, Homo sapiens
gcagcagcgtggccaacgtagcgagacctccatctctacaaaaaaactaaagaaattagcaaggcatggtggtgtgcacctgtagtcccagctactcaggragttgagcccaggaggctgaggctatagtaagccatgatggcaccattgcacactccagcttgggtgacagagcaagaccttgtctctaaaaaaagaaaa

SEQ ID NO: 111330 - DNA, 201 bp, Homo sapiens
aggctatagtaagccatgatggcaccattgcacactccagcttgggtgacagagcaagaccttgtctctaaaaaaagaaaaaaagaaaaagaaaaaaaaamaaacaaaccaaaaacaaaaaaacctcccggaattccatagctgttactatcagtagcagctaatgtttcctggctggcctcttgcccagaagccacagtt

SEQ ID NO: 111331 - DNA, 201 bp, Homo sapiens
cttggcaggagaatggcgtgaacctgggaggtgcagcttgcagtgagccaagatcgggccactgcactccagcctgggcgacagagcgagactccatatcaaaaaaaaaaaaaaaaaaaaaaaaaaaaaaaaaaaatcagccttgggaagagttgcagagggcagagtccaggagggctcacacctggagctggtctccac

SEQ ID NO: 111332 - DNA, 201 bp, Homo sapiens
cacatggatgtgtagactccctgcactgctgacctcagcctccagcccctctggagggcgagctgatatcacgtggcccagcgctcctgctcctccggacmccagtcccccactgatcagaaggcaggagtcagagccccagtgcacctcagtcattaactagtgtgtcattgcatctgcaggttcccagcaggatgcccc

SEQ ID NO: 111333 - DNA, 201 bp, Homo sapiens
aaaatatcgcgaacatgaggcaagaacaggaagctctaaaaaaaagccaccaaaaggagtattcgaatatccaaaaagagaactctcggatgtaaaaaaawaaaataaaagcagaaataagaaaatcagttagtgggtgaaagataaagttgaggaactccctcagaaagtagaacagaaaagcaacgaggtggcaaatga

SEQ ID NO: 111334 - DNA, 201 bp, Homo sapiens; identical to SEQ ID NO: 18329

SEQ ID NO: 111335 - DNA, 201 bp, Homo sapiens; identical to SEQ ID NO: 18320

SEQ ID NO: 111336 - DNA, 201 bp, Homo sapiens; identical to SEQ ID NO: 18323
  misc_feature (1)...(201): n = A,T,C or G

SEQ ID NO: 111337 - DNA, 201 bp, Homo sapiens
agtctcactgtgtcaccaagtctggaatacagtggtacaatctcagctcactgcaacctctgcctcctgggttcaagcaattctgcctcagcctccttgaktagctgggattacaggcgtgagtcactgcacctggcccctcatatggtaattttatatgataattctgtgttaatttttttttttgagacagagtctcac

SEQ ID NO: 111338 - DNA, 201 bp, Homo sapiens
ttttaaattatttatttatttatttttaaattttgagatgagatctcactctgtcatccaggctggagggctggagtacagtggtgtgatcatagttcacwgcagcctcagcctcctgggcttaagagatcctcccacctcagcctcctgagtagctgggactacaggtgtatactaccatacctggctaatttttaaatt

SEQ ID NO: 111339 - DNA, 201 bp, Homo sapiens; identical to SEQ ID NO: 18324

SEQ ID NO: 111340 - DNA, 201 bp, Homo sapiens
tgagtgccagatgctactgtaagccttgagaatacccgctgtgaggcaggacgaggacctcccttttaagtcagtgcaggaagacagtgagtggattaacyggtgtatatgagctatttgaggccaggcatggtggctcacgcctgtaatcctgacattttgggaggctgaggcaggaggatggcttgagcccagcagttc

SEQ ID NO: 111341 - DNA, 201 bp, Homo sapiens; identical to SEQ ID NO: 18325

SEQ ID NO: 111342 - DNA, 201 bp, Homo sapiens
tgatatgatctcattgcagcctctgtttcctgagttcaagcaattatgattacaggcctgagccgccacgcccggccgagcgctttctttcgtcgttttcyaagggggttttaaaacataccgaccagtagagagagcagtattatacatcatccttcacctgtccccaagtttcagaaattaggcaatcagagtttgtct

SEQ ID NO: 111343 - DNA, 201 bp, Homo sapiens; identical to SEQ ID NO: 18327

SEQ ID NO: 111344 - DNA, 201 bp, Homo sapiens
ctcccaggttcaagcgattctcctgcctcagcctcccgagtagctgggattacaggcatgtgccaccatgcccggcttattttgtatttttagtagagacmgggtttctccgttattggtcaggctggtctcgaactcctgacctcaggtgatccacccgcctcggcctcccaaggttctgggattacaggcgtgagccac

SEQ ID NO: 111345 - DNA, 201 bp, Homo sapiens; identical to SEQ ID NO: 18328

SEQ ID NO: 111346 - DNA, 201 bp, Homo sapiens
cagaagtgcttaggttggctcagtaacgcccttatctagttcttaggtacagaattcgtggacggcggcagcatccctggcctctggcgtctgcctatgtyggcgatgtgactgactcccctgcagcttcactctcctcgttagtcttcatcttaattggcaacttccctctcaagttgtttgtcatgttaacttttcccc

SEQ ID NO: 111347 - DNA, 201 bp, Homo sapiens
cagagtcttctccctagagtctctgaaaggaagcctgggttcctggtggtgctcccctccatgtgtgctcacccgcctggatggaggcagcccaggggagyggctgagactcttggcagagagctggggacgctctgttctcattggcagccccaccctgaagaataacagactcccaaatatcacacaggctgcagatac

SEQ ID NO: 111348 - DNA, 201 bp, Homo sapiens
gaactccctcagaaagtagaacagaaaagcaacgaggtggcaaatgagagaaaaaagaaacggaaaggatcagatcaggaagtcagcagctgaatagtaasagcttcaaagctgaggtgagaggatcgtttgaggccaggagttcaagaccagcctgggcaacatagcaagacccccatctctacaacaaaatttaaaaat

SEQ ID NO: 111349 - DNA, 201 bp, Homo sapiens; identical to SEQ ID NO: 18317

SEQ ID NO: 111350 - DNA, 201 bp, Homo sapiens; identical to SEQ ID NO: 18342

SEQ ID NO: 111351 - DNA, 201 bp, Homo sapiens
gagacaggagaattgcttgaacctgggaggcggaggtaacggtaagtggagatcatgccattgcactccagcccgggcaacaagggtgagactccgtctcaaaaaaaaaaaaaaaaaaaaaaagatccttgcgtaccctctccaggacatactgttgtgaaatctcagaacaagaggagaaagtaaaaacaaatcacaaat

SEQ ID NO: 111352 - DNA, 201 bp, Homo sapiens
tgggtggcaggagacgggagggccttgcttgagaaattctgaaggatgcatttgcagcctggaagtctacactcaggcaagggagggtagggtaaagacamcttcagacttgctcccagatttgttcctcatgctttaaggaggtgattggcagatgtagtctccccagatgaggcagtaagtctagactgagagagactg

SEQ ID NO: 111353 - DNA, 201 bp, Homo sapiens
agtaagtctagactgagagagactggctggtgggaacaggatttcccccaggtgagaggtgagaagaacctgctgaagggaaatcccagccaggtgctggygtgaagagcagacatgtcctgaccccagctggtcagaggctccaagaggagattctttgggagaagatgaaattagcaggacacctgacatgctgcagca

SEQ ID NO: 111354 - DNA, 201 bp, Homo sapiens
tgctggtggagggtcttgtcttgatgttgatagctgctgattgatcagggcggtggttgctgaaggctggagtggctatggcaatttcttttcttttttcttttttttttttttgaggcagagtcgctctgtcgcccaggctggagtgcagtggcacgatcttggctcactgcaagctccgcctcccgggttcacgccatt

SEQ ID NO: 111355 - DNA, 201 bp, Homo sapiens
cctcttgcctcagcctcctgagtagctgggactgtaagtgcacaccaccatgtcctgctaattcttttttttttttttttttttttacattttttttgtaragaagggtcttggtatgttgcccaggctgggatgcagtggcaacatcatagctcactgcagcctcaaactcttgggctcaagcaatcctctcacctcagc

SEQ ID NO: 111356 - DNA, 201 bp, Homo sapiens
gcccaggctagagtgcggtgacgcgatcttggctcactgcaacttccacctgccaggttcaaatggtccttccatctcagcctctcaagaaactgggattrcaagtgtacaccaccatgccaggctaatttttttatttttagtagagacagggttttgccatgttggccaggctgtcctcaaactcctgagctcaagtga

SEQ ID NO: 111357 - DNA, 201 bp, Homo sapiens
tacttaggatctagttttaaaaataggctgcagtggctcacgcctgtcattccagcactttgggaggctgaggcacttggatcactcgaggccaggagttmgagaccagcctggccaacatggagaaagcccctctctactaaaaatccaaaaattagccgggcatggtgcgtgcctgtggtcccagctatttgggaggct

SEQ ID NO: 111358 - DNA, 201 bp, Homo sapiens
aggtggtgagtcacctgtaaggcccacacgcgggacaggtgcagggggcccacatctgcagatgtgtgtgtgttcaaatgcaaaatagcactgcatttgcttttttttttttttgtcttttgtcaagcttgtcccttttcctcttgtatccaacttgcaggtcttctcccatgctgtctatttgatctttatttttttggg

SEQ ID NO: 111359 - DNA, 201 bp, Homo sapiens; identical to SEQ ID NO: 18326

SEQ ID NO: 111360 - DNA, 201 bp, Homo sapiens
taattatgaggttagctgtaggtttttttttttaaagcactcagattgttgctaatattaaaaaaatataacatacaagagtgacaggagagacatacagkccgggtgtggtggcttatgcctgtaatcccagcactttggaggccgaggaaggtggatcacttgaggtcaggagttcaagaccagcctggccaacatggt

SEQ ID NO: 111361 - DNA, 201 bp, Homo sapiens; identical to SEQ ID NO: 18319

SEQ ID NO: 111362 - DNA, 201 bp, Homo sapiens; identical to SEQ ID NO: 18321

SEQ ID NO: 111363 - DNA, 201 bp, Homo sapiens; identical to SEQ ID NO: 18322

SEQ ID NO: 111364 - DNA, 201 bp, Homo sapiens
tctggccatgtggcagtgtcttccagagcaggatggctgtggtcacgtcacggtgacacacagctgaacacgagtgagctaaggccatagctgtctgtgcyagctgccttttctttctctagtgttttgcccacagtcagcatgagtatttggaccagtggccttgcgtgggcagccggcatggacttgctccctggggct

SEQ ID NO: 111365 - DNA, 201 bp, Homo sapiens
agtgcagtgatatgatctcattgcagcctctgtttcctgagttcaagcaattatgattacaggcctgagccgccacgcccggccgagcgctttctttcgtygttttccaagggggttttaaaacataccgaccagtagagagagcagtattatacatcatccttcacctgtccccaagtttcagaaattaggcaatcagag

SEQ ID NO: 111366 - DNA, 201 bp, Homo sapiens
atgcgcttctggggggcttaatatagatctggccatgtggcagtgtcttccagagcaggatggctgtggtcacgtcacggtgacacacagctgaacacgartgagctaaggccatagctgtctgtgctagctgccttttctttctctagtgttttgcccacagtcagcatgagtatttggaccagtggccttgcgtgggca

SEQ ID NO: 111367 - DNA, 201 bp, Homo sapiens
agattgatgataagaaattggctcacacaattacggaggctgagaaattcagaccctggagagccaatggtatgactccagtctgagacggagtccaaagrcgaagaccaatgtcccagctcaaagacaggcaggcagagagagttgattctcttactctaccttttttttttttttttgaggcagagtcttgctctgttg

SEQ ID NO: 111368 - DNA, 201 bp, Homo sapiens
gtcatccatgaggactggaaccaacctcttcaaacttctattaatgttgctattttgatctcttcctgtgaatcccgaatgttcttaaaggcattagaatrgtgaatcctttccaggttttcagtttactttgcccagatcctacagaggaatcactatggcagctttagccttacaaaatgtattcctttaataataaga

SEQ ID NO: 111369 - DNA, 201 bp, Homo sapiens
cagactgttgggctcttccagaaaccccagaccaggtcatagccactgaaaatggatatatttcatattcaccttttaccctccacccccaaaagggcctmtgagatggccctgctcaaacatctagaaagaaagagataggatctggcctctgacggagatgagtgcctctggggatccatgccctgtggccaccattgt

SEQ ID NO: 111370 - DNA, 201 bp, Homo sapiens
ttccataacctatgattagcaagatattaatcagcagtaatagttgcagcaaaagctggttacaaacaatccatagaaacaggacgtgaagctagacagcyagttagaccagaaattctcagaagggagtatgccttaaccctaaagaggcctagaagagccgtggcaagatgagggcgtttatagcactatcttatccat

SEQ ID NO: 111371 - DNA, 201 bp, Homo sapiens
gagtcatccatgaggactggaaccaacctcttcaaacttctattaatgttgctattttgatctcttcctgtgaatcccgaatgttcttaaaggcattagawtggtgaatcctttccaggttttcagtttactttgcccagatcctacagaggaatcactatggcagctttagccttacaaaatgtattcctttaataataa

SEQ ID NO: 111372 - DNA, 201 bp, Homo sapiens
ttggggccacaccaacgtccccagagtcttctccctagagtctctgaaaggaagcctgggttcctggtggtgctcccctccatgtgtgctcacccgcctgkatggaggcagcccaggggagcggctgagactcttggcagagagctggggacgctctgttctcattggcagccccaccctgaagaataacagactcccaaa

SEQ ID NO: 111373 - DNA, 201 bp, Homo sapiens
cacacccggctaattttttgtatttttagtagagacagggtttcatcatgtgttggccaggctggtctcgaattcctgatctcgtgatctgcccgcctacrcctcccaaagcactgggatcacaggcgtgagccaacaagcccagctgacctctcaggcttaagcgattctcccacctcagcctcctgagtggctgggatt

SEQ ID NO: 111374 - DNA, 201 bp, Homo sapiens
ctcttggtagaaagcatgagtaataataaaaataacacatatttgtgtaacaaatatttgagcctgatgaagacagagagataagtaaggccggggcagaktctaaagaaagtgctttactattttatcaaccacttagctgtgttttctcatttttgtgctctcggtagctctggttagcagaaaggcctagtttgttct

SEQ ID NO: 111375 - DNA, 201 bp, Homo sapiens
aaatagacagtttttttttttttgacttgataactggctcttggtagaaagcatgagtaataataaaaataacacatatttgtgtaacaaatatttgagcytgatgaagacagagagataagtaaggccggggcagattctaaagaaagtgctttactattttatcaaccacttagctgtgttttctcatttttgtgctct

SEQ ID NO: 111376 - DNA, 201 bp, Homo sapiens
gtagaagcagagtttggtgaaatatcagcagtgccctatttggatcagttctgtttttgcatgaaaagtctgtcttcacttgatgaaacctgcaggcagtkccccctggagaagggcccaccaggaaggggtggaaggcagaggtggcatagactgacacccagagatgacttactggggcatggccctgtggggggtgga

SEQ ID NO: 111377 - DNA, 201 bp, Homo sapiens
attcaaagggcataggaaaaacagaattcattcattcagaatggcacatttgataatgaaattattcaggagatagaaatgcagattttaggcacctgctkcttcagagctggcaaaactgacacgcaaataagtagatcctggatatttagaagcagaggatattggaacttaaagatcattataatcagaaattcttac

SEQ ID NO: 111378 - DNA, 201 bp, Homo sapiens
aaaccagccacagacccccaaaagctggccaccactgtcagggacgagaaccttccagtgtttctgccccttgagcgaatctgcttcttcaccttgttccttttttttttttttttttttgagatggagtctcgctctgacgcccaggctggaatgcagtggcgcgatctcggctcactgcaacctccgcctcccaggttc

SEQ ID NO: 111379 - DNA, 201 bp, Homo sapiens
gcctccctgtatgaggatgtgagaaggaggaggcacagtggagttgaactgtagatggagttattcttaagtaagtctgatgaaaatcacactcctttttwtcttccagactttcaaattgtaaaataaaggtgataaaatgagagatttaggaatagaaaatatattcttaaataaggacatgggaaaaacaggttgaaa

SEQ ID NO: 111380 - DNA, 201 bp, Homo sapiens; identical to SEQ ID NO: 18364

SEQ ID NO: 111381 - DNA, 201 bp, Homo sapiens
gggagatggagggggtcttggcggcctgcgccttattggcacgggaaggagtccccggcgtgattcgtggttgcggggatccccgcgcgcccctttgtgtktgttggtgtgtaggggtttgcaaggtttctgtgcaagtgcgaggttcaagtcctcagggaaagtgcggacgggtttctccggtcacctgcaattccgcac

SEQ ID NO: 111382 - DNA, 201 bp, Homo sapiens
cccatcacaaatcccagtaacagtcctattatggtgatattatcaatctgccctttgtaaagtacttttacatacattatctcctactcctgcaagggacrggggagtgtggtggagggcttctaatgaggggtcctcatttccactaaacttggaaaattgcctccctgtatgaggatgtgagaaggaggaggcacagtg

SEQ ID NO: 111383 - DNA, 201 bp, Homo sapiens
aggacagtcttccccatcacaaatcccagtaacagtcctattatggtgatattatcaatctgccctttgtaaagtacttttacatacattatctcctactyctgcaagggacgggggagtgtggtggagggcttctaatgaggggtcctcatttccactaaacttggaaaattgcctccctgtatgaggatgtgagaagga

SEQ ID NO: 111384 - DNA, 201 bp, Homo sapiens
acctgcaatcctagcactttgagagactgaggcaggcagatcacttgaggccaggacaacatggcaaacttggtctctacaaaaaatgcaaaaattagccrggcgagatggcatgtgcctgtaatctcagctactcaggaggctgaagcaaggagattgcttgagcccagggaagtcaaggctacagtgagccataatcgt

SEQ ID NO: 111385 - DNA, 201 bp, Homo sapiens
ccaccaaaaggaaccccctttagtgtggcatcttgtgaaaccagccacagacccccaaaagctggccaccactgtcagggacgagaaccttccagtgtttmtgccccttgagcgaatctgcttcttcaccttgttccttttttttttttttttttttgagatggagtctcgctctgacgcccaggctggaatgcagtggcg

SEQ ID NO: 111386 - DNA, 201 bp, Homo sapiens; identical to SEQ ID NO: 18348

SEQ ID NO: 111387 - DNA, 201 bp, Homo sapiens
tgaagacgtttcccaaacccgaaaaccttgtttttcccccgaccagggttaaataaacatcttttaggaagcgtggacaggagcgcagcctgctctcctcsctcggaacaccattccggcaattaatgcctccctttgggtagtaaagcaacaaaccccacacctcactccgatcctgggcttcgggcgggaggactttct

SEQ ID NO: 111388 - DNA, 201 bp, Homo sapiens; identical to SEQ ID NO: 18351

SEQ ID NO: 111389 - DNA, 201 bp, Homo sapiens; identical to SEQ ID NO: 18353

SEQ ID NO: 111390 - DNA, 201 bp, Homo sapiens; identical to SEQ ID NO: 18355

SEQ ID NO: 111391 - DNA, 201 bp, Homo sapiens; identical to SEQ ID NO: 18356

SEQ ID NO: 111392 - DNA, 201 bp, Homo sapiens; identical to SEQ ID NO: 18357

SEQ ID NO: 111393 - DNA, 201 bp, Homo sapiens; identical to SEQ ID NO: 18358

SEQ ID NO: 111394 - DNA, 201 bp, Homo sapiens
ctgacttgatgggcagaggtacgtagggaaggacaggcatttctcaattccatttctaaacgttgcctaagaacacgctgtgtagaccacaggcttctctsctttcaggagcaggagagggtctcccagttcttttgagccttcccactaccagggggcaagttccctaattagttgatctaagaagcctaaccaacaaga

SEQ ID NO: 111395 - DNA, 201 bp, Homo sapiens
gggttgggtgggaggaggaagaaagggaagaattaggtttgaattgctttttaaaaaaaaaagaaaagaaaaagacagcatctcactatgttgccaaggcwcatcttgagaagcaggcgggttgggtgggaggaggaagaaagggaagaattaggtttgaattgcttttttaaaaaaaaagaaaagaaaaaaaaagacagc

SEQ ID NO: 111396 - DNA, 201 bp, Homo sapiens
aggcgggttgggtgggaggaggaagaaagggaagaattaggtttgaattgctttttaaaaaaaaaagaaaagaaaaagacagcatctcactatgttgccawggctcatcttgagaagcaggcgggttgggtgggaggaggaagaaagggaagaattaggtttgaattgcttttttaaaaaaaaagaaaagaaaaaaaaaga

SEQ ID NO: 111397 - DNA, 201 bp, Homo sapiens
caggcgggttgggtgggaggaggaagaaagggaagaattaggtttgaattgctttttaaaaaaaaaagaaaagaaaaagacagcatctcactatgttgccwaggctcatcttgagaagcaggcgggttgggtgggaggaggaagaaagggaagaattaggtttgaattgcttttttaaaaaaaaagaaaagaaaaaaaaag

SEQ ID NO: 111398 - DNA, 201 bp, Homo sapiens
ctctgggaagctgaggtcattctcctctgaagtagcaggccatgaaatacatctcagtccccgacaggcaggctgctcccacgtatcagccgaatgaacayagatggtcacccaccctccctccaagaaaacctgcttgagccactgtgtttcttataagcccaccctccagccctttcagttagatggactctgctgccc

SEQ ID NO: 111399 - DNA, 201 bp, Homo sapiens
tttcccttccactttctccgaaagggagcatggactgaagtttcccatcacagaagcccctgaaggacttcagctgcagacagatatttccttcctcttcyctcatcctctaattactgcattttgggcagcagtggtggcagccgaataaggaaaggggtttatgatgggagggagggggtgcttctgtgatgaagtggc

SEQ ID NO: 111400 - DNA, 201 bp, Homo sapiens
aagccctgggggacctgctctctgggaagctgaggtcattctcctctgaagtagcaggccatgaaatacatctcagtccccgacaggcaggctgctcccaygtatcagccgaatgaacatagatggtcacccaccctccctccaagaaaacctgcttgagccactgtgtttcttataagcccaccctccagccctttcagt

SEQ ID NO: 111401 - DNA, 201 bp, Homo sapiens
cgaggctgacggtaccagccccaccagcaggttttccatccagggaggctggtcactgtgactcagcaggaacaagggcctgtgaccagagagagatccayttatatcctgagggagggagaggaggggaatagagaagcctccggtcagagaggaaaaaatgtacaccctgtttctataagcctcatgatgtggtagaga

SEQ ID NO: 111402 - DNA, 201 bp, Homo sapiens
ctctttgtgacgtcgagttcccgtgaccgggagccagcggccgcgctccattcaagctccggggagggggtgggaggaggggcccggagggggcggggagwcagcgcggggggcgggggacggcgcggggcccggaatggaacggggcggggcctggcggggtagtacctagcgccccctcccccgggagcgcggaggagc

SEQ ID NO: 111403 - DNA, 201 bp, Homo sapiens
tctcctttacaggcggctatgagaggttttcctccgagtacccagaattctgttctaaaaccaaggccctggcagccatcccacccccggttccccccagygccacagagcccttggacctgggctgcagctcctgtgggaccccactacacgaccaggtagactcggggggcagggcttggaagtggggggcaggaacag

SEQ ID NO: 111404 - DNA, 201 bp, Homo sapiens
cgccgcattccgcgcattcttccgcgcgggtagggtctgcgcttccgagcccggtaggcagttcagacccccccacacccatcaaagagccgctcctcccscccgcaggcgccttcgccgcctccctcccttcctttcctttccgctcctcttccgacctgtccacccgggaggaagggagctggaaagggggcggaaacc

SEQ ID NO: 111405 - DNA, 201 bp, Homo sapiens; identical to SEQ ID NO: 18347

SEQ ID NO: 111406 - DNA, 201 bp, Homo sapiens
ccactacacgaccaggtagactcggggggcagggcttggaagtggggggcaggaacagcgtaggggccagtggatgccttcttttcagagttctgacggtrttttttgtctttgcttttgagacagtcttgctctgtcacccaggagtgcagtggtgtgatcatagcttactgcagcctcgaactcctgggctcaagggat

SEQ ID NO: 111407 - DNA, 201 bp, Homo sapiens
acaagtgaggaggcctccagaagccctgggggacctgctctctgggaagctgaggtcattctcctctgaagtagcaggccatgaaatacatctcagtcccygacaggcaggctgctcccacgtatcagccgaatgaacatagatggtcacccaccctccctccaagaaaacctgcttgagccactgtgtttcttataagcc

SEQ ID NO: 111408 - DNA, 201 bp, Homo sapiens
ctcattttgccaagatcctctctcttgtctgtgtggccatgagggcatcagcttatttatttgtttatttttagagacagagtctcactctgttacccagrcttgagtcctgtggcgcaatcatagctcactgcagcttcaaagtcctgggctcaaatgatcctcccatttcagcctcccaagcaactgagactacaggtg

SEQ ID NO: 111409 - DNA, 201 bp, Homo sapiens
cctctctcttgtctgtgtggccatgagggcatcagcttatttatttgtttatttttagagacagagtctcactctgttacccaggcttgagtcctgtggcscaatcatagctcactgcagcttcaaagtcctgggctcaaatgatcctcccatttcagcctcccaagcaactgagactacaggtgtgcaccatcatgccag

SEQ ID NO: 111410 - DNA, 201 bp, Homo sapiens; identical to SEQ ID NO: 18349

SEQ ID NO: 111411 - DNA, 201 bp, Homo sapiens; identical to SEQ ID NO: 18350

SEQ ID NO: 111412 - DNA, 201 bp, Homo sapiens; identical to SEQ ID NO: 18352

SEQ ID NO: 111413 - DNA, 201 bp, Homo sapiens; identical to SEQ ID NO: 18354

SEQ ID NO: 111414 - DNA, 201 bp, Homo sapiens
ttctgccccttgagcgaatctgcttcttcaccttgttccttttttttttttttttttttgagatggagtctcgctctgacgcccaggctggaatgcagtgrcgcgatctcggctcactgcaacctccgcctcccaggttcacgccattctcctgcctcagcctcccgagtagctgggactacagacacccgccaccacgcc

SEQ ID NO: 111415 - DNA, 201 bp, Homo sapiens
catcaccaccttaattaattcattaatgatttttcaggcaagttttattcaggcactttgggacagagcagtgagtcagaggttggcatcaaaactagaayagaagctgtacttctctctggggattctactccgggctttagattccccgatcatacaacttcctaattggaaagaaatgttcctaaacaagagcaggtg

SEQ ID NO: 111416 - DNA, 201 bp, Homo sapiens
aacctgtacatagcatgaggggtttatttagatttaagcccgttttcctcttgttctggtctcttggtgacggaacagctattcatgaggacgtgcaatgracatctgttccattgctgagatccagaagagtttgtaccagggtcattttttcccttctttctcacattggagaacctcccctgaggaagggctggaatc

SEQ ID NO: 111417 - DNA, 201 bp, Homo sapiens
aagagtttttggacggggaggaagacacaaggagcattgagtcatagtttttattttatttctatttatttatttattttgagacagagccttgctctgtygcccaggctggagtgcagtggcgccatctcagctcactgcaacctccgcttctggggtgcaagtgattctcctgcctcagcctctggagtagctgggact

SEQ ID NO: 111418 - DNA, 201 bp, Homo sapiens
gtacccagaattctgttctaaaaccaaggccctggcagccatcccacccccggttccccccagcgccacagagcccttggacctgggctgcagctcctgtgggaccccactacacgaccaggtagactcggggggcagggcttggaagtggggggcaggaacagcgtaggggccagtggatgccttcttttcagagttctg

SEQ ID NO: 111419 - DNA, 201 bp, Homo sapiens
ccttcctttccacctacctaaaacttccctcagcctttgtcagttctaatttaaaagctgtcctggagctgttggagaaatggggaagatcatctagatawtccagtttctccttccactcaccctatagtaccggatagcatccaatagcccagggcctgaccatacagcccatgatattaccctttctgtagaaaacag

SEQ ID NO: 111420 - DNA, 201 bp, Homo sapiens
agtttcactgaaaacaagaccctggcaaatgcagaaagggagattgggttgcacacactgtgtagagcgatctgtatctgcgttcccgctgcccaactccragctcagcttggaaggtggccaatccccgtcccgggctagatccaggctctgggagcgggaggctgaaggactgggtatctgggggacgccgggcggaac

SEQ ID NO: 111421 - DNA, 201 bp, Homo sapiens; identical to SEQ ID NO: 18359

SEQ ID NO: 111422 - DNA, 201 bp, Homo sapiens
cccctggtcattagagaaagacaaaaagagctttttcttaccctattctttgcctttattaaccccaaataacaaaataatctgttatgcaaaaagattgyaggtataaaaacattaccttcctttccacctacctaaaacttccctcagcctttgtcagttctaatttaaaagctgtcctggagctgttggagaaatggg

SEQ ID NO: 111423 - DNA, 201 bp, Homo sapiens
gcggaggagcattaataaacctctaagccgaggagaaaactctggctggggcagtgcgctgagcgccggaggagcgtaggcagggcagcgctggcgccagyggcgacaggagccgcgcgaccggcaaaaatacacgggaggccgtcgccgaaaagagtccgcggtcctctctcgtaaacacactctcctccaccggcgcct

SEQ ID NO: 111424 - DNA, 201 bp, Homo sapiens; identical to SEQ ID NO: 18361

SEQ ID NO: 111425 - DNA, 201 bp, Homo sapiens
attgcttgagcccagggaagtcaaggctacagtgagccataatcgtgccactgcactgcagcctgggtgagagagtgacagtgacagaccctgtctggggraaaaaaaaaaaaaaagatccatgaccatagtcaccaccaaaggacagtcttccccatcacaaatcccagtaacagtcctattatggtgatattatcaatc

SEQ ID NO: 111426 - DNA, 201 bp, Homo sapiens
ccaggtccctgacaagggttctgctgagtggcagccatggccatgcctgggagagaagatggaggtctggaggtctccggaaaccaagagacaggtttccrggagagcaggctgtcaaatgcccagtaccttaccagcattaccctgtccccggttcctctttggcctttgaggatctctgctgagggcatccgagggcac

SEQ ID NO: 111427 - DNA, 201 bp, Homo sapiens
tctgctctgtgaccgtggggcctgccctggcactcctgggccacccaaccattcacttttgagtgcaggcgatagcttgtctgtcttggtggtgagttttkgcaggacaccacctgtgtctaacatgttgttttaaaatgtgttttaatagctcaaattatgtaatagacaaaaggatcatgtacttagaattttttcaaa

SEQ ID NO: 111428 - DNA, 201 bp, Homo sapiens
aggcgggtgaattacctgaggtcaggagttcgagacagcctggccaacatggcaaaaccccgtctctactgaaagtacaaaaatttgccaggtatggtggyaggtgcttgtaatcccagctactcaggaggctgaggaaagagaattgcttgaacccgggaggcggaggtcgcagtgagccaagatagcaccactgcactc

SEQ ID NO: 111429 - DNA, 201 bp, Homo sapiens
ttctgagcctctaccctgcctgctgtgtgggagacaggcagagatggcaggtgagatcgccaaggctcaggtcgctcggcctggtggcaacactgtcttcrggaagatcatctgcaaggaaatcccagccaaaatcatttttgaggatgaccagtgccttgctttccatgacacttcccctcaagcaccaacacgttttct

SEQ ID NO: 111430 - DNA, 201 bp, Homo sapiens
ctgcttgcccctgtccttcccccagtgtagctccttaagcctctgctcttgctgtccccaaggcgtctggggcagcatgcccacctccagctatttatagmcccctctccgtcacatgaccccccactgccacatctgatctgcttggggtcgaagcaggtgtgagtgcagtgtgggggtgggggttgggatgagaacctg

SEQ ID NO: 111431 - DNA, 201 bp, Homo sapiens
gtgttcaaagggcatatactggtactgggggtcactaccccaccagctttgttcacccccacgctgctgtgaccgggattgctccatattccctcccccckagccccggccaggccttggcctgcttgcccctgtccttcccccagtgtagctccttaagcctctgctcttgctgtccccaaggcgtctggggcagcatgc

SEQ ID NO: 111432 - DNA, 201 bp, Homo sapiens
gaggcccccattctcagagggcagtccgtagctggtgcagtgttcaaagggcatatactggtactgggggtcactaccccaccagctttgttcacccccaygctgctgtgaccgggattgctccatattccctccccccgagccccggccaggccttggcctgcttgcccctgtccttcccccagtgtagctccttaagcc

SEQ ID NO: 111433 - DNA, 201 bp, Homo sapiens
aagggcatatactggtactgggggtcactaccccaccagctttgttcacccccacgctgctgtgaccgggattgctccatattccctccccccgagccccrgccaggccttggcctgcttgcccctgtccttcccccagtgtagctccttaagcctctgctcttgctgtccccaaggcgtctggggcagcatgcccacctc

SEQ ID NO: 111434 - DNA, 201 bp, Homo sapiens; identical to SEQ ID NO: 18380

SEQ ID NO: 111435 - DNA, 201 bp, Homo sapiens
cccgccagagcattaccgtgtgagctccgcctcccgccagagcattaccgtgtgagctccgcctccccacagagcattaccgtgtgagctccgcctcccgkcagagcattaccgtgtgagctccgcctcccgtcagagcattaccgtgtgagctccgcctcccgtcagagcattaccgtgtgagctccgcctcccgtcaga

SEQ ID NO: 111436 - DNA, 201 bp, Homo sapiens
cccgtcacagcattaccgtgtgagctccgcctcccgtcagagcattaccgtgtgagctccgcctcccgccagagcattaccgtgtgagctccgcctcccgscagagcattaccgtgtgagctccgcctccccacagagcattaccgtgtgagctccgcctcccggcagagcattaccgtgtgagctccgcctcccgtcaga

SEQ ID NO: 111437 - DNA, 201 bp, Homo sapiens
gtccgagcattaccgtgtgagctccgcctcccgtcacagcattaccgtgtgagctccgcctcccgtcacagcattaccgtgtgagctccgcctcccgtcasagcattaccgtgtgagctccgcctcccgccagagcattaccgtgtgagctccgcctcccgccagagcattaccgtgtgagctccgcctccccacagagca

SEQ ID NO: 111438 - DNA, 201 bp, Homo sapiens
cccgtccgagcattaccgtgtgagctccgcctcccgtcacagcattaccgtgtgagctccgcctcccgtcacagcattaccgtgtgagctccgcctcccgycagagcattaccgtgtgagctccgcctcccgccagagcattaccgtgtgagctccgcctcccgccagagcattaccgtgtgagctccgcctccccacaga

SEQ ID NO: 111439 - DNA, 201 bp, Homo sapiens
ctttccacaggtcctgaggcacgtgaatggccaggatcagattgtgcccggcctgtacgcctgtggggaggccgcctgtgcctcggtacatggtgccaacygcctcggggcaaactcgctcttggacctggttgtctttggtcgggcatgtgccctgagcatcgaagagtcatgcaggcctggtaagtgttttcttcagga

SEQ ID NO: 111440 - DNA, 201 bp, Homo sapiens
gccagagcattaccgtgtgagctccgcctcccgtccgagcattaccgtgtgagctccgcctcccgtcacagcattaccgtgtgagctccgcctcccgtcasagcattaccgtgtgagctccgcctcccgtcagagcattaccgtgtgagctccgcctcccgccagagcattaccgtgtgagctccgcctcccgccagagca

SEQ ID NO: 111441 - DNA, 201 bp, Homo sapiens
gcattactgtgagctccatctcttgtcagagcattaccgtgtgagctccaccccctgccagagcattaccgtgtgagctccgccccctgccagagcattastgtgagctccttctcctctcagagccttgccgtgagctccgccccccgccagagcattaccgtgtgagctccgcctcccgtcagagcattaccgtgtgag

SEQ ID NO: 111442 - DNA, 201 bp, Homo sapiens
tcagagcattactgtgagctccatctcttgtcagagcattaccgtgtgagctccaccccctgccagagcattaccgtgtgagctccgccccctgccagagyattactgtgagctccttctcctctcagagccttgccgtgagctccgccccccgccagagcattaccgtgtgagctccgcctcccgtcagagcattaccgt

SEQ ID NO: 111443 - DNA, 201 bp, Homo sapiens
ctcctgtcagagcattactgtgagctccatctcttgtcagagcattaccgtgtgagctccaccccctgccagagcattaccgtgtgagctccgccccctgycagagcattactgtgagctccttctcctctcagagccttgccgtgagctccgccccccgccagagcattaccgtgtgagctccgcctcccgtcagagcat

SEQ ID NO: 111444 - DNA, 201 bp, Homo sapiens
gtgcctcttcgggttgtgtagaagtaggaaatgtgtcaccaaaataggagctgttgctgctgcgttctctagcacacctgccttgtctgtactgctcggcrtggaatgcctctcgggctctgacagtgtcactgacactgttgctgatctccttggatttacctggtccatttggatcaagttctttcacctattcacatg

SEQ ID NO: 111445 - DNA, 201 bp, Homo sapiens
cccctgccagagcattaccgtttgagctccgcctcctgtcagagcattactgtgagctccatctcttgtcagagcattaccgtgtgagctccaccccctgycagagcattaccgtgtgagctccgccccctgccagagcattactgtgagctccttctcctctcagagccttgccgtgagctccgccccccgccagagcat

SEQ ID NO: 111446 - DNA, 201 bp, Homo sapiens
agctccgccccctgccagagcattaccgtttgagctccgcctcctgtcagagcattactgtgagctccatctcttgtcagagcattaccgtgtgagctccrccccctgccagagcattaccgtgtgagctccgccccctgccagagcattactgtgagctccttctcctctcagagccttgccgtgagctccgccccccgc

SEQ ID NO: 111447 - DNA, 201 bp, Homo sapiens
taaaacagtcacaactcacagaaacagagtaggacagtggttgccaggggctgggggaatgcagactgtggcgatgctgattaaaggtgtaacttcccgtyacaaggtgaagttctgaaggtctaatatacaacatggtggctatagttaacattatacagcatggtggccagagttaacattatacagcatggtggctat

SEQ ID NO: 111448 - DNA, 201 bp, Homo sapiens
tcaaaaattaaaacaaaatttgaggcatccaacgtacactgggctgtaatcagagtattggccagaggtctgtgggccggcctttctcctctctggggacrccgctctgccccagcctctgctgcagctgtcagccttgtcagtgctttttgttatccagactttctactgtatcttaactgtcttgctgtgcagttttgc

SEQ ID NO: 111449 - DNA, 201 bp, Homo sapiens
gcagcaggctgtgatccctgagacgagcgtgagtttagtgagggcagagtttttgttctggttctcagctgtgtcccagcacctgggattgtccctggcayacagtagctgcttagaaaagatttgatgagagggtgaccatacatgaggggaaattttcctcagtatcaaaacatgttgaaactcacacacttccaagat

SEQ ID NO: 111450 - DNA, 201 bp, Homo sapiens
cttaccaaggacacctgcagcaggctgtgatccctgagacgagcgtgagtttagtgagggcagagtttttgttctggttctcagctgtgtcccagcacctrggattgtccctggcacacagtagctgcttagaaaagatttgatgagagggtgaccatacatgaggggaaattttcctcagtatcaaaacatgttgaaact

SEQ ID NO: 111451 - DNA, 201 bp, Homo sapiens
cttaacacttcttgccctttttttttcctttcttttagtctctgcgatatgataccagctattttgtggagtattttgccttggatctcctgatggagaayggggagtgccgtggtgtcatcgcactgtgcatagaggacgggtccatccatcgcataagagcaaagaacactgttgttgccacagggtaggaatctcatt

SEQ ID NO: 111452 - DNA, 201 bp, Homo sapiens
gttcattatcttctgtgcattacaccataaaaaagctggtcataaaaatgcgaaccaaaaacaaaggtgaaactaggataaaatttctcacctgtgtgatkggtaaatgtgcaggtttgacatcatgctttgtttatgaagctgtgggatacaaggactctcatacgtcactgtggaatgcagaacattgcaacctcatgg

SEQ ID NO: 111453 - DNA, 201 bp, Homo sapiens
ttgaaaataaaattgcatccttacaaatatgcagactttttttccttgtcattgttcccttaacaatacagtgtaacagctatttacgtagcatttacatkgtattaggtactatgagtcatcctggagttgctgtaaaacttaaacgtaaaacttgaaatgaggatgatttaaagtatagaggaggatgtgcataggtta

SEQ ID NO: 111454 - DNA, 201 bp, Homo sapiens
ttgtgtccccaggaatggtctggaacacggacctggtggagaccctggagctgcagaacctgatgctgtgtgcgctgcagaccatctacggagcagaggcrcggaaggagtcacggggcgcgcatgccagggaagactacaaggtgggccttctcaccacgcccacctgcacctgccttttcctgccacctggtgggactc

SEQ ID NO: 111455 - DNA, 201 bp, Homo sapiens
agagcattaccttgtgagctccaccccctgccagagcattactgggtgagctccaccccctgccagagcattactgggtgagctccaccccctgccagagmattactgtgagctccgcctcccgacagcattaccgtgtgagctccgcgccctgccagagcattactgtgtgagctccgcccctgccagagcattaccttg

SEQ ID NO: 111456 - DNA, 201 bp, Homo sapiens
cataggagtggaaccctgttgtgaactgcacatgcgaaggatctaggttatgcgccgcttatgaaaatctaatgctgatgatctgagatggaaccgtttcrtctccaaaccatccccaccatccccacacttgtccgtggaaaaagtgtcttccatgaaaccagtccctggtgccaacaaggttagggaccaccagtttaa

SEQ ID NO: 111457 - DNA, 201 bp, Homo sapiens
aggccagctgggaaagaaagaaccattgcattagagaatgggaacatgccttcggatatagaaatggcaaatccatgagatagtttaaagtgagaatactrgaagcattcccaccaaacatggtgtgtcttggtgcctgctgtatcccaggctccacgagatgctggagtcagcactgaacaaacagagtttcctctgctc

SEQ ID NO: 111458 - DNA, 201 bp, Homo sapiens
gcttgcctgtgcgctgagtgcctctagggccgggctcggcttagtccaggatggtggtcagggttatacttccctgagcccttgctctctgagtgtctgartgtgccctctacgattgcatcttaagaatcggccttctagggttttatttaatcaagctaaattggataggtttagttgtttggttcttttaaatgaact

SEQ ID NO: 111459 - DNA, 201 bp, Homo sapiens
aacacctatgtggtgttagacacaggagaacaggttccctgctgacattttcagaggcctgtgcccttcagtcttcaagtgaagctgggcttcagggaggytttgtggaatggtgagaagaacagtgtgactaaggcacagaaggctgagtgatgccctgcagtactattgtagggttggaggccagctgggaaagaaaga

SEQ ID NO: 111460 - DNA, 201 bp, Homo sapiens
gtgtgaggagaaaggacacaccaaagaagtaaaataattgggtcaatataaaaagaaagtagaatattgcccagagaggagatgtggataattcctaacayggatcaaaggtgagctgtgtctaagacagtcagacctgcaccgtcccgtgcagtagacaccgtggccgctgtgtctgagatattcagaccctcgccgtcc

SEQ ID NO: 111461 - DNA, 201 bp, Homo sapiens
aactgacaggcagtgttgtgtgtgtgtctactgcttaggaacccaaaacaaaccttcagaccattttcatgagtactgagaccaggaaaaccactgggcastgggtggtctggaaatgtaaatgtttatagtactccatggagtactatatgagtcatggaacgatgtttcatattgaaaatgttttataaatgtgggttt

SEQ ID NO: 111462 - DNA, 201 bp, Homo sapiens
aggcaggtcttctcgttagctgtggtgctccatgcccagcacatggtagggtctccaccggggtttactgagtgaacattctgagagctgggagaatgccrtggaaccgagaagcagcacaggcagacttcagctttgtaggagaacacggagcttctgtgacaatgggatgtaaagttaggacgcagccgtgacagaacc

SEQ ID NO: 111463 - DNA, 201 bp, Homo sapiens
taaggccgcccccgtccacctgagacaggacacgtagtgctggggcttatggtgacagtggggaatgggttagcgtgcccagtgagtcagccagagattaygtaaaaagcaacagagaacagcagcgtggggcgcatgcagcgactgtggatgtgacaggaccagacgtgtgccttgaggagctgtccctaaggcagtgtg

SEQ ID NO: 111464 - DNA, 201 bp, Homo sapiens
cacacgggccggggttgcttctgtgagtttcagcaccgctcgccctcaccttcgtgtgcaggcgcatgtgcacagccacctctcttagctgctggcaggcrtctgttagtctgcgatattttcctaaagacctacattttgaaaattttagccagtttctttctcaaatctgtggaacagagtttctcttagtgtgtgtga

SEQ ID NO: 111465 - DNA, 201 bp, Homo sapiens
agctccaccccctgccagagcattactgggtgagctccaccccctgccagagcattactgtgtgagctccgcctcctgccatagcattactgtgagctccrcctcccgacagcattaccgtgtgagctccgcccccgttagagcattactgtgtgagctccaccccctgccagagcattactgggtgagctccgcccctgc

SEQ ID NO: 111466 - DNA, 201 bp, Homo sapiens
attactgtgtgagctccgcccctgccagagcattaccttgtgagctccaccccctgccagagcattactgggtgagctccaccccctgccagagcattacygtgtgagctccgcctcctgccatagcattactgtgagctccgcctcccgacagcattaccgtgtgagctccgcccccgttagagcattactgtgtgagct

SEQ ID NO: 111467 - DNA, 201 bp, Homo sapiens
tccgcgccctgccagagcattactgtgtgagctccgcccctgccagagcattaccttgtgagctccaccccctgccagagcattactgggtgagctccacsccctgccagagcattactgtgtgagctccgcctcctgccatagcattactgtgagctccgcctcccgacagcattaccgtgtgagctccgcccccgttag

SEQ ID NO: 111468 - DNA, 201 bp, Homo sapiens; identical to SEQ ID NO: 18411

SEQ ID NO: 111469 - DNA, 201 bp, Homo sapiens
tactgtgtgagctccgcccctgccagagcattaccttgtgagctccaccccctgccagagcattactgggtgagctccaccccctgccagagcattactgkgtgagctccaccccctgccagagcattactgtgagctccgcctcccgacagcattaccgtgtgagctccgcgccctgccagagcattactgtgtgagctc

SEQ ID NO: 111470 - DNA, 201 bp, Homo sapiens
cgttaccgtgagctccgccccctgttggagcattactgtgtgagctccgcgccctgccagagcattactgtgtgagctccgcccctgccagagcattaccktgtgagctccaccccctgccagagcattactgggtgagctccaccccctgccagagcattactgggtgagctccaccccctgccagagcattactgtgag

SEQ ID NO: 111471 - DNA, 201 bp, Homo sapiens
cattactctgtgagctccgcctcctgtcagagcgttaccgtgagctccgccccctgttggagcattactgtgtgagctccgcgccctgccagagcattacygtgtgagctccgcccctgccagagcattaccttgtgagctccaccccctgccagagcattactgggtgagctccaccccctgccagagcattactgggtg

SEQ ID NO: 111472 - DNA, 201 bp, Homo sapiens
cagcctgggcaacagagtaagactccgtctcaaaaaaaaaaaaaaaaaaagtaaagcagggattgttcagtgtccctcttcgcaacgaggtcgtcagctcytcgggcaggcaggtcttctcgttagctgtggtgctccatgcccagcacatggtagggtctccaccggggtttactgagtgaacattctgagagctgggag

SEQ ID NO: 111473 - DNA, 201 bp, Homo sapiens
agctccgcctgctgccagagcattactctgtgagctccgcctcctgtcagagcgttaccgtgagctccgccccctgttggagcattactgtgtgagctccrcgccctgccagagcattactgtgtgagctccgcccctgccagagcattaccttgtgagctccaccccctgccagagcattactgggtgagctccaccccc

SEQ ID NO: 111474 - DNA, 201 bp, Homo sapiens
tttatgtaataacatggttttgaagatcagcttcctcagctctcaggtcctaacttcaacgtcatttacctaaggagacttttcccacactccccttcccytaaggcagtttgggccaccgtcttatgtatttctcaagagcgctaaaccctgccttggtgatacttaagccagcagtaaagcagggattgaggccgagca

SEQ ID NO: 111475 - DNA, 201 bp, Homo sapiens
catatatggtgctggttgtctcattacggaaggatgtcgtggagagggaggcattctcattaacagtcaaggcgaaaggtttatggagcgatacgcccctrtcgcgaaggacctggcgtctagagatgtggtgtctcggtccatgactctggagatccgagaaggaaggtgcgtgtgatttaccaccagcactgtctgagc

SEQ ID NO: 111476 - DNA, 201 bp, Homo sapiens
ttaccgtgtgagctccgcctgctgccagagcattactctgtgagctccgcctcctgtcagagcgttaccgtgagctccgccccctgttggagcattactgkgtgagctccgcgccctgccagagcattactgtgtgagctccgcccctgccagagcattaccttgtgagctccaccccctgccagagcattactgggtgag

SEQ ID NO: 111477 - DNA, 201 bp, Homo sapiens
ttgctcttccatagttttatgtaataacatggttttgaagatcagcttcctcagctctcaggtcctaacttcaacgtcatttacctaaggagacttttccsacactccccttcccctaaggcagtttgggccaccgtcttatgtatttctcaagagcgctaaaccctgccttggtgatacttaagccagcagtaaagcagg

SEQ ID NO: 111478 - DNA, 201 bp, Homo sapiens
aatccaaaaaatgcctttttcccccctggtaactttgatccctgggttctcgccatcttctggatcactgtgaccttttccttgctttgggtcggcatccrctgatgccagcagtggcatctccaagccaatgtgctttgctgttagaaggccaaggttagaagtgcagctagagtggcaagaccaggaaataaatgccag

SEQ ID NO: 111479 - DNA, 201 bp, Homo sapiens
atgtgatgcctactcattgctcttccatagttttatgtaataacatggttttgaagatcagcttcctcagctctcaggtcctaacttcaacgtcatttacytaaggagacttttcccacactccccttcccctaaggcagtttgggccaccgtcttatgtatttctcaagagcgctaaaccctgccttggtgatacttaag

SEQ ID NO: 111480 - DNA, 201 bp, Homo sapiens
cctgtcagagcattaccgtgtgagctccgcctgctgccagagcattactctgtgagctccgcctcctgtcagagcgttaccgtgagctccgccccctgttrgagcattactgtgtgagctccgcgccctgccagagcattactgtgtgagctccgcccctgccagagcattaccttgtgagctccaccccctgccagagca

SEQ ID NO: 111481 - DNA, 201 bp, Homo sapiens
tcttgtaagcatgtgatgcctactcattgctcttccatagttttatgtaataacatggttttgaagatcagcttcctcagctctcaggtcctaacttcaaygtcatttacctaaggagacttttcccacactccccttcccctaaggcagtttgggccaccgtcttatgtatttctcaagagcgctaaaccctgccttggt

SEQ ID NO: 111482 - DNA, 201 bp, Homo sapiens
accacctgtcagagcattaccgtgtgagctccgcctgctgccagagcattactctgtgagctccgcctcctgtcagagcgttaccgtgagctccgccccctgttggagcattactgtgtgagctccgcgccctgccagagcattactgtgtgagctccgcccctgccagagcattaccttgtgagctccaccccctgccag

SEQ ID NO: 111483 - DNA, 201 bp, Homo sapiens
gacggcacggccatgatcaccagggcaggccttccttgccaggacctagagtttgttcagttccaccccacaggtagggcaggacgccttgcccggcaggygtttggcttgtgtgtgtcttgtaagcatgtgatgcctactcattgctcttccatagttttatgtaataacatggttttgaagatcagcttcctcagctct

SEQ ID NO: 111484 - DNA, 201 bp, Homo sapiens
tcagctgcacgtctgcccacaccagcactggcgacggcacggccatgatcaccagggcaggccttccttgccaggacctagagtttgttcagttccacccyacaggtagggcaggacgccttgcccggcaggtgtttggcttgtgtgtgtcttgtaagcatgtgatgcctactcattgctcttccatagttttatgtaata

SEQ ID NO: 111485 - DNA, 201 bp, Homo sapiens
gaggtccagatgtgggccgctgtgtgcagtcactgctctctgttgtttccagaggctacgggcgcacctacttcagctgcacgtctgcccacaccagcacyggcgacggcacggccatgatcaccagggcaggccttccttgccaggacctagagtttgttcagttccaccccacaggtagggcaggacgccttgcccggc

SEQ ID NO: 111486 - DNA, 201 bp, Homo sapiens
cagcactgagaagacggtgctgggggctgccgtgtccattctgtgatctcaccagataggaggtccagatgtgggccgctgtgtgcagtcactgctctctrttgtttccagaggctacgggcgcacctacttcagctgcacgtctgcccacaccagcactggcgacggcacggccatgatcaccagggcaggccttccttg

SEQ ID NO: 111487 - DNA, 201 bp, Homo sapiens
caggatggtggtcagggttatacttccctgagcccttgctctctgagtgtctgaatgtgccctctacgattgcatcttaagaatcggccttctagggtttyatttaatcaagctaaattggataggtttagttgtttggttcttttaaatgaacttacccacccacctccttaattacaaagtaattttaaattgcagaat

SEQ ID NO: 111488 - DNA, 201 bp, Homo sapiens
ccttaattacaaagtaattttaaattgcagaataaaaatctcaataggaaccaaggcattcagcaatattgatttgaattatgcctgtaattgtgcaattytctcctttttgaaatacttattaaaaatctcgttgagttaaatgtgaggattagtcatacagccatcctgccaacatcagaaagcgtgtaaaccgttcta

SEQ ID NO: 111489 - DNA, 201 bp, Homo sapiens
tggttcttttaaatgaacttacccacccacctccttaattacaaagtaattttaaattgcagaataaaaatctcaataggaaccaaggcattcagcaataktgatttgaattatgcctgtaattgtgcaattttctcctttttgaaatacttattaaaaatctcgttgagttaaatgtgaggattagtcatacagccatcc

SEQ ID NO: 111490 - DNA, 201 bp, Homo sapiens
tggtggacagagcctcaagtttggaaagggcgggcaggcccatcggtgctgctgtgtggctgatcggactggccactcgctattgcacaccttatatggamgggtaaggccgcccccgtccacctgagacaggacacgtagtgctggggcttatggtgacagtggggaatgggttagcgtgcccagtgagtcagccagaga

SEQ ID NO: 111491 - DNA, 201 bp, Homo sapiens
caccacctgtcagagcattaccgtgtgagctccgcctgctgccagagcattactctgtgagctccgcctcctgtcagagcgttaccgtgagctccgccccctgttggagcattactgtgtgagctccgcgccctgccagagcattactgtgtgagctccgcccctgccagagcattaccttgtgagctccaccccctgcca

SEQ ID NO: 111492 - DNA, 201 bp, Homo sapiens; identical to SEQ ID NO: 18412

SEQ ID NO: 111493 - DNA, 201 bp, Homo sapiens; identical to SEQ ID NO: 18413

SEQ ID NO: 111494 - DNA, 201 bp, Homo sapiens
ttaccactgactcttcttttcaaggtcactctggaatatagacccgtgatcgacaaaactttgaacgaggctgactgtgccaccgtcccgccagccattcrctcctactgatgagacaagatgtggtgatgacagaatcagcttttgtaattatgtataatagctcatgcatgtgtccatgtcataactgtcttcatacgc

SEQ ID NO: 111495 - DNA, 201 bp, Homo sapiens
catttttgtgcttaacttaccactgactcttcttttcaaggtcactctggaatatagacccgtgatcgacaaaactttgaacgaggctgactgtgccaccrtcccgccagccattcgctcctactgatgagacaagatgtggtgatgacagaatcagcttttgtaattatgtataatagctcatgcatgtgtccatgtcat

SEQ ID NO: 111496 - DNA, 201 bp, Homo sapiens
tctaatatacaacatggtggctatagttaacattatacagcatggtggccagagttaacattatacagcatggtggctatagttaacattatacagcatgrtggttagagttaacattatacagcatggtggctagagttaacattatacagcatggtggctagagttaacattatacagcatgctggctatcgttaacat

SEQ ID NO: 111497 - DNA, 201 bp, Homo sapiens
gcatatatggtgctggttgtctcattacggaaggatgtcgtggagagggaggcattctcattaacagtcaaggcgaaaggtttatggagcgatacgccccygtcgcgaaggacctggcgtctagagatgtggtgtctcggtccatgactctggagatccgagaaggaaggtgcgtgtgatttaccaccagcactgtctgag

SEQ ID NO: 111498 - DNA, 201 bp, Homo sapiens
caagagatggctttttgtacatttttgtgcttaacttaccactgactcttcttttcaaggtcactctggaatatagacccgtgatcgacaaaactttgaaygaggctgactgtgccaccgtcccgccagccattcgctcctactgatgagacaagatgtggtgatgacagaatcagcttttgtaattatgtataatagctc

SEQ ID NO: 111499 - DNA, 201 bp, Homo sapiens
ttcgtatctgagtcagtgagtatcctgtttggaaacaagcttcatcctggttttctagagtgccaagtcagggtggaaacgaggacctgggggctcagtcyttccttgccccttgggctgccttcagggttaagtagagggtcccagctgagctctctggatgcacaggagcacctgggtacataagaaggtgaacagttt

SEQ ID NO: 111500 - DNA, 201 bp, Homo sapiens
gacagtggttgccaggggctgggggaatgcagactgtggcgatgctgattaaaggtgtaacttcccgttacaaggtgaagttctgaaggtctaatatacarcatggtggctatagttaacattatacagcatggtggccagagttaacattatacagcatggtggctatagttaacattatacagcatggtggttagagtt

SEQ ID NO: 111501 - DNA, 201 bp, Homo sapiens
ttgggaccagaagcgttgtggatttcaggcttgttcagactttggaatatttgcattatacttactgtctgagcatccctaatcggaacatctgactccayagcacatttcttttgaatgtcatgctggtgctcagaaagtttcagattttagagaatttcagatttttggattagggatgttcaacctatataaatattt

SEQ ID NO: 111502 - DNA, 201 bp, Homo sapiens
gtaggacagtggttgccaggggctgggggaatgcagactgtggcgatgctgattaaaggtgtaacttcccgttacaaggtgaagttctgaaggtctaatawacaacatggtggctatagttaacattatacagcatggtggccagagttaacattatacagcatggtggctatagttaacattatacagcatggtggttag

SEQ ID NO: 111503 - DNA, 201 bp, Homo sapiens
gagtattccttctctgaaatccttgggaccagaagcgttgtggatttcaggcttgttcagactttggaatatttgcattatacttactgtctgagcatccytaatcggaacatctgactccacagcacatttcttttgaatgtcatgctggtgctcagaaagtttcagattttagagaatttcagatttttggattaggga

SEQ ID NO: 111504 - DNA, 201 bp, Homo sapiens
cagagtaggacagtggttgccaggggctgggggaatgcagactgtggcgatgctgattaaaggtgtaacttcccgttacaaggtgaagttctgaaggtctratatacaacatggtggctatagttaacattatacagcatggtggccagagttaacattatacagcatggtggctatagttaacattatacagcatggtgg

SEQ ID NO: 111505 - DNA, 201 bp, Homo sapiens
ctgggaacagccagccgagggtgtggtagggggtcgcagcctttttccacacacggtgagcagcgtcctgggaacagccagccgagggtgtggtaggggggtcgcagccttgttccacacaagcacagttcacctgtgtggcatttccgctgggcattaagattcagaaataatgaagatagaaagcttttacccttaaac

SEQ ID NO: 111506 - DNA, 201 bp, Homo sapiens
gcattgtagaataacggtttagacacaggccttgatataaccatgtgagggtgatggcctttcccagccgtggttcctcacctgtaaagggtgaggacagyagcacctgcctcagggtgagaaagcatggtcctcagtagatggtagtggttgccctcaggttcacagcttacctctcccaatttagatgagggaactgtg

SEQ ID NO: 111507 - DNA, 201 bp, Homo sapiens
aaaaggcactccgacagcagtcgggcttcgggctggaaacagaatccagttcctgcaggtggttcagaggagccttaaggaagggttgctccgtggtgtgsgccagatggacgtcactgggcaggagcaagtgtccaaggcctggtggtaggggaggagatgatgattgtggacctagcgagaaagcatctgtggggtggg

SEQ ID NO: 111508 - DNA, 201 bp, Homo sapiens
ttagtctctgcgatatgataccagctattttgtggagtattttgccttggatctcctgatggagaatggggagtgccgtggtgtcatcgcactgtgcatasaggacgggtccatccatcgcataagagcaaagaacactgttgttgccacagggtaggaatctcatttctactttattttgtttataaaaatgaataaatt

SEQ ID NO: 111509 - DNA, 201 bp, Homo sapiens
tgctcggcgtggaatgcctctcgggctctgacagtgtcactgacactgttgctgatctccttggatttacctggtccatttggatcaagttctttcacctrttcacatgagcagataccaccttaaaaccttaaagtttggcttaacacttcttgccctttttttttcctttcttttagtctctgcgatatgataccagct

SEQ ID NO: 111510 - DNA, 201 bp, Homo sapiens
tcctggatcacttgagaccaggaggttgaggctacagtgagccatgttcgtaccactgcactccagcctgggcaacaggagaccctgtctcaaaaaaagaraaagaacaggctgggtgcggtggctcacgcctgtaatcccagcactttgtgaggcctaggcgggcagatcacaaggtcaggagtttgaggccatcttgcc

SEQ ID NO: 111511 - DNA, 201 bp, Homo sapiens
atttgttaataaaattatctggaaagatttgttgagtaccttttctgtgccagataggttaggttataagcatattacaggtagcctttcactcactgctmcagtcagcccttcctggagttccctgtgtctccaccacgcagatgaggagactgaggctaaggatggaatcactgggcgagtcggggaggggttgtgatc

SEQ ID NO: 111512 - DNA, 201 bp, Homo sapiens
aattaacaattggcacaaaagactagttttgtgtcaaaactagttttgagttttatctaaagactgaaattggcttaaagttgggctttccaaattcaaawatctgccccagattagatttagattgagagggttagtgtccttttcgccagggggatggcgtgataatttgttcaagattgtgttatagtagctgcccct

SEQ ID NO: 111513 - DNA, 201 bp, Homo sapiens
tgcacttcttacttttcccctccacctcctaattcagtcatctgaaattctgtattgttaagcaaggtctaagtattccttttagttatatgttccccatkttttttcttgaggaaatgtttgatagtttctcctaaaaaaattaacaattggcacaaaagactagttttgtgtcaaaactagttttgagttttatctaaa

SEQ ID NO: 111514 - DNA, 201 bp, Homo sapiens
ctgagaaagatcacgtctacctgcagctgcaccacctacctccagagcagctggccacgcgcctgcctggcatttcagagacagccatgatcttcgctggygtggacgtcacgaaggagccgatccctgtcctccccaccgtgcattataacatgggcggcattcccaccaactacaaggggcaggtgatggtgctggctc

SEQ ID NO: 111515 - DNA, 201 bp, Homo sapiens
agcccatccaggggcaacagaagaagccctttgaggagcactggaggaagcacaccctgtcctatgtggacgttggcactgggaaggtcagtgtggagctygttctcaccacagcccagcacccacacggccccgcccaggcctgcgggctggccttgctgatggtgaacggggaagagcaggccagatttaaatcaactc

SEQ ID NO: 111516 - DNA, 201 bp, Homo sapiens
gcctccgtgggttctgaacatgttgatggtgccaacctcctgggctgaagtggaaatggaatgagttctagggcatctgtctcttagatcatgttaatgtytgctgtgttttttctgtattgctctgttagagtaataagaaacgtgatggtgtttctggcctcaggtgcggattgatgagtacgattactccaagcccat

SEQ ID NO: 111517 - DNA, 201 bp, Homo sapiens
acggaaagggaagcttgggatgcaaatgcaagttcaggataaaccacatcagcaaaaggacaaaggctccacaaggcaggcgcacaggctggttcaggacmgtgtgtaggcggctggtggcagcctttccagtcagctgaacatggtgaatgggaaaatcatttttattcaccatgaaattttactgatttaccctccact

SEQ ID NO: 111518 - DNA, 201 bp, Homo sapiens
tcagatgaactgatttttgtgcagagcgcacgtgttggattctgcctggtaagagtttttcccatatgatagcaaaaaacgacggaaagggaagcttgggrtgcaaatgcaagttcaggataaaccacatcagcaaaaggacaaaggctccacaaggcaggcgcacaggctggttcaggaccgtgtgtaggcggctggtgg

SEQ ID NO: 111519 - DNA, 201 bp, Homo sapiens
aaaaggtattatagagcctgccctgtggtcacttgttcttcagatgaactgatttttgtgcagagcgcacgtgttggattctgcctggtaagagtttttcmcatatgatagcaaaaaacgacggaaagggaagcttgggatgcaaatgcaagttcaggataaaccacatcagcaaaaggacaaaggctccacaaggcaggc

SEQ ID NO: 111520 - DNA, 201 bp, Homo sapiens
ggaaatgtttgatagtttctcctaaaaaaattaacaattggcacaaaagactagttttgtgtcaaaactagttttgagttttatctaaagactgaaattgrcttaaagttgggctttccaaattcaaaaatctgccccagattagatttagattgagagggttagtgtccttttcgccagggggatggcgtgataatttgt

SEQ ID NO: 111521 - DNA, 201 bp, Homo sapiens
ggagtaagccaccatttcagacctgtcctgtggtttggaaaaggtattatagagcctgccctgtggtcacttgttcttcagatgaactgatttttgtgcasagcgcacgtgttggattctgcctggtaagagtttttcccatatgatagcaaaaaacgacggaaagggaagcttgggatgcaaatgcaagttcaggataaa

SEQ ID NO: 111522 - DNA, 201 bp, Homo sapiens
ttccttctctgaaatccttgggaccagaagcgttgtggatttcaggcttgttcagactttggaatatttgcattatacttactgtctgagcatccctaatsggaacatctgactccacagcacatttcttttgaatgtcatgctggtgctcagaaagtttcagattttagagaatttcagatttttggattagggatgttc

SEQ ID NO: 111523 - DNA, 201 bp, Homo sapiens
ctcggggacccggggagctcggtccttagtagatagtccgcgtccgggtgaaggtcacaaccccgcgggcttgctgggcgtcccctccgccgccttggtcygggcctggggtcctgggaccccgcgggctgaggtagcccctcgcctcagtgcctggcaggtggactcggggaggagtcgtgtctgcccaaggtcacccgg

SEQ ID NO: 111524 - DNA, 201 bp, Homo sapiens
ctgccctgtggaggaaatgccagtttattaaataacgagtaagccaccgtttcaaacctgccctgtggaggaaatgccagtttattaaataacgagtaagycaccgtttcaaacctgccctgtggaggaaatgccagtttattaaataacgagtaagccaccgtttcaagcctgccctgtggaggaaatgccagtttatta

SEQ ID NO: 111525 - DNA, 201 bp, Homo sapiens
cgactgtatttggcatagaggcctttctaatgcacttaccaaggacacctgcagcaggctgtgatccctgagacgagcgtgagtttagtgagggcagagtwtttgttctggttctcagctgtgtcccagcacctgggattgtccctggcacacagtagctgcttagaaaagatttgatgagagggtgaccatacatgaggg

SEQ ID NO: 111526 - DNA, 201 bp, Homo sapiens
ctgctgagcgctcggcgcctggcgctggccaaggcggtgagtccgtgccgcggaccggggcggggcaggcgggggccgaggcggcggtaggagcgggacgrtccccagcgggtccgagcggagcgggcgccgggtccctgcgccctctgtcccgggatcgggaaggggctgagagagccctgggccggtgcgaggggaagc

SEQ ID NO: 111527 - DNA, 201 bp, Homo sapiens
ttcaagcctgccctgtggaggaaatgccagtttattaaataacgagtaagccaccgtttcaaacctgccctgtggaggaaatgccagtttattaaataacragtaagccaccgtttcaaacctgccctgtggaggaaatgccagtttattaaataacgagtaagccaccgtttcaagcctgccctgtggaggaaatgccag

SEQ ID NO: 111528 - DNA, 201 bp, Homo sapiens
aggcgcggtatcccccctcccccgccagctcgaccccggtgtggtgcgcaggcgcagtctgcgcagggactggcgggactgcgcggcggcaacagcagacrtgtcgggggtccggggcctgtcgcggctgctgagcgctcggcgcctggcgctggccaaggcggtgagtccgtgccgcggaccggggcggggcaggcgggg

SEQ ID NO: 111529 - DNA, 201 bp, Homo sapiens
catgactctggagatccgagaaggaaggtgcgtgtgatttaccaccagcactgtctgagcgggcacacgggccggggttgcttctgtgagtttcagcaccrctcgccctcaccttcgtgtgcaggcgcatgtgcacagccacctctcttagctgctggcaggcgtctgttagtctgcgatattttcctaaagacctacatt

SEQ ID NO: 111530 - DNA, 201 bp, Homo sapiens
aaatgccagtttattaaataacgagtaagccatcatttcaagcctgccctgtggaggaaatgccagtttattaaataacgagtaagccaccgtttcaaacytgccctgtggaggaaatgccagtttattaaataacgagtaagccaccgtttcaaacctgccctgtggaggaaatgccagtttattaaataacgagtaagc

SEQ ID NO: 111531 - DNA, 201 bp, Homo sapiens
tgccagcagtggcatctccaagccaatgtgctttgctgttagaaggccaaggttagaagtgcagctagagtggcaagaccaggaaataaatgccagtttaktaaataacgagtaagccatcatttcaagcctgccctgtggaggaaatgccagtttattaaataacgagtaagccaccgtttcaaacctgccctgtggagg

SEQ ID NO: 111532 - DNA, 201 bp, Homo sapiens
aaaactatgttttctgggtcaggggaggaaacaggaggtacaggaacactagaggggagaaagcacggagagatgggaaaagcacggagagagagatgggraaagggcaatcaagaagactgagagaaaaggggggaagcagaatgacagaggaggtgtgaagagagagaagccctctggagcgctgaaatactgaatatt

SEQ ID NO: 111533 - DNA, 201 bp, Homo sapiens
actttactcacagagttcttttcacgcctaaatatgtttgcaaccaagttcttcactgtggcatttgtaaaactggaaacaatcaaaatgtccatcagtargggattaggaacattaattcgtacagtggggaactcagtaccagaaggagggatgaggaagacctattgataaggggcagagtacatatcatataatgca

SEQ ID NO: 111534 - DNA, 201 bp, Homo sapiens
tttcacagctagaaaattatggcatgccgtttagcagaactgaagatgggaagatttatcagcgtgcatttggtggacagagcctcaagtttggaaagggygggcaggcccatcggtgctgctgtgtggctgatcggactggccactcgctattgcacaccttatatggaagggtaaggccgcccccgtccacctgagaca

SEQ ID NO: 111535 - DNA, 201 bp, Homo sapiens
ctgggcgacagagcaacactctgtctcaaaaaaaaaaaaaaaaaaaaaaaaacagagaagtcaaatggttttttggaatatggtggccctccgtacccatyggttccacatgtgtggtttcagccaactatgtattgaaaataaaattgcatccttacaaatatgcagactttttttccttgtcattgttcccttaacaat

SEQ ID NO: 111536 - DNA, 201 bp, Homo sapiens
cctgatggaactttttgtgtccccaggaatggtctggaacacggacctggtggagaccctggagctgcagaacctgatgctgtgtgcgctgcagaccatcwacggagcagaggcacggaaggagtcacggggcgcgcatgccagggaagactacaaggtgggccttctcaccacgcccacctgcacctgccttttcctgcc

SEQ ID NO: 111537 - DNA, 201 bp, Homo sapiens
gcccctgatggaactttttgtgtccccaggaatggtctggaacacggacctggtggagaccctggagctgcagaacctgatgctgtgtgcgctgcagaccrtctacggagcagaggcacggaaggagtcacggggcgcgcatgccagggaagactacaaggtgggccttctcaccacgcccacctgcacctgccttttcct

SEQ ID NO: 111538 - DNA, 201 bp, Homo sapiens
tgactgggtcccgcctgcccctgatggaactttttgtgtccccaggaatggtctggaacacggacctggtggagaccctggagctgcagaacctgatgctrtgtgcgctgcagaccatctacggagcagaggcacggaaggagtcacggggcgcgcatgccagggaagactacaaggtgggccttctcaccacgcccacct

SEQ ID NO: 111539 - DNA, 201 bp, Homo sapiens
ctcataggtatccaatgcatgctgaaattattttcagtgtaataatacttaattgcaagtacaaatataaacatagatgtttacatttttacttgtatctsttatgtatctataaactagatttaaatttagatcaagtaaagcaataaattaaaataaaatgaacagtgtctgctgtgatagatgataaaattcctactg

SEQ ID NO: 111540 - DNA, 201 bp, Homo sapiens
ccaggaaataaatgccagtttattaaataacgagtaagccatcatttcaagcctgccctgtggaggaaatgccagtttattaaataacgagtaagccaccrtttcaaacctgccctgtggaggaaatgccagtttattaaataacgagtaagccaccgtttcaaacctgccctgtggaggaaatgccagtttattaaataa

SEQ ID NO: 111541 - DNA, 201 bp, Homo sapiens
ctggatgggtcctggcccacagctataaagccacaaccagtgactccatggactagcaggcccaggctgacagctcggagggcccatgtgactgggtcccrcctgcccctgatggaactttttgtgtccccaggaatggtctggaacacggacctggtggagaccctggagctgcagaacctgatgctgtgtgcgctgcag

SEQ ID NO: 111542 - DNA, 201 bp, Homo sapiens
taactagccagagcccatccttttgtttcccgtaaggaatacttttagtaaatcttatcactggcttgctgtcaataaatatgtgggtaaatctctgttcraggctctcagctctgaaggctgtaagacccctgatttcccacttcacatgctgtatttctgtgtgtgtgtctttaattcctccagcaccgctgggttagg

SEQ ID NO: 111543 - DNA, 201 bp, Homo sapiens
tactggaatgagggcaagggacacctggcccacccagggtggaaaaccgtttaaggcattcttaaaccacaaacaatagcatgagcgatctgtgccttaargacattttcctgctgcagataactagccagagcccatccttttgtttcccgtaaggaatacttttagtaaatcttatcactggcttgctgtcaataaata

SEQ ID NO: 111544 - DNA, 201 bp, Homo sapiens
caaaactggccataaacaaaatctctgcagcactctgacatgctcttgatggccatgatgcccacgctggaaggttgtcggtttactggaatgagggcaasggacacctggcccacccagggtggaaaaccgtttaaggcattcttaaaccacaaacaatagcatgagcgatctgtgccttaaggacattttcctgctgca

SEQ ID NO: 111545 - DNA, 201 bp, Homo sapiens
atgataagaaatacggcaagggttcctattatctggaaccatggcggtgtagtggcacctcaacctcaaatggtatggccctttgtaggagctaaacataaggatttgtggaaactgttaatagctcttaataagatcaaaatttgggaaagaataaaaaagcatctagaaggacaccgtacaaacttgtctttggatatt

SEQ ID NO: 111546 - DNA, 201 bp, Homo sapiens
gtcttgctgtgcagttttgcacataatgccttctgcttatctttttcctctttcccccaaaaaatgtcttgaaaaaaataatgcatttgaaatagagatcyagcaattgttaggtaataaatatgtgtggttttttgcaggcatatatggtgctggttgtctcattacggaaggatgtcgtggagagggaggcattctcat

SEQ ID NO: 111547 - DNA, 201 bp, Homo sapiens
aaatgataagaaatacggcaagggttcctattatctggaaccatggcggtgtagtggcacctcaacctcaaatggtatggccctttgtaggagctaaacataaggatttgtggaaactgttaatagctcttaataagatcaaaatttgggaaagaataaaaaagcatctagaaggacaccgtacaaacttgtctttggata

SEQ ID NO: 111548 - DNA, 201 bp, Homo sapiens
tgttcagctggtctgaacaaaattgtcagatggtagaaatgataagaaatacggcaagggttcctattatctggaaccatggcggtgtagtggcacctcamcctcaaatggtatggccctttgtaggagctaaacataaggatttgtggaaactgttaatagctcttaataagatcaaaatttgggaaagaataaaaaagc

SEQ ID NO: 111549 - DNA, 201 bp, Homo sapiens
gagcagagacccctgccgcatcttgggcttttaagagctgctaggagggcgtccacaagcaggaaggaaagcccatggtcagtggggctttttaggggaartggtagcttgtgattggagaaaagctagagctagtgcctttgtcctcaacccagatggtgcccggtgttccttctgcagactaagaccctgccagcggcg

SEQ ID NO: 111550 - DNA, 201 bp, Homo sapiens
tcacagagttcttttcacgcctaaatatgtttgcaaccaagttcttcactgtggcatttgtaaaactggaaacaatcaaaatgtccatcagtaggggattrggaacattaattcgtacagtggggaactcagtaccagaaggagggatgaggaagacctattgataaggggcagagtacatatcatataatgcaaatatat

SEQ ID NO: 111551 - DNA, 201 bp, Homo sapiens
aacaagaaaacttctctttgatgaagtgttgacattttcataaaataggttactttgggtttgcagatttgtgttaaacttgtttagtgtagattagctgygaatatcttgactcctttaaggtgttaaggtttttgtttgtttttatctttcacagctagaaaattatggcatgccgtttagcagaactgaagatgggaa

SEQ ID NO: 111552 - DNA, 201 bp, Homo sapiens
aatttttcaaaaggaacacaagagatggctttttgtacatttttgtgcttaacttaccactgactcttcttttcaaggtcactctggaatatagacccgtratcgacaaaactttgaacgaggctgactgtgccaccgtcccgccagccattcgctcctactgatgagacaagatgtggtgatgacagaatcagcttttgt

SEQ ID NO: 111553 - DNA, 201 bp, Homo sapiens
ggaccccaactgtcatgagcaacacccgtcgaacacagccacccacctgaggtcagatcaagaagctgtcacagatggcagaagaaaacctgaggaaagcrggacaaccagtcacaatgagtaatttaatggtagctgtgatagcagtgatcaccattgccatgagtattccttcaacaagggctgacacagagaacaatt

SEQ ID NO: 111554 - DNA, 201 bp, Homo sapiens
ttgtttgaggtgacttgtcctatacttttctgggttgcttttctgacctgtggacgatggagacctctgaagtggtgccaaagaaccagacctgtgtcttytctttctctgtcagtgtcagctttctgatccctggaagggatgaaaataagaaatgaatttgttgtagtgttttttttttatttgtttcgagatggggtc

SEQ ID NO: 111555 - DNA, 201 bp, Homo sapiens
cgcgcccgagcttaggcttgcagttcgcctttccagaaagcgcaaatctgtccatgtccacttcgagaccttgtaagttaagggcttctactttgggtcgygtttggtggtccttatgccaccaaaaatgtgccagtgtttaaaagcagctgtgccagtttttaaaactcaggcggagagctcagcgcactgaccgggcga

SEQ ID NO: 111556 - DNA, 201 bp, Homo sapiens
cgtgccacggccacactatgttcagctggtctgaacaaaattgtcagatggtagaaatgataagaaatacggcaagggttcctattatctggaaccatggyggtgtagtggcacctcaacctcaaatggtatggccctttgtaggagctaaacataaggatttgtggaaactgttaatagctcttaataagatcaaaattt

SEQ ID NO: 111557 - DNA, 201 bp, Homo sapiens
gagtaatttaatggtagctgtgatagcagtgatcaccattgccatgagtattccttcaacaagggctgacacagagaacaattatacttattgggcatatktatcaatcttggctggcaagaatgcctggatgtaatcactctatgatgcagttacacatgctttctgatctcagtatttaccatgataaatctgcttcta

SEQ ID NO: 111558 - DNA, 201 bp, Homo sapiens
atcggactggccactcgctattgcacaccttatatggaagggtaaggccgcccccgtccacctgagacaggacacgtagtgctggggcttatggtgacagyggggaatgggttagcgtgcccagtgagtcagccagagattacgtaaaaagcaacagagaacagcagcgtggggcgcatgcagcgactgtggatgtgacag

SEQ ID NO: 111559 - DNA, 201 bp, Homo sapiens
actgtcatgagcaacacccgtcgaacacagccacccacctgaggtcagatcaagaagctgtcacagatggcagaagaaaacctgaggaaagcgggacaacmagtcacaatgagtaatttaatggtagctgtgatagcagtgatcaccattgccatgagtattccttcaacaagggctgacacagagaacaattatacttat

SEQ ID NO: 111560 - DNA, 201 bp, Homo sapiens
ggtgcgtgtgatttaccaccagcactgtctgagcgggcacacgggccggggttgcttctgtgagtttcagcaccgctcgccctcaccttcgtgtgcaggcrcatgtgcacagccacctctcttagctgctggcaggcgtctgttagtctgcgatattttcctaaagacctacattttgaaaattttagccagtttctttct

SEQ ID NO: 111561 - DNA, 201 bp, Homo sapiens
actgaggaagagattctgggaggatcccgaggacccctcggttgcagccatgtcaagactgatgctgaggaggaccccaactgtcatgagcaacacccgtygaacacagccacccacctgaggtcagatcaagaagctgtcacagatggcagaagaaaacctgaggaaagcgggacaaccagtcacaatgagtaatttaat

SEQ ID NO: 111562 - DNA, 201 bp, Homo sapiens
atacagatctcctgattcaatgttgagtgccttttgaactgaccacaagccctcctggacgattggaactgtaatgtggaaagggctatgatggagccagytaaaatgcttcattacttgcaaaataccacatacagtaatacaatatacacgtctttccccttctccactaagtagcatacattaagacttcacagagga

SEQ ID NO: 111563 - DNA, 201 bp, Homo sapiens
cctagttgctactgcaatatctaatgctagacactttcacaatttaacccgtgttaatgcctctggtctcaaacgcagatacagcagtacccggaaagaarctaaagctattatccagcgatgcccaacttgccaaatggtacattcctcatcttttacaggaggagttaatcctcgaagattggaacctaattctctttg

SEQ ID NO: 111564 - DNA, 201 bp, Homo sapiens
ggtagagtgtgttcattatcttctgtgcattacaccataaaaaagctggtcataaaaatgcgaaccaaaaacaaaggtgaaactaggataaaatttctcamctgtgtgattggtaaatgtgcaggtttgacatcatgctttgtttatgaagctgtgggatacaaggactctcatacgtcactgtggaatgcagaacattgc

SEQ ID NO: 111565 - DNA, 201 bp, Homo sapiens
accctatgcttcagctcaaaaagtggagcttgtagctgtaattgaggtattgactgcttttaatatgcttattaatgtgatttctggttcttcatacatgrttcattccacacaattaattgaaaatgctgagttacgatttcatacagatgaacaactgatgactttatttatgcaattgcaaacagcagttaggagtag

SEQ ID NO: 111566 - DNA, 201 bp, Homo sapiens
cgcctcccgtcagagcattaccgtgtgagctccgcctcccggcagagcattaccgtgtgagctccgcctcctgtccaagcattactgtgtgagatccgccycctgtcatatcattactgggcgagctccgcctcctgccagatcagtggtggcattagattctcataggagtggaaccctgttgtgaactgcacatgcgaa

SEQ ID NO: 111567 - DNA, 201 bp, Homo sapiens
aagattttttaaatagtcttacttggcaaacccatttagctgactttgtgggtattcttgatattttcctaaaatgaaactgtttcaatttttgaaattarctaattggattctccctaaaataactaaatttaaaccaaatgaagatgcagagaatgtttttacagatgggtctagtaatggtaaagcttcttactctgg

SEQ ID NO: 111568 - DNA, 201 bp, Homo sapiens
gactcaagctgcagctgatcgaaaagcaaggccataaagcccaagtaaatagaatcgatccagagaagactcgagctgcagctgatcgaaaagcaaggccrtaaagcccaagtaaatagaatcgatccagagaagacttgagctgcagctgatcgaaacgcaaggccgtaaagcccaaatcaatagaatcgatccagagaa

SEQ ID NO: 111569 - DNA, 201 bp, Homo sapiens
tgagctccgcctcccgtcagagcattaccgtgtgagctccgcctcccggcagagcattaccgtgtgagctccgcctcctgtccaagcattactgtgtgagmtccgccccctgtcatatcattactgggcgagctccgcctcctgccagatcagtggtggcattagattctcataggagtggaaccctgttgtgaactgcac

SEQ ID NO: 111570 - DNA, 201 bp, Homo sapiens
tcactagccctcggctatgccatgagtaatctattttctatccttagaggagatcctggtctcactagccctcagcaattaacaaaagaaactaagggagygcctcagctgatcgaaaagcaagtccataaagcccaaataaatagaacagatccagagaagactcgagctgcagctgatcgaaaagcaaggccataaagc

SEQ ID NO: 111571 - DNA, 201 bp, Homo sapiens
accgtgtgagctccgcctcccgtcagagcattaccgtgtgagctccgcctcccggcagagcattaccgtgtgagctccgcctcctgtccaagcattactgkgtgagatccgccccctgtcatatcattactgggcgagctccgcctcctgccagatcagtggtggcattagattctcataggagtggaaccctgttgtgaa

SEQ ID NO: 111572 - DNA, 201 bp, Homo sapiens
caacatcctagaaagaacgaataaacattgagtgatctcactgtttctacttacatttggtataatatactgttcttactggtgctattactatgttaatrgggcactttacaacattttcaagaacatttgtattaaaattatttcaaagacttctttcttaaaatatgattttaccatgcaaaaattttactaaggtag

SEQ ID NO: 111573 - DNA, 201 bp, Homo sapiens
ttaccgtgtgagctccgcctcccgacagagcattaccgtgtgagctccgcctcccgtcagagcattaccgtgtgagctccgcctcccggcagagcattacygtgtgagctccgcctcctgtccaagcattactgtgtgagatccgccccctgtcatatcattactgggcgagctccgcctcctgccagatcagtggtggca

SEQ ID NO: 111574 - DNA, 201 bp, Homo sapiens
gtcacagcattaccgtgtgagctccgcctcccgtcacagcattaccgtgtgagctccgcctcccggcagagcattaccgtgtgagctccgcctcccaacasagcattaccgtgtgagctccgcctcccggcagagcattaccgtgtgagctccgcctcccggcagagcattaccgtgtgagctccgcctcccgtcagagca

SEQ ID NO: 111575 - DNA, 201 bp, Homo sapiens
ttaccgtgtgagctccgcctcccgtcacagcattaccgtgtgagctccgcctcccgtcacagcattaccgtgtgagctccgcctcccgtcacagcattacygtgtgagctccgcctcccgtcacagcattaccgtgtgagctccgcctcccgtcacagcattaccgtgtgagctccgcctcccggcagagcattaccgtgt

SEQ ID NO: 111576 - DNA, 201 bp, Homo sapiens
cacagagcattaccgtgtgagctccgcctcccgtcacagcattaccgtgtgagctccgcctcccggcagagcattaccgtgtgagctccgcctcccggcasagcattaccgtgtgagctccgccccccgccagagcattaccgtgtgagctccgccccccgacagagcattaccgtgtgagctccgccccccgtcagagca

SEQ ID NO: 111577 - DNA, 201 bp, Homo sapiens
cgtggtcgaggtgatgggcgggaggctctgggtgttctcgtggtctgtttctagtacaaaagaatcctggaaaaaaatgtaagcaattgaggcggatgtgscagccaaaagaatggtgatgagcaaagttcacaagaagagtctttttccgttatgaactatgcattatatgtaacaagaaaacttctctttgatgaagtg

SEQ ID NO: 111578 - DNA, 201 bp, Homo sapiens; identical to SEQ ID NO: 18414

SEQ ID NO: 111579 - DNA, 201 bp, Homo sapiens; identical to SEQ ID NO: 18418

SEQ ID NO: 111580 - DNA, 201 bp, Homo sapiens
gcagtagtctgctcagacatcagtaaatatctcattcacatttcaaaaaaaattgaaaatgccctgaaataatgtaaccagaaatacgaaaaaaaggataygaaaacatgtggctgctaatggacatgaaagaatgtaatactagattctgagatgcaatgtttttcatttgttcttcctgaaaaaccattaggttgatgt

SEQ ID NO: 111581 - DNA, 201 bp, Homo sapiens
cacctgagacaggacacgtagtgctggggcttatggtgacagtggggaatgggttagcgtgcccagtgagtcagccagagattacgtaaaaagcaacagasaacagcagcgtggggcgcatgcagcgactgtggatgtgacaggaccagacgtgtgccttgaggagctgtccctaaggcagtgtgtgacttcttgcatcta

SEQ ID NO: 111582 - DNA, 201 bp, Homo sapiens
ttctgtgtgtgtgtctttaattcctccagcaccgctgggttagggtctccacaaccgagctggtctcagcagtaaatattgaaaaggaatagatacaattktcattatttacagatagaatttccaaacaattcccagggaataaactgaaaaactaacagaaacaaaacaagaatgtagtaaggtgtctggataagagat

SEQ ID NO: 111583 - DNA, 201 bp, Homo sapiens
cttccagcagctcggaaatgtctttaagctggacttgttgctgcctctaaatatactcggaagagagggagagtgggcggcaggtggaaactgatctgtgycctgtgctgctgggagtcggtccagtaggaccatctgtgatgatggaaatgttccgagtgtttgccatccagtatggcagccattagccatggggccgtg

SEQ ID NO: 111584 - DNA, 201 bp, Homo sapiens
tttctttactatccccttagctgagcaagactgtgaacggtttgcatttacaattcgtgcagtaaacaacctgcagcctgctaagcgttttcattggaaaktgttgcgacaaggcatgttaaacagtccaacgatttgccagacttgtgtagggcaagcaattgaacctactcataaaacattttcacagtgttacattat

SEQ ID NO: 111585 - DNA, 201 bp, Homo sapiens
cctcaaattaatataactgcagaccagcttttgggggtcggcagctgggctggtttagatgcacaagtggtcgtgcaggatgatgccgtagaacagcttasaggagtgtgcattagagcttgggaaaaaatcacttcaggtagagaacaatacccttcctttagtgcagtaaaacagggaccaaaagaaccgtacgctgat

SEQ ID NO: 111586 - DNA, 201 bp, Homo sapiens
caccttgagcgacccctctcagttctattcaggcaggaattcagcaagctagatgagagggtgatttagaggcttggcagttccctgttagaatacacccygcagatcaacagggaaatattacagctacatttgagccttttccctttaaattacttaaggagtttaaacacgctatcaatcagtatggaccaggttctc

SEQ ID NO: 111587 - DNA, 201 bp, Homo sapiens
cagaggacagtgggcgaaaagtagttgctccagtgactgtccgagcagcaccttgagcgacccctctcagttctattcaggcaggaattcagcaagctagwtgagagggtgatttagaggcttggcagttccctgttagaatacaccctgcagatcaacagggaaatattacagctacatttgagccttttccctttaaat

SEQ ID NO: 111588 - DNA, 201 bp, Homo sapiens
atcatgtcatcatgcctggcttccagcagctcggaaatgtctttaagctggacttgttgctgcctctaaatatactcggaagagagggagagtgggcggcmggtggaaactgatctgtggcctgtgctgctgggagtcggtccagtaggaccatctgtgatgatggaaatgttccgagtgtttgccatccagtatggcagc

SEQ ID NO: 111589 - DNA, 201 bp, Homo sapiens
ttcctggagttcaacacaacactggtgcttacatctcaggcccggatatcgatcatgtcatcatgcctggcttccagcagctcggaaatgtctttaagctrgacttgttgctgcctctaaatatactcggaagagagggagagtgggcggcaggtggaaactgatctgtggcctgtgctgctgggagtcggtccagtagga

SEQ ID NO: 111590 - DNA, 201 bp, Homo sapiens
tgatggaactttttgtgtccccaggaatggtctggaacacggacctggtggagaccctggagctgcagaacctgatgctgtgtgcgctgcagaccatctayggagcagaggcacggaaggagtcacggggcgcgcatgccagggaagactacaaggtgggccttctcaccacgcccacctgcacctgccttttcctgccac

SEQ ID NO: 111591 - DNA, 201 bp, Homo sapiens
ggttttgttttttaaaaactagatctagggggatgcaggtgcagttttgtgtggatgtactgggaggtggtggagtctgggcttttcatgtacccgtcacmcaagtcgtgtgtgttgtacccagtaggtaattgttcaaccccacccctcccgctttttggagctcccagtctctgctactccactccatgtgtccatgtg

SEQ ID NO: 111592 - DNA, 201 bp, Homo sapiens
acccagtcagagaaaatgaacgtacatgtttgggaagattgcattgcagaacaggcaggggtgctggcaacgattcctatggaatcattattgattgatcycctaaggggatgtttagcttgaattgcacctctctgtctgcgtgccacggccacactatgttcagctggtctgaacaaaattgtcagatggtagaaatga

SEQ ID NO: 111593 - DNA, 201 bp, Homo sapiens
agtacagccaaacaaaaaatcagcaaaactacaggttgggaagaaatattttccaaaccatatgtgtaataatatcttactatctaaaatagcaaaaaaamaaccctactaaaaacaacctactaaaccctactaaaaaacaaccctactaaaaatgggcaaaggacttgaatagatatttttctagagaagacatacaaa

SEQ ID NO: 111594 - DNA, 201 bp, Homo sapiens
tgcactggttttgttttttaaaaactagatctagggggatgcaggtgcagttttgtgtggatgtactgggaggtggtggagtctgggcttttcatgtaccygtcacacaagtcgtgtgtgttgtacccagtaggtaattgttcaaccccacccctcccgctttttggagctcccagtctctgctactccactccatgtgtc

SEQ ID NO: 111595 - DNA, 201 bp, Homo sapiens
catcggaactgcgactcagcatgcagaaggtaagagcctggactcgctctggagtgagcaggagggctgcatacctggccctgcactggttttgttttttwaaaactagatctagggggatgcaggtgcagttttgtgtggatgtactgggaggtggtggagtctgggcttttcatgtacccgtcacacaagtcgtgtgtg

SEQ ID NO: 111596 - DNA, 201 bp, Homo sapiens
tttaaaacggttttcaaaagttaaattctagcttttttttgttttaggagataaagtccctccaattaaaccaaacgctggggaagaatctgtcatgaatsttgacaaattgagatttgctgatggaagcataagaacatcggaactgcgactcagcatgcagaaggtaagagcctggactcgctctggagtgagcaggag

SEQ ID NO: 111597 - DNA, 201 bp, Homo sapiens
cgtggtgcgcaggcgcggtatcccccctcccccgccagctcgaccccggtgtggtgcgcaggcgcagtctgcgcagggactggcgggactgcgcggcggcracagcagacatgtcgggggtccggggcctgtcgcggctgctgagcgctcggcgcctggcgctggccaaggcggtgagtccgtgccgcggaccggggcggg

SEQ ID NO: 111598 - DNA, 201 bp, Homo sapiens
acatttttgtgcttaacttaccactgactcttcttttcaaggtcactctggaatatagacccgtgatcgacaaaactttgaacgaggctgactgtgccacygtcccgccagccattcgctcctactgatgagacaagatgtggtgatgacagaatcagcttttgtaattatgtataatagctcatgcatgtgtccatgtca

SEQ ID NO: 111599 - DNA, 201 bp, Homo sapiens
cccgtcagagcattaccgtgtgagctccggctcccgtcacagcattaccgtgtgagctccgactcccgtccgagcattaccgtgtgagctccgcctcccgscagagcattaccgtgtgagctccgcctcccgtcacagcattaccgtgtgagctccgcctccccacagagcattaccgtgtgagctccgcctcccgtcaca

SEQ ID NO: 111600 - DNA, 201 bp, Homo sapiens
tttcctaaagacctacattttgaaaattttagccagtttctttctcaaatctgtggaacagagtttctcttagtgtgtgtgagtatgtgacggagtatggragagagagacacacacccaacctgaagtcggcatgtgagccttgggtgttgtgtctgatacccacagatgttttttggcagctttcaaagtgtgtgggtt

SEQ ID NO: 111601 - DNA, 201 bp, Homo sapiens
cgtccgagcattaccgtgtgagctccgcctcccgtcagagcattaccgtgtgagctccggctcccgtcacagcattaccgtgtgagctccgactcccgtcmgagcattaccgtgtgagctccgcctcccgccagagcattaccgtgtgagctccgcctcccgtcacagcattaccgtgtgagctccgcctccccacagagc

SEQ ID NO: 111602 - DNA, 201 bp, Homo sapiens
gtcagagcattaccgtgtgagctccgcctcccgtcagagcattaccgtgtgagctccgcctcccgtccgagcattaccgtgtgagctccgcctcccgtcasagcattaccgtgtgagctccggctcccgtcacagcattaccgtgtgagctccgactcccgtccgagcattaccgtgtgagctccgcctcccgccagagca

SEQ ID NO: 111603 - DNA, 201 bp, Homo sapiens; identical to SEQ ID NO: 18409

SEQ ID NO: 111604 - DNA, 201 bp, Homo sapiens
ggtcacagcattaccgtgtgagctccgcctcccgtcacagcattaccgtgtgagctccgcctcccgtcagagcattaccgtgtgagctccggctcccgtcmgagcattaccgtgtgagctccgcctcccgtcagagcattaccgtgtgagctccgcctcccggcagagcattaccgtgtgagctccgcctcccgacagagc

SEQ ID NO: 111605 - DNA, 201 bp, Homo sapiens
ccgcctcccggtcacagcattaccgtgtgagctccgcctcccgtcacagcattaccgtgtgagctccgcctcccgtcagagcattaccgtgtgagctccgsctcccgtcagagcattaccgtgtgagctccgcctcccgtcagagcattaccgtgtgagctccgcctcccggcagagcattaccgtgtgagctccgcctcc

SEQ ID NO: 111606 - DNA, 201 bp, Homo sapiens
ttaccgtgtgagctccggctcccgccagagcattaccgtgtgagctccggctcccgtcagagcattaccgtgtgagctccggctcccggcagagcattacygtgtgagctccgcctcccgacagagcattaccgtgtgagctccgcctcccgccagagcattaccgtgtgagctccgcctcccggtcacagcattaccgtg

SEQ ID NO: 111607 - DNA, 201 bp, Homo sapiens
cccgtcacagcattaccgtgtgagctccggctcccgccagagcattaccgtgtgagctccggctcccgtcagagcattaccgtgtgagctccggctcccgrcagagcattaccgtgtgagctccgcctcccgacagagcattaccgtgtgagctccgcctcccgccagagcattaccgtgtgagctccgcctcccggtcac

SEQ ID NO: 111608 - DNA, 201 bp, Homo sapiens
ctccgcctccgtcagagcattaccgtgtgagctccgcctcccggcagagcattaccgtgtgagctccggctcccgtcacagcattaccgtgtgagctccgsctcccgccagagcattaccgtgtgagctccggctcccgtcagagcattaccgtgtgagctccggctcccggcagagcattaccgtgtgagctccgcctcc

SEQ ID NO: 111609 - DNA, 201 bp, Homo sapiens
cccgtcagagcattaccgtgtgagctccgcctcccgtcagagcattaccgtgtgagctccgcctcccgtcagagcattaccgtgtgagctccgcctcccgkcagagcattaccgtgtgagctccgcctccgtcagagcattaccgtgtgagctccgcctcccggcagagcattaccgtgtgagctccggctcccgtcacag

SEQ ID NO: 111610 - DNA, 201 bp, Homo sapiens
cccgccagagcattaccgtgtgagctccgcctccccacagagcattaccgtgtgagctccgcctcccggcagagcattaccgtgtgagctccgcctcccgkcagagcattaccgtgtgagctccgcctcccgtcagagcattaccgtgtgagctccgcctcccgtcagagcattaccgtgtgagctccgcctcccgtcaga

SEQ ID NO: 111611 - DNA, 201 bp, Homo sapiens
ccatgtgactgggtcccgcctgcccctgatggaactttttgtgtccccaggaatggtctggaacacggacctggtggagaccctggagctgcagaacctgrtgctgtgtgcgctgcagaccatctacggagcagaggcacggaaggagtcacggggcgcgcatgccagggaagactacaaggtgggccttctcaccacgcc

SEQ ID NO: 111612 - DNA, 201 bp, Homo sapiens
tatacggaatattaaacacattactggtatcccttataattctcaaggacaagccatagtggaaagaatgaatctttccctgaaacagcagctgcaaaagyaaaagggggaaaacagggactacgggacaccccatatgcaattgaatcgcattatttaaattttttgagcctgcctaaaggccagatcttatcagcagct

SEQ ID NO: 111613 - DNA, 201 bp, Homo sapiens
ttttcaaaaatgaaaaggaaagaaaaaatgcttgtagcatcactattctcccccaaaaccccctgcaaaaaaaaatacatatatatacacatatatatgtwttttttttttttaagagatagtctccctctgtcgcccaggctgtagtgcagtggtacgatcaggtgcacaccaccacacctggctaatttttaaaaatgt

SEQ ID NO: 111614 - DNA, 201 bp, Homo sapiens
ctctggagatccgagaaggaaggtgcgtgtgatttaccaccagcactgtctgagcgggcacacgggccggggttgcttctgtgagtttcagcaccgctcgmcctcaccttcgtgtgcaggcgcatgtgcacagccacctctcttagctgctggcaggcgtctgttagtctgcgatattttcctaaagacctacattttgaa

SEQ ID NO: 111615 - DNA, 201 bp, Homo sapiens
gatagtattaaaagggtagcttacttcagacactctgtctctggatctgaccaccgctcgggaggccagcacacgcagagctggcgtctcatccccagccrttggtgatcatcggcgaaggcggagttcaggtccatcgttcctgacgccgcaggtagtgcttgtctcactccatagccctgcactttgtcgcagtgagga

SEQ ID NO: 111616 - DNA, 201 bp, Homo sapiens
ctccagagcagctggccacgcgcctgcctggcatttcagagacagccatgatcttcgctggcgtggacgtcacgaaggagccgatccctgtcctccccacygtgcattataacatgggcggcattcccaccaactacaaggggcaggtgatggtgctggctcctcccccacagctggaaagaaggctgggacgacggggcc

SEQ ID NO: 111617 - DNA, 201 bp, Homo sapiens
aacttataaacgtgcccccttttgtatctgtagttagaaaggtgcagatagtattaaaagggtagcttacttcagacactctgtctctggatctgaccacygctcgggaggccagcacacgcagagctggcgtctcatccccagccattggtgatcatcggcgaaggcggagttcaggtccatcgttcctgacgccgcagg

SEQ ID NO: 111618 - DNA, 201 bp, Homo sapiens
cgttacctttctctggtgttaactgttagcatcatttctgctgtttttatacaacaggtgctttttgtatggattcaagtgaaataaaaactagcacggcygtaacttataaacgtgcccccttttgtatctgtagttagaaaggtgcagatagtattaaaagggtagcttacttcagacactctgtctctggatctgacc

SEQ ID NO: 111619 - DNA, 201 bp, Homo sapiens
acagtgaacaggattcccaccctttacggacagattggatttcacttgctggttttcttttcatgatagcatcaaataatgtgcagtaaaggaaataccaygtgtgggagtgtgagtcttacgtgcactaagaacggggcagttagcatctctcccacctccagacatcctcacggtggttatccagcctcgtgtgctcag

SEQ ID NO: 111620 - DNA, 201 bp, Homo sapiens
agcctcaacctcccgggctcaagcagtcttcaacacctcaaccttcagagtcccaagtagctgggactacagatgtgcaccaccacacctggctaattttwaaaaaaatttattttgtagagacagggtctcacaatattgcccaggctggtcttgaactcctagactcaaacagtcctgcctcagcttcccaaagtatcg

SEQ ID NO: 111621 - DNA, 201 bp, Homo sapiens
ctccacaaccgagctggtctcagcagtaaatattgaaaaggaatagatacaattgtcattatttacagatagaatttccaaacaattcccagggaataaaytgaaaaactaacagaaacaaaacaagaatgtagtaaggtgtctggataagagatttgtatctaaaaatcagtagctttacaatgtgccagcagtagtctg

SEQ ID NO: 111622 - DNA, 201 bp, Homo sapiens
gttagtgtccttttcgccagggggatggcgtgataatttgttcaagattgtgttatagtagctgccccttttaagccagctctgtgtgtgtgtggtggggrgtgggcagtgggtcttccacatcaacatcctagaaagaacgaataaacattgagtgatctcactgtttctacttacatttggtataatatactgttctta

SEQ ID NO: 111623 - DNA, 201 bp, Homo sapiens
ttataacatgggcggcattcccaccaactacaaggggcaggtgatggtgctggctcctcccccacagctggaaagaaggctgggacgacggggcccacctygcagttgtctctttagatcttacaggaaaagatagatgtttccttcaagaaagtactgtattgttttctagattgcactttaaatttctattaccggagg

SEQ ID NO: 111624 - DNA, 201 bp, Homo sapiens
ccccaccgtgcattataacatgggcggcattcccaccaactacaaggggcaggtgatggtgctggctcctcccccacagctggaaagaaggctgggacgayggggcccacctcgcagttgtctctttagatcttacaggaaaagatagatgtttccttcaagaaagtactgtattgttttctagattgcactttaaatttc

SEQ ID NO: 111625 - DNA, 201 bp, Homo sapiens
acctgggattgtccctggcacacagtagctgcttagaaaagatttgatgagagggtgaccatacatgaggggaaattttcctcagtatcaaaacatgttgmaactcacacacttccaagatgacgtattctcaggtctcctgccgttgccgttctctgccgtatgtgatggtgttctgtcttaccagaggctgtggccctg

SEQ ID NO: 111626 - DNA, 201 bp, Homo sapiens
tgagtttagtgagggcagagtttttgttctggttctcagctgtgtcccagcacctgggattgtccctggcacacagtagctgcttagaaaagatttgatgrgagggtgaccatacatgaggggaaattttcctcagtatcaaaacatgttgaaactcacacacttccaagatgacgtattctcaggtctcctgccgttgcc

SEQ ID NO: 111627 - DNA, 201 bp, Homo sapiens
cagttagcctcgagaacctttgctttcagccggactccggactcctccggggacagcgcagcgcccgccagagccctcggcgctccctcccgctggcggcytccgcagccttcaagtgggtcctccgcccccggccctcccctctcaggcggagccaaactgcggccccgcctttacagtctcggaaaggtccccagactg

SEQ ID NO: 111628 - DNA, 201 bp, Homo sapiens
agggaaagagagcccgaggagaatggggctgggggttaggcagctggacactggctgtgtgtaatatttgcacatcacctgcctgccagatcttacagccrgaaaagcgcttgatagtcatctagtcccacctcccaccgactgcaagaacctttctaatgacaggatgaccccttttaggttgtacagaagtaatgctct

SEQ ID NO: 111629 - DNA, 201 bp, Homo sapiens
acctggcagtacctgaattaggaaggcaccctcatgccaggccagactgggctggggagctccttggatgtccggcctcttggcttcctctcttaggccaytgtcagccatttaactgcccagtttgtgggacatttacctttggcttcttaacatgtttttttaaaaaatgttcaactacgtcttggaccagtttaggac

SEQ ID NO: 111630 - DNA, 201 bp, Homo sapiens
agggaccagccacctcatgcaagagcttgtaggagaaaaacaaaaatccttaccatggtctatgagcaataggaagctgtgaagagttctaagcagagggktgacgctgatttacattggaaaagatcatgttggctgctgtgagtagaatggaagggaagtaagtgagacagcagaggtgcagagaccaggtaagaaatt

SEQ ID NO: 111631 - DNA, 201 bp, Homo sapiens
cgccagggcgaccagcaacaagccgaggaggtactcacaaaagtagggatcgggggatagtctggcttcttggttttgcagcaggaacagcaacagcaaakgaactggcaaattctcctgagagatttcagtggtgggaagaggtcggttagaggacagggaaatgggggcaggggctggggatttagggggtgggagtgg

SEQ ID NO: 111632 - DNA, 201 bp, Homo sapiens
cctttatcccagctgaacaaggaacaggaatggggagggcttggaggtgggtgacaaacctttccgccgggtctcctcgaattctcgccgggcagtctctrtgtagcgctgtaccagggccttgatgacgtgaaggcggtaggatccacgctctccctccccaggcacagcccctgccctgggattggcctggaatgggaa

SEQ ID NO: 111633 - DNA, 201 bp, Homo sapiens
ttccatcctccttcagctgctttgactccccctcaccctgctgaccccttcctcctcttttcccttcagcaggggtgcagctagggtcacaatctgagggrgcctcctctctgcccccctggaagactctgctcttggcccctggagagttccagctctcaggggttgggccctgaaagtccaacatctgccacttaggag

SEQ ID NO: 111634 - DNA, 201 bp, Homo sapiens
ggaaggaggggtgacaaccccacctcctcctggctctggctgctaggaagctcttccctgagttaccaattcctccgctggccccttctcccatgacctcwgacggggcatccaaaactcagagccaggttatttatagataagcccagaggaggtgggggaaaggccagtgtttacaaacatgggtcacctgagtctgag

SEQ ID NO: 111635 - DNA, 201 bp, Homo sapiens; identical to SEQ ID NO: 18446

SEQ ID NO: 111636 - DNA, 201 bp, Homo sapiens
ctttcccaaggagcgcgaggtgctgattcccccccatgaagtctttttggttaccagattctctcaggatggagcccagagcttggtgactctctggagcyataatcagacctgtagccattttaactgcgcctatctgggtggtaagctgtgcatgggggaagcaggactggcagtgtgggtgaaataagccaggatgtc

SEQ ID NO: 111637 - DNA, 201 bp, Homo sapiens
gctttgactccccctcaccctgctgaccccttcctcctcttttcccttcagcaggggtgcagctagggtcacaatctgagggggcctcctctctgcccccmtggaagactctgctcttggcccctggagagttccagctctcaggggttgggccctgaaagtccaacatctgccacttaggagccctgggaacgggtgacc

SEQ ID NO: 111638 - DNA, 201 bp, Homo sapiens
ctgctcttggcccctggagagttccagctctcaggggttgggccctgaaagtccaacatctgccacttaggagccctgggaacgggtgaccttcatatgamgaagaggcacctccagcagccttgagaagcaagaacatggttccggacccagccctagcagccttctccccaaccaggatgttggcctggggaggccaca

SEQ ID NO: 111639 - DNA, 201 bp, Homo sapiens; identical to SEQ ID NO: 18441

SEQ ID NO: 111640 - DNA, 201 bp, Homo sapiens
gtgatggggacttcctgggacaagcaaggaaagtactgaggcagccacttgattgaacggtgttgcaatgtggagacatggagttttattgaggtagctaygtgattaaatggtattgcagtgtggagacatggaattttatgattggtttattccatgagactagaccttctgccccgctgtggccttgctgggctgagg

SEQ ID NO: 111641 - DNA, 201 bp, Homo sapiens; identical to SEQ ID NO: 18443

SEQ ID NO: 111642 - DNA, 201 bp, Homo sapiens; identical to SEQ ID NO: 18453

SEQ ID NO: 111643 - DNA, 201 bp, Homo sapiens
cctcacgtctcctccagggatggcgctggcggctttgatgatcgccctcggcagcctcggcctccacacctggcaggtaactccaggaaccatctcctagycccaagggggacattaagggacagaccctgaggaagtggacccggggctgactcctcacatccctctcccagggactcttccctaggattccactcttaa

SEQ ID NO: 111644 - DNA, 201 bp, Homo sapiens
gagagcccgaggagaatggggctgggggttaggcagctggacactggctgtgtgtaatatttgcacatcacctgcctgccagatcttacagccagaaaagygcttgatagtcatctagtcccacctcccaccgactgcaagaacctttctaatgacaggatgaccccttttaggttgtacagaagtaatgctctttatgct

SEQ ID NO: 111645 - DNA, 201 bp, Homo sapiens
agcacatgagctggggagcaggggccagactctccggaagccagagtcctcacccctccagtgtcctgaagcccggttcctgatgattcctgggtcctcasaatcccaggccctgtcagctctggggtctcagggatgggaggccccaggttctggaagctgttgtgcacttgagtgatgtagtgactgaggacgctggca

SEQ ID NO: 111646 - DNA, 201 bp, Homo sapiens
gctggagttgctgtcctctgtgactcaggttttttggggtcctataagtgttttctagattcgtgaacattcttagatgattctatatgtcctcaaaaggrtccatctgctacatggtctaatagaccaaaagaacctggttaaggagattagcaagcagcagaaagagccaaggggactgcttcaggtctcaggggggcc

SEQ ID NO: 111647 - DNA, 201 bp, Homo sapiens
gtgccattcccaagtgctaaggcagggagagatggaagagtgactgggtcttgggtgggaagagggatggaaaggcaatctggaaagagttcctggaggayggaggaggaagggaaatcagaagtttccctttaggtgaagggaaagatagattgagaagggaaatggccctgccagggcctggtgggccaggcagtttgg

SEQ ID NO: 111648 - DNA, 201 bp, Homo sapiens
gcactttgggaggctgaggctggtggatcacttgaggtcaggagttcgagaccagcctgaccaacatggtgaaaccctgtctctactaaaaatacaaaaaattagctgggcgtggtattgcgcacctgtaatcctagctacttgggaggctgagagaggagaattgcttgaacccgggaggcagaggttgcagtgagccaa

SEQ ID NO: 111649 - DNA, 201 bp, Homo sapiens; identical to SEQ ID NO: 18445

SEQ ID NO: 111650 - DNA, 201 bp, Homo sapiens
ctgatatttagggatagaaatgagattctgtgtttctggatgggtttgcccccaggacccatgtccagtgctctgaacttatgctcttttcggtgtggcayctcttttgctccacaggcccaggctgttcccaccatcctgcccctgggcctggctccagacacctttgacgatacctatgtgggttgtgcagaggagatg

SEQ ID NO: 111651 - DNA, 201 bp, Homo sapiens
gttgtacagaagtaatgctctttatgctgtcttcataataactgtgaggttggaagtatcctcaagtccagaaaagttatgacacttgcccaaggcctcasagctaataggtggtaaagtcaagatttcagcctgcgcgcggtggctcactcctgtaatcccagcactttgggaggctgaggctggtggatcacttgaggt

SEQ ID NO: 111652 - DNA, 201 bp, Homo sapiens
tcagaagtttccctttaggtgaagggaaagatagattgagaagggaaatggccctgccagggcctggtgggccaggcagtttgggtgcgagtctgtccacrcggaggcctcaccctgctgtctgttgcaggggagaagaggcggggctgtgtgtctgcgccaggtgagttgcccttccatcctccttcagctgctttgact

SEQ ID NO: 111653 - DNA, 201 bp, Homo sapiens
tgggtatggagcctttatcccagctgaacaaggaacaggaatggggagggcttggaggtgggtgacaaacctttccgccgggtctcctcgaattctcgccrggcagtctctgtgtagcgctgtaccagggccttgatgacgtgaaggcggtaggatccacgctctccctccccaggcacagcccctgccctgggattggcc

SEQ ID NO: 111654 - DNA, 201 bp, Homo sapiens; identical to SEQ ID NO: 18456

SEQ ID NO: 111655 - DNA, 201 bp, Homo sapiens; identical to SEQ ID NO: 18457

SEQ ID NO: 111656 - DNA, 201 bp, Homo sapiens; identical to SEQ ID NO: 18458

SEQ ID NO: 111657 - DNA, 201 bp, Homo sapiens; identical to SEQ ID NO: 18460

SEQ ID NO: 111658 - DNA, 201 bp, Homo sapiens; identical to SEQ ID NO: 18459

SEQ ID NO: 111659 - DNA, 201 bp, Homo sapiens
gaatctgggaggtggaggctgcagtgagcagaaagcacaccactgcacactagcctgggcaacagagggagactctgtctcaaaaattcaaaaaaaaagastatatggcaatgttccaaactatacagcctctctacttaaaacctgggttataatattaaactgaccacccaccctcacatttcctatactgccccctga

SEQ ID NO: 111660 - DNA, 201 bp, Homo sapiens
aaatgtcttgaagctcaaggaagaagaccaatctcttggaggtttaaaagctataaagggaaggagtatttgcactgtcactaggagaaggagccagtccyaccaagaagctgagacactgccaagtggctttgctccaggagtccctaagtaattaaggccttgctcccctgccctgtttgcctgtgacctccacaaagg

SEQ ID NO: 111661 - DNA, 201 bp, Homo sapiens
tcttgaagctcaaggaagaagaccaatctcttggaggtttaaaagctataaagggaaggagtatttgcactgtcactaggagaaggagccagtcccaccawgaagctgagacactgccaagtggctttgctccaggagtccctaagtaattaaggccttgctcccctgccctgtttgcctgtgacctccacaaaggctaga

SEQ ID NO: 111662 - DNA, 201 bp, Homo sapiens; identical to SEQ ID NO: 18461

SEQ ID NO: 111663 - DNA, 201 bp, Homo sapiens
acgggaagaatctggtgcaggaatggctggcgaagcgccaggtgatgggggctggcgggtgcagggggcacagcagggggagggcagaggtgtggggctcrgggctgtgggctgaggcctggctctctccctccccacagggtgcccggtacgtgtggaaccgcactgagctcatgcaggcttccctggacccgtctgtga

SEQ ID NO: 111664 - DNA, 201 bp, Homo sapiens
ctggcgggtgcagggggcacagcagggggagggcagaggtgtggggctcggggctgtgggctgaggcctggctctctccctccccacagggtgcccggtaygtgtggaaccgcactgagctcatgcaggcttccctggacccgtctgtgacccatctcatgggtaatgacccccttcctgccctggcatccctcagatggc

SEQ ID NO: 111665 - DNA, 201 bp, Homo sapiens
cagggggagggcagaggtgtggggctcggggctgtgggctgaggcctggctctctccctccccacagggtgcccggtacgtgtggaaccgcactgagctcmtgcaggcttccctggacccgtctgtgacccatctcatgggtaatgacccccttcctgccctggcatccctcagatggcctcagatggcaccttctgagcc

SEQ ID NO: 111666 - DNA, 201 bp, Homo sapiens
ggctctctccctccccacagggtgcccggtacgtgtggaaccgcactgagctcatgcaggcttccctggacccgtctgtgacccatctcatgggtaatgayccccttcctgccctggcatccctcagatggcctcagatggcaccttctgagcctgtgtgcacatccgccagcacccgcccacccccagcctgccagtcac

SEQ ID NO: 111667 - DNA, 201 bp, Homo sapiens
gtgacccatctcatgggtaatgacccccttcctgccctggcatccctcagatggcctcagatggcaccttctgagcctgtgtgcacatccgccagcaccckcccacccccagcctgccagtcaccacaggaccccttgtcccacaggtctctttgagcctggagacatgaaatacgagatccaccgagactccacactgga

SEQ ID NO: 111668 - DNA, 201 bp, Homo sapiens
gcaggtgctgctgcagcaattaagtgggtgaaatctgagcctcagtctcctcctctgtcaaatgggagtaatgctggcaccagccctgtagggtctcctgmggactaagcccctgaccaggcaaaacgtggcggtgcctagcacgtgggagacactccacagctgtgttcagctcaaccacagggacccctctctctgcag

SEQ ID NO: 111669 - DNA, 201 bp, Homo sapiens; identical to SEQ ID NO: 18472

SEQ ID NO: 111670 - DNA, 201 bp, Homo sapiens; identical to SEQ ID NO: 18474

SEQ ID NO: 111671 - DNA, 201 bp, Homo sapiens; identical to SEQ ID NO: 18475

SEQ ID NO: 111672 - DNA, 201 bp, Homo sapiens; identical to SEQ ID NO: 18476

SEQ ID NO: 111673 - DNA, 201 bp, Homo sapiens; identical to SEQ ID NO: 18477

SEQ ID NO: 111674 - DNA, 201 bp, Homo sapiens; identical to SEQ ID NO: 18478

SEQ ID NO: 111675 - DNA, 201 bp, Homo sapiens
gagtggtaaccaccacacgagtgcagcacgcctcgccagccggcacctacgcccacacggtgaaccgcaactggtactcggacgccgacgtgcctgcctcsgcccgccaggaggggtgccaggacatcgctacgcagctcatctccaacatggacattgacgtgcgacccccaggccaagggctggggctgggcagagagt

SEQ ID NO: 111676 - DNA, 201 bp, Homo sapiens; identical to SEQ ID NO: 18480

SEQ ID NO: 111677 - DNA, 201 bp, Homo sapiens; identical to SEQ ID NO: 18482

SEQ ID NO: 111678 - DNA, 201 bp, Homo sapiens; identical to SEQ ID NO: 18481

SEQ ID NO: 111679 - DNA, 201 bp, Homo sapiens; identical to SEQ ID NO: 18483

SEQ ID NO: 111680 - DNA, 201 bp, Homo sapiens
ccggatgttaccgagagcgagagcggtgagtgccgcggggtggccccctgagggggaccagggtgccaaggatggggggctggcgggaaggggtcacctcytgtctgcctggaactgaatgaaccctcctaccggaactgaaccctccaaccagggagccccgagtatcggcagcagtcagcagtgcccctggacgaagag

SEQ ID NO: 111681 - DNA, 201 bp, Homo sapiens
ccgcggggtggccccctgagggggaccagggtgccaaggatggggggctggcgggaaggggtcacctcctgtctgcctggaactgaatgaaccctcctacyggaactgaaccctccaaccagggagccccgagtatcggcagcagtcagcagtgcccctggacgaagagacccacgcaggcgaggacgtggcggtgttcgc

SEQ ID NO: 111682 - DNA, 201 bp, Homo sapiens
gcggggtggccccctgagggggaccagggtgccaaggatggggggctggcgggaaggggtcacctcctgtctgcctggaactgaatgaaccctcctaccgraactgaaccctccaaccagggagccccgagtatcggcagcagtcagcagtgcccctggacgaagagacccacgcaggcgaggacgtggcggtgttcgcgc

SEQ ID NO: 111683 - DNA, 201 bp, Homo sapiens
cctcctgtctgcctggaactgaatgaaccctcctaccggaactgaaccctccaaccagggagccccgagtatcggcagcagtcagcagtgcccctggacgragagacccacgcaggcgaggacgtggcggtgttcgcgcgcggcccgcaggcgcacctggttcacggcgtgcaggagcagaccttcatagcgcacgtcatg

SEQ ID NO: 111684 - DNA, 201 bp, Homo sapiens; identical to SEQ ID NO: 18490

SEQ ID NO: 111685 - DNA, 201 bp, Homo sapiens; identical to SEQ ID NO: 18492

SEQ ID NO: 111686 - DNA, 201 bp, Homo sapiens; identical to SEQ ID NO: 18497

SEQ ID NO: 111687 - DNA, 201 bp, Homo sapiens; identical to SEQ ID NO: 18498

SEQ ID NO: 111688 - DNA, 201 bp, Homo sapiens; identical to SEQ ID NO: 18501

SEQ ID NO: 111689 - DNA, 201 bp, Homo sapiens; identical to SEQ ID NO: 18505

SEQ ID NO: 111690 - DNA, 201 bp, Homo sapiens; identical to SEQ ID NO: 18508

SEQ ID NO: 111691 - DNA, 201 bp, Homo sapiens; identical to SEQ ID NO: 18510

SEQ ID NO: 111692 - DNA, 201 bp, Homo sapiens; identical to SEQ ID NO: 18511

SEQ ID NO: 111693 - DNA, 201 bp, Homo sapiens; identical to SEQ ID NO: 18513

SEQ ID NO: 111694 - DNA, 201 bp, Homo sapiens; identical to SEQ ID NO: 18514

SEQ ID NO: 111695 - DNA, 201 bp, Homo sapiens; identical to SEQ ID NO: 18515

SEQ ID NO: 111696 - DNA, 201 bp, Homo sapiens; identical to SEQ ID NO: 18516

SEQ ID NO: 111697 - DNA, 201 bp, Homo sapiens; identical to SEQ ID NO: 18517

SEQ ID NO: 111698 - DNA, 201 bp, Homo sapiens; identical to SEQ ID NO: 18518

SEQ ID NO: 111699 - DNA, 201 bp, Homo sapiens; identical to SEQ ID NO: 18520

SEQ ID NO: 111700 - DNA, 201 bp, Homo sapiens
caaggtggtcacgttggggtcaccccttgcagcttgtagctgctgtgaacgccagagaatgaagtactcagacaattccagctgagtggggcaggcggcarctcctctgagagagtgccgccccaaaatccatccgccaagtatttattagaaggcttgttaaaccacaaacatccaccagatgggtttttgccgtggggt

SEQ ID NO: 111701 - DNA, 201 bp, Homo sapiens; identical to SEQ ID NO: 18521

SEQ ID NO: 111702 - DNA, 201 bp, Homo sapiens; identical to SEQ ID NO: 18522

SEQ ID NO: 111703 - DNA, 201 bp, Homo sapiens; identical to SEQ ID NO: 18524

SEQ ID NO: 111704 - DNA, 201 bp, Homo sapiens; identical to SEQ ID NO: 18525

SEQ ID NO: 111705 - DNA, 201 bp, Homo sapiens; identical to SEQ ID NO: 18527

SEQ ID NO: 111706 - DNA, 201 bp, Homo sapiens; identical to SEQ ID NO: 18535

SEQ ID NO: 111707 - DNA, 201 bp, Homo sapiens; identical to SEQ ID NO: 18536

SEQ ID NO: 111708 - DNA, 201 bp, Homo sapiens; identical to SEQ ID NO: 18539

SEQ ID NO: 111709 - DNA, 201 bp, Homo sapiens; identical to SEQ ID NO: 18543

SEQ ID NO: 111710 - DNA, 201 bp, Homo sapiens; identical to SEQ ID NO: 18544

SEQ ID NO: 111711 - DNA, 201 bp, Homo sapiens; identical to SEQ ID NO: 18546

SEQ ID NO: 111712 - DNA, 201 bp, Homo sapiens; identical to SEQ ID NO: 18548

SEQ ID NO: 111713 - DNA, 201 bp, Homo sapiens; identical to SEQ ID NO: 18550

SEQ ID NO: 111714 - DNA, 201 bp, Homo sapiens; identical to SEQ ID NO: 18553

SEQ ID NO: 111715 - DNA, 201 bp, Homo sapiens; identical to SEQ ID NO: 18552

SEQ ID NO: 111716 - DNA, 201 bp, Homo sapiens; identical to SEQ ID NO: 18555

SEQ ID NO: 111717 - DNA, 201 bp, Homo sapiens; identical to SEQ ID NO: 18554

SEQ ID NO: 111718 - DNA, 201 bp, Homo sapiens; identical to SEQ ID NO: 18556

SEQ ID NO: 111719 - DNA, 201 bp, Homo sapiens; identical to SEQ ID NO: 18557

SEQ ID NO: 111720 - DNA, 201 bp, Homo sapiens; identical to SEQ ID NO: 18560

SEQ ID NO: 111721 - DNA, 201 bp, Homo sapiens; identical to SEQ ID NO: 18572

SEQ ID NO: 111722 - DNA, 201 bp, Homo sapiens; identical to SEQ ID NO: 18573

SEQ ID NO: 111723 - DNA, 201 bp, Homo sapiens; identical to SEQ ID NO: 18574

SEQ ID NO: 111724 - DNA, 201 bp, Homo sapiens; identical to SEQ ID NO: 18577

SEQ ID NO: 111725 - DNA, 201 bp, Homo sapiens; identical to SEQ ID NO: 18579

SEQ ID NO: 111726 - DNA, 201 bp, Homo sapiens; identical to SEQ ID NO: 18581

SEQ ID NO: 111727 - DNA, 201 bp, Homo sapiens; identical to SEQ ID NO: 18583

SEQ ID NO: 111728 - DNA, 201 bp, Homo sapiens; identical to SEQ ID NO: 18584

SEQ ID NO: 111729 - DNA, 201 bp, Homo sapiens; identical to SEQ ID NO: 18462

SEQ ID NO: 111730 - DNA, 201 bp, Homo sapiens; identical to SEQ ID NO: 18463

SEQ ID NO: 111731 - DNA, 201 bp, Homo sapiens; identical to SEQ ID NO: 18464

SEQ ID NO: 111732 - DNA, 201 bp, Homo sapiens; identical to SEQ ID NO: 18467

SEQ ID NO: 111733 - DNA, 201 bp, Homo sapiens; identical to SEQ ID NO: 18468

SEQ ID NO: 111734 - DNA, 201 bp, Homo sapiens; identical to SEQ ID NO: 18469

SEQ ID NO: 111735 - DNA, 201 bp, Homo sapiens; identical to SEQ ID NO: 18470

SEQ ID NO: 111736 - DNA, 201 bp, Homo sapiens; identical to SEQ ID NO: 18471

SEQ ID NO: 111737 - DNA, 201 bp, Homo sapiens; identical to SEQ ID NO: 18473

SEQ ID NO: 111738 - DNA, 201 bp, Homo sapiens; identical to SEQ ID NO: 18484

SEQ ID NO: 111739 - DNA, 201 bp, Homo sapiens; identical to SEQ ID NO: 18485

SEQ ID NO: 111740 - DNA, 201 bp, Homo sapiens; identical to SEQ ID NO: 18486

SEQ ID NO: 111741 - DNA, 201 bp, Homo sapiens; identical to SEQ ID NO: 18489

SEQ ID NO: 111742 - DNA, 201 bp, Homo sapiens; identical to SEQ ID NO: 18488

SEQ ID NO: 111743 - DNA, 201 bp, Homo sapiens
gtgccgcggggtggccccctgagggggaccagggtgccaaggatggggggctggcgggaaggggtcacctcctgtctgcctggaactgaatgaaccctccyaccggaactgaaccctccaaccagggagccccgagtatcggcagcagtcagcagtgcccctggacgaagagacccacgcaggcgaggacgtggcggtgtt

SEQ ID NO: 111744 - DNA, 201 bp, Homo sapiens; identical to SEQ ID NO: 18491

SEQ ID NO: 111745 - DNA, 201 bp, Homo sapiens
cctacacaacacacacacagggcaccccccagcccaggctgacctgatctttgctctccccctggccagttgaggaggagaacccggacttctggaaccgygaggcagccgaggccctgggtgccgccaagaagctgcagcctgcacagacagccgccaagaacctcatcatcttcctgggcgatggtgagtgagccaggc

SEQ ID NO: 111746 - DNA, 201 bp, Homo sapiens; identical to SEQ ID NO: 18495

SEQ ID NO: 111747 - DNA, 201 bp, Homo sapiens; identical to SEQ ID NO: 18494

SEQ ID NO: 111748 - DNA, 201 bp, Homo sapiens; identical to SEQ ID NO: 18493

SEQ ID NO: 111749 - DNA, 201 bp, Homo sapiens; identical to SEQ ID NO: 18499

SEQ ID NO: 111750 - DNA, 201 bp, Homo sapiens; identical to SEQ ID NO: 18502

SEQ ID NO: 111751 - DNA, 201 bp, Homo sapiens; identical to SEQ ID NO: 18500

SEQ ID NO: 111752 - DNA, 201 bp, Homo sapiens; identical to SEQ ID NO: 18506

SEQ ID NO: 111753 - DNA, 201 bp, Homo sapiens; identical to SEQ ID NO: 18504

SEQ ID NO: 111754 - DNA, 201 bp, Homo sapiens; identical to SEQ ID NO: 18503

SEQ ID NO: 111755 - DNA, 201 bp, Homo sapiens; identical to SEQ ID NO: 18507

SEQ ID NO: 111756 - DNA, 201 bp, Homo sapiens; identical to SEQ ID NO: 18509

SEQ ID NO: 111757 - DNA, 201 bp, Homo sapiens
tcgccactgtcctgctgccctccagacatgctggggccctgcatgctgctgctgctgctgctgctgggcctgaggctacagctctccctgggcatcatccyaggtaatgaggctccccgagctgcccctacacaacacacacacagggcaccccccagcccaggctgacctgatctttgctctccccctggccagttgagg

SEQ ID NO: 111758 - DNA, 201 bp, Homo sapiens
ctcatcatcttcctgggcgatggtgagtgagccaggccttccagccctgcagccctcacagccccggcgcccggaccctcagtggttccaggagagccctkgggcccaagcctcacacatttctgttccttcagggatgggggtgtctacggtgacagctgccaggatcctaaaagggcagaagaaggacaaactggggcc

SEQ ID NO: 111759 - DNA, 201 bp, Homo sapiens
gctacagctctccctgggcatcatcccaggtaatgaggctccccgagctgcccctacacaacacacacacagggcaccccccagcccaggctgacctgatytttgctctccccctggccagttgaggaggagaacccggacttctggaaccgcgaggcagccgaggccctgggtgccgccaagaagctgcagcctgcacag

SEQ ID NO: 111760 - DNA, 201 bp, Homo sapiens; identical to SEQ ID NO: 18519

SEQ ID NO: 111761 - DNA, 201 bp, Homo sapiens; identical to SEQ ID NO: 18523

SEQ ID NO: 111762 - DNA, 201 bp, Homo sapiens; identical to SEQ ID NO: 18526

SEQ ID NO: 111763 - DNA, 201 bp, Homo sapiens
caggatcctaaaagggcagaagaaggacaaactggggcctgagatacccctggccatggaccgcttcccatatgtggctctgtccaaggtaagtgctgggstaccttagagtcctccaagcacagaaggggaatcctggctatggagtgtggtaggagggagggaccctaaacagctggggctccagtaaggagttagagg

SEQ ID NO: 111764 - DNA, 201 bp, Homo sapiens; identical to SEQ ID NO: 18528

SEQ ID NO: 111765 - DNA, 201 bp, Homo sapiens
ccgctttaaccagtgcaacacgacacgcggcaacgaggtcatctccgtgatgaatcgggccaagaaagcaggtgagctggggcccgctgctgggtcacggycaggtcacagacgttggtcacatatactgacctctgacacccttagggaagtcagtgggagtggtaaccaccacacgagtgcagcacgcctcgccagccg

SEQ ID NO: 111766 - DNA, 201 bp, Homo sapiens; identical to SEQ ID NO: 18529

SEQ ID NO: 111767 - DNA, 201 bp, Homo sapiens; identical to SEQ ID NO: 18531

SEQ ID NO: 111768 - DNA, 201 bp, Homo sapiens; identical to SEQ ID NO: 18530

SEQ ID NO: 111769 - DNA, 201 bp, Homo sapiens; identical to SEQ ID NO: 18533

SEQ ID NO: 111770 - DNA, 201 bp, Homo sapiens; identical to SEQ ID NO: 18532

SEQ ID NO: 111771 - DNA, 201 bp, Homo sapiens; identical to SEQ ID NO: 18534

SEQ ID NO: 111772 - DNA, 201 bp, Homo sapiens
gtgcaacacgacacgcggcaacgaggtcatctccgtgatgaatcgggccaagaaagcaggtgagctggggcccgctgctgggtcacggccaggtcacagaygttggtcacatatactgacctctgacacccttagggaagtcagtgggagtggtaaccaccacacgagtgcagcacgcctcgccagccggcacctacgccc

SEQ ID NO: 111773 - DNA, 201 bp, Homo sapiens; identical to SEQ ID NO: 18537

SEQ ID NO: 111774 - DNA, 201 bp, Homo sapiens
ctacacaacacacacacagggcaccccccagcccaggctgacctgatctttgctctccccctggccagttgaggaggagaacccggacttctggaaccgcsaggcagccgaggccctgggtgccgccaagaagctgcagcctgcacagacagccgccaagaacctcatcatcttcctgggcgatggtgagtgagccaggcc

SEQ ID NO: 111775 - DNA, 201 bp, Homo sapiens
acccggacttctggaaccgcgaggcagccgaggccctgggtgccgccaagaagctgcagcctgcacagacagccgccaagaacctcatcatcttcctgggygatggtgagtgagccaggccttccagccctgcagccctcacagccccggcgcccggaccctcagtggttccaggagagccctggggcccaagcctcacac

SEQ ID NO: 111776 - DNA, 201 bp, Homo sapiens
cggacttctggaaccgcgaggcagccgaggccctgggtgccgccaagaagctgcagcctgcacagacagccgccaagaacctcatcatcttcctgggcgayggtgagtgagccaggccttccagccctgcagccctcacagccccggcgcccggaccctcagtggttccaggagagccctggggcccaagcctcacacatt

SEQ ID NO: 111777 - DNA, 201 bp, Homo sapiens
ccaagcctcacacatttctgttccttcagggatgggggtgtctacggtgacagctgccaggatcctaaaagggcagaagaaggacaaactggggcctgagwtacccctggccatggaccgcttcccatatgtggctctgtccaaggtaagtgctgggctaccttagagtcctccaagcacagaaggggaatcctggctatg

SEQ ID NO: 111778 - DNA, 201 bp, Homo sapiens
ggcagagagtagcagggagggggcactagctcagacccaggcaaccaaaagccttatctgggccagcagggtctggaggtggggttgtgggcgtagaaggygcagcccaggctgggccattcccacagccttggggaggggagtcaggggctgtgcatgaggagggggcacggggccagccagggccccaaatccacctgc

SEQ ID NO: 111779 - DNA, 201 bp, Homo sapiens
gctgggcgtgctggcgggcgcctgtaatcccagctactcaagaggctgaggcaggagaatcgcttgaacctgggaggtggaggttgcagtgagctgagatkgcgccactgcactccagcctgggggacagagtgggactccatctcaaaaaaataaaaataaataaataaattaattaattaattaataaaataaaataga

SEQ ID NO: 111780 - DNA, 201 bp, Homo sapiens
ggggcccgctgctgggtcacggccaggtcacagacgttggtcacatatactgacctctgacacccttagggaagtcagtgggagtggtaaccaccacacgrgtgcagcacgcctcgccagccggcacctacgcccacacggtgaaccgcaactggtactcggacgccgacgtgcctgcctcggcccgccaggaggggtgcc

SEQ ID NO: 111781 - DNA, 201 bp, Homo sapiens
tgctgggtcacggccaggtcacagacgttggtcacatatactgacctctgacacccttagggaagtcagtgggagtggtaaccaccacacgagtgcagcaygcctcgccagccggcacctacgcccacacggtgaaccgcaactggtactcggacgccgacgtgcctgcctcggcccgccaggaggggtgccaggacatcg

SEQ ID NO: 111782 - DNA, 201 bp, Homo sapiens
ccttagggaagtcagtgggagtggtaaccaccacacgagtgcagcacgcctcgccagccggcacctacgcccacacggtgaaccgcaactggtactcggaygccgacgtgcctgcctcggcccgccaggaggggtgccaggacatcgctacgcagctcatctccaacatggacattgacgtgcgacccccaggccaagggc

SEQ ID NO: 111783 - DNA, 201 bp, Homo sapiens; identical to SEQ ID NO: 18551

SEQ ID NO: 111784 - DNA, 201 bp, Homo sapiens
cccagcttctgggaaatatagaaaaaaatgggtgaatgatccagtgacagggtgtcttgttccacacaagacacagtgagcaggggttgggggaggggctmctggctgcgggaggcacaccacactcacccaaatggcatctgtactcaataccgcacccttccctgggggacacctggtcccaacctgagctgcctttct

SEQ ID NO: 111785 - DNA, 201 bp, Homo sapiens
ttgtgggcgtagaaggtgcagcccaggctgggccattcccacagccttggggaggggagtcaggggctgtgcatgaggagggggcacggggccagccaggsccccaaatccacctgccccatcctctgttcccaggtgatcctaggtggaggccgaaagtacatgtttcgcatgggaaccccagaccctgagtacccagat

SEQ ID NO: 111786 - DNA, 201 bp, Homo sapiens; identical to SEQ ID NO: 18558

SEQ ID NO: 111787 - DNA, 201 bp, Homo sapiens
tgaaccgcaactggtactcggacgccgacgtgcctgcctcggcccgccaggaggggtgccaggacatcgctacgcagctcatctccaacatggacattgaygtgcgacccccaggccaagggctggggctgggcagagagtagcagggagggggcactagctcagacccaggcaaccaaaagccttatctgggccagcagg

SEQ ID NO: 111788 - DNA, 201 bp, Homo sapiens; identical to SEQ ID NO: 18561

SEQ ID NO: 111789 - DNA, 201 bp, Homo sapiens; identical to SEQ ID NO: 18562

SEQ ID NO: 111790 - DNA, 201 bp, Homo sapiens; identical to SEQ ID NO: 18563

SEQ ID NO: 111791 - DNA, 201 bp, Homo sapiens; identical to SEQ ID NO: 18564

SEQ ID NO: 111792 - DNA, 201 bp, Homo sapiens; identical to SEQ ID NO: 18565

SEQ ID NO: 111793 - DNA, 201 bp, Homo sapiens; identical to SEQ ID NO: 18567

SEQ ID NO: 111794 - DNA, 201 bp, Homo sapiens; identical to SEQ ID NO: 18566

SEQ ID NO: 111795 - DNA, 201 bp, Homo sapiens
gccaggacatcgctacgcagctcatctccaacatggacattgacgtgcgacccccaggccaagggctggggctgggcagagagtagcagggagggggcacyagctcagacccaggcaaccaaaagccttatctgggccagcagggtctggaggtggggttgtgggcgtagaaggtgcagcccaggctgggccattcccaca

SEQ ID NO: 111796 - DNA, 201 bp, Homo sapiens; identical to SEQ ID NO: 18568

SEQ ID NO: 111797 - DNA, 201 bp, Homo sapiens; identical to SEQ ID NO: 18569

SEQ ID NO: 111798 - DNA, 201 bp, Homo sapiens; identical to SEQ ID NO: 18571

SEQ ID NO: 111799 - DNA, 201 bp, Homo sapiens; identical to SEQ ID NO: 18570

SEQ ID NO: 111800 - DNA, 201 bp, Homo sapiens; identical to SEQ ID NO: 18575

SEQ ID NO: 111801 - DNA, 201 bp, Homo sapiens; identical to SEQ ID NO: 18576

SEQ ID NO: 111802 - DNA, 201 bp, Homo sapiens
tgcatgaggagggggcacggggccagccagggccccaaatccacctgccccatcctctgttcccaggtgatcctaggtggaggccgaaagtacatgtttcscatgggaaccccagaccctgagtacccagatgactacagccaaggtgggaccaggctggacgggaagaatctggtgcaggaatggctggcgaagcgccag

SEQ ID NO: 111803 - DNA, 201 bp, Homo sapiens
ggagggggcacggggccagccagggccccaaatccacctgccccatcctctgttcccaggtgatcctaggtggaggccgaaagtacatgtttcgcatgggraccccagaccctgagtacccagatgactacagccaaggtgggaccaggctggacgggaagaatctggtgcaggaatggctggcgaagcgccaggtgatgg

SEQ ID NO: 111804 - DNA, 201 bp, Homo sapiens
tttcgcatgggaaccccagaccctgagtacccagatgactacagccaaggtgggaccaggctggacgggaagaatctggtgcaggaatggctggcgaagcrccaggtgatgggggctggcgggtgcagggggcacagcagggggagggcagaggtgtggggctcggggctgtgggctgaggcctggctctctccctcccca

SEQ ID NO: 111805 - DNA, 201 bp, Homo sapiens
accctgagtacccagatgactacagccaaggtgggaccaggctggacgggaagaatctggtgcaggaatggctggcgaagcgccaggtgatgggggctggygggtgcagggggcacagcagggggagggcagaggtgtggggctcggggctgtgggctgaggcctggctctctccctccccacagggtgcccggtacgtgt

SEQ ID NO: 111806 - DNA, 201 bp, Homo sapiens; identical to SEQ ID NO: 18585

SEQ ID NO: 111807 - DNA, 201 bp, Homo sapiens
agttcctgttatatgggtttctccagtttgtgaaaatttattcagatgtacccaaatcaaaaagttaaaactgaaacaaaaataataattgcaatggatcrcgttatttaaaacaaaggcgaccacaatgaactcctctctccccaccccctaacccctgcgcacgcacacgcacaatgaagcgaaacctcattggctggg

SEQ ID NO: 111808 - DNA, 201 bp, Homo sapiens
aaaactcttttcattttaaatcatacatatattgctttcctaaccaaaattaagatagatttcacacctttggaatggtgtcatcacctcaactgcatttyacaggcgcttacctagagaacacagtccttagcaagttgagcaattttcacaagaggtggttcaatagagtgagaagacacagagtgcggagtccaacag

SEQ ID NO: 111809 - DNA, 201 bp, Homo sapiens
cccctgcgcacgcacacgcacaatgaagcgaaacctcattggctgggatcagtgacgcacttctgaaagccgcagtttggcaccatcttttccatctcctsctccttccgccttcccgccatccgccctccacacgattcagcccggtggtgttagccccctggactcgattcctgaggcaaacagtgccccttaaggtcg

SEQ ID NO: 111810 - DNA, 201 bp, Homo sapiens
ttacaggcatgagccactgcgcccggccaagatccccaactcttaaataaataaataaaacattagtaaaccatgatagtacattagggcaagcatctggytggtttttcattaccagaactctaacgagagtgttaagtctggcttttattcctgaaagctggtacacaaattaaaagtttgactgtttgttaaataata

SEQ ID NO: 111811 - DNA, 201 bp, Homo sapiens
atttgcttctcttcattgttaaactctagctgagaacagagctaatcagaggttgttttaaaaccatatatatatatatatatacacacacacacacacatacacctataaaactgatgaattcaaaagcacttaatatctgctatgagaaacaaaataactgccactgtagtaaaagaagagagaaataataaataagaa

SEQ ID NO: 111812 - DNA, 201 bp, Homo sapiens
tcatctgaattctcactgactgccatggagatatatctagtccaaactagttactgggtttctttatctgctgttccagtctatcattaactaaaccagtrttctttcagagctgtcagagcttatagctctccctttctcatttgttttcttctcatttttcaacagcatttcaggtcctcatgtctcaaccacatctac

SEQ ID NO: 111813 - DNA, 201 bp, Homo sapiens; identical to SEQ ID NO: 18587

SEQ ID NO: 111814 - DNA, 201 bp, Homo sapiens
ttagatgtcaggaaaggttcatgtgttcttatggcagggaggggagagagccccagatctgtgtgtggtctttgtgcagtcatctgaattctcactgactkccatggagatatatctagtccaaactagttactgggtttctttatctgctgttccagtctatcattaactaaaccagtattctttcagagctgtcagagc

SEQ ID NO: 111815 - DNA, 201 bp, Homo sapiens
gacgcacttctgaaagccgcagtttggcaccatcttttccatctcctgctccttccgccttcccgccatccgccctccacacgattcagcccggtggtgtyagccccctggactcgattcctgaggcaaacagtgccccttaaggtcggcgacagcctcttctgggttcactgcagtccaaccggttccctaccctctgcc

SEQ ID NO: 111816 - DNA, 201 bp, Homo sapiens
tttgcttctcttcattgttaaactctagctgagaacagagctaatcagaggttgttttaaaaccatatatatatatatatatacacacacacacacacatacacctataaaactgatgaattcaaaagcacttaatatctgctatgagaaacaaaataactgccactgtagtaaaagaagagagaaataataaataagaaa

SEQ ID NO: 111817 - DNA, 201 bp, Homo sapiens
gatagatgccatttgttgaattatttataatctctaacaatgtcacctttcaatcagtgtatgatgtacatgtaggatgactgaaataccaactttgtcaraagtaactgataaaagcagaggtttttcctaaattttgtactctatgctctagtatatgaaatccaatgggctttatggtacaggaggttagatagaata

SEQ ID NO: 111818 - DNA, 201 bp, Homo sapiens; identical to SEQ ID NO: 18590

SEQ ID NO: 111819 - DNA, 201 bp, Homo sapiens; identical to SEQ ID NO: 18589

SEQ ID NO: 111820 - DNA, 201 bp, Homo sapiens
tggctcccacggcccatgcataacagagaaaacatgagtaataaaccacggtagcttgctttaatttttcctttcttcattagaacaaagagggatagtaygttaggtgatttgtggtccaagaagaggtcttccaggcgattggatggtatggctctcaacagctggtccagcacatttgggaacagcatgtagaaaaat

SEQ ID NO: 111821 - DNA, 201 bp, Homo sapiens; identical to SEQ ID NO: 18591

SEQ ID NO: 111822 - DNA, 201 bp, Homo sapiens
ccgtgaatattaaactcattggcttgtctgtcatgtaatgcttacctaaaatgccaagggctcctaatgtgaatgcggtggctcccacggcccatgcatamcagagaaaacatgagtaataaaccacggtagcttgctttaatttttcctttcttcattagaacaaagagggatagtacgttaggtgatttgtggtccaag

SEQ ID NO: 111823 - DNA, 201 bp, Homo sapiens; identical to SEQ ID NO: 18592

SEQ ID NO: 111824 - DNA, 201 bp, Homo sapiens
tccccatctccaacatacacacacacatacacacattccaaggaaaggtttaaagcttttttttttcctctctctctcaaaaaaaaaaaaaaaagataggkgtgggcaagaatgagcatctttcacattctgcattttcagagtaagtatccaatgcaacttgccatgataactaaatttattattaactgtgtatttcat

SEQ ID NO: 111825 - DNA, 201 bp, Homo sapiens; identical to SEQ ID NO: 18593

SEQ ID NO: 111826 - DNA, 201 bp, Homo sapiens; identical to SEQ ID NO: 18594

SEQ ID NO: 111827 - DNA, 201 bp, Homo sapiens; identical to SEQ ID NO: 18595

SEQ ID NO: 111828 - DNA, 201 bp, Homo sapiens
gaagagttttataatattggtaatattttgcctctaaatgtttggtagaattcttaggggaaattatctagaactagagcttctgtggtgtgatgggtgaygcactgggagagatgtgggggagttttaaaagattcagtttattcagtatttctagaactattcagattttctatttcttcttgcatcttttttaaaatt

SEQ ID NO: 111829 - DNA, 201 bp, Homo sapiens; identical to SEQ ID NO: 18596

SEQ ID NO: 111830 - DNA, 201 bp, Homo sapiens; identical to SEQ ID NO: 18597

SEQ ID NO: 111831 - DNA, 201 bp, Homo sapiens
actaaaaacatgagtgccatttgctatgtggagcaggggtcacagggattagataaggtggctatggtcttaggagaaaaggttcatctaaattgtaccawaaggtaatttcagcagaagcatgttcctagtactgaggtaggagttattttaataagtaaatgccttcgtaattgcttttttatattagcaagtggtgtc

SEQ ID NO: 111832 - DNA, 201 bp, Homo sapiens
gccaacatgacaaaacctcatctctactaaaaatacaaaaattcatcgggcttgctggtgggtgcgtgtagtcccagctatttgggaggctgaggcaggasaatggcttgatctgggaggcagaggttgtagtgagctgagatcatgccactgcactccagcctgggttgacagagcaatattccatctcaaaaaataaaa

SEQ ID NO: 111833 - DNA, 201 bp, Homo sapiens
aaaattcatcgggcttgctggtgggtgcgtgtagtcccagctatttgggaggctgaggcaggacaatggcttgatctgggaggcagaggttgtagtgagcygagatcatgccactgcactccagcctgggttgacagagcaatattccatctcaaaaaataaaaaataaaaataaaaatacagtctgttggcagttaattt

SEQ ID NO: 111834 - DNA, 201 bp, Homo sapiens
catatatgatagtaagtgccttcaaacaattcttgacacattaaaggtcagaaaatgttagccgtcattattgcttagtacaaacctgagctaggaaatamtaacagagagctctttgtgccactgagtcctggaacttccccatactaattttgagaaggctttcttgtaagtatgtgacagatactgtttcctccactt

SEQ ID NO: 111835 - DNA, 201 bp, Homo sapiens
tcggactcccaactactagaattatgtgaatcctgaatgataatcagatgtttactcagttaagtgtttactcaaatattaataagtattgatacattggkatgccatcttatataatgattaacgacacagattctgggtgtatttcagccccagtttcttctgcatatatgatagtaagtgccttcaaacaattcttga

SEQ ID NO: 111836 - DNA, 201 bp, Homo sapiens
ggtcacagggattagataaggtggctatggtcttaggagaaaaggttcatctaaattgtaccataaggtaatttcagcagaagcatgttcctagtactgargtaggagttattttaataagtaaatgccttcgtaattgcttttttatattagcaagtggtgtcggataattttgctaattaaaagatacctaaaataaat

SEQ ID NO: 111837 - DNA, 201 bp, Homo sapiens
ttcagtgtgtagccagtagtgttttcagtgtgtagccatgtaataataatacatattttaaaatcaaagcaagaagtaagctcttcgcaaagtcgttcatkggttgttgctcatttaattaaggattctgtagttggattataatgccctcatcaaagtaataattgatgtccctctgaaaaacacgtagattaattaaaa

SEQ ID NO: 111838 - DNA, 201 bp, Homo sapiens
tgagtagctgggattacaggcgcctgccaccatgcccagctaattttctgtatttttagtagtagagatgggatttcactaaatctcgaacacctgacctygtgatttgcccaccttggcctcccaaattgctgggattactggggtgagccaccgcgcccggccgagaccagacttctgagggggagaaacttgcaaacc

SEQ ID NO: 111839 - DNA, 201 bp, Homo sapiens
ccctcctaagttactgtatcagaattatgatgacaacatagatcttctgactcttaaaccagtgttcttttcctcacaacagagatacactaagttcaaaagttttttacttaaatctaaggattggatagttgatagagttagtgtacttttgttattaaaatatgagtggaatgacaaagttcagacatttgcacactt

SEQ ID NO: 111840 - DNA, 201 bp, Homo sapiens
agtggacttcatgtaaggtagttagtggtcctgtaagattagaatggaactgaaaaattcctgtcacttagtgacatcataggcataatgtcatagtgcartgcattactcttgtttgtggtagtgctggtgtaaacctattgcactgccagttgtgtaaaagtacaacaggccacgcgtggtggctcatgcctgtagtcc

SEQ ID NO: 111841 - DNA, 201 bp, Homo sapiens
tggtttgagtatagtcatatgttctgtcaaatgatgttttggtcaacagtggacttcatgtaaggtagttagtggtcctgtaagattagaatggaactgaraaattcctgtcacttagtgacatcataggcataatgtcatagtgcagtgcattactcttgtttgtggtagtgctggtgtaaacctattgcactgccagtt

SEQ ID NO: 111842 - DNA, 201 bp, Homo sapiens; identical to SEQ ID NO: 18607

SEQ ID NO: 111843 - DNA, 201 bp, Homo sapiens
gggtgatgttggctcactgcaacctctgcccctgcaggtccaagcgattattctgcctcagcttcccaagtagctgggactacagcatgccaccacgcccyggctaattttgtatttttagtagtttcaccatgttggcctggctggtctcgaactttccatcctcaagtgatccacccgcctcggcctcccaaagtgctg

SEQ ID NO: 111844 - DNA, 201 bp, Homo sapiens
acttctggtgactacattttatgagttgctttttgtttttcttttttaggtgggcgtattattgataagttttttttgttttttgtttttttgagacggarttttgcgcttgtcacccaggctggagtgcggtggggtgatgttggctcactgcaacctctgcccctgcaggtccaagcgattattctgcctcagcttccc

SEQ ID NO: 111845 - DNA, 201 bp, Homo sapiens
gattctatgatgaatgtaagtgaaaataaagacttagaaaagtaattcatggaaacattgcctaataattttctggttcagaagagttgctttgattcagmgttttttcaaaataagatctgtcaggcataggccaggaagaggaacctgaaactgggaaacatgttactaattaaattggttccttgagatctccttggt

SEQ ID NO: 111846 - DNA, 201 bp, Homo sapiens
tttcaaaaataaatgatgatttttaaaaatcaggtttctgaactacgctagtttgcatggtcttttgttttccagaaactgccaaaatccttctattgtgyttattttcaaataattgtctctaaaattctagaaatattccctttaaaaaagaaaatttgaaagaatgaacaagtaagcaaactaaaaaaccaagaacta

SEQ ID NO: 111847 - DNA, 201 bp, Homo sapiens
aaacttaaaaacaaaaaaagtacttagtgtcccagctccctgtagtcatgatgcctattagtatgttttgtttcatggggagccttgcaaatggcatgatwtttaagctttcaggagtggtgaatttattattccaattaagctaaattgtttccattatagaaaaggcacaccagttttaatgttctaagcaaagtttaa

SEQ ID NO: 111848 - DNA, 201 bp, Homo sapiens; identical to SEQ ID NO: 18602

SEQ ID NO: 111849 - DNA, 201 bp, Homo sapiens
gatgtgaaagccatccagcagtcttaagactgaataggaagcaaaagttttaccaggaactcttatttaccttttcctttactatcaagttattcctgggrggccccctggtgcctgcagtcagtgttcactacctaagactttgtttcagatgtgaacatcttgctgggtctttgagaaatttgctttgaaaataattgt

SEQ ID NO: 111850 - DNA, 201 bp, Homo sapiens
tatttggtttgtacaatctgttttccttttttgggggggcggggggggcgggtaagaattgtagtccagacacgtttctctcttaatttagcaagcgttarcaagttgacctcctccttgccaggcaccagcaatcctaagataagacacagtctcttcactcaaggagctcccagtctaaacaagtgtctttcaggcttt

SEQ ID NO: 111851 - DNA, 201 bp, Homo sapiens
cctctgcctcacttgtggtgattttctctcggatgctcactttctctctgtgcaatctttcctttgggtgtcccttgtctttaaacatgtctgcgtatacytgaactctaattgtggacagggttcaaagttctttttcatgggattcatgggccccatgaaaattagaggctaagtaggcatctaagtaggagcatttac

SEQ ID NO: 111852 - DNA, 201 bp, Homo sapiens
tttgtggtatgtaaatgggtaaagttggaaacaactcttttgaatcatgtttttcctcccatgtttaagatctagagaaaacattttttgaaatttttgtrtaaaacagatcagtaggctttactaaataaaagtgtataaaaattgaaacttataaaaatgacaagttacagacaagatgaaaatacttgctatatatca

SEQ ID NO: 111853 - DNA, 201 bp, Homo sapiens
cagggtagtagaaaacactgagagatgttttctgccatgccaaataggaatcctcaataaatattccccataaactctgttataattggtggctagagtcyatattgccatggacactcttctatagttacattaaggactaaattgattttgcagactgatctgagagtttaaccaccatttgtaccacagtctctgtgg

SEQ ID NO: 111854 - DNA, 201 bp, Homo sapiens
cagattcttgttctgtcacccaggctggagtgcaatggcgcaatctctgctcactgcaacctgtgcctcccgggttcaggcagttcttgtgcctcagcctyccaagtagctgggacgatagccgtgtgccaccacacctggactcttaaacatttattatttgttaacttcacataagccctctcattttgttttgaggaa

SEQ ID NO: 111855 - DNA, 201 bp, Homo sapiens
tttgcacactttaagaaatgtttatggaactttgctattctacatttttattgcatttttgcagtttatgccatttattgaaaatcacaattgtaacaatkttcttaacttctgtacatgaaaaaataacattatttgttaataatttactttaagatattgaaaccatctgaaaagaaagctaaataccagtatggtgga

SEQ ID NO: 111856 - DNA, 201 bp, Homo sapiens
atcgctcgaacccgggaggtggaggttgcagtgagctgagatcacgctactgcactccagcctgggtgacagagtaagattctgtctcgaaaaaaaaaaaagacgttaaaaggaacacttttcagtatctttaatttcacatagtgaatctattttgattaaatgctttttattcggtgactgttaaaatattaaaatttt

SEQ ID NO: 111857 - DNA, 201 bp, Homo sapiens
ggtaaccttattttcagccccaaattactgtggcgagtttgataatgctggtggaatgatgagtgtggatgaaactttgatgtgttcatttcaggtatgaygtaaacataaatatataagaactagaaatctaataaaaactattatcagaattcgttttagatttgtgaagtttccttgagcaagtgttgaaagtctgtt

SEQ ID NO: 111858 - DNA, 201 bp, Homo sapiens
ttagcattttgggagaaaacaacacttaaaatttactcttagcattttacaaagatacaatatagtgttaactgtagtcactgttatacaatcgatcttcygtatttattcctactacccaactgatactttgtattctttgaccaacatcttcccatcccacccctacccccagcacaatctttgaagtcttggtaactt

SEQ ID NO: 111859 - DNA, 201 bp, Homo sapiens
aatgggtaaagttggaaacaactcttttgaatcatgtttttcctcccatgtttaagatctagagaaaacattttttgaaatttttgtataaaacagatcartaggctttactaaataaaagtgtataaaaattgaaacttataaaaatgacaagttacagacaagatgaaaatacttgctatatatcaacagataaaagga

SEQ ID NO: 111860 - DNA, 201 bp, Homo sapiens
tttttgtataaaacagatcagtaggctttactaaataaaagtgtataaaaattgaaacttataaaaatgacaagttacagacaagatgaaaatacttgctrtatatcaacagataaaaggagttctatttataatatataaagagttcttataaataagagaaaggcgatacagtataaaaataacataggaagaggaagg

SEQ ID NO: 111861 - DNA, 201 bp, Homo sapiens
atttacactcccaccagcaatgtttgaacattcctttttctccacaaccttgctgacatctattatcttttaactttttattaatggccattctgactggygtgagacagtatcttgtggtttgatttacattaatagtgatgatgagcattttttcatatatttgttggctgcacgtttgttttttgagaagtgtctgtt

SEQ ID NO: 111862 - DNA, 201 bp, Homo sapiens
ttctcagaaaaatatttttacatatacacaatattacagacaatttgtggtactatacagagccactaaaggccattttggtctctgaatccacgttagttattcttttgttttgagacggagtctcactttgtcacccaggctggagtgcagtggcaccatctcagctcactgcaacctctgcctcccgggttgaagcga

SEQ ID NO: 111863 - DNA, 201 bp, Homo sapiens
cttctcagaaaaatatttttacatatacacaatattacagacaatttgtggtactatacagagccactaaaggccattttggtctctgaatccacgttagttattcttttgttttgagacggagtctcactttgtcacccaggctggagtgcagtggcaccatctcagctcactgcaacctctgcctcccgggttgaagcg

SEQ ID NO: 111864 - DNA, 201 bp, Homo sapiens
ccttctcagaaaaatatttttacatatacacaatattacagacaatttgtggtactatacagagccactaaaggccattttggtctctgaatccacgttagttattcttttgttttgagacggagtctcactttgtcacccaggctggagtgcagtggcaccatctcagctcactgcaacctctgcctcccgggttgaagc

SEQ ID NO: 111865 - DNA, 201 bp, Homo sapiens
tctcagaaaaatatttttacatatacacaatattacagacaatttgtggtactatacagagccactaaaggccattttggtctctgaatccacgttagttattcttttgttttgagacggagtctcactttgtcacccaggctggagtgcagtggcaccatctcagctcactgcaacctctgcctcccgggttgaagcgat

SEQ ID NO: 111866 - DNA, 201 bp, Homo sapiens
tggtgccactgacttggtgtgtactgagacacttaacagttttacccatccttgcttttgtattatcaaagcagatgtcagtgcagtggaaaaaaaaaaaaagtcctttattcctgaaatgtctagccctcacctatatctgtcacttttcttcttcactcttttctcattatacttgctatttgtttaccaatgtacctg

SEQ ID NO: 111867 - DNA, 201 bp, Homo sapiens
atagtttgtcagttaatactttccagtaaaagtgtttagtgaaaaaaagtgtctaggtctgcttggaactaaaacagtcacaggagtgctttcctttgcgmcaaccattgtactttgggatggagcaggagtgctttgtgggcatttccattttatcatgtagattattaaagagatgtattcaaagattgaagtttaata

SEQ ID NO: 111868 - DNA, 201 bp, Homo sapiens
tatctaagtctgaataaccatagtttgtcagttaatactttccagtaaaagtgtttagtgaaaaaaagtgtctaggtctgcttggaactaaaacagtcacmggagtgctttcctttgcgacaaccattgtactttgggatggagcaggagtgctttgtgggcatttccattttatcatgtagattattaaagagatgtatt

SEQ ID NO: 111869 - DNA, 201 bp, Homo sapiens
aatggatcttacacatgactttataatacgcgttgttcatttggataatattgattcagctgagttatgcagatgtccagatgttgaaacagcttattatstaatacagtatccagaaatgacatttgttaatgttacaagatctcatcagaagagtccttaattatggagaagctgtcagattcatggtgctgattacaa

SEQ ID NO: 111870 - DNA, 201 bp, Homo sapiens
gggactgtatgtccttgtagtgaaaaaaggctgtatcaggcttccaatgcttaatgaaaatagcctttcttttttcttttttcttttcttttctttctttctttttttttttttttttgagacggagtctcgctcttcttgcccaggctggagtgcaatggcacgatctcagctcactgcaacctccgcctcccgggttca

SEQ ID NO: 111871 - DNA, 201 bp, Homo sapiens
ttctttttgagacagaatttcactcttgtcgcccaggctggagtgcaatggcctgatctcagctcactgcaacctccacctcccaggttcaagcagttctmttgcttcagcctcccaagtagctagaataacaggttcctgccactgtgcccagctaatttttgtatgtttaatagagacagggtttcaccatgttggcca

SEQ ID NO: 111872 - DNA, 201 bp, Homo sapiens
cagttggacttttacccactccgttaccctcaatcaccaagaaacttgcattgaggtctgatgatttaattgtaagtggcacatttttggtcttcgtcctrctgcccttgttcatggcacatttcctactttaggacgattgtttcccctttcgggatacgtttactatactaagccctttgtcttgatcattccttctca

SEQ ID NO: 111873 - DNA, 201 bp, Homo sapiens
gtgatgctagctcattaaacaataaatcttgactctgaaattctttttgagacagaatttcactcttgtcgcccaggctggagtgcaatggcctgatctcrgctcactgcaacctccacctcccaggttcaagcagttctattgcttcagcctcccaagtagctagaataacaggttcctgccactgtgcccagctaattt

SEQ ID NO: 111874 - DNA, 201 bp, Homo sapiens
tcttaagatttccactaccattaatatgatgacaatactcaagtaaatatttttaaccctgacctcttttccagggctccaaacattaccaaagtcaaggrtctgatctgattttgttcttccacatttaaaaaaaaatcctcagggtctcagtagaaaatgtttttttttcgctcaagtgatctgtagatcaaatacaat

SEQ ID NO: 111875 - DNA, 201 bp, Homo sapiens
ttattttactttggagatggggtctcactctcacccaggctggagtgcagtggcacgatctcagctcactgtagcctctgccttctggggtcaagtgaacsttccacctcaacctctgccttgagtagctgggaccacaagcatgcaccatcatgcccagctaattttttgtattttgggtagagatggggtttcatcgtg

SEQ ID NO: 111876 - DNA, 201 bp, Homo sapiens
tattaattgaaatatgttttccagtagacattaaacacgtaatgaattgtagttcttgtacattagtgtagctaaggatagaagtgtagcagtatggataygaatgtttagcttcattccttgtgatgatacttggattgcctatcagagagaaataatagcttatataccacttcaaagattgcagagtatttttatgag

SEQ ID NO: 111877 - DNA, 201 bp, Homo sapiens
agacctgttcctgtatggtcacctgatttttctacaaagctgccattgcggttcagtggggaaaaggatgatctttatgataaatggtgctgaatcaactkggtatctgcttagataaaaaccttgacctttacatcaaaccatacacaaaattaatttgagatgggttatagaatgaagtgggctaaaacaataaaatat

SEQ ID NO: 111878 - DNA, 201 bp, Homo sapiens
tggcctgactagaaggtcaagtacatgctgggaaatgatggaatcagattatggagatttgactattgagcaacggagtttgttgagtgatttaataaccrtattgggtttttgtacagggaagtaatttaatggaaatagtgtaagaaaattagtttttcatcaatatacgggaagaattaaagtggaaaaacgctgaaa

SEQ ID NO: 111879 - DNA, 201 bp, Homo sapiens
cacctgccatcacgcctggctaatttttgtatttttagtagaggcggagtttcaccatgttggccaggctggtctcttcctgacctcaggtgatccacccrcctcggcctcccaaagtgctgggattacaggcatgagccactgtactcggccttattcccaatttaacacctcacaagtttgggggtggaggggctagac

SEQ ID NO: 111880 - DNA, 201 bp, Homo sapiens
aggatgtgaacattgggaatcatttcatagaagctgcttataacagtaaccaatttttctaaaactgactctttctctttttaggagatattcatggacartatacagatttactgagattatttgaatatggaggtttcccaccagaagccaactatcttttcttaggagattatgtggacagaggaaagcagtctttgg

SEQ ID NO: 111881 - DNA, 201 bp, Homo sapiens
ctcctaaaccatactatgatgtttatggattatttaaaattcttaaaactgacttaactctttaaaaattatcttcttggctgggcgcggtggctcacacytgtaatcccagcactctgggaggccgaagcgggcggatcacgaggttaggagatcgagaccatcctggctaacacagtgaaaccccatctctactaaaaa

SEQ ID NO: 111882 - DNA, 201 bp, Homo sapiens
tcctaactcagcctcccaattagctgggattacaggcatgcgccaccacgcctggctaattttgtatttttggagagatggggtttctccatgttgatcargctggttttgaactcccgacctcaggtgatccacccacctcaacctcccaaggtgctgggattacaggcatgagccaccgtgcccggccctgaaatcttt

SEQ ID NO: 111883 - DNA, 201 bp, Homo sapiens
aaaaaggtgaacatacacttgaggttgtctttgtcgtagctttttatgctaggctacaggaaaattatagcctttgtgcctctatttatacttgctatagygccaagttgtaattcacacaaaagaatactagttaaacacttggaaattttccttccttggcaataagtttatactgtgttaatcaatgcattagtgtta

SEQ ID NO: 111884 - DNA, 201 bp, Homo sapiens
cccgggttcaagcgattctcctgcttcagcctcccgagtagctgggattacaggcatgtgccaccacgcctggctaattttgtatttttagtagaggcagrgtttctccatcttggtcaggctggtctagaattctaaatctagaatatccttcaatagtaaagtaaaatgaagacaaactaaagctcagaaaatatattg

SEQ ID NO: 111885 - DNA, 201 bp, Homo sapiens
ggcgtgaacccgggaggcagagtttgcagtgagcagagattgcaccactgcatcccagcctgggcaacagagcgagactccgtctcaaaaaaatatatatrtatcttctcttagccactgcaattcttagaaaatcaccatcaccatctcaacatccacccttcttttaatatcactacagttggacttttacccactccg

SEQ ID NO: 111886 - DNA, 201 bp, Homo sapiens
tgctttgttctatacatacctaagataaatatgcccatggatattcatagcatttgtaatagccccaaactggaaataatccaaatagagtagtaaagatwttgtcatatgttcatagaatggaatacaggttgaatattttttatccaaaatgcttgggaccccaagtgtttggaatttggatttttttcagatttttga

SEQ ID NO: 111887 - DNA, 201 bp, Homo sapiens
ggtgccactgacttggtgtgtactgagacacttaacagttttacccatccttgcttttgtattatcaaagcagatgtcagtgcagtggaaaaaaaaaaaaagtcctttattcctgaaatgtctagccctcacctatatctgtcacttttcttcttcactcttttctcattatacttgctatttgtttaccaatgtacctga

SEQ ID NO: 111888 - DNA, 201 bp, Homo sapiens; identical to SEQ ID NO: 18611

SEQ ID NO: 111889 - DNA, 201 bp, Homo sapiens; identical to SEQ ID NO: 18605

SEQ ID NO: 111890 - DNA, 201 bp, Homo sapiens; identical to SEQ ID NO: 18606

SEQ ID NO: 111891 - DNA, 201 bp, Homo sapiens
agtagttttttgttattttctatgtcctctatttgaaatttttagagctttttttcaagggggtgtgggagggatttcaatctgttgcccaggctggcctygaattcctaggctcaagcaatcctcctgcctcttctgagtagctaggggactccaggcatgtgccatacctggcttaaatttttagagctcttaaggctc

SEQ ID NO: 111892 - DNA, 201 bp, Homo sapiens
gaagatagttgcatctagtaggtctttttcttccttattctccacgtttattacttttaaaagagtatacattccaatgccatgcatttttaattttttttaattaattttttttttttttggaggcagggtctggctctgtcacccggttggagtgcagtggcatgaacatggctcacctgcagcctcaaccttctgggc

SEQ ID NO: 111893 - DNA, 201 bp, Homo sapiens
tgaacgtggacagcctcatcacccggctgctggagggtgagtgcgcgcctggccgcgggacagagggaggtcgggcaccgccgccgacccctgcgtccccktctgccgccggaacgcgaggggacccctttcccgccccgagacgagtctctgggagcgcggcgcggcggacgaaccgaggagggggcgaggaggctctgg

SEQ ID NO: 111894 - DNA, 201 bp, Homo sapiens; identical to SEQ ID NO: 18610

SEQ ID NO: 111895 - DNA, 201 bp, Homo sapiens
attttgtaactgttttatgagggaaatacagttaatttaaaaatgtgtatgtcttgtttacatttgggaagtagaggcctactcctttttattttttttttatttttattttttgagacggagtctcactctgtcgcccaggctggagtgcaatggcacggtctcagctcactgcaacctccgcctcccgggttcgagcga

SEQ ID NO: 111896 - DNA, 201 bp, Homo sapiens
ctgccaaacagtccctctaccctaaagttttcgtcatcaataattgttttgtgagtgtgtagaaaagcctttaatcctttttaaacaatttagaggcctcctttgttagccgccgtccagcgattgcatatgtactgtttgctttcaaattaccttaagataattgctagagtgaagcagtatgtacttatatttggaaaa

SEQ ID NO: 111897 - DNA, 201 bp, Homo sapiens
gagttcttataaataagagaaaggcgatacagtataaaaataacataggaagaggaaggtcttagaagaaattcaaatggccagtaaacataaggacgtcmgcttctttttttagtaatcagtgatgtgcaatttaaagcaagtctccaactctagtcagattataaaaaaataccaaagattgatgtttagtgttgtcaa

SEQ ID NO: 111898 - DNA, 201 bp, Homo sapiens
aggctattctatgtctttgatgtacacacactgtatttctcttaaaatgcattggggctttcccattcctctttctctttatcataatatactgtttccaycaattagtacaattgaatggtaaatggttgattgctcatttacaaattaaatatagtaaccataccttatccttccagcagttgtcatagtggtgttgga

SEQ ID NO: 111899 - DNA, 201 bp, Homo sapiens; identical to SEQ ID NO: 18612

SEQ ID NO: 111900 - DNA, 201 bp, Homo sapiens; identical to SEQ ID NO: 18613

SEQ ID NO: 111901 - DNA, 201 bp, Homo sapiens
tccaacctcaggtaaacaccctcccatgcagcccctcagagggaggacattggtggaggcccagtcgcaaggcatctgggattattaccagagaagacagmagggagaaagccctcctccaaatccctggactgggactatcttggggagagggaagagaagcaggggcacactcagttctgggctgctctttggccccca

SEQ ID NO: 111902 - DNA, 201 bp, Homo sapiens
cccatgggaggcgccacccctcgctacctgtacctggccagcaaccacagcaacaagtggggtcacccccggggctaccgcatccaggtgcgcagcttttytggggagccactgccccagaacagctccgtggagagaggcttcagctgggggaggtgagtggtcggcggtcaggagggagtggggcaagtagaatgtatg

SEQ ID NO: 111903 - DNA, 201 bp, Homo sapiens
tgggtgagctgactccctatctgcaaggtcactgtgggaggcagggcatgtcctcagcaaagccagacctcgtgatcctctttcttctcccctgctaggayttggtggcctgggtgacagctggttttctgcatatcccacatgcagaggacattcctaacacagtgactgtggggaacagcgtgggcttcttcctccgac

SEQ ID NO: 111904 - DNA, 201 bp, Homo sapiens
ccaccctgagcaggactggagaactgggtctgggccgaggatatggcctttgtccccatggctgtgccctggagccctgagcaccagatgcagaggctgcrggtgacccggaagctgctggagacagaggagcaagccaccttccccatgggaggcgccacccctcgctacctgtacctggccagcaaccacagcaacaag

SEQ ID NO: 111905 - DNA, 201 bp, Homo sapiens
ctttcttctcccctgctaggacttggtggcctgggtgacagctggttttctgcatatcccacatgcagaggacattcctaacacagtgactgtggggaacrgcgtgggcttcttcctccgaccctacaacttctttgacgaagacccctccttctactctgccgactccatctacttccgaggggaccaggatgctggggc

SEQ ID NO: 111906 - DNA, 201 bp, Homo sapiens; identical to SEQ ID NO: 18618

SEQ ID NO: 111907 - DNA, 201 bp, Homo sapiens
aggtaccagctggtggtaacccagcggaaggaggaggaacctagtagcaccagcatctacaatttgaatgacccttggacacccactgtggacttcactgrcttcatcaacaatgagaccattgcagggcaggttagttgcgcggaggggtgagcaggcagctggagaggaggggaggagtcagggggacaagatgagcca

SEQ ID NO: 111908 - DNA, 201 bp, Homo sapiens
tttggcccccactctgcccccactctgaagccaggtgggggcagagtccagaggggccagggcaattgcatgactggccctccccgatcccaccctgagcmggactggagaactgggtctgggccgaggatatggcctttgtccccatggctgtgccctggagccctgagcaccagatgcagaggctgcaggtgacccgga

SEQ ID NO: 111909 - DNA, 201 bp, Homo sapiens
ccccactctgcccccactctgaagccaggtgggggcagagtccagaggggccagggcaattgcatgactggccctccccgatcccaccctgagcaggactrgagaactgggtctgggccgaggatatggcctttgtccccatggctgtgccctggagccctgagcaccagatgcagaggctgcaggtgacccggaagctgc

SEQ ID NO: 111910 - DNA, 201 bp, Homo sapiens; identical to SEQ ID NO: 18622

SEQ ID NO: 111911 - DNA, 201 bp, Homo sapiens; identical to SEQ ID NO: 18623

SEQ ID NO: 111912 - DNA, 201 bp, Homo sapiens; identical to SEQ ID NO: 18624

SEQ ID NO: 111913 - DNA, 201 bp, Homo sapiens; identical to SEQ ID NO: 18625

SEQ ID NO: 111914 - DNA, 201 bp, Homo sapiens
gcctacctgtaatgacattgcacttttcaataccattttattttcaaataattctcacatccatcttgcatcttctgcccccacttcatttttccatatamcttctttaatgtctctcactttcctccccaattcatctgcttttctttccacttgactatcttctcagcattccttccttcacctcctgtactcttcatt

SEQ ID NO: 111915 - DNA, 201 bp, Homo sapiens; identical to SEQ ID NO: 18626

SEQ ID NO: 111916 - DNA, 201 bp, Homo sapiens
ctgtctcaaaaaaaaaagaaaaaaaaaaaaagatatcgtagatttttaaataaatggtactaaaacattggatatccttagaaaaagaataatctagacayagaccttccttctacttttcacaaaaaattaactcaaagtggatcatagacctgaatgtaaaactataaaacttctagaagataatgtagaagaaaatct

SEQ ID NO: 111917 - DNA, 201 bp, Homo sapiens
ggcacagggcagggatcattctgaatctcctgcaaaaagactttgcttccaaagtggccaaagtccccagtggaatctgccgatgaagtccttgccttagmgtcaggattgagggaggagattagcccgatcccaggatgaagtcacatgaaaacctcctgcaccacgactgtgccaatgaagaagggccccactggggca

SEQ ID NO: 111918 - DNA, 201 bp, Homo sapiens
accctgcgactcttccttccccacctcccacaggtccccgcgacagctgttggggtgagagccaagtcttctgcagcccccgcccctcccccgcaggtgcycctccttccgtcctgggatatccctcctgagcgcatcccgcacctgtatttgttaatcaagccgcggaggacacagtaattgcccagcagaaaacacggg

SEQ ID NO: 111919 - DNA, 201 bp, Homo sapiens
gaatccacgctctagaggagaggcagctcctctccccatgccatctttcctccctgctgctcaattggcaggaatggtgggggggcaccaattactgccawtttggaggagtgatgccagcatggggaatgtgtcttactgaataatggttaaaattgtattcttccttcctgtcccccactcctcataccccacaccagc

SEQ ID NO: 111920 - DNA, 201 bp, Homo sapiens
cttgcccagtttggatctagaatccacgctctagaggagaggcagctcctctccccatgccatctttcctccctgctgctcaattggcaggaatggtgggrgggcaccaattactgccaatttggaggagtgatgccagcatggggaatgtgtcttactgaataatggttaaaattgtattcttccttcctgtcccccact

SEQ ID NO: 111921 - DNA, 201 bp, Homo sapiens
tctagaatccacgctctagaggagaggcagctcctctccccatgccatctttcctccctgctgctcaattggcaggaatggtgggggggcaccaattactkccaatttggaggagtgatgccagcatggggaatgtgtcttactgaataatggttaaaattgtattcttccttcctgtcccccactcctcataccccacac

SEQ ID NO: 111922 - DNA, 201 bp, Homo sapiens
ctctccccatgccatctttcctccctgctgctcaattggcaggaatggtgggggggcaccaattactgccaatttggaggagtgatgccagcatggggaawgtgtcttactgaataatggttaaaattgtattcttccttcctgtcccccactcctcataccccacaccagcacccagtctcccagcttccattctgctca

SEQ ID NO: 111923 - DNA, 201 bp, Homo sapiens
tctcccacccccacacagagtggatgtctaaagtagacctcaaggagcctcaaaaccccactgctccagcatgcaggcaacctcaccccttgggctgtgarccacacacaggaggctgggtgaagtgtggcaagaccaatgaaaacctgaaaaagctgatatttctgctgaaactccccaagtctactctctccagcaaaa

SEQ ID NO: 111924 - DNA, 201 bp, Homo sapiens
tctctctcttttttttttttaatttttgttgtttgtttgtttggtttttcttttgagacatggtctcaccctgttgcccaagttgtagtgaagtggtgcartctcagctcacggcaacctccccctcccgggttcaagcctcagcctcccaagtagctgagaatacgggtgcccaccactacgcctggctaatttttgtat

SEQ ID NO: 111925 - DNA, 201 bp, Homo sapiens
agctagtaacagcagcacctatcctctgactgtgttgaggggattcagtgacagagtagaaagagtccttagtatggtgcctgacccctagtgactattcwgtaaaaaaaagtgactaataccatgggggaaggcatggtatttctatgggacaggtggaggactgtggtcaaggcagctgctttgaactgtagaagttca

SEQ ID NO: 111926 - DNA, 201 bp, Homo sapiens
ttttgatgtcctttaagcatgcttttaaactttgcttcccaaaaggtactaacactacaagtgaagtcatttctgattttagctcatcacctctagccackgtcatgaacccaagaggcctaaattcaagatcctgtatagttaagaaatttcaatgaagaagcaatggcttgggattaagaaacctgctttagccattga

SEQ ID NO: 111927 - DNA, 201 bp, Homo sapiens
gaaaggtattggcagcattttcctgggtcaccacatggacagagttgatgaagaagggtcattcttgatcaaaagctcttctttcattctgttcctttctrtctgattccaggagaggaggaacctggattcccccaaggcaggatcatgtttactgactctatccaaatatccaggccaaagaactagaacaatgaggta

SEQ ID NO: 111928 - DNA, 201 bp, Homo sapiens
tcctagctaagacagtaagataagaaaagaacaaaaaaattaaacagataaagaaggaagaaataaaactgtctttgtttgcaaatgtgatgattgtcaawgttgaaaattccaaagaactgaccaaaaaacaaaaaaaaagtcttgaaatcaaaaagcagttacagcaagattgtcgatacaaggctaatatacaaaatt

SEQ ID NO: 111929 - DNA, 201 bp, Homo sapiens
tctccataagacaaagtcctaaggaggcaccttagggactccttaggggaaagagactggacccctttgggtgtcctcaggtccccaccagagcctcctcrccacgcgccatcctcactgccctcccatgcttgcccagtttggatctagaatccacgctctagaggagaggcagctcctctccccatgccatctttcctc

SEQ ID NO: 111930 - DNA, 201 bp, Homo sapiens
ctgggaggcagaggctgcagtgagccgacaccacaccactgcactccagcctgggcgacagactgagaatctgtctcaaaaaaaaaagaaaaaaaaaaaaagatatcgtagatttttaaataaatggtactaaaacattggatatccttagaaaaagaataatctagacacagaccttccttctacttttcacaaaaaatt

SEQ ID NO: 111931 - DNA, 201 bp, Homo sapiens
gctatcaaaaaacaatgaaatcttgtcatttgcagcaacatggatgagcctggagtacattgttggtgaaataaaccaggcacagaaagataaatactccrtgttctcactcatgtgaaagctaaaagaaaaagttgatctcatagcagagagtagaagagagtttaccagacactgagaagggtgaggaggaggtgtgga

SEQ ID NO: 111932 - DNA, 201 bp, Homo sapiens
agactttccctgattataccctatagtacctctctctccaccactccctacctcccattcctgctttatttttttttcctaaaatgtattactttctgatrtactaaatattatttttatgtttgtgttttctctatcctcttttagaatgtaagctccatgaaggcatgaattatgttgtgctcacttgtatccctggtg

SEQ ID NO: 111933 - DNA, 201 bp, Homo sapiens
agaaaaagttctgttacttaatacattgttgttgtccaaattacaaaagcacctgccaagtctctaagaaagatcatggagaaaggtattggcagcatttwcctgggtcaccacatggacagagttgatgaagaagggtcattcttgatcaaaagctcttctttcattctgttcctttctatctgattccaggagaggagg

SEQ ID NO: 111934 - DNA, 201 bp, Homo sapiens
ctcaaaccagcttaagcacaaagagaatgccaagaattcctgtccagattcagaattaaggaattaatttgaaaaatatcattagatctcttctctctctmtctctctctctctctctctctctctctctctcgcttttctgagttgattttattctcaggcaattttctcccgcatgctaaaaaattcgcttagggtgtg

SEQ ID NO: 111935 - DNA, 201 bp, Homo sapiens
ggaggttagcaaggtgaagggcacagggcagggatcattctgaatctcctgcaaaaagactttgcttccaaagtggccaaagtccccagtggaatctgccratgaagtccttgccttagagtcaggattgagggaggagattagcccgatcccaggatgaagtcacatgaaaacctcctgcaccacgactgtgccaatgaa

SEQ ID NO: 111936 - DNA, 201 bp, Homo sapiens
ttggtttttcttttgagacatggtctcaccctgttgcccaagttgtagtgaagtggtgcagtctcagctcacggcaacctccccctcccgggttcaagcckcagcctcccaagtagctgagaatacgggtgcccaccactacgcctggctaatttttgtatttttttctgtagagacggcgtttcaccatgttggtcaggc

SEQ ID NO: 111937 - DNA, 201 bp, Homo sapiens
catccttcctcctctgacatatgcagactacacattagcatggtaatgtctcatgccattagtgagtaacgtgctgaataattaggctatgaaaatctaamggcagggatttttgttttattagcaattttccatcctattgtgttaatttcatctcatgtcagctggctttctaagtaaacaatgatcacaggcagacat

SEQ ID NO: 111938 - DNA, 201 bp, Homo sapiens
attgacatactatgatctccccagcctctgtatgtgaatctggaaaatagggcgggtatggcagctccaagtttgtcggcaacagtacatgaaaccatgcrttctctaccatcagagctcccagaagagagtgcaatatgcatgccaggtggtgttattagtgacatactcaggtgctttctacagtttgtgattactact

SEQ ID NO: 111939 - DNA, 201 bp, Homo sapiens
tttgttgtttgtttgtttggtttttcttttgagacatggtctcaccctgttgcccaagttgtagtgaagtggtgcagtctcagctcacggcaacctccccstcccgggttcaagcctcagcctcccaagtagctgagaatacgggtgcccaccactacgcctggctaatttttgtatttttttctgtagagacggcgtttc

SEQ ID NO: 111940 - DNA, 201 bp, Homo sapiens
tgcataccaacctcgcaccccacaagagcctgtggttatcttgaggaaaataatggtttctgtttttctttgcattctatcacatggtccagggatagtcwttcagccagtattgaatgaatgtctgtatctctggatgcataaatggacagaataaagagcttctaagaaagtagaatatacagtccctgactctgggat

SEQ ID NO: 111941 - DNA, 201 bp, Homo sapiens
ccaccacatccagctaattttctttctattttttgtacagatgggtctcactattttgcccaggctggtcttaaacccctggcctcaagggatcctcctamctcagcctcccaaagcactggaattataggcatgagccgctgtgcctggccattctgtaaatctaaaactgtgctaaaaaataaagttcattaatttaaa

SEQ ID NO: 111942 - DNA, 201 bp, Homo sapiens
ggtgggaaagtgcttggcacctccaaggaacagcaagaggccctggtggctggagcagagggagctgggagagcagtgagaggtgctggggctgagtcatrctgggctttgaaaaccatcacgaaggcttcggctgttccctgagtgagatgggcccattggaagctactgggcagagaaataatgtcatctgagttacat

SEQ ID NO: 111943 - DNA, 201 bp, Homo sapiens
ttttaaaattgctgtggacacacaacacccactgattcggggctcccattctcttgctgacatgtcccttcttcctctggtcatccctctctctctctctyttttttttttaatttttgttgtttgtttgtttggtttttcttttgagacatggtctcaccctgttgcccaagttgtagtgaagtggtgcagtctcagctc

SEQ ID NO: 111944 - DNA, 201 bp, Homo sapiens
ataagaaaataaacaactcattttaaaaactggcaaaagacccgaacagataccccaccaaaaaagatacacagatggcaaacaagtatatgaatagatgytcaacatcatatgccattagagaagtgcaagttaaaacaacgagataccactaaaaacctattctaatggaaaaacaaacctgacaataccaaatattgg

SEQ ID NO: 111945 - DNA, 201 bp, Homo sapiens
taaagtttagattttattttgagcataattagaacccatcgaaggaaagtgatatgatctaaattatgatgtaaaggagtcattttagctgtggtttaaasaatggatcgacttcatttgaaatgggtcttttctgtatgttataactttccaaaatgatctacttaaccactatccatgttattcttagaattcaattaa

SEQ ID NO: 111946 - DNA, 201 bp, Homo sapiens
aattcaattaactttaatggcaatagaagatatcttaagatatcctcattatgaataatatttattttaatataagtataattaaaatttatacatagtcctctctctctctctctctctctaaatatatatatatatatatatatatatgtttagtttacaatactgttaggtgtatatatacttgtgtgtatatgtgtg

SEQ ID NO: 111947 - DNA, 201 bp, Homo sapiens
attcaattaactttaatggcaatagaagatatcttaagatatcctcattatgaataatatttattttaatataagtataattaaaatttatacatagtcctctctctctctctctctctctaaatatatatatatatatatatatatatgtttagtttacaatactgttaggtgtatatatacttgtgtgtatatgtgtgt

SEQ ID NO: 111948 - DNA, 201 bp, Homo sapiens
atacagaaccatatggttcaaatcctacaggacgatcttttcctgtttgaacagaataaagagtttcaggtgggtttattattactgtggcaaatattcaygtaattatatgtaataggtttttagtattatctttaataaacccagtcagtatgtaatagtccatgtgtcttgattaaagtagcttgtgtttatttaagt

SEQ ID NO: 111949 - DNA, 201 bp, Homo sapiens
aattttgtatttttagtagagaaggggtttcaccatgttggctaggctggtcttgaactcctgatctcaggtgatccacccacctcagcctcccaaagtgytgggattacaggcatgagccactgcgcccagccttgaactctgttttctaagtgcttgttcctccttgtaaatgagcccctttgagtttgggtttatatg

SEQ ID NO: 111950 - DNA, 201 bp, Homo sapiens
cttaagatatcctcattatgaataatatttattttaatataagtataattaaaatttatacatagtcctctctctctctctctctctctaaatatatatatatatatatatatatatgtttagtttacaatactgttaggtgtatatatacttgtgtgtatatgtgtgtatacatatgtttgtataggtaaagtattaacc

SEQ ID NO: 111951 - DNA, 201 bp, Homo sapiens
cttggttttaaagcatcaatattgagcagtatacagatttagaatataataaattgtaaataagactatctttctacataatatcccatgttaaacatttyttcaaaacagcagtatttgcttggttcttcattttcaccttttaggtacccttgggcgagactgtacagtacttcccaaaccactgtcgacagcggtgag

SEQ ID NO: 111952 - DNA, 201 bp, Homo sapiens
ttcagatggtctgtcagttcaaacagtggtaggaatgctctataaccccttctcaggttactggcattggagtgaaaataccagccttaactatgcagctyatgctgtgaaatccagggtccaggaacacccagcctctgctgagtttgttttaaagggagaaacagaagagctccaagctaatgcctgcaccaatccagc

SEQ ID NO: 111953 - DNA, 201 bp, Homo sapiens
gttttatatatacacatacattttttttcctctgtaaagggtattgagcatatgcaaaaattcatttcatgtagctaatatggaattgacagaatttgaamtagttttgacaaataatttcagaattaatattatcctagtttaaaacataacactttatatttgaatatcattcctgtcattttatgtacataatgtaga

SEQ ID NO: 111954 - DNA, 201 bp, Homo sapiens
taagatatcctcattatgaataatatttattttaatataagtataattaaaatttatacatagtcctctctctctctctctctctctaaatatatatatatatatatatatatatgtttagtttacaatactgttaggtgtatatatacttgtgtgtatatgtgtgtatacatatgtttgtataggtaaagtattaaccgt

SEQ ID NO: 111955 - DNA, 201 bp, Homo sapiens
gcatgcttgaaagaatgtatattttgttgtttgggggaagtgtttcacacattttaagtagattttattgaataatggtcttgttctgttcttctttatcyctgctggttttctatccagtggttctatcaattactgagagaagagtgttgaagtctccaacttacaattgtggatttgtttatttctcatttcatttct

SEQ ID NO: 111956 - DNA, 201 bp, Homo sapiens
gtatttttccactggtgcagtcgggattaaatacttaacagatattgaatgacaattataagacattgatttgaggctgggcacagtggctcacacctgtratcccagcactttgggaggcggaggcgggtggatcacctgaggttgggagtttgagaccagcctgaccaacatggagaaaccccgtctctactaaaaata

SEQ ID NO: 111957 - DNA, 201 bp, Homo sapiens
gggtggatcacctgaggttgggagtttgagaccagcctgaccaacatggagaaaccccgtctctactaaaaatacaaattagccaggcgtggtggcgcatrcctgtaatcccagctacttgggagggtgaggcaggagaattgcttgaacccgggaggcagaggttgcagtgagccgagattgtgcctgggcaacaagagc

SEQ ID NO: 111958 - DNA, 201 bp, Homo sapiens
tagcctagcacttaataaaataggccactatgtttttgaatgttggttttatcttctcaactaggtcataaactcatggaagctaggattaagtagtagawaccacttctcttttacctgttgccccctaacccagggccaagcagataacagatgatcaatgaatactttttggctatttagtcctcacttgtttaggaa

SEQ ID NO: 111959 - DNA, 201 bp, Homo sapiens
atttcatttcttttagcccggtggttctttattcattactacaatcaacaaaacacaactttcctatgccttgggaattgttttttcagagcaaattgcargtattgtaccaaaaggtactcatacatgggagaagtttgtttcacctgaaacactagagagcattctggaatcaagtaagtattaagagaattttttcca

SEQ ID NO: 111960 - DNA, 201 bp, Homo sapiens
gtcttgaactcctggtctcgagcaatcctcctgcctcagcactagaattataggcatgagccaccatgcctggcctagaagtgattcttaagatattttaragtttgaagttgcaatgagctatgatcatgccattaaagggaaaaaaagatattttagaatactagagctttacagaggaaagttaaaatgtgtgataat

SEQ ID NO: 111961 - DNA, 201 bp, Homo sapiens
agattgtgccactgcactccagcctgggcaacagagtgaaactctgtctcacaaaaaaaaaaaaaaaaaaaagtaaagaaaagaaaagaaagaaagaaaakaaagtaggaaaaaaatgttttaaagatgtgttatggggacaatctcctgttggcacatattttttaataacagctaacatttattgagtacttaccaaac

SEQ ID NO: 111962 - DNA, 201 bp, Homo sapiens
ggggtttcaccatgttggctaggctggtcttgaactcctgatctcaggtgatccacccacctcagcctcccaaagtgctgggattacaggcatgagccacygcgcccagccttgaactctgttttctaagtgcttgttcctccttgtaaatgagcccctttgagtttgggtttatatgaaatcattcttagtcaaatgagc

SEQ ID NO: 111963 - DNA, 201 bp, Homo sapiens
cttggatatctgatgttttcaaatacaaaaatgtacaatttatcctttgagagagaatcatgaagaaaagaaggtcaataaaaagggctaaaaccttggamaaaagtttttgttatttcgtctaatagctactttcaagggattctgtgaataaaaagttttgtcaagatattgcgtgatctaggagtgtaagttcctcaa

SEQ ID NO: 111964 - DNA, 201 bp, Homo sapiens
ataagactcatgattcaatatatttatttatatttttaaagtataatatgacctcaaatcaatggaggaatgctgtattatgcaggtttgtgtcaatttcmtgacattaaaattgtctgattttgtccgtttcttaaaattatgattagtgagtggtctaacagtttaaggcattgataacttacaagtagaatggggctc

SEQ ID NO: 111965 - DNA, 201 bp, Homo sapiens
ggtttcaccacattgtccaggctggtcttgaactcctgggctcaagcgggccgcccaccttggtctcccaaagtgatgggattacaggcattgagccactkcgtctggcctaagatgatttttaaacctcttgagaattgtagcaatactgatgacttagggattcattttccagaaatagaggaggtaagagagagatca

SEQ ID NO: 111966 - DNA, 201 bp, Homo sapiens
tattgttaatatggtcgattatattaactgctttttaacattgaactagtgttgcatacctggaataaatctcacttggttgtgctgtattcttctatttrtatgttgctgaattatattgtggtaatatttgctaagaatttttgtgtctgttcctgagaggaattggtctgtagtctttgctgtactctttgatttttg

SEQ ID NO: 111967 - DNA, 201 bp, Homo sapiens
aacaatcttgactcttcagcctcccaaagtgctggaactacaggtgtgagccaccctgcctggtgtatttctcttttttattgttaatatggtcgattatrttaactgctttttaacattgaactagtgttgcatacctggaataaatctcacttggttgtgctgtattcttctatttgtatgttgctgaattatattgtg

SEQ ID NO: 111968 - DNA, 201 bp, Homo sapiens
ccttagtagcaaggaccatgggtgcacaccactatacctggctaattttttaagtttttctgtagagatagggtctcaccatgttgcccagacttgtctcraactcctgggctcaaacaatcttgactcttcagcctcccaaagtgctggaactacaggtgtgagccaccctgcctggtgtatttctcttttttattgtta

SEQ ID NO: 111969 - DNA, 201 bp, Homo sapiens
tgtgccactatgcccggctaattttgtatttttagtagagacagggtttctccatgttggtcaggctggtctcgaactcccaacctcgggtgatccacccrcctcggcctcccaaagtgctgggattacaggtgtgagccactgtgcggcctgtaatctttgacctttctgaattcacttattatttccaggagcttttta

SEQ ID NO: 111970 - DNA, 201 bp, Homo sapiens
ttacttataatacctaatacaatattttaaaatttttagaaatcataagtgatttgggtgctgcataaatatgataaggtggctaaggtagcaaaattgawtgaaggtaatatctttctgtatttgtattttataagccaacttttaaccttgtgaaaatattgcacagcattaatacttgaactctgttttttgttgttg

SEQ ID NO: 111971 - DNA, 201 bp, Homo sapiens
tgaattttctttgtgattaaattctgataatgcatttttggaaagaataccacagacatgatactgtactcttctccacctcaatgcatcctatcaggagwtacataatgtcaatttgccttgttactggtgatgttaactttcatcacttgactaaggtgttgtctaccaggttccttcacggtaaagttagtatttttc

SEQ ID NO: 111972 - DNA, 201 bp, Homo sapiens
taatggcctgattgaggtcaacttcgaacatgaggtttgaggtgtcctatagcaataaagtatcttcaaagttgtttatgatagtaaaaacatcttgcagkttaattccatgtgcaatttgctaaatgagcgtgaaagtatagccatacatacataacactcaacaatacaatcatgaaagtcggctgcaggccgggcgcg

SEQ ID NO: 111973 - DNA, 201 bp, Homo sapiens
ggaattggtagcattctgtttaaatacaaactcaattactctctttccgttgtggtaaggtggtagagtggtttttatttttactttttagattaattaatttttttttttgagaaaaggtcttgctctgtatcccaggttagagtgcagtggcatgaccacagttcacggcagccttggcctccctggctcaattggtcc

SEQ ID NO: 111974 - DNA, 201 bp, Homo sapiens
gtgctggggcctggaggctgtaatacaaaagctgcgcgtcccttaatttcctcggcgggtgagtgtgtgtgcggaggtccttcgcatgcagtcaattgcgmgcgctggcgtctctgcgcatgcgccgggggtggggcggtgggttgtctctggacctcgcgaggggtcagcgcgaaacctaaggcttggtcctggccccat

SEQ ID NO: 111975 - DNA, 201 bp, Homo sapiens
gctacttgggaggctgaggcaggagaatggcgtgaacccgggaggcagaacttgtagtgagctgagatctcgccactgcactccagcctgggcgacagagsaagactccgtctcaaaaaaaaaaaaaaaagtttaacattgtatgggtgacagtgtgggaaaaccaacaagagacactctcatagattaccgataggatag

SEQ ID NO: 111976 - DNA, 201 bp, Homo sapiens
tctaagttaacatccttactatgttttacctgagcagccctttgaaggatttttctatactatatgcttctacatggaagtcagtgtagtgtctatctaayccctctttactcctgtttgatcccatttaattaaataaaattttaggcaaattatatactttcctgggctttttccttcagattattcatttgccaagtg

SEQ ID NO: 111977 - DNA, 201 bp, Homo sapiens
ggacccatgtggttggagtgggaaggatgaggagaatagaaggaagtgagtttggaaagggagaaaactgggaactaaataattcagaactttgtaaactwtgctaaggattttggtcttttttctaatggcactgggaagatatggaagcattttattcaggaaaataacaatcaaatttgtattttggaacaatcactc

SEQ ID NO: 111978 - DNA, 201 bp, Homo sapiens
gtttcgcttttgttgcccaggctggagtgcaatggtgcgacctctgctcaccgcaacctccgcctcctgggttcaagcaattctcctgcctcagcctcccragtagctgggattacaggcatgtgccactatgcccggctaattttgtatttttagtagagacagggtttctccatgttggtcaggctggtctcgaactcc

SEQ ID NO: 111979 - DNA, 201 bp, Homo sapiens
taagtgctcaataaatggtagctattattattatttatttatttattttgagacagagtctcactctgtcgccgaggctggagtgcagtggctcaatctckactcactgcaacctccacctcccggattcaagcgattctcctgcctcagcctcctgagtagctgggattagaggtacccactaccatgcccagctaattt

SEQ ID NO: 111980 - DNA, 201 bp, Homo sapiens
aggcaggcaccacaatgcatggctaatttttatatttttagtagagaaggggtttcaccacattgtccaggctggtcttgaactcctgggctcaagcgggycgcccaccttggtctcccaaagtgatgggattacaggcattgagccactgcgtctggcctaagatgatttttaaacctcttgagaattgtagcaatactg

SEQ ID NO: 111981 - DNA, 201 bp, Homo sapiens
aagggaactgcaagggagcagctacaagcaaaatgtaaaaaaaaaaaaaagaaagaaattgttcatttgttcctctgtccatttatgtattcatcaaacarttttgggcaaagcactgtaacagacacagaatatctgactcagactttgccctcaaggaacttcctggttggtttttgctggttcatccagaattagtat

SEQ ID NO: 111982 - DNA, 201 bp, Homo sapiens
caatgcatggctaatttttatatttttagtagagaaggggtttcaccacattgtccaggctggtcttgaactcctgggctcaagcgggccgcccaccttgstctcccaaagtgatgggattacaggcattgagccactgcgtctggcctaagatgatttttaaacctcttgagaattgtagcaatactgatgacttaggga

SEQ ID NO: 111983 - DNA, 201 bp, Homo sapiens
aatgtcagtttgctgttacaggatccaaaccagacttgtacatgtatttagttgtcatttctccttagtcttctttaatctgtgacagttttttggtgttwcctctgtttttcttgacaaggtcttactctgtcacccaggctggagtgtactggcaagatcacggctcactgcagccatttcctgggctcaagccatgct

SEQ ID NO: 111984 - DNA, 201 bp, Homo sapiens
ggttgccatctcattctttatataaaaaaattatacatgcatctaaaaattaaatgtgaaaagcaaaaccatagaagtactataaaataacatgggagaamtgtattatcttggaggagggaaggaaattttaatcaatacaaaaaaatacccagcagatataaaatagatatttatatagataaatttgacaatgtaaaa

SEQ ID NO: 111985 - DNA, 201 bp, Homo sapiens; identical to SEQ ID NO: 18633

SEQ ID NO: 111986 - DNA, 201 bp, Homo sapiens; identical to SEQ ID NO: 18636

SEQ ID NO: 111987 - DNA, 201 bp, Homo sapiens
ccagtcatcgtttagattatagttgaatgagctttctaaaattccctccactttgctctatttaattttccttgtgttccatgacatctcagctggtgccrtctgtgtactcttacaaatttgttcactatcccagatactaaatctagaactttcatataatttcaaagccagaagttttaagcaagataagattaaaat

SEQ ID NO: 111988 - DNA, 201 bp, Homo sapiens
actcaaagacattcaaccattatcagacaagctacacatctgaatgtctcaccagtgaatttgaaccaagatatgggcactatagcagagtaagtgatggyaggcaatggtgaggttgggcagactcatcactggttaactgtttttaaccacgatcagcaaaataaatggagaaagccaatctgcagagaataataggtg

SEQ ID NO: 111989 - DNA, 201 bp, Homo sapiens; identical to SEQ ID NO: 18638

SEQ ID NO: 111990 - DNA, 201 bp, Homo sapiens
gacagggtctcactctgtcacccagactggagtgcagtggtacaaaatcatagctcactgcagcctcgaactactgggctcaagtgatcctcccacttcarcctcccaagcagcttggactacaggtgcatgcaaccatgcctggctaatttgtttatttattgtagagatggaggtctcactattttgcccaggctgatc

SEQ ID NO: 111991 - DNA, 201 bp, Homo sapiens
ggttggggtaggcattctcctgatgattgaggcaagtaaacgggacaggcttagattttctcagtcaaagccaacaacttcagcagttactttgaatgacytttcctttataatgaagcctcatgtgtaaaattcatcattaatctgtatttccaggctggaagagcagacagcacatccctaaactggttgctgattata

SEQ ID NO: 111992 - DNA, 201 bp, Homo sapiens
aagttacataaaatactaaatatattgtattctttgcatttacattttgaaaataagaaaaaacaagaagtagaatgcactgaaactggacttgaaagtamaaatgagacaaaaatttatgaaaaaaaggttgactgaggtaaactattgaacaattatttaaatgaggcatatgataaataatcaaacacattagtggaa

SEQ ID NO: 111993 - DNA, 201 bp, Homo sapiens
aacccctatactgtattgcgtcactttctaacaggcagctgccctcgcctcctgcaatgagagctatggggtctgtgtggttgttggggtgttgcctgccrgtgttcaactcaaaatcagtggccagttgttcttctcaggacgttctttgaagggttctgtttttggaggtatggatgaagcagggaaaggtggaaatgc

SEQ ID NO: 111994 - DNA, 201 bp, Homo sapiens
agccttcccaactgagtaaaggtgtatgttctctttgctttttgttttctgagttttctgcctgtatgtgtttaggtgactccaggttctacctgtgctgrgttggcctgggaggagtcggcttgtctgttgtcatgggttgtaaagcagcaggagcagccaggatcattggagtggatgtcaacaaggagaaatttaaga

SEQ ID NO: 111995 - DNA, 201 bp, Homo sapiens
tatcactttggtaataccagcaccttctgtgaatacacagtgataaaggaaatctcagttgccaagattgatgcagtcgctcctctagagaaagtatgcckaattagctgtggcttttccactgggtttggtgctgcaatcaatactgccaaggtgaggggcatttatacccatttggaagggaattattgggatatggag

SEQ ID NO: 111996 - DNA, 201 bp, Homo sapiens
gtgaaaagcaaaaccatagaagtactataaaataacatgggagaactgtattatcttggaggagggaaggaaattttaatcaatacaaaaaaatacccagmagatataaaatagatatttatatagataaatttgacaatgtaaaaattacatagattctgcatgtttaaaaaaaaccccaaaagtcaaaacccagtatga

SEQ ID NO: 111997 - DNA, 201 bp, Homo sapiens
catagaagtactataaaataacatgggagaactgtattatcttggaggagggaaggaaattttaatcaatacaaaaaaatacccagcagatataaaatagrtatttatatagataaatttgacaatgtaaaaattacatagattctgcatgtttaaaaaaaaccccaaaagtcaaaacccagtatgacaatggaccaattt

SEQ ID NO: 111998 - DNA, 201 bp, Homo sapiens
tggtgctgcaatcaatactgccaaggtgaggggcatttatacccatttggaagggaattattgggatatggagttgaaaggcctcttgcatctttgtcatstcttatcataccaaaggaaaaatcccaagcctgactccaaacatccttgagttctctgctatctacctagtcatcccacacccccttcaacatttttccc

SEQ ID NO: 111999 - DNA, 201 bp, Homo sapiens
aagacatgattttgctcttttaggtgacaaagttatcacactctttctgccacagtgtggagaatgtacctcttgcctgaattctgagggcaatttttgtrtacaattcaagtaagtttttactaatattttctttttgaaaacttaattcactttcattggagaagatctaagctttctaattcaaaataaactttgtgt

SEQ ID NO: 112000 - DNA, 201 bp, Homo sapiens
ttcccaggtttctacttgggtgagtgaacacatcgcatggctgctagttgaatagaggtagcagagggaggaatatattgagtgttttgtccactagagcrtggtggaaggtggagatgggaagaagaaataatgatatgttcatgttttaacatgttgagtttgagatacctccagtaccttcaaacagcaaatgaatac

SEQ ID NO: 112001 - DNA, 201 bp, Homo sapiens
ttttaaattcaatccctgagagaggaaattagtgttgaaaatgttgagaagagataagacttgactgaatggatatatgacaaaaaactatttcatactcsaaaaggagcttacaaaagaggcaaatctggggccagttcctcaagattcagccactgagcccagggctgggcccagatgctaaagacattctctcttttt

SEQ ID NO: 112002 - DNA, 201 bp, Homo sapiens
attttaaattcaatccctgagagaggaaattagtgttgaaaatgttgagaagagataagacttgactgaatggatatatgacaaaaaactatttcatactygaaaaggagcttacaaaagaggcaaatctggggccagttcctcaagattcagccactgagcccagggctgggcccagatgctaaagacattctctctttt

SEQ ID NO: 112003 - DNA, 201 bp, Homo sapiens
tctaccagtcgcctgtgtacctttgtactttctacagtgaaagttgctacaggatctccctttctcaataaattcatctgcggtggagaaaatcagcatgwgtactacaggccaagtaggtgcagtcttattctttatgttgtgtcatatctttgtcagtttgtgtgctcatctctttaccaacatctcatcacccagcta

SEQ ID NO: 112004 - DNA, 201 bp, Homo sapiens
agaatcagaaaagaaagtcatagaccatttaggagttaagctgaaattaagatgtaggctcaatcctcacatacatcttttaacccctatactgtattgcrtcactttctaacaggcagctgccctcgcctcctgcaatgagagctatggggtctgtgtggttgttggggtgttgcctgccagtgttcaactcaaaatcag

SEQ ID NO: 112005 - DNA, 201 bp, Homo sapiens
ggtgttggacagtcctgctaaacctcccacaatgtgcaaaagaaagaatgttccccacccaaaatgccagtagtgcccttgttgagaaacactgcctagtmccgtctgtggtcctagaattttctttcctatgtcatttggttgaaataagaaaaaaagtggagggttgacatagatgtaaaaatgttttatcagatcacc

SEQ ID NO: 112006 - DNA, 201 bp, Homo sapiens
caaaaagacaaatatcacatgttcttacgcatacgtgggagctaaaaatttgaacacatggaggtagagagtgggaaaatagataacagagactgggaagkgtgagtggagaggatgatgagaagtgggtgaaaaggtacaaacatggccgggcgtggtggctcacgcctgtaatcccagcactttgggaggccaaggtgg

SEQ ID NO: 112007 - DNA, 201 bp, Homo sapiens
ttagctgtggcttttccactgggtttggtgctgcaatcaatactgccaaggtgaggggcatttatacccatttggaagggaattattgggatatggagttraaaggcctcttgcatctttgtcatctcttatcataccaaaggaaaaatcccaagcctgactccaaacatccttgagttctctgctatctacctagtcatc

SEQ ID NO: 112008 - DNA, 201 bp, Homo sapiens
tgaagaggctttcaggaatttgtaaagcatctccttcccctctgcattttgttttatttctagctaataaaatacataatcctgaaagtatttaagtgttyacctaccgttacttttgccattagcattgtatttccaatatggattttttttttacatgacatattaatggaagtcagcttataaaattgtagctcaagt

SEQ ID NO: 112009 - DNA, 201 bp, Homo sapiens; identical to SEQ ID NO: 18637

SEQ ID NO: 112010 - DNA, 201 bp, Homo sapiens
caacacctgaaggaaggaggactggctaacccagaagatgcatgcccaagattttactgtctctgccatgcatggagatatggaccaaaaggaacgagatrtggtcatgagggagtatcgttctggctctagcagagttttgattaccactgacctgctgcccagaggcattgatgtgcagcagctttctttagtcatcaa

SEQ ID NO: 112011 - DNA, 201 bp, Homo sapiens
agccattctaccttgaccaagggttatgatgtgatcgctcaagcccaatctgggactgcgaaaatggccacatttgccatattgattctgcagcagattgmattagatctaaaggccacccaggccttggtcctagcacctactcgagaattggcttagcagatacagaaggtgatcacggcactgggagactacatgggt

SEQ ID NO: 112012 - DNA, 201 bp, Homo sapiens; identical to SEQ ID NO: 18646

SEQ ID NO: 112013 - DNA, 201 bp, Homo sapiens; identical to SEQ ID NO: 18647

SEQ ID NO: 112014 - DNA, 201 bp, Homo sapiens
tcaacacctgaaggaaggaggactggctaacccagaagatgcatgcccaagattttactgtctctgccatgcatggagatatggaccaaaaggaacgagaygtggtcatgagggagtatcgttctggctctagcagagttttgattaccactgacctgctgcccagaggcattgatgtgcagcagctttctttagtcatca

SEQ ID NO: 112015 - DNA, 201 bp, Homo sapiens
tttcttaataacattttcttttctctagcatactttattgtaagaacgcaatatataatacatataatttaggaaatatgtgttaatacactatgttatcrgtaaagtttccagtcaatagcaggctattagtagttaagttttgagggagtcaaagttaatggattatcaactacacaggggttagcactccaaacccct

SEQ ID NO: 112016 - DNA, 201 bp, Homo sapiens
ttcaaatttaacgtggtatcctgtattttatctggtaaccccacctaggagggagatggcagccttgagcacgacacagtctacaacacaaggtgatgctkaggagccctcagctccgggacctgcagagcagaacgtggtgcggacaatgagcgcacagaaagttcaggtttctcggccgagcgccgtggctcacgcctg

SEQ ID NO: 112017 - DNA, 201 bp, Homo sapiens
aagatgaatttcaagtaatttaaattaatccatttgaagtaacatttaatgtgtgtgtaaaacttgtgatagatgtgtaaaatatgtaataggtataatcyatttttatataaacatatttatttagaaagagaactgccgtcctgatggaagagaacttggtgaattcagaaccacaactgtcaacatcggtaaggatgt

SEQ ID NO: 112018 - DNA, 201 bp, Homo sapiens; identical to SEQ ID NO: 18652

SEQ ID NO: 112019 - DNA, 201 bp, Homo sapiens
ggtagcatgctacgtgccgggcttatggatagcaacaagcaagcagcaggtggcccagcgatcggggtgctgccaggactgcctctcacagtgcatctggyttggggtccacaattggtgacctggtctagttttaattggagatatcatattaaaagagaaaacatgatacctgtctcttctctagatagctcagagctt

SEQ ID NO: 112020 - DNA, 201 bp, Homo sapiens
atctatttttatataaacatatttatttagaaagagaactgccgtcctgatggaagagaacttggtgaattcagaaccacaactgtcaacatcggtaaggwtgtattttccactttcaactgtatgatattcccaagttttagtctatgaaccagccaaacagtttttcacccaaattctttgtctaaaggatttgatgat

SEQ ID NO: 112021 - DNA, 201 bp, Homo sapiens
tcatattaaaagagaaaacatgatacctgtctcttctctagatagctcagagcttcatccatcatcacaggcacttgaagaaaaaaatatattaaaaatcrcttttgaaaatgattttccaagcccggcacattcagcttacatacagaaaaaagtcccaataatctaacaagcccctctggtactttcccaatggtcatt

SEQ ID NO: 112022 - DNA, 201 bp, Homo sapiens; identical to SEQ ID NO: 18649

SEQ ID NO: 112023 - DNA, 201 bp, Homo sapiens
cgcgcccgctggccgcagcgcccccgcgtggcgaggcggagaaaacgccgctctcgtgccctcggcgcccagtcggtggagaggagcgctaggttccacascggggcgccaggtttatcaagtatgcaagacgtctacttaatttgaatttcagattaaaaaactaatcatgtttttaacagccttattaagatagccaca

SEQ ID NO: 112024 - DNA, 201 bp, Homo sapiens
gcagagtgtttctttcagttcctaatgtggatctaccacccctgtgttcatcgagattccggtctggacctcctggagaagaggcccaagtggctagccarttcattgcagatgtcattgaaaagtaagagcaccatgataaaattttattacaattcattttcagatagttttgggcttttcatttactttgctctttgt

SEQ ID NO: 112025 - DNA, 201 bp, Homo sapiens
aggctgaggcaggagaatggcgtgaacccgggaggcggagcttgcagtgagccgagatcgcgccactgcactccagcctggacgacagagcgagactctgyctcaaaaaaaaaaaaaaaaaaagttcaggtttctcatgtgttggagcacggagcccttgaccagtgaagaggcaaggccagggctgagcctaagtcacag

SEQ ID NO: 112026 - DNA, 201 bp, Homo sapiens
ggtggaagtgggctaactggagctaaacttcaggactgtatgagccgagcagttacaagacacaaagaagttaaaaaactgatggatgaagtaattaagastatgaaacccaaataaacagccaccacattttcaaaacagatttgtaaaaattgtatttgttaacactgtgcacaaacgttttatactaaataaatatca

SEQ ID NO: 112027 - DNA, 201 bp, Homo sapiens; identical to SEQ ID NO: 18658

SEQ ID NO: 112028 - DNA, 201 bp, Homo sapiens
tatagaactttaaaaaggtgaagcattttcttaaggtttttgagccttgaaagttatcttgcttgtttaaccaagggttctgtggttcttaagtctaagckaatagcatgttctacccattagaagactttaatttccttttgtgtttaattctattttagcttgtctgggttctatactgtgatctcatttgcctcgact

SEQ ID NO: 112029 - DNA, 201 bp, Homo sapiens
tttacagatgactttcagtaacctgtccaggtacataagactcataagtaaaacttagacataaatctgactccaaagcctgtgcttctttgactacagtmtaccctgtgttatttaacctcagttgagattcttctttcgtaaacctggagtgatgtataacagtaagatttgagaacttgctccttgtcaggttttatg

SEQ ID NO: 112030 - DNA, 201 bp, Homo sapiens; identical to SEQ ID NO: 18660

SEQ ID NO: 112031 - DNA, 201 bp, Homo sapiens; identical to SEQ ID NO: 18661

SEQ ID NO: 112032 - DNA, 201 bp, Homo sapiens
gggcggatcacgaggtcaggcgatcgagaccatcttggccaatatggtaaaaccctgtctactaaaatacaaaaaattagccgggcgtggtggcgtgtgcytgtaatctcagctacttgggaggctgaggcaaggaaatctcttgaacctgggaggtagaggttgcagtaagctgagatcgcaccaatgcactccagcctg

SEQ ID NO: 112033 - DNA, 201 bp, Homo sapiens
ctagtgggtctcatcgatccacgcatttattcccatttgtaacagatggctgccgtcaaggctccgtcacccctatttgcttaaccacatcagccaagggrgcaggctagggagcacaccccttctgggggctcgagacctccctgggtggagcagaactgcagcggctgcaggtcccggagagtctgggagaggtcgagg

SEQ ID NO: 112034 - DNA, 201 bp, Homo sapiens; identical to SEQ ID NO: 18653

SEQ ID NO: 112035 - DNA, 201 bp, Homo sapiens; identical to SEQ ID NO: 18662

SEQ ID NO: 112036 - DNA, 201 bp, Homo sapiens
gcagtgacgcaatcttggctcactgcaagctctgcctcccggattcatgccattctcctgcctcagcctcccaagtagctgggactacaggcgcccccccmaccacacccagctaatttttttgtatttttagtagagacggggtttcaccgtgttagccaggatggtcttcatctcctgaccttgtgatccgcctgcctc

SEQ ID NO: 112037 - DNA, 201 bp, Homo sapiens
aaaaaggcaggggttgcaatcctagtctctgataaaacagactttgaaccaacaatgatcaaaagagacaaagaaggccattacataatggtagagggatygatttaacaagaagagctaactatcctaaatatatatgcacctcaaacaggagcacccagattcataaagcaagtcctgagtgacctacaaagagattta

SEQ ID NO: 112038 - DNA, 201 bp, Homo sapiens
aaggcaggggttgcaatcctagtctctgataaaacagactttgaaccaacaatgatcaaaagagacaaagaaggccattacataatggtagagggatcgawttaacaagaagagctaactatcctaaatatatatgcacctcaaacaggagcacccagattcataaagcaagtcctgagtgacctacaaagagatttagac

SEQ ID NO: 112039 - DNA, 201 bp, Homo sapiens
cactcctctgcaaatgtaaaagaacagaaattataaaaatggtctctcagaccacagtgcaatcaaactagaactcaggagtaagaaactcactcaaaacsgctctactacatggaaactgaaaaacctgctcctgaatgactactgggtacataacgaaatgaaggcagaaataaaggtgttctttgaaaccaacaagaa

SEQ ID NO: 112040 - DNA, 201 bp, Homo sapiens
atttattcccttaagtagtcctcaatattatcctgaataattcttttttacattaccaaaaaaagtcagttaaaagttacagaattcagagagtgcggacvtccagtttcgcagtgggagtcttcattgcgccagtgactaaaaagagaattaaatatgggtgatgttgagaaaggcaagaagatttttattatgaagtgt

SEQ ID NO: 112041 - DNA, 201 bp, Homo sapiens
aaaaggttacaaaattctaaactgattcttttcaaaagagaggtacattatggaatgtgttaaactcatagttccatttttaaaaaatgttaaccataatmtttttatttttaattcaatttcattttataattgacataataattgtgcatattcatcaggtacatagtgaagtttcaatacatataatgtatattgatc

SEQ ID NO: 112042 - DNA, 201 bp, Homo sapiens; identical to SEQ ID NO: 18664

SEQ ID NO: 112043 - DNA, 201 bp, Homo sapiens
gaacatatattcacaaaaaaagaaaaacttatgtaagaatacttatgaaaactggccaggcacagtggctcatgcctgtaatcccagcactttgggaggcygaggcaggcagatcacttcaggtcagaagttttagatcagcctggccaacatggtgaaaccagtctgtactaaaaatacaaaaaccagccaggcatggtg

SEQ ID NO: 112044 - DNA, 201 bp, Homo sapiens
ctcatataaagcccatgctctgagccccttgcagcagacacacctacgtagaacacccgtctccccttgctctccgcaccaaggattgctgcagcactctrtataagtttccttagtaaatgctttgaactggtcacctggccttcagtgcttctttctttagaaatctaaccagttccatctccagacgggttgagagac

SEQ ID NO: 112045 - DNA, 201 bp, Homo sapiens
acaggaaaaaaatgaaccttgatctcatgtcactcaatatacaaaaattaatttaagatggatcataaacctaaccataaaaaccaggactataaagtttytagaagaaaacatagaaaaatatctttgtgaccttaggagtccacgaacatttcttgaataggacacaaaatgcattaataaaatattaatagactggat

SEQ ID NO: 112046 - DNA, 201 bp, Homo sapiens
caaaaattagccagatatagtggtgcatgcctgtggtcccagctactcaggaggccgaggcaggagaattgccttaacctgggagttggaggttgcagtgmgccaagattgcaccactgcattccaacctgggagacaagagtgaaaaactcaatctcaaaaatataaataaataaataaaaacttttgtgcatcaaagga

SEQ ID NO: 112047 - DNA, 201 bp, Homo sapiens; identical to SEQ ID NO: 18665

SEQ ID NO: 112048 - DNA, 201 bp, Homo sapiens
cagcccgtcccattcacctgtgtatttatgcgagatccagcctcaggaggtacaagacccccacagggaggtcacctgggggcagctggtgcctggcgtcytcgcccagactgcactgggtccacagtgttgggggtttggggcccgtgtctcccaccagccactgcttcctcccgggctctcagcctcccacccctcgtc

SEQ ID NO: 112049 - DNA, 201 bp, Homo sapiens; identical to SEQ ID NO: 18666

SEQ ID NO: 112050 - DNA, 201 bp, Homo sapiens
aaataaatttgtatgtatgagtaaatacaaataaatttgtatgtatgagtaaataaatatgtaagattttatccaggcacagtggtgcatacctgaaatcycaacctcctagaggactacttgagcacaggagtttgaggtcagccttgacaacacagtgagtgcctctctctgtctctctctctgctccctccctcctcc

SEQ ID NO: 112051 - DNA, 201 bp, Homo sapiens; identical to SEQ ID NO: 18667

SEQ ID NO: 112052 - DNA, 201 bp, Homo sapiens
tggtatgatctcagctcactgtagcctttgcctcctgggtttaagtgattctcctgcctcagcctcccgaatagctggaattacaggtgctctccaccacrcccagctaatttttgtatttttagtagagacagggttttgccatgttggccaggctggtcttgaattcctggcctcaagtgatccacccacctcggcctc

SEQ ID NO: 112053 - DNA, 201 bp, Homo sapiens
ctgtagcctttgcctcctgggtttaagtgattctcctgcctcagcctcccgaatagctggaattacaggtgctctccaccacgcccagctaatttttgtayttttagtagagacagggttttgccatgttggccaggctggtcttgaattcctggcctcaagtgatccacccacctcggcctcccaaagtgctgggattac

SEQ ID NO: 112054 - DNA, 201 bp, Homo sapiens
tgcctcctgggtttaagtgattctcctgcctcagcctcccgaatagctggaattacaggtgctctccaccacgcccagctaatttttgtatttttagtagrgacagggttttgccatgttggccaggctggtcttgaattcctggcctcaagtgatccacccacctcggcctcccaaagtgctgggattacagatgtaagc

SEQ ID NO: 112055 - DNA, 201 bp, Homo sapiens
ctgtgtctctaaagatagctgcctcgagatcctgtactcagggaggtgtctgccagagaattcagaattcttaatttaacttattcctggagtttagagtrtattttgggaaatcacatcaatagaaagtgtattggatttatcatgaacttgaagaaatatctgagatttgaagtgttagaatcccaagggtgacttctg

SEQ ID NO: 112056 - DNA, 201 bp, Homo sapiens
ctgggtttaagtgattctcctgcctcagcctcccgaatagctggaattacaggtgctctccaccacgcccagctaatttttgtatttttagtagagacagvgttttgccatgttggccaggctggtcttgaattcctggcctcaagtgatccacccacctcggcctcccaaagtgctgggattacagatgtaagccaccac

SEQ ID NO: 112057 - DNA, 201 bp, Homo sapiens
gtttaagtgattctcctgcctcagcctcccgaatagctggaattacaggtgctctccaccacgcccagctaatttttgtatttttagtagagacagggttktgccatgttggccaggctggtcttgaattcctggcctcaagtgatccacccacctcggcctcccaaagtgctgggattacagatgtaagccaccacaccc

SEQ ID NO: 112058 - DNA, 201 bp, Homo sapiens
tttaagtgattctcctgcctcagcctcccgaatagctggaattacaggtgctctccaccacgcccagctaatttttgtatttttagtagagacagggtttygccatgttggccaggctggtcttgaattcctggcctcaagtgatccacccacctcggcctcccaaagtgctgggattacagatgtaagccaccacaccct

SEQ ID NO: 112059 - DNA, 201 bp, Homo sapiens
cctcccgaatagctggaattacaggtgctctccaccacgcccagctaatttttgtatttttagtagagacagggttttgccatgttggccaggctggtctygaattcctggcctcaagtgatccacccacctcggcctcccaaagtgctgggattacagatgtaagccaccacacccttgtttgtttatttttgagacagg

SEQ ID NO: 112060 - DNA, 201 bp, Homo sapiens
ccgaatagctggaattacaggtgctctccaccacgcccagctaatttttgtatttttagtagagacagggttttgccatgttggccaggctggtcttgaaytcctggcctcaagtgatccacccacctcggcctcccaaagtgctgggattacagatgtaagccaccacacccttgtttgtttatttttgagacagggtct

SEQ ID NO: 112061 - DNA, 201 bp, Homo sapiens
accacgcccagctaatttttgtatttttagtagagacagggttttgccatgttggccaggctggtcttgaattcctggcctcaagtgatccacccacctcrgcctcccaaagtgctgggattacagatgtaagccaccacacccttgtttgtttatttttgagacagggtctcattctgttgcctgagctggaatgcaatg

SEQ ID NO: 112062 - DNA, 201 bp, Homo sapiens
acacccttgtttgtttatttttgagacagggtctcattctgttgcctgagctggaatgcaatgggacaatcaccactcactgcagcctcaacctcctgggstcaagtgatcctcccacctcagcctcccaagtagctgagactacaggcgcttgccatggttttttgtttttgttttttttagagacgaggtttcgctatg

SEQ ID NO: 112063 - DNA, 201 bp, Homo sapiens
gcatgttctccccaggaacaaggaaggccatgatgttcctaactctctgatgagaatgctgcctgtctcctctagaactcaagccaccgggggtcagagcwgacgcagagtgtccaggcatgctggagtctgctgaacagctgctggtggaggacctgtacaaccgcgtcagggagaagatggatgacaccagcctctata

SEQ ID NO: 112064 - DNA, 201 bp, Homo sapiens
gcacttgcccagctgtggccctagactggctgaggcaggctcaccgtcacagtggtgacacacctttctagttccgactcttgcaaacaggtccctgcctyttcccgcaggagtgtggctgtgaacaaggggaggctgaagaggctgggaatcacccacattctgaatgctgcgcatggcaccggcgtttacactggcccc

SEQ ID NO: 112065 - DNA, 201 bp, Homo sapiens
gaggcaggctcaccgtcacagtggtgacacacctttctagttccgactcttgcaaacaggtccctgcctcttcccgcaggagtgtggctgtgaacaagggsaggctgaagaggctgggaatcacccacattctgaatgctgcgcatggcaccggcgtttacactggccccgaattctacactggcctggagatccagtacc

SEQ ID NO: 112066 - DNA, 201 bp, Homo sapiens; identical to SEQ ID NO: 18673

SEQ ID NO: 112067 - DNA, 201 bp, Homo sapiens; identical to SEQ ID NO: 18674

SEQ ID NO: 112068 - DNA, 201 bp, Homo sapiens; identical to SEQ ID NO: 18677

SEQ ID NO: 112069 - DNA, 201 bp, Homo sapiens; identical to SEQ ID NO: 18678

SEQ ID NO: 112070 - DNA, 201 bp, Homo sapiens; identical to SEQ ID NO: 18679

SEQ ID NO: 112071 - DNA, 201 bp, Homo sapiens
gtctcagatgcagaaacagaaagcattttcatggaacccattcacctctcctcagccattgcagccaaacagatcatcaatgaaggtaatgcaatcaaaakctgggtggaagcaaagtccagtggtcatctggagacccttagaggggggccattggaagacgtcaatgtgcctctcaggtgctgcccatcacgttaggaa

SEQ ID NO: 112072 - DNA, 201 bp, Homo sapiens
gtggggaagggcccattctactctatgtgagtgagtcagtccaaacctgaaatatcttgctccatcctgagtacaaactcctaaaaaaaaaaaaaaaaaaycctgataaattcaagttttgacctagaggaaagtagctagaatagtaagggaacatgagaagatgttcaaataatgtttgaaggactcaaaatagccagg

SEQ ID NO: 112073 - DNA, 201 bp, Homo sapiens; identical to SEQ ID NO: 18681

SEQ ID NO: 112074 - DNA, 201 bp, Homo sapiens
ggctgtcttaagagctgagaccttgcgtctagggagccagcctgatgcgaccccataggaaaggaggcagaggactttagcccctcttactctgacctccrtcaacctccccacaggccaaacccaaccaaaacccatagggaagagagttggtgtgtgcggtccattctgtcagccccatggggccccagggagagtggg

SEQ ID NO: 112075 - DNA, 201 bp, Homo sapiens; identical to SEQ ID NO: 18668

SEQ ID NO: 112076 - DNA, 201 bp, Homo sapiens; identical to SEQ ID NO: 18669

SEQ ID NO: 112077 - DNA, 201 bp, Homo sapiens
ttcctttagccctaggaactgcagagaacaaagacaaaaatatcaaatcctaaagttgctgtgaggaataacgttttaaaaatgcatataaaataactccyttgggacaacacctggcacaataaatgctttaaaaattatagccattgctataataatattgttaatgatttcctggaaagggcattgcctgtcaccacc

SEQ ID NO: 112078 - DNA, 201 bp, Homo sapiens
tgtgaaattatccttaagtttaaaaatgactgcacattaaaaggaacacgacttaattgcagtttttaaaaaacgttttacaggtttcagttgacggatgyaaaagataacttgagttcattgtgtgacatatcctcccatattgcaagtttatatggtatcagtaaagccccagtgacccaaacaagggtggggaagggc

SEQ ID NO: 112079 - DNA, 201 bp, Homo sapiens
agccaaacagatcatcaatgaaggtaatgcaatcaaaagctgggtggaagcaaagtccagtggtcatctggagacccttagaggggggccattggaagacrtcaatgtgcctctcaggtgctgcccatcacgttaggaagagcagatctgcagaaggcagttctgccaaccctacctcctcaactttgataggatggaagt

SEQ ID NO: 112080 - DNA, 201 bp, Homo sapiens
tttttttaattatttttactttttatttttagagacaggatgcagctctgttgcccaggctgctggagtgctcactatagccttgacctcctgggctcaarcgatcctcccacctcggcctcccaaagtgctgagattacaggcgtgaaccaccatgcctggccaaatacacatattttaaatatgtatatgtatgtgtgc

SEQ ID NO: 112081 - DNA, 201 bp, Homo sapiens
gacctcctgtgtgaccaagacatgaccttaactgctgcaaagatataatactgaaagagtcacctcccatctcatattgttagagaggatttttaactgawttagcaaacatccccaaagactgttggcaagtagattgatgagagcagggaggaaggtctccagtggtcccagtctgcattttaaacagctattacaatg

SEQ ID NO: 112082 - DNA, 201 bp, Homo sapiens
caccatgcctggccaaatacacatattttaaatatgtatatgtatgtgtgcgtgtaaattacatatatatatatatatatatatatatatatatatatatrtatatatatatatatatacagagagagagagaggtatgtatgtgtatatatacagacatgtatacacatatacatatatacacacatacacacactcaca

SEQ ID NO: 112083 - DNA, 201 bp, Homo sapiens
acccttgtttgtttatttttgagacagggtctcattctgttgcctgagctggaatgcaatgggacaatcaccactcactgcagcctcaacctcctgggctsaagtgatcctcccacctcagcctcccaagtagctgagactacaggcgcttgccatggttttttgtttttgttttttttagagacgaggtttcgctatgtt

SEQ ID NO: 112084 - DNA, 201 bp, Homo sapiens
tttctgtctctgacctcctgtgtgaccaagacatgaccttaactgctgcaaagatataatactgaaagagtcacctcccatctcatattgttagagaggayttttaactgaattagcaaacatccccaaagactgttggcaagtagattgatgagagcagggaggaaggtctccagtggtcccagtctgcattttaaacag

SEQ ID NO: 112085 - DNA, 201 bp, Homo sapiens
gcctggccaaatacacatattttaaatatgtatatgtatgtgtgcgtgtaaattacatatatatatatatatatatatatatatatatatatatatatatrtatatatatatacagagagagagagaggtatgtatgtgtatatatacagacatgtatacacatatacatatatacacacatacacacactcacatatata

SEQ ID NO: 112086 - DNA, 201 bp, Homo sapiens
tgtttgtttatttttgagacagggtctcattctgttgcctgagctggaatgcaatgggacaatcaccactcactgcagcctcaacctcctgggctcaagtratcctcccacctcagcctcccaagtagctgagactacaggcgcttgccatggttttttgtttttgttttttttagagacgaggtttcgctatgttgccag

SEQ ID NO: 112087 - DNA, 201 bp, Homo sapiens
attgcctgccatataaagacatactgagagtgtagagaattcaaatccaggcttgctcaagtctgatgctctccccagtagctgtactcttaaaaaaaaawtttttttttgaaggtcctttttttgagacagagtctcactctgtcacccaggatggaatgcagtaatgtgacctcagctcactacctccgcctcccagat

SEQ ID NO: 112088 - DNA, 201 bp, Homo sapiens
ttggtctcgtgattccacctccaaagaaaaccagtgagacttagagactagccacagtatatggtagcctggtcagagggtggaggggaggtccttgtaasggacagctaagccctgactgaggacgagaggagaaaaaagacaagtgcttctatagatgctccttataaggcttttacttgtttttctttttctttttta

SEQ ID NO: 112089 - DNA, 201 bp, Homo sapiens
ccagtgacccaaacaagggtggggaagggcccattctactctatgtgagtgagtcagtccaaacctgaaatatcttgctccatcctgagtacaaactcctaaaaaaaaaaaaaaaaaatcctgataaattcaagttttgacctagaggaaagtagctagaatagtaagggaacatgagaagatgttcaaataatgtttgaa

SEQ ID NO: 112090 - DNA, 201 bp, Homo sapiens
gcactccagtgtttcaaatacagggccagtggggattgtgatgtctcccatctgtaatatggggtcagtgatgctcagccctcctgtgtcttgagcccggatgaacttcagaggcaaagtaaacaccttaagtgcagcatattaaaacagcacttaccaaagaaaacaaacaaacaagaacactacaaggaagccactgtc

SEQ ID NO: 112091 - DNA, 201 bp, Homo sapiens
ccaggccagtctcaaactcctgatctcaagtgatccaccacctcggcctcccagggtactgagattacaggtgtgagccactgcacccagcctgtactttycaaattttaaaaacagggaccctcttcacaatcagccctgctggtaatcaaaatggtaactctgctaattagaaaaacactaccttcctcaaaccatttt

SEQ ID NO: 112092 - DNA, 201 bp, Homo sapiens
gggtggaggggaggtccttgtaagggacagctaagccctgactgaggacgagaggagaaaaaagacaagtgcttctatagatgctccttataaggcttttrcttgtttttctttttcttttttaagaaacagaatctcactctgttgcccaggttggagtgcactggtatgatctcagctcactgtagcctttgcctcctg

SEQ ID NO: 112093 - DNA, 201 bp, Homo sapiens
ggcttttacttgtttttctttttcttttttaagaaacagaatctcactctgttgcccaggttggagtgcactggtatgatctcagctcactgtagcctttrcctcctgggtttaagtgattctcctgcctcagcctcccgaatagctggaattacaggtgctctccaccacgcccagctaatttttgtatttttagtagag

SEQ ID NO: 112094 - DNA, 201 bp, Homo sapiens
ttggcgtgtgtgaggggtatctgtcttaagaaggctgttttctctaagaaaaggagaaaagacaggataatcattcatccagtaagtaattactgagtgcytagcaagtgccaactactattctaggcactgtggtgaaagacacaggcaacgcttccagcctttgactgttacactgtaagaggggacagaaaatgaaaa

SEQ ID NO: 112095 - DNA, 201 bp, Homo sapiens
ttttacttgtttttctttttcttttttaagaaacagaatctcactctgttgcccaggttggagtgcactggtatgatctcagctcactgtagcctttgccwcctgggtttaagtgattctcctgcctcagcctcccgaatagctggaattacaggtgctctccaccacgcccagctaatttttgtatttttagtagagaca

SEQ ID NO: 112096 - DNA, 201 bp, Homo sapiens
ctttaaatagatcttcagatacagaagcattcatcttacggtcactaagaacccaggcatcgccaggtatcctcagctaaaagcttttgttccttctcggrcaacctgtcctcagggcctcttcaaactaagctgcacttattcagctacagcaaaaagagctctgaactagaaatctaaaacactagttcttgttgtctt

SEQ ID NO: 112097 - DNA, 201 bp, Homo sapiens
caaggagtaatcagttgcctagaacttgatcctcagagctgggcaccaagtcttaagtgatctttaaatagatcttcagatacagaagcattcatcttacsgtcactaagaacccaggcatcgccaggtatcctcagctaaaagcttttgttccttctcggacaacctgtcctcagggcctcttcaaactaagctgcactt

SEQ ID NO: 112098 - DNA, 201 bp, Homo sapiens
cagttgacggatgtaaaagataacttgagttcattgtgtgacatatcctcccatattgcaagtttatatggtatcagtaaagccccagtgacccaaacaarggtggggaagggcccattctactctatgtgagtgagtcagtccaaacctgaaatatcttgctccatcctgagtacaaactcctaaaaaaaaaaaaaaaaa

SEQ ID NO: 112099 - DNA, 201 bp, Homo sapiens
tgaagaaagggggaattatgaattgggagggtatagcacaattgcctgccatataaagacatactgagagtgtagagaattcaaatccaggcttgctcaartctgatgctctccccagtagctgtactcttaaaaaaaaattttttttttgaaggtcctttttttgagacagagtctcactctgtcacccaggatggaatg

SEQ ID NO: 112100 - DNA, 201 bp, Homo sapiens
gaggcacttgcccagctgtggccctagactggctgaggcaggctcaccgtcacagtggtgacacacctttctagttccgactcttgcaaacaggtccctgmctcttcccgcaggagtgtggctgtgaacaaggggaggctgaagaggctgggaatcacccacattctgaatgctgcgcatggcaccggcgtttacactggc

SEQ ID NO: 112101 - DNA, 201 bp, Homo sapiens
atttcccagcatttccggaaggcgtctgagttcctggatgaggcgctgctgacttacagaggtgagagggatctgccgctccaggctgctggaattccackggggaaaagtaatgtggggaatgttatgaaaacctgattagttggcgtgtgtgaggggtatctgtcttaagaaggctgttttctctaagaaaaggagaaa

SEQ ID NO: 112102 - DNA, 201 bp, Homo sapiens; identical to SEQ ID NO: 18672

SEQ ID NO: 112103 - DNA, 201 bp, Homo sapiens; identical to SEQ ID NO: 18675

SEQ ID NO: 112104 - DNA, 201 bp, Homo sapiens; identical to SEQ ID NO: 18676

SEQ ID NO: 112105 - DNA, 201 bp, Homo sapiens
ggagggagagcctcatgtggccaaggtggctggaagaggtttatcagaggagaagctcctagaagaaccttggagggtagggggatctcagcagggagatwgtaggttggggtggggaagctgagccagggggaaaagcctgagcaagggcacagaagggtgttccaaatgtggtgcggttcacacatggccggaaggtga

SEQ ID NO: 112106 - DNA, 201 bp, Homo sapiens
ctctggatcattcaaatgtttccttacacatcattttgttggcctcttcatctcgcccttccttgcctaactgcatgtcttttctcccttttgctgaggcyaagtcatcaactctttctataatggtatttgcagtgatccccagacaaccaggggcagaaaaggaggcacttgcccagctgtggccctagactggctgag

SEQ ID NO: 112107 - DNA, 201 bp, Homo sapiens; identical to SEQ ID NO: 18680

SEQ ID NO: 112108 - DNA, 201 bp, Homo sapiens
gttactaatgctcctcatttcatgatagaccttcattgtttgtgtggttcttacattatatgtttatttattgccttttattctatatactcttcagttcytctctacgtcttcctccctttggcaacgatttgaatgtgttagatgtgcggtcttctattttctatgtccttgtaaaactagtagtgttgttttatgcat

SEQ ID NO: 112109 - DNA, 201 bp, Homo sapiens; identical to SEQ ID NO: 18682

SEQ ID NO: 112110 - DNA, 201 bp, Homo sapiens
gggtttcaccatgttggccaggctggtctggaactcctgacctcaagtgatctgcccaccttggcctcccaaagtgctgggattacaggtgtgagccaccrtgcccgggtcctggaatgtttcttatcaagtgtatggctgtctccatggccaagcataaatgtcaagttcttttgcatgcctataaatgttcttcatgat

SEQ ID NO: 112111 - DNA, 201 bp, Homo sapiens
tcttcaaaattgaagaaaaatatcccaaagtttagaactggatcacttggccctttctcttcttatctcctcccagttcaaaatgcttgcatctcttaatrgccagcatcctcttggatctgcagttaggctcaacacattccagccttagcacaatcttctttgtggtcttagccttcttccggaaaattggctttgtct

SEQ ID NO: 112112 - DNA, 201 bp, Homo sapiens
caatcttctttgtggtcttagccttcttccggaaaattggctttgtctgcccaccatagccactctgcttccgatcatagcgcctccttccctgggcatamaaagaatccttgcccttcttatactgtgtcactttgtgaggctgatgcttgccacacttcttacagaaggttcttcgggttttaggtacgttgaccatct

SEQ ID NO: 112113 - DNA, 201 bp, Homo sapiens
ctacagcctcgttcttagcttaccgagaaacagcgcccgacacctggcccttcgcagctctcgcctttcgcagctctcgcctaacaggaaagggaagaaasaggcggaagtgggaactgcacctgagcgacagtactgcaaaccaataggcagccggccacggcggtcaggcgccttcggtcgcgtctggaaagcaccaac

SEQ ID NO: 112114 - DNA, 201 bp, Homo sapiens
ataatgcccagctaatttttacatttttggggcctggtgtggcagctaacgcctgtaattccagcactttgggaggccaaggtgggtggatcacttcaggycaggaattcgagaccagcctggccaacatagtgaaaccctgtctctactaaaactgcaatcacgtgaacccgtgaggcggagattgcagtgagtccagcc

SEQ ID NO: 112115 - DNA, 201 bp, Homo sapiens; identical to SEQ ID NO: 18684

SEQ ID NO: 112116 - DNA, 201 bp, Homo sapiens; identical to SEQ ID NO: 18685

SEQ ID NO: 112117 - DNA, 201 bp, Homo sapiens
gcccaccatagccactctgcttccgatcatagcgcctccttccctgggcatacaaagaatccttgcccttcttatactgtgtcactttgtgaggctgatgyttgccacacttcttacagaaggttcttcgggttttaggtacgttgaccatctttgcagcagggctgttttgtctatatgatgaaaactgtagtaaaatat

SEQ ID NO: 112118 - DNA, 201 bp, Homo sapiens; identical to SEQ ID NO: 18686

SEQ ID NO: 112119 - DNA, 201 bp, Homo sapiens; identical to SEQ ID NO: 18687

SEQ ID NO: 112120 - DNA, 201 bp, Homo sapiens; identical to SEQ ID NO: 18691

SEQ ID NO: 112121 - DNA, 201 bp, Homo sapiens; identical to SEQ ID NO: 18692

SEQ ID NO: 112122 - DNA, 201 bp, Homo sapiens; identical to SEQ ID NO: 18693

SEQ ID NO: 112123 - DNA, 201 bp, Homo sapiens; identical to SEQ ID NO: 18694

SEQ ID NO: 112124 - DNA, 201 bp, Homo sapiens; identical to SEQ ID NO: 18695

SEQ ID NO: 112125 - DNA, 201 bp, Homo sapiens; identical to SEQ ID NO: 18683

SEQ ID NO: 112126 - DNA, 201 bp, Homo sapiens
actctgtgcttcattactcctctatagagcccatcaacttccttacctttgcattaatttgaatcttattatcagtaacttgaagaacttcaattaatggyggggtcaaggacatagactgtttgaatggagagctcaggacctcttcaagaaactcattaacattttcttcattgacaaataacctttcctaaaataaaa

SEQ ID NO: 112127 - DNA, 201 bp, Homo sapiens; identical to SEQ ID NO: 18688

SEQ ID NO: 112128 - DNA, 201 bp, Homo sapiens; identical to SEQ ID NO: 18690

SEQ ID NO: 112129 - DNA, 201 bp, Homo sapiens
tggaaagcaccaaccaacggtctaaggggcgggccggaggggtgtgggccggagggccgcggtgtgccgcggggcagttgcgggttgtcataacggtcccygccggagtgaggcgaggccgcgtcgctcagttctggccgtctagggcccctgtaaggatgagagcgcagaggacgcagggccgctggaggcgcaggtaac

SEQ ID NO: 112130 - DNA, 201 bp, Homo sapiens
gaatccaggtatattgtgaaccgtagttttgttcagtaatgaagataggtgatctccatctgtttctttctcttcagttattactgactcgtttaagttayctttttcctcatttgaacaagtagcacttttttcttttataaattcagattgcatttttgactcaggttgctgagattttccaagtatcatttgagaaac

SEQ ID NO: 112131 - DNA, 201 bp, Homo sapiens; identical to SEQ ID NO: 18696

SEQ ID NO: 112132 - DNA, 201 bp, Homo sapiens
ttcaggtagacagaatataattaggtctaaaatagattctattagtggggcatagtggcatgtgcctgtagtcctgggtactcaggaggatgaggtgggaygaacacctgacaaaaacaacccaactcaaaaatgagcaaagaacttccacagacattttccaaagaagttatacaaatgaccaaaaaaacatgaaaagat

SEQ ID NO: 112133 - DNA, 201 bp, Homo sapiens; identical to SEQ ID NO: 18697

SEQ ID NO: 112134 - DNA, 201 bp, Homo sapiens; identical to SEQ ID NO: 18698

SEQ ID NO: 112135 - DNA, 201 bp, Homo sapiens; identical to SEQ ID NO: 18699

SEQ ID NO: 112136 - DNA, 201 bp, Homo sapiens
cccctctgctctcaactcagtcttacggtctcttacacctggtgaaactgctgtgccccttgcagactgattttctgaggatgaagaagacgacaaggtcycactgataaacgctttctttccccaccctcagctctacctgagcatcgtactgtccgtcgtggtcatcgtcactggctgcttctcctattatcaggaggc

SEQ ID NO: 112137 - DNA, 201 bp, Homo sapiens
ttgctatggctgttcctcttttcacagctctctatccaaccctatttcttctctgcacagggccatagccaccaaagggcaaaggaaatcctgactcgagrtggacccaatactgttaccccaccccccaccactccagaatgggtcaaattctgtaagcaactgttcggaggcttctccctcctactatggactggggcc

SEQ ID NO: 112138 - DNA, 201 bp, Homo sapiens
ctatggactggggccattctctgctttgtggcctacagcatccagatatatttcaatgaggagcctaccaaagacaacgtgagtctcttcagctactactrgccagccctatctctgcttagccccagacactcttttgctcagcagcctagcactcctgaagtcctctggcccaaatccctaattacattattacattaa

SEQ ID NO: 112139 - DNA, 201 bp, Homo sapiens
cctggaaatgacctgggccaccccctgtccctcaatgcctctactgtcccctcaggatgatcacaaattaaccttggaagagctgagcaccaagtactccrtggacctgacaaaggtgagtaagaagctccctgaggaggcagagagtctccaactctgactgtgaggctgccaggacaaaagctgaactaggaatccagc

SEQ ID NO: 112140 - DNA, 201 bp, Homo sapiens
ccaactctgactgtgaggctgccaggacaaaagctgaactaggaatccagccccctaacttcaagtccaacgttcccacccctcaccctctgcctggccamgttccatggacactacctggaaaaagctgcaaatggtaactaccctcaaagagagtgtgggactagataagagaataagaatgctttagggcagtgctgg

SEQ ID NO: 112141 - DNA, 201 bp, Homo sapiens
aagaattaggtacctctccgtccatgtgattcaaaataaaagcaaaacatattcacaacatttgttggggcatccaacaaatagtgactttctctcagatgactatgttgctgcctcttccgagctaccaaacatgcggctcaaatggcagacttgtcctcagtggttcaccgagtgtgacaggctgtcccactggccgcc

SEQ ID NO: 112142 - DNA, 201 bp, Homo sapiens
gcttaagcatattttgaatgtaactgaacaaacgaacagaacagttgtaaccacgttttgtgcactggtttcccaccctgcttaccctgtgggcagtacartctggcctcctctgcactcccgctgttcctttcaatgcatcgattttgttctcaacaggcgacctagcgggcatttcctgtccatcacaagaggaacccc

SEQ ID NO: 112143 - DNA, 201 bp, Homo sapiens
ctacttctatgtaaccttaactaattacgtgtgttcgtgttcgtgaagtttttcatttcccaggaacattttggtccactctccggggaggagtggacaasagcaggggaaatgctgagtgagggaccatgaagggacaggaaagagtctttctctccaaagtagaatctgggcagactgaagagaaggttatggtaggat

SEQ ID NO: 112144 - DNA, 201 bp, Homo sapiens
gataaatacttgaatgacctggaggacagctacggacagcagtgggtgagtagaagggataaggtaggagctgagaccagtaagagtgagagtgacagggragagtgagtgcagcaaattttttaagagagaagaagggaagcaccacacaaacagagctgatgccttttcttcagtcctgtatgagccttctcacacttg

SEQ ID NO: 112145 - DNA, 201 bp, Homo sapiens
ggcaacaagagcgagacttagtctcaaaaaaaaaaaaaaaaagaatgaggacctgactcagcccaggggtcctggaaggtgggagaggaaagaagccttasggtgtacagaatccccttctgacactgtctcctctctccctgctgtctctagacctatgagcaacgaaaagttgtggagttcacatgccaaacggccttt

SEQ ID NO: 112146 - DNA, 201 bp, Homo sapiens
aggaaaccatagcagaaggaataaaatagaagaactagactaaaccatgacacaagatatatgtaggtgacaccatacactacccaccctcctccacccgrcccaaaataggaaactcctcagcatctctcaagtatttcagcatcttcattccataggacccaatatatgcctttggcaaccagtttgaagcccatctat

SEQ ID NO: 112147 - DNA, 201 bp, Homo sapiens
aaggagagtcatctgtgctctgataagtggatcttatttagggagatattagagactgtgccaaatgatcacaacccactagacacacaaatttagcagayttaccagtgtttaacagagtgaaatctttttcgtgatgatgtgtgctgtagttgtccaaggatacatattgcttggagctgaagtaaccataaaaatagc

SEQ ID NO: 112148 - DNA, 201 bp, Homo sapiens
gcccaggatttccttctctttttggtatcacttaattccttccttgggtaagagttttgggacaaagtgtttgggcagttttggagactaggagtttaggsatggtcggttagcttttgctacctaacaaactaccctaaaacttagtggcttaaaatagcaagctcctgtttctcataattctgtggctgtgctgttgtt

SEQ ID NO: 112149 - DNA, 201 bp, Homo sapiens
ttttatactgacattctcaaacatcgcaggattaaccaggcccaaccctgctaattttcagagatcagataacgttagctagggtgaatctaagaacaaasagtacacagacggcatggctctgattaaaaggcacacaatttagaaacaatactgggaccctggaggtctaggacctccagaccctttcctggactgtga

SEQ ID NO: 112150 - DNA, 201 bp, Homo sapiens
ggcttatcaagaaaaaaatggtgaagagggaaaaacagaagcgcaatatggaggaactgaagaaggaagtggtcatggtgaggccacccaaagtgggcgcygacagctgccctctgaaaacactcctccacctatctttaacatcttaccttgagaatgaaacacacaggccagagccacatctcttctctgttaggcttt

SEQ ID NO: 112151 - DNA, 201 bp, Homo sapiens
acaggccagagccacatctcttctctgttaggctttggagggaaggagagggttaaaaaaaaaaaaaaagatacacacagagagacagggcagctcaacarcaagcacaggtatattgcagacacctgtggaagtgggggatcagcttaattccacagtccactgccacttacaggctgggtacttatagggatggatggg

SEQ ID NO: 112152 - DNA, 201 bp, Homo sapiens
tgataagtgagctgagtgaggttggtgatgagggggtcaaggtactgtatcagtccttaaaagtacctggaaaagctgtgaaaccctgagaaagacataaygtcacctatgaagtgctctgatctagaaggcagaatctgaatctaaagaggaaacaccatacaaaccccaaataagaacattctatttttttaaagagac

SEQ ID NO: 112153 - DNA, 201 bp, Homo sapiens
ttgagctcgggcagctctttctggggatagctatggggctttgggggaagaaagggacagtggctccccatgaccagagtccaagacgaagacctaaaaargggcttatcaagaaaaaaatggtgaagagggaaaaacagaagcgcaatatggaggaactgaagaaggaagtggtcatggtgaggccacccaaagtgggcg

SEQ ID NO: 112154 - DNA, 201 bp, Homo sapiens
ctgtctccagcacccagcacagtcccacgcacacagtagacacaagcaatgaaacgtgcaattcctgtgcattgccctctgcacctgtcctctggcatctstctctcctgccatgctgactggctcttgctctctacaggataacctggtggctctgtgccattccctacagtattctcatcttcgtctatgatgaaatca

SEQ ID NO: 112155 - DNA, 201 bp, Homo sapiens
gtcaccatcgtggttgtgcagtgggcggatctcatcatctccaagactcgccgcaactcacttttccagcagggcatgaggtgaacatctcacaaaacagyccagcactctcccaagccccacacaccaggacatgccatttccccctgccttttcttctccctccccgccacacccatgaatgtttcttcccagaaacaa

SEQ ID NO: 112156 - DNA, 201 bp, Homo sapiens
ccgagatcaagccactgcactccagcctgggtgacagagtgagactccgtctcaaaaaaaaaaaaaaaaattgcaaaaaattagctgggcgtggtggtgcrcacctgtaatctcagctactcaggaggctaaggcatgagaatcgcttaaatccgggaggcagaggttgcagtgagccgagattgcactccagcctgggca

SEQ ID NO: 112157 - DNA, 201 bp, Homo sapiens
gccttagggtgtacagaatccccttctgacactgtctcctctctccctgctgtctctagacctatgagcaacgaaaagttgtggagttcacatgccaaacrgccttttttgtcaccatcgtggttgtgcagtgggcggatctcatcatctccaagactcgccgcaactcacttttccagcagggcatgaggtgaacatctc

SEQ ID NO: 112158 - DNA, 201 bp, Homo sapiens
ttctatgcatgtctctactctgctcacctttccatcccttgtaatgttttacacgatgttttatacaatgtaggcactcaattaatgtttaataggagacrttggcactggccttagacactcacaatccaaggtggaaatctcaactctactatgtattattctgtggccttggacaagtatggaaccattctgagcctc

SEQ ID NO: 112159 - DNA, 201 bp, Homo sapiens
tctgggccagccctgtccttccctgcattcccaagttaggagtgctgagtgaagcaaaggaaactggctggagctgagccaggttgccagtcttggacgcrgctccatcttttattcagagaatgacctcatccttggtcctggttctttaaaagaaagtggagggggtctctttcctgcagcctggcttgcacttttatc

SEQ ID NO: 112160 - DNA, 201 bp, Homo sapiens
aaaaaaaaaaaaagaatgaggacctgactcagcccaggggtcctggaaggtgggagaggaaagaagccttagggtgtacagaatccccttctgacactgtytcctctctccctgctgtctctagacctatgagcaacgaaaagttgtggagttcacatgccaaacggccttttttgtcaccatcgtggttgtgcagtgggc

SEQ ID NO: 112161 - DNA, 201 bp, Homo sapiens
cgagatgtgactggggaggggagggaacaaaagaaatgggggtatgaaacacatttttttacctttgaaaccttccccttctttttgcccctgatccttgrtctctcctcctgtcccatcagtgctccctttgctctccctagatgtccatccaccttcgggaggacagctcccagacccacgtactgatgatgaagggtg

SEQ ID NO: 112162 - DNA, 201 bp, Homo sapiens
agtagagacgtggtttcaccatgttggccaggatggtctcgaactcctgacctcaggtgatccacctgcctgtgcctcccaaagtgctgggattacaggcrtgagccaccacatccggccttcttccaacacatttctatgcatgtctctactctgctcacctttccatcccttgtaatgttttacacgatgttttataca

SEQ ID NO: 112163 - DNA, 201 bp, Homo sapiens
ccctggtgtcaatacctgatcctctttgtcttgtcaaagacatgggaataaatagtagctattcactctccttggaagcatgcagcctgggaaaacctccyttcccactgtgccccagaaaaccgagtcccataggatcagggtagggagtgcacacacaggtggcaaccaaaggacagaccccttctcattgtgggcttt

SEQ ID NO: 112164 - DNA, 201 bp, Homo sapiens
aggagacactcttggctgcatttctgtcctacactccaggcatggacgtggccctgcgaatgtacccactcaagtgagtaagggaagggatgcaagcaggrgatgtgcaggcacgggggagcatacagaggaagggtgtgtttcactaggattgtcatgagccaggagctgcctggatacatggagctacatgtacactca

SEQ ID NO: 112165 - DNA, 201 bp, Homo sapiens
aaatgaaggaagccttccaaaatgcctatttagaactgggaggtctgggggaacgtgtgctaggtgaggagctttgggagaagtttttaaaagaatggcaycaaaatggttattatctgtggggtgagaaatcaaggatgttggggtaagcagataggaatgtagagtgctggatgactactggtccctccctctgtctct

SEQ ID NO: 112166 - DNA, 201 bp, Homo sapiens
ggcagggtgcagtggctcacgcctgtaatcccagcactttgggaggccgaagtgggcggatcacttgaggttgggagttgagaccatcctggccaacatgragataccccgtctctactaaaaatacaaaattagccgggcgtggtggcgcatgcctgtaatcccaaccactcgggaggctgagtcaggagaatcacttga

SEQ ID NO: 112167 - DNA, 201 bp, Homo sapiens
aatgtttcttcccagaaacaaagtcttaatatttgggatcctggaggagacactcttggctgcatttctgtcctacactccaggcatggacgtggccctgygaatgtacccactcaagtgagtaagggaagggatgcaagcaggggatgtgcaggcacgggggagcatacagaggaagggtgtgtttcactaggattgtca

SEQ ID NO: 112168 - DNA, 201 bp, Homo sapiens
gcagtgcctgatgctgtgagcaagtgtcgcagtgcaggaattaaggtaaatacttgcccagaccaggagcccctcacctgtcacaagttgaagcatctacyagaaggccttgcgcagagtagatgcttaatacccttagtttaattgagcggatttctgtttccttgggcttatgatttttaattaatagtaagtttcctc

SEQ ID NO: 112169 - DNA, 201 bp, Homo sapiens
caaaatgcctatttagaactgggaggtctgggggaacgtgtgctaggtgaggagctttgggagaagtttttaaaagaatggcatcaaaatggttattatcygtggggtgagaaatcaaggatgttggggtaagcagataggaatgtagagtgctggatgactactggtccctccctctgtctctctccaggcttctgcttc

SEQ ID NO: 112170 - DNA, 201 bp, Homo sapiens
gcaggaattaaggtaaatacttgcccagaccaggagcccctcacctgtcacaagttgaagcatctactagaaggccttgcgcagagtagatgcttaatacycttagtttaattgagcggatttctgtttccttgggcttatgatttttaattaatagtaagtttcctctccagttagaattctacttgcattgaacattag

SEQ ID NO: 112171 - DNA, 201 bp, Homo sapiens
gtgtgtaaagccaaacatgatgtccaagctgcccttctgactggggcagtgctggtggagaggaaagagggacctcataagcacagaagcccagctgttatggcccgtgctacccagcagaggtcagattggctccagccagcaaagcagggagggggcgcaagttacagcaggatttctcaaccactcacatttggggct

SEQ ID NO: 112172 - DNA, 201 bp, Homo sapiens
ccctatcagcaaggtcgatgccaggtgagatcactaaagaactcaagatctgccatgttccctccatccccagcctgccccacccagatgccactttactraagttcttggagtctccttcaataggtaggatgtgtggggtttacactacaaagtaaaacataataggaaaataaagtgaatatgtcagtgggttttcaa

SEQ ID NO: 112173 - DNA, 201 bp, Homo sapiens
cttcagaacaaacccagaggtagaaaatcctctttggtcagggtgggccttgaacttcatgggatggcagcagtagaattcttcaaattctgaggtgttckgtgtcccatgtttcccaggtcaaattctaagactcatcatatacatctttacagcttagatatagacaccttccgtgctcataccttacattctggatta

SEQ ID NO: 112174 - DNA, 201 bp, Homo sapiens
acatgtgggctgggctagaggagactccagagagtaccccatctggaacctccatggtggccttcagtttggggctccctgaaagtttaaatatctcaggrggagtgggagaaggacgggagccctaaatcaagcatgattacatcaggaaacaagggatgcagaaagcgtactgatctttgggactagttctggatctga

SEQ ID NO: 112175 - DNA, 201 bp, Homo sapiens
catgtgggctgggctagaggagactccagagagtaccccatctggaacctccatggtggccttcagtttggggctccctgaaagtttaaatatctcaggasgagtgggagaaggacgggagccctaaatcaagcatgattacatcaggaaacaagggatgcagaaagcgtactgatctttgggactagttctggatctgat

SEQ ID NO: 112176 - DNA, 201 bp, Homo sapiens
tggtatacataatatcgtcattgtcctctcactggacttcaagtaggcccacagccagttccaagatgtagccacacccctgggactattccatgcgctgyaatctttaggagggtcccctaggaacctgttgcctaaataatggtgacacatcaggatcagctggagcttgacccgtgaattgactgcatgagcccaatt

SEQ ID NO: 112177 - DNA, 201 bp, Homo sapiens
acatcagagatcaagaggaaatgcaaaacccacatttctctctccttgctgcgggttgtcccctcgggttcatttcatgaatgtgccctttccctcccccmccacagccacaaggactcccatgcccaaccacactagctagcccctctcaggagacttctcacgcttttaggagacagaggcccagggactagaatgact

SEQ ID NO: 112178 - DNA, 201 bp, Homo sapiens
gaaactcttaccataaagcacaaaccacaatcactttcctaatttcctttaccacagccagaaatgaaatgtgtaaagagtaggtgggaacaaaagggaartaagtacaaaaaatcaaaatagcattaaaaatgatcaaatatccacaatgcaaaatggtgtgagtattccatctcccatgtgtattctctcctctcttct

SEQ ID NO: 112179 - DNA, 201 bp, Homo sapiens
atgcaaagatcctgagggagcagaatattccaggggggaataaagaggatccctgtctatgataccctggtaaagaaatacactcttttttggccaggcayggtggctcacatctataatcccagcactttgggaggccaaggcacgcagatcacttgagcccaggagttcaagaccagcctggccaacatggtgaaaccc

SEQ ID NO: 112180 - DNA, 201 bp, Homo sapiens
ccattccccaatcccccctcccacttgagcccctaactcagaatctgggacccaggggcccctccctaccccagctaacctcttctggaccaggagagccmacccagatcccactacctccatgagtgctacagacaggatggggcccagagctgtgccgggtctgcggctggcactgctgttgctgctggtgctagggac

SEQ ID NO: 112181 - DNA, 201 bp, Homo sapiens; identical to SEQ ID NO: 18708

SEQ ID NO: 112182 - DNA, 201 bp, Homo sapiens
ctgcatcccaattaacggaagactcacatcaagagaacgtgacaaacaggtaaagagaggcgaaacaggtgataaagggagaggcatcagtcagtcctatrcagagatctgagctctgccacttggggaaaaagcgagtcataaaatcctctctgaaatgtctgtagacagcagaagctggttggtgaaagtcatgttaga

SEQ ID NO: 112183 - DNA, 201 bp, Homo sapiens
tccacaatgcaaaatggtgtgagtattccatctcccatgtgtattctctcctctcttcttggctttaggtgtgcctgaccctcacagccaagcgcatggcrcggaagaactgcctggtgaagaacctggaggcggtggagacgctgggctccacgtccaccatctgctcagacaagacgggcaccctcacccagaaccgca

SEQ ID NO: 112184 - DNA, 201 bp, Homo sapiens
ttgtttaaactattggtctgccgggcgcggtggctcacacctgtaatcccagcactttgggaggccaaggtgggcggatcacgaggtcaggagatcgagaycgttctggctaacacggtgaaaccccgtctctactaaaaatacaaaaaaaaaattagacaggcatggtggctggcgcctgtagtcccagctacttgggaa

SEQ ID NO: 112185 - DNA, 201 bp, Homo sapiens
ccatctctactaaaaaatacaaaaaaatcagctgggtatggtggcgtgtgcctgtagtctcagctacttagaaggctgaggcacgagaatcgcttgaacamaggtggtggaggttgcagtgagctgagattgcaccgctgcactccagcctgtcaaaagaaagaaagagagaaagaaaggaaggaagaaaggaaagagaga

SEQ ID NO: 112186 - DNA, 201 bp, Homo sapiens
aatgcagatctggcttcagaaggtccatggaaacctgagagactgcatttttaacgagctcccaggcgatgctgttgctgctggtctgcagaccacactakgaatagcaaagtgctagaagatgtcgtgtaaatgtgctgccgagatgggcggtaaaagggtgaggctaggagggctggggctctggaccaggcaatagtg

SEQ ID NO: 112187 - DNA, 201 bp, Homo sapiens
acaggaaaggacttcaaagatcatataaattcaacctttcaaccagtgctgaatatcctctataaaacccatgggagatgattattatttctattaattgrgaagcccacccctttctgtctcaattcgtttcattgttgtcttgctctatttacatttcactgtgttaagcagaactataaatccctgtttgtcctaagt

SEQ ID NO: 112188 - DNA, 201 bp, Homo sapiens
ttgctgctggtctgcagaccacactaggaatagcaaagtgctagaagatgtcgtgtaaatgtgctgccgagatgggcggtaaaagggtgaggctaggaggsctggggctctggaccaggcaatagtgagaatgagatattgagagctgaaggatcttcaatgggtgtgagcagctgccctaagaggtatatgcccaggtct

SEQ ID NO: 112189 - DNA, 201 bp, Homo sapiens
tggagtcttttaagaacatggtgcctcaggtaggattggagtgggaggatctagtgggagcaggagcaggatgtggccaaatacacaatgatgaagtcccrtggaaaattatatcctatgataagtgagctgagtgaggttggtgatgagggggtcaaggtactgtatcagtccttaaaagtacctggaaaagctgtgaaa

SEQ ID NO: 112190 - DNA, 201 bp, Homo sapiens
acaacgcgtcccctctcccatcccaggtggacaactcatccttgactggggagtcagaaccccagagccgctcccctgacttcacccatgagaaccctctrgagacccgaaacatctgcttcttttccaccaactgtgtggaaggtgaatatcgaaccataagtagcatagattcaaaagcaggcaccaaaacataaagat

SEQ ID NO: 112191 - DNA, 201 bp, Homo sapiens
ccaccaactgtgtggaaggtgaatatcgaaccataagtagcatagattcaaaagcaggcaccaaaacataaagattttaataactgtcttctaaaggtagygaggtaggtaagagccagtaaaaagtcgagcttctccatcacgagctgtatgacctctggtgaaaggtcaaggtcatcatttccacattcgcacaatgat

SEQ ID NO: 112192 - DNA, 201 bp, Homo sapiens
gtagcgaggtaggtaagagccagtaaaaagtcgagcttctccatcacgagctgtatgacctctggtgaaaggtcaaggtcatcatttccacattcgcacartgatgacagtaaaagtcgttactctgtagattttcgtgtgaattgagataatatatgtaaaatgcccagcacaagacctaatacattgtaagtgacctac

SEQ ID NO: 112193 - DNA, 201 bp, Homo sapiens
caccctcaagtaggccttggtgtctgtttttccccttctttgtgtccatatgtactcagtgtttagcttccagttataagtgagaacataaggtatttgaytttctgttcctgttagtttgcttaggacaatgtcctccagctccaccaaagataatgcgttaaaggatgtattgggtcaattggcaaaactggaatactg

SEQ ID NO: 112194 - DNA, 201 bp, Homo sapiens
tttgttttgctttgcattaacattagtatatgcttgatgtggaaaaatttatatttaaaaatgtacagagaaaaaagcaaatgttccattccactcccatycccattacccaacccaacttgcataggtagcctcagttaaggatttagtatgtattcttccaacacatttctttattttattttattttttattttgaga

SEQ ID NO: 112195 - DNA, 201 bp, Homo sapiens
tccagagagtaccccatctggaacctccatggtggccttcagtttggggctccctgaaagtttaaatatctcaggaggagtgggagaaggacgggagcccyaaatcaagcatgattacatcaggaaacaagggatgcagaaagcgtactgatctttgggactagttctggatctgatgcaataaattgttcactctctctg

SEQ ID NO: 112196 - DNA, 201 bp, Homo sapiens
ggtgattggcaggttctactatcattttcattaacaggaaaaagcacataagcttgtgcacaagagtggaatgagaatctatgcattcatgttttttgttrgtattcttttctatttatgttttttaaaaatttatgggccaggtgccgtggctcacacctgtaatccaaggcaggcagatcacttgaggtcagtagttgg

SEQ ID NO: 112197 - DNA, 201 bp, Homo sapiens
taccaacaagtaccaggtacagaacccacaaaggtaggagaatggtggtggggggatgggcttatcactggaacaaggggagctttgcctctgccttcaayttcacctcggagcagcagaggagctcagcagaacctgcatcccaattaacggaagactcacatcaagagaacgtgacaaacaggtaaagagaggcgaaac

SEQ ID NO: 112198 - DNA, 201 bp, Homo sapiens
aattcaataagttcgtttgaacactgactatgtgggaggcactatgcttgatgctggggatacaacagtagggagaacaaagacacaaatccctgccctcrtgtaacttaatttctagtggggatgacaaacaataaaataattaaattatatagtatgttaaaagaagataagtgccatgggacagaccaagcagagagt

SEQ ID NO: 112199 - DNA, 201 bp, Homo sapiens
caggtacagaacccacaaaggtaggagaatggtggtggggggatgggcttatcactggaacaaggggagctttgcctctgccttcaacttcacctcggagmagcagaggagctcagcagaacctgcatcccaattaacggaagactcacatcaagagaacgtgacaaacaggtaaagagaggcgaaacaggtgataaaggg

SEQ ID NO: 112200 - DNA, 201 bp, Homo sapiens
gggtgcccaaggtcacagctagctatggcagaagatgggatttgaacacaagcctgtcccaagccctggctgtttccattccagccttaatcttgtaaagkcttttatactgacattctcaaacatcgcaggattaaccaggcccaaccctgctaattttcagagatcagataacgttagctagggtgaatctaagaacaa

SEQ ID NO: 112201 - DNA, 201 bp, Homo sapiens
aacatcgcaggattaaccaggcccaaccctgctaattttcagagatcagataacgttagctagggtgaatctaagaacaaacagtacacagacggcatggytctgattaaaaggcacacaatttagaaacaatactgggaccctggaggtctaggacctccagaccctttcctggactgtgacacttctttgaggtggcct

SEQ ID NO: 112202 - DNA, 201 bp, Homo sapiens
ttctgcctcctaagctccctgctttctgcctggagctatcttactaaaactcatgacaacccacttatgatccagctctcgcacctcctgcaagatggatygaggctgcgtcaagacagaatggtagagcttgaattactgctgggtttccttctgaactttgtgacccctgtcatccccaccctccatcctccaggtccc

SEQ ID NO: 112203 - DNA, 201 bp, Homo sapiens
ggggatgggcttatcactggaacaaggggagctttgcctctgccttcaacttcacctcggagcagcagaggagctcagcagaacctgcatcccaattaacrgaagactcacatcaagagaacgtgacaaacaggtaaagagaggcgaaacaggtgataaagggagaggcatcagtcagtcctatgcagagatctgagctct

SEQ ID NO: 112204 - DNA, 201 bp, Homo sapiens
aaaatcctctcctggagctcagtaatttccccccaggtacccgccctccccatttgtcccctctccatgttgccacaggtatgcctcatgcccaggtagcrtgcccctggggcttactatacaaaccccatcctggcagagggccacaacaggtgatgcttccgagtcagccctcctcaagttcatcgagcagtcttacag

SEQ ID NO: 112205 - DNA, 201 bp, Homo sapiens
acctgcatcccaattaacggaagactcacatcaagagaacgtgacaaacaggtaaagagaggcgaaacaggtgataaagggagaggcatcagtcagtcctrtgcagagatctgagctctgccacttggggaaaaagcgagtcataaaatcctctctgaaatgtctgtagacagcagaagctggttggtgaaagtcatgtta

SEQ ID NO: 112206 - DNA, 201 bp, Homo sapiens
tcccccttttgtcctatattatcaatttagcctctgacccagttagctcctcctctccactgcatttaacttctaattacccttgccccaccctcggcccwccctaattacccttatacctcccctcccccagccccagcttcatttacctccgactcatctggtcttatttttagctccggcatctctccttttcctttc

SEQ ID NO: 112207 - DNA, 201 bp, Homo sapiens
ggaggctgaggtaggaggattgcttgagcacggaaggcagagattgcatgccattgcactccagcctggtgacagacagagacgctgtctcaaaaaaaagmcagggacgtggcaactaaatgcaatatctaaccctagatctgattctgtgccagaggagaaagtaatgctttatttttacttttttattttgagctttta

SEQ ID NO: 112208 - DNA, 201 bp, Homo sapiens
cgtgcctgtagtgccagctactcaggaggctgaggtaggaggattgcttgagcacggaaggcagagattgcatgccattgcactccagcctggtgacagasagagacgctgtctcaaaaaaaagacagggacgtggcaactaaatgcaatatctaaccctagatctgattctgtgccagaggagaaagtaatgctttattt

SEQ ID NO: 112209 - DNA, 201 bp, Homo sapiens
tttttcaaaacaaaaaaattagcagcatcttacatttttgcaaacctcttcaatgtcttgctttttaatagaagatagctggattctcaaatattttctgkataaaatctgttgtgatgttatgccagttggccttcagaaaattccactatatactcttaagaaaatgagagtaaaaaaaggcaaacaatgatttagtat

SEQ ID NO: 112210 - DNA, 201 bp, Homo sapiens
aggcaggagaaacacctgttgggaggcagaggttgcagtgagtcgaaatcgcaccactgtacaccagcctgggcaacagagtgactccatctcaaaaaaaraattgcagggagcttacaaaatggagcagtctcagtttggactaacattctccagtctgtttctccccctctccctggaaatgacctgggccaccccctg

SEQ ID NO: 112211 - DNA, 201 bp, Homo sapiens
ccagggaaaagggatcactagcgtctcttttgttgttgaacctttcaagtgcagggtcttcctgatatgtaaataggtatcaggaataatttagctctcawtattacactgactccttctgcccatatatttcggtgtcttctctttcctcaatgagagaggaagcaagtttcaatggaaagtgcattggattatcagtca

SEQ ID NO: 112212 - DNA, 201 bp, Homo sapiens
tggtgaaaggtcaaggtcatcatttccacattcgcacaatgatgacagtaaaagtcgttactctgtagattttcgtgtgaattgagataatatatgtaaartgcccagcacaagacctaatacattgtaagtgacctacaattattagctattattttagcttgtgaatggactatgctgtttaagctgaaaatggcacag

SEQ ID NO: 112213 - DNA, 201 bp, Homo sapiens
cctcttaatgggaagagcgtcaaagtcacattgcaaagggccctgcaaacagcatcatgggaatttgcaatctgccaaagacaccttcaagaatgatgtgrtgggtgacagtaagaaaggggagtaaggaggagggagaccaataacagaaggttttaggctaagagtgggatgaggaaagccaaaagttttggaaatgat

SEQ ID NO: 112214 - DNA, 201 bp, Homo sapiens
ctccctatgttgcccagtctggtcttaaactcctgggttcaagcaatcctcccacctcggcctcccagtgtgctgggattacaggtgtgagccaccagtcmcggcctgaaagcactttttaaactcctctttccatcacattcattctatgggccaaagcaagtcacgtggtcaagcccaggtttaggggtagagagatag

SEQ ID NO: 112215 - DNA, 201 bp, Homo sapiens
gattctcagaaacaggaatgcaagccccagcatgaaagcactttttttttaattttttgagacagggtctcactctgtcactcagactgaagcgtagtgaygtgatcacggctcactgcagccttaaccttctgggctcaagcgatcctccaactttagcctcccaaacagctgggactacaggtgcatgccaccacacct

SEQ ID NO: 112216 - DNA, 201 bp, Homo sapiens
atctcacctggctgcctttgctctggccttggggctttcccacgttagccactcttcagggagaccaggatatgggcttctgaggtctcttcagctccaaygtgctgtgcttaggctagctccaacctctcctgctacagtgacagctgtccctcttggcctcactcctgccatgcttttgagattttctgtggccttccg

SEQ ID NO: 112217 - DNA, 201 bp, Homo sapiens
agataacgttagctagggtgaatctaagaacaaacagtacacagacggcatggctctgattaaaaggcacacaatttagaaacaatactgggaccctggakgtctaggacctccagaccctttcctggactgtgacacttctttgaggtggcctgtctgtcccggagctggtttgagggaggcgtgttctcccagggcttc

SEQ ID NO: 112218 - DNA, 201 bp, Homo sapiens
atgaaataaatttccccatggacaacctttgttttgtgggcctcatatccatgattgaccctccccgagctgcagtgcctgatgctgtgagcaagtgtcgmagtgcaggaattaaggtaaatacttgcccagaccaggagcccctcacctgtcacaagttgaagcatctactagaaggccttgcgcagagtagatgcttaa

SEQ ID NO: 112219 - DNA, 201 bp, Homo sapiens; identical to SEQ ID NO: 18715

SEQ ID NO: 112220 - DNA, 201 bp, Homo sapiens; identical to SEQ ID NO: 18717

SEQ ID NO: 112221 - DNA, 201 bp, Homo sapiens; identical to SEQ ID NO: 18703

SEQ ID NO: 112222 - DNA, 201 bp, Homo sapiens
ctttttttgcgctctcacttctcttgggctatggttggctggaggctatcatttttctcattggcatcattgtggccaatgtgcctgaggggctgttggcyacagtcactgtgagtagacagggtggaaaatggcctcagggcagacaaaccaccccagggaaaagggatcactagcgtctcttttgttgttgaacctttc

SEQ ID NO: 112223 - DNA, 201 bp, Homo sapiens
agaccaaatattagaacaaaagattctcctagcacccctatctttaagggtttttagaagctctatgtcaggaagtgggggcagagaccaatatctatacytcttatcatatcacaacatcacattgccctctcctgcttcatccacaggaaccgcccggggtattgtgattgctacgggagactccacagtgatgggcag

SEQ ID NO: 112224 - DNA, 201 bp, Homo sapiens
ctactcaggaggctgaggcagtaggattgcttgagcccaggagttcaagactgcagtgagttatgattgtaccactgcactccagcctggacgacagagcragtccctgtctctaaaaaaaacattaaatgtaattaaaataaataatgtttatattgattacatatttaactgatatattgatatcagtttttgatatat

SEQ ID NO: 112225 - DNA, 201 bp, Homo sapiens
taagcatattttgaatgtaactgaacaaacgaacagaacagttgtaaccacgttttgtgcactggtttcccaccctgcttaccctgtgggcagtacagtcyggcctcctctgcactcccgctgttcctttcaatgcatcgattttgttctcaacaggcgacctagcgggcatttcctgtccatcacaagaggaaccccatg

SEQ ID NO: 112226 - DNA, 201 bp, Homo sapiens
gtgacctctgagattactagtaggtcttgccatcacctcctgggcccttcacttattcaacacattttactgagcacttagaaaactgagctctttaaacyttttccagctttctgcttaagtgagttacggttcttcctcttaattgcttaagcatattttgaatgtaactgaacaaacgaacagaacagttgtaaccac

SEQ ID NO: 112227 - DNA, 201 bp, Homo sapiens
gtgttctaccgtttaaggctctacattcctctccaagtaccactttgccacatcccgtggggtttgatatgtagtatttcattattgtgcggtcctacctrttttcaaatttattggatctacgagttgttgataaacatgctgctttagtttttaaaacagaagctttttctctccagtctaatttagatgcaccccttc

SEQ ID NO: 112228 - DNA, 201 bp, Homo sapiens
gatcagggtagggagtgcacacacaggtggcaaccaaaggacagaccccttctcattgtgggctttataggcagagaaaccccaaacccacatctctacakgacaggatctgggccagccctgtccttccctgcattcccaagttaggagtgctgagtgaagcaaaggaaactggctggagctgagccaggttgccagtct

SEQ ID NO: 112229 - DNA, 201 bp, Homo sapiens
ctccactgggaagataaatacttgaatgacctggaggacagctacggacagcagtgggtgagtagaagggataaggtaggagctgagaccagtaagagtgrgagtgacaggggagagtgagtgcagcaaattttttaagagagaagaagggaagcaccacacaaacagagctgatgccttttcttcagtcctgtatgagcc

SEQ ID NO: 112230 - DNA, 201 bp, Homo sapiens
ttgaaaataattttgtatctgagttcaaacattctgtcagtgaaaaatattcactgaatttccaagacttaggttgagaagaagaatgtaaaatatcttawtgataatgctttttttttttttttttgagatggagtgtcactctgttgcccaggctggagtgcagtagcgcaatctcggctcactgcaaactccgccccg

SEQ ID NO: 112231 - DNA, 201 bp, Homo sapiens
actgggaagataaatacttgaatgacctggaggacagctacggacagcagtgggtgagtagaagggataaggtaggagctgagaccagtaagagtgagagkgacaggggagagtgagtgcagcaaattttttaagagagaagaagggaagcaccacacaaacagagctgatgccttttcttcagtcctgtatgagccttct

SEQ ID NO: 112232 - DNA, 201 bp, Homo sapiens
tttttgaccattgacagcttgctctttgtgggaaccaaaccaaacagcttcctcaattcagactcggcatgtcttgggtgaccatctctgatggaaaaaamaagaaacagcttttttttttctctacactcacgctgaacacagaacacttctgtgtccaacatgtgtagacagttctccccaccaacaaccagttctcca

SEQ ID NO: 112233 - DNA, 201 bp, Homo sapiens
gtgctccggagaggatcttggagttttgttctacctttcttctgaatgggcaggagtactcaatgaacgatgaaatgaaggaagccttccaaaatgcctayttagaactgggaggtctgggggaacgtgtgctaggtgaggagctttgggagaagtttttaaaagaatggcatcaaaatggttattatctgtggggtgaga

SEQ ID NO: 112234 - DNA, 201 bp, Homo sapiens
tacccctgcctctgggaaccataaccatcctctgcattgatctcggcactgacatggtaagggccaagctggtgagcaagagattcccagaattctgcctyctaagctccctgctttctgcctggagctatcttactaaaactcatgacaacccacttatgatccagctctcgcacctcctgcaagatggattgaggctgc

SEQ ID NO: 112235 - DNA, 201 bp, Homo sapiens
cagaaaatagggtgagtgatgaacagagtaagatcctgtctcaaaagaaaaaattgggagagggaatcagtggcctctaaagtcctttttagttttaagaycatgtgattcaaagctgactctgggtcagagtttagaaacaaatgtcagggcttgaaggaaagtcccacagagatgagagataacaggcttaggcagctg

SEQ ID NO: 112236 - DNA, 201 bp, Homo sapiens
aaaatgcctatttagaactgggaggtctgggggaacgtgtgctaggtgaggagctttgggagaagtttttaaaagaatggcatcaaaatggttattatctstggggtgagaaatcaaggatgttggggtaagcagataggaatgtagagtgctggatgactactggtccctccctctgtctctctccaggcttctgcttct

SEQ ID NO: 112237 - DNA, 201 bp, Homo sapiens
cctttttagttttaagaccatgtgattcaaagctgactctgggtcagagtttagaaacaaatgtcagggcttgaaggaaagtcccacagagatgagagatracaggcttaggcagctgatggcaagattcttccgcattactcttcagacacacaccagcccagccagaagcaagtcccagcccccagccctcccctggcc

SEQ ID NO: 112238 - DNA, 201 bp, Homo sapiens
ggcagaggattctcagaaacaggaatgcaagccccagcatgaaagcactttttttttaattttttgagacagggtctcactctgtcactcagactgaagcrtagtgacgtgatcacggctcactgcagccttaaccttctgggctcaagcgatcctccaactttagcctcccaaacagctgggactacaggtgcatgccac

SEQ ID NO: 112239 - DNA, 201 bp, Homo sapiens
ctctgcacaaggatgtaaggtgaggggatgccgaaagctatgtgagggacccaagcgtgatctcatggcagggtagacacctgggctgttagagaaagtayaagcttattactcagaatcttgagaagttacaagtgcagatttgatgttagagacaacagatgtgtaaatttgtttctctcagtctgtcagtgatgatgt

SEQ ID NO: 112240 - DNA, 201 bp, Homo sapiens
cacatgtctgggcccttagctgagatgactgggacagctggggcctttttcttcgtgatctctctttttacagagaggttagcttgggcttgttcataggrtggcagaggattctcagaaacaggaatgcaagccccagcatgaaagcactttttttttaattttttgagacagggtctcactctgtcactcagactgaag

SEQ ID NO: 112241 - DNA, 201 bp, Homo sapiens
acctccggcttatctctgcacaaggatgtaaggtgaggggatgccgaaagctatgtgagggacccaagcgtgatctcatggcagggtagacacctgggctrttagagaaagtataagcttattactcagaatcttgagaagttacaagtgcagatttgatgttagagacaacagatgtgtaaatttgtttctctcagtctg

SEQ ID NO: 112242 - DNA, 201 bp, Homo sapiens
ccactatttctgctctctcgccatccagttggcaaggatgcaggggaaaagtgagagtgcctggttctgcccccagggagcttcaggctgagaagataatrgagattcctgtgcaaataataccaggctgcagttttctggaaaaaggaggaggggctgggttcaacctggggcgagatgtgactggggaggggagggaac

SEQ ID NO: 112243 - DNA, 201 bp, Homo sapiens
tcctgtttctcataattctgtggctgtgctgttgttcctcagctggggctggatggtcttagatgacctcatccacatgtctgggcccttagctgagatgmctgggacagctggggcctttttcttcgtgatctctctttttacagagaggttagcttgggcttgttcataggatggcagaggattctcagaaacaggaat

SEQ ID NO: 112244 - DNA, 201 bp, Homo sapiens
gacctccggcttatctctgcacaaggatgtaaggtgaggggatgccgaaagctatgtgagggacccaagcgtgatctcatggcagggtagacacctgggcygttagagaaagtataagcttattactcagaatcttgagaagttacaagtgcagatttgatgttagagacaacagatgtgtaaatttgtttctctcagtct

SEQ ID NO: 112245 - DNA, 201 bp, Homo sapiens
tggttctgcccccagggagcttcaggctgagaagataatagagattcctgtgcaaataataccaggctgcagttttctggaaaaaggaggaggggctgggytcaacctggggcgagatgtgactggggaggggagggaacaaaagaaatgggggtatgaaacacatttttttacctttgaaaccttccccttctttttgcc

SEQ ID NO: 112246 - DNA, 201 bp, Homo sapiens
cgatgttttatacaatgtaggcactcaattaatgtttaataggagacattggcactggccttagacactcacaatccaaggtggaaatctcaactctactrtgtattattctgtggccttggacaagtatggaaccattctgagcctcagctacacctgcaaagtctcaataatacactccagggatagaccttgcagagt

SEQ ID NO: 112247 - DNA, 201 bp, Homo sapiens
ctgcaaacagcatcatgggaatttgcaatctgccaaagacaccttcaagaatgatgtgatgggtgacagtaagaaaggggagtaaggaggagggagaccartaacagaaggttttaggctaagagtgggatgaggaaagccaaaagttttggaaatgatcctgcactatcctctcatagcaagctctggtaattcgaggag

SEQ ID NO: 112248 - DNA, 201 bp, Homo sapiens
attttctgaggatgaagaagacgacaaggtcccactgataaacgctttctttccccaccctcagctctacctgagcatcgtactgtccgtcgtggtcatcrtcactggctgcttctcctattatcaggaggccaagagctccaagatcatggagtcttttaagaacatggtgcctcaggtaggattggagtgggaggatct

SEQ ID NO: 112249 - DNA, 201 bp, Homo sapiens
  misc_feature (1)...(201): n = A,T,C or G
tttcatattggctatagaaatatacatgttttagcattctgaagatcaaaaagaaaaagctctatgaattgactgctagatgtattttcctgtcttactgntctacacacactggggaaaaaataatttgtgcccatgaaaagaagagtgtgataatttgccttacaaatgaatttaccagaaataagcaagctctctggc

SEQ ID NO: 112250 - DNA, 201 bp, Homo sapiens
cgtcagcttataaaatttttacctaaatgtccttgataaaataggacactgcctacaatatgctctcagatctgcagcctattgtgctttttaaacaagcrtttttaaaaaaatgtttggattacaagttacattgagaatatgatgtaagctatacaccatctccattctaaaatacacttggactaaaatttttgctta

SEQ ID NO: 112251 - DNA, 201 bp, Homo sapiens
ctcagtctaaaatactaaatatttgagattttccttttttatatacaaggatttatctttttttttttttttgtcttttacttcaagttctgggatacatrtgcagaacgtgcaggtttgttgcataggtatacatgtgccatggtggtttgctgcacctatcaactcgtcatctaggttttaagccctgcatgcattaag

SEQ ID NO: 112252 - DNA, 201 bp, Homo sapiens
ttaatgatcgccattctaaacacttctctagttcttttaattgcgatgttcgagtgtcaatttcagatctattcagctttctgatatggccatttagtggyataaatttccctcttaacactgctttagctgtgtcccagagattctgctatgttgtctcttcattctcattggtttgaaagaacttcgttatttctgcct

SEQ ID NO: 112253 - DNA, 201 bp, Homo sapiens
ccaatctaacgtaggtttggtcttttcacatagttccatatttcttggaggctttgtttgtttcttttctttctgtttttctctaatcttatcttcacacyttatttcattaagttgatcttcaatccctgatatcctttcttccactcgattgattgagctattgatacttgtatatgcctcacgaagttcttgtgctgt

SEQ ID NO: 112254 - DNA, 201 bp, Homo sapiens
taatcttatcttcacaccttatttcattaagttgatcttcaatccctgatatcctttcttccactcgattgattgagctattgatacttgtatatgcctcrcgaagttcttgtgctgtgtttttcagctccatctggtcatttatgttcttctctaaactggttattttagttagcagttcctgtaaccttttatcaaggt

SEQ ID NO: 112255 - DNA, 201 bp, Homo sapiens
ttttaaattaatatattttacttgtcaccattgcaacatagactgctcctcaaagaggttcagtgtcccattatttttctgtgattgtgagaatatctgawttataccccagagtaagcagttttggaaacacttgctctagacacgtaagactcaggtcctataaggccctagtagtgtcccaagtaacacagctggaca

SEQ ID NO: 112256 - DNA, 201 bp, Homo sapiens
ctttcctgctcagtttgaagatggccttgctgcagtcaaattttttcttttggaaaaaattcttacaaaatatggagtggatcccacccgaatctgcattkcgggagacagttctgggggcaatttagcaacagcggtcactcaacaggtacattatatttgtttttatgataggaggcagaaattgaggctcattttttt

SEQ ID NO: 112257 - DNA, 201 bp, Homo sapiens; identical to SEQ ID NO: 18723

SEQ ID NO: 112258 - DNA, 201 bp, Homo sapiens
ggaatttgtaatttgtaatttatttctatgctatatagaaatacaattgattttgatattggccttttcccatcatatcctcaataaactcacttataackctagtgttctgtgttttttttgttttttttttttttagtttcctaggattttctatattttcaatgacgagagacagttttagttcttgcttcccagtac

SEQ ID NO: 112259 - DNA, 201 bp, Homo sapiens
catgtctcatactttattagatcctcttcaatttctcagcaatattttactattttcagtgtagaaatcatggaaatcttttctcaaattttaccctgagstattttttaaaatttttattaaaatactattttctgaatgtttatttggaacatattggaatttgtaatttgtaatttatttctatgctatatagaaata

SEQ ID NO: 112260 - DNA, 201 bp, Homo sapiens
tggagtggatcccacccgaatctgcatttcgggagacagttctgggggcaatttagcaacagcggtcactcaacaggtacattatatttgtttttatgatrggaggcagaaattgaggctcattttttttctatagataattcagttcttcccccaccatttgttgaaaagaccattctttcccattgaattacagtagca

SEQ ID NO: 112261 - DNA, 201 bp, Homo sapiens
gagaaaagggtggtcacacatcactttgttcccagagaaggcagctccaaacatcctgtttgcgcccctgagctaagatgtttccaagctgaaacaccctrattagaaaactcatcccaccagttgcttgaaagcggtatctaacagacttttggtttggggcttggaaactacccaatcaggaatcagctgttttaaact

SEQ ID NO: 112262 - DNA, 201 bp, Homo sapiens
caaattatgacactaagagctcagtgtccataatgagtgagaaaagggtggtcacacatcactttgttcccagagaaggcagctccaaacatcctgtttgygcccctgagctaagatgtttccaagctgaaacaccctgattagaaaactcatcccaccagttgcttgaaagcggtatctaacagacttttggtttggggc

SEQ ID NO: 112263 - DNA, 201 bp, Homo sapiens
aagcacaaaagaaatggccactgacaggaaaatatcactttgattgaaaaatactaagaagtattcctgattattagggttatatctctttttactgacayaggcaatgattgtgatcagtaatttctaaaactgtgagaattattattcaggatatgacattccaacattctgcttagctaaattctagatgtcttttgt

SEQ ID NO: 112264 - DNA, 201 bp, Homo sapiens
gatcatcccaggttgacttcagactgctgtgctggcagtgaggatttcaaggcagtggatcttagcttgctgggatcctcgggagtggaaccctctgatcraaacctcttggctccctgacttcagccccctttccaggggagtgaacggttctgtctcactggagttccaagcaccactggggtacaaaagaaactcctg

SEQ ID NO: 112265 - DNA, 201 bp, Homo sapiens
ggagttccaagcaccactggggtacaaaagaaactcctgcagctagctccatgtctgcccaaacagccatccagttttgtgcttgaaacccagggccctgstgtaggcacatgagagcatctcctgatctgcagattgcaaaaaccatggaaaagcgtagtatatgggctgggtagcacagtccctcaacggcttcccttg

SEQ ID NO: 112266 - DNA, 201 bp, Homo sapiens
tcacacaaaaaatcaatattttttaaaaccttaaatttaaattggtttgaatttttttatgccatggtaatatattataaatattataaaaataattatgatacatcacatcaatttatgtagatttgtttatcttatgactgctagataattaaattttttttctcctggtattttggaaatgtttgcattacagaatat

SEQ ID NO: 112267 - DNA, 201 bp, Homo sapiens
gaagtttttacgaggtgtatgaaatatccaagtgttcatatacatattacctaggacttgagtaagcacaaaagaaatggccactgacaggaaaatatcaytttgattgaaaaatactaagaagtattcctgattattagggttatatctctttttactgacataggcaatgattgtgatcagtaatttctaaaactgtga

SEQ ID NO: 112268 - DNA, 201 bp, Homo sapiens
tactgatacatacatctatatatatacttgtctggatatggataagtatagatataaatatgagacatctaataaagagacatagacatatgtttggcaamtaatattatggggattttaaattcagtttttgttttgtttttttattatccttagctttcatattgaatgaacatatatcaaaggaaaataggatataaa

SEQ ID NO: 112269 - DNA, 201 bp, Homo sapiens
cacaaaaaatcaatattttttaaaaccttaaatttaaattggtttgaatttttttatgccatggtaatatattataaatattataaaaataattatgatayatcacatcaatttatgtagatttgtttatcttatgactgctagataattaaattttttttctcctggtattttggaaatgtttgcattacagaatattac

SEQ ID NO: 112270 - DNA, 201 bp, Homo sapiens
gaaacagagtctccctctgttgcccaggctggagtgcagtggcatgatctctgctcactgcacgctctgcctcccgggttcatgccattctcctgcctcakcctcccgagtagctgggactacaggcacccgccatcatgcctggctaatttttgtatttttagtagagacaaggtttcaccatgttaaccaggatggtct

SEQ ID NO: 112271 - DNA, 201 bp, Homo sapiens
ttacctcacatagttaccatttattttttctctatggtgagcatgtttaagatctgtcttagcaaatttcgagtacgcagtattattaactatagtcaccrcacttaatattagatctccagaacttattcatcctgcataactgaaactttgtaacctttcaccaatatctccctgttctccccatctccatcccctttc

SEQ ID NO: 112272 - DNA, 201 bp, Homo sapiens
tgagagggacatctgatgatctctagagggattattatccaaaatgttctaatccatttcttttatgtattttttaccttcttaatgttttcaatacattrgatttcatctatatttcatctataatttaatttatatcatgtgttaaaatggtcgaataacctgctttcttgataagataaataccaagtttgcctcatt

SEQ ID NO: 112273 - DNA, 201 bp, Homo sapiens
tggatccttcgtgaatagattaatgcccttcagagggaatgaatgagtgaattcttgctctccagggaatgaaatagtttgtcagagagcagattattaamaacaatctggcttccttggtttctctctcttgcttcctttcttgccatgtgatttctttgcacatgcagatacccggttctctttcatgagttaaagcag

SEQ ID NO: 112274 - DNA, 201 bp, Homo sapiens
aatgttctaatccatttcttttatgtattttttaccttcttaatgttttcaatacattggatttcatctatatttcatctataatttaatttatatcatgygttaaaatggtcgaataacctgctttcttgataagataaataccaagtttgcctcatttctctccaaagaaatgcattcattccactgaagtttttacga

SEQ ID NO: 112275 - DNA, 201 bp, Homo sapiens
tgtgttaaaatggtcgaataacctgctttcttgataagataaataccaagtttgcctcatttctctccaaagaaatgcattcattccactgaagtttttaygaggtgtatgaaatatccaagtgttcatatacatattacctaggacttgagtaagcacaaaagaaatggccactgacaggaaaatatcactttgattgaa

SEQ ID NO: 112276 - DNA, 201 bp, Homo sapiens
agttctgagattttgagtgagtttcttaatcctgagttctaatttgattgtgctgtggtccgagagactttttttttttaattttcattcttttgtatttkctgaggagtgttttttcttccaattatgtggtcaatgttagaataagtgctatatggtgctgagaagaatgtatattctgttgatttgtggtggagagtt

SEQ ID NO: 112277 - DNA, 201 bp, Homo sapiens
gtttatttcttcatttcagaacagagggcttttgacttcctgaatagatggacggcaaacacgcttgatgctgttgttgtaggcgtggagtaagaatgatwtttttctggctactatgatttttgcctttaccatgtagaggtttgatttccacatcaagtcagctatgcttcaaatataattttttaaattaatatattt

SEQ ID NO: 112278 - DNA, 201 bp, Homo sapiens
ttaattaattatataagaacttagtatctatttagacattctgatttatctgttcaaagggaacatagtgtagtatgcagatgaacaggctgcagaagaaytcagtgtacttaatgagcatttaaaaaggtgattttctttatcctttcctatttacttttgtgattatactttaagttatttgttcttcatggactgcta

SEQ ID NO: 112279 - DNA, 201 bp, Homo sapiens
aatgttgaatatttgtccccactctcttctggcttgtagagtttctgcagagaaatccagtgttagtctgatgggtctccctttgtaggtaacctgacctktctctccagctgcctttacatttttcctttgttttaaccttggagaatctgatgattatgtgtcatggggttgctcttctcaaggagtatcttagtggtg

SEQ ID NO: 112280 - DNA, 201 bp, Homo sapiens; identical to SEQ ID NO: 18720

SEQ ID NO: 112281 - DNA, 201 bp, Homo sapiens
catggattaggacacatacattaccctgtcattttctcttgtggacttggtccacttttcaattgtattcttattattgagaagaaatgaatatatttaasctattattgctagatttcctggcaacatcacatgatgtgtcctaaaatcactgatgtggcttgctggtcacaacgatctggatgatcactatagcttaga

SEQ ID NO: 112282 - DNA, 201 bp, Homo sapiens
gaacatgcgtgctaggatgaggccaaaaaatcctcccatttggaatttcttcatggtggttcatagtttatccagatactcattggctagttgtgtattgwtggaatcaagtttggagttgttaggggtagttcatagaaaggaaaattagtggggatagcaatcacagtttctatgaagttgagtgctctgggttgaaaa

SEQ ID NO: 112283 - DNA, 201 bp, Homo sapiens
atacatcacagtgactgatacaacatttgttgacattccagtacgattgtacttgccaaaaagaaagtcagaaacccgaaggcgagctgtgatatattttsatggtggtggtttttgttttggaagttccagtaagttcattgtataaggaaaaagtgtagctagctctacatttttgatataagaactattttatataaa

SEQ ID NO: 112284 - DNA, 201 bp, Homo sapiens
cagaggggcaccagcttgatgccagccagagctctcctgtatgaggtgtctgttgacccttgctgggagatgtctccctgtcaggaggcacaggggtcagsgaaccatttgaggagacagtctgtcccttagcagagctcaagcactgtgctgggagaattctccttctcaggatcagctgctctcttcagagccagcagg

SEQ ID NO: 112285 - DNA, 201 bp, Homo sapiens
aaatttttgcttacaattcctaggaagttcataacactcccctgactcctcacaaataattccattcatggattttaggtacaagattgaaaaccttataytttattaaaataattttcattttaatcaagagttagtagaaaacttaggcttgatttttagaagactgaacaataaagactggcattaaattgcatctat

SEQ ID NO: 112286 - DNA, 201 bp, Homo sapiens; identical to SEQ ID NO: 18721

SEQ ID NO: 112287 - DNA, 201 bp, Homo sapiens
tgatatttgtaactctttgatattaatttaaggctcttattatttaatggctttcattgtccatcttcaattctaaattgctggttttcaggcattatctkacttggcatgtgcagaatgaattataaattcatgcaaaaatagctcctttaaaagggagagatagggttagaaactaatatttttgagttcttaagttgt

SEQ ID NO: 112288 - DNA, 201 bp, Homo sapiens
gaatgctccattctaggcttgttttggtttagtattaatgtttatgtgcacttttgaactttgcttagctggctatcttcgagaccatataggtctaggasgaaagaactaagctatagataggtcaataattcagcattactgttgggacctacttgttttatacttgttactgtttctcggatcctattattcctggct

SEQ ID NO: 112289 - DNA, 201 bp, Homo sapiens
ttatatgttgctgctttccatttgctttagttcattaaatgttttgtatttttgagattaatctttaatttttaacactttttgtcaggttttttttttttctttgagatggagttttgctccatcacccaagctggagtgcagtggcgcgatctcagctcactgcaacctctgccacctgtctttgtcaggttttgagag

SEQ ID NO: 112290 - DNA, 201 bp, Homo sapiens
aagtggtatcactgtgagtcctgcacttctgagtgatataatctgttttactgtcacacttttaggacataaagtgggaagtgggattttaggggaagaakaaagatcaggaaaggacaggattaatctgcaaggaggagagcaggttgattatcttggactctagcccatgtgggagttttgcagtttccagcatggttg

SEQ ID NO: 112291 - DNA, 201 bp, Homo sapiens
ttgaaggaagcatgagtttaagtgtgagaacttgggttacatgattgtgttcaccagacttaaagcaaaaataaggcagcaaatgggaccacatctatgtygaaacagaaactgggtggagactgtctcaaaatatgtaggacatttgtgacaagctggggacggaccaagaaggtggtgctgaggcagcactaatatgaa

SEQ ID NO: 112292 - DNA, 201 bp, Homo sapiens
agaaatacaattgattttgatattggccttttcccatcatatcctcaataaactcacttataacgctagtgttctgtgttttttttgttttttttttttttagtttcctaggattttctatattttcaatgacgagagacagttttagttcttgcttcccagtacttgttccttttaatttttcttttattattgcactgt

SEQ ID NO: 112293 - DNA, 201 bp, Homo sapiens; identical to SEQ ID NO: 18718

SEQ ID NO: 112294 - DNA, 201 bp, Homo sapiens
tgtgagatgggtctcctgaatacagcacactgatgagtcttgacttcttatccaatttgctagcctgtgtcttttaataggggcattaacccatttacatytaaagtaaacattgttatgtatgaatttgatcctgtcatcatgatgctagctagttattttgcacaatagtcaatgcagtttcttcagagtgtcattggt

SEQ ID NO: 112295 - DNA, 201 bp, Homo sapiens
ataaaaatgaagacatagatttgaaatacatcactgagtggctttaaaggttatgaaatgaaactggaaataagacctcaaggtctctggatgaaacggayttcttgtggctgataaagaaacccaaattatgacactaagagctcagtgtccataatgagtgagaaaagggtggtcacacatcactttgttcccagagaa

SEQ ID NO: 112296 - DNA, 201 bp, Homo sapiens
tcttatccaatttgctagcctgtgtcttttaataggggcattaacccatttacatttaaagtaaacattgttatgtatgaatttgatcctgtcatcatgawgctagctagttattttgcacaatagtcaatgcagtttcttcagagtgtcattggtctttatattttggtgtgttttttcagtggctggtaccagtttttc

SEQ ID NO: 112297 - DNA, 201 bp, Homo sapiens
aaaaatgaagacatagatttgaaatacatcactgagtggctttaaaggttatgaaatgaaactggaaataagacctcaaggtctctggatgaaacggattycttgtggctgataaagaaacccaaattatgacactaagagctcagtgtccataatgagtgagaaaagggtggtcacacatcactttgttcccagagaagg

SEQ ID NO: 112298 - DNA, 201 bp, Homo sapiens
cttttgtatttgctgaggagtgttttttcttccaattatgtggtcaatgttagaataagtgctatatggtgctgagaagaatgtatattctgttgatttgkggtggagagttctgtagatgactattaggtccccttggtccagagctgagtgcaagtcctgagtatccttgttaattttctgtctcgttgatctgtctaa

SEQ ID NO: 112299 - DNA, 201 bp, Homo sapiens
taaatagtctatttctttttgtttaccttgcttattttttcttcctttttaactttctttttaaatatatttggtgttatttaaatatctaaatatttaaytttgtttgttttgttcttacaggctatgtgttttgaaaatatgcgtattatgagatatgaagagtttatatccatgatattcaggctggattatacccaa

SEQ ID NO: 112300 - DNA, 201 bp, Homo sapiens
ttgaaatacatcactgagtggctttaaaggttatgaaatgaaactggaaataagacctcaaggtctctggatgaaacggatttcttgtggctgataaagawacccaaattatgacactaagagctcagtgtccataatgagtgagaaaagggtggtcacacatcactttgttcccagagaaggcagctccaaacatcctgt

SEQ ID NO: 112301 - DNA, 201 bp, Homo sapiens
ctaggaaagtgccatgccctttgaatggtcacagggcacttgggaaatgggagaggattcagtaatgcctcagactgtctggagttgactttatgccaagygcaggtgtccatggcagattactgctttgaatgggctttgaagcagttgagtcataaaatgacacagggcatgaagtcatggatcatcccttctctgact

SEQ ID NO: 112302 - DNA, 201 bp, Homo sapiens
cattctccttgtcactttcaggtacaccaatctaacgtaggtttggtcttttcacatagttccatatttcttggaggctttgtttgtttcttttctttctktttttctctaatcttatcttcacaccttatttcattaagttgatcttcaatccctgatatcctttcttccactcgattgattgagctattgatacttgta

SEQ ID NO: 112303 - DNA, 201 bp, Homo sapiens
aaggtgcttggccagggccctggtaaataggatatgtggggacctggggaaagatgtgtgtgtgtgtgttatgtgtctggggaaagtcaatagcttgtacrtcaagcatgtcaaaactcatatgtatatcaagtcttcacactgacctgccagaggctctctcatatctagttattattccttagactctgtcttaatgcc

SEQ ID NO: 112304 - DNA, 201 bp, Homo sapiens
taccataagtttaggattaatgatatttaattataaaaggaaagttcaaatgcatactatccattgtgttttcatgaaaataaagttcattgttgaaaaasattaagaataaggatgggctttattgaagctcttccacaacctttaagttacttagctatccaaaggtctttattatattggaaatataataaaaaggta

SEQ ID NO: 112305 - DNA, 201 bp, Homo sapiens
caagcaaatggaaaacagaaaaaggcagatgttgcaatcctagtctctgataaaacagactttaaaccaacaaagatcaaaagagacaaagaaggccattrcataatggtaaagggatcaattcaacaagaacagctaactatcctaaatatatatgcacctaatacaagaggacccagattcataaagcaagtccttaga

SEQ ID NO: 112306 - DNA, 201 bp, Homo sapiens
atcaagtcttcacactgacctgccagaggctctctcatatctagttattattccttagactctgtcttaatgccaatgttattggactattttattatgtkgcatcttcaaagaagacaagaggttttgaagaacgatgtttagagactcaatacatactattactttctttttcctccgacttctgaaccagttaaaaaa

SEQ ID NO: 112307 - DNA, 201 bp, Homo sapiens
ctttacaaagtaataacatcctgagatgaatgtcacatttttttgcactcaagtacatatcagttacccacaaaatcagaaatacatatccattccttcaygtccattttatagaatgctccattctaggcttgttttggtttagtattaatgtttatgtgcacttttgaactttgcttagctggctatcttcgagaccat

SEQ ID NO: 112308 - DNA, 201 bp, Homo sapiens
  misc_feature (1)...(201): n = A,T,C or G
aaaccattaccattatttcagatgaagtaaaatgcaccaggatacaaagggtcctgggaagggtcattgtgtacagacagcagatgtcaagacgatattanaataggctgagcctattctagttgatcctccccaaaataatcaattggtgaagtcatccttttcctcctggaaagagtggctgaaaagactaggaagggg

SEQ ID NO: 112309 - DNA, 201 bp, Homo sapiens
caggacgcggaggtaacgggccagggccaaagcgactttcgctacttggattggtcggcgtagctttgggcggccggaccttagaaagtcacacatctgcscgcctgtgcggcccctgcttctgcggatgctgaggtgggaggatcgcttgggcagaagtttgaggttgcagtgacccgtgatcgcgccactgcactgcag

SEQ ID NO: 112310 - DNA, 201 bp, Homo sapiens
gaggtaacgggccagggccaaagcgactttcgctacttggattggtcggcgtagctttgggcggccggaccttagaaagtcacacatctgcgcgcctgtgmggcccctgcttctgcggatgctgaggtgggaggatcgcttgggcagaagtttgaggttgcagtgacccgtgatcgcgccactgcactgcagcgtgggcga

SEQ ID NO: 112311 - DNA, 201 bp, Homo sapiens; identical to SEQ ID NO: 18724

SEQ ID NO: 112312 - DNA, 201 bp, Homo sapiens; identical to SEQ ID NO: 18725

SEQ ID NO: 112313 - DNA, 201 bp, Homo sapiens
agctcccgcgggagatttcgtgcgcagttacttccggtagctggtaaaggctgatacttcccaggacgcggaggtaacgggccagggccaaagcgactttygctacttggattggtcggcgtagctttgggcggccggaccttagaaagtcacacatctgcgcgcctgtgcggcccctgcttctgcggatgctgaggtggg

SEQ ID NO: 112314 - DNA, 201 bp, Homo sapiens
aggacgcggaggtaacgggccagggccaaagcgactttcgctacttggattggtcggcgtagctttgggcggccggaccttagaaagtcacacatctgcgygcctgtgcggcccctgcttctgcggatgctgaggtgggaggatcgcttgggcagaagtttgaggttgcagtgacccgtgatcgcgccactgcactgcagc

SEQ ID NO: 112315 - DNA, 201 bp, Homo sapiens
atttccccataccatcttccatgctcagactacttcctaagctgagaaacctttattttgcctatggcaaatttagtgtgtgtttatgcaaaacttaaatyaccacaaaaaccccacaatagggtaaatgaagcagaaggcacagctaattaaatggatttgaggttcattgctcattttgctcagggtcaaataatagta

SEQ ID NO: 112316 - DNA, 201 bp, Homo sapiens
gcttacagttcccaggcccacagcgtcagcagcagcggcagcagcggcaggcggccgcgcgggtgtttgtcgcttcgcggggccttgcggcagcatggcgraccatctgatcagtggcggcaccggctacgtgccccaggactggctcaccgtgcagcagctcttcctcggcgccaactgccgcacccacaacaacttcct

SEQ ID NO: 112317 - DNA, 201 bp, Homo sapiens; identical to SEQ ID NO: 18732

SEQ ID NO: 112318 - DNA, 201 bp, Homo sapiens; identical to SEQ ID NO: 18733

SEQ ID NO: 112319 - DNA, 201 bp, Homo sapiens; identical to SEQ ID NO: 18734

SEQ ID NO: 112320 - DNA, 201 bp, Homo sapiens; identical to SEQ ID NO: 18735

SEQ ID NO: 112321 - DNA, 201 bp, Homo sapiens
gtgcagggtgtctcggcctccatccaggacaaagggtccattcagaagtttgtgccctacctcatagcgagtaaccagcatggctccatgatgtactcagragagctcaaatttgagaagtggaccatgtcagcccagatcgagggtggcgtccatggcctgcacgcttaccagaagcagctgtactgaggatagcagtgg

SEQ ID NO: 112322 - DNA, 201 bp, Homo sapiens; identical to SEQ ID NO: 18737

SEQ ID NO: 112323 - DNA, 201 bp, Homo sapiens; identical to SEQ ID NO: 18738

SEQ ID NO: 112324 - DNA, 201 bp, Homo sapiens; identical to SEQ ID NO: 18739

SEQ ID NO: 112325 - DNA, 201 bp, Homo sapiens; identical to SEQ ID NO: 18740

SEQ ID NO: 112326 - DNA, 201 bp, Homo sapiens
gagtcctgcagcctttgaataaatacctgccaggccaagctagcaaatagcacagtttcatgtctggaatttgcagaccagggctgaaggaagttagacaygcttctgtgaagaaaactgatattctgctggggtttgcaagatccctaaaggtcccgtcctccccctgggaatcccagcagtttagaagattcctgaaag

SEQ ID NO: 112327 - DNA, 201 bp, Homo sapiens
gccaagctagcaaatagcacagtttcatgtctggaatttgcagaccagggctgaaggaagttagacacgcttctgtgaagaaaactgatattctgctgggrtttgcaagatccctaaaggtcccgtcctccccctgggaatcccagcagtttagaagattcctgaaagggaaaggagcagctcacctgagacaagcaaggg

SEQ ID NO: 112328 - DNA, 201 bp, Homo sapiens
gaattcgagaccaacctgggcaatatattgagaccctgtctctatttaaaattgttttaatttaaaaaaatttacaataaataaataaaaataagaaaaamctcccaaatcccaccactctagtacaaccaaagtggccacaccatcacacgtgaggttgttcacagcatccttctctggggatgattctaagtcccttga

SEQ ID NO: 112329 - DNA, 201 bp, Homo sapiens; identical to SEQ ID NO: 18741

SEQ ID NO: 112330 - DNA, 201 bp, Homo sapiens; identical to SEQ ID NO: 18742

SEQ ID NO: 112331 - DNA, 201 bp, Homo sapiens
tgtagaccttcatgtgattccatattgtttcctatgtttggaacacactttccttccttattagcaaatttttattcatccttcaaaattcaacttatagktcaactctgggtaagcactctgaaactgcccaacaccaccctgctccctttttttaattttttaaaggaaagaagaagaataaggaaaaaactatagttg

SEQ ID NO: 112332 - DNA, 201 bp, Homo sapiens
tcacaaatatcaccaatcttcaaactgggtgatctgtctgtaatctgtctttaaaagaaatctataggccccatctgtatctttttttcttccttgctctwctttttccttataatttatttgctgaagaagtcagttcttttgtctggattttgctgattttatcttggttttcttgcttatcttacataaaaactgaaa

SEQ ID NO: 112333 - DNA, 201 bp, Homo sapiens
ttggtatctgtgggttaaggtttggaacaggctcctataaatagcaccggtcctggaatagctgcagcactgtcaccccctcattttaactccgacggtcrtgggagtgagtacgcactgtctgagcccgtgttcttctcaccctcatatgagaactcatgtcttccagtcgcttttagagagcatagatttgctgcaatg

SEQ ID NO: 112334 - DNA, 201 bp, Homo sapiens
ttcaaactgggtgatctgtctgtaatctgtctttaaaagaaatctataggccccatctgtatctttttttcttccttgctcttctttttccttataatttmtttgctgaagaagtcagttcttttgtctggattttgctgattttatcttggttttcttgcttatcttacataaaaactgaaagctctatcttaaccaact

SEQ ID NO: 112335 - DNA, 201 bp, Homo sapiens
gtttacgagggaccagacctggcagagcggtttcttgtttccctttgcatacagtgctcagtggatttggtatctgtgggttaaggtttggaacaggctcmtataaatagcaccggtcctggaatagctgcagcactgtcaccccctcattttaactccgacggtcatgggagtgagtacgcactgtctgagcccgtgttc

SEQ ID NO: 112336 - DNA, 201 bp, Homo sapiens
cttccttgctcttctttttccttataatttatttgctgaagaagtcagttcttttgtctggattttgctgattttatcttggttttcttgcttatcttacrtaaaaactgaaagctctatcttaaccaactaggttcttagccttggccagacattacactcacctgggaagcttgtaaaatcctgacatgtgtggaaagc

SEQ ID NO: 112337 - DNA, 201 bp, Homo sapiens
ctcttctttttccttataatttatttgctgaagaagtcagttcttttgtctggattttgctgattttatcttggttttcttgcttatcttacataaaaacygaaagctctatcttaaccaactaggttcttagccttggccagacattacactcacctgggaagcttgtaaaatcctgacatgtgtggaaagcagcttgtc

SEQ ID NO: 112338 - DNA, 201 bp, Homo sapiens
acttcctcaataagttaaacatagaattaccatatgacccagcaatttcactccaaaagaatggaaacaggttcagacacagtcttgtattcgtatgttcrcagcagcactattttcaatagccaaaagatggaaacaacccaaatatccttcagctgaggaaagggtcaacaatatgtggtatttccacgcaatggaata

SEQ ID NO: 112339 - DNA, 201 bp, Homo sapiens
caccgcgcccggccgaatccgcctttctttttaatctgtatgaggtgttgggttgtcttctgatgtttccatctgtgtcctgtgtgatcgtagatactgcatgccactctctgtccagcacgtgatgccctttgcaacctcctttctcacccaccctggggcttgggagctggagatgggggaataggggtggtcagtgaa

SEQ ID NO: 112340 - DNA, 201 bp, Homo sapiens
atgattttatgttatgtgaactttaccacaattttttataattctgatgtataaaaacaccccagaccaagtaattaataatctcttaagtgtgacccgascatcagaatattctaaagccctccaagggatgccagtgtacacgcaaggtttggaatcattgacagaggctggacgggtcaggatcgtgtctttggagcc

SEQ ID NO: 112341 - DNA, 201 bp, Homo sapiens
aatgttctctccttttttagaaaataaaatttaggaaaacctaagaagaaaacgatcgatcatcttgattttgcttttatgtgagaggaaagagccctctrtttctagctaccatatagatgtgtaaaacagtgccacccatagcctcacccgtgagatggcagcacggggacaagtggccctcaggctgcccagcacaca

SEQ ID NO: 112342 - DNA, 201 bp, Homo sapiens
aatttacaatcagagcattccatatatccctgtttagggcgtttcagggtttattgctgcaatttagcatttttatctgggatgttcaacttctaagggaygggctctctgtttgctgttttaaaattattagagtctttcattgtatctgtctgtattcacagcatatatggtcatttcatttgagtgttcatgaacagc

SEQ ID NO: 112343 - DNA, 201 bp, Homo sapiens
cagcacacacaccctgcccaacacaacaacagtaacaaaaagagacaaagtaaccagtcctgattccttggggaggcgggcgaaccttctctagtcatctwtgtcctgcagtggctggtgctgccgtcatacccgtagaatctcagcagtgcgtgcttccctaccctgggaaggaaatgtcatttccttgcaagactcact

SEQ ID NO: 112344 - DNA, 201 bp, Homo sapiens
ctggctctgcagccttggcagagttgcaaataggttaaacggagatgggagttctagttctcttttgcttcagccagcttccttttctggctaaatctgartaaactcaaaagaaactgggcaaggggtttacggctccccatggtgcttcacaaaggtaagttccacttatgtgatccaagaggtggttggcttgtgatt

SEQ ID NO: 112345 - DNA, 201 bp, Homo sapiens
tcttgatctgtcaactggggatccacgactgcttaaagataaaggcgtaagtcagggataaaataatgaagccaaggcatataatgattgcctctcaatcrtgagttgtatcctgctgcttcttttcacaaaacatattttccaagtctttaaatattcttctataatgtcgttcttaatgattgcacagtgaggatacgg

SEQ ID NO: 112346 - DNA, 201 bp, Homo sapiens
ggcagatcacgaggtcaacagatagagaccatcctggccaacatggtgaaaacccgtctctactaaaaatacaaaaaattagctgggcatggtggcacgcrtctgtagtcccagctactcaggaggctgaggcaggaggatcccttgaacccaggaggcggaggttgcagtgagccaagatcgtgccactgcaatccagcc

SEQ ID NO: 112347 - DNA, 201 bp, Homo sapiens
ataaaacaaggcattatttaagattgcacatttatgtttatccccagaaatttccacattggggtctggaatgccattgcttctttaaatactacttactktaaatcatatttgcaaagaattcttgtaactgagaatctaggcgctcaataaatagaccgcatccttccttcatctgcacatgaatggcagcattttgtg

SEQ ID NO: 112348 - DNA, 201 bp, Homo sapiens
gaggctgaggcaggaggatcccttgaacccaggaggcggaggttgcagtgagccaagatcgtgccactgcaatccagcctagtgacagagcaagactccgytgcaaaaaaaaaaaaaaaattcaaaacaaacaaaaggcattttggagcccctgaagatttggagtaagaggttaaataagtaaaggtcacttctagccat

SEQ ID NO: 112349 - DNA, 201 bp, Homo sapiens
ttcaaggataagggcctagaactccacctgtgtcctattccctcttgaatccacaggtcgagcaggaaagtgaaggatgaggctggcatgtgtagaagtgycagtggagggcgctgtggctgactagaaggcctctacgttttaaaggacagctgttccaaacggaggtgggaatgaagtccttgtgtttccagatttccc

SEQ ID NO: 112350 - DNA, 201 bp, Homo sapiens
caggatttcgccatgttggccaggctgctcttgaactcctgaccccagatgatccgcctgcctcggcctcccaaagtgctgggattacaggcgtgagccascgcccccgaccgaagtttgtattttttaaaaggtcacattgtctgcttttgaggggatacactgggagagatgcagggagaccagcttttcggaggagtg

SEQ ID NO: 112351 - DNA, 201 bp, Homo sapiens
agccatagctgggaagactgtaacactgggtgtactcaaatggctggggtttggaatcacccggagacaggtctggtgcctaggccaggatcagcagcagytgtagagcagaatgtctgtgtggccggggcttcctcacatcgtggtagcctcagagcagtgcgacttcctacttggtgggcagaactgcagaggagagtg

SEQ ID NO: 112352 - DNA, 201 bp, Homo sapiens
tcagcctaaggatggtgagcaactcgggagtttttaggcaagatgaggtttttgttttgttttgttttgtttttttgagacagagtctcgctctgttgcccaggctggagtgcagtggcataatctcagctcactacaacctctgcctcccgggttcaagcaattctcctgcctcagcctcctgagtagctgggactacag

SEQ ID NO: 112353 - DNA, 201 bp, Homo sapiens
ttgaacccgggaggcagaggttacagtgagctgagatcacgccactgcactccagcctgggcaatagagcgagactctgtctcaaaaaaaaaaaaaaaaaytaatagcgtaatacaaccaccatttttgttataactcacagattatctgggccgggaatgctgatagtgcacatgctatcagccatagctgggaagactg

SEQ ID NO: 112354 - DNA, 201 bp, Homo sapiens
tggtcttgaactcctcggccccccaaagtgctggtattacaggcatgaaccaccaccccctgccaatttcaggataaagtcctgagcatctgtgaaaatartgaagctcttagcaagtcccagatctcttaccctctaaccagttcctgcctgggagctgcagtgttagagcatatgcaaagccctaattgggggagagct

SEQ ID NO: 112355 - DNA, 201 bp, Homo sapiens
aggttgcagcgagctgagagcacaccacagcactgcagcctggatgacagagtgagactctgtctcaaaaaaaaaaaaaacaaaacaaaacaaaacaaaaatatatatatatatattgttttggtgacttaaggggtttttttggccttccaaagcccccatgaaagtgtagctatcttaggaaagtgcagtgtcttaaaa

SEQ ID NO: 112356 - DNA, 201 bp, Homo sapiens
tgtgatgggaagcttggggaaatgtacaggagctttcagaacttatacttctgcctcatgccattgtagatgaaattatatactcacacttttagaaatcygagatacacattcaccaaaacttttaaccactgtgaaagaaacagataatcagctgtcattatccttgtgttcaagatgaagaccgaaacttcattttca

SEQ ID NO: 112357 - DNA, 201 bp, Homo sapiens
ggtggaggttgcagcgagctgagagcacaccacagcactgcagcctggatgacagagtgagactctgtctcaaaaaaaaaaaaaacaaaacaaaacaaaamaaaaatatatatatatatattgttttggtgacttaaggggtttttttggccttccaaagcccccatgaaagtgtagctatcttaggaaagtgcagtgtct

SEQ ID NO: 112358 - DNA, 201 bp, Homo sapiens
ttttgtgcacatgtatgacatttacacagtaggggatctattgagatattttcaaacagtcaacaatcctaatcaaaatgtgtgctactgaaataagttayttggagtattaaaacaagtatcttcctgtggacaacactactcatttgtaattatgtgatgggaagcttggggaaatgtacaggagctttcagaacttat

SEQ ID NO: 112359 - DNA, 201 bp, Homo sapiens
aacacaggaggtgaggaggtggaggttgcagcgagctgagagcacaccacagcactgcagcctggatgacagagtgagactctgtctcaaaaaaaaaaaaaacaaaacaaaacaaaacaaaaatatatatatatatattgttttggtgacttaaggggtttttttggccttccaaagcccccatgaaagtgtagctatctt

SEQ ID NO: 112360 - DNA, 201 bp, Homo sapiens
atgatcattgtgttggcaccaagagcttgtgtctcactgaatggtgccccctagagaggcaggcagtgcctaggaaggggtcatcccggagagctgggtasgctttccagtcagatgactgagttccaagcgattaaaatgtttgggtgcagtactcctccaaggacatgcttatccctaactgttactgcattactagga

SEQ ID NO: 112361 - DNA, 201 bp, Homo sapiens
catttgacagctgtagctaaaaggattaaagaaaatacataaatgaaagattcctcaagccagagcggcaggacagaaacagcatgtcctaacaaggcaaygtgggagactgggtctagaggtcaattcaacaatggtcacctgaatgatcattgtgttggcaccaagagcttgtgtctcactgaatggtgccccctagag

SEQ ID NO: 112362 - DNA, 201 bp, Homo sapiens
aaatgtggtagttggggaattcttaggaggaggaagttcagtggtttctccaattaaagaccttgtaaggagaacagagaactgaacccaatctttgactmcagaacctgcacggtctcacccagccactccacccccttgcttcaaatttgccagtggcgccatgtggtttctggaatggaattcattcttagcttcaca

SEQ ID NO: 112363 - DNA, 201 bp, Homo sapiens
aagttaaaaaaaatgaatactgtattagtctattgatatatatcattcttgtgactaaatgtaactgaatttttactccttctagaatagaaatcggcttrtgggtctttgtgattgtatttggtttgtttgtttgttttaattaaataaaaaattacagtgtgccaggcgcagtggctcatgcctgtaatcccagctatt

SEQ ID NO: 112364 - DNA, 201 bp, Homo sapiens
gcactaggataaatgtggtagttggggaattcttaggaggaggaagttcagtggtttctccaattaaagaccttgtaaggagaacagagaactgaacccartctttgactccagaacctgcacggtctcacccagccactccacccccttgcttcaaatttgccagtggcgccatgtggtttctggaatggaattcattct

SEQ ID NO: 112365 - DNA, 201 bp, Homo sapiens
gtgaaatggttaaacaggctccctagtttcatgagtggtaaaattcctaagtcctgatcaacctaagtgctgatcaacgtcaggtctcgcttactatgtastacacaactgaatgaaacactgatatctgtgattgctgtcttaatgaaggaaccaaataatgatttctgtttaggaatctgttttctttttgagccactg

SEQ ID NO: 112366 - DNA, 201 bp, Homo sapiens
cgccccaacttccccgcattctgtctggacacctcccaggcccactccctccacttcaccctcactaccttcacccatcccatgctgacttctaacctggrtggctgtgtccgtataccactctcagtcccccctgcaccctgccctccttactgtgaggtttctcaagtacagcagcaactaactgagctgtgtgctggg

SEQ ID NO: 112367 - DNA, 201 bp, Homo sapiens
aatgaagtaataaaactaggtaagttacatgaaccaagctgagagtttctagatttagcaaagttcagctcagttaaggcgggtcctcctggctgttgtckggatctgtgataggaatgcaagttgccaaggttatgacataatgtatcactgtgatatcttaatcatctgtgtggtttcataggttctcattggaattct

SEQ ID NO: 112368 - DNA, 201 bp, Homo sapiens
gggaagtaattggatcatgggggcaggtttctcatgaatagtttagcaccattccccttggtactgtcctcacaataatgagtgagttctcatgagatccrgttgttttaaagtatgtggcatctccttcctcgcttgcttgctcctgctctggcctgtgatgtgtctgctcccccttcaccttctgccatgattgtaagc

SEQ ID NO: 112369 - DNA, 201 bp, Homo sapiens
tactacacaactgaatgaaacactgatatctgtgattgctgtcttaatgaaggaaccaaataatgatttctgtttaggaatctgttttctttttgagccaytggaactctttaatatattaccagtcgcaatccagatttattggcaagctgaggaattagaaccatgagctcctggagtgggaaccaggcagccctctca

SEQ ID NO: 112370 - DNA, 201 bp, Homo sapiens
ttgggaggccgaggtggatggatcccgaggtcaggagatgatgaccagcctggccaatatggcaaaaccccatctctactaaaaatacaaaaaaattagcyagacgtggtggcatgcacctgtagtcccagctactcgggaggctgaggcagaagaatcgcttgaacccaggaggcagaggttgcagtgagccgagatcat

SEQ ID NO: 112371 - DNA, 201 bp, Homo sapiens
tctgtggcagctaatttgaaaatctaataaaaaataaattaacctgaggaatagaaagcttgaatagaccaattaccatagaagagattaaaatatctacyggtttgagccttttcagactttcttttggcctagtccttgatgaatttttgtgaatggcttacagacaatgttttctttgttgtctttggagggagcttt

SEQ ID NO: 112372 - DNA, 201 bp, Homo sapiens; identical to SEQ ID NO: 18754

SEQ ID NO: 112373 - DNA, 201 bp, Homo sapiens
ccagcgttggcctccaggccctgcatggtccaccaggaggaaagctctcatgaactccccctgcagcccacgcccaggcccaagacctcactcacaccagygtctcccccagcgctggggtgggaacaggggaagcatagtctattcagggctccacagttccagaattcctctctctagtacctcttaatgaaaaagatt

SEQ ID NO: 112374 - DNA, 201 bp, Homo sapiens
tgagtagtatagtggcctctttcttcatacttgactctgaatgacttttgactgttaccaaaaaaatctaccctcaaaggatgcaactgccaacacagacratatacaaaacaaagtatgtgtgattcaataaatattgagtgcctactatgttgccaggtgttctgctagacaccagggatataagatgaaaagacaatt

SEQ ID NO: 112375 - DNA, 201 bp, Homo sapiens
agaattcctctctctagtacctcttaatgaaaaagatttcagatttaattagtttttgtagccagagctgggaatctaatccatatttagaacataatctrtaagaaaagcatattccaagtacttaccaactttgaatgaagacttctgcagcacagctgccttcccacccgtccatacccctgcttcacctcagcacga

SEQ ID NO: 112376 - DNA, 201 bp, Homo sapiens
ccttgaacccaggaggcggaggttgcagtgagccaagatcgtgccactgcaatccagcctagtgacagagcaagactccgttgcaaaaaaaaaaaaaaaawtcaaaacaaacaaaaggcattttggagcccctgaagatttggagtaagaggttaaataagtaaaggtcacttctagccatgccatgagagtactagtgta

SEQ ID NO: 112377 - DNA, 201 bp, Homo sapiens
aatccatatttagaacataatctgtaagaaaagcatattccaagtacttaccaactttgaatgaagacttctgcagcacagctgccttcccacccgtccayacccctgcttcacctcagcacgaatctctctgacttggcctgttgggctgctttgcgctctcgcttctccctcccttcagtgtggctggtggagtaagga

SEQ ID NO: 112378 - DNA, 201 bp, Homo sapiens
acccgtccatacccctgcttcacctcagcacgaatctctctgacttggcctgttgggctgctttgcgctctcgcttctccctcccttcagtgtggctggtrgagtaaggatggtcctaggtcctacattttcacattttccacagtaagatacattacgtttttaaaaataattgttttcaacaaagccataaaggaagat

SEQ ID NO: 112379 - DNA, 201 bp, Homo sapiens
tgctttgcgctctcgcttctccctcccttcagtgtggctggtggagtaaggatggtcctaggtcctacattttcacattttccacagtaagatacattacrtttttaaaaataattgttttcaacaaagccataaaggaagatctggtaggctgaataatggcccccaaaggcgtccacatcctaatccccgagacctgtg

SEQ ID NO: 112380 - DNA, 201 bp, Homo sapiens
ttgactgcagcattaggaagctaacacacagggtaatcctttggagaaacctgggttgtctcagggcagcccgcgagcccaatgccactatttcccatatycccagctgagtgcgggagcaggtagacgcagtccgaagatcacaccatcaagtgcagtggccactgatggcctggaagcatagctggggtgcaggcaggg

SEQ ID NO: 112381 - DNA, 201 bp, Homo sapiens
aagactccgttgcaaaaaaaaaaaaaaaattcaaaacaaacaaaaggcattttggagcccctgaagatttggagtaagaggttaaataagtaaaggtcacytctagccatgccatgagagtactagtgtagacactgattaaataagctgataggggcttgaattgaagattaaaagtcaggaagggagaaaagaagacat

SEQ ID NO: 112382 - DNA, 201 bp, Homo sapiens
gtgcaggcagggttgtggccgctcgcagcctctaagccctcagggacagtgcacacgtggagagaagtcctttgggggattgagcagttttttgagcaagygcatatgtaaggagcacatcagaagctctggagaggcaaagtcaagcctttgaagggcataggcccaagcactggctgcccaagagaagccccaggccct

SEQ ID NO: 112383 - DNA, 201 bp, Homo sapiens
gaacacaggaggtgaggaggtggaggttgcagcgagctgagagcacaccacagcactgcagcctggatgacagagtgagactctgtctcaaaaaaaaaaaaaacaaaacaaaacaaaacaaaaatatatatatatatattgttttggtgacttaaggggtttttttggccttccaaagcccccatgaaagtgtagctatct

SEQ ID NO: 112384 - DNA, 201 bp, Homo sapiens
gtaaagaggtttgaatcccagctttacgacatgctatctgaccttggttaaccactgaaaatctccctagcctcagtttcagtgtctgagataatgagccygacaccatccttgatatctgtgtcctggggacctggaggaattaatgagctgatgccataaaataccgatcctgggttgaagggcctctcctgtgaggtc

SEQ ID NO: 112385 - DNA, 201 bp, Homo sapiens
tgaacacaggaggtgaggaggtggaggttgcagcgagctgagagcacaccacagcactgcagcctggatgacagagtgagactctgtctcaaaaaaaaaaaaaacaaaacaaaacaaaacaaaaatatatatatatatattgttttggtgacttaaggggtttttttggccttccaaagcccccatgaaagtgtagctatc

SEQ ID NO: 112386 - DNA, 201 bp, Homo sapiens
cccgccgtggaccacgtctgacttggcctgctaacaaagcatgtttaggcagtagggagagaaccgaggggagatggacgtctctacatggaaatattttstgaatgtgaattttagtatccctgtttcctgtcttccttcaaagatgaaaaggaatccatgtataaaacaggtagtcacatgagcatatgtaaagtttgg

SEQ ID NO: 112387 - DNA, 201 bp, Homo sapiens
tcacttgaacacaggaggtgaggaggtggaggttgcagcgagctgagagcacaccacagcactgcagcctggatgacagagtgagactctgtctcaaaaamaaaaaaaacaaaacaaaacaaaacaaaaatatatatatatatattgttttggtgacttaaggggtttttttggccttccaaagcccccatgaaagtgtag

SEQ ID NO: 112388 - DNA, 201 bp, Homo sapiens
cgtggaccacgtctgacttggcctgctaacaaagcatgtttaggcagtagggagagaaccgaggggagatggacgtctctacatggaaatattttctgaaygtgaattttagtatccctgtttcctgtcttccttcaaagatgaaaaggaatccatgtataaaacaggtagtcacatgagcatatgtaaagtttggttaag

SEQ ID NO: 112389 - DNA, 201 bp, Homo sapiens
ccatctctactaaaaatacaaaaattagccaggtgtggtggcgggtgcctgtggacccagctacttgggatgttgagacaggagaattgcttgaacccggraggcggaggttgcagtgagccaagatcgtgccactgcactccagcctgggtgacagtgagactgtctcaaataaataaataaagtatattattcactggc

SEQ ID NO: 112390 - DNA, 201 bp, Homo sapiens
aattgcgaaatatttagtgactttttaacctgtattttttaacatctttattgagattcacataccttaaaatttacccatttaaggtatattattcagcygggcacggtggcttatgcctgtaatcgcagcgcattgggaggccgaggcaggtggatcacttgagcccaggagttcaagaccatcctgggtaacatgatg

SEQ ID NO: 112391 - DNA, 201 bp, Homo sapiens
ttcatattatggctgatggagttgattttattctgtcttatgttattatgtattttagttggttctctcttttccttatttttaatggtttttatcaagtractattcattccctgtttatctctcttttgtcagtttggaaattccattctacttttctgtgcccttaatgactgtcttctgtagcccaatgtttataat

SEQ ID NO: 112392 - DNA, 201 bp, Homo sapiens
tgaaagcaacaaggaattgggtacgatcatgaaaacttgcttcgggttaaaccaagttaaaagttaggatctgctgatatgtcttgatctgtcaactggggatccacgactgcttaaagataaaggcgtaagtcagggataaaataatgaagccaaggcatataatgattgcctctcaatcgtgagttgtatcctgctgct

SEQ ID NO: 112393 - DNA, 201 bp, Homo sapiens
caccctccacagccccgggagcgatccgcaccctccacagccccgggagcgatccgcaccctccacagtcccgggagcgatccgcaccctccacagccccrggagtgaaccgcaccctccacagccctaggagtgcggttaccaagggagaggaaggagaagggaatagggatgagatctcttaaatagacatttgatgac

SEQ ID NO: 112394 - DNA, 201 bp, Homo sapiens
tccgcaccctccacagccccgggagcgatccgcaccctccacagccccgggagcgatccgcaccctccacagtcccgggagcgatccgcaccctccacagycccgggagtgaaccgcaccctccacagccctaggagtgcggttaccaagggagaggaaggagaagggaatagggatgagatctcttaaatagacatttga

SEQ ID NO: 112395 - DNA, 201 bp, Homo sapiens
aacaacaggctggaaaattaggatacagctattctagcatctctagtgaaaagacagcagagagaaaacggtgggaagaactattgattaggcaacagtckgtgtcagccacagaggtggacatgcgatggaagagcattccaggcaaagacagtaaggcatgtgaaaagtaaaatgcaaggcgtgtgtcagaaccagacg

SEQ ID NO: 112396 - DNA, 201 bp, Homo sapiens
caaaacttcattacgtttatatcactaggtaaacaacaggctggaaaattaggatacagctattctagcatctctagtgaaaagacagcagagagaaaackgtgggaagaactattgattaggcaacagtctgtgtcagccacagaggtggacatgcgatggaagagcattccaggcaaagacagtaaggcatgtgaaaag

SEQ ID NO: 112397 - DNA, 201 bp, Homo sapiens
ccatggctttagcatacagtggcattagaatttccatgatcccacctcccccatgtggcccagccgaggtccaccttcagaacctgcctgcatgatgaggrggccaaggttgccttctcacccacatttcagtccaattatgaacctttaaaatactccctctcaaactgctaggcatgttgcccctggaaatctttgttt

SEQ ID NO: 112398 - DNA, 201 bp, Homo sapiens
gggcttattcttctcacataggaaaggtctagaggtatgtagctgccagagcttatttagcagctagaaaatgtcaaggtatgtgtgagtctcggtgttcytctcatgcttatgcctgatggttgcaaacagcttttgaagctccaaatacatccttatttagtcaggaagaagaagggcagtcacagccaggaaagggta

SEQ ID NO: 112399 - DNA, 201 bp, Homo sapiens
atctggccctgtcctctactcatcttcatcttctcctgagtggggatgacacccacatacgtgtctggggcccacccccctgccaggaccccatggggacyatcctacctgcctagtatacagttcctttggaagagtacgatcgctgctgtcagtctggccccctccagcccagctttctcccagacacagatctggtca

SEQ ID NO: 112400 - DNA, 201 bp, Homo sapiens
ccggcgactaggctcctcatcttcaaggctctcgtctcctttgcaaaacttcttgaaccaccacagcactgtacgtttgttagcagttcctaggccaaatragttgtcgcaagttgtcgctgcagctttttgaccaattttgagctcaaataagaaaattgctgaaatttactttttgtctaacattatttccatagtgta

SEQ ID NO: 112401 - DNA, 201 bp, Homo sapiens
tccctgcaaaaagttgtcgagatgcttcaagaagtggaagttggttagcgagaagtcagatgaatatggcggatgaggccaattcgttcaacttgtgaagygttggttttgtgacatgcagtcaagggtcattatggagacagttgggccgtttctgttgaccagtgctggctgcaggcattgccgttttcagtgcatctc

SEQ ID NO: 112402 - DNA, 201 bp, Homo sapiens
aacttaactggtcttaggccttttacgttcttaaatattactgaggaccccaaaaagctttcatttatgtgggacgcatttatcatattagaaaaaaaaakcttttaaaaacacctattttaaagtgactaaatccattatgttaaataacacttttatgaagaataaccatttttcctccccctaaatcagcagattgat

SEQ ID NO: 112403 - DNA, 201 bp, Homo sapiens
aaaggaaataatcttcatatctaaagggcttaactttgtggtaaactctgcagctttctataatagggtcccaaaggtaagtgacaggaacgtattactcyaattcagaaataaaccatgtgcatggtgaaaggcgatgtcttcgcaaactgcccagaaggaaggtcttgtcccaccaatgggcagtgtcctcagggttag

SEQ ID NO: 112404 - DNA, 201 bp, Homo sapiens
aggaactgacaggtgaatgggggtgtttgctcacagcctgggtcatgggctccatcccggctgcctagaccaaaggttccatgtcgaggcaaccaaagcaygtgataggccaggactagttgattggaagagggaggagagctgggggagggcctggcacccagccagggaatgaggattccgtaggagtgagccatccta

SEQ ID NO: 112405 - DNA, 201 bp, Homo sapiens
tgtctgctaggaaagaaaccttttctctaaattttctaaaaactaggaagtaaggctggactcagtggttcacacctataatcccagcactttgggaggcygaggtgggaatttcacctgagacagagcagcgggggcagcagcaggagaaaagtggacatgttctggtgtggaggccaaggcttctgggccggtatgtgg

SEQ ID NO: 112406 - DNA, 201 bp, Homo sapiens
agtggacatgttctggtgtggaggccaaggcttctgggccggtatgtggagccctacaagtgggttcttttccctctaggtgtttaactggaaggtatgtycagtaaactgggcctcagggaccacactagggctgtggagccaccagccaattccccaggccctaagacagccccagggacctgggaggtgagcttgcta

SEQ ID NO: 112407 - DNA, 201 bp, Homo sapiens
ttcttttccctctaggtgtttaactggaaggtatgttcagtaaactgggcctcagggaccacactagggctgtggagccaccagccaattccccaggccckaagacagccccagggacctgggaggtgagcttgctaagagagagcgtgtgcccgccctctccacggccctgggagagcagaggactaccaaagagccacc

SEQ ID NO: 112408 - DNA, 201 bp, Homo sapiens
cacggccctgggagagcagaggactaccaaagagccaccacagttggactggcaccagaaaacaggaggcccagctccccacctcccagaccccagtgtcrtctgaggctcccatccacgtcatcttcacctcttgcagcacacagctgttctgtgcagctgtgcgtgcatctcccctgcagaatgctagagaaaaactac

SEQ ID NO: 112409 - DNA, 201 bp, Homo sapiens
agcgcagaggtaggacagctgccaccagccatggcatgcagccaggaacaggtggatgtgggactgtccaagagaaacttctggaaagcactgggtcggcragaggagggagcccaacggggaaggggcactcattgcatctcatcaagggatgttgttcattcctgacgatttgatgccaaaaagcatcagactcccctg

SEQ ID NO: 112410 - DNA, 201 bp, Homo sapiens
ccccaaatgcaggagtgtgacctctgatgggacattacctctggcagtttgcctgggctctgttgtcgccatcccagggaaatgccaggttttcctctgaygtgatgtttgggccctgagttctgcccagttcccagaagggcctggtgacagttgcggcagtgctgacatgtaacgtggtgtgctgtttggatgcttttg

SEQ ID NO: 112411 - DNA, 201 bp, Homo sapiens
tccacagccccgggagcgatccgcaccctccacagccccgggagcgatccgcaccctccacagccccgggagcgatccgcaccctccacagtcccgggagygatccgcaccctccacagccccgggagtgaaccgcaccctccacagccctaggagtgcggttaccaagggagaggaaggagaagggaatagggatgagat

SEQ ID NO: 112412 - DNA, 201 bp, Homo sapiens
accgcaccctccacagccccgggagcgatccgcaccctccacagtcccgggagcgatccgcaccctccacagccccgggagcgatccgcaccctccacagycccgggagcgatccgcaccctccacagccccgggagcgatccgcaccctccacagccccgggagcgatccgcaccctccacagccccgggagcgatccgc

SEQ ID NO: 112413 - DNA, 201 bp, Homo sapiens
tccacagccccgggagagaaccgcaccctccacagccccgggagcgatccgcaccctccacagtcccgggagcgatccgcaccctccacagccccgggagygatccgcaccctccacagccccgggagcgatccgcaccctccacagccccgggagcgatccgcaccctccacagccccgggagcgatccgcaccctccac

SEQ ID NO: 112414 - DNA, 201 bp, Homo sapiens
accgcaccctccacagccccgggagagaaccgcaccctccacagccccgggagcgatccgcaccctccacagtcccgggagcgatccgcaccctccacagycccgggagcgatccgcaccctccacagccccgggagcgatccgcaccctccacagccccgggagcgatccgcaccctccacagccccgggagcgatccgc

SEQ ID NO: 112415 - DNA, 201 bp, Homo sapiens
tccgcaccctccacagccccaggagcgatccgcaccctccacagtcccgggagtgaaccgcaccctccacagccccaggagcgatccgcaccctccacagycccgggagtgaaccgcaccctccacagccccgggagtgaaccgcaccctccacagccccgggagagaaccgcaccctccacagccccgggagcgatccgc

SEQ ID NO: 112416 - DNA, 201 bp, Homo sapiens
tcccaagtagctgggactgcgggcgcccaccgccatgcccggctaattttttgtgtttttagtagagacggggattcaccatgttagccaggatggtctcratctcctgagcttgtgatctgcccgcctcagcctcccaaagtgctggaattacaggcttcagccaccgcacccggcctcacctgacatatttcttacacg

SEQ ID NO: 112417 - DNA, 201 bp, Homo sapiens
cccaggctggagtgcagtggcgtgatctcagctcacctcccaggttcacgccattctcctgcctcagcctcccaagtagctgggactgcgggcgcccaccrccatgcccggctaattttttgtgtttttagtagagacggggattcaccatgttagccaggatggtctcgatctcctgagcttgtgatctgcccgcctcag

SEQ ID NO: 112418 - DNA, 201 bp, Homo sapiens
atacacctgacgtatttctttttttttttttttttttttttttttttttgagacggagtctcgctgtgtcgcccaggctggagtgcagtggcgtgatctcrgctcacctcccaggttcacgccattctcctgcctcagcctcccaagtagctgggactgcgggcgcccaccgccatgcccggctaattttttgtgttttta

SEQ ID NO: 112419 - DNA, 201 bp, Homo sapiens
ctcctgctcccaggcaggaacaaagtgatttcccagctcctggggccatgggtagctaactgattaaatacccggtttggaaaatacacctgacgtatttctttttttttttttttttttttttttttttttgagacggagtctcgctgtgtcgcccaggctggagtgcagtggcgtgatctcagctcacctcccaggttc

SEQ ID NO: 112420 - DNA, 201 bp, Homo sapiens
atgacttgttcaaggcgtatacccagcccagctcaggattacgatacagagttctgactctgccccctcagcccagctcaggattacgattcagagttctractctgccccctcagcccagctcaggattacgattcagagttctgactctgcgcccccagcccagctcaggattacgattcagaattctaactctcccca

SEQ ID NO: 112421 - DNA, 201 bp, Homo sapiens
gctgggagggtggccgggacaccagtcacggatgtcttctgtgagcaagagctctttcatctgggacctggtgatgagtaaggtgacgtgaagggagagtrggggagggcaggtggcctggggagtgctaacgagcttggtgtgttctggaactgaaagaagacagagattgttttcccgctccatgtggagagaaccagt

SEQ ID NO: 112422 - DNA, 201 bp, Homo sapiens
ggagcttccaggaaaatttggcttaataagtaccatactgttacttcctcgggaatattaaaaaggaaggagcgatgagacagaagggcctaattcacccygccgtggaccacgtctgacttggcctgctaacaaagcatgtttaggcagtagggagagaaccgaggggagatggacgtctctacatggaaatattttctg

SEQ ID NO: 112423 - DNA, 201 bp, Homo sapiens
gggaaacatgctactaaactgcccctgaactcacaggcttgtgatgtgtggtggatgagacacagcccgtgctgaggcaggcaggtctgaatccagtgccrgaagcaccatgtgccatgaggtggcattcgaatatttggagcaatgaagcgatctcattgaatgtatatatatgctagaggaattgcaatcatgagaaaa

SEQ ID NO: 112424 - DNA, 201 bp, Homo sapiens
atcatgagaaaaattaattgcagagttgatcgtagaggcatagtgtccaggcagaaacctaatccaagcaagagatcatttgacggctgagggaagagagwgccaaggggaatggagtggaatggaatggaatgcaggaactctagaggggatttaaaggctgaatatgctggtttgcgggcttgagttaggagcccacct

SEQ ID NO: 112425 - DNA, 201 bp, Homo sapiens
atctggtcatgcctttccccgaaatccatggctttagcatacagtggcattagaatttccatgatcccacctcccccatgtggcccagccgaggtccaccktcagaacctgcctgcatgatgagggggccaaggttgccttctcacccacatttcagtccaattatgaacctttaaaatactccctctcaaactgctaggc

SEQ ID NO: 112426 - DNA, 201 bp, Homo sapiens
gagtctgataatcattttatactgttacctgagatcatagacctaaaaaccgacattcctgctattacctccctagataaacttacttgttataaaaataygtccttttacattaaggctgtgtcttgtgaatttcaggaaaagtcccttccctcctctctaatctctgcagctgtttgtcactgatggcaaatcaatagc

SEQ ID NO: 112427 - DNA, 201 bp, Homo sapiens
ttatacatttgggtggtgggagctatttttcttcctttttttcttttgttcttttcttccttctctctgatcctgtccccatagcaaacagagtgtgtggyttgtgttgttgttgccttggcgtttcgggccagcccccctgtcaagtcctgcatcctcttttcattagacctcctggatggcagcagggcctgccgacag

SEQ ID NO: 112428 - DNA, 201 bp, Homo sapiens
aagatcatatgcattcagaaaataattgatcaaattataccttaagcatatacttttaagctaaatttactatccaaatataaatatattatccaaaggartctgataatcattttatactgttacctgagatcatagacctaaaaaccgacattcctgctattacctccctagataaacttacttgttataaaaatatgt

SEQ ID NO: 112429 - DNA, 201 bp, Homo sapiens
gagagcaagcgtttcagcgcctacaattacaggtgacccagcgggcaccgggggccgggggcggggggccaggggccggggaccgggggtgcgggctgacscggaatatccccggggactgggagccaccgtggtttgccggcggctgcgaggcaaggaccgggctccgccatcgaaaagcgtgctcctgcctacaggtgt

SEQ ID NO: 112430 - DNA, 201 bp, Homo sapiens
aactttttaatatttcctccctgtgtgaactgagtatttccccttcttcttctgtaatggctctgaaaatcccatatagaatcccccggattctagccttmaaccctctgctgggccaaatttaaatcatttgatttcacttaatggtcagtgaacattctttttgcagtaaatggtcctaccgctgtttttattcacttg

SEQ ID NO: 112431 - DNA, 201 bp, Homo sapiens
tttgcagtaaatggtcctaccgctgtttttattcacttgtcttcatcagttctgtatttccacttgtggcttaccatcagagcactctgtagtcactcatstctccggattttagagtcagtgagcacagaccctcagaaccatggagtatgggactgatatttttagttgttaggtactttctgagcacttcctatgtgt

SEQ ID NO: 112432 - DNA, 201 bp, Homo sapiens
gtaaatggtcctaccgctgtttttattcacttgtcttcatcagttctgtatttccacttgtggcttaccatcagagcactctgtagtcactcatctctccrgattttagagtcagtgagcacagaccctcagaaccatggagtatgggactgatatttttagttgttaggtactttctgagcacttcctatgtgtctggca

SEQ ID NO: 112433 - DNA, 201 bp, Homo sapiens
ttttctcacacataaaagaaagctggcaataaggcgtccagagctggcatggtggctccatggtcatcaagcactcagtctccacctttctgccccccagycttagcgtgtagctcccatatcaaacttatcttacagtgctagatggctgctggtgttccagctatcaagttcatattccaggcagaacggagacaaact

SEQ ID NO: 112434 - DNA, 201 bp, Homo sapiens
tccctgttcccaggtcccctgtgcaatgccagcctgacgaacagggagcaacagccttgctctctagcccctgcttggcagataaagctcacttgggaggcagtgacagccagattcccagggctcacacgtctcctccaggcccactaatcccagaatcccagcgttggcctccaggccctgcatggtccaccaggagga

SEQ ID NO: 112435 - DNA, 201 bp, Homo sapiens
tagcgtgtagctcccatatcaaacttatcttacagtgctagatggctgctggtgttccagctatcaagttcatattccaggcagaacggagacaaactggrgggcgggcaggcacttgagtgcccccagtctgaggcagcccacttcaaagaactgtcctagatgctccagccatgatgacagctgacacctcattggcca

SEQ ID NO: 112436 - DNA, 201 bp, Homo sapiens
ttagtagagacagggtttcaccgtgttggtcaggctggtctcagacttgtgacctcgtgatccacccgtctcgacctcccgaagtgctggaattataggcrtaagccactgcacccatcctcacctgcactcttactggccccttaactgggtcccctcgccacaactctccacctcttcttcgccttgacctgaagacaa

SEQ ID NO: 112437 - DNA, 201 bp, Homo sapiens
tttttaaccacagatctgggtgggttggtcctccatttttaacattttagcagctttccattccctccaagtggagcatggcatctgtgttctggccctascccacttctcttttattctctcttctctgccttctccacccccatcctcaccctcacccttctctatccacactcagcccatttctgtctctggcagtct

SEQ ID NO: 112438 - DNA, 201 bp, Homo sapiens
cccttgaacccaggaggcggaggttgcagtgagccaagatcgtgccactgcaatccagcctagtgacagagcaagactccgttgcaaaaaaaaaaaaaaaattcaaaacaaacaaaaggcattttggagcccctgaagatttggagtaagaggttaaataagtaaaggtcacttctagccatgccatgagagtactagtgt

SEQ ID NO: 112439 - DNA, 201 bp, Homo sapiens
ccgagtagctgggactacaggcgcgtgacaccacgcccggctaattcttttgtgtgtttttagtacagacagggtttcacagtgttcgtcaggatggtctygatctcctgacctcatgatctgcccaccttggcctcccaaagtcctgggattacaggcttgagccaccgcgcccggccgaatccgcctttctttttaatc

SEQ ID NO: 112440 - DNA, 201 bp, Homo sapiens
gcgatcccggctcactgcaagctccgcctcccgggttcacgccattctcctgcctcagcctcccgagtagctgggactacaggcgcgtgacaccacgcccrgctaattcttttgtgtgtttttagtacagacagggtttcacagtgttcgtcaggatggtctcgatctcctgacctcatgatctgcccaccttggcctccc

SEQ ID NO: 112441 - DNA, 201 bp, Homo sapiens
atcccaccacaatgggaggccaaggcaggcagatcacttgaggccaggagttcaagaccagcctggccaacatggtgaaacccccgtctctactaaaaatrcaaaaattatccaggcggtggcgcatgcctgtaatcccagctactcaggaggctgaagcagtagaattgcttgaacccgggagacagagtttgcagtgag

SEQ ID NO: 112442 - DNA, 201 bp, Homo sapiens
atctcagccgggctcagaggctcacacctgtaatcccaccacaatgggaggccaaggcaggcagatcacttgaggccaggagttcaagaccagcctggccmacatggtgaaacccccgtctctactaaaaatgcaaaaattatccaggcggtggcgcatgcctgtaatcccagctactcaggaggctgaagcagtagaatt

SEQ ID NO: 112443 - DNA, 201 bp, Homo sapiens
tcttcctcttcagagctaacttcgtttcatcatcctggatttgataagggttattcattctagctctttgcctcctattttggcaaacactccagaagacrgatgataccatcctattgaaaaaatgactgttgaataacagattataaatctgtgtgtttcctctggagaactgtgtgtgaaatgagaacattgggtttg

SEQ ID NO: 112444 - DNA, 201 bp, Homo sapiens
tatccatctttccccgtcaccacccctccctgaagaagagctgggtgtttctgtttctgtttctgggtttagcacaaaacagattataggagatctggattcggttgcataaaacaaatctgagacagggcattattctaatgacatctagagcatgaggcagctcagcaaggagcctccgcaggtcacccatccagactc

SEQ ID NO: 112445 - DNA, 201 bp, Homo sapiens
caccaccttctccttgtctgctcctctcttggctccgcttgacattggaggccccttgcactccatcttgaccttcccacaccctccctagatgcccacarctcatggctccaaccttgtgtgctctagtgattcccctccatttgtcctttccaggggcctcctgggcattttctggttatgctaccaacacctcgtatc

SEQ ID NO: 112446 - DNA, 201 bp, Homo sapiens
ttctaccatttcatattaataggcatgaggatcgaaaataggaaatgatttttcttttctcctccctggcagccttctctgctgtgatgttttttcctcayaaggctggggtcctattgctttcccttctgatgaagcttttttattacttggtgggtagagggccttaggtgtggcagagaaattccgcagcctcgccct

SEQ ID NO: 112447 - DNA, 201 bp, Homo sapiens
agagaaataaacctgcagaccagagaaataaacctgccatagccaatttatctcactctgtgtgtggcaagggctttggaaaagaatgttatcattaatcstggtttgtgacagtgcattcagtgtaaatttttattgccaagaatacttgcccaaggtttttctgttcctgtttgtttatgcttcttgaaatactttgaa

SEQ ID NO: 112448 - DNA, 201 bp, Homo sapiens
tgtaatctttgttatagagctagcttcatagcctcatgtctagagaaaacagtaaaatagagtgttgggaatgggaaacaggaatgggaatgcagcaccasagaagttgccagaactgggtttctggattctaatgagattcccctgaacaaatgaattaagatcatgatttcaggaatattcagcaaaatctaagtattt

SEQ ID NO: 112449 - DNA, 201 bp, Homo sapiens
cccagacacatgcagctcctgctcccaggcaggaacaaagtgatttcccagctcctggggccatgggtagctaactgattaaatacccggtttggaaaatwcacctgacgtatttctttttttttttttttttttttttttttttttgagacggagtctcgctgtgtcgcccaggctggagtgcagtggcgtgatctcagc

SEQ ID NO: 112450 - DNA, 201 bp, Homo sapiens
agcccaagagtttgaggctgcagaaagctattattgcaccactgcactccagcctgtgtgacaaagcaagaccctgtctttaaaaaaaaaaaaaaaaaaaacgtggagaccagagaaataaacctgcagaccagagaaataaacctgccatagccaatttatctcactctgtgtgtggcaagggctttggaaaagaatgtt

SEQ ID NO: 112451 - DNA, 201 bp, Homo sapiens
accagcctgggcagcatagtgacaccctctctctacaaaatgaaaattagcaggtcatggtggcatgctgctgtattcccagctacttgggagggtgaggyggaaggatcgtttgagcccaggagtttgaggctacagagagctataatagggccattgcacttcagcctgggtgacagtgaaaccctgtctctgaaaaaa

SEQ ID NO: 112452 - DNA, 201 bp, Homo sapiens
atggctttagcatacagtggcattagaatttccatgatcccacctcccccatgtggcccagccgaggtccaccttcagaacctgcctgcatgatgagggggccaaggttgccttctcacccacatttcagtccaattatgaacctttaaaatactccctctcaaactgctaggcatgttgcccctggaaatctttgtttct

SEQ ID NO: 112453 - DNA, 201 bp, Homo sapiens
cagctattcagggaggaaagcaatttgatgtcaggggcttctttgagccttgggaattagacctcagaagcttagaattggagctcagctgctggtggaaratatactgtgaatgttttattcagtaatgcatatataacattgagcagaatccaaatacataaatcacttatacaatagctgtgaagagccaccttccag

SEQ ID NO: 112454 - DNA, 201 bp, Homo sapiens
ctattcagggaggaaagcaatttgatgtcaggggcttctttgagccttgggaattagacctcagaagcttagaattggagctcagctgctggtggaaaatrtactgtgaatgttttattcagtaatgcatatataacattgagcagaatccaaatacataaatcacttatacaatagctgtgaagagccaccttccagcac

SEQ ID NO: 112455 - DNA, 201 bp, Homo sapiens
agtcatcccccaaaacttagtggcttcaaagaacaatcttcatttattgccacatcccacttctataggtcaagaattcagacagggcatggcgagggggrcttgtgttgctccacagtgattgaacctcagctggaagattggaaagctgggggcaggaatcatcttttacttagctgtctggaggttgatgctagctgt

SEQ ID NO: 112456 - DNA, 201 bp, Homo sapiens
tgctgatcaacgtcaggtctcgcttactatgtactacacaactgaatgaaacactgatatctgtgattgctgtcttaatgaaggaaccaaataatgatttstgtttaggaatctgttttctttttgagccactggaactctttaatatattaccagtcgcaatccagatttattggcaagctgaggaattagaaccatgag

SEQ ID NO: 112457 - DNA, 201 bp, Homo sapiens
gggacttgtgttgctccacagtgattgaacctcagctggaagattggaaagctgggggcaggaatcatcttttacttagctgtctggaggttgatgctagytgtgagccaggagtctggccagggtgtcagccagaacatagcacatatggcctcactgtaacctgggcttcctcacaacatggcggctgggttccaaagg

SEQ ID NO: 112458 - DNA, 201 bp, Homo sapiens
agttcttacgtttgttctgaatttatattactggatttcatatagagcctgtggcgctgtattacaaagaactattgttacctgacctcttcaacaatgcwccacaggcaactagaggtgattcatgtgtgcctaaaaacagtttcttagacttttgaaagattattcattattgttaaatatgctggagtttccaaaaaa

SEQ ID NO: 112459 - DNA, 201 bp, Homo sapiens
ctaaaggattaatctcatttctagcttttaacctgtcttaaacacctctagcacttgcttctgtttgaaatcccaaagaactctttctttctgttaactgktactcttaacttttatttttttctctttttacccccaggcataaagtccatagtcattgtctgccaccaggtttgttttctattgcatcttgatattttc

SEQ ID NO: 112460 - DNA, 201 bp, Homo sapiens
catatagagcctgtggcgctgtattacaaagaactattgttacctgacctcttcaacaatgctccacaggcaactagaggtgattcatgtgtgcctaaaarcagtttcttagacttttgaaagattattcattattgttaaatatgctggagtttccaaaaaacatttttttctcttacattgctaagttctgccaggttt

SEQ ID NO: 112461 - DNA, 201 bp, Homo sapiens
gaaacacagtggttgtatgggtactcgaagtatggtttgtacagaatgcctgttgctctcatgccatcataaagtcgagaaatcctaagtcaaaccatcgyatgtctgggaccatctttagactaaattcaggaaacaagatatgttagaaatacggtgtcttcaaaatcatttcctttcccttttaaaaaataagaacgt

SEQ ID NO: 112462 - DNA, 201 bp, Homo sapiens
ttttaaggatcattggtattctagcctttcttttctcaatatcatttgatagtgggttcatctatctgttgaggttaatatatgaaaacaaaaccatgtaytattcagggtggaggacaatgccaatcctccccttctctgtagtagggtatagatggcttcagctcacccagcagctatttcaggttgtccagaagggaa

SEQ ID NO: 112463 - DNA, 201 bp, Homo sapiens
ggcttcagctcacccagcagctatttcaggttgtccagaagggaaggccagaaagtccctgtgctgcattcatcgtgactgtaccgtagcccctgagaaamccagtgcggctcctcacagccctcaagatgatttccgaccttgccacctaaagtgtggcccgtggaccagcagcatcagcattacctgcaggttgcgaga

SEQ ID NO: 112464 - DNA, 201 bp, Homo sapiens
ccaaagtcttctctatattaatgagaggaaaggacgactgaagacacagtagcaaagctcatcactgtgacttgttaggagcactcattctctacaccccsttcccataactcctacctacctcttttggtttttaattaggacattcacttgcatttaaaaatacctgcaagatccccccatcccccatatctccactgt

SEQ ID NO: 112465 - DNA, 201 bp, Homo sapiens; identical to SEQ ID NO: 18751

SEQ ID NO: 112466 - DNA, 201 bp, Homo sapiens
agatgtctacaaaagagcaggaatcctgtctttgagaatagggcaacaatcaactgggtggttttaattattcagatagagtcacaggacattagatgcaraatattaaaatctccatcattcaggggaaatgatcttaaatacagatagaggcatatcactagccgggtagcagagtcattatttaaaggacactagagt

SEQ ID NO: 112467 - DNA, 201 bp, Homo sapiens
gccatcagataataaatggatgagcaacatgtggtatagccatacaataaaaatattattggtggtaaaacggaaccaagtactgatacatgctagaacayggatggcccttgagaacattatgctacgggaaagaagccagacacaaaaagtcacgcattgtgtgatttcgtttctgtgaaatggccaaaataggcaaat

SEQ ID NO: 112468 - DNA, 201 bp, Homo sapiens; identical to SEQ ID NO: 18753

SEQ ID NO: 112469 - DNA, 201 bp, Homo sapiens
ggggcggtttagcatgtcattaccacagactgtggctaggacctgtgggactcatttgtaaatgccaccttctttgacaacacctgggattgttgaaatgraagtaatcgattactagaagccattaattgaaagctgtgtgccaggcattgtagtaagacattataaataccatctaacttatgtaaaattgacattatc

SEQ ID NO: 112470 - DNA, 201 bp, Homo sapiens
ttttaaaaagacatctctcagcacttccctctctgcagattctgactcagtaagtgaggggtgaggcacagtcatttttctctattctgaagctctcccastgttttcaatgtttaaccaactggggacccctgctctttaagtatattacaggtaataaagatattgtttgtatgcttttattcttggaaacagattcat

SEQ ID NO: 112471 - DNA, 201 bp, Homo sapiens
aagacattataaataccatctaacttatgtaaaattgacattatcccattctgtaggtaaggaaactgagactacagggttaggtgaaacccaaggtttckgagccagtgattggcagagcaggtgtttaaaccaggtttgtcttgggacaaaccccaggctcttaagtactacattatcgtgtcttcccgcttctccacc

SEQ ID NO: 112472 - DNA, 201 bp, Homo sapiens
aaggaaattccgccacacgccacagcaagggtgaaccttgacgacattgtcctaagtgaaataagccatagaagaaacaaatgctgtatgattccacttayggcggtccctagagtccccctacagacggaaagtagaattgcggttgccaaggactggaggggagggagaatggagagttagtgtttaatggctacaggg

SEQ ID NO: 112473 - DNA, 201 bp, Homo sapiens
gaaattccgccacacgccacagcaagggtgaaccttgacgacattgtcctaagtgaaataagccatagaagaaacaaatgctgtatgattccacttacggsggtccctagagtccccctacagacggaaagtagaattgcggttgccaaggactggaggggagggagaatggagagttagtgtttaatggctacagggttt

SEQ ID NO: 112474 - DNA, 201 bp, Homo sapiens
aggctcctataaatagcaccggtcctggaatagctgcagcactgtcaccccctcattttaactccgacggtcatgggagtgagtacgcactgtctgagccygtgttcttctcaccctcatatgagaactcatgtcttccagtcgcttttagagagcatagatttgctgcaatgatgcgttcaaatagatgtaacgtgtagc

SEQ ID NO: 112475 - DNA, 201 bp, Homo sapiens
aaagtactcatgcgtgtttacaacctggatgaaccttgaaaacactgcggtaaatgaaagaagcctgacacaaaagccacatattatatgatttcatctgyatgtctacggaaacccatagaaacagaacatagattagtggttgccagaggctgggaaaataagaaaacagggaggggctgcttaatgagtatggggttt

SEQ ID NO: 112476 - DNA, 201 bp, Homo sapiens
ttgctgcaatgatgcgttcaaatagatgtaacgtgtagccattctatttggcagtacaacttttgatttcaggataaagtctttttttttgagatggagtytcgctctgtcacccaggctggagtgcagcggtgcgatcttggctcactgcaacctccacctcctgggttcaagccattctcctgcctcagcctcccgagt

SEQ ID NO: 112477 - DNA, 201 bp, Homo sapiens
ctgtgaactgaggaagtcccataaaacttcccagaatgtgattcgaggtagattgtaaaagataggtatgaattgtaaggaaaggtcttgaacagaatgtyaagattgaaagacccaagacctaaggtgtgctcgcccagtgggaggctagaggacaggttttctctggagagagcttgagatgggcttggatagtagcca

SEQ ID NO: 112478 - DNA, 201 bp, Homo sapiens
gggaaaataagaaaacagggaggggctgcttaatgagtatggggtttccttttgggggtgatgaaaatttccagaactaaatagtgttgatgattgtacarttatgaaggtacttaataccactgaattacgcactttgaagtggtttaaatgattttatgttatgtgaactttaccacaattttttataattctgatgta

SEQ ID NO: 112479 - DNA, 201 bp, Homo sapiens
aaaataagaaaacagggaggggctgcttaatgagtatggggtttccttttgggggtgatgaaaatttccagaactaaatagtgttgatgattgtacagttrtgaaggtacttaataccactgaattacgcactttgaagtggtttaaatgattttatgttatgtgaactttaccacaattttttataattctgatgtataa

SEQ ID NO: 112480 - DNA, 201 bp, Homo sapiens
cctcacaggtggtggtggcgtgctagatttaagcccgtgcaagtttgcttctgtattctaaaggataactatgtcttttgcactcctgtcagacagcagaygctgtcaggaatctgctgcctacagtcacaaaaaatgttctctccttttttagaaaataaaatttaggaaaacctaagaagaaaacgatcgatcatcttg

SEQ ID NO: 112481 - DNA, 201 bp, Homo sapiens
ggcggcgtgaaaggatgtccagccttgtcataagccagaggagggccacagatgtcatgcttaccttcctcagtgcaggtgagcaggagcaggcagtttakcatgtgccatctgagaccatatgctgaaattctactatcaaaaatgtattggccaggcatggtggctcatgcctgtaatcctagcactttaggaggccga

SEQ ID NO: 112482 - DNA, 201 bp, Homo sapiens
ccatatctccactgtctacttctcgttcttcttagatgacgtgctgctctcgcctcttccttcgctttctcttgcaccgcaacacttagttattatccatrccacggaccttcaagatacctctgtgcaagggcagactgaagaccgagcaaatggcatggaaaacaggacacctcagatggacggcgcggcggtccttgg

SEQ ID NO: 112483 - DNA, 201 bp, Homo sapiens
aaggatgcaacagcaggaaacaccagatggcttcacagatacttataaccctttggaaaaagtttttccattaccatgaaatgtgagcaaacagatctccyctgccacctgcctcctgtctttctctttctctctctctttctctctctctctctctctctctctcgctcgctctctgtcgctccatctctgagctgtaga

SEQ ID NO: 112484 - DNA, 201 bp, Homo sapiens
agtaggttttctgggaaaataaaatgaaaatgcttgctttcaaacaaacatttgatgttgacatttaccttgccccctttctcagatccaaaaccctttggcatccaaagatgccaggtgggaatcccataacctcttcagccttcaaccaacactgtacactgtagccaagctaggcttttctcctaaaattctgctttc

SEQ ID NO: 112485 - DNA, 201 bp, Homo sapiens
tacttataaccctttggaaaaagtttttccattaccatgaaatgtgagcaaacagatctcccctgccacctgcctcctgtctttctctttctctctctctytctctctctctctctctctctctctcgctcgctctctgtcgctccatctctgagctgtagacatcacatccctgacccagggccacatcaggctcactgt

SEQ ID NO: 112486 - DNA, 201 bp, Homo sapiens
ttggaaaaagtttttccattaccatgaaatgtgagcaaacagatctcccctgccacctgcctcctgtctttctctttctctctctctttctctctctctckctctctctctctcgctcgctctctgtcgctccatctctgagctgtagacatcacatccctgacccagggccacatcaggctcactgtcgagggtcagtag

SEQ ID NO: 112487 - DNA, 201 bp, Homo sapiens
atgacaaacatcagagctcacctagtccaaccctcaaatcttcaggtgttaaaacaaagagcctgaacatctgcagatcacgtacagagtcagggcctttyccctaaacccctttcactcattcatttattcactcagtattgactaaggccacctagtgccaggtgccaggtgccagggagcaaccagtgaacaagacag

SEQ ID NO: 112488 - DNA, 201 bp, Homo sapiens
aaaaagtttttccattaccatgaaatgtgagcaaacagatctcccctgccacctgcctcctgtctttctctttctctctctctttctctctctctctctckctctctctcgctcgctctctgtcgctccatctctgagctgtagacatcacatccctgacccagggccacatcaggctcactgtcgagggtcagtagtgtc

SEQ ID NO: 112489 - DNA, 201 bp, Homo sapiens
tcatcggtaaataggcaagcgaataagtcagcgtgtaattgtaaattgtgaattgtatcccaagacaagaatcactttcaaagttgaaaaagaagttttarataaagggggaaatgtgtatggtgtatatgtatgaaaataggtgtgtatttcacatactgtctactctcattctcattattcatatttataaattcgcct

SEQ ID NO: 112490 - DNA, 201 bp, Homo sapiens
atgaaactttaaaatgaatttttgttaaacatttaagcattgattaaaagctaaattatatttctataaccaatttaaaaagcagttgctaatctaatatrgctgtttcttttaaagtcttcaaacaccttgaagggtaactaaaacaacacaaaaatagtcattacaaaaccagttactacatttacaattccacctatt

SEQ ID NO: 112491 - DNA, 201 bp, Homo sapiens
gaggcagaagtatagtttgaacccgggaggcagaggttacagtgagctgagatcacgccactgcactccagcctgggcaatagagcgagactctgtctcaaaaaaaaaaaaaaaaactaatagcgtaatacaaccaccatttttgttataactcacagattatctgggccgggaatgctgatagtgcacatgctatcagcc

SEQ ID NO: 112492 - DNA, 201 bp, Homo sapiens; identical to SEQ ID NO: 18744

SEQ ID NO: 112493 - DNA, 201 bp, Homo sapiens
tgaggcagaagtatagtttgaacccgggaggcagaggttacagtgagctgagatcacgccactgcactccagcctgggcaatagagcgagactctgtctcaaaaaaaaaaaaaaaaactaatagcgtaatacaaccaccatttttgttataactcacagattatctgggccgggaatgctgatagtgcacatgctatcagc

SEQ ID NO: 112494 - DNA, 201 bp, Homo sapiens
gagtttcgtgggttgggtcgtacttgggacctcggcgaagaggacccgtttatttttttttctttccaaaatggcagcctccagtcgcgcacaagtgttakctctgtaccgggcgatgctgagagagagcaagcgtttcagcgcctacaattacaggtgacccagcgggcaccgggggccgggggcggggggccaggggcc

SEQ ID NO: 112495 - DNA, 201 bp, Homo sapiens
aaggaactcactgtatttcaacgctttgtagcagtgaggtacaatcagaggaaactcttttttttttttttttttttttttttttttgagacagagtctcrctctgtcgcccaggctggagtgcaatggcgtgatctcagctcactgccacctccgcctcccgggttcaagcgattcttctgcctcagcctctggagtagc

SEQ ID NO: 112496 - DNA, 201 bp, Homo sapiens
ataacctgttttcactgactaaggataaaaaaaaatgcatgccactgaaagctgcagaattctacatttaagtatttaagatgatttctcccacagcagaygaaggatgttgtgcagggatagagcacagggaacctttcatttgtgcatcataggaaaggtggaattagaacacagtacttttattttctctttcttcct

SEQ ID NO: 112497 - DNA, 201 bp, Homo sapiens
ctaattttgccccattcttgtaaacacttgtttttttctgtcgttttgattatagccatcctagtgggtatgagtggtgtaagatataccttttatacatraaacaaccagatctagattagaaggctaactttgacctagttaccctttaaggaaggttaagacagcagggaggcggggatggacatggaccttaggcca

SEQ ID NO: 112498 - DNA, 201 bp, Homo sapiens
atcctcccttgatttacaacttaggtaacttaatctttctgaaatttgtgtttacttaccattttttaatcaaaataatgcattctctctcttttttttttcttttgagagtgagtcttgctctgtcacctaggctggagtgcagtggtgtgatctcatggcacttctggtgctcaagcgatcctcccacctcagcctcct

SEQ ID NO: 112499 - DNA, 201 bp, Homo sapiens
aaaggataactatgtcttttgcactcctgtcagacagcagacgctgtcaggaatctgctgcctacagtcacaaaaaatgttctctccttttttagaaaatraaatttaggaaaacctaagaagaaaacgatcgatcatcttgattttgcttttatgtgagaggaaagagccctctgtttctagctaccatatagatgtgta

SEQ ID NO: 112500 - DNA, 201 bp, Homo sapiens
ctcattgcatctcatcaagggatgttgttcattcctgacgatttgatgccaaaaagcatcagactcccctggaccacttatttaaagaggccagcaatcarcacattttacaagcctaaatttaaagaaaaaaacaagtatgacttctggttcctactctggaagccctttccagttctgagtgttgcatttctggtgcag

SEQ ID NO: 112501 - DNA, 201 bp, Homo sapiens
gcagtttagcatgtgccatctgagaccatatgctgaaattctactatcaaaaatgtattggccaggcatggtggctcatgcctgtaatcctagcactttakgaggccgagtcaggcggatcacctgaagtcaggagtttgcgaccggcctggccaacatggtgaaagcccatctgtactaaaaatacaaaaattagccagg

SEQ ID NO: 112502 - DNA, 201 bp, Homo sapiens
gagatggggttttgccatgttggcccagctggtctcaaactcctgacttcaggtgatccgcccgcctcggcctcccaaagtcctgggattacaggcgcggrccaccgcgccaggccctaaatgtgctttggatacaacggaatacacagcctgttgtggatttggtgccttttaaccatgcgcagattcagaagttagatc

SEQ ID NO: 112503 - DNA, 201 bp, Homo sapiens
catctttgtcctgcagtggctggtgctgccgtcatacccgtagaatctcagcagtgcgtgcttccctaccctgggaaggaaatgtcatttccttgcaagastcacttctcatgagcactgataggccacagctgctgctggctctgcagccttggcagagttgcaaataggttaaacggagatgggagttctagttctctt

SEQ ID NO: 112504 - DNA, 201 bp, Homo sapiens
aatcccgtgttcttgttctagccgccgcatagagaatacggcctttagcacacagagctcacacagggagctacatggggagaagcgtgtttgttctgcgkcatgataagtgtgccgccaaagccttcaaaggggccaccagagggagcgtcagccggacaaacagaccttctggaaagtagttttgcaagatccatcagt

SEQ ID NO: 112505 - DNA, 201 bp, Homo sapiens
attaggacattcacttgcatttaaaaatacctgcaagatccccccatcccccatatctccactgtctacttctcgttcttcttagatgacgtgctgctctygcctcttccttcgctttctcttgcaccgcaacacttagttattatccatgccacggaccttcaagatacctctgtgcaagggcagactgaagaccgagca

SEQ ID NO: 112506 - DNA, 201 bp, Homo sapiens
tacagtggcgtgatcttggctcactacaatctgcctcctgggttcaagccattctcctgcctcagcctcccgagtagctgggattacaggcatgcaccacyaagcctggctaatttttgtatttttagtagagatggggttttgccatgttggcccagctggtctcaaactcctgacttcaggtgatccgcccgcctcggc

SEQ ID NO: 112507 - DNA, 201 bp, Homo sapiens
aagtgctagattttgaagtcagaagacctagaaaggagtatctcagctccataattcatttaccaattgtgcagatgtacacaggttactcagtttctctrgttccatatactcattcctaaggaaatatgaatattatgtattgcataggacaagggtaaaaacggtgagaaactaagtaaagcatgtaagcttagcaca

SEQ ID NO: 112508 - DNA, 201 bp, Homo sapiens
tggagtgcagtggcatgatctcggctcactgcaacctctgcctcccaggttcaagcagttctctgcctcagcctccggagtagctgggattacaggcaccygccaccatgcccagctaattttttttgtattttcagtagagacggggtttcaccatcttggccaggctggtcttgaactcctgacctcgtgatccacagg

SEQ ID NO: 112509 - DNA, 201 bp, Homo sapiens
acacgtctcctccaggcccactaatcccagaatcccagcgttggcctccaggccctgcatggtccaccaggaggaaagctctcatgaactccccctgcagyccacgcccaggcccaagacctcactcacaccagtgtctcccccagcgctggggtgggaacaggggaagcatagtctattcagggctccacagttccagaa

SEQ ID NO: 112510 - DNA, 201 bp, Homo sapiens
ttttgtattttagtagggatggggtttcaccatgttggtcaggctggtcttgcactcctgacctcaggtgatccgcccacctcagcctcccaaagtgctggattacaggcgtgagccaccgcgcccggcgctgccttccctttctcttaaactaatttaccttcccagttcctccatttctcagtaactgaggctcaaatc

SEQ ID NO: 112511 - DNA, 201 bp, Homo sapiens
agaaatcaacaactgtaagacaccctctcccattgcctgcccagactcttcctcgtccaggtgctgatttgtctaccaccaaaaaaattgtaaaggatggkgtaaatgtcaatttctgggtttcatactatcctataattcggcaggatgtctccattggaggaaatagggtgaagggtacagggaccctctctctactat

SEQ ID NO: 112512 - DNA, 201 bp, Homo sapiens
tctaccaccaaaaaaattgtaaaggatggtgtaaatgtcaatttctgggtttcatactatcctataattcggcaggatgtctccattggaggaaatagggkgaagggtacagggaccctctctctactattttttgcaacttcctgtgaatgtatatttatttcaaaattaaaagcaagggttaaaaatggtaaattgtaa

SEQ ID NO: 112513 - DNA, 201 bp, Homo sapiens
tcctttttgaggctaaataatattccattgtatgaacataccacattttatttatttgttcatcagttaatatgtatttgggctgttttcacttcttggckgttgtgaattgtgttgctgtgaccatctttgtgcacgtttctgaggcgtatgttttcattcccttgggtgtagttgctgtacagaatcattcttgcactg

SEQ ID NO: 112514 - DNA, 201 bp, Homo sapiens
ctctcacctccactctccatgaccagctcttcctgagggcttctgggaacagagctgctgccttcccgaggctggggttgggatgaggacgtgtgtgctgrgcgagggtcaagtattctcagagcaccgggcccactgccccagctgaggccctgtcaggccctgtggctcaaggcgatgtttttccctctcaccattttg

SEQ ID NO: 112515 - DNA, 201 bp, Homo sapiens
acgtggaaggatgcctgggatgctgagcgtgaaggagagcatgtactgggaaaccgtgcagacggggatgtctgcctcgtttgtctctgttggtattcacmaccatttcttgcatgagccagatgttggcccacgagcgcagaggtaggacagctgccaccagccatggcatgcagccaggaacaggtggatgtgggactg

SEQ ID NO: 112516 - DNA, 201 bp, Homo sapiens
aaatctgagacagggcattattctaatgacatctagagcatgaggcagctcagcaaggagcctccgcaggtcacccatccagactcgaagtccttcaagaygcacgggcagccccggccattccacacgtgcaccattgctttgctttttatttctttgcccctctatcctggcttctgcccccaccttattctttctgct

SEQ ID NO: 112517 - DNA, 201 bp, Homo sapiens
agaaggcaccatgacttgttcaaggcgtatacccagcccagctcaggattacgatacagagttctgactctgccccctcagcccagctcaggattacgatwcagagttctaactctgccccctcagcccagctcaggattacgattcagagttctgactctgcgcccccagcccagctcaggattacgattcagaattcta

SEQ ID NO: 112518 - DNA, 201 bp, Homo sapiens
acaaaagaaaaaaaatagctgcagttacaggacctggaggagatatcacctgattcctggacagggcactggtcaccagtctggactgcctcattatgggmgaagttcatttgttataaagtttacttattacaaagtatgtctggggattgggggggaggtatttttttgcttggttcaacaggaatgctcttaacagca

SEQ ID NO: 112519 - DNA, 201 bp, Homo sapiens
ttaaagggacagctcttttgaagaaggaagagaggttatccagttataattttgaacccctttcttgtgaaactccatgccactcgccatttatatcctgytttagattgttggggtttatttatttgaatacctacaaagtggacatctcgggatcattatcgttaagaatatgtatgaaaaaaatttgtcttcaatgca

SEQ ID NO: 112520 - DNA, 201 bp, Homo sapiens
atgcagacctagagctcagaggccatctgggcaggaggcctgagtttggaagtcatctggtaagaggtgaagctggactatattacctagagggagtgacyagaaagagaagaggctgagaagagcagtaggaagaagagagttgtgaaatgggatgtttggcaacatctcttagagagagctcggcagggaggccagttg

SEQ ID NO: 112521 - DNA, 201 bp, Homo sapiens
acactatgtacagccattaaagatcattggaaaggggttaacattacacgtagcatccatttttgttaatgtaagtgtgagatgaagcattttcagtgttkcttagcttacactttttttttccttttgtagatcgctaagcaaagtaatttgctgaatttattgatgtttggggtagtggtagttgagtctctgaaacca

SEQ ID NO: 112522 - DNA, 201 bp, Homo sapiens
aagtatttggatgaaaaaatatattgttactatagtacataattgtgcagtaagaagataaactggatgtgttctaattctagataatggtagggttttggagtcatgcccatcttcccatcagcttttcaggggtcactgttttctaccacagcagctgttcttaagcttgtgcttttttagttaaggaactcaaaatag

SEQ ID NO: 112523 - DNA, 201 bp, Homo sapiens
ctaattgtctgtgtcacttcttggtttgaaatgctcaaactacccttgcaaaaaaaaaaaaaatactaaactggccctcatctgacatcccagtgagttcycctcccaggacagacgcactggagcagtggcatgtgcagggcaagggcgccctccccagggcagcctggccactgcacgttcccgatggagaatacacac

SEQ ID NO: 112524 - DNA, 201 bp, Homo sapiens
ttttttctgtcgttttgattatagccatcctagtgggtatgagtggtgtaagatataccttttatacataaaacaaccagatctagattagaaggctaackttgacctagttaccctttaaggaaggttaagacagcagggaggcggggatggacatggaccttaggccagtcctctgtatctaaactcaattctctgtgg

SEQ ID NO: 112525 - DNA, 201 bp, Homo sapiens
attgtaaataatctgtgccatcatttctcccgctatatctaattgtctgtgtcacttcttggtttgaaatgctcaaactacccttgcaaaaaaaaaaaaaatactaaactggccctcatctgacatcccagtgagttcccctcccaggacagacgcactggagcagtggcatgtgcagggcaagggcgccctccccagggc

SEQ ID NO: 112526 - DNA, 201 bp, Homo sapiens
ctttctaagtcactgtcagtcctggctgcgtcatgctttccaagggtttttactgatggattctcagtttcagcctaggaaggttgtcaggatctctggcytgctttctttggctgttcatctgtctcagccatcaacatggtctcttgataacttagattgttggttaattagagaacagctttagtttgcccttttagc

SEQ ID NO: 112527 - DNA, 201 bp, Homo sapiens
tttgaaaactctagaacaatggcatttccagtcaccagtagttgaattttatgaggtcctttagcagtggagcatagaagaacaagcagctgagttcttaytttgcataaactcagaaagattttgttctttggcacttactctgtgtagaggttggcaaaacaggcaggttttatctttagcgtaaaattatccagagta

SEQ ID NO: 112528 - DNA, 201 bp, Homo sapiens
tgcaattgcagtgagctatgatcatgacactgcctgggcaacagagggacaccccatctctaaaaaagaaaaaaaaaacatagagaaaatggtgtctcacrtgcctggctcagtctgcttctccttagtcttatgcctttcaatctggagtagttggggtagagctagagataggccatagccatctgagtatgaggctgt

SEQ ID NO: 112529 - DNA, 201 bp, Homo sapiens
gcctgggcaacgcagcaagtccccatcccccaaaattttttttaattagccaggcgtggtggtgggtgcttataatcctggccactttggaggctgaggcrggaggatcacttgagcccaggagtttgcaattgcagtgagctatgatcatgacactgcctgggcaacagagggacaccccatctctaaaaaagaaaaaaa

SEQ ID NO: 112530 - DNA, 201 bp, Homo sapiens
ttgtaatcctagctccttgagatgctaaggcaggaggatagcttgagcccaggagtttaagaccagcctgggcaacgcagcaagtccccatcccccaaaaktttttttaattagccaggcgtggtggtgggtgcttataatcctggccactttggaggctgaggcaggaggatcacttgagcccaggagtttgcaattgca

SEQ ID NO: 112531 - DNA, 201 bp, Homo sapiens
acagccccgggagcgatccgcaccctccacagtcccgggagcgatccgcaccctccacagccccgggagtgaaccgcaccctccacagccctaggagtgcsgttaccaagggagaggaaggagaagggaatagggatgagatctcttaaatagacatttgatgacattttccccaatttgttagttgcaatgacgaagact

SEQ ID NO: 112532 - DNA, 201 bp, Homo sapiens
cttgtaatcctagctccttgagatgctaaggcaggaggatagcttgagcccaggagtttaagaccagcctgggcaacgcagcaagtccccatcccccaaaattttttttaattagccaggcgtggtggtgggtgcttataatcctggccactttggaggctgaggcaggaggatcacttgagcccaggagtttgcaattgc

SEQ ID NO: 112533 - DNA, 201 bp, Homo sapiens
cgcccgcctcagcctcccaaagtggtgggatcacaggtgtgagacaccacacccagccttttttaagtgaacatgagacattcagaaagacaacaagccgrtgcagcatgctgacaaaagtggataagagtgaggacaactgcgtgttcatgattgaggcagacacctgagaatgaacaagcgctctatctatagtcaccc

SEQ ID NO: 112534 - DNA, 201 bp, Homo sapiens
tatcataagatttagttttactcttgcttttaaatgcaaatagacctgacatttgaattttttaatgtaaaatgcctttttactttaaaaaactttatctraaacaatttgtcctttttaagataaagtttcccaataagttatatgagctcccaacaccccctccgcgctgctcccaaggaaatttatatcccctcctct

SEQ ID NO: 112535 - DNA, 201 bp, Homo sapiens
atagtgggcagggatatgaacttgctcatcactctgccagcaacaacacagaggaaataagaggccgactccccactgcctccctccacattaagaatatmccatatctaacattcaaggcttacaggaaggatggagatggagtgtgtactgggagaggggaagcaaaaagatgcacccctggcttctttcacatggcct

SEQ ID NO: 112536 - DNA, 201 bp, Homo sapiens
agcagtgttatgctattatatgtaaacattttgaaaaacaagcctgctggattctagaaagaaaaaaggttatgtggactgagggctatttttagaggaayaccatggggtcgatattcgtaagtttgggtttcacaatacttcttgctgctatacagaacagactgaaaaaatacagacataaattcatgtgtccctatt

SEQ ID NO: 112537 - DNA, 201 bp, Homo sapiens
aacaaaacaaaacaaaacaaaaatatatatatatatattgttttggtgacttaaggggtttttttggccttccaaagcccccatgaaagtgtagctatctyaggaaagtgcagtgtcttaaaaatatgcttctgaaactgggtgtatcagaaggtactcaaaggcaacagggtaaaaacagtgcgtcgttttggagggtca

SEQ ID NO: 112538 - DNA, 201 bp, Homo sapiens
aaacaaaaatatatatatatatattgttttggtgacttaaggggtttttttggccttccaaagcccccatgaaagtgtagctatcttaggaaagtgcagtrtcttaaaaatatgcttctgaaactgggtgtatcagaaggtactcaaaggcaacagggtaaaaacagtgcgtcgttttggagggtcagggttacttgtcaa

SEQ ID NO: 112539 - DNA, 201 bp, Homo sapiens; identical to SEQ ID NO: 18746

SEQ ID NO: 112540 - DNA, 201 bp, Homo sapiens
atcttacggccttgctaaagaagatgaaggcctctattagaatctccaatatttctgagtcaggccaatggcacgatgtatcaccattttacttccagttwtctccacggcctgttttcctgtctctaatccttgtggacaggaactttttgatattgatatataacatatgcctgcgaaccatattcattcaattaacaa

SEQ ID NO: 112541 - DNA, 201 bp, Homo sapiens
gccttgctaaagaagatgaaggcctctattagaatctccaatatttctgagtcaggccaatggcacgatgtatcaccattttacttccagttatctccacrgcctgttttcctgtctctaatccttgtggacaggaactttttgatattgatatataacatatgcctgcgaaccatattcattcaattaacaaatgtttac

SEQ ID NO: 112542 - DNA, 201 bp, Homo sapiens
tgcagctactttcaccaacctaatacctaattttaatcatatacaaatgcatttaaagtataaacttctggaaaacaggatcagtgtttgatttatatatygccctcaagttaccacaacaacagtaacttgaattgctaggctgccagctatctcttgaatgcacaggtaaataaataacatttcagtgcctctggaata

SEQ ID NO: 112543 - DNA, 201 bp, Homo sapiens
gcttccactcccatccctcccaccagccaaacaggtctcattgctgtgtgtcattcttttacctcagtgcttctacaaaacatctctgaagcatgctttgsccagtgctatatcacagctatccccaaccttcttggcaccaggaaccaatttcatggaagacagtttttccatggaccgggtcaagggaggggatggttt

SEQ ID NO: 112544 - DNA, 201 bp, Homo sapiens
agtcgaatcccatctccctgaatagaggtgattgtcgcttggagatccacccatgagggatgaatatttctgaagtcacactttaggccagtcggaggcayaggcaaaaggcggaaatggaaaagaggagaaagaacaaagaagcaaaggacataagaactcagccctgtgtctgctaggaaagaaaccttttctctaaat

SEQ ID NO: 112545 - DNA, 201 bp, Homo sapiens
tggtgtttctgggaggggacagagtaaagcagaacctcaagcactgaagagctttcgttactgcctgctgtgcaacagggaaattggagttttgagtggargaatctcagaaaagagtataatccttgcaatggtaaaaagaacctgtgggcacttgagatctaatgacagaatgaagagcaaaggctggggtggagaagg

SEQ ID NO: 112546 - DNA, 201 bp, Homo sapiens
gccactatttcccatattcccagctgagtgcgggagcaggtagacgcagtccgaagatcacaccatcaagtgcagtggccactgatggcctggaagcatarctggggtgcaggcagggttgtggccgctcgcagcctctaagccctcagggacagtgcacacgtggagagaagtcctttgggggattgagcagttttttga

SEQ ID NO: 112547 - DNA, 201 bp, Homo sapiens
aagggtgaatcagtgatctgaaagcagcagcaggctcccggaatacaccagcaccctcctctgggccctgtggaatatggggacatgctagaatttagcarcttcctcttgcacatttcagttaaggcaagtaggtggaggatgtgtccttccaagtcattggaggtagatgagtttgccccacagaggccagtagaaagg

SEQ ID NO: 112548 - DNA, 201 bp, Homo sapiens
gtttcaggtttttctgtctggctcctggattcccttaggcaatatttctttgtcgtctcactggggcccaggtctgcttgttacagcaccccatgtgcctrcagttctgcaggtggtaaacgtgagtggctccctgctccggaggaccagtggggcagcagtggcggcagctgccagtctccctgttcccaggtcccctgt

SEQ ID NO: 112549 - DNA, 201 bp, Homo sapiens
tcttctctgtaccagacacatacagtggtgagccagaaagattaaagttcctgctatgtggggcttacattgtaccaggagctcacattatcagaaagaarctttctgctcttcttcactctgttatatacccagagtccgtgtgaccttcaaatgatccttgagcttcctctccataggcatcgtgatccatttgattat

SEQ ID NO: 112550 - DNA, 201 bp, Homo sapiens
taattttgaattttgtaatcattgccttctaaaagttgtttgaatctttttgctgcaaacccttttttcattgttttgttttcattattggttattggtayttttcttgaaggtctttttgatattgcctatgatattttgataagctcatttattcattaaacatgtattgaatatcttctctgtaccagacacatacag

SEQ ID NO: 112551 - DNA, 201 bp, Homo sapiens
ggcttctgtttcttatttcatctctttatctacagatcttgtcacccaccgaacctgagaccagtaccctagttattctccactgtattcccagctcctgkcataatgcttatatagtaggcatttagtatgtatttcttgaataaattgtaattttgaattttgtaatcattgccttctaaaagttgtttgaatcttttt

SEQ ID NO: 112552 - DNA, 201 bp, Homo sapiens
tgacgtttgccctttgttacatttatcctagagtgtcttaacattattttaaagtgatggatgttttgctcgtaggaaatcattcagaggtgtaacaaacrtagtaccatgatgaactagtaagacgacatgttctgggaatggcttgcacctgcctgttgtgcatatgtgtgtccatgtgtggacaggcatgcttttaag

SEQ ID NO: 112553 - DNA, 201 bp, Homo sapiens
acctcaggtgatccgcctgcctcggcctcccaaagtgctgggattataggcctgagccatggcgcccagcctattttttcagacagtttcactcttgttasccaggctggagtgcagtggcgcaatctcggctcattgcaaccttcgcctccgaggttcaagtggttcttctgcctcagcctaccgagtagctgggattac

SEQ ID NO: 112554 - DNA, 201 bp, Homo sapiens
tttaatggctacagggtttcagtggaggaaaatgaaaagattctggagaaggatgctgttgatggttgtacaacaatgtgaatgtacttaatgccacagasctgtacacttaaaatgaataaaatgataaatgttgtgttttgtgtatttaacacacacacatacacatcagtattgtgtgtgtttgaaagtctagagcta

SEQ ID NO: 112555 - DNA, 201 bp, Homo sapiens
gccctagcccacttctcttttattctctcttctctgccttctccacccccatcctcaccctcacccttctctatccacactcagcccatttctgtctctgrcagtctccacgtccaatcgtgtcatgggcttcttaccctgccccagctccagcctctgggcctctgagctcttcctcccttgaggctgtctcctctgaga

SEQ ID NO: 112556 - DNA, 201 bp, Homo sapiens
attctcctgcctcagccacccaagtagctgggactacaggcgcccaccaccacgcccagctaattttgtatttttagtagagacggggtttctccatgttrgccaggctggtctcaaactcccgacctcaggtgatccgcctgcctcggcctcccaaagtgctgggattataggcctgagccatggcgcccagcctatttt

SEQ ID NO: 112557 - DNA, 201 bp, Homo sapiens
ctcgtgaatgtccgattgtggacacttctaggacaggttcctggtgaatcccctgagatcaattaaatacagaacaagctcccaggtagctgaaccatccsagctgttatacaaaactgtttgtattagcctagttttaattatccaaaaagtaatggttcccttttttttaaggatcattggtattctagcctttctttt

SEQ ID NO: 112558 - DNA, 201 bp, Homo sapiens
tgatagcatctagagagaactggttgtttaagggacaggaatgagagggcgaatgattttccaccttacatcttttttacctgtgactttaagtttttttwaaacatcttttttttttttttttttttgattcggagtcttgctctgtcacccaggctggagcgcagtggcgcaatcttggctcactgcaaactctgcctc

SEQ ID NO: 112559 - DNA, 201 bp, Homo sapiens
aaacagtcatcacgtgtcctacagatggaagggctggccaaccagaaagaaaagaaaaagtcgagtcagcagaacttggtgattgattggatgaggagacyaggcctgagggctgcagggagtctaggaggagtctcaggagcagggcctgaggaactaagaaggggctctggctgagaccagacaggagcagccactgtc

SEQ ID NO: 112560 - DNA, 201 bp, Homo sapiens
ccaactgtgatagcatctagagagaactggttgtttaagggacaggaatgagagggcgaatgattttccaccttacatcttttttacctgtgactttaagktttttttaaacatcttttttttttttttttttttgattcggagtcttgctctgtcacccaggctggagcgcagtggcgcaatcttggctcactgcaaact

SEQ ID NO: 112561 - DNA, 201 bp, Homo sapiens
attccaaagattttatgcattatctttttcattattttaaagacactttcttggctgggcatggtggctcaagcctataatcccagcactttgggagaccraggcaggtggactacctgaggtcaggagttcaataccagcctggccaacatggtgaaaccctgcatctactaagatatacaaaaattagccagacatggt

SEQ ID NO: 112562 - DNA, 201 bp, Homo sapiens
taatggaaggaaagatcctagaccacaggccctgggttccacctgattggctgcggcaggcagcatgagcatccctgccgggggcatcagcttcccttctytctctgtcctctcatgcacttgttctgcgccatggccaggtactgttccctatgggggtggtgagaatgtttttaagggcctatgctcagggaccctcat

SEQ ID NO: 112563 - DNA, 201 bp, Homo sapiens
ccacctgattggctgcggcaggcagcatgagcatccctgccgggggcatcagcttcccttctctctctgtcctctcatgcacttgttctgcgccatggccrggtactgttccctatgggggtggtgagaatgtttttaagggcctatgctcagggaccctcatagagcagaaacccagattctgcaggtctggaagagcct

SEQ ID NO: 112564 - DNA, 201 bp, Homo sapiens
actctgtctcaaaaaaaaaaaaaacaaaacaaaacaaaacaaaaatatatatatatatattgttttggtgacttaaggggtttttttggccttccaaagcycccatgaaagtgtagctatcttaggaaagtgcagtgtcttaaaaatatgcttctgaaactgggtgtatcagaaggtactcaaaggcaacagggtaaaaac

SEQ ID NO: 112565 - DNA, 201 bp, Homo sapiens
ggctggtagcacaaggccacagtaggaaagcattttgcaggtaaccaaaattgcaggtccttggcacatccaacagacacagcttagcatatctagaagagtagatacagggcttgtcttttaggcaatccttcataagtagtgctcagttcaccccaacttttcatacattttaaaccagtggtccccaacctttttggc

SEQ ID NO: 112566 - DNA, 201 bp, Homo sapiens
agagcctgaacatctgcagatcacgtacagagtcagggcctttcccctaaacccctttcactcattcatttattcactcagtattgactaaggccacctartgccaggtgccaggtgccagggagcaaccagtgaacaagacagacgtaccttcataaagcctgtgtctagcagggaaatctgagaagaaaatgacaagtc

SEQ ID NO: 112567 - DNA, 201 bp, Homo sapiens
cagtgtgccctgaagggagagatgtgataatcccacaggtgaagactccttttgccaatcctgtggcagtaagagtccagtttatattattcaacagtttwttttgagactgcattttttggcttgaccttccatgtctgttcttcttgtgttttgacagatcaatgccaagtgccattctgatattgtttagttagtatt

SEQ ID NO: 112568 - DNA, 201 bp, Homo sapiens
ggtttcaccatgttggtcaggctggtcttgcactcctgacctcaggtgatccgcccacctcagcctcccaaagtgctggattacaggcgtgagccaccgcrcccggcgctgccttccctttctcttaaactaatttaccttcccagttcctccatttctcagtaactgaggctcaaatcctccctcttgcctacacatagg

SEQ ID NO: 112569 - DNA, 201 bp, Homo sapiens; identical to SEQ ID NO: 18743

SEQ ID NO: 112570 - DNA, 201 bp, Homo sapiens
tttctggccatccttcactgctctatctgaggattattagatgctttgggaagagtcagaaagaaccctgccttctattacatgtttcttcaactggatgrctagcaagctacaatttgaaatggtcttcagaaatactgctcttaacaaagctaaggcgttttttttttgttttctggtttttttttaaatcacatatag

SEQ ID NO: 112571 - DNA, 201 bp, Homo sapiens
aactttgtattccttcttcgatatttttatctttccttttctgtgttttcctactcatgtagaaccttgggttttgaattctatatttattattagcctgycgttgcagaaaggctttccctctggtgaaattctattcatccttcaaagacatcaccttccctggaaagacttctcaaagcccctggctgagttactccc

SEQ ID NO: 112572 - DNA, 201 bp, Homo sapiens
tattttatattttcacactttttccagtggcagtcagtaaacacattttcttctgatgaaaccactttgtaaccaagtaaagctcaaacacaggggtaaaagaacagaccttgagctatgttcttaagactaacacaaccagattatttttctgtttaaagaatttgaaagtaatttacatccacatacttaatcttgtgc

SEQ ID NO: 112573 - DNA, 201 bp, Homo sapiens
tcccaaggtgctgggattacaggcatgagccaccacacacagcctaatgctcatttttaataatgtaatattttgagcttacagccattgtctattaacaycactccacttgtttattaaaacctcaatatccacctacgggaaaatggctttccctctgcgctcaggaagagatatatttgactgtactttgttcttgta

SEQ ID NO: 112574 - DNA, 201 bp, Homo sapiens
ggaggctgaggcaggagaatcgcttgaaccagagaggcagaggttgcagtgagccgagatcacaccactgcactccagcctgggtggcagagtgagactcyatctcaaaaaaaaaaaaaaaagtgtaagcaagccaggaaattataactgagacaatgtgtgtgtgaaggccttgtaatctgtaaagcacttacagattaa

SEQ ID NO: 112575 - DNA, 201 bp, Homo sapiens
ccaaggggctcccccttgtttgtgttaatttgtatttctgtgttgcaccctctgtggtgcagggaggtgatggccccttgcctgctgtgtatatgagggcrtgcactcattttctgagcccttgcctgctgtgtatatgagggtgtgcactcatttcctgagcccttgatagctgcagctgaattttcttttcggactgga

SEQ ID NO: 112576 - DNA, 201 bp, Homo sapiens
gaggccgaggcgggcagatcacgaggtcaggagatcgagaccatcctggctaacatagtgaaaccccatctttactaaaaatacaaaaaattagccaggcrtggtggcacgtgcctgtagtcctagttactcaggaggctgaggcaggagaatcgcttgaaccagagaggcagaggttgcagtgagccgagatcacaccac

SEQ ID NO: 112577 - DNA, 201 bp, Homo sapiens
gctgaagcagatattattaactctggcagagaaagcacattggtctcacaggcaagaagcggaagttctcagctcagatgatattttacctcatgatctcrggcaagttgcctatttgcctaatttaccacatctgtaaagagtcaagtttatgatggtggtggcagcagtgatgatgtgtgcttgtcagtgctgcttcct

SEQ ID NO: 112578 - DNA, 201 bp, Homo sapiens
gcctagagtaggaactcttaatttaaaagtataagtggccgggcgcagtggctcacgcctgtaatcccagcatttggggaggccgaggcgggcagatcacraggtcaggagatcgagaccatcctggctaacatagtgaaaccccatctttactaaaaatacaaaaaattagccaggcgtggtggcacgtgcctgtagtcc

SEQ ID NO: 112579 - DNA, 201 bp, Homo sapiens
aacaagattccatttcctttctaaaagaagcctgtccctatgcgtctttcatatacaacagttttcctttagtgtatttccatgtgctggagtgctcccawaaaaggcagcagtaatgctgtgtatagaaaacttttgcaagagtttcatttgggaatttttattatgatatccatccttctcccatttagtcctcatatc

SEQ ID NO: 112580 - DNA, 201 bp, Homo sapiens
taactggctgctgtagcagccttctgacctgtcctccgggtgcccctgcccctactccaccccacacatggtctgttctccacacaccaccaccacagtgwtctttttcaaaagaaagatcgggccactgccccgttcaaccccttcaaggctcttgcttcgtgacaccctaacataaaacctgaagccagtgtgaggtcc

SEQ ID NO: 112581 - DNA, 201 bp, Homo sapiens
tccatttctgcttccattcgtgtttcccttttacttgcaggaaatttgcttataaagtgtggagggggaaactctttaccatttttgtaagttatgctgtrctgttttgaaagggcttctttagcatcaagagatgccagcttggctgacattaaattagataataatctttccctgacccttcttcatgcttgactctaa

SEQ ID NO: 112582 - DNA, 201 bp, Homo sapiens
ttgaactcctgggctcaagcaatcctcccgccttggcctcccaaaatgctgggattacagatgtgagctactgcgcttggcccccttagagatttttttasagggattattataacagaccatctcttttaaacaaaataatattcagatgagatcttcaaataatttataaactgtaagtctgtagggttagtttgagtt

SEQ ID NO: 112583 - DNA, 201 bp, Homo sapiens
ataataataaaagatccgtctcacagtaggcagggtaggggactcagtaattctgtacagaaaagaagcagtgcttctgtgtcactcttgctccgtctatscatcccatccaccatcctgttagaacggcattgtttattaaaagtcccaggcctggggtgaggagacctgaaccctgatgcccccctctgacactgtgta

SEQ ID NO: 112584 - DNA, 201 bp, Homo sapiens
tccgtctcacagtaggcagggtaggggactcagtaattctgtacagaaaagaagcagtgcttctgtgtcactcttgctccgtctatgcatcccatccaccrtcctgttagaacggcattgtttattaaaagtcccaggcctggggtgaggagacctgaaccctgatgcccccctctgacactgtgtaatttgggtgaagtt

SEQ ID NO: 112585 - DNA, 201 bp, Homo sapiens
tgtgtgaaggccttgtaatctgtaaagcacttacagattaaggtagtagtaatatggccgggagtgtttgggagtttcttatttaggttggaggatcttasggccttgctaaagaagatgaaggcctctattagaatctccaatatttctgagtcaggccaatggcacgatgtatcaccattttacttccagttatctcca

SEQ ID NO: 112586 - DNA, 201 bp, Homo sapiens
gtaacctaaaataacaaagttggtatggagccagcttaacaccggattctccaaagccaacgtttttccccgtattccacgttggttcaggcaggtacatkccctgcttccacctccttttgcatttttggatgtgcttctttatgtaagtgataataagactgacgcgttccagtgtccctccaagtgggcccccgccat

SEQ ID NO: 112587 - DNA, 201 bp, Homo sapiens
taggagctggagggatggaggactctcccgaaacagtgttttagtgttgtgcctgacaggaaaggagagttagggtaggagctggagagggatgtaacgtwgatggatgactaggggtttggttggcattaggaggggtggcttaagggaagtattgcttttttattacacagataatctgtggttattgtaataatattt

SEQ ID NO: 112588 - DNA, 201 bp, Homo sapiens
gggattacaggcctgagccactgtgcccagcctcatgtatttttaaatctcccactggctttgcctagagtaggaactcttaatttaaaagtataagtggycgggcgcagtggctcacgcctgtaatcccagcatttggggaggccgaggcgggcagatcacgaggtcaggagatcgagaccatcctggctaacatagtga

SEQ ID NO: 112589 - DNA, 201 bp, Homo sapiens
ccccgtctctactaaaaatacaaaaaattagccgggcgcggtggcgggcgcctgtagtcccagctactggggaggctgaggcaggagaatggcgtgaaccygggaagcggagcttgcagtgagccgagattgcgccactgcagtccgcagtccggcctgggcgacagagcgagactccgtctcaaaaaaaaaaaaaaaaaa

SEQ ID NO: 112590 - DNA, 201 bp, Homo sapiens
gttgttactccctaaataattattttcattttcttagcagtcctttctttccctggccatgctcacaaagctgggacctacattggatactactactgcgsgtttacaatcctcagttgacctgtctgcggggagacggaagcccctgagtactttgcccaggatgtcttgtctttggaactccactcctccccagcttgg

SEQ ID NO: 112591 - DNA, 201 bp, Homo sapiens
ggaggccgaggcgggtggatcatgaggtcaggagatcgagaccatcctggctaacaaggtgaaaccccgtctctactaaaaatacaaaaaattagccgggygcggtggcgggcgcctgtagtcccagctactggggaggctgaggcaggagaatggcgtgaacctgggaagcggagcttgcagtgagccgagattgcgcca

SEQ ID NO: 112592 - DNA, 201 bp, Homo sapiens
ttgcagaaaggctttccctctggtgaaattctattcatccttcaaagacatcaccttccctggaaagacttctcaaagcccctggctgagttactccctcyttctctgttctcagagcactgtgtatactcctgttataaaatagagtaatttgtaatatgtgcccaataccaggagctttgtaaagcttgtcctgttttg

SEQ ID NO: 112593 - DNA, 201 bp, Homo sapiens
ggggcactgcaaataaaagaaagcacagggtacaggcaaaacaaatgggacaagtgtgggtggagcagacacacgaactgagcatttgcccttcaaattcrcccttgaagaattctcccagccctgctatatccagctctttaagagcagaaatcctggccgggcgcggtggctcacgcctgtaatcccagcactttggga

SEQ ID NO: 112594 - DNA, 201 bp, Homo sapiens
cacctcaggctcccaaatagctggggctacaggcatgcagcaccacacccagctaatttttaattttttttttttttttttagagacagggtctcactgtrttgctcaggctggtcttgaactcctgggctcaagcaatcctcccgccttggcctcccaaaatgctgggattacagatgtgagctactgcgcttggccccc

SEQ ID NO: 112595 - DNA, 201 bp, Homo sapiens
aacttactgaaagctatactgaaagtggaaacacagtggttgtatgggtactcgaagtatggtttgtacagaatgcctgttgctctcatgccatcataaaktcgagaaatcctaagtcaaaccatcgcatgtctgggaccatctttagactaaattcaggaaacaagatatgttagaaatacggtgtcttcaaaatcattt

SEQ ID NO: 112596 - DNA, 201 bp, Homo sapiens
ttattttcctaaatctgtttgcttagtcatcccagaatggtagtggatcagcctgcgccacgagcaaagatcaaagtggattatccgtaggggaagattaracagttaattctaaaggaaaaactttaaaattcatttgaaagcatagcctcagacacgctgacaccttttcttttttttcctctgaattcatttagaaca

SEQ ID NO: 112597 - DNA, 201 bp, Homo sapiens
ctgcccacatcgtcactgttgttgtggccctctcggtgcctcatgctaggtggccatgcagacagcaggtcccaaccctctatcccaagctaggtcagaamtgcttctcctcacagagtaagggactcaggtctggatctgtttcttcctgtgttctggctgaactcacaaactagcccagagaggagtctctcttctcct

SEQ ID NO: 112598 - DNA, 201 bp, Homo sapiens
ctcacgctccctatttccttgaacttcttgctcccatctcaatgcttgtgcaccacctgcctggaggagtccctccaaatgttcctgtagctccctccccyttccacccaggcctgtgctcagatttcaccttcccataggggcccccctgggaccacactatctaaaacagattctctctctctccgctgccctgcctta

SEQ ID NO: 112599 - DNA, 201 bp, Homo sapiens
gaagacataccaagattttcagattaatgcttcccctaattctagagtattttggagaatatctctctggagaagcaataaggatcagtggtttgagctaygactttgaaagcagacatgtaaagaggtttgaatcccagctttacgacatgctatctgaccttggttaaccactgaaaatctccctagcctcagtttcag

SEQ ID NO: 112600 - DNA, 201 bp, Homo sapiens
tctcattggaattctgtttgattgtattaatagttctcttaactcagacgttttgaggttaaaaaatagatcgcagaaatgatctttcgtgataaaaaaarcaaaaatcacagtgacttccttctagaaatttcccctaattttcttttcaccctatctttccccaaaattgtgactcctgaactactttgacttacatat

SEQ ID NO: 112601 - DNA, 201 bp, Homo sapiens
aaaaaaacgtggagaccagagaaataaacctgcagaccagagaaataaacctgccatagccaatttatctcactctgtgtgtggcaagggctttggaaaaraatgttatcattaatcgtggtttgtgacagtgcattcagtgtaaatttttattgccaagaatacttgcccaaggtttttctgttcctgtttgtttatgct

SEQ ID NO: 112602 - DNA, 201 bp, Homo sapiens
attatgaacctttaaaatactccctctcaaactgctaggcatgttgcccctggaaatctttgtttcttccagatttgaccctcttccagcctggcaaaggmaatggctgccactctagatttctgcttgacagacatgacctcaagacctgcagacttgaccaggcatggtggctcacacctctaatcccaacactttggg

SEQ ID NO: 112603 - DNA, 201 bp, Homo sapiens
tcatcccttcagagaaccagttagacagcagcagctgggaagtttctactcacttccctttcatgtcaagactcttcctgaatccacatgcagcctttacmgtagttagggcgtaaggcacagtggctcccccggccatctggctgcaagctggcgtaagttgcctttggactaacagcctatggcaaggtggagagtctg

SEQ ID NO: 112604 - DNA, 201 bp, Homo sapiens
tgagctcaaataagaaaattgctgaaatttactttttgtctaacattatttccatagtgtaaaataaacataaacagcaagtcattagcaaaaaaaaaaaactgagaattgcccattaaaatgatgtataacataaccacatttatttaagaatttattccagtatcaaacagcaaattccagcaatgcaaaaactgcatt

SEQ ID NO: 112605 - DNA, 201 bp, Homo sapiens
ttgtattatcaaatgatcactaagatagattttcatttaaaaattaaaagcctacagtatgtttagaatgctaccgtttgtgaaggaaaaaaaatgtacasgtagagattttaatatgaacctaatgtctccagaaagctgtataagaaactgccaactgtgatagcatctagagagaactggttgtttaagggacaggaa

SEQ ID NO: 112606 - DNA, 201 bp, Homo sapiens
aattggtcggtgacaacttccaatggccggcgactaggctcctcatcttcaaggctctcgtctcctttgcaaaacttcttgaaccaccacagcactgtacstttgttagcagttcctaggccaaataagttgtcgcaagttgtcgctgcagctttttgaccaattttgagctcaaataagaaaattgctgaaatttacttt

SEQ ID NO: 112607 - DNA, 201 bp, Homo sapiens
ttggtacaccggaccacacaaaaagtgaacatttctacatcacaaaaataaaaagcaccataaacatagccaaatggcaacaaaccagagtgaatattgtmactctgcacaaaaggctagcttcttaaagacctccttacaaatccattcaaaagaccactcgattaagaaaaggcaaaggatataaacagaagtacaaat

SEQ ID NO: 112608 - DNA, 201 bp, Homo sapiens
gctttggagcttcttggtccagccactgagctggtcatcaccagttgtcacataaaatccacttttcatcacacatcacaatctgatcgagaaatggttcrttgttgcatggaataagagaagacaacacttcaaaacgatggtttttttttttttgctcagcatgaggcacccacttattgaggtttttcacatttgcat

SEQ ID NO: 112609 - DNA, 201 bp, Homo sapiens
cgttcctgtgtccctctgacatggccccattagtctctgaacacatccttgctttataacagtttttttttcctttgtcttttcccggtagtataagatgyaatagttattttctatccatagttatatcagaagctgagtatttcaaattagcaaacaaaaaaaggtgtataccccattcatagcttaaaaaaaaatgca

SEQ ID NO: 112610 - DNA, 201 bp, Homo sapiens
cagaccggagtgcagtagctgggattataggtgcccgccaccacgcccagctaatttttgtatttttagtagatacacggtttcaccacattggccagackgttctcgaactcctaacctcaaatgatccatctaccttagcctcacaaagtgctgggattacaggcgtgagccaccgcacctggccttgaaatgtgttta

SEQ ID NO: 112611 - DNA, 201 bp, Homo sapiens
ctcatcacctacaatgacagtggtgtaaaagccctgcattttgtatacttttgcttcatgagggttttcgccacagaaagaggtgctttgtcagcacgttrgactcttaaaatgtttatacggttggttaacaagcaccagcaaaatggtaacaactgcttatcgattcttatatcgagtacgggaaaaatttaaactccc

SEQ ID NO: 112612 - DNA, 201 bp, Homo sapiens
gactccttttgccaatcctgtggcagtaagagtccagtttatattattcaacagttttttttgagactgcattttttggcttgaccttccatgtctgttcytcttgtgttttgacagatcaatgccaagtgccattctgatattgtttagttagtattaaaaagaaaaaagtggcatggtaaccagtaagcatttgtaaat

SEQ ID NO: 112613 - DNA, 201 bp, Homo sapiens
cagagcggcaggacagaaacagcatgtcctaacaaggcaacgtgggagactgggtctagaggtcaattcaacaatggtcacctgaatgatcattgtgttgrcaccaagagcttgtgtctcactgaatggtgccccctagagaggcaggcagtgcctaggaaggggtcatcccggagagctgggtaggctttccagtcagat

SEQ ID NO: 112614 - DNA, 201 bp, Homo sapiens
cttaaaaaggaaggaaattctgatacatgctataacatggatgaatctggaggacattatgctaggtgaaataagccaggcacaaaagaacaaatactgtrctattccaattatatgagctactaaagtcaaattcatagagatagaaagtagaatggtgattgccaggggctgggtgatgaggggttgggggagactgag

SEQ ID NO: 112615 - DNA, 201 bp, Homo sapiens
ccatacacttgattttgtcggtctaaagggggagaagaggggtgtgggaatagagagagaactgaggtttgatgtgaaattcaaaattggagattgtagargcatagcagaattactcagtagtaagcttattctccagaaatttttttaccaactttattgcattggtgcaagttcattccttttgaataggaaaccttt

SEQ ID NO: 112616 - DNA, 201 bp, Homo sapiens
tttcaagtatgcaatacattattattaatagcctccatgttatacaatagatctgcagtggttcttactattcttaacagctcaagcggagcattaaatamgattcaggcttgccttcttatttagttgtcagactgtttttctccaattttgtttatttctagtcacataattgcacagccgaaagatgagaaattacca

SEQ ID NO: 112617 - DNA, 201 bp, Homo sapiens
actttcttagcagttttcaagtatgcaatacattattattaatagcctccatgttatacaatagatctgcagtggttcttactattcttaacagctcaagyggagcattaaataagattcaggcttgccttcttatttagttgtcagactgtttttctccaattttgtttatttctagtcacataattgcacagccgaaag

SEQ ID NO: 112618 - DNA, 201 bp, Homo sapiens
agggactgtcttttttagcacagaacctagaacagtacctgatccacagtagatgctcagcaagagtttgctgggtgaatgagtggatgttacagtgcagrgcatatgagcaaaagggtctacttgttcttaaaacaaaagcatgaactcatgagctgcttacatcctgttcatttattttctttgaagaacaagatccat

SEQ ID NO: 112619 - DNA, 201 bp, Homo sapiens
cctgtgctctttccactggcttagccagctttctgtctttccttagcatgagcacagggcagatgcttggtcattgtttagtcaatgaaggacaagtatcytcattcattcgttcacccattcattcattggacacatatttatccttgtctttgtgccagactttcacccaggtattgggattcatggtaacaaggggcg

SEQ ID NO: 112620 - DNA, 201 bp, Homo sapiens
tgctagtaagcctgctccttcagctgtctgctctcctaaacctccccttcttcctctccacatagcatctccccagtccagaaagaagcctttggcttcckggctttcaagtcatgcttctgcccagctctttccccttctcctctatctgcagggtcatttgcactcataagcttcactgcctccccttaacacctcaac

SEQ ID NO: 112621 - DNA, 201 bp, Homo sapiens
agtgatccacctgcctcagcctcccaaagtgctgggattacaggtgtgaaccactgtgcccggcagacaattataatttttatgtagttacatttcacttmattgtctttgaattttgtgtcatgctgaattcccactccaagacaataaaaattctcttgcatttccttctggtgcttttgtagattttttaaatgttta

SEQ ID NO: 112622 - DNA, 201 bp, Homo sapiens
cattgtgacagaatttttagatcagaccaagtttcacttgcctgggttcgtatcttctcaaagccagttctgtgtatgaccgtgacccagcacagggatcygtatggtctgggaccatttgggagaagggaccgtgaacatattgcagatctctgttgtaactaatggaactcacacagctcagattatcagatgcaggct

SEQ ID NO: 112623 - DNA, 201 bp, Homo sapiens
agtgtagaagatgattttgaggggccaaggacatcaaatgggagttgattacaacagtgcagagtagagattaggacgctagtaaggacaggaatagtggragatagagaagaatgttgtatttgataaatcattagaagggaaaattgttggaactggaatgattggattgaggactaaggaagaagagaatccaagcag

SEQ ID NO: 112624 - DNA, 201 bp, Homo sapiens
aatctagaaggcctcccaaggggtgatgttggatcaaaggcatgaagcagcttggtgtggtcaggcaggcaaacagcacagcactgccagggaggtaagtrtgatggggttgggggggcggtgacaggaaggcactgaggttggagagggccactgatttgagggcctgggggccgtgctgaggaccctggactttaccct

SEQ ID NO: 112625 - DNA, 201 bp, Homo sapiens
aggaaattttaaggaagacatctaatgaccaagaggaattttcatcgtttgtgctttatttcacccataaagtggaaaatctagaattaattgatctaccrtaggtagttattctccataaattttaaataatttaaaggctatgtcttacattattggcaggttcacactataattttaaaataaaatttagaaaactgt

SEQ ID NO: 112626 - DNA, 201 bp, Homo sapiens
tgggcacacatctgacagctctgccaccagcaggcaggcgtcacccagctcagcacagccccgagtcccaggctgcagcctcctgtgctgtttcagagggraggaatgggtgtgtggatctctgtaacttctcacagtgagggaaacgggggttggatggtgctctagtggccggctttgccccgcagtgcagttgccgga

SEQ ID NO: 112627 - DNA, 201 bp, Homo sapiens
atggatttgctgagcatacttctcagatgaaacagttttgccgggattcaagaagctctagtggagcagacaaccaaacagtgagcatgacctttttttgrtgcaagtttggctttgggaagtgctttggagcttcttggtccagccactgagctggtcatcaccagttgtcacataaaatccacttttcatcacacatca

SEQ ID NO: 112628 - DNA, 201 bp, Homo sapiens
ggcactcagacaactgccctcgaccccacccgggatgggccacggacaggtgtctgcattgccctgaatgcagcgcttttcctaccccagcatagacggcrcccatttctgcactgttctaaaaccccttccctatgcgagaatcagttctaagggaaggaagccctcttaggagaggaggtactgggcacacatctgaca

SEQ ID NO: 112629 - DNA, 201 bp, Homo sapiens
ttcgggattctacaaactcttggaaagcattttcttcatcctgctagtcaaggaagcgttttccctgcaaaaagttgtcgagatgcttcaagaagtggaarttggttagcgagaagtcagatgaatatggcggatgaggccaattcgttcaacttgtgaagcgttggttttgtgacatgcagtcaagggtcattatggaga

SEQ ID NO: 112630 - DNA, 201 bp, Homo sapiens
caggaaagatagaaggcaggaggtgcaggcactcagacaactgccctcgaccccacccgggatgggccacggacaggtgtctgcattgccctgaatgcagygcttttcctaccccagcatagacggcgcccatttctgcactgttctaaaaccccttccctatgcgagaatcagttctaagggaaggaagccctcttagga

SEQ ID NO: 112631 - DNA, 201 bp, Homo sapiens
aataagtttattcctgtggcgtaaaaatccgtgcttcgggattctacaaactcttggaaagcattttcttcatcctgctagtcaaggaagcgttttccctrcaaaaagttgtcgagatgcttcaagaagtggaagttggttagcgagaagtcagatgaatatggcggatgaggccaattcgttcaacttgtgaagcgttgg

SEQ ID NO: 112632 - DNA, 201 bp, Homo sapiens
ctgaatgagagcccagttaatagtctcggactatgaataactgtgtccaagaccttattatgtttatatgaaataggttggatttgcttataaaattcagktatcctagtagattcattttctgctgctggaaatagtaaggactgaccctgggtcaaaatttgcatttgtttcctatcatgtagaaacttcagcaaaata

SEQ ID NO: 112633 - DNA, 201 bp, Homo sapiens
caacttaactggtcttaggccttttacgttcttaaatattactgaggaccccaaaaagctttcatttatgtgggacgcatttatcatattagaaaaaaaaagcttttaaaaacacctattttaaagtgactaaatccattatgttaaataacacttttatgaagaataaccatttttcctccccctaaatcagcagattga

SEQ ID NO: 112634 - DNA, 201 bp, Homo sapiens
agttaggtgaagcaagggtatccacgagagcatcgctgcagtgattggtcaccaggtccacgctggcagagcagctgagaggctggaggcaactctgggcyaggaaaataggaggaaccaacgaaccagagatcatgttgaggaagagcaagctcaggggtgacagattgagaaaagtgggaagacaggaaactgagtcaa

SEQ ID NO: 112635 - DNA, 201 bp, Homo sapiens
tttccccgtattccacgttggttcaggcaggtacatgccctgcttccacctccttttgcatttttggatgtgcttctttatgtaagtgataataagactgrcgcgttccagtgtccctccaagtgggcccccgccattgaggcgctgctggtgtttcagtgaagctttttctgttcttgcctccccttgacttaaattaca

SEQ ID NO: 112636 - DNA, 201 bp, Homo sapiens
tccgtagccactaattttctcaccttaaactaggatttctcaatcttggcatgaccaaccttttgggccagctaattctttgttaatgggggctgtagtcrgcaccactgtggtgagttaatacacatcaagtacttaggatagtccctggtgcagaataggtacttgataagtggaattatcatcataagtcaaattaaa

SEQ ID NO: 112637 - DNA, 201 bp, Homo sapiens
gagagagagcaagcgtttcagcgcctacaattacaggtgacccagcgggcaccgggggccgggggcggggggccaggggccggggaccgggggtgcgggcygacccggaatatccccggggactgggagccaccgtggtttgccggcggctgcgaggcaaggaccgggctccgccatcgaaaagcgtgctcctgcctacag

SEQ ID NO: 112638 - DNA, 201 bp, Homo sapiens
gaagaaaagagggagaggacaaatgagagctatgcaggacaattctaaggcaaagaagttggagaagctcacattttcttttcccaccttgtcattcctcyttcaaccaggtttgtggttttgtttttttaaaaacaaacaaacgaaaaccttgtaattgtgtaatcaaatatttcaattatttctttcatggttttgttt

SEQ ID NO: 112639 - DNA, 201 bp, Homo sapiens
aggcacttttaatttcccccattttgcaaacaagaaagctgcagttcatagaatagaagtaacctaaaataacaaagttggtatggagccagcttaacacyggattctccaaagccaacgtttttccccgtattccacgttggttcaggcaggtacatgccctgcttccacctccttttgcatttttggatgtgcttcttt

SEQ ID NO: 112640 - DNA, 201 bp, Homo sapiens
ggaatgggcagatgggcccgcgtggggtcttgttttgttttctttggattttaggttgtggtttttataaggatgtaaagattgtattgtgtgtgttgackgggaggaaaaagccaatgcaaaagaaatcattgacgacacaatacagggtagaaaaccattcatggagcctggtcccagggcaatgaggggaaagtaggg

SEQ ID NO: 112641 - DNA, 201 bp, Homo sapiens
ttttattaaccatctcccatgggccggacacatactaggcccttccttgcattgtcttatttaactgtcataaaaactctattaagcaggcacttttaatktcccccattttgcaaacaagaaagctgcagttcatagaatagaagtaacctaaaataacaaagttggtatggagccagcttaacaccggattctccaaag

SEQ ID NO: 112642 - DNA, 201 bp, Homo sapiens
gtttggcaacatctcttagagagagctcggcagggaggccagttgagcatggcccgtgggaaagaatggaatctgctcacaggggacctggagccagggcstggtcaggaggcaggggcaccagacctagaggagcagtgtggtggtgaagaggaggagaggacacagggaccatttgaaaatctagggaatgggcagatg

SEQ ID NO: 112643 - DNA, 201 bp, Homo sapiens
ttcattttacaaatacaatcataacagctctttttttttattaaccatctcccatgggccggacacatactaggcccttccttgcattgtcttatttaacygtcataaaaactctattaagcaggcacttttaatttcccccattttgcaaacaagaaagctgcagttcatagaatagaagtaacctaaaataacaaagtt

SEQ ID NO: 112644 - DNA, 201 bp, Homo sapiens
atacacatattcaggctcgtagttctgagcccctgggctctcctaaagtcattgttctaaaccactcttaggatgaagagagagatgtgtatgatatacawctaaagtattgatgggttttcaatatctagagggcttatgaccatgtataagtttattctcagttgaatgatcaatttattaattttacacatctaataa

SEQ ID NO: 112645 - DNA, 201 bp, Homo sapiens
ttcttacttcattttacaaatacaatcataacagctctttttttttattaaccatctcccatgggccggacacatactaggcccttccttgcattgtcttrtttaactgtcataaaaactctattaagcaggcacttttaatttcccccattttgcaaacaagaaagctgcagttcatagaatagaagtaacctaaaataa

SEQ ID NO: 112646 - DNA, 201 bp, Homo sapiens
aacctgttttcactgactaaggataaaaaaaaatgcatgccactgaaagctgcagaattctacatttaagtatttaagatgatttctcccacagcagatgraggatgttgtgcagggatagagcacagggaacctttcatttgtgcatcataggaaaggtggaattagaacacagtacttttattttctctttcttcctcc

SEQ ID NO: 112647 - DNA, 201 bp, Homo sapiens
ccatacttacacaaatcccttattatttggtagactgagaagaaaaggtagcttcagagtgaattaacattgattgaatacatgctgtctgtcacgcactrtatgttatagactttaatatgcattgttttatttagtatagagtcactatgaaatgaggattcttacttcattttacaaatacaatcataacagctcttt

SEQ ID NO: 112648 - DNA, 201 bp, Homo sapiens
tgcttatatgctacatgctataacctgttttcactgactaaggataaaaaaaaatgcatgccactgaaagctgcagaattctacatttaagtatttaagaygatttctcccacagcagatgaaggatgttgtgcagggatagagcacagggaacctttcatttgtgcatcataggaaaggtggaattagaacacagtactt

SEQ ID NO: 112649 - DNA, 201 bp, Homo sapiens
caatccttatggctatgtgcttattaatataggtcccttttggacaccaggatgtttaatacctactgccttctaatggggaaaaagaaaatttcaacttmttttctcttaaagggacagctcttttgaagaaggaagagaggttatccagttataattttgaacccctttcttgtgaaactccatgccactcgccattta

SEQ ID NO: 112650 - DNA, 201 bp, Homo sapiens
atttggggaggccgaggcgggcagatcacgaggtcaggagatcgagaccatcctggctaacatagtgaaaccccatctttactaaaaatacaaaaaattarccaggcgtggtggcacgtgcctgtagtcctagttactcaggaggctgaggcaggagaatcgcttgaaccagagaggcagaggttgcagtgagccgagatc

SEQ ID NO: 112651 - DNA, 201 bp, Homo sapiens
cccaggtattgggattcatggtaacaaggggcgactcgaccctcgaggagctaggtaggagcgtattgtgatgcagcaagtaagtacaggggctggggaaracaaagggcaaggaggaagggacttcagtgcgtcaatgacaagcagggcataaggaagggacttcagtgcataagtgactagaagcagagaaagcaagag

SEQ ID NO: 112652 - DNA, 201 bp, Homo sapiens
ccccttcaaagtctgtcacaagttagtgatagcatcaccatgaagtcctcacctctaggcctcacctgtagaaagtaagaatttgagcatattggtttccragatcccttatagcacaagaattttttcaggaattggctctattgttacaacctaaatttaactgccttgttgagatccttggggtttctttcattagac

SEQ ID NO: 112653 - DNA, 201 bp, Homo sapiens
ttaggctaagcactaaccttaggctaaccactaaccttaggctaagcactaaccttaggctcaccactaaccttaggctaagcactaaccttaggctaacyactaaccttaggctaagcacttaatttctccaaaacaaataaaactggggctgttgtgaaattgagatacgataatagtgttttataatctaaaaacaag

SEQ ID NO: 112654 - DNA, 201 bp, Homo sapiens
ggaatgagagggcgaatgattttccaccttacatcttttttacctgtgactttaagttttttttaaacatcttttttttttttttttttttgattcggagycttgctctgtcacccaggctggagcgcagtggcgcaatcttggctcactgcaaactctgcctcccaggttcacgccattctcctgcctcagccacccaag

SEQ ID NO: 112655 - DNA, 201 bp, Homo sapiens
aatccctttgtgcggtgtttgaggcaaattagaaagcaggagtctctgaactcaaatctggttctgtcattaaatcactaaaggacttgggaaaattagayaaattctttttgttctatctattaaatggagacaacagtatcagcctacttttctagaccaggaaaacaattctttgtgtcagatcaacctctgttatat

SEQ ID NO: 112656 - DNA, 201 bp, Homo sapiens
gggcgaatgattttccaccttacatcttttttacctgtgactttaagttttttttaaacatcttttttttttttttttttttgattcggagtcttgctctktcacccaggctggagcgcagtggcgcaatcttggctcactgcaaactctgcctcccaggttcacgccattctcctgcctcagccacccaagtagctggga

SEQ ID NO: 112657 - DNA, 201 bp, Homo sapiens
aatggagacctatgttctgtttctagtcttttggggatcgtaacctctttttaccaaatgcatcgtgaacttttctcatgtgaccccattctctcttgacycatgttgttttaatagcttccagtatttcattgtatagcttatcatttgtttattgtttcccccaaatgttgaatatttacttggtccctaatttttttt

SEQ ID NO: 112658 - DNA, 201 bp, Homo sapiens
gtttcactcttgttagccaggctggagtgcagtggcgcaatctcggctcattgcaaccttcgcctccgaggttcaagtggttcttctgcctcagcctaccragtagctgggattacaggcatgcatcaccatgcctggctaaattttgtatttttagtagagatggggtttcaccatgttggtcaggctggtctcaaactc

SEQ ID NO: 112659 - DNA, 201 bp, Homo sapiens
tgtaggatagatccctaaaagtaggattactgggtaaaatattaagaacatcagtatccatccattagtatactgttttcttcacaggaagtaccagtccrtgctcacaccagcagggtgtacctgtccctttgtcttttcaaaaactgcaggtaatttgatggacacaaaatgatgcctcatttaaattttcatttgttt

SEQ ID NO: 112660 - DNA, 201 bp, Homo sapiens
cgtttgccctttgttacatttatcctagagtgtcttaacattattttaaagtgatggatgttttgctcgtaggaaatcattcagaggtgtaacaaacgtartaccatgatgaactagtaagacgacatgttctgggaatggcttgcacctgcctgttgtgcatatgtgtgtccatgtgtggacaggcatgcttttaagtgg

SEQ ID NO: 112661 - DNA, 201 bp, Homo sapiens
cttatcatgaatcaccagtaagcacctatgttttttccaaaggacttggtttgaggttctgttagatattcctgttgactagatgctcatctgtttcagtratctcacttgaatgtggaagcaccctttgtttcctggcagcctaatttctctgcacagttacagtggttagatgtgtattgatgagcattactctctaac

SEQ ID NO: 112662 - DNA, 201 bp, Homo sapiens
tggcctacatttttgaaatctctctgagttgtagtttgtgaggattaaatgagatcaatatgtatcaagtacttagcacactactctgtgcttggcatgtrtatcagaaattgatgatattcttttgttatcctattgtaccctcaaaacagcaatgcaaatgactgtggaaagcagcccttttctttgaagatttgaaaa

SEQ ID NO: 112663 - DNA, 201 bp, Homo sapiens
aacaattagtgagggcctactgtgtactaggcactgtgctcaggattttgcatacctcagacctcacctccctatgaggtgtcattattatatcccatttkcatagaaagtacctgaaaccagggtatccatggtcacagaactaatacatggccaagctgggacttgaacccaggtctgatggcctaaggtccccagcct

SEQ ID NO: 112664 - DNA, 201 bp, Homo sapiens
tccttaaagtattctttctcttaaccttggagtccagggttttataagtagatatcttggcattgtcctctggttgttaaatttcaacgatgagtcttctsaattttttataatcacttctgggacatttccttccattataaatttaattacccatgcagttcagtttgttcacacttattattcataggttatacacct

SEQ ID NO: 112665 - DNA, 201 bp, Homo sapiens
aggcaatggctgttgggagctgacccagtgacaaatgctaataccctgggccaaatgtcctagcatccaaaggaactggatggcacagcttaaattgggakgggttggccagaccagaacaccaacttttttcaggcaattgcctggcaattcctggcaatttgagaaaaattgagatttttctcaacttcagggccattc

SEQ ID NO: 112666 - DNA, 201 bp, Homo sapiens
tacggtgttactacagaataccaagtgaatttttttctaaatgggctttttcctaagcagagttacattgtgctaaaatacatccatccatctatctatayatcaggagagcatttagaagtcactgctacttaaaaatgttgagcattctcagtttgagccaaattggtttttaaattaaaaaaaaaagcctcaaggaaa

SEQ ID NO: 112667 - DNA, 201 bp, Homo sapiens
tcccctccctgtgtccatgtgttctcattgttcagctcccacttacgagtgcgaacatgtggtgtttggttttctgttcctgtgttagtttgctgaggatratggtttccagcttcatccatgtccctgcaaaggacatgatctcattcttttttataactgtttagtattctgtggtgtaaatgtgccacattttcttat

SEQ ID NO: 112668 - DNA, 201 bp, Homo sapiens
taaattggtttacgttttaaaaaatcttgtttgcaacaaaatgtcagtggctatgaggataaatccaagtgatagggtttaattttgataaattataggtyaaagatcttaaatgttattaagcaccagaaaggacgcctgggcagaaatactcctaaacttttcctctagagactgaaaggagcatctgctatagaatgg

SEQ ID NO: 112669 - DNA, 201 bp, Homo sapiens
ttttttcccctgacaaaagtagtttgcaggactccacaaatgaagcatgtggtcatctttgagtttaggagcatgtcaagagggaactgtggatcttagcyacagccaccagttctcagccttcagccttcaggaaattgcactgtctaaataggcacgtctaaaacccaacaaaaaaggagccagagacctcgcggctgc

SEQ ID NO: 112670 - DNA, 201 bp, Homo sapiens
tagaagaaatatgaccagtttcataagaggatatgtagatgtgaggaaagtgcgttttttcccctgacaaaagtagtttgcaggactccacaaatgaagcmtgtggtcatctttgagtttaggagcatgtcaagagggaactgtggatcttagctacagccaccagttctcagccttcagccttcaggaaattgcactgtc

SEQ ID NO: 112671 - DNA, 201 bp, Homo sapiens
aactcctaatacctgatggaagcttgagctggcttttctggtatgagatcaagctcattctgataggtggggggaaaaaagaagccagaaaatctttgccrtatacatggagcttttatacatggggactatactgtcacagtgatacttttagaagaaatatgaccagtttcataagaggatatgtagatgtgaggaaag

SEQ ID NO: 112672 - DNA, 201 bp, Homo sapiens
tcacccataaagtggaaaatctagaattaattgatctaccgtaggtagttattctccataaattttaaataatttaaaggctatgtcttacattattggcwggttcacactataattttaaaataaaatttagaaaactgtgttctgtagtctaatatttaactcctaatacctgatggaagcttgagctggcttttctgg

SEQ ID NO: 112673 - DNA, 201 bp, Homo sapiens
cagacatgaactggagcacgtgacctcatagggaccacacacagaccacacagatggcccaggtggctgcaaagaggagcacgggcttcgcgagcgtgccrcccaggctgcaggcagcgaacgggtggacagaagagcgccctcccttccggagggggcaggaagccagtcacccctcctgctactgcaacacatttctcc

SEQ ID NO: 112674 - DNA, 201 bp, Homo sapiens
gaagacagacatgaactggagcacgtgacctcatagggaccacacacagaccacacagatggcccaggtggctgcaaagaggagcacgggcttcgcgagcrtgccgcccaggctgcaggcagcgaacgggtggacagaagagcgccctcccttccggagggggcaggaagccagtcacccctcctgctactgcaacacatt

SEQ ID NO: 112675 - DNA, 201 bp, Homo sapiens
tttgtagctttcttatgaatggttgaggttactgtacacctgaaatgtttgggttttttgtggggttttttttggttttttatttttttgagacagtctcrctctgtcgcccagaccggagtgcagtagctgggattataggtgcccgccaccacgcccagctaatttttgtatttttagtagatacacggtttcaccaca

SEQ ID NO: 112676 - DNA, 201 bp, Homo sapiens
tgctgtccttttaaaaccaggacactcgggaagcccagcaaggttttgactatgctctatagcctccctgaattcggccctgcagccttttttagttaccrcctggtttgtagctttcttatgaatggttgaggttactgtacacctgaaatgtttgggttttttgtggggttttttttggttttttatttttttgagaca

SEQ ID NO: 112677 - DNA, 201 bp, Homo sapiens
acatgcgatggaagagcattccaggcaaagacagtaaggcatgtgaaaagtaaaatgcaaggcgtgtgtcagaaccagacgtgggtaattgtggctgaagygttggactgagctaaatgtcatgatgttaaatgctaggtaaaatccccagtaagtaacgaaataggtttcaaggcagagtgaggcatagagaggagaagc

SEQ ID NO: 112678 - DNA, 201 bp, Homo sapiens
agtgaagtaaagttagctgatgggctctcttgccctggattcaatccagtattcagggattgagggaacagaggcccagcttgttcccttgctgtcctttyaaaaccaggacactcgggaagcccagcaaggttttgactatgctctatagcctccctgaattcggccctgcagccttttttagttaccacctggtttgta

SEQ ID NO: 112679 - DNA, 201 bp, Homo sapiens
gtgctgatcaacgtcaggtctcgcttactatgtactacacaactgaatgaaacactgatatctgtgattgctgtcttaatgaaggaaccaaataatgattyctgtttaggaatctgttttctttttgagccactggaactctttaatatattaccagtcgcaatccagatttattggcaagctgaggaattagaaccatga

SEQ ID NO: 112680 - DNA, 201 bp, Homo sapiens
ttgtattctattttaagcagccaaataagagttttgctctctatgaaatgttgaacacatcatacatgtctgtaaaaattgctttcactcttttattataycatatgtaagaacatagtaaaggaagggaaaattaaaagagaaaaagactgctttgtaaaattttctaagttgtttccatatcagttcttacgtttgttc

SEQ ID NO: 112681 - DNA, 201 bp, Homo sapiens
taaaccctggcaatgagaatatccacagtgtcctatatatttatagcaggcattttcccaagcaggattccaagtacatctacagttattaagaaagtcayacaccttctctcctttcagggggaatttgtgggaagaaaagattaatatacctatataccaagaaagacatatgtaaaattttttcagcccttcaggatt

SEQ ID NO: 112682 - DNA, 201 bp, Homo sapiens
gccccccaaagtgctgggattacaggcctgagccactgtgcccagcctcatgtatttttaaatctcccactggctttgcctagagtaggaactcttaattwaaaagtataagtggccgggcgcagtggctcacgcctgtaatcccagcatttggggaggccgaggcgggcagatcacgaggtcaggagatcgagaccatcc

SEQ ID NO: 112683 - DNA, 201 bp, Homo sapiens
cagactctcctttagctagctcaccccatatagaaaagacgcggaagacatagaggccagtcaggaggccattgccctagttgagtttactcagatgtttscagaggcctggctacagcaatgtgacagcacagggagaaggggactggctttgaggtatgttgataaacagaattagctggccttagtgtttggttgaat

SEQ ID NO: 112684 - DNA, 201 bp, Homo sapiens
atttctacaacagcatggtgacaatataccaatagtgaaatggaacagaatattgtggaagcagataggagagacagcagcctaacccgaaaggggatcakagctgaagaaagcagtggtggctgacctgagctgtgaagggctagtagggactagctggggaagggaggcaggagcagatgagaaacaaacagtgtagtt

SEQ ID NO: 112685 - DNA, 201 bp, Homo sapiens
aatttctacaacagcatggtgacaatataccaatagtgaaatggaacagaatattgtggaagcagataggagagacagcagcctaacccgaaaggggatcrtagctgaagaaagcagtggtggctgacctgagctgtgaagggctagtagggactagctggggaagggaggcaggagcagatgagaaacaaacagtgtagt

SEQ ID NO: 112686 - DNA, 201 bp, Homo sapiens
agattgttttcccgctccatgtggagagaaccagttgcccactaatttacaaaaggaaagtcggacagtaatctctcatcagcgtggctatcaatgagacytggagcttccaggaaaatttggcttaataagtaccatactgttacttcctcgggaatattaaaaaggaaggagcgatgagacagaagggcctaattcacc

SEQ ID NO: 112687 - DNA, 201 bp, Homo sapiens
atgtgggacacaggtacagagatagttgtcacagactgggttaagtgctgtgacagaaggatgtacaaggtgtggaatctagaaggcctcccaaggggtgwtgttggatcaaaggcatgaagcagcttggtgtggtcaggcaggcaaacagcacagcactgccagggaggtaagtatgatggggttgggggggcggtgaca

SEQ ID NO: 112688 - DNA, 201 bp, Homo sapiens
gctggagggatggaggactctcccgaaacagtgttttagtgttgtgcctgacaggaaaggagagttagggtaggagctggagagggatgtaacgttgatgkatgactaggggtttggttggcattaggaggggtggcttaagggaagtattgcttttttattacacagataatctgtggttattgtaataatatttgaggg

SEQ ID NO: 112689 - DNA, 201 bp, Homo sapiens
ctaggcacctgttatcaatggctttacaggcctatgtgggacacaggtacagagatagttgtcacagactgggttaagtgctgtgacagaaggatgtacarggtgtggaatctagaaggcctcccaaggggtgatgttggatcaaaggcatgaagcagcttggtgtggtcaggcaggcaaacagcacagcactgccaggga

SEQ ID NO: 112690 - DNA, 201 bp, Homo sapiens
gattatttttattctgttgcacttttaccgactttcagactctgtttagaagttttattttaaattaaacaatgaaaattttactgcaactgaaaatttcrtgtgcttccacccggtggagtagagtgcatgctcctgaggaggctctttggggttcgagctgatatcacaagacaatatccttaacaaccaagtagaata

SEQ ID NO: 112691 - DNA, 201 bp, Homo sapiens
actggaggtctgtgtattgcaatgagtgctctttagacattaagacttgaatatgaagacttgacctccagaaattaacaagtaacagtatcatggaggcrtgcaacacagtattgtcagatggcatgacctcaaagatgcataagggtgaatcagtgatctgaaagcagcagcaggctcccggaatacaccagcaccctc

SEQ ID NO: 112692 - DNA, 201 bp, Homo sapiens
tcggtgaactgattcacccaaagaaaagtaagacagtttgtggcatgagcttgtcaacccctttaccccttgccagttgatgatgatttgatgcattggtmtgtttccaggccactctcagggatctgaaattcttggctagacagggaagagcatttgagcctgcccgtgcacttgcactgccaggactagcaagcagtg

SEQ ID NO: 112693 - DNA, 201 bp, Homo sapiens
ggttccagtccagactctgacttgctttctggccagaagtcttcacctaccctgtgcaccacttagcatctttgcgaatagacaaagtgagatgatgtgcrctagcaccctgtggaaacagcaaagctgctgatcagtgtaaagcaaaaagtgaccgaggcagatctcaatcgatagaggtttatttggccaaggttgagg

SEQ ID NO: 112694 - DNA, 201 bp, Homo sapiens
agccgtttgctcaaggaccgagaagtgggtggaattggcacgtgtgactggggagaggatttcctggaggcaacaactgtgaaggagtcggggcaaacccrgtgaaagggagatgggccaggcagagacttcagaaattatttaaaaggcattttggaggccgggtgcggtggctcatgcctgtaatcccagcactgtggg

SEQ ID NO: 112695 - DNA, 201 bp, Homo sapiens
cacgagcaaagatcaaagtggattatccgtaggggaagattagacagttaattctaaaggaaaaactttaaaattcatttgaaagcatagcctcagacacrctgacaccttttcttttttttcctctgaattcatttagaacatatgctgtcaggaggataagagatgccttcagagaaaataaaaatgtaaaggatcctg

SEQ ID NO: 112696 - DNA, 201 bp, Homo sapiens
aggaaatgcttttggcatcacatacttgcctgcagctgatcagggaagcagcttggcagggcaggagaaacacagagctgagtctgccgctctcactggcrtgctaaccatgggcaagctgcttagcttctcagcgtcatgttgctcctcatctatagaatgaagttgggtcagtgatttttctctaaggtcctttccagt

SEQ ID NO: 112697 - DNA, 201 bp, Homo sapiens
cttgttgagtagatttattttcctaaatctgtttgcttagtcatcccagaatggtagtggatcagcctgcgccacgagcaaagatcaaagtggattatccrtaggggaagattagacagttaattctaaaggaaaaactttaaaattcatttgaaagcatagcctcagacacgctgacaccttttcttttttttcctctga

SEQ ID NO: 112698 - DNA, 201 bp, Homo sapiens
aagcgtgtacaacagaggggaacagccaggccggagacagacacgcagctggggctgcctcacttctccatttgcctccaccagccatgccttctgactgracattttcaccaaagaagatacgatggggtatagtttttaaaaaaatattagaaggatggcagattattaaaagccagctctcgccccctatttaatcta

SEQ ID NO: 112699 - DNA, 201 bp, Homo sapiens
ttcctcttgctttgaaccaggttctattttagcagagccaaacttagtgttttgttttttaaaaaataagtatcagctattatttgaagctcactgctgtstgtatagctgttcatgttttttgtaatattaaagtatttttcctactggaaataatttttgaaactcagcctgtttttttttataagacattgaccatac

SEQ ID NO: 112700 - DNA, 201 bp, Homo sapiens
aagcagacctttgtaatggggctgagggaggaagcgtgtacaacagaggggaacagccaggccggagacagacacgcagctggggctgcctcacttctccrtttgcctccaccagccatgccttctgactgaacattttcaccaaagaagatacgatggggtatagtttttaaaaaaatattagaaggatggcagattatt

SEQ ID NO: 112701 - DNA, 201 bp, Homo sapiens
ctctattgactgaactgactataaagggaaagcctgactgcccagatctcccagcaagtgtgttttcttgcacatgggggagtaactggatgatgtaatgytgagttatgtaatgctggttcttcacggtcggctccagcagcggggcctgtttgagaaaagcctggagctgcactttgtgaaagcttttgacacccagca

SEQ ID NO: 112702 - DNA, 201 bp, Homo sapiens
gaaactgaggctctggaaggttctgtgagttgcccccggtcacaccgaacagcagcacttcatcaagttagtttccagatgtccagcttctctctgcccarctgggcaggcacaagagacttgctgtgttatgacctggtgtcttagttttgtttaagattagcaagggcgccaggtgtggtggttcacacttgtaatccc

SEQ ID NO: 112703 - DNA, 201 bp, Homo sapiens
actgaccctctctattgactgaactgactataaagggaaagcctgactgcccagatctcccagcaagtgtgttttcttgcacatgggggagtaactggatkatgtaatgctgagttatgtaatgctggttcttcacggtcggctccagcagcggggcctgtttgagaaaagcctggagctgcactttgtgaaagcttttga

SEQ ID NO: 112704 - DNA, 201 bp, Homo sapiens
tttgttgagcaccactgttgaaaaccacaggttttccaagagtgtccgtgtgtatttcacatggctttactcgtcaggaggtactggtgattgcctctttyacaaaagaggaaactgaggctctggaaggttctgtgagttgcccccggtcacaccgaacagcagcacttcatcaagttagtttccagatgtccagcttct

SEQ ID NO: 112705 - DNA, 201 bp, Homo sapiens
gattactttatgtgtcgagcaccgtacaacagtggttgccagttctgactacacatcaggatgtatttttgaagacttacagaggtgattttgttgagcaycactgttgaaaaccacaggttttccaagagtgtccgtgtgtatttcacatggctttactcgtcaggaggtactggtgattgcctcttttacaaaagagga

SEQ ID NO: 112706 - DNA, 201 bp, Homo sapiens
atgatctgcccaccttggcctcccaaagtcctgggattacaggcttgagccaccgcgcccggccgaatccgcctttctttttaatctgtatgaggtgttgsgttgtcttctgatgtttccatctgtgtcctgtgtgatcgtagatactgcatgccactctctgtccagcacgtgatgccctttgcaacctcctttctcacc

SEQ ID NO: 112707 - DNA, 201 bp, Homo sapiens
aatagagtaatttgtaatatgtgcccaataccaggagctttgtaaagcttgtcctgttttgatttgaatccttatagcctaagggcacctggcgcctctgyggaggagcgcaggagtgaagggagctgccccgtgaaggccacttgccattgggtgataagaacacgaggggctcatctcacagaagttccttgttttgtc

SEQ ID NO: 112708 - DNA, 201 bp, Homo sapiens
gtcctgcctttgaggggctctcagggggctggagaagggaagacagacatgaactggagcacgtgacctcatagggaccacacacagaccacacagatggyccaggtggctgcaaagaggagcacgggcttcgcgagcgtgccgcccaggctgcaggcagcgaacgggtggacagaagagcgccctcccttccggaggggg

SEQ ID NO: 112709 - DNA, 201 bp, Homo sapiens
ctccctccttctctgttctcagagcactgtgtatactcctgttataaaatagagtaatttgtaatatgtgcccaataccaggagctttgtaaagcttgtcytgttttgatttgaatccttatagcctaagggcacctggcgcctctgtggaggagcgcaggagtgaagggagctgccccgtgaaggccacttgccattggg

SEQ ID NO: 112710 - DNA, 201 bp, Homo sapiens
tgtgcgaggcccagggacacagaaagcagtgttcaccagtcctgcctttgaggggctctcagggggctggagaagggaagacagacatgaactggagcacrtgacctcatagggaccacacacagaccacacagatggcccaggtggctgcaaagaggagcacgggcttcgcgagcgtgccgcccaggctgcaggcagcga

SEQ ID NO: 112711 - DNA, 201 bp, Homo sapiens
gtgttttcctactcatgtagaaccttgggttttgaattctatatttattattagcctgccgttgcagaaaggctttccctctggtgaaattctattcatcyttcaaagacatcaccttccctggaaagacttctcaaagcccctggctgagttactccctccttctctgttctcagagcactgtgtatactcctgttataa

SEQ ID NO: 112712 - DNA, 201 bp, Homo sapiens
cacagatctgctgagcagtgttgtctaccaggactgtgcgaggcccagggacacagaaagcagtgttcaccagtcctgcctttgaggggctctcagggggstggagaagggaagacagacatgaactggagcacgtgacctcatagggaccacacacagaccacacagatggcccaggtggctgcaaagaggagcacgggc

SEQ ID NO: 112713 - DNA, 201 bp, Homo sapiens
ttttttcttatagctcctctctcctttttccaaaactttgtattccttcttcgatatttttatctttccttttctgtgttttcctactcatgtagaacctkgggttttgaattctatatttattattagcctgccgttgcagaaaggctttccctctggtgaaattctattcatccttcaaagacatcaccttccctggaa

SEQ ID NO: 112714 - DNA, 201 bp, Homo sapiens
ctttttttcttatagctcctctctcctttttccaaaactttgtattccttcttcgatatttttatctttccttttctgtgttttcctactcatgtagaacmttgggttttgaattctatatttattattagcctgccgttgcagaaaggctttccctctggtgaaattctattcatccttcaaagacatcaccttccctgg

SEQ ID NO: 112715 - DNA, 201 bp, Homo sapiens
aagtaaagctcaaacacaggggtaaaagaacagaccttgagctatgttcttaagactaacacaaccagattatttttctgtttaaagaatttgaaagtaayttacatccacatacttaatcttgtgcaggagtagaattgtaatgatgtgtttaaataccttatgcctgatacagcaaatgttgaatgtaatatgctgata

SEQ ID NO: 112716 - DNA, 201 bp, Homo sapiens
ttaagcataatgttaacatttctttcttattctaggccagtatattatatatacagtattaggaatctcaaaaccagtgagaatattttatattttcacaytttttccagtggcagtcagtaaacacattttcttctgatgaaaccactttgtaaccaagtaaagctcaaacacaggggtaaaagaacagaccttgagcta

SEQ ID NO: 112717 - DNA, 201 bp, Homo sapiens
tctgtaaaaattgctttcactcttttattataccatatgtaagaacatagtaaaggaagggaaaattaaaagagaaaaagactgctttgtaaaattttctmagttgtttccatatcagttcttacgtttgttctgaatttatattactggatttcatatagagcctgtggcgctgtattacaaagaactattgttacctga

SEQ ID NO: 112718 - DNA, 201 bp, Homo sapiens
ccacaggcaactagaggtgattcatgtgtgcctaaaaacagtttcttagacttttgaaagattattcattattgttaaatatgctggagtttccaaaaaamatttttttctcttacattgctaagttctgccaggtttaatgataatggtttcaaaaaataaaaatagtacggttaacttagagtagaaaatatttaagat

SEQ ID NO: 112719 - DNA, 201 bp, Homo sapiens
gcctctggtaccattaccagagcagcattgttagtcaagtggttatggcagaacccagattgtgggggttgagacatgaatcagaagtgcgtaaattgctrccgtgagtagagataccccctccacctcccaccggaattttggttaataaaacatgagagtagataaccgatagagcaggaccccacgagaggtgaaaag

SEQ ID NO: 112720 - DNA, 201 bp, Homo sapiens
tcccaaaccaaatttatattgatcttttttgttccagaaattcacctattttatatatatatatatatatatatatatatatatatatatatatatatatwtttttttttttttttttttttttttaaggtcttcctgcaaataaagtcagcatgattcctttgtccttgggatcagtgtcacatatgtgttgtaggcaaa

SEQ ID NO: 112721 - DNA, 201 bp, Homo sapiens
ttaagatgatacattttatggtttgtgttttttccacaataaaaataagtcccttctttttcaaaacgaattatagccagtcattggtttttttttttaaytggaagcatgaaattaaattcttcagatgctggtatttagggataggaagcttaagtcatttgaagcttgaactagtgaatttacacccgcgagccctct

SEQ ID NO: 112722 - DNA, 201 bp, Homo sapiens
tcagccgggctcagaggctcacacctgtaatcccaccacaatgggaggccaaggcaggcagatcacttgaggccaggagttcaagaccagcctggccaacrtggtgaaacccccgtctctactaaaaatgcaaaaattatccaggcggtggcgcatgcctgtaatcccagctactcaggaggctgaagcagtagaattgct

SEQ ID NO: 112723 - DNA, 201 bp, Homo sapiens
cattgggtttgtccagcctgcctccaaacatatctcaagatgtttctctctgcctgttgtccttagccataggagacaactaatgtgtatttcacagggawcatgtataatactttggaacatacacaattccgagaggtgtaacataccagagacctttgctttttcctttgctttgcttaatgccttaaactttcctaa

SEQ ID NO: 112724 - DNA, 201 bp, Homo sapiens
gcttcaggggggatcttgtgacattcccatcatgtctgttgtgatttgaaagctttgcaggttcatgagcagctgcagagctgcgcctgggaagtcaggaytgccttgcagtacagattctcacccgtactctcctatccatctttccccgtcaccacccctccctgaagaagagctgggtgtttctgtttctgtttctgg

SEQ ID NO: 112725 - DNA, 201 bp, Homo sapiens
ttaagtgaaattatgtgtcataaaatgtaggcattaaatggtaactttcgccacactaggttattcctgatgatctagggaaaatacttttttgcgttgastgctttcgcttagtaactcttataaaggagcaaatattcatatgattgtaagagaacagaagaatgctttcttctttcttttgctaggttcactaactca

SEQ ID NO: 112726 - DNA, 201 bp, Homo sapiens
atcatagtccgtcacagatacctaagtccttatttatttacatgtttgtttttaagtgaaattatgtgtcataaaatgtaggcattaaatggtaactttcrccacactaggttattcctgatgatctagggaaaatacttttttgcgttgagtgctttcgcttagtaactcttataaaggagcaaatattcatatgattgt

SEQ ID NO: 112727 - DNA, 201 bp, Homo sapiens
catcatagtccgtcacagatacctaagtccttatttatttacatgtttgtttttaagtgaaattatgtgtcataaaatgtaggcattaaatggtaactttygccacactaggttattcctgatgatctagggaaaatacttttttgcgttgagtgctttcgcttagtaactcttataaaggagcaaatattcatatgattg

SEQ ID NO: 112728 - DNA, 201 bp, Homo sapiens
tgttcttttcttccttctctctgatcctgtccccatagcaaacagagtgtgtggcttgtgttgttgttgccttggcgtttcgggccagcccccctgtcaartcctgcatcctcttttcattagacctcctggatggcagcagggcctgccgacagtgcagaggcggctgctggccggctggggtattctcactgcagtctg

SEQ ID NO: 112729 - DNA, 201 bp, Homo sapiens
ctgcgctcaggaagagatatatttgactgtactttgttcttgtagagtggtcatagttttgttgacatagagttccctctcagatagtgtcaaaaaagtgscattaagcataatgttaacatttctttcttattctaggccagtatattatatatacagtattaggaatctcaaaaccagtgagaatattttatattttca

SEQ ID NO: 112730 - DNA, 201 bp, Homo sapiens
ttaaacaaaataatattcagatgagatcttcaaataatttataaactgtaagtctgtagggttagtttgagttaggagccacttaacatgtaccaaaaatkaaaactttggtttcagaaaattttatctaacactttttttttttcctttttttttagatggagtctcactctgtcgcccaggctggagtgcagtggtgct

SEQ ID NO: 112731 - DNA, 201 bp, Homo sapiens
cattttaaaccagtggtccccaacctttttggcaccagggactggtttcatggaagacaattattccacggactggggttgtgggggatggtttcaggatrattcaagcacattacatttattgtgtacttatttctgtttattacattgtactatataatgaaataattatgaaactcaccataatatagaatcagtggg

SEQ ID NO: 112732 - DNA, 201 bp, Homo sapiens
gcctgcctgtctgtcttcgcggcagagccatttgctctcagtgcattgggctcagattccttcgctcgctcgctcatcacagatctgctgagcagtgttgyctaccaggactgtgcgaggcccagggacacagaaagcagtgttcaccagtcctgcctttgaggggctctcagggggctggagaagggaagacagacatga

SEQ ID NO: 112733 - DNA, 201 bp, Homo sapiens
ttcaccccaacttttcatacattttaaaccagtggtccccaacctttttggcaccagggactggtttcatggaagacaattattccacggactggggttgkgggggatggtttcaggataattcaagcacattacatttattgtgtacttatttctgtttattacattgtactatataatgaaataattatgaaactcacc

SEQ ID NO: 112734 - DNA, 201 bp, Homo sapiens
atctgaaagtctcacccgcacaaggtgcctggagcaggaggtgctcactgcttgtctgcagaatgactcagggcttgagctgctcctccagggctccttcrggttttctgggtctttaaacacctgtgcattgtgttctgtgtatgcctttcacttgtaggaaagagccctgcctgcctgtctgtcttcgcggcagagcca

SEQ ID NO: 112735 - DNA, 201 bp, Homo sapiens
ggtcatttatctcagttcttgtcagttttcccttcctgactcagagatttctgcagccattgatcacatctgaaagtctcacccgcacaaggtgcctggarcaggaggtgctcactgcttgtctgcagaatgactcagggcttgagctgctcctccagggctccttcaggttttctgggtctttaaacacctgtgcattgt

SEQ ID NO: 112736 - DNA, 201 bp, Homo sapiens
ctaaagcggaagacattctcttatgctctttcaatgaagggcagcatcctcagcataagtacaacagtttcaaagggcctgtgcttctggcatcctgtcaygttggctggtagcacaaggccacagtaggaaagcattttgcaggtaaccaaaattgcaggtccttggcacatccaacagacacagcttagcatatctaga

SEQ ID NO: 112737 - DNA, 201 bp, Homo sapiens
gttagttgacttaatatatccagtgcctatacaaattcagataatcaatgatgtctctttaaacacaaatcctctaataagaatttcttttttaacatgartatagaattacgctgggagtgacttctcttaacactgtcattttgctgcagcatggttaaattaaatttacttggactgccctgtgaaccttaccatcat

SEQ ID NO: 112738 - DNA, 201 bp, Homo sapiens
ctggttatgctaccaacacctcgtatctaaactaaaactccacatcatccctaacccatccccaacctaatccttcaggcaaactcaacactccagcattscctctcatcatcccagtatttccttgtgcaagctggaagtcacttcactttctccccttactttaccgtagtcagtaggtccttatgcccagcaggttct

SEQ ID NO: 112739 - DNA, 201 bp, Homo sapiens
ttcttccttccctagcgtgcgggacaccaccttctccttgtctgctcctctcttggctccgcttgacattggaggccccttgcactccatcttgaccttcycacaccctccctagatgcccacagctcatggctccaaccttgtgtgctctagtgattcccctccatttgtcctttccaggggcctcctgggcattttctg

SEQ ID NO: 112740 - DNA, 201 bp, Homo sapiens
ccaaaccaaatttatattgatcttttttgttccagaaattcacctattttatatatatatatatatatatatatatatatatatatatatatatatatatwtttttttttttttttttttttttaaggtcttcctgcaaataaagtcagcatgattcctttgtccttgggatcagtgtcacatatgtgttgtaggcaaaca

SEQ ID NO: 112741 - DNA, 201 bp, Homo sapiens
actatcattagttaacttcccaggcagaactcattggccgagcaaggctatatcctagactttcagagacagctctgggctgggctggctgtcatgacatmatagctgggagatcttgcacggccaagtacagggctgtgttgttctgatggctgttggaatctggattttggaactgaaagaattggctagattgcttta

SEQ ID NO: 112742 - DNA, 201 bp, Homo sapiens
atacttctgcagagtagtaataatggatggcagaaaaaatgaagagaaaggaaagataggaggtgagattttaccagagtgagtcagggaacaagcagacrtagagaaggcctggaaaggttggatgtactgtaaggagagttttcagcaataggatacagctgaggctaggtttggcagagctaggtggagtactgaaag

SEQ ID NO: 112743 - DNA, 201 bp, Homo sapiens
catgacataatagctgggagatcttgcacggccaagtacagggctgtgttgttctgatggctgttggaatctggattttggaactgaaagaattggctagrttgctttaggtatactccgtcctgctgctaactaagtagcagtgacctttaactcccttcatccacagcctctcccgttaatctcaagccccaccataca

SEQ ID NO: 112744 - DNA, 201 bp, Homo sapiens
ggaaatctgagaagaaaatgacaagtcttatgaatgttacaaagagggaaatatgagtgctgccagagccgatgggacgggccagggaagggctccccagrggatatttacacgtgcaaattaatgatgaggattggctgtgtgaaggtggggagaggagctctctaggcaggaggaacagcacatgcaaagcccttaatt

SEQ ID NO: 112745 - DNA, 201 bp, Homo sapiens
cctgcgtgccctcctcatgctagcacattccagatgctaggtcatttatctcagttcttgtcagttttcccttcctgactcagagatttctgcagccattratcacatctgaaagtctcacccgcacaaggtgcctggagcaggaggtgctcactgcttgtctgcagaatgactcagggcttgagctgctcctccagggct

SEQ ID NO: 112746 - DNA, 201 bp, Homo sapiens
ctcttgaactcctgaccccagatgatccgcctgcctcggcctcccaaagtgctgggattacaggcgtgagccaccgcccccgaccgaagtttgtatttttkaaaaggtcacattgtctgcttttgaggggatacactgggagagatgcagggagaccagcttttcggaggagtgggggattgggtgtggcattccaggcaa

SEQ ID NO: 112747 - DNA, 201 bp, Homo sapiens
tttggcgctgaactatttataggaacacttgaagcagagttgaaaagttagatgacctttttaagctttgtgatgccagagacaattttttttaatgcctsttcaaatggacaaccactcggctttataccaagtacttaacaaagattggatagggcttatcgacctgtggaggaggaatagcctagggttgaaaatcac

SEQ ID NO: 112748 - DNA, 201 bp, Homo sapiens
ggccaaccagaaagaaaagaaaaagtcgagtcagcagaacttggtgattgattggatgaggagaccaggcctgagggctgcagggagtctaggaggagtcycaggagcagggcctgaggaactaagaaggggctctggctgagaccagacaggagcagccactgtctggaattttgtccccactgctgacttcgaacaacc

SEQ ID NO: 112749 - DNA, 201 bp, Homo sapiens
ttcatggtgccttgcggctggaatttcagtcacccgaaatgcatgtcagagcaccaggactagtggcttactggccttcagacagcggtgctagagcagcrtaaactcttgaagtcacagatctgctttcaaatcctaggctaagcactaaccttaggctcaccactaaccttaggctcaccactaaccttaggctaagca

SEQ ID NO: 112750 - DNA, 201 bp, Homo sapiens
gatgaagcttttttattacttggtgggtagagggccttaggtgtggcagagaaattccgcagcctcgccctcgccgtcatagtgatgaagagcgttgactycggagtcaccaagggaaattaagcacatgttttattaatctttatgaacctcagtttcctctcctgcaaaatgagaacaatactggtgccgacttcgcag

SEQ ID NO: 112751 - DNA, 201 bp, Homo sapiens
ttttattaatctttatgaacctcagtttcctctcctgcaaaatgagaacaatactggtgccgacttcgcagcactgtttgcagcgtgagggcgataaggcrcttacacaggcgcgtgccccccacatggaaatgcctggagatgctgccggctcctccactcaccgaaactgcactttctctcctttgttctaaatgagaa

SEQ ID NO: 112752 - DNA, 201 bp, Homo sapiens
cttctaagaggaaggcagagggaggtttgattgcacagagagagaaagtggcagaagcagagatcagagcggctgcttcgaggatgaagcaggcaccccasgctaagcaacgcaggaggccatacaagctggaaaagacaaggaaacagattttccccagagcctcgggaagaagccagccctgacaacaccttgactttc

SEQ ID NO: 112753 - DNA, 201 bp, Homo sapiens
gccaggcctggagatggggcctgcccttttacctctcaaatatgttcccagggaagagtgtgtccttctccgggagccaccccatcacactgactctcackttgggctcattgctagaaactctgtggcctgcgcctgcttcccatgtcgcgtcaaagcgtctcagcacagacctaaaggagacctcagaggtcacccagc

SEQ ID NO: 112754 - DNA, 201 bp, Homo sapiens
agaggggtgtgggaatagagagagaactgaggtttgatgtgaaattcaaaattggagattgtagaggcatagcagaattactcagtagtaagcttattctycagaaatttttttaccaactttattgcattggtgcaagttcattccttttgaataggaaacctttgctatactgtatatgattatggctataataataat

SEQ ID NO: 112755 - DNA, 201 bp, Homo sapiens
tcttttaaacacacggggaagacacaggaggccttgagagtcctctggcagctgtcgatggtgcaactgtattcgcacttttccatattttcccttcctaytggcattctcaagttttgtgcacatgtatgacatttacacagtaggggatctattgagatattttcaaacagtcaacaatcctaatcaaaatgtgtgcta

SEQ ID NO: 112756 - DNA, 201 bp, Homo sapiens
acattatacatttgggtggtgggagctatttttcttcctttttttcttttgttcttttcttccttctctctgatcctgtccccatagcaaacagagtgtgkggcttgtgttgttgttgccttggcgtttcgggccagcccccctgtcaagtcctgcatcctcttttcattagacctcctggatggcagcagggcctgccga

SEQ ID NO: 112757 - DNA, 201 bp, Homo sapiens
taaggaaaggtcttgaacagaatgtcaagattgaaagacccaagacctaaggtgtgctcgcccagtgggaggctagaggacaggttttctctggagagagsttgagatgggcttggatagtagccatgtaggcggtaaaggaccactaaaaatacttttgttcaaaagctactctcagcagggtcaccagtggcctctttg

SEQ ID NO: 112758 - DNA, 201 bp, Homo sapiens
gccaagagtgtagccaggtgattctgcagtgcaggcagggttgacagccttggtggtgctcagtcctctcatagttaaagctgaaatgccatgctcacccycctgagcaaccctgttaggctacatgacttgtgttgtggctgggttggggaggagttctttttacactttttttctgggggttgttgtaaatcctgggaa

SEQ ID NO: 112759 - DNA, 201 bp, Homo sapiens
ctgattgaaatcatctagcgagctttagaaactagcagtgcctgaggccaagagtgtagccaggtgattctgcagtgcaggcagggttgacagccttggtrgtgctcagtcctctcatagttaaagctgaaatgccatgctcaccctcctgagcaaccctgttaggctacatgacttgtgttgtggctgggttggggagga

SEQ ID NO: 112760 - DNA, 201 bp, Homo sapiens
atctgcaaaaactgaaggaacacttaaagctgctgtgccttttttatgatattgcattacagttctttgaaaaataaacacagatatacacttgtgtccamgctagagcaattgacaaattgctataacaggtaggaacaataagtgatcatttgaatgggaaattaaggcaaactgattgaaactgggaatatggtgtaa

SEQ ID NO: 112761 - DNA, 201 bp, Homo sapiens
ccaactttcagcatttgcttgagatctctctttctccttgtcattaacaagtaatatttgaaacctagttgataccctgttctgcagcagttttgcccacrttttgcatccattgatgatcacccttgcctgatttacttattacatgagtggttgcagaagatgattttgtacgtagctggccttattttataaagaaga

SEQ ID NO: 112762 - DNA, 201 bp, Homo sapiens
catgacccaccacgccccagcctggaagaaaaattataggcaaaaaaaggaaagtgatgtacggaaaatggaaatgaggtgctaaaacagccagattggcracagttcagttgtttgccttatttgagcacagtttgaacaattggctgcctatagccaaagctcagtgatcagcacaagagtagattatagtctgtgtac

SEQ ID NO: 112763 - DNA, 201 bp, Homo sapiens
gtacagttttatacattgaaaataaattaacttgggtacatgccatattccaaagtgtcagcagaggagggggagtagtgttaatgtaaatacttctgcaragtagtaataatggatggcagaaaaaatgaagagaaaggaaagataggaggtgagattttaccagagtgagtcagggaacaagcagacgtagagaaggcc

SEQ ID NO: 112764 - DNA, 201 bp, Homo sapiens
tctttagttgttactccctaaataattattttcattttcttagcagtcctttctttccctggccatgctcacaaagctgggacctacattggatactactrctgcgggtttacaatcctcagttgacctgtctgcggggagacggaagcccctgagtactttgcccaggatgtcttgtctttggaactccactcctcccca

SEQ ID NO: 112765 - DNA, 201 bp, Homo sapiens
cctctgagaagtcttcactgactccctaggctgagtcacatcttctagatccctctagtcctgcgtgccctcctcatgctagcacattccagatgctaggycatttatctcagttcttgtcagttttcccttcctgactcagagatttctgcagccattgatcacatctgaaagtctcacccgcacaaggtgcctggagca

SEQ ID NO: 112766 - DNA, 201 bp, Homo sapiens
ttccacctccttttgcatttttggatgtgcttctttatgtaagtgataataagactgacgcgttccagtgtccctccaagtgggcccccgccattgaggcrctgctggtgtttcagtgaagctttttctgttcttgcctccccttgacttaaattacaggtcagcatgtggactctttagttgttactccctaaataatta

SEQ ID NO: 112767 - DNA, 201 bp, Homo sapiens
gtctcctctgagaagtcttcactgactccctaggctgagtcacatcttctagatccctctagtcctgcgtgccctcctcatgctagcacattccagatgcyaggtcatttatctcagttcttgtcagttttcccttcctgactcagagatttctgcagccattgatcacatctgaaagtctcacccgcacaaggtgcctgg

SEQ ID NO: 112768 - DNA, 201 bp, Homo sapiens
accaggaaaacagccctcagcctgcccaaccccacctcagatgccatccgcttctcagaactacactcagctacccccgtcagtgccatgaaagctccacrctcatcctgacatgtcttgtaccacagcccacagtcagcgcagatgggccctttgtgcctcatgagttgaatgtccatgtgtgcagcctgtcactactga

SEQ ID NO: 112769 - DNA, 201 bp, Homo sapiens
aagattggccaccgtaccctgaatgacagtggtgtgctgacacggcatcagactccactcacacagaagatccgcttgtggtgcaggcttggcctcctcartgtggccacaggccctagagcgctaacagatgtcacttatcgggatcacccctgaggcattgtgaacaggaagtggcatcactgatctcccaccagctct

SEQ ID NO: 112770 - DNA, 201 bp, Homo sapiens
atgaaaactgaaaacacaggggaccggcccgcgatgcggcctcctgggagacatctgcatgaggccagcaggccaagggtccatggctggggatggctgcrctctccttagggaaaggcattccagaaactgaagttacgaggcagcgtagggaaagcatcctgggctcttcaaatctgggcatggctgtgagtcccaaag

SEQ ID NO: 112771 - DNA, 201 bp, Homo sapiens
caggttttaaggggaaaaaatgaaaaggtgcatggcctttacctgtaaacagtagaagggggtggggaatggttgaatggtagaaatgaaaatcaagaaayctagcaatggctggtgatttaaggaccttgtatatcagttattgctgcacagtaagtcatcccccaaaacttagtggcttcaaagaacaatcttcattta

SEQ ID NO: 112772 - DNA, 201 bp, Homo sapiens
tgctgcacagtaagtcatcccccaaaacttagtggcttcaaagaacaatcttcatttattgccacatcccacttctataggtcaagaattcagacagggcrtggcgagggggacttgtgttgctccacagtgattgaacctcagctggaagattggaaagctgggggcaggaatcatcttttacttagctgtctggaggtt

SEQ ID NO: 112773 - DNA, 201 bp, Homo sapiens
ttttctctacggcatagcctcaggagttgtacagcgtcacctccactgtcaaggttatagaacctgtccaggttcacatagagagaacacaaaccccttcwctcagtagaggagggtccattcattgtaatacaatcattggaaaacaccatctgccacaccggtttccttatcacctgtacccgcatcccccccgacaca

SEQ ID NO: 112774 - DNA, 201 bp, Homo sapiens
cagctctgacctccgtgagtgttgagatgctggtcatgctctttggctttttgggattttactttcctgctctgtaaaatgaagggtctactaaattatcrgttaaactttttccagctgtcatgtttgatgttagtatgcgttttgatataatgaggttccttcatccacaccagtactgttccgctacggtggacatgt

SEQ ID NO: 112775 - DNA, 201 bp, Homo sapiens
agggctccatacgtcctggcttccaggccctggagaggccccatggcccttagattccaggcaagaacccagcatccatgagccaactcccctccttgctsacgctggcttgtatcagtttctgtaacttgcagtttggcacatgctgggttttattgaaatatggagccatattgaggcctgcaagaggtaagttcccat

SEQ ID NO: 112776 - DNA, 201 bp, Homo sapiens
aaataaagtgagaaagctcttttgatacccaagaatattttgggtcacaggccctttgtgaatctgactaagctttggatactccccttgaaaaatgcatrtatatatatatgtgcacatacacacacaattccactaaggcatggacctaatccatggatttcagttaagtctttgatttctagctatttcctaatgatt

SEQ ID NO: 112777 - DNA, 201 bp, Homo sapiens
attgataaatcaggctacagtcctgtgacctaaggcagtgtactttactgttgtgacctcatcctcttaatagaaaatatgtgagcatgaggaccctgagwcataccacccccatctctcccatctgcattattcctatgaagggccagtaccctcaacagtgccatcttctttttatttccacaaatgtgataaatgctc

SEQ ID NO: 112778 - DNA, 201 bp, Homo sapiens
tcgctcgctctctgtcgctccatctctgagctgtagacatcacatccctgacccagggccacatcaggctcactgtcgagggtcagtagtgtcatccttcrggaaacactgaagggacatatgaggagcaatgatgaagtaaggaggcctcttgtgtgctctgcctggagacttagtgggatttttaaaaataaggtaaat

SEQ ID NO: 112779 - DNA, 201 bp, Homo sapiens
agaggcatatcactagccgggtagcagagtcattatttaaaggacactagagttcctctgtgaggaggaactgagctcaaagaagatgttcagtatcaatrcagtgagattacagagtacaaatctgaacacctttgtaagcttctcactaagtggaggagtggggccaactccaggagcttggtttttgcttgtctgaga

SEQ ID NO: 112780 - DNA, 201 bp, Homo sapiens
actgagctcaaagaagatgttcagtatcaatgcagtgagattacagagtacaaatctgaacacctttgtaagcttctcactaagtggaggagtggggccarctccaggagcttggtttttgcttgtctgagaatctcttgacaggtcctagaagcaaccattctatgttggggcttaaaaagaagaggtagtgtgatccag

SEQ ID NO: 112781 - DNA, 201 bp, Homo sapiens
ctcccgtattgttttgagaaactgtgtattcgttttcatattaaactattttggtacatatctgaaaagatgattctttttaaaacatagctatgataccrttatcataactaacaaaataatgctaattccttaatatcatcaaatacaaagtgtttaaattttaatgtctcacaaatatcaccaatcttcaaactgggt

SEQ ID NO: 112782 - DNA, 201 bp, Homo sapiens
aattaacatctttcatcagtaaaaaatatgcctgcatcatcagtttaaaatggacacatagggtacactcaacgcagtaaccatcatatgttgagccaacycctaatggtggaccgttaggtcacttcagcttttgcttctttaagtggtgctatgatgaacacctttgtgaatcctatatctttgttcactaggatagat

SEQ ID NO: 112783 - DNA, 201 bp, Homo sapiens
cttcccgtatcccttcaacctaaaaatcatgataaaaaacaatttaaagatgctgtataaatctgccatgtttgataaaacaggggaaatctcatcacctmcaatgacagtggtgtaaaagccctgcattttgtatacttttgcttcatgagggttttcgccacagaaagaggtgctttgtcagcacgttggactcttaaa

SEQ ID NO: 112784 - DNA, 201 bp, Homo sapiens
taaaggacacgacccagagctccacataaagactgcagtcctgtccatgaccctctattgccatgtgggtgtcactgttatgtttatggactctcttccartggagtggtgatttacagtgttctgtcctagaaattgatgaactctgagtaggttttcccccattcataattcttcccgtatcccttcaacctaaaaatc

SEQ ID NO: 112785 - DNA, 201 bp, Homo sapiens
agggtttccgggtaggcctgtcgtcaggtggttagtatgtctccagagcacctttcagggatggtgaagggttcctgaatgcagcctgtgaggcttgtggrtgttgactctttgcattctgtagccaggagagctttccctaaaggacacgacccagagctccacataaagactgcagtcctgtccatgaccctctattgc

SEQ ID NO: 112786 - DNA, 201 bp, Homo sapiens
tgagatgctggggagccctttggaccaggtgcagtcatttgtgtggtcctccctttgcagagaggaactttcagccccacaggtccaggatgtgagaacaygagatgctcagtccctgggaggagagctttccttagggcatctcacatttcaaagcagggtagggtcggggcagcttagtgacgctagcatcaaagcaaa

SEQ ID NO: 112787 - DNA, 201 bp, Homo sapiens
aggaataattttagtctctcaagtgccttaacgtgtctctttagaattaatgcaaacatcagggttttgactttgtgagcatgagaatgatttttggtgcrtgtttctgtctgtgtgataaacaaaacagtgtctgtgagatgctggggagccctttggaccaggtgcagtcatttgtgtggtcctccctttgcagagagg

SEQ ID NO: 112788 - DNA, 201 bp, Homo sapiens
ccctataggtcactgaaataatgccatattgctttattagtattttgggggagaaaggaaggaataaaattagtatttctgaaaatcatcaaggaataatwttagtctctcaagtgccttaacgtgtctctttagaattaatgcaaacatcagggttttgactttgtgagcatgagaatgatttttggtgcatgtttctgt

SEQ ID NO: 112789 - DNA, 201 bp, Homo sapiens
aatttcaaatgtgttaatgtaggatatcattcatagaaaagaaaaggattgtaattttacacatcatgtttaactttttaaagtgtggcatctttaatgcrggtatttgttcttagaactcttattgtatgactgattcagacttcgtgattcattagccctacaaatctcgagaacatacatgaatgtgctcatacagag

SEQ ID NO: 112790 - DNA, 201 bp, Homo sapiens
cactgtccttagtaacacagctgatgccctgtaggggtaaaattagttgtgttttctctgtgcaggtgaaattttaatgaattttttgatactctgtagakcattcactgcaaaatgcgttgtaagctctaaacaccaacagctgattgtgaaagactctttattttttctttgccctaacttaaaaaaaaacagagaatg

SEQ ID NO: 112791 - DNA, 201 bp, Homo sapiens
gaatatggttgatttatttcctgttcgcagagtccttgccgtgtgcacaagagtgggagctacatggccagcaggttagaaccccacacgctgtgcgcccygggcatgagcgtcactgcagtcctgactgtctgactcggtgacggggcactgcaaataaaagaaagcacagggtacaggcaaaacaaatgggacaagtgt

SEQ ID NO: 112792 - DNA, 201 bp, Homo sapiens
gtacctaagaaaggagaatatggttgatttatttcctgttcgcagagtccttgccgtgtgcacaagagtgggagctacatggccagcaggttagaaccccrcacgctgtgcgccctgggcatgagcgtcactgcagtcctgactgtctgactcggtgacggggcactgcaaataaaagaaagcacagggtacaggcaaaac

SEQ ID NO: 112793 - DNA, 201 bp, Homo sapiens
aagcatgataaaaatggtctatttgacaaataagcttttatcgctggtgacttgacagtggcaaggctgtggcagtgcctctccatgctgggatctcaccrgggacaattgctgcatgaattgcaggcggcgtgaaaggatgtccagccttgtcataagccagaggagggccacagatgtcatgcttaccttcctcagtgc

SEQ ID NO: 112794 - DNA, 201 bp, Homo sapiens
tgggataaagtccagaatccttaccatggtctgtgtttcctgcctttctcgccttatgtcctgtcaccttcccatttggggatggtattgtcactctggcrttttctcagcttcttaaatgctctgctccctggtgctcatgctgtccctctgtcttaagatcttctgcactcactcgcctggaccccagcaaggcactct

SEQ ID NO: 112795 - DNA, 201 bp, Homo sapiens
cacctctgctggtggtcaagggggatgagattcgagagtccagtgaactcattaacaaggccatcttatcattctgagggtagcagctgttttcaatggtycctgggagccggctggagacaggtggtcctgtaaaagctctgctctaaatgtaggcacattccactcccatgtgccgtcaaaatctttttgtgtatatat

SEQ ID NO: 112796 - DNA, 201 bp, Homo sapiens
cccaaagtgttgggattacaggcatgagccactgcgcccggcgaggaaaggaattattaaacgctattgttattaaagaaaccaaagattgtgatgcttgraaggtgtgtctacgacttcaagattatggacttctggccaagccaacctgtggcgacatcatcaggtttcacctctgctggtggtcaagggggatgagat

SEQ ID NO: 112797 - DNA, 201 bp, Homo sapiens
tggttgcccaggatggagtgtaatggcgcaatctcggctcaatgcaacctccacctcacaggttcaagtgattctcctacctcagcctcctgagtagctgrgattacaggcacgcactgctatgcccagcgaatttttgtatttttagtagagatggagttttgccatgttggtcaagctggtctcgaactcctgacctca

SEQ ID NO: 112798 - DNA, 201 bp, Homo sapiens
aggcatgagccactgcgcccggcgaggaaaggaattattaaacgctattgttattaaagaaaccaaagattgtgatgcttggaaggtgtgtctacgacttyaagattatggacttctggccaagccaacctgtggcgacatcatcaggtttcacctctgctggtggtcaagggggatgagattcgagagtccagtgaactc

SEQ ID NO: 112799 - DNA, 201 bp, Homo sapiens; identical to SEQ ID NO: 18765

SEQ ID NO: 112800 - DNA, 201 bp, Homo sapiens
gaaaatatactagctatcatttttaatgtatgtattttaaagctaatattgttaaaatcttaacgtgaactagaagcagtagtatgttcaaggatttcagscatactctcagaaaactcacagttcacttggagaaccaaggatcaagggactgacttgataaattgtggaaacgagattgtgcacttcgtagaaagctgt

SEQ ID NO: 112801 - DNA, 201 bp, Homo sapiens
tatttttctctataaacagaaggattccttcacagttgagaggtatactggctctatttcagaaacagaaacctaaaatttgaggtttctagtgtttgtayatcattcactaacaactgagaaattatttgctttgtgaattaaaatcttgttgaaagtgaacattcaagcttttaatctatactttattaactacatctc

SEQ ID NO: 112802 - DNA, 201 bp, Homo sapiens
catgggagtttgttgtgcagactatttcatcacccaggtacaaagcctaggacccaatagttattttttctgatcctattcttctccccaaccctccaccstcaagtagaccccagtgtctgttgtctctttgcatccatgtgttctcatcagttagctccccctcataagtgagtacatgcagcatttggttttctgttc

SEQ ID NO: 112803 - DNA, 201 bp, Homo sapiens
gcagagcaacttgaagcatggaaggggcttccaggtcataggtagataggagacaaatggctgaattcctttgagtttctgattagcctctccaaatgagkcaattagatatgcatttatctcagtgagccaagggctgactttgaatagaatgggaagtaggtttgccctgagcagcttaacttttccctttagcataga

SEQ ID NO: 112804 - DNA, 201 bp, Homo sapiens
gccttataattaataactttgttaaaatgcatccacttttaggtcatcccaaaaccaaagcttttataactcatggtggaaccaatggcatctatgaggcratctaccatgggatccctatggtgggcattcccttgtttgcggatcaacatgataacattgctcacatgaaagccaagggagcagccctcagtgtggaca

SEQ ID NO: 112805 - DNA, 201 bp, Homo sapiens
ctttgtttacctattcaatccatgggaatggcaggcgcccctcccccagtctcactgctgccttgcagttcgatctcagactgctgtgctagcaatgagcraggctccgtgggcgtaggaccctctgagccaggtgcgcgatataatctcctggtgtgccgtttgctaaaaccttttggaaaagcgcagtattagggtggg

SEQ ID NO: 112806 - DNA, 201 bp, Homo sapiens
atctgttacccctatccttggctagggaagggaattcacagaccccttgtgcttccctgatgaggcaatgcctcgccgtgctttggctcacacgtggtgcrctgcacccactgtcctgcacccactgtctgacagtcccctgggagatgaacccagtacctcagttggaaatgcagaaatcattcctcatctgtgtcattc

SEQ ID NO: 112807 - DNA, 201 bp, Homo sapiens
accccttgtgcttccctgatgaggcaatgcctcgccgtgctttggctcacacgtggtgcgctgcacccactgtcctgcacccactgtctgacagtcccctsggagatgaacccagtacctcagttggaaatgcagaaatcattcctcatctgtgtcattcacactgggagctgtagactggagctgttcttattcggccat

SEQ ID NO: 112808 - DNA, 201 bp, Homo sapiens; identical to SEQ ID NO: 18773

SEQ ID NO: 112809 - DNA, 201 bp, Homo sapiens
ctattcccatcaaactaccattgacattcctcacagagctagaaaaaaactactttaaatttaatatggaaccaaaaaagagcccatatagccaagacaamcctaagcaaaaagaacaaagctggaggcatcacgctacctgatgtcaaactatactattaggctacataaccaaaacagaatggtactggtaccaaaaag

SEQ ID NO: 112810 - DNA, 201 bp, Homo sapiens
aatcattctactgtaaagacacatgcacatgtatgtctattgcagcactatctacaatatcaaagatatggaaccaacacaaatactcatcaatgatagastggataaagaaaatatgatgcatgtacagtatggcggcatactatgtgccataaaaaggaatgagattatgtctgttgcagggacatggatgaaactcaa

SEQ ID NO: 112811 - DNA, 201 bp, Homo sapiens; identical to SEQ ID NO: 18770

SEQ ID NO: 112812 - DNA, 201 bp, Homo sapiens
atgtacagtatggcggcatactatgtgccataaaaaggaatgagattatgtctgttgcagggacatggatgaaactcaaagccattatcctcagcaaactracacaggaacagaaaaccaaacaccacatgttctcactcataagagggagtcgaaaaatgagaatacatggactcagggaggggagcaaaacacaccggg

SEQ ID NO: 112813 - DNA, 201 bp, Homo sapiens
aaaatattttttaaaaaattcagtcaaaaaattctaattataaatatgcctttctctcatcaactattcttccaagtatacatccaacaaaaatgaataartatgtaaatctaataaaatatataaatatcttaataccataattattagtaagatcaaaaaatgttaacaacacaaatatccattaatcataaatgaaga

SEQ ID NO: 112814 - DNA, 201 bp, Homo sapiens
ctcaaaattcacaagtgagatgtaaactgaagagcttctgcacagcagactatcaagagaataaacaaacaacctattgaatggaagaatatattagcaarctacacatctgttaaaggtctaatatccagaatctataagaaacttgaataattcaacaagcaaaaatcaagtaaccctatgaaaaactgggcaaaagat

SEQ ID NO: 112815 - DNA, 201 bp, Homo sapiens
gtgaacagcaaatgttgctgtctgattgttcctctggaagttttctcagaggagtacccggctgtgtgaggtgtcagtctgcccctactggggggtgcctmccagtcaggctactcggggatcaggacccacttgagtagcagtctgtccattctcagatctcaagctgcgtgctgggagaaccactactcttttcaaagc

SEQ ID NO: 112816 - DNA, 201 bp, Homo sapiens
aacaaagagaataaaatacctaggaatatgcctaacaaggtacgtgaaggacctcttcaaggagaaatagaaaaccctgctgaaggaattaagagaggacacaaacaaatggaaaaacattccatcctcatggataaaaaaatcagaattgtaaaaatggccatgctgcccaaagtaattttttttattatactttaagtt

SEQ ID NO: 112817 - DNA, 201 bp, Homo sapiens
acaaagagaataaaatacctaggaatatgcctaacaaggtacgtgaaggacctcttcaaggagaaatagaaaaccctgctgaaggaattaagagaggacacaaacaaatggaaaaacattccatcctcatggataaaaaaatcagaattgtaaaaatggccatgctgcccaaagtaattttttttattatactttaagttt

SEQ ID NO: 112818 - DNA, 201 bp, Homo sapiens
caaagagaataaaatacctaggaatatgcctaacaaggtacgtgaaggacctcttcaaggagaaatagaaaaccctgctgaaggaattaagagaggacacaaacaaatggaaaaacattccatcctcatggataaaaaaatcagaattgtaaaaatggccatgctgcccaaagtaattttttttattatactttaagtttt

SEQ ID NO: 112819 - DNA, 201 bp, Homo sapiens
tagttggacttcattaaaatcaatacttttgtgcttcaattaacaccattaagaaagtaaaaggacagcccaaagaataaaaaaatacaaggaaatcatayatgtgataaggttcttatatcaaaaaatattaaaaacacaagtccataagaagacaaataattcaatcaaaactaggcaaaacattctcaacatgatttc

SEQ ID NO: 112820 - DNA, 201 bp, Homo sapiens
acttggaaatggtttgtgagatataaaatcaaaaataaaagcaaccaaattaaaattgattagttggacttcattaaaatcaatacttttgtgcttcaatkaacaccattaagaaagtaaaaggacagcccaaagaataaaaaaatacaaggaaatcatatatgtgataaggttcttatatcaaaaaatattaaaaacaca

SEQ ID NO: 112821 - DNA, 201 bp, Homo sapiens
ctttaaagacaaatacaaatatatgataatcaagagagtgtgatacaggcctacagatagacatgtagatcaatggaatgattttagaacatagaaatatrcccatgcatttaaagtttttgacaaaagtttcaaaacgttttaataggggaaagaatagattattcaacaaatataagtgggaaaaatgattatctgtat

SEQ ID NO: 112822 - DNA, 201 bp, Homo sapiens
tagaaaggcatctcattttcatttattgaaagacctaaaattgtgataatgaccatactctactccccaaactgatataccaaatcaatgcaatccgtatsaaaatcccagattgcttctttgtataaacagacaaactgatcctgaaatttatgtacatattcaagagacatactaatagccaaaagaagctaggtatag

SEQ ID NO: 112823 - DNA, 201 bp, Homo sapiens
ctcctgtgcctactcaactcttccattgtagtacaaaagcagccatagtcaataaggtaaactctgtaaaagtaaacaaaatcaacaaactgttagctagrctaagtaagaaaaagtgagaacagacccactaaataaaatcagaagtgaaagaggagacataaaaactgagattacagaaacacaaattattacagaata

SEQ ID NO: 112824 - DNA, 201 bp, Homo sapiens
gcagacttaaatgtccctgtctgacagctttgaagagagcagtggttctcccagcatgcagctggagatctgagaacgggcagactgcctcctcaagtggktccctgacccctgacccccaagcagcctaactgagaggcaccccccagcaggggcacactgacacctcacacggtagggtattccaacagacctgcagct

SEQ ID NO: 112825 - DNA, 201 bp, Homo sapiens
ctttaaaaaaggcaaaacatatatcaataaacaacttgatgaaggcagacatttagatgaggagctacacatatttctagcataactattaatgcagcatygagaaacttgtttctctttgtgtacctcagttttcttatttaggtattaaaatatttttctctataaacagaaggattccttcacagttgagaggtatac

SEQ ID NO: 112826 - DNA, 201 bp, Homo sapiens
ttatgtttcaaatataaatgattaaaataacagcactttctatttcaataatgtactaattgagcacttaggcaagagaaagctataaaaggcatccaaayaggaaaagaattgaaggtatctctctttcctgatgatatgattctatacctagaaaatcctaaagactgcctaaagcctgctagaactgaaaaatgactt

SEQ ID NO: 112827 - DNA, 201 bp, Homo sapiens
aaacaaatgcatatttaagtccatagtggcttattttaataactatttgagattgtgaatatactaatgttacattaaatatgtaatttccgaagatggcygaataggaacagctcaggtctacagctcccagcgtgagcgacgcagaagacgggtgatttctgcatttccatctgaggtaccaggttcatctcactaggg

SEQ ID NO: 112828 - DNA, 201 bp, Homo sapiens
taaagtgaaataacccttacaaaaaaaattatacttagagtttgactctgcaattctacatctagtcatctgctatccagatacacttgcacctgagtgcrtgtatgtacaggttgttccctccatcacttacatggctatcagtcagtgcacatacatacctcccacaaaaagtagaaggtatgaagcaattacagagaa

SEQ ID NO: 112829 - DNA, 201 bp, Homo sapiens
acacaactgatcattttattctaggactaaatttaccacacaagattctttctcatataaaattatttctcttcaagctttttacaaaaaaaaaaaaaaaactttttatttttataactttctttacatctcccttacttcctggttccttttaccttgttttatacataacctttaaataagctttgaattagacaacac

SEQ ID NO: 112830 - DNA, 201 bp, Homo sapiens; identical to SEQ ID NO: 18772

SEQ ID NO: 112831 - DNA, 201 bp, Homo sapiens
aacctggcagtgtgaacaatagaaagtgatggttaatgatcacgccttacatccacacagcttcctactgggtccacatgagcttaagtcccaacagtcasggtgatgattagtttggtaacacattcttgtactgacttttctcccttcttgtttcaccctttcctgtcccctactcctgtaccctaagaacatttctca

SEQ ID NO: 112832 - DNA, 201 bp, Homo sapiens
gtccctgcggctttccgcagtgcattgtgcccctggtttattgagactagagaatggtgatgacttttaccaagtatactgcctgtaaacattttgttaamaaggcatgtcctgcacagtcctagatcccttaaaccttgatttcatacaacacatgtttttgtgagctccaggttgggtcaaagtggctggggcaaagtg

SEQ ID NO: 112833 - DNA, 201 bp, Homo sapiens
gttccaagacctaatgacagaaataccatttgacccagcaatcccattactgggtatatacccaaaggaatataatcattctattataaagacacatgcaygtatatgttgattacaacactattcacaatagcaaagacatgaaatcaacctaaatgtccatcaatgatagactgaataaggaaagtgcagtatgtatac

SEQ ID NO: 112834 - DNA, 201 bp, Homo sapiens
cattgaatatatagaaaggttaaaggaaaaaacgaacctgcttactgtagagcagagatcagaataggttctataaagcctcagatggtaaacatttttgraatttgcaaaccctttggactcctgtgcctactcaactcttccattgtagtacaaaagcagccatagtcaataaggtaaactctgtaaaagtaaacaaaa

SEQ ID NO: 112835 - DNA, 201 bp, Homo sapiens
aagctgcgtgctgggagaaccactactcttttcaaagctgtcagacagggacatttaagactgcagaggtttctgctgccttttgtttggttatgccctgyccccagaggtggatctacagaggcaggcaggcgtccttgagctgcggtgggctccacccagttcaagcttctgggccgctttgtttacctattcaatcca

SEQ ID NO: 112836 - DNA, 201 bp, Homo sapiens
aaagagaataaaatacctaggaatatgcctaacaaggtacgtgaaggacctcttcaaggagaaatagaaaaccctgctgaaggaattaagagaggacacaaacaaatggaaaaacattccatcctcatggataaaaaaatcagaattgtaaaaatggccatgctgcccaaagtaattttttttattatactttaagtttta

SEQ ID NO: 112837 - DNA, 201 bp, Homo sapiens
aaatcagaattgtaaaaatggccatgctgcccaaagtaattttttttattatactttaagttttagggtatctgtgcacaaggtgcagctttgctacatawgtatacatgtgccatgttggtgtgctgcacccattaactcgtcatttaacattaagtgtatctcctaatgctatccctccccactcccgctacccccaag

SEQ ID NO: 112838 - DNA, 201 bp, Homo sapiens
acttttttcatctttaaaaaaggcaaaacatatatcaataaacaacttgatgaaggcagacatttagatgaggagctacacatatttctagcataactatyaatgcagcatcgagaaacttgtttctctttgtgtacctcagttttcttatttaggtattaaaatatttttctctataaacagaaggattccttcacagtt

SEQ ID NO: 112839 - DNA, 201 bp, Homo sapiens
ttataatagaaaatttttacaaatccactaaaaaatattcaagtaaactaataaaacaagattttgggatacaaggtaaataaacaaacaaaaaatctacrcaattgcaatggaaatttaaactaaaataaagattacacagtcacccctataataccatgaaaaaatataattcttagcaataagtttatcaaaaaattg

SEQ ID NO: 112840 - DNA, 201 bp, Homo sapiens
aattaaaaaaaaaaaactacaaagtaaagcacttatgatttctttaagcaactatataagtattttactatacttttttcatctttaaaaaaggcaaaacrtatatcaataaacaacttgatgaaggcagacatttagatgaggagctacacatatttctagcataactattaatgcagcatcgagaaacttgtttctctt

SEQ ID NO: 112841 - DNA, 201 bp, Homo sapiens
gaattaaaaaaaaaaaactacaaagtaaagcacttatgatttctttaagcaactatataagtattttactatacttttttcatctttaaaaaaggcaaaayatatatcaataaacaacttgatgaaggcagacatttagatgaggagctacacatatttctagcataactattaatgcagcatcgagaaacttgtttctct

SEQ ID NO: 112842 - DNA, 201 bp, Homo sapiens
agttagaaccctttggtcatcactcctataggacactacaggaattaaaaaaaaaaaactacaaagtaaagcacttatgatttctttaagcaactatatamgtattttactatacttttttcatctttaaaaaaggcaaaacatatatcaataaacaacttgatgaaggcagacatttagatgaggagctacacatatttc

SEQ ID NO: 112843 - DNA, 201 bp, Homo sapiens
tatactttcacttgattgatttatgctcagatgtaagtatgagaaagacagaaagaaacagcaatttgaaaagaaacattgcattgcaccaggaggactatgaaatcgatgtcaaatattctcctgatacaactcagttgttactttagctctgggagttgtggaaaggtgctgctgtggcccacagaatacagccattgg

SEQ ID NO: 112844 - DNA, 201 bp, Homo sapiens
agaaatgtacaatcgggttttatactgagacattcagttcccaggggcaggcgggagatagtggccttcctctatctcgactgcaagaggctttcctcttytactactccacctcagcacagaccctttacgggtgtcaggctgggggacagccaggtctttctcatcccatgaggccatatttcagactatcacatggag

SEQ ID NO: 112845 - DNA, 201 bp, Homo sapiens
gttatactttcacttgattgatttatgctcagatgtaagtatgagaaagacagaaagaaacagcaatttgaaaagaaacattgcattgcaccaggaggactatgaaatcgatgtcaaatattctcctgatacaactcagttgttactttagctctgggagttgtggaaaggtgctgctgtggcccacagaatacagccatt

SEQ ID NO: 112846 - DNA, 201 bp, Homo sapiens
agtaaaaaataacaaggcagcattgctgcaaacatgtctcacctcccaccatagggtggtttttttctctcatctcagaattgaagaaatgtacaatcggrttttatactgagacattcagttcccaggggcaggcgggagatagtggccttcctctatctcgactgcaagaggctttcctcttttactactccacctcag

SEQ ID NO: 112847 - DNA, 201 bp, Homo sapiens
gaaattgtatggtaacagacaattcctatgataatttagaaattatatggtaactgctactttgaattgtagcagttatactttcacttgattgatttatsctcagatgtaagtatgagaaagacagaaagaaacagcaatttgaaaagaaacattgcattgcaccaggaggactatgaaatcgatgtcaaatattctcct

SEQ ID NO: 112848 - DNA, 201 bp, Homo sapiens
tggacgtgcacgtaagccagatttatgtttctctccacccaaacatctcagtggagtaaaaaataacaaggcagcattgctgcaaacatgtctcacctcccaccatagggtggtttttttctctcatctcagaattgaagaaatgtacaatcgggttttatactgagacattcagttcccaggggcaggcgggagatagtg

SEQ ID NO: 112849 - DNA, 201 bp, Homo sapiens
agaataaaaaaatacaaggaaatcatatatgtgataaggttcttatatcaaaaaatattaaaaacacaagtccataagaagacaaataattcaatcaaaaytaggcaaaacattctcaacatgatttcatatcaaggaaaggtaaagcataatgagatatcacttcattcacactggctataatcaaacgaaatgtaatcc

SEQ ID NO: 112850 - DNA, 201 bp, Homo sapiens
tttgcaatctatccctctgacaacggtctaatatctagagtctacaaggaacttaaacaaatttacaagacaaaaacaaacaacaccatcacaaaggctawaaacagacacttctcaaaagaagacatttacatggccaacaaacatatgaaaaaaagctcatcatcactggtcattagagaaatacaaattaaatccaca

SEQ ID NO: 112851 - DNA, 201 bp, Homo sapiens
tttgtgcttcaattaacaccattaagaaagtaaaaggacagcccaaagaataaaaaaatacaaggaaatcatatatgtgataaggttcttatatcaaaaaatattaaaaacacaagtccataagaagacaaataattcaatcaaaactaggcaaaacattctcaacatgatttcatatcaaggaaaggtaaagcataatga

SEQ ID NO: 112852 - DNA, 201 bp, Homo sapiens
ttgcagcaaaagccaaaattgacaaatgagatctaattaaactaaagagcttctgcacagcaaaataaactatcatcagagggaacaggcaacctacagartcggcaaacatttttgcaatctatccctctgacaacggtctaatatctagagtctacaaggaacttaaacaaatttacaagacaaaaacaaacaacacca

SEQ ID NO: 112853 - DNA, 201 bp, Homo sapiens
atcaatacttttgtgcttcaattaacaccattaagaaagtaaaaggacagcccaaagaataaaaaaatacaaggaaatcatatatgtgataaggttcttayatcaaaaaatattaaaaacacaagtccataagaagacaaataattcaatcaaaactaggcaaaacattctcaacatgatttcatatcaaggaaaggtaaa

SEQ ID NO: 112854 - DNA, 201 bp, Homo sapiens
ccacatgattatctcaatagatgcagaaaaggcctttgataaaattcaacatgccttcatgctaaaaactttcaattcactaggtattgatggaacatatstcaaaataataaaagcaacttatgacaaatccatagcccatatcatactgaatgggaaaaagctggaagcactccctttgaaaactggcacaagacaagg

SEQ ID NO: 112855 - DNA, 201 bp, Homo sapiens
atggacatcgatgcaaaaatattcaataaaatactggcaaactgaatctaaccacacatcaaaaagcttatccaccacaatcaggccagcttcatccccakgatgcaaggctggttcaacatacagaactcaatgaacataatccatcacataaacagaacgaattacaaataccacatgattatctcaatagatgcagaa

SEQ ID NO: 112856 - DNA, 201 bp, Homo sapiens
aagaagacatttatgcagccaaaaaagacatgaaaaaatgctcatcatcactggccatcagagaaatgcaaatcaaaaccacaatgagataccatctcacmccagttagaatggcaatcattaaaaagtcaggaaaaaacaggtgctggagaggatgtggagaaataggaacacttttacactgttggtgggactgtaaac

SEQ ID NO: 112857 - DNA, 201 bp, Homo sapiens
ttttaataactatttgagattgtgaatatactaatgttacattaaatatgtaatttccgaagatggccgaataggaacagctcaggtctacagctcccagygtgagcgacgcagaagacgggtgatttctgcatttccatctgaggtaccaggttcatctcactagggagtgccagacagtgggcacaggtcagtgggtgc

SEQ ID NO: 112858 - DNA, 201 bp, Homo sapiens
agatggtttttattgttatactaaggagtgttatctctggagacacatttgcctgtgttttaatattggctgtgtttctttctctgcaaactgaggataawaacacctatgttattcagttactgtgagaattaaatttattaacacattaaagtattatggttaatgctcagtacaaattaacgattaatatgatatgta

SEQ ID NO: 112859 - DNA, 201 bp, Homo sapiens
tgacatagaaagacaaatactacatgatctcatatatatagaaaaaagtttaactcggggcgcaaagcgagccggtggatccataaagaacccagccaacycgcagagggaagggaggggctgagctgtgaggagagtggggcccaacaaccatatctacatgggagtcctttaacccggaaagttacgaattggacaaaa

SEQ ID NO: 112860 - DNA, 201 bp, Homo sapiens; identical to SEQ ID NO: 18785

SEQ ID NO: 112861 - DNA, 201 bp, Homo sapiens
tcgcttcaattaaagactataagcaacaaaaatctcactgtatctacatatcaggtgaccttaggtcagtttgtaagtggatacaattaataaaataaaayccatgcctttttttcctgtcacattaactgaagatgcacctaatcttgaggcagcttctgagttgagaattatattgttatccaatactgttgatacatt

SEQ ID NO: 112862 - DNA, 201 bp, Homo sapiens
cacatgatcttccctccctacccaccctggtagctgaaaacaaatatcatatattcttgggagtcctaggaccccactcaccacctgattctccctatacyaccacagctgatgctccctttaaagcgccacctcctggcaagtagccaacgagtacaaaaatagtgcattaaacaaccaaaactaaggaccttaacagag

SEQ ID NO: 112863 - DNA, 201 bp, Homo sapiens
ggctgtgtttctttctctgcaaactgaggataataacacctatgttattcagttactgtgagaattaaatttattaacacattaaagtattatggttaatkctcagtacaaattaacgattaatatgatatgtatatgctgaattacactagtatgtgctttaagacgggaatgcccttttataacacatgagtttttcaa

SEQ ID NO: 112864 - DNA, 201 bp, Homo sapiens; identical to SEQ ID NO: 18787

SEQ ID NO: 112865 - DNA, 201 bp, Homo sapiens; identical to SEQ ID NO: 18788

SEQ ID NO: 112866 - DNA, 201 bp, Homo sapiens; identical to SEQ ID NO: 18789

SEQ ID NO: 112867 - DNA, 201 bp, Homo sapiens; identical to SEQ ID NO: 18790

SEQ ID NO: 112868 - DNA, 201 bp, Homo sapiens; identical to SEQ ID NO: 18791

SEQ ID NO: 112869 - DNA, 201 bp, Homo sapiens
cccgagtagctgggattacaggcacgtgccaccacacccggctaatttttgtatttttaatagagatgggttttgccatgttggtaaggctggtttcgaaytcctgacctcaggtgatctgcccgcctcagcctcccaaagtgctaggattacaggcgtgagccaccgcgcccggctggaatgagatttttaaaaacacca

SEQ ID NO: 112870 - DNA, 201 bp, Homo sapiens; identical to SEQ ID NO: 18792

SEQ ID NO: 112871 - DNA, 201 bp, Homo sapiens
gaatttccagggaggtctcatttcaaaatgtcatcaacaagaaccacatggacctctgtgagagggatgattaaactagcctgagtttgaatgaaaggattatgtgtacccaacctgtaacaaacaccaaggaggtaaagtggcagagggtcttgtatgagcaacagccctttcctgataactttgtggaccggcggttcc

SEQ ID NO: 112872 - DNA, 201 bp, Homo sapiens
gtactatatagccattttccaatgcaacattagagtacagaacaggtattctgtggctagtgagtaatactgctgctgtagggtgcatacacgttaggatyggacgaggatcttactcaggattgcatcgtagtagggacagaagaccatcttgttatagttgaccaggcgagcaaatttaatagcaacttcctccagctc

SEQ ID NO: 112873 - DNA, 201 bp, Homo sapiens; identical to SEQ ID NO: 18794

SEQ ID NO: 112874 - DNA, 201 bp, Homo sapiens
cctggcttgcttcactcattgattctacctacccagcccctttagacattaaagtttttatccgatgcccattgatttaaccagggactatattttccaarctgaaactcaggacatacaacattatcactatgaatatgcttatggaagagtagaacaaaaagccagaaattgggattgtcttggaatagtatggatatg

SEQ ID NO: 112875 - DNA, 201 bp, Homo sapiens
aaaaaaatgaaagaaattctgaaaaccatgaggcttaaatcaaataatatttgaattgtactagaacaggagagaaaatgacttggagcaggatgagaagrtgaaattgaaagcccatgctatggtccctgccctgctgatgtcaatctcttcccaggcccatgggtgtgggagtgcttagatgctcattctgaaattctg

SEQ ID NO: 112876 - DNA, 201 bp, Homo sapiens
tgcagtatgaccctatgttcacatgaataagacagctttacagaattataaagtgacatttcaaacctctgaattttccctacactattgattgttcagtyctatccatgttcctttctatctggaatacctgcccttctcccagacctggtccagacccctcaaggccaagctgcacattttcttctgtgaaacctttga

SEQ ID NO: 112877 - DNA, 201 bp, Homo sapiens
ccctgttcattaaaaataaaaataaagtagcctggagtgcagcggggtgatcatgactcattgcagccttgacttcctgggttcaagtgatcctcccgcckcagcctccactcccggttagttttttgtattttttgtagaaacaaagtctcgcttttttgcccaggctggcctcgaactcctggactcaagcgatcctcc

SEQ ID NO: 112878 - DNA, 201 bp, Homo sapiens
cccatgatgtaaagcaagaaattttactttacaaccctgcagactgtgatgcattctgatctgttctattctattctattctttctacaatgggtgttatrgcctacataattggttttcaaaacatgactctattgctatgtgcattggaaaaaacacagttcttgtgggctgggtccaataggttttggtttcctttct

SEQ ID NO: 112879 - DNA, 201 bp, Homo sapiens
acactgtaagaatgataaatcatgggaaacagctggaaggatcctgaagttctttcttctgacttgttctttttccaaggactgtagattccttagcttargccagctggggtgagttcttgttggtgtgtgagtatatggttttcacatgtaaagcaaatttaagactcggttatgatagatttgtgctgtgtttgtgcc

SEQ ID NO: 112880 - DNA, 201 bp, Homo sapiens
cgcctcctttccctaacaaaagcagtacccccttagacccgagccccaacaatgactccaaaagatttttaaggacctaaaagcccaaggcctagtaaaascatgcaatagcccctgcaatactccaaatttaggagtacagaaacccatcagacagtggaggttagtgcaagatctcaggattatcagtgaggccgttgt

SEQ ID NO: 112881 - DNA, 201 bp, Homo sapiens
cttctcaatcagaccttccctgagcatcgtatttaaaatggaaacccatctcccaaactccttatctctcttccatgctttattttggaggctgtaatacttttttttttttatcactgtcaagtggaaaattattttcattgcaatcaatggcagcctctgagtccacaactaggcaaactcttccagaagggatcacag

SEQ ID NO: 112882 - DNA, 201 bp, Homo sapiens
ttaagatttttgcatctcttccataaggcttgccaagggctctgcatatgactgtcatgataaatacaaaattaattcttaaaatataagccatcatttaytgcttttccaagctcttcaaataatacctaaatgggataagcatctcgaatgtgaatatcattcatcagctaagttaaaaatagtacagtcaaaaggatc

SEQ ID NO: 112883 - DNA, 201 bp, Homo sapiens
gggcatgctggacttcctggaggaggtgcaccataagcaggagagcatcatggatgcagggctggtcgtggtccactgcagtgctggaattggccatacagggaggttcattgtgattaatagtcttattgacatcatcagagagaaaggtattaactgcaacattgaccttctcaaaaccatccacacagtgcagtctca

SEQ ID NO: 112884 - DNA, 201 bp, Homo sapiens
ctggagggccctgagcacatccaggcctaagccttcgcgttagtctgctcaggctgctgtaacaaaagatcgtagcctgggtggcttaaacaacagaaatytatttctcacagttctggaggctgggaagtcaaaaatcaaggtgctggctaattcggttccctggtgaaggctgtctttctggcttgcacacatttgtcg

SEQ ID NO: 112885 - DNA, 201 bp, Homo sapiens
agggccctcagtgaggaatgtatccagactatactggcttatcctcattccaaaaccctaaaagcaattacgagggttccttggcataacaggcttctgcyaaatatggattcccaggtacggcaaaatagccaggccattatatacactaattaaggaaactcagaaagccaatacccatttagtaagatggatacctga

SEQ ID NO: 112886 - DNA, 201 bp, Homo sapiens; identical to SEQ ID NO: 18796

SEQ ID NO: 112887 - DNA, 201 bp, Homo sapiens
aaggatccaaataacatcaaattttttgaaaggtggggcttttcatattgtttatggttaggttctaatacacccaaggaatggtttgaaaaagtattccrcacaagcatttgctcgtatcaagtcaccacatcttcctgtggttggtttatgaagagctaaaacccaaacaaacaccacctcttacacagtcacccagag

SEQ ID NO: 112888 - DNA, 201 bp, Homo sapiens
gtcagctcccagttgggttctgccccaaaggaccgtgaggagagactggaaggcagaaggagggagaagggatttcatcctctctatttgcttcttgtgcrtggcagtgccagcggctcttcaccaggcagaagcctttgcccattccatcttccagcttctttctactgtccctgtaccagcctcattgcatcactctgg

SEQ ID NO: 112889 - DNA, 201 bp, Homo sapiens
tacaagaagaatcctatgctggaaacattgggtacagtactacgactcaagcagccccttaacatgactcgtataaatgctgctgaaatagaaagcagagyttgagaactaagcaaattagctgagaccacagacaaagtccaacaaggcttttgggaagaatttgagacactacaaccacaggagtgcaaacttctctac

SEQ ID NO: 112890 - DNA, 201 bp, Homo sapiens
cttcacatgttccattagaagaaatagagctgtcacccacatcaagattcagaacactggtgattactaggacccgtttggggggaaaagtttgccacttmggctgagttggtccagtattacatggaacatcacaggcaattaaaagagaagaatggagatgttgttgagcttaaatatcctctgaactgtgcggatcct

SEQ ID NO: 112891 - DNA, 201 bp, Homo sapiens
ggcctagtaaaagtacccctggagacttcacatgttccattagaagaaatagagctgtcacccacatcaagattcagaacactggtgattactaggacccrtttggggggaaaagtttgccacttcggctgagttggtccagtattacatggaacatcacaggcaattaaaagagaagaatggagatgttgttgagcttaa

SEQ ID NO: 112892 - DNA, 201 bp, Homo sapiens
ctggcttgcacacatttgtcgtcttgcaacatggtcacatgcctttctttggtgcacgttcacacagagagagagagaaagagagggagagagagagagayctcttccttccataataaggtcataaggccaccagtcatacaggattagggccccacccttatgccctcgtttaaccttaactacctcctaaagacctgt

SEQ ID NO: 112893 - DNA, 201 bp, Homo sapiens
ttccttcttctgtaaaatgatactaacttctcccaaatttctccctcctgcatttgtggcatctccatctttccagctgctaaagcccaaatccttggatkcatcattgactcctccctttgtttctcccccacatccaatccaatagcaaatcccagtggcttcactttcagaacataaccagagtctcatcactactta

SEQ ID NO: 112894 - DNA, 201 bp, Homo sapiens
tcttatttgcttacgtatgtacaagttagtggctaaaaagcagactgtccacatcctatacatcagtttgatcctctacaaccagcccaataaaccttccrtagcctttgtcaataatgttgttttcaatacaaagcgctttgtatttttacacataaaatctaatctggctttaaggcaggtattattatgcctatttta

SEQ ID NO: 112895 - DNA, 201 bp, Homo sapiens
aaaagtcaaatataaatatcagtgtctaccataaacaacaaacaccacacaaagtggtttttcccaataggcgtgttccagcaatacatgtgcaacctcayccaataatccagcttctttcaggctccctgttgagcagaagcaagtctgagatagctcctttcccagagccaggacatgagatttttccagaatcagaaa

SEQ ID NO: 112896 - DNA, 201 bp, Homo sapiens
gtaattctgatcatctgtcctgattcattcaagaatttcaactcttattttcccctggattccaatattgactctgccattttctgaatcaatatgatctycaaaaatcacagatcatctctaacaaaggctctttattctccaagatgtaaataactatgactttgtgttgagcaaattgacaccaaaggattacctttt

SEQ ID NO: 112897 - DNA, 201 bp, Homo sapiens
taattagctatcatagagagatttactctactctccaccaccctacccatggggtgtgaccagcctcaagagggtcttcaatcatcttgtcttcctcctgycatgacgtctccagcctcaggctagatcagctgcccggagatcttgccccttactgctctggactaatctcaaatacctcataccaataccagccatttg

SEQ ID NO: 112898 - DNA, 201 bp, Homo sapiens
tgtagttggtcatgtcagcttctaattcttatcataaggctctaagactaagccaagaatcaaaataatacagccagttttaattcatgggacaactaacrattggctgaaataagatcccatttccagtgccaaatgctgccaggacaacactaattcctagcacagtgcctgccacttacttaacatacaaatatgaga

SEQ ID NO: 112899 - DNA, 201 bp, Homo sapiens
tgtcgacggtgagtccttgggccgcatctcttttgagctgtttgcagacaagtttccaaagacagcagaaaacttttgtgctctgaatactggagagaaargatttggttacaagggttgctgctttcacagaattattccagggtttatgtgtcatggtggtgacttcacacaccataatggcactggtggcaagtcaat

SEQ ID NO: 112900 - DNA, 201 bp, Homo sapiens; identical to SEQ ID NO: 18802

SEQ ID NO: 112901 - DNA, 201 bp, Homo sapiens; identical to SEQ ID NO: 18803

SEQ ID NO: 112902 - DNA, 201 bp, Homo sapiens
gcctagttgctgataaatttccctcaaccgtgatgactatagcaatattataattagctatcatagagagatttactctactctccaccaccctacccatrgggtgtgaccagcctcaagagggtcttcaatcatcttgtcttcctcctgtcatgacgtctccagcctcaggctagatcagctgcccggagatcttgcccc

SEQ ID NO: 112903 - DNA, 201 bp, Homo sapiens
gaatcacagtgattctggttctcttaaaaagcaaaaagtaagtgaatgacacaagcacattatttatgtggaatatttatatccacatatcccatataagrgtagatttgggtcagacaaggctttctgtagctgtcctgactttttacttcacgctctaacttccatgttcccacaggctatcagtgagaggaacatgtg

SEQ ID NO: 112904 - DNA, 201 bp, Homo sapiens
gctatcatagagagatttactctactctccaccaccctacccatggggtgtgaccagcctcaagagggtcttcaatcatcttgtcttcctcctgtcatgaygtctccagcctcaggctagatcagctgcccggagatcttgccccttactgctctggactaatctcaaatacctcataccaataccagccatttgtggctg

SEQ ID NO: 112905 - DNA, 201 bp, Homo sapiens
aatttgaggtcatgaagcccgtatttataccaattgactctttcaagttgggaactctctacaacgcatatttctctttccacaagtgtcagatgaaggtygggcagttggtaatttggccacatgatagtgtgggtttgtgtgtggatacatgtgtgtctgtgtttcagtatgaatcacagtgattctggttctcttaaa

SEQ ID NO: 112906 - DNA, 201 bp, Homo sapiens
aattcattaacctactcccaagatgactattacacactttctcctcagtcctcaaatctccaacatctcctcccactcaacttcagccgaagactttgtcrtatatttcatgcagaaatatagatgcaatcatgtgaaaaccatttcaacttcccaccttcattccacaagcttattcatatctgtagtcacatgctctgg

SEQ ID NO: 112907 - DNA, 201 bp, Homo sapiens
gtgtccaaggttattttctactaccaaaggatttggagaaatgtatgtttctccatagcatccctctctaacttgtctgggaatttatctggaaaatgaawgtgggaaacagtagtagcaaggttgagggaacaggactccactttattccataaacattcactgagtgctttgcagatgctgccgtcgggagctctgtat

SEQ ID NO: 112908 - DNA, 201 bp, Homo sapiens
tactctttagctttttacttttattttttaatatgcatatccagagttagaaattttctctcaggtctgcaaccaaatctaatgttatttgatattatatggaacctgtctttttttatttttttattgtggtaagaacacttaacatgaaatctacgctattaacaaattttaaatatacaatgtaataatgctaaccac

SEQ ID NO: 112909 - DNA, 201 bp, Homo sapiens; identical to SEQ ID NO: 18799

SEQ ID NO: 112910 - DNA, 201 bp, Homo sapiens; identical to SEQ ID NO: 18801

SEQ ID NO: 112911 - DNA, 201 bp, Homo sapiens; identical to SEQ ID NO: 18800

SEQ ID NO: 112912 - DNA, 201 bp, Homo sapiens
tggatagcaagcatgtggtcattggcaaggtgaaagaaggcatgaatattgtggaggccatggagcactttgggtccaggaatggcaagaccagcaagaaggtcaccattcctgactttggacaactcgaataagtttgacttgtgttttatcttaaccactggaccattccttctgcagctcaggagagcagccctccac

SEQ ID NO: 112913 - DNA, 201 bp, Homo sapiens
caggcagcaatccaagagctttggcatgatttgcaagagaaaaccagctctgattaatgctatcaaaatgcttgtctttcctgtgattgatattccagccycttgttacaattattgatgctggtgaccactattatgagagtctttttatagtttgctgttttggagggaggttgcatggacttcaccagaacatttgca

SEQ ID NO: 112914 - DNA, 201 bp, Homo sapiens
gtattctagaatctttgtgctctcgctgcagttccctttgggttccatgttttccttgttcccttccatgcctagttagatggcagagttaagtttgtgattatgaaatgaaaactaaataagaaacaaaaaaaaaaaattcacttccaggcactactgtaggcactggagatagaaagatgaatccttgtccccaaaact

SEQ ID NO: 112915 - DNA, 201 bp, Homo sapiens
ggagaacagttgttgccaaggtcagggggagggaaagggagttagtgtttcgtgagtacaaagtttcagtgtgggaagatgaaaaggtcctagagatgggyggtggtgacggttgtacgacaacgtgaatgtgcttcacactagtgaatggtcccatgaaaatggctaagatggtacggtggatgtgtatttcaccacaaa

SEQ ID NO: 112916 - DNA, 201 bp, Homo sapiens
tacatttttaaaaactgtatctgatttagaagtatttaaattcagttactctaaagtgtatttgtttttaggatggggcggctccacgcttcacggattawttgtttcctaagcagtccttctctcttacatcaaacgtcttgttgtcttgttgattccattgtaaatggcttcacagttcctgttgaatgtttcatttct

SEQ ID NO: 112917 - DNA, 201 bp, Homo sapiens; identical to SEQ ID NO: 18805

SEQ ID NO: 112918 - DNA, 201 bp, Homo sapiens
taccttatgattgtcagaagttggacatcaagtccatcctgagtatcatgaggcagaactgtgagatcagccccaatgatgggttcctggctcagctttgycatctcaatgacaaactagccaaggaggggaaggtgaaaccctggggtgcccctaccacctttgctcgagaggttcagtgggagaggccctggttgaagg

SEQ ID NO: 112919 - DNA, 201 bp, Homo sapiens
aatatcttcaagtgatcatcaataagggagggggtgtgtaggctgtacggcatctgctccccaacagaaatgaatagactgtcagactgacggactataartagactatcaattaattatttccttgcttttcatacatggatgtaatgtcacaccctcaacccactggtttttctagagtctaatttattaaccatattc

SEQ ID NO: 112920 - DNA, 201 bp, Homo sapiens
catgtttgactcatcaatgcattttggtcacaccaatgataaatttagtggtttagtcatgataaaaagacaggtgcaacgttatcttttggaagaaagarcaatgagacccatataatttcaatcttggatgaaaatcaccagttgctaaaataaacaaaatgttttcagacctggttctcatctccttttatatgcaat

SEQ ID NO: 112921 - DNA, 201 bp, Homo sapiens; identical to SEQ ID NO: 18807

SEQ ID NO: 112922 - DNA, 201 bp, Homo sapiens
attggagttctctctactccattgcttcagcctaatgctggcaagagagactctttggcccactgctggcactcagggctgaagaggtggttgaggcttcyggaaaaggaagattattagaatgattgtgcaagtctcttatggcttttgaatacctcacccatgtttgactcatcaatgcattttggtcacaccaatgat

SEQ ID NO: 112923 - DNA, 201 bp, Homo sapiens
tgtctaaaatatgtgctttcatgaaactgtgtagtaataaacaataatcagcccaaatttatggttaattcagttgacagttcatacacatacgcgcgcgmacacacacacacacacacacacacacacacacattgtgtaagcctttttagttttctaaacatcccaaatttcctattttcttagatgtcttggtagttc

SEQ ID NO: 112924 - DNA, 201 bp, Homo sapiens
ttgtctgagagtttgtgatacaaatttgaatggatcatgggggaagcagggagccaatcaacatataatcatacaacttttttttttttttttttttttttgagacagtcttgctctgttgccaggctggagtgcagtggtacgatctcggctcactgcaacctctgcctcctgggttcaattgattctcctgcctcagcc

SEQ ID NO: 112925 - DNA, 201 bp, Homo sapiens
aagttaaataaatactttctttgcatctggaaagggctaattcaattttcaaagtttactttataattgggtttatcttatttattgaggaaatatggtgygataataaagaacagaataaattgttcataatgagtttgctcagttgtttactaaatcgattatggacttctgaaactaataaaatagaaagaccaataa

SEQ ID NO: 112926 - DNA, 201 bp, Homo sapiens
tctaaggtaactcagctaacaagcagcatgattgggctcttttttttttgagacagagtctcgctgtgcagtggcacgatctcggctcaccgcagcttcckcctcctgggttgaagcaatactcctgcctcagactcccgagtagctgggactgcaggtgcccgccaccatgcccagctaattttcatatttttagtagag

SEQ ID NO: 112927 - DNA, 201 bp, Homo sapiens
gattccaatgtgcagccaaggggaagaacagacggagccaaggcgcggggatcaaggataaaggagacaagctccactaggcagagccgggcctcttctckacgtcacgccctggcgttgctgcgtggttcgtttactcaaccgagaataggccggtcctcgctgtagcaacacgacccgcacaactgattgagtgggaag

SEQ ID NO: 112928 - DNA, 201 bp, Homo sapiens
gataggtagtattattatccccattttacagatgaggaaactgaggatcagggaggttaggtaacttgtctaaggtaactcagctaacaagcagcatgatygggctcttttttttttgagacagagtctcgctgtgcagtggcacgatctcggctcaccgcagcttcctcctcctgggttgaagcaatactcctgcctcag

SEQ ID NO: 112929 - DNA, 201 bp, Homo sapiens
aaacaaaactacaaaaattagccgggtgtggtggcacagcgcctgtaatcccagctacttgggagactgaggcaggagaatcgcctgaacccgggaggtgraggatgcagtgagccgagattgtgccaccgaactctagcctgggtgacagagtgagaccatctcaaaaaaaacaacaaaaaagaagataggtgggaatcc

SEQ ID NO: 112930 - DNA, 201 bp, Homo sapiens
taggtgtgtgatgagagatgacatacaacttttttttttcatttgagcctagaagtttctatatcaaaaagccactgttttctcttatgactgcctttttycccttcctaatgcagttgactgattatagtgtctataatctgttaggtatgctttactcagaataattatattcaagtcagagtacacagtgaagtggcc

SEQ ID NO: 112931 - DNA, 201 bp, Homo sapiens
cattgctctttctttcttcacaggtaggtgtgtgatgagagatgacatacaacttttttttttcatttgagcctagaagtttctatatcaaaaagccactrttttctcttatgactgcctttttccccttcctaatgcagttgactgattatagtgtctataatctgttaggtatgctttactcagaataattatattcaa

SEQ ID NO: 112932 - DNA, 201 bp, Homo sapiens
tgaacgggtagggtcctcccggcacagcgcggccacgccccctggacgccgcggtcccgcccccggacaccgctgtcccgctcccgggctgtcctcagcargggcgcggtctggtactcgtgcgtcttttatcgcctcagtttccctccgccgactagcgcgcggggcccggttctccatcgcgcgcacggcagcctagcg

SEQ ID NO: 112933 - DNA, 201 bp, Homo sapiens
ctggagtgcagtggtacgatctcggctcactgcaacctctgcctcctgggttcaattgattctcctgcctcagcctcctgagtaactgggacgccaccacrcccggctaatttttgtatttttagtagacatggggtttcaccatgtcagccaggatggtctcgatctctcgacctcgtgatccgcctgccttggcctccc

SEQ ID NO: 112934 - DNA, 201 bp, Homo sapiens
tggcaccatctcggctcactgtaacctctgcctctcgagttcgagcagttctcctgcctcagctttcgacgtagctgggattacaggcatctaccacaacrcccagctaatttttgtatctttagtagagatggggttttgccatgttggtcaggctggtctcaaactcgtgacttcaggtgatccccccacctcggcctc

SEQ ID NO: 112935 - DNA, 201 bp, Homo sapiens
gcggactccagcctcccgccaatgaacgggtagggtcctcccggcacagcgcggccacgccccctggacgccgcggtcccgcccccggacaccgctgtccsgctcccgggctgtcctcagcaagggcgcggtctggtactcgtgcgtcttttatcgcctcagtttccctccgccgactagcgcgcggggcccggttctcca

SEQ ID NO: 112936 - DNA, 201 bp, Homo sapiens
gggttttgccatgttggtcaggctggtctcaaactcgtgacttcaggtgatccccccacctcggcctcccaaagtgctgggattacaggtgtgagccaccrcgcctggctcatctttatcatttttaagtgtactgatcagtggtaaaaactacatttatattacattttcctccgtctcttctctacccttcccttctgc

SEQ ID NO: 112937 - DNA, 201 bp, Homo sapiens
tgttgggattacaggtgtgagccactgcgcccagccctattttttcagttgaggttaaaatataaaatttaccatctttatctttttttttttttttttttgagacagagtctcactctgtcacctagactggagtgcagtggcaccatctcggctcactgtaacctctgcctctcgagttcgagcagttctcctgcctca

SEQ ID NO: 112938 - DNA, 201 bp, Homo sapiens
ccacgcccggctaattttttgtatctttagtagagacggggtttcaccatgttggccgggctggtctcgaacttctgacctcaggtgatccactcgcctcrgcctcccaaagtgctgggattacagacgtgagccactgcgcccggccttttgaattttataatttgttcatattaattaaattttaaggcattttaaaat

SEQ ID NO: 112939 - DNA, 201 bp, Homo sapiens
aggggctggcagggcggtagcctggggtgccatcgtcttcccctagagcttcgggctggccccggcggaagaagtgggccacgcatgggcatttgggctckatgataaggggcgctcgcccactgtacctccgaccggacataagcccgccggcctttggttgggagaacctcgcccccactttggcgacttctagcactg

SEQ ID NO: 112940 - DNA, 201 bp, Homo sapiens
cagctttgcttactggatgacgatgatgtctgccactgttcttcactgtaaagttactcttttcccctttgtaattaataagtaccttatgtgggggggggtggcaggtaactttgagaccttcatcagactttcaattcattatttttaaatcagtatggactcaggaattcctatgttactgaatggactataatatgt

SEQ ID NO: 112941 - DNA, 201 bp, Homo sapiens
cgggaggcggaggttgcagtgagctgagatcgtgctattgcactccaggctgggcaacaagagcgaaactctgtctcaaacaaaacaaaacaaaacaaaactacaaaaattagccgggtgtggtggcacagcgcctgtaatcccagctacttgggagactgaggcaggagaatcgcctgaacccgggaggtggaggatgca

SEQ ID NO: 112942 - DNA, 201 bp, Homo sapiens
gctctgggctcacgtgatcctcctgctatggccttgcaaagccctaggattacaggtgtgaacaactgtgccctccccaataccttcatttggatgtgccrtaggctcttcaaattcaacgcattgaaaatggcccattcttttcttcctatattctctttttattttgagacagagtcttactctgttgttcaggctgga

SEQ ID NO: 112943 - DNA, 201 bp, Homo sapiens
ccgggaggcggaggttgcagtgagctgagatcgtgctattgcactccaggctgggcaacaagagcgaaactctgtctcaaacaaaacaaaacaaaacaaaactacaaaaattagccgggtgtggtggcacagcgcctgtaatcccagctacttgggagactgaggcaggagaatcgcctgaacccgggaggtggaggatgc

SEQ ID NO: 112944 - DNA, 201 bp, Homo sapiens
cccgggaggcggaggttgcagtgagctgagatcgtgctattgcactccaggctgggcaacaagagcgaaactctgtctcaaacaaaacaaaacaaaacaaaactacaaaaattagccgggtgtggtggcacagcgcctgtaatcccagctacttgggagactgaggcaggagaatcgcctgaacccgggaggtggaggatg

SEQ ID NO: 112945 - DNA, 201 bp, Homo sapiens
acccgggaggcggaggttgcagtgagctgagatcgtgctattgcactccaggctgggcaacaagagcgaaactctgtctcaaacaaaacaaaacaaaacaaaactacaaaaattagccgggtgtggtggcacagcgcctgtaatcccagctacttgggagactgaggcaggagaatcgcctgaacccgggaggtggaggat

SEQ ID NO: 112946 - DNA, 201 bp, Homo sapiens
aacccgggaggcggaggttgcagtgagctgagatcgtgctattgcactccaggctgggcaacaagagcgaaactctgtctcaaacaaaacaaaacaaaacaaaactacaaaaattagccgggtgtggtggcacagcgcctgtaatcccagctacttgggagactgaggcaggagaatcgcctgaacccgggaggtggagga

SEQ ID NO: 112947 - DNA, 201 bp, Homo sapiens
ctgatcattgctttaattagtatcattaggcagtttagagtaattctcaaattttgtcattccttctacgtttgttagctggaattctgtaaagaagagckttcccttaacaactagggcgattgggtttgaaatggagttaggatcaatgcttcattcttgtcttttatttacatgttttcagaataaggagttggttca

SEQ ID NO: 112948 - DNA, 201 bp, Homo sapiens
ggttataaataacttctgtcattactttatggtatgactttcctggaagtacagacttctaggggataaagaaacatcttaaggcccaggcatggtggctyatgcctgtaatcccagcattttgggaggctgaggctggtagattccttgagctcaggaggtcaagaccagcctgggtaacatggaaaaccccatctctac

SEQ ID NO: 112949 - DNA, 201 bp, Homo sapiens
caggctggtctcaaactcgtgacttcaggtgatccccccacctcggcctcccaaagtgctgggattacaggtgtgagccaccgcgcctggctcatctttaycatttttaagtgtactgatcagtggtaaaaactacatttatattacattttcctccgtctcttctctacccttcccttctgcccttttttgggttgacgt

SEQ ID NO: 112950 - DNA, 201 bp, Homo sapiens
ctgttctgcctacagtcttttaaaaaatattcttggttaattcctagtctgctcagtgccatgcacagcagattcctggcacaggacctgccttttagggmatcttgacaatttgcctcttggacaaataggttgaaaaagagatacaggaattattgagagagaaccagtggaactcagtgtcagacaagtaaacacttt

SEQ ID NO: 112951 - DNA, 201 bp, Homo sapiens
tcaagtcagagtacacagtgaagtggcctccctgcaggagaagcagcatacaaccaccaatgtctttcatttcacgttcatgtcggaaaaagaagtgccaytggttttcccaaaaacatatggaggtaagtagtgattattgcttgtccctaacaaagggaagaacttctaaggacatttttctccttttgaattggagga

SEQ ID NO: 112952 - DNA, 201 bp, Homo sapiens
tttcagaaaaagcctgaagctagctctgtagtagttatttgtcaaaataagtattttttttattcagtactatatgcaagtgattgaatctttcaattccyatgtttgatgtaactgacagtaatactgttttattttgtttgtttgagacagtgtcactctgtctcccaggctggagtgtagtggcgcgatctcagcttt

SEQ ID NO: 112953 - DNA, 201 bp, Homo sapiens
gtttattgcctttagcctatcattcccccagtgtgtcctttagcaggtgcatagatggaaggatttacacttactcaacaagtatttattgagccacataycttgtctgagagtttgtgatacaaatttgaatggatcatgggggaagcagggagccaatcaacatataatcatacaactttttttttttttttttttttt

SEQ ID NO: 112954 - DNA, 201 bp, Homo sapiens
atatatgcatatgaaaatgtctagaatgctgtataccaagatatttattataattaggtgggttttgcatgattccagttttattttttatattctttgcwttttctacatttttcaaaaacacatgtagatttcttctgcgtgtcaaaaaagttattttagttttgaagacaaaaaagaaatgtagtggaatttgccata

SEQ ID NO: 112955 - DNA, 201 bp, Homo sapiens
tttctactcctgttgccataggttggagccatctgatttctttgctggacaaagacttttaaatggagtttattgcctttagcctatcattcccccagtgygtcctttagcaggtgcatagatggaaggatttacacttactcaacaagtatttattgagccacatatcttgtctgagagtttgtgatacaaatttgaatg

SEQ ID NO: 112956 - DNA, 201 bp, Homo sapiens
gaatgacctctttatttttgtttcagttcgagataagttgcgggagatagtaggagcatccacaaactggaggtatgcatctttgttttcattcattcttytcatccccaaggtattatactacactgtatttaggctcagttgatggtctcacagtggggatggggagccctatgttcagagataggttgagaagtattt

SEQ ID NO: 112957 - DNA, 201 bp, Homo sapiens
ttacttcatagtttcttggctaaatcacaggatggactgcctcctaggagaatgaaggacagttatattgaagttctcttgcctttgggcagtgagcctgrattacgagagaaatatttgactgttcaaaacaccgtaaggtaacacagtgctatttttatgtatttgtttttatttccttgttttataacaattttgaaa

SEQ ID NO: 112958 - DNA, 201 bp, Homo sapiens
gtgtttgtatgatgatatgatggttttctacggtattacaagtttctccaaggttctctttcttgtgtttcagagtccatgttgtacttagatgggcagckgcatttcaactccatgagtggcccagcgaccttgagaaaggactaccttgtggagccctaagaacaccacatttgttgaaaactagcactctacccacag

SEQ ID NO: 112959 - DNA, 201 bp, Homo sapiens
cttactggcctgtgtaccactggaattgtgggctagaactgctcttgttttatgaatcctgcatcctttcttctcagagaccatgtgaaggcaatggaagraaggaaattacttcatagtttcttggctaaatcacaggatggactgcctcctaggagaatgaaggacagttatattgaagttctcttgcctttgggcagt

SEQ ID NO: 112960 - DNA, 201 bp, Homo sapiens
aaatgatcaatttcaccaagtggcaggtgggaagggagggaaggaagagaaggtgaaagtaggcccagaccttctttttcctcctttgatggtatcttacyggcctgtgtaccactggaattgtgggctagaactgctcttgttttatgaatcctgcatcctttcttctcagagaccatgtgaaggcaatggaagaaagga

SEQ ID NO: 112961 - DNA, 201 bp, Homo sapiens
ataccgtctctttgacttgctctcctggcacctgctagtctcctacagagctgtgcatgaatatgtcttttctcttccactgcggactctactcctcaacrataggacctgggtttgagtcacctagctcacttcctgacatccattcatttaacattcatttagcaatcatttattgagtgcctgtcctgtgccaggcat

SEQ ID NO: 112962 - DNA, 201 bp, Homo sapiens
tcctatattctctttttattttgagacagagtcttactctgttgttcaggctggagtgtagcggcatgatcatggctaactacagtcttgacctcctgggytcaagcaatcctcctacctatctcccgagtagctgggactacaggcatgtgccaccacacctggctaacttttgtgtttttggtagagatggagtctctg

SEQ ID NO: 112963 - DNA, 201 bp, Homo sapiens
aaattagccaggcttggtggtgcacgcctgtaatctcagctacttaggaggctgagggttgggaaccgcttgaacccaggaggtggaggttgcagtgagcygagattgcgccactgcactccagcctgggcaacagagtgagactcgtctcaaaaaataaataaataaataaataaaaatagagaaatggatatggagttt

SEQ ID NO: 112964 - DNA, 201 bp, Homo sapiens
tttggaaaaaaacagtgaaaaataatataaataaaacacaatacagtataacaaccatttttttaaaaaaatagagatggggctgggtgcagtggctcacrcctgtaatcccaccacgttgggaggctgaggtgggcagatcacttgaggccaggagtttgagaccagcctggccaatatggtgaaaccctgtctctattt

SEQ ID NO: 112965 - DNA, 201 bp, Homo sapiens
ccagctagtctccatgcaagaaaagcttatttacctatgtatctgtagacaggtatgttgctcactgcttctagaaaaacagttgaaagctcatgtcatayggatggtgggttattaatatcctccttgtggacaaagcctgacgtactatttggtgtttatatttaatatttatttctaatcatatacaagtccatgtta

SEQ ID NO: 112966 - DNA, 201 bp, Homo sapiens
tagctactagatttatttttcttttttagagacagtctcactctgttgcccgggctgtagtgcagtggtaaaatcatagcctactgcaaccttaaacttgygggctcaagtgttccttctgcctcagcctcctgagtagctgggactataggcacactgcaccatgcctggctaatttgttttgtttttttggaatagggt

SEQ ID NO: 112967 - DNA, 201 bp, Homo sapiens
accatctcggctcactgtaacctctgcctctcgagttcgagcagttctcctgcctcagctttcgacgtagctgggattacaggcatctaccacaacgcccrgctaatttttgtatctttagtagagatggggttttgccatgttggtcaggctggtctcaaactcgtgacttcaggtgatccccccacctcggcctcccaa

SEQ ID NO: 112968 - DNA, 201 bp, Homo sapiens
caccatctcggctcactgtaacctctgcctctcgagttcgagcagttctcctgcctcagctttcgacgtagctgggattacaggcatctaccacaacgccyagctaatttttgtatctttagtagagatggggttttgccatgttggtcaggctggtctcaaactcgtgacttcaggtgatccccccacctcggcctccca

SEQ ID NO: 112969 - DNA, 201 bp, Homo sapiens
aattgttaaatcttttaaaattatttatttagtttttgagacagggtctcactctgtcacccaggctggagtgcagtggcgtgatcacagctcactgtagycttgacctcctggctcaagcagtcctcctgccttagcctcctgagtagctgggactacgggtgcacaccaccatgcccagctaatttttttgatttttag

SEQ ID NO: 112970 - DNA, 201 bp, Homo sapiens
ttccttacttcatagctcactttctgaaaagaacctagaaaatcacctgctctcattgcctctttatgctaacttcctgttaattaaacatttcccggtcrgctgtgttccggcttctgctcctccacgccattgaatctgctcttgccaagctcgccattggcccctttactgcacagttgaatggatacttttcagggc

SEQ ID NO: 112971 - DNA, 201 bp, Homo sapiens
ttttgatatatttagagagttgtgcatccatcaccacagtcaattttagaacattttcatcaccctgaagtgtgttatttatttttaaagggagaccaacrtgatttgcatttaattcactgtttgctttatttcacagatttggcaggattcttgaggatcttgacagcttgggaggtactggtattattttagtctttc

SEQ ID NO: 112972 - DNA, 201 bp, Homo sapiens
ctgcaggtcagggctctggatcaggatgatatcaagtgatctcacactgaaccaatataatttccatgtggaaccaaagactcactgggagttttatgtgkcctctgcagttttctcttggatacgtgtataattttcagtgagattttgaaaggcatcccaggtcagaataccgtgtgctgtagtgcgaccgtcctgatc

SEQ ID NO: 112973 - DNA, 201 bp, Homo sapiens
tcacgatggcgtctcttaccatttctcactggtaggatcttttcccccttctctaactttattcttcgttcatttttattttgcttcagctagttgttagrggaaacaattgagatcatctgaattttgcaatataccccaaattctgtcctttcccccaacagtggttctcgaccgtttgtggtagcagtagatgacatc

SEQ ID NO: 112974 - DNA, 201 bp, Homo sapiens
cttgcgtgggctactgcttgtagctttgggtgagttacatgtaaggcagccttaacttctgagaagcaatttatatcaccccactgaaatgaaacatttcrgaccagtctgggtgtgtgtgggaatatgttatgtttttgaatgaataccacactgataccagctgaatttgatcttcattttagaaggttgtttctctga

SEQ ID NO: 112975 - DNA, 201 bp, Homo sapiens
tgaatagagccaagcacttgactcctagagaactgaagttgcacccaactcccctggggtttcaacatttttctttttcttttcaattagtttgtgcagtytatctttctaaagatatacttgattctgtgggatggctgggctcacctgggaggttcttctgttccatgtagcattggctaaggtcactcagtcagctct

SEQ ID NO: 112976 - DNA, 201 bp, Homo sapiens
tcctgttttggatgcaacatttgtaatggtggctcgtgattctgaaaataaagggtaattgctattttttcataattctttattttgaagaatttcaaagmtacataagactggagagaaaactataatgaatgtccatatacctatcacttggacgtaacagttttaattgcaatttcttggccatttttattttaaggc

SEQ ID NO: 112977 - DNA, 201 bp, Homo sapiens
cctcacactttcttccttacttcatagctcactttctgaaaagaacctagaaaatcacctgctctcattgcctctttatgctaacttcctgttaattaaayatttcccggtcggctgtgttccggcttctgctcctccacgccattgaatctgctcttgccaagctcgccattggcccctttactgcacagttgaatggat

SEQ ID NO: 112978 - DNA, 201 bp, Homo sapiens
accagcctgggaaacatagtgagtccccatctctacaaaacccaaaaaattagctgggcatggtggcatgcactagtagttccagctactcagaagactgmggtgggaggattgcttcagcccaggaagtcgaggctgcagtgagctgtggtgacaccactgcactacagcctgattgactttggtttgcttaggtgtcct

SEQ ID NO: 112979 - DNA, 201 bp, Homo sapiens
ctcctcaccgtgcttggatgccagcaccctactctaggttaccttacttgctcccacctaatgatatttgggctgaatggttgggaaagggtctgaaaaarggttctaatatattgtttaaaaaactatttttttatagagatggggtctccctgtgttgcccaggtttttcgtgaactcctgggctcaaaggatcttcct

SEQ ID NO: 112980 - DNA, 201 bp, Homo sapiens
cctctgcaggctcaccctcttcattgtgctcaagctgtgacatgctctgccatcactcttgcagcctctctgcaaggatgtcctcctcaccgtgcttggaygccagcaccctactctaggttaccttacttgctcccacctaatgatatttgggctgaatggttgggaaagggtctgaaaaagggttctaatatattgttt

SEQ ID NO: 112981 - DNA, 201 bp, Homo sapiens
tctcatttccttcctttccatatttgtaattcccttctccaactggctccattctccttaatatattgacttatttaatcagttccgctgtatgtgaccartttcctatggctgccacccctcatgcatcatggatgctcccctcaccttacctgggctctggtaccccacaccaggtccccctctgcaggctcaccctct

SEQ ID NO: 112982 - DNA, 201 bp, Homo sapiens
caatcttggctcactgcagcctcgacctcctgggttcaagtgatcctcccatctgagcctcttgagtagctgggaccacaggtgcatgccaccacgcccgkctaatttttgtattttttgtagagatggggttttgccatgttgcccaggctggtcttgaactcctgggctcaacctgtctacctgcctcagcctcccaaa

SEQ ID NO: 112983 - DNA, 201 bp, Homo sapiens
gactttcaattcattatttttaaatcagtatggactcaggaattcctatgttactgaatggactataatatgttactatcatctatttgatgttcacatgrtcccaggagtgtcccagtcccttcaggctagcttctgtgtggttttctttgatgtgtccccattattctttgagcactttctcactttctggcacaataa

SEQ ID NO: 112984 - DNA, 201 bp, Homo sapiens
atcccaggtcagaataccgtgtgctgtagtgcgaccgtcctgatcattgctccttattctcccttgttccagtgaacaaggggagaagaattgccttcagytccacgtcgttactgaaaatggcccccagcgctgaggagaggaccaccatacatgagatgtttctcagcacactggatccaaagtaaggatggtgagatt

SEQ ID NO: 112985 - DNA, 201 bp, Homo sapiens
ttaaactggcctttgtcctgtggcattgttaattcctctgttctgtatacaaaggtggccataagttttgtatttattgatatttatttatgtcctgtagsagcggaacattttcaatcggatctttggtggtttccttatgaggaaggcatatgaacttgcgtgggctactgcttgtagctttgggtgagttacatgtaa

SEQ ID NO: 112986 - DNA, 201 bp, Homo sapiens
gcagtggcaggatctcggctcactgcaacctctgcctccctagtagctaggattacaggcatgctccaccacgcccaactaatttttgtatttttaggagmgatggagtttcgccacgttggccaggctggtcttgaactcctggcctcaagtaatctgcctgtcttggcctcccaaagtgctgggattacaggtgtgagc

SEQ ID NO: 112987 - DNA, 201 bp, Homo sapiens
cctaatgcagttgactgattatagtgtctataatctgttaggtatgctttactcagaataattatattcaagtcagagtacacagtgaagtggcctccctkcaggagaagcagcatacaaccaccaatgtctttcatttcacgttcatgtcggaaaaagaagtgccattggttttcccaaaaacatatggaggtaagtagt

SEQ ID NO: 112988 - DNA, 201 bp, Homo sapiens
gcagtggcacgatctcggctcaccgcagcttcctcctcctgggttgaagcaatactcctgcctcagactcccgagtagctgggactgcaggtgcccgccascatgcccagctaattttcatatttttagtagagacggggtttcaccatattggccaggctggtctcaaactcctaacctcaagtgatacgcctgcctcgg

SEQ ID NO: 112989 - DNA, 201 bp, Homo sapiens
gtacttcttccaaggaatagagcaagggaggtcataccgaatatcacagtgtcacctaggaagcccaagggaggtattcccgttaatctgcagccaaggcygggcgcggtagctcatgcctgtaatcccagcactttgggaggccaaggcggatgggaggatcgcttgagaccagcctgggaaacatagtgagaccccgtt

SEQ ID NO: 112990 - DNA, 201 bp, Homo sapiens
tcagcacactggatccaaagtaaggatggtgagattccacgttgggaaaacatttaaaccttggccttttttttttttttttttttttgagacggagtttygctcttgttacccaggctggagtgcaatggcacgatcttggctcactgcaacctctgcctcccgggttcaagtgattctcctgcctcagcctccgagtag

SEQ ID NO: 112991 - DNA, 201 bp, Homo sapiens
caccatgcctggctaattaaaatttttctttgtagagacaggggtctcactatgttgcccaggctggtcttgaactcctggactcaagcaatcctcctgcytccgcctcccaaagtgttgggattacaggcatgagccactgcacctggcctgttttctccgttttaatgaagtgagaaatgcatctcaatgggataactg

SEQ ID NO: 112992 - DNA, 201 bp, Homo sapiens
agtctctctgtctcttgccaggctggagtgcagtggtgccatctcggctcactgcaacctctgcctcctgggttcaagtgattcttctgccccagcctccygagtagctgggactacaggtgcgcgccaccacacccagctaatttttgtacttttagtagagatggggtttcaccattttggccaggatggtctcgatct

SEQ ID NO: 112993 - DNA, 201 bp, Homo sapiens
atggcgtgaacccaggaggcggagcttgcagtgagccgagatcacaccactgctctccagcctgggcgacagagcgagactccgtctcaaaaaaaaaaaaatgacttattcatttatgccagggtattgagtagaccaggggtccccaacccccgggccatgggctacatagcaggaggtgagctgtgggcaagagagaat

SEQ ID NO: 112994 - DNA, 201 bp, Homo sapiens
ctccgcagaggcggactccagcctcccgccaatgaacgggtagggtcctcccggcacagcgcggccacgccccctggacgccgcggtcccgcccccggacrccgctgtcccgctcccgggctgtcctcagcaagggcgcggtctggtactcgtgcgtcttttatcgcctcagtttccctccgccgactagcgcgcggggcc

SEQ ID NO: 112995 - DNA, 201 bp, Homo sapiens
tgcctgcctcggcctcccaaagtgctgggattacaggtgtgagccaccatgccaggccctaacttttaaaatatagatacaagcttgttgttaagcttacrcctagcaactacttttctctagattaaataaacccagttaaaaattcttggctgggcacagtggctcacacctgtaatccttgcactttgggagatcgag

SEQ ID NO: 112996 - DNA, 201 bp, Homo sapiens
atcaaggtgtcagcagaggcatgttccctctaaaacctgtaagagagaagccttccttgtctgtttcttgcttctggtggtttgctggcaatccctagcgytccttggcttccagctgtagcacttcattcagtctctgcctccgtcatcacatggtgttctctcatgtgtctctgtctctctggtgtctcttgtcaggat

SEQ ID NO: 112997 - DNA, 201 bp, Homo sapiens
cccggctaatttttggatttttagtacagacagtgtttcaccatgttggccaggctggtctcgaactcctgacctcaagtgatccacctgccttggcttcycaaagtgctgggattacaggcatgagccaccacgcctggcctgcggggttcttaacctattcagtgccttgccttcttcaactgtgctctcacagatcag

SEQ ID NO: 112998 - DNA, 201 bp, Homo sapiens; identical to SEQ ID NO: 18828

SEQ ID NO: 112999 - DNA, 201 bp, Homo sapiens; identical to SEQ ID NO: 18829

SEQ ID NO: 113000 - DNA, 201 bp, Homo sapiens; identical to SEQ ID NO: 18830

SEQ ID NO: 113001 - DNA, 201 bp, Homo sapiens; identical to SEQ ID NO: 18832

SEQ ID NO: 113002 - DNA, 201 bp, Homo sapiens; identical to SEQ ID NO: 18831

SEQ ID NO: 113003 - DNA, 201 bp, Homo sapiens; identical to SEQ ID NO: 18833

SEQ ID NO: 113004 - DNA, 201 bp, Homo sapiens; identical to SEQ ID NO: 18834

SEQ ID NO: 113005 - DNA, 201 bp, Homo sapiens
gggaaacatcatctgctcttggatttcccagatcaatctgaggatattacttcttgggggtaggtagggccctgtggtggtttggactgttattcccaatyctttgcttcctccttattatttaagtgtacatccatcccctttgctgtgtgacttgcttgtgccaacagaatgtcagaggacacgatgcaagcagatgct

SEQ ID NO: 113006 - DNA, 201 bp, Homo sapiens; identical to SEQ ID NO: 18835

SEQ ID NO: 113007 - DNA, 201 bp, Homo sapiens; identical to SEQ ID NO: 18836

SEQ ID NO: 113008 - DNA, 201 bp, Homo sapiens; identical to SEQ ID NO: 18837

SEQ ID NO: 113009 - DNA, 201 bp, Homo sapiens; identical to SEQ ID NO: 18838

SEQ ID NO: 113010 - DNA, 201 bp, Homo sapiens
tggaatatagatgaaactggaggacattattttaagtgaaaaaagccaggaacagaaagttaaacagtgcatgttctcactcatatgcgaaagctaaaaawagttgatctcatagaagtaaaaagtaggacagaggatactagaggctgggatgagagtgacagagagatttgttaaaagatacaaaattatagcgagata

SEQ ID NO: 113011 - DNA, 201 bp, Homo sapiens
tatttgtcccagccatgcccaccatcattgagcgggagttcaaggagttggatgctcagcatcgctggcagctgccgtacttggaaattcgaaatgagtcycatgactatcttcatagagtggccaagtttccagaaaacagaaatcgaaatagatacagagatgtaagcccatatgatcacagtcgtgttaaactgcaga

SEQ ID NO: 113012 - DNA, 201 bp, Homo sapiens
tcctgtagcaatgagggtagagattatatcccacctaccactgcagctccaggatccagcttcacaaacatttgttgaatgaatgaataagaaaagaggayacccccaaagaggctgcaagggaaaaagctacaaagacagaagcaccaggaaaaagtagggtcatgtaagtcaaagcaggaaaaaagttccatggtgggg

SEQ ID NO: 113013 - DNA, 201 bp, Homo sapiens
acatctttgttgcttctggaattaattttgttataggactgagggtcagagggaggtggtgagagggtctccaggggcagcaggagggccgtgtatgctcyctggataattgttgggtgtttccttagggacgacctggcccagttgcccttcctgaccatgtgcctgaaggagagcctgcggttgcatcccccaatccct

SEQ ID NO: 113014 - DNA, 201 bp, Homo sapiens
gcttctcccaggctgcagagtcctgctggggtgtgagtccttgctcatggctcatgaaagttcaacatatgcttatggcttcaatattgggccagatttcrcttcccaccttggccttcccaaggatgaattgtgtggtcccatgtgttggtgatctcagcatgaactgcgaaggaagaagaactcatgtgcatttttgcg

SEQ ID NO: 113015 - DNA, 201 bp, Homo sapiens; identical to SEQ ID NO: 18876

SEQ ID NO: 113016 - DNA, 201 bp, Homo sapiens
gttctctcacatatttggagctttgctggcttctggctgatttaggatggcctcagctgggacacctggacttttctccatgtgattctctgcctctagaygacatcccaggattgctcacatggcagagacaggattccaaggcagtgagaggaggatacaatgcttctcactagttattattatttattttatttttga

SEQ ID NO: 113017 - DNA, 201 bp, Homo sapiens
gaagctcctgcccctcctaaagccgaagccaaagcgaaggctttaaaggccaagaaggcagtgttgaaaggtgtccacagccacaaaaagaagatccacaygtcacccaccttccggcggccgaagacactgcgactccggagacagcccaaatatcctcggaagagcgctcccaggagaaacaagcttgaccactatgct

SEQ ID NO: 113018 - DNA, 201 bp, Homo sapiens
catcatatgacagaaatgatgtaatatgcctattccatggtgtatgtggtctcatttaatttacaccgccttgtgaagtagaggatattttccaccctctmccccatgccatgacaaatggtgaaactgagggccagagaggttagagagatttcccaagttcacccagcttgtcagtgagtctaagagtgggggaaaagg

SEQ ID NO: 113019 - DNA, 201 bp, Homo sapiens
ggggccattgctcttcctctctgtgccttgatttccccatgaggctaataatcctcactaaaaggtggtaggagcatgtaatggactcatgtctctgacamttagtaggtggtcagaaggagtcaatttccacatttttctcacagaagccctgtaaactcaagaaaggaatgatgacacgtgcatagtagtcattgctga

SEQ ID NO: 113020 - DNA, 201 bp, Homo sapiens
atcagtctgttctttggcaaatggcaggaatgatgggtgtgtccacaggtgcagggtgagggaacacaggacggactagctctgagcttgatgtgcaaaaggtgctccctggtgagagccgctgttcttcctgacagacagttagagccacctcttctcccctgggggctgctgagaaaggaagttccaccgtgtacagac

SEQ ID NO: 113021 - DNA, 201 bp, Homo sapiens
cctctgatgggttcctgtggcagagtgggggttacgcagcaggtattcaccattatttccacattatccactgctgtactggaggcctcttgggctcactstctagaacccactttctgcctggcccatttgcttgtgtccatccatctctgggctggagttttcccataggaagtagctatacaccccctaccctcacat

SEQ ID NO: 113022 - DNA, 201 bp, Homo sapiens
agaaaatggggcagatttgggagaaactgagtaataataggcaggagcagatgttttataagacagagagaggagatgcccatgatggccaagctgtgccytggggacctggggcaggaggcagctcacagagagtgggaggcagagagtgaagtgcgcttgcaggacacccctttctgcatggaatgtggtcctgggatt

SEQ ID NO: 113023 - DNA, 201 bp, Homo sapiens
gttggctctcctgggtgggtttggggccattgctcttcctctctgtgccttgatttccccatgaggctaataatcctcactaaaaggtggtaggagcatgtaatggactcatgtctctgacacttagtaggtggtcagaaggagtcaatttccacatttttctcacagaagccctgtaaactcaagaaaggaatgatgaca

SEQ ID NO: 113024 - DNA, 201 bp, Homo sapiens
ttgcagaggctgtgccacctctaaagcctgcagtgggacctgctgtggctcctcctgggaaatgtatttatttctccagagtaatagaattaataggataycatatctatctatctatctatctatctatctatctatctatctatctatctatcagtccgtctgtctgtctatgatctatctaatctatggagagacaga

SEQ ID NO: 113025 - DNA, 201 bp, Homo sapiens
gcagaggctgtgccacctctaaagcctgcagtgggacctgctgtggctcctcctgggaaatgtatttatttctccagagtaatagaattaataggatatcatatctatctatctatctatctatctatctatctatctatctatctatctatcagtccgtctgtctgtctatgatctatctaatctatggagagacagaag

SEQ ID NO: 113026 - DNA, 201 bp, Homo sapiens; identical to SEQ ID NO: 18882

SEQ ID NO: 113027 - DNA, 201 bp, Homo sapiens
cagaggctgtgccacctctaaagcctgcagtgggacctgctgtggctcctcctgggaaatgtatttatttctccagagtaatagaattaataggatatcayatctatctatctatctatctatctatctatctatctatctatctatctatcagtccgtctgtctgtctatgatctatctaatctatggagagacagaaga

SEQ ID NO: 113028 - DNA, 201 bp, Homo sapiens
caggacataaaaggatgtggggaccagccctggggacatgtcctgaggccacattgctgcccacacaccacacttgtggagcccaccccacgtgactttcygtgggctggagccactcccaggatgagaaaatccatcctctttattcaaggtgggcttctccatgaacagacagtttgtcttccccctgttccctgggat

SEQ ID NO: 113029 - DNA, 201 bp, Homo sapiens
gctgtgccacctctaaagcctgcagtgggacctgctgtggctcctcctgggaaatgtatttatttctccagagtaatagaattaataggatatcatatctmtctatctatctatctatctatctatctatctatctatctatctatcagtccgtctgtctgtctatgatctatctaatctatggagagacagaagagggca

SEQ ID NO: 113030 - DNA, 201 bp, Homo sapiens
ttggctctcctgggtgggtttggggccattgctcttcctctctgtgccttgatttccccatgaggctaataatcctcactaaaaggtggtaggagcatgtaatggactcatgtctctgacacttagtaggtggtcagaaggagtcaatttccacatttttctcacagaagccctgtaaactcaagaaaggaatgatgacac

SEQ ID NO: 113031 - DNA, 201 bp, Homo sapiens
gtactcctgcagagcttgtggtggtgggcacaggagaacattggagggcttctagatctcatccccaaagcttctgtgcagctcttgtagtactcagcccsttccttcctgcttctctctcagccaccttcctctttccttcctgtagtcaccaaccccaacctcagtgtcttttctctctgctgccatcttccccacctc

SEQ ID NO: 113032 - DNA, 201 bp, Homo sapiens
cttcatggggttcagaatgggccaggaggagataggctgtgacagagcataggagaacaaggtttctactggggcaggctggaaggcttcctggaggaggmgtagcaggagctgggtgtggaacgatgagtgataattttttttttaaagcaggggcagggtgatgcagtgggcattgttagtattcaaggctccgggcca

SEQ ID NO: 113033 - DNA, 201 bp, Homo sapiens
tggctctcctgggtgggtttggggccattgctcttcctctctgtgccttgatttccccatgaggctaataatcctcactaaaaggtggtaggagcatgtartggactcatgtctctgacacttagtaggtggtcagaaggagtcaatttccacatttttctcacagaagccctgtaaactcaagaaaggaatgatgacacg

SEQ ID NO: 113034 - DNA, 201 bp, Homo sapiens
ggcaaatggcaggaatgatgggtgtgtccacaggtgcagggtgagggaacacaggacggactagctctgagcttgatgtgcaaaaggtgctccctggtgaragccgctgttcttcctgacagacagttagagccacctcttctcccctgggggctgctgagaaaggaagttccaccgtgtacagaccttctccatgggagg

SEQ ID NO: 113035 - DNA, 201 bp, Homo sapiens
ggaagattctgcccttgcccacagcctttggctgccgtactaggggatgggctcttgttaagtgttggtgacaagtggagacaccaccgtcgcttgctgaygcctgccttccatttcaacatcctgaagccctatataaagattttcagcaagagtgcaaacatcatgcatgtgagtgccttgaactcagcatcccagctg

SEQ ID NO: 113036 - DNA, 201 bp, Homo sapiens
cctatataaagattttcagcaagagtgcaaacatcatgcatgtgagtgccttgaactcagcatcccagctgcagccttggggtggagggatcacatacaaytgggtctggaatgttggctctcctgggtgggtttggggccattgctcttcctctctgtgccttgatttccccatgaggctaataatcctcactaaaaggt

SEQ ID NO: 113037 - DNA, 201 bp, Homo sapiens
ctcacatatttggagctttgctggcttctggctgatttaggatggcctcagctgggacacctggacttttctccatgtgattctctgcctctagacgacaycccaggattgctcacatggcagagacaggattccaaggcagtgagaggaggatacaatgcttctcactagttattattatttattttatttttgagatga

SEQ ID NO: 113038 - DNA, 201 bp, Homo sapiens
atttgtagcagtagctcttattctgagaacatcactgcacctcctagccaagggggaaagcagcttcaataaggcagaactttgcctaaaacaggaagttsgttgatttcaggagaaacttatctgttgcatccagcaggggcatcccagttgggggaacacgatggattccgtgcatgaaggttgaaacctgctcaggaa

SEQ ID NO: 113039 - DNA, 201 bp, Homo sapiens
ggaagtggaggttgcagtgagctgagatcaggccactgcactccagcctgggtgacagagtgagaatccatctcaaaaaaaaaaaaaaaattgacctagcycttgatgaactttaaaattccttcaattagaataagatttcaaagttccaaaaagaatccagctagatttttattaattgcatgaagtatattgattagt

SEQ ID NO: 113040 - DNA, 201 bp, Homo sapiens
tgagggtcctgacccagctggtggccacctacccccagggctttgtgaggtggttgggccccatcactcccatcatcaacttgtgccaccctgacatcgtycgatctgtcatcaatacctcaggtactcctgcagagcttgtggtggtgggcacaggagaacattggagggcttctagatctcatccccaaagcttctgtg

SEQ ID NO: 113041 - DNA, 201 bp, Homo sapiens
tccttcctgcttctctctcagccaccttcctctttccttcctgtagtcaccaaccccaacctcagtgtcttttctctctgctgccatcttccccacctccrtgttgttctgggaaccactggggccccgagaagccttaatccaaggccctgtcctggaggaatccccaaacttgaagagatggagcagtacagagacatc

SEQ ID NO: 113042 - DNA, 201 bp, Homo sapiens
tccaccccaggtctatgaccccttccgcttcgaccccgaaaacgcccagaagaggtcacctatggcttttattcctttctcggcggggcccaggtgaggcyagggggtgtctgaggtgggcatgggctgagggtggcacagatggctgccttgtcagatgcctgacttgtaggaccacgtgtttctgtgataggggtttta

SEQ ID NO: 113043 - DNA, 201 bp, Homo sapiens
tagactgttttgaattcttttcctgactgttttcagtacactagtgaacctctgatgggttcctgtggcagagtgggggttacgcagcaggtattcaccaktatttccacattatccactgctgtactggaggcctcttgggctcactgtctagaacccactttctgcctggcccatttgcttgtgtccatccatctctgg

SEQ ID NO: 113044 - DNA, 201 bp, Homo sapiens
tggatccaggtctcacctaatatcatcagaattctgtctttaactcttattctgtaaatgtgttttgtagagtgttgacttatgcttgggtgttgcagaayatgttggaccatgtaggagccatgtcaagacatgctgggtgtgctgtaccatgtcagggtgtatcattgctctatagtgttgttgcagcctagtccggtc

SEQ ID NO: 113045 - DNA, 201 bp, Homo sapiens
cactcccaggatgagaaaatccatcctctttattcaaggtgggcttctccatgaacagacagtttgtcttccccctgttccctgggatgtagccttggaasttagatactgcccccaagagaagggagcaggagggagtggagattacccctatgtgcgcagaatctggacatgctgttcattgcagaggctgtgccacct

SEQ ID NO: 113046 - DNA, 201 bp, Homo sapiens
atgttttataagacagagagaggagatgcccatgatggccaagctgtgccctggggacctggggcaggaggcagctcacagagagtgggaggcagagagtraagtgcgcttgcaggacacccctttctgcatggaatgtggtcctgggattctggctggaaggtgctcccaggctttcatgtgggtaaggagctgcttcct

SEQ ID NO: 113047 - DNA, 201 bp, Homo sapiens
tccagtttttaattcatatgtgatctttttacatatgaaaatgtttatttacatctatatagctgtgtcatatcacatttgcatgtaattttgtttacaartgctattttcctgccaaatgagcacgtgaaaagatgctaaacattattcccattatgcaaaccaaaagcacaacgtgatgtcacctcaacacctacagga

SEQ ID NO: 113048 - DNA, 201 bp, Homo sapiens
ttagatcaaatcctttgtctacttttcacttgggttacctgttcgttctcttgtagatttgcaggaattcctgacatattcagatattgttctggatatchatctatctatctatctatctatctatctatctatctatcttaggcatcttctctgaatctcttatctctcattggaatgttaattgggtccactgtatct

SEQ ID NO: 113049 - DNA, 201 bp, Homo sapiens
acatctgttttatgtgggggtggctgggtgtcctgagaggccccatcagcagccttaacttgcctccaccccaggtctatgaccccttccgcttcgacccmgaaaacgcccagaagaggtcacctatggcttttattcctttctcggcggggcccaggtgaggccagggggtgtctgaggtgggcatgggctgagggtggc

SEQ ID NO: 113050 - DNA, 201 bp, Homo sapiens
attatagtatgtgaaagaagtcagacacaaaaggtcacatagtgtatgatttatttataagaaatgtccatctgggtgtggtggctcatgcctgtaatccmagcactttgggaggcccaggcaggcagatcacttgaggtcaggagttcaagagcagcctggccaacagggtgaaaccccgtcgctactaaaaatacaaga

SEQ ID NO: 113051 - DNA, 201 bp, Homo sapiens
gtgctcccagacagccgagtcatccccaaaggtgccctccatggcaggggaggagggtcttgggcagggcggtggtcccagcaggcagctcggaccttgtycttactgtcctctcctgcacgacagggaatgtctgtaacatcaacatcttcgcaatccatcacaacccctcagtctggccagaccctgaggtgctgcccc

SEQ ID NO: 113052 - DNA, 201 bp, Homo sapiens
ggattccaaggcagtgagaggaggatacaatgcttctcactagttattattatttattttatttttgagatgaagtctcgctttgtctcccaggctggagwgcagtggtgcgatcttggctctctgcaacccccgcctcaagcaattctcctgtcttagcctcgcgggtagatggaattacaggcgcccaccaccatgccc

SEQ ID NO: 113053 - DNA, 201 bp, Homo sapiens
ccccaatccctacattcgcccgcggctgcacccaggacgtggtgctcccagacagccgagtcatccccaaaggtgccctccatggcaggggaggagggtcytgggcagggcggtggtcccagcaggcagctcggaccttgtccttactgtcctctcctgcacgacagggaatgtctgtaacatcaacatcttcgcaatcca

SEQ ID NO: 113054 - DNA, 201 bp, Homo sapiens
ttgagatgaagtctcgctttgtctcccaggctggagagcagtggtgcgatcttggctctctgcaacccccgcctcaagcaattctcctgtcttagcctcgygggtagatggaattacaggcgcccaccaccatgcccaactaattttttgtatcttcagtagagacagggtttcaccatgttgggcaggctggtcttgaac

SEQ ID NO: 113055 - DNA, 201 bp, Homo sapiens
taattttttgtatcttcagtagagacagggtttcaccatgttgggcaggctggtcttgaactcctgacctcaagtgatctgccctcctcggcctcacaaartgctggaattacaggcatgggctgctgcacccagtcaacttctcactagttatggccttatcattttcaccacattctattggccaaaaaaagtaaaacg

SEQ ID NO: 113056 - DNA, 201 bp, Homo sapiens
tgtgaaacgactaggatttttttttctcctgtgagctaataaattagcttgttacttttgcatggattctgccagaagacacgagacttctgggtcaaagrcaaaagtttattactcatgtctcagcaagtggcatgtgcatcttgttggtttggatcctttctctaagccacccaaattccctggggtgataaggtgggc

SEQ ID NO: 113057 - DNA, 201 bp, Homo sapiens; identical to SEQ ID NO: 18875

SEQ ID NO: 113058 - DNA, 201 bp, Homo sapiens
agccaggacataaaaggatgtggggaccagccctggggacatgtcctgaggccacattgctgcccacacaccacacttgtggagcccaccccacgtgactktccgtgggctggagccactcccaggatgagaaaatccatcctctttattcaaggtgggcttctccatgaacagacagtttgtcttccccctgttccctgg

SEQ ID NO: 113059 - DNA, 201 bp, Homo sapiens
atgaccctggacagtctgcagaaatgcatcttcagctttgacagcaattgtcaggagtgagttcttgcccagggcctgggaacatgggatggagtgggggkgtgggtgtggggagagcaaagcccagggagacaagaagagccttcctggagagatgatgagaactaggcattgaaggacaaagaaggagagaaggagaga

SEQ ID NO: 113060 - DNA, 201 bp, Homo sapiens
tgtgctacgtttgcagcaccgtggttgcatgctatgatttgtgctatataaatgtagcactatgatttgcagcaccgtggttctaagtacatttattctcytgcttttagctatgatctagtccttttctcttcagttctgtagtggatacctggactgcttctatctctccagtgcaatgaccatctttgtgcatatctc

SEQ ID NO: 113061 - DNA, 201 bp, Homo sapiens
gtctgcccaaggtgatctgggtggggttgggggttccgggcctcgttcctggcgcagtggggccgggatctgggtcctgggtgcagtcagaccttccaccytggcccccaggaactgcatcgggcagaagttcgcgatggcagagatgaaggtggtcctggcgctcacgctgctgcgcttccgcatcctgcccgaccacag

SEQ ID NO: 113062 - DNA, 201 bp, Homo sapiens
ctagaacccactttctgcctggcccatttgcttgtgtccatccatctctgggctggagttttcccataggaagtagctatacaccccctaccctcacatcrtgacacagctgggccagaagagagatgtgtgccatctccaccctcccccgtgcaggggcatcttctttatccccactaagctgtcccaatgagttgtgtt

SEQ ID NO: 113063 - DNA, 201 bp, Homo sapiens
tcctgctggtggtcggggcctcctggctcctggcccgcatcctggcctggacctatgccttctatcacaacggccgccgcctccggtgtttcccgcagccmcggaaacagaactggttcttgggtcacctgggcctggtgagtggcaggaggatggatctagtgtctcagggtggaagggtggaaatggggctcaggctga

SEQ ID NO: 113064 - DNA, 201 bp, Homo sapiens
gctaggctctgggaatatgcaagcccacatgggggtcccagacccagcttcccccctgtctgcccaaggtgatctgggtggggttgggggttccgggcctsgttcctggcgcagtggggccgggatctgggtcctgggtgcagtcagaccttccaccttggcccccaggaactgcatcgggcagaagttcgcgatggcaga

SEQ ID NO: 113065 - DNA, 201 bp, Homo sapiens
gtctgtaacatcaacatcttcgcaatccatcacaacccctcagtctggccagaccctgaggtgctgcccctccctgtttctccatcccccgggcctggtckggggaggggtcttgtcccggaaaaccagatactccctctctactccacccacatctgttttatgtgggggtggctgggtgtcctgagaggccccatcagc

SEQ ID NO: 113066 - DNA, 201 bp, Homo sapiens
ggaataggagtagagcccagaaacaggctagcaagggtaacattgcatgctttggggacagaatggtctgggagtccatatttatttccccactaacttgstatgcaagcttagtaaaatcaattcccttttctgaacaacttttctcctttgtaaattgggggtgtggggaattgctgtcccacagggctgcttggagaa

SEQ ID NO: 113067 - DNA, 201 bp, Homo sapiens
aagccctcatccattcctggtgtgactgtaaaaatggtgcagctgctgtggaaaacagtctggagattctgaaaaagtaaaacatagaattactatatgaygcaattccacgatatcatattaagctcctagctatatactcaaaataatagaaaacagttgttcaaacaaaaaagcttgtacattcgtgcttatagcagc

SEQ ID NO: 113068 - DNA, 201 bp, Homo sapiens
tgccttccatttcaacatcctgaagccctatataaagattttcagcaagagtgcaaacatcatgcatgtgagtgccttgaactcagcatcccagctgcagycttggggtggagggatcacatacaattgggtctggaatgttggctctcctgggtgggtttggggccattgctcttcctctctgtgccttgatttccccat

SEQ ID NO: 113069 - DNA, 201 bp, Homo sapiens
gccaccctccatacccaaagtccctcctctattcctctccatggaccctgatggtcctcattcatgtcagatgccattacagacaaggacatagtcttctwcaagaccctgaagccctggctgggtaagtaactgtaggtggacgggacggggaccaacttttgtggccaggggaagattctgcccttgcccacagccttt

SEQ ID NO: 113070 - DNA, 201 bp, Homo sapiens; identical to SEQ ID NO: 18878

SEQ ID NO: 113071 - DNA, 201 bp, Homo sapiens; identical to SEQ ID NO: 18881

SEQ ID NO: 113072 - DNA, 201 bp, Homo sapiens
caggctggtgtggaactcctgacctcaagtgatcctcctgcctcaggcttccaaagtgctgggattacaggagtgagccactgcaccccgccggaatgaayacttttaagagacaccctctgaatattgttttgctcagaaatacctctaaaaacaccaggtcaacttttcttctagtagttttgtgactttggttttcta

SEQ ID NO: 113073 - DNA, 201 bp, Homo sapiens
aaactcaagaaaggaatgatgacacgtgcatagtagtcattgctgagtacagatcacttcaaaactaattggtttagagcaataagggtttatatttgctracaaatctgtgggactgttggccagcccttctgcatgtggataggatccctcatggtataagagcagctgtgggtcaggtaggcagctttgcttgtgcca

SEQ ID NO: 113074 - DNA, 201 bp, Homo sapiens
taattgttgggtgtttccttagggacgacctggcccagttgcccttcctgaccatgtgcctgaaggagagcctgcggttgcatcccccaatccctacattygcccgcggctgcacccaggacgtggtgctcccagacagccgagtcatccccaaaggtgccctccatggcaggggaggagggtcttgggcagggcggtggt

SEQ ID NO: 113075 - DNA, 201 bp, Homo sapiens; identical to SEQ ID NO: 18884

SEQ ID NO: 113076 - DNA, 201 bp, Homo sapiens
aatggaattgacgtaggatgattccatatttggactgttgtgaatagtgctgcaataaacatgggagtgcagatataccttcagtgtattgattttctttytgttggatatatgtatagtagtggaattgttggatcatatggtagtttacttctgtttttttttttttttttttttttttgaggaaccttcatactgttc

SEQ ID NO: 113077 - DNA, 201 bp, Homo sapiens; identical to SEQ ID NO: 18885

SEQ ID NO: 113078 - DNA, 201 bp, Homo sapiens
tttgaacctccctgcctcccttatttccctttgtttttaactctagacaaattaaaggaaacattcctatgataagtatacttttatatagcacttctaaraaagttgtatattcaggctgggcgcagtggctcacgcctgttatcacagcactttgagaggccgaggcggacagatcacctgaggtcaggagatcgagac

SEQ ID NO: 113079 - DNA, 201 bp, Homo sapiens
tgaagacagaattcaatgtcattcttacctttatattgtcttctcactcaggttcctcccattaaaccttaacacatagttcagtaaatagaaggtgaacraattagtgaatgcataccccgtttttgccatcctactagcttcataagaagcctaatatcacatgcatagatttgttgagttctgggataaattttttct

SEQ ID NO: 113080 - DNA, 201 bp, Homo sapiens
aaacatgggagtgcagatataccttcagtgtattgattttctttctgttggatatatgtatagtagtggaattgttggatcatatggtagtttacttctgkttttttttttttttttttttttttgaggaaccttcatactgttcttcgtagtggctgctctaatttacattcccactaacactgagggttcccctttctg

SEQ ID NO: 113081 - DNA, 201 bp, Homo sapiens; identical to SEQ ID NO: 18887

SEQ ID NO: 113082 - DNA, 201 bp, Homo sapiens; identical to SEQ ID NO: 18888

SEQ ID NO: 113083 - DNA, 201 bp, Homo sapiens
aggcctcactcatccaaggaataccaattgggagactcagttcagagatatctacatgtttagttttattaggtattgctaaatttcttcccaaagtgatyatcccaggttattacagtcccgctgtattagttatctattgctgtgtaatcaaatactcccacacttaggagtttaaaacattttttatgtacacagttc

SEQ ID NO: 113084 - DNA, 201 bp, Homo sapiens
aagatgccatctcaatgtgccaggaccaagaggagaaaaaatacctgatggtgagatgtgattgaataacttgatattgttgtctaaacattgttttggtrcttctgtcagaatcttgaatatgaactaaggacattgaccttgggtagatttttgcatttgccttgatctgctagtgggtaaaacataggctttgtagct

SEQ ID NO: 113085 - DNA, 201 bp, Homo sapiens
aaaaaagaaaaagatattggagactagtgatttggaagttgtcagtaaaagagttggaaacttgaaaggatggtttcaccaaagcaatgtaaaatatatakgtgtgtgtgtgtgtgtgtgtgtgtgtgtgtgtgtgtgtatgtgtatatatatatgtgtatatatatgtatatatatatgtgtatatatatgtatatatat

SEQ ID NO: 113086 - DNA, 201 bp, Homo sapiens
gaccccagagagtttttatgtgggctacatcttccagtatttactatatgagaaatttaaacttaggcaatttaaaaatatttctttaaaaacaaacttayatgtttatatatatattttaaagaaaaaacacttttttccccaaataagaaatagtggtgggaggagtggggttgttttacattttgcaaacctctttca

SEQ ID NO: 113087 - DNA, 201 bp, Homo sapiens
gggagagagtatttatgctttaactctggaccttgataaagtattaagacaatgattttatgaaatgttattactttggaagagctgggtttgatagtaaraatgttcttatctggaggtgagcggctattctgagtatatgtagatttagagcactacactcaaagtagtggtgcatatctagattgacatgaagcgttg

SEQ ID NO: 113088 - DNA, 201 bp, Homo sapiens
acattacattcatttggttatactgcctattccagtaatctcaaaattttccactttgaatctaccctaattcctctctgaacaggaattttggcttatgyatctttgtatttgaaacacataagacattattttgtaataatgtagtcttattttattagtgatttaatatactgagctatcttagttgttgtattttaa

SEQ ID NO: 113089 - DNA, 201 bp, Homo sapiens
gtagtgttgctttttttttgacatggtatttatacttacttttcttcacattacattcatttggttatactgcctattccagtaatctcaaaattttccastttgaatctaccctaattcctctctgaacaggaattttggcttatgcatctttgtatttgaaacacataagacattattttgtaataatgtagtcttatt

SEQ ID NO: 113090 - DNA, 201 bp, Homo sapiens
tttgtgtcctcttcaatttctttcatcagtattttctagttttcctttatagatctttcacatctttggttaaattgattactaggcattttataatttgkgtacctattggaaataggattgctttcttgatttctttttcagattgtttgctgttggtatatgtaaatgctgctgatttttgtatgttcatcttgtatc

SEQ ID NO: 113091 - DNA, 201 bp, Homo sapiens
acctcttaaaaactggccccgtgttaagggtgtgcgttagattctgcttgggttttctttttggaaattgccttagctgattgctttcagatagttcccamccggttgttcctagtttaaaaagtacttataaattgtaactgcccatcaaaataagaaaaggcaaggaattactgtatgctagaaggaaataaaggtctt

SEQ ID NO: 113092 - DNA, 201 bp, Homo sapiens
tcgaaggacttggtgggaggtaacattctgtcgttttctctttcctcttttggttctatttagtccttttatgctttactaatgaaattgacctactactstcccttttactgaagttactttcttagtattacaggttttttagtttgtctgatgtaatactcatgtatgtatgttcatatttttctcattactatgaat

SEQ ID NO: 113093 - DNA, 201 bp, Homo sapiens
ttaaattgtttcctgtgctaattcgaatgttaacatgctaattcagagtttgttgccatttgtatcctgacagtgtattaatgtttatacttgcaagagtraaatattttatttcttattacagcggaatggccaaagactatgacgggtcttcctagcacatcagggacaactgccagtgtggtcatcattcggggcatg

SEQ ID NO: 113094 - DNA, 201 bp, Homo sapiens
ttattttgcagtatacttggagtaacatgaatttgccatatgtttgaactttaaggataaaaaatctttaaggtataaactccgttacattagtattaaatttttttttttttaagagacgggcaggggcgggggacgggtgtgggccgccttactttgttgcccaggctgggcaacaagcgatcctgggctcaagcgatc

SEQ ID NO: 113095 - DNA, 201 bp, Homo sapiens; identical to SEQ ID NO: 18890

SEQ ID NO: 113096 - DNA, 201 bp, Homo sapiens
acactgagggttcccctttctgcacatcctcaccagcatctgtagttgcctatctttttgatgcaagtggttttaactggagtgagatgatacctcattgkggttttgatttgcatttctctgatgattagtgatgttgagcattttttcatatatctgttaatcatttgtatgtcttttgagaaatgtgtattttagatc

SEQ ID NO: 113097 - DNA, 201 bp, Homo sapiens
atgagtgagatcatgtctttctgtgcttggattatttcatttagcataatgtcctccagttccatccctgttgctgcaaatgacaagatttcattcttttytatggccgaatactatttcattgtgtatgtgtatatacaccacattttctttatccattcatgtattaaatggaattgacgtaggatgattccatatttg

SEQ ID NO: 113098 - DNA, 201 bp, Homo sapiens
agtgtttatgttcaagtgactcttattttacttaataatggacccaaagagcaagagtagtaatgctggcatattgttatacttgttttattttattaatkttgttaatttcttactgtgcctaatttataaattacattttatcatagatacgtatgtataggagccaagcacggtggctcacgcctgtaatcccagccc

SEQ ID NO: 113099 - DNA, 201 bp, Homo sapiens; identical to SEQ ID NO: 18886

SEQ ID NO: 113100 - DNA, 201 bp, Homo sapiens; identical to SEQ ID NO: 18889

SEQ ID NO: 113101 - DNA, 201 bp, Homo sapiens
cctgtaatatatttctcttaggattggtttgatagttgtatcataattgcattatttataacattaatttattaatgtattcattaattaacctaagtccyttagtagttttcagaatatttttcttaaattgtttcctgtgctaattcgaatgttaacatgctaattcagagtttgttgccatttgtatcctgacagtgt

SEQ ID NO: 113102 - DNA, 201 bp, Homo sapiens
ctaagtggctggctaaatgataccacaactcttgaatcaaaactgattcagattaaaaaaacctcttaacacattctttcctatcaatgtagttaggactragagtcatgtagcagtagtaaacctgtcctgtaatatatttctcttaggattggtttgatagttgtatcataattgcattatttataacattaatttatt

SEQ ID NO: 113103 - DNA, 201 bp, Homo sapiens
caccacgcccagctaattttttgtatttttagtagagatggggtttcatcatgttagccaggatgctctccatctcctgacctcatgatccgcctgcctcrgcctcccaaagtgctaggattacaggcatgagccactgtgcccagcggaaagataaagtatttttcatacaaacaaatgctgagagaatttgccactaac

SEQ ID NO: 113104 - DNA, 201 bp, Homo sapiens
cccagcaggcgctcggcgtccacgctccctctccaccttcttgcctctctaaggaggacctggcccactaggaagcccggggcgttctgtgaactgggtgktcaaacacggtgtgtggggaaggggccaattgagattagacgtgaaaaaccgggaacctggggaccgcagggttggggcccaggaggggcccgaagcttc

SEQ ID NO: 113105 - DNA, 201 bp, Homo sapiens
cttgacagcgcccagagtccgctgcttccgtccagtccgctcttcccctacgtggccaagaggacgcagcactggcggcttcaggaggtggctgtgagcgyggggctggggccaagagcagaggaccagagaggagtctccaagccaccaccggccccgtcaccggctaccggctaggtcaggccccagattcgggtttgc

SEQ ID NO: 113106 - DNA, 201 bp, Homo sapiens
ccgaacctatcaaaacctctgggatacagaaaaagcagtgctaagaggaaagttcatagcattaaatgcctacatcaaaaagtctgaaagagcacaaataracaatctagggtcgcacctccaggaactagagaaacaagaacaaaccaaacccaaatgagcagaagaaaaaaaaataacctagatcggagcaaaactaaa

SEQ ID NO: 113107 - DNA, 201 bp, Homo sapiens; identical to SEQ ID NO: 18891

SEQ ID NO: 113108 - DNA, 201 bp, Homo sapiens
atttgatggtgtttatgaggaaaactacagcaataatctcttctgtaacttttattaatagtaatgttagactcagaaatggtggcctccatgttcttccrcccgctgttggtggccgccacccttcggaccacactgcgggctgctgctcaggttctgggaagttctggattgtttaataaccatggactccaagtacag

SEQ ID NO: 113109 - DNA, 201 bp, Homo sapiens
atatatactaataagtcttagggaaaatggaactgaaaccatttgttaatatattggtgatttatatttatctacttaaatgattcttcattgtcctgtawtgcattttgtgtgtgaagacagtgacttaaaactaatttctaatacatgttcactattcttgaaaatagcttggatcttcttcattagtcttggtttaaa

SEQ ID NO: 113110 - DNA, 201 bp, Homo sapiens
aggtaattaactgctatattcttttaatacactcgttaaagaaactattctattagagctattctattaagtaaataatcttttttgctagtaattacatyctactttttatgcatgtagcttccacctaaaccagaaagttttctgttgttgattattgtaaatgtataatttcaagtgtctaattaacactttcagata

SEQ ID NO: 113111 - DNA, 201 bp, Homo sapiens
ggatgcagattatgtaaaagtgataaatattgtgagccacatgactatgaatactgctgtccttgtgagtggcaccgtacagaacatgataggcaactcartgaagtagagaacaatattaagaagtaagtttttttaaaaactcatgatttttcctggcatgacctatacacatacctttggttgaattatttccatata

SEQ ID NO: 113112 - DNA, 201 bp, Homo sapiens
tcgtatctcatatttaacacaaatggatgtaaaactggtatttgttatggaaggggaaccaccaaagctgaaagctgatgtcataagcaagaggaatcagwctcggtatgggtcttctggaaaatcgtggtctcagaaaacagggagatcacattttaaatcagtcttaagagaggtgagcattcagatttgattcagtaa

SEQ ID NO: 113113 - DNA, 201 bp, Homo sapiens
gcacctgctttttgttttcagtgcctccatatgctcgaatgcttaggaatcccctgggttcaggctgctggggaagctgaagccatgtgtgcttatctcartgctggtggtcatgtcgatggctgcctcaccaatgatggagatactttcctttatggggcccagactgtttacaggaatttcactatgaatacaaaggtg

SEQ ID NO: 113114 - DNA, 201 bp, Homo sapiens
gtggaggaaaggcctcctggaatattaaaagcttattcagggcttataatcagaacaacatagtaagtcatgctttatcatacttttctacttcaaacacrtagtaataatagattataaaaagaaacaagcataaaaggatatagccaggctttataagacaactatttcagtggaccagaaaaggaacaaacgtgttaa

SEQ ID NO: 113115 - DNA, 201 bp, Homo sapiens
agattaggaattccttgcagtcagttttgttatatacacatagtagtcactcagtaaatgtttattgaaaccaataatgtgatgtagatgataaatataastacagtttcaaactatgataccaaattacttagatcttaaaactatgttttcaatatagaaatccattttaagaaaaaaatatatactaataagtcttag

SEQ ID NO: 113116 - DNA, 201 bp, Homo sapiens
gtaatcccagcactttgggaggctgaggcaggcagatcacttgaacctgggaggcagaggttgcactgagctgagatctcgccactgcgctccagccagcstgacagagcgagaccctgtctcaaaaaaaaaaaaaaaaggaataatacttatggcagcactggccacactataaaattcaggttcagaaaaacagggtaa

SEQ ID NO: 113117 - DNA, 201 bp, Homo sapiens
caatattaagaagtaagtttttttaaaaactcatgatttttcctggcatgacctatacacatacctttggttgaattatttccatataatctttccccatrtctagattagtcacatgtttaactaaatttttttttcatttctgttcaaaaatttagctaacctaggagatagtaatgtaatagttattcaaagggaagc

SEQ ID NO: 113118 - DNA, 201 bp, Homo sapiens
acattaataatgacagccaacatttgttagacatttaaatttgctgttatgtttaatgcattgcatgtaatctcaatctttgtaatctgtgaagtgggttrtaatattttcacattacagatggtaaaactgaggctaagagagtttaagtaagttacccaacatctaagaaatatcatcctggcgttcaaaccgagagcc

SEQ ID NO: 113119 - DNA, 201 bp, Homo sapiens
ttttctttctctttttcagcatttgtttacgaactaccttttttaaagggctgattaaatgaaatagtagatataaaatgcttactgtaatgccttgcacstagcaattgctaattaaaatgcttactgttattaaaaatcattgccacatagttcattctcttcaaaatgtggatttatctcataagaacttgacttgtt

SEQ ID NO: 113120 - DNA, 201 bp, Homo sapiens
gccacattaataatgacagccaacatttgttagacatttaaatttgctgttatgtttaatgcattgcatgtaatctcaatctttgtaatctgtgaagtggrttgtaatattttcacattacagatggtaaaactgaggctaagagagtttaagtaagttacccaacatctaagaaatatcatcctggcgttcaaaccgaga

SEQ ID NO: 113121 - DNA, 201 bp, Homo sapiens
ggtacttttgacccattatgacatgatagaaagaaagcttggtagcagaaactctaatcaactacagccaattcggtaatgtaaagaactgtatggtgaargtggtgtttttacttgagtattttataattaaaatattcctaatatctttaagctcgtttttgtaaaggtggaggaaaggcctcctggaatattaaaagc

SEQ ID NO: 113122 - DNA, 201 bp, Homo sapiens
tgtgtgaagacagtgacttaaaactaatttctaatacatgttcactattcttgaaaatagcttggatcttcttcattagtcttggtttaaaaaaaaaaaaagacactacggaacacgtactggatcagaaaggcctttcattcccaaaagagattaggatatcatgttaactcatcttttaaaagaaattctgctatatct

SEQ ID NO: 113123 - DNA, 201 bp, Homo sapiens
tttttaaactgacctatattttgtttgatttaagataatttatttttatttattttgaaattttccaaaggaaggatgagaatacatgttccaagccgtaytgcatttttttttctttttttggagacaaggtctcactgtgtcgcctaggctgcagtgcagtggcgcaatcactgctcactgcaatctcaacctgccgga

SEQ ID NO: 113124 - DNA, 201 bp, Homo sapiens
tttttgttttatgcatagcagtgtatcttgcatatcttttcctatctttattgaagagttacctcattctttcagctgctgactcttccgttcaattaatatacttttaaccattcctagtgattaacattggaattattttttttcccactttctgaaagggagtccctggagttggaaaagagcaagcattaaaactta

SEQ ID NO: 113125 - DNA, 201 bp, Homo sapiens
taaaaactaaattctaactgtagtaatcatgtgatattaaagatattatttatggggttaaaagccctctttatcttgcttaggggtttccaataatcgartcagtgctggactttttttttttttttttaggcatggctgccccctgttaataatatatttaattaacagctttacacaatgatcttaatatacttgaaa

SEQ ID NO: 113126 - DNA, 201 bp, Homo sapiens
aacaaattttaaaacaaaaatcattattgtgaagatgaggaacactgcataataaggtaagaaacaacttacttagaagaactaacagtaataaactctakgtacctaacaatattatcttttgaataaactagtcaaaggaataggcagtaattccttaaaatgtttttacctgggaaaaaaaaatctatggaaattatt

SEQ ID NO: 113127 - DNA, 201 bp, Homo sapiens
gtttttgttttatgcatagcagtgtatcttgcatatcttttcctatctttattgaagagttacctcattctttcagctgctgactcttccgttcaattaatatacttttaaccattcctagtgattaacattggaattattttttttcccactttctgaaagggagtccctggagttggaaaagagcaagcattaaaactt

SEQ ID NO: 113128 - DNA, 201 bp, Homo sapiens
acttacaagtaccagctgtaagtaatgacagccacattaagaacgacagccacattaataatgacagccaacatttgttagacatttaaatttgctgttaygtttaatgcattgcatgtaatctcaatctttgtaatctgtgaagtgggttgtaatattttcacattacagatggtaaaactgaggctaagagagtttaag

SEQ ID NO: 113129 - DNA, 201 bp, Homo sapiens
aagaaaggaaaggtataatttggcctgggtgtgagttaaggaatcatttgggaattgtaaaaaataatataaagaaggaaaagcaagtgaatataacaccwggctaactccaaaccattcttattgaaacagtttcagcaaataagcactgttgacacttgaaaataataaaattacatttattttataattatctattat

SEQ ID NO: 113130 - DNA, 201 bp, Homo sapiens
tgtctgattatagtaataacatgtatataatttttttttcaggaaagcttgctgttgtgagggattcccattccatgaggtaatatccagtaattcaactstattaattttagaaactttcttaaaagtttaaatctcagtttctattttcttttttcttgctaggttattcaagaattccttttaaacaaggataaattg

SEQ ID NO: 113131 - DNA, 201 bp, Homo sapiens
agtttttgttttatgcatagcagtgtatcttgcatatcttttcctatctttattgaagagttacctcattctttcagctgctgactcttccgttcaattaatatacttttaaccattcctagtgattaacattggaattattttttttcccactttctgaaagggagtccctggagttggaaaagagcaagcattaaaact

SEQ ID NO: 113132 - DNA, 201 bp, Homo sapiens
ctgatttgttattgtttcaggtatctgaaaataaattcttctttactgtatgaagttatatgctggaaagataggaacagatattcactctgattggtctkagaggaggtttaaaattaaaacaggcagctcttatattttttcagcatttatttctactctctcatttgccatacagtggccatctttgcacactataag

SEQ ID NO: 113133 - DNA, 201 bp, Homo sapiens
tttgtcatctttaatacttattaattttattgtgactagcagggatgtgcctagagaaaagagtttattttttagagtgaaattgacctgagtttcattcytggcactggtatgtagaaactctgagacactgagcaaaatttgtaacctatctctaccttgtatgttaccttgtgaaatgacaacagtaatactcagcag

SEQ ID NO: 113134 - DNA, 201 bp, Homo sapiens
ataatctctgtcttccaaaccagtacaattaaaataagaaagtaaaactatcaaaccaaaataatacaggcagaaggaagatggaagtaacaaagaaaaarctggtgacagcaaacaaaataaggtgcatgaatgaatccagcagctttatcagtaatcaccaaaaatgtaagcagattaaactcacctattaaaagacag

SEQ ID NO: 113135 - DNA, 201 bp, Homo sapiens
agtgagccgagatcacaccactgcactccagcctgggcaacagagtgagactccacctcaaaaaaaaaaaaaaaatcagtggttttggccgggcacagtgkctcacacttgtattcctagcactttgcgaggctgagatgggcggattatttgagctcaggagttcaagaccagcctgggcaacatggtgaaaccccatct

SEQ ID NO: 113136 - DNA, 201 bp, Homo sapiens; identical to SEQ ID NO: 18896

SEQ ID NO: 113137 - DNA, 201 bp, Homo sapiens
tgtttaatgcattgcatgtaatctcaatctttgtaatctgtgaagtgggttgtaatattttcacattacagatggtaaaactgaggctaagagagtttaartaagttacccaacatctaagaaatatcatcctggcgttcaaaccgagagccttcactcttaatcattatgcaataatgattcttccttaggaggctcatt

SEQ ID NO: 113138 - DNA, 201 bp, Homo sapiens
cctctacctcccaggttcaagtgattcttctgcctcagcctcctgagtagctgggattataggcacgcaccagcatgcccggctaatttttgtattttttrtagagacatggtttcaccatgttgatcgggctggtctggtgttggtcaggctggtctcgaactcctgacctcatgatccgcccgccttggcctcccaaaa

SEQ ID NO: 113139 - DNA, 201 bp, Homo sapiens; identical to SEQ ID NO: 18893

SEQ ID NO: 113140 - DNA, 201 bp, Homo sapiens
catatttttagtagagatggagtttcgttattttggccaggctggtctctaacccctgacctcaggtgttccacccacttcggcctcccaaagtgctgggrttacaggcgtgagccactgcgcccagcctggaaagtagtaatacttttgatggccctttcaattgtgttcttttcagaagctatcactaaagaaagctga

SEQ ID NO: 113141 - DNA, 201 bp, Homo sapiens
ctcccaagtagctggggttacaggcacctgccatcatgcctggctaattttcatatttttagtagagatggagtttcgttattttggccaggctggtctckaacccctgacctcaggtgttccacccacttcggcctcccaaagtgctgggattacaggcgtgagccactgcgcccagcctggaaagtagtaatacttttg

SEQ ID NO: 113142 - DNA, 201 bp, Homo sapiens
tagtaattacattctactttttatgcatgtagcttccacctaaaccagaaagttttctgttgttgattattgtaaatgtataatttcaagtgtctaattawcactttcagatagaagaataattttttctaaagtgtcatgtgatagtaatagctcaagatctacttgagcccaagaattactatggtgtctattactcta

SEQ ID NO: 113143 - DNA, 201 bp, Homo sapiens
cacagacagtcaaaaaaatgatgggcagcgtcatgaagccccacctcaggtatagtaaaagctcttacagtataaatgtatgatgtataaacagtcttggkatcttgattttgtttcacctttttttttcttttgttgttgttattcttttacattttgaggttttaagatctatttaacatgtctagattcaccatcttt

SEQ ID NO: 113144 - DNA, 201 bp, Homo sapiens
attcttccttaggaggctcattgtttctagaatattctcattgatactactttaacttacgttaattctaaaggaaaaaatattaatatcacctaggagtrctatttgtctccaagagataacaaaatcttgttttatttttattatatttatagagatttactcttgaaaaaatggagtggcccaatcactatgcatgtg

SEQ ID NO: 113145 - DNA, 201 bp, Homo sapiens
cctcaccaatgatggagatactttcctttatggggcccagactgtttacaggaatttcactatgaatacaaaggtgtttattttctttctctttttcagcrtttgtttacgaactaccttttttaaagggctgattaaatgaaatagtagatataaaatgcttactgtaatgccttgcacgtagcaattgctaattaaaat

SEQ ID NO: 113146 - DNA, 201 bp, Homo sapiens
gggaacaaaccctctacctgcgactctgaagttccctctctgaccctcttttctttcttcccctcccccctccccctcactccctctgcacctgtgtttcrctgtcacgctcccaactcatccctgtagagctggtgaagagatgctgatgtagttcttgaccttgaaccccggccctgcagccgtcctgtggcctcactg

SEQ ID NO: 113147 - DNA, 201 bp, Homo sapiens
gttccagatttcccaagatggtgttcttagtctgcccagcccagccaaaatggatgtgcacaacctggaacaaatgggcaacatggaacaaagggatttcraaatcccaggacatgtggaggagtgagaggacagaggatatgatgataagagggcgtcatgtggaaagaatctgtctctttgacttcaagaggtagaacc

SEQ ID NO: 113148 - DNA, 201 bp, Homo sapiens; identical to SEQ ID NO: 18928

SEQ ID NO: 113149 - DNA, 201 bp, Homo sapiens
tagtcgacctaatttttcattatttaaaattgtaaagtagaaacatgcccatagattagctcgtgacttgtgacataattgtctcagaaattaattttttytttttttaaatagtatcttttaaccttgcaatagaaataaattttcttattaaaaactgtaaattattccataacaaattatgcgttaaattcctgtggt

SEQ ID NO: 113150 - DNA, 201 bp, Homo sapiens
gactgtgaccttgccatgaccttcctcctgcgtgtgcctctgccaccacaggaatggccacgcctcagatcatgtcaccgctgggaacaaaccctctaccygcgactctgaagttccctctctgaccctcttttctttcttcccctcccccctccccctcactccctctgcacctgtgtttcgctgtcacgctcccaactc

SEQ ID NO: 113151 - DNA, 201 bp, Homo sapiens
cagtggcgcgatctctgcttactgcagtctccgtctcctgagttcaaatcaagcgagaaatcacttgttctcttctgtgaacggaagcatcgcagatctcycttggcctcacactcctccatctccctgattcctctgttcttcatttacctaccttcccagcagtctgcagagctggccgctcactcacctctagtaagg

SEQ ID NO: 113152 - DNA, 201 bp, Homo sapiens
tggcgtgcagtggcgcgatctctgcttactgcagtctccgtctcctgagttcaaatcaagcgagaaatcacttgttctcttctgtgaacggaagcatcgcrgatctctcttggcctcacactcctccatctccctgattcctctgttcttcatttacctaccttcccagcagtctgcagagctggccgctcactcacctct

SEQ ID NO: 113153 - DNA, 201 bp, Homo sapiens
aaataaaagcaagctggaagtatgttctttagaataattattatctgcctttttagtgatttttataatttaagactaaaatctgcttctactaaggattwatttgagcttcctttttcgagtgatgccgaggaaaaacatcatagtgtcctagtgtcaaaaattaaagtctaagccaggcatgcttgtggtcccagctac

SEQ ID NO: 113154 - DNA, 201 bp, Homo sapiens
agtgagccgtgattgtgctactgcactccagcatgggtgacagagcaagatcttgtcaaaaaaaaaaaaaaaaaaaaaagtaagaaccttaactctttttyagaggcaggactcaaagaaggttggatggggaaagatagaaatatactttttagatgcaaagtcaagaagttgagttagttgatgtgaaactggtgttgt

SEQ ID NO: 113155 - DNA, 201 bp, Homo sapiens
gagggctattgcagtcacctagggatgtaatcccaagggcctggatttgggttgtggcagggagaaggaagaggggagactgcagttctaaaatgttggtrttggtgtattagggctgccataacaaagtgccacgaatgaagtgacttaaacttaccatcatctcatagctctggaggctacaacaaatctgaactcaag

SEQ ID NO: 113156 - DNA, 201 bp, Homo sapiens
aataaaaaagattcctttcaacacattactgttcattgacgatgttcctggtcacccaagagctttgatggagatgtacaaggaaattaatgttgttttcwtgcctgctaacacaatatccatagtgcagctgctatggtttgaatgtttgtcctccccaaaactcatgttgaaatttaatccccaaggtagtagttggga

SEQ ID NO: 113157 - DNA, 201 bp, Homo sapiens
aaataatgcacgaagcaggggcagggcttgagagaattgacttcaatttggaaagagtatctactgtaggttagatgctctcaaacagcatcatacgctcyggagaaatcttttgtgaaatgaagagtccattgatgtggcaaaccttattattgtatttttaaagaaattgccatttccaccctaatcttcagcaaccac

SEQ ID NO: 113158 - DNA, 201 bp, Homo sapiens
tctgcagcgcatggcacttatactttgaaagacatagaaatgctttatatgaaaaatgcaagctccattttactctaagagaagagcgggccatcttcctrctgccattttttaaacaaagacacagaggtcttgagtccctaaggaccttctccttctcccctctgttacccagacctcctgtacagcccttggcctagc

SEQ ID NO: 113159 - DNA, 201 bp, Homo sapiens
ctgctgccattttttaaacaaagacacagaggtcttgagtccctaaggaccttctccttctcccctctgttacccagacctcctgtacagcccttggcctrgctatgattgcttacgcccagtctgcctgtagttcagtatttttcaaactttagacgataacatagattagaaagtcataaggaggccgaggcaggtgga

SEQ ID NO: 113160 - DNA, 201 bp, Homo sapiens; identical to SEQ ID NO: 18914

SEQ ID NO: 113161 - DNA, 201 bp, Homo sapiens
ccacaggaatggccacgcctcagatcatgtcaccgctgggaacaaaccctctacctgcgactctgaagttccctctctgaccctcttttctttcttccccycccccctccccctcactccctctgcacctgtgtttcgctgtcacgctcccaactcatccctgtagagctggtgaagagatgctgatgtagttcttgacct

SEQ ID NO: 113162 - DNA, 201 bp, Homo sapiens
agtcgacctaatttttcattatttaaaattgtaaagtagaaacatgcccatagattagctcgtgacttgtgacataattgtctcagaaattaattttttcyttttttaaatagtatcttttaaccttgcaatagaaataaattttcttattaaaaactgtaaattattccataacaaattatgcgttaaattcctgtggtg

SEQ ID NO: 113163 - DNA, 201 bp, Homo sapiens
tttgtgtatcttctgtgatgaggtgtttgttaagggctttggctcattttaaaatcaggttatgttcttattgttgagtttaaagaggttttatatatttyagataacagtcctttatctgatatgtcccttgcaaatattttcttccagtctgtgtcttttcttttcattcttttgacagtgtctttcacagagtagaaa

SEQ ID NO: 113164 - DNA, 201 bp, Homo sapiens
cagatttttgtgtggccataagttcagcccctttggataaatccaagaagcatgattgctggctcatacagcaagaggctgtttaggtttctaagatgccrccaaactgtcttccaaagtggctgtaccattttgcattcccacccagcaatggatgagagttcctgttgctccacatccttgtcagcatttggtattgtc

SEQ ID NO: 113165 - DNA, 201 bp, Homo sapiens
gggaaaactgtgaagttaacacaactttggaatggaagttgcttcctagcaattcatatggaaagatgttaaatgtttaacatgaatttcaagttcctttrcttttcactggcaacctgaacttgaacaagagaaccaaaatggtttaggtttgacctttaggagggtgagctgttgggacaagtataatcccactctcta

SEQ ID NO: 113166 - DNA, 201 bp, Homo sapiens
cttaattcagccttgcagctattgcattccagtccaaaccaacggcaggttctcaaaacaagcggtgaaagggttcctgttgcagagctgtctggacattwaaagaagggagaggaaatctcaaggggtcggttgcactggaatagaaatcgcctgttctttttttttgagacggagtctcgctctgtcacccaggctgga

SEQ ID NO: 113167 - DNA, 201 bp, Homo sapiens
taaatctagggagatttagacttttccacagttctgaatgatactcatctggcagaatggtgcagataaaagctactggaacaaaactgggagatggaagkgttgctcctttccttaaattggatggaaaggccgggtgtggtggctcacgcctgtaatcccagcactttgggaggccaaggcgggcagatcatgaggtca

SEQ ID NO: 113168 - DNA, 201 bp, Homo sapiens
atctccctgattcctctgttcttcatttacctaccttcccagcagtctgcagagctggccgctcactcacctctagtaaggggatggagggtcctgtgttrgaataactcactgaccgctagaaagttaaaaataaatgggtaatgccaggagaacttggctggtgccttaaaagccatagaacttctctttccatctgta

SEQ ID NO: 113169 - DNA, 201 bp, Homo sapiens
agcttctactccatgctccccatgctctcttcctattttattttccatgactgcctcggtataacttgtgctcaaccaaactggactactcaattccctgmattttcttttttaaagtttaatcaaaaaaaaaaagaaaactggctgggcacagtggcttctgcccacaatctcggtgctttgggaaactgaggcaggagg

SEQ ID NO: 113170 - DNA, 201 bp, Homo sapiens
gccatagtactctgatttgatgtggtctgttaatacctatgggctttgacttgtttctgcttttagacctagacaaaataaaatatctgtggtaaaacatwttcaagtttaccgggcacgggggctcacgcctgtaatcccagcactttgggaggctggggcaggcagatcacttgagcccaggagtttgagaccagcctg

SEQ ID NO: 113171 - DNA, 201 bp, Homo sapiens
tcccactctgtcacccaggctggagtgtaatgacatgatctcagcttactacagcctcaatctcctgggcttaagcaatcctcccacctcagcctcccacrtagctaggactacaggcgctcaccacaacacctcatttttgtatattttttgtagagattgggggatctcactacgttgccccggctggttttgaacttc

SEQ ID NO: 113172 - DNA, 201 bp, Homo sapiens
aatcctcccacctcagcctcccacatagctaggactacaggcgctcaccacaacacctcatttttgtatattttttgtagagattgggggatctcactacrttgccccggctggttttgaacttctgggctcagacaatccacccaccttggcctcccaaactgttgagattacaggaatgagccaccattccctggccaa

SEQ ID NO: 113173 - DNA, 201 bp, Homo sapiens
caatccacccaccttggcctcccaaactgttgagattacaggaatgagccaccattccctggccaaatacatttctaaaagccagtttctggagtatactrtcaaataatagatatatgtccacatttttatacggacttatattgtaagaaaaagtaaaaataagtgtgaagttattacagtaatagtaattattttgca

SEQ ID NO: 113174 - DNA, 201 bp, Homo sapiens
cccttaaaatataccaccatcttctatttgatataatgcagaatgggaatgataaaaacatgaattacatttcagagtttcaaaaagcaaaccagctttakagcaatgcttgaggttgggctgctaacaagctcactcaactagtgtttcctgacggccaacgtcagaataattccatctccatgagaagtacagaaagaa

SEQ ID NO: 113175 - DNA, 201 bp, Homo sapiens
ccagctaatatttaaattattttgtagagactgggtctcaaaatgttgcataggctggtcttgaactccttgcctcaagcaatcctgccaccttggcctcygaaagtgctgaaattgcatgtgtgagccaccatgcccagccagtattttcacataaacattatttcagtgaattctcacaatcctgcagacacttgcaga

SEQ ID NO: 113176 - DNA, 201 bp, Homo sapiens
gcagttgttaccacctgctgctgggcctcttgccttgcctaaatctagggagatttagacttttccacagttctgaatgatactcatctggcagaatggtrcagataaaagctactggaacaaaactgggagatggaagtgttgctcctttccttaaattggatggaaaggccgggtgtggtggctcacgcctgtaatccc

SEQ ID NO: 113177 - DNA, 201 bp, Homo sapiens
cctggcccagcacccccgccagatgcccagcttgtctgagttggtagcagttgttaccacctgctgctgggcctcttgccttgcctaaatctagggagatwtagacttttccacagttctgaatgatactcatctggcagaatggtgcagataaaagctactggaacaaaactgggagatggaagtgttgctcctttcctt

SEQ ID NO: 113178 - DNA, 201 bp, Homo sapiens
atactctgtcattcagagaccagggccccatctattgtgctttatttcctaggcttggtgtcatccagaactagagcagggggatgactcggctttgctartcttgacaatttagaaagagcctggggcctagctgcccagtttgacaacttggcatcttaaagccgaagggaaccttagaaatcacattgttcagcctcc

SEQ ID NO: 113179 - DNA, 201 bp, Homo sapiens
tttgtctggcattcaagaaggtcagtagtctagagcctcctaaatgtttcactcctgctccttccttctaccacttaccacctgtgtgctcttgggttagwtattattattattattattattattattattttttgagatggagtctcactctgtcgccaggctggagtacaatggtgtgatctcaactcactgcaacct

SEQ ID NO: 113180 - DNA, 201 bp, Homo sapiens
atgagccaccattccctggccaaatacatttctaaaagccagtttctggagtatactgtcaaataatagatatatgtccacatttttatacggacttataytgtaagaaaaagtaaaaataagtgtgaagttattacagtaatagtaattattttgcagaaaaagaactgagtttaaacaggctttttagaaaaacccaac

SEQ ID NO: 113181 - DNA, 201 bp, Homo sapiens
aagaaggtcagtagtctagagcctcctaaatgtttcactcctgctccttccttctaccacttaccacctgtgtgctcttgggttagttattattattattrttattattattattattttttgagatggagtctcactctgtcgccaggctggagtacaatggtgtgatctcaactcactgcaacctccccctcctgggtt

SEQ ID NO: 113182 - DNA, 201 bp, Homo sapiens
tactaacgtttagacatggatcatcagtaaatgtgttccaaagagttacacagataccagctttgtcttgggaattcttacccctgaaaattgattgactrtcactgactgtgtgacatgagaaagttttgtggggttttttttttgtatttttttgagacgtagtcttgctctgtcacccaagctggagtccactggcgc

SEQ ID NO: 113183 - DNA, 201 bp, Homo sapiens
tcccacgcacctcctccactcagtggctcactgtagcaatgccctgaaaggctgtaattgagtcatattccagcccctggactcaggagtcaggggtgatrtcgccaccacctaattgcttggattgaggatgggaacagtgattctcaagaagaaaacttggacactattaccagaagttagtacaactgccttaaagca

SEQ ID NO: 113184 - DNA, 201 bp, Homo sapiens
acagctgaggttttgggttggtgatgtggaaccctggtgtgagtgactccattttgggttggtctattggggtctcggtgcaggagctcagtccaaatcartggcctctcctcatttttatttgacttctccatcaatctatccgtgtctcccgtcacatcagtccattcccccgtgggctgcacattcagctcggagctg

SEQ ID NO: 113185 - DNA, 201 bp, Homo sapiens
gatggggatcgttgcaattcataggaaaggaggcacgaggaaatgaaaatgaaagggagtaataactacgtaactagtcaatcttccttaaaaaaaaaaacccttaaaatataccaccatcttctatttgatataatgcagaatgggaatgataaaaacatgaattacatttcagagtttcaaaaagcaaaccagctttat

SEQ ID NO: 113186 - DNA, 201 bp, Homo sapiens
aagggctggggagggtggcatttcaggcctacacaaccacacgcgtgttcttcagccatctccatggcctcactgcccacctggtatcagccggccaccayccggctagaacggctttcaaaatcgctgctcgtctactcctcaccaaatcttgtcttcacttggtgctcagagcccatcacctttctgcaagtatttttt

SEQ ID NO: 113187 - DNA, 201 bp, Homo sapiens
atttttaggctggtctcgaactcctgacctcaagtgatccacccacctcggcctcccagagtgctgggattactggtgtgaaccactgtgcccagccagtygtcttttaaaaacaaatcggattctgccatttgtctgtgctggctttgaatccggtgctggctttccaacactccgacagatcctcagtccttgaggctt

SEQ ID NO: 113188 - DNA, 201 bp, Homo sapiens
gataagaaataaaataaggaagataacccataatgtaaaataaaaatagcacattgttgcatgcattgatacccttttttttttttctttgagatcttgckctgtctttcaggccgaagtacagtgtctcaatcatagctcactgcagcctccagcttctgggctcaagcaatcttcccatctcagccacccaagtagctg

SEQ ID NO: 113189 - DNA, 201 bp, Homo sapiens
ccattctcctgcctcagcctcctgagtagctgggactacaggtgcccgccaccatgcccggctaattttttgtatttttagtagagacggggtttcaccaygttagccaggatggtctcgatctcctgacctcgtgatccgcctgcctcggcctcccaaagtgctgggattacaggtgtgagccaccacgcccagcctaga

SEQ ID NO: 113190 - DNA, 201 bp, Homo sapiens
taattttttgtatttttagtagagacggggtttcaccatgttagccaggatggtctcgatctcctgacctcgtgatccgcctgcctcggcctcccaaagtkctgggattacaggtgtgagccaccacgcccagcctagagctttgaaagtttaattgtgaactttcagcttggaggtgctctttgacccatgtggatacta

SEQ ID NO: 113191 - DNA, 201 bp, Homo sapiens
gaaaaatcaagcttaaaatcaagccttcagtcagaatggcaaagtgaaactgtcttagaaaaagacggagctgtaatggccctagcattgaatgtcgtggwgccatcaggctcaatatctttttttgtcactcttaagtgtgatttcctgttttgaaagaaaaagattgttgcttagcaacctgatactacagtaattgta

SEQ ID NO: 113192 - DNA, 201 bp, Homo sapiens
gcatcccagactaattaatcgggatctccgagggtgggaccacacatcagggttttgtaaatttccctgggggtttggtggggttgggggtggaggcgtcyatcctatggccaaggttgagaaccactgctttttaaaagactgtttgcttgtttttgagatggggtctcgctctgtcacccaggctggagtgcagtggcg

SEQ ID NO: 113193 - DNA, 201 bp, Homo sapiens
tcctcacaaccaccttgtgagagaggtgtcattatccctgtttggagagtgagacaggggcttagcaagctcagtaacctgtccaagtcacacatctgcayggggttagctgctgctaaagctcatgccgttaatctccatggtacacggtgtcctctccatagcaatcttgcggctgccttgttaacaccaaaaaaactt

SEQ ID NO: 113194 - DNA, 201 bp, Homo sapiens
cttgtgagagaggtgtcattatccctgtttggagagtgagacaggggcttagcaagctcagtaacctgtccaagtcacacatctgcacggggttagctgcygctaaagctcatgccgttaatctccatggtacacggtgtcctctccatagcaatcttgcggctgccttgttaacaccaaaaaaacttgcatcagctggtt

SEQ ID NO: 113195 - DNA, 201 bp, Homo sapiens
cagtggcaccaccatggctcactgcagcctcaatctcctgagctaatcgagcctccccttcagcctcctgagtagctgggactataggcgtgcaccaccayacctgaataatcaaaacctaacatctttaaagaacattggcataagacttggcaaaaatggcatcttgtccctcatctcatttagtccaagcgatacagg

SEQ ID NO: 113196 - DNA, 201 bp, Homo sapiens
gtgttaagtcctccagagagctaattagagtttgtgattctaaaaggcaactatagattcacttatattagcagttcatgtagattccagttaaggaaatkgtttgtcacttgtgttattgaaaacacacacagggcgagcactgtggcccatgctggtaatcccagcgttttgggaggctgaggtgggcagatcacgggg

SEQ ID NO: 113197 - DNA, 201 bp, Homo sapiens
cttttttttttgagacagagtcttgctctgtttaccaggctggagtgcagtgttgagatcttggctcaccgaaatctccgcctcctgggttcaagcgattmtcctgcctcagtgtccccagtagctgggattacaagcatgtgccaccacgcctggctaatttttgtatttttagtagagatggggtttcaccatgttggc

SEQ ID NO: 113198 - DNA, 201 bp, Homo sapiens
gaaacatgcccatagattagctcgtgacttgtgacataattgtctcagaaattaattttttctttttttaaatagtatcttttaaccttgcaatagaaatraattttcttattaaaaactgtaaattattccataacaaattatgcgttaaattcctgtggtgtttttaacaggcataaaatgaagacagctgggactttg

SEQ ID NO: 113199 - DNA, 201 bp, Homo sapiens
gtttttaacaggcataaaatgaagacagctgggactttgggttgcaaagggagagaaatctaacactaatttgtttaaaaagcgggaactggccaggcgcrgtggctcgcacctgtaatccctgcactttgggaggccgaggcaggtggatagcctgaggtatggtgtgggcgtggtggcaggcacctgtaatcccagcta

SEQ ID NO: 113200 - DNA, 201 bp, Homo sapiens
actctgtggatgagcaaattctttaaggcacaacaaaactagatactctaatataatacttgtaatgctttattaaactttaatttttttagatatcagawgtcaaactttaacatattatttctattatctttttccaaaaaggaaatatgtttattgtgttatgattataaaagaattcatattttttaattgtaaatt

SEQ ID NO: 113201 - DNA, 201 bp, Homo sapiens
caccttctcctcacccctgctctaggattatggggatggacaaacacacacatccaacactggagagacaagatcagcagcagtttatgagtcacatataygcacagcccaggggaggaggacactgcccatcacacagagccacgcagggggacacagatgttgtacttgagagcagagcaaaaaaccatgggctgtgtg

SEQ ID NO: 113202 - DNA, 201 bp, Homo sapiens
gctaaaggttgcatagagagagatttctatccgttcagagactcactataattctctctttctgtctctgtccttcatctgtttctctctttctctctcaytctctctctgatacacacacacacacacacacactcacactcacacactcctgagtaagggaaatgtgagaagaaggtaaaacttcaactaaatgaaaag

SEQ ID NO: 113203 - DNA, 201 bp, Homo sapiens
atagagagagatttctatccgttcagagactcactataattctctctttctgtctctgtccttcatctgtttctctctttctctctcactctctctctgamacacacacacacacacacacactcacactcacacactcctgagtaagggaaatgtgagaagaaggtaaaacttcaactaaatgaaaagaaattgtatgaa

SEQ ID NO: 113204 - DNA, 201 bp, Homo sapiens
ttccctttttatggtcactggatatacttttggcaggggcagtcttctctactctgctcatattgataaatttcttcccccagagaacctcaaatcagtawcatcaggggtggggccttccctgtggcagtggttgctctcatatagtttaaaaactgtgggcttgtgtcagggtgaattaacccttttactgtgccccgg

SEQ ID NO: 113205 - DNA, 201 bp, Homo sapiens
tcagagactcactataattctctctttctgtctctgtccttcatctgtttctctctttctctctcactctctctctgatacacacacacacacacacacactcacactcacacactcctgagtaagggaaatgtgagaagaaggtaaaacttcaactaaatgaaaagaaattgtatgaattatggtaagcaggttggtttt

SEQ ID NO: 113206 - DNA, 201 bp, Homo sapiens
cagagactcactataattctctctttctgtctctgtccttcatctgtttctctctttctctctcactctctctctgatacacacacacacacacacacactcacactcacacactcctgagtaagggaaatgtgagaagaaggtaaaacttcaactaaatgaaaagaaattgtatgaattatggtaagcaggttggttttt

SEQ ID NO: 113207 - DNA, 201 bp, Homo sapiens
aggtagtgtcaaattcagtaggcaagagagtcattaatgtgatgactgcatagtttgtggttgtttgtaactctgggtatttgaagatatttataggtaamctgttccaaaatatggtggggttttttatgtagttactttttatatttttaattaattaatttatttttttgagatggagttttgctctgtcacccaggc

SEQ ID NO: 113208 - DNA, 201 bp, Homo sapiens
cgtgaacccaggaggcggagatgcagtgagccgagattgtgccactgcactccagcctgggcgacagagcaagactccgtctcaaaaaaaacaaaaaaacaaaaaaaaaacacacattgacaccaggacggagttagcacatctttacaggtgagactctcagacccgagaaaatagaggcactttagagctgagctaatc

SEQ ID NO: 113209 - DNA, 201 bp, Homo sapiens
tatgtagttactttttatatttttaattaattaatttatttttttgagatggagttttgctctgtcacccaggctggagggcagtggtgtgatctcagctyactgcaacctccacctcccaggttcaagctattcttctgcctcagcctcctgagtagctgggactacaggtgtgcaccactatgcgaggctaatttttgt

SEQ ID NO: 113210 - DNA, 201 bp, Homo sapiens
tagaaagatggagttaacataaacgaaggtgtactgggactggtctcctctgctgacttcatgggaagcacacacacgcacacacacacacacacacacayacacacacatacacacacctgtccaagatcagaaaaaatccctcacatccctgtagcatgatcctgattgtaaaaatggagccctaatcagaagggcaga

SEQ ID NO: 113211 - DNA, 201 bp, Homo sapiens
gtgtgcaccactatgcgaggctaatttttgtatttttagtagagatggggtttccctatgttggaccaggctgatcttgaactcctgacctcaggtgatcygcctggcttggcctcccaaagtgctgggattacaggcgtgagccactgcgtctggcctatagtttctttttattaatctctttcttgatgcaatctgaat

SEQ ID NO: 113212 - DNA, 201 bp, Homo sapiens
gcaccactatgcgaggctaatttttgtatttttagtagagatggggtttccctatgttggaccaggctgatcttgaactcctgacctcaggtgatccgccyggcttggcctcccaaagtgctgggattacaggcgtgagccactgcgtctggcctatagtttctttttattaatctctttcttgatgcaatctgaatctgt

SEQ ID NO: 113213 - DNA, 201 bp, Homo sapiens
gaaagatggagttaacataaacgaaggtgtactgggactggtctcctctgctgacttcatgggaagcacacacacgcacacacacacacacacacacacayacacacatacacacacctgtccaagatcagaaaaaatccctcacatccctgtagcatgatcctgattgtaaaaatggagccctaatcagaagggcagaag

SEQ ID NO: 113214 - DNA, 201 bp, Homo sapiens
tcccgccttcctctgtccacctccaacagactctctgtttcagttctataccctccgctcttccagccacctgatcccttctcctgccatgcctgccaccwgcaactactttgctgcttcttctgagttcatccaattctcagccattctctagggctagctccagcatcgtctttctaggagccctgaacttgctctggc

SEQ ID NO: 113215 - DNA, 201 bp, Homo sapiens
ttgggtttctccaggctaaaaatggcgttagattcttttcttcttttgctcatgttggaggtgatattacattatgtgagggctttacccacttccctggkttttttttatttcatttttcatttttatttttttttagacggagtcttgctctctcacccaggctggagtgcagtggcgcgatctcagctcactgcaatc

SEQ ID NO: 113216 - DNA, 201 bp, Homo sapiens
gagttaacataaacgaaggtgtactgggactggtctcctctgctgacttcatgggaagcacacacacgcacacacacacacacacacacacacacacacayacacacacctgtccaagatcagaaaaaatccctcacatccctgtagcatgatcctgattgtaaaaatggagccctaatcagaagggcagaagcatgattg

SEQ ID NO: 113217 - DNA, 201 bp, Homo sapiens
ttccagccacctgatcccttctcctgccatgcctgccaccagcaactactttgctgcttcttctgagttcatccaattctcagccattctctagggctagytccagcatcgtctttctaggagccctgaacttgctctggcttctgtgttcttccatgcagactttcagtggatgtttacttaaaactatgttacaatctg

SEQ ID NO: 113218 - DNA, 201 bp, Homo sapiens
ttcttggtctttcttagaaactgggtccgtcatttctcatctaatcccgccttcctctgtccacctccaacagactctctgtttcagttctataccctccrctcttccagccacctgatcccttctcctgccatgcctgccaccagcaactactttgctgcttcttctgagttcatccaattctcagccattctctagggc

SEQ ID NO: 113219 - DNA, 201 bp, Homo sapiens
attaatcagaagggatagggagtgagggagtaagcattaaaataagctagcaaatggccaggtgtggtggctcacacctgtaatcccaggactttgggagkccaaggtgggcagatcacttgaggccaggagttcaagaccagcatggccaacatggcaaaactccatctctactaaaaatacaaaaattagccaggcgtg

SEQ ID NO: 113220 - DNA, 201 bp, Homo sapiens
ctttgctgcttcttctgagttcatccaattctcagccattctctagggctagctccagcatcgtctttctaggagccctgaacttgctctggcttctgtgytcttccatgcagactttcagtggatgtttacttaaaactatgttacaatctgggaatgcacagattgtaattccatctctgggaaaactcagtctatctg

SEQ ID NO: 113221 - DNA, 201 bp, Homo sapiens
aaaaaaaaaaaaaggagtaaggttttcttcagcctaagtaaaattacttgcctctgtatagagacagttatcaaaggactcatttgtggttttaaattaargcaaacccgctctatttgtttgtttttgttctttttacagatcatatggtaaaggaaccagtggaagacacagaccctagcactttatcctttaatatgg

SEQ ID NO: 113222 - DNA, 201 bp, Homo sapiens
cttgttgcctaggctggagtgcaatggtgcgccaccacgcccggctaatttttgtatttttagtagagacggggtttcaccatgttggccaggctggtctygaactcctgacctcaggtgatccacctgcttcggcctcctaaagtgctgggatgacaggtgtctcactatgttgcctaagcttttctcgaacccctgagc

SEQ ID NO: 113223 - DNA, 201 bp, Homo sapiens
tcaagtgatccacccgccttggccttccaaagtgctgggattacagcatgagctacctcacccagccaatcctatttcttaaaaaaaaaaaaaaaaaaagragtaaggttttcttcagcctaagtaaaattacttgcctctgtatagagacagttatcaaaggactcatttgtggttttaaattaaagcaaacccgctcta

SEQ ID NO: 113224 - DNA, 201 bp, Homo sapiens
tttatttttatttatttatttattttgagaccaactcttgctccgttgctcaggctggagtgcgatggcacgatctcaggtcactgcaacctccgcctccyggggcaattctcgtaactcagcctcctgagcagctgggattacaggcacgggccaccatgcccagctaatttttgtatttttagtagagatggggtttca

SEQ ID NO: 113225 - DNA, 201 bp, Homo sapiens
aagcactagtcgacctaatttttcattatttaaaattgtaaagtagaaacatgcccatagattagctcgtgacttgtgacataattgtctcagaaattaattttttctttttttaaatagtatcttttaaccttgcaatagaaataaattttcttattaaaaactgtaaattattccataacaaattatgcgttaaattcc

SEQ ID NO: 113226 - DNA, 201 bp, Homo sapiens; identical to SEQ ID NO: 18900

SEQ ID NO: 113227 - DNA, 201 bp, Homo sapiens
ttattattattttttgagacagagtttcactcttgttgcccaagctggagtgcaatggctcaatcttggctcactgcaacctctgcctcccgggttcaagygattctcctccctcagccttccaagtagctgggattacaggtgcctgccaccacacccggctaattttgtatttttagtagaggcggggtttcaccatgt

SEQ ID NO: 113228 - DNA, 201 bp, Homo sapiens
ccaactcaggacagccccagtggtggcattcacctctcactgcccctcctgtgggcttcaatgggtccaaggtggcaacctaccctcctgtggcattgggygcagtacccaggactaaaggataaaccacttcctggagcactcatatgtgcaaagctggaccagccaattctttctgcagatacaccaaagagagggatg

SEQ ID NO: 113229 - DNA, 201 bp, Homo sapiens
cgccctggccacaccctggccatgagttaattttaagtgactttttacattgagaaaattcacaagactgtcacagtcacatggaaggaaaacaatgatgktggttatagtgtagctatcaccctgtgtctctcccactgagaaacagtctcacaatggatgagccagatttgtctgtcaaatgtttgtaaaatctgtttg

SEQ ID NO: 113230 - DNA, 201 bp, Homo sapiens
atgtgtgtgttctgactgctccaatgactggccattcctctgtctccctcttcttgggccttcctattccctgagacacaacagtatcgaaactaggccarttgataaccctacaatgagctcttaagtgaggaagagttgcatgtttctcacttcaaatcaaaagctagaaataattaagtttagagaggaaggcatatc

SEQ ID NO: 113231 - DNA, 201 bp, Homo sapiens
tttatagacttaaaagcaattgtaatttaattctataaaggaaagactaggacgccaacgtttaagtgagttttaaggaggccagctttatttactagaarcatcatttgtaattagcgttaagagtttcacaaaatctcttacatactgctaacatattcctacttcattcacagagagtataaacctttaacagtggcc

SEQ ID NO: 113232 - DNA, 201 bp, Homo sapiens
tcttcttccctctgagttctaagagccatagcattggtggagaacatgctgtttgttgcttggtggaagggaccagaagccagctgggtcatctctctgtktgtgccttggccacttaggtagccaaaggagccctcctgacattaggtcaggtgttagtccctctccttttctgcttttagtgtgtttaagcaaataaac

SEQ ID NO: 113233 - DNA, 201 bp, Homo sapiens
gagccatagcattggtggagaacatgctgtttgttgcttggtggaagggaccagaagccagctgggtcatctctctgtttgtgccttggccacttaggtarccaaaggagccctcctgacattaggtcaggtgttagtccctctccttttctgcttttagtgtgtttaagcaaataaacattaaagttcatttctccccgc

SEQ ID NO: 113234 - DNA, 201 bp, Homo sapiens
ggcgcctgtaatcccaactacttgggaggctgaggcaggagaattgcttgaaccagcaggtggaggttgcagtgagctgagattgtgccactgcactccakcctaggtgacagagtgagaccctgtcttaaaataaataaataaataaaataaaagcaagctggaagtatgttctttagaataattattatctgccttttt

SEQ ID NO: 113235 - DNA, 201 bp, Homo sapiens
ctcctgggtttaagtgattctcccacctcagcctcctaagtagctgagagtacaggcgcctgccaccacgcccagcttgggctaattattttaagaccggyccccctgtccctgtaaagatcccacgcacctcctccactcagtggctcactgtagcaatgccctgaaaggctgtaattgagtcatattccagcccctgga

SEQ ID NO: 113236 - DNA, 201 bp, Homo sapiens; identical to SEQ ID NO: 18919

SEQ ID NO: 113237 - DNA, 201 bp, Homo sapiens
ggtgctagttttaactttgttttggggaattttcaaccattaattgtgaatatcagacttcactctttactcctgatactcaacattttccttgaaattayaatctaataatgggcttctgtgcttactgaatttaaactagtttagtaaactgaaagtataaatttgttcttctcataatcctaatttttaaacaaaatt

SEQ ID NO: 113238 - DNA, 201 bp, Homo sapiens
tccccattgttaagggacacatgactgtaattgatttctttgatatctaacatgtctctcaaaaatttaagttctgcattatgttatacagaataaatggrgaactatcttagttaatgattgatgctaaagtagccacccaatacatagtgactagttttatcttgtttcctcatcaaggaaacagaaatctatttccaa

SEQ ID NO: 113239 - DNA, 201 bp, Homo sapiens
catcaagttaatttgtaacaagttttgcctagtcttgctttaaaacatcactctgtaataaagtctttaatagtaacattgttgggtagtcaaatcacctmtgtaagaaagagaagttacacaatagttgataaaataagcagtttaaattaaaacacataactgtcttgaaaatggtcagtggtgctagttttaactttg

SEQ ID NO: 113240 - DNA, 201 bp, Homo sapiens
tttatgtttattacgggacttggagattgtttcaactatttcactgttctaaatgctgcttcggtgaatgtcacgatgtgagtacttgccccccactcccrcataaggttgtatctttcctacaactaccctgatgtctgtatttgtagactagacctaaggctgattgccagttcgttcttccactaagcaacccagagg

SEQ ID NO: 113241 - DNA, 201 bp, Homo sapiens
tccactgtacagcagccctgtgcttgtggttggcctgttatttgagaagcatcaaataataatctcattttttggctgggtgtgatagctcacgcctgtartcccagcactttgggaggctgaggcgggtggatcacttgaggatgggcgttggagaccagcctggctaacatggtgaaacctcgtctctattaaaaatac

SEQ ID NO: 113242 - DNA, 201 bp, Homo sapiens
acttcgggaggccgaggcaggtggattgcttcagcccaggagttcaagagcagcctggggaacatagtgagacccctgtccctacagattttttttttttktttgagatggagttttgctcatgttgcctaggctggagtgcagtggcacgatctcggttcactgcaacctctgcctcctgggttcaagcaattctcctgc

SEQ ID NO: 113243 - DNA, 201 bp, Homo sapiens
agcagcctggggaacatagtgagacccctgtccctacagattttttttttttgtttgagatggagttttgctcatgttgcctaggctggagtgcagtggcrcgatctcggttcactgcaacctctgcctcctgggttcaagcaattctcctgcctcagcctcccaagtagctgggattacaggcatgtgccaccacacccg

SEQ ID NO: 113244 - DNA, 201 bp, Homo sapiens
attttatcatcttcattttctctcgtgtccctgctcttttctttgattattcaaaaaaatgttatagtgtatttagaagttaaagagaagtaaggtagacttttttttttctcttcttttctttttttctttttttttttgagacggattctcgctctgtcgcccaggctggagtgcagtggtgcgatctcggctcactgc

SEQ ID NO: 113245 - DNA, 201 bp, Homo sapiens
tatggccgggcacggtggctcacacctgtaatctcagtactctgggaggctgaagtgagcagatcatgaggtcaggaaatcgagaccatcctggctaacasagtgaaaccccgtctctactaaaaatacaaaaaattacctgggcgtggtggcaggcgcctgtagtcccagctactcgggaggctcaggcaggagcagaga

SEQ ID NO: 113246 - DNA, 201 bp, Homo sapiens
cctgctcttttctttgattattcaaaaaaatgttatagtgtatttagaagttaaagagaagtaaggtagacttttttttttctcttcttttctttttttctttttttttttgagacggattctcgctctgtcgcccaggctggagtgcagtggtgcgatctcggctcactgcaagctctgcctcccaagttcacgccattc

SEQ ID NO: 113247 - DNA, 201 bp, Homo sapiens
taagactatgaaacccacaaaaatcagtggttttcctatttcacccttagaaaacaaacccacaacatagcacaacctgataatcagagctaagaacaaasgtcatgcatattaatctaaattctatctttatcaactttcacaagtaattcgtatttccctgtctgcatcacggggatgattctggccagacattgacct

SEQ ID NO: 113248 - DNA, 201 bp, Homo sapiens
ctgctcttttctttgattattcaaaaaaatgttatagtgtatttagaagttaaagagaagtaaggtagacttttttttttctcttcttttctttttttctttttttttttgagacggattctcgctctgtcgcccaggctggagtgcagtggtgcgatctcggctcactgcaagctctgcctcccaagttcacgccattct

SEQ ID NO: 113249 - DNA, 201 bp, Homo sapiens
tctactaaaaatataaaaattagacgggtgtgatggtgggtgcctgtagtcccaactactcaggaggctgaggcaggagaattgcttgaacccgagaggcrgaggttgctgtgagctgagattgtgccactgcactccagcctggatagcaggatgagactgtctcaaaaaaagaaagaaaaggaaagaaaaaaaaatccg

SEQ ID NO: 113250 - DNA, 201 bp, Homo sapiens
ctgttaattgacccatattttataacccgccagccatgaacttacaagttagatacagacactaccagacattcactatttttttttacaattgttttaartgacattaatgagcatgcttgattcctgaactcttctttacagtataattttaaaatatttgagtgggatacgatggagaggagggaggtgggggaagaa

SEQ ID NO: 113251 - DNA, 201 bp, Homo sapiens
cccaatttatgtgaaaggtatgcatcacatcttcactcataatcaggagagttggggaaaaccctagctgttaatagtttatccaaaatccatatatatatgtgtgtgtgtgtgtgtgtgtgtgtgtatggatttatatatatatataaatggatatatatatatatctggatggatatataaatatgatatatatatgtg

SEQ ID NO: 113252 - DNA, 201 bp, Homo sapiens
tagctcggaaagggtagcgagacccaaacaatgcaaaggacccggcccgtggagatctaagacaggaggatgccagggacaggaagttgctggggcaaagsccctgaggctggactgagctcagtgttctaggacgggcgtgggcagtgaggagcagcagaggaggtgagctgggagatagcctggggactctttcttctg

SEQ ID NO: 113253 - DNA, 201 bp, Homo sapiens
ccaatttatgtgaaaggtatgcatcacatcttcactcataatcaggagagttggggaaaaccctagctgttaatagtttatccaaaatccatatatatatgtgtgtgtgtgtgtgtgtgtgtgtgtatggatttatatatatatataaatggatatatatatatatctggatggatatataaatatgatatatatatgtgt

SEQ ID NO: 113254 - DNA, 201 bp, Homo sapiens
aaggacccggcccgtggagatctaagacaggaggatgccagggacaggaagttgctggggcaaagcccctgaggctggactgagctcagtgttctaggacrggcgtgggcagtgaggagcagcagaggaggtgagctgggagatagcctggggactctttcttctgcctccttcaaaaaataaaactagccaggtgtggtg

SEQ ID NO: 113255 - DNA, 201 bp, Homo sapiens
aaaaaagttaattagctgagtgtagtggtgcacacctgtagtcccagctacgtgggaggcttaggctggaggatcgtttgagcctgggagttcgaggctgyagtgagctatagctataattgcaccactgcactacagcttgggcaacagtgagcccccatctcaacaaaaacaaaactaaaacaaaacaaaaaactcaac

SEQ ID NO: 113256 - DNA, 201 bp, Homo sapiens
ctctcttcctattttattttccatgactgcctcggtataacttgtgctcaaccaaactggactactcaattccctgcattttcttttttaaagtttaatcaaaaaaaaaaagaaaactggctgggcacagtggcttctgcccacaatctcggtgctttgggaaactgaggcaggaggattgcttaaggccaagagttcaag

SEQ ID NO: 113257 - DNA, 201 bp, Homo sapiens
acccggcccgtggagatctaagacaggaggatgccagggacaggaagttgctggggcaaagcccctgaggctggactgagctcagtgttctaggacgggcktgggcagtgaggagcagcagaggaggtgagctgggagatagcctggggactctttcttctgcctccttcaaaaaataaaactagccaggtgtggtggctc

SEQ ID NO: 113258 - DNA, 201 bp, Homo sapiens
cccccatctcaacaaaaacaaaactaaaacaaaacaaaaaactcaacttctcgtagtgggaaaaaagcactttaaagaaatctgggttaataattttgacagtggggatgactgtgattgaagtcacacacctattacgttgggctgtgacgaatgacacttcagtgtgcatcagaatgtggggatgcttgtcaacaacgc

SEQ ID NO: 113259 - DNA, 201 bp, Homo sapiens
gagtcggaggttgcagtgagtcgagatcgcaccattgcactccagcttgggcaacaagggcaagactccgtctcaaaaaaaaagaaagaaaacacacacamaaaaaaactttagtagatctttcggcatattattttttaaaataaactgataatggttgatatgattgttcaaagaaataagagcttttcataaactcag

SEQ ID NO: 113260 - DNA, 201 bp, Homo sapiens
aagaaataagagcttttcataaactcagtttaaagaaactttacaggccgggcgcggtggctcatgcccgtaatcctagcactttgggaggccaaggcggrtggatcacctgaggtcaagagttcgagaccagcctggccaacatggtaaaagcctgtctctattaaaaaatacaaaaattagccaggtgtgttggctggc

SEQ ID NO: 113261 - DNA, 201 bp, Homo sapiens
gatggagttaacataaacgaaggtgtactgggactggtctcctctgctgacttcatgggaagcacacacacgcacacacacacacacacacacacacacayacatacacacacctgtccaagatcagaaaaaatccctcacatccctgtagcatgatcctgattgtaaaaatggagccctaatcagaagggcagaagcatg

SEQ ID NO: 113262 - DNA, 201 bp, Homo sapiens
gcttcttgggagtctagggtaggagaatcactcaaacctgggaaatggaggttgcagtgagctgagatcgcaccactgcactccagcctgggtgacagaayaagactccgtctcaaaaaataaataaataaaataaaattgtagtaatccactgtgaagcatctttttttttttttttttttttttttggaacaggacgtt

SEQ ID NO: 113263 - DNA, 201 bp, Homo sapiens
agagagagatttctatccgttcagagactcactataattctctctttctgtctctgtccttcatctgtttctctctttctctctcactctctctctgatamacacacacacacacacacactcacactcacacactcctgagtaagggaaatgtgagaagaaggtaaaacttcaactaaatgaaaagaaattgtatgaatt

SEQ ID NO: 113264 - DNA, 201 bp, Homo sapiens
ctgggtttcaccgtgttagccgggatggtctccatctgctgacctcatgatccacccgcctcggcctcccaaagtgctgggattacaggcgtgagccaccrcgcccagcgagactgttattctaagtgaagtaactcaggaatggaaaaccaaacatcgtatgttctcactcataagtgggagttatgctatgaggacgca

SEQ ID NO: 113265 - DNA, 201 bp, Homo sapiens
ggcctcccaaagtgctgggattacaggcgtgagccaccgcgcccagcgagactgttattctaagtgaagtaactcaggaatggaaaaccaaacatcgtatrttctcactcataagtgggagttatgctatgaggacgcaaaggcataagaatgatacgatagactttggggactcagggaaaaggtgggaagggggtgaag

SEQ ID NO: 113266 - DNA, 201 bp, Homo sapiens
ctccttctatatataacatcaagttaatttgtaacaagttttgcctagtcttgctttaaaacatcactctgtaataaagtctttaatagtaacattgttgkgtagtcaaatcacctatgtaagaaagagaagttacacaatagttgataaaataagcagtttaaattaaaacacataactgtcttgaaaatggtcagtggt

SEQ ID NO: 113267 - DNA, 201 bp, Homo sapiens
ctgctccttctatatataacatcaagttaatttgtaacaagttttgcctagtcttgctttaaaacatcactctgtaataaagtctttaatagtaacattgytgggtagtcaaatcacctatgtaagaaagagaagttacacaatagttgataaaataagcagtttaaattaaaacacataactgtcttgaaaatggtcagt

SEQ ID NO: 113268 - DNA, 201 bp, Homo sapiens
cctctgttctctctcccaaagctcattagcagagttgcttaactatatttacagcattcagtatctcaaaggcatgttttgcctcaaataggctgattcarttctgctccttctatatataacatcaagttaatttgtaacaagttttgcctagtcttgctttaaaacatcactctgtaataaagtctttaatagtaacat

SEQ ID NO: 113269 - DNA, 201 bp, Homo sapiens
ccacaagaatccagctggggagtgagaggctggtccccgcccctgctgataagcaccccctagtggtgatcttgacgccctcatcacttggcttggatggrgcagagagcagccctgtttctccttatgagcagagggagggcagcagccccagctttcactccttccgtgaatttcttctaagaaatctctttctcttat

SEQ ID NO: 113270 - DNA, 201 bp, Homo sapiens
tctcttcctattttattttccatgactgcctcggtataacttgtgctcaaccaaactggactactcaattccctgcattttcttttttaaagtttaatcaaaaaaaaaaagaaaactggctgggcacagtggcttctgcccacaatctcggtgctttgggaaactgaggcaggaggattgcttaaggccaagagttcaaga

SEQ ID NO: 113271 - DNA, 201 bp, Homo sapiens
ctcttcctattttattttccatgactgcctcggtataacttgtgctcaaccaaactggactactcaattccctgcattttcttttttaaagtttaatcaaaaaaaaaaagaaaactggctgggcacagtggcttctgcccacaatctcggtgctttgggaaactgaggcaggaggattgcttaaggccaagagttcaagac

SEQ ID NO: 113272 - DNA, 201 bp, Homo sapiens
tcttcctattttattttccatgactgcctcggtataacttgtgctcaaccaaactggactactcaattccctgcattttcttttttaaagtttaatcaaaaaaaaaaagaaaactggctgggcacagtggcttctgcccacaatctcggtgctttgggaaactgaggcaggaggattgcttaaggccaagagttcaagacc

SEQ ID NO: 113273 - DNA, 201 bp, Homo sapiens
aactgaggcaggaggattgcttaaggccaagagttcaagaccagcctgggtaacatagcaagacctccatctccacaaaaaaatttaaaaattgactgagygtgatggtgtgcaccttagtcccagctgcttgggaggctgaggcaggagaattgcttgagcccaggagttccaggttatgatgagctatgactgtgccac

SEQ ID NO: 113274 - DNA, 201 bp, Homo sapiens
gttagccgagagcagttaatgaaatctgaccaaatgtccttgattgtggttgggtcatcctgttcattatgccaggtgtttcttttcttttatttttcttrcctttttttttatttttttatttttggagacagggtctcactctgtcccccaggctggagtgcagtggcatgatcgatcagagctcactgcagccttgaa

SEQ ID NO: 113275 - DNA, 201 bp, Homo sapiens
ttagccgagagcagttaatgaaatctgaccaaatgtccttgattgtggttgggtcatcctgttcattatgccaggtgtttcttttcttttatttttcttgyctttttttttatttttttatttttggagacagggtctcactctgtcccccaggctggagtgcagtggcatgatcgatcagagctcactgcagccttgaac

SEQ ID NO: 113276 - DNA, 201 bp, Homo sapiens
ttgcttaaggccaagagttcaagaccagcctgggtaacatagcaagacctccatctccacaaaaaaatttaaaaattgactgagtgtgatggtgtgcaccttagtcccagctgcttgggaggctgaggcaggagaattgcttgagcccaggagttccaggttatgatgagctatgactgtgccaccgcactccagccaggg

SEQ ID NO: 113277 - DNA, 201 bp, Homo sapiens
gcttgtaatcccagcactttgggaggtcaaggtgggcagatcacttgagtctaggagttcaagaccagcctgggaaacatggtgaaaccccacctctaccaaaaaaaaaaaaaagaaagaaagaaaagattagccaggtttggtggtacgtgcctgtagtcccaggtactcgggaagctgaggtgggaggatcgcttgagc

SEQ ID NO: 113278 - DNA, 201 bp, Homo sapiens
tgaggtgggaggatcgcttgagcctggagggcggaggttgcagtgagccgagatcatgccactgcactccagcctgggcaacagagtgacaccctgtatcaaaaaaaaaaaaaaaaaagaacagtaacacattattagaaatgagcattctgaggccaggcacggtggctcatgcctataatcgcagcactttgggaggcc

SEQ ID NO: 113279 - DNA, 201 bp, Homo sapiens
gaagtcaaactttaacatattatttctattatctttttccaaaaaggaaatatgtttattgtgttatgattataaaagaattcatattttttaattgtaawtttttttatttatttattttatttttttttttagtatttattgatcattcttgggtgtttcacagagagggggatttggcagggtcataggacaatagtg

SEQ ID NO: 113280 - DNA, 201 bp, Homo sapiens
gggaggcggagcttgcagtgagccgagatagtgccactgcactccagcctgggcgaaagagcgagactccatctcaaaaaaaaaaaaaaaaagaaagaaaygagcattctgaaatagtcttccatatgatgcttttgacaattcagcaggaaaataaaggatgtaagaaatgaatgcatatgttaggcctcttgttgacct

SEQ ID NO: 113281 - DNA, 201 bp, Homo sapiens
aagtaaatactatcctaaaaggtgaaaatatatttatcaactaaaaaaataggggaaatacctctttgagatttttaaagttctattttaaaacaaaatgtcttcttctcctataaaaagtagtactataggcagctggctgcttccgttgactatttctttgtataatctataggatttgttttaactgctagatactca

SEQ ID NO: 113282 - DNA, 201 bp, Homo sapiens
ttttctgcctctttccctcccactgcacacaccccagggtgttggcgccacttcaaagggagcctgtggatgaagaaaacacaggtaaaggcagagggctsataagggggccataaatttaaaaagttaagattcctggcactatcaactctcacttgttttcaaatatgcatatggagtggatattccagttttcatgtc

SEQ ID NO: 113283 - DNA, 201 bp, Homo sapiens
agtaaatactatcctaaaaggtgaaaatatatttatcaactaaaaaaataggggaaatacctctttgagatttttaaagttctattttaaaacaaaatgtcttcttctcctataaaaagtagtactataggcagctggctgcttccgttgactatttctttgtataatctataggatttgttttaactgctagatactcag

SEQ ID NO: 113284 - DNA, 201 bp, Homo sapiens
tttggtgttaaactgtcagggctgactggtcacttggaaagggcaagggctgaggtgcatgcaagtgtcggctggttactcacagacacagcagccccttktaccccggagagagttctgtttgctggagcccttattctggccagcagtgtcacaaatgcacactgtaagacatagacagtcttggaaagaaagggaaac

SEQ ID NO: 113285 - DNA, 201 bp, Homo sapiens
gtaaatactatcctaaaaggtgaaaatatatttatcaactaaaaaaataggggaaatacctctttgagatttttaaagttctattttaaaacaaaatgtcttcttctcctataaaaagtagtactataggcagctggctgcttccgttgactatttctttgtataatctataggatttgttttaactgctagatactcaga

SEQ ID NO: 113286 - DNA, 201 bp, Homo sapiens
tactaaaaacacaaaaaattagccgggtgcagtggcgggtgcctatagtcccagctactcaggaggctgaggcaggagaatggcgtgaacccctgggaggyggagcttgcagtgagccgagatagtgccactgcactccagcctgggcgaaagagcgagactccatctcaaaaaaaaaaaaaaaaagaaagaaatgagcat

SEQ ID NO: 113287 - DNA, 201 bp, Homo sapiens; identical to SEQ ID NO: 18925

SEQ ID NO: 113288 - DNA, 201 bp, Homo sapiens
tccagccacctgatcccttctcctgccatgcctgccaccagcaactactttgctgcttcttctgagttcatccaattctcagccattctctagggctagcwccagcatcgtctttctaggagccctgaacttgctctggcttctgtgttcttccatgcagactttcagtggatgtttacttaaaactatgttacaatctgg

SEQ ID NO: 113289 - DNA, 201 bp, Homo sapiens; identical to SEQ ID NO: 18926

SEQ ID NO: 113290 - DNA, 201 bp, Homo sapiens
gatgagctaggcaggaaggaggagcacactacagcagggatctttgccactggccagtgtcacaggaggtagaaatggaggaagaagaagattaaattggygactaataaacttttcaatatagttgtaagtcacatgacagtcttcataaatgtgcatgcccatatttgatgcctccaagagtcttgggaggtgagatat

SEQ ID NO: 113291 - DNA, 201 bp, Homo sapiens
ggcaggagaattgcttgaaccagcaggtggaggttgcagtgagctgagattgtgccactgcactccatcctaggtgacagagtgagaccctgtcttaaaawaaataaataaataaaataaaagcaagctggaagtatgttctttagaataattattatctgcctttttagtgatttttataatttaagactaaaatctgct

SEQ ID NO: 113292 - DNA, 201 bp, Homo sapiens
tgtggtcccatggtcccagctgctcaggaggctgaggtgagaggatcgcttaaacctgggaagcagaggttgcagggaatggaaatcgtgccactgcactycagcctgggagacagagccagaccctgccaccaaaagaaaaaaaaaaaaaattgggttccagtttgtagccaagaatccatgccaagaggagtctaaggt

SEQ ID NO: 113293 - DNA, 201 bp, Homo sapiens
tatggagggtcacagctagtgtttaatgacagcctctatttccaagagagcccagtatgcagctagcagttgctgctctaataatgtgtagaacagggccygggagggcagtttcttgcatcaaaagcctgtggacaactttcagctatcgtgggtggtccagagacttcaggaggaatgagaggaggttgctgaagctcc

SEQ ID NO: 113294 - DNA, 201 bp, Homo sapiens
tcccagctgctcaggaggctgaggtgagaggatcgcttaaacctgggaagcagaggttgcagggaatggaaatcgtgccactgcactccagcctgggagayagagccagaccctgccaccaaaagaaaaaaaaaaaaaattgggttccagtttgtagccaagaatccatgccaagaggagtctaaggtaatacaataaaaa

SEQ ID NO: 113295 - DNA, 201 bp, Homo sapiens
ctgggcatggtggtgggtgcctgtaatcccagctatctgggaggctaaggcaggagaattgcttgaactcaggagaggaaggttccagtgagccgagatcrtgctcagcttgagcctgggaggctgtggctgcagtgagctgtgactgtgctgctgcactccagcatggatgacagagcaagactctcaaaaaaaaaaaaa

SEQ ID NO: 113296 - DNA, 201 bp, Homo sapiens
actgtcttctcaaattttctgtaaatctaaaatgattctaaaataaaagcgttactttaaaaagcatactaaataaaatttagattctagatcaatgaaagcgcatcgcccattccaccactcgaatacaattatttttgtcacttcgttgtattcctttgtacatttttgtatgcataattataaaaacagcaaataacc

SEQ ID NO: 113297 - DNA, 201 bp, Homo sapiens
gctgaggcaggagaatcacttgagcctgggaggttgaggctgcagtgagccgtgattgtgctactgcactccagcatgggtgacagagcaagatcttgtcaaaaaaaaaaaaaaaaaaaaaagtaagaaccttaactctttttcagaggcaggactcaaagaaggttggatggggaaagatagaaatatactttttagatg

SEQ ID NO: 113298 - DNA, 201 bp, Homo sapiens
ctgaggcaggagaatcacttgagcctgggaggttgaggctgcagtgagccgtgattgtgctactgcactccagcatgggtgacagagcaagatcttgtcaaaaaaaaaaaaaaaaaaaaaagtaagaaccttaactctttttcagaggcaggactcaaagaaggttggatggggaaagatagaaatatactttttagatgc

SEQ ID NO: 113299 - DNA, 201 bp, Homo sapiens
accaagcctggccatctaggactttcctagctagagaggagaagtcaattcctggattcaaactttacaggacaggctaactctcttgttaagggttaatscagccgatgaccttaagttgaagctaatgatcattgaccattccgaaaatcatagtgcccttggaataaggctaaatttactctgtctgtgctgtgctct

SEQ ID NO: 113300 - DNA, 201 bp, Homo sapiens
tgtaatgctttattaaactttaatttttttagatatcagaagtcaaactttaacatattatttctattatctttttccaaaaaggaaatatgtttattgtkttatgattataaaagaattcatattttttaattgtaaatttttttatttatttattttatttttttttttagtatttattgatcattcttgggtgtttca

SEQ ID NO: 113301 - DNA, 201 bp, Homo sapiens
agttgttttctttctaatgcagttggcactctgtggatgagcaaattctttaaggcacaacaaaactagatactctaatataatacttgtaatgctttatwaaactttaatttttttagatatcagaagtcaaactttaacatattatttctattatctttttccaaaaaggaaatatgtttattgtgttatgattataaa

SEQ ID NO: 113302 - DNA, 201 bp, Homo sapiens
gttacagggatggccaaacacatgacactcaacacttaacagatgagatcgacaggaatttatgagtcatgtatactcagtccaggaggggaggacactgygcgtcatgcagggccacatggaggttgcacttaggagcagagcaaacaacaaggggctgtcagacaggctttatggtattaagcaagtggggtgcctcct

SEQ ID NO: 113303 - DNA, 201 bp, Homo sapiens
aagaacattcatgattcatgagaggagatcaaaatatcaacatttacgggagtttggaagaagttgattccaacgctcatggatgacgttgagggattcargatttcagtgggggaagtaactgcagatacagtagaaatagcaagagaattaaaattagaagtggtgcctgaagatggggctggatttctgcagtgtgat

SEQ ID NO: 113304 - DNA, 201 bp, Homo sapiens
ccatagggaagaatctttccttgtctcttctagcttgtagtggttgccagccatcgtggaaactcctcagcttatagaggcatcactccgttctctcactygttagcacatgaccatcttctcccagggtgtttgtgtctcgtctcttcttctccttctccctctccttcttctttcttcttcttcttcctcttcttcttc

SEQ ID NO: 113305 - DNA, 201 bp, Homo sapiens
gtctgtgctgtgctctataaataaaacaccaggcttggataacagcacatctgtttatagcatggtttactgaatattttaagcccactgttaagacctaktgctcaataaaaaagattcctttcaacacattactgttcattgacgatgttcctggtcacccaagagctttgatggagatgtacaaggaaattaatgttg

SEQ ID NO: 113306 - DNA, 201 bp, Homo sapiens
aaatatatattttataatatgtaatataatatttatatattatatatatatattttttgagatggagtctcactctattgaccaggctggagtgcaatggygcgatctccgctcactgcaacctccacctcctgggttcaagcgattctcctgactcagcctcctgagcagctaggattacaggcacccctcccgcccacc

SEQ ID NO: 113307 - DNA, 201 bp, Homo sapiens
taatttttttttgttattccagtaccatttgttgaaaaaactatctttccactattatattgcctttgctcctttgttaaaaatcaatagactatatttaygtggtcctatttctgggttctgtattctgtttcattcatctattttgcttttatttgtctcttgtttgccaataccacactgttttgattactgtagctt

SEQ ID NO: 113308 - DNA, 201 bp, Homo sapiens
ttacttgcaagagttaagaagtgagtatgagaatgtttatgcagttctatccagaaattcattaaggtagcaaagaaaaatattaaaatgttatttgaagrtattggaaagtacagaaaaggcttcctttctacttttcaggatgagaaacttcaggattttagaaagaaaaaggatcagcaggagtggaggattaaaaat

SEQ ID NO: 113309 - DNA, 201 bp, Homo sapiens
tcctttctacttttcaggatgagaaacttcaggattttagaaagaaaaaggatcagcaggagtggaggattaaaaataatagagagaagggggataatacrtgggatgttttcctatagaaggtagaggggattcattttcttagcaaatatttattgataacatatgtttggtagaaaacacacagcactagattttcct

SEQ ID NO: 113310 - DNA, 201 bp, Homo sapiens
attctttattgactgtcctctacatctaaggatgagctaggcaggaaggaggagcacactacagcagggatctttgccactggccagtgtcacaggaggtrgaaatggaggaagaagaagattaaattggtgactaataaacttttcaatatagttgtaagtcacatgacagtcttcataaatgtgcatgcccatatttga

SEQ ID NO: 113311 - DNA, 201 bp, Homo sapiens
aaaaaaaaaaaagtaagaaccttaactctttttcagaggcaggactcaaagaaggttggatggggaaagatagaaatatactttttagatgcaaagtcaaraagttgagttagttgatgtgaaactggtgttgtgccttgaatcacggcatttggttgggacagttggttgggacaggagggaggaaatggagcagagtta

SEQ ID NO: 113312 - DNA, 201 bp, Homo sapiens
ttgactgtcctctacatctaaggatgagctaggcaggaaggaggagcacactacagcagggatctttgccactggccagtgtcacaggaggtagaaatggrggaagaagaagattaaattggtgactaataaacttttcaatatagttgtaagtcacatgacagtcttcataaatgtgcatgcccatatttgatgcctcca

SEQ ID NO: 113313 - DNA, 201 bp, Homo sapiens
tttttcagaggcaggactcaaagaaggttggatggggaaagatagaaatatactttttagatgcaaagtcaagaagttgagttagttgatgtgaaactggkgttgtgccttgaatcacggcatttggttgggacagttggttgggacaggagggaggaaatggagcagagttattagggggctaaagagtttgctctgttc

SEQ ID NO: 113314 - DNA, 201 bp, Homo sapiens
atgagtagtatacaatacaaaaaattagaaaatgtgtcaaaatgctgtgcatgaaatagaattatttttgtaaatttttggttttgagtatatattttttaaaaacacgtatatttatgcaaaatagtgttacatgtttcatttctgtaggttgtggtcaaaaagttgaaagagccctgcactagactgtgagttgcttaa

SEQ ID NO: 113315 - DNA, 201 bp, Homo sapiens
ggaaagatagaaatatactttttagatgcaaagtcaagaagttgagttagttgatgtgaaactggtgttgtgccttgaatcacggcatttggttgggacasttggttgggacaggagggaggaaatggagcagagttattagggggctaaagagtttgctctgttcatacagcagggaggcagagacctgcgtgaaatagg

SEQ ID NO: 113316 - DNA, 201 bp, Homo sapiens
gtgattggatcacgggggtggttatccccatgctgttctcacgacagtgagtgagtttgcacgagatctgatggtttaaaagtgtgtggccgatccccccyctctctctctctttcttactgccatgtaagacgtgccctgcttctccttcaccttctaccatgactgtaagtttcttgaggcctcctcagccatgtggaa

SEQ ID NO: 113317 - DNA, 201 bp, Homo sapiens
gtcaagaagttgagttagttgatgtgaaactggtgttgtgccttgaatcacggcatttggttgggacagttggttgggacaggagggaggaaatggagcasagttattagggggctaaagagtttgctctgttcatacagcagggaggcagagacctgcgtgaaataggcaatgctatgacagtatttgataaatgtgaaa

SEQ ID NO: 113318 - DNA, 201 bp, Homo sapiens
atacatagtgactagttttatcttgtttcctcatcaaggaaacagaaatctatttccaaggatgcagagtttgtatctttttctttttctttttcttttcytttttgagacagagtctcgctctgttgcccaggctggagtgcagtggcgtgatcttggctcactgcaacctccatctcccgggttcaagcaattctcctg

SEQ ID NO: 113319 - DNA, 201 bp, Homo sapiens
ggtagcatatctttagaacttttttacttctaataaatattatagctttcattcattctttgaaatactcttctacatgccaacaacagaaaatcaatgcwggtgagttagaaaggagagttgttttctttctaatgcagttggcactctgtggatgagcaaattctttaaggcacaacaaaactagatactctaatataa

SEQ ID NO: 113320 - DNA, 201 bp, Homo sapiens
acctggctaactttttgtagtttttttagtagagacagggtttcacccccttagccaagatggtctcgatctcctgaccttgtgatctgcccgccttggcmtcccaaagtactgggattacaggcatgagccaccgcgcccggcctagagtttgtatcttcagtgggacacgcccctttgtctttgacccctcacacaccg

SEQ ID NO: 113321 - DNA, 201 bp, Homo sapiens
tgaactgcccacgaaattcagatatgaaaaatcaggtaagaataatttcaactatattttacccttaggtacatgataatccacctaaaattttttgagakttatagagttttacaaataaaaaatgaaaaacaggatttctagatcataaacagggtttgcaaatggtctctaagcatcccagtaaggtagcatatcttt

SEQ ID NO: 113322 - DNA, 201 bp, Homo sapiens
ttagtagagacagggtttcacccccttagccaagatggtctcgatctcctgaccttgtgatctgcccgccttggcatcccaaagtactgggattacaggcrtgagccaccgcgcccggcctagagtttgtatcttcagtgggacacgcccctttgtctttgacccctcacacaccgcctgcaccttccttttagagagctg

SEQ ID NO: 113323 - DNA, 201 bp, Homo sapiens
actcctgacctcaggtgatccgcctggcttggcctcccaaagtgctgggattacaggcgtgagccactgcgtctggcctatagtttctttttattaatctmtttcttgatgcaatctgaatctgttcctctttattttgtctcaactaataattggaagtaagactttcaggccaggtgcggtgtctcatgcctgtaatcc

SEQ ID NO: 113324 - DNA, 201 bp, Homo sapiens
cagcaaaataggaaatcaggaaagaagtagattcagaatggagtcattcctgccgaaggtagtgtcaaattcagtaggcaagagagtcattaatgtgatgmctgcatagtttgtggttgtttgtaactctgggtatttgaagatatttataggtaacctgttccaaaatatggtggggttttttatgtagttactttttat

SEQ ID NO: 113325 - DNA, 201 bp, Homo sapiens
caagaaccttacaataataataacagcgcattttgagggagagatgaagatgatttggtgtctggcagactctgggacagaagtggagggaagggctgaargtccatttcagagaaccccggtggtgaccagggctgtggtgggtgccactgttgaaaatagaaaaaccacttgtttgggcagtgggaaaagcaagtagag

SEQ ID NO: 113326 - DNA, 201 bp, Homo sapiens
gtctgatgacatgtatccaccattctagtatcttacagaggagtttcgctgccctaaaaatcctctgagctccacccattcatctctccctcaccactaayttctgaccaacaactgacctttttactgtctccatacttttgccttttgcagaatgtcacatagttggaatcatatgctatgtaaccttttcagattggc

SEQ ID NO: 113327 - DNA, 201 bp, Homo sapiens
agggtttcacccccttagccaagatggtctcgatctcctgaccttgtgatctgcccgccttggcatcccaaagtactgggattacaggcatgagccaccgygcccggcctagagtttgtatcttcagtgggacacgcccctttgtctttgacccctcacacaccgcctgcaccttccttttagagagctggattcctcctt

SEQ ID NO: 113328 - DNA, 201 bp, Homo sapiens
gaatgatactcatctggcagaatggtgcagataaaagctactggaacaaaactgggagatggaagtgttgctcctttccttaaattggatggaaaggccgkgtgtggtggctcacgcctgtaatcccagcactttgggaggccaaggcgggcagatcatgaggtcaggagttcgagagcagcttggccaatatggtgaaac

SEQ ID NO: 113329 - DNA, 201 bp, Homo sapiens
tttttcccactgccagttcctgctacccaacctccgccctcatttcaaggccttgagtactttttttctatagtgaagtctcccaaaaatgatattttttwaaaaaagaaaagccatagtactctgatttgatgtggtctgttaatacctatgggctttgacttgtttctgcttttagacctagacaaaataaaatatctg

SEQ ID NO: 113330 - DNA, 201 bp, Homo sapiens
ttacctctgtagagaccctatgtccaaataagcttacattctgagatattgggtatcagaaccccaacatagggattttgcaggggacacaattcagtccrtaacagcacacaataatttggtgatgattatattgcagaatttgtctcgaaatctgatacttagtagacgtttattaaatggaatggatggatgaataca

SEQ ID NO: 113331 - DNA, 201 bp, Homo sapiens
ctgaactccagcctgggcaacagaggcagattctttctctctaaaaaacataaaataaaaaaaggccaggcgcagtggctcacacctgtaatcccagcackttgggaggctgaggggggcggacgaagaggtcaggagatagagaccatcctggccaacatggtgaaaccctgcctctactaaaaatacaaaaattagccg

SEQ ID NO: 113332 - DNA, 201 bp, Homo sapiens
atggcctctggagctagatggaccttctcagtccctagctttgctactttgctgtgtcacctggagctggttcccaatccctctcagtcagctttctcctycgtaaaatggacatcttaatactgatctcctagcacacagtaagtgctcaataaatatctggttaacgttatatttacatgaaacaaactcagtggagta

SEQ ID NO: 113333 - DNA, 201 bp, Homo sapiens
tctactaaaaatacaaaaattagccgggtgtagtggtgcatgcctgtaatctcaactactcaggaggctgaggcaggaaaatcgcttgaacccaggaggcrgaggctgcagtgagccaagatcgcaccactgcactccagcctgggtgacagagcaagactctgtcccccaccaaaaaaaaaaaaaaaaaaaatcaggcca

SEQ ID NO: 113334 - DNA, 201 bp, Homo sapiens
tggcctctggagctagatggaccttctcagtccctagctttgctactttgctgtgtcacctggagctggttcccaatccctctcagtcagctttctccttsgtaaaatggacatcttaatactgatctcctagcacacagtaagtgctcaataaatatctggttaacgttatatttacatgaaacaaactcagtggagtat

SEQ ID NO: 113335 - DNA, 201 bp, Homo sapiens
caggaaaatcgcttgaacccaggaggcggaggctgcagtgagccaagatcgcaccactgcactccagcctgggtgacagagcaagactctgtcccccaccaaaaaaaaaaaaaaaaaaaatcaggccaaagggcaaaaatgcttgctttttagcacttagtagttatttccccaagaagagcgggagagaagtttattaat

SEQ ID NO: 113336 - DNA, 201 bp, Homo sapiens
tcgcttgaacccaggaggcggaggctgcagtgagccaagatcgcaccactgcactccagcctgggtgacagagcaagactctgtcccccaccaaaaaaaawaaaaaaaaaaatcaggccaaagggcaaaaatgcttgctttttagcacttagtagttatttccccaagaagagcgggagagaagtttattaataatgaaac

SEQ ID NO: 113337 - DNA, 201 bp, Homo sapiens
ttgaacccaggaggcggaggctgcagtgagccaagatcgcaccactgcactccagcctgggtgacagagcaagactctgtcccccaccaaaaaaaaaaaawaaaaaaatcaggccaaagggcaaaaatgcttgctttttagcacttagtagttatttccccaagaagagcgggagagaagtttattaataatgaaactgga

SEQ ID NO: 113338 - DNA, 201 bp, Homo sapiens
tgaacccaggaggcggaggctgcagtgagccaagatcgcaccactgcactccagcctgggtgacagagcaagactctgtcccccaccaaaaaaaaaaaaawaaaaaatcaggccaaagggcaaaaatgcttgctttttagcacttagtagttatttccccaagaagagcgggagagaagtttattaataatgaaactggac

SEQ ID NO: 113339 - DNA, 201 bp, Homo sapiens; identical to SEQ ID NO: 18921

SEQ ID NO: 113340 - DNA, 201 bp, Homo sapiens
acccaggaggcggaggctgcagtgagccaagatcgcaccactgcactccagcctgggtgacagagcaagactctgtcccccaccaaaaaaaaaaaaaaaawaaatcaggccaaagggcaaaaatgcttgctttttagcacttagtagttatttccccaagaagagcgggagagaagtttattaataatgaaactggacagt

SEQ ID NO: 113341 - DNA, 201 bp, Homo sapiens
ccctgccattacgcccagctactttttgtatttttagtagagatgggtttcaccgtgttggttaggctggtttgaactcctgagctcaggcgatctgcctrcttcagcctcccaaaatgctgggattacagccgtgagccaccgcccccagccggtattttttcaaatcaaagaaaaaataatagagtaaatcatccaaaa

SEQ ID NO: 113342 - DNA, 201 bp, Homo sapiens
tggcgagatcttggttcactgcaacctccgcctcctaggtccaagtgattctcctgcctcagccttccgagtagctgggattacaggtgcacaccaccacrcccggctaattttgtatttttagtagatgcggggtttcaccatgttagccaggttggtctcgaactcccgacctcaggtgatcagcccgcctcgcctccc

SEQ ID NO: 113343 - DNA, 201 bp, Homo sapiens
gtttcaccatgttagccaggttggtctcgaactcccgacctcaggtgatcagcccgcctcgcctccccagtgctgggattacaggcgtgcgccactgtgcygggcccattttaaccacttttaagtgcacagttcagtggcattaagtatattcgcggtgttgtgcgaccgtcaccaccattcacctccagaacttctctg

SEQ ID NO: 113344 - DNA, 201 bp, Homo sapiens
caccacccggctagaacggctttcaaaatcgctgctcgtctactcctcaccaaatcttgtcttcacttggtgctcagagcccatcacctttctgcaagtattttttttttttttttggagatggagtctcgctctgtcacccgggctggagtgcagtggttcaatgatagctcactgcaaccttgaactcctgggctcaag

SEQ ID NO: 113345 - DNA, 201 bp, Homo sapiens
tgcaaccttgaactcctgggctcaagatcctcttgccacagcctcccaaagtgctgagattacaggcacaagccaccatgcgtggtccttgctgcaacttkttttttttttttttttttttttttgagacagaatctcgctctgtcgctcaggctggagtgcagtggtgtgatctcggctcaatgcaacctccgcctcccg

SEQ ID NO: 113346 - DNA, 201 bp, Homo sapiens
gcaaccttgaactcctgggctcaagatcctcttgccacagcctcccaaagtgctgagattacaggcacaagccaccatgcgtggtccttgctgcaactttytttttttttttttttttttttttgagacagaatctcgctctgtcgctcaggctggagtgcagtggtgtgatctcggctcaatgcaacctccgcctcccgg

SEQ ID NO: 113347 - DNA, 201 bp, Homo sapiens; identical to SEQ ID NO: 18920

SEQ ID NO: 113348 - DNA, 201 bp, Homo sapiens
ggataaaagacaaccaatatggtgcactgtattctcctcgggtgatgggtgcaccaaaatctcacaaaccaccactaaagaacttactcatggccgggcgyggtggctcatgcctgtaatcccagcactttgggaggccgaggcgggcggatcacgaggtcaggagatcaagaccatcctggctaacacggtgaaacccca

SEQ ID NO: 113349 - DNA, 201 bp, Homo sapiens; identical to SEQ ID NO: 18915

SEQ ID NO: 113350 - DNA, 201 bp, Homo sapiens; identical to SEQ ID NO: 18899

SEQ ID NO: 113351 - DNA, 201 bp, Homo sapiens
cagccatgagcagaggacagatcccgcaccggccctggcgaaaccactggccttgtctccgatgggctcacgtggccccgcttctcctctgctcctctgcmcgtcctattagatatcagagccttgcctgaaggctcagcctgctgttaggcgggggctgggaaaaacaaacattttaaagcttctagataaacgatttga

SEQ ID NO: 113352 - DNA, 201 bp, Homo sapiens
cctggatttctcagagctgagtttttagccagaggttgcttatttacgataattcttggatatattatacactaaatactattattatctttttcgacccracttttatctttctgttcttatgtgtgaaggcagagaaagattatttagagctcttcaaagattcctatttaatttaaaatgcctgtcgccttcctataa

SEQ ID NO: 113353 - DNA, 201 bp, Homo sapiens
ccccagcagttctcatggtagtggataatcgtagagagatccccagggccaacctgtccagagtttggccaaagctctcctcctcttctccccctactatyccagacccttctccctgctccctgaaatgacaccattagagtgtcctttcttttctgtccaaaaaggctgtgagtggcctcagcaagtggcttcaggtct

SEQ ID NO: 113354 - DNA, 201 bp, Homo sapiens
gggcaggatttccccccgtggagggaaagatgattactagcgcctcttgctttagatggcgttctcaaggtggtggaggaagagggagcctttccaccagmacggatagcacaattttagagatgattgtgattgtggcagttcaggtcatgtggccatccttaaatcagctattgtcatcaggaggatggaggacattgg

SEQ ID NO: 113355 - DNA, 201 bp, Homo sapiens; identical to SEQ ID NO: 18922

SEQ ID NO: 113356 - DNA, 201 bp, Homo sapiens; identical to SEQ ID NO: 18924

SEQ ID NO: 113357 - DNA, 201 bp, Homo sapiens
ttggatatgattttaatgaaggttgctttttggtttttagggagaagaaaatggctttccagatagcactggagatcctcttccaggtaaatgattgattytaaagctatctgggctaatagctagtgtggctgaataaaagataatttgaggccagggtcggtgactcatgcctgtaattccagcactttgggaggccaa

SEQ ID NO: 113358 - DNA, 201 bp, Homo sapiens
aaataaaagacttaggttgaaatataacaaaatacatatatgatctatgtgaggaaaactataaaaactctgatgaaagaaatcaaataactaactatagktgctccggtgccagcactggtgacctgccccgccctgctatgcaaatttcttaggccaaggaacgcacattgggaaatgccgtcttcacctaaccaatgt

SEQ ID NO: 113359 - DNA, 201 bp, Homo sapiens
gggaggcattgctgtcttatggtcctggcctgagaagtcccttgagacccagcagccctctgtttctgtgctggacacagggcacaggtctctttgctggkgctgggccgcggtccccgggggttaggctgctctgtgctgtctctgatgcagtcttgccaccttcatgctctgcagatgtctgtatcctgctccatggga

SEQ ID NO: 113360 - DNA, 201 bp, Homo sapiens
cccctgatggccagtaaaggcagttgaggaacccgtgtggcattggtgtagggagtacatgtccccagaggttgtggatttagattcattaaggcctgtgrcaatagtgacacccagtaacttacataggagtttcttgaagatttcattatgcctctcaatcgaacctgctgcctgatatgagaggggaggtggaagttt

SEQ ID NO: 113361 - DNA, 201 bp, Homo sapiens
ataggagtttcttgaagatttcattatgcctctcaatcgaacctgctgcctgatatgagaggggaggtggaagtttcattgaatggcttaagagcctggcrttgtatgttcttagaagagaaatgagtgtcttgctcactgtcagtaataagtgggactccaaaggagactggaaatgttctgctgaagccttgtatggtg

SEQ ID NO: 113362 - DNA, 201 bp, Homo sapiens
gggtgcaactcttaggcaatggtccaaaaatttataaaaactgtgcagatggggcgatttgttggccaggacatccagcaataagatgactgcctgaagtytggccagttttgctaatcttgggtccttcctttatcagggatatcctggttaagggatggaaagcagcaactgtctgctgagcttcatcgtgtatgatgg

SEQ ID NO: 113363 - DNA, 201 bp, Homo sapiens
gtcaagctttgatacccactggaaattcctatgaaaaattctcagtctcttcactctgatcaaaatggaacgaagaacaaccctgtggccatggcttataygtctctggagtagcttgttactaaagcctttggtttctataaagtgttattcagtttgccttctttcccttcccactgcccccacctgtgactctccagt

SEQ ID NO: 113364 - DNA, 201 bp, Homo sapiens
ggcctacttgcctgtttttaatactactggtctggtaatggagcagcctgggatgccagatggacacacgctattggatttacctcagttacagcgtttarttctagcagctgccttctgagccacatcctctccccaccctcccgtaaccattctgaggctattgctttaagggtatccaaagatttcacatatattggt

SEQ ID NO: 113365 - DNA, 201 bp, Homo sapiens
tacattagctgggcatggtgacgcatgtctgtggtcccagctacttgggaggctgaggtgggaggatcgcttgtgcttgggaggttgaggctgcagtaagyggtgatcacatcgcggcactccagcctgggtgacactgtgagacgccgtctcaaaaaaaatgtctggcgcggtggctcacacctgtaatcccagcacttt

SEQ ID NO: 113366 - DNA, 201 bp, Homo sapiens
acactcacatctggacctgtgagaacaaaaggagtctgccaggatctaaaataaaggccagggagaaggtgcagtttcagatacagtgcatgggcgccacygtgggcctgggtcaatgagtgtatttggcagtaacatgtatgtaagaacttaatccacagcttgatataaggcaaaggctgataaagtcagaaccgcaat

SEQ ID NO: 113367 - DNA, 201 bp, Homo sapiens
agagcccgaggcttagaaagcttacgtgacttctccaaggtcacacctctaggcttgtccaaggccacagctctagacttgtttaaggccagactgctagstcttagtgatgtgccactgaggaccggtccttccttgcttttaactgtcctgtgtgtgtcctcaatgatgcttttttgtggctctgcctttcccagcgat

SEQ ID NO: 113368 - DNA, 201 bp, Homo sapiens
aactcggtcagagtctgaggagtgttgattgaaattcacccacccaggtggttcccaaatccagaataatggtagtaagctgagtgtgggatccggagacytggaactcctcatggtgcagaggaagagcccgaggcttagaaagcttacgtgacttctccaaggtcacacctctaggcttgtccaaggccacagctctag

SEQ ID NO: 113369 - DNA, 201 bp, Homo sapiens
ttttcagtgattttctcatgaccttatctgggatcctaaggggacttgaaagaagatgagacaggcttaaaagcctgtgcctgggagatggatgctattgmcaagatcaatagagaattcaggaagaagaccatcagatgtgtgtgtgttgttaggattgagttttctttgttggttggttcagaaagaggagataaaggt

SEQ ID NO: 113370 - DNA, 201 bp, Homo sapiens
aaaggtctgtcctaaaactaggaagccaatatgttgtatttgatatgatttcctacctcacggattgataatgatgccatgtgaagagttgtccctgttcycacgggaaactcctcatcctcccacctgtgtggtttgctctgtgttctcatcccgcttgttcaataaatacactccccgcccccgctccccaagccttga

SEQ ID NO: 113371 - DNA, 201 bp, Homo sapiens
gactattgagatagtcactgaacagaacatattaggcaaatctgtaatagcaaaatattttctagtcactaattggatggagtcagtgttttccaatcatwttaggcatggggtatggaagccttaagggatgagaccacagcagtaaaagtgtagtaatctggctagatgcagtggctcacacctgtaatcccagcactt

SEQ ID NO: 113372 - DNA, 201 bp, Homo sapiens
agatagtcactgaacagaacatattaggcaaatctgtaatagcaaaatattttctagtcactaattggatggagtcagtgttttccaatcatattaggcayggggtatggaagccttaagggatgagaccacagcagtaaaagtgtagtaatctggctagatgcagtggctcacacctgtaatcccagcactttgcgaggc

SEQ ID NO: 113373 - DNA, 201 bp, Homo sapiens
actgccactgccttagcactaagggctctgtatcattacttgttgcttgggcagtaagagttctgccatctcagggaggcattagcaacacaatttgtttktcattttctttctatccatttaaatccaaatctgagtgtgtattgcactggactggcaggaaattccacttcagtcagaactggggctctgtcccttagg

SEQ ID NO: 113374 - DNA, 201 bp, Homo sapiens
acatatatgcacagcccaggggaggaggacactgcccatcacacagagccacgcagggggacacagatgttgtacttgagagcagagcaaaaaaccatggsctgtgtgagacaaacattgtggcatcaaaagggtaggctgccttctggttcccatgtgagttcgtgatcagcctgtttgaataattccacatgttggtag

SEQ ID NO: 113375 - DNA, 201 bp, Homo sapiens
ggagtttgaaaccagcctgggtaacatagtgagacccccatctctacaaaaataaaaataaattagccagatgtgacagcacatgtctttagtcctagctrctcaagaggaggtggaaggattgcttgagcccaggaggtggaggctgcagtgagctgtgattaagccactgcactccagcctgggtgagagagtgaaacc

SEQ ID NO: 113376 - DNA, 201 bp, Homo sapiens; identical to SEQ ID NO: 18923

SEQ ID NO: 113377 - DNA, 201 bp, Homo sapiens
ccatcacacagagccacgcagggggacacagatgttgtacttgagagcagagcaaaaaaccatgggctgtgtgagacaaacattgtggcatcaaaagggtrggctgccttctggttcccatgtgagttcgtgatcagcctgtttgaataattccacatgttggtaggaaactgaaacccactacccaaaaaataagcaggg

SEQ ID NO: 113378 - DNA, 201 bp, Homo sapiens
atcgtggttctagccacttttctgtagatcagtcccacttgagcagcccagtttgctgggttttatctgtatggaatgtacatatcctttgaagtaagacrcatgtggttcaataatgtaactttttagattgcagaaatttcactgtaacacttacctcaaatggcataaaataagcaaaaacatgtattctgtgatgaa

SEQ ID NO: 113379 - DNA, 201 bp, Homo sapiens
gctcggattacaggggtgtgccaccacccctggctaatttttgtatttcttttttagtagagacggggtttcaccatgttggccaggctggcctggaaccmctgacctcaagtgatctgactgcttcagcttcccaaagtgctgggattacaggcatgagccaccacgccctggccacaccctggccatgagttaatttta

SEQ ID NO: 113380 - DNA, 201 bp, Homo sapiens
gagcatcttctcgcaatctgttgcttcttccatggcaaactccagagaattaagaagccaaactcaacatcgccatgggcctcaggacgactaaacagatrgggagaggcactaaagctcctggtcaccaagagggtatgtaggcatttgctgtcttcctggatttctcagagctgagtttttagccagaggttgcttatt

SEQ ID NO: 113381 - DNA, 201 bp, Homo sapiens
ccaggttcaagcgattcttttgcctcagcttcctgagtggctgggagtacaggcatgtgccaccaatccagctaagttttttgtatttttagtagcggtgrggtttcatcacattggccaggctggcctcgaactcctgacctcaaataatccacctgccttgggctcccaaagtgctggggttacaggtgtgagccactg

SEQ ID NO: 113382 - DNA, 201 bp, Homo sapiens
ttcttttttttttttttttttttttgagacagagtctcactctgtcgcccaggctggagtgccgtggtgcaatctcagcttactgcaacctccacctcccrggttcaagcgattcttttgcctcagcttcctgagtggctgggagtacaggcatgtgccaccaatccagctaagttttttgtatttttagtagcggtgggg

SEQ ID NO: 113383 - DNA, 201 bp, Homo sapiens
gtatttgcaaatctcttttgaccacaaactcctaacagtcagggacttctcatttggatttccccagggcttggaattttgttttgttcatggggaggggstgagatttttaaaattgcattaatgaatgaaaccaatcaatccattgctccatgctgtgtacaaacactgtaataaatattggttgacttcttataacta

SEQ ID NO: 113384 - DNA, 201 bp, Homo sapiens
gtactatagcaaaacagtatttgcaaatctcttttgaccacaaactcctaacagtcagggacttctcatttggatttccccagggcttggaattttgtttygttcatggggagggggtgagatttttaaaattgcattaatgaatgaaaccaatcaatccattgctccatgctgtgtacaaacactgtaataaatattggt

SEQ ID NO: 113385 - DNA, 201 bp, Homo sapiens
aaagaaaaaaaaagttaattagctgagtgtagtggtgcacacctgtagtcccagctacgtgggaggcttaggctggaggatcgtttgagcctgggagttcraggctgtagtgagctatagctataattgcaccactgcactacagcttgggcaacagtgagcccccatctcaacaaaaacaaaactaaaacaaaacaaaaa

SEQ ID NO: 113386 - DNA, 201 bp, Homo sapiens
aatccgagatggtcatgaccaagccactttgcttccatacatcttcagtgcctccttccacacacacatctttcctggtttaaactttcatttctccagtwctatagcaaaacagtatttgcaaatctcttttgaccacaaactcctaacagtcagggacttctcatttggatttccccagggcttggaattttgttttgt

SEQ ID NO: 113387 - DNA, 201 bp, Homo sapiens
tgagatggtcatcaaaaacaggaactttagaggtgtccccctgatggccagtaaaggcagttgaggaacccgtgtggcattggtgtagggagtacatgtcyccagaggttgtggatttagattcattaaggcctgtggcaatagtgacacccagtaacttacataggagtttcttgaagatttcattatgcctctcaatcg

SEQ ID NO: 113388 - DNA, 201 bp, Homo sapiens
ctcaagcaaccctcccatcttggcctcccaaagtgctgggattacaggtgtgagccaccacacccaacctgtcttctcctttgtgtccaggtttctttttrtctttctttcattccctttttatggtcactggatatacttttggcaggggcagtcttctctactctgctcatattgataaatttcttcccccagagaacc

SEQ ID NO: 113389 - DNA, 201 bp, Homo sapiens
cccaagggaccttctgggaggttacgagcaaagtgttgggagccaggtggcccccgtcgcaggcagccacctcttcctccagggaataccagtcggtctcsctggggatggggtcctcatccagccaggtggttttgtctgtggcccaagtggggacattaaacccactatggcaagatgagctctttggcgtgttggaag

SEQ ID NO: 113390 - DNA, 201 bp, Homo sapiens
atggggtcctcatccagccaggtggttttgtctgtggcccaagtggggacattaaacccactatggcaagatgagctctttggcgtgttggaagcagcagygctaagcacagctgggtgcgctcgccaggggctctgtgccgagagagcagttgagtaccaaatgctttttcccgttttctttcttcattagcacctgggc

SEQ ID NO: 113391 - DNA, 201 bp, Homo sapiens
atgaatgcatatgttaggcctcttgttgacctgtggactaaattgtttctccctgcagagatcagcaaggacaactcctgcaaagaaaactgtacttgttyctcctgcttgctccgggcccccaccataagtgacttgctcaatgatcaggacttactagacgtgatcaggataaagctggatccgtgtcacccaacggtg

SEQ ID NO: 113392 - DNA, 201 bp, Homo sapiens
atgtatgtatgcaaaatctacaaggcaattgactcctgtataataatgaatgcttaagaaggtaacaagactaggcatggtggcccacacatgtaatcccmgtactttagaggccaaggcaggtggattccctgagcccaggagttcgagacctgcctaggtaatgtagtgagactcctgtctctacaaaaaataaaaata

SEQ ID NO: 113393 - DNA, 201 bp, Homo sapiens
ttgactcctgtataataatgaatgcttaagaaggtaacaagactaggcatggtggcccacacatgtaatcccagtactttagaggccaaggcaggtggatyccctgagcccaggagttcgagacctgcctaggtaatgtagtgagactcctgtctctacaaaaaataaaaataaaaaaattggccaggcgtggtggggtac

SEQ ID NO: 113394 - DNA, 201 bp, Homo sapiens
aaacaagaaggtagcaaaagaagatttaatattttctgataggaatggaaaaccaaacatcgtgtgttctcactgatgtgtaggagctaagctatgaggaygcaaaggcataagaatgatacagtgaactttggggacttgagggaagagtgggagggggcaagggataaaagacaaccaatatggtgcactgtattctcc

SEQ ID NO: 113395 - DNA, 201 bp, Homo sapiens
atgtgtaggagctaagctatgaggatgcaaaggcataagaatgatacagtgaactttggggacttgagggaagagtgggagggggcaagggataaaagacwaccaatatggtgcactgtattctcctcgggtgatgggtgcaccaaaatctcacaaaccaccactaaagaacttactcatggccgggcgtggtggctcatg

SEQ ID NO: 113396 - DNA, 201 bp, Homo sapiens
gttgaaatttaatccccaaggtagtagttgggagaggtggagcctttaagaggtgattggttcgtgaaggctctgccatcatgaatggattaatctgttcrtggattaatgggcttatggattaatgagttatcgtgagaaaggaactgaaggcttcctaagaagaagttaccatattagcatgcccagttcctttgccat

SEQ ID NO: 113397 - DNA, 201 bp, Homo sapiens
taaggctcagatgtgtaaacaatttccatgatactttaaggaaaacatttcctaggacctttatcaatcaataaagttttaattactttaacgacatgcayaagcatatggcaaatgaagataaagcaaaaatttgttccagctgggtacggaggctcacacctgtaatcccagcactttgggaggccaaggtcagcaaaa

SEQ ID NO: 113398 - DNA, 201 bp, Homo sapiens
cgtgtcactctggcacggggctctacagaacatgtcgagcgtgttgccttccctactgcccacatcgtttgagagaacacattttaaacatttttttattrtggtaaaatacacataacataaaagttacgattttaaccttttttaactctgtcatccaggctggagtgcagtggcgagatcttggttcactgcaacctc

SEQ ID NO: 113399 - DNA, 201 bp, Homo sapiens
atgtttcacattaaactagcccctaagggaccagtgggggctgtcagagaacaaggtttcaacgtactgagttttaaagatctaattggcttttaataacrattcatgaaccaggcaccatagtctacaaaatagacagggtttctgctgggcactgcaggacagttggtttttggaaggtggcttgagcaggaacaagga

SEQ ID NO: 113400 - DNA, 201 bp, Homo sapiens
ttagcacctgggccacagactgccatggctgtgtacctcgatgcccctgggggtcaggagaacacatgggcagcagcaagggaagcagcagctgaggggaygggcagggtcactgcccttgccttagcagcaaccagggcaccagggaaactcccctggggaactccctggtctctctccttcctttctgcaaacctctgt

SEQ ID NO: 113401 - DNA, 201 bp, Homo sapiens
gactgccatggctgtgtacctcgatgcccctgggggtcaggagaacacatgggcagcagcaagggaagcagcagctgaggggacgggcagggtcactgccyttgccttagcagcaaccagggcaccagggaaactcccctggggaactccctggtctctctccttcctttctgcaaacctctgtctgcaaaggaccgcccc

SEQ ID NO: 113402 - DNA, 201 bp, Homo sapiens
ccctggggaactccctggtctctctccttcctttctgcaaacctctgtctgcaaaggaccgcccccgtggctgacctggggatgcacttcacaaacagtgyctgtacagctgccccaagtggccagtgatggtcaccaagctagttgtattgctaagagagcttgcacctgtcccttgataagtgggacttaagcagcaac

SEQ ID NO: 113403 - DNA, 201 bp, Homo sapiens
acagatgggagcctcaagagaccacctgccaaacacaggcccaaactgacagctctggggtccagtcagttcacaacagttttcatcttgggatgagatascaaacaatcaacaaagacaacacagcatttcataggccagagtgcaaatcttccagtaattgtcaattctatcccaggcagcctgcgtggtattagtgaa

SEQ ID NO: 113404 - DNA, 201 bp, Homo sapiens
aaacacaggcccaaactgacagctctggggtccagtcagttcacaacagttttcatcttgggatgagatagcaaacaatcaacaaagacaacacagcattkcataggccagagtgcaaatcttccagtaattgtcaattctatcccaggcagcctgcgtggtattagtgaagttggttagccgagagcagttaatgaaatc

SEQ ID NO: 113405 - DNA, 201 bp, Homo sapiens
agcctgcgtggtattagtgaagttggttagccgagagcagttaatgaaatctgaccaaatgtccttgattgtggttgggtcatcctgttcattatgccagktgtttcttttcttttatttttcttgcctttttttttatttttttatttttggagacagggtctcactctgtcccccaggctggagtgcagtggcatgatc

SEQ ID NO: 113406 - DNA, 201 bp, Homo sapiens
tttttatttttttatttttggagacagggtctcactctgtcccccaggctggagtgcagtggcatgatcgatcagagctcactgcagccttgaactcctgkgctcaagtgatcctcctctctcagcctcccaagtagctgggactacaggcacacaccaccatgcctggctaatttttaagttttttgagactgggtctca

SEQ ID NO: 113407 - DNA, 201 bp, Homo sapiens
ctgggctgtttggtacagcccattgctccaggactacacacctgcccagcatgggaccaccctgaatacagcaggcggctgtaacacagtgctatttgtgwgtctaaacatatctcaacatggaaaaggtatggtgagaagatggtggtctaatctttatgggaccaccatcatatacatggtctgtcctgtgactgtacg

SEQ ID NO: 113408 - DNA, 201 bp, Homo sapiens
taacacagtgctatttgtgtgtctaaacatatctcaacatggaaaaggtatggtgagaagatggtggtctaatctttatgggaccaccatcatatacatgrtctgtcctgtgactgtacgttaatgtgtcatgttctctctcttctctgtggctgtgctattccctctgcctagaatgcttttccctcgctaccatgtcaa

SEQ ID NO: 113409 - DNA, 201 bp, Homo sapiens
gcttgtcaacaacgcagacttctgggcccctggagattccaactaaggcggtctgggggagagctcagcactctgactgacaggcaggagagctgagagcsaggcaagcctgggtcagatggtgaccgctctagctgtaaaaagataacatacacagcctcaggcaaagaccacacttttagcttcagtttcccagataat

SEQ ID NO: 113410 - DNA, 201 bp, Homo sapiens
ctgggcattgtggtgcatgcctgtagtcgcagctactcgggagactgaggtgggaggatggcttgagctctggaggcggaggtcatagtgagccaagatcrtgccactgaactccagcctgggcaacagaggcagattctttctctctaaaaaacataaaataaaaaaaggccaggcgcagtggctcacacctgtaatccc

SEQ ID NO: 113411 - DNA, 201 bp, Homo sapiens
tggcatgatcgatcagagctcactgcagccttgaactcctgtgctcaagtgatcctcctctctcagcctcccaagtagctgggactacaggcacacaccascatgcctggctaatttttaagttttttgagactgggtctcactgggttgcccaggctgctcttaaactcctgcctcaagtgctcctcctgcctcagcctc

SEQ ID NO: 113412 - DNA, 201 bp, Homo sapiens
ccagcatggacaacacagtgaggccctatatcttacttagcttggtgtggtggcacatgcctatcttcccagatacttgggaggctgaggtgggaggatcrcatgagcctaggagttccaagttactgtgagatgcactccagcctggatgacagagtgagaccctctgtctcttatttttatttttttgagacggagttt

SEQ ID NO: 113413 - DNA, 201 bp, Homo sapiens
gtcccaagctcccaacctcaggtgatccgcctgcccctgtctcttattttaaaaaaataaataaaaaataagcaggaattgtgcctaatctcttgataagsagcattgtttagctgggggatcttatccttaagagcagagtttggagaggaatttgtagtccagctcttctgattttaccagatgccaaggcagcatgtg

SEQ ID NO: 113414 - DNA, 201 bp, Homo sapiens
aataagcaggaattgtgcctaatctcttgataagcagcattgtttagctgggggatcttatccttaagagcagagtttggagaggaatttgtagtccagcycttctgattttaccagatgccaaggcagcatgtgacactgaaccttaattttaggtcttacaccacggagtgtgtgctttttaaaatcacactttgtttc

SEQ ID NO: 113415 - DNA, 201 bp, Homo sapiens
agagcagagtttggagaggaatttgtagtccagctcttctgattttaccagatgccaaggcagcatgtgacactgaaccttaattttaggtcttacaccayggagtgtgtgctttttaaaatcacactttgtttctttctttctttctttttttttttcctagctgaagaatgtgatacaattactttgaactgcccacga

SEQ ID NO: 113416 - DNA, 201 bp, Homo sapiens
cagctcttctgattttaccagatgccaaggcagcatgtgacactgaaccttaattttaggtcttacaccacggagtgtgtgctttttaaaatcacactttstttctttctttctttctttttttttttcctagctgaagaatgtgatacaattactttgaactgcccacgaaattcagatatgaaaaatcaggtaagaata

SEQ ID NO: 113417 - DNA, 201 bp, Homo sapiens
tgtagtttacttttagggattttccaaaaccacttaagatgaggtacagaatatatgttagcacactgttcagcatttttcctaatttcagtgttataatkttggctatatcaagtaaatactatcctaaaaggtgaaaatatatttatcaactaaaaaaataggggaaatacctctttgagatttttaaagttctatttt

SEQ ID NO: 113418 - DNA, 201 bp, Homo sapiens
ttacttttagggattttccaaaaccacttaagatgaggtacagaatatatgttagcacactgttcagcatttttcctaatttcagtgttataattttggcyatatcaagtaaatactatcctaaaaggtgaaaatatatttatcaactaaaaaaataggggaaatacctctttgagatttttaaagttctattttaaaaca

SEQ ID NO: 113419 - DNA, 201 bp, Homo sapiens
ggtctgcctcaaaggctgcctgggatcacataaagactgtgaagatgcagagcccttcccagcagattccttgcttttctctgtggaatataattcttctytcatgaaatgtttgtgaaattatcttttaaaagaacaggggcattatttttaaaaacaatttatttacaaaatatttaataggaagaaaaaagaaataca

SEQ ID NO: 113420 - DNA, 201 bp, Homo sapiens
tgtacagatgacaaatacgctacctacaaataccattttgaatattttttcaaaatggctaaaagtataaacttacacaatctgtagcattaacttcgacrccagcatcaagtagcattcgtacaagagcctcattctgctttgtctttgatacctattacaaatggtaattataagaaaggcttatttacaaatagtttc

SEQ ID NO: 113421 - DNA, 201 bp, Homo sapiens
aaatatgaaaatttaagcagaaaataatggttcatgtttgactccatttgaaaatggttaagttcacagctgatccaagaaacctctctgcttttacaatrgagtaggaggcctttttagctgaggctgtctccctaaacaaggtactgggcttctcaggagcaagatgaagtagatttagtcaagagaagagtgtagtct

SEQ ID NO: 113422 - DNA, 201 bp, Homo sapiens
tttccaccatgccagagctggctcagaaaatcaaaatgtattttgctttagcacccatagccactgttaagcatgcaaaaagccccgggaccaaatttttsttgctgccagatatgatgatcaaggtatgagactcctcagaaaacttcctgtgtacgtagaaaaatcttccagcccaatttcctaaaacataaactttta

SEQ ID NO: 113423 - DNA, 201 bp, Homo sapiens
catatgttaagcaacttgcccaaaacgtctgtgctagtgcttgctagtgagttgtaaaacctgcactcaaatcaaatctgtctctctgccattatagcccrtgttcttaactaggaccagaaaatgctggacaaatgctattgggctttggtgtaaagaaacgttggggttctgttttactccaatttgtacttgtgtagc

SEQ ID NO: 113424 - DNA, 201 bp, Homo sapiens
catttcttgacttattttagcgcttaacccattccccaaaactcctcctatgtagacattctaaaatatttactgacaattccttgaacagaccatatcarcctctgattatgaagaattcaagcttctttatggcacctggtacccgctcctgtatactctgtattcctcatctaaagagcacttaaaatatttaagatg

SEQ ID NO: 113425 - DNA, 201 bp, Homo sapiens
cctgaaatctgtcaccttgtgcttccttcagacctgctcttttcatcttcagaatcatgtagtccccagcaatgtgtctagcatatagacatatgtgctasatatagcatatctctgtgctatatgtgtctagatatagcatatctctcaatataaatattttctcaaagccaacatcgtgttattcaattatttatttaa

SEQ ID NO: 113426 - DNA, 201 bp, Homo sapiens
agccaacatcgtgttattcaattatttatttaactcattgagcacctactacttgaaagcaaatatgctggtgtcataaggaccttataattttataggaraggtaagatgcagtcacatatatacttattgaaatatgtatttaaaagcaaaatatacattttatgagttctaaaaatatttcgtattcatgttgacata

SEQ ID NO: 113427 - DNA, 201 bp, Homo sapiens
ggctcacgtggatttcatctggggtttggatgctcctcaccgtatgtacaatgaaatcatccatctgatgcagcaggaggagaccaacctttcccagggayggtgtgaggccgtattgtgaagcatctgacactgacgatcttaggacaacctcctgagggatggggctaggacccatgaaggcagaattacggagagcag

SEQ ID NO: 113428 - DNA, 201 bp, Homo sapiens
tcagacaacttgttatttacctttgtggccaggtgattcttgatcagatttgtagtaatatcatgttacttctgggtggattcaacaccaacaatatgaayatggtaagtgggagcctagtaaattcccagcatcccagcataaagctgggagtcatatggctcacccctggagggagagctaatgccagtgaagactcag

SEQ ID NO: 113429 - DNA, 201 bp, Homo sapiens
cgtgcatgtacatatttttgtttcatagataattgctgataacttaataatgttaccatttcttagtctgacaccctggagatttggtcttgacagggtayacatcttgtgagtttttctatgtcccccagaatactcatggtttgttacagagccgagcaagtgtatatgctgcccacactcttgctggaacatctgtgc

SEQ ID NO: 113430 - DNA, 201 bp, Homo sapiens
gatagaatccagtcgttaactttttctgtatctccatcggtgtggtcacaaggattacaatgctttccttagcattaattcaatctgggaaaattttaatmtccgtgcaatatccagtgagctctcaccatgctgaggggggaaaaatatacagttatttccaatagagtgcccaagatctcgtacgtagcttagaccaat

SEQ ID NO: 113431 - DNA, 201 bp, Homo sapiens
gaagatagaatccagtcgttaactttttctgtatctccatcggtgtggtcacaaggattacaatgctttccttagcattaattcaatctgggaaaattttwatctccgtgcaatatccagtgagctctcaccatgctgaggggggaaaaatatacagttatttccaatagagtgcccaagatctcgtacgtagcttagacc

SEQ ID NO: 113432 - DNA, 201 bp, Homo sapiens
atgtctatttgaaacataaattatgagcctgaaagtccaaatgttacctagagttaagaactattccttttctctagccaactcctgtaaggtacagagtyagagatatgacggtccctacagcaatgtggacaggaggtcaggactggctttcaaatccagaagacgtgaaaatgctgctctctgaggtgaccaacctca

SEQ ID NO: 113433 - DNA, 201 bp, Homo sapiens
tgctgctgctagaggaacctcagaccacggtccaccctcccttaccttattctttattgtggggtctgcacgggcttccaagagcagagggataagagackggtttttcatttcacaggcataatgtaatgcggtacagccatactgaaacacaaagggccaaaacttcagctcataagtcgggccctccacagaccatag

SEQ ID NO: 113434 - DNA, 201 bp, Homo sapiens
tgaaaactctgcctcctagctttgagccattctcttgcctcagcctcccgagtagctgggactacaggtgcacgccaccatgctcagctaattttttttttgtacttttagggatggggtttcaccatgttggtcaggctggtctcaaactcctgacctcaagtgatccacctacctcagcctcccaaagtgctgggatta

SEQ ID NO: 113435 - DNA, 201 bp, Homo sapiens
atttgcccctaagtacttcagtgagtattttctaagaacaagagtattctcttctataactgcaatacctttatcaaagttagaaaacaaacattgattgacattagtgtttaattcgtagtctatatccaaattttgtcaattgtcccaaagtcctttacagctgttttccctcctctggtccataatctaatccaggat

SEQ ID NO: 113436 - DNA, 201 bp, Homo sapiens; identical to SEQ ID NO: 18940

SEQ ID NO: 113437 - DNA, 201 bp, Homo sapiens
tttgacgtgtggatggggaacagcaggggaaacgcctggtctcgaaaacacaagacactctccatagaccaagatgagttctgggctttcaggtatatgayaatctcgagaacagaggtagacatgtctgtctttcaaaaaaaatgggtaaaaaattacggcttctagtatttggttgatttattttggttgagtcatcat

SEQ ID NO: 113438 - DNA, 201 bp, Homo sapiens
gatttctcagacaacttgttatttacctttgtggccaggtgattcttgatcagatttgtagtaatatcatgttacttctgggtggattcaacaccaacaayatgaacatggtaagtgggagcctagtaaattcccagcatcccagcataaagctgggagtcatatggctcacccctggagggagagctaatgccagtgaag

SEQ ID NO: 113439 - DNA, 201 bp, Homo sapiens
aaacataaattatgagcctgaaagtccaaatgttacctagagttaagaactattccttttctctagccaactcctgtaaggtacagagtcagagatatgayggtccctacagcaatgtggacaggaggtcaggactggctttcaaatccagaagacgtgaaaatgctgctctctgaggtgaccaacctcatctaccataag

SEQ ID NO: 113440 - DNA, 201 bp, Homo sapiens
tatttgcccctaagtacttcagtgagtattttctaagaacaagagtattctcttctataactgcaatacctttatcaaagttagaaaacaaacattgattgacattagtgtttaattcgtagtctatatccaaattttgtcaattgtcccaaagtcctttacagctgttttccctcctctggtccataatctaatccagga

SEQ ID NO: 113441 - DNA, 201 bp, Homo sapiens
ctatttgcccctaagtacttcagtgagtattttctaagaacaagagtattctcttctataactgcaatacctttatcaaagttagaaaacaaacattgattgacattagtgtttaattcgtagtctatatccaaattttgtcaattgtcccaaagtcctttacagctgttttccctcctctggtccataatctaatccagg

SEQ ID NO: 113442 - DNA, 201 bp, Homo sapiens
gaccttgtgatccacccacctcaacctcccaaagtgctgggattacaggtgtgagccactgtgcccggcctatacatttttttaaggttaagtatacaatkgtgtctcacacacatacatgcacacatatacactgcattccataatattcggttaattgagttttaattatagtggtagttaatgcttattgagttccta

SEQ ID NO: 113443 - DNA, 201 bp, Homo sapiens
cctatttgcccctaagtacttcagtgagtattttctaagaacaagagtattctcttctataactgcaatacctttatcaaagttagaaaacaaacattgattgacattagtgtttaattcgtagtctatatccaaattttgtcaattgtcccaaagtcctttacagctgttttccctcctctggtccataatctaatccag

SEQ ID NO: 113444 - DNA, 201 bp, Homo sapiens
gcacctggtacccgctcctgtatactctgtattcctcatctaaagagcacttaaaatatttaagatgttgcctagctttttactaagggcttttgaaaaaygaaagttctatacatacattttattttattttattttattttattttattttattttatttttgaggtggagttttgcacttgttgcccaggctggagtg

SEQ ID NO: 113445 - DNA, 201 bp, Homo sapiens
cagtccacagtgacccacacgttctctcccttgagagacaaaatgaggcagatggaattcatgaagactgtcaagatgctggatgagtttggtgtagaaggcttttgtcctacagggagactgcatgtgtgtttggtgcccgtttatagcaataacaacaagagctacccatctgatctgaggtcgggcagcatgctgagt

SEQ ID NO: 113446 - DNA, 201 bp, Homo sapiens
ctccctctggaccactgtttcatcagatgtctatgcagcttgccttggcccttctttcagccaactttatcagagttcttccctggccaccctattcaaarttgcagctctttgctacctattgagttctagccccttaccctgcttacttttccatatagcacttaccatcacctgatataatagatatttgcatgtttg

SEQ ID NO: 113447 - DNA, 201 bp, Homo sapiens
tccttgttccagtccgtgcagaatacttccctctagtggccaatgttgttggcatgtgcctcttcagaggcaatctcccatatcaaaaaaaaaaaaaaaaattcaccaaccaagaaagccaatgaaattcttattgaaaacaactgaaaaatgtttactgtaaagcttatagcttgtggtagcggcctttttatctttatc

SEQ ID NO: 113448 - DNA, 201 bp, Homo sapiens
aatacttccctctagtggccaatgttgttggcatgtgcctcttcagaggcaatctcccatatcaaaaaaaaaaaaaaaaattcaccaaccaagaaagccartgaaattcttattgaaaacaactgaaaaatgtttactgtaaagcttatagcttgtggtagcggcctttttatctttatcaaagaatcttagttggcttca

SEQ ID NO: 113449 - DNA, 201 bp, Homo sapiens
ccctgtgaggaatatgaagtcgcaactgaagatgggtatatcctttctgttaacaggattcctcgaggcctagtgcaacctaagaagacaggtgtgggtcrccccatgtcaccgcaacacagcagtcttctctgcagtcacgatttccttgtgatttgaatgtagaagagagcctgggttcttagtgcagagtgaggtcca

SEQ ID NO: 113450 - DNA, 201 bp, Homo sapiens
gcttcataggtttgaaagaaatccattctgagtgttgtgagggacacggtaacaagctgtcagagttgacaactcaagggcttgtttgtaaacctggtgtsggggggagcttttgtttgtttctgattataatttttcatataactttgtcttttccccttgtagttatgatgagatggctaggtttgaccttcctgcagt

SEQ ID NO: 113451 - DNA, 201 bp, Homo sapiens
  misc_feature (1)...(201): n = A,T,C or G
ttataattttataggagaggtaagatgcagtcacatatatacttattgaaatatgtatttaaaagcaaaatatacattttatgagttctaaaaatatttcntattcatgttgacatatttcttcttttgcaggctttattgcattttccaccatgccagagctggctcagaaaatcaaaatgtattttgctttagcaccca

SEQ ID NO: 113452 - DNA, 201 bp, Homo sapiens
ggcaaaaaagaatttctgtatcagaccagatttctcagacaacttgttatttacctttgtggccaggtgattcttgatcagatttgtagtaatatcatgtyacttctgggtggattcaacaccaacaatatgaacatggtaagtgggagcctagtaaattcccagcatcccagcataaagctgggagtcatatggctcacc

SEQ ID NO: 113453 - DNA, 201 bp, Homo sapiens
atttagataagccagggattatttcacacttattctaagatgaaatgcagtatcgtcgatgctattttgatggagaatttgatctagatcactgaaacttytcaagaaatgggaagaaaggacagaagtagcctaagaacttctttagatcttaaaagtatgaatttagatgatccaagtgagacttctctctgtctctag

SEQ ID NO: 113454 - DNA, 201 bp, Homo sapiens
ctttgagaccctcacatcataaattaacatccgctgccatatgtctatctagatgtaaaatgctaggaaactggacaaactgtgcagtgcccctggatagygaactctcaatctctggtatcagctgcttctcttgaagtctttcttcactgtttcccaaaatatgtctttagagaaagtatttctgttcaaagatgtttt

SEQ ID NO: 113455 - DNA, 201 bp, Homo sapiens
tgtaaaccgaaatctctagtggtatgctggtaaacgaactttatggaaagtaaaaaacaaaaaaacaaaaacaaactctgatttgtcaatttgccaatttytgtggtgtaaacacactcaccgctgacacttgatagatgtttttattgaaattccttcaccaaaggaatatttacttgtgaatctctaagcccacacaca

SEQ ID NO: 113456 - DNA, 201 bp, Homo sapiens
agattccttgcttttctctgtggaatataattcttctttcatgaaatgtttgtgaaattatcttttaaaagaacaggggcattatttttaaaaacaatttrtttacaaaatatttaataggaagaaaaaagaaatacaaggcattacatgtttttatgtgttttgtcatttgatctagcaagttattacagatattatccc

SEQ ID NO: 113457 - DNA, 201 bp, Homo sapiens; identical to SEQ ID NO: 18942

SEQ ID NO: 113458 - DNA, 201 bp, Homo sapiens
gtactttttctatgtttagatacacacgtacttaccattatgttataattgcctacagtatttagtacagtgccatgcagtataggcttgtagcctaggarcaataggccataccttacagcctaggttgtactaagctactccatctaggtttgtgtaagtactttctatgatgtttgcaaaatgacaaaatcatctaag

SEQ ID NO: 113459 - DNA, 201 bp, Homo sapiens
tctgatcatagctcactgcagccttgaactcctgggcttaaactatcctcctgcctcagcctccgaaatggcttggactacaggtgtgtgccagcatgccyggctaagttttaaacatttgtttagagatgggctcactatgttgcccaggctggtcttgacctcctgagctctattattccccccacttcagcctcccaa

SEQ ID NO: 113460 - DNA, 201 bp, Homo sapiens; identical to SEQ ID NO: 18943

SEQ ID NO: 113461 - DNA, 201 bp, Homo sapiens
ggaggccgaggcgggcgaatcacgagatcaggaaacggagaccatcctggctaacatggtgaaacccccgtctctactaaaaatacaaaaaaaaaaattarccgggcgtggtggcaggtgcctgtagtcccagctacttgggaggctgaggcaggagaatgacatgaacccaggaggcagagccaagggctctgttttttc

SEQ ID NO: 113462 - DNA, 201 bp, Homo sapiens; identical to SEQ ID NO: 18948

SEQ ID NO: 113463 - DNA, 201 bp, Homo sapiens
tggaatagcctgaatgtgctcatgttaatgtccctgagcaaccctcagccaatgggagtgggagttactgggtaaactttccagcttccttgcttctcagrgtgacaactgtaaggtgtgttctacacagtctgtcaagtggttctagaaagatggaagccccaactagtcacagtgtccaactcattagcgtgtccatat

SEQ ID NO: 113464 - DNA, 201 bp, Homo sapiens
tcagtccttaggggctaggagaggagaggagaggatatgctggatgatcactttctgcaagtctccagaacctcctgttgacttctgtgtgatggtcaacytgagacgtcttgttcagtgcaaatgaatgtgttctttttggctgacacatttagtaggaacaaatgaatgtgaaagagtaggagatgctataaggtaggg

SEQ ID NO: 113465 - DNA, 201 bp, Homo sapiens
taaagtatacatacatataaacctaatactgtttattttatttccaagaatgacttgccattagcatcagtcagggccaagaacacacacttagaacaggmcaatggctacaagcaagattgactgatcagctcttgacctatgtgctctcctatgtgctatatgctcttccacctgccagcctttcctgctcttgctttt

SEQ ID NO: 113466 - DNA, 201 bp, Homo sapiens
ttgccaattaagggcgtattttgcttcccaaatttgttatttcctagaacatcactagcaggatttgaataaagtatacatacatataaacctaatactgyttattttatttccaagaatgacttgccattagcatcagtcagggccaagaacacacacttagaacaggacaatggctacaagcaagattgactgatcagc

SEQ ID NO: 113467 - DNA, 201 bp, Homo sapiens
ttgttgtgtctaatttgggctgcaagcggtttttggtgtcaatgactaaccactgtttggtctgcacagccatttctgttgaacttggatagcgctgaaarcccagtttcccccaaataaagtctaaatacatttacacatttattcccacatgcatctttgtgtttctgcctgtctcctcacacctcacacatgtgtgtg

SEQ ID NO: 113468 - DNA, 201 bp, Homo sapiens; identical to SEQ ID NO: 18950

SEQ ID NO: 113469 - DNA, 201 bp, Homo sapiens
aaagaaactgcttgcaccaaacctttgtctcaggctctacttcaggggacccccagctaaatattattaacgttggatagagtctcagaagcagaattacyaagttaaaccagatggattccttaaagattcgggacacatatagattggcaagtaatttccatatgggggttttcagagctcttttactaatctctgatt

SEQ ID NO: 113470 - DNA, 201 bp, Homo sapiens; identical to SEQ ID NO: 18951

SEQ ID NO: 113471 - DNA, 201 bp, Homo sapiens
agcatacttggtctatggacatgtggaatagcctgaatgtgctcatgttaatgtccctgagcaaccctcagccaatgggagtgggagttactgggtaaacwttccagcttccttgcttctcagggtgacaactgtaaggtgtgttctacacagtctgtcaagtggttctagaaagatggaagccccaactagtcacagtgt

SEQ ID NO: 113472 - DNA, 201 bp, Homo sapiens
atctttcatccccaagtctccaggatctacttgagagatgattggcaagtaaattccccaatgcagaggtccctcctctggtggaatggtgagtctctaayagaagaaggaaatttgctgacactggagtcactggctaactattgaagatggtatcaaagctaatcagcagacagaagagccagtctggaggacatgact

SEQ ID NO: 113473 - DNA, 201 bp, Homo sapiens
tcctgattccaaggtattgtggtacaacctaggcatatgcccatgtttcttttcaaactccacattaacaaatgacaccatatactcttgaaggcaaggayggggtcagctcttactcatcatagtgacacgaggacctagtacagaccttggcacacagtaaatgttgttgaacaaaataaaaatgaagagtaggtcatg

SEQ ID NO: 113474 - DNA, 201 bp, Homo sapiens
ccaatgtctgtgttcccatctttatgtccatgtgtacccaatgtttagctcccacttgtgagaacatgtggtatttgattttctgtttctgcattaatttkcttagaataatggcttccagctgcatctatattgctgcaaaggacatgatttcattcttttttatggttgtgtagtatttcgtggtgtgtatgtaccaga

SEQ ID NO: 113475 - DNA, 201 bp, Homo sapiens
ataatagcacagtagtgtgcacttaccacagactgctggctctataagatatcctgacaagggacaacaaagacagtgagggtggcacttctgtgttcaamaatgtgtgaacattgcatattctgcttcccccttggaaattcttaaagatattggcatacttaagaccagaaagagtcttgcaataggaagagctgctta

SEQ ID NO: 113476 - DNA, 201 bp, Homo sapiens
tgataagccatatagatgacggagtttgttgtttctgacacgcttgtcactaactattgtcaggaaggatttactaagatgtagagtcaggaaagttggcragggatgtacgtcgtgccaaagcagagatgaggagaggaaactctaatggcctctctctctcttattgaattcttgtaggtaaaaggcagctgaaggcag

SEQ ID NO: 113477 - DNA, 201 bp, Homo sapiens
caagtatcttcttagttctaggccagcctcctccacttaacctctctgtaatagttcccaaactccactcttcaaaactcctagccccacagttgcctgcrttgcctcctcttttctttgtctgcttgctttgttagccagaaggcagagagcacgaaggcatgttagtacctgcagtgatggctctgcactccaagaagg

SEQ ID NO: 113478 - DNA, 201 bp, Homo sapiens
attgtcatgaggagtaggacagacagagaagagcaggtgggagagttgctcacagcctcgcaggctttcaggactggccccccgtcatttgctaacaatgyctcttttgacgatgtccaaagggtcttcctcatccactttttcttcctaggagccaaagtaccaaaaggaggaattttgaggctctattaaacagttata

SEQ ID NO: 113479 - DNA, 201 bp, Homo sapiens
cttgtaagtgtggagccctgtatgactgtgtaggacccacacccatgaacctggccctgtctctgctacattgtgtcatttagaaatctgaattgatgtcsgttttagtggctgcataatatttcattgtgcagatttaccataatttctataacaattgctgtattcttggatatttttatggcattgaatgaagcaatc

SEQ ID NO: 113480 - DNA, 201 bp, Homo sapiens
ctgcattaatttgcttagaataatggcttccagctgcatctatattgctgcaaaggacatgatttcattcttttttatggttgtgtagtatttcgtggtgwgtatgtaccagattttctttatctagtccaccattgatcagcacctgggtcaattacatgtctttgctattgtgaataatactgcaatgaacattcaagt

SEQ ID NO: 113481 - DNA, 201 bp, Homo sapiens
aaccctgaagtatgggcctatcatcaaatattggattaatgaaaggcaaaggaactaaaatgtttccatctatcagaaataatttagaatccaggggcatrggggagtctaaggagagggtttccaagatatttaactctcttaacttcatggaaaatatttcaggatgaactttgccaattataactaagccaataaata

SEQ ID NO: 113482 - DNA, 201 bp, Homo sapiens
tcaagagatctggttgtttaaaagtgtgtagcatgtccttgtttgctctcttcctcctgctccagccatataagacgtgccagcttcccctttgccttctkccatgattgtaagtttcctgaggcctccccagcctcctgtacagcctgtggaaccatgagccaattaaacctcttttctttataaattacccagtttcat

SEQ ID NO: 113483 - DNA, 201 bp, Homo sapiens
agtatttcgtggtgtgtatgtaccagattttctttatctagtccaccattgatcagcacctgggtcaattacatgtctttgctattgtgaataatactgcratgaacattcaagttcaagtgtctttttgatagaacaatgtattatcctttggatataaacccagtaataggatgctaggttaaatagtagttctgagtt

SEQ ID NO: 113484 - DNA, 201 bp, Homo sapiens
caaaacacagaggtttaaataaaatagaatgtatttctctccatacgacaatcttaggatagtccagggcaggtaggcaattccgttccacaaggtcataaggagaacaggctagaggagcagccctctcttccttaacatgtaatttctgaattttggtcccagtgagtcctgtacttttcatcatttccgagccagaga

SEQ ID NO: 113485 - DNA, 201 bp, Homo sapiens
atttgttttccaaacatttcctccatacctttgttttttccttctcccacattggctgttgtatagacacctcattgctattcagacacctgtcactttcrgatgtcagtgtggctgttgccacactgattagttaagatgaagaaaaaaatgcagtggcatataaataaaaaattagagactgtcacattgtttaaaaag

SEQ ID NO: 113486 - DNA, 201 bp, Homo sapiens
attgctattcagacacctgtcactttcggatgtcagtgtggctgttgccacactgattagttaagatgaagaaaaaaatgcagtggcatataaataaaaamttagagactgtcacattgtttaaaaagggcccacctcccaatgccagatctcggcagagcagcgtccttctctttcctaggtaacccagctaaggggacc

SEQ ID NO: 113487 - DNA, 201 bp, Homo sapiens
agtgtgtagcatgtccttgtttgctctcttcctcctgctccagccatataagacgtgccagcttcccctttgccttctgccatgattgtaagtttcctgargcctccccagcctcctgtacagcctgtggaaccatgagccaattaaacctcttttctttataaattacccagtttcatgtatttatttacagcagtgcaa

SEQ ID NO: 113488 - DNA, 201 bp, Homo sapiens
aaagtgcctctaagaacactcatcctctattttgtgtaatgaagcctctggtgaaaaatggagtctgacaggtatgtggacagaaatgccctgcaggggcrggcagaactggctgtgttagccggcaggtagatggacaaatagatggataaagtctttggtaaacatggagcattactcaacagcaaatttaccacctct

SEQ ID NO: 113489 - DNA, 201 bp, Homo sapiens
atcggcttggccagctgggaatgctggaactggtattctcagcctgtggactcaagagagcactgggccaggagggtttcagtgtttccaagtcaatgccraaggcacgtacaccggtggatgggaaagacattgatttttcttgagataatacctcaagtgtatttgttcagtgtctttcagaaacaaagccttgtctga

SEQ ID NO: 113490 - DNA, 201 bp, Homo sapiens
tattttagacacctctgtatgttcttaaaaaaaaatctctccttttcaatattgtcagctaagtcctcccaggggaacacttggggagaagttatctccarcctgagacccccttggtaagctgcaaaaagttggaggtcactcagagtaatggtgtctaagcagaacttgatttctgcattttttttttcatcatagaat

SEQ ID NO: 113491 - DNA, 201 bp, Homo sapiens
gaggcgcggtggctctccaatgtggatgggacgcattggctggaatatataagggtaaagagatccagcactttatatgctttccagttaagacttctttrtgcctgtgccataaatacgtatatctccaagtgcctcttggctgtgtgcatgaactttcttattcaatagtttccatggacagcatcagactggggtctt

SEQ ID NO: 113492 - DNA, 201 bp, Homo sapiens
ctgcacgagacaggcatatggtggtctcgggtttgagaggacctgatgctattatttcactagaagccgaggttggcaaaacaaaatgaaaaaacaaacaaccgacctccatgttaaaacccagggtccactgcatcttgtttgttttcatgctgaaatgccctgaactgaactgtcgtcttctcaatttgaagccaacat

SEQ ID NO: 113493 - DNA, 201 bp, Homo sapiens
gatttaagacaaaaaagaaactagtgaacaaaaatggaaagcagaaaaataagcttataaacctgaacatacctttgattctcaacaaatacctaattatrtaaacaatctgtttgctatgactccctcttttacgatttcctataactaagtataaggggaacttcagtcataccctcaaaaagtagtagagaatgacaa

SEQ ID NO: 113494 - DNA, 201 bp, Homo sapiens
cctgcacgagacaggcatatggtggtctcgggtttgagaggacctgatgctattatttcactagaagccgaggttggcaaaacaaaatgaaaaaacaaacaaccgacctccatgttaaaacccagggtccactgcatcttgtttgttttcatgctgaaatgccctgaactgaactgtcgtcttctcaatttgaagccaaca

SEQ ID NO: 113495 - DNA, 201 bp, Homo sapiens
ctccctcttttacgatttcctataactaagtataaggggaacttcagtcataccctcaaaaagtagtagagaatgacaaaggagtagcaacaacaagttakcatgctattgtattaccagttggcattgctggtttcactgaatcatcctagagaaaatgcttctttcttagatactgagcatgatgccatagctgcgtgg

SEQ ID NO: 113496 - DNA, 201 bp, Homo sapiens
tcctgcacgagacaggcatatggtggtctcgggtttgagaggacctgatgctattatttcactagaagccgaggttggcaaaacaaaatgaaaaaacaaacaaccgacctccatgttaaaacccagggtccactgcatcttgtttgttttcatgctgaaatgccctgaactgaactgtcgtcttctcaatttgaagccaac

SEQ ID NO: 113497 - DNA, 201 bp, Homo sapiens
ctcctgcacgagacaggcatatggtggtctcgggtttgagaggacctgatgctattatttcactagaagccgaggttggcaaaacaaaatgaaaaaacaaacaaccgacctccatgttaaaacccagggtccactgcatcttgtttgttttcatgctgaaatgccctgaactgaactgtcgtcttctcaatttgaagccaa

SEQ ID NO: 113498 - DNA, 201 bp, Homo sapiens; identical to SEQ ID NO: 18975

SEQ ID NO: 113499 - DNA, 201 bp, Homo sapiens
ttgtaaatgtatcatgagtcttaagtaagtaagtaagtaagtaagtaagtattttggctgaaacaggaaatactgattgattgattgattgattgattgatgattgtaaagtcagaaacgccctcagctctaaccttgagaaaacgtggacgacttggggaaaggtctggagacacctgagaggagccagtcagggtgatg

SEQ ID NO: 113500 - DNA, 201 bp, Homo sapiens
accccgtctctactaaaaatacaaaaattagccagatgtgttagcgggcgcctgtagtcccagctactgagtaggctgaggcaggataattgcttgaaccygggaggcagaggttgcagtgagccgaggtcatgccactgcactccagcctgggcaacagagcaaaactccgtctcaaaaaacaaaacaaaacaaaaaccg

SEQ ID NO: 113501 - DNA, 201 bp, Homo sapiens
attgtaaatgtatcatgagtcttaagtaagtaagtaagtaagtaagtaagtattttggctgaaacaggaaatactgattgattgattgattgattgattgatgattgtaaagtcagaaacgccctcagctctaaccttgagaaaacgtggacgacttggggaaaggtctggagacacctgagaggagccagtcagggtgat

SEQ ID NO: 113502 - DNA, 201 bp, Homo sapiens
gtctaggccattgagctgttagggatctttctgaactgtgcattgaatgggaatactcctgaagtccccattagacttgctatggaaagcaggaagatggrtagtgcaaggatttcattggctttggtgtgagtgtgccaagcttccagctgtccctgcactcctggggtggagcgcctgcaagaggacctcccagagaga

SEQ ID NO: 113503 - DNA, 201 bp, Homo sapiens
atccctgggcatgtgccttcccctctcttgccttgattccctcctctctgaaatgggggcattgtgtgggagaaatgagtttatatgtgtcaaatgtttarggcagtgtttggcccatgctaagtgccagggaagttttaaacaacatcaccaattcctttgtttcttaccccctcagcaaaggctggtctcggtaaggaa

SEQ ID NO: 113504 - DNA, 201 bp, Homo sapiens
agcaaaggctggtctcggtaaggaagagagagtgtgtggaatctttccagatgtttgggccacctcagaagactcagaggccactgccttctaccttcctycccaaactgtatgtcctaggggagagaaagcttgaatgggtgctttgccagaggggtagtggtgaaggctgtctagcgaggtgccagcgatggcagcatg

SEQ ID NO: 113505 - DNA, 201 bp, Homo sapiens
ggatcgcttgaggccaggaattcaagaccagcctgggcaacatagtgagacaccccatctcttcaaaaaaaaaattaaaaaattagccaggcatggtggtktgcacctgtagtcccagttactcgggcggctgaggcaggaggattgcttgagtccaggagttcaaggttacagtgaactatgattgtaccagtgcactcc

SEQ ID NO: 113506 - DNA, 201 bp, Homo sapiens
actgggtgctggttactgagcaccttgttattagagggacctggctgcccccttgcggtctcgctctcatcctccttccgtctcccccttccctccaggasggctgatcaccattggcacacacggtggaacagctcagtctttgagggagtgggggaaggacctggtgaaagatgagccagagggccaggctggggccag

SEQ ID NO: 113507 - DNA, 201 bp, Homo sapiens
cctagtctgtgtctgtggaccatgcttatcttgtccttggttttgaaattctttatttccttgggttctaggacttcattctatcctggcagtcctctggmctctttgttccttctctgggcgttcttctagctctgccctcatactgttttcttaatgatctgtttaaaatgcagaggtaattatgtcatgcccctgctt

SEQ ID NO: 113508 - DNA, 201 bp, Homo sapiens
aaagaaattttagtggtttatcagatcccaaaaagtacaattttggtgcatggcaagggcttgtgttgccatcctggcttttaaaggtgatggcatgaggsctcccatatccctccatggtgtactgccaggcctttcagggagtagttgattgtgccatgggtggatgggaggggcagctggatgcgatccgttcatctc

SEQ ID NO: 113509 - DNA, 201 bp, Homo sapiens
tataccaactgtgtactaaattcaatctgatgataaaatataaaagtacattaaggagttattgtactttattgacaaaaatggaaggtgggaaatagtamattcttttaaagctttactagttcttcactggttgcctttgtaaaaacgataatcattgcaaccaaagtttcatgaagcaaaaatatatataggctaaat

SEQ ID NO: 113510 - DNA, 201 bp, Homo sapiens; identical to SEQ ID NO: 18955

SEQ ID NO: 113511 - DNA, 201 bp, Homo sapiens
tttctgtttctaaaaacttaattactcgattttctttatatttaaaaaatggaaatttcaaaaaactggctgcactgaaaaattacactgccttgaagtaygctaaactataccaactgtgtactaaattcaatctgatgataaaatataaaagtacattaaggagttattgtactttattgacaaaaatggaaggtggga

SEQ ID NO: 113512 - DNA, 201 bp, Homo sapiens
cattccctctgaccagggctttctgagtgtgtatgctgcatgttcaattaggattcacaggcctcaggcacaacaagaatattgttgctaaaatcagtgtscctgctgaataaagctgggctttccctcctctccgggaacagccacttacctcttcccgcgtggagcccccctttggccatgcagctggtgctggggcgg

SEQ ID NO: 113513 - DNA, 201 bp, Homo sapiens
gacccaacacctcccattaggctccacctccaacactggggatcaaatttcaacacgaggtttaggaggacaaacatcccaacaatagcagtagcctttcygcaacctagctctgtctaatccatcgtccccattggagccagatggagcattccaaacaacagattggatgctgccactccacagtgtgagtccctcagc

SEQ ID NO: 113514 - DNA, 201 bp, Homo sapiens
aattgtaaatgtatcatgagtcttaagtaagtaagtaagtaagtaagtaagtattttggctgaaacaggaaatactgattgattgattgattgattgattgatgattgtaaagtcagaaacgccctcagctctaaccttgagaaaacgtggacgacttggggaaaggtctggagacacctgagaggagccagtcagggtga

SEQ ID NO: 113515 - DNA, 201 bp, Homo sapiens
aaattgtaaatgtatcatgagtcttaagtaagtaagtaagtaagtaagtaagtattttggctgaaacaggaaatactgattgattgattgattgattgattgatgattgtaaagtcagaaacgccctcagctctaaccttgagaaaacgtggacgacttggggaaaggtctggagacacctgagaggagccagtcagggtg

SEQ ID NO: 113516 - DNA, 201 bp, Homo sapiens
tttcttctttttcttcttcttctttctttcttttttttttttttatagagatggggtcttactacgtttcccaggctggtcttgaactcctgggctcgagygatcctcccatctcggcctcccaaaatgctgggattagaggtgtgagccaccatacccagcctcatccactgtttttcaaaatgtgacccttgggtcttc

SEQ ID NO: 113517 - DNA, 201 bp, Homo sapiens
taatcctagcactttgggaggctaaggcgggtgggtcactcgagcccaggaattcgagactagcctgggaaacatggcaaaaccctgtctacacgcgcgcrcacacacacacacacacacacacacacacacacacacaaaagccgggcctggtggcatgtgcctgtagtcccagctacataggaggctgaggtgggagga

SEQ ID NO: 113518 - DNA, 201 bp, Homo sapiens; identical to SEQ ID NO: 18974

SEQ ID NO: 113519 - DNA, 201 bp, Homo sapiens
acacactaaagatgtctcactaaaaaaagcagatgaggccgggcgcggtggctcacgcctgtaatcccagcactttgggaggctgaggtgggcggatcacsaggtcaagagatggagaccatcctggccaacaatgtgaaacccctgtctctactaaaagtacaaaaattagccgggcgtggtggtgtgcgcctgtagtcc

SEQ ID NO: 113520 - DNA, 201 bp, Homo sapiens
ctgcagatatgggggttggggtggcagcccttttccctgtttccacgtagaggtggtagaaaggcgtgtggaagatgcatcagggctacagtgtatagacyctgttagtccagcagtaggagggcaggtgcttgaatcacagaacaggtgcccctttgaagaagggggagagtttgcccctccccaccacactttttcact

SEQ ID NO: 113521 - DNA, 201 bp, Homo sapiens
agtcccgatcaaataggtatgaggaatgcattatactgtggcgccctcttgcggattcggtgtgcattgacacactaaagatgtctcactaaaaaaagcaratgaggccgggcgcggtggctcacgcctgtaatcccagcactttgggaggctgaggtgggcggatcacgaggtcaagagatggagaccatcctggccaac

SEQ ID NO: 113522 - DNA, 201 bp, Homo sapiens
cccaagaagtctatgtgcagggtgacctgctgccctgtcactggagtccaggtccagcactgtcctcctttctgacttcaggtgcattatttgagatgctraacacaggggcccatcaagcacttctttccagtcagtggtcaacttgggaaccaaagcctacatcccccttccagcaccttcctcttcactgatgtgtat

SEQ ID NO: 113523 - DNA, 201 bp, Homo sapiens
agtgattttcctgcctcagcctcccaagtaggtgggattacaggctcctgccaccaagcccggctaatgttttgtatttttagtagagacgggtttcaccrtgttggtcaggctggtttcgaaatcctgacctcaagtgatccacttgcctcggcctcccaaagtgctgggattacaggcgtgagccactgcgcccggcca

SEQ ID NO: 113524 - DNA, 201 bp, Homo sapiens; identical to SEQ ID NO: 18954

SEQ ID NO: 113525 - DNA, 201 bp, Homo sapiens
ggcaaactatttaaataggtcattgtgaagtaaaatactccgtctaaagtattacttcagtttgtcattgtcagaatgtgaagagttttgacacggtgtayacctgagaaaccatcattcacagtcaaggtaacaaacatatccatcacctcccagttttcgtttccttattcccctttataatccctacttcctctgcct

SEQ ID NO: 113526 - DNA, 201 bp, Homo sapiens
ggcgtaaaatgtaaaatgtgaagaggttgtttttcactttagttttataatttgtcagtgagtcaaagtgagctcagaaaagattagagctcatgtaggtrattgacaactttgcacatcagatacatattttgaatgagcagggagcgttataaaagcttggattgcaagctcacagttgttgtagtaagaagagaaggc

SEQ ID NO: 113527 - DNA, 201 bp, Homo sapiens
tttgcaagtggaggtgatgtatgtgctggagatccgccagaccaacttaattaggggacaaatggactagatctattcatcctcattagtgtcatcatgayctaagagatagaagactgcagaggatcccgttaagttccaattgagtatttgatggcgttcccaacagaagaggggcctgacttttcctggtgaactgaa

SEQ ID NO: 113528 - DNA, 201 bp, Homo sapiens
taacatttgaagtaatttaaaactctgatattgattaaaatagctttctcacttcgtgagatgctatacagttagtcactagttcaggcaataaagcagartttcaaattaaggcttctaagattggagatcttttagtgtttctaaaaccagacatttataagtatacctgttagtttatgctttattgcataaaatata

SEQ ID NO: 113529 - DNA, 201 bp, Homo sapiens; identical to SEQ ID NO: 18960

SEQ ID NO: 113530 - DNA, 201 bp, Homo sapiens
ctttaacaacgtaacatttgaagtaatttaaaactctgatattgattaaaatagctttctcacttcgtgagatgctatacagttagtcactagttcaggcrataaagcagagtttcaaattaaggcttctaagattggagatcttttagtgtttctaaaaccagacatttataagtatacctgttagtttatgctttattg

SEQ ID NO: 113531 - DNA, 201 bp, Homo sapiens
taattcatgaaacagtagcccagggttttcagagtttaattaatgttttgaatatgattaatttatcacccagggaaaatgttaactacctaggaaaaatracagaatataacttcttatgaggccctttacttaaaacctcattaagtagcaaatcagaattttgttttaaaaaattgaaatttattagaagactatgca

SEQ ID NO: 113532 - DNA, 201 bp, Homo sapiens
cagtgcgtgtagttgtggaaggatgcccccgacagggccagatcccgtctctggcagtgactcaccgcctgatctgcagcagggtcctgagcctcacgggsacctcacagggggttgctgagcaggaagtgaatccattccaagtgcactgtgctcggagggtagtaggtgtgtggtcctgctttttgcattctccctcca

SEQ ID NO: 113533 - DNA, 201 bp, Homo sapiens
ataatacatgataatatttagccattaaaataggctttaacaacgtaacatttgaagtaatttaaaactctgatattgattaaaatagctttctcacttcrtgagatgctatacagttagtcactagttcaggcaataaagcagagtttcaaattaaggcttctaagattggagatcttttagtgtttctaaaaccagaca

SEQ ID NO: 113534 - DNA, 201 bp, Homo sapiens
gctgtgcaggagattcaggaagaacacaatggctacccttctgaagctgaagctgatcaggtggcaagttctacgtgttcatctgtttgtagctacagatygtgtatttagaagccatttcattctagacttctagataataagcaaagctttccagatgcctctaccacaatagtagtgccctcctgtccaaatttggta

SEQ ID NO: 113535 - DNA, 201 bp, Homo sapiens
ttatcaattagaggtttgccttactatgtctcactgacatataaatgcacagaagtttcaagccaaacttgacatgactatgggaagagaagagaaatgcytgattttcaacttctatcttgagagcattgtgtattcttaaaatggtcctaatcacctctgtctcctatatgcaacattttattagctagtcctggattg

SEQ ID NO: 113536 - DNA, 201 bp, Homo sapiens
aaaactgagatgatagagatgttagattttaaagaagtcctcataaaattgcttcaataagcaattgcaggtatgcttgaaacaaacaatgaaaaaaaaaatagagaagtttccacaaagaaatgtaagagacaaagaagaaccagatggaaattttaaaactagaaaatacaataaatgaaataaactcaaaggataggt

SEQ ID NO: 113537 - DNA, 201 bp, Homo sapiens
cagatttcaggttcagtgacatcagaaaatgtgtccagagattacaaggtaagcaacattgagtgtttaattcattttcagtatgctaagtagccaagaarctttgcagttttaattcaagtgagctgttggccttttgatgcaacatggccatttgctcgagaataaggatgaaaggttctctgttgttagatctgaaat

SEQ ID NO: 113538 - DNA, 201 bp, Homo sapiens
tgataatgcagctttgtctctgctccctccagatgcccattcaccagaatctcaaggagctgctggccgtcagggcggagctgcagaagcgtgtggagggyctacagcgggaggtggccacgcgcgccgtctcatcctcatctgagcggggctcctcgccctcccactccgccacctccgtccacacctcggtctgatggg

SEQ ID NO: 113539 - DNA, 201 bp, Homo sapiens
cagagaacctagaagtcatcccacagaaatatgctcagccgattttttttttccaccaagacatgaaaacaatttaatggttgaaagataggcttttcaayaaatactgctggagtaattggacatctatagacaaaaaaacaaaacaaaacaaaacaaaaccttgatctaagtctcacatcttatacaaaaattaactca

SEQ ID NO: 113540 - DNA, 201 bp, Homo sapiens
acactatagttttaatgtgatcatcttccttcctcttgcttcatcattatcatcagctcttctctgttctccttccctcacccacacacacacagtagctrtatctcttctctaaacattctgaagaaaaatgagaaaatggagatggccttatactaagtttaatcattggatgggatagtacagtaattacatttggag

SEQ ID NO: 113541 - DNA, 201 bp, Homo sapiens
gtgattttaagattttgtcccacccccattcccatccactgcttttcgatctttttttttcttctttttcttcttcttctttctttcttttttttttttttatagagatggggtcttactacgtttcccaggctggtcttgaactcctgggctcgagcgatcctcccatctcggcctcccaaaatgctgggattagaggtg

SEQ ID NO: 113542 - DNA, 201 bp, Homo sapiens
gccattgacattagtattgtaacaatgaaatacttaggtattgtcttagtccgtttgctgctgctgtgacagaatgccacagactgggtaatttataaagraaataaattttttactttcagttctagaggctgggaagtccaagtttgaggggtgagcatctggtcagggccttcctgctgcatcatgacatggcaggag

SEQ ID NO: 113543 - DNA, 201 bp, Homo sapiens
gggaggatcacttgaacctgggaggttgcagtgagctgagattgcaccactgcactccagcctgggtgacagagtgagaccccatctcacaaaaaaaaaaagaagtatttcttccatataattttaatagagtaaaattccattaaatggtagagaatagtaagcttaactaacacctagaatcttcaactttgtttgaga

SEQ ID NO: 113544 - DNA, 201 bp, Homo sapiens
gagcccaggaattcgagactagcctgggaaacatggcaaaaccctgtctacacgcgcgcacacacacacacacacacacacacacacacacacacacaaaagccgggcctggtggcatgtgcctgtagtcccagctacataggaggctgaggtgggaggatcacttgaacctgggaggttgcagtgagctgagattgcacc

SEQ ID NO: 113545 - DNA, 201 bp, Homo sapiens
actaagttttttcaatctcagtctatttacaaattttgtgtagctgaattagctcatgttggaatggttgaacagatggtattcagaaaaaataaggcttkctttcttttggaaattaaattttaagttcctacatcagatcatagctaaagtctttgatgaattattgtaagggggcatgttttataattgtctttgtta

SEQ ID NO: 113546 - DNA, 201 bp, Homo sapiens
acagatgtttgtatcttgaaaacaaaggctgttaaagtaccgcttaaacctggaggggaaattccattgttgtctcaatatatatttcacaaggaatgctrtcaatcagacttcaatttagctgggacaaagaggaaatgcgaagtaaacaaacatgttttgtaacccagcaaagacttaaaatatgaaaactgttgactg

SEQ ID NO: 113547 - DNA, 201 bp, Homo sapiens
taaggcaaatgagatgccctggctcacagaactgctccagacaggaggagagatggccacaggcacagttgaggtcaggattgcaaacagtgttgtcgggwctccccatctctctctccctctctcttttattttccctcactttttaatcgctgtgagttccttaagatggtaggggtggggtggggtggggagtggcct

SEQ ID NO: 113548 - DNA, 201 bp, Homo sapiens
cagtgacatctttctcatttctgatattattaatgtgcatgtcttctcttttttgtttttctcatctggctagaggtttattgattttattgatcttctcmaagagtcagcttttggttttattattttctttgttttctgtttcattgatttccactctgatctttattatttcctttcttctgcttactttgggtttaa

SEQ ID NO: 113549 - DNA, 201 bp, Homo sapiens
cgggtccaaatgaaggggtggggggagccgggtgacaagcggtggcaccattgtgcatgcctgcagctggacagggccctcagatccgggctggttcgggyggcggcggcggctctgcagactgcgtgtgcaacgtggagtatttcactaggggaaaaagaggccgtcagaaggaattctgctctgtcttgcacagaagaa

SEQ ID NO: 113550 - DNA, 201 bp, Homo sapiens
gccagagtgggagcaaggcagcgggaggtgccataccctcttaaataaccagatctcaaaagaattaattcactagctcaaagacagcgcccagccatgaragatccacccccatgacgcaaacacctcctaccaagccccacctccaacactggggattagaatccaacatgagatttagaggggacaacgtccaaacta

SEQ ID NO: 113551 - DNA, 201 bp, Homo sapiens
cggctcccggcagcccagcgtggagaccctggacaggtaagcggggcccgggctgccccggcctcccgcgccccgactcccgagggccccgcgcgaggccmgcccgccccctccccgcgcgctgcgcagggcctggcggtggcggggtgggcggcccctcttcatcccctctgggccctcctcccccccacccccggaaac

SEQ ID NO: 113552 - DNA, 201 bp, Homo sapiens
ctatcatggtttttgtgggaaataattatttcttaaaaatgttaagatttagacttctgtttctggaaaaaatggagcaaatgtattttctcttattcttygtactaagtacaactaaaaaccttggacattatctgcaaaataaacataagaatactctgaaaggtagaaaaggcagactagctagggacctcaagaccc

SEQ ID NO: 113553 - DNA, 201 bp, Homo sapiens
atttgcaactggtgggtgctgacagaaaaaggcattatgacaagaaaagtatgatatacgtgggaatgaaagtgacttaacctttaaaaaggaaacaaatytctcccttttctctccttctccccctcaggtcgaaattgtggtatatagattcctggcatgtgataggaatttctgctcattcagtattttcaaccatac

SEQ ID NO: 113554 - DNA, 201 bp, Homo sapiens
tggaaaccacagcgacagcgcctataacctgcagtcctcttgtgtgccagtgggttctgtacacacatgatcccagttaacgctcccagcaattccacgaygtagagaatgagggaagggtcagagaagcagtgacttggttgaaatcttgctgcccagtgcgtgtagttgtggaaggatgcccccgacagggccagatcc

SEQ ID NO: 113555 - DNA, 201 bp, Homo sapiens
gatacagatccatgtatttcaggatccaaggggaaaagtctgggattggctggtcctaggtaactcacctacaagtgggagcaggtggaggaaggggtcamccttcttctccgctttcccccacagaagcctgtgttgtggggaagggcagttcccaaagtaaagaggaaggtctttatcagaagaagggggaaggcatgc

SEQ ID NO: 113556 - DNA, 201 bp, Homo sapiens
tcaggatctagcatggtgtttggcaactaacggagactcgacagatgtgactgaatgaacgcatgagtgaatgaagaggtgcgcccctctgctgcaggccrgttccccctgcacatctgctctctccagccccttgaacctgcatttattccttctccctgtggtggctcttgcccctcagcctacagaggactcacacct

SEQ ID NO: 113557 - DNA, 201 bp, Homo sapiens
cggagctgcagggcggcctcagtggcagccaaagctcatgggatggggtcccattgtccacctgacgcgagatcggtcaacgcctcaggagactttggcckctccaggagtttggatggtgaaaagctcctgaagccaacagcatttccatgtggaaacgctgtggtaggaggatggcctgataatgcagctttgtctctg

SEQ ID NO: 113558 - DNA, 201 bp, Homo sapiens; identical to SEQ ID NO: 18952

SEQ ID NO: 113559 - DNA, 201 bp, Homo sapiens
ctacagaagcacttgccaatccactccctgccaacttctctggcctcatattcgactgtcctcactgcacccattgatccaggcatactaacctctaacarcttatcactgtgcccttcctcccttccttctcttactccccctacccactttcctattgagttaagttgatccttttctgaacttccattgtaatacttt

SEQ ID NO: 113560 - DNA, 201 bp, Homo sapiens
gtgcttattttgcacgcttctgtagccttatagtgacatcacagaacaccgaaattcttcacaggtatacggaaagtgagatttactcccgtttggtgtcyttttttttttttttttttttttttttttttgccaggctctaagggatggaaataagctggcacagatggaagaggctccacttttcccaggagaatcaat

SEQ ID NO: 113561 - DNA, 201 bp, Homo sapiens
gaactcactcacacactcccccatccaaggagggattaatttatttatgagggatccacccccatgacccaacacctcccattaggctccacctccaacaytggggatcaaatttcaacacgaggtttaggaggacaaacatcccaacaatagcagtagcctttccgcaacctagctctgtctaatccatcgtccccattg

SEQ ID NO: 113562 - DNA, 201 bp, Homo sapiens
attttgaagctgttattagatacatacatgtttaggattcttacatcctcctgacgaattgacctcgttattatcatgaaatgaccttctttattcttggyaatattctttgctctgaaatctactttgtctgatattattatagacattatagcttttaaaaaattttactaacatgatatacctattttcatcctttga

SEQ ID NO: 113563 - DNA, 201 bp, Homo sapiens
gtatgctgcttcatgtacaggataagaaccttatagtagtatactcccatttgtcccctcctaccctttatgctgttgttgtcatccattttacttttacrtatgttataaaccccacaatatattgtttttgtttttgtttaaacagttatcttttaaggataatgataataatgccttagtctcctacagaagcacttg

SEQ ID NO: 113564 - DNA, 201 bp, Homo sapiens; identical to SEQ ID NO: 18958

SEQ ID NO: 113565 - DNA, 201 bp, Homo sapiens
gcgcgcgctacaacacccggctaattttttctgtatttttaatagagacggggtttcaccatgttggccaggctggtctcaaactcctgaccttgtgatcygcccacctcggcctcccaaagtgctgggattacaggcatgagccaccgcacccagcctgttagttgctatcttaaagaaatataagtaaaaggatcaggt

SEQ ID NO: 113566 - DNA, 201 bp, Homo sapiens
ggttttttaaagtttaaagtgattaagtgccccatgttttgtgaattaaaggttgcagtttataaaaaaataaaaagtaattaaaaaattttataagtgaraagtaaaaaaaagtagtttgatctaaatggtagtatagtgcaccccagttttatgttcagtaaaagaacagttcagactaacacacaattcagaaaagaa

SEQ ID NO: 113567 - DNA, 201 bp, Homo sapiens
aaaatccaacatatttgtatttttttatacaggtagataaaattttattaataacagaagacttaaaaaacattggaaatacttttttcaaatcccagaaytgggagatggctattaaaaaatatgcagaagttttaaggtaatattatttctaacaaattatttttaagaaattataaattgaattataaactaaaatta

SEQ ID NO: 113568 - DNA, 201 bp, Homo sapiens
gttagttgctatcttaaagaaatataagtaaaaggatcaggtgattattagctggaaaaatgttataataattttgggtataggagccaggatctgccacttttttttttttttttttaacttttctacaatgggaaagacaattagggtagttttaaaggagatttttattatttcaactttcatttggtgatctttgct

SEQ ID NO: 113569 - DNA, 201 bp, Homo sapiens
tcaaagaggtatctgcactcccatgttcattgcagcattattcatgatagccaagataatggaatcaaactaggtttccatctacagatggattttttttwaaatttgatatatgtgcacagtggagtactattcacccataaaaaataatgaaatcttgtcacttctgacaacatgaattaatatggaggacattatgtt

SEQ ID NO: 113570 - DNA, 201 bp, Homo sapiens
tggagcttgcagtgagccgagatcacgccactgcactccatcctgggcgacagagtgagactctgcctcaaacaaacaaacaaacaaacaaacaaaaaaadgcataatttttgggcctgagtgcttgggaaggcagcagatttgaagattcagtgttttgggcacatgggtgatagtgtggtcaaaatatgccatttcata

SEQ ID NO: 113571 - DNA, 201 bp, Homo sapiens
gttagttcaggcccattcgggagattgaaaccacagtggggagcatattggaaactagagaaatgtctttctcctccatgtccattcagtgccctctgctracaaaacttagtgcccactggcagaggagagctatttgcatgtttcagctccattttcacagagcagtgaaggatgggtttggagttgataggcaatgaa

SEQ ID NO: 113572 - DNA, 201 bp, Homo sapiens
cttcattgcctggtgacaaaaaagttatgcatagaccgggcgcagtggctcacgcctgtaatcccagcactttgggaggctgaggcgggtgaatcacgagrtcaggagatcgagaccatcttggctaacgcggtgaaaccccgtctctactaaaaatacaaaaaataagccgggtgtggtggtgggcgcctgtagtcccag

SEQ ID NO: 113573 - DNA, 201 bp, Homo sapiens
caaatgtttaattttttaaaatagacaactacctttataaatcatacacctaacttaaatgtttttttccaattaaaggctgatcttaagaaagctcaggrgatagcaccagaagataaaggtaagttggcagcttttgtagtgaaagttaattttgttatttaaatacttatcctcaggaaccattgttcactttgccag

SEQ ID NO: 113574 - DNA, 201 bp, Homo sapiens
gtaagaactcagtaagtatttgtttaataaataggcaaataagcaataatcacaagagcaacattttttaaacgatttattaagaaaaaattaactttttaaaaatatttaaaatgtttactttcatgtttaataaaaacttgaaatatgctaataaactatatgcagaaaatatttaacatagcaagtgtgagactgcta

SEQ ID NO: 113575 - DNA, 201 bp, Homo sapiens
ttggttgttttgcatactgacaagattttcttttcttttagttggtcgaattgtcttagaattgtttgcagatatcgtacccaaaactgcggaaaattttygtgcactgtgtacaggagaaaaaggcattggacacacgactgggaaacctctccatttcaaaggatgcccttttcatcgaagtatgtgtaaattttctta

SEQ ID NO: 113576 - DNA, 201 bp, Homo sapiens
attctttgatgtatccatggtggatgatgctaggttttcatacttatagataatacacacacacacacacacacaaacttgttcagggatgggcatacttyttctgcaagggccagatcataaagtttttaggctttgtagaccatgtaatgtcacacccactcacctgcacagttgtaattcaaaattagccatagacaa

SEQ ID NO: 113577 - DNA, 201 bp, Homo sapiens
cacacacacaaacttgttcagggatgggcatacttcttctgcaagggccagatcataaagtttttaggctttgtagaccatgtaatgtcacacccactcamctgcacagttgtaattcaaaattagccatagacaatgtgtaaccaatgggtatggctgtgtttcaataaaactttagtctagaatatatattcattttta

SEQ ID NO: 113578 - DNA, 201 bp, Homo sapiens
acttattatcttagttgctatctttttgagacggagtctcgatctgttccaggctggagtgcagtggtgcggtctcggctcactgcagcctctgtctcccrggttcaagctattctcctgcctcagccttctgagtagcagggattacaggcgcgcgctacaacacccggctaattttttctgtatttttaatagagacgg

SEQ ID NO: 113579 - DNA, 201 bp, Homo sapiens
tagcctatttgtacaaacatgaatgtgtgctctcttttggggagtctggaattttggtacatgctaggtagagtgtgcccaataaataccttgggtgctgrgtctctaattggctctcctgggcagaaatactgtgtacatgttgctgcatttttgttgctgggggaagtgtgtgttctgtagcacttcatgggacggaga

SEQ ID NO: 113580 - DNA, 201 bp, Homo sapiens
tctgttccaggctggagtgcagtggtgcggtctcggctcactgcagcctctgtctcccaggttcaagctattctcctgcctcagccttctgagtagcaggkattacaggcgcgcgctacaacacccggctaattttttctgtatttttaatagagacggggtttcaccatgttggccaggctggtctcaaactcctgacct

SEQ ID NO: 113581 - DNA, 201 bp, Homo sapiens
gggcggtgccggaagtcaggccatggcttccggttcttgcgtcggaagtggccggtcagcgtcgctgccggtctccggcggagacggactctggagtttgrgcggcccgggcggccactaggtactctgatattccgtactaaacacgtctgcaagtcaagatgtcgcacccgtccccccaagccaagccctccaacccca

SEQ ID NO: 113582 - DNA, 201 bp, Homo sapiens
cagtggatcttagcatcattgaaaatccatgcctgaatctgttatactgaacttctaagtttatcatcgtacagttattaactagcattcttctgtttgcragagcctcccgcatattttttaagtatcactatagacctgtggatatttttcttttctttttttttccttttatagaaacaaggcctcctttatattgcc

SEQ ID NO: 113583 - DNA, 201 bp, Homo sapiens
gccggaagtcaggccatggcttccggttcttgcgtcggaagtggccggtcagcgtcgctgccggtctccggcggagacggactctggagtttgggcggccsgggcggccactaggtactctgatattccgtactaaacacgtctgcaagtcaagatgtcgcacccgtccccccaagccaagccctccaaccccagtaaccc

SEQ ID NO: 113584 - DNA, 201 bp, Homo sapiens
gggaaacctctccatttcaaaggatgcccttttcatcgaagtatgtgtaaattttcttaatcttgttattcttcatacagacaagtcctgttctttaggayttggggaagaaaacactaagtaggaagtgaagcttaaaaagtactattagcgtccatgtctgaggcagtaacgcagtttcgtaaaggttaggctgtgcga

SEQ ID NO: 113585 - DNA, 201 bp, Homo sapiens; identical to SEQ ID NO: 18983

SEQ ID NO: 113586 - DNA, 201 bp, Homo sapiens
ggatgggtttggagttgataggcaatgaattgaaatctggcatataagcttaatactttgatataaatactagctttatacttttttgtaggctcttgaamtagacccatcaaataccaaagcattgtaccgcagagctcaaggatggcaaggattaaaagaatatgatcaagcattggtaaattttgttccaaatgttta

SEQ ID NO: 113587 - DNA, 201 bp, Homo sapiens
cttaatgagaaagaggactatggacatgaaagggtgatacttgtgtgagagtgcgggtccaggaagggtgcgacttagaaagtgctgtgaaaggaatgccraatacaaacttcaagttcataatttggtcaagggctcccctctcctgggagcccaacattttaagtatacatggtaaatctggtagatcatttcactgag

SEQ ID NO: 113588 - DNA, 201 bp, Homo sapiens
gcttttttcatcctcaaattatatacacttgtggcactcttcagagtgtattagggttctctagagggacacaactaatagaatagatatataaaggggartttattaagtattaactcacacgatcacaaggtctcacaataggccatctgccagctgaggagcaaggagagccagtctgagtcccagaattgaagaatt

SEQ ID NO: 113589 - DNA, 201 bp, Homo sapiens
aagatgctggagaaatacatcattggtatccttgtttgagcacttagttgaattttcaaggcattctctattaaacagggaggtgggaggtagggggatgytatagtaaaaatggttatgaatgagagtgctgtatgaaacctaggccctttcatgtttgctttttcatatagggtgacatatgtgattctcactttgtga

SEQ ID NO: 113590 - DNA, 201 bp, Homo sapiens
ctcttctagttgcttcctgagtcctttttgacatgaccttagcagtctttgacaaccatctaactttctggtttgataggatgtttcagttttatcttcartgtttttccccctagatctggaatcagccctttctgtcaggagccattgttccttttggtgggaaatggtgtttagaggccacagtctgggcactgggag

SEQ ID NO: 113591 - DNA, 201 bp, Homo sapiens
gtagcctcttggttggccataactgcgtccactcatgttcctttaaagcctgttgctcacatacaagtcagtgtttcttaagtcaatcagatcatggtagragcaggattttacttcagtggttcctgccacacttaagaataaagcccaaactctaccatatctagaaaactcaagtgcccaagccctacttttgcaacc

SEQ ID NO: 113592 - DNA, 201 bp, Homo sapiens
gcccaggagtttgggcctatagtgaactacgattgcaccactacactctagtctgggtgacagcgagaccccatctctttaaaaaaaaaaaaaaaaaaaaagcaaggaagttcacatcaactcattgtgcctctcatgcagtgttaccatatttatacgactaaacactgtattatacttttttatataaaataaccttaa

SEQ ID NO: 113593 - DNA, 201 bp, Homo sapiens
tgcaccaccatgcccagctaattttgtagtttagtagagatggggtttctccatgttggtcaggctggtctcgaactcctgacctcaggtgatccgcctgyctcggcctcccaaagtgctgggattataggtatgagccactgtgtccagccttagaatctattttttaaaataaatcatgcataaatattacacttttta

SEQ ID NO: 113594 - DNA, 201 bp, Homo sapiens
ctacctgttcatctttccctttcagtcaggaaaacatattggaatttcaaggagacagtgtaaaattcttgtaaaaaccaaaatctattttttttttttttgagatgggagtttcgctcttattgcccagcctggagtgcaatggttcaatcttgactagccacaacctccgcctcccaggttcaagcaattctcctgcct

SEQ ID NO: 113595 - DNA, 201 bp, Homo sapiens
catctttttatttccaaactttctctagttttatgggttagctgcatgtcttgtaaacaacatgtatttggattttgatttttttaaacccattctgaccmtcctcggcatttgccctcagtgtttagtttgttgctgtatttggatttatttctaccatcttactgtacgctttcttttcccacctgttctgtttccttg

SEQ ID NO: 113596 - DNA, 201 bp, Homo sapiens
ttttatttccaaactttctctagttttatgggttagctgcatgtcttgtaaacaacatgtatttggattttgatttttttaaacccattctgaccctcctyggcatttgccctcagtgtttagtttgttgctgtatttggatttatttctaccatcttactgtacgctttcttttcccacctgttctgtttccttggttgc

SEQ ID NO: 113597 - DNA, 201 bp, Homo sapiens
tttttatttccaaactttctctagttttatgggttagctgcatgtcttgtaaacaacatgtatttggattttgatttttttaaacccattctgaccctccycggcatttgccctcagtgtttagtttgttgctgtatttggatttatttctaccatcttactgtacgctttcttttcccacctgttctgtttccttggttg

SEQ ID NO: 113598 - DNA, 201 bp, Homo sapiens
ccgtgggttacttagacacgtatgtcttaatttccaaacatgtatgggttttcttgttcttatggaattctagcttaattgtatgtgattagataacgtaytctatgattgtagtcctttatgctacgacttgctttttggttcagtatatggtcactttccgtaaatcgtgtgtgtattgaaaagaatgttaacttgcaa

SEQ ID NO: 113599 - DNA, 201 bp, Homo sapiens
agaaaaggtaaattttacttcttaattcatggtgtttttcagtgattgtaacttctcattgtttgaaataacctcttttcagttatttgtctaaaataatwtgttgtaaattatacataattttatatgctgtataacaccacttgcagattccttcagacttagagtttgaaaacttgagttttaagtctcaagctggct

SEQ ID NO: 113600 - DNA, 201 bp, Homo sapiens
atggcgtgaacccgggagacagagcttgcagtgagctgaggttgcaccactgcactccagcctgggtgacagagagactccatcttaaaaaaaaaaaaaaagaaatcttttgtccattttaaaatgggattgtttacctttttctcattgaaagagaagtttcaatgagaaaaaatggcaagtagagtttttatatattca

SEQ ID NO: 113601 - DNA, 201 bp, Homo sapiens
gcacgttaaagaagttaccacatgtccttgggaaaacaccaggcacataggatttaagaagtggcttttaaaatttggtgattgacatttgaagtgttaayatatgctctgatttctatacttaaaatatgcataacacttttttaaatatatatttttaaaaataggaatttgatgaatcttcacccaaacaacctacaa

SEQ ID NO: 113602 - DNA, 201 bp, Homo sapiens
gtagattaatccatggagttggatatagatatagtttgtttgttttcagtgtcataatattccagtctaaaaatacatatatacacatacactgtagtagtttacttaatatactttattcttgatggccatttgggttctttacactttggagcaattttgagcactactaccttgaacatgtatcatgatacataagta

SEQ ID NO: 113603 - DNA, 201 bp, Homo sapiens
attattataactcttgcagctgtggtaaatgaagaacagtgactagtactctccttaaacctgagtccatcatttggcatttgttttatccgttgggtagrcttgttttagcttttcactcttttcttttagatctttcattcgtacgtgcctttgagtttacctatgttaatgtttatggcactcacgttttggtaagtg

SEQ ID NO: 113604 - DNA, 201 bp, Homo sapiens
caccacgcccagccttttcccgttttcaatggtgtcttattattagtgaaagttcttaattacaatgtgggttaatttatctttacctttttctttagggktagtgctctttctgtctcttttttttttttttttttgagatggagtgtcttgctctgtcacccaggctggagtgcagtggcgcaatctcggctcactgca

SEQ ID NO: 113605 - DNA, 201 bp, Homo sapiens
cgcaatctcggctcactgcaagctctgcctcctgggttcatgccattctcctgcctcagcctcccgagtagctgggactacaggcgcccgccaccacaccyggctaattttttgtatttttaatagagacggggtttcaccgtgttagccaggacggtctcgatctcctgacctcgtgatccacccgcctcagcctcccaa

SEQ ID NO: 113606 - DNA, 201 bp, Homo sapiens
ttagtgtagttatgttttctgttatcttagaaaaaattaaagttatctttgagtattttcctagtactcaacaccttaggaaaatattcaagagtttaggraagttaaagtttttcactaacaagatatactttttttccatagtgcatcacatatgattgtctctttagtggaagattatccaaactatatgatcataaa

SEQ ID NO: 113607 - DNA, 201 bp, Homo sapiens
ctctgcctcctgggttcatgccattctcctgcctcagcctcccgagtagctgggactacaggcgcccgccaccacacccggctaattttttgtatttttartagagacggggtttcaccgtgttagccaggacggtctcgatctcctgacctcgtgatccacccgcctcagcctcccaaagttctgggattacaggcgtga

SEQ ID NO: 113608 - DNA, 201 bp, Homo sapiens
ctggtcttacctttattatttcattatttctactttgtttaggcttactttctattcttttttctaatctttgtgatatatttagcttattaattttcacsttttctctaatgtatgcattttagactataaatttacttctaaatactggtttatctgaatcctacaggttttcatatgtattttttcattatcttttaa

SEQ ID NO: 113609 - DNA, 201 bp, Homo sapiens
ctcagcctcccgagtagctgggactacaggcgcccgccaccacacccggctaattttttgtatttttaatagagacggggtttcaccgtgttagccaggayggtctcgatctcctgacctcgtgatccacccgcctcagcctcccaaagttctgggattacaggcgtgagccaccgcacccggctctgtcttgattaagaa

SEQ ID NO: 113610 - DNA, 201 bp, Homo sapiens
tatttaatattatatatataaatatacttaatatatgttaaatatatattttatatatatatataatgatatgtagagttttttttgttttttcaaaatcsatgtagattaatccatggagttggatatagatatagtttgtttgttttcagtgtcataatattccagtctaaaaatacatatatacacatacactgtagt

SEQ ID NO: 113611 - DNA, 201 bp, Homo sapiens
atgttaaatatatattttatatatatatataatgatatgtagagttttttttgttttttcaaaatcgatgtagattaatccatggagttggatatagatayagtttgtttgttttcagtgtcataatattccagtctaaaaatacatatatacacatacactgtagtagtttacttaatatactttattcttgatggccat

SEQ ID NO: 113612 - DNA, 201 bp, Homo sapiens
tcttttcagttatttgtctaaaataatatgttgtaaattatacataattttatatgctgtataacaccacttgcagattccttcagacttagagtttgaaracttgagttttaagtctcaagctggctgacactcaccagctggcttcaccacttagcagggattttgaaagatccaatgagaatgatatatgtgaaaata

SEQ ID NO: 113613 - DNA, 201 bp, Homo sapiens
cgcctcacatcagccttcctgcaattcctttggacatgcttctgtctcagggcccttacacttgctgttctctctctctgctatataggattgttgtgcaygttaaagaagttaccacatgtccttgggaaaacaccaggcacataggatttaagaagtggcttttaaaatttggtgattgacatttgaagtgttaacata

SEQ ID NO: 113614 - DNA, 201 bp, Homo sapiens
gcagtctccggaagctgcctctggctgctctgttaacgtgtcccgcgagcgaggcgcgtcgcaaaaggtcgcggcggaacttccctgcgcttttcagaccmtactctttacggtactaggcactgctgagctgggagatgtcggcggcgtgttgggaggaaccgtggggtcttcccggcggctttgcgaagcgggtcctgg

SEQ ID NO: 113615 - DNA, 201 bp, Homo sapiens
gcccgccccacgtcggcagctgggggaggcggggtgggcgccggagacctgctgctctggagcctgagagccaatgaggcgggctcctctgccataagccraagacattcaccagtcagaggccgaaatgggcgggacgcgcagatcctagcgtcccatcagtccccggcttttgactagttcccgcctttttctttaatg

SEQ ID NO: 113616 - DNA, 201 bp, Homo sapiens
aaaccagggcagatgacttatttcccacaccccaaattccttaaaatcagaatcttaaatatttataccaagttcagtattgaatgactttagaagttaaraagaaaaaaatagttgatttttaatcataaattttttaggtgatttaaatgtcttctgattgacttcattgttaagttcaaaatcaaattgtttacatca

SEQ ID NO: 113617 - DNA, 201 bp, Homo sapiens
agttcctgaaaaggcatgctataggcatgtacagttgtgctgactagctcccatttattgttccactttactcgatacttgtacctgtatggatggcatcrtttggttaaactgacttttttccctatacccagaaccagtacattctctcttctgcatagtctaaatggaatgtaaaacttttgtttatagatactgttg

SEQ ID NO: 113618 - DNA, 201 bp, Homo sapiens
ggaggctgaggtaggtggatcacctgaggtcaggagttcaagaccagcctcgccaacatggtgaaaccccatctctaaaatacaaaaaagttagctgggcrtggtagtgggcacctgtaaccccagctactcgggaggctgagacacaagaatggcttgaatctgggaggcagaggtggcagtgaactgagattgcgccac

SEQ ID NO: 113619 - DNA, 201 bp, Homo sapiens
atatctacataaaaagaagttttccagccaggcgcagtggctcacgcctgtaatcccaacactttgggaggctgaggtaggtggatcacctgaggtcaggmgttcaagaccagcctcgccaacatggtgaaaccccatctctaaaatacaaaaaagttagctgggcgtggtagtgggcacctgtaaccccagctactcggg

SEQ ID NO: 113620 - DNA, 201 bp, Homo sapiens
ttcttttttaagatctgatatgctatcattgccttaataatggaacaaaatagaagcatatctaacactttttaaattgataattttgtaaaattgattamgttgaatgctttttaagagaagtgtgtaaagtttttatattttcacaattaacgtatgtaaaaccttgtatcagaaatttatcatgtttactgtttaaaa

SEQ ID NO: 113621 - DNA, 201 bp, Homo sapiens
tgtagattaatccatggagttggatatagatatagtttgtttgttttcagtgtcataatattccagtctaaaaatacatatatacacatacactgtagtagtttacttaatatactttattcttgatggccatttgggttctttacactttggagcaattttgagcactactaccttgaacatgtatcatgatacataagt

SEQ ID NO: 113622 - DNA, 201 bp, Homo sapiens
atgaagtcagaaaaaatacatggcttaggatggagacctaaagtgccttggaaagaaggaataaagaaaacaagtatgttttgaattaatcattttggggrcaagtcagaaaaatttaaaggaaaaataacttatttccagaacattatacaaaccagtggaatattgtgttgaatcattcgtacttttcaaattgccaca

SEQ ID NO: 113623 - DNA, 201 bp, Homo sapiens
atgtagattaatccatggagttggatatagatatagtttgtttgttttcagtgtcataatattccagtctaaaaatacatatatacacatacactgtagtagtttacttaatatactttattcttgatggccatttgggttctttacactttggagcaattttgagcactactaccttgaacatgtatcatgatacataag

SEQ ID NO: 113624 - DNA, 201 bp, Homo sapiens
tgtgtcaggtacttcacttatatctagatcgtggctgaaacaagaagacaagacacagagagggttaggcacctggcattatgggtgactttttttttttwaatatatacttgattttacagactttctgcagaaaacctattgggaatttttgtaaagagaaaagttgggttgtggtaaaaatgcataaacacatatctc

SEQ ID NO: 113625 - DNA, 201 bp, Homo sapiens
atatctgcccttatgaagtcagcacacaggtgagctttatgatgagaccaactgtctgatgaagactttttctgcatttttcccctatttagatcattttrtcttcaagtaacctgtctttatgaaatagcaaactaggagttcttttacatatcaaatactatagtaggttttttaataaactgataaaaataattagaa

SEQ ID NO: 113626 - DNA, 201 bp, Homo sapiens
tcctcttcagtagtaaatattactgctgcctattaccagatttaaagttataatttcctttgcttttgtctacacttttgttgtctgtatatttatccctwaacaatacagcttaacttagggtgtttttaaatatatgtatatttaatattatatatataaatatacttaatatatgttaaatatatattttatatatat

SEQ ID NO: 113627 - DNA, 201 bp, Homo sapiens
gaagcacttaatgcataggtgctatatgtaaagcaataagtaagatacaaatatctgcccttatgaagtcagcacacaggtgagctttatgatgagaccarctgtctgatgaagactttttctgcatttttcccctatttagatcattttatcttcaagtaacctgtctttatgaaatagcaaactaggagttcttttaca

SEQ ID NO: 113628 - DNA, 201 bp, Homo sapiens
aaacgttccatacccctaccatccgggcgaccccaattgcacctggcggaccaggcaagggcggaaaggagcagcgcctgcgcgtggtgagcgcggccccrcccagcccgctagtgggcgggcagaaactggccacagagcagtctccggaagctgcctctggctgctctgttaacgtgtcccgcgagcgaggcgcgtcgc

SEQ ID NO: 113629 - DNA, 201 bp, Homo sapiens
gtaaggacagagactactgttcattcagcacctggaagaatgcctggcccattctatataagtctttagtaattgtggaatggatgaatgcaagagtaataaacaggaaactctcctatcctcccctcaaggaactcagtggctagtggaagaagtgggaatgtgaggattcctgtttatggccatttgcacattaaatca

SEQ ID NO: 113630 - DNA, 201 bp, Homo sapiens
ggtaaggacagagactactgttcattcagcacctggaagaatgcctggcccattctatataagtctttagtaattgtggaatggatgaatgcaagagtaataaacaggaaactctcctatcctcccctcaaggaactcagtggctagtggaagaagtgggaatgtgaggattcctgtttatggccatttgcacattaaatc

SEQ ID NO: 113631 - DNA, 201 bp, Homo sapiens
taaagaaatcataaatatgactgcctgtgtatgttattattataactcttgcagctgtggtaaatgaagaacagtgactagtactctccttaaacctgagyccatcatttggcatttgttttatccgttgggtagacttgttttagcttttcactcttttcttttagatctttcattcgtacgtgcctttgagtttaccta

SEQ ID NO: 113632 - DNA, 201 bp, Homo sapiens
cctttcatgtttgctttttcatatagggtgacatatgtgattctcactttgtgaaactgctttttgaaacagagaaaatagatatagtactacattttgcygcacaaacacatgtaggtaagcattgttttatgttacagttatgattggcagttctctccccgccctcgcccccctaatacttatatttgaaagaggata

SEQ ID NO: 113633 - DNA, 201 bp, Homo sapiens
tagccgggcgtggtgacaggcgcctgtagtcccaactactcgggaggctgaggcaggagaatggcgtgaacccgggagacagagcttgcagtgagctgagrttgcaccactgcactccagcctgggtgacagagagactccatcttaaaaaaaaaaaaaaagaaatcttttgtccattttaaaatgggattgtttaccttt

SEQ ID NO: 113634 - DNA, 201 bp, Homo sapiens; identical to SEQ ID NO: 18994

SEQ ID NO: 113635 - DNA, 201 bp, Homo sapiens
tgaacccgggagacagagcttgcagtgagctgaggttgcaccactgcactccagcctgggtgacagagagactccatcttaaaaaaaaaaaaaaagaaatsttttgtccattttaaaatgggattgtttacctttttctcattgaaagagaagtttcaatgagaaaaaatggcaagtagagtttttatatattcaggacac

SEQ ID NO: 113636 - DNA, 201 bp, Homo sapiens
gaggggtccttattctgatatggggagggtcctaatgcacgacctggaccagcttttctctctctggcctgcaaagaagtggttcctttgaaactgacttmtttaaaacgcctcttccaaagctgcgttactctccgcccttctgtggccggaggtgctcaccatgtcactccttgagtgcgtgcaagttaccctaagctg

SEQ ID NO: 113637 - DNA, 201 bp, Homo sapiens
tgtcggcggcgtgttgggaggaaccgtggggtcttcccggcggctttgcgaagcgggtcctggtgaccggcggtgctggtttcatgtaggtaatggcgccrctagccaagcagtggctccccagaaacccctaccttttcccgcagctctgcttgccctaggtaatttgggtccagctttgaggggtccttattctgatat

SEQ ID NO: 113638 - DNA, 201 bp, Homo sapiens
tttgacagtgtgttttgatgaacagatgttttcaatgtatgttttttcctttatgcttaatgctttttcagttcttaaattctctcctaccccaaggtcaygaagatgtatttttgtatattatcttttcaaagctttataattttgtcttttatgtttagatttgtaatccatctgaaattaattcttatataaccccaa

SEQ ID NO: 113639 - DNA, 201 bp, Homo sapiens
taattttgtatttttgatagagatggggtttcaccatgttggccaggctggtcttgaactcccaacctcagacgagccaccctcctcaggtgatccacccrtctcagcctcccaaagtgctgggattacaggcgtgagccaccacgcccagccttttcccgttttcaatggtgtcttattattagtgaaagttcttaatta

SEQ ID NO: 113640 - DNA, 201 bp, Homo sapiens
cttccctgcgcttttcagaccatactctttacggtactaggcactgctgagctgggagatgtcggcggcgtgttgggaggaaccgtggggtcttcccggcrgctttgcgaagcgggtcctggtgaccggcggtgctggtttcatgtaggtaatggcgccgctagccaagcagtggctccccagaaacccctaccttttccc

SEQ ID NO: 113641 - DNA, 201 bp, Homo sapiens
gcagggattttgaaagatccaatgagaatgatatatgtgaaaataccttgtacttctaaagactctaaagcactatagaatacttctacctctactgtcaygctgcagttgactccctgtttgcagtcagaccagtatgtcagcgtatacagaaagtcaaaagctagctagatagtgatgcaagaagcttgtatacattaa

SEQ ID NO: 113642 - DNA, 201 bp, Homo sapiens
tatattatagcaatgttaaacttacactcctcatgtttgataataatcaccacttatataccacttctcatcttcaaagatctttataaaaattaattaaygtcagccaatgacatttcttggaaaggaaatgatttatttaaatggcatctatataaaaaatagccaatatatttacataacaagtgctatatataccct

SEQ ID NO: 113643 - DNA, 201 bp, Homo sapiens
ttattccaaaattgcttagtcacgacgcagtgtctgtatttttatatatgtattcatatatacatgattgtaatacataataagaatgaagtggtattacwttattcctaataatacagataatgctattcattgtcaaaaaagagtaaaattgttgtcttcaattaatgacccttttattttgggaccaggattttcttt

SEQ ID NO: 113644 - DNA, 201 bp, Homo sapiens
ataattgactccacttgttcagctgagctgggtttctgggagtccctctagatccctgctgtggtcttttcatagcttccacctcactgctgccatctctygaatcctccctgagccactgtgcagatgagtgttgtggctcacgccgccttctccccagtggactcccacaaactcatctccatttctaactttttattg

SEQ ID NO: 113645 - DNA, 201 bp, Homo sapiens
aagctccacttcccgggttcacgcctttctcctgcctcagcctcccgagtagctgggaccacaggcgcctgccaccgtccccggctaattttttgtatttktagtagagacggggtttcactgtgttagccaggatggtctcgatctcctgacctcgtgatccgctcgcctcggcctcccaaagtgctgggattacaggcg

SEQ ID NO: 113646 - DNA, 201 bp, Homo sapiens
tcctttctttgtttaaaagccatcgatggctgctgtttgctagagatgaagctcaaatgtttgcaggacgttcaaggaggcctcagatctgccccaggctytctctccagcttactcatctctcctttcaccttatcctggattcccctcctgcccccaagctccgcacacgcacacccgagtcccgcaggctcctcctcc

SEQ ID NO: 113647 - DNA, 201 bp, Homo sapiens
ttagaacaatgttgcacccaagagtggctgcaggaaatgtcctcccatcagactcatattatgtccagaagagttacttttatatatggggtcctctcagstgtttgacagaagaaataataaagagcttcagatttcgttttagaatgacacgtcagctaatacacgtttaggcttatcttccaatttgcagtttttggc

SEQ ID NO: 113648 - DNA, 201 bp, Homo sapiens
taaatgtgttactcggggaaatctcaagcccttcttagggtccccgaggtgtgacgggggaggcttgatggagcctgcgtctggtcctgactgctcatcayggctgtgcagccctgacaggactaagccagggtggtgggaccagcacggtgtggccagcttaactcactgcggctcagaggagacctggagacatgaggg

SEQ ID NO: 113649 - DNA, 201 bp, Homo sapiens
agttttctcctctatgaaatgaggcagaggggccggttgatgctttgtttcttttagggtctttttagttataaagccataaaccccttggcttggctcgmaactcaggctacccccgacccaggcttccttgcttgctgggtctctctattgattcgtttaacccgtgtgtttgggggccaacactggttctttctgggc

SEQ ID NO: 113650 - DNA, 201 bp, Homo sapiens
catgtgcagtggaatgataatggctcactgcagcctcgacctcccaggttcaagtgatccttcagcctcagcctccttagtagccacaggcacatgccacyatgcctggctaattaaaaaaaaattttttttcgtagagatggggtctcccagtgttgcacaaactggtctcaaactccttgcctcaaatgatcctcctac

SEQ ID NO: 113651 - DNA, 201 bp, Homo sapiens
tttttcttaaagaggcaggttctcattctgtcacccaggcatgtgcagtggaatgataatggctcactgcagcctcgacctcccaggttcaagtgatcctycagcctcagcctccttagtagccacaggcacatgccaccatgcctggctaattaaaaaaaaattttttttcgtagagatggggtctcccagtgttgcaca

SEQ ID NO: 113652 - DNA, 201 bp, Homo sapiens
gtttgtggttttctggtttgtggttttctcatttatatgagtagttgttatgcttgaatgtgaagttcttacacttgagtgtgaaggtcaccccttcacaytgcatagtgcaatgcagattctcaggccccgccatggaaagtctgacagtgtgtctaggctgtagccccagaatatgcatttcttttctttttcttaaag

SEQ ID NO: 113653 - DNA, 201 bp, Homo sapiens
ggtgtgacgggggaggcttgatggagcctgcgtctggtcctgactgctcatcatggctgtgcagccctgacaggactaagccagggtggtgggaccagcayggtgtggccagcttaactcactgcggctcagaggagacctggagacatgagggacacctggacattgttgctatcaacatggcagcatagttggctggca

SEQ ID NO: 113654 - DNA, 201 bp, Homo sapiens
gggtaaatatgtggtctgttttgatccccttgatggatcttccaacatcgattgccttgtgtccgttggaaccatttttggcatctatagaaaggtaaaaygtgatatcttaagcacttggtttggggacagaagttaagattgagcatccagtcctatttcactgtggcagagcagccggagtggagatcatgaaactgt

SEQ ID NO: 113655 - DNA, 201 bp, Homo sapiens
tgaagcagtggacgacattgcttcttcaaaaatagctcccacatttattcgtgtacatttacacaaaccttcagttaactggtgcagtctttctttctttyttttttttttttctgagatgtagtcttgccctgtctcccaggctggagtgcagtggcgtgatctcggctcactgcaagttctgcctcctgggttcgagcg

SEQ ID NO: 113656 - DNA, 201 bp, Homo sapiens
aggaaggccggggggcaagggtggaactggggtgaactgaagagttccagcaattacaattgggaggagggggcccgccttgccaaggcttctattaatgsttcaagaaacactggattgtaaaaaacataatgtttctgcatgtgtgcaacactatgttggccaactaaaatgcatttatggacctgatggggctgtaga

SEQ ID NO: 113657 - DNA, 201 bp, Homo sapiens
ctcactgcagcctcgacctcccaggttcaagtgatccttcagcctcagcctccttagtagccacaggcacatgccaccatgcctggctaattaaaaaaaawttttttttcgtagagatggggtctcccagtgttgcacaaactggtctcaaactccttgcctcaaatgatcctcctaccttagcctcccaaagtgctggga

SEQ ID NO: 113658 - DNA, 201 bp, Homo sapiens
gcaagactctgtctccaaaaaaaaaaaaaaaaaaaagttgggggctgggctagaaaagaattcctccaaatccatggctcagtgggataattttctcttcrttttgagtatgtgggtcatagacaagtattactattattttttattccgtgcgaggaagtgtataaatgtagagcatttggtgaccgtatgtcagggaag

SEQ ID NO: 113659 - DNA, 201 bp, Homo sapiens
agcaagactctgtctcaaaaaataaataaataaattaattaattaataaaaagaaagtgatgatgagtatgacacagacctctaagtcatttcagtttttkgaagccttattgattgcttgaaacagctgaaaccagttgagggctcatgaggcataaacatagacatctataatgcttccaaggggatttttcctgcttt

SEQ ID NO: 113660 - DNA, 201 bp, Homo sapiens
gtgtgaacctgggaggcggagcttgcagtgagccgagatcgcgccactgcactccagcctgggtgacagagcaagactctgtctcaaaaaataaataaatwaattaattaattaataaaaagaaagtgatgatgagtatgacacagacctctaagtcatttcagttttttgaagccttattgattgcttgaaacagctgaa

SEQ ID NO: 113661 - DNA, 201 bp, Homo sapiens
gagcgagactctgtctcaaaacaaacaaaaaacaacaacaaaaagcctttaattgaaattacccaatagattgcatgtaatatatacttgttttataaacytgatacaacatagaacgagattttaaagtatttaaatatagtgtgaatcatgattagtgtttcctcatcattgttctctttgctattctcaagaaaatct

SEQ ID NO: 113662 - DNA, 201 bp, Homo sapiens
tattttgctttttatcttgggtaagaggcagatccacatcacaatcagtttgaggaatagaagattcaaattctcatactagaaaggcaaaaaggcaacartttatccattttccaagtcatgccaaggaacataccatttctgttgtagacatggaagaatgcaattttccttgcaaaatatcaaatccacagaatagca

SEQ ID NO: 113663 - DNA, 201 bp, Homo sapiens
ggcatgaacctgggaggtggaggttgcagtgagccaagatcgcgctactggactccagtccgggtgacagagctagactccgtctcaaaaaaaaaaaaaaagaactgagacccaaatttgcactttatctctaaaagtgacttattgtctagtattatacataatttcctttcaaatatgtgaaaagtagagcccccatgg

SEQ ID NO: 113664 - DNA, 201 bp, Homo sapiens
gtactcaggaggctgaggcaggagaatggcatgaacctgggaggtggaggttgcagtgagccaagatcgcgctactggactccagtccgggtgacagagcwagactccgtctcaaaaaaaaaaaaaaagaactgagacccaaatttgcactttatctctaaaagtgacttattgtctagtattatacataatttcctttca

SEQ ID NO: 113665 - DNA, 201 bp, Homo sapiens
cctgtagtcccaggtactcaggaggctgaggcaggagaatggcatgaacctgggaggtggaggttgcagtgagccaagatcgcgctactggactccagtcygggtgacagagctagactccgtctcaaaaaaaaaaaaaaagaactgagacccaaatttgcactttatctctaaaagtgacttattgtctagtattataca

SEQ ID NO: 113666 - DNA, 201 bp, Homo sapiens
ccacctctgtgataacttttattcagaaaacatttccttggcagatcaagtcactggctcaatcaaaattgcccttcctgcccctgcatgatcagcccccractgctactgttgactccttttctggcagtggggctgaggggcagagcaggggagggaggtaggggaagggagctaggcctggaggtttacatctggctc

SEQ ID NO: 113667 - DNA, 201 bp, Homo sapiens
tccaccattgagggttttaatgtagccggtcttcttcccagcttcataattgactccacttgttcagctgagctgggtttctgggagtccctctagatccytgctgtggtcttttcatagcttccacctcactgctgccatctctcgaatcctccctgagccactgtgcagatgagtgttgtggctcacgccgccttctcc

SEQ ID NO: 113668 - DNA, 201 bp, Homo sapiens
acaaacatggccagaaacagccactcaggggctttgcacaacttgatgtcacatcatcagtaagaagcaaaggcagaatttgaactgaggtctttctggtkctgagttcttgcttctccgcatggttgtgttatgccaagggagctagaggtggaaacggtaatatttcttgcacacttgcctatgcaccaggcacttttc

SEQ ID NO: 113669 - DNA, 201 bp, Homo sapiens
atagttgtgaataccaggttttaaagaaatactatgttgcactcattgacaaaaatttaaaccattcaaaagaattcaagggaagagtgaaacccaccccmtatatatcccatggggtatccactgcaaataatttactgcttatttttccggatactcttttacagtcatataagtttacacatgaacacatatttacat

SEQ ID NO: 113670 - DNA, 201 bp, Homo sapiens
gctgaactctgttctaggacacaaaggcattaacttaagaactgagacccttggcctagcgagatggctcacgcctgtaatcccagcactttgggaggccraggtgggcggatcatgaggtcaggagattgagaccatcctggctaacacggtgaaaccccgtctctactaaaaattacaaaaaattaactgggcatggtg

SEQ ID NO: 113671 - DNA, 201 bp, Homo sapiens; identical to SEQ ID NO: 19001

SEQ ID NO: 113672 - DNA, 201 bp, Homo sapiens
gggcatggtggcgggcgcctgtagtcccaggtactcaggaggctgaggcaggagaatggcatgaacctgggaggtggaggttgcagtgagccaagatcgckctactggactccagtccgggtgacagagctagactccgtctcaaaaaaaaaaaaaaagaactgagacccaaatttgcactttatctctaaaagtgactta

SEQ ID NO: 113673 - DNA, 201 bp, Homo sapiens
cctaattcttgctggtcttaacttgcaggataattcagctccttatggggcccggtatgtgggctccatggtggctgatgttcatcgcactctggtctacrgagggatatttctgtaccccgctaacaagaagagccccaatggaaaggtaagggtgtcccctggagagggagtgaggagcagatttcacttgcagcccac

SEQ ID NO: 113674 - DNA, 201 bp, Homo sapiens
agtagctgggactacaggcacccaccaccacacccggctacttttttgtattttttaatagagacggggtttcaccatgttagccaggatggtctcgatcycctgacctcgtgatccacccgcctcagcctcccaaagtgctgggattacaggcgtgagccaccacgcccggcccttttttaaaaaaattattattatact

SEQ ID NO: 113675 - DNA, 201 bp, Homo sapiens
atattaaaaaaaacctttggccaggtgtggtggctcacgcctgtaatcccagcactttgggaggccaagatgggcggatcgtggggtcaggagttcgacamcagcctggtcaacatggtgagaccctgtctctactaaaaatacaaaaattagccaggtgtggtggcaggtgcctgtaatcccagctactcgggaggctga

SEQ ID NO: 113676 - DNA, 201 bp, Homo sapiens
tctgtgaagggcacgagcaggactcatgctaatcagctctgctttttctatattaaaaaaaacctttggccaggtgtggtggctcacgcctgtaatcccakcactttgggaggccaagatgggcggatcgtggggtcaggagttcgacaccagcctggtcaacatggtgagaccctgtctctactaaaaatacaaaaatta

SEQ ID NO: 113677 - DNA, 201 bp, Homo sapiens
gagggacgcttactgggggtaaagagaagaggcgttcccaagaaaggggcaggaaccagcttaacgcatctgtcaccacccagcggggtcatggaaacgcraagcaggtggagcccatttcctgccgtggtttggtggacgcaggcagccccatccatgcaggtgctaaaggccctgtgtggcttggtggatgcaggcagc

SEQ ID NO: 113678 - DNA, 201 bp, Homo sapiens
gctaatttttgtatttttagtagagatgggattttgccaagttgaccagggtcgaactggcctcaagtgatccacctgcctcggcctcccaaagtgctggrattagaagtgtgagccactgcgcccggcctaatttttgtatttttagtagagacagggtttagccatgttggccaggcgacatttttgatgtgaattcag

SEQ ID NO: 113679 - DNA, 201 bp, Homo sapiens
tcactctttctgcaattagggacccaagtcaggtttctaatccagttatctctgacctgaaacaagacctgttaggagcgagtgtcccccccgccccccccgcaagcaggctgggaggtctcctgtgtgtccagagcctttaggagcagcagggcttgtgtgcaaaggagctcccgtgggctgccccttgctgggacagtt

SEQ ID NO: 113680 - DNA, 201 bp, Homo sapiens
gttctcattgttcaactcccatttatgagtgagaacatgtggtgtttggttttctgttcctgtattagtttgctgagaatgatggattccagcttcatccrtgtccctgcaaaggacatgaactctttcttctaaatcttaccgaacactcacttttggtgggtttatggactcatctacatgttctggtggtcatggctt

SEQ ID NO: 113681 - DNA, 201 bp, Homo sapiens
gagatctggaccagtttagcagacaggaatgtgcagggattcagagcacgttttggagagagatggagccaagcttagattcctggccctgccattcaacrtctgtgaggattgggctgttgatgtgacatcactgaacctgtttctccaattgttaagatggagacagcctcagagactcgtaggaggatcaattaagtt

SEQ ID NO: 113682 - DNA, 201 bp, Homo sapiens
cctggccctgccattcaacgtctgtgaggattgggctgttgatgtgacatcactgaacctgtttctccaattgttaagatggagacagcctcagagactcrtaggaggatcaattaagtttactaattgggtaccaatgttattaatatcattgttttcctgaaggctatatttctttatttttcagacagagtctagctc

SEQ ID NO: 113683 - DNA, 201 bp, Homo sapiens
tattgctggcactggcttgatgaatggttgaatttaaccaaatggttaactgttttgtctcagatgcaacctggggtgggaggaaacttttacagcctcayaggaaggaaaaatacagtattcgttcccttggaaactcccaccagctctgcatgttttgctgcagaaaagtctcttttttacgcaataccttctgataca

SEQ ID NO: 113684 - DNA, 201 bp, Homo sapiens
cattaagtccagtttccatggtataaagagaaggcaatgatcgcttctgccaaaatgtcattctgtccagtatgcaggtggtctgtctcacatttgcatcrggtaatctattgctggcactggcttgatgaatggttgaatttaaccaaatggttaactgttttgtctcagatgcaacctggggtgggaggaaacttttac

SEQ ID NO: 113685 - DNA, 201 bp, Homo sapiens
cttggcactccctaaccaaatgctgtctccataatgccactggtgttaagatatattttgagtggatggaggagaaataaacttattcctccttaaaaaaagtctcccttgctttgtgtcaaataataatgatgatgacaataataactgctgatgcatataacattagataactcatttaatcttcacaataacccaatg

SEQ ID NO: 113686 - DNA, 201 bp, Homo sapiens; identical to SEQ ID NO: 18998

SEQ ID NO: 113687 - DNA, 201 bp, Homo sapiens
agttgcaaacaatatcacactgtttggaggagccggtctgctttccagatgtctgtagccagacaccaccatggattttttttattgcttttagaataggygaagctccatccaacacacacagaatcactcattaagtccagtttccatggtataaagagaaggcaatgatcgcttctgccaaaatgtcattctgtccag

SEQ ID NO: 113688 - DNA, 201 bp, Homo sapiens
cgatctcagctcactgcagcctctgcctcctgggttcaagtgattctcctgcctcagcattctgagtagctgggattacaggtgcccgccaccacgcccgrctaatttttatatttttagtagagacggggtttcaccatgttgaccaggctggtcctgaacttctgacctcaagtgatccacccgccacagcctcccaaa

SEQ ID NO: 113689 - DNA, 201 bp, Homo sapiens
ggtaaaatctacagccttaacgagggctacgccaaggactttgaccctgccgtcactgagtacatccagaggaagaagttccccccagtaagtgagggccyggggagggtggtgcaggttctgggcatctggcaccagaggccgttctggaggcaggggcatcccccggagatgaaagggatccttgggatcgagggcctt

SEQ ID NO: 113690 - DNA, 201 bp, Homo sapiens
cttccttgtctaaaaaggccatcggggagttcattttggtggacaaggatgtgaagataaaaaagaaaggtaaaatctacagccttaacgagggctacgcyaaggactttgaccctgccgtcactgagtacatccagaggaagaagttccccccagtaagtgagggcccggggagggtggtgcaggttctgggcatctggc

SEQ ID NO: 113691 - DNA, 201 bp, Homo sapiens
aatcccttcttgtttccagattgcaggggagcatccctgtagggaagcttctgtgtgtttgatagtcttttgccctcctcagtcctgaatgtttggaagcrcaatgcagggctgctgggatttgattccagcccttctgtctgcggtgcctgacggggctgagcctcccgccagggaggtgctaagtgcttcctctttgtt

SEQ ID NO: 113692 - DNA, 201 bp, Homo sapiens
ggggtggggtgggggagttagtggcagaaccagagcaaagttccacctgagcccaggatggaatttcgggcaccactgatgtttgctgactgtgatttgcygggccctgactgcttcccattcttctggtgccttctcttgttacctttgagttggtggaagcagagaaaacattcaatcccttcttgtttccagattgca

SEQ ID NO: 113693 - DNA, 201 bp, Homo sapiens; identical to SEQ ID NO: 19003

SEQ ID NO: 113694 - DNA, 201 bp, Homo sapiens
ttttaacttttagagatgtcctcctatgacattagtgaactatgtgtaaagtgctttttgctggcaaactgaaccccaggaacagacaaggaataggaacyttctgtgcgagataggctgctggaggtgaggccgggtctgtgtgtggcaggaaggctaactcaacacaggctgcctttgtcccaggctgtcagggaagtg

SEQ ID NO: 113695 - DNA, 201 bp, Homo sapiens
cgggtagatcactcaaagtccaggtgtttgagaccagcctggccaacatggtgaaaccctgtctctactaaaaacacaaaaattagccaggcatggtggcrggcgcctgtaatcccagctacttgggaggctgaggcaggagaattgcttgaacccgggaggcggaggttgcagtgagcccagatcgtgccactctactcc

SEQ ID NO: 113696 - DNA, 201 bp, Homo sapiens
gtactgtctggtgaatacaaaccaaactgaatcaaataacccagtgcaaccagctaactaaccacctccccaggtgaaaactaggaggggcagggaagcgktggaaagaaatgggtttgtggttttctggtttgtggttttctcatttatatgagtagttgttatgcttgaatgtgaagttcttacacttgagtgtgaagg

SEQ ID NO: 113697 - DNA, 201 bp, Homo sapiens
tgtactgtctggtgaatacaaaccaaactgaatcaaataacccagtgcaaccagctaactaaccacctccccaggtgaaaactaggaggggcagggaagckgtggaaagaaatgggtttgtggttttctggtttgtggttttctcatttatatgagtagttgttatgcttgaatgtgaagttcttacacttgagtgtgaag

SEQ ID NO: 113698 - DNA, 201 bp, Homo sapiens
gttggagcagcccagagtaatctatcttcatgtgttctcttacacttcaaagacaactggaggatagctggagaagggtccttcctgctagaagaggggarggacgcttactgggggtaaagagaagaggcgttcccaagaaaggggcaggaaccagcttaacgcatctgtcaccacccagcggggtcatggaaacgcaaa

SEQ ID NO: 113699 - DNA, 201 bp, Homo sapiens; identical to SEQ ID NO: 19004

SEQ ID NO: 113700 - DNA, 201 bp, Homo sapiens
tgtcctccttcactctttctgcaattagggacccaagtcaggtttctaatccagttatctctgacctgaaacaagacctgttaggagcgagtgtcccccccgccccccccgcaagcaggctgggaggtctcctgtgtgtccagagcctttaggagcagcagggcttgtgtgcaaaggagctcccgtgggctgccccttgct

SEQ ID NO: 113701 - DNA, 201 bp, Homo sapiens
gcacaggtgccagcctgggctggagggtggcagaaatagcaggccctcccttggatccctttacggggggagctgacttatacatggcactggccaatccycctccctcctgatccccaaattatccaggcttctgctcatccttgacacccacagtgccggacaaccggcgcctctcccagagatctgctcataacactg

SEQ ID NO: 113702 - DNA, 201 bp, Homo sapiens; identical to SEQ ID NO: 19009

SEQ ID NO: 113703 - DNA, 201 bp, Homo sapiens
gtggcgcgatctcagctcactgcaagctccgcctcccggattcatgccattctcctgcctcagcttcccaagtagctgggactacaggtgcccgccaccaygccaggctaatttttttgtatttttagtagagacggggtttcaccacgttagccaggatagtctcaatctcctgacctcgtgatccgcctgcctcggcct

SEQ ID NO: 113704 - DNA, 201 bp, Homo sapiens; identical to SEQ ID NO: 19010

SEQ ID NO: 113705 - DNA, 201 bp, Homo sapiens; identical to SEQ ID NO: 19011

SEQ ID NO: 113706 - DNA, 201 bp, Homo sapiens
acacctatgtggaaatagactcaggaaacacctgcagaaagctgtcgctcagtaggcagactgcatgaaaaggcatacaataaaaaagttaatatttaaargtgaatgccaagacgtataatacactgaattccaacccaaaagccttcggagaatcgtaaaaggaatgcacacagagttgcaaacaatatcacactgttt

SEQ ID NO: 113707 - DNA, 201 bp, Homo sapiens
tctccacctttccttccttgtctaaaaaggccatcggggagttcattttggtggacaaggatgtgaagataaaaaagaaaggtaaaatctacagccttaasgagggctacgccaaggactttgaccctgccgtcactgagtacatccagaggaagaagttccccccagtaagtgagggcccggggagggtggtgcaggttc

SEQ ID NO: 113708 - DNA, 201 bp, Homo sapiens
ataccttctgatacaaggaggccgctacccggtcttgttttccagctgagactgctgtacgaatgcaaccccatggcctacgtcatggagaaggctggggkaatggccaccactgggaaggaggccgtgttagacgtcattcccacagacattcaccagagggcgccggtgatcttggggtcccccgacgacgtgctcgag

SEQ ID NO: 113709 - DNA, 201 bp, Homo sapiens
gcattgctggttctaccaacgtgacaggtgatcaagttaagaagctggacgtcctctccaacgacctggttatgaacatgttaaagtcatcctttgccacktgtgttctcgtgtcagaagaagataaacacgccatcatagtggaaccggagaaaagggtgggtctgtacttccaccattgagggttttaatgtagccggt

SEQ ID NO: 113710 - DNA, 201 bp, Homo sapiens
ccaacttttttaacttttagagatgtcctcctatgacattagtgaactatgtgtaaagtgctttttgctggcaaactgaaccccaggaacagacaaggaayaggaaccttctgtgcgagataggctgctggaggtgaggccgggtctgtgtgtggcaggaaggctaactcaacacaggctgcctttgtcccaggctgtcag

SEQ ID NO: 113711 - DNA, 201 bp, Homo sapiens
cctggccaacttttttaacttttagagatgtcctcctatgacattagtgaactatgtgtaaagtgctttttgctggcaaactgaaccccaggaacagacarggaataggaaccttctgtgcgagataggctgctggaggtgaggccgggtctgtgtgtggcaggaaggctaactcaacacaggctgcctttgtcccaggct

SEQ ID NO: 113712 - DNA, 201 bp, Homo sapiens
tatggacctgatggggctgtagatattctgtttgccataaactgtatccatccatttctagcttttctactttagtcaccaaaaggctgttttcctgagaygaatgggtgtgccaactgaagcagtggacgacattgcttcttcaaaaatagctcccacatttattcgtgtacatttacacaaaccttcagttaactggtg

SEQ ID NO: 113713 - DNA, 201 bp, Homo sapiens
attgggaggagggggcccgccttgccaaggcttctattaatggttcaagaaacactggattgtaaaaaacataatgtttctgcatgtgtgcaacactatgytggccaactaaaatgcatttatggacctgatggggctgtagatattctgtttgccataaactgtatccatccatttctagcttttctactttagtcacca

SEQ ID NO: 113714 - DNA, 201 bp, Homo sapiens
aaggctgcttctgaagccctgggcaagtgccacacccttagcaagtgctaaatagatgtttgctgtttagtttccacaccaggcccccggggccacaggarctgggggaggtgtttaaggaaggaccatgctactgcaatccctctcacatacaccacttggcttttgtttttctttttgtctttttgttagagacacact

SEQ ID NO: 113715 - DNA, 201 bp, Homo sapiens
tgtgagcaaatgaatgatatgtgtgggggattggcaggggtatgtggaggtgggaggtgatgcccatggagggacagagatgatgatgtgtggtggaaagrgggcaggagaccaagagagagtgtatgcctcccgagcagactatggaggtgagaaatgccatctcagactggcacaagagggggtctttgttccaatgtg

SEQ ID NO: 113716 - DNA, 201 bp, Homo sapiens
ggatgtgaagataaaaaagaaaggtaaaatctacagccttaacgagggctacgccaaggactttgaccctgccgtcactgagtacatccagaggaagaagwtccccccagtaagtgagggcccggggagggtggtgcaggttctgggcatctggcaccagaggccgttctggaggcaggggcatcccccggagatgaaagg

SEQ ID NO: 113717 - DNA, 201 bp, Homo sapiens
actgtatggcagtgccaccatgctggtccttgccatggactgtggggtcaactgcttcatgctggacccggtgagagacctcacaggaggctgggggcttrgctggtgtctgtgagcaaatgaatgatatgtgtgggggattggcaggggtatgtggaggtgggaggtgatgcccatggagggacagagatgatgatgtgt

SEQ ID NO: 113718 - DNA, 201 bp, Homo sapiens
tgaatgtgcatttttaataaatatcccaggtgattctaatgcaggtgctctgtgggccacccttttgaaagttatgggaagaaattacctggaatgttttkctgggatgacttccttctccagctgcgtgatacagatgcccctgcttacgctcagctgcaggaatctaggaaaagaataagtgaagttcgagaaattgca

SEQ ID NO: 113719 - DNA, 201 bp, Homo sapiens
ttgaccttggaggggcccacctgggggtccgtctcacaggtgtacacctgattccatcttgcattcctcttctctgccctgagcagcctgcctcgtacccstctcagccggccaagtgtgggcacctggcctgcccgtcatacccgccctagcctcagacaggaaagtgctagctcaggtgccttccttccccatttcttc

SEQ ID NO: 113720 - DNA, 201 bp, Homo sapiens
gtgagggcctttcaccaagcacagcaagcccataaatagctctgtgatcaccaatgcatcagtggcgctgaaaaaagcgtgagctggacgctgccccccccttcctctgggccttccagatgccccgtgtgtccacgctgttgtgtgccctgaaagaactttggcatttgctgaaaggtcaccagctgcaatttcagatca

SEQ ID NO: 113721 - DNA, 201 bp, Homo sapiens
ctgtgagggcctttcaccaagcacagcaagcccataaatagctctgtgatcaccaatgcatcagtggcgctgaaaaaagcgtgagctggacgctgcccccsccttcctctgggccttccagatgccccgtgtgtccacgctgttgtgtgccctgaaagaactttggcatttgctgaaaggtcaccagctgcaatttcagat

SEQ ID NO: 113722 - DNA, 201 bp, Homo sapiens
tcactgcagcctctgcctcctgggttcaagtgattctcctgcctcagcattctgagtagctgggattacaggtgcccgccaccacgcccgactaatttttrtatttttagtagagacggggtttcaccatgttgaccaggctggtcctgaacttctgacctcaagtgatccacccgccacagcctcccaaagtgctgggat

SEQ ID NO: 113723 - DNA, 201 bp, Homo sapiens
tcccgggttcaagtgattctcctgcctcaatttcccgagtagctgagattacaggcgtacactaccatacctggctaatttttgtatttttagtagagatrggattttgccaagttgaccagggtcgaactggcctcaagtgatccacctgcctcggcctcccaaagtgctgggattagaagtgtgagccactgcgcccgg

SEQ ID NO: 113724 - DNA, 201 bp, Homo sapiens
acatctggctcagttcagcccatgtcttggccatttcacctgttcctctcctttaattgtaaggcacagttggcctggggagggcttttttggacagggtygtgtgatggtttcccatatccctccagcctcatttgctgccttttcccatccctagagaatggcaaattgggagctgatctagaagggagctgggtggtg

SEQ ID NO: 113725 - DNA, 201 bp, Homo sapiens
gctgggattacaggcatgagccaccacgcgtggctgcctttttttttttttttaatgcaagaggagaacaggaacaacagttcccttaaacacaaaacctrtgtgtttggatgtatttgggtctgtttgcagcatgtggcatccagaatgaaggcatttctatttactgaaaccatcatccagctgtagctgcctcgggca

SEQ ID NO: 113726 - DNA, 201 bp, Homo sapiens
ggagtgcagtggcgcgatctcagctcactgcagcctctgcctcctgggttcaagtgattctcctgcctcagcattctgagtagctgggattacaggtgccygccaccacgcccgactaatttttatatttttagtagagacggggtttcaccatgttgaccaggctggtcctgaacttctgacctcaagtgatccacccgc

SEQ ID NO: 113727 - DNA, 201 bp, Homo sapiens
acccggttcaagcatggctgaccaggcgcccttcgacacggacgtcaacaccctgacccgcttcgtcatggaggagggcaggaaggcccgcggcacgggckagttgacccagctgctcaactcgctctgcacagcagtcaaagccatctcttcggcggtgcgcaaggcgggcatcgcgcacctgtgagtcgggccttgggc

SEQ ID NO: 113728 - DNA, 201 bp, Homo sapiens
aaaacaaaaacattctttgatttctttcttgctctagaaatcaactgatgagccttctgagaaggatgctctgcaaccaggccggaacctggtggcagccrgctacgcactgtatggcagtgccaccatgctggtccttgccatggactgtggggtcaactgcttcatgctggacccggtgagagacctcacaggaggctg

SEQ ID NO: 113729 - DNA, 201 bp, Homo sapiens
ttctcagcctttaaggtgttactaaatggtacagtttctgtaatgcctgcctcagccccataaccagaatcaaccataccctcgttggggcttctgtgggyaatctgacctattgtgagatgatgagaggctgtctccatttttccattttctatttattgggaacaggattctcatcacattttttagcacagccccaaa

SEQ ID NO: 113730 - DNA, 201 bp, Homo sapiens
atctgccccaggctctctctccagcttactcatctctcctttcaccttatcctggattcccctcctgcccccaagctccgcacacgcacacccgagtcccrcaggctcctcctccaggaccatatccctctccacattgctaagcagacacttgtgcagtttcctctcctgtaaattacacactgcctcccacccctgccc

SEQ ID NO: 113731 - DNA, 201 bp, Homo sapiens
tgatctcggctcactgcaagttctgcctcctgggttcgagcgattctcctgcctcagctcctgagtagctgggactacaggcgcctgccaccacacttgtwtttttagtagagacggggtttcgccatgttggtcaggctggtcgcgaactcctaacctcaggtgatctgcccgcctcagcctcccaaagtgctgggatta

SEQ ID NO: 113732 - DNA, 201 bp, Homo sapiens
tccttgtctaaaaaggccatcggggagttcattttggtggacaaggatgtgaagataaaaaagaaaggtaaaatctacagccttaacgagggctacgccarggactttgaccctgccgtcactgagtacatccagaggaagaagttccccccagtaagtgagggcccggggagggtggtgcaggttctgggcatctggcac

SEQ ID NO: 113733 - DNA, 201 bp, Homo sapiens
gctgacggtttctgctgaaaacactgctacagctgtactcgggtttccagcggcttcaactttctgggagcttttatgttttgtctctgtacacagacttycctcctttgcaccatggacagtctggctgggccctgcgctctgcacccagcaactgttgtgagatggctttcttttctatatagttttttgaaagacatt

SEQ ID NO: 113734 - DNA, 201 bp, Homo sapiens
ttgtgattttgcatcattttatattaagatttttgccccagcattttgtttgcatttgcttttatatctttgcttgttctttttttaatttttttttttttgagatggagtctcactccatcacccaggctggagtgcagtggcgtaatcttggctcactgcaacctccgcctcccagtttcaagtaatcctcctgtctca

SEQ ID NO: 113735 - DNA, 201 bp, Homo sapiens
tttttggcctggcacagtggctcgtgcctgtagttccagcattttgggaggccaaggcaggtgggagcctaggaattcaagaccagcctgggtaacacggygaaaccccatctctactaaaaatgaacctggtatggtggcatgtgcctgtagtcccagctactcaggaggctgaggtgggaggatcatgtacttgagcct

SEQ ID NO: 113736 - DNA, 201 bp, Homo sapiens
cttattgatttctgggagctctttatatattagaaaaattcgacttatgtgatatgagctgcatttaagttgtcccaggttgtcacttcttttttttttttgagacacagtcctgctgtgtcatctacgctggagtgcagtggtgtgatcttggctcactgcaacctccatccctcaggttcaagcaattctctcgcctca

SEQ ID NO: 113737 - DNA, 201 bp, Homo sapiens
ttagtagagacagggtttcaccctgttggccagcctggtcttgaacttctggcctcaagtgatccactcacctcggcctctcaaagtgctgcgattacagrtgtgagtcaccacactcggccttgctactggttatttttaatctttaagacagtaaaacaggtgaaagtgaagcaatatggaaactttctttcaaataga

SEQ ID NO: 113738 - DNA, 201 bp, Homo sapiens
tttgtatttttagtagagacagggtttcaccctgttggccagcctggtcttgaacttctggcctcaagtgatccactcacctcggcctctcaaagtgctgsgattacaggtgtgagtcaccacactcggccttgctactggttatttttaatctttaagacagtaaaacaggtgaaagtgaagcaatatggaaactttctt

SEQ ID NO: 113739 - DNA, 201 bp, Homo sapiens
gctcaagtgatgctcccgccttggccttccaaaattctggaattacaggagggagccaccattcctgccttttttttttttttttttttttttttttttttgagacagagtcttgctctgttgcccaggctggagtgcggtggtatgagcatagctcactgcagcctcagccttctgggctcacgcagtcctcccacctca

SEQ ID NO: 113740 - DNA, 201 bp, Homo sapiens
aattcctgtttgcatacttgaagacaactattgttaacatttgcctttttttttgccagacctttaaaaacacgtttttccagccgggcgaggtggctcaygcctgtaatcccagcactttgggaggctgaggcgggtggatcacttgaagtcaggagttcgagaccagcctggccaacttggtgaaaccccccatctcca

SEQ ID NO: 113741 - DNA, 201 bp, Homo sapiens
tccaggacccgaaaccctgctacactgtgtttccatagctgcaaccccccaaaagagggtccccaaatcaaaggaatacaaaggaaaacaaaatagaaaggaaaagaaaggaagaggagagatggaatcctctctgtcattagttttctgtttgtttgttttttagggtctccctctgtcacccaggctggaatgctgtgg

SEQ ID NO: 113742 - DNA, 201 bp, Homo sapiens
ctccctgcttgcctatgcctggccagctgggaagattcttaaataaccgactggacaccggccccaggccacgcagtgctcccccagtaaaggataggtcyacgtctttctcagtcctggccaaaaacgtctgtgaacacacccactagaaacaagccaggaacaaaccgctgctctgaggatctgattacatttccccag

SEQ ID NO: 113743 - DNA, 201 bp, Homo sapiens
tccctgcttgcctatgcctggccagctgggaagattcttaaataaccgactggacaccggccccaggccacgcagtgctcccccagtaaaggataggtccwcgtctttctcagtcctggccaaaaacgtctgtgaacacacccactagaaacaagccaggaacaaaccgctgctctgaggatctgattacatttccccagg

SEQ ID NO: 113744 - DNA, 201 bp, Homo sapiens
caagccaggaacaaaccgctgctctgaggatctgattacatttccccagggcaggtttccaccagagcgagcgcccctccctcctcctttcccagaactcmgttgcccaacaactgttccagctcctgctcctgaggcgggggcagcctgaggaaaccagggcctcaggcgacagccggctctgttaggcaggggcaggac

SEQ ID NO: 113745 - DNA, 201 bp, Homo sapiens
tcagccttctgggctcacgcagtcctcccacctcagtttcctgaatagctaggactaccacccctggctaattgttttatttttattttttgtagtgatgyggtctccctatgtttcccacgcaactcttggcctcaagattctcctgcctcagcctcccaaagtgctgggattacaggcatgcgccactgtgcctggcct

SEQ ID NO: 113746 - DNA, 201 bp, Homo sapiens
tctcagagtcaagcacctcctcttggccacagtgagattgagcccctagccctggtgcagccccaggcaaatgaggctgggccacaggtagacagaccccyttcccccagcaaagggtgtttgaaccccgctctgccgctgcccagcaggccttggtttcctctacacttacactgtagttaatcataagaggacctgcca

SEQ ID NO: 113747 - DNA, 201 bp, Homo sapiens
aggctggtctggagctcctgggctcaagtgatcctcacacctccacctcccaaagtgctgggattacaggcatgagccaccttgcccagccctgaattacrtttcctttgacccagagggctcacttctaggaaccaatcctatagaagtaattaaggacatgctcaaagatgtaagtgatggttaccatggtgttgttta

SEQ ID NO: 113748 - DNA, 201 bp, Homo sapiens
cgctgcccagcaggccttggtttcctctacacttacactgtagttaatcataagaggacctgccacacaggatggtgagggattgaacaagtcaaagcagraaaccactttgaccaacggctgcacatggtcagtgctcagaaaatacacgccattgttactattaaaccacacagctccaggcctgacagtgagctttta

SEQ ID NO: 113749 - DNA, 201 bp, Homo sapiens
ccttaccagaccctctcagccaccatgctctgttattcccattttacagacaaggagactgagtctcagagtcaagcacctcctcttggccacagtgagaytgagcccctagccctggtgcagccccaggcaaatgaggctgggccacaggtagacagacccctttcccccagcaaagggtgtttgaaccccgctctgccg

SEQ ID NO: 113750 - DNA, 201 bp, Homo sapiens
cgccactgtgcctggcctctggctaatttttttatttttattttttgtagagatgaggtcttcctgcgttgcccaggctggtattgaactcttggcctcargatcctcccacctcagcctcccaaagtgctgggattacaggtgtgagccacctcgcccagtcagcacctgatgtctgtctgtctgtctgtctgtcttttt

SEQ ID NO: 113751 - DNA, 201 bp, Homo sapiens
tctccaggacccgaaaccctgctacactgtgtttccatagctgcaaccccccaaaagagggtccccaaatcaaaggaatacaaaggaaaacaaaatagaaaggaaaagaaaggaagaggagagatggaatcctctctgtcattagttttctgtttgtttgttttttagggtctccctctgtcacccaggctggaatgctgt

SEQ ID NO: 113752 - DNA, 201 bp, Homo sapiens
tgtctgtcttcacctgtttgaaagtcattgtcccagatatagttacgggacccagagagccctgatcatctgtgaccatcatttgctccttccccttcagktgggggtaggcctctacccattaagccagacactgttacctgaccttaccagaccctctcagccaccatgctctgttattcccattttacagacaaggag

SEQ ID NO: 113753 - DNA, 201 bp, Homo sapiens
ttctccaggacccgaaaccctgctacactgtgtttccatagctgcaaccccccaaaagagggtccccaaatcaaaggaatacaaaggaaaacaaaatagaaaggaaaagaaaggaagaggagagatggaatcctctctgtcattagttttctgtttgtttgttttttagggtctccctctgtcacccaggctggaatgctg

SEQ ID NO: 113754 - DNA, 201 bp, Homo sapiens
acacaccttcccctgtgcccgcactgtcacccaccacaagcctactccagcaggagcaccacagccttctgcggtcacgctgtgcagtcagctggcagacrgggagccaggtggaccagcacatgagagcgaaacaggaagagtgtctgtcttcacctgtttgaaagtcattgtcccagatatagttacgggacccagaga

SEQ ID NO: 113755 - DNA, 201 bp, Homo sapiens
ggcctcaagatcctcccacctcagcctcccaaagtgctgggattacaggtgtgagccacctcgcccagtcagcacctgatgtctgtctgtctgtctgtctktcttttttttttttttttttttgacagagtttcgctcttgttgcccaggctggagtgcaatggcacggtcttggctcactgcaaccgccacctcccgggt

SEQ ID NO: 113756 - DNA, 201 bp, Homo sapiens
cttctccaggacccgaaaccctgctacactgtgtttccatagctgcaaccccccaaaagagggtccccaaatcaaaggaatacaaaggaaaacaaaatagaaaggaaaagaaaggaagaggagagatggaatcctctctgtcattagttttctgtttgtttgttttttagggtctccctctgtcacccaggctggaatgct

SEQ ID NO: 113757 - DNA, 201 bp, Homo sapiens
ccttcccttccagaccagtgtccacataccctcccctgtgcccacacaccttcccctgtgcccgcactgtcacccaccacaagcctactccagcaggagcmccacagccttctgcggtcacgctgtgcagtcagctggcagacagggagccaggtggaccagcacatgagagcgaaacaggaagagtgtctgtcttcacct

SEQ ID NO: 113758 - DNA, 201 bp, Homo sapiens
tgcagagctcctatgggactggccgaggcccctgtggcaatgacagcctcacagctcaacatctccctctgtgcagtcctgcgtcccttgccctcacaggractcagagccctccccttgccctgcatggggctctccaagtcctcagtcagctccccgggccaggcccatgaccaagggcattgaaggaaatgtcgagtg

SEQ ID NO: 113759 - DNA, 201 bp, Homo sapiens
gatcctcccgggctggtgaggacaggaggcaagagggaggggcttgggggacacttgatgaattggctttgatcttccccagagggagttggaagtcagcrgaggggagggccccagtctttggtgcttcctccctgggagggagcaggtgtgaacactcccattgatgactacgcagggaggagagagcctagttcaggg

SEQ ID NO: 113760 - DNA, 201 bp, Homo sapiens
caatcctcacagagccctgtgtgtcacatggcgaagccatcacttctgacagtccttacgcagaccagactctggcctgggcctgtgatggttacacaccwtgggtggcactggcctggtccttgggtgagctcacaggtgtgtcgcagagagtggaagggaccctgctcagaccccagtccatggcccactgtgctccca

SEQ ID NO: 113761 - DNA, 201 bp, Homo sapiens
gcttattgattggtttgagctcatcagtaaggttttaccccttgtctggtctttgtgtgccaaggatctttccccagtttatcatttggctcttatttgtkggtgtgtttgtgcgtgcgtgggtgtgtgtgtgggtgtatgtctgtgagacagagagatagagaggagcagcaagttttttgttttactttatctgtgtgt

SEQ ID NO: 113762 - DNA, 201 bp, Homo sapiens
agcaactcccaagcccacctggccacggggccactgggttcagacctccaaggatgcagttcagctggggatgcaggtcccggaaggtggtggcaggtggrcggcctccaccaccaagccagccatctgagttctgaagtgcacctcctctcactctccccagctgcctccttctttggggacctgctaggcgtgctcaca

SEQ ID NO: 113763 - DNA, 201 bp, Homo sapiens; identical to SEQ ID NO: 19017

SEQ ID NO: 113764 - DNA, 201 bp, Homo sapiens
gaagaaagacaggggcagggggcaccatgtcttggttcacaccacagccctgtccttgctacccgcatcccagggagctcacccggcctctgccccccacmtttcgcactggcccacttggtcacacagcgatctacacactcattggttcactcttactggtcactcactcgttcactcattcattcatttactgatcat

SEQ ID NO: 113765 - DNA, 201 bp, Homo sapiens
tggggctctccaagtcctcagtcagctccccgggccaggcccatgaccaagggcattgaaggaaatgtcgagtgatgtgaccgagagtgacaggagggtcrtggccactcacaccaaggggcaagaaaattcaggatgagtccgcagtgcaaagtgaaagcaagtttactaagattgtaaaggagccgggcgcagtgtctc

SEQ ID NO: 113766 - DNA, 201 bp, Homo sapiens
ccctacctcgggagcagcccatccccagtgacccactgcgggccagtgttggtgtagacccctgggttagtcggggttctccaaataaacagaaccagtcratgagaagatgaaataagacatcctctctcagctcagcagtgaggcaggagaacgggggcgaattcctccgtcctcagcctttccttctactcagggttg

SEQ ID NO: 113767 - DNA, 201 bp, Homo sapiens
ctgggtagattgccccctacctcgggagcagcccatccccagtgacccactgcgggccagtgttggtgtagacccctgggttagtcggggttctccaaatwaacagaaccagtcgatgagaagatgaaataagacatcctctctcagctcagcagtgaggcaggagaacgggggcgaattcctccgtcctcagcctttcct

SEQ ID NO: 113768 - DNA, 201 bp, Homo sapiens
gaatgacgtggctgatatacttgtaaagcatcctgctggctgttgagtgaatgggtcagagtgagccattttcccatgtgcctgctgcgtgctgggaaccyagctgggtgccggggagagaagatgcaggtgaaccctagatgcttattcccatggtgcttgcagaggtctggagccaccactgtctcctccatctgacct

SEQ ID NO: 113769 - DNA, 201 bp, Homo sapiens
cccaagaacatgagaagagtggaaatagcctctggctctcctggagggccattcctcatctcatcagtatctgttgagctcctgctgtcggctgaacctgygtcagcaccaggaacagaatgagagcgaggagcccctgccccttaggactgacacaacggaaaacacatacaatcatttccaggggacgagggctgcgct

SEQ ID NO: 113770 - DNA, 201 bp, Homo sapiens
gcccagggaggacctggtgggaaggggacttttgagtgggcatctgagagaagaaccctccaagcagaagaacagcaggtgccaaggccctagcagccgtktgaggcctgaaaaacaggcggccaggtgtggctggggcacaggtggcggggagagaagcagaacgtgaggtcagggggacacatggggcccagtggatca

SEQ ID NO: 113771 - DNA, 201 bp, Homo sapiens
gaggatgaatgggtgcagggtaggtaaacctagatgacccctctgcctccactgcagaacagcagtgcatgtgacttttctcctttttctcctgctgcggygggagcattctttatggagctgctatgttagtgatgttcaaagccacatgtgaccttagggtcatggggactctggagaaggtagtgggagaagtttcct

SEQ ID NO: 113772 - DNA, 201 bp, Homo sapiens
cggaccccgcccacaccatggagtcagatcatgccagcactcggggcccccaagtgggcagaggctcctgctgctgctactggccctccaactgtccaccygtccgcgtggttcacatggggttaaaagtactcaggaccaaaatagcccctctccctgcagaagaaagacaggggcagggggcaccatgtcttggttcac

SEQ ID NO: 113773 - DNA, 201 bp, Homo sapiens
tcttactggtcactcactcgttcactcattcattcatttactgatcattcattaattcactcattggttaactcatggaatcactgcctatttattgaccrcatactaagagctggacaccgttctaccatttcagagctgaacaaaacacaaaacatacctatcctcatggggttatgttctagacagacaaccaaagca

SEQ ID NO: 113774 - DNA, 201 bp, Homo sapiens
caggggtggctccccacaggacagcaggtgttctcaggaggatgaatgggtgcagggtaggtaaacctagatgacccctctgcctccactgcagaacagcrgtgcatgtgacttttctcctttttctcctgctgcggcgggagcattctttatggagctgctatgttagtgatgttcaaagccacatgtgaccttagggtc

SEQ ID NO: 113775 - DNA, 201 bp, Homo sapiens
gatattgggctgcggccaacttggccccatacacagtttctattcctgggtcttgggctctgacaccaaatatggcgtggcctgagtctggcacccccaaytgtggtccgacgacatatcctgctcctccaagtgggcccggaccccgcccacaccatggagtcagatcatgccagcactcggggcccccaagtgggcaga

SEQ ID NO: 113776 - DNA, 201 bp, Homo sapiens
ggaggccgaggtgggcggatcacccgaggtcaggagttccagaacatcctggccaacatggcgaaaccccgtctctactaaaaatacaaaaaaattagccrgacatggtggcgcactcctgtagtacttgggaggctgaggcaagagaatcgcttgaacccgggcggcggaagttggcagtgagccgagatcgcaccactg

SEQ ID NO: 113777 - DNA, 201 bp, Homo sapiens
ggggagtggccacagtaacaggctaactgggagtagctccctggtgacagggcgggaagtagtgagcctggaggcaggggcaggcagcaggggtgtgccargcccagctgacaaggtccaggacataggctgcaactgcgaggcccgtctcgggggccaggagcatgctttgggcctgaggtcacctggatattgggctgc

SEQ ID NO: 113778 - DNA, 201 bp, Homo sapiens
tgtctcccactacgtcccctccccaaaaccacccagttccagtgagtccaggtgtcctcttcctggcaagggggctcccatgccagttgggggtaaagagygtgtttcagccggacacggcggctcacgcctgtaatcccagcactttgggaggccgaggtgggcggatcacccgaggtcaggagttccagaacatcctgg

SEQ ID NO: 113779 - DNA, 201 bp, Homo sapiens
atttctgggagctctttatatattagaaaaattcgacttatgtgatatgagctgcatttaagttgtcccaggttgtcacttcttttttttttttgagacasagtcctgctgtgtcatctacgctggagtgcagtggtgtgatcttggctcactgcaacctccatccctcaggttcaagcaattctctcgcctcagcctcct

SEQ ID NO: 113780 - DNA, 201 bp, Homo sapiens
gatggagccaggcctccctcaagatttcccacagccctcttccagcctcaaaccttctccaggacccgaaaccctgctacactgtgtttccatagctgcarccccccaaaagagggtccccaaatcaaaggaatacaaaggaaaacaaaatagaaaggaaaagaaaggaagaggagagatggaatcctctctgtcattagt

SEQ ID NO: 113781 - DNA, 201 bp, Homo sapiens
gggtggaggtgggtggggaggggacccgatttggctccactagaggcaagtatgaccatgggacagggatggcaggctctcaccatccagttggtgacagstgtgggactgggagcatgataaagagcatgctacgtcctggctgcatgtccctgcttcctgaccttaaacactatcctgagtggtccttcacttccagcc

SEQ ID NO: 113782 - DNA, 201 bp, Homo sapiens
ctcagtcagctccccgggccaggcccatgaccaagggcattgaaggaaatgtcgagtgatgtgaccgagagtgacaggagggtcgtggccactcacaccarggggcaagaaaattcaggatgagtccgcagtgcaaagtgaaagcaagtttactaagattgtaaaggagccgggcgcagtgtctcatgcctgtaatcccag

SEQ ID NO: 113783 - DNA, 201 bp, Homo sapiens
ggtgtgcaccaccacacctggctaattttttttgtatttttagtagagatagggttttgccatgttgcctgggctggtctcaaactcctgagctcaagccrttcaccagccttggcctcccaaagtgctaggattataggcttcagccacaaggctgcattgttcttatttatttatttatttatttatttatttatttcg

SEQ ID NO: 113784 - DNA, 201 bp, Homo sapiens
agtagagatagggttttgccatgttgcctgggctggtctcaaactcctgagctcaagccattcaccagccttggcctcccaaagtgctaggattataggcktcagccacaaggctgcattgttcttatttatttatttatttatttatttatttatttcgagctggagtcttgctctgttgcccaggctggagtgagatgg

SEQ ID NO: 113785 - DNA, 201 bp, Homo sapiens
tctgttttaattgttacatacactggtggctaaaaatatcctgatcattgctgtagctgtatcctgtagatatggatacttggtgttttggtatttgttgktggtggtggtgttatattttgagaaagagtctctcactcagtcattcagggtagaaaatgatgatgcagtttcagctcactgcaacctctgcctcccatt

SEQ ID NO: 113786 - DNA, 201 bp, Homo sapiens
cggggttctccaaataaacagaaccagtcgatgagaagatgaaataagacatcctctctcagctcagcagtgaggcaggagaacgggggcgaattcctccrtcctcagcctttccttctactcagggttgggggcccacccacactgggggccatctgcttcctgagtctgccattcgaatggtaatctcatctggaaaca

SEQ ID NO: 113787 - DNA, 201 bp, Homo sapiens
ccaccattgagccctggagcccccgtctcctgggtagattgccccctacctcgggagcagcccatccccagtgacccactgcgggccagtgttggtgtagrcccctgggttagtcggggttctccaaataaacagaaccagtcgatgagaagatgaaataagacatcctctctcagctcagcagtgaggcaggagaacggg

SEQ ID NO: 113788 - DNA, 201 bp, Homo sapiens
atgtcatgttgagttattggatctcttgactttttaaaaatatatttggctctttttgataatgttacattgaatttctgcatacatttatacatggccasatctttcctgggaaggaatgaacctggtaatcagtgcgtatgaacttctagaatggctgtatctggacccagctagatatttcttcgtatttcctagaaa

SEQ ID NO: 113789 - DNA, 201 bp, Homo sapiens; identical to SEQ ID NO: 19014

SEQ ID NO: 113790 - DNA, 201 bp, Homo sapiens; identical to SEQ ID NO: 19015

SEQ ID NO: 113791 - DNA, 201 bp, Homo sapiens
atggcgaagccatcacttctgacagtccttacgcagaccagactctggcctgggcctgtgatggttacacaccatgggtggcactggcctggtccttgggkgagctcacaggtgtgtcgcagagagtggaagggaccctgctcagaccccagtccatggcccactgtgctcccatttcgtaggtgagcagccagcaggctg

SEQ ID NO: 113792 - DNA, 201 bp, Homo sapiens
cctaaagtagaaacgatgcaactgcccctcgggcttgctgagggtcaaagggggtgtgactttgtcatggagcgtagaagtcagagtcgatggtgatcccrctggctgttaacatcgatacagttcaggtcagcatgcaccaagttcctccaacacaccaggtacattggctagccacctctcccaggcagggcggtgcag

SEQ ID NO: 113793 - DNA, 201 bp, Homo sapiens
aatgcaaggatgaggaaacgagggggctctgaggtgatggggggagttggaatttcagggggcccagggaggacctggtgggaaggggacttttgagtggrcatctgagagaagaaccctccaagcagaagaacagcaggtgccaaggccctagcagccgtttgaggcctgaaaaacaggcggccaggtgtggctggggca

SEQ ID NO: 113794 - DNA, 201 bp, Homo sapiens
agtgggttccagcgtcctatcctgtcggtgggaagactgaggctcagagagctccgtaacttgccccaggtcacacagccggttcaggcagagttggggtytcatgcctcccaggtgttcccacagtcttttccccaggagcagggtccaagcctgctgctcctccaaccacctgcgaggcacctgggcatgttcctggcc

SEQ ID NO: 113795 - DNA, 201 bp, Homo sapiens
taccctgggaagggcccagcctaagttaccaagccccaggctcccagtaccaccctcagcctatgtggattgccaccccaccttctgcctgtccttgggargggaccgactcttagctccccttagcaatcaggttgcacccagtcccttgactttatgcccaggtttcctggcacctaaagtagaaacgatgcaactgcc

SEQ ID NO: 113796 - DNA, 201 bp, Homo sapiens
tccagaacctaacctgtctcaagaggtcacttgcctccagccctgagtactcccagttcattctggccgtagctcatgccttctgccatctcccttttagragtggccttttctggggtcttccactcttgagctcccccgcctccgccgcccccccccgccccccccattgccatgtctgctgcccgcaggtgctttggg

SEQ ID NO: 113797 - DNA, 201 bp, Homo sapiens
tttgatgcattatgaattataccgttagcataataaattgcccttctttggctaatttagtgaggtttgttgtgattttgcatcattttatattaagattwttgccccagcattttgtttgcatttgcttttatatctttgcttgttctttttttaatttttttttttttgagatggagtctcactccatcacccaggctg

SEQ ID NO: 113798 - DNA, 201 bp, Homo sapiens; identical to SEQ ID NO: 19016

SEQ ID NO: 113799 - DNA, 201 bp, Homo sapiens
tggatggagggctcagtgcggactccgttttgttgggtcatggttggccagtgctaggctgagctgggctggacacagggctggaggggtagcgcccttaytgtagggacaggtgggggtgcaatttgtgtagggatgaaaagcaccagcttggagggccttttctaggcccttgggcctagcccctgatgctgatgcccc

SEQ ID NO: 113800 - DNA, 201 bp, Homo sapiens
ttgtgtagggatgaaaagcaccagcttggagggccttttctaggcccttgggcctagcccctgatgctgatgcccctagttggggtctgcagagctggtgscaagaacctggctggtaggggtctgacccagcctttggccttctgtctccattgccctgcacctctcgattttttttttttttttgagacggagtctcgc

SEQ ID NO: 113801 - DNA, 201 bp, Homo sapiens
atctcttgactttttaaaaatatatttggctctttttgataatgttacattgaatttctgcatacatttatacatggccagatctttcctgggaaggaatkaacctggtaatcagtgcgtatgaacttctagaatggctgtatctggacccagctagatatttcttcgtatttcctagaaatgaaactcctgggtcagagt

SEQ ID NO: 113802 - DNA, 201 bp, Homo sapiens
gcctcccaagttcaagcgattcttctgcctcagcctcctgagtagctgagactacaggcgtgcaccatcatgccagctaatttttgtattttcagtagagrtggggtttcaccgtgttggccaggatggtcttaatctcctgacttcatgatccgcccacctcagcctcccaaagtgccgggattacaggcgtgagccacc

SEQ ID NO: 113803 - DNA, 201 bp, Homo sapiens; identical to SEQ ID NO: 19018

SEQ ID NO: 113804 - DNA, 201 bp, Homo sapiens; identical to SEQ ID NO: 19013

SEQ ID NO: 113805 - DNA, 201 bp, Homo sapiens
cacccagtcccttgactttatgcccaggtttcctggcacctaaagtagaaacgatgcaactgcccctcgggcttgctgagggtcaaagggggtgtgactttgtcatggagcgtagaagtcagagtcgatggtgatcccgctggctgttaacatcgatacagttcaggtcagcatgcaccaagttcctccaacacaccaggt

SEQ ID NO: 113806 - DNA, 201 bp, Homo sapiens
gcacccagtcccttgactttatgcccaggtttcctggcacctaaagtagaaacgatgcaactgcccctcgggcttgctgagggtcaaagggggtgtgactttgtcatggagcgtagaagtcagagtcgatggtgatcccgctggctgttaacatcgatacagttcaggtcagcatgcaccaagttcctccaacacaccagg

SEQ ID NO: 113807 - DNA, 201 bp, Homo sapiens
gcccagcctaagttaccaagccccaggctcccagtaccaccctcagcctatgtggattgccaccccaccttctgcctgtccttgggaggggaccgactctyagctccccttagcaatcaggttgcacccagtcccttgactttatgcccaggtttcctggcacctaaagtagaaacgatgcaactgcccctcgggcttgct

SEQ ID NO: 113808 - DNA, 201 bp, Homo sapiens
agaagaacagcaggtgccaaggccctagcagccgtttgaggcctgaaaaacaggcggccaggtgtggctggggcacaggtggcggggagagaagcagaacrtgaggtcagggggacacatggggcccagtggatcagggcctcatgtcattcagggtctgagctgagaatgacgtggctgatatacttgtaaagcatcctg

SEQ ID NO: 113809 - DNA, 201 bp, Homo sapiens
cgtgcaccatcatgccagctaatttttgtattttcagtagagatggggtttcaccgtgttggccaggatggtcttaatctcctgacttcatgatccgcccrcctcagcctcccaaagtgccgggattacaggcgtgagccaccgcgcccggccatgccctgcacctctcctctctcctcacttcctgcctaagatgagtca

SEQ ID NO: 113810 - DNA, 201 bp, Homo sapiens
cacctctcgattttttttttttttttgagacggagtctcgctctattgccaggctagagtgcagtggcacgatctcagctcactgcaacctctgcctcccragttcaagcgattcttctgcctcagcctcctgagtagctgagactacaggcgtgcaccatcatgccagctaatttttgtattttcagtagagatggggtt

SEQ ID NO: 113811 - DNA, 201 bp, Homo sapiens
tctgcagagctggtggcaagaacctggctggtaggggtctgacccagcctttggccttctgtctccattgccctgcacctctcgattttttttttttttttgagacggagtctcgctctattgccaggctagagtgcagtggcacgatctcagctcactgcaacctctgcctcccaagttcaagcgattcttctgcctcag

SEQ ID NO: 113812 - DNA, 201 bp, Homo sapiens
tttagaccacccaaggtaacttcctgacgttgcgatggcatttgtaaactcatggtgctggtgggagtgtagcagagaggacgaccagaggtcactcttayggccattttggttttggtgggttttggccggcttctctactgcaacctgttttatcagcaaggtctttatgacctgtattttgtgctgaactcctatctc

SEQ ID NO: 113813 - DNA, 201 bp, Homo sapiens
cgtagctcatgccttctgccatctcccttttagaagtggccttttctggggtcttccactcttgagctcccccgcctccgccgcccccccccgccccccccattgccatgtctgctgcccgcaggtgctttgggccacactcaactgtggttgggagtttgcgggttttccctgcctcttagtttctctcatttgtcttta

SEQ ID NO: 113814 - DNA, 201 bp, Homo sapiens
ctgacagtccttacgcagaccagactctggcctgggcctgtgatggttacacaccatgggtggcactggcctggtccttgggtgagctcacaggtgtgtcrcagagagtggaagggaccctgctcagaccccagtccatggcccactgtgctcccatttcgtaggtgagcagccagcaggctggggttcaagccttggccc

SEQ ID NO: 113815 - DNA, 201 bp, Homo sapiens
cagccgggcgaggtggctcacgcctgtaatcccagcactttgggaggctgaggcgggtggatcacttgaagtcaggagttcgagaccagcctggccaactkggtgaaaccccccatctccactaaaaatacaataaattaactgggcgtggtggcacgtgcctgcaatcccagctactcaggaggctgaggcaggagaatc

SEQ ID NO: 113816 - DNA, 201 bp, Homo sapiens
taccatctttagtttttactttttcaattatttatcttgacttttccaggtatacaataatatcatatgaaaatagcaatagttttaactatttctattgsgttttctttcttttgtcaaattcctctgataaatacacccagtatagtgatggtggtggcagcatctgtgtcttccctgagcttagtattagtgcccagg

SEQ ID NO: 113817 - DNA, 201 bp, Homo sapiens
tttttgtaattttttgtggagatgaggtttcaccatgttgtccagactggtcttgaactcctgggctcaagcaatctggctgcctcagcctcctaaagtgytgggattacaggtgtgggccactgcacccagcctcacatagatgtttaatatcttttgttaagtttaaccctgagtatcgcgactgttgttgtaagcggg

SEQ ID NO: 113818 - DNA, 201 bp, Homo sapiens
gtgacttgatttgtaccttcaaataatgaggcagctgtaatttgcatctgcgtagagtttatagtttgcaaagggcatttcccaggattagttatcacatwtgatcccggctttgtgggcaggactggtatcatttactcatcctttcaaaaaaatacgtactgagaccagtcacggtggctcacgcctgtgatcctagca

SEQ ID NO: 113819 - DNA, 201 bp, Homo sapiens
gtctgtcttttttttttttttttttttgacagagtttcgctcttgttgcccaggctggagtgcaatggcacggtcttggctcactgcaaccgccacctccygggtccaagcaattctcctgcctcagccttacaagtagctgggattacaggtgcccaccaccatgcctggctaatttttgtatttttagttgaggtgggg

SEQ ID NO: 113820 - DNA, 201 bp, Homo sapiens
agtcagcacctgatgtctgtctgtctgtctgtctgtcttttttttttttttttttttgacagagtttcgctcttgttgcccaggctggagtgcaatggcayggtcttggctcactgcaaccgccacctcccgggtccaagcaattctcctgcctcagccttacaagtagctgggattacaggtgcccaccaccatgcctgg

SEQ ID NO: 113821 - DNA, 201 bp, Homo sapiens
cgtggccactcacaccaaggggcaagaaaattcaggatgagtccgcagtgcaaagtgaaagcaagtttactaagattgtaaaggagccgggcgcagtgtcwcatgcctgtaatcccagcactttgggaggccgaggtgggcggatcacttgaggtcaggagttcaagactagcttggcaaacttggtgaaaccaaatctct

SEQ ID NO: 113822 - DNA, 201 bp, Homo sapiens
ttctggccgtagctcatgccttctgccatctcccttttagaagtggccttttctggggtcttccactcttgagctcccccgcctccgccgcccccccccgscccccccattgccatgtctgctgcccgcaggtgctttgggccacactcaactgtggttgggagtttgcgggttttccctgcctcttagtttctctcattt

SEQ ID NO: 113823 - DNA, 201 bp, Homo sapiens
tcattctggccgtagctcatgccttctgccatctcccttttagaagtggccttttctggggtcttccactcttgagctcccccgcctccgccgcccccccccgccccccccattgccatgtctgctgcccgcaggtgctttgggccacactcaactgtggttgggagtttgcgggttttccctgcctcttagtttctctca

SEQ ID NO: 113824 - DNA, 201 bp, Homo sapiens
tatgataggtcaagtaagtatgacaatgaggtagaatcacatggatgttttcaaggtccatattgacaaaatgtggtttatgacacagtaccagaattaayggggagagggagcactttatcttttaaaatgcagatgacatttgactttgctttagtcatgaataattatatttatgtattgaagaggaatgtcacaccc

SEQ ID NO: 113825 - DNA, 201 bp, Homo sapiens
acctctttgtcacgtagtgtgtccagttgatccgaatgtcttgttaacagtctgcccctgccctttgcagatggccaagctgcggagcctcctctccagtrctgagaacgagcccccagtgcctcttgtgagcaactggcgacctccacagcctatcaataacagggtggtgagagcttccttcaaatgaggctgctggat

SEQ ID NO: 113826 - DNA, 201 bp, Homo sapiens
attcacactaattgcagagcaataaggtttaaaaattgtttttgacagcctatttctgtttttcaaatgtttactattagccattaatatctatgcaaaagaaaagagagtgaaggattcttacatatttttgagtctttatagctaaaaataaggcctgagggataaaagaatagtaggaattgaactgaaacttaaata

SEQ ID NO: 113827 - DNA, 201 bp, Homo sapiens
caacttttcagtaatggcactgtgagaaatgctgccaatatgctaggagataatttgtagttaatcattgctcactcttttttttttctggcattatttawctcagtgtatacctaacagttttctttttcaggtgaactccagaaatctcaaagtcttgaacacacagtttagaattatctgtttattgacagagaattt

SEQ ID NO: 113828 - DNA, 201 bp, Homo sapiens; identical to SEQ ID NO: 19028

SEQ ID NO: 113829 - DNA, 201 bp, Homo sapiens
cggcgactctgcaccacgcaggggaagagaaagcaggagccgtccagcacggaggaaggcgaccatggccaaggagtggggctacgccagtcacaacggtragtgcaggcagccgcgacccggccaggaagggatgccagtccaggagagccctgccattgcacagaaatgggcaactttagagactgcagtggaaaatgt

SEQ ID NO: 113830 - DNA, 201 bp, Homo sapiens; identical to SEQ ID NO: 19025

SEQ ID NO: 113831 - DNA, 201 bp, Homo sapiens; identical to SEQ ID NO: 19027

SEQ ID NO: 113832 - DNA, 201 bp, Homo sapiens
ataggggctgtgacagaagctcagaaacacactatgaacatgttcttaagcagaatcattaggcatcttagttcttggttaaattaaattctgtgaaaccyaaagtacttcactgtgatctttctgtttctttacagccaatctagagagccatggcaagataaattaagtattgagaatgccttctagacatcttcccca

SEQ ID NO: 113833 - DNA, 201 bp, Homo sapiens
aataattatatttatgtattgaagaggaatgtcacaccctccaaacttggtctctgtgaaaacggccccatgtccaagctaaaagttggcaatgcattccygaaatggaacacgataggacagagatgacaataaactcaaatgagtattcttcagactccgatggcctatacctgagggttcttgtgcttcttgtccatg

SEQ ID NO: 113834 - DNA, 201 bp, Homo sapiens
ttcagtggggttcatctgattaatcatttgggtgagtatttttgaaatatctgacaatttcttcttgagtagtagtttgtgtgtgagacagcgactgaaaratacatgtttagaaaaaacaaatctctttatttcacctacactagtaagcaaatcagtataataaaagaagactagtcagaaatactttatttcacgata

SEQ ID NO: 113835 - DNA, 201 bp, Homo sapiens
gttgtgccaccaaataaatacatctcctcgactttatttcctaggtcctgaccactggcatgaacttttcccaaatgccaagggggaaaaccagtcgcccrttgagctgcatactaaagacatcaggcatgacccttctctgcagccatggtctgtgtcttatgatggtggctctgccaagaccatcctgaataatgggaa

SEQ ID NO: 113836 - DNA, 201 bp, Homo sapiens
ttctgaataatgcttatgttccaatctcttaatgaaccgtgtgcatatatatgtgtgtgtgtatatctatatatacacatgcatacatatttacacacacrtagagatatgtgtacacacataccatttaatctgagcacatactactctctgtctcagttaactcattaaagaaaaacatgaattttaactcagatcaac

SEQ ID NO: 113837 - DNA, 201 bp, Homo sapiens; identical to SEQ ID NO: 19031

SEQ ID NO: 113838 - DNA, 201 bp, Homo sapiens; identical to SEQ ID NO: 19030

SEQ ID NO: 113839 - DNA, 201 bp, Homo sapiens; identical to SEQ ID NO: 19032

SEQ ID NO: 113840 - DNA, 201 bp, Homo sapiens
atagattgtcctcactgtcacactccagatatgtgccaggaagaggaggtgactttgtgttgttttttctccacaggttcaacttctgtagtccagaaacygtcagggaggaagttctgctcaccctcacaccgtgttaggagactactgttatttgaccaatgaattgacttctaataaaatctagtggtgatgcattac

SEQ ID NO: 113841 - DNA, 201 bp, Homo sapiens
aaagaaggcatattgttcagtcacaatgagaaaagtttgtcatttcagttcaaatattgaattaaaataatggttagccaacgtaacaccagaaattagaytttatacactgggctgatttcttatgatggtgactctgctgttcctgagttgcattggttgacatgggctaagtgttcagtgactgctcatgacaaatga

SEQ ID NO: 113842 - DNA, 201 bp, Homo sapiens
ctacaattagaagacaaaacttaccccactgtattttttaaaactcaatatccaattgtattctggctatataaaatgcactttttttttttttttttgaratggagtcttgctctgtcacccaggctggagtgcagtggcacgatctcagttcactgcaacctctgcctcctgggttcaagtgattctcctgcctcagcc

SEQ ID NO: 113843 - DNA, 201 bp, Homo sapiens
gataatagcaagtaaaccaaacaaggagataaaatggaataaaatataatccaaaatagagtataaaaagagctaaaaggggccgggtgtggtggctcacrcctgtaatcccagcactttgggaggccgaggcgggtggatcatgaggtcagatcgagaccatcatggctaacacggtgaaaccccgtctctactaaatac

SEQ ID NO: 113844 - DNA, 201 bp, Homo sapiens
aagtttaaacacaagcagtaaaaccacaacttgtcctccaaaataatttaaagctgatgattactggagggagggtaataatagatatttatagaacagcraagaaaaaaatgtgattctcagttcaaaaggaatatagttacctttgatatggctatgcaatttatttctaagatcccaaaggcaattgtggtttgtttt

SEQ ID NO: 113845 - DNA, 201 bp, Homo sapiens
tggtataacaatgtgatcaacccaactttacctagagtgggagcatccaagattatagtggagacaaatgttggaaaacagtaagtaatgaaaatcccagragatgtgaaatatcgagtctgtgtttatagttctattcccactaaaagtctaatttaagtgaaacctcctacaggggatcgcctacatcctagttgcagt

SEQ ID NO: 113846 - DNA, 201 bp, Homo sapiens
gaacttatacatgcctttaattatatgtatttaaatagtgataaattagagcactttagagaaatgagcttgtacatggaaatgtcctgtttactttcatytgtgttacttttgtatgcattgggtaaatgtccaaacttgttttagaaataaccctaaacagacaaaaaataattagtctatggaaatctgagcaatatc

SEQ ID NO: 113847 - DNA, 201 bp, Homo sapiens
gtgaatctgttggatgaagtgactaaaatccaaaatttggagttggtcaaaagaaccaccaatggctgttaaattttgctgcatatttgaccttaagaatrttgtttacatggtactgtcatcatgttcattatcaatattacttatgccattctggtcacttaaggcagtcttccatgtccaaaatgaccccctcttggt

SEQ ID NO: 113848 - DNA, 201 bp, Homo sapiens
taattgatcagaatgtatccattttcccccagaggtctaaatgaactaaaacttgccgatcttttaaaaacttagccagactcaatcatgtttttaatttygtgtagatgctgccactttggactctttcactgctgctgggagcagtagcaggtaagaaaacaaataaatgttgagctgggagagattcacttttcaaca

SEQ ID NO: 113849 - DNA, 201 bp, Homo sapiens
gggcggttcacgaggtcaggagatcgagaccatgctggctaacatggtgaaaccccatctctactaaaaatacaaacaattagccaggcgtggtggcaggygcctgtagtcccagctactcgggaaactgaagcaggaggatggcgtgaacccgggaggcagagcttgcagtaagccgagatcgcgccactgcactccagc

SEQ ID NO: 113850 - DNA, 201 bp, Homo sapiens
gaacagtaacatgctgtacagatttgtagcctaggagcaacaggctgtaccacacagcccaggtaggtagtaggctatgccatctaggtttatgtaaatayactttatgatgttcccacaacaatgaaatcgcttgatgatgcatttcttgtaacgtatccctgttgttgagcaactcatgactgcacttgaaaacattct

SEQ ID NO: 113851 - DNA, 201 bp, Homo sapiens
cctttatgtagaagaggtcttccctcagccattgtctggtctccagcacagggtgcgcccttccctcagactaggaggttgggggcatagattgtcctcaytgtcacactccagatatgtgccaggaagaggaggtgactttgtgttgttttttctccacaggttcaacttctgtagtccagaaaccgtcagggaggaagt

SEQ ID NO: 113852 - DNA, 201 bp, Homo sapiens
aggtaaattaaagctcaataaagctgttaaaacaaaaatatatatcctatgaggtagatggttttattatccttattttatggataattaattaaggtacygtttctgaatttctatgcaggaagtttgactctacaaaattcttaactactacaaaaaaattcagttcacctttaatcatgtataaatattggtgccttt

SEQ ID NO: 113853 - DNA, 201 bp, Homo sapiens
aatgagccaagtcgtgggccacctagatttctttccaaatggaggagtggaaatgcctggatgtaaaaagaacattctctctcagattgtggacatagacrgaatctgggaaggtagaactattatgtgtagaaagagatcttcttgggagaaagcttgtgttttgttttgctaaacttgctaaattctttggaattgtac

SEQ ID NO: 113854 - DNA, 201 bp, Homo sapiens
gaatgagccaagtcgtgggccacctagatttctttccaaatggaggagtggaaatgcctggatgtaaaaagaacattctctctcagattgtggacatagayggaatctgggaaggtagaactattatgtgtagaaagagatcttcttgggagaaagcttgtgttttgttttgctaaacttgctaaattctttggaattgta

SEQ ID NO: 113855 - DNA, 201 bp, Homo sapiens
tccttccttcctttcttctttccttccctccctcccttctttcttttcattccttccatccttcctccctcctttctttctctttctttctttctttcttttcttctctttctttcttttctttctttctctttctttcttttctttctttccttctttctttttttctctttctctctttctttcttctttctttattcc

SEQ ID NO: 113856 - DNA, 201 bp, Homo sapiens
ttccttccttcctttcttctttccttccctccctcccttctttcttttcattccttccatccttcctccctcctttctttctctttctttctttctttcttttcttctctttctttcttttctttctttctctttctttcttttctttctttccttctttctttttttctctttctctctttctttcttctttctttattc

SEQ ID NO: 113857 - DNA, 201 bp, Homo sapiens
tggtgcccccatagtccccaatttgggtgagttcctcaacccgtcccccaaagggtgttatagtgtctgagtctatatacattagcataaaccctcatgtrtttttatgatttcagggtttggaatgagccaagtcgtgggccacctagatttctttccaaatggaggagtggaaatgcctggatgtaaaaagaacattct

SEQ ID NO: 113858 - DNA, 201 bp, Homo sapiens
tttccttccttcctttcttctttccttccctccctcccttctttcttttcattccttccatccttcctccctcctttctttctctttctttctttctttcttttcttctctttctttcttttctttctttctctttctttcttttctttctttccttctttctttttttctctttctctctttctttcttctttctttatt

SEQ ID NO: 113859 - DNA, 201 bp, Homo sapiens
ctttccttccttcctttcttctttccttccctccctcccttctttcttttcattccttccatccttcctccctcctttctttctctttctttctttctttcttttcttctctttctttcttttctttctttctctttctttcttttctttctttccttctttctttttttctctttctctctttctttcttctttctttat

SEQ ID NO: 113860 - DNA, 201 bp, Homo sapiens
ttctgcaaagcccctattacctaatgcctgtcccctaaacacatataaaggaatatctatcactatttcattagaaaattacacacacacacacacacacmcacacacacacaattataaataaattattcaaaacgtggcagtagtgggatgcaaattaacttgtttttagtgtcttttatctccaaactgacattttgc

SEQ ID NO: 113861 - DNA, 201 bp, Homo sapiens
attctgcaaagcccctattacctaatgcctgtcccctaaacacatataaaggaatatctatcactatttcattagaaaattacacacacacacacacacacacacacacacacaattataaataaattattcaaaacgtggcagtagtgggatgcaaattaacttgtttttagtgtcttttatctccaaactgacattttg

SEQ ID NO: 113862 - DNA, 201 bp, Homo sapiens
ttacagtattacctattataatcttaaacagtactcaacttgtgattacatcacaaatcataaatatactttacaaatgactttgttctgtgacctgcatragctcacactaattagagaaatctattcaaccactatattctgaatatgacgttaacttggaaaaataaaatctgtccttgatgtgtaattgtgtctgat

SEQ ID NO: 113863 - DNA, 201 bp, Homo sapiens
acacataaaaatcaaaatgctcaaaccaggtagaatgtacattattcaggtgattacactaaaaacctagattttaccactatacaatatatccatctaayaaaacttcacttgttcccttaaacttacacaaataaaaaaatgttgaaacccaattataaagacaaaatattgaaagcagtcagagaaaaaccacacatt

SEQ ID NO: 113864 - DNA, 201 bp, Homo sapiens
tcattaaaaagagcatgtttgtaaaactaatatccttctgggggattgcaggaaaagaagtttgctacgaaagactcggctgcttcagtgatgactccccmtggtcaggaattacggaaagacccctccatatattgccttggtctccaaaagatgtcaacacccgcttcctcctatatactaatgagaacccaaacaact

SEQ ID NO: 113865 - DNA, 201 bp, Homo sapiens
ggtactgattgacccatgtatgagaacaaaccagctggaggtcattgaaatatccatttgatggattagagaaaatagttcccctacttttgcaggactgrgaatggtgcttgtttccaccaagcagtctggaaaagtttataattcaaaggacacagggtagagtattttagaaggtcttgctttatagtggaaaataat

SEQ ID NO: 113866 - DNA, 201 bp, Homo sapiens
cactacaacctctgcctctagggttcaagcaattctcctgccttagcctcccgagtagctgggattacaggcgcccaccaccacgcctggctaatttttgyatttttaattgagatggggtttcaccatgttggccaggctggtctcaaactcctgacctcaggtgacctacccacctaggcctcccaaagtgctgggatt

SEQ ID NO: 113867 - DNA, 201 bp, Homo sapiens
taaaggaaactctaagcagtatgaaattttcaagtgagtaaaataatattgctctatgcttttttttttttttttttttgagtcggagtctcgctgtgtcrccggggctggagtcttgctctgtcacccaggctggagtgtagtggtgcaatcttggctcactacaacctctgcctctagggttcaagcaattctcctgcc

SEQ ID NO: 113868 - DNA, 201 bp, Homo sapiens
agaattcagtcctttatgtagaagaggtcttccctcagccattgtctggtctccagcacagggtgcgcccttccctcagactaggaggttgggggcatagrttgtcctcactgtcacactccagatatgtgccaggaagaggaggtgactttgtgttgttttttctccacaggttcaacttctgtagtccagaaaccgtca

SEQ ID NO: 113869 - DNA, 201 bp, Homo sapiens
tgtaacgtatccctgttgttgagcaactcatgactgcacttgaaaacattctgaaaaggttttctttccgacagtcggcgttcggttactcaccttccaaygtgcatgtcattggccacagcctgggtgcccacgctgctggggaggctggaaggagaaccaatgggaccattggacgcatcacaggttggtgaaaacagt

SEQ ID NO: 113870 - DNA, 201 bp, Homo sapiens
gtgtaattgtgtctgattcaaagggactcgagactttgcggcctgtaatcacttaagaagctacaaatattacactgatagcatcgtcaaccctgatggcyttgctggattcccctgtgcctcttacaacgtcttcactgcagtaagtagactccaccttccgcataaagaattttgtgactgtcacttctcatgactggt

SEQ ID NO: 113871 - DNA, 201 bp, Homo sapiens
tagttttaagatcactttgcatatccattatctaatggaattatcatccccccccacctttttaaattttgagacggagtctcaccctgtcccccaggttrgagtgcaatgtgcaatctcagctcactgccacctccacctcccaggttcaagagattttcctcagcttccaaagtagctgggattacaggcgtgtgccac

SEQ ID NO: 113872 - DNA, 201 bp, Homo sapiens
gaccttgtgatcctccccgctcggcttcccaaagtgctgggattacaggcgtgagccaccgcacccaaccttttttttttttttgagatggagtcttgctsttgtcacccaggctggagtgcagtggcgccaccttggctcactacaacctctgcctcccagattcaagcaagtctcctgcctcagcctcccgagtagctg

SEQ ID NO: 113873 - DNA, 201 bp, Homo sapiens
tccttctcccgcttcaaacccaaactgtcaacctcaacccttcttccctctcccgttgaggctccctgagttgcctcacagaggttcttcttgaattagayggggctgtgtcaacagctctgggttcacgttctgattctatcactaatgagctgtggggccttgggcaagctaattcatttctctgggtttcagcttctt

SEQ ID NO: 113874 - DNA, 201 bp, Homo sapiens
gctcactgccacctccacctcccaggttcaagagattttcctcagcttccaaagtagctgggattacaggcgtgtgccaccacacccagctaatttttttwaaatctttagtagagaccgggtttcaccatgttggccaggctggtcttgaactcctgacctcgtgatccacctgcctcggcctcccgaagtgctgggatt

SEQ ID NO: 113875 - DNA, 201 bp, Homo sapiens
gccctagacaacttatcttacctttctgtatctgtttccctgttagtaaaatatagcagagaaatcaaatgagttattccagctctgacaacctaggattytccttacagtgctgaggcactgccagttttccaacagcaacatcagcattgttcttcctgcttcaatgggcatgtgacagtatcttggttgtttgaattg

SEQ ID NO: 113876 - DNA, 201 bp, Homo sapiens
tttctgtatctgtttccctgttagtaaaatatagcagagaaatcaaatgagttattccagctctgacaacctaggattctccttacagtgctgaggcactrccagttttccaacagcaacatcagcattgttcttcctgcttcaatgggcatgtgacagtatcttggttgtttgaattgatactgacttggccttttaaaa

SEQ ID NO: 113877 - DNA, 201 bp, Homo sapiens; identical to SEQ ID NO: 19048

SEQ ID NO: 113878 - DNA, 201 bp, Homo sapiens
ctgcctcccagattcaagcaagtctcctgcctcagcctcccgagtagctgggattacaggctcacgccaccatgcctggctaatttttgtacttttagtaragacagggtttcaccatgttggccaggctgatctcgaactcctgacctcaaatgatccacccaccttggcctcccaaagtgctgggattacaggcgtgag

SEQ ID NO: 113879 - DNA, 201 bp, Homo sapiens; identical to SEQ ID NO: 19049

SEQ ID NO: 113880 - DNA, 201 bp, Homo sapiens
ccatgttggccaagatggtctcaatctcctgaccttgtgatcctccccgctcggcttcccaaagtgctgggattacaggcgtgagccaccgcacccaaccttttttttttttttgagatggagtcttgctcttgtcacccaggctggagtgcagtggcgccaccttggctcactacaacctctgcctcccagattcaagca

SEQ ID NO: 113881 - DNA, 201 bp, Homo sapiens; identical to SEQ ID NO: 19050

SEQ ID NO: 113882 - DNA, 201 bp, Homo sapiens; identical to SEQ ID NO: 19046

SEQ ID NO: 113883 - DNA, 201 bp, Homo sapiens; identical to SEQ ID NO: 19047

SEQ ID NO: 113884 - DNA, 201 bp, Homo sapiens
cacgtgtgcatttattagtatgtgaatgcttgtaaatgtgtgaattgaatgagtgtgttctcatcagtgactttgttaagaatttaattgaagaggggccrggcgcggtggctcacaccaaagcactttgggaggccgaggcgggcggatcatgaggccaggagattgagaccatcctggctaacatggtgaaacccaatc

SEQ ID NO: 113885 - DNA, 201 bp, Homo sapiens
tgtgcatttattagtatgtgaatgcttgtaaatgtgtgaattgaatgagtgtgttctcatcagtgactttgttaagaatttaattgaagaggggccaggcrcggtggctcacaccaaagcactttgggaggccgaggcgggcggatcatgaggccaggagattgagaccatcctggctaacatggtgaaacccaatctcta

SEQ ID NO: 113886 - DNA, 201 bp, Homo sapiens
catggataaagactagtattaatagaaattggaccacagcacctgccagttttgattctgtgccacctgccagccctgctcccacaaactggtctcattasttgtaaacaacatccacgtccattgcaatctcaaaaccacctgatgcagctatgtaggaaaagattctcatccccagtttactagtatggaaattgaagc

SEQ ID NO: 113887 - DNA, 201 bp, Homo sapiens
cataatctgtgtgaaggctgctctgtaattatgcggaataaacatgggacccccaaacacagagcctatggagagctctgctccaggcattttctcagccrtttttccttctcccgcttcaaacccaaactgtcaacctcaacccttcttccctctcccgttgaggctccctgagttgcctcacagaggttcttcttgaat

SEQ ID NO: 113888 - DNA, 201 bp, Homo sapiens
tagaccttggacactagggaaggtaatggtggccatgctggtgggtgtgagtctacaaagggacattccaggagaggagagggggcagtggtgcaacccastgggagaggaacagcctgactttcagacagagccactcttgggtcagggtattgggaccacaacctaggagggcctaagactaggcctgtgttactatcc

SEQ ID NO: 113889 - DNA, 201 bp, Homo sapiens
tggagtgcagtggcgcgatctcagctcactgcaacctccacctcccgattcaagcaattctcctgcctcagccacccgagtagttgggactacaggtgcaygccactacacccagctaattttttgtatttttagtagagatggggtttcaccatgttggccaagatggtctcaatctcctgaccttgtgatcctccccgc

SEQ ID NO: 113890 - DNA, 201 bp, Homo sapiens
ggaggcctgagaagtaaaatgagtccaagtttactcagtaaataacagccaagatgtgaaccctggcctaattagtctaattcttttcctctacagtggtrttccttagagccttagacttttgcagagtgggctcaaagtgggaactgggcatggcagagtgggtagaaaccacactctgactcactcagttgcttcaaa

SEQ ID NO: 113891 - DNA, 201 bp, Homo sapiens
ttctgacctcaaattggcaattgcaatgaagtgatatggaaacagagggaaaagtggcctgtgagggcatatctcatatgcacatatatgtgtttgtgcaygtgtgcatttattagtatgtgaatgcttgtaaatgtgtgaattgaatgagtgtgttctcatcagtgactttgttaagaatttaattgaagaggggccagg

SEQ ID NO: 113892 - DNA, 201 bp, Homo sapiens
agctactcgggaggctgaggcaggagaatggcatgaacctgggaggcagaggttgcagtgagctgagattgtgccactgcactccagcctaggtgacagarggagactccatctcaaaaaaaaaaaaaaaaacttacctaaggcatgcacattgatttaagtgaacattgtgaattccatttgtgtgacagtgtttcccaa

SEQ ID NO: 113893 - DNA, 201 bp, Homo sapiens
gaacctgggaggtggagattgcagtgagccgagaccacgccactgcactccagcctgggcaacagagtgagactttgtctttaaaaaaaaaaaaaaaaaaaggctgaaacaataaactcaaacttttattagaggctctcaatatgttctaactggccttcttatactttccctcctatccttgccagctttcttctgaca

SEQ ID NO: 113894 - DNA, 201 bp, Homo sapiens
tcatacacagatgtattgcttggtaaaagattggcctccaatcaaacctgaacaggctatggaacttctggactgtaattacccagatcctatggttcgargttttgctgttcggtgcttggaaaaatatttaacagatgacaaactttctcagtatttaattcagctagtacaggtaaaataatgtaaaatagtaaataa

SEQ ID NO: 113895 - DNA, 201 bp, Homo sapiens
tcccagctactcgggaggctgaggcaggagaatcgcttgaacctgggaggtggagattgcagtgagccgagaccacgccactgcactccagcctgggcaasagagtgagactttgtctttaaaaaaaaaaaaaaaaaaaggctgaaacaataaactcaaacttttattagaggctctcaatatgttctaactggccttctt

SEQ ID NO: 113896 - DNA, 201 bp, Homo sapiens
tattgcttggtaaaagattggcctccaatcaaacctgaacaggctatggaacttctggactgtaattacccagatcctatggttcgaggttttgctgttcrgtgcttggaaaaatatttaacagatgacaaactttctcagtatttaattcagctagtacaggtaaaataatgtaaaatagtaaataatgtttaattacaa

SEQ ID NO: 113897 - DNA, 201 bp, Homo sapiens
ctctagccttggccagcccagaaaggggctcctcaggcgcggccagagtgggcgccaaggccgaggaggcgcggagagcgagcgagggctgcaagggctgccagcacgttgtcacctctcaagacctgactacaaacttagccacaaagaattcctcaacaaatgtcaaatgattcatgaaagtaatatatttttatatgc

SEQ ID NO: 113898 - DNA, 201 bp, Homo sapiens
ctgtgcttgccgccacctcatcacctgtgtttccgcctcggcagccgggagcatcgccatagagacctcaacgcttgtggaaagttctgaggcccaaggggaccctctataattggtgagggacgtactcagttcaaggtttataagaagaggaaatgttttgccctggccgcgtttccttttccacgtattgtctgttag

SEQ ID NO: 113899 - DNA, 201 bp, Homo sapiens
ggcatcactaatgtcctgtgagggactttcatttttgggtacggtgcagtgatctgcatcttcgctctctggttcttcaggattgctttaagtggcaccakctattttagcattatcttttgcaacaccttcatctaattcttcaccaccagccctcgggcctgatgattgaactgtgacatcctcaaaatctaatgtgtc

SEQ ID NO: 113900 - DNA, 201 bp, Homo sapiens
gtatgggacactaaaacttgtttgcttgcatgtttgtcatttgatcttttgccataaagtaattcattttaattgtctgttcacaaaaaaattggttcatktctagcgagaagaacacctttctttcctctgtagtctgtctggtccttcttccctgaacccccatcttatccaaactcctgtatctcactctcctcatgc

SEQ ID NO: 113901 - DNA, 201 bp, Homo sapiens
tgatctgcctgtgcacacacacggacatttactcaacattcccatacattcaaacattcaatcaaattacatagacatgtaatgcatatatatatatatawgatgagaggaaaaggagtaaatgaaaaagaggaaaaaaagacagaatgaagtcagaagtgaggtatagccaagacaagagaatcgcttgagcctaggagt

SEQ ID NO: 113902 - DNA, 201 bp, Homo sapiens
gatttttactgaagaaagcattgactaatcaaaggattgggcactttttcttttggcatttaaagtaagtctaattattttcccattaaattcttaaggtrcatattacttgctttcttaatagatttataaatatgtattacttatatacttttgtttatgtttggctggaagagttttccatactaaaagtattttgta

SEQ ID NO: 113903 - DNA, 201 bp, Homo sapiens
tttaaaatattctagtagttttaggtcaatttagatgtgatttagttggtctagatattataatttttaggggttccctttcatttttcttttttcttacrtttcttcaaatagtataatgccttattttcatttatgaagaaattaccctgctgttggtgatacgggtatatttaaataaaccagttgcagtgcatttct

SEQ ID NO: 113904 - DNA, 201 bp, Homo sapiens
cgtccatgatatctgtgtggatggcagtgcaggtcgattcttctctctgaatgcttcaatttgaaaaaaaaaaaatgttcttcacttattagaaaatttcrttctacattttggtgtggttatgagcttatgtacacaatgcccaaggcatttgtgtacaaggcatttgtgtattttgaggtggtgcaggatccttacagc

SEQ ID NO: 113905 - DNA, 201 bp, Homo sapiens
tgattggagggccacagtgaaatggccatttccagtcattaagcaaggatgtggaagagaattcttagttatatgacattgcaggagagtcagtgaccaahttcataaggaatatgactcctccctacatgcaggttcttggactcttggacagtatgaatccgtttgtccattgaacaaaaatgtattgggcctcactat

SEQ ID NO: 113906 - DNA, 201 bp, Homo sapiens
ggcgacgagcaaaactccatctcaaaaaggaaaaaaaaaaaaactataataaatatgttagctccatgttttcttaagttttctaccagatttttgtcttygtatagtgaacaaactgttaagaacttttttatgagaaatattttagtatgactatattgcatagagttaggctgatggttcagtgttcagtagattaga

SEQ ID NO: 113907 - DNA, 201 bp, Homo sapiens
gaaattaattgctaaaagggattaaactgacttagaatcagttttttgtttgattacatctacatacaaaagtagcttcaaatgtctcattccactgtccrtaatttaagatttttgagtataataaaattttaaagatactttgaggcactttggaaaatcagaccaaaatctcttttccactcatagattcggcttaat

SEQ ID NO: 113908 - DNA, 201 bp, Homo sapiens
tgttactatattgagaatatagaataataacagtatcactaaatttaagacctcttcccagtcttgctgttcctagcaagaagtttggcctgtgactgcayttactgtttatgctcatcagaaactgtcaatgtctgcttttctttaactctgcagtctgtaacatcacgctgtttattaaaaaaaaaaagaaaaattact

SEQ ID NO: 113909 - DNA, 201 bp, Homo sapiens
tcctagaaattacttcatccatattcattatttccaactatgctaaaaaagactaaaataatatgaaaatataaaagaaggatagaatagcctagaaggayaataaaatagtgaagtaaatcatgatgttacatcatccttcagttttcttattgcattgcccagtgtcttgcatcatctttccagaagtatagaagaagt

SEQ ID NO: 113910 - DNA, 201 bp, Homo sapiens
ttaccgctgtgcctggatcttatctgaattggaaactctagatttccttcctctgtttcttacctgagcataaaaggctttagaatggttgttccgagcamgaagaacattaggactgagaagcccatcatggcaaaccccagcatcacggctcggtcctctccagcactggatggcagcctcttgtgcacatctagtggg

SEQ ID NO: 113911 - DNA, 201 bp, Homo sapiens
tgtaaagtgtgtaatagtctgtcatctgtaaagtgtgtgatagccttacgtctaacacaacaatgtacatactttaaaaatattgctcaaaaatgctgatratcatgcaaggcttcagcaagttgtaatctttttgctggtggagggtcttgcctcagtgttgatggctgctgacttaccaagctggtggttgctgaagta

SEQ ID NO: 113912 - DNA, 201 bp, Homo sapiens
gctgaggttgattttcaggcattttgggggccatccctcaaactgactacattccccttctggccctctcgctctttggacaagctctccttggggactcmtacatcgtcaccataattccacctgtaaagctcacccggagcgtgcccccaagccaggtcccatatggccctgttcataagaaagaagtatgaatgaata

SEQ ID NO: 113913 - DNA, 201 bp, Homo sapiens
acaggagaataggagaattgcttgatcctggaagttccaggctgcagtcagctatgatcgtgccactgcattccagcattagtgagacctgatctcaaaawatatatatattttacatcattagctttatacaagctatatattaataaattaccagaaatgtacatatagaccagcaagactttctgtcaaatgagtatc

SEQ ID NO: 113914 - DNA, 201 bp, Homo sapiens
caggtgcaggaataaaggtatgtgcaaaaagttatggaaacctggtcaagtaacaaaatagctctattctgcttgacatccatagcttccctcaaattaarggagcagcaggcccagggttcatgtgtctacaggcattcctgcaaacagcattcttgtgcaacaggaagcgcctttagaaagtagttaataccaggctgg

SEQ ID NO: 113915 - DNA, 201 bp, Homo sapiens
tgagcttgaaattttagctccatgaaggcctgaatctgtgtcttttatttataactgtatcaccagctcctggaatagtgcttggcatggatgctcagtamatagctcctggatgattgaataagctggacactactgcaaaaactattctgtattcaccactaaaggcagcaacttccaacaaattggggtaggcttgaa

SEQ ID NO: 113916 - DNA, 201 bp, Homo sapiens
agccacgtggttctgcagactcctggcaaggcggagcggtcagttctagatgatcaagaaggacctgcgtggtttgctgcagccgaagctgcttctctctytttgcactgtgcttgccgccacctcatcacctgtgtttccgcctcggcagccgggagcatcgccatagagacctcaacgcttgtggaaagttctgaggcc

SEQ ID NO: 113917 - DNA, 201 bp, Homo sapiens
catgctgtgtatgtaatagaatgttatattctttatgtaattttattaaaggttttgctatcggcatgccagtgtgtgaatttgatatggttaaagatccwgaagtacaggacttccgaagaaatattctgaacgtttgtaaagaagctgtggatcttagggacctcaattcacctcatagtagagcaatgtatgtctatc

SEQ ID NO: 113918 - DNA, 201 bp, Homo sapiens
gatccactcacctcggcctcccaaagtgctgggattacaggtgtgagccaccgcgcctggcacaaaaggttttagtatcccatttgtccaacaccctcagkcatcactcttctctccattttggttcccacattgactgccccatgccccaaccctagggcaggcaaaaggggtgcaggtcactagaggctttcagcttct

SEQ ID NO: 113919 - DNA, 201 bp, Homo sapiens
gctctagccttggccagcccagaaaggggctcctcaggcgcggccagagtgggcgccaaggccgaggaggcgcggagagcgagcgagggctgcaagggctgccagcacgttgtcacctctcaagacctgactacaaacttagccacaaagaattcctcaacaaatgtcaaatgattcatgaaagtaatatatttttatatg

SEQ ID NO: 113920 - DNA, 201 bp, Homo sapiens
ggctctagccttggccagcccagaaaggggctcctcaggcgcggccagagtgggcgccaaggccgaggaggcgcggagagcgagcgagggctgcaagggctgccagcacgttgtcacctctcaagacctgactacaaacttagccacaaagaattcctcaacaaatgtcaaatgattcatgaaagtaatatatttttatat

SEQ ID NO: 113921 - DNA, 201 bp, Homo sapiens
ctgacatcccacacctctctgtactttctgcttcacaggcatcactaatgtcctgtgagggactttcatttttgggtacggtgcagtgatctgcatcttcrctctctggttcttcaggattgctttaagtggcaccagctattttagcattatcttttgcaacaccttcatctaattcttcaccaccagccctcgggcctg

SEQ ID NO: 113922 - DNA, 201 bp, Homo sapiens
aatgttgtatgtaaataagtgttacgaactttgttatctttcagggatattgcacgtccctcctgaaaatttgtttacattctcctttgaattccacatgraaagaatgactcaaaaagttcacatttggaattaacagcgtcctgaacagggtttgacttattctttcatattcacctgttggaaaggcagcatatccac

SEQ ID NO: 113923 - DNA, 201 bp, Homo sapiens
cttgaactcctggcctcaagcgatcctccaaacttggcttcccaatgtgctagggttacaggcatgaaaacattgttttgtgtgtgtgtgtgtgtgtgtgtgtgttttttagacagagtttcgctcgttgtccaggctggagtacaatggcttgatcttggctgactgcaatctccgcctcgcaggttcaagcgattctcc

SEQ ID NO: 113924 - DNA, 201 bp, Homo sapiens
atttaacaacttattttgaaacagcaaataaggttaagtcaacatagttcatcaagttcagcaagaggaaatagcaataattcagttgtgcatttcagaartgaaaatgggatacagtagtttgctttgatgacaacacaactgcctttatatctagttaattgtgtgacgtatgggacactaaaacttgtttgcttgcat

SEQ ID NO: 113925 - DNA, 201 bp, Homo sapiens
ccttgaactcctggcctcaagcgatcctccaaacttggcttcccaatgtgctagggttacaggcatgaaaacattgttttgtgtgtgtgtgtgtgtgtgtgtgtgttttttagacagagtttcgctcgttgtccaggctggagtacaatggcttgatcttggctgactgcaatctccgcctcgcaggttcaagcgattctc

SEQ ID NO: 113926 - DNA, 201 bp, Homo sapiens
gccttgaactcctggcctcaagcgatcctccaaacttggcttcccaatgtgctagggttacaggcatgaaaacattgttttgtgtgtgtgtgtgtgtgtgtgtgtgttttttagacagagtttcgctcgttgtccaggctggagtacaatggcttgatcttggctgactgcaatctccgcctcgcaggttcaagcgattct

SEQ ID NO: 113927 - DNA, 201 bp, Homo sapiens
agccttgaactcctggcctcaagcgatcctccaaacttggcttcccaatgtgctagggttacaggcatgaaaacattgttttgtgtgtgtgtgtgtgtgtgtgtgtgttttttagacagagtttcgctcgttgtccaggctggagtacaatggcttgatcttggctgactgcaatctccgcctcgcaggttcaagcgattc

SEQ ID NO: 113928 - DNA, 201 bp, Homo sapiens
gcagccttgaactcctggcctcaagcgatcctccaaacttggcttcccaatgtgctagggttacaggcatgaaaacattgttttgtgtgtgtgtgtgtgtgtgtgtgtgttttttagacagagtttcgctcgttgtccaggctggagtacaatggcttgatcttggctgactgcaatctccgcctcgcaggttcaagcgat

SEQ ID NO: 113929 - DNA, 201 bp, Homo sapiens
atagcaataattcagttgtgcatttcagaaatgaaaatgggatacagtagtttgctttgatgacaacacaactgcctttatatctagttaattgtgtgacrtatgggacactaaaacttgtttgcttgcatgtttgtcatttgatcttttgccataaagtaattcattttaattgtctgttcacaaaaaaattggttcatg

SEQ ID NO: 113930 - DNA, 201 bp, Homo sapiens
acagcaaataaggttaagtcaacatagttcatcaagttcagcaagaggaaatagcaataattcagttgtgcatttcagaaatgaaaatgggatacagtagkttgctttgatgacaacacaactgcctttatatctagttaattgtgtgacgtatgggacactaaaacttgtttgcttgcatgtttgtcatttgatcttttg

SEQ ID NO: 113931 - DNA, 201 bp, Homo sapiens
tcgttgtaagtttttggctttatttctaggttctccattctgttccattggtctgtgtgtctgcttttgtgtgtatctgctgttttggtaattatagtttyctggtataatttgaagtccagtaatgtgatgcctccagatttgttctttttgcttagtcttgctttggctattcagactctttttggtcggttttatatg

SEQ ID NO: 113932 - DNA, 201 bp, Homo sapiens
aaaagaaaaattactttttgtgtccaaacaatccttagtgtactacataagcaaaaaactgtgataattctcttttgccattccttttgaaaagcaagccrgtgttgctaataatcaaaatttagctgaatttgagttcttttcagtaatgactaagaatacttgattgaaaatctgaaactattataccttaaaagccaa

SEQ ID NO: 113933 - DNA, 201 bp, Homo sapiens
agtccagccagtcgtccatgatatctgtgtggatggcagtgcaggtcgattcttctctctgaatgcttcaatttgaaaaaaaaaaaatgttcttcacttaytagaaaatttcattctacattttggtgtggttatgagcttatgtacacaatgcccaaggcatttgtgtacaaggcatttgtgtattttgaggtggtgcag

SEQ ID NO: 113934 - DNA, 201 bp, Homo sapiens
agtaatctgttgacctgtagtatgttttcagatggttaggagaacatccaaatctccgaatgtaaaaatatatcaagaattttacttgagcttccatctamcttagctattatacagctcacagtcctttgttaataattctaatattcacaattctagctcttaaaatcaaaagttttacagaattcgtttggcagaaag

SEQ ID NO: 113935 - DNA, 201 bp, Homo sapiens
aaactgtggattccagggcttcattccagaaattctgatttggtaggtctgacttgaggcccaggaatctttaatagtatttaagatgcaggtatttggaraaccacagtgtaaacagtgttagcattaccataatgctgtaaccaccaagattcaccctcactcaggaatctcatcacctctcatgctcatcatctcaag

SEQ ID NO: 113936 - DNA, 201 bp, Homo sapiens
ttccatctaccttagctattatacagctcacagtcctttgttaataattctaatattcacaattctagctcttaaaatcaaaagttttacagaattcgttyggcagaaagacctgggccaaccttaagtgagggtttttataatctttattaaccccacttagtataaaattccggtatcttattaaagaaatattaatgt

SEQ ID NO: 113937 - DNA, 201 bp, Homo sapiens
taaagtcttgcaatgaaaataaattattttacaacagttaattagcaatgtaaaatttattgaaaatgtatttgctttttctgtaaatcatctgtgaatcyagaggggaaaaatatgacaaagaaagctatataagatattattttattttacagagtaacagactagctagagacaatgaattaagggaaaatgacaaag

SEQ ID NO: 113938 - DNA, 201 bp, Homo sapiens
gcaacctacgtgaatgtaaatattcgagacattgataaggtaaagtcaaatgctgatgcttattattttatagaaattattttagataacctttttcttgmactatacagtaatctgttgacctgtagtatgttttcagatggttaggagaacatccaaatctccgaatgtaaaaatatatcaagaattttacttgagctt

SEQ ID NO: 113939 - DNA, 201 bp, Homo sapiens
ccagaaggtggatgttgcagtgagctgagatcgtgccactgcacttcagtctgggcaacagagcaagactctatctcaaaaaaaaatgaataaataaatamataataaaaaataaaataaaagtcataaaacacacaggaaatcaaggcgtttgagtgcaaaaaaaatagaccacaaaatgagatccacgaaaaatttcag

SEQ ID NO: 113940 - DNA, 201 bp, Homo sapiens
atgaatcttcttacattttcgtaagtgttactcaagaagcagaaagggaagaattttttgatgaaacaagacgactttgtgaccttcggctttttcaaccmtttttaaaagtaattgaaccagtaggcaaccgtgaagaaaagatcctcaatcgagaaattggtatgatacaatatcctattctaaaatgcaaataaccat

SEQ ID NO: 113941 - DNA, 201 bp, Homo sapiens
gacaatcacttgaacccagaaggtggatgttgcagtgagctgagatcgtgccactgcacttcagtctgggcaacagagcaagactctatctcaaaaaaaaatgaataaataaatacataataaaaaataaaataaaagtcataaaacacacaggaaatcaaggcgtttgagtgcaaaaaaaatagaccacaaaatgagatc

SEQ ID NO: 113942 - DNA, 201 bp, Homo sapiens
aggctgaggtgggacaatcacttgaacccagaaggtggatgttgcagtgagctgagatcgtgccactgcacttcagtctgggcaacagagcaagactctakctcaaaaaaaaatgaataaataaatacataataaaaaataaaataaaagtcataaaacacacaggaaatcaaggcgtttgagtgcaaaaaaaatagacca

SEQ ID NO: 113943 - DNA, 201 bp, Homo sapiens; identical to SEQ ID NO: 19051

SEQ ID NO: 113944 - DNA, 201 bp, Homo sapiens
ataaatgtccaaggagtatatgcactcatttagaagtcataaaacacacaacagccaggcgaggtagttcatggctataatcccagcactttcagaggctraggcaggtggatcacctgaggtcaggagtttgagacgagcccggccaacatggctaagccctgtctctattaaaaatacaaaaattagccaggtgtagtg

SEQ ID NO: 113945 - DNA, 201 bp, Homo sapiens; identical to SEQ ID NO: 19052

SEQ ID NO: 113946 - DNA, 201 bp, Homo sapiens
caagggctgtgactccagggcttcaccaatgggaccaaatgctggtctaatttcttcattcctcattcaaccaacagatcattcttgagcaccaactatgsgctgggctatgatcagtgctggggagctacaggtgagtttaaaaggtctccagtctccaagaactggcaacctagaggatagagccaacaggaaaggctg

SEQ ID NO: 113947 - DNA, 201 bp, Homo sapiens
caaaccggtgggcatggcggcatccagcccacagatgtgttttgtttggccttctctgtcgttttttgtttttgtgttttttggttttttttgagacggarcctcgcactgttgcccaggctgggtacgatctcagttcactgcaacctcctccgcctcccaggttcaagcgattctcctgcctcagcctccctagtagct

SEQ ID NO: 113948 - DNA, 201 bp, Homo sapiens
tgtgatttgctgctgcttttatgtatttgattcaacctcagaaatatgatcattttttagtccatgaggatcttgtcacacaaaacttgcacctgcctttrccagagcctcctggtcattcttatcttatgattccggttccatttaaaagaaaatactcatggacaataagtgagaaggagcaacatagctttttgccct

SEQ ID NO: 113949 - DNA, 201 bp, Homo sapiens
tgctaaagatggccacccttttagagcctaggtaaggttaaaagagatggtagccttgtctgccacagggaaggaagatagttcctcagcctacctaaacyactgtaggtcagaaaacgtatcattcaggtcagaaatgagattgtgacaacaaacaacttcaggatctttttttttttttttttttttttgagttgaagt

SEQ ID NO: 113950 - DNA, 201 bp, Homo sapiens
gagaacataatgtccttcagacacagaacttgaggaggtaggaactttttgcgcattcagcagatgaggacacagaagaccagagagtccgaggaacttgygcaaaaatcacaaagtaacaagggctaggtccggggctccagaacagatcacatccaaaagtccatgcttctactgacaatattcggcctcctcgctcag

SEQ ID NO: 113951 - DNA, 201 bp, Homo sapiens
aaatcaaggcgtttgagtgcaaaaaaaatagaccacaaaatgagatccacgaaaaatttcagatatttgcatagaatataaaatacacatctgtaacatayttaaagaaataaaggaaggatccaaaatgtcagaaatcaaggaattctaaaatgtagagctaatatttaaaaaagaatttatagaaatcaaaaataaaat

SEQ ID NO: 113952 - DNA, 201 bp, Homo sapiens
ggggctccagaacagatcacatccaaaagtccatgcttctactgacaatattcggcctcctcgctcaggaggagcttgggcttattcttttaagtgtcttmttctcaaggcttgaaggagccttagccctttgcgccaggaatgttgctggccaagttgttatacagacaggatgttcatagctttttataagtctgcatg

SEQ ID NO: 113953 - DNA, 201 bp, Homo sapiens
actctatctcaaaaaaaaatgaataaataaatacataataaaaaataaaataaaagtcataaaacacacaggaaatcaaggcgtttgagtgcaaaaaaaawagaccacaaaatgagatccacgaaaaatttcagatatttgcatagaatataaaatacacatctgtaacatatttaaagaaataaaggaaggatccaaaat

SEQ ID NO: 113954 - DNA, 201 bp, Homo sapiens
ggagaaccaagctatatctgaacaaaaattccgtggttttatatttgagtctatcgagtgtgtgcatatgtgtatgttgagtgtatacattagtatatacmtacttttttcttttagatctatgttcgaacaggtatctaccatggaggagaacccttatgtgacaatgtgaacactcaaagagtaccttgttccaatccc

SEQ ID NO: 113955 - DNA, 201 bp, Homo sapiens
gacatagctctcttagagtatagaacacttcttattaatttatgagcacttctaaagatttaggaataataaaaagtctggtacattaaagtaatatatcwttttcttttcttttttttttttttggaggcggagtcttgctctgtcgcccaggctggagtgcatggcacaaactcgactcactgcaacctctgcctcagc

SEQ ID NO: 113956 - DNA, 201 bp, Homo sapiens
ccagtggagaagggagctctgtcagctggtgacttttttcaaaaaagcttgaggtttattaccatatccattaggtacttgaggtactgtgctaaaggccwaaaactgtttgaaatcttaaaaatcattgcatcccaaacagaaaacaaaagtcatcggattgaaattgatgcttaaagacaataaaatgtaacatgtcaa

SEQ ID NO: 113957 - DNA, 201 bp, Homo sapiens
aattagggagcctgtataaagtaaaacaagcttggtgcctgctacaaaagctggctttttcatgctgtctttgaaatacagtctgtattttacacttctaraatatctcagtaaggacagtaaattttcagtggttagaaccatgtatcgtagaaacctccgtggttcacagtgaaacccaggaaggagggaggaacttgt

SEQ ID NO: 113958 - DNA, 201 bp, Homo sapiens
ctcatcaaaacttcataattcatctgacattcatttcacgggtgtatgtgaaatgaatgtctaaacatgaagtacactatattaatatttccctgtaattygttttggttacagaggagacccttggtaattatttttactcttctattttttaattacaacattatttaacaacttattttgaaacagcaaataaggtta

SEQ ID NO: 113959 - DNA, 201 bp, Homo sapiens
tgaggcaaactcaattacaaacagcctgaacacactcacctgggtgtgatccccacagaagccagcagcctctccctccagcactgaaacttttgcaagargtattccttagaaacatgctgtggctcatcaaaacttcataattcatctgacattcatttcacgggtgtatgtgaaatgaatgtctaaacatgaagtaca

SEQ ID NO: 113960 - DNA, 201 bp, Homo sapiens
atagttgaagtcttgagtagtgaacaagggactctaataccaatactcttaatatctggctattttagatcccttaaagggcataattattggaaatttargtatttcactaaagcatgtatataatattgccaacaagaaaagtaaatttgaagattaagggaacttacttctgcaaactgtcttgcgatagttaagcag

SEQ ID NO: 113961 - DNA, 201 bp, Homo sapiens
agcttctggcttagcctgaggcaaactcaattacaaacagcctgaacacactcacctgggtgtgatccccacagaagccagcagcctctccctccagcacygaaacttttgcaagaagtattccttagaaacatgctgtggctcatcaaaacttcataattcatctgacattcatttcacgggtgtatgtgaaatgaatgt

SEQ ID NO: 113962 - DNA, 201 bp, Homo sapiens
ttttccaataagaatatactgggacataacaaatgaaaacatttataacaaaataccaaaagtgattcagctctttaaaatatcctactccagtctaattygtagtttgcacaagaacaagtaacctttttttactgttcttttgaatgatgattagaaattcaaacaaagagaagtaattttaaggttcaaaaacttttt

SEQ ID NO: 113963 - DNA, 201 bp, Homo sapiens
ttctaaccaggagaatccttaagaagtgggggtgaagcagtttttgccctcaacaactaagactttaagcttattgcctgtgtctgtggctataaaactgyttgcattctcattagttatttgcgcactaagagcagaattgtgcatcttttccactggaaagtcacaaacatggttaaatttaagtagactctgtgtgct

SEQ ID NO: 113964 - DNA, 201 bp, Homo sapiens
aagtaacctttttttactgttcttttgaatgatgattagaaattcaaacaaagagaagtaattttaaggttcaaaaactttttcttttttttagagacagkgtctcactctgtctcccaggctagagtatagtggtgcaatcatagctcactgcagccttgaactcctggcctcaagcgatcctccaaacttggcttccca

SEQ ID NO: 113965 - DNA, 201 bp, Homo sapiens
ccatgtgcagtgcactcagaacacagagatcaatgggatgcagtcccacccacacacttcccatgtcagggctgatttccaacaggcaaaaaatgctacaygagatgtgttgatttgcaatgaattaaattataacttcaggtaaatgatgttcatcctctggatatatgatgttcatcctctggatattttttgagaatc

SEQ ID NO: 113966 - DNA, 201 bp, Homo sapiens
tgatgattagaaattcaaacaaagagaagtaattttaaggttcaaaaactttttcttttttttagagacagggtctcactctgtctcccaggctagagtayagtggtgcaatcatagctcactgcagccttgaactcctggcctcaagcgatcctccaaacttggcttcccaatgtgctagggttacaggcatgaaaacat

SEQ ID NO: 113967 - DNA, 201 bp, Homo sapiens
agcataaaaggctttagaatggttgttccgagcaagaagaacattaggactgagaagcccatcatggcaaaccccagcatcacggctcggtcctctccagyactggatggcagcctcttgtgcacatctagtgggtctccatcactgtagtctgtctctctcttcttccctgaggcaggaaaggctgtcctttggggaaag

SEQ ID NO: 113968 - DNA, 201 bp, Homo sapiens
gtgctaaaatggagattctctgtttctttttctttattacagaaaaaataactgaatttggctgatctcagcatgtttttaccatacctattggaataaakaaagcagaatttacatgatttttaaactataaacattgcctttttaaaaacaatggttgtaaattgatatttgtggaaaatcatactacattggtagttg

SEQ ID NO: 113969 - DNA, 201 bp, Homo sapiens
ccttctttgatttaggtttctgctttgggacaaccatacatctaattccttaaagtagttttatatgtaaaacttgcaaagaatcagaacaatgcctccamgaccatcatcaggtgaactgtggggcatccacttgatgcccccaagaatcctagtagaatgtttactaccaaatggaatgatagtgactttagaatgcct

SEQ ID NO: 113970 - DNA, 201 bp, Homo sapiens
gtgaaatggccatttccagtcattaagcaaggatgtggaagagaattcttagttatatgacattgcaggagagtcagtgaccaacttcataaggaatatgwctcctccctacatgcaggttcttggactcttggacagtatgaatccgtttgtccattgaacaaaaatgtattgggcctcactatgagctttcaacgctta

SEQ ID NO: 113971 - DNA, 201 bp, Homo sapiens
ctccagttaagggtagaactacagtttcaaaagttgaccttaatttttttctttcgtgcaatttatattcagaagtgtttgattgatcttgtgcttcaacrtaaatcctaaatgttagtattttaaatgttataggaactactagtaaatgtggtctataatgtttaattttttatcacctttgcagattaatatgtagtc

SEQ ID NO: 113972 - DNA, 201 bp, Homo sapiens
tctggagttgttcattcctcccgatgggttcgtggtctccctggcttcaggagtgaagctgcagaccttcgcagtgagtgttacagctcataaaggcagcrtggacccaaagaacgagcagtaccaagatttattgcaaagagcaaaggaacaaatcctccacagcgtggaaagggacctgagcaggttgccactgctggc

SEQ ID NO: 113973 - DNA, 201 bp, Homo sapiens
tcctcaggaagcagatctgctgatagagagctggagcttttctgctgagtcagggaactcataaggtaaaccttggaagaaaacaagggaatgaataagasggggaagcgaggtgccccataaaaatgccttgcaaaaaataacccagaaaaggaatgcaacttttttctcttctgggttttcgttttaagatcaaactgt

SEQ ID NO: 113974 - DNA, 201 bp, Homo sapiens
agtggctgggattacaggcgcccaccaccacgcctggccaattttttgtatttttcgtagagacagggtttcaccatgttggccaggctggccttgaactyctgacctcaggtgatccacccgccttggcctcccaacgtgctgagattacaggcgtgagccaccacacccggccaaaaacatttaaaaaatgactgtccc

SEQ ID NO: 113975 - DNA, 201 bp, Homo sapiens
caggagttcgagaccagcctgggcaacatagcaagaccctgtctctacacaataaaaattaaaacaccatccagttgtagtggcacacctatagtcctagytactcaggaggctgagccaggaggattgcttgagcccaggtgtttgaggctgcaataagcttgattgtgccactgcactccagcctcagtgataggtgag

SEQ ID NO: 113976 - DNA, 201 bp, Homo sapiens
aagaaagaagtatgaatgaatatatatatttttaaaatattttgacaaaatgacttaaatctagtcatttttacactatttccaaggacaatttaataatrtatgccaacaatttttaagcataccttcatcctccagcagaaagaatgtagcaaatttctcttgttaacattattttatgggtagaaccatgagatgcta

SEQ ID NO: 113977 - DNA, 201 bp, Homo sapiens
caaaataacatgatagaataatgttattgcatcagtatatcagtaattacaataaaactaaatggagtaaatgatccagttaaaagatagagagtagggcwggctgtggtggctcatgcctatagtcccaacactttgggaaaccaacgtgggagaatcacttgaacccaggagttcgagaccagcctgggcaacatagca

SEQ ID NO: 113978 - DNA, 201 bp, Homo sapiens
aactgactacattccccttctggccctctcgctctttggacaagctctccttggggactcctacatcgtcaccataattccacctgtaaagctcacccggrgcgtgcccccaagccaggtcccatatggccctgttcataagaaagaagtatgaatgaatatatatatttttaaaatattttgacaaaatgacttaaatct

SEQ ID NO: 113979 - DNA, 201 bp, Homo sapiens
gtttcaccatgttggccaggctggccttgaacttctgacctcaggtgatccacccgccttggcctcccaacgtgctgagattacaggcgtgagccaccacrcccggccaaaaacatttaaaaaatgactgtccctgctcaaatactgcagtaggaaatgtaatttgacatgtatcacttccagaaaaaatctttaaacttt

SEQ ID NO: 113980 - DNA, 201 bp, Homo sapiens
atttgatacatcatcagcatgaagttaaaatctcctacaaagtaaattcaagtatcatcaacaatgagatccaaaagcattggttcaaaatcaaagacttwtatgaggtgaaggcaaataaagcccctcatgctttcagacctttacttgttatccttaaaatgattattgttctaaggtgcaaatcttttcagtgaccta

SEQ ID NO: 113981 - DNA, 201 bp, Homo sapiens
atctcctacaaagtaaattcaagtatcatcaacaatgagatccaaaagcattggttcaaaatcaaagacttatatgaggtgaaggcaaataaagcccctcrtgctttcagacctttacttgttatccttaaaatgattattgttctaaggtgcaaatcttttcagtgacctatttgctatttggcggtttatctcctttaa

SEQ ID NO: 113982 - DNA, 201 bp, Homo sapiens
tcaaatattccactttagtggaatatttagtggcgcctcaaaaggaacggtgccacctcctggtgggcatttgggaatctgtgggtgagggtgtttcttgsttgtcaccatgattggaagggcactgccaggtacttagggagtggagagctacatgtggcagatgtcctacagtttgcagggcagtcccacacaacaaag

SEQ ID NO: 113983 - DNA, 201 bp, Homo sapiens
gaatttgtatgtatttatagaaataaatagaatacaaaatgaggcttttaaattttttcccacatgaaaatatgatactttaattattaccttttacattrttagtttgcagacaggcataattaggtcctcagttgcagaaatcacagacatctgaaggccagcactttaatttggccaccgtcttaagatttctctgct

SEQ ID NO: 113984 - DNA, 201 bp, Homo sapiens
cctcaggcgcggccagagtgggcgccaaggccgaggaggcgcggagagcgagcgagggctgcaagggctgccagcacgttgtcacctctcaagacctgacwacaaacttagccacaaagaattcctcaacaaatgtcaaatgattcatgaaagtaatatatttttatatgctcattgtatgaaacttgaaaaatacaaaaa

SEQ ID NO: 113985 - DNA, 201 bp, Homo sapiens
accaacttcataaggaatatgactcctccctacatgcaggttcttggactcttggacagtatgaatccgtttgtccattgaacaaaaatgtattgggcctyactatgagctttcaacgcttagtaatgcctctgttgtctctgtcttgatctcctgtagcaaaatatcaccctgaagaaaagcacgttgaggcttttgctc

SEQ ID NO: 113986 - DNA, 201 bp, Homo sapiens
gaaaccaaagccagcctctcctcctttaccgctgtgcctggatcttatctgaattggaaactctagatttccttcctctgtttcttacctgagcataaaakgctttagaatggttgttccgagcaagaagaacattaggactgagaagcccatcatggcaaaccccagcatcacggctcggtcctctccagcactggatgg

SEQ ID NO: 113987 - DNA, 201 bp, Homo sapiens
tgggctggtctcgaactcctgagctcaagtgatcctccctcccctacctcccaaagtgctaggattacaggtgtgagccatcatgcccggccaaaagacaraataaatgtatagtatcagtaaatacagtacagtactgtaaatgaattttctcttccttatgattttcttaataacattttattttcactgtcttactct

SEQ ID NO: 113988 - DNA, 201 bp, Homo sapiens
ctctttaggaatggattcctaaataaaaattgaggtgaaagttgtaaatctttgtaacacttcaaaaagctatattgtatttatattttaaaataaatttsagggtaaaataataataaagcaaaggtacctagtaaagtttttaactattttaaaggcttgaagagtgtcgaattatgtcctctgcaaaaaggccactgt

SEQ ID NO: 113989 - DNA, 201 bp, Homo sapiens
tagatcacctggtgattggcatacagtgcatctctatgaatttagaacattctacttacattggcagtggagagaaaagagcccctcacactcagacttcytgtgcaccacgcctgccgcctgcctcagcttaggacatggtacggtcttctttgcttttgcccttctcgttccctcctctggtatcttctctgctttctg

SEQ ID NO: 113990 - DNA, 201 bp, Homo sapiens
gaacattctacttacattggcagtggagagaaaagagcccctcacactcagacttcctgtgcaccacgcctgccgcctgcctcagcttaggacatggtacrgtcttctttgcttttgcccttctcgttccctcctctggtatcttctctgctttctggattgaagtcccccggctctcctcctggtgccaacaagtcatgg

SEQ ID NO: 113991 - DNA, 201 bp, Homo sapiens
tgtaattctagctgctgcggcaggagaatcctttgaacaaggagtcggaggttgcagtgagccaagattgcgccactgcactccagcctagcgacagagcragactcgtctcaaataaaataaaataaaaaaagaagacgtatataaatgtccaaggagtatatgcactcatttagaagtcataaaacacacaacagccag

SEQ ID NO: 113992 - DNA, 201 bp, Homo sapiens
agatgcacgtccctgcagatgaacagcgggcccagcagagcagtggctgcccctgtggaaggtgtgttctctagtttgccaaaatccctccacttcctacrgtgtcactgatttgccattccctgctcagtagccatttgagttccagaagtatctccattttaagaagcttaatgaaatcttaagccaaacaaatgcagc

SEQ ID NO: 113993 - DNA, 201 bp, Homo sapiens
gcgattctcctgcctcagcctccctagtagctgggattacaggcgccggccaccatgcccagctaatttttgtattttaagtagagacagtgtttcaccaygttggccataatggtctcgaacgcctgacctcatgatccacccacctcagcctcccaaaatgttgggattacaggcgtgagccactgcacccggcctggt

SEQ ID NO: 113994 - DNA, 201 bp, Homo sapiens
tagatatgccatatttccttaaccatttccttattattgaatattattaggttgtttccagttttctcagaccataaacagccttgtaattaactttgttrtatttacaagcatctttcatccaaggacctcaaagcacttaagtatgatctagtttgctttctagtcaggaagatggataaaaagcatattgattccttt

SEQ ID NO: 113995 - DNA, 201 bp, Homo sapiens
actgacctttctatcacaccacgtgtagtgaggcactgttaaactgatgggttgctgaggttgattttcaggcattttgggggccatccctcaaactgacyacattccccttctggccctctcgctctttggacaagctctccttggggactcctacatcgtcaccataattccacctgtaaagctcacccggagcgtgcc

SEQ ID NO: 113996 - DNA, 201 bp, Homo sapiens
gtaagtaaataagtaaataaataaataaataagaatttgaattcattaaagttaaatacaatttaaaattcagtttctccccagccgcactagccacacayatttcaggtgatcaatagccatatgtggctggcggccactgtattggaaagtgtcaaactagctgaaatacctcaacttacagatgaagaaactgtagca

SEQ ID NO: 113997 - DNA, 201 bp, Homo sapiens
taatccaacatatctaaaatattatcacataaacatagagtcaatacaaaaatgtattaatgagatagtttatagtgtctttcacactgttctttaaagaygattttacacttctaacccatctcagtaaggatactaaattttcaacggctaaagtaaaatgtagtgctgtcaaagttactacgttttgtttaaaagaga

SEQ ID NO: 113998 - DNA, 201 bp, Homo sapiens
gttcctagcaagaagtttggcctgtgactgcacttactgtttatgctcatcagaaactgtcaatgtctgcttttctttaactctgcagtctgtaacatcaygctgtttattaaaaaaaaaaagaaaaattactttttgtgtccaaacaatccttagtgtactacataagcaaaaaactgtgataattctcttttgccattc

SEQ ID NO: 113999 - DNA, 201 bp, Homo sapiens
agaatacttgattgaaaatctgaaactattataccttaaaagccaatttttctaccccagtaaagtgatgaatattaaaggaatgtatgtttaaatatttrcttcctttaagcataaagaattatatgcttgtattttaagaaatatatgtatatacatatatgtatgaatgtatgtatgtatatgcaataggtaagtaga

SEQ ID NO: 114000 - DNA, 201 bp, Homo sapiens
acagaatccctgccctcttggagcttacagcctaacagagaaaagagggacattaaatgaataattacaaaaataaaattgcaagcatgttgcaaaggaaragtgtagtctgctcaggaaccatataaaagaaggtacttatatggaggaaaaggctatggggggagtgaaggaggatcatggatgggttttcaataggaa

SEQ ID NO: 114001 - DNA, 201 bp, Homo sapiens
tctcatgctcatcatctcaagatgcactggcttgtcctgatgaaaatgtgcctttggaaggagtctaactacagggccgttggtcaacatagcctacacamtttctggcaacaaggtacaattccacatacccactacttccaaagaggcaagtgcaaatcatacatggaatctctcagtagaatacttaccatatttttg

SEQ ID NO: 114002 - DNA, 201 bp, Homo sapiens
gaagtcctgtggtatactgcattcattagaagaaaaacgtttttaatgtccttttaatgatggcccagaaagcatttgacacagcaagatgcatgtgttaytatattgagaatatagaataataacagtatcactaaatttaagacctcttcccagtcttgctgttcctagcaagaagtttggcctgtgactgcacttact

SEQ ID NO: 114003 - DNA, 201 bp, Homo sapiens
ttcggcatttgaaattcattttgttctctcttcttcattattagtgcatttggtgtgtgtatacttgcacacaattctgtttgtgtacacactgcttgctwagccctagtcaagaggcatcttttataaaaggtgtaaagaaatatcaaggttctaaaattcggaagagtttagaatttattaggagtttcccaagttggg

SEQ ID NO: 114004 - DNA, 201 bp, Homo sapiens
gccccacccacatcctgctgattggtccattttacagagagccgattggtccattttacagagagctaattggcccattttgacagggtgctgattggtgygtttacaatccctgagctagacacaaaggttctccacatccccactagattagctagatacagagtgtggacacaaacgttttccaagtccccaccagag

SEQ ID NO: 114005 - DNA, 201 bp, Homo sapiens
atgaagttattaaaaagatagaaaagtagattttaaaaattcttactaaatatttgtttcaaatctgtgcttcttttatgctaaattagatgctttatgakttctttgtaaatgttacaagtatctcccaaaatcagagtcaatttggactgtatacacacacacaaccattttctagaaataaagaacttaattgagcat

SEQ ID NO: 114006 - DNA, 201 bp, Homo sapiens
ccacggaagtggagtcccagcgggagcccccagcccccagcgcagctgcagccattagaagccccccgccttcctggagaggtgagaacttcaggcaggcyagccacgtggttctgcagactcctggcaaggcggagcggtcagttctagatgatcaagaaggacctgcgtggtttgctgcagccgaagctgcttctctct

SEQ ID NO: 114007 - DNA, 201 bp, Homo sapiens
ttattaaaaagatagaaaagtagattttaaaaattcttactaaatatttgtttcaaatctgtgcttcttttatgctaaattagatgctttatgagttcttygtaaatgttacaagtatctcccaaaatcagagtcaatttggactgtatacacacacacaaccattttctagaaataaagaacttaattgagcatgtgtat

SEQ ID NO: 114008 - DNA, 201 bp, Homo sapiens
aatcaaacctgaacaggctatggaacttctggactgtaattacccagatcctatggttcgaggttttgctgttcggtgcttggaaaaatatttaacagatracaaactttctcagtatttaattcagctagtacaggtaaaataatgtaaaatagtaaataatgtttaattacaataataatttattctagatccatacaa

SEQ ID NO: 114009 - DNA, 201 bp, Homo sapiens
taaaggggtcaattcagcaagaggatataacaatttgataaatatatatgcaccaaacactggagcacccagatatataaagcaaatattattagagaatygcttgagcctgggaggcgaggcagaggctatggtaagccaagatcacaccactgtactccagcctgggtgacagagtgacaccgtgtctcaaacaaataa

SEQ ID NO: 114010 - DNA, 201 bp, Homo sapiens
ataaagtgccttttccaatcaatctctttcctgtttttcgtttggttgatctttgtcttcgtgatttgtaggagtcatttatatactttgatgaagacttytcttgatgtattatttttgctttaaaattttacataggtggaatgaatggctgaattatgatatatacattcctgatcttcctcgtgctgctcgactttg

SEQ ID NO: 114011 - DNA, 201 bp, Homo sapiens
tccgagcaagaagaacattaggactgagaagcccatcatggcaaaccccagcatcacggctcggtcctctccagcactggatggcagcctcttgtgcacayctagtgggtctccatcactgtagtctgtctctctcttcttccctgaggcaggaaaggctgtcctttggggaaagggagaaggagatactgcagtgagctc

SEQ ID NO: 114012 - DNA, 201 bp, Homo sapiens
aattgtaatagtattattttatttaatccaacatatctaaaatattatcacataaacatagagtcaatacaaaaatgtattaatgagatagtttatagtgkctttcacactgttctttaaagacgattttacacttctaacccatctcagtaaggatactaaattttcaacggctaaagtaaaatgtagtgctgtcaaagt

SEQ ID NO: 114013 - DNA, 201 bp, Homo sapiens
tccccgcatttttaaacaactaagagtataattggattgtttgtgacacaaggataaatacttgagatgatggacaccccatttaccctgatgtgattatygcatgcctgtatcaaaatatctcacgtaacccataaatacataaaactactatgtacccacgaaaattaaaataaaaaataaaaataataaaaaataaaa

SEQ ID NO: 114014 - DNA, 201 bp, Homo sapiens
tgccttgtttttaatgatatggaagaccttaagaaaaaaacttggctgaagtttaatcgttggtccagccatttgaaaaaggcaatagtttgaggaggttyccgaattcggcatttgaaattcattttgttctctcttcttcattattagtgcatttggtgtgtgtatacttgcacacaattctgtttgtgtacacactgc

SEQ ID NO: 114015 - DNA, 201 bp, Homo sapiens
gcaaggtactggcataaaaacagacacatacatcagtggaacagaatagagaacccagaggtaaatgcatacatctgcagtgaattcatttttgacaaagstaccaagagcataaattggggaaacgacagtctcttcaataaatgatgctgggaaaactggatatccatatgcaaaagagtgaaactagacctgttatct

SEQ ID NO: 114016 - DNA, 201 bp, Homo sapiens
agagttggcatgccttgtttttaatgatatggaagaccttaagaaaaaaacttggctgaagtttaatcgttggtccagccatttgaaaaaggcaatagttygaggaggttcccgaattcggcatttgaaattcattttgttctctcttcttcattattagtgcatttggtgtgtgtatacttgcacacaattctgtttgtg

SEQ ID NO: 114017 - DNA, 201 bp, Homo sapiens
aaaaagtgaactattaataattatagaagcatatagaggcatatgtctaaaaagaaatgtatgcagtaattatcagtagttgattacactatagtactttkacatatcctcctcttacttgacttagaatagctaaattatattcagctaagtaaaaagagctaataagctaataaacactctgctactgcctctggagtg

SEQ ID NO: 114018 - DNA, 201 bp, Homo sapiens
aaatgggaaaaaaaaatagatgagtcacaattcaatacttcaagctcagaaactgtgcagatcactgaattttagatttataaagtcagagttggcatgcsttgtttttaatgatatggaagaccttaagaaaaaaacttggctgaagtttaatcgttggtccagccatttgaaaaaggcaatagtttgaggaggttcccg

SEQ ID NO: 114019 - DNA, 201 bp, Homo sapiens
taatttttgtatttttagtagagacagtgtttcgctttgttgcccaggctggtctccaattcctgggctcaagcagtctgcccacctcggcctcccaaagkgctggaattacaggcatgagccactgtgcctagcccaatgtaaacttttttatgaccttttcctacaccctattctttattcaatccaatccaccacatc

SEQ ID NO: 114020 - DNA, 201 bp, Homo sapiens
agaaatgtgagttgtattattctttcttcctatgttaatctaagtttttgttagatgagtctgtcggtgtttgtgtattcctctgagttagaacagagaamacaattgtactttctatggaaaaaaatatgctcaacctttgaaatatttgatgttaatggatttaaatgattataattacttttaatttggtaaaatctt

SEQ ID NO: 114021 - DNA, 201 bp, Homo sapiens
tggactgttttacaatgccatcttattccagacgcatttccacagctacaccatatatgaatggagaaacatctacaaaatccctttgggttataaatagwgcactcagaataaaaattctttgtgcaacctacgtgaatgtaaatattcgagacattgataaggtaaagtcaaatgctgatgcttattattttatagaaa

SEQ ID NO: 114022 - DNA, 201 bp, Homo sapiens
aagtacaggacttccgaagaaatattctgaacgtttgtaaagaagctgtggatcttagggacctcaattcacctcatagtagagcaatgtatgtctatcckccaaatgtagaatcttcaccagaattgccaaagcacatatataataaattagataaaggtaagaaaatgactaatctactctaatcattactatagtgca

SEQ ID NO: 114023 - DNA, 201 bp, Homo sapiens
ttaggtcctcagttgcagaaatcacagacatctgaaggccagcactttaatttggccaccgtcttaagatttctctgctcttcctttgctcctcctcatamtgcacagtttgaactgatgctgttctatataaggtacttttccacctacctcatctctgactacagtgctatatttttcacacagtaaggacaggtgttg

SEQ ID NO: 114024 - DNA, 201 bp, Homo sapiens
tgcttgccgccacctcatcacctgtgtttccgcctcggcagccgggagcatcgccatagagacctcaacgcttgtggaaagttctgaggcccaaggggacyctctataattggtgagggacgtactcagttcaaggtttataagaagaggaaatgttttgccctggccgcgtttccttttccacgtattgtctgttagagt

SEQ ID NO: 114025 - DNA, 201 bp, Homo sapiens
ttagaatggaaattagcttggtctcaggtacttgtgacccacatatcacagttttgtgtgcttgtcataaaacatgagatttgggaatgatctggcagccygctcagatataaacattttctgtttctacctgatatttacctagttttaattgggctgattaaaaagcatttctgatatggataaagtaatgatagtgaa

SEQ ID NO: 114026 - DNA, 201 bp, Homo sapiens
atatatatatatgatgagaggaaaaggagtaaatgaaaaagaggaaaaaaagacagaatgaagtcagaagtgaggtatagccaagacaagagaatcgcttkagcctaggagtttgagactagcctggacaacatagtgagatcccacttcttaaaaaaaaaagtttaaaaaaaagtgaggtacaaacatgtaatctgcaga

SEQ ID NO: 114027 - DNA, 201 bp, Homo sapiens
aaataactcgccattaaaattatctcaaattttaagaaaagctgtatcaaatattattttatctttctctgatgacttaaaagacatttggggatctttcyacactcccaaattaggaacatcaattaccattatattatagtaccacacattgctacaggcacctgtagatgtggatgacagaatgccaaagagaccatg

SEQ ID NO: 114028 - DNA, 201 bp, Homo sapiens
gtttgggtttttttgagatggagtctccctctgtcacccaggccggagtgcactggctcaatcttggctcactgcaacctccacctcccaggttcaagcgmttctcctgcctcagcctcccgagtagctgggattacaggcatgtgccaccacgactggctaatttttgtatttttagtaaagacagggtttcatcatgtt

SEQ ID NO: 114029 - DNA, 201 bp, Homo sapiens
agatattgtagcaaacaagcctaagaaatgttgcctcatgcaagtctgtagagatctgtttaatcaataactagagaatgttgtatgtaaataagtgttamgaactttgttatctttcagggatattgcacgtccctcctgaaaatttgtttacattctcctttgaattccacatggaaagaatgactcaaaaagttcaca

SEQ ID NO: 114030 - DNA, 201 bp, Homo sapiens
attttgaattgactttgttctccagggataatctctctctttgctggaatgaatcaggtagctcctatctaaatggaaaactgtggtaattgaaacacacrctttatattttaaattagcagttttgaatttgttagggaaaaaaaaatcccagcaactgcatattgttaggtagaagtcaaatttacaaaaacggaatag

SEQ ID NO: 114031 - DNA, 201 bp, Homo sapiens
cttcccatagcctcatctctgtcttgatgaaaccttagagaatccactcaaatatagtgttttcttaaatgactttattaaatttaattaaatacaaatgktttttctaatctctgctgaaataaattctttgtagcctaatttagagcaacagtctagattagaatacttaagatgaattattactacttagcctaatca

SEQ ID NO: 114032 - DNA, 201 bp, Homo sapiens
tctctttgctggaatgaatcaggtagctcctatctaaatggaaaactgtggtaattgaaacacacgctttatattttaaattagcagttttgaatttgttrgggaaaaaaaaatcccagcaactgcatattgttaggtagaagtcaaatttacaaaaacggaatagagatgtgcccttgagaaaagtgtagaatctcaatg

SEQ ID NO: 114033 - DNA, 201 bp, Homo sapiens
tgtgcctaagtatatatgtaaatatatttccaactatagtgttaaacactgatgtcttttgaattttaaaaaagctagtaatgtaagaagtttgggacttmttaagaagattcatatggagaagttagacatgtcaaccttttgaacagcatgcaagaatgtttatgtttattttgtttctcccacacagacactattgtg

SEQ ID NO: 114034 - DNA, 201 bp, Homo sapiens
ttgagattactagataactgttgtacaaattggtatgtcacttaaattgttttctctcagaaagtccacataaataaatgaaatagactaatagtaatatrgtgtagaaaaaaacacccttaacattatttccatagataaaactaattagaactgtaaattctaaggagattatttatctaaactaattttaaaatcaga

SEQ ID NO: 114035 - DNA, 201 bp, Homo sapiens
atgtactgtgaacaaccaaacctctctaaatagtttgtcttcccgttttcttcatctttctcttttcttcttttttggactcctggcttaatcttaaaagragaaaattagacaatgcatttcctctcccctcgtaattttcttacctttcctccctcacattttctgtcattctaattgaacatctttaaacctccattg

SEQ ID NO: 114036 - DNA, 201 bp, Homo sapiens
tttaattattacattaaaaattgtaaatatatctatgtgccatggcctgggaagcctgctttcttttttcataaaaattatttttactgtatgaaaagatyatggggtttagctcaaaatatctgtggtcctgataaaattggattggtaactctacctcagaaggaaaatgggaaaaaaaaatagatgagtcacaattca

SEQ ID NO: 114037 - DNA, 201 bp, Homo sapiens
tttttaaaagtaattgaaccagtaggcaaccgtgaagaaaagatcctcaatcgagaaattggtatgatacaatatcctattctaaaatgcaaataaccatraagcttaactgttgtccctttctaaaatatttctgtctaaaccaataccttcgtaatcttaaatagctttctaaataaaaatcataaatctaaagtatgt

SEQ ID NO: 114038 - DNA, 201 bp, Homo sapiens
ctggacccacatactcaagagtccaccttaagaaattattttgatgtccaagacatcactaaaatatttaagtttaaagataatatgtggtgttaatagaytgtggtgcttttactatttaaagacaactttcatacttcagatgtttttgagaagaggggaatgtgaggggagggggcagaacagggaggagttgtttga

SEQ ID NO: 114039 - DNA, 201 bp, Homo sapiens; identical to SEQ ID NO: 19073

SEQ ID NO: 114040 - DNA, 201 bp, Homo sapiens; identical to SEQ ID NO: 19076

SEQ ID NO: 114041 - DNA, 201 bp, Homo sapiens
gccctacagttttatttcgatgtcaattaaacatctttaaattaacacatatttttaaaatcataaatgtttgtaaaattttaattgccacaataattttyttaattcttttctgataaaaatacagtgctttctcagttgaaggttataataaatgatgacaggtaattttgaggattattccaggagtatgtttatcac

SEQ ID NO: 114042 - DNA, 201 bp, Homo sapiens
agtaaaaatttaatgaacagacataacactcaattagatacatctgagaagataattagtgaacacagagctggatctgcaaaaatagccagagtataatmcagagagatttttaaatggaaagtattaaagagaggttcagagacatgaaagatagattaaatagtgtaacataatatctattcagaattccagaagaaa

SEQ ID NO: 114043 - DNA, 201 bp, Homo sapiens
gtatcagagatcagttctcgtggtttagacagttcctatctatagctgactatccttgtccttgaatatggtgtaactgactattggctctacagttttaytgggccacttaagaaatatttccttgaataattattttgagaaaaagtctaaaagtaataaaaataattttaaacacactgtagtaagaaatgactgttg

SEQ ID NO: 114044 - DNA, 201 bp, Homo sapiens
tctggcaaaatcaaggtcttgatcttcggtaggtaaccagtaaggcaacctgtatgttgaaagttatcctgaaaaagtgaactattaataattatagaagsatatagaggcatatgtctaaaaagaaatgtatgcagtaattatcagtagttgattacactatagtactttgacatatcctcctcttacttgacttagaat

SEQ ID NO: 114045 - DNA, 201 bp, Homo sapiens
atcctctagtatcctaatctggtcttgttgttggctaacttcagcagttactattctgtgactggtgtaatattaaccaaataaattactggatttgttcyacaaatattatgtcttagattggttctttcctgtctctgaaaataaagtcttgcaatgaaaataaattattttacaacagttaattagcaatgtaaaatt

SEQ ID NO: 114046 - DNA, 201 bp, Homo sapiens
gtgacaccgtgtctcaaacaaataaacaaataaataaaaaaaaactataccaatcctactcaaactattcaaaaacacaaagaaaggagggaatacttccwaactcattctatgaggccagtattatcttgatactaaaactagacaaagacacatcaaaaaaataaaactatacaccaatatttctgatgaatattgatg

SEQ ID NO: 114047 - DNA, 201 bp, Homo sapiens
atttctatcttggtggcacttaggtgtgtaaaagcactaggaatatggaagagggaaaaagataaaggcactgtcaccaataccaaatacttaacagtttytaattatgaaatagcttcaggctgaagttattagtgggcagtttcaatcttagaaggtggtaaaatattacatagctcatgggaaagggttgattggagg

SEQ ID NO: 114048 - DNA, 201 bp, Homo sapiens
gcatgccagtgtgtgaatttgatatggttaaagatccagaagtacaggacttccgaagaaatattctgaacgtttgtaaagaagctgtggatcttagggayctcaattcacctcatagtagagcaatgtatgtctatcctccaaatgtagaatcttcaccagaattgccaaagcacatatataataaattagataaaggta

SEQ ID NO: 114049 - DNA, 201 bp, Homo sapiens
tatgtaattttattaaaggttttgctatcggcatgccagtgtgtgaatttgatatggttaaagatccagaagtacaggacttccgaagaaatattctgaaygtttgtaaagaagctgtggatcttagggacctcaattcacctcatagtagagcaatgtatgtctatcctccaaatgtagaatcttcaccagaattgccaa

SEQ ID NO: 114050 - DNA, 201 bp, Homo sapiens
ctttatgtaattttattaaaggttttgctatcggcatgccagtgtgtgaatttgatatggttaaagatccagaagtacaggacttccgaagaaatattctkaacgtttgtaaagaagctgtggatcttagggacctcaattcacctcatagtagagcaatgtatgtctatcctccaaatgtagaatcttcaccagaattgc

SEQ ID NO: 114051 - DNA, 201 bp, Homo sapiens
ttccaatttagagatgcacaaatcattgacaacaacctaaaatttacacaacagcctatgttctttgcgtgactatctatatttgttcgtaggagaataartaaacccctaactggacagttattccaatatggagaatttttgctgatgtgagcaagaattcaaactgtcaaaagtaaagtcacatctgatcttacattc

SEQ ID NO: 114052 - DNA, 201 bp, Homo sapiens
tcagctgctgagaggcagcgctcacccagaaagaagagaattcaacaactgcatgcccaacccaactttccctagacacataatgataacttgggtgcccygagtaaccatgtgccagggattgtgctcagtgctatgagaacataatgtccttcagacacagaacttgaggaggtaggaactttttgcgcattcagcaga

SEQ ID NO: 114053 - DNA, 201 bp, Homo sapiens
taaaaccatgagcttcaagtcaatgactagtaaaaaagaaaaagaaaaaaaaaagtgaacccaaaaggtggctaaatatttagtttgctttaaaaaaaaaaccatttggtgatttctccctgtcttctggaagaaaaatcttagtgccaagttcatcagtcttttgagcacctctgtgcttgccaagggggctgaggacat

SEQ ID NO: 114054 - DNA, 201 bp, Homo sapiens
gttcatgtgtctacaggcattcctgcaaacagcattcttgtgcaacaggaagcgcctttagaaagtagttaataccaggctgggcaatgtggctcacgccwgtaatcccagcacttcaggaggccaaggtgggaggatcaccggaggtcagaagttcgaggccagcctgcccaacatgatgaaactccatctctactaaaa

SEQ ID NO: 114055 - DNA, 201 bp, Homo sapiens
aggcatagtacaatgatcaaaactatgaagttaacattactaaatcactaatcactataaactatataccttatttggattttgccagttttccccctaawgtccttttttttttttgagatggagtctcgctctgtcgcccaggctggagtgcagtggcgtgatctcggctcactgcaagctccgcttcccggttcacgc

SEQ ID NO: 114056 - DNA, 201 bp, Homo sapiens
gttttccccctaatgtccttttttttttttgagatggagtctcgctctgtcgcccaggctggagtgcagtggcgtgatctcggctcactgcaagctccgcytcccggttcacgccattctcctgcctcagcctccaaagtagctgggactacaggcacccaccaccacgcgtggctaattttttgtatttttagtagagac

SEQ ID NO: 114057 - DNA, 201 bp, Homo sapiens
actaaaactcaattccgcgccaggcctgccagacacctgcgccctcctgcagccaccgccacagctgccagcatgtctggcccagacatcaagacgccgamcgccatccagatctgccggattatgcggacgctaatgtggcccgcaatgtctaggcgggaccatcctgaagatgatcaaagaggcgggcgccatcatcag

SEQ ID NO: 114058 - DNA, 201 bp, Homo sapiens
gtttcttgatagttgcatccaaagaaatctcactgtcatagcaggttttcttttttgtttttgtttgtttgtttgtgacagggtctcgctctgtcaccggsgctggaatgcagtggcgtgatctcggctcactgcaacctcccactcctaggtcaagcgattttcttgcctcagcctcccaagtagttgggattacaggca

SEQ ID NO: 114059 - DNA, 201 bp, Homo sapiens
ctccagggttttgaaaaatcactctacttccttcaccacagttaaccaagagtgggtgttttaatccaattagtctcttccagggaaattttagaattggracaaagaccattagtaaaatcaaaatacaaataataaacaagaaaaaatgcaattcacatcggagacaaagggctgatttctctaatatacaaacatgta

SEQ ID NO: 114060 - DNA, 201 bp, Homo sapiens
atcagaattttgtctgtacttggaaacattctccaagaccttgaggacaagaaatataagaaagcggctttgcagatgacgccgccgaggaaaactgtgtrctattagccatggtcaaccccaccgtgttcttcgacattgccgtcgatggcgagcccttgggccgcgtctcctttgagctgttagctgacaaggtcccaa

SEQ ID NO: 114061 - DNA, 201 bp, Homo sapiens
agtggaggccaatattcaacattcttaaagaagagaatttccaacccagaatcacatatccagccaaactaagcttcataagtgaaggagaaataaatacyttacagacaagcaaatgctgagagattttgtcaccaccaggcctgccctaaaagagctcctgaaggaagcactaaacatggaaaggaacaaccggtacca

SEQ ID NO: 114062 - DNA, 201 bp, Homo sapiens; identical to SEQ ID NO: 19079

SEQ ID NO: 114063 - DNA, 201 bp, Homo sapiens; identical to SEQ ID NO: 19080

SEQ ID NO: 114064 - DNA, 201 bp, Homo sapiens
ccggaagtactgggtgcagcctgatggcgcaggaggtagacacggcacagggcgccgagatgcggcggggcgcgggcgcggctcggggacgcgcttcctgrtgctgggccctggcgctgctttggctcgcggtggttccgggctggtcccgggtctcgggcatcccctcccggcgccactggccggtgccctacaagtgag

SEQ ID NO: 114065 - DNA, 201 bp, Homo sapiens; identical to SEQ ID NO: 19081

SEQ ID NO: 114066 - DNA, 201 bp, Homo sapiens; identical to SEQ ID NO: 19082

SEQ ID NO: 114067 - DNA, 201 bp, Homo sapiens; identical to SEQ ID NO: 19083

SEQ ID NO: 114068 - DNA, 201 bp, Homo sapiens; identical to SEQ ID NO: 19084

SEQ ID NO: 114069 - DNA, 201 bp, Homo sapiens; identical to SEQ ID NO: 19085

SEQ ID NO: 114070 - DNA, 201 bp, Homo sapiens; identical to SEQ ID NO: 19086

SEQ ID NO: 114071 - DNA, 201 bp, Homo sapiens; identical to SEQ ID NO: 19087

SEQ ID NO: 114072 - DNA, 201 bp, Homo sapiens; identical to SEQ ID NO: 19088

SEQ ID NO: 114073 - DNA, 201 bp, Homo sapiens; identical to SEQ ID NO: 19089

SEQ ID NO: 114074 - DNA, 201 bp, Homo sapiens
tcagttcaaaaccatggcctctcatacattttatttaacaacacaaagaaaagagtttttgttctgaagccaattttcttgcggctattgataaatcgatyataacagaactaaaaaatatattcaataaacaagtacaagattaaagaattgtctaaacaatgtaatgtaataagcaaaataaatccaaatcacttgatt

SEQ ID NO: 114075 - DNA, 201 bp, Homo sapiens; identical to SEQ ID NO: 19090

SEQ ID NO: 114076 - DNA, 201 bp, Homo sapiens
tcggagcgcacttgagagcaaagttgaggactggggagtcgcagccgctcgttacgtgcagccctgggacctttcgtcccctctggtcacttgcggcagaytcaggacagtcctgaatcgtggaagaagaaaaggagagtaatgttatttaatggagggacttctgggtacaagtagctgatttcttgagtagtttaaaaa

SEQ ID NO: 114077 - DNA, 201 bp, Homo sapiens
agtgagccaagaccgtgccattgcactccatcctggcccacaggagtgaaactctgtttcaaaaaaaaaaaaaagagtttgttgctcccaccgagttctgragaacgccagcagctcgctgcttaaaattaaaccacagggttccatgatgggtcgacttgatgggaaagtcatcatcctgacagccgctgctcaggggat

SEQ ID NO: 114078 - DNA, 201 bp, Homo sapiens
gtgtgtctcaggcggatccgaagctgacaaaccatgtgagtgtgtatggccatgaaaactttgaattatctgccagacagagtaagtgccctaaaaccaaratacattttaaaatgcttttattctgaatatttattcataggtcaagcctcatatttcattccattaatgcattcatattgcacctgttttcctctccct
